United States Patent Application Publication US 2015/0232836 A1 - sequence listing, part 25

SEQ ID NO: 916551 - DNA, 15 bp, Homo sapiens
atgttttataaaagc

SEQ ID NO: 916552 - DNA, 15 bp, Homo sapiens
aatgttttataaaag

SEQ ID NO: 916553 - DNA, 15 bp, Homo sapiens
aaatgttttataaaa

SEQ ID NO: 916554 - DNA, 15 bp, Homo sapiens
taaatgttttataaa

SEQ ID NO: 916555 - DNA, 15 bp, Homo sapiens
ttaaatgttttataa

SEQ ID NO: 916556 - DNA, 15 bp, Homo sapiens
attaaatgttttata

SEQ ID NO: 916557 - DNA, 15 bp, Homo sapiens
tattaaatgttttat

SEQ ID NO: 916558 - DNA, 15 bp, Homo sapiens
gtattaaatgtttta

SEQ ID NO: 916559 - DNA, 15 bp, Homo sapiens
tgtattaaatgtttt

SEQ ID NO: 916560 - DNA, 15 bp, Homo sapiens
ttgtattaaatgttt

SEQ ID NO: 916561 - DNA, 15 bp, Homo sapiens
tttgtattaaatgtt

SEQ ID NO: 916562 - DNA, 15 bp, Homo sapiens
atttgtattaaatgt

SEQ ID NO: 916563 - DNA, 15 bp, Homo sapiens
tatttgtattaaatg

SEQ ID NO: 916564 - DNA, 15 bp, Homo sapiens
ttatttgtattaaat

SEQ ID NO: 916565 - DNA, 15 bp, Homo sapiens
tttatttgtattaaa

SEQ ID NO: 916566 - DNA, 15 bp, Homo sapiens
ttttatttgtattaa

SEQ ID NO: 916567 - DNA, 15 bp, Homo sapiens
cttttatttgtatta

SEQ ID NO: 916568 - DNA, 15 bp, Homo sapiens
acttttatttgtatt

SEQ ID NO: 916569 - DNA, 15 bp, Homo sapiens
cacttttatttgtat

SEQ ID NO: 916570 - DNA, 15 bp, Homo sapiens
ccacttttatttgta

SEQ ID NO: 916571 - DNA, 15 bp, Homo sapiens
tccacttttatttgt

SEQ ID NO: 916572 - DNA, 15 bp, Homo sapiens
ctccacttttatttg

SEQ ID NO: 916573 - DNA, 15 bp, Homo sapiens
gctccacttttattt

SEQ ID NO: 916574 - DNA, 15 bp, Homo sapiens
agctccacttttatt

SEQ ID NO: 916575 - DNA, 15 bp, Homo sapiens
tagctccacttttat

SEQ ID NO: 916576 - DNA, 15 bp, Homo sapiens
ttagctccactttta

SEQ ID NO: 916577 - DNA, 15 bp, Homo sapiens
gttagctccactttt

SEQ ID NO: 916578 - DNA, 15 bp, Homo sapiens
ggttagctccacttt

SEQ ID NO: 916579 - DNA, 15 bp, Homo sapiens
aggttagctccactt

SEQ ID NO: 916580 - DNA, 15 bp, Homo sapiens
caggttagctccact

SEQ ID NO: 916581 - DNA, 15 bp, Homo sapiens
tcaggttagctccac

SEQ ID NO: 916582 - DNA, 15 bp, Homo sapiens
atcaggttagctcca

SEQ ID NO: 916583 - DNA, 15 bp, Homo sapiens
aatcaggttagctcc

SEQ ID NO: 916584 - DNA, 15 bp, Homo sapiens
caatcaggttagctc

SEQ ID NO: 916585 - DNA, 15 bp, Homo sapiens
tcaatcaggttagct

SEQ ID NO: 916586 - DNA, 15 bp, Homo sapiens
ttcaatcaggttagc

SEQ ID NO: 916587 - DNA, 15 bp, Homo sapiens
cttcaatcaggttag

SEQ ID NO: 916588 - DNA, 15 bp, Homo sapiens
acttcaatcaggtta

SEQ ID NO: 916589 - DNA, 15 bp, Homo sapiens
cacttcaatcaggtt

SEQ ID NO: 916590 - DNA, 15 bp, Homo sapiens
ccacttcaatcaggt

SEQ ID NO: 916591 - DNA, 15 bp, Homo sapiens
tccacttcaatcagg

SEQ ID NO: 916592 - DNA, 15 bp, Homo sapiens
ttccacttcaatcag

SEQ ID NO: 916593 - DNA, 15 bp, Homo sapiens
attccacttcaatca

SEQ ID NO: 916594 - DNA, 15 bp, Homo sapiens
gattccacttcaatc

SEQ ID NO: 916595 - DNA, 15 bp, Homo sapiens
tgattccacttcaat

SEQ ID NO: 916596 - DNA, 15 bp, Homo sapiens
ctgattccacttcaa

SEQ ID NO: 916597 - DNA, 15 bp, Homo sapiens
tctgattccacttca

SEQ ID NO: 916598 - DNA, 15 bp, Homo sapiens
atctgattccacttc

SEQ ID NO: 916599 - DNA, 15 bp, Homo sapiens
aatctgattccactt

SEQ ID NO: 916600 - DNA, 15 bp, Homo sapiens
aaatctgattccact

SEQ ID NO: 916601 - DNA, 15 bp, Homo sapiens
aaaatctgattccac

SEQ ID NO: 916602 - DNA, 15 bp, Homo sapiens
taaaatctgattcca

SEQ ID NO: 916603 - DNA, 15 bp, Homo sapiens
ataaaatctgattcc

SEQ ID NO: 916604 - DNA, 15 bp, Homo sapiens
cataaaatctgattc

SEQ ID NO: 916605 - DNA, 15 bp, Homo sapiens
ccataaaatctgatt

SEQ ID NO: 916606 - DNA, 15 bp, Homo sapiens
cccataaaatctgat

SEQ ID NO: 916607 - DNA, 15 bp, Homo sapiens
ccccataaaatctga

SEQ ID NO: 916608 - DNA, 15 bp, Homo sapiens
accccataaaatctg

SEQ ID NO: 916609 - DNA, 15 bp, Homo sapiens
aaccccataaaatct

SEQ ID NO: 916610 - DNA, 15 bp, Homo sapiens
caaccccataaaatc

SEQ ID NO: 916611 - DNA, 15 bp, Homo sapiens
ccaaccccataaaat

SEQ ID NO: 916612 - DNA, 15 bp, Homo sapiens
tccaaccccataaaa

SEQ ID NO: 916613 - DNA, 15 bp, Homo sapiens
ctccaaccccataaa

SEQ ID NO: 916614 - DNA, 15 bp, Homo sapiens
actccaaccccataa

SEQ ID NO: 916615 - DNA, 15 bp, Homo sapiens
cactccaaccccata

SEQ ID NO: 916616 - DNA, 15 bp, Homo sapiens
ccactccaaccccat

SEQ ID NO: 916617 - DNA, 15 bp, Homo sapiens
accactccaacccca

SEQ ID NO: 916618 - DNA, 15 bp, Homo sapiens
caccactccaacccc

SEQ ID NO: 916619 - DNA, 15 bp, Homo sapiens
ccaccactccaaccc

SEQ ID NO: 916620 - DNA, 15 bp, Homo sapiens
cccaccactccaacc

SEQ ID NO: 916621 - DNA, 15 bp, Homo sapiens
acccaccactccaac

SEQ ID NO: 916622 - DNA, 15 bp, Homo sapiens
cacccaccactccaa

SEQ ID NO: 916623 - DNA, 15 bp, Homo sapiens
ccacccaccactcca

SEQ ID NO: 916624 - DNA, 15 bp, Homo sapiens
cccacccaccactcc

SEQ ID NO: 916625 - DNA, 15 bp, Homo sapiens
gcccacccaccactc

SEQ ID NO: 916626 - DNA, 15 bp, Homo sapiens
tgcccacccaccact

SEQ ID NO: 916627 - DNA, 15 bp, Homo sapiens
ctgcccacccaccac

SEQ ID NO: 916628 - DNA, 15 bp, Homo sapiens
cctgcccacccacca

SEQ ID NO: 916629 - DNA, 15 bp, Homo sapiens
ccctgcccacccacc

SEQ ID NO: 916630 - DNA, 15 bp, Homo sapiens
gccctgcccacccac

SEQ ID NO: 916631 - DNA, 15 bp, Homo sapiens
agccctgcccaccca

SEQ ID NO: 916632 - DNA, 15 bp, Homo sapiens
cagccctgcccaccc

SEQ ID NO: 916633 - DNA, 15 bp, Homo sapiens
ccagccctgcccacc

SEQ ID NO: 916634 - DNA, 15 bp, Homo sapiens
tccagccctgcccac

SEQ ID NO: 916635 - DNA, 15 bp, Homo sapiens
ttccagccctgccca

SEQ ID NO: 916636 - DNA, 15 bp, Homo sapiens
gttccagccctgccc

SEQ ID NO: 916637 - DNA, 15 bp, Homo sapiens
tgttccagccctgcc

SEQ ID NO: 916638 - DNA, 15 bp, Homo sapiens
atgttccagccctgc

SEQ ID NO: 916639 - DNA, 15 bp, Homo sapiens
aatgttccagccctg

SEQ ID NO: 916640 - DNA, 15 bp, Homo sapiens
caatgttccagccct

SEQ ID NO: 916641 - DNA, 15 bp, Homo sapiens
gcaatgttccagccc

SEQ ID NO: 916642 - DNA, 15 bp, Homo sapiens
agcaatgttccagcc

SEQ ID NO: 916643 - DNA, 15 bp, Homo sapiens
aagcaatgttccagc

SEQ ID NO: 916644 - DNA, 15 bp, Homo sapiens
aaagcaatgttccag

SEQ ID NO: 916645 - DNA, 15 bp, Homo sapiens
taaagcaatgttcca

SEQ ID NO: 916646 - DNA, 15 bp, Homo sapiens
ataaagcaatgttcc

SEQ ID NO: 916647 - DNA, 15 bp, Homo sapiens
aataaagcaatgttc

SEQ ID NO: 916648 - DNA, 15 bp, Homo sapiens
aaataaagcaatgtt

SEQ ID NO: 916649 - DNA, 15 bp, Homo sapiens
caaataaagcaatgt

SEQ ID NO: 916650 - DNA, 15 bp, Homo sapiens
ccaaataaagcaatg

SEQ ID NO: 916651 - DNA, 15 bp, Homo sapiens
accaaataaagcaat

SEQ ID NO: 916652 - DNA, 15 bp, Homo sapiens
gaccaaataaagcaa

SEQ ID NO: 916653 - DNA, 15 bp, Homo sapiens
agaccaaataaagca

SEQ ID NO: 916654 - DNA, 15 bp, Homo sapiens
tagaccaaataaagc

SEQ ID NO: 916655 - DNA, 15 bp, Homo sapiens
ctagaccaaataaag

SEQ ID NO: 916656 - DNA, 15 bp, Homo sapiens
gctagaccaaataaa

SEQ ID NO: 916657 - DNA, 15 bp, Homo sapiens
tgctagaccaaataa

SEQ ID NO: 916658 - DNA, 15 bp, Homo sapiens
atgctagaccaaata

SEQ ID NO: 916659 - DNA, 15 bp, Homo sapiens
gatgctagaccaaat

SEQ ID NO: 916660 - DNA, 15 bp, Homo sapiens
agatgctagaccaaa

SEQ ID NO: 916661 - DNA, 15 bp, Homo sapiens
gagatgctagaccaa

SEQ ID NO: 916662 - DNA, 15 bp, Homo sapiens
ggagatgctagacca

SEQ ID NO: 916663 - DNA, 15 bp, Homo sapiens
aggagatgctagacc

SEQ ID NO: 916664 - DNA, 15 bp, Homo sapiens
gaggagatgctagac

SEQ ID NO: 916665 - DNA, 15 bp, Homo sapiens
tgaggagatgctaga

SEQ ID NO: 916666 - DNA, 15 bp, Homo sapiens
ctgaggagatgctag

SEQ ID NO: 916667 - DNA, 15 bp, Homo sapiens
actgaggagatgcta

SEQ ID NO: 916668 - DNA, 15 bp, Homo sapiens
tactgaggagatgct

SEQ ID NO: 916669 - DNA, 15 bp, Homo sapiens
ttactgaggagatgc

SEQ ID NO: 916670 - DNA, 15 bp, Homo sapiens
attactgaggagatg

SEQ ID NO: 916671 - DNA, 15 bp, Homo sapiens
tattactgaggagat

SEQ ID NO: 916672 - DNA, 15 bp, Homo sapiens
ctattactgaggaga

SEQ ID NO: 916673 - DNA, 15 bp, Homo sapiens
gctattactgaggag

SEQ ID NO: 916674 - DNA, 15 bp, Homo sapiens
agctattactgagga

SEQ ID NO: 916675 - DNA, 15 bp, Homo sapiens
cagctattactgagg

SEQ ID NO: 916676 - DNA, 15 bp, Homo sapiens
gcagctattactgag

SEQ ID NO: 916677 - DNA, 15 bp, Homo sapiens
agcagctattactga

SEQ ID NO: 916678 - DNA, 15 bp, Homo sapiens
aagcagctattactg

SEQ ID NO: 916679 - DNA, 15 bp, Homo sapiens
caagcagctattact

SEQ ID NO: 916680 - DNA, 15 bp, Homo sapiens
acaagcagctattac

SEQ ID NO: 916681 - DNA, 15 bp, Homo sapiens
aacaagcagctatta

SEQ ID NO: 916682 - DNA, 15 bp, Homo sapiens
aaacaagcagctatt

SEQ ID NO: 916683 - DNA, 15 bp, Homo sapiens
taaacaagcagctat

SEQ ID NO: 916684 - DNA, 15 bp, Homo sapiens
ttaaacaagcagcta

SEQ ID NO: 916685 - DNA, 15 bp, Homo sapiens
tttaaacaagcagct

SEQ ID NO: 916686 - DNA, 15 bp, Homo sapiens
ttttaaacaagcagc

SEQ ID NO: 916687 - DNA, 15 bp, Homo sapiens
tttttaaacaagcag

SEQ ID NO: 916688 - DNA, 15 bp, Homo sapiens
ctttttaaacaagca

SEQ ID NO: 916689 - DNA, 15 bp, Homo sapiens
tctttttaaacaagc

SEQ ID NO: 916690 - DNA, 15 bp, Homo sapiens
atctttttaaacaag

SEQ ID NO: 916691 - DNA, 15 bp, Homo sapiens
catctttttaaacaa

SEQ ID NO: 916692 - DNA, 15 bp, Homo sapiens
tcatctttttaaaca

SEQ ID NO: 916693 - DNA, 15 bp, Homo sapiens
ttcatctttttaaac

SEQ ID NO: 916694 - DNA, 15 bp, Homo sapiens
tttcatctttttaaa

SEQ ID NO: 916695 - DNA, 15 bp, Homo sapiens
ctttcatctttttaa

SEQ ID NO: 916696 - DNA, 15 bp, Homo sapiens
actttcatcttttta

SEQ ID NO: 916697 - DNA, 15 bp, Homo sapiens
aactttcatcttttt

SEQ ID NO: 916698 - DNA, 15 bp, Homo sapiens
aaactttcatctttt

SEQ ID NO: 916699 - DNA, 15 bp, Homo sapiens
taaactttcatcttt

SEQ ID NO: 916700 - DNA, 15 bp, Homo sapiens
ataaactttcatctt

SEQ ID NO: 916701 - DNA, 15 bp, Homo sapiens
aataaactttcatct

SEQ ID NO: 916702 - DNA, 15 bp, Homo sapiens
taataaactttcatc

SEQ ID NO: 916703 - DNA, 15 bp, Homo sapiens
ttaataaactttcat

SEQ ID NO: 916704 - DNA, 15 bp, Homo sapiens
attaataaactttca

SEQ ID NO: 916705 - DNA, 15 bp, Homo sapiens
tattaataaactttc

SEQ ID NO: 916706 - DNA, 15 bp, Homo sapiens
gtattaataaacttt

SEQ ID NO: 916707 - DNA, 15 bp, Homo sapiens
ggtattaataaactt

SEQ ID NO: 916708 - DNA, 15 bp, Homo sapiens
tggtattaataaact

SEQ ID NO: 916709 - DNA, 15 bp, Homo sapiens
gtggtattaataaac

SEQ ID NO: 916710 - DNA, 15 bp, Homo sapiens
tgtggtattaataaa

SEQ ID NO: 916711 - DNA, 15 bp, Homo sapiens
atgtggtattaataa

SEQ ID NO: 916712 - DNA, 15 bp, Homo sapiens
tatgtggtattaata

SEQ ID NO: 916713 - DNA, 15 bp, Homo sapiens
atatgtggtattaat

SEQ ID NO: 916714 - DNA, 15 bp, Homo sapiens
gatatgtggtattaa

SEQ ID NO: 916715 - DNA, 15 bp, Homo sapiens
tgatatgtggtatta

SEQ ID NO: 916716 - DNA, 15 bp, Homo sapiens
ctgatatgtggtatt

SEQ ID NO: 916717 - DNA, 15 bp, Homo sapiens
tctgatatgtggtat

SEQ ID NO: 916718 - DNA, 15 bp, Homo sapiens
ctctgatatgtggta

SEQ ID NO: 916719 - DNA, 15 bp, Homo sapiens
tctctgatatgtggt

SEQ ID NO: 916720 - DNA, 15 bp, Homo sapiens
atctctgatatgtgg

SEQ ID NO: 916721 - DNA, 15 bp, Homo sapiens
aatctctgatatgtg

SEQ ID NO: 916722 - DNA, 15 bp, Homo sapiens
taatctctgatatgt

SEQ ID NO: 916723 - DNA, 15 bp, Homo sapiens
ttaatctctgatatg

SEQ ID NO: 916724 - DNA, 15 bp, Homo sapiens
gttaatctctgatat

SEQ ID NO: 916725 - DNA, 15 bp, Homo sapiens
ggttaatctctgata

SEQ ID NO: 916726 - DNA, 15 bp, Homo sapiens
aggttaatctctgat

SEQ ID NO: 916727 - DNA, 15 bp, Homo sapiens
aaggttaatctctga

SEQ ID NO: 916728 - DNA, 15 bp, Homo sapiens
aaaggttaatctctg

SEQ ID NO: 916729 - DNA, 15 bp, Homo sapiens
aaaaggttaatctct

SEQ ID NO: 916730 - DNA, 15 bp, Homo sapiens
aaaaaggttaatctc

SEQ ID NO: 916731 - DNA, 15 bp, Homo sapiens
aaaaaaggttaatct

SEQ ID NO: 916732 - DNA, 15 bp, Homo sapiens
aaaaaaaggttaatc

SEQ ID NO: 916733 - DNA, 15 bp, Homo sapiens
aaaaaaaaggttaat

SEQ ID NO: 916734 - DNA, 15 bp, Homo sapiens
aaaaaaaaaggttaa

SEQ ID NO: 916735 - DNA, 15 bp, Homo sapiens
gaaaaaaaaaggtta

SEQ ID NO: 916736 - DNA, 15 bp, Homo sapiens
ggaaaaaaaaaggtt

SEQ ID NO: 916737 - DNA, 15 bp, Homo sapiens
gggaaaaaaaaaggt

SEQ ID NO: 916738 - DNA, 15 bp, Homo sapiens
tgggaaaaaaaaagg

SEQ ID NO: 916739 - DNA, 15 bp, Homo sapiens
ttgggaaaaaaaaag

SEQ ID NO: 916740 - DNA, 15 bp, Homo sapiens
gttgggaaaaaaaaa

SEQ ID NO: 916741 - DNA, 15 bp, Homo sapiens
tgttgggaaaaaaaa

SEQ ID NO: 916742 - DNA, 15 bp, Homo sapiens
ttgttgggaaaaaaa

SEQ ID NO: 916743 - DNA, 15 bp, Homo sapiens
tttgttgggaaaaaa

SEQ ID NO: 916744 - DNA, 15 bp, Homo sapiens
ttttgttgggaaaaa

SEQ ID NO: 916745 - DNA, 15 bp, Homo sapiens
cttttgttgggaaaa

SEQ ID NO: 916746 - DNA, 15 bp, Homo sapiens
acttttgttgggaaa

SEQ ID NO: 916747 - DNA, 15 bp, Homo sapiens
tacttttgttgggaa

SEQ ID NO: 916748 - DNA, 15 bp, Homo sapiens
ctacttttgttggga

SEQ ID NO: 916749 - DNA, 15 bp, Homo sapiens
cctacttttgttggg

SEQ ID NO: 916750 - DNA, 15 bp, Homo sapiens
ccctacttttgttgg

SEQ ID NO: 916751 - DNA, 15 bp, Homo sapiens
accctacttttgttg

SEQ ID NO: 916752 - DNA, 15 bp, Homo sapiens
gaccctacttttgtt

SEQ ID NO: 916753 - DNA, 15 bp, Homo sapiens
agaccctacttttgt

SEQ ID NO: 916754 - DNA, 15 bp, Homo sapiens
cagaccctacttttg

SEQ ID NO: 916755 - DNA, 15 bp, Homo sapiens
acagaccctactttt

SEQ ID NO: 916756 - DNA, 15 bp, Homo sapiens
tacagaccctacttt

SEQ ID NO: 916757 - DNA, 15 bp, Homo sapiens
atacagaccctactt

SEQ ID NO: 916758 - DNA, 15 bp, Homo sapiens
aatacagaccctact

SEQ ID NO: 916759 - DNA, 15 bp, Homo sapiens
taatacagaccctac

SEQ ID NO: 916760 - DNA, 15 bp, Homo sapiens
gtaatacagacccta

SEQ ID NO: 916761 - DNA, 15 bp, Homo sapiens
ggtaatacagaccct

SEQ ID NO: 916762 - DNA, 15 bp, Homo sapiens
gggtaatacagaccc

SEQ ID NO: 916763 - DNA, 15 bp, Homo sapiens
tgggtaatacagacc

SEQ ID NO: 916764 - DNA, 15 bp, Homo sapiens
atgggtaatacagac

SEQ ID NO: 916765 - DNA, 15 bp, Homo sapiens
catgggtaatacaga

SEQ ID NO: 916766 - DNA, 15 bp, Homo sapiens
acatgggtaatacag

SEQ ID NO: 916767 - DNA, 15 bp, Homo sapiens
aacatgggtaataca

SEQ ID NO: 916768 - DNA, 15 bp, Homo sapiens
aaacatgggtaatac

SEQ ID NO: 916769 - DNA, 15 bp, Homo sapiens
caaacatgggtaata

SEQ ID NO: 916770 - DNA, 15 bp, Homo sapiens
acaaacatgggtaat

SEQ ID NO: 916771 - DNA, 15 bp, Homo sapiens
aacaaacatgggtaa

SEQ ID NO: 916772 - DNA, 15 bp, Homo sapiens
aaacaaacatgggta

SEQ ID NO: 916773 - DNA, 15 bp, Homo sapiens
caaacaaacatgggt

SEQ ID NO: 916774 - DNA, 15 bp, Homo sapiens
gcaaacaaacatggg

SEQ ID NO: 916775 - DNA, 15 bp, Homo sapiens
tgcaaacaaacatgg

SEQ ID NO: 916776 - DNA, 15 bp, Homo sapiens
ttgcaaacaaacatg

SEQ ID NO: 916777 - DNA, 15 bp, Homo sapiens
tttgcaaacaaacat

SEQ ID NO: 916778 - DNA, 15 bp, Homo sapiens
ttttgcaaacaaaca

SEQ ID NO: 916779 - DNA, 15 bp, Homo sapiens
attttgcaaacaaac

SEQ ID NO: 916780 - DNA, 15 bp, Homo sapiens
cattttgcaaacaaa

SEQ ID NO: 916781 - DNA, 15 bp, Homo sapiens
gcattttgcaaacaa

SEQ ID NO: 916782 - DNA, 15 bp, Homo sapiens
agcattttgcaaaca

SEQ ID NO: 916783 - DNA, 15 bp, Homo sapiens
gagcattttgcaaac

SEQ ID NO: 916784 - DNA, 15 bp, Homo sapiens
agagcattttgcaaa

SEQ ID NO: 916785 - DNA, 15 bp, Homo sapiens
aagagcattttgcaa

SEQ ID NO: 916786 - DNA, 15 bp, Homo sapiens
caagagcattttgca

SEQ ID NO: 916787 - DNA, 15 bp, Homo sapiens
acaagagcattttgc

SEQ ID NO: 916788 - DNA, 15 bp, Homo sapiens
tacaagagcattttg

SEQ ID NO: 916789 - DNA, 15 bp, Homo sapiens
ttacaagagcatttt

SEQ ID NO: 916790 - DNA, 15 bp, Homo sapiens
gttacaagagcattt

SEQ ID NO: 916791 - DNA, 15 bp, Homo sapiens
tgttacaagagcatt

SEQ ID NO: 916792 - DNA, 15 bp, Homo sapiens
ctgttacaagagcat

SEQ ID NO: 916793 - DNA, 15 bp, Homo sapiens
tctgttacaagagca

SEQ ID NO: 916794 - DNA, 15 bp, Homo sapiens
atctgttacaagagc

SEQ ID NO: 916795 - DNA, 15 bp, Homo sapiens
catctgttacaagag

SEQ ID NO: 916796 - DNA, 15 bp, Homo sapiens
tcatctgttacaaga

SEQ ID NO: 916797 - DNA, 15 bp, Homo sapiens
ctcatctgttacaag

SEQ ID NO: 916798 - DNA, 15 bp, Homo sapiens
tctcatctgttacaa

SEQ ID NO: 916799 - DNA, 15 bp, Homo sapiens
atctcatctgttaca

SEQ ID NO: 916800 - DNA, 15 bp, Homo sapiens
tatctcatctgttac

SEQ ID NO: 916801 - DNA, 15 bp, Homo sapiens
atatctcatctgtta

SEQ ID NO: 916802 - DNA, 15 bp, Homo sapiens
aatatctcatctgtt

SEQ ID NO: 916803 - DNA, 15 bp, Homo sapiens
aaatatctcatctgt

SEQ ID NO: 916804 - DNA, 15 bp, Homo sapiens
taaatatctcatctg

SEQ ID NO: 916805 - DNA, 15 bp, Homo sapiens
ttaaatatctcatct

SEQ ID NO: 916806 - DNA, 15 bp, Homo sapiens
tttaaatatctcatc

SEQ ID NO: 916807 - DNA, 15 bp, Homo sapiens
gtttaaatatctcat

SEQ ID NO: 916808 - DNA, 15 bp, Homo sapiens
agtttaaatatctca

SEQ ID NO: 916809 - DNA, 15 bp, Homo sapiens
aagtttaaatatctc

SEQ ID NO: 916810 - DNA, 15 bp, Homo sapiens
gaagtttaaatatct

SEQ ID NO: 916811 - DNA, 15 bp, Homo sapiens
agaagtttaaatatc

SEQ ID NO: 916812 - DNA, 15 bp, Homo sapiens
aagaagtttaaatat

SEQ ID NO: 916813 - DNA, 15 bp, Homo sapiens
caagaagtttaaata

SEQ ID NO: 916814 - DNA, 15 bp, Homo sapiens
gcaagaagtttaaat

SEQ ID NO: 916815 - DNA, 15 bp, Homo sapiens
agcaagaagtttaaa

SEQ ID NO: 916816 - DNA, 15 bp, Homo sapiens
gagcaagaagtttaa

SEQ ID NO: 916817 - DNA, 15 bp, Homo sapiens
agagcaagaagttta

SEQ ID NO: 916818 - DNA, 15 bp, Homo sapiens
cagagcaagaagttt

SEQ ID NO: 916819 - DNA, 15 bp, Homo sapiens
acagagcaagaagtt

SEQ ID NO: 916820 - DNA, 15 bp, Homo sapiens
cacagagcaagaagt

SEQ ID NO: 916821 - DNA, 15 bp, Homo sapiens
acacagagcaagaag

SEQ ID NO: 916822 - DNA, 15 bp, Homo sapiens
aacacagagcaagaa

SEQ ID NO: 916823 - DNA, 15 bp, Homo sapiens
caacacagagcaaga

SEQ ID NO: 916824 - DNA, 15 bp, Homo sapiens
acaacacagagcaag

SEQ ID NO: 916825 - DNA, 15 bp, Homo sapiens
cacaacacagagcaa

SEQ ID NO: 916826 - DNA, 15 bp, Homo sapiens
tcacaacacagagca

SEQ ID NO: 916827 - DNA, 15 bp, Homo sapiens
atcacaacacagagc

SEQ ID NO: 916828 - DNA, 15 bp, Homo sapiens
aatcacaacacagag

SEQ ID NO: 916829 - DNA, 15 bp, Homo sapiens
gaatcacaacacaga

SEQ ID NO: 916830 - DNA, 15 bp, Homo sapiens
agaatcacaacacag

SEQ ID NO: 916831 - DNA, 15 bp, Homo sapiens
gagaatcacaacaca

SEQ ID NO: 916832 - DNA, 15 bp, Homo sapiens
ggagaatcacaacac

SEQ ID NO: 916833 - DNA, 15 bp, Homo sapiens
aggagaatcacaaca

SEQ ID NO: 916834 - DNA, 15 bp, Homo sapiens
caggagaatcacaac

SEQ ID NO: 916835 - DNA, 15 bp, Homo sapiens
gcaggagaatcacaa

SEQ ID NO: 916836 - DNA, 15 bp, Homo sapiens
ggcaggagaatcaca

SEQ ID NO: 916837 - DNA, 15 bp, Homo sapiens
aggcaggagaatcac

SEQ ID NO: 916838 - DNA, 15 bp, Homo sapiens
gaggcaggagaatca

SEQ ID NO: 916839 - DNA, 15 bp, Homo sapiens
agaggcaggagaatc

SEQ ID NO: 916840 - DNA, 15 bp, Homo sapiens
cagaggcaggagaat

SEQ ID NO: 916841 - DNA, 15 bp, Homo sapiens
gcagaggcaggagaa

SEQ ID NO: 916842 - DNA, 15 bp, Homo sapiens
ggcagaggcaggaga

SEQ ID NO: 916843 - DNA, 15 bp, Homo sapiens
aggcagaggcaggag

SEQ ID NO: 916844 - DNA, 15 bp, Homo sapiens
gaggcagaggcagga

SEQ ID NO: 916845 - DNA, 15 bp, Homo sapiens
ggaggcagaggcagg

SEQ ID NO: 916846 - DNA, 15 bp, Homo sapiens
aggaggcagaggcag

SEQ ID NO: 916847 - DNA, 15 bp, Homo sapiens
caggaggcagaggca

SEQ ID NO: 916848 - DNA, 15 bp, Homo sapiens
tcaggaggcagaggc

SEQ ID NO: 916849 - DNA, 15 bp, Homo sapiens
ctcaggaggcagagg

SEQ ID NO: 916850 - DNA, 15 bp, Homo sapiens
actcaggaggcagag

SEQ ID NO: 916851 - DNA, 15 bp, Homo sapiens
tactcaggaggcaga

SEQ ID NO: 916852 - DNA, 15 bp, Homo sapiens
ctactcaggaggcag

SEQ ID NO: 916853 - DNA, 15 bp, Homo sapiens
gctactcaggaggca

SEQ ID NO: 916854 - DNA, 15 bp, Homo sapiens
acctgtaatcccagc

SEQ ID NO: 916855 - DNA, 15 bp, Homo sapiens
cacctgtaatcccag

SEQ ID NO: 916856 - DNA, 15 bp, Homo sapiens
acacctgtaatccca

SEQ ID NO: 916857 - DNA, 15 bp, Homo sapiens
cacacctgtaatccc

SEQ ID NO: 916858 - DNA, 15 bp, Homo sapiens
gcacacctgtaatcc

SEQ ID NO: 916859 - DNA, 15 bp, Homo sapiens
tgcacacctgtaatc

SEQ ID NO: 916860 - DNA, 15 bp, Homo sapiens
gtgcacacctgtaat

SEQ ID NO: 916861 - DNA, 15 bp, Homo sapiens
ggtgcacacctgtaa

SEQ ID NO: 916862 - DNA, 15 bp, Homo sapiens
tggtgcacacctgta

SEQ ID NO: 916863 - DNA, 15 bp, Homo sapiens
gtggtgcacacctgt

SEQ ID NO: 916864 - DNA, 15 bp, Homo sapiens
agtggtgcacacctg

SEQ ID NO: 916865 - DNA, 15 bp, Homo sapiens
tagtggtgcacacct

SEQ ID NO: 916866 - DNA, 15 bp, Homo sapiens
atagtggtgcacacc

SEQ ID NO: 916867 - DNA, 15 bp, Homo sapiens
catagtggtgcacac

SEQ ID NO: 916868 - DNA, 15 bp, Homo sapiens
gcatagtggtgcaca

SEQ ID NO: 916869 - DNA, 15 bp, Homo sapiens
ggcatagtggtgcac

SEQ ID NO: 916870 - DNA, 15 bp, Homo sapiens
gggcatagtggtgca

SEQ ID NO: 916871 - DNA, 15 bp, Homo sapiens
cgggcatagtggtgc

SEQ ID NO: 916872 - DNA, 15 bp, Homo sapiens
ccgggcatagtggtg

SEQ ID NO: 916873 - DNA, 15 bp, Homo sapiens
gccgggcatagtggt

SEQ ID NO: 916874 - DNA, 15 bp, Homo sapiens
agccgggcatagtgg

SEQ ID NO: 916875 - DNA, 15 bp, Homo sapiens
tagccgggcatagtg

SEQ ID NO: 916876 - DNA, 15 bp, Homo sapiens
ttagccgggcatagt

SEQ ID NO: 916877 - DNA, 15 bp, Homo sapiens
attagccgggcatag

SEQ ID NO: 916878 - DNA, 15 bp, Homo sapiens
aattagccgggcata

SEQ ID NO: 916879 - DNA, 15 bp, Homo sapiens
aaattagccgggcat

SEQ ID NO: 916880 - DNA, 15 bp, Homo sapiens
aaaattagccgggca

SEQ ID NO: 916881 - DNA, 15 bp, Homo sapiens
aaaaattagccgggc

SEQ ID NO: 916882 - DNA, 15 bp, Homo sapiens
caaaaattagccggg

SEQ ID NO: 916883 - DNA, 15 bp, Homo sapiens
acaaaaattagccgg

SEQ ID NO: 916884 - DNA, 15 bp, Homo sapiens
tacaaaaattagccg

SEQ ID NO: 916885 - DNA, 15 bp, Homo sapiens
atacaaaaattagcc

SEQ ID NO: 916886 - DNA, 15 bp, Homo sapiens
aatacaaaaattagc

SEQ ID NO: 916887 - DNA, 15 bp, Homo sapiens
aaatacaaaaattag

SEQ ID NO: 916888 - DNA, 15 bp, Homo sapiens
aaaatacaaaaatta

SEQ ID NO: 916889 - DNA, 15 bp, Homo sapiens
aaaaatacaaaaatt

SEQ ID NO: 916890 - DNA, 15 bp, Homo sapiens
caaaaatacaaaaat

SEQ ID NO: 916891 - DNA, 15 bp, Homo sapiens
ccaaaaatacaaaaa

SEQ ID NO: 916892 - DNA, 15 bp, Homo sapiens
accaaaaatacaaaa

SEQ ID NO: 916893 - DNA, 15 bp, Homo sapiens
taccaaaaatacaaa

SEQ ID NO: 916894 - DNA, 15 bp, Homo sapiens
ctaccaaaaatacaa

SEQ ID NO: 916895 - DNA, 15 bp, Homo sapiens
tctaccaaaaataca

SEQ ID NO: 916896 - DNA, 15 bp, Homo sapiens
ctctaccaaaaatac

SEQ ID NO: 916897 - DNA, 15 bp, Homo sapiens
tctctaccaaaaata

SEQ ID NO: 916898 - DNA, 15 bp, Homo sapiens
atctctaccaaaaat

SEQ ID NO: 916899 - DNA, 15 bp, Homo sapiens
catctctaccaaaaa

SEQ ID NO: 916900 - DNA, 15 bp, Homo sapiens
ccatctctaccaaaa

SEQ ID NO: 916901 - DNA, 15 bp, Homo sapiens
cccatctctaccaaa

SEQ ID NO: 916902 - DNA, 15 bp, Homo sapiens
tcccatctctaccaa

SEQ ID NO: 916903 - DNA, 15 bp, Homo sapiens
atcccatctctacca

SEQ ID NO: 916904 - DNA, 15 bp, Homo sapiens
aatcccatctctacc

SEQ ID NO: 916905 - DNA, 15 bp, Homo sapiens
aaatcccatctctac

SEQ ID NO: 916906 - DNA, 15 bp, Homo sapiens
gaaatcccatctcta

SEQ ID NO: 916907 - DNA, 15 bp, Homo sapiens
tgaaatcccatctct

SEQ ID NO: 916908 - DNA, 15 bp, Homo sapiens
gtgaaatcccatctc

SEQ ID NO: 916909 - DNA, 15 bp, Homo sapiens
ggtgaaatcccatct

SEQ ID NO: 916910 - DNA, 15 bp, Homo sapiens
tggtgaaatcccatc

SEQ ID NO: 916911 - DNA, 15 bp, Homo sapiens
atggtgaaatcccat

SEQ ID NO: 916912 - DNA, 15 bp, Homo sapiens
catggtgaaatccca

SEQ ID NO: 916913 - DNA, 15 bp, Homo sapiens
acatggtgaaatccc

SEQ ID NO: 916914 - DNA, 15 bp, Homo sapiens
aacatggtgaaatcc

SEQ ID NO: 916915 - DNA, 15 bp, Homo sapiens
caacatggtgaaatc

SEQ ID NO: 916916 - DNA, 15 bp, Homo sapiens
ccaacatggtgaaat

SEQ ID NO: 916917 - DNA, 15 bp, Homo sapiens
gccaacatggtgaaa

SEQ ID NO: 916918 - DNA, 15 bp, Homo sapiens
agccaacatggtgaa

SEQ ID NO: 916919 - DNA, 15 bp, Homo sapiens
tagccaacatggtga

SEQ ID NO: 916920 - DNA, 15 bp, Homo sapiens
ctagccaacatggtg

SEQ ID NO: 916921 - DNA, 15 bp, Homo sapiens
cctagccaacatggt

SEQ ID NO: 916922 - DNA, 15 bp, Homo sapiens
gcctagccaacatgg

SEQ ID NO: 916923 - DNA, 15 bp, Homo sapiens
agcctagccaacatg

SEQ ID NO: 916924 - DNA, 15 bp, Homo sapiens
cagcctagccaacat

SEQ ID NO: 916925 - DNA, 15 bp, Homo sapiens
ccagcctagccaaca

SEQ ID NO: 916926 - DNA, 15 bp, Homo sapiens
accagcctagccaac

SEQ ID NO: 916927 - DNA, 15 bp, Homo sapiens
gaccagcctagccaa

SEQ ID NO: 916928 - DNA, 15 bp, Homo sapiens
agaccagcctagcca

SEQ ID NO: 916929 - DNA, 15 bp, Homo sapiens
gagaccagcctagcc

SEQ ID NO: 916930 - DNA, 15 bp, Homo sapiens
ggagaccagcctagc

SEQ ID NO: 916931 - DNA, 15 bp, Homo sapiens
tggagaccagcctag

SEQ ID NO: 916932 - DNA, 15 bp, Homo sapiens
ttggagaccagccta

SEQ ID NO: 916933 - DNA, 15 bp, Homo sapiens
gttggagaccagcct

SEQ ID NO: 916934 - DNA, 15 bp, Homo sapiens
agttggagaccagcc

SEQ ID NO: 916935 - DNA, 15 bp, Homo sapiens
gagttggagaccagc

SEQ ID NO: 916936 - DNA, 15 bp, Homo sapiens
ggagttggagaccag

SEQ ID NO: 916937 - DNA, 15 bp, Homo sapiens
aggagttggagacca

SEQ ID NO: 916938 - DNA, 15 bp, Homo sapiens
caggagttggagacc

SEQ ID NO: 916939 - DNA, 15 bp, Homo sapiens
tcaggagttggagac

SEQ ID NO: 916940 - DNA, 15 bp, Homo sapiens
gtcaggagttggaga

SEQ ID NO: 916941 - DNA, 15 bp, Homo sapiens
ggtcaggagttggag

SEQ ID NO: 916942 - DNA, 15 bp, Homo sapiens
aggtcaggagttgga

SEQ ID NO: 916943 - DNA, 15 bp, Homo sapiens
aaggtcaggagttgg

SEQ ID NO: 916944 - DNA, 15 bp, Homo sapiens
taaggtcaggagttg

SEQ ID NO: 916945 - DNA, 15 bp, Homo sapiens
ttaaggtcaggagtt

SEQ ID NO: 916946 - DNA, 15 bp, Homo sapiens
cttaaggtcaggagt

SEQ ID NO: 916947 - DNA, 15 bp, Homo sapiens
acttaaggtcaggag

SEQ ID NO: 916948 - DNA, 15 bp, Homo sapiens
cacttaaggtcagga

SEQ ID NO: 916949 - DNA, 15 bp, Homo sapiens
tcacttaaggtcagg

SEQ ID NO: 916950 - DNA, 15 bp, Homo sapiens
atcacttaaggtcag

SEQ ID NO: 916951 - DNA, 15 bp, Homo sapiens
gatcacttaaggtca

SEQ ID NO: 916952 - DNA, 15 bp, Homo sapiens
ggatcacttaaggtc

SEQ ID NO: 916953 - DNA, 15 bp, Homo sapiens
tggatcacttaaggt

SEQ ID NO: 916954 - DNA, 15 bp, Homo sapiens
gtggatcacttaagg

SEQ ID NO: 916955 - DNA, 15 bp, Homo sapiens
ggtggatcacttaag

SEQ ID NO: 916956 - DNA, 15 bp, Homo sapiens
gggtggatcacttaa

SEQ ID NO: 916957 - DNA, 15 bp, Homo sapiens
cgggtggatcactta

SEQ ID NO: 916958 - DNA, 15 bp, Homo sapiens
gcgggtggatcactt

SEQ ID NO: 916959 - DNA, 15 bp, Homo sapiens
ggcgggtggatcact

SEQ ID NO: 916960 - DNA, 15 bp, Homo sapiens
aggcgggtggatcac

SEQ ID NO: 916961 - DNA, 15 bp, Homo sapiens
aaggcgggtggatca

SEQ ID NO: 916962 - DNA, 15 bp, Homo sapiens
caaggcgggtggatc

SEQ ID NO: 916963 - DNA, 15 bp, Homo sapiens
ccaaggcgggtggat

SEQ ID NO: 916964 - DNA, 15 bp, Homo sapiens
gccaaggcgggtgga

SEQ ID NO: 916965 - DNA, 15 bp, Homo sapiens
ggccaaggcgggtgg

SEQ ID NO: 916966 - DNA, 15 bp, Homo sapiens
aggccaaggcgggtg

SEQ ID NO: 916967 - DNA, 15 bp, Homo sapiens
gaggccaaggcgggt

SEQ ID NO: 916968 - DNA, 15 bp, Homo sapiens
ggaggccaaggcggg

SEQ ID NO: 916969 - DNA, 15 bp, Homo sapiens
gggaggccaaggcgg

SEQ ID NO: 916970 - DNA, 15 bp, Homo sapiens
tgggaggccaaggcg

SEQ ID NO: 916971 - DNA, 15 bp, Homo sapiens
ttgggaggccaaggc

SEQ ID NO: 916972 - DNA, 15 bp, Homo sapiens
tttgggaggccaagg

SEQ ID NO: 916973 - DNA, 15 bp, Homo sapiens
ctttgggaggccaag

SEQ ID NO: 916974 - DNA, 15 bp, Homo sapiens
actttgggaggccaa

SEQ ID NO: 916975 - DNA, 15 bp, Homo sapiens
cactttgggaggcca

SEQ ID NO: 916976 - DNA, 15 bp, Homo sapiens
cccagcactttggga

SEQ ID NO: 916977 - DNA, 15 bp, Homo sapiens
tcccagcactttggg

SEQ ID NO: 916978 - DNA, 15 bp, Homo sapiens
atcccagcactttgg

SEQ ID NO: 916979 - DNA, 15 bp, Homo sapiens
tatcccagcactttg

SEQ ID NO: 916980 - DNA, 15 bp, Homo sapiens
ttatcccagcacttt

SEQ ID NO: 916981 - DNA, 15 bp, Homo sapiens
attatcccagcactt

SEQ ID NO: 916982 - DNA, 15 bp, Homo sapiens
tattatcccagcact

SEQ ID NO: 916983 - DNA, 15 bp, Homo sapiens
ctattatcccagcac

SEQ ID NO: 916984 - DNA, 15 bp, Homo sapiens
cctattatcccagca

SEQ ID NO: 916985 - DNA, 15 bp, Homo sapiens
gcctattatcccagc

SEQ ID NO: 916986 - DNA, 15 bp, Homo sapiens
tgcctattatcccag

SEQ ID NO: 916987 - DNA, 15 bp, Homo sapiens
atgcctattatccca

SEQ ID NO: 916988 - DNA, 15 bp, Homo sapiens
catgcctattatccc

SEQ ID NO: 916989 - DNA, 15 bp, Homo sapiens
tcatgcctattatcc

SEQ ID NO: 916990 - DNA, 15 bp, Homo sapiens
ctcatgcctattatc

SEQ ID NO: 916991 - DNA, 15 bp, Homo sapiens
gctcatgcctattat

SEQ ID NO: 916992 - DNA, 15 bp, Homo sapiens
ggctcatgcctatta

SEQ ID NO: 916993 - DNA, 15 bp, Homo sapiens
tggctcatgcctatt

SEQ ID NO: 916994 - DNA, 15 bp, Homo sapiens
gtggctcatgcctat

SEQ ID NO: 916995 - DNA, 15 bp, Homo sapiens
ggtggctcatgccta

SEQ ID NO: 916996 - DNA, 15 bp, Homo sapiens
cggtggctcatgcct

SEQ ID NO: 916997 - DNA, 15 bp, Homo sapiens
gcggtggctcatgcc

SEQ ID NO: 916998 - DNA, 15 bp, Homo sapiens
cgcggtggctcatgc

SEQ ID NO: 916999 - DNA, 15 bp, Homo sapiens
gcgcggtggctcatg

SEQ ID NO: 917000 - DNA, 15 bp, Homo sapiens
ggcgcggtggctcat

SEQ ID NO: 917001 - DNA, 15 bp, Homo sapiens
aggcgcggtggctca

SEQ ID NO: 917002 - DNA, 15 bp, Homo sapiens
caggcgcggtggctc

SEQ ID NO: 917003 - DNA, 15 bp, Homo sapiens
ccaggcgcggtggct

SEQ ID NO: 917004 - DNA, 15 bp, Homo sapiens
gccaggcgcggtggc

SEQ ID NO: 917005 - DNA, 15 bp, Homo sapiens
ggccaggcgcggtgg

SEQ ID NO: 917006 - DNA, 15 bp, Homo sapiens
aggccaggcgcggtg

SEQ ID NO: 917007 - DNA, 15 bp, Homo sapiens
caggccaggcgcggt

SEQ ID NO: 917008 - DNA, 15 bp, Homo sapiens
acaggccaggcgcgg

SEQ ID NO: 917009 - DNA, 15 bp, Homo sapiens
aacaggccaggcgcg

SEQ ID NO: 917010 - DNA, 15 bp, Homo sapiens
taacaggccaggcgc

SEQ ID NO: 917011 - DNA, 15 bp, Homo sapiens
ttaacaggccaggcg

SEQ ID NO: 917012 - DNA, 15 bp, Homo sapiens
tttaacaggccaggc

SEQ ID NO: 917013 - DNA, 15 bp, Homo sapiens
ttttaacaggccagg

SEQ ID NO: 917014 - DNA, 15 bp, Homo sapiens
attttaacaggccag

SEQ ID NO: 917015 - DNA, 15 bp, Homo sapiens
gattttaacaggcca

SEQ ID NO: 917016 - DNA, 15 bp, Homo sapiens
agattttaacaggcc

SEQ ID NO: 917017 - DNA, 15 bp, Homo sapiens
aagattttaacaggc

SEQ ID NO: 917018 - DNA, 15 bp, Homo sapiens
aaagattttaacagg

SEQ ID NO: 917019 - DNA, 15 bp, Homo sapiens
aaaagattttaacag

SEQ ID NO: 917020 - DNA, 15 bp, Homo sapiens
taaaagattttaaca

SEQ ID NO: 917021 - DNA, 15 bp, Homo sapiens
ttaaaagattttaac

SEQ ID NO: 917022 - DNA, 15 bp, Homo sapiens
tttaaaagattttaa

SEQ ID NO: 917023 - DNA, 15 bp, Homo sapiens
ctttaaaagatttta

SEQ ID NO: 917024 - DNA, 15 bp, Homo sapiens
tctttaaaagatttt

SEQ ID NO: 917025 - DNA, 15 bp, Homo sapiens
atctttaaaagattt

SEQ ID NO: 917026 - DNA, 15 bp, Homo sapiens
aatctttaaaagatt

SEQ ID NO: 917027 - DNA, 15 bp, Homo sapiens
aaatctttaaaagat

SEQ ID NO: 917028 - DNA, 15 bp, Homo sapiens
aaaatctttaaaaga

SEQ ID NO: 917029 - DNA, 15 bp, Homo sapiens
aaaaatctttaaaag

SEQ ID NO: 917030 - DNA, 15 bp, Homo sapiens
taaaaatctttaaaa

SEQ ID NO: 917031 - DNA, 15 bp, Homo sapiens
ttaaaaatctttaaa

SEQ ID NO: 917032 - DNA, 15 bp, Homo sapiens
cttaaaaatctttaa

SEQ ID NO: 917033 - DNA, 15 bp, Homo sapiens
acttaaaaatcttta

SEQ ID NO: 917034 - DNA, 15 bp, Homo sapiens
tacttaaaaatcttt

SEQ ID NO: 917035 - DNA, 15 bp, Homo sapiens
gtacttaaaaatctt

SEQ ID NO: 917036 - DNA, 15 bp, Homo sapiens
agtacttaaaaatct

SEQ ID NO: 917037 - DNA, 15 bp, Homo sapiens
aagtacttaaaaatc

SEQ ID NO: 917038 - DNA, 15 bp, Homo sapiens
caagtacttaaaaat

SEQ ID NO: 917039 - DNA, 15 bp, Homo sapiens
tcaagtacttaaaaa

SEQ ID NO: 917040 - DNA, 15 bp, Homo sapiens
atcaagtacttaaaa

SEQ ID NO: 917041 - DNA, 15 bp, Homo sapiens
aatcaagtacttaaa

SEQ ID NO: 917042 - DNA, 15 bp, Homo sapiens
aaatcaagtacttaa

SEQ ID NO: 917043 - DNA, 15 bp, Homo sapiens
aaaatcaagtactta

SEQ ID NO: 917044 - DNA, 15 bp, Homo sapiens
aaaaatcaagtactt

SEQ ID NO: 917045 - DNA, 15 bp, Homo sapiens
taaaaatcaagtact

SEQ ID NO: 917046 - DNA, 15 bp, Homo sapiens
ataaaaatcaagtac

SEQ ID NO: 917047 - DNA, 15 bp, Homo sapiens
tataaaaatcaagta

SEQ ID NO: 917048 - DNA, 15 bp, Homo sapiens
ttataaaaatcaagt

SEQ ID NO: 917049 - DNA, 15 bp, Homo sapiens
attataaaaatcaag

SEQ ID NO: 917050 - DNA, 15 bp, Homo sapiens
aattataaaaatcaa

SEQ ID NO: 917051 - DNA, 15 bp, Homo sapiens
aaattataaaaatca

SEQ ID NO: 917052 - DNA, 15 bp, Homo sapiens
taaattataaaaatc

SEQ ID NO: 917053 - DNA, 15 bp, Homo sapiens
ctaaattataaaaat

SEQ ID NO: 917054 - DNA, 15 bp, Homo sapiens
tctaaattataaaaa

SEQ ID NO: 917055 - DNA, 15 bp, Homo sapiens
gtctaaattataaaa

SEQ ID NO: 917056 - DNA, 15 bp, Homo sapiens
agtctaaattataaa

SEQ ID NO: 917057 - DNA, 15 bp, Homo sapiens
tagtctaaattataa

SEQ ID NO: 917058 - DNA, 15 bp, Homo sapiens
gtagtctaaattata

SEQ ID NO: 917059 - DNA, 15 bp, Homo sapiens
agtagtctaaattat

SEQ ID NO: 917060 - DNA, 15 bp, Homo sapiens
aagtagtctaaatta

SEQ ID NO: 917061 - DNA, 15 bp, Homo sapiens
taagtagtctaaatt

SEQ ID NO: 917062 - DNA, 15 bp, Homo sapiens
gtaagtagtctaaat

SEQ ID NO: 917063 - DNA, 15 bp, Homo sapiens
cgtaagtagtctaaa

SEQ ID NO: 917064 - DNA, 15 bp, Homo sapiens
acgtaagtagtctaa

SEQ ID NO: 917065 - DNA, 15 bp, Homo sapiens
aacgtaagtagtcta

SEQ ID NO: 917066 - DNA, 15 bp, Homo sapiens
aaacgtaagtagtct

SEQ ID NO: 917067 - DNA, 15 bp, Homo sapiens
aaaacgtaagtagtc

SEQ ID NO: 917068 - DNA, 15 bp, Homo sapiens
taaaacgtaagtagt

SEQ ID NO: 917069 - DNA, 15 bp, Homo sapiens
gtaaaacgtaagtag

SEQ ID NO: 917070 - DNA, 15 bp, Homo sapiens
agtaaaacgtaagta

SEQ ID NO: 917071 - DNA, 15 bp, Homo sapiens
aagtaaaacgtaagt

SEQ ID NO: 917072 - DNA, 15 bp, Homo sapiens
aaagtaaaacgtaag

SEQ ID NO: 917073 - DNA, 15 bp, Homo sapiens
caaagtaaaacgtaa

SEQ ID NO: 917074 - DNA, 15 bp, Homo sapiens
acaaagtaaaacgta

SEQ ID NO: 917075 - DNA, 15 bp, Homo sapiens
aacaaagtaaaacgt

SEQ ID NO: 917076 - DNA, 15 bp, Homo sapiens
gaacaaagtaaaacg

SEQ ID NO: 917077 - DNA, 15 bp, Homo sapiens
cgaacaaagtaaaac

SEQ ID NO: 917078 - DNA, 15 bp, Homo sapiens
tcgaacaaagtaaaa

SEQ ID NO: 917079 - DNA, 15 bp, Homo sapiens
ctcgaacaaagtaaa

SEQ ID NO: 917080 - DNA, 15 bp, Homo sapiens
actcgaacaaagtaa

SEQ ID NO: 917081 - DNA, 15 bp, Homo sapiens
tactcgaacaaagta

SEQ ID NO: 917082 - DNA, 15 bp, Homo sapiens
atactcgaacaaagt

SEQ ID NO: 917083 - DNA, 15 bp, Homo sapiens
aatactcgaacaaag

SEQ ID NO: 917084 - DNA, 15 bp, Homo sapiens
aaatactcgaacaaa

SEQ ID NO: 917085 - DNA, 15 bp, Homo sapiens
aaaatactcgaacaa

SEQ ID NO: 917086 - DNA, 15 bp, Homo sapiens
taaaatactcgaaca

SEQ ID NO: 917087 - DNA, 15 bp, Homo sapiens
ttaaaatactcgaac

SEQ ID NO: 917088 - DNA, 15 bp, Homo sapiens
cttaaaatactcgaa

SEQ ID NO: 917089 - DNA, 15 bp, Homo sapiens
ccttaaaatactcga

SEQ ID NO: 917090 - DNA, 15 bp, Homo sapiens
tccttaaaatactcg

SEQ ID NO: 917091 - DNA, 15 bp, Homo sapiens
ctccttaaaatactc

SEQ ID NO: 917092 - DNA, 15 bp, Homo sapiens
actccttaaaatact

SEQ ID NO: 917093 - DNA, 15 bp, Homo sapiens
tactccttaaaatac

SEQ ID NO: 917094 - DNA, 15 bp, Homo sapiens
ttactccttaaaata

SEQ ID NO: 917095 - DNA, 15 bp, Homo sapiens
attactccttaaaat

SEQ ID NO: 917096 - DNA, 15 bp, Homo sapiens
aattactccttaaaa

SEQ ID NO: 917097 - DNA, 15 bp, Homo sapiens
taattactccttaaa

SEQ ID NO: 917098 - DNA, 15 bp, Homo sapiens
ctaattactccttaa

SEQ ID NO: 917099 - DNA, 15 bp, Homo sapiens
actaattactcctta

SEQ ID NO: 917100 - DNA, 15 bp, Homo sapiens
tactaattactcctt

SEQ ID NO: 917101 - DNA, 15 bp, Homo sapiens
ttactaattactcct

SEQ ID NO: 917102 - DNA, 15 bp, Homo sapiens
attactaattactcc

SEQ ID NO: 917103 - DNA, 15 bp, Homo sapiens
tattactaattactc

SEQ ID NO: 917104 - DNA, 15 bp, Homo sapiens
atattactaattact

SEQ ID NO: 917105 - DNA, 15 bp, Homo sapiens
tatattactaattac

SEQ ID NO: 917106 - DNA, 15 bp, Homo sapiens
ctatattactaatta

SEQ ID NO: 917107 - DNA, 15 bp, Homo sapiens
gctatattactaatt

SEQ ID NO: 917108 - DNA, 15 bp, Homo sapiens
agctatattactaat

SEQ ID NO: 917109 - DNA, 15 bp, Homo sapiens
aagctatattactaa

SEQ ID NO: 917110 - DNA, 15 bp, Homo sapiens
caagctatattacta

SEQ ID NO: 917111 - DNA, 15 bp, Homo sapiens
tcaagctatattact

SEQ ID NO: 917112 - DNA, 15 bp, Homo sapiens
ctcaagctatattac

SEQ ID NO: 917113 - DNA, 15 bp, Homo sapiens
tctcaagctatatta

SEQ ID NO: 917114 - DNA, 15 bp, Homo sapiens
ctctcaagctatatt

SEQ ID NO: 917115 - DNA, 15 bp, Homo sapiens
actctcaagctatat

SEQ ID NO: 917116 - DNA, 15 bp, Homo sapiens
aactctcaagctata

SEQ ID NO: 917117 - DNA, 15 bp, Homo sapiens
aaactctcaagctat

SEQ ID NO: 917118 - DNA, 15 bp, Homo sapiens
taaactctcaagcta

SEQ ID NO: 917119 - DNA, 15 bp, Homo sapiens
ataaactctcaagct

SEQ ID NO: 917120 - DNA, 15 bp, Homo sapiens
tataaactctcaagc

SEQ ID NO: 917121 - DNA, 15 bp, Homo sapiens
atataaactctcaag

SEQ ID NO: 917122 - DNA, 15 bp, Homo sapiens
tatataaactctcaa

SEQ ID NO: 917123 - DNA, 15 bp, Homo sapiens
atatataaactctca

SEQ ID NO: 917124 - DNA, 15 bp, Homo sapiens
aatatataaactctc

SEQ ID NO: 917125 - DNA, 15 bp, Homo sapiens
aaatatataaactct

SEQ ID NO: 917126 - DNA, 15 bp, Homo sapiens
taaatatataaactc

SEQ ID NO: 917127 - DNA, 15 bp, Homo sapiens
ataaatatataaact

SEQ ID NO: 917128 - DNA, 15 bp, Homo sapiens
aataaatatataaac

SEQ ID NO: 917129 - DNA, 15 bp, Homo sapiens
aaataaatatataaa

SEQ ID NO: 917130 - DNA, 15 bp, Homo sapiens
aaaataaatatataa

SEQ ID NO: 917131 - DNA, 15 bp, Homo sapiens
taaaataaatatata

SEQ ID NO: 917132 - DNA, 15 bp, Homo sapiens
ttaaaataaatatat

SEQ ID NO: 917133 - DNA, 15 bp, Homo sapiens
attaaaataaatata

SEQ ID NO: 917134 - DNA, 15 bp, Homo sapiens
tattaaaataaatat

SEQ ID NO: 917135 - DNA, 15 bp, Homo sapiens
ttattaaaataaata

SEQ ID NO: 917136 - DNA, 15 bp, Homo sapiens
tttattaaaataaat

SEQ ID NO: 917137 - DNA, 15 bp, Homo sapiens
atttattaaaataaa

SEQ ID NO: 917138 - DNA, 15 bp, Homo sapiens
tatttattaaaataa

SEQ ID NO: 917139 - DNA, 15 bp, Homo sapiens
ctatttattaaaata

SEQ ID NO: 917140 - DNA, 15 bp, Homo sapiens
gctatttattaaaat

SEQ ID NO: 917141 - DNA, 15 bp, Homo sapiens
ggctatttattaaaa

SEQ ID NO: 917142 - DNA, 15 bp, Homo sapiens
aggctatttattaaa

SEQ ID NO: 917143 - DNA, 15 bp, Homo sapiens
taggctatttattaa

SEQ ID NO: 917144 - DNA, 15 bp, Homo sapiens
ataggctatttatta

SEQ ID NO: 917145 - DNA, 15 bp, Homo sapiens
aataggctatttatt

SEQ ID NO: 917146 - DNA, 15 bp, Homo sapiens
taataggctatttat

SEQ ID NO: 917147 - DNA, 15 bp, Homo sapiens
ctaataggctattta

SEQ ID NO: 917148 - DNA, 15 bp, Homo sapiens
actaataggctattt

SEQ ID NO: 917149 - DNA, 15 bp, Homo sapiens
aactaataggctatt

SEQ ID NO: 917150 - DNA, 15 bp, Homo sapiens
taactaataggctat

SEQ ID NO: 917151 - DNA, 15 bp, Homo sapiens
ttaactaataggcta

SEQ ID NO: 917152 - DNA, 15 bp, Homo sapiens
attaactaataggct

SEQ ID NO: 917153 - DNA, 15 bp, Homo sapiens
tattaactaataggc

SEQ ID NO: 917154 - DNA, 15 bp, Homo sapiens
atattaactaatagg

SEQ ID NO: 917155 - DNA, 15 bp, Homo sapiens
aatattaactaatag

SEQ ID NO: 917156 - DNA, 15 bp, Homo sapiens
taatattaactaata

SEQ ID NO: 917157 - DNA, 15 bp, Homo sapiens
gtaatattaactaat

SEQ ID NO: 917158 - DNA, 15 bp, Homo sapiens
agtaatattaactaa

SEQ ID NO: 917159 - DNA, 15 bp, Homo sapiens
tagtaatattaacta

SEQ ID NO: 917160 - DNA, 15 bp, Homo sapiens
ttagtaatattaact

SEQ ID NO: 917161 - DNA, 15 bp, Homo sapiens
attagtaatattaac

SEQ ID NO: 917162 - DNA, 15 bp, Homo sapiens
aattagtaatattaa

SEQ ID NO: 917163 - DNA, 15 bp, Homo sapiens
aaattagtaatatta

SEQ ID NO: 917164 - DNA, 15 bp, Homo sapiens
caaattagtaatatt

SEQ ID NO: 917165 - DNA, 15 bp, Homo sapiens
tcaaattagtaatat

SEQ ID NO: 917166 - DNA, 15 bp, Homo sapiens
ctcaaattagtaata

SEQ ID NO: 917167 - DNA, 15 bp, Homo sapiens
actcaaattagtaat

SEQ ID NO: 917168 - DNA, 15 bp, Homo sapiens
cactcaaattagtaa

SEQ ID NO: 917169 - DNA, 15 bp, Homo sapiens
acactcaaattagta

SEQ ID NO: 917170 - DNA, 15 bp, Homo sapiens
aacactcaaattagt

SEQ ID NO: 917171 - DNA, 15 bp, Homo sapiens
taacactcaaattag

SEQ ID NO: 917172 - DNA, 15 bp, Homo sapiens
ataacactcaaatta

SEQ ID NO: 917173 - DNA, 15 bp, Homo sapiens
cataacactcaaatt

SEQ ID NO: 917174 - DNA, 15 bp, Homo sapiens
tcataacactcaaat

SEQ ID NO: 917175 - DNA, 15 bp, Homo sapiens
atcataacactcaaa

SEQ ID NO: 917176 - DNA, 15 bp, Homo sapiens
tatcataacactcaa

SEQ ID NO: 917177 - DNA, 15 bp, Homo sapiens
ctatcataacactca

SEQ ID NO: 917178 - DNA, 15 bp, Homo sapiens
actatcataacactc

SEQ ID NO: 917179 - DNA, 15 bp, Homo sapiens
cactatcataacact

SEQ ID NO: 917180 - DNA, 15 bp, Homo sapiens
gcactatcataacac

SEQ ID NO: 917181 - DNA, 15 bp, Homo sapiens
tgcactatcataaca

SEQ ID NO: 917182 - DNA, 15 bp, Homo sapiens
ctgcactatcataac

SEQ ID NO: 917183 - DNA, 15 bp, Homo sapiens
tctgcactatcataa

SEQ ID NO: 917184 - DNA, 15 bp, Homo sapiens
gtctgcactatcata

SEQ ID NO: 917185 - DNA, 15 bp, Homo sapiens
agtctgcactatcat

SEQ ID NO: 917186 - DNA, 15 bp, Homo sapiens
tagtctgcactatca

SEQ ID NO: 917187 - DNA, 15 bp, Homo sapiens
ttagtctgcactatc

SEQ ID NO: 917188 - DNA, 15 bp, Homo sapiens
cttagtctgcactat

SEQ ID NO: 917189 - DNA, 15 bp, Homo sapiens
acttagtctgcacta

SEQ ID NO: 917190 - DNA, 15 bp, Homo sapiens
aacttagtctgcact

SEQ ID NO: 917191 - DNA, 15 bp, Homo sapiens
caacttagtctgcac

SEQ ID NO: 917192 - DNA, 15 bp, Homo sapiens
gcaacttagtctgca

SEQ ID NO: 917193 - DNA, 15 bp, Homo sapiens
agcaacttagtctgc

SEQ ID NO: 917194 - DNA, 15 bp, Homo sapiens
cagcaacttagtctg

SEQ ID NO: 917195 - DNA, 15 bp, Homo sapiens
gcagcaacttagtct

SEQ ID NO: 917196 - DNA, 15 bp, Homo sapiens
agcagcaacttagtc

SEQ ID NO: 917197 - DNA, 15 bp, Homo sapiens
aagcagcaacttagt

SEQ ID NO: 917198 - DNA, 15 bp, Homo sapiens
aaagcagcaacttag

SEQ ID NO: 917199 - DNA, 15 bp, Homo sapiens
taaagcagcaactta

SEQ ID NO: 917200 - DNA, 15 bp, Homo sapiens
ttaaagcagcaactt

SEQ ID NO: 917201 - DNA, 15 bp, Homo sapiens
tttaaagcagcaact

SEQ ID NO: 917202 - DNA, 15 bp, Homo sapiens
ttttaaagcagcaac

SEQ ID NO: 917203 - DNA, 15 bp, Homo sapiens
attttaaagcagcaa

SEQ ID NO: 917204 - DNA, 15 bp, Homo sapiens
cattttaaagcagca

SEQ ID NO: 917205 - DNA, 15 bp, Homo sapiens
tcattttaaagcagc

SEQ ID NO: 917206 - DNA, 15 bp, Homo sapiens
ttcattttaaagcag

SEQ ID NO: 917207 - DNA, 15 bp, Homo sapiens
tttcattttaaagca

SEQ ID NO: 917208 - DNA, 15 bp, Homo sapiens
ttttcattttaaagc

SEQ ID NO: 917209 - DNA, 15 bp, Homo sapiens
attttcattttaaag

SEQ ID NO: 917210 - DNA, 15 bp, Homo sapiens
tattttcattttaaa

SEQ ID NO: 917211 - DNA, 15 bp, Homo sapiens
ttattttcattttaa

SEQ ID NO: 917212 - DNA, 15 bp, Homo sapiens
tttattttcatttta

SEQ ID NO: 917213 - DNA, 15 bp, Homo sapiens
atttattttcatttt

SEQ ID NO: 917214 - DNA, 15 bp, Homo sapiens
tatttattttcattt

SEQ ID NO: 917215 - DNA, 15 bp, Homo sapiens
atatttattttcatt

SEQ ID NO: 917216 - DNA, 15 bp, Homo sapiens
gatatttattttcat

SEQ ID NO: 917217 - DNA, 15 bp, Homo sapiens
agatatttattttca

SEQ ID NO: 917218 - DNA, 15 bp, Homo sapiens
tagatatttattttc

SEQ ID NO: 917219 - DNA, 15 bp, Homo sapiens
ttagatatttatttt

SEQ ID NO: 917220 - DNA, 15 bp, Homo sapiens
tttagatatttattt

SEQ ID NO: 917221 - DNA, 15 bp, Homo sapiens
atttagatatttatt

SEQ ID NO: 917222 - DNA, 15 bp, Homo sapiens
tatttagatatttat

SEQ ID NO: 917223 - DNA, 15 bp, Homo sapiens
atatttagatattta

SEQ ID NO: 917224 - DNA, 15 bp, Homo sapiens
gatatttagatattt

SEQ ID NO: 917225 - DNA, 15 bp, Homo sapiens
tgatatttagatatt

SEQ ID NO: 917226 - DNA, 15 bp, Homo sapiens
ttgatatttagatat

SEQ ID NO: 917227 - DNA, 15 bp, Homo sapiens
attgatatttagata

SEQ ID NO: 917228 - DNA, 15 bp, Homo sapiens
aattgatatttagat

SEQ ID NO: 917229 - DNA, 15 bp, Homo sapiens
aaattgatatttaga

SEQ ID NO: 917230 - DNA, 15 bp, Homo sapiens
gaaattgatatttag

SEQ ID NO: 917231 - DNA, 15 bp, Homo sapiens
tgaaattgatattta

SEQ ID NO: 917232 - DNA, 15 bp, Homo sapiens
atgaaattgatattt

SEQ ID NO: 917233 - DNA, 15 bp, Homo sapiens
aatgaaattgatatt

SEQ ID NO: 917234 - DNA, 15 bp, Homo sapiens
taatgaaattgatat

SEQ ID NO: 917235 - DNA, 15 bp, Homo sapiens
ataatgaaattgata

SEQ ID NO: 917236 - DNA, 15 bp, Homo sapiens
aataatgaaattgat

SEQ ID NO: 917237 - DNA, 15 bp, Homo sapiens
caataatgaaattga

SEQ ID NO: 917238 - DNA, 15 bp, Homo sapiens
gcaataatgaaattg

SEQ ID NO: 917239 - DNA, 15 bp, Homo sapiens
agcaataatgaaatt

SEQ ID NO: 917240 - DNA, 15 bp, Homo sapiens
tagcaataatgaaat

SEQ ID NO: 917241 - DNA, 15 bp, Homo sapiens
ttagcaataatgaaa

SEQ ID NO: 917242 - DNA, 15 bp, Homo sapiens
tttagcaataatgaa

SEQ ID NO: 917243 - DNA, 15 bp, Homo sapiens
atttagcaataatga

SEQ ID NO: 917244 - DNA, 15 bp, Homo sapiens
aatttagcaataatg

SEQ ID NO: 917245 - DNA, 15 bp, Homo sapiens
aaatttagcaataat

SEQ ID NO: 917246 - DNA, 15 bp, Homo sapiens
gaaatttagcaataa

SEQ ID NO: 917247 - DNA, 15 bp, Homo sapiens
tgaaatttagcaata

SEQ ID NO: 917248 - DNA, 15 bp, Homo sapiens
atgaaatttagcaat

SEQ ID NO: 917249 - DNA, 15 bp, Homo sapiens
aatgaaatttagcaa

SEQ ID NO: 917250 - DNA, 15 bp, Homo sapiens
aaatgaaatttagca

SEQ ID NO: 917251 - DNA, 15 bp, Homo sapiens
taaatgaaatttagc

SEQ ID NO: 917252 - DNA, 15 bp, Homo sapiens
ttaaatgaaatttag

SEQ ID NO: 917253 - DNA, 15 bp, Homo sapiens
attaaatgaaattta

SEQ ID NO: 917254 - DNA, 15 bp, Homo sapiens
cattaaatgaaattt

SEQ ID NO: 917255 - DNA, 15 bp, Homo sapiens
gcattaaatgaaatt

SEQ ID NO: 917256 - DNA, 15 bp, Homo sapiens
agcattaaatgaaat

SEQ ID NO: 917257 - DNA, 15 bp, Homo sapiens
aagcattaaatgaaa

SEQ ID NO: 917258 - DNA, 15 bp, Homo sapiens
aaagcattaaatgaa

SEQ ID NO: 917259 - DNA, 15 bp, Homo sapiens
gaaagcattaaatga

SEQ ID NO: 917260 - DNA, 15 bp, Homo sapiens
agaaagcattaaatg

SEQ ID NO: 917261 - DNA, 15 bp, Homo sapiens
aagaaagcattaaat

SEQ ID NO: 917262 - DNA, 15 bp, Homo sapiens
taagaaagcattaaa

SEQ ID NO: 917263 - DNA, 15 bp, Homo sapiens
ctaagaaagcattaa

SEQ ID NO: 917264 - DNA, 15 bp, Homo sapiens
actaagaaagcatta

SEQ ID NO: 917265 - DNA, 15 bp, Homo sapiens
aactaagaaagcatt

SEQ ID NO: 917266 - DNA, 15 bp, Homo sapiens
taactaagaaagcat

SEQ ID NO: 917267 - DNA, 15 bp, Homo sapiens
ttaactaagaaagca

SEQ ID NO: 917268 - DNA, 15 bp, Homo sapiens
tttaactaagaaagc

SEQ ID NO: 917269 - DNA, 15 bp, Homo sapiens
ttttaactaagaaag

SEQ ID NO: 917270 - DNA, 15 bp, Homo sapiens
tttttaactaagaaa

SEQ ID NO: 917271 - DNA, 15 bp, Homo sapiens
atttttaactaagaa

SEQ ID NO: 917272 - DNA, 15 bp, Homo sapiens
catttttaactaaga

SEQ ID NO: 917273 - DNA, 15 bp, Homo sapiens
tcatttttaactaag

SEQ ID NO: 917274 - DNA, 15 bp, Homo sapiens
atcatttttaactaa

SEQ ID NO: 917275 - DNA, 15 bp, Homo sapiens
gatcatttttaacta

SEQ ID NO: 917276 - DNA, 15 bp, Homo sapiens
tgatcatttttaact

SEQ ID NO: 917277 - DNA, 15 bp, Homo sapiens
atgatcatttttaac

SEQ ID NO: 917278 - DNA, 15 bp, Homo sapiens
aatgatcatttttaa

SEQ ID NO: 917279 - DNA, 15 bp, Homo sapiens
aaatgatcattttta

SEQ ID NO: 917280 - DNA, 15 bp, Homo sapiens
caaatgatcattttt

SEQ ID NO: 917281 - DNA, 15 bp, Homo sapiens
acaaatgatcatttt

SEQ ID NO: 917282 - DNA, 15 bp, Homo sapiens
tacaaatgatcattt

SEQ ID NO: 917283 - DNA, 15 bp, Homo sapiens
ttacaaatgatcatt

SEQ ID NO: 917284 - DNA, 15 bp, Homo sapiens
tttacaaatgatcat

SEQ ID NO: 917285 - DNA, 15 bp, Homo sapiens
ttttacaaatgatca

SEQ ID NO: 917286 - DNA, 15 bp, Homo sapiens
tttttacaaatgatc

SEQ ID NO: 917287 - DNA, 15 bp, Homo sapiens
gtttttacaaatgat

SEQ ID NO: 917288 - DNA, 15 bp, Homo sapiens
agtttttacaaatga

SEQ ID NO: 917289 - DNA, 15 bp, Homo sapiens
tagtttttacaaatg

SEQ ID NO: 917290 - DNA, 15 bp, Homo sapiens
atagtttttacaaat

SEQ ID NO: 917291 - DNA, 15 bp, Homo sapiens
aatagtttttacaaa

SEQ ID NO: 917292 - DNA, 15 bp, Homo sapiens
taatagtttttacaa

SEQ ID NO: 917293 - DNA, 15 bp, Homo sapiens
ataatagtttttaca

SEQ ID NO: 917294 - DNA, 15 bp, Homo sapiens
gataatagtttttac

SEQ ID NO: 917295 - DNA, 15 bp, Homo sapiens
agataatagttttta

SEQ ID NO: 917296 - DNA, 15 bp, Homo sapiens
tagataatagttttt

SEQ ID NO: 917297 - DNA, 15 bp, Homo sapiens
ttagataatagtttt

SEQ ID NO: 917298 - DNA, 15 bp, Homo sapiens
tttagataatagttt

SEQ ID NO: 917299 - DNA, 15 bp, Homo sapiens
ctttagataatagtt

SEQ ID NO: 917300 - DNA, 15 bp, Homo sapiens
tctttagataatagt

SEQ ID NO: 917301 - DNA, 15 bp, Homo sapiens
ttctttagataatag

SEQ ID NO: 917302 - DNA, 15 bp, Homo sapiens
tttctttagataata

SEQ ID NO: 917303 - DNA, 15 bp, Homo sapiens
ttttctttagataat

SEQ ID NO: 917304 - DNA, 15 bp, Homo sapiens
cttttctttagataa

SEQ ID NO: 917305 - DNA, 15 bp, Homo sapiens
tcttttctttagata

SEQ ID NO: 917306 - DNA, 15 bp, Homo sapiens
gtcttttctttagat

SEQ ID NO: 917307 - DNA, 15 bp, Homo sapiens
tgtcttttctttaga

SEQ ID NO: 917308 - DNA, 15 bp, Homo sapiens
ttgtcttttctttag

SEQ ID NO: 917309 - DNA, 15 bp, Homo sapiens
tttgtcttttcttta

SEQ ID NO: 917310 - DNA, 15 bp, Homo sapiens
atttgtcttttcttt

SEQ ID NO: 917311 - DNA, 15 bp, Homo sapiens
tatttgtcttttctt

SEQ ID NO: 917312 - DNA, 15 bp, Homo sapiens
ctatttgtcttttct

SEQ ID NO: 917313 - DNA, 15 bp, Homo sapiens
tctatttgtcttttc

SEQ ID NO: 917314 - DNA, 15 bp, Homo sapiens
gtctatttgtctttt

SEQ ID NO: 917315 - DNA, 15 bp, Homo sapiens
tgtctatttgtcttt

SEQ ID NO: 917316 - DNA, 15 bp, Homo sapiens
ttgtctatttgtctt

SEQ ID NO: 917317 - DNA, 15 bp, Homo sapiens
tttgtctatttgtct

SEQ ID NO: 917318 - DNA, 15 bp, Homo sapiens
atttgtctatttgtc

SEQ ID NO: 917319 - DNA, 15 bp, Homo sapiens
tatttgtctatttgt

SEQ ID NO: 917320 - DNA, 15 bp, Homo sapiens
ttatttgtctatttg

SEQ ID NO: 917321 - DNA, 15 bp, Homo sapiens
cttatttgtctattt

SEQ ID NO: 917322 - DNA, 15 bp, Homo sapiens
acttatttgtctatt

SEQ ID NO: 917323 - DNA, 15 bp, Homo sapiens
tacttatttgtctat

SEQ ID NO: 917324 - DNA, 15 bp, Homo sapiens
atacttatttgtcta

SEQ ID NO: 917325 - DNA, 15 bp, Homo sapiens
aatacttatttgtct

SEQ ID NO: 917326 - DNA, 15 bp, Homo sapiens
aaatacttatttgtc

SEQ ID NO: 917327 - DNA, 15 bp, Homo sapiens
aaaatacttatttgt

SEQ ID NO: 917328 - DNA, 15 bp, Homo sapiens
taaaatacttatttg

SEQ ID NO: 917329 - DNA, 15 bp, Homo sapiens
ataaaatacttattt

SEQ ID NO: 917330 - DNA, 15 bp, Homo sapiens
tataaaatacttatt

SEQ ID NO: 917331 - DNA, 15 bp, Homo sapiens
gtataaaatacttat

SEQ ID NO: 917332 - DNA, 15 bp, Homo sapiens
tgtataaaatactta

SEQ ID NO: 917333 - DNA, 15 bp, Homo sapiens
ctgtataaaatactt

SEQ ID NO: 917334 - DNA, 15 bp, Homo sapiens
tctgtataaaatact

SEQ ID NO: 917335 - DNA, 15 bp, Homo sapiens
atctgtataaaatac

SEQ ID NO: 917336 - DNA, 15 bp, Homo sapiens
tatctgtataaaata

SEQ ID NO: 917337 - DNA, 15 bp, Homo sapiens
atatctgtataaaat

SEQ ID NO: 917338 - DNA, 15 bp, Homo sapiens
tatatctgtataaaa

SEQ ID NO: 917339 - DNA, 15 bp, Homo sapiens
atatatctgtataaa

SEQ ID NO: 917340 - DNA, 15 bp, Homo sapiens
tatatatctgtataa

SEQ ID NO: 917341 - DNA, 15 bp, Homo sapiens
atatatatctgtata

SEQ ID NO: 917342 - DNA, 15 bp, Homo sapiens
catatatatctgtat

SEQ ID NO: 917343 - DNA, 15 bp, Homo sapiens
acatatatatctgta

SEQ ID NO: 917344 - DNA, 15 bp, Homo sapiens
cacatatatatctgt

SEQ ID NO: 917345 - DNA, 15 bp, Homo sapiens
acacatatatatctg

SEQ ID NO: 917346 - DNA, 15 bp, Homo sapiens
cacacatatatatct

SEQ ID NO: 917347 - DNA, 15 bp, Homo sapiens
tcacacatatatatc

SEQ ID NO: 917348 - DNA, 15 bp, Homo sapiens
ttcacacatatatat

SEQ ID NO: 917349 - DNA, 15 bp, Homo sapiens
tttcacacatatata

SEQ ID NO: 917350 - DNA, 15 bp, Homo sapiens
ttttcacacatatat

SEQ ID NO: 917351 - DNA, 15 bp, Homo sapiens
cttttcacacatata

SEQ ID NO: 917352 - DNA, 15 bp, Homo sapiens
acttttcacacatat

SEQ ID NO: 917353 - DNA, 15 bp, Homo sapiens
tacttttcacacata

SEQ ID NO: 917354 - DNA, 15 bp, Homo sapiens
atacttttcacacat

SEQ ID NO: 917355 - DNA, 15 bp, Homo sapiens
gatacttttcacaca

SEQ ID NO: 917356 - DNA, 15 bp, Homo sapiens
agatacttttcacac

SEQ ID NO: 917357 - DNA, 15 bp, Homo sapiens
tagatacttttcaca

SEQ ID NO: 917358 - DNA, 15 bp, Homo sapiens
ttagatacttttcac

SEQ ID NO: 917359 - DNA, 15 bp, Homo sapiens
gttagatacttttca

SEQ ID NO: 917360 - DNA, 15 bp, Homo sapiens
agttagatacttttc

SEQ ID NO: 917361 - DNA, 15 bp, Homo sapiens
aagttagatactttt

SEQ ID NO: 917362 - DNA, 15 bp, Homo sapiens
caagttagatacttt

SEQ ID NO: 917363 - DNA, 15 bp, Homo sapiens
ccaagttagatactt

SEQ ID NO: 917364 - DNA, 15 bp, Homo sapiens
tccaagttagatact

SEQ ID NO: 917365 - DNA, 15 bp, Homo sapiens
atccaagttagatac

SEQ ID NO: 917366 - DNA, 15 bp, Homo sapiens
gatccaagttagata

SEQ ID NO: 917367 - DNA, 15 bp, Homo sapiens
ggatccaagttagat

SEQ ID NO: 917368 - DNA, 15 bp, Homo sapiens
cggatccaagttaga

SEQ ID NO: 917369 - DNA, 15 bp, Homo sapiens
acggatccaagttag

SEQ ID NO: 917370 - DNA, 15 bp, Homo sapiens
tacggatccaagtta

SEQ ID NO: 917371 - DNA, 15 bp, Homo sapiens
ctacggatccaagtt

SEQ ID NO: 917372 - DNA, 15 bp, Homo sapiens
actacggatccaagt

SEQ ID NO: 917373 - DNA, 15 bp, Homo sapiens
aactacggatccaag

SEQ ID NO: 917374 - DNA, 15 bp, Homo sapiens
caactacggatccaa

SEQ ID NO: 917375 - DNA, 15 bp, Homo sapiens
acaactacggatcca

SEQ ID NO: 917376 - DNA, 15 bp, Homo sapiens
cacaactacggatcc

SEQ ID NO: 917377 - DNA, 15 bp, Homo sapiens
gcacaactacggatc

SEQ ID NO: 917378 - DNA, 15 bp, Homo sapiens
agcacaactacggat

SEQ ID NO: 917379 - DNA, 15 bp, Homo sapiens
tagcacaactacgga

SEQ ID NO: 917380 - DNA, 15 bp, Homo sapiens
ctagcacaactacgg

SEQ ID NO: 917381 - DNA, 15 bp, Homo sapiens
cctagcacaactacg

SEQ ID NO: 917382 - DNA, 15 bp, Homo sapiens
tcctagcacaactac

SEQ ID NO: 917383 - DNA, 15 bp, Homo sapiens
gtcctagcacaacta

SEQ ID NO: 917384 - DNA, 15 bp, Homo sapiens
ggtcctagcacaact

SEQ ID NO: 917385 - DNA, 15 bp, Homo sapiens
gggtcctagcacaac

SEQ ID NO: 917386 - DNA, 15 bp, Homo sapiens
ggggtcctagcacaa

SEQ ID NO: 917387 - DNA, 15 bp, Homo sapiens
tggggtcctagcaca

SEQ ID NO: 917388 - DNA, 15 bp, Homo sapiens
ttggggtcctagcac

SEQ ID NO: 917389 - DNA, 15 bp, Homo sapiens
tttggggtcctagca

SEQ ID NO: 917390 - DNA, 15 bp, Homo sapiens
atttggggtcctagc

SEQ ID NO: 917391 - DNA, 15 bp, Homo sapiens
aatttggggtcctag

SEQ ID NO: 917392 - DNA, 15 bp, Homo sapiens
taatttggggtccta

SEQ ID NO: 917393 - DNA, 15 bp, Homo sapiens
ctaatttggggtcct

SEQ ID NO: 917394 - DNA, 15 bp, Homo sapiens
tctaatttggggtcc

SEQ ID NO: 917395 - DNA, 15 bp, Homo sapiens
gtctaatttggggtc

SEQ ID NO: 917396 - DNA, 15 bp, Homo sapiens
agtctaatttggggt

SEQ ID NO: 917397 - DNA, 15 bp, Homo sapiens
aagtctaatttgggg

SEQ ID NO: 917398 - DNA, 15 bp, Homo sapiens
gaagtctaatttggg

SEQ ID NO: 917399 - DNA, 15 bp, Homo sapiens
agaagtctaatttgg

SEQ ID NO: 917400 - DNA, 15 bp, Homo sapiens
cagaagtctaatttg

SEQ ID NO: 917401 - DNA, 15 bp, Homo sapiens
tcagaagtctaattt

SEQ ID NO: 917402 - DNA, 15 bp, Homo sapiens
atcagaagtctaatt

SEQ ID NO: 917403 - DNA, 15 bp, Homo sapiens
gatcagaagtctaat

SEQ ID NO: 917404 - DNA, 15 bp, Homo sapiens
tgatcagaagtctaa

SEQ ID NO: 917405 - DNA, 15 bp, Homo sapiens
ttgatcagaagtcta

SEQ ID NO: 917406 - DNA, 15 bp, Homo sapiens
gttgatcagaagtct

SEQ ID NO: 917407 - DNA, 15 bp, Homo sapiens
agttgatcagaagtc

SEQ ID NO: 917408 - DNA, 15 bp, Homo sapiens
aagttgatcagaagt

SEQ ID NO: 917409 - DNA, 15 bp, Homo sapiens
caagttgatcagaag

SEQ ID NO: 917410 - DNA, 15 bp, Homo sapiens
ccaagttgatcagaa

SEQ ID NO: 917411 - DNA, 15 bp, Homo sapiens
tccaagttgatcaga

SEQ ID NO: 917412 - DNA, 15 bp, Homo sapiens
gtccaagttgatcag

SEQ ID NO: 917413 - DNA, 15 bp, Homo sapiens
agtccaagttgatca

SEQ ID NO: 917414 - DNA, 15 bp, Homo sapiens
tagtccaagttgatc

SEQ ID NO: 917415 - DNA, 15 bp, Homo sapiens
atagtccaagttgat

SEQ ID NO: 917416 - DNA, 15 bp, Homo sapiens
gatagtccaagttga

SEQ ID NO: 917417 - DNA, 15 bp, Homo sapiens
tgatagtccaagttg

SEQ ID NO: 917418 - DNA, 15 bp, Homo sapiens
ctgatagtccaagtt

SEQ ID NO: 917419 - DNA, 15 bp, Homo sapiens
tctgatagtccaagt

SEQ ID NO: 917420 - DNA, 15 bp, Homo sapiens
atctgatagtccaag

SEQ ID NO: 917421 - DNA, 15 bp, Homo sapiens
gatctgatagtccaa

SEQ ID NO: 917422 - DNA, 15 bp, Homo sapiens
tgatctgatagtcca

SEQ ID NO: 917423 - DNA, 15 bp, Homo sapiens
gtgatctgatagtcc

SEQ ID NO: 917424 - DNA, 15 bp, Homo sapiens
tgtgatctgatagtc

SEQ ID NO: 917425 - DNA, 15 bp, Homo sapiens
ctgtgatctgatagt

SEQ ID NO: 917426 - DNA, 15 bp, Homo sapiens
gctgtgatctgatag

SEQ ID NO: 917427 - DNA, 15 bp, Homo sapiens
ggctgtgatctgata

SEQ ID NO: 917428 - DNA, 15 bp, Homo sapiens
aggctgtgatctgat

SEQ ID NO: 917429 - DNA, 15 bp, Homo sapiens
aaggctgtgatctga

SEQ ID NO: 917430 - DNA, 15 bp, Homo sapiens
gaaggctgtgatctg

SEQ ID NO: 917431 - DNA, 15 bp, Homo sapiens
agaaggctgtgatct

SEQ ID NO: 917432 - DNA, 15 bp, Homo sapiens
cagaaggctgtgatc

SEQ ID NO: 917433 - DNA, 15 bp, Homo sapiens
tcagaaggctgtgat

SEQ ID NO: 917434 - DNA, 15 bp, Homo sapiens
atcagaaggctgtga

SEQ ID NO: 917435 - DNA, 15 bp, Homo sapiens
gatcagaaggctgtg

SEQ ID NO: 917436 - DNA, 15 bp, Homo sapiens
tgatcagaaggctgt

SEQ ID NO: 917437 - DNA, 15 bp, Homo sapiens
ttgatcagaaggctg

SEQ ID NO: 917438 - DNA, 15 bp, Homo sapiens
gttgatcagaaggct

SEQ ID NO: 917439 - DNA, 15 bp, Homo sapiens
agttgatcagaaggc

SEQ ID NO: 917440 - DNA, 15 bp, Homo sapiens
aagttgatcagaagg

SEQ ID NO: 917441 - DNA, 15 bp, Homo sapiens
tggctgtgatctgat

SEQ ID NO: 917442 - DNA, 15 bp, Homo sapiens
ttggctgtgatctga

SEQ ID NO: 917443 - DNA, 15 bp, Homo sapiens
cttggctgtgatctg

SEQ ID NO: 917444 - DNA, 15 bp, Homo sapiens
tcttggctgtgatct

SEQ ID NO: 917445 - DNA, 15 bp, Homo sapiens
ttcttggctgtgatc

SEQ ID NO: 917446 - DNA, 15 bp, Homo sapiens
attcttggctgtgat

SEQ ID NO: 917447 - DNA, 15 bp, Homo sapiens
gattcttggctgtga

SEQ ID NO: 917448 - DNA, 15 bp, Homo sapiens
agattcttggctgtg

SEQ ID NO: 917449 - DNA, 15 bp, Homo sapiens
cagattcttggctgt

SEQ ID NO: 917450 - DNA, 15 bp, Homo sapiens
ccagattcttggctg

SEQ ID NO: 917451 - DNA, 15 bp, Homo sapiens
tccagattcttggct

SEQ ID NO: 917452 - DNA, 15 bp, Homo sapiens
ttccagattcttggc

SEQ ID NO: 917453 - DNA, 15 bp, Homo sapiens
cttccagattcttgg

SEQ ID NO: 917454 - DNA, 15 bp, Homo sapiens
acttccagattcttg

SEQ ID NO: 917455 - DNA, 15 bp, Homo sapiens
aacttccagattctt

SEQ ID NO: 917456 - DNA, 15 bp, Homo sapiens
gaacttccagattct

SEQ ID NO: 917457 - DNA, 15 bp, Homo sapiens
ggaacttccagattc

SEQ ID NO: 917458 - DNA, 15 bp, Homo sapiens
aggaacttccagatt

SEQ ID NO: 917459 - DNA, 15 bp, Homo sapiens
taggaacttccagat

SEQ ID NO: 917460 - DNA, 15 bp, Homo sapiens
ttaggaacttccaga

SEQ ID NO: 917461 - DNA, 15 bp, Homo sapiens
tttaggaacttccag

SEQ ID NO: 917462 - DNA, 15 bp, Homo sapiens
ctttaggaacttcca

SEQ ID NO: 917463 - DNA, 15 bp, Homo sapiens
tctttaggaacttcc

SEQ ID NO: 917464 - DNA, 15 bp, Homo sapiens
atctttaggaacttc

SEQ ID NO: 917465 - DNA, 15 bp, Homo sapiens
catctttaggaactt

SEQ ID NO: 917466 - DNA, 15 bp, Homo sapiens
tcatctttaggaact

SEQ ID NO: 917467 - DNA, 15 bp, Homo sapiens
gtcatctttaggaac

SEQ ID NO: 917468 - DNA, 15 bp, Homo sapiens
agtcatctttaggaa

SEQ ID NO: 917469 - DNA, 15 bp, Homo sapiens
aagtcatctttagga

SEQ ID NO: 917470 - DNA, 15 bp, Homo sapiens
gaagtcatctttagg

SEQ ID NO: 917471 - DNA, 15 bp, Homo sapiens
agaagtcatctttag

SEQ ID NO: 917472 - DNA, 15 bp, Homo sapiens
cagaagtcatcttta

SEQ ID NO: 917473 - DNA, 15 bp, Homo sapiens
ccagaagtcatcttt

SEQ ID NO: 917474 - DNA, 15 bp, Homo sapiens
gccagaagtcatctt

SEQ ID NO: 917475 - DNA, 15 bp, Homo sapiens
ggccagaagtcatct

SEQ ID NO: 917476 - DNA, 15 bp, Homo sapiens
gggccagaagtcatc

SEQ ID NO: 917477 - DNA, 15 bp, Homo sapiens
cgggccagaagtcat

SEQ ID NO: 917478 - DNA, 15 bp, Homo sapiens
acgggccagaagtca

SEQ ID NO: 917479 - DNA, 15 bp, Homo sapiens
gacgggccagaagtc

SEQ ID NO: 917480 - DNA, 15 bp, Homo sapiens
agacgggccagaagt

SEQ ID NO: 917481 - DNA, 15 bp, Homo sapiens
tagacgggccagaag

SEQ ID NO: 917482 - DNA, 15 bp, Homo sapiens
ctagacgggccagaa

SEQ ID NO: 917483 - DNA, 15 bp, Homo sapiens
cctagacgggccaga

SEQ ID NO: 917484 - DNA, 15 bp, Homo sapiens
acctagacgggccag

SEQ ID NO: 917485 - DNA, 15 bp, Homo sapiens
tacctagacgggcca

SEQ ID NO: 917486 - DNA, 15 bp, Homo sapiens
ctacctagacgggcc

SEQ ID NO: 917487 - DNA, 15 bp, Homo sapiens
gctacctagacgggc

SEQ ID NO: 917488 - DNA, 15 bp, Homo sapiens
agctacctagacggg

SEQ ID NO: 917489 - DNA, 15 bp, Homo sapiens
cagctacctagacgg

SEQ ID NO: 917490 - DNA, 15 bp, Homo sapiens
acagctacctagacg

SEQ ID NO: 917491 - DNA, 15 bp, Homo sapiens
gacagctacctagac

SEQ ID NO: 917492 - DNA, 15 bp, Homo sapiens
tgacagctacctaga

SEQ ID NO: 917493 - DNA, 15 bp, Homo sapiens
atgacagctacctag

SEQ ID NO: 917494 - DNA, 15 bp, Homo sapiens
tatgacagctaccta

SEQ ID NO: 917495 - DNA, 15 bp, Homo sapiens
ctatgacagctacct

SEQ ID NO: 917496 - DNA, 15 bp, Homo sapiens
tctatgacagctacc

SEQ ID NO: 917497 - DNA, 15 bp, Homo sapiens
gtctatgacagctac

SEQ ID NO: 917498 - DNA, 15 bp, Homo sapiens
tgtctatgacagcta

SEQ ID NO: 917499 - DNA, 15 bp, Homo sapiens
atgtctatgacagct

SEQ ID NO: 917500 - DNA, 15 bp, Homo sapiens
gatgtctatgacagc

SEQ ID NO: 917501 - DNA, 15 bp, Homo sapiens
tgatgtctatgacag

SEQ ID NO: 917502 - DNA, 15 bp, Homo sapiens
atgatgtctatgaca

SEQ ID NO: 917503 - DNA, 15 bp, Homo sapiens
tatgatgtctatgac

SEQ ID NO: 917504 - DNA, 15 bp, Homo sapiens
atatgatgtctatga

SEQ ID NO: 917505 - DNA, 15 bp, Homo sapiens
aatatgatgtctatg

SEQ ID NO: 917506 - DNA, 15 bp, Homo sapiens
aaatatgatgtctat

SEQ ID NO: 917507 - DNA, 15 bp, Homo sapiens
aaaatatgatgtcta

SEQ ID NO: 917508 - DNA, 15 bp, Homo sapiens
gaaaatatgatgtct

SEQ ID NO: 917509 - DNA, 15 bp, Homo sapiens
agaaaatatgatgtc

SEQ ID NO: 917510 - DNA, 15 bp, Homo sapiens
cagaaaatatgatgt

SEQ ID NO: 917511 - DNA, 15 bp, Homo sapiens
acagaaaatatgatg

SEQ ID NO: 917512 - DNA, 15 bp, Homo sapiens
cacagaaaatatgat

SEQ ID NO: 917513 - DNA, 15 bp, Homo sapiens
gcacagaaaatatga

SEQ ID NO: 917514 - DNA, 15 bp, Homo sapiens
agcacagaaaatatg

SEQ ID NO: 917515 - DNA, 15 bp, Homo sapiens
aagcacagaaaatat

SEQ ID NO: 917516 - DNA, 15 bp, Homo sapiens
taagcacagaaaata

SEQ ID NO: 917517 - DNA, 15 bp, Homo sapiens
ttaagcacagaaaat

SEQ ID NO: 917518 - DNA, 15 bp, Homo sapiens
tttaagcacagaaaa

SEQ ID NO: 917519 - DNA, 15 bp, Homo sapiens
ttttaagcacagaaa

SEQ ID NO: 917520 - DNA, 15 bp, Homo sapiens
tttttaagcacagaa

SEQ ID NO: 917521 - DNA, 15 bp, Homo sapiens
ctttttaagcacaga

SEQ ID NO: 917522 - DNA, 15 bp, Homo sapiens
gctttttaagcacag

SEQ ID NO: 917523 - DNA, 15 bp, Homo sapiens
agctttttaagcaca

SEQ ID NO: 917524 - DNA, 15 bp, Homo sapiens
gagctttttaagcac

SEQ ID NO: 917525 - DNA, 15 bp, Homo sapiens
ggagctttttaagca

SEQ ID NO: 917526 - DNA, 15 bp, Homo sapiens
tggagctttttaagc

SEQ ID NO: 917527 - DNA, 15 bp, Homo sapiens
ttggagctttttaag

SEQ ID NO: 917528 - DNA, 15 bp, Homo sapiens
tttggagctttttaa

SEQ ID NO: 917529 - DNA, 15 bp, Homo sapiens
atttggagcttttta

SEQ ID NO: 917530 - DNA, 15 bp, Homo sapiens
gatttggagcttttt

SEQ ID NO: 917531 - DNA, 15 bp, Homo sapiens
agatttggagctttt

SEQ ID NO: 917532 - DNA, 15 bp, Homo sapiens
aagatttggagcttt

SEQ ID NO: 917533 - DNA, 15 bp, Homo sapiens
caagatttggagctt

SEQ ID NO: 917534 - DNA, 15 bp, Homo sapiens
ccaagatttggagct

SEQ ID NO: 917535 - DNA, 15 bp, Homo sapiens
accaagatttggagc

SEQ ID NO: 917536 - DNA, 15 bp, Homo sapiens
aaccaagatttggag

SEQ ID NO: 917537 - DNA, 15 bp, Homo sapiens
aaaccaagatttgga

SEQ ID NO: 917538 - DNA, 15 bp, Homo sapiens
taaaccaagatttgg

SEQ ID NO: 917539 - DNA, 15 bp, Homo sapiens
ataaaccaagatttg

SEQ ID NO: 917540 - DNA, 15 bp, Homo sapiens
tataaaccaagattt

SEQ ID NO: 917541 - DNA, 15 bp, Homo sapiens
ttataaaccaagatt

SEQ ID NO: 917542 - DNA, 15 bp, Homo sapiens
attataaaccaagat

SEQ ID NO: 917543 - DNA, 15 bp, Homo sapiens
aattataaaccaaga

SEQ ID NO: 917544 - DNA, 15 bp, Homo sapiens
aaattataaaccaag

SEQ ID NO: 917545 - DNA, 15 bp, Homo sapiens
gaaattataaaccaa

SEQ ID NO: 917546 - DNA, 15 bp, Homo sapiens
tgaaattataaacca

SEQ ID NO: 917547 - DNA, 15 bp, Homo sapiens
atgaaattataaacc

SEQ ID NO: 917548 - DNA, 15 bp, Homo sapiens
aatgaaattataaac

SEQ ID NO: 917549 - DNA, 15 bp, Homo sapiens
aaatgaaattataaa

SEQ ID NO: 917550 - DNA, 15 bp, Homo sapiens
taaatgaaattataa

SEQ ID NO: 917551 - DNA, 15 bp, Homo sapiens
ctaaatgaaattata

SEQ ID NO: 917552 - DNA, 15 bp, Homo sapiens
cctaaatgaaattat

SEQ ID NO: 917553 - DNA, 15 bp, Homo sapiens
acctaaatgaaatta

SEQ ID NO: 917554 - DNA, 15 bp, Homo sapiens
aacctaaatgaaatt

SEQ ID NO: 917555 - DNA, 15 bp, Homo sapiens
aaacctaaatgaaat

SEQ ID NO: 917556 - DNA, 15 bp, Homo sapiens
aaaacctaaatgaaa

SEQ ID NO: 917557 - DNA, 15 bp, Homo sapiens
aaaaacctaaatgaa

SEQ ID NO: 917558 - DNA, 15 bp, Homo sapiens
caaaaacctaaatga

SEQ ID NO: 917559 - DNA, 15 bp, Homo sapiens
acaaaaacctaaatg

SEQ ID NO: 917560 - DNA, 15 bp, Homo sapiens
aacaaaaacctaaat

SEQ ID NO: 917561 - DNA, 15 bp, Homo sapiens
taacaaaaacctaaa

SEQ ID NO: 917562 - DNA, 15 bp, Homo sapiens
ctaacaaaaacctaa

SEQ ID NO: 917563 - DNA, 15 bp, Homo sapiens
cctaacaaaaaccta

SEQ ID NO: 917564 - DNA, 15 bp, Homo sapiens
tcctaacaaaaacct

SEQ ID NO: 917565 - DNA, 15 bp, Homo sapiens
atcctaacaaaaacc

SEQ ID NO: 917566 - DNA, 15 bp, Homo sapiens
aatcctaacaaaaac

SEQ ID NO: 917567 - DNA, 15 bp, Homo sapiens
aaatcctaacaaaaa

SEQ ID NO: 917568 - DNA, 15 bp, Homo sapiens
gaaatcctaacaaaa

SEQ ID NO: 917569 - DNA, 15 bp, Homo sapiens
ggaaatcctaacaaa

SEQ ID NO: 917570 - DNA, 15 bp, Homo sapiens
tggaaatcctaacaa

SEQ ID NO: 917571 - DNA, 15 bp, Homo sapiens
atggaaatcctaaca

SEQ ID NO: 917572 - DNA, 15 bp, Homo sapiens
aatggaaatcctaac

SEQ ID NO: 917573 - DNA, 15 bp, Homo sapiens
taatggaaatcctaa

SEQ ID NO: 917574 - DNA, 15 bp, Homo sapiens
ttaatggaaatccta

SEQ ID NO: 917575 - DNA, 15 bp, Homo sapiens
attaatggaaatcct

SEQ ID NO: 917576 - DNA, 15 bp, Homo sapiens
tattaatggaaatcc

SEQ ID NO: 917577 - DNA, 15 bp, Homo sapiens
ttattaatggaaatc

SEQ ID NO: 917578 - DNA, 15 bp, Homo sapiens
attattaatggaaat

SEQ ID NO: 917579 - DNA, 15 bp, Homo sapiens
aattattaatggaaa

SEQ ID NO: 917580 - DNA, 15 bp, Homo sapiens
caattattaatggaa

SEQ ID NO: 917581 - DNA, 15 bp, Homo sapiens
acaattattaatgga

SEQ ID NO: 917582 - DNA, 15 bp, Homo sapiens
cacaattattaatgg

SEQ ID NO: 917583 - DNA, 15 bp, Homo sapiens
tcacaattattaatg

SEQ ID NO: 917584 - DNA, 15 bp, Homo sapiens
atcacaattattaat

SEQ ID NO: 917585 - DNA, 15 bp, Homo sapiens
tatcacaattattaa

SEQ ID NO: 917586 - DNA, 15 bp, Homo sapiens
ttatcacaattatta

SEQ ID NO: 917587 - DNA, 15 bp, Homo sapiens
tttatcacaattatt

SEQ ID NO: 917588 - DNA, 15 bp, Homo sapiens
ttttatcacaattat

SEQ ID NO: 917589 - DNA, 15 bp, Homo sapiens
attttatcacaatta

SEQ ID NO: 917590 - DNA, 15 bp, Homo sapiens
aattttatcacaatt

SEQ ID NO: 917591 - DNA, 15 bp, Homo sapiens
aaattttatcacaat

SEQ ID NO: 917592 - DNA, 15 bp, Homo sapiens
aaaattttatcacaa

SEQ ID NO: 917593 - DNA, 15 bp, Homo sapiens
taaaattttatcaca

SEQ ID NO: 917594 - DNA, 15 bp, Homo sapiens
ttaaaattttatcac

SEQ ID NO: 917595 - DNA, 15 bp, Homo sapiens
gttaaaattttatca

SEQ ID NO: 917596 - DNA, 15 bp, Homo sapiens
agttaaaattttatc

SEQ ID NO: 917597 - DNA, 15 bp, Homo sapiens
aagttaaaattttat

SEQ ID NO: 917598 - DNA, 15 bp, Homo sapiens
caagttaaaatttta

SEQ ID NO: 917599 - DNA, 15 bp, Homo sapiens
ccaagttaaaatttt

SEQ ID NO: 917600 - DNA, 15 bp, Homo sapiens
cccaagttaaaattt

SEQ ID NO: 917601 - DNA, 15 bp, Homo sapiens
acccaagttaaaatt

SEQ ID NO: 917602 - DNA, 15 bp, Homo sapiens
aacccaagttaaaat

SEQ ID NO: 917603 - DNA, 15 bp, Homo sapiens
taacccaagttaaaa

SEQ ID NO: 917604 - DNA, 15 bp, Homo sapiens
gtaacccaagttaaa

SEQ ID NO: 917605 - DNA, 15 bp, Homo sapiens
tgtaacccaagttaa

SEQ ID NO: 917606 - DNA, 15 bp, Homo sapiens
ctgtaacccaagtta

SEQ ID NO: 917607 - DNA, 15 bp, Homo sapiens
actgtaacccaagtt

SEQ ID NO: 917608 - DNA, 15 bp, Homo sapiens
aactgtaacccaagt

SEQ ID NO: 917609 - DNA, 15 bp, Homo sapiens
aaactgtaacccaag

SEQ ID NO: 917610 - DNA, 15 bp, Homo sapiens
taaactgtaacccaa

SEQ ID NO: 917611 - DNA, 15 bp, Homo sapiens
ttaaactgtaaccca

SEQ ID NO: 917612 - DNA, 15 bp, Homo sapiens
tttaaactgtaaccc

SEQ ID NO: 917613 - DNA, 15 bp, Homo sapiens
atttaaactgtaacc

SEQ ID NO: 917614 - DNA, 15 bp, Homo sapiens
tatttaaactgtaac

SEQ ID NO: 917615 - DNA, 15 bp, Homo sapiens
atatttaaactgtaa

SEQ ID NO: 917616 - DNA, 15 bp, Homo sapiens
gatatttaaactgta

SEQ ID NO: 917617 - DNA, 15 bp, Homo sapiens
agatatttaaactgt

SEQ ID NO: 917618 - DNA, 15 bp, Homo sapiens
cagatatttaaactg

SEQ ID NO: 917619 - DNA, 15 bp, Homo sapiens
ccagatatttaaact

SEQ ID NO: 917620 - DNA, 15 bp, Homo sapiens
tccagatatttaaac

SEQ ID NO: 917621 - DNA, 15 bp, Homo sapiens
ttccagatatttaaa

SEQ ID NO: 917622 - DNA, 15 bp, Homo sapiens
tttccagatatttaa

SEQ ID NO: 917623 - DNA, 15 bp, Homo sapiens
ttttccagatattta

SEQ ID NO: 917624 - DNA, 15 bp, Homo sapiens
attttccagatattt

SEQ ID NO: 917625 - DNA, 15 bp, Homo sapiens
aattttccagatatt

SEQ ID NO: 917626 - DNA, 15 bp, Homo sapiens
gaattttccagatat

SEQ ID NO: 917627 - DNA, 15 bp, Homo sapiens
agaattttccagata

SEQ ID NO: 917628 - DNA, 15 bp, Homo sapiens
aagaattttccagat

SEQ ID NO: 917629 - DNA, 15 bp, Homo sapiens
aaagaattttccaga

SEQ ID NO: 917630 - DNA, 15 bp, Homo sapiens
gaaagaattttccag

SEQ ID NO: 917631 - DNA, 15 bp, Homo sapiens
tgaaagaattttcca

SEQ ID NO: 917632 - DNA, 15 bp, Homo sapiens
gtgaaagaattttcc

SEQ ID NO: 917633 - DNA, 15 bp, Homo sapiens
tgtgaaagaattttc

SEQ ID NO: 917634 - DNA, 15 bp, Homo sapiens
ctgtgaaagaatttt

SEQ ID NO: 917635 - DNA, 15 bp, Homo sapiens
tctgtgaaagaattt

SEQ ID NO: 917636 - DNA, 15 bp, Homo sapiens
ttctgtgaaagaatt

SEQ ID NO: 917637 - DNA, 15 bp, Homo sapiens
tttctgtgaaagaat

SEQ ID NO: 917638 - DNA, 15 bp, Homo sapiens
ctttctgtgaaagaa

SEQ ID NO: 917639 - DNA, 15 bp, Homo sapiens
actttctgtgaaaga

SEQ ID NO: 917640 - DNA, 15 bp, Homo sapiens
aactttctgtgaaag

SEQ ID NO: 917641 - DNA, 15 bp, Homo sapiens
taactttctgtgaaa

SEQ ID NO: 917642 - DNA, 15 bp, Homo sapiens
gtaactttctgtgaa

SEQ ID NO: 917643 - DNA, 15 bp, Homo sapiens
ggtaactttctgtga

SEQ ID NO: 917644 - DNA, 15 bp, Homo sapiens
aggtaactttctgtg

SEQ ID NO: 917645 - DNA, 15 bp, Homo sapiens
gaggtaactttctgt

SEQ ID NO: 917646 - DNA, 15 bp, Homo sapiens
tgaggtaactttctg

SEQ ID NO: 917647 - DNA, 15 bp, Homo sapiens
atgaggtaactttct

SEQ ID NO: 917648 - DNA, 15 bp, Homo sapiens
aatgaggtaactttc

SEQ ID NO: 917649 - DNA, 15 bp, Homo sapiens
gaatgaggtaacttt

SEQ ID NO: 917650 - DNA, 15 bp, Homo sapiens
agaatgaggtaactt

SEQ ID NO: 917651 - DNA, 15 bp, Homo sapiens
aagaatgaggtaact

SEQ ID NO: 917652 - DNA, 15 bp, Homo sapiens
gaagaatgaggtaac

SEQ ID NO: 917653 - DNA, 15 bp, Homo sapiens
tgaagaatgaggtaa

SEQ ID NO: 917654 - DNA, 15 bp, Homo sapiens
ctgaagaatgaggta

SEQ ID NO: 917655 - DNA, 15 bp, Homo sapiens
actgaagaatgaggt

SEQ ID NO: 917656 - DNA, 15 bp, Homo sapiens
cactgaagaatgagg

SEQ ID NO: 917657 - DNA, 15 bp, Homo sapiens
tcactgaagaatgag

SEQ ID NO: 917658 - DNA, 15 bp, Homo sapiens
atcactgaagaatga

SEQ ID NO: 917659 - DNA, 15 bp, Homo sapiens
tatcactgaagaatg

SEQ ID NO: 917660 - DNA, 15 bp, Homo sapiens
gtatcactgaagaat

SEQ ID NO: 917661 - DNA, 15 bp, Homo sapiens
agtatcactgaagaa

SEQ ID NO: 917662 - DNA, 15 bp, Homo sapiens
cagtatcactgaaga

SEQ ID NO: 917663 - DNA, 15 bp, Homo sapiens
ccagtatcactgaag

SEQ ID NO: 917664 - DNA, 15 bp, Homo sapiens
gccagtatcactgaa

SEQ ID NO: 917665 - DNA, 15 bp, Homo sapiens
agccagtatcactga

SEQ ID NO: 917666 - DNA, 15 bp, Homo sapiens
tagccagtatcactg

SEQ ID NO: 917667 - DNA, 15 bp, Homo sapiens
ttagccagtatcact

SEQ ID NO: 917668 - DNA, 15 bp, Homo sapiens
cttagccagtatcac

SEQ ID NO: 917669 - DNA, 15 bp, Homo sapiens
acttagccagtatca

SEQ ID NO: 917670 - DNA, 15 bp, Homo sapiens
cacttagccagtatc

SEQ ID NO: 917671 - DNA, 15 bp, Homo sapiens
tcacttagccagtat

SEQ ID NO: 917672 - DNA, 15 bp, Homo sapiens
ttcacttagccagta

SEQ ID NO: 917673 - DNA, 15 bp, Homo sapiens
attcacttagccagt

SEQ ID NO: 917674 - DNA, 15 bp, Homo sapiens
aattcacttagccag

SEQ ID NO: 917675 - DNA, 15 bp, Homo sapiens
taattcacttagcca

SEQ ID NO: 917676 - DNA, 15 bp, Homo sapiens
ataattcacttagcc

SEQ ID NO: 917677 - DNA, 15 bp, Homo sapiens
tataattcacttagc

SEQ ID NO: 917678 - DNA, 15 bp, Homo sapiens
ttataattcacttag

SEQ ID NO: 917679 - DNA, 15 bp, Homo sapiens
gttataattcactta

SEQ ID NO: 917680 - DNA, 15 bp, Homo sapiens
ggttataattcactt

SEQ ID NO: 917681 - DNA, 15 bp, Homo sapiens
tggttataattcact

SEQ ID NO: 917682 - DNA, 15 bp, Homo sapiens
ctggttataattcac

SEQ ID NO: 917683 - DNA, 15 bp, Homo sapiens
actggttataattca

SEQ ID NO: 917684 - DNA, 15 bp, Homo sapiens
aactggttataattc

SEQ ID NO: 917685 - DNA, 15 bp, Homo sapiens
caactggttataatt

SEQ ID NO: 917686 - DNA, 15 bp, Homo sapiens
gcaactggttataat

SEQ ID NO: 917687 - DNA, 15 bp, Homo sapiens
agcaactggttataa

SEQ ID NO: 917688 - DNA, 15 bp, Homo sapiens
aagcaactggttata

SEQ ID NO: 917689 - DNA, 15 bp, Homo sapiens
caagcaactggttat

SEQ ID NO: 917690 - DNA, 15 bp, Homo sapiens
tcaagcaactggtta

SEQ ID NO: 917691 - DNA, 15 bp, Homo sapiens
atcaagcaactggtt

SEQ ID NO: 917692 - DNA, 15 bp, Homo sapiens
catcaagcaactggt

SEQ ID NO: 917693 - DNA, 15 bp, Homo sapiens
ccatcaagcaactgg

SEQ ID NO: 917694 - DNA, 15 bp, Homo sapiens
accatcaagcaactg

SEQ ID NO: 917695 - DNA, 15 bp, Homo sapiens
taccatcaagcaact

SEQ ID NO: 917696 - DNA, 15 bp, Homo sapiens
ataccatcaagcaac

SEQ ID NO: 917697 - DNA, 15 bp, Homo sapiens
tataccatcaagcaa

SEQ ID NO: 917698 - DNA, 15 bp, Homo sapiens
atataccatcaagca

SEQ ID NO: 917699 - DNA, 15 bp, Homo sapiens
catataccatcaagc

SEQ ID NO: 917700 - DNA, 15 bp, Homo sapiens
tcatataccatcaag

SEQ ID NO: 917701 - DNA, 15 bp, Homo sapiens
gtcatataccatcaa

SEQ ID NO: 917702 - DNA, 15 bp, Homo sapiens
tgtcatataccatca

SEQ ID NO: 917703 - DNA, 15 bp, Homo sapiens
atgtcatataccatc

SEQ ID NO: 917704 - DNA, 15 bp, Homo sapiens
aatgtcatataccat

SEQ ID NO: 917705 - DNA, 15 bp, Homo sapiens
aaatgtcatatacca

SEQ ID NO: 917706 - DNA, 15 bp, Homo sapiens
aaaatgtcatatacc

SEQ ID NO: 917707 - DNA, 15 bp, Homo sapiens
aaaaatgtcatatac

SEQ ID NO: 917708 - DNA, 15 bp, Homo sapiens
caaaaatgtcatata

SEQ ID NO: 917709 - DNA, 15 bp, Homo sapiens
gcaaaaatgtcatat

SEQ ID NO: 917710 - DNA, 15 bp, Homo sapiens
tgcaaaaatgtcata

SEQ ID NO: 917711 - DNA, 15 bp, Homo sapiens
ctgcaaaaatgtcat

SEQ ID NO: 917712 - DNA, 15 bp, Homo sapiens
gctgcaaaaatgtca

SEQ ID NO: 917713 - DNA, 15 bp, Homo sapiens
agctgcaaaaatgtc

SEQ ID NO: 917714 - DNA, 15 bp, Homo sapiens
aagctgcaaaaatgt

SEQ ID NO: 917715 - DNA, 15 bp, Homo sapiens
taagctgcaaaaatg

SEQ ID NO: 917716 - DNA, 15 bp, Homo sapiens
ataagctgcaaaaat

SEQ ID NO: 917717 - DNA, 15 bp, Homo sapiens
aataagctgcaaaaa

SEQ ID NO: 917718 - DNA, 15 bp, Homo sapiens
aaataagctgcaaaa

SEQ ID NO: 917719 - DNA, 15 bp, Homo sapiens
caaataagctgcaaa

SEQ ID NO: 917720 - DNA, 15 bp, Homo sapiens
tcaaataagctgcaa

SEQ ID NO: 917721 - DNA, 15 bp, Homo sapiens
ttcaaataagctgca

SEQ ID NO: 917722 - DNA, 15 bp, Homo sapiens
attcaaataagctgc

SEQ ID NO: 917723 - DNA, 15 bp, Homo sapiens
cattcaaataagctg

SEQ ID NO: 917724 - DNA, 15 bp, Homo sapiens
acattcaaataagct

SEQ ID NO: 917725 - DNA, 15 bp, Homo sapiens
aacattcaaataagc

SEQ ID NO: 917726 - DNA, 15 bp, Homo sapiens
aaacattcaaataag

SEQ ID NO: 917727 - DNA, 15 bp, Homo sapiens
aaaacattcaaataa

SEQ ID NO: 917728 - DNA, 15 bp, Homo sapiens
aaaaacattcaaata

SEQ ID NO: 917729 - DNA, 15 bp, Homo sapiens
taaaaacattcaaat

SEQ ID NO: 917730 - DNA, 15 bp, Homo sapiens
ttaaaaacattcaaa

SEQ ID NO: 917731 - DNA, 15 bp, Homo sapiens
cttaaaaacattcaa

SEQ ID NO: 917732 - DNA, 15 bp, Homo sapiens
acttaaaaacattca

SEQ ID NO: 917733 - DNA, 15 bp, Homo sapiens
aacttaaaaacattc

SEQ ID NO: 917734 - DNA, 15 bp, Homo sapiens
aaacttaaaaacatt

SEQ ID NO: 917735 - DNA, 15 bp, Homo sapiens
aaaacttaaaaacat

SEQ ID NO: 917736 - DNA, 15 bp, Homo sapiens
aaaaacttaaaaaca

SEQ ID NO: 917737 - DNA, 15 bp, Homo sapiens
taaaaacttaaaaac

SEQ ID NO: 917738 - DNA, 15 bp, Homo sapiens
ttaaaaacttaaaaa

SEQ ID NO: 917739 - DNA, 15 bp, Homo sapiens
attaaaaacttaaaa

SEQ ID NO: 917740 - DNA, 15 bp, Homo sapiens
aattaaaaacttaaa

SEQ ID NO: 917741 - DNA, 15 bp, Homo sapiens
taattaaaaacttaa

SEQ ID NO: 917742 - DNA, 15 bp, Homo sapiens
ataattaaaaactta

SEQ ID NO: 917743 - DNA, 15 bp, Homo sapiens
tataattaaaaactt

SEQ ID NO: 917744 - DNA, 15 bp, Homo sapiens
atataattaaaaact

SEQ ID NO: 917745 - DNA, 15 bp, Homo sapiens
aatataattaaaaac

SEQ ID NO: 917746 - DNA, 15 bp, Homo sapiens
caatataattaaaaa

SEQ ID NO: 917747 - DNA, 15 bp, Homo sapiens
gcaatataattaaaa

SEQ ID NO: 917748 - DNA, 15 bp, Homo sapiens
agcaatataattaaa

SEQ ID NO: 917749 - DNA, 15 bp, Homo sapiens
aagcaatataattaa

SEQ ID NO: 917750 - DNA, 15 bp, Homo sapiens
aaagcaatataatta

SEQ ID NO: 917751 - DNA, 15 bp, Homo sapiens
gaaagcaatataatt

SEQ ID NO: 917752 - DNA, 15 bp, Homo sapiens
agaaagcaatataat

SEQ ID NO: 917753 - DNA, 15 bp, Homo sapiens
tagaaagcaatataa

SEQ ID NO: 917754 - DNA, 15 bp, Homo sapiens
atagaaagcaatata

SEQ ID NO: 917755 - DNA, 15 bp, Homo sapiens
aatagaaagcaatat

SEQ ID NO: 917756 - DNA, 15 bp, Homo sapiens
caatagaaagcaata

SEQ ID NO: 917757 - DNA, 15 bp, Homo sapiens
acaatagaaagcaat

SEQ ID NO: 917758 - DNA, 15 bp, Homo sapiens
tacaatagaaagcaa

SEQ ID NO: 917759 - DNA, 15 bp, Homo sapiens
ctacaatagaaagca

SEQ ID NO: 917760 - DNA, 15 bp, Homo sapiens
cctacaatagaaagc

SEQ ID NO: 917761 - DNA, 15 bp, Homo sapiens
gcctacaatagaaag

SEQ ID NO: 917762 - DNA, 15 bp, Homo sapiens
ggcctacaatagaaa

SEQ ID NO: 917763 - DNA, 15 bp, Homo sapiens
aggcctacaatagaa

SEQ ID NO: 917764 - DNA, 15 bp, Homo sapiens
aaggcctacaataga

SEQ ID NO: 917765 - DNA, 15 bp, Homo sapiens
caaggcctacaatag

SEQ ID NO: 917766 - DNA, 15 bp, Homo sapiens
tcaaggcctacaata

SEQ ID NO: 917767 - DNA, 15 bp, Homo sapiens
ttcaaggcctacaat

SEQ ID NO: 917768 - DNA, 15 bp, Homo sapiens
gttcaaggcctacaa

SEQ ID NO: 917769 - DNA, 15 bp, Homo sapiens
ggttcaaggcctaca

SEQ ID NO: 917770 - DNA, 15 bp, Homo sapiens
tggttcaaggcctac

SEQ ID NO: 917771 - DNA, 15 bp, Homo sapiens
ttggttcaaggccta

SEQ ID NO: 917772 - DNA, 15 bp, Homo sapiens
tttggttcaaggcct

SEQ ID NO: 917773 - DNA, 15 bp, Homo sapiens
ctttggttcaaggcc

SEQ ID NO: 917774 - DNA, 15 bp, Homo sapiens
tctttggttcaaggc

SEQ ID NO: 917775 - DNA, 15 bp, Homo sapiens
gtctttggttcaagg

SEQ ID NO: 917776 - DNA, 15 bp, Homo sapiens
tgtctttggttcaag

SEQ ID NO: 917777 - DNA, 15 bp, Homo sapiens
ttgtctttggttcaa

SEQ ID NO: 917778 - DNA, 15 bp, Homo sapiens
attgtctttggttca

SEQ ID NO: 917779 - DNA, 15 bp, Homo sapiens
cattgtctttggttc

SEQ ID NO: 917780 - DNA, 15 bp, Homo sapiens
tcattgtctttggtt

SEQ ID NO: 917781 - DNA, 15 bp, Homo sapiens
atcattgtctttggt

SEQ ID NO: 917782 - DNA, 15 bp, Homo sapiens
aatcattgtctttgg

SEQ ID NO: 917783 - DNA, 15 bp, Homo sapiens
caatcattgtctttg

SEQ ID NO: 917784 - DNA, 15 bp, Homo sapiens
tcaatcattgtcttt

SEQ ID NO: 917785 - DNA, 15 bp, Homo sapiens
atcaatcattgtctt

SEQ ID NO: 917786 - DNA, 15 bp, Homo sapiens
aatcaatcattgtct

SEQ ID NO: 917787 - DNA, 15 bp, Homo sapiens
aaatcaatcattgtc

SEQ ID NO: 917788 - DNA, 15 bp, Homo sapiens
taaatcaatcattgt

SEQ ID NO: 917789 - DNA, 15 bp, Homo sapiens
ttaaatcaatcattg

SEQ ID NO: 917790 - DNA, 15 bp, Homo sapiens
gttaaatcaatcatt

SEQ ID NO: 917791 - DNA, 15 bp, Homo sapiens
agttaaatcaatcat

SEQ ID NO: 917792 - DNA, 15 bp, Homo sapiens
cagttaaatcaatca

SEQ ID NO: 917793 - DNA, 15 bp, Homo sapiens
tcagttaaatcaatc

SEQ ID NO: 917794 - DNA, 15 bp, Homo sapiens
ttcagttaaatcaat

SEQ ID NO: 917795 - DNA, 15 bp, Homo sapiens
attcagttaaatcaa

SEQ ID NO: 917796 - DNA, 15 bp, Homo sapiens
aattcagttaaatca

SEQ ID NO: 917797 - DNA, 15 bp, Homo sapiens
aaattcagttaaatc

SEQ ID NO: 917798 - DNA, 15 bp, Homo sapiens
taaattcagttaaat

SEQ ID NO: 917799 - DNA, 15 bp, Homo sapiens
ctaaattcagttaaa

SEQ ID NO: 917800 - DNA, 15 bp, Homo sapiens
tctaaattcagttaa

SEQ ID NO: 917801 - DNA, 15 bp, Homo sapiens
ttctaaattcagtta

SEQ ID NO: 917802 - DNA, 15 bp, Homo sapiens
tttctaaattcagtt

SEQ ID NO: 917803 - DNA, 15 bp, Homo sapiens
atttctaaattcagt

SEQ ID NO: 917804 - DNA, 15 bp, Homo sapiens
tatttctaaattcag

SEQ ID NO: 917805 - DNA, 15 bp, Homo sapiens
ctatttctaaattca

SEQ ID NO: 917806 - DNA, 15 bp, Homo sapiens
gctatttctaaattc

SEQ ID NO: 917807 - DNA, 15 bp, Homo sapiens
tgctatttctaaatt

SEQ ID NO: 917808 - DNA, 15 bp, Homo sapiens
ttgctatttctaaat

SEQ ID NO: 917809 - DNA, 15 bp, Homo sapiens
tttgctatttctaaa

SEQ ID NO: 917810 - DNA, 15 bp, Homo sapiens
gtttgctatttctaa

SEQ ID NO: 917811 - DNA, 15 bp, Homo sapiens
tgtttgctatttcta

SEQ ID NO: 917812 - DNA, 15 bp, Homo sapiens
gtgtttgctatttct

SEQ ID NO: 917813 - DNA, 15 bp, Homo sapiens
agtgtttgctatttc

SEQ ID NO: 917814 - DNA, 15 bp, Homo sapiens
aagtgtttgctattt

SEQ ID NO: 917815 - DNA, 15 bp, Homo sapiens
taagtgtttgctatt

SEQ ID NO: 917816 - DNA, 15 bp, Homo sapiens
ttaagtgtttgctat

SEQ ID NO: 917817 - DNA, 15 bp, Homo sapiens
tttaagtgtttgcta

SEQ ID NO: 917818 - DNA, 15 bp, Homo sapiens
ttttaagtgtttgct

SEQ ID NO: 917819 - DNA, 15 bp, Homo sapiens
gttttaagtgtttgc

SEQ ID NO: 917820 - DNA, 15 bp, Homo sapiens
tgttttaagtgtttg

SEQ ID NO: 917821 - DNA, 15 bp, Homo sapiens
ctgttttaagtgttt

SEQ ID NO: 917822 - DNA, 15 bp, Homo sapiens
gctgttttaagtgtt

SEQ ID NO: 917823 - DNA, 15 bp, Homo sapiens
tgctgttttaagtgt

SEQ ID NO: 917824 - DNA, 15 bp, Homo sapiens
ctgctgttttaagtg

SEQ ID NO: 917825 - DNA, 15 bp, Homo sapiens
gctgctgttttaagt

SEQ ID NO: 917826 - DNA, 15 bp, Homo sapiens
tgctgctgttttaag

SEQ ID NO: 917827 - DNA, 15 bp, Homo sapiens
ctgctgctgttttaa

SEQ ID NO: 917828 - DNA, 15 bp, Homo sapiens
actgctgctgtttta

SEQ ID NO: 917829 - DNA, 15 bp, Homo sapiens
tactgctgctgtttt

SEQ ID NO: 917830 - DNA, 15 bp, Homo sapiens
gtactgctgctgttt

SEQ ID NO: 917831 - DNA, 15 bp, Homo sapiens
tgtactgctgctgtt

SEQ ID NO: 917832 - DNA, 15 bp, Homo sapiens
ctgtactgctgctgt

SEQ ID NO: 917833 - DNA, 15 bp, Homo sapiens
tctgtactgctgctg

SEQ ID NO: 917834 - DNA, 15 bp, Homo sapiens
ctctgtactgctgct

SEQ ID NO: 917835 - DNA, 15 bp, Homo sapiens
gctctgtactgctgc

SEQ ID NO: 917836 - DNA, 15 bp, Homo sapiens
agctctgtactgctg

SEQ ID NO: 917837 - DNA, 15 bp, Homo sapiens
cagctctgtactgct

SEQ ID NO: 917838 - DNA, 15 bp, Homo sapiens
tcagctctgtactgc

SEQ ID NO: 917839 - DNA, 15 bp, Homo sapiens
ttcagctctgtactg

SEQ ID NO: 917840 - DNA, 15 bp, Homo sapiens
tttcagctctgtact

SEQ ID NO: 917841 - DNA, 15 bp, Homo sapiens
ttttcagctctgtac

SEQ ID NO: 917842 - DNA, 15 bp, Homo sapiens
gttttcagctctgta

SEQ ID NO: 917843 - DNA, 15 bp, Homo sapiens
ggttttcagctctgt

SEQ ID NO: 917844 - DNA, 15 bp, Homo sapiens
tggttttcagctctg

SEQ ID NO: 917845 - DNA, 15 bp, Homo sapiens
ctggttttcagctct

SEQ ID NO: 917846 - DNA, 15 bp, Homo sapiens
tctggttttcagctc

SEQ ID NO: 917847 - DNA, 15 bp, Homo sapiens
atctggttttcagct

SEQ ID NO: 917848 - DNA, 15 bp, Homo sapiens
aatctggttttcagc

SEQ ID NO: 917849 - DNA, 15 bp, Homo sapiens
gaatctggttttcag

SEQ ID NO: 917850 - DNA, 15 bp, Homo sapiens
agaatctggttttca

SEQ ID NO: 917851 - DNA, 15 bp, Homo sapiens
aagaatctggttttc

SEQ ID NO: 917852 - DNA, 15 bp, Homo sapiens
aaagaatctggtttt

SEQ ID NO: 917853 - DNA, 15 bp, Homo sapiens
aaaagaatctggttt

SEQ ID NO: 917854 - DNA, 15 bp, Homo sapiens
caaaagaatctggtt

SEQ ID NO: 917855 - DNA, 15 bp, Homo sapiens
tcaaaagaatctggt

SEQ ID NO: 917856 - DNA, 15 bp, Homo sapiens
ttcaaaagaatctgg

SEQ ID NO: 917857 - DNA, 15 bp, Homo sapiens
tttcaaaagaatctg

SEQ ID NO: 917858 - DNA, 15 bp, Homo sapiens
ctttcaaaagaatct

SEQ ID NO: 917859 - DNA, 15 bp, Homo sapiens
tctttcaaaagaatc

SEQ ID NO: 917860 - DNA, 15 bp, Homo sapiens
ctctttcaaaagaat

SEQ ID NO: 917861 - DNA, 15 bp, Homo sapiens
cctctttcaaaagaa

SEQ ID NO: 917862 - DNA, 15 bp, Homo sapiens
gcctctttcaaaaga

SEQ ID NO: 917863 - DNA, 15 bp, Homo sapiens
tgcctctttcaaaag

SEQ ID NO: 917864 - DNA, 15 bp, Homo sapiens
ttgcctctttcaaaa

SEQ ID NO: 917865 - DNA, 15 bp, Homo sapiens
cttgcctctttcaaa

SEQ ID NO: 917866 - DNA, 15 bp, Homo sapiens
acttgcctctttcaa

SEQ ID NO: 917867 - DNA, 15 bp, Homo sapiens
cacttgcctctttca

SEQ ID NO: 917868 - DNA, 15 bp, Homo sapiens
acacttgcctctttc

SEQ ID NO: 917869 - DNA, 15 bp, Homo sapiens
cacacttgcctcttt

SEQ ID NO: 917870 - DNA, 15 bp, Homo sapiens
ccacacttgcctctt

SEQ ID NO: 917871 - DNA, 15 bp, Homo sapiens
accacacttgcctct

SEQ ID NO: 917872 - DNA, 15 bp, Homo sapiens
taccacacttgcctc

SEQ ID NO: 917873 - DNA, 15 bp, Homo sapiens
ctaccacacttgcct

SEQ ID NO: 917874 - DNA, 15 bp, Homo sapiens
actaccacacttgcc

SEQ ID NO: 917875 - DNA, 15 bp, Homo sapiens
gactaccacacttgc

SEQ ID NO: 917876 - DNA, 15 bp, Homo sapiens
tgactaccacacttg

SEQ ID NO: 917877 - DNA, 15 bp, Homo sapiens
ctgactaccacactt

SEQ ID NO: 917878 - DNA, 15 bp, Homo sapiens
actgactaccacact

SEQ ID NO: 917879 - DNA, 15 bp, Homo sapiens
aactgactaccacac

SEQ ID NO: 917880 - DNA, 15 bp, Homo sapiens
caactgactaccaca

SEQ ID NO: 917881 - DNA, 15 bp, Homo sapiens
tcaactgactaccac

SEQ ID NO: 917882 - DNA, 15 bp, Homo sapiens
atcaactgactacca

SEQ ID NO: 917883 - DNA, 15 bp, Homo sapiens
aatcaactgactacc

SEQ ID NO: 917884 - DNA, 15 bp, Homo sapiens
taatcaactgactac

SEQ ID NO: 917885 - DNA, 15 bp, Homo sapiens
ataatcaactgacta

SEQ ID NO: 917886 - DNA, 15 bp, Homo sapiens
aataatcaactgact

SEQ ID NO: 917887 - DNA, 15 bp, Homo sapiens
aaataatcaactgac

SEQ ID NO: 917888 - DNA, 15 bp, Homo sapiens
aaaataatcaactga

SEQ ID NO: 917889 - DNA, 15 bp, Homo sapiens
gaaaataatcaactg

SEQ ID NO: 917890 - DNA, 15 bp, Homo sapiens
agaaaataatcaact

SEQ ID NO: 917891 - DNA, 15 bp, Homo sapiens
aagaaaataatcaac

SEQ ID NO: 917892 - DNA, 15 bp, Homo sapiens
caagaaaataatcaa

SEQ ID NO: 917893 - DNA, 15 bp, Homo sapiens
ccaagaaaataatca

SEQ ID NO: 917894 - DNA, 15 bp, Homo sapiens
gccaagaaaataatc

SEQ ID NO: 917895 - DNA, 15 bp, Homo sapiens
agccaagaaaataat

SEQ ID NO: 917896 - DNA, 15 bp, Homo sapiens
cagccaagaaaataa

SEQ ID NO: 917897 - DNA, 15 bp, Homo sapiens
tcagccaagaaaata

SEQ ID NO: 917898 - DNA, 15 bp, Homo sapiens
ttcagccaagaaaat

SEQ ID NO: 917899 - DNA, 15 bp, Homo sapiens
gttcagccaagaaaa

SEQ ID NO: 917900 - DNA, 15 bp, Homo sapiens
agttcagccaagaaa

SEQ ID NO: 917901 - DNA, 15 bp, Homo sapiens
tagttcagccaagaa

SEQ ID NO: 917902 - DNA, 15 bp, Homo sapiens
atagttcagccaaga

SEQ ID NO: 917903 - DNA, 15 bp, Homo sapiens
tatagttcagccaag

SEQ ID NO: 917904 - DNA, 15 bp, Homo sapiens
ctatagttcagccaa

SEQ ID NO: 917905 - DNA, 15 bp, Homo sapiens
tctatagttcagcca

SEQ ID NO: 917906 - DNA, 15 bp, Homo sapiens
ctctatagttcagcc

SEQ ID NO: 917907 - DNA, 15 bp, Homo sapiens
tctctatagttcagc

SEQ ID NO: 917908 - DNA, 15 bp, Homo sapiens
ttctctatagttcag

SEQ ID NO: 917909 - DNA, 15 bp, Homo sapiens
tttctctatagttca

SEQ ID NO: 917910 - DNA, 15 bp, Homo sapiens
atttctctatagttc

SEQ ID NO: 917911 - DNA, 15 bp, Homo sapiens
tatttctctatagtt

SEQ ID NO: 917912 - DNA, 15 bp, Homo sapiens
gtatttctctatagt

SEQ ID NO: 917913 - DNA, 15 bp, Homo sapiens
agtatttctctatag

SEQ ID NO: 917914 - DNA, 15 bp, Homo sapiens
tagtatttctctata

SEQ ID NO: 917915 - DNA, 15 bp, Homo sapiens
ttagtatttctctat

SEQ ID NO: 917916 - DNA, 15 bp, Homo sapiens
attagtatttctcta

SEQ ID NO: 917917 - DNA, 15 bp, Homo sapiens
tattagtatttctct

SEQ ID NO: 917918 - DNA, 15 bp, Homo sapiens
ttattagtatttctc

SEQ ID NO: 917919 - DNA, 15 bp, Homo sapiens
attattagtatttct

SEQ ID NO: 917920 - DNA, 15 bp, Homo sapiens
aattattagtatttc

SEQ ID NO: 917921 - DNA, 15 bp, Homo sapiens
aaattattagtattt

SEQ ID NO: 917922 - DNA, 15 bp, Homo sapiens
taaattattagtatt

SEQ ID NO: 917923 - DNA, 15 bp, Homo sapiens
ataaattattagtat

SEQ ID NO: 917924 - DNA, 15 bp, Homo sapiens
tataaattattagta

SEQ ID NO: 917925 - DNA, 15 bp, Homo sapiens
gtataaattattagt

SEQ ID NO: 917926 - DNA, 15 bp, Homo sapiens
agtataaattattag

SEQ ID NO: 917927 - DNA, 15 bp, Homo sapiens
aagtataaattatta

SEQ ID NO: 917928 - DNA, 15 bp, Homo sapiens
aaagtataaattatt

SEQ ID NO: 917929 - DNA, 15 bp, Homo sapiens
caaagtataaattat

SEQ ID NO: 917930 - DNA, 15 bp, Homo sapiens
gcaaagtataaatta

SEQ ID NO: 917931 - DNA, 15 bp, Homo sapiens
tgcaaagtataaatt

SEQ ID NO: 917932 - DNA, 15 bp, Homo sapiens
ctgcaaagtataaat

SEQ ID NO: 917933 - DNA, 15 bp, Homo sapiens
tctgcaaagtataaa

SEQ ID NO: 917934 - DNA, 15 bp, Homo sapiens
atctgcaaagtataa

SEQ ID NO: 917935 - DNA, 15 bp, Homo sapiens
aatctgcaaagtata

SEQ ID NO: 917936 - DNA, 15 bp, Homo sapiens
caatctgcaaagtat

SEQ ID NO: 917937 - DNA, 15 bp, Homo sapiens
tcaatctgcaaagta

SEQ ID NO: 917938 - DNA, 15 bp, Homo sapiens
ttcaatctgcaaagt

SEQ ID NO: 917939 - DNA, 15 bp, Homo sapiens
tttcaatctgcaaag

SEQ ID NO: 917940 - DNA, 15 bp, Homo sapiens
ctttcaatctgcaaa

SEQ ID NO: 917941 - DNA, 15 bp, Homo sapiens
actttcaatctgcaa

SEQ ID NO: 917942 - DNA, 15 bp, Homo sapiens
gactttcaatctgca

SEQ ID NO: 917943 - DNA, 15 bp, Homo sapiens
agactttcaatctgc

SEQ ID NO: 917944 - DNA, 15 bp, Homo sapiens
tagactttcaatctg

SEQ ID NO: 917945 - DNA, 15 bp, Homo sapiens
ctagactttcaatct

SEQ ID NO: 917946 - DNA, 15 bp, Homo sapiens
tctagactttcaatc

SEQ ID NO: 917947 - DNA, 15 bp, Homo sapiens
ctctagactttcaat

SEQ ID NO: 917948 - DNA, 15 bp, Homo sapiens
cctctagactttcaa

SEQ ID NO: 917949 - DNA, 15 bp, Homo sapiens
tcctctagactttca

SEQ ID NO: 917950 - DNA, 15 bp, Homo sapiens
ttcctctagactttc

SEQ ID NO: 917951 - DNA, 15 bp, Homo sapiens
cttcctctagacttt

SEQ ID NO: 917952 - DNA, 15 bp, Homo sapiens
tcttcctctagactt

SEQ ID NO: 917953 - DNA, 15 bp, Homo sapiens
ttcttcctctagact

SEQ ID NO: 917954 - DNA, 15 bp, Homo sapiens
gttcttcctctagac

SEQ ID NO: 917955 - DNA, 15 bp, Homo sapiens
cgttcttcctctaga

SEQ ID NO: 917956 - DNA, 15 bp, Homo sapiens
tcgttcttcctctag

SEQ ID NO: 917957 - DNA, 15 bp, Homo sapiens
gtcgttcttcctcta

SEQ ID NO: 917958 - DNA, 15 bp, Homo sapiens
agtcgttcttcctct

SEQ ID NO: 917959 - DNA, 15 bp, Homo sapiens
aagtcgttcttcctc

SEQ ID NO: 917960 - DNA, 15 bp, Homo sapiens
caagtcgttcttcct

SEQ ID NO: 917961 - DNA, 15 bp, Homo sapiens
tcaagtcgttcttcc

SEQ ID NO: 917962 - DNA, 15 bp, Homo sapiens
atcaagtcgttcttc

SEQ ID NO: 917963 - DNA, 15 bp, Homo sapiens
gatcaagtcgttctt

SEQ ID NO: 917964 - DNA, 15 bp, Homo sapiens
agatcaagtcgttct

SEQ ID NO: 917965 - DNA, 15 bp, Homo sapiens
cagatcaagtcgttc

SEQ ID NO: 917966 - DNA, 15 bp, Homo sapiens
tcagatcaagtcgtt

SEQ ID NO: 917967 - DNA, 15 bp, Homo sapiens
ttcagatcaagtcgt

SEQ ID NO: 917968 - DNA, 15 bp, Homo sapiens
tttcagatcaagtcg

SEQ ID NO: 917969 - DNA, 15 bp, Homo sapiens
ttttcagatcaagtc

SEQ ID NO: 917970 - DNA, 15 bp, Homo sapiens
tttttcagatcaagt

SEQ ID NO: 917971 - DNA, 15 bp, Homo sapiens
ttttttcagatcaag

SEQ ID NO: 917972 - DNA, 15 bp, Homo sapiens
tttttttcagatcaa

SEQ ID NO: 917973 - DNA, 15 bp, Homo sapiens
ttttttttcagatca

SEQ ID NO: 917974 - DNA, 15 bp, Homo sapiens
tttttttttcagatc

SEQ ID NO: 917975 - DNA, 15 bp, Homo sapiens
ttttttttttcagat

SEQ ID NO: 917976 - DNA, 15 bp, Homo sapiens
attttttttttcaga

SEQ ID NO: 917977 - DNA, 15 bp, Homo sapiens
aattttttttttcag

SEQ ID NO: 917978 - DNA, 15 bp, Homo sapiens
gaattttttttttca

SEQ ID NO: 917979 - DNA, 15 bp, Homo sapiens
cgaattttttttttc

SEQ ID NO: 917980 - DNA, 15 bp, Homo sapiens
acgaatttttttttt

SEQ ID NO: 917981 - DNA, 15 bp, Homo sapiens
gacgaattttttttt

SEQ ID NO: 917982 - DNA, 15 bp, Homo sapiens
tgacgaatttttttt

SEQ ID NO: 917983 - DNA, 15 bp, Homo sapiens
ttgacgaattttttt

SEQ ID NO: 917984 - DNA, 15 bp, Homo sapiens
tttgacgaatttttt

SEQ ID NO: 917985 - DNA, 15 bp, Homo sapiens
atttgacgaattttt

SEQ ID NO: 917986 - DNA, 15 bp, Homo sapiens
catttgacgaatttt

SEQ ID NO: 917987 - DNA, 15 bp, Homo sapiens
ccatttgacgaattt

SEQ ID NO: 917988 - DNA, 15 bp, Homo sapiens
gccatttgacgaatt

SEQ ID NO: 917989 - DNA, 15 bp, Homo sapiens
agccatttgacgaat

SEQ ID NO: 917990 - DNA, 15 bp, Homo sapiens
gagccatttgacgaa

SEQ ID NO: 917991 - DNA, 15 bp, Homo sapiens
tgagccatttgacga

SEQ ID NO: 917992 - DNA, 15 bp, Homo sapiens
ttgagccatttgacg

SEQ ID NO: 917993 - DNA, 15 bp, Homo sapiens
cttgagccatttgac

SEQ ID NO: 917994 - DNA, 15 bp, Homo sapiens
tcttgagccatttga

SEQ ID NO: 917995 - DNA, 15 bp, Homo sapiens
ttcttgagccatttg

SEQ ID NO: 917996 - DNA, 15 bp, Homo sapiens
tttcttgagccattt

SEQ ID NO: 917997 - DNA, 15 bp, Homo sapiens
ctttcttgagccatt

SEQ ID NO: 917998 - DNA, 15 bp, Homo sapiens
tctttcttgagccat

SEQ ID NO: 917999 - DNA, 15 bp, Homo sapiens
ctctttcttgagcca

SEQ ID NO: 918000 - DNA, 15 bp, Homo sapiens
cctctttcttgagcc

SEQ ID NO: 918001 - DNA, 15 bp, Homo sapiens
tcctctttcttgagc

SEQ ID NO: 918002 - DNA, 15 bp, Homo sapiens
ttcctctttcttgag

SEQ ID NO: 918003 - DNA, 15 bp, Homo sapiens
tttcctctttcttga

SEQ ID NO: 918004 - DNA, 15 bp, Homo sapiens
ttttcctctttcttg

SEQ ID NO: 918005 - DNA, 15 bp, Homo sapiens
tttttcctctttctt

SEQ ID NO: 918006 - DNA, 15 bp, Homo sapiens
ctttttcctctttct

SEQ ID NO: 918007 - DNA, 15 bp, Homo sapiens
tctttttcctctttc

SEQ ID NO: 918008 - DNA, 15 bp, Homo sapiens
ttctttttcctcttt

SEQ ID NO: 918009 - DNA, 15 bp, Homo sapiens
cttctttttcctctt

SEQ ID NO: 918010 - DNA, 15 bp, Homo sapiens
acttctttttcctct

SEQ ID NO: 918011 - DNA, 15 bp, Homo sapiens
cacttctttttcctc

SEQ ID NO: 918012 - DNA, 15 bp, Homo sapiens
gcacttctttttcct

SEQ ID NO: 918013 - DNA, 15 bp, Homo sapiens
tgcacttctttttcc

SEQ ID NO: 918014 - DNA, 15 bp, Homo sapiens
ttgcacttctttttc

SEQ ID NO: 918015 - DNA, 15 bp, Homo sapiens
gttgcacttcttttt

SEQ ID NO: 918016 - DNA, 15 bp, Homo sapiens
agttgcacttctttt

SEQ ID NO: 918017 - DNA, 15 bp, Homo sapiens
aagttgcacttcttt

SEQ ID NO: 918018 - DNA, 15 bp, Homo sapiens
gaagttgcacttctt

SEQ ID NO: 918019 - DNA, 15 bp, Homo sapiens
tgaagttgcacttct

SEQ ID NO: 918020 - DNA, 15 bp, Homo sapiens
ctgaagttgcacttc

SEQ ID NO: 918021 - DNA, 15 bp, Homo sapiens
cctgaagttgcactt

SEQ ID NO: 918022 - DNA, 15 bp, Homo sapiens
acctgaagttgcact

SEQ ID NO: 918023 - DNA, 15 bp, Homo sapiens
tacctgaagttgcac

SEQ ID NO: 918024 - DNA, 15 bp, Homo sapiens
atacctgaagttgca

SEQ ID NO: 918025 - DNA, 15 bp, Homo sapiens
tatacctgaagttgc

SEQ ID NO: 918026 - DNA, 15 bp, Homo sapiens
gtatacctgaagttg

SEQ ID NO: 918027 - DNA, 15 bp, Homo sapiens
agtatacctgaagtt

SEQ ID NO: 918028 - DNA, 15 bp, Homo sapiens
gagtatacctgaagt

SEQ ID NO: 918029 - DNA, 15 bp, Homo sapiens
tgagtatacctgaag

SEQ ID NO: 918030 - DNA, 15 bp, Homo sapiens
ctgagtatacctgaa

SEQ ID NO: 918031 - DNA, 15 bp, Homo sapiens
actgagtatacctga

SEQ ID NO: 918032 - DNA, 15 bp, Homo sapiens
aactgagtatacctg

SEQ ID NO: 918033 - DNA, 15 bp, Homo sapiens
taactgagtatacct

SEQ ID NO: 918034 - DNA, 15 bp, Homo sapiens
ataactgagtatacc

SEQ ID NO: 918035 - DNA, 15 bp, Homo sapiens
aataactgagtatac

SEQ ID NO: 918036 - DNA, 15 bp, Homo sapiens
gaataactgagtata

SEQ ID NO: 918037 - DNA, 15 bp, Homo sapiens
agaataactgagtat

SEQ ID NO: 918038 - DNA, 15 bp, Homo sapiens
tagaataactgagta

SEQ ID NO: 918039 - DNA, 15 bp, Homo sapiens
ttagaataactgagt

SEQ ID NO: 918040 - DNA, 15 bp, Homo sapiens
tttagaataactgag

SEQ ID NO: 918041 - DNA, 15 bp, Homo sapiens
gtttagaataactga

SEQ ID NO: 918042 - DNA, 15 bp, Homo sapiens
ggtttagaataactg

SEQ ID NO: 918043 - DNA, 15 bp, Homo sapiens
aggtttagaataact

SEQ ID NO: 918044 - DNA, 15 bp, Homo sapiens
aaggtttagaataac

SEQ ID NO: 918045 - DNA, 15 bp, Homo sapiens
aaaggtttagaataa

SEQ ID NO: 918046 - DNA, 15 bp, Homo sapiens
taaaggtttagaata

SEQ ID NO: 918047 - DNA, 15 bp, Homo sapiens
ttaaaggtttagaat

SEQ ID NO: 918048 - DNA, 15 bp, Homo sapiens
tttaaaggtttagaa

SEQ ID NO: 918049 - DNA, 15 bp, Homo sapiens
ttttaaaggtttaga

SEQ ID NO: 918050 - DNA, 15 bp, Homo sapiens
tttttaaaggtttag

SEQ ID NO: 918051 - DNA, 15 bp, Homo sapiens
ctttttaaaggttta

SEQ ID NO: 918052 - DNA, 15 bp, Homo sapiens
tctttttaaaggttt

SEQ ID NO: 918053 - DNA, 15 bp, Homo sapiens
ttctttttaaaggtt

SEQ ID NO: 918054 - DNA, 15 bp, Homo sapiens
attctttttaaaggt

SEQ ID NO: 918055 - DNA, 15 bp, Homo sapiens
aattctttttaaagg

SEQ ID NO: 918056 - DNA, 15 bp, Homo sapiens
taattctttttaaag

SEQ ID NO: 918057 - DNA, 15 bp, Homo sapiens
ataattctttttaaa

SEQ ID NO: 918058 - DNA, 15 bp, Homo sapiens
aataattctttttaa

SEQ ID NO: 918059 - DNA, 15 bp, Homo sapiens
caataattcttttta

SEQ ID NO: 918060 - DNA, 15 bp, Homo sapiens
tcaataattcttttt

SEQ ID NO: 918061 - DNA, 15 bp, Homo sapiens
atcaataattctttt

SEQ ID NO: 918062 - DNA, 15 bp, Homo sapiens
tatcaataattcttt

SEQ ID NO: 918063 - DNA, 15 bp, Homo sapiens
ttatcaataattctt

SEQ ID NO: 918064 - DNA, 15 bp, Homo sapiens
cttatcaataattct

SEQ ID NO: 918065 - DNA, 15 bp, Homo sapiens
acttatcaataattc

SEQ ID NO: 918066 - DNA, 15 bp, Homo sapiens
cacttatcaataatt

SEQ ID NO: 918067 - DNA, 15 bp, Homo sapiens
tcacttatcaataat

SEQ ID NO: 918068 - DNA, 15 bp, Homo sapiens
ctcacttatcaataa

SEQ ID NO: 918069 - DNA, 15 bp, Homo sapiens
actcacttatcaata

SEQ ID NO: 918070 - DNA, 15 bp, Homo sapiens
aactcacttatcaat

SEQ ID NO: 918071 - DNA, 15 bp, Homo sapiens
caactcacttatcaa

SEQ ID NO: 918072 - DNA, 15 bp, Homo sapiens
acaactcacttatca

SEQ ID NO: 918073 - DNA, 15 bp, Homo sapiens
gacaactcacttatc

SEQ ID NO: 918074 - DNA, 15 bp, Homo sapiens
agacaactcacttat

SEQ ID NO: 918075 - DNA, 15 bp, Homo sapiens
cagacaactcactta

SEQ ID NO: 918076 - DNA, 15 bp, Homo sapiens
ccagacaactcactt

SEQ ID NO: 918077 - DNA, 15 bp, Homo sapiens
tccagacaactcact

SEQ ID NO: 918078 - DNA, 15 bp, Homo sapiens
atccagacaactcac

SEQ ID NO: 918079 - DNA, 15 bp, Homo sapiens
tatccagacaactca

SEQ ID NO: 918080 - DNA, 15 bp, Homo sapiens
atatccagacaactc

SEQ ID NO: 918081 - DNA, 15 bp, Homo sapiens
catatccagacaact

SEQ ID NO: 918082 - DNA, 15 bp, Homo sapiens
tcatatccagacaac

SEQ ID NO: 918083 - DNA, 15 bp, Homo sapiens
ttcatatccagacaa

SEQ ID NO: 918084 - DNA, 15 bp, Homo sapiens
tttcatatccagaca

SEQ ID NO: 918085 - DNA, 15 bp, Homo sapiens
atttcatatccagac

SEQ ID NO: 918086 - DNA, 15 bp, Homo sapiens
aatttcatatccaga

SEQ ID NO: 918087 - DNA, 15 bp, Homo sapiens
taatttcatatccag

SEQ ID NO: 918088 - DNA, 15 bp, Homo sapiens
ataatttcatatcca

SEQ ID NO: 918089 - DNA, 15 bp, Homo sapiens
aataatttcatatcc

SEQ ID NO: 918090 - DNA, 15 bp, Homo sapiens
aaataatttcatatc

SEQ ID NO: 918091 - DNA, 15 bp, Homo sapiens
caaataatttcatat

SEQ ID NO: 918092 - DNA, 15 bp, Homo sapiens
acaaataatttcata

SEQ ID NO: 918093 - DNA, 15 bp, Homo sapiens
cacaaataatttcat

SEQ ID NO: 918094 - DNA, 15 bp, Homo sapiens
acacaaataatttca

SEQ ID NO: 918095 - DNA, 15 bp, Homo sapiens
gacacaaataatttc

SEQ ID NO: 918096 - DNA, 15 bp, Homo sapiens
agacacaaataattt

SEQ ID NO: 918097 - DNA, 15 bp, Homo sapiens
aagacacaaataatt

SEQ ID NO: 918098 - DNA, 15 bp, Homo sapiens
taagacacaaataat

SEQ ID NO: 918099 - DNA, 15 bp, Homo sapiens
ctaagacacaaataa

SEQ ID NO: 918100 - DNA, 15 bp, Homo sapiens
gctaagacacaaata

SEQ ID NO: 918101 - DNA, 15 bp, Homo sapiens
agctaagacacaaat

SEQ ID NO: 918102 - DNA, 15 bp, Homo sapiens
cagctaagacacaaa

SEQ ID NO: 918103 - DNA, 15 bp, Homo sapiens
acagctaagacacaa

SEQ ID NO: 918104 - DNA, 15 bp, Homo sapiens
aacagctaagacaca

SEQ ID NO: 918105 - DNA, 15 bp, Homo sapiens
aaacagctaagacac

SEQ ID NO: 918106 - DNA, 15 bp, Homo sapiens
aaaacagctaagaca

SEQ ID NO: 918107 - DNA, 15 bp, Homo sapiens
aaaaacagctaagac

SEQ ID NO: 918108 - DNA, 15 bp, Homo sapiens
caaaaacagctaaga

SEQ ID NO: 918109 - DNA, 15 bp, Homo sapiens
gcaaaaacagctaag

SEQ ID NO: 918110 - DNA, 15 bp, Homo sapiens
agcaaaaacagctaa

SEQ ID NO: 918111 - DNA, 15 bp, Homo sapiens
cagcaaaaacagcta

SEQ ID NO: 918112 - DNA, 15 bp, Homo sapiens
acagcaaaaacagct

SEQ ID NO: 918113 - DNA, 15 bp, Homo sapiens
aacagcaaaaacagc

SEQ ID NO: 918114 - DNA, 15 bp, Homo sapiens
gaacagcaaaaacag

SEQ ID NO: 918115 - DNA, 15 bp, Homo sapiens
agaacagcaaaaaca

SEQ ID NO: 918116 - DNA, 15 bp, Homo sapiens
tagaacagcaaaaac

SEQ ID NO: 918117 - DNA, 15 bp, Homo sapiens
atagaacagcaaaaa

SEQ ID NO: 918118 - DNA, 15 bp, Homo sapiens
aatagaacagcaaaa

SEQ ID NO: 918119 - DNA, 15 bp, Homo sapiens
caatagaacagcaaa

SEQ ID NO: 918120 - DNA, 15 bp, Homo sapiens
acaatagaacagcaa

SEQ ID NO: 918121 - DNA, 15 bp, Homo sapiens
cacaatagaacagca

SEQ ID NO: 918122 - DNA, 15 bp, Homo sapiens
ccacaatagaacagc

SEQ ID NO: 918123 - DNA, 15 bp, Homo sapiens
tccacaatagaacag

SEQ ID NO: 918124 - DNA, 15 bp, Homo sapiens
atccacaatagaaca

SEQ ID NO: 918125 - DNA, 15 bp, Homo sapiens
gatccacaatagaac

SEQ ID NO: 918126 - DNA, 15 bp, Homo sapiens
agatccacaatagaa

SEQ ID NO: 918127 - DNA, 15 bp, Homo sapiens
cagatccacaataga

SEQ ID NO: 918128 - DNA, 15 bp, Homo sapiens
gcagatccacaatag

SEQ ID NO: 918129 - DNA, 15 bp, Homo sapiens
agcagatccacaata

SEQ ID NO: 918130 - DNA, 15 bp, Homo sapiens
tagcagatccacaat

SEQ ID NO: 918131 - DNA, 15 bp, Homo sapiens
gtagcagatccacaa

SEQ ID NO: 918132 - DNA, 15 bp, Homo sapiens
tgtagcagatccaca

SEQ ID NO: 918133 - DNA, 15 bp, Homo sapiens
ttgtagcagatccac

SEQ ID NO: 918134 - DNA, 15 bp, Homo sapiens
tttgtagcagatcca

SEQ ID NO: 918135 - DNA, 15 bp, Homo sapiens
atttgtagcagatcc

SEQ ID NO: 918136 - DNA, 15 bp, Homo sapiens
aatttgtagcagatc

SEQ ID NO: 918137 - DNA, 15 bp, Homo sapiens
aaatttgtagcagat

SEQ ID NO: 918138 - DNA, 15 bp, Homo sapiens
taaatttgtagcaga

SEQ ID NO: 918139 - DNA, 15 bp, Homo sapiens
ttaaatttgtagcag

SEQ ID NO: 918140 - DNA, 15 bp, Homo sapiens
attaaatttgtagca

SEQ ID NO: 918141 - DNA, 15 bp, Homo sapiens
tattaaatttgtagc

SEQ ID NO: 918142 - DNA, 15 bp, Homo sapiens
ttattaaatttgtag

SEQ ID NO: 918143 - DNA, 15 bp, Homo sapiens
tttattaaatttgta

SEQ ID NO: 918144 - DNA, 15 bp, Homo sapiens
atttattaaatttgt

SEQ ID NO: 918145 - DNA, 15 bp, Homo sapiens
catttattaaatttg

SEQ ID NO: 918146 - DNA, 15 bp, Homo sapiens
tcatttattaaattt

SEQ ID NO: 918147 - DNA, 15 bp, Homo sapiens
gtcatttattaaatt

SEQ ID NO: 918148 - DNA, 15 bp, Homo sapiens
tgtcatttattaaat

SEQ ID NO: 918149 - DNA, 15 bp, Homo sapiens
ttgtcatttattaaa

SEQ ID NO: 918150 - DNA, 15 bp, Homo sapiens
attgtcatttattaa

SEQ ID NO: 918151 - DNA, 15 bp, Homo sapiens
tattgtcatttatta

SEQ ID NO: 918152 - DNA, 15 bp, Homo sapiens
ttattgtcatttatt

SEQ ID NO: 918153 - DNA, 15 bp, Homo sapiens
attattgtcatttat

SEQ ID NO: 918154 - DNA, 15 bp, Homo sapiens
tattattgtcattta

SEQ ID NO: 918155 - DNA, 15 bp, Homo sapiens
ttattattgtcattt

SEQ ID NO: 918156 - DNA, 15 bp, Homo sapiens
gttattattgtcatt

SEQ ID NO: 918157 - DNA, 15 bp, Homo sapiens
ggttattattgtcat

SEQ ID NO: 918158 - DNA, 15 bp, Homo sapiens
aggttattattgtca

SEQ ID NO: 918159 - DNA, 15 bp, Homo sapiens
caggttattattgtc

SEQ ID NO: 918160 - DNA, 15 bp, Homo sapiens
tcaggttattattgt

SEQ ID NO: 918161 - DNA, 15 bp, Homo sapiens
ttcaggttattattg

SEQ ID NO: 918162 - DNA, 15 bp, Homo sapiens
cttcaggttattatt

SEQ ID NO: 918163 - DNA, 15 bp, Homo sapiens
ccttcaggttattat

SEQ ID NO: 918164 - DNA, 15 bp, Homo sapiens
tccttcaggttatta

SEQ ID NO: 918165 - DNA, 15 bp, Homo sapiens
ctccttcaggttatt

SEQ ID NO: 918166 - DNA, 15 bp, Homo sapiens
tctccttcaggttat

SEQ ID NO: 918167 - DNA, 15 bp, Homo sapiens
atctccttcaggtta

SEQ ID NO: 918168 - DNA, 15 bp, Homo sapiens
tatctccttcaggtt

SEQ ID NO: 918169 - DNA, 15 bp, Homo sapiens
ttatctccttcaggt

SEQ ID NO: 918170 - DNA, 15 bp, Homo sapiens
cttatctccttcagg

SEQ ID NO: 918171 - DNA, 15 bp, Homo sapiens
acttatctccttcag

SEQ ID NO: 918172 - DNA, 15 bp, Homo sapiens
cacttatctccttca

SEQ ID NO: 918173 - DNA, 15 bp, Homo sapiens
tcacttatctccttc

SEQ ID NO: 918174 - DNA, 15 bp, Homo sapiens
ctcacttatctcctt

SEQ ID NO: 918175 - DNA, 15 bp, Homo sapiens
actcacttatctcct

SEQ ID NO: 918176 - DNA, 15 bp, Homo sapiens
cactcacttatctcc

SEQ ID NO: 918177 - DNA, 15 bp, Homo sapiens
acactcacttatctc

SEQ ID NO: 918178 - DNA, 15 bp, Homo sapiens
gacactcacttatct

SEQ ID NO: 918179 - DNA, 15 bp, Homo sapiens
tgacactcacttatc

SEQ ID NO: 918180 - DNA, 15 bp, Homo sapiens
ctgacactcacttat

SEQ ID NO: 918181 - DNA, 15 bp, Homo sapiens
actgacactcactta

SEQ ID NO: 918182 - DNA, 15 bp, Homo sapiens
cactgacactcactt

SEQ ID NO: 918183 - DNA, 15 bp, Homo sapiens
ccactgacactcact

SEQ ID NO: 918184 - DNA, 15 bp, Homo sapiens
cccactgacactcac

SEQ ID NO: 918185 - DNA, 15 bp, Homo sapiens
acccactgacactca

SEQ ID NO: 918186 - DNA, 15 bp, Homo sapiens
aacccactgacactc

SEQ ID NO: 918187 - DNA, 15 bp, Homo sapiens
gaacccactgacact

SEQ ID NO: 918188 - DNA, 15 bp, Homo sapiens
tgaacccactgacac

SEQ ID NO: 918189 - DNA, 15 bp, Homo sapiens
ctgaacccactgaca

SEQ ID NO: 918190 - DNA, 15 bp, Homo sapiens
actgaacccactgac

SEQ ID NO: 918191 - DNA, 15 bp, Homo sapiens
gactgaacccactga

SEQ ID NO: 918192 - DNA, 15 bp, Homo sapiens
ggactgaacccactg

SEQ ID NO: 918193 - DNA, 15 bp, Homo sapiens
aggactgaacccact

SEQ ID NO: 918194 - DNA, 15 bp, Homo sapiens
caggactgaacccac

SEQ ID NO: 918195 - DNA, 15 bp, Homo sapiens
tcaggactgaaccca

SEQ ID NO: 918196 - DNA, 15 bp, Homo sapiens
ttcaggactgaaccc

SEQ ID NO: 918197 - DNA, 15 bp, Homo sapiens
attcaggactgaacc

SEQ ID NO: 918198 - DNA, 15 bp, Homo sapiens
gattcaggactgaac

SEQ ID NO: 918199 - DNA, 15 bp, Homo sapiens
agattcaggactgaa

SEQ ID NO: 918200 - DNA, 15 bp, Homo sapiens
cagattcaggactga

SEQ ID NO: 918201 - DNA, 15 bp, Homo sapiens
tcagattcaggactg

SEQ ID NO: 918202 - DNA, 15 bp, Homo sapiens
ttcagattcaggact

SEQ ID NO: 918203 - DNA, 15 bp, Homo sapiens
tttcagattcaggac

SEQ ID NO: 918204 - DNA, 15 bp, Homo sapiens
atttcagattcagga

SEQ ID NO: 918205 - DNA, 15 bp, Homo sapiens
tatttcagattcagg

SEQ ID NO: 918206 - DNA, 15 bp, Homo sapiens
ctatttcagattcag

SEQ ID NO: 918207 - DNA, 15 bp, Homo sapiens
tctatttcagattca

SEQ ID NO: 918208 - DNA, 15 bp, Homo sapiens
gtctatttcagattc

SEQ ID NO: 918209 - DNA, 15 bp, Homo sapiens
tgtctatttcagatt

SEQ ID NO: 918210 - DNA, 15 bp, Homo sapiens
ttgtctatttcagat

SEQ ID NO: 918211 - DNA, 15 bp, Homo sapiens
tttgtctatttcaga

SEQ ID NO: 918212 - DNA, 15 bp, Homo sapiens
ttttgtctatttcag

SEQ ID NO: 918213 - DNA, 15 bp, Homo sapiens
tttttgtctatttca

SEQ ID NO: 918214 - DNA, 15 bp, Homo sapiens
gtttttgtctatttc

SEQ ID NO: 918215 - DNA, 15 bp, Homo sapiens
tgtttttgtctattt

SEQ ID NO: 918216 - DNA, 15 bp, Homo sapiens
ttgtttttgtctatt

SEQ ID NO: 918217 - DNA, 15 bp, Homo sapiens
tttgtttttgtctat

SEQ ID NO: 918218 - DNA, 15 bp, Homo sapiens
ttttgtttttgtcta

SEQ ID NO: 918219 - DNA, 15 bp, Homo sapiens
gttttgtttttgtct

SEQ ID NO: 918220 - DNA, 15 bp, Homo sapiens
tgttttgtttttgtc

SEQ ID NO: 918221 - DNA, 15 bp, Homo sapiens
ttttgttttgttttg

SEQ ID NO: 918222 - DNA, 15 bp, Homo sapiens
attttgttttgtttt

SEQ ID NO: 918223 - DNA, 15 bp, Homo sapiens
tattttgttttgttt

SEQ ID NO: 918224 - DNA, 15 bp, Homo sapiens
ttattttgttttgtt

SEQ ID NO: 918225 - DNA, 15 bp, Homo sapiens
gttattttgttttgt

SEQ ID NO: 918226 - DNA, 15 bp, Homo sapiens
tgttattttgttttg

SEQ ID NO: 918227 - DNA, 15 bp, Homo sapiens
ttgttattttgtttt

SEQ ID NO: 918228 - DNA, 15 bp, Homo sapiens
tttgttattttgttt

SEQ ID NO: 918229 - DNA, 15 bp, Homo sapiens
ttttgttattttgtt

SEQ ID NO: 918230 - DNA, 15 bp, Homo sapiens
tttttgttattttgt

SEQ ID NO: 918231 - DNA, 15 bp, Homo sapiens
gtttttgttattttg

SEQ ID NO: 918232 - DNA, 15 bp, Homo sapiens
ggtttttgttatttt

SEQ ID NO: 918233 - DNA, 15 bp, Homo sapiens
tggtttttgttattt

SEQ ID NO: 918234 - DNA, 15 bp, Homo sapiens
ttggtttttgttatt

SEQ ID NO: 918235 - DNA, 15 bp, Homo sapiens
cttggtttttgttat

SEQ ID NO: 918236 - DNA, 15 bp, Homo sapiens
gcttggtttttgtta

SEQ ID NO: 918237 - DNA, 15 bp, Homo sapiens
tgcttggtttttgtt

SEQ ID NO: 918238 - DNA, 15 bp, Homo sapiens
ttgcttggtttttgt

SEQ ID NO: 918239 - DNA, 15 bp, Homo sapiens
tttgcttggtttttg

SEQ ID NO: 918240 - DNA, 15 bp, Homo sapiens
gtttgcttggttttt

SEQ ID NO: 918241 - DNA, 15 bp, Homo sapiens
tgtttgcttggtttt

SEQ ID NO: 918242 - DNA, 15 bp, Homo sapiens
ttgtttgcttggttt

SEQ ID NO: 918243 - DNA, 15 bp, Homo sapiens
tttgtttgcttggtt

SEQ ID NO: 918244 - DNA, 15 bp, Homo sapiens
ttttgtttgcttggt

SEQ ID NO: 918245 - DNA, 15 bp, Homo sapiens
tttttgtttgcttgg

SEQ ID NO: 918246 - DNA, 15 bp, Homo sapiens
ttttttgtttgcttg

SEQ ID NO: 918247 - DNA, 15 bp, Homo sapiens
cttttttgtttgctt

SEQ ID NO: 918248 - DNA, 15 bp, Homo sapiens
tcttttttgtttgct

SEQ ID NO: 918249 - DNA, 15 bp, Homo sapiens
ttcttttttgtttgc

SEQ ID NO: 918250 - DNA, 15 bp, Homo sapiens
tttcttttttgtttg

SEQ ID NO: 918251 - DNA, 15 bp, Homo sapiens
ttttcttttttgttt

SEQ ID NO: 918252 - DNA, 15 bp, Homo sapiens
tttttcttttttgtt

SEQ ID NO: 918253 - DNA, 15 bp, Homo sapiens
ttttttcttttttgt

SEQ ID NO: 918254 - DNA, 15 bp, Homo sapiens
tttttttcttttttg

SEQ ID NO: 918255 - DNA, 15 bp, Homo sapiens
gtttttttctttttt

SEQ ID NO: 918256 - DNA, 15 bp, Homo sapiens
ggtttttttcttttt

SEQ ID NO: 918257 - DNA, 15 bp, Homo sapiens
aggtttttttctttt

SEQ ID NO: 918258 - DNA, 15 bp, Homo sapiens
aaggtttttttcttt

SEQ ID NO: 918259 - DNA, 15 bp, Homo sapiens
taaggtttttttctt

SEQ ID NO: 918260 - DNA, 15 bp, Homo sapiens
ctaaggtttttttct

SEQ ID NO: 918261 - DNA, 15 bp, Homo sapiens
tctaaggtttttttc

SEQ ID NO: 918262 - DNA, 15 bp, Homo sapiens
ttctaaggttttttt

SEQ ID NO: 918263 - DNA, 15 bp, Homo sapiens
attctaaggtttttt

SEQ ID NO: 918264 - DNA, 15 bp, Homo sapiens
aattctaaggttttt

SEQ ID NO: 918265 - DNA, 15 bp, Homo sapiens
taattctaaggtttt

SEQ ID NO: 918266 - DNA, 15 bp, Homo sapiens
ataattctaaggttt

SEQ ID NO: 918267 - DNA, 15 bp, Homo sapiens
cataattctaaggtt

SEQ ID NO: 918268 - DNA, 15 bp, Homo sapiens
ccataattctaaggt

SEQ ID NO: 918269 - DNA, 15 bp, Homo sapiens
tccataattctaagg

SEQ ID NO: 918270 - DNA, 15 bp, Homo sapiens
ttccataattctaag

SEQ ID NO: 918271 - DNA, 15 bp, Homo sapiens
attccataattctaa

SEQ ID NO: 918272 - DNA, 15 bp, Homo sapiens
aattccataattcta

SEQ ID NO: 918273 - DNA, 15 bp, Homo sapiens
aaattccataattct

SEQ ID NO: 918274 - DNA, 15 bp, Homo sapiens
aaaattccataattc

SEQ ID NO: 918275 - DNA, 15 bp, Homo sapiens
aaaaattccataatt

SEQ ID NO: 918276 - DNA, 15 bp, Homo sapiens
caaaaattccataat

SEQ ID NO: 918277 - DNA, 15 bp, Homo sapiens
tcaaaaattccataa

SEQ ID NO: 918278 - DNA, 15 bp, Homo sapiens
ttcaaaaattccata

SEQ ID NO: 918279 - DNA, 15 bp, Homo sapiens
tttcaaaaattccat

SEQ ID NO: 918280 - DNA, 15 bp, Homo sapiens
ttttcaaaaattcca

SEQ ID NO: 918281 - DNA, 15 bp, Homo sapiens
cttttcaaaaattcc

SEQ ID NO: 918282 - DNA, 15 bp, Homo sapiens
acttttcaaaaattc

SEQ ID NO: 918283 - DNA, 15 bp, Homo sapiens
aacttttcaaaaatt

SEQ ID NO: 918284 - DNA, 15 bp, Homo sapiens
aaacttttcaaaaat

SEQ ID NO: 918285 - DNA, 15 bp, Homo sapiens
aaaacttttcaaaaa

SEQ ID NO: 918286 - DNA, 15 bp, Homo sapiens
taaaacttttcaaaa

SEQ ID NO: 918287 - DNA, 15 bp, Homo sapiens
ataaaacttttcaaa

SEQ ID NO: 918288 - DNA, 15 bp, Homo sapiens
tataaaacttttcaa

SEQ ID NO: 918289 - DNA, 15 bp, Homo sapiens
ctataaaacttttca

SEQ ID NO: 918290 - DNA, 15 bp, Homo sapiens
actataaaacttttc

SEQ ID NO: 918291 - DNA, 15 bp, Homo sapiens
tactataaaactttt

SEQ ID NO: 918292 - DNA, 15 bp, Homo sapiens
atactataaaacttt

SEQ ID NO: 918293 - DNA, 15 bp, Homo sapiens
tatactataaaactt

SEQ ID NO: 918294 - DNA, 15 bp, Homo sapiens
ctatactataaaact

SEQ ID NO: 918295 - DNA, 15 bp, Homo sapiens
actatactataaaac

SEQ ID NO: 918296 - DNA, 15 bp, Homo sapiens
tactatactataaaa

SEQ ID NO: 918297 - DNA, 15 bp, Homo sapiens
atactatactataaa

SEQ ID NO: 918298 - DNA, 15 bp, Homo sapiens
aatactatactataa

SEQ ID NO: 918299 - DNA, 15 bp, Homo sapiens
aaatactatactata

SEQ ID NO: 918300 - DNA, 15 bp, Homo sapiens
aaaatactatactat

SEQ ID NO: 918301 - DNA, 15 bp, Homo sapiens
taaaatactatacta

SEQ ID NO: 918302 - DNA, 15 bp, Homo sapiens
ttaaaatactatact

SEQ ID NO: 918303 - DNA, 15 bp, Homo sapiens
attaaaatactatac

SEQ ID NO: 918304 - DNA, 15 bp, Homo sapiens
aattaaaatactata

SEQ ID NO: 918305 - DNA, 15 bp, Homo sapiens
aaattaaaatactat

SEQ ID NO: 918306 - DNA, 15 bp, Homo sapiens
gaaattaaaatacta

SEQ ID NO: 918307 - DNA, 15 bp, Homo sapiens
agaaattaaaatact

SEQ ID NO: 918308 - DNA, 15 bp, Homo sapiens
tagaaattaaaatac

SEQ ID NO: 918309 - DNA, 15 bp, Homo sapiens
ctagaaattaaaata

SEQ ID NO: 918310 - DNA, 15 bp, Homo sapiens
tctagaaattaaaat

SEQ ID NO: 918311 - DNA, 15 bp, Homo sapiens
gtctagaaattaaaa

SEQ ID NO: 918312 - DNA, 15 bp, Homo sapiens
tgtctagaaattaaa

SEQ ID NO: 918313 - DNA, 15 bp, Homo sapiens
ctgtctagaaattaa

SEQ ID NO: 918314 - DNA, 15 bp, Homo sapiens
gctgtctagaaatta

SEQ ID NO: 918315 - DNA, 15 bp, Homo sapiens
tgctgtctagaaatt

SEQ ID NO: 918316 - DNA, 15 bp, Homo sapiens
gtgctgtctagaaat

SEQ ID NO: 918317 - DNA, 15 bp, Homo sapiens
ggtgctgtctagaaa

SEQ ID NO: 918318 - DNA, 15 bp, Homo sapiens
tggtgctgtctagaa

SEQ ID NO: 918319 - DNA, 15 bp, Homo sapiens
ttggtgctgtctaga

SEQ ID NO: 918320 - DNA, 15 bp, Homo sapiens
attggtgctgtctag

SEQ ID NO: 918321 - DNA, 15 bp, Homo sapiens
tattggtgctgtcta

SEQ ID NO: 918322 - DNA, 15 bp, Homo sapiens
atattggtgctgtct

SEQ ID NO: 918323 - DNA, 15 bp, Homo sapiens
catattggtgctgtc

SEQ ID NO: 918324 - DNA, 15 bp, Homo sapiens
acatattggtgctgt

SEQ ID NO: 918325 - DNA, 15 bp, Homo sapiens
aacatattggtgctg

SEQ ID NO: 918326 - DNA, 15 bp, Homo sapiens
caacatattggtgct

SEQ ID NO: 918327 - DNA, 15 bp, Homo sapiens
acaacatattggtgc

SEQ ID NO: 918328 - DNA, 15 bp, Homo sapiens
aacaacatattggtg

SEQ ID NO: 918329 - DNA, 15 bp, Homo sapiens
taacaacatattggt

SEQ ID NO: 918330 - DNA, 15 bp, Homo sapiens
ataacaacatattgg

SEQ ID NO: 918331 - DNA, 15 bp, Homo sapiens
aataacaacatattg

SEQ ID NO: 918332 - DNA, 15 bp, Homo sapiens
taataacaacatatt

SEQ ID NO: 918333 - DNA, 15 bp, Homo sapiens
ttaataacaacatat

SEQ ID NO: 918334 - DNA, 15 bp, Homo sapiens
attaataacaacata

SEQ ID NO: 918335 - DNA, 15 bp, Homo sapiens
tattaataacaacat

SEQ ID NO: 918336 - DNA, 15 bp, Homo sapiens
ttattaataacaaca

SEQ ID NO: 918337 - DNA, 15 bp, Homo sapiens
attattaataacaac

SEQ ID NO: 918338 - DNA, 15 bp, Homo sapiens
tattattaataacaa

SEQ ID NO: 918339 - DNA, 15 bp, Homo sapiens
ttattattaataaca

SEQ ID NO: 918340 - DNA, 15 bp, Homo sapiens
attattattaataac

SEQ ID NO: 918341 - DNA, 15 bp, Homo sapiens
tattattattaataa

SEQ ID NO: 918342 - DNA, 15 bp, Homo sapiens
ttattattattaata

SEQ ID NO: 918343 - DNA, 15 bp, Homo sapiens
tttattattattaat

SEQ ID NO: 918344 - DNA, 15 bp, Homo sapiens
ttttattattattaa

SEQ ID NO: 918345 - DNA, 15 bp, Homo sapiens
gttttattattatta

SEQ ID NO: 918346 - DNA, 15 bp, Homo sapiens
agttttattattatt

SEQ ID NO: 918347 - DNA, 15 bp, Homo sapiens
aagttttattattat

SEQ ID NO: 918348 - DNA, 15 bp, Homo sapiens
taagttttattatta

SEQ ID NO: 918349 - DNA, 15 bp, Homo sapiens
ctaagttttattatt

SEQ ID NO: 918350 - DNA, 15 bp, Homo sapiens
actaagttttattat

SEQ ID NO: 918351 - DNA, 15 bp, Homo sapiens
tactaagttttatta

SEQ ID NO: 918352 - DNA, 15 bp, Homo sapiens
ctactaagttttatt

SEQ ID NO: 918353 - DNA, 15 bp, Homo sapiens
actactaagttttat

SEQ ID NO: 918354 - DNA, 15 bp, Homo sapiens
aactactaagtttta

SEQ ID NO: 918355 - DNA, 15 bp, Homo sapiens
aaactactaagtttt

SEQ ID NO: 918356 - DNA, 15 bp, Homo sapiens
aaaactactaagttt

SEQ ID NO: 918357 - DNA, 15 bp, Homo sapiens
aaaaactactaagtt

SEQ ID NO: 918358 - DNA, 15 bp, Homo sapiens
taaaaactactaagt

SEQ ID NO: 918359 - DNA, 15 bp, Homo sapiens
ataaaaactactaag

SEQ ID NO: 918360 - DNA, 15 bp, Homo sapiens
cataaaaactactaa

SEQ ID NO: 918361 - DNA, 15 bp, Homo sapiens
acataaaaactacta

SEQ ID NO: 918362 - DNA, 15 bp, Homo sapiens
aacataaaaactact

SEQ ID NO: 918363 - DNA, 15 bp, Homo sapiens
taacataaaaactac

SEQ ID NO: 918364 - DNA, 15 bp, Homo sapiens
ttaacataaaaacta

SEQ ID NO: 918365 - DNA, 15 bp, Homo sapiens
attaacataaaaact

SEQ ID NO: 918366 - DNA, 15 bp, Homo sapiens
tattaacataaaaac

SEQ ID NO: 918367 - DNA, 15 bp, Homo sapiens
atattaacataaaaa

SEQ ID NO: 918368 - DNA, 15 bp, Homo sapiens
tatattaacataaaa

SEQ ID NO: 918369 - DNA, 15 bp, Homo sapiens
atatattaacataaa

SEQ ID NO: 918370 - DNA, 15 bp, Homo sapiens
catatattaacataa

SEQ ID NO: 918371 - DNA, 15 bp, Homo sapiens
acatatattaacata

SEQ ID NO: 918372 - DNA, 15 bp, Homo sapiens
aacatatattaacat

SEQ ID NO: 918373 - DNA, 15 bp, Homo sapiens
taacatatattaaca

SEQ ID NO: 918374 - DNA, 15 bp, Homo sapiens
gtaacatatattaac

SEQ ID NO: 918375 - DNA, 15 bp, Homo sapiens
agtaacatatattaa

SEQ ID NO: 918376 - DNA, 15 bp, Homo sapiens
gagtaacatatatta

SEQ ID NO: 918377 - DNA, 15 bp, Homo sapiens
tgagtaacatatatt

SEQ ID NO: 918378 - DNA, 15 bp, Homo sapiens
ttgagtaacatatat

SEQ ID NO: 918379 - DNA, 15 bp, Homo sapiens
gttgagtaacatata

SEQ ID NO: 918380 - DNA, 15 bp, Homo sapiens
tgttgagtaacatat

SEQ ID NO: 918381 - DNA, 15 bp, Homo sapiens
atgttgagtaacata

SEQ ID NO: 918382 - DNA, 15 bp, Homo sapiens
aatgttgagtaacat

SEQ ID NO: 918383 - DNA, 15 bp, Homo sapiens
aaatgttgagtaaca

SEQ ID NO: 918384 - DNA, 15 bp, Homo sapiens
aaaatgttgagtaac

SEQ ID NO: 918385 - DNA, 15 bp, Homo sapiens
gaaaatgttgagtaa

SEQ ID NO: 918386 - DNA, 15 bp, Homo sapiens
ggaaaatgttgagta

SEQ ID NO: 918387 - DNA, 15 bp, Homo sapiens
gggaaaatgttgagt

SEQ ID NO: 918388 - DNA, 15 bp, Homo sapiens
agggaaaatgttgag

SEQ ID NO: 918389 - DNA, 15 bp, Homo sapiens
aagggaaaatgttga

SEQ ID NO: 918390 - DNA, 15 bp, Homo sapiens
aaagggaaaatgttg

SEQ ID NO: 918391 - DNA, 15 bp, Homo sapiens
gaaagggaaaatgtt

SEQ ID NO: 918392 - DNA, 15 bp, Homo sapiens
ggaaagggaaaatgt

SEQ ID NO: 918393 - DNA, 15 bp, Homo sapiens
aggaaagggaaaatg

SEQ ID NO: 918394 - DNA, 15 bp, Homo sapiens
aaggaaagggaaaat

SEQ ID NO: 918395 - DNA, 15 bp, Homo sapiens
taaggaaagggaaaa

SEQ ID NO: 918396 - DNA, 15 bp, Homo sapiens
ttaaggaaagggaaa

SEQ ID NO: 918397 - DNA, 15 bp, Homo sapiens
cttaaggaaagggaa

SEQ ID NO: 918398 - DNA, 15 bp, Homo sapiens
ccttaaggaaaggga

SEQ ID NO: 918399 - DNA, 15 bp, Homo sapiens
tccttaaggaaaggg

SEQ ID NO: 918400 - DNA, 15 bp, Homo sapiens
gtccttaaggaaagg

SEQ ID NO: 918401 - DNA, 15 bp, Homo sapiens
agtccttaaggaaag

SEQ ID NO: 918402 - DNA, 15 bp, Homo sapiens
tagtccttaaggaaa

SEQ ID NO: 918403 - DNA, 15 bp, Homo sapiens
atagtccttaaggaa

SEQ ID NO: 918404 - DNA, 15 bp, Homo sapiens
catagtccttaagga

SEQ ID NO: 918405 - DNA, 15 bp, Homo sapiens
gcatagtccttaagg

SEQ ID NO: 918406 - DNA, 15 bp, Homo sapiens
tgcatagtccttaag

SEQ ID NO: 918407 - DNA, 15 bp, Homo sapiens
atgcatagtccttaa

SEQ ID NO: 918408 - DNA, 15 bp, Homo sapiens
aatgcatagtcctta

SEQ ID NO: 918409 - DNA, 15 bp, Homo sapiens
caatgcatagtcctt

SEQ ID NO: 918410 - DNA, 15 bp, Homo sapiens
tcaatgcatagtcct

SEQ ID NO: 918411 - DNA, 15 bp, Homo sapiens
ttcaatgcatagtcc

SEQ ID NO: 918412 - DNA, 15 bp, Homo sapiens
tttcaatgcatagtc

SEQ ID NO: 918413 - DNA, 15 bp, Homo sapiens
ttttcaatgcatagt

SEQ ID NO: 918414 - DNA, 15 bp, Homo sapiens
cttttcaatgcatag

SEQ ID NO: 918415 - DNA, 15 bp, Homo sapiens
gcttttcaatgcata

SEQ ID NO: 918416 - DNA, 15 bp, Homo sapiens
agcttttcaatgcat

SEQ ID NO: 918417 - DNA, 15 bp, Homo sapiens
aagcttttcaatgca

SEQ ID NO: 918418 - DNA, 15 bp, Homo sapiens
aaagcttttcaatgc

SEQ ID NO: 918419 - DNA, 15 bp, Homo sapiens
aaaagcttttcaatg

SEQ ID NO: 918420 - DNA, 15 bp, Homo sapiens
gaaaagcttttcaat

SEQ ID NO: 918421 - DNA, 15 bp, Homo sapiens
agaaaagcttttcaa

SEQ ID NO: 918422 - DNA, 15 bp, Homo sapiens
aagaaaagcttttca

SEQ ID NO: 918423 - DNA, 15 bp, Homo sapiens
caagaaaagcttttc

SEQ ID NO: 918424 - DNA, 15 bp, Homo sapiens
acaagaaaagctttt

SEQ ID NO: 918425 - DNA, 15 bp, Homo sapiens
tacaagaaaagcttt

SEQ ID NO: 918426 - DNA, 15 bp, Homo sapiens
ttacaagaaaagctt

SEQ ID NO: 918427 - DNA, 15 bp, Homo sapiens
cttacaagaaaagct

SEQ ID NO: 918428 - DNA, 15 bp, Homo sapiens
acttacaagaaaagc

SEQ ID NO: 918429 - DNA, 15 bp, Homo sapiens
aacttacaagaaaag

SEQ ID NO: 918430 - DNA, 15 bp, Homo sapiens
taacttacaagaaaa

SEQ ID NO: 918431 - DNA, 15 bp, Homo sapiens
ataacttacaagaaa

SEQ ID NO: 918432 - DNA, 15 bp, Homo sapiens
aataacttacaagaa

SEQ ID NO: 918433 - DNA, 15 bp, Homo sapiens
taataacttacaaga

SEQ ID NO: 918434 - DNA, 15 bp, Homo sapiens
ataataacttacaag

SEQ ID NO: 918435 - DNA, 15 bp, Homo sapiens
aataataacttacaa

SEQ ID NO: 918436 - DNA, 15 bp, Homo sapiens
taataataacttaca

SEQ ID NO: 918437 - DNA, 15 bp, Homo sapiens
ataataataacttac

SEQ ID NO: 918438 - DNA, 15 bp, Homo sapiens
aataataataactta

SEQ ID NO: 918439 - DNA, 15 bp, Homo sapiens
taataataataactt

SEQ ID NO: 918440 - DNA, 15 bp, Homo sapiens
ataataataataact

SEQ ID NO: 918441 - DNA, 15 bp, Homo sapiens
aataataataataac

SEQ ID NO: 918442 - DNA, 15 bp, Homo sapiens
taataataataataa

SEQ ID NO: 918443 - DNA, 15 bp, Homo sapiens
ataataataataata

SEQ ID NO: 918444 - DNA, 15 bp, Homo sapiens
aataataataataat

SEQ ID NO: 918445 - DNA, 15 bp, Homo sapiens
ttaataataataata

SEQ ID NO: 918446 - DNA, 15 bp, Homo sapiens
attaataataataat

SEQ ID NO: 918447 - DNA, 15 bp, Homo sapiens
tattaataataataa

SEQ ID NO: 918448 - DNA, 15 bp, Homo sapiens
atattaataataata

SEQ ID NO: 918449 - DNA, 15 bp, Homo sapiens
aatattaataataat

SEQ ID NO: 918450 - DNA, 15 bp, Homo sapiens
aaatattaataataa

SEQ ID NO: 918451 - DNA, 15 bp, Homo sapiens
caaatattaataata

SEQ ID NO: 918452 - DNA, 15 bp, Homo sapiens
tcaaatattaataat

SEQ ID NO: 918453 - DNA, 15 bp, Homo sapiens
ctcaaatattaataa

SEQ ID NO: 918454 - DNA, 15 bp, Homo sapiens
tctcaaatattaata

SEQ ID NO: 918455 - DNA, 15 bp, Homo sapiens
atctcaaatattaat

SEQ ID NO: 918456 - DNA, 15 bp, Homo sapiens
catctcaaatattaa

SEQ ID NO: 918457 - DNA, 15 bp, Homo sapiens
ccatctcaaatatta

SEQ ID NO: 918458 - DNA, 15 bp, Homo sapiens
tccatctcaaatatt

SEQ ID NO: 918459 - DNA, 15 bp, Homo sapiens
ctccatctcaaatat

SEQ ID NO: 918460 - DNA, 15 bp, Homo sapiens
actccatctcaaata

SEQ ID NO: 918461 - DNA, 15 bp, Homo sapiens
gactccatctcaaat

SEQ ID NO: 918462 - DNA, 15 bp, Homo sapiens
agactccatctcaaa

SEQ ID NO: 918463 - DNA, 15 bp, Homo sapiens
cagactccatctcaa

SEQ ID NO: 918464 - DNA, 15 bp, Homo sapiens
acagactccatctca

SEQ ID NO: 918465 - DNA, 15 bp, Homo sapiens
gacagactccatctc

SEQ ID NO: 918466 - DNA, 15 bp, Homo sapiens
agacagactccatct

SEQ ID NO: 918467 - DNA, 15 bp, Homo sapiens
aagacagactccatc

SEQ ID NO: 918468 - DNA, 15 bp, Homo sapiens
caagacagactccat

SEQ ID NO: 918469 - DNA, 15 bp, Homo sapiens
acaagacagactcca

SEQ ID NO: 918470 - DNA, 15 bp, Homo sapiens
aacaagacagactcc

SEQ ID NO: 918471 - DNA, 15 bp, Homo sapiens
gaacaagacagactc

SEQ ID NO: 918472 - DNA, 15 bp, Homo sapiens
agaacaagacagact

SEQ ID NO: 918473 - DNA, 15 bp, Homo sapiens
tagaacaagacagac

SEQ ID NO: 918474 - DNA, 15 bp, Homo sapiens
atagaacaagacaga

SEQ ID NO: 918475 - DNA, 15 bp, Homo sapiens
aatagaacaagacag

SEQ ID NO: 918476 - DNA, 15 bp, Homo sapiens
caatagaacaagaca

SEQ ID NO: 918477 - DNA, 15 bp, Homo sapiens
gcaatagaacaagac

SEQ ID NO: 918478 - DNA, 15 bp, Homo sapiens
ggcaatagaacaaga

SEQ ID NO: 918479 - DNA, 15 bp, Homo sapiens
gggcaatagaacaag

SEQ ID NO: 918480 - DNA, 15 bp, Homo sapiens
tgggcaatagaacaa

SEQ ID NO: 918481 - DNA, 15 bp, Homo sapiens
ctgggcaatagaaca

SEQ ID NO: 918482 - DNA, 15 bp, Homo sapiens
cctgggcaatagaac

SEQ ID NO: 918483 - DNA, 15 bp, Homo sapiens
gcctgggcaatagaa

SEQ ID NO: 918484 - DNA, 15 bp, Homo sapiens
agcctgggcaataga

SEQ ID NO: 918485 - DNA, 15 bp, Homo sapiens
cagcctgggcaatag

SEQ ID NO: 918486 - DNA, 15 bp, Homo sapiens
ccagcctgggcaata

SEQ ID NO: 918487 - DNA, 15 bp, Homo sapiens
tccagcctgggcaat

SEQ ID NO: 918488 - DNA, 15 bp, Homo sapiens
ctccagcctgggcaa

SEQ ID NO: 918489 - DNA, 15 bp, Homo sapiens
actccagcctgggca

SEQ ID NO: 918490 - DNA, 15 bp, Homo sapiens
cactccagcctgggc

SEQ ID NO: 918491 - DNA, 15 bp, Homo sapiens
gcactccagcctggg

SEQ ID NO: 918492 - DNA, 15 bp, Homo sapiens
tgcactccagcctgg

SEQ ID NO: 918493 - DNA, 15 bp, Homo sapiens
gtgcactccagcctg

SEQ ID NO: 918494 - DNA, 15 bp, Homo sapiens
agtgcactccagcct

SEQ ID NO: 918495 - DNA, 15 bp, Homo sapiens
cagtgcactccagcc

SEQ ID NO: 918496 - DNA, 15 bp, Homo sapiens
ccagtgcactccagc

SEQ ID NO: 918497 - DNA, 15 bp, Homo sapiens
accagtgcactccag

SEQ ID NO: 918498 - DNA, 15 bp, Homo sapiens
caccagtgcactcca

SEQ ID NO: 918499 - DNA, 15 bp, Homo sapiens
gcaccagtgcactcc

SEQ ID NO: 918500 - DNA, 15 bp, Homo sapiens
cgcaccagtgcactc

SEQ ID NO: 918501 - DNA, 15 bp, Homo sapiens
tcgcaccagtgcact

SEQ ID NO: 918502 - DNA, 15 bp, Homo sapiens
atcgcaccagtgcac

SEQ ID NO: 918503 - DNA, 15 bp, Homo sapiens
gatcgcaccagtgca

SEQ ID NO: 918504 - DNA, 15 bp, Homo sapiens
agatcgcaccagtgc

SEQ ID NO: 918505 - DNA, 15 bp, Homo sapiens
aagatcgcaccagtg

SEQ ID NO: 918506 - DNA, 15 bp, Homo sapiens
caagatcgcaccagt

SEQ ID NO: 918507 - DNA, 15 bp, Homo sapiens
gcaagatcgcaccag

SEQ ID NO: 918508 - DNA, 15 bp, Homo sapiens
agcaagatcgcacca

SEQ ID NO: 918509 - DNA, 15 bp, Homo sapiens
gagcaagatcgcacc

SEQ ID NO: 918510 - DNA, 15 bp, Homo sapiens
tgagcaagatcgcac

SEQ ID NO: 918511 - DNA, 15 bp, Homo sapiens
atgagcaagatcgca

SEQ ID NO: 918512 - DNA, 15 bp, Homo sapiens
aatgagcaagatcgc

SEQ ID NO: 918513 - DNA, 15 bp, Homo sapiens
caatgagcaagatcg

SEQ ID NO: 918514 - DNA, 15 bp, Homo sapiens
gcaatgagcaagatc

SEQ ID NO: 918515 - DNA, 15 bp, Homo sapiens
tgcaatgagcaagat

SEQ ID NO: 918516 - DNA, 15 bp, Homo sapiens
ttgcaatgagcaaga

SEQ ID NO: 918517 - DNA, 15 bp, Homo sapiens
gttgcaatgagcaag

SEQ ID NO: 918518 - DNA, 15 bp, Homo sapiens
ggttgcaatgagcaa

SEQ ID NO: 918519 - DNA, 15 bp, Homo sapiens
aggttgcaatgagca

SEQ ID NO: 918520 - DNA, 15 bp, Homo sapiens
gaggttgcaatgagc

SEQ ID NO: 918521 - DNA, 15 bp, Homo sapiens
ggaggttgcaatgag

SEQ ID NO: 918522 - DNA, 15 bp, Homo sapiens
cggaggttgcaatga

SEQ ID NO: 918523 - DNA, 15 bp, Homo sapiens
gcggaggttgcaatg

SEQ ID NO: 918524 - DNA, 15 bp, Homo sapiens
ggcggaggttgcaat

SEQ ID NO: 918525 - DNA, 15 bp, Homo sapiens
aggcggaggttgcaa

SEQ ID NO: 918526 - DNA, 15 bp, Homo sapiens
gaggcggaggttgca

SEQ ID NO: 918527 - DNA, 15 bp, Homo sapiens
ggaggcggaggttgc

SEQ ID NO: 918528 - DNA, 15 bp, Homo sapiens
gggaggcggaggttg

SEQ ID NO: 918529 - DNA, 15 bp, Homo sapiens
cgggaggcggaggtt

SEQ ID NO: 918530 - DNA, 15 bp, Homo sapiens
ccgggaggcggaggt

SEQ ID NO: 918531 - DNA, 15 bp, Homo sapiens
cccgggaggcggagg

SEQ ID NO: 918532 - DNA, 15 bp, Homo sapiens
acccgggaggcggag

SEQ ID NO: 918533 - DNA, 15 bp, Homo sapiens
aacccgggaggcgga

SEQ ID NO: 918534 - DNA, 15 bp, Homo sapiens
gaacccgggaggcgg

SEQ ID NO: 918535 - DNA, 15 bp, Homo sapiens
agaacccgggaggcg

SEQ ID NO: 918536 - DNA, 15 bp, Homo sapiens
tagaacccgggaggc

SEQ ID NO: 918537 - DNA, 15 bp, Homo sapiens
ctagaacccgggagg

SEQ ID NO: 918538 - DNA, 15 bp, Homo sapiens
actagaacccgggag

SEQ ID NO: 918539 - DNA, 15 bp, Homo sapiens
cactagaacccggga

SEQ ID NO: 918540 - DNA, 15 bp, Homo sapiens
tcactagaacccggg

SEQ ID NO: 918541 - DNA, 15 bp, Homo sapiens
atcactagaacccgg

SEQ ID NO: 918542 - DNA, 15 bp, Homo sapiens
aatcactagaacccg

SEQ ID NO: 918543 - DNA, 15 bp, Homo sapiens
gaatcactagaaccc

SEQ ID NO: 918544 - DNA, 15 bp, Homo sapiens
agaatcactagaacc

SEQ ID NO: 918545 - DNA, 15 bp, Homo sapiens
aagaatcactagaac

SEQ ID NO: 918546 - DNA, 15 bp, Homo sapiens
caagaatcactagaa

SEQ ID NO: 918547 - DNA, 15 bp, Homo sapiens
acaagaatcactaga

SEQ ID NO: 918548 - DNA, 15 bp, Homo sapiens
cacaagaatcactag

SEQ ID NO: 918549 - DNA, 15 bp, Homo sapiens
gcacaagaatcacta

SEQ ID NO: 918550 - DNA, 15 bp, Homo sapiens
agcacaagaatcact

SEQ ID NO: 918551 - DNA, 15 bp, Homo sapiens
aagcacaagaatcac

SEQ ID NO: 918552 - DNA, 15 bp, Homo sapiens
gaagcacaagaatca

SEQ ID NO: 918553 - DNA, 15 bp, Homo sapiens
tgaagcacaagaatc

SEQ ID NO: 918554 - DNA, 15 bp, Homo sapiens
ctgaagcacaagaat

SEQ ID NO: 918555 - DNA, 15 bp, Homo sapiens
gctgaagcacaagaa

SEQ ID NO: 918556 - DNA, 15 bp, Homo sapiens
ggctgaagcacaaga

SEQ ID NO: 918557 - DNA, 15 bp, Homo sapiens
aggctgaagcacaag

SEQ ID NO: 918558 - DNA, 15 bp, Homo sapiens
gaggctgaagcacaa

SEQ ID NO: 918559 - DNA, 15 bp, Homo sapiens
ggaggctgaagcaca

SEQ ID NO: 918560 - DNA, 15 bp, Homo sapiens
aggaggctgaagcac

SEQ ID NO: 918561 - DNA, 15 bp, Homo sapiens
caggaggctgaagca

SEQ ID NO: 918562 - DNA, 15 bp, Homo sapiens
tcaggaggctgaagc

SEQ ID NO: 918563 - DNA, 15 bp, Homo sapiens
ctcaggaggctgaag

SEQ ID NO: 918564 - DNA, 15 bp, Homo sapiens
actcaggaggctgaa

SEQ ID NO: 918565 - DNA, 15 bp, Homo sapiens
actactcaggaggct

SEQ ID NO: 918566 - DNA, 15 bp, Homo sapiens
aactactcaggaggc

SEQ ID NO: 918567 - DNA, 15 bp, Homo sapiens
caactactcaggagg

SEQ ID NO: 918568 - DNA, 15 bp, Homo sapiens
tcaactactcaggag

SEQ ID NO: 918569 - DNA, 15 bp, Homo sapiens
ctcaactactcagga

SEQ ID NO: 918570 - DNA, 15 bp, Homo sapiens
tctcaactactcagg

SEQ ID NO: 918571 - DNA, 15 bp, Homo sapiens
gtctcaactactcag

SEQ ID NO: 918572 - DNA, 15 bp, Homo sapiens
agtctcaactactca

SEQ ID NO: 918573 - DNA, 15 bp, Homo sapiens
tagtctcaactactc

SEQ ID NO: 918574 - DNA, 15 bp, Homo sapiens
gtagtctcaactact

SEQ ID NO: 918575 - DNA, 15 bp, Homo sapiens
tgtagtctcaactac

SEQ ID NO: 918576 - DNA, 15 bp, Homo sapiens
ctgtagtctcaacta

SEQ ID NO: 918577 - DNA, 15 bp, Homo sapiens
cctgtagtctcaact

SEQ ID NO: 918578 - DNA, 15 bp, Homo sapiens
gcctgtagtctcaac

SEQ ID NO: 918579 - DNA, 15 bp, Homo sapiens
cgcctgtagtctcaa

SEQ ID NO: 918580 - DNA, 15 bp, Homo sapiens
acgcctgtagtctca

SEQ ID NO: 918581 - DNA, 15 bp, Homo sapiens
cacgcctgtagtctc

SEQ ID NO: 918582 - DNA, 15 bp, Homo sapiens
tcacgcctgtagtct

SEQ ID NO: 918583 - DNA, 15 bp, Homo sapiens
ctcacgcctgtagtc

SEQ ID NO: 918584 - DNA, 15 bp, Homo sapiens
gctcacgcctgtagt

SEQ ID NO: 918585 - DNA, 15 bp, Homo sapiens
ggctcacgcctgtag

SEQ ID NO: 918586 - DNA, 15 bp, Homo sapiens
tggctcacgcctgta

SEQ ID NO: 918587 - DNA, 15 bp, Homo sapiens
gtggctcacgcctgt

SEQ ID NO: 918588 - DNA, 15 bp, Homo sapiens
ggtggctcacgcctg

SEQ ID NO: 918589 - DNA, 15 bp, Homo sapiens
tggtggctcacgcct

SEQ ID NO: 918590 - DNA, 15 bp, Homo sapiens
gtggtggctcacgcc

SEQ ID NO: 918591 - DNA, 15 bp, Homo sapiens
cgtggtggctcacgc

SEQ ID NO: 918592 - DNA, 15 bp, Homo sapiens
gcgtggtggctcacg

SEQ ID NO: 918593 - DNA, 15 bp, Homo sapiens
ggcgtggtggctcac

SEQ ID NO: 918594 - DNA, 15 bp, Homo sapiens
aggcgtggtggctca

SEQ ID NO: 918595 - DNA, 15 bp, Homo sapiens
caggcgtggtggctc

SEQ ID NO: 918596 - DNA, 15 bp, Homo sapiens
tcaggcgtggtggct

SEQ ID NO: 918597 - DNA, 15 bp, Homo sapiens
gtcaggcgtggtggc

SEQ ID NO: 918598 - DNA, 15 bp, Homo sapiens
agtcaggcgtggtgg

SEQ ID NO: 918599 - DNA, 15 bp, Homo sapiens
aagtcaggcgtggtg

SEQ ID NO: 918600 - DNA, 15 bp, Homo sapiens
taagtcaggcgtggt

SEQ ID NO: 918601 - DNA, 15 bp, Homo sapiens
ataagtcaggcgtgg

SEQ ID NO: 918602 - DNA, 15 bp, Homo sapiens
aataagtcaggcgtg

SEQ ID NO: 918603 - DNA, 15 bp, Homo sapiens
aaataagtcaggcgt

SEQ ID NO: 918604 - DNA, 15 bp, Homo sapiens
aaaataagtcaggcg

SEQ ID NO: 918605 - DNA, 15 bp, Homo sapiens
aaaaataagtcaggc

SEQ ID NO: 918606 - DNA, 15 bp, Homo sapiens
caaaaataagtcagg

SEQ ID NO: 918607 - DNA, 15 bp, Homo sapiens
acaaaaataagtcag

SEQ ID NO: 918608 - DNA, 15 bp, Homo sapiens
tacaaaaataagtca

SEQ ID NO: 918609 - DNA, 15 bp, Homo sapiens
atacaaaaataagtc

SEQ ID NO: 918610 - DNA, 15 bp, Homo sapiens
aatacaaaaataagt

SEQ ID NO: 918611 - DNA, 15 bp, Homo sapiens
aaatacaaaaataag

SEQ ID NO: 918612 - DNA, 15 bp, Homo sapiens
aaaatacaaaaataa

SEQ ID NO: 918613 - DNA, 15 bp, Homo sapiens
aaaaatacaaaaata

SEQ ID NO: 918614 - DNA, 15 bp, Homo sapiens
taaaaatacaaaaat

SEQ ID NO: 918615 - DNA, 15 bp, Homo sapiens
ctaaaaatacaaaaa

SEQ ID NO: 918616 - DNA, 15 bp, Homo sapiens
actaaaaatacaaaa

SEQ ID NO: 918617 - DNA, 15 bp, Homo sapiens
tactaaaaatacaaa

SEQ ID NO: 918618 - DNA, 15 bp, Homo sapiens
ctactaaaaatacaa

SEQ ID NO: 918619 - DNA, 15 bp, Homo sapiens
tctactaaaaataca

SEQ ID NO: 918620 - DNA, 15 bp, Homo sapiens
ttctactaaaaatac

SEQ ID NO: 918621 - DNA, 15 bp, Homo sapiens
tttctactaaaaata

SEQ ID NO: 918622 - DNA, 15 bp, Homo sapiens
gtttctactaaaaat

SEQ ID NO: 918623 - DNA, 15 bp, Homo sapiens
tgtttctactaaaaa

SEQ ID NO: 918624 - DNA, 15 bp, Homo sapiens
ctgtttctactaaaa

SEQ ID NO: 918625 - DNA, 15 bp, Homo sapiens
cctgtttctactaaa

SEQ ID NO: 918626 - DNA, 15 bp, Homo sapiens
ccctgtttctactaa

SEQ ID NO: 918627 - DNA, 15 bp, Homo sapiens
accctgtttctacta

SEQ ID NO: 918628 - DNA, 15 bp, Homo sapiens
aaccctgtttctact

SEQ ID NO: 918629 - DNA, 15 bp, Homo sapiens
aaaccctgtttctac

SEQ ID NO: 918630 - DNA, 15 bp, Homo sapiens
gaaaccctgtttcta

SEQ ID NO: 918631 - DNA, 15 bp, Homo sapiens
tgaaaccctgtttct

SEQ ID NO: 918632 - DNA, 15 bp, Homo sapiens
gtgaaaccctgtttc

SEQ ID NO: 918633 - DNA, 15 bp, Homo sapiens
ggtgaaaccctgttt

SEQ ID NO: 918634 - DNA, 15 bp, Homo sapiens
tggtgaaaccctgtt

SEQ ID NO: 918635 - DNA, 15 bp, Homo sapiens
atggtgaaaccctgt

SEQ ID NO: 918636 - DNA, 15 bp, Homo sapiens
catggtgaaaccctg

SEQ ID NO: 918637 - DNA, 15 bp, Homo sapiens
acatggtgaaaccct

SEQ ID NO: 918638 - DNA, 15 bp, Homo sapiens
aacatggtgaaaccc

SEQ ID NO: 918639 - DNA, 15 bp, Homo sapiens
caacatggtgaaacc

SEQ ID NO: 918640 - DNA, 15 bp, Homo sapiens
ccaacatggtgaaac

SEQ ID NO: 918641 - DNA, 15 bp, Homo sapiens
ggccaacatggtgaa

SEQ ID NO: 918642 - DNA, 15 bp, Homo sapiens
gggccaacatggtga

SEQ ID NO: 918643 - DNA, 15 bp, Homo sapiens
tgggccaacatggtg

SEQ ID NO: 918644 - DNA, 15 bp, Homo sapiens
ctgggccaacatggt

SEQ ID NO: 918645 - DNA, 15 bp, Homo sapiens
cctgggccaacatgg

SEQ ID NO: 918646 - DNA, 15 bp, Homo sapiens
gcctgggccaacatg

SEQ ID NO: 918647 - DNA, 15 bp, Homo sapiens
agcctgggccaacat

SEQ ID NO: 918648 - DNA, 15 bp, Homo sapiens
cagcctgggccaaca

SEQ ID NO: 918649 - DNA, 15 bp, Homo sapiens
ccagcctgggccaac

SEQ ID NO: 918650 - DNA, 15 bp, Homo sapiens
accagcctgggccaa

SEQ ID NO: 918651 - DNA, 15 bp, Homo sapiens
gaccagcctgggcca

SEQ ID NO: 918652 - DNA, 15 bp, Homo sapiens
agaccagcctgggcc

SEQ ID NO: 918653 - DNA, 15 bp, Homo sapiens
aagaccagcctgggc

SEQ ID NO: 918654 - DNA, 15 bp, Homo sapiens
caagaccagcctggg

SEQ ID NO: 918655 - DNA, 15 bp, Homo sapiens
agttcaagaccagcc

SEQ ID NO: 918656 - DNA, 15 bp, Homo sapiens
gagttcaagaccagc

SEQ ID NO: 918657 - DNA, 15 bp, Homo sapiens
ggagttcaagaccag

SEQ ID NO: 918658 - DNA, 15 bp, Homo sapiens
aggagttcaagacca

SEQ ID NO: 918659 - DNA, 15 bp, Homo sapiens
caggagttcaagacc

SEQ ID NO: 918660 - DNA, 15 bp, Homo sapiens
tcaggagttcaagac

SEQ ID NO: 918661 - DNA, 15 bp, Homo sapiens
gtcaggagttcaaga

SEQ ID NO: 918662 - DNA, 15 bp, Homo sapiens
ggtcaggagttcaag

SEQ ID NO: 918663 - DNA, 15 bp, Homo sapiens
aggtcaggagttcaa

SEQ ID NO: 918664 - DNA, 15 bp, Homo sapiens
gaggtcaggagttca

SEQ ID NO: 918665 - DNA, 15 bp, Homo sapiens
tgaggtcaggagttc

SEQ ID NO: 918666 - DNA, 15 bp, Homo sapiens
ttgaggtcaggagtt

SEQ ID NO: 918667 - DNA, 15 bp, Homo sapiens
cttgaggtcaggagt

SEQ ID NO: 918668 - DNA, 15 bp, Homo sapiens
acttgaggtcaggag

SEQ ID NO: 918669 - DNA, 15 bp, Homo sapiens
cacttgaggtcagga

SEQ ID NO: 918670 - DNA, 15 bp, Homo sapiens
tcacttgaggtcagg

SEQ ID NO: 918671 - DNA, 15 bp, Homo sapiens
atcacttgaggtcag

SEQ ID NO: 918672 - DNA, 15 bp, Homo sapiens
gatcacttgaggtca

SEQ ID NO: 918673 - DNA, 15 bp, Homo sapiens
ggatcacttgaggtc

SEQ ID NO: 918674 - DNA, 15 bp, Homo sapiens
tggatcacttgaggt

SEQ ID NO: 918675 - DNA, 15 bp, Homo sapiens
atggatcacttgagg

SEQ ID NO: 918676 - DNA, 15 bp, Homo sapiens
gatggatcacttgag

SEQ ID NO: 918677 - DNA, 15 bp, Homo sapiens
ggatggatcacttga

SEQ ID NO: 918678 - DNA, 15 bp, Homo sapiens
tggatggatcacttg

SEQ ID NO: 918679 - DNA, 15 bp, Homo sapiens
gtggatggatcactt

SEQ ID NO: 918680 - DNA, 15 bp, Homo sapiens
agtggatggatcact

SEQ ID NO: 918681 - DNA, 15 bp, Homo sapiens
aagtggatggatcac

SEQ ID NO: 918682 - DNA, 15 bp, Homo sapiens
aaagtggatggatca

SEQ ID NO: 918683 - DNA, 15 bp, Homo sapiens
caaagtggatggatc

SEQ ID NO: 918684 - DNA, 15 bp, Homo sapiens
ccaaagtggatggat

SEQ ID NO: 918685 - DNA, 15 bp, Homo sapiens
gccaaagtggatgga

SEQ ID NO: 918686 - DNA, 15 bp, Homo sapiens
agccaaagtggatgg

SEQ ID NO: 918687 - DNA, 15 bp, Homo sapiens
gagccaaagtggatg

SEQ ID NO: 918688 - DNA, 15 bp, Homo sapiens
ggagccaaagtggat

SEQ ID NO: 918689 - DNA, 15 bp, Homo sapiens
gggagccaaagtgga

SEQ ID NO: 918690 - DNA, 15 bp, Homo sapiens
ggggagccaaagtgg

SEQ ID NO: 918691 - DNA, 15 bp, Homo sapiens
tggggagccaaagtg

SEQ ID NO: 918692 - DNA, 15 bp, Homo sapiens
ttggggagccaaagt

SEQ ID NO: 918693 - DNA, 15 bp, Homo sapiens
tttggggagccaaag

SEQ ID NO: 918694 - DNA, 15 bp, Homo sapiens
ctttggggagccaaa

SEQ ID NO: 918695 - DNA, 15 bp, Homo sapiens
actttggggagccaa

SEQ ID NO: 918696 - DNA, 15 bp, Homo sapiens
cactttggggagcca

SEQ ID NO: 918697 - DNA, 15 bp, Homo sapiens
gcactttggggagcc

SEQ ID NO: 918698 - DNA, 15 bp, Homo sapiens
agcactttggggagc

SEQ ID NO: 918699 - DNA, 15 bp, Homo sapiens
cagcactttggggag

SEQ ID NO: 918700 - DNA, 15 bp, Homo sapiens
ccagcactttgggga

SEQ ID NO: 918701 - DNA, 15 bp, Homo sapiens
tccagcactttgggg

SEQ ID NO: 918702 - DNA, 15 bp, Homo sapiens
ataattccagcactt

SEQ ID NO: 918703 - DNA, 15 bp, Homo sapiens
tataattccagcact

SEQ ID NO: 918704 - DNA, 15 bp, Homo sapiens
ctataattccagcac

SEQ ID NO: 918705 - DNA, 15 bp, Homo sapiens
cctataattccagca

SEQ ID NO: 918706 - DNA, 15 bp, Homo sapiens
gcctataattccagc

SEQ ID NO: 918707 - DNA, 15 bp, Homo sapiens
cgcctataattccag

SEQ ID NO: 918708 - DNA, 15 bp, Homo sapiens
acgcctataattcca

SEQ ID NO: 918709 - DNA, 15 bp, Homo sapiens
cacgcctataattcc

SEQ ID NO: 918710 - DNA, 15 bp, Homo sapiens
tcacgcctataattc

SEQ ID NO: 918711 - DNA, 15 bp, Homo sapiens
ctcacgcctataatt

SEQ ID NO: 918712 - DNA, 15 bp, Homo sapiens
gctcacgcctataat

SEQ ID NO: 918713 - DNA, 15 bp, Homo sapiens
ggctcacgcctataa

SEQ ID NO: 918714 - DNA, 15 bp, Homo sapiens
tggctcacgcctata

SEQ ID NO: 918715 - DNA, 15 bp, Homo sapiens
gtggctcacgcctat

SEQ ID NO: 918716 - DNA, 15 bp, Homo sapiens
ggtggctcacgccta

SEQ ID NO: 918717 - DNA, 15 bp, Homo sapiens
atggtggctcacgcc

SEQ ID NO: 918718 - DNA, 15 bp, Homo sapiens
catggtggctcacgc

SEQ ID NO: 918719 - DNA, 15 bp, Homo sapiens
gcatggtggctcacg

SEQ ID NO: 918720 - DNA, 15 bp, Homo sapiens
ggcatggtggctcac

SEQ ID NO: 918721 - DNA, 15 bp, Homo sapiens
aggcatggtggctca

SEQ ID NO: 918722 - DNA, 15 bp, Homo sapiens
caggcatggtggctc

SEQ ID NO: 918723 - DNA, 15 bp, Homo sapiens
ccaggcatggtggct

SEQ ID NO: 918724 - DNA, 15 bp, Homo sapiens
gccaggcatggtggc

SEQ ID NO: 918725 - DNA, 15 bp, Homo sapiens
ggccaggcatggtgg

SEQ ID NO: 918726 - DNA, 15 bp, Homo sapiens
aggccaggcatggtg

SEQ ID NO: 918727 - DNA, 15 bp, Homo sapiens
aaggccaggcatggt

SEQ ID NO: 918728 - DNA, 15 bp, Homo sapiens
taaggccaggcatgg

SEQ ID NO: 918729 - DNA, 15 bp, Homo sapiens
ttaaggccaggcatg

SEQ ID NO: 918730 - DNA, 15 bp, Homo sapiens
tttaaggccaggcat

SEQ ID NO: 918731 - DNA, 15 bp, Homo sapiens
atttaaggccaggca

SEQ ID NO: 918732 - DNA, 15 bp, Homo sapiens
aatttaaggccaggc

SEQ ID NO: 918733 - DNA, 15 bp, Homo sapiens
taatttaaggccagg

SEQ ID NO: 918734 - DNA, 15 bp, Homo sapiens
ataatttaaggccag

SEQ ID NO: 918735 - DNA, 15 bp, Homo sapiens
aataatttaaggcca

SEQ ID NO: 918736 - DNA, 15 bp, Homo sapiens
gaataatttaaggcc

SEQ ID NO: 918737 - DNA, 15 bp, Homo sapiens
agaataatttaaggc

SEQ ID NO: 918738 - DNA, 15 bp, Homo sapiens
aagaataatttaagg

SEQ ID NO: 918739 - DNA, 15 bp, Homo sapiens
aaagaataatttaag

SEQ ID NO: 918740 - DNA, 15 bp, Homo sapiens
aaaagaataatttaa

SEQ ID NO: 918741 - DNA, 15 bp, Homo sapiens
gaaaagaataattta

SEQ ID NO: 918742 - DNA, 15 bp, Homo sapiens
agaaaagaataattt

SEQ ID NO: 918743 - DNA, 15 bp, Homo sapiens
tagaaaagaataatt

SEQ ID NO: 918744 - DNA, 15 bp, Homo sapiens
ttagaaaagaataat

SEQ ID NO: 918745 - DNA, 15 bp, Homo sapiens
cttagaaaagaataa

SEQ ID NO: 918746 - DNA, 15 bp, Homo sapiens
acttagaaaagaata

SEQ ID NO: 918747 - DNA, 15 bp, Homo sapiens
cacttagaaaagaat

SEQ ID NO: 918748 - DNA, 15 bp, Homo sapiens
tcacttagaaaagaa

SEQ ID NO: 918749 - DNA, 15 bp, Homo sapiens
ttcacttagaaaaga

SEQ ID NO: 918750 - DNA, 15 bp, Homo sapiens
tttcacttagaaaag

SEQ ID NO: 918751 - DNA, 15 bp, Homo sapiens
ctttcacttagaaaa

SEQ ID NO: 918752 - DNA, 15 bp, Homo sapiens
actttcacttagaaa

SEQ ID NO: 918753 - DNA, 15 bp, Homo sapiens
tactttcacttagaa

SEQ ID NO: 918754 - DNA, 15 bp, Homo sapiens
ttactttcacttaga

SEQ ID NO: 918755 - DNA, 15 bp, Homo sapiens
attactttcacttag

SEQ ID NO: 918756 - DNA, 15 bp, Homo sapiens
cattactttcactta

SEQ ID NO: 918757 - DNA, 15 bp, Homo sapiens
acattactttcactt

SEQ ID NO: 918758 - DNA, 15 bp, Homo sapiens
aacattactttcact

SEQ ID NO: 918759 - DNA, 15 bp, Homo sapiens
aaacattactttcac

SEQ ID NO: 918760 - DNA, 15 bp, Homo sapiens
aaaacattactttca

SEQ ID NO: 918761 - DNA, 15 bp, Homo sapiens
taaaacattactttc

SEQ ID NO: 918762 - DNA, 15 bp, Homo sapiens
ataaaacattacttt

SEQ ID NO: 918763 - DNA, 15 bp, Homo sapiens
aataaaacattactt

SEQ ID NO: 918764 - DNA, 15 bp, Homo sapiens
caataaaacattact

SEQ ID NO: 918765 - DNA, 15 bp, Homo sapiens
tcaataaaacattac

SEQ ID NO: 918766 - DNA, 15 bp, Homo sapiens
ttcaataaaacatta

SEQ ID NO: 918767 - DNA, 15 bp, Homo sapiens
attcaataaaacatt

SEQ ID NO: 918768 - DNA, 15 bp, Homo sapiens
tattcaataaaacat

SEQ ID NO: 918769 - DNA, 15 bp, Homo sapiens
atattcaataaaaca

SEQ ID NO: 918770 - DNA, 15 bp, Homo sapiens
tatattcaataaaac

SEQ ID NO: 918771 - DNA, 15 bp, Homo sapiens
ttatattcaataaaa

SEQ ID NO: 918772 - DNA, 15 bp, Homo sapiens
tttatattcaataaa

SEQ ID NO: 918773 - DNA, 15 bp, Homo sapiens
atttatattcaataa

SEQ ID NO: 918774 - DNA, 15 bp, Homo sapiens
aatttatattcaata

SEQ ID NO: 918775 - DNA, 15 bp, Homo sapiens
taatttatattcaat

SEQ ID NO: 918776 - DNA, 15 bp, Homo sapiens
ttaatttatattcaa

SEQ ID NO: 918777 - DNA, 15 bp, Homo sapiens
gttaatttatattca

SEQ ID NO: 918778 - DNA, 15 bp, Homo sapiens
tgttaatttatattc

SEQ ID NO: 918779 - DNA, 15 bp, Homo sapiens
atgttaatttatatt

SEQ ID NO: 918780 - DNA, 15 bp, Homo sapiens
gatgttaatttatat

SEQ ID NO: 918781 - DNA, 15 bp, Homo sapiens
agatgttaatttata

SEQ ID NO: 918782 - DNA, 15 bp, Homo sapiens
aagatgttaatttat

SEQ ID NO: 918783 - DNA, 15 bp, Homo sapiens
aaagatgttaattta

SEQ ID NO: 918784 - DNA, 15 bp, Homo sapiens
gaaagatgttaattt

SEQ ID NO: 918785 - DNA, 15 bp, Homo sapiens
agaaagatgttaatt

SEQ ID NO: 918786 - DNA, 15 bp, Homo sapiens
aagaaagatgttaat

SEQ ID NO: 918787 - DNA, 15 bp, Homo sapiens
caagaaagatgttaa

SEQ ID NO: 918788 - DNA, 15 bp, Homo sapiens
ccaagaaagatgtta

SEQ ID NO: 918789 - DNA, 15 bp, Homo sapiens
cccaagaaagatgtt

SEQ ID NO: 918790 - DNA, 15 bp, Homo sapiens
acccaagaaagatgt

SEQ ID NO: 918791 - DNA, 15 bp, Homo sapiens
aacccaagaaagatg

SEQ ID NO: 918792 - DNA, 15 bp, Homo sapiens
aaacccaagaaagat

SEQ ID NO: 918793 - DNA, 15 bp, Homo sapiens
taaacccaagaaaga

SEQ ID NO: 918794 - DNA, 15 bp, Homo sapiens
ataaacccaagaaag

SEQ ID NO: 918795 - DNA, 15 bp, Homo sapiens
aataaacccaagaaa

SEQ ID NO: 918796 - DNA, 15 bp, Homo sapiens
aaataaacccaagaa

SEQ ID NO: 918797 - DNA, 15 bp, Homo sapiens
aaaataaacccaaga

SEQ ID NO: 918798 - DNA, 15 bp, Homo sapiens
taaaataaacccaag

SEQ ID NO: 918799 - DNA, 15 bp, Homo sapiens
gtaaaataaacccaa

SEQ ID NO: 918800 - DNA, 15 bp, Homo sapiens
agtaaaataaaccca

SEQ ID NO: 918801 - DNA, 15 bp, Homo sapiens
aagtaaaataaaccc

SEQ ID NO: 918802 - DNA, 15 bp, Homo sapiens
caagtaaaataaacc

SEQ ID NO: 918803 - DNA, 15 bp, Homo sapiens
tcaagtaaaataaac

SEQ ID NO: 918804 - DNA, 15 bp, Homo sapiens
ctcaagtaaaataaa

SEQ ID NO: 918805 - DNA, 15 bp, Homo sapiens
gctcaagtaaaataa

SEQ ID NO: 918806 - DNA, 15 bp, Homo sapiens
agctcaagtaaaata

SEQ ID NO: 918807 - DNA, 15 bp, Homo sapiens
tagctcaagtaaaat

SEQ ID NO: 918808 - DNA, 15 bp, Homo sapiens
ttagctcaagtaaaa

SEQ ID NO: 918809 - DNA, 15 bp, Homo sapiens
tttagctcaagtaaa

SEQ ID NO: 918810 - DNA, 15 bp, Homo sapiens
ctttagctcaagtaa

SEQ ID NO: 918811 - DNA, 15 bp, Homo sapiens
tctttagctcaagta

SEQ ID NO: 918812 - DNA, 15 bp, Homo sapiens
ctctttagctcaagt

SEQ ID NO: 918813 - DNA, 15 bp, Homo sapiens
tctctttagctcaag

SEQ ID NO: 918814 - DNA, 15 bp, Homo sapiens
ttctctttagctcaa

SEQ ID NO: 918815 - DNA, 15 bp, Homo sapiens
gttctctttagctca

SEQ ID NO: 918816 - DNA, 15 bp, Homo sapiens
tgttctctttagctc

SEQ ID NO: 918817 - DNA, 15 bp, Homo sapiens
ctgttctctttagct

SEQ ID NO: 918818 - DNA, 15 bp, Homo sapiens
actgttctctttagc

SEQ ID NO: 918819 - DNA, 15 bp, Homo sapiens
aactgttctctttag

SEQ ID NO: 918820 - DNA, 15 bp, Homo sapiens
caactgttctcttta

SEQ ID NO: 918821 - DNA, 15 bp, Homo sapiens
ccaactgttctcttt

SEQ ID NO: 918822 - DNA, 15 bp, Homo sapiens
accaactgttctctt

SEQ ID NO: 918823 - DNA, 15 bp, Homo sapiens
aaccaactgttctct

SEQ ID NO: 918824 - DNA, 15 bp, Homo sapiens
taaccaactgttctc

SEQ ID NO: 918825 - DNA, 15 bp, Homo sapiens
ttaaccaactgttct

SEQ ID NO: 918826 - DNA, 15 bp, Homo sapiens
cttaaccaactgttc

SEQ ID NO: 918827 - DNA, 15 bp, Homo sapiens
acttaaccaactgtt

SEQ ID NO: 918828 - DNA, 15 bp, Homo sapiens
aacttaaccaactgt

SEQ ID NO: 918829 - DNA, 15 bp, Homo sapiens
aaacttaaccaactg

SEQ ID NO: 918830 - DNA, 15 bp, Homo sapiens
aaaacttaaccaact

SEQ ID NO: 918831 - DNA, 15 bp, Homo sapiens
taaaacttaaccaac

SEQ ID NO: 918832 - DNA, 15 bp, Homo sapiens
ataaaacttaaccaa

SEQ ID NO: 918833 - DNA, 15 bp, Homo sapiens
tataaaacttaacca

SEQ ID NO: 918834 - DNA, 15 bp, Homo sapiens
ttataaaacttaacc

SEQ ID NO: 918835 - DNA, 15 bp, Homo sapiens
attataaaacttaac

SEQ ID NO: 918836 - DNA, 15 bp, Homo sapiens
tattataaaacttaa

SEQ ID NO: 918837 - DNA, 15 bp, Homo sapiens
ctattataaaactta

SEQ ID NO: 918838 - DNA, 15 bp, Homo sapiens
gctattataaaactt

SEQ ID NO: 918839 - DNA, 15 bp, Homo sapiens
ggctattataaaact

SEQ ID NO: 918840 - DNA, 15 bp, Homo sapiens
tggctattataaaac

SEQ ID NO: 918841 - DNA, 15 bp, Homo sapiens
atggctattataaaa

SEQ ID NO: 918842 - DNA, 15 bp, Homo sapiens
aatggctattataaa

SEQ ID NO: 918843 - DNA, 15 bp, Homo sapiens
caatggctattataa

SEQ ID NO: 918844 - DNA, 15 bp, Homo sapiens
gcaatggctattata

SEQ ID NO: 918845 - DNA, 15 bp, Homo sapiens
tgcaatggctattat

SEQ ID NO: 918846 - DNA, 15 bp, Homo sapiens
ctgcaatggctatta

SEQ ID NO: 918847 - DNA, 15 bp, Homo sapiens
actgcaatggctatt

SEQ ID NO: 918848 - DNA, 15 bp, Homo sapiens
cactgcaatggctat

SEQ ID NO: 918849 - DNA, 15 bp, Homo sapiens
gcactgcaatggcta

SEQ ID NO: 918850 - DNA, 15 bp, Homo sapiens
agcactgcaatggct

SEQ ID NO: 918851 - DNA, 15 bp, Homo sapiens
aagcactgcaatggc

SEQ ID NO: 918852 - DNA, 15 bp, Homo sapiens
aaagcactgcaatgg

SEQ ID NO: 918853 - DNA, 15 bp, Homo sapiens
aaaagcactgcaatg

SEQ ID NO: 918854 - DNA, 15 bp, Homo sapiens
aaaaagcactgcaat

SEQ ID NO: 918855 - DNA, 15 bp, Homo sapiens
aaaaaagcactgcaa

SEQ ID NO: 918856 - DNA, 15 bp, Homo sapiens
caaaaaagcactgca

SEQ ID NO: 918857 - DNA, 15 bp, Homo sapiens
acaaaaaagcactgc

SEQ ID NO: 918858 - DNA, 15 bp, Homo sapiens
tacaaaaaagcactg

SEQ ID NO: 918859 - DNA, 15 bp, Homo sapiens
ttacaaaaaagcact

SEQ ID NO: 918860 - DNA, 15 bp, Homo sapiens
cttacaaaaaagcac

SEQ ID NO: 918861 - DNA, 15 bp, Homo sapiens
tcttacaaaaaagca

SEQ ID NO: 918862 - DNA, 15 bp, Homo sapiens
ttcttacaaaaaagc

SEQ ID NO: 918863 - DNA, 15 bp, Homo sapiens
cttcttacaaaaaag

SEQ ID NO: 918864 - DNA, 15 bp, Homo sapiens
tcttcttacaaaaaa

SEQ ID NO: 918865 - DNA, 15 bp, Homo sapiens
gtcttcttacaaaaa

SEQ ID NO: 918866 - DNA, 15 bp, Homo sapiens
ggtcttcttacaaaa

SEQ ID NO: 918867 - DNA, 15 bp, Homo sapiens
tggtcttcttacaaa

SEQ ID NO: 918868 - DNA, 15 bp, Homo sapiens
gtggtcttcttacaa

SEQ ID NO: 918869 - DNA, 15 bp, Homo sapiens
tgtggtcttcttaca

SEQ ID NO: 918870 - DNA, 15 bp, Homo sapiens
gtgtggtcttcttac

SEQ ID NO: 918871 - DNA, 15 bp, Homo sapiens
tgtgtggtcttctta

SEQ ID NO: 918872 - DNA, 15 bp, Homo sapiens
ctgtgtggtcttctt

SEQ ID NO: 918873 - DNA, 15 bp, Homo sapiens
tctgtgtggtcttct

SEQ ID NO: 918874 - DNA, 15 bp, Homo sapiens
ttctgtgtggtcttc

SEQ ID NO: 918875 - DNA, 15 bp, Homo sapiens
cttctgtgtggtctt

SEQ ID NO: 918876 - DNA, 15 bp, Homo sapiens
ccttctgtgtggtct

SEQ ID NO: 918877 - DNA, 15 bp, Homo sapiens
tccttctgtgtggtc

SEQ ID NO: 918878 - DNA, 15 bp, Homo sapiens
gtccttctgtgtggt

SEQ ID NO: 918879 - DNA, 15 bp, Homo sapiens
agtccttctgtgtgg

SEQ ID NO: 918880 - DNA, 15 bp, Homo sapiens
cagtccttctgtgtg

SEQ ID NO: 918881 - DNA, 15 bp, Homo sapiens
acagtccttctgtgt

SEQ ID NO: 918882 - DNA, 15 bp, Homo sapiens
gacagtccttctgtg

SEQ ID NO: 918883 - DNA, 15 bp, Homo sapiens
agacagtccttctgt

SEQ ID NO: 918884 - DNA, 15 bp, Homo sapiens
aagacagtccttctg

SEQ ID NO: 918885 - DNA, 15 bp, Homo sapiens
aaagacagtccttct

SEQ ID NO: 918886 - DNA, 15 bp, Homo sapiens
aaaagacagtccttc

SEQ ID NO: 918887 - DNA, 15 bp, Homo sapiens
aaaaagacagtcctt

SEQ ID NO: 918888 - DNA, 15 bp, Homo sapiens
gaaaaagacagtcct

SEQ ID NO: 918889 - DNA, 15 bp, Homo sapiens
tgaaaaagacagtcc

SEQ ID NO: 918890 - DNA, 15 bp, Homo sapiens
gtgaaaaagacagtc

SEQ ID NO: 918891 - DNA, 15 bp, Homo sapiens
agtgaaaaagacagt

SEQ ID NO: 918892 - DNA, 15 bp, Homo sapiens
aagtgaaaaagacag

SEQ ID NO: 918893 - DNA, 15 bp, Homo sapiens
caagtgaaaaagaca

SEQ ID NO: 918894 - DNA, 15 bp, Homo sapiens
gcaagtgaaaaagac

SEQ ID NO: 918895 - DNA, 15 bp, Homo sapiens
ggcaagtgaaaaaga

SEQ ID NO: 918896 - DNA, 15 bp, Homo sapiens
gggcaagtgaaaaag

SEQ ID NO: 918897 - DNA, 15 bp, Homo sapiens
ggggcaagtgaaaaa

SEQ ID NO: 918898 - DNA, 15 bp, Homo sapiens
tggggcaagtgaaaa

SEQ ID NO: 918899 - DNA, 15 bp, Homo sapiens
ttggggcaagtgaaa

SEQ ID NO: 918900 - DNA, 15 bp, Homo sapiens
tttggggcaagtgaa

SEQ ID NO: 918901 - DNA, 15 bp, Homo sapiens
atttggggcaagtga

SEQ ID NO: 918902 - DNA, 15 bp, Homo sapiens
gatttggggcaagtg

SEQ ID NO: 918903 - DNA, 15 bp, Homo sapiens
ggatttggggcaagt

SEQ ID NO: 918904 - DNA, 15 bp, Homo sapiens
gggatttggggcaag

SEQ ID NO: 918905 - DNA, 15 bp, Homo sapiens
ggggatttggggcaa

SEQ ID NO: 918906 - DNA, 15 bp, Homo sapiens
tggggatttggggca

SEQ ID NO: 918907 - DNA, 15 bp, Homo sapiens
ttggggatttggggc

SEQ ID NO: 918908 - DNA, 15 bp, Homo sapiens
cttggggatttgggg

SEQ ID NO: 918909 - DNA, 15 bp, Homo sapiens
gcttggggatttggg

SEQ ID NO: 918910 - DNA, 15 bp, Homo sapiens
tgcttggggatttgg

SEQ ID NO: 918911 - DNA, 15 bp, Homo sapiens
gtgcttggggatttg

SEQ ID NO: 918912 - DNA, 15 bp, Homo sapiens
cgtgcttggggattt

SEQ ID NO: 918913 - DNA, 15 bp, Homo sapiens
acgtgcttggggatt

SEQ ID NO: 918914 - DNA, 15 bp, Homo sapiens
tacgtgcttggggat

SEQ ID NO: 918915 - DNA, 15 bp, Homo sapiens
atacgtgcttgggga

SEQ ID NO: 918916 - DNA, 15 bp, Homo sapiens
tatacgtgcttgggg

SEQ ID NO: 918917 - DNA, 15 bp, Homo sapiens
atatacgtgcttggg

SEQ ID NO: 918918 - DNA, 15 bp, Homo sapiens
catatacgtgcttgg

SEQ ID NO: 918919 - DNA, 15 bp, Homo sapiens
tcatatacgtgcttg

SEQ ID NO: 918920 - DNA, 15 bp, Homo sapiens
ctcatatacgtgctt

SEQ ID NO: 918921 - DNA, 15 bp, Homo sapiens
actcatatacgtgct

SEQ ID NO: 918922 - DNA, 15 bp, Homo sapiens
tactcatatacgtgc

SEQ ID NO: 918923 - DNA, 15 bp, Homo sapiens
ttactcatatacgtg

SEQ ID NO: 918924 - DNA, 15 bp, Homo sapiens
attactcatatacgt

SEQ ID NO: 918925 - DNA, 15 bp, Homo sapiens
tattactcatatacg

SEQ ID NO: 918926 - DNA, 15 bp, Homo sapiens
ctattactcatatac

SEQ ID NO: 918927 - DNA, 15 bp, Homo sapiens
gctattactcatata

SEQ ID NO: 918928 - DNA, 15 bp, Homo sapiens
tgctattactcatat

SEQ ID NO: 918929 - DNA, 15 bp, Homo sapiens
ctgctattactcata

SEQ ID NO: 918930 - DNA, 15 bp, Homo sapiens
tctgctattactcat

SEQ ID NO: 918931 - DNA, 15 bp, Homo sapiens
ctctgctattactca

SEQ ID NO: 918932 - DNA, 15 bp, Homo sapiens
actctgctattactc

SEQ ID NO: 918933 - DNA, 15 bp, Homo sapiens
cactctgctattact

SEQ ID NO: 918934 - DNA, 15 bp, Homo sapiens
ccactctgctattac

SEQ ID NO: 918935 - DNA, 15 bp, Homo sapiens
accactctgctatta

SEQ ID NO: 918936 - DNA, 15 bp, Homo sapiens
aaccactctgctatt

SEQ ID NO: 918937 - DNA, 15 bp, Homo sapiens
gaaccactctgctat

SEQ ID NO: 918938 - DNA, 15 bp, Homo sapiens
agaaccactctgcta

SEQ ID NO: 918939 - DNA, 15 bp, Homo sapiens
aagaaccactctgct

SEQ ID NO: 918940 - DNA, 15 bp, Homo sapiens
aaagaaccactctgc

SEQ ID NO: 918941 - DNA, 15 bp, Homo sapiens
aaaagaaccactctg

SEQ ID NO: 918942 - DNA, 15 bp, Homo sapiens
aaaaagaaccactct

SEQ ID NO: 918943 - DNA, 15 bp, Homo sapiens
taaaaagaaccactc

SEQ ID NO: 918944 - DNA, 15 bp, Homo sapiens
ctaaaaagaaccact

SEQ ID NO: 918945 - DNA, 15 bp, Homo sapiens
gctaaaaagaaccac

SEQ ID NO: 918946 - DNA, 15 bp, Homo sapiens
tgctaaaaagaacca

SEQ ID NO: 918947 - DNA, 15 bp, Homo sapiens
atgctaaaaagaacc

SEQ ID NO: 918948 - DNA, 15 bp, Homo sapiens
aatgctaaaaagaac

SEQ ID NO: 918949 - DNA, 15 bp, Homo sapiens
taatgctaaaaagaa

SEQ ID NO: 918950 - DNA, 15 bp, Homo sapiens
ataatgctaaaaaga

SEQ ID NO: 918951 - DNA, 15 bp, Homo sapiens
cataatgctaaaaag

SEQ ID NO: 918952 - DNA, 15 bp, Homo sapiens
tcataatgctaaaaa

SEQ ID NO: 918953 - DNA, 15 bp, Homo sapiens
atcataatgctaaaa

SEQ ID NO: 918954 - DNA, 15 bp, Homo sapiens
aatcataatgctaaa

SEQ ID NO: 918955 - DNA, 15 bp, Homo sapiens
aaatcataatgctaa

SEQ ID NO: 918956 - DNA, 15 bp, Homo sapiens
gaaatcataatgcta

SEQ ID NO: 918957 - DNA, 15 bp, Homo sapiens
agaaatcataatgct

SEQ ID NO: 918958 - DNA, 15 bp, Homo sapiens
tagaaatcataatgc

SEQ ID NO: 918959 - DNA, 15 bp, Homo sapiens
atagaaatcataatg

SEQ ID NO: 918960 - DNA, 15 bp, Homo sapiens
tatagaaatcataat

SEQ ID NO: 918961 - DNA, 15 bp, Homo sapiens
ttatagaaatcataa

SEQ ID NO: 918962 - DNA, 15 bp, Homo sapiens
attatagaaatcata

SEQ ID NO: 918963 - DNA, 15 bp, Homo sapiens
tattatagaaatcat

SEQ ID NO: 918964 - DNA, 15 bp, Homo sapiens
gtattatagaaatca

SEQ ID NO: 918965 - DNA, 15 bp, Homo sapiens
tgtattatagaaatc

SEQ ID NO: 918966 - DNA, 15 bp, Homo sapiens
atgtattatagaaat

SEQ ID NO: 918967 - DNA, 15 bp, Homo sapiens
gatgtattatagaaa

SEQ ID NO: 918968 - DNA, 15 bp, Homo sapiens
ggatgtattatagaa

SEQ ID NO: 918969 - DNA, 15 bp, Homo sapiens
tggatgtattataga

SEQ ID NO: 918970 - DNA, 15 bp, Homo sapiens
ttggatgtattatag

SEQ ID NO: 918971 - DNA, 15 bp, Homo sapiens
tttggatgtattata

SEQ ID NO: 918972 - DNA, 15 bp, Homo sapiens
ttttggatgtattat

SEQ ID NO: 918973 - DNA, 15 bp, Homo sapiens
gttttggatgtatta

SEQ ID NO: 918974 - DNA, 15 bp, Homo sapiens
agttttggatgtatt

SEQ ID NO: 918975 - DNA, 15 bp, Homo sapiens
aagttttggatgtat

SEQ ID NO: 918976 - DNA, 15 bp, Homo sapiens
aaagttttggatgta

SEQ ID NO: 918977 - DNA, 15 bp, Homo sapiens
gaaagttttggatgt

SEQ ID NO: 918978 - DNA, 15 bp, Homo sapiens
agaaagttttggatg

SEQ ID NO: 918979 - DNA, 15 bp, Homo sapiens
gagaaagttttggat

SEQ ID NO: 918980 - DNA, 15 bp, Homo sapiens
tgagaaagttttgga

SEQ ID NO: 918981 - DNA, 15 bp, Homo sapiens
ttgagaaagttttgg

SEQ ID NO: 918982 - DNA, 15 bp, Homo sapiens
cttgagaaagttttg

SEQ ID NO: 918983 - DNA, 15 bp, Homo sapiens
tcttgagaaagtttt

SEQ ID NO: 918984 - DNA, 15 bp, Homo sapiens
ttcttgagaaagttt

SEQ ID NO: 918985 - DNA, 15 bp, Homo sapiens
tttcttgagaaagtt

SEQ ID NO: 918986 - DNA, 15 bp, Homo sapiens
ttttcttgagaaagt

SEQ ID NO: 918987 - DNA, 15 bp, Homo sapiens
tttttcttgagaaag

SEQ ID NO: 918988 - DNA, 15 bp, Homo sapiens
ttttttcttgagaaa

SEQ ID NO: 918989 - DNA, 15 bp, Homo sapiens
gttttttcttgagaa

SEQ ID NO: 918990 - DNA, 15 bp, Homo sapiens
agttttttcttgaga

SEQ ID NO: 918991 - DNA, 15 bp, Homo sapiens
aagttttttcttgag

SEQ ID NO: 918992 - DNA, 15 bp, Homo sapiens
gaagttttttcttga

SEQ ID NO: 918993 - DNA, 15 bp, Homo sapiens
tgaagttttttcttg

SEQ ID NO: 918994 - DNA, 15 bp, Homo sapiens
atgaagttttttctt

SEQ ID NO: 918995 - DNA, 15 bp, Homo sapiens
catgaagttttttct

SEQ ID NO: 918996 - DNA, 15 bp, Homo sapiens
tcatgaagttttttc

SEQ ID NO: 918997 - DNA, 15 bp, Homo sapiens
atcatgaagtttttt

SEQ ID NO: 918998 - DNA, 15 bp, Homo sapiens
aatcatgaagttttt

SEQ ID NO: 918999 - DNA, 15 bp, Homo sapiens
aaatcatgaagtttt

SEQ ID NO: 919000 - DNA, 15 bp, Homo sapiens
taaatcatgaagttt

SEQ ID NO: 919001 - DNA, 15 bp, Homo sapiens
ataaatcatgaagtt

SEQ ID NO: 919002 - DNA, 15 bp, Homo sapiens
aataaatcatgaagt

SEQ ID NO: 919003 - DNA, 15 bp, Homo sapiens
taataaatcatgaag

SEQ ID NO: 919004 - DNA, 15 bp, Homo sapiens
ctaataaatcatgaa

SEQ ID NO: 919005 - DNA, 15 bp, Homo sapiens
actaataaatcatga

SEQ ID NO: 919006 - DNA, 15 bp, Homo sapiens
tactaataaatcatg

SEQ ID NO: 919007 - DNA, 15 bp, Homo sapiens
gtactaataaatcat

SEQ ID NO: 919008 - DNA, 15 bp, Homo sapiens
tgtactaataaatca

SEQ ID NO: 919009 - DNA, 15 bp, Homo sapiens
ttgtactaataaatc

SEQ ID NO: 919010 - DNA, 15 bp, Homo sapiens
attgtactaataaat

SEQ ID NO: 919011 - DNA, 15 bp, Homo sapiens
tattgtactaataaa

SEQ ID NO: 919012 - DNA, 15 bp, Homo sapiens
ttattgtactaataa

SEQ ID NO: 919013 - DNA, 15 bp, Homo sapiens
attattgtactaata

SEQ ID NO: 919014 - DNA, 15 bp, Homo sapiens
gattattgtactaat

SEQ ID NO: 919015 - DNA, 15 bp, Homo sapiens
tgattattgtactaa

SEQ ID NO: 919016 - DNA, 15 bp, Homo sapiens
ctgattattgtacta

SEQ ID NO: 919017 - DNA, 15 bp, Homo sapiens
actgattattgtact

SEQ ID NO: 919018 - DNA, 15 bp, Homo sapiens
aactgattattgtac

SEQ ID NO: 919019 - DNA, 15 bp, Homo sapiens
aaactgattattgta

SEQ ID NO: 919020 - DNA, 15 bp, Homo sapiens
taaactgattattgt

SEQ ID NO: 919021 - DNA, 15 bp, Homo sapiens
gtaaactgattattg

SEQ ID NO: 919022 - DNA, 15 bp, Homo sapiens
agtaaactgattatt

SEQ ID NO: 919023 - DNA, 15 bp, Homo sapiens
gagtaaactgattat

SEQ ID NO: 919024 - DNA, 15 bp, Homo sapiens
tgagtaaactgatta

SEQ ID NO: 919025 - DNA, 15 bp, Homo sapiens
atgagtaaactgatt

SEQ ID NO: 919026 - DNA, 15 bp, Homo sapiens
aatgagtaaactgat

SEQ ID NO: 919027 - DNA, 15 bp, Homo sapiens
taatgagtaaactga

SEQ ID NO: 919028 - DNA, 15 bp, Homo sapiens
gtaatgagtaaactg

SEQ ID NO: 919029 - DNA, 15 bp, Homo sapiens
agtaatgagtaaact

SEQ ID NO: 919030 - DNA, 15 bp, Homo sapiens
gagtaatgagtaaac

SEQ ID NO: 919031 - DNA, 15 bp, Homo sapiens
tgagtaatgagtaaa

SEQ ID NO: 919032 - DNA, 15 bp, Homo sapiens
atgagtaatgagtaa

SEQ ID NO: 919033 - DNA, 15 bp, Homo sapiens
gatgagtaatgagta

SEQ ID NO: 919034 - DNA, 15 bp, Homo sapiens
tgatgagtaatgagt

SEQ ID NO: 919035 - DNA, 15 bp, Homo sapiens
atgatgagtaatgag

SEQ ID NO: 919036 - DNA, 15 bp, Homo sapiens
aatgatgagtaatga

SEQ ID NO: 919037 - DNA, 15 bp, Homo sapiens
aaatgatgagtaatg

SEQ ID NO: 919038 - DNA, 15 bp, Homo sapiens
taaatgatgagtaat

SEQ ID NO: 919039 - DNA, 15 bp, Homo sapiens
ataaatgatgagtaa

SEQ ID NO: 919040 - DNA, 15 bp, Homo sapiens
tataaatgatgagta

SEQ ID NO: 919041 - DNA, 15 bp, Homo sapiens
atataaatgatgagt

SEQ ID NO: 919042 - DNA, 15 bp, Homo sapiens
aatataaatgatgag

SEQ ID NO: 919043 - DNA, 15 bp, Homo sapiens
aaatataaatgatga

SEQ ID NO: 919044 - DNA, 15 bp, Homo sapiens
taaatataaatgatg

SEQ ID NO: 919045 - DNA, 15 bp, Homo sapiens
gtaaatataaatgat

SEQ ID NO: 919046 - DNA, 15 bp, Homo sapiens
agtaaatataaatga

SEQ ID NO: 919047 - DNA, 15 bp, Homo sapiens
aagtaaatataaatg

SEQ ID NO: 919048 - DNA, 15 bp, Homo sapiens
aaagtaaatataaat

SEQ ID NO: 919049 - DNA, 15 bp, Homo sapiens
taaagtaaatataaa

SEQ ID NO: 919050 - DNA, 15 bp, Homo sapiens
ataaagtaaatataa

SEQ ID NO: 919051 - DNA, 15 bp, Homo sapiens
tataaagtaaatata

SEQ ID NO: 919052 - DNA, 15 bp, Homo sapiens
atataaagtaaatat

SEQ ID NO: 919053 - DNA, 15 bp, Homo sapiens
catataaagtaaata

SEQ ID NO: 919054 - DNA, 15 bp, Homo sapiens
acatataaagtaaat

SEQ ID NO: 919055 - DNA, 15 bp, Homo sapiens
gacatataaagtaaa

SEQ ID NO: 919056 - DNA, 15 bp, Homo sapiens
agacatataaagtaa

SEQ ID NO: 919057 - DNA, 15 bp, Homo sapiens
aagacatataaagta

SEQ ID NO: 919058 - DNA, 15 bp, Homo sapiens
aaagacatataaagt

SEQ ID NO: 919059 - DNA, 15 bp, Homo sapiens
aaaagacatataaag

SEQ ID NO: 919060 - DNA, 15 bp, Homo sapiens
taaaagacatataaa

SEQ ID NO: 919061 - DNA, 15 bp, Homo sapiens
ttaaaagacatataa

SEQ ID NO: 919062 - DNA, 15 bp, Homo sapiens
gttaaaagacatata

SEQ ID NO: 919063 - DNA, 15 bp, Homo sapiens
agttaaaagacatat

SEQ ID NO: 919064 - DNA, 15 bp, Homo sapiens
cagttaaaagacata

SEQ ID NO: 919065 - DNA, 15 bp, Homo sapiens
ccagttaaaagacat

SEQ ID NO: 919066 - DNA, 15 bp, Homo sapiens
accagttaaaagaca

SEQ ID NO: 919067 - DNA, 15 bp, Homo sapiens
caccagttaaaagac

SEQ ID NO: 919068 - DNA, 15 bp, Homo sapiens
gcaccagttaaaaga

SEQ ID NO: 919069 - DNA, 15 bp, Homo sapiens
agcaccagttaaaag

SEQ ID NO: 919070 - DNA, 15 bp, Homo sapiens
aagcaccagttaaaa

SEQ ID NO: 919071 - DNA, 15 bp, Homo sapiens
taagcaccagttaaa

SEQ ID NO: 919072 - DNA, 15 bp, Homo sapiens
ataagcaccagttaa

SEQ ID NO: 919073 - DNA, 15 bp, Homo sapiens
aataagcaccagtta

SEQ ID NO: 919074 - DNA, 15 bp, Homo sapiens
taataagcaccagtt

SEQ ID NO: 919075 - DNA, 15 bp, Homo sapiens
ttaataagcaccagt

SEQ ID NO: 919076 - DNA, 15 bp, Homo sapiens
cttaataagcaccag

SEQ ID NO: 919077 - DNA, 15 bp, Homo sapiens
acttaataagcacca

SEQ ID NO: 919078 - DNA, 15 bp, Homo sapiens
tacttaataagcacc

SEQ ID NO: 919079 - DNA, 15 bp, Homo sapiens
ctacttaataagcac

SEQ ID NO: 919080 - DNA, 15 bp, Homo sapiens
gctacttaataagca

SEQ ID NO: 919081 - DNA, 15 bp, Homo sapiens
tgctacttaataagc

SEQ ID NO: 919082 - DNA, 15 bp, Homo sapiens
gtgctacttaataag

SEQ ID NO: 919083 - DNA, 15 bp, Homo sapiens
agtgctacttaataa

SEQ ID NO: 919084 - DNA, 15 bp, Homo sapiens
aagtgctacttaata

SEQ ID NO: 919085 - DNA, 15 bp, Homo sapiens
aaagtgctacttaat

SEQ ID NO: 919086 - DNA, 15 bp, Homo sapiens
taaagtgctacttaa

SEQ ID NO: 919087 - DNA, 15 bp, Homo sapiens
ttaaagtgctactta

SEQ ID NO: 919088 - DNA, 15 bp, Homo sapiens
attaaagtgctactt

SEQ ID NO: 919089 - DNA, 15 bp, Homo sapiens
tattaaagtgctact

SEQ ID NO: 919090 - DNA, 15 bp, Homo sapiens
atattaaagtgctac

SEQ ID NO: 919091 - DNA, 15 bp, Homo sapiens
tatattaaagtgcta

SEQ ID NO: 919092 - DNA, 15 bp, Homo sapiens
ctatattaaagtgct

SEQ ID NO: 919093 - DNA, 15 bp, Homo sapiens
tctatattaaagtgc

SEQ ID NO: 919094 - DNA, 15 bp, Homo sapiens
ttctatattaaagtg

SEQ ID NO: 919095 - DNA, 15 bp, Homo sapiens
attctatattaaagt

SEQ ID NO: 919096 - DNA, 15 bp, Homo sapiens
tattctatattaaag

SEQ ID NO: 919097 - DNA, 15 bp, Homo sapiens
ctattctatattaaa

SEQ ID NO: 919098 - DNA, 15 bp, Homo sapiens
cctattctatattaa

SEQ ID NO: 919099 - DNA, 15 bp, Homo sapiens
gcctattctatatta

SEQ ID NO: 919100 - DNA, 15 bp, Homo sapiens
tgcctattctatatt

SEQ ID NO: 919101 - DNA, 15 bp, Homo sapiens
ttgcctattctatat

SEQ ID NO: 919102 - DNA, 15 bp, Homo sapiens
tttgcctattctata

SEQ ID NO: 919103 - DNA, 15 bp, Homo sapiens
ctttgcctattctat

SEQ ID NO: 919104 - DNA, 15 bp, Homo sapiens
tctttgcctattcta

SEQ ID NO: 919105 - DNA, 15 bp, Homo sapiens
ttctttgcctattct

SEQ ID NO: 919106 - DNA, 15 bp, Homo sapiens
attctttgcctattc

SEQ ID NO: 919107 - DNA, 15 bp, Homo sapiens
cattctttgcctatt

SEQ ID NO: 919108 - DNA, 15 bp, Homo sapiens
ccattctttgcctat

SEQ ID NO: 919109 - DNA, 15 bp, Homo sapiens
accattctttgccta

SEQ ID NO: 919110 - DNA, 15 bp, Homo sapiens
taccattctttgcct

SEQ ID NO: 919111 - DNA, 15 bp, Homo sapiens
ctaccattctttgcc

SEQ ID NO: 919112 - DNA, 15 bp, Homo sapiens
tctaccattctttgc

SEQ ID NO: 919113 - DNA, 15 bp, Homo sapiens
ctctaccattctttg

SEQ ID NO: 919114 - DNA, 15 bp, Homo sapiens
tctctaccattcttt

SEQ ID NO: 919115 - DNA, 15 bp, Homo sapiens
ttctctaccattctt

SEQ ID NO: 919116 - DNA, 15 bp, Homo sapiens
cttctctaccattct

SEQ ID NO: 919117 - DNA, 15 bp, Homo sapiens
tcttctctaccattc

SEQ ID NO: 919118 - DNA, 15 bp, Homo sapiens
atcttctctaccatt

SEQ ID NO: 919119 - DNA, 15 bp, Homo sapiens
catcttctctaccat

SEQ ID NO: 919120 - DNA, 15 bp, Homo sapiens
tcatcttctctacca

SEQ ID NO: 919121 - DNA, 15 bp, Homo sapiens
ttcatcttctctacc

SEQ ID NO: 919122 - DNA, 15 bp, Homo sapiens
tttcatcttctctac

SEQ ID NO: 919123 - DNA, 15 bp, Homo sapiens
atttcatcttctcta

SEQ ID NO: 919124 - DNA, 15 bp, Homo sapiens
aatttcatcttctct

SEQ ID NO: 919125 - DNA, 15 bp, Homo sapiens
gaatttcatcttctc

SEQ ID NO: 919126 - DNA, 15 bp, Homo sapiens
tgaatttcatcttct

SEQ ID NO: 919127 - DNA, 15 bp, Homo sapiens
ttgaatttcatcttc

SEQ ID NO: 919128 - DNA, 15 bp, Homo sapiens
tttgaatttcatctt

SEQ ID NO: 919129 - DNA, 15 bp, Homo sapiens
ttttgaatttcatct

SEQ ID NO: 919130 - DNA, 15 bp, Homo sapiens
tttttgaatttcatc

SEQ ID NO: 919131 - DNA, 15 bp, Homo sapiens
atttttgaatttcat

SEQ ID NO: 919132 - DNA, 15 bp, Homo sapiens
aatttttgaatttca

SEQ ID NO: 919133 - DNA, 15 bp, Homo sapiens
taatttttgaatttc

SEQ ID NO: 919134 - DNA, 15 bp, Homo sapiens
ctaatttttgaattt

SEQ ID NO: 919135 - DNA, 15 bp, Homo sapiens
cctaatttttgaatt

SEQ ID NO: 919136 - DNA, 15 bp, Homo sapiens
acctaatttttgaat

SEQ ID NO: 919137 - DNA, 15 bp, Homo sapiens
aacctaatttttgaa

SEQ ID NO: 919138 - DNA, 15 bp, Homo sapiens
gaacctaatttttga

SEQ ID NO: 919139 - DNA, 15 bp, Homo sapiens
agaacctaatttttg

SEQ ID NO: 919140 - DNA, 15 bp, Homo sapiens
gagaacctaattttt

SEQ ID NO: 919141 - DNA, 15 bp, Homo sapiens
tgagaacctaatttt

SEQ ID NO: 919142 - DNA, 15 bp, Homo sapiens
gtgagaacctaattt

SEQ ID NO: 919143 - DNA, 15 bp, Homo sapiens
tgtgagaacctaatt

SEQ ID NO: 919144 - DNA, 15 bp, Homo sapiens
atgtgagaacctaat

SEQ ID NO: 919145 - DNA, 15 bp, Homo sapiens
aatgtgagaacctaa

SEQ ID NO: 919146 - DNA, 15 bp, Homo sapiens
taatgtgagaaccta

SEQ ID NO: 919147 - DNA, 15 bp, Homo sapiens
ataatgtgagaacct

SEQ ID NO: 919148 - DNA, 15 bp, Homo sapiens
aataatgtgagaacc

SEQ ID NO: 919149 - DNA, 15 bp, Homo sapiens
taataatgtgagaac

SEQ ID NO: 919150 - DNA, 15 bp, Homo sapiens
ttaataatgtgagaa

SEQ ID NO: 919151 - DNA, 15 bp, Homo sapiens
attaataatgtgaga

SEQ ID NO: 919152 - DNA, 15 bp, Homo sapiens
tattaataatgtgag

SEQ ID NO: 919153 - DNA, 15 bp, Homo sapiens
ctattaataatgtga

SEQ ID NO: 919154 - DNA, 15 bp, Homo sapiens
actattaataatgtg

SEQ ID NO: 919155 - DNA, 15 bp, Homo sapiens
aactattaataatgt

SEQ ID NO: 919156 - DNA, 15 bp, Homo sapiens
gaactattaataatg

SEQ ID NO: 919157 - DNA, 15 bp, Homo sapiens
tgaactattaataat

SEQ ID NO: 919158 - DNA, 15 bp, Homo sapiens
atgaactattaataa

SEQ ID NO: 919159 - DNA, 15 bp, Homo sapiens
aatgaactattaata

SEQ ID NO: 919160 - DNA, 15 bp, Homo sapiens
taatgaactattaat

SEQ ID NO: 919161 - DNA, 15 bp, Homo sapiens
ttaatgaactattaa

SEQ ID NO: 919162 - DNA, 15 bp, Homo sapiens
tttaatgaactatta

SEQ ID NO: 919163 - DNA, 15 bp, Homo sapiens
ttttaatgaactatt

SEQ ID NO: 919164 - DNA, 15 bp, Homo sapiens
cttttaatgaactat

SEQ ID NO: 919165 - DNA, 15 bp, Homo sapiens
acttttaatgaacta

SEQ ID NO: 919166 - DNA, 15 bp, Homo sapiens
cacttttaatgaact

SEQ ID NO: 919167 - DNA, 15 bp, Homo sapiens
tcacttttaatgaac

SEQ ID NO: 919168 - DNA, 15 bp, Homo sapiens
ctcacttttaatgaa

SEQ ID NO: 919169 - DNA, 15 bp, Homo sapiens
gctcacttttaatga

SEQ ID NO: 919170 - DNA, 15 bp, Homo sapiens
agctcacttttaatg

SEQ ID NO: 919171 - DNA, 15 bp, Homo sapiens
tagctcacttttaat

SEQ ID NO: 919172 - DNA, 15 bp, Homo sapiens
ttagctcacttttaa

SEQ ID NO: 919173 - DNA, 15 bp, Homo sapiens
tttagctcactttta

SEQ ID NO: 919174 - DNA, 15 bp, Homo sapiens
atttagctcactttt

SEQ ID NO: 919175 - DNA, 15 bp, Homo sapiens
catttagctcacttt

SEQ ID NO: 919176 - DNA, 15 bp, Homo sapiens
tcatttagctcactt

SEQ ID NO: 919177 - DNA, 15 bp, Homo sapiens
ctcatttagctcact

SEQ ID NO: 919178 - DNA, 15 bp, Homo sapiens
tctcatttagctcac

SEQ ID NO: 919179 - DNA, 15 bp, Homo sapiens
ttctcatttagctca

SEQ ID NO: 919180 - DNA, 15 bp, Homo sapiens
cttctcatttagctc

SEQ ID NO: 919181 - DNA, 15 bp, Homo sapiens
gcttctcatttagct

SEQ ID NO: 919182 - DNA, 15 bp, Homo sapiens
agcttctcatttagc

SEQ ID NO: 919183 - DNA, 15 bp, Homo sapiens
aagcttctcatttag

SEQ ID NO: 919184 - DNA, 15 bp, Homo sapiens
caagcttctcattta

SEQ ID NO: 919185 - DNA, 15 bp, Homo sapiens
acaagcttctcattt

SEQ ID NO: 919186 - DNA, 15 bp, Homo sapiens
tacaagcttctcatt

SEQ ID NO: 919187 - DNA, 15 bp, Homo sapiens
atacaagcttctcat

SEQ ID NO: 919188 - DNA, 15 bp, Homo sapiens
aatacaagcttctca

SEQ ID NO: 919189 - DNA, 15 bp, Homo sapiens
caatacaagcttctc

SEQ ID NO: 919190 - DNA, 15 bp, Homo sapiens
ccaatacaagcttct

SEQ ID NO: 919191 - DNA, 15 bp, Homo sapiens
gccaatacaagcttc

SEQ ID NO: 919192 - DNA, 15 bp, Homo sapiens
agccaatacaagctt

SEQ ID NO: 919193 - DNA, 15 bp, Homo sapiens
tagccaatacaagct

SEQ ID NO: 919194 - DNA, 15 bp, Homo sapiens
atagccaatacaagc

SEQ ID NO: 919195 - DNA, 15 bp, Homo sapiens
catagccaatacaag

SEQ ID NO: 919196 - DNA, 15 bp, Homo sapiens
acatagccaatacaa

SEQ ID NO: 919197 - DNA, 15 bp, Homo sapiens
tacatagccaataca

SEQ ID NO: 919198 - DNA, 15 bp, Homo sapiens
ctacatagccaatac

SEQ ID NO: 919199 - DNA, 15 bp, Homo sapiens
tctacatagccaata

SEQ ID NO: 919200 - DNA, 15 bp, Homo sapiens
ttctacatagccaat

SEQ ID NO: 919201 - DNA, 15 bp, Homo sapiens
attctacatagccaa

SEQ ID NO: 919202 - DNA, 15 bp, Homo sapiens
aattctacatagcca

SEQ ID NO: 919203 - DNA, 15 bp, Homo sapiens
aaattctacatagcc

SEQ ID NO: 919204 - DNA, 15 bp, Homo sapiens
aaaattctacatagc

SEQ ID NO: 919205 - DNA, 15 bp, Homo sapiens
caaaattctacatag

SEQ ID NO: 919206 - DNA, 15 bp, Homo sapiens
ccaaaattctacata

SEQ ID NO: 919207 - DNA, 15 bp, Homo sapiens
tccaaaattctacat

SEQ ID NO: 919208 - DNA, 15 bp, Homo sapiens
ctccaaaattctaca

SEQ ID NO: 919209 - DNA, 15 bp, Homo sapiens
cctccaaaattctac

SEQ ID NO: 919210 - DNA, 15 bp, Homo sapiens
ccctccaaaattcta

SEQ ID NO: 919211 - DNA, 15 bp, Homo sapiens
tccctccaaaattct

SEQ ID NO: 919212 - DNA, 15 bp, Homo sapiens
atccctccaaaattc

SEQ ID NO: 919213 - DNA, 15 bp, Homo sapiens
aatccctccaaaatt

SEQ ID NO: 919214 - DNA, 15 bp, Homo sapiens
aaatccctccaaaat

SEQ ID NO: 919215 - DNA, 15 bp, Homo sapiens
aaaatccctccaaaa

SEQ ID NO: 919216 - DNA, 15 bp, Homo sapiens
caaaatccctccaaa

SEQ ID NO: 919217 - DNA, 15 bp, Homo sapiens
ccaaaatccctccaa

SEQ ID NO: 919218 - DNA, 15 bp, Homo sapiens
tccaaaatccctcca

SEQ ID NO: 919219 - DNA, 15 bp, Homo sapiens
ttccaaaatccctcc

SEQ ID NO: 919220 - DNA, 15 bp, Homo sapiens
tttccaaaatccctc

SEQ ID NO: 919221 - DNA, 15 bp, Homo sapiens
gtttccaaaatccct

SEQ ID NO: 919222 - DNA, 15 bp, Homo sapiens
tgtttccaaaatccc

SEQ ID NO: 919223 - DNA, 15 bp, Homo sapiens
ttgtttccaaaatcc

SEQ ID NO: 919224 - DNA, 15 bp, Homo sapiens
attgtttccaaaatc

SEQ ID NO: 919225 - DNA, 15 bp, Homo sapiens
aattgtttccaaaat

SEQ ID NO: 919226 - DNA, 15 bp, Homo sapiens
taattgtttccaaaa

SEQ ID NO: 919227 - DNA, 15 bp, Homo sapiens
ataattgtttccaaa

SEQ ID NO: 919228 - DNA, 15 bp, Homo sapiens
aataattgtttccaa

SEQ ID NO: 919229 - DNA, 15 bp, Homo sapiens
gaataattgtttcca

SEQ ID NO: 919230 - DNA, 15 bp, Homo sapiens
agaataattgtttcc

SEQ ID NO: 919231 - DNA, 15 bp, Homo sapiens
tagaataattgtttc

SEQ ID NO: 919232 - DNA, 15 bp, Homo sapiens
gtagaataattgttt

SEQ ID NO: 919233 - DNA, 15 bp, Homo sapiens
ggtagaataattgtt

SEQ ID NO: 919234 - DNA, 15 bp, Homo sapiens
aggtagaataattgt

SEQ ID NO: 919235 - DNA, 15 bp, Homo sapiens
aaggtagaataattg

SEQ ID NO: 919236 - DNA, 15 bp, Homo sapiens
aaaggtagaataatt

SEQ ID NO: 919237 - DNA, 15 bp, Homo sapiens
caaaggtagaataat

SEQ ID NO: 919238 - DNA, 15 bp, Homo sapiens
gcaaaggtagaataa

SEQ ID NO: 919239 - DNA, 15 bp, Homo sapiens
tgcaaaggtagaata

SEQ ID NO: 919240 - DNA, 15 bp, Homo sapiens
atgcaaaggtagaat

SEQ ID NO: 919241 - DNA, 15 bp, Homo sapiens
aatgcaaaggtagaa

SEQ ID NO: 919242 - DNA, 15 bp, Homo sapiens
taatgcaaaggtaga

SEQ ID NO: 919243 - DNA, 15 bp, Homo sapiens
ttaatgcaaaggtag

SEQ ID NO: 919244 - DNA, 15 bp, Homo sapiens
tttaatgcaaaggta

SEQ ID NO: 919245 - DNA, 15 bp, Homo sapiens
ttttaatgcaaaggt

SEQ ID NO: 919246 - DNA, 15 bp, Homo sapiens
gttttaatgcaaagg

SEQ ID NO: 919247 - DNA, 15 bp, Homo sapiens
agttttaatgcaaag

SEQ ID NO: 919248 - DNA, 15 bp, Homo sapiens
aagttttaatgcaaa

SEQ ID NO: 919249 - DNA, 15 bp, Homo sapiens
caagttttaatgcaa

SEQ ID NO: 919250 - DNA, 15 bp, Homo sapiens
tcaagttttaatgca

SEQ ID NO: 919251 - DNA, 15 bp, Homo sapiens
atcaagttttaatgc

SEQ ID NO: 919252 - DNA, 15 bp, Homo sapiens
aatcaagttttaatg

SEQ ID NO: 919253 - DNA, 15 bp, Homo sapiens
caatcaagttttaat

SEQ ID NO: 919254 - DNA, 15 bp, Homo sapiens
acaatcaagttttaa

SEQ ID NO: 919255 - DNA, 15 bp, Homo sapiens
tacaatcaagtttta

SEQ ID NO: 919256 - DNA, 15 bp, Homo sapiens
ctacaatcaagtttt

SEQ ID NO: 919257 - DNA, 15 bp, Homo sapiens
cctacaatcaagttt

SEQ ID NO: 919258 - DNA, 15 bp, Homo sapiens
acctacaatcaagtt

SEQ ID NO: 919259 - DNA, 15 bp, Homo sapiens
aacctacaatcaagt

SEQ ID NO: 919260 - DNA, 15 bp, Homo sapiens
aaacctacaatcaag

SEQ ID NO: 919261 - DNA, 15 bp, Homo sapiens
aaaacctacaatcaa

SEQ ID NO: 919262 - DNA, 15 bp, Homo sapiens
taaaacctacaatca

SEQ ID NO: 919263 - DNA, 15 bp, Homo sapiens
ttaaaacctacaatc

SEQ ID NO: 919264 - DNA, 15 bp, Homo sapiens
cttaaaacctacaat

SEQ ID NO: 919265 - DNA, 15 bp, Homo sapiens
tcttaaaacctacaa

SEQ ID NO: 919266 - DNA, 15 bp, Homo sapiens
ttcttaaaacctaca

SEQ ID NO: 919267 - DNA, 15 bp, Homo sapiens
attcttaaaacctac

SEQ ID NO: 919268 - DNA, 15 bp, Homo sapiens
aattcttaaaaccta

SEQ ID NO: 919269 - DNA, 15 bp, Homo sapiens
taattcttaaaacct

SEQ ID NO: 919270 - DNA, 15 bp, Homo sapiens
ttaattcttaaaacc

SEQ ID NO: 919271 - DNA, 15 bp, Homo sapiens
tttaattcttaaaac

SEQ ID NO: 919272 - DNA, 15 bp, Homo sapiens
ctttaattcttaaaa

SEQ ID NO: 919273 - DNA, 15 bp, Homo sapiens
actttaattcttaaa

SEQ ID NO: 919274 - DNA, 15 bp, Homo sapiens
cactttaattcttaa

SEQ ID NO: 919275 - DNA, 15 bp, Homo sapiens
acactttaattctta

SEQ ID NO: 919276 - DNA, 15 bp, Homo sapiens
aacactttaattctt

SEQ ID NO: 919277 - DNA, 15 bp, Homo sapiens
caacactttaattct

SEQ ID NO: 919278 - DNA, 15 bp, Homo sapiens
ccaacactttaattc

SEQ ID NO: 919279 - DNA, 15 bp, Homo sapiens
tccaacactttaatt

SEQ ID NO: 919280 - DNA, 15 bp, Homo sapiens
ttccaacactttaat

SEQ ID NO: 919281 - DNA, 15 bp, Homo sapiens
attccaacactttaa

SEQ ID NO: 919282 - DNA, 15 bp, Homo sapiens
tattccaacacttta

SEQ ID NO: 919283 - DNA, 15 bp, Homo sapiens
ctattccaacacttt

SEQ ID NO: 919284 - DNA, 15 bp, Homo sapiens
actattccaacactt

SEQ ID NO: 919285 - DNA, 15 bp, Homo sapiens
tactattccaacact

SEQ ID NO: 919286 - DNA, 15 bp, Homo sapiens
ctactattccaacac

SEQ ID NO: 919287 - DNA, 15 bp, Homo sapiens
cctactattccaaca

SEQ ID NO: 919288 - DNA, 15 bp, Homo sapiens
tcctactattccaac

SEQ ID NO: 919289 - DNA, 15 bp, Homo sapiens
ctcctactattccaa

SEQ ID NO: 919290 - DNA, 15 bp, Homo sapiens
cctcctactattcca

SEQ ID NO: 919291 - DNA, 15 bp, Homo sapiens
ccctcctactattcc

SEQ ID NO: 919292 - DNA, 15 bp, Homo sapiens
accctcctactattc

SEQ ID NO: 919293 - DNA, 15 bp, Homo sapiens
aaccctcctactatt

SEQ ID NO: 919294 - DNA, 15 bp, Homo sapiens
taaccctcctactat

SEQ ID NO: 919295 - DNA, 15 bp, Homo sapiens
ataaccctcctacta

SEQ ID NO: 919296 - DNA, 15 bp, Homo sapiens
aataaccctcctact

SEQ ID NO: 919297 - DNA, 15 bp, Homo sapiens
aaataaccctcctac

SEQ ID NO: 919298 - DNA, 15 bp, Homo sapiens
aaaataaccctccta

SEQ ID NO: 919299 - DNA, 15 bp, Homo sapiens
taaaataaccctcct

SEQ ID NO: 919300 - DNA, 15 bp, Homo sapiens
ttaaaataaccctcc

SEQ ID NO: 919301 - DNA, 15 bp, Homo sapiens
attaaaataaccctc

SEQ ID NO: 919302 - DNA, 15 bp, Homo sapiens
cattaaaataaccct

SEQ ID NO: 919303 - DNA, 15 bp, Homo sapiens
acattaaaataaccc

SEQ ID NO: 919304 - DNA, 15 bp, Homo sapiens
aacattaaaataacc

SEQ ID NO: 919305 - DNA, 15 bp, Homo sapiens
aaacattaaaataac

SEQ ID NO: 919306 - DNA, 15 bp, Homo sapiens
aaaacattaaaataa

SEQ ID NO: 919307 - DNA, 15 bp, Homo sapiens
aaaaacattaaaata

SEQ ID NO: 919308 - DNA, 15 bp, Homo sapiens
taaaaacattaaaat

SEQ ID NO: 919309 - DNA, 15 bp, Homo sapiens
ctaaaaacattaaaa

SEQ ID NO: 919310 - DNA, 15 bp, Homo sapiens
actaaaaacattaaa

SEQ ID NO: 919311 - DNA, 15 bp, Homo sapiens
aactaaaaacattaa

SEQ ID NO: 919312 - DNA, 15 bp, Homo sapiens
aaactaaaaacatta

SEQ ID NO: 919313 - DNA, 15 bp, Homo sapiens
caaactaaaaacatt

SEQ ID NO: 919314 - DNA, 15 bp, Homo sapiens
acaaactaaaaacat

SEQ ID NO: 919315 - DNA, 15 bp, Homo sapiens
aacaaactaaaaaca

SEQ ID NO: 919316 - DNA, 15 bp, Homo sapiens
taacaaactaaaaac

SEQ ID NO: 919317 - DNA, 15 bp, Homo sapiens
ttaacaaactaaaaa

SEQ ID NO: 919318 - DNA, 15 bp, Homo sapiens
attaacaaactaaaa

SEQ ID NO: 919319 - DNA, 15 bp, Homo sapiens
aattaacaaactaaa

SEQ ID NO: 919320 - DNA, 15 bp, Homo sapiens
gaattaacaaactaa

SEQ ID NO: 919321 - DNA, 15 bp, Homo sapiens
agaattaacaaacta

SEQ ID NO: 919322 - DNA, 15 bp, Homo sapiens
gagaattaacaaact

SEQ ID NO: 919323 - DNA, 15 bp, Homo sapiens
agagaattaacaaac

SEQ ID NO: 919324 - DNA, 15 bp, Homo sapiens
aagagaattaacaaa

SEQ ID NO: 919325 - DNA, 15 bp, Homo sapiens
taagagaattaacaa

SEQ ID NO: 919326 - DNA, 15 bp, Homo sapiens
ataagagaattaaca

SEQ ID NO: 919327 - DNA, 15 bp, Homo sapiens
tataagagaattaac

SEQ ID NO: 919328 - DNA, 15 bp, Homo sapiens
atataagagaattaa

SEQ ID NO: 919329 - DNA, 15 bp, Homo sapiens
tatataagagaatta

SEQ ID NO: 919330 - DNA, 15 bp, Homo sapiens
atatataagagaatt

SEQ ID NO: 919331 - DNA, 15 bp, Homo sapiens
tatatataagagaat

SEQ ID NO: 919332 - DNA, 15 bp, Homo sapiens
ctatatataagagaa

SEQ ID NO: 919333 - DNA, 15 bp, Homo sapiens
cctatatataagaga

SEQ ID NO: 919334 - DNA, 15 bp, Homo sapiens
tcctatatataagag

SEQ ID NO: 919335 - DNA, 15 bp, Homo sapiens
atcctatatataaga

SEQ ID NO: 919336 - DNA, 15 bp, Homo sapiens
aatcctatatataag

SEQ ID NO: 919337 - DNA, 15 bp, Homo sapiens
taatcctatatataa

SEQ ID NO: 919338 - DNA, 15 bp, Homo sapiens
ttaatcctatatata

SEQ ID NO: 919339 - DNA, 15 bp, Homo sapiens
gttaatcctatatat

SEQ ID NO: 919340 - DNA, 15 bp, Homo sapiens
ggttaatcctatata

SEQ ID NO: 919341 - DNA, 15 bp, Homo sapiens
tggttaatcctatat

SEQ ID NO: 919342 - DNA, 15 bp, Homo sapiens
gtggttaatcctata

SEQ ID NO: 919343 - DNA, 15 bp, Homo sapiens
agtggttaatcctat

SEQ ID NO: 919344 - DNA, 15 bp, Homo sapiens
cagtggttaatccta

SEQ ID NO: 919345 - DNA, 15 bp, Homo sapiens
tcagtggttaatcct

SEQ ID NO: 919346 - DNA, 15 bp, Homo sapiens
ctcagtggttaatcc

SEQ ID NO: 919347 - DNA, 15 bp, Homo sapiens
cctcagtggttaatc

SEQ ID NO: 919348 - DNA, 15 bp, Homo sapiens
tcctcagtggttaat

SEQ ID NO: 919349 - DNA, 15 bp, Homo sapiens
gtcctcagtggttaa

SEQ ID NO: 919350 - DNA, 15 bp, Homo sapiens
ggtcctcagtggtta

SEQ ID NO: 919351 - DNA, 15 bp, Homo sapiens
aggtcctcagtggtt

SEQ ID NO: 919352 - DNA, 15 bp, Homo sapiens
caggtcctcagtggt

SEQ ID NO: 919353 - DNA, 15 bp, Homo sapiens
tcaggtcctcagtgg

SEQ ID NO: 919354 - DNA, 15 bp, Homo sapiens
ttcaggtcctcagtg

SEQ ID NO: 919355 - DNA, 15 bp, Homo sapiens
gttcaggtcctcagt

SEQ ID NO: 919356 - DNA, 15 bp, Homo sapiens
ggttcaggtcctcag

SEQ ID NO: 919357 - DNA, 15 bp, Homo sapiens
aggttcaggtcctca

SEQ ID NO: 919358 - DNA, 15 bp, Homo sapiens
taggttcaggtcctc

SEQ ID NO: 919359 - DNA, 15 bp, Homo sapiens
ttaggttcaggtcct

SEQ ID NO: 919360 - DNA, 15 bp, Homo sapiens
gttaggttcaggtcc

SEQ ID NO: 919361 - DNA, 15 bp, Homo sapiens
agttaggttcaggtc

SEQ ID NO: 919362 - DNA, 15 bp, Homo sapiens
cagttaggttcaggt

SEQ ID NO: 919363 - DNA, 15 bp, Homo sapiens
tcagttaggttcagg

SEQ ID NO: 919364 - DNA, 15 bp, Homo sapiens
ttcagttaggttcag

SEQ ID NO: 919365 - DNA, 15 bp, Homo sapiens
tttcagttaggttca

SEQ ID NO: 919366 - DNA, 15 bp, Homo sapiens
ttttcagttaggttc

SEQ ID NO: 919367 - DNA, 15 bp, Homo sapiens
gttttcagttaggtt

SEQ ID NO: 919368 - DNA, 15 bp, Homo sapiens
tgttttcagttaggt

SEQ ID NO: 919369 - DNA, 15 bp, Homo sapiens
atgttttcagttagg

SEQ ID NO: 919370 - DNA, 15 bp, Homo sapiens
aatgttttcagttag

SEQ ID NO: 919371 - DNA, 15 bp, Homo sapiens
aaatgttttcagtta

SEQ ID NO: 919372 - DNA, 15 bp, Homo sapiens
gaaatgttttcagtt

SEQ ID NO: 919373 - DNA, 15 bp, Homo sapiens
agaaatgttttcagt

SEQ ID NO: 919374 - DNA, 15 bp, Homo sapiens
gagaaatgttttcag

SEQ ID NO: 919375 - DNA, 15 bp, Homo sapiens
tgagaaatgttttca

SEQ ID NO: 919376 - DNA, 15 bp, Homo sapiens
ttgagaaatgttttc

SEQ ID NO: 919377 - DNA, 15 bp, Homo sapiens
cttgagaaatgtttt

SEQ ID NO: 919378 - DNA, 15 bp, Homo sapiens
ccttgagaaatgttt

SEQ ID NO: 919379 - DNA, 15 bp, Homo sapiens
tccttgagaaatgtt

SEQ ID NO: 919380 - DNA, 15 bp, Homo sapiens
ctccttgagaaatgt

SEQ ID NO: 919381 - DNA, 15 bp, Homo sapiens
tctccttgagaaatg

SEQ ID NO: 919382 - DNA, 15 bp, Homo sapiens
atctccttgagaaat

SEQ ID NO: 919383 - DNA, 15 bp, Homo sapiens
tatctccttgagaaa

SEQ ID NO: 919384 - DNA, 15 bp, Homo sapiens
ctatctccttgagaa

SEQ ID NO: 919385 - DNA, 15 bp, Homo sapiens
tctatctccttgaga

SEQ ID NO: 919386 - DNA, 15 bp, Homo sapiens
ttctatctccttgag

SEQ ID NO: 919387 - DNA, 15 bp, Homo sapiens
attctatctccttga

SEQ ID NO: 919388 - DNA, 15 bp, Homo sapiens
tattctatctccttg

SEQ ID NO: 919389 - DNA, 15 bp, Homo sapiens
ttattctatctcctt

SEQ ID NO: 919390 - DNA, 15 bp, Homo sapiens
cttattctatctcct

SEQ ID NO: 919391 - DNA, 15 bp, Homo sapiens
acttattctatctcc

SEQ ID NO: 919392 - DNA, 15 bp, Homo sapiens
cacttattctatctc

SEQ ID NO: 919393 - DNA, 15 bp, Homo sapiens
tcacttattctatct

SEQ ID NO: 919394 - DNA, 15 bp, Homo sapiens
ttcacttattctatc

SEQ ID NO: 919395 - DNA, 15 bp, Homo sapiens
tttcacttattctat

SEQ ID NO: 919396 - DNA, 15 bp, Homo sapiens
ctttcacttattcta

SEQ ID NO: 919397 - DNA, 15 bp, Homo sapiens
tctttcacttattct

SEQ ID NO: 919398 - DNA, 15 bp, Homo sapiens
ttctttcacttattc

SEQ ID NO: 919399 - DNA, 15 bp, Homo sapiens
tttctttcacttatt

SEQ ID NO: 919400 - DNA, 15 bp, Homo sapiens
ttttctttcacttat

SEQ ID NO: 919401 - DNA, 15 bp, Homo sapiens
attttctttcactta

SEQ ID NO: 919402 - DNA, 15 bp, Homo sapiens
aattttctttcactt

SEQ ID NO: 919403 - DNA, 15 bp, Homo sapiens
caattttctttcact

SEQ ID NO: 919404 - DNA, 15 bp, Homo sapiens
ccaattttctttcac

SEQ ID NO: 919405 - DNA, 15 bp, Homo sapiens
tccaattttctttca

SEQ ID NO: 919406 - DNA, 15 bp, Homo sapiens
atccaattttctttc

SEQ ID NO: 919407 - DNA, 15 bp, Homo sapiens
aatccaattttcttt

SEQ ID NO: 919408 - DNA, 15 bp, Homo sapiens
aaatccaattttctt

SEQ ID NO: 919409 - DNA, 15 bp, Homo sapiens
taaatccaattttct

SEQ ID NO: 919410 - DNA, 15 bp, Homo sapiens
ataaatccaattttc

SEQ ID NO: 919411 - DNA, 15 bp, Homo sapiens
aataaatccaatttt

SEQ ID NO: 919412 - DNA, 15 bp, Homo sapiens
caataaatccaattt

SEQ ID NO: 919413 - DNA, 15 bp, Homo sapiens
tcaataaatccaatt

SEQ ID NO: 919414 - DNA, 15 bp, Homo sapiens
ctcaataaatccaat

SEQ ID NO: 919415 - DNA, 15 bp, Homo sapiens
gctcaataaatccaa

SEQ ID NO: 919416 - DNA, 15 bp, Homo sapiens
ggctcaataaatcca

SEQ ID NO: 919417 - DNA, 15 bp, Homo sapiens
aggctcaataaatcc

SEQ ID NO: 919418 - DNA, 15 bp, Homo sapiens
gaggctcaataaatc

SEQ ID NO: 919419 - DNA, 15 bp, Homo sapiens
tgaggctcaataaat

SEQ ID NO: 919420 - DNA, 15 bp, Homo sapiens
ttgaggctcaataaa

SEQ ID NO: 919421 - DNA, 15 bp, Homo sapiens
tttgaggctcaataa

SEQ ID NO: 919422 - DNA, 15 bp, Homo sapiens
ttttgaggctcaata

SEQ ID NO: 919423 - DNA, 15 bp, Homo sapiens
tttttgaggctcaat

SEQ ID NO: 919424 - DNA, 15 bp, Homo sapiens
atttttgaggctcaa

SEQ ID NO: 919425 - DNA, 15 bp, Homo sapiens
tatttttgaggctca

SEQ ID NO: 919426 - DNA, 15 bp, Homo sapiens
atatttttgaggctc

SEQ ID NO: 919427 - DNA, 15 bp, Homo sapiens
catatttttgaggct

SEQ ID NO: 919428 - DNA, 15 bp, Homo sapiens
tcatatttttgaggc

SEQ ID NO: 919429 - DNA, 15 bp, Homo sapiens
ctcatatttttgagg

SEQ ID NO: 919430 - DNA, 15 bp, Homo sapiens
actcatatttttgag

SEQ ID NO: 919431 - DNA, 15 bp, Homo sapiens
cactcatatttttga

SEQ ID NO: 919432 - DNA, 15 bp, Homo sapiens
tcactcatatttttg

SEQ ID NO: 919433 - DNA, 15 bp, Homo sapiens
ttcactcatattttt

SEQ ID NO: 919434 - DNA, 15 bp, Homo sapiens
cttcactcatatttt

SEQ ID NO: 919435 - DNA, 15 bp, Homo sapiens
gcttcactcatattt

SEQ ID NO: 919436 - DNA, 15 bp, Homo sapiens
tgcttcactcatatt

SEQ ID NO: 919437 - DNA, 15 bp, Homo sapiens
gtgcttcactcatat

SEQ ID NO: 919438 - DNA, 15 bp, Homo sapiens
tgtgcttcactcata

SEQ ID NO: 919439 - DNA, 15 bp, Homo sapiens
ttgtgcttcactcat

SEQ ID NO: 919440 - DNA, 15 bp, Homo sapiens
attgtgcttcactca

SEQ ID NO: 919441 - DNA, 15 bp, Homo sapiens
gattgtgcttcactc

SEQ ID NO: 919442 - DNA, 15 bp, Homo sapiens
tgattgtgcttcact

SEQ ID NO: 919443 - DNA, 15 bp, Homo sapiens
ttgattgtgcttcac

SEQ ID NO: 919444 - DNA, 15 bp, Homo sapiens
tttgattgtgcttca

SEQ ID NO: 919445 - DNA, 15 bp, Homo sapiens
ctttgattgtgcttc

SEQ ID NO: 919446 - DNA, 15 bp, Homo sapiens
cctttgattgtgctt

SEQ ID NO: 919447 - DNA, 15 bp, Homo sapiens
acctttgattgtgct

SEQ ID NO: 919448 - DNA, 15 bp, Homo sapiens
tacctttgattgtgc

SEQ ID NO: 919449 - DNA, 15 bp, Homo sapiens
ttacctttgattgtg

SEQ ID NO: 919450 - DNA, 15 bp, Homo sapiens
attacctttgattgt

SEQ ID NO: 919451 - DNA, 15 bp, Homo sapiens
tattacctttgattg

SEQ ID NO: 919452 - DNA, 15 bp, Homo sapiens
ctattacctttgatt

SEQ ID NO: 919453 - DNA, 15 bp, Homo sapiens
actattacctttgat

SEQ ID NO: 919454 - DNA, 15 bp, Homo sapiens
tactattacctttga

SEQ ID NO: 919455 - DNA, 15 bp, Homo sapiens
ttactattacctttg

SEQ ID NO: 919456 - DNA, 15 bp, Homo sapiens
tttactattaccttt

SEQ ID NO: 919457 - DNA, 15 bp, Homo sapiens
ctttactattacctt

SEQ ID NO: 919458 - DNA, 15 bp, Homo sapiens
actttactattacct

SEQ ID NO: 919459 - DNA, 15 bp, Homo sapiens
tactttactattacc

SEQ ID NO: 919460 - DNA, 15 bp, Homo sapiens
atactttactattac

SEQ ID NO: 919461 - DNA, 15 bp, Homo sapiens
aatactttactatta

SEQ ID NO: 919462 - DNA, 15 bp, Homo sapiens
caatactttactatt

SEQ ID NO: 919463 - DNA, 15 bp, Homo sapiens
gcaatactttactat

SEQ ID NO: 919464 - DNA, 15 bp, Homo sapiens
tgcaatactttacta

SEQ ID NO: 919465 - DNA, 15 bp, Homo sapiens
ttgcaatactttact

SEQ ID NO: 919466 - DNA, 15 bp, Homo sapiens
tttgcaatactttac

SEQ ID NO: 919467 - DNA, 15 bp, Homo sapiens
ctttgcaatacttta

SEQ ID NO: 919468 - DNA, 15 bp, Homo sapiens
tctttgcaatacttt

SEQ ID NO: 919469 - DNA, 15 bp, Homo sapiens
ctctttgcaatactt

SEQ ID NO: 919470 - DNA, 15 bp, Homo sapiens
tctctttgcaatact

SEQ ID NO: 919471 - DNA, 15 bp, Homo sapiens
ctctctttgcaatac

SEQ ID NO: 919472 - DNA, 15 bp, Homo sapiens
actctctttgcaata

SEQ ID NO: 919473 - DNA, 15 bp, Homo sapiens
tactctctttgcaat

SEQ ID NO: 919474 - DNA, 15 bp, Homo sapiens
ttactctctttgcaa

SEQ ID NO: 919475 - DNA, 15 bp, Homo sapiens
tttactctctttgca

SEQ ID NO: 919476 - DNA, 15 bp, Homo sapiens
ctttactctctttgc

SEQ ID NO: 919477 - DNA, 15 bp, Homo sapiens
cctttactctctttg

SEQ ID NO: 919478 - DNA, 15 bp, Homo sapiens
tcctttactctcttt

SEQ ID NO: 919479 - DNA, 15 bp, Homo sapiens
ttcctttactctctt

SEQ ID NO: 919480 - DNA, 15 bp, Homo sapiens
tttcctttactctct

SEQ ID NO: 919481 - DNA, 15 bp, Homo sapiens
ttttcctttactctc

SEQ ID NO: 919482 - DNA, 15 bp, Homo sapiens
attttcctttactct

SEQ ID NO: 919483 - DNA, 15 bp, Homo sapiens
tattttcctttactc

SEQ ID NO: 919484 - DNA, 15 bp, Homo sapiens
atattttcctttact

SEQ ID NO: 919485 - DNA, 15 bp, Homo sapiens
aatattttcctttac

SEQ ID NO: 919486 - DNA, 15 bp, Homo sapiens
aaatattttccttta

SEQ ID NO: 919487 - DNA, 15 bp, Homo sapiens
aaaatattttccttt

SEQ ID NO: 919488 - DNA, 15 bp, Homo sapiens
aaaaatattttcctt

SEQ ID NO: 919489 - DNA, 15 bp, Homo sapiens
aaaaaatattttcct

SEQ ID NO: 919490 - DNA, 15 bp, Homo sapiens
aaaaaaatattttcc

SEQ ID NO: 919491 - DNA, 15 bp, Homo sapiens
aaaaaaaatattttc

SEQ ID NO: 919492 - DNA, 15 bp, Homo sapiens
aaaaaaaaatatttt

SEQ ID NO: 919493 - DNA, 15 bp, Homo sapiens
aaaaaaaaaatattt

SEQ ID NO: 919494 - DNA, 15 bp, Homo sapiens
aaaaaaaaaaatatt

SEQ ID NO: 919495 - DNA, 15 bp, Homo sapiens
aaaaaaaaaaaatat

SEQ ID NO: 919496 - DNA, 15 bp, Homo sapiens
aaaaaaaaaaaaata

SEQ ID NO: 919497 - DNA, 15 bp, Homo sapiens
ctcaaaaaaaaaaaa

SEQ ID NO: 919498 - DNA, 15 bp, Homo sapiens
tctcaaaaaaaaaaa

SEQ ID NO: 919499 - DNA, 15 bp, Homo sapiens
gtctcaaaaaaaaaa

SEQ ID NO: 919500 - DNA, 15 bp, Homo sapiens
cgtctcaaaaaaaaa

SEQ ID NO: 919501 - DNA, 15 bp, Homo sapiens
ccgtctcaaaaaaaa

SEQ ID NO: 919502 - DNA, 15 bp, Homo sapiens
tccgtctcaaaaaaa

SEQ ID NO: 919503 - DNA, 15 bp, Homo sapiens
ctccgtctcaaaaaa

SEQ ID NO: 919504 - DNA, 15 bp, Homo sapiens
actccgtctcaaaaa

SEQ ID NO: 919505 - DNA, 15 bp, Homo sapiens
gactccgtctcaaaa

SEQ ID NO: 919506 - DNA, 15 bp, Homo sapiens
agactccgtctcaaa

SEQ ID NO: 919507 - DNA, 15 bp, Homo sapiens
gagactccgtctcaa

SEQ ID NO: 919508 - DNA, 15 bp, Homo sapiens
cgagactccgtctca

SEQ ID NO: 919509 - DNA, 15 bp, Homo sapiens
gcgagactccgtctc

SEQ ID NO: 919510 - DNA, 15 bp, Homo sapiens
agcgagactccgtct

SEQ ID NO: 919511 - DNA, 15 bp, Homo sapiens
gagcgagactccgtc

SEQ ID NO: 919512 - DNA, 15 bp, Homo sapiens
agagcgagactccgt

SEQ ID NO: 919513 - DNA, 15 bp, Homo sapiens
cagagcgagactccg

SEQ ID NO: 919514 - DNA, 15 bp, Homo sapiens
acagagcgagactcc

SEQ ID NO: 919515 - DNA, 15 bp, Homo sapiens
gacagagcgagactc

SEQ ID NO: 919516 - DNA, 15 bp, Homo sapiens
agacagagcgagact

SEQ ID NO: 919517 - DNA, 15 bp, Homo sapiens
gagacagagcgagac

SEQ ID NO: 919518 - DNA, 15 bp, Homo sapiens
ggagacagagcgaga

SEQ ID NO: 919519 - DNA, 15 bp, Homo sapiens
gggagacagagcgag

SEQ ID NO: 919520 - DNA, 15 bp, Homo sapiens
tgggagacagagcga

SEQ ID NO: 919521 - DNA, 15 bp, Homo sapiens
ctgggagacagagcg

SEQ ID NO: 919522 - DNA, 15 bp, Homo sapiens
cctgggagacagagc

SEQ ID NO: 919523 - DNA, 15 bp, Homo sapiens
gcctgggagacagag

SEQ ID NO: 919524 - DNA, 15 bp, Homo sapiens
agcctgggagacaga

SEQ ID NO: 919525 - DNA, 15 bp, Homo sapiens
cagcctgggagacag

SEQ ID NO: 919526 - DNA, 15 bp, Homo sapiens
ccagcctgggagaca

SEQ ID NO: 919527 - DNA, 15 bp, Homo sapiens
tccagcctgggagac

SEQ ID NO: 919528 - DNA, 15 bp, Homo sapiens
ctccagcctgggaga

SEQ ID NO: 919529 - DNA, 15 bp, Homo sapiens
actccagcctgggag

SEQ ID NO: 919530 - DNA, 15 bp, Homo sapiens
cactccagcctggga

SEQ ID NO: 919531 - DNA, 15 bp, Homo sapiens
ctgcactccagcctg

SEQ ID NO: 919532 - DNA, 15 bp, Homo sapiens
actgcactccagcct

SEQ ID NO: 919533 - DNA, 15 bp, Homo sapiens
cactgcactccagcc

SEQ ID NO: 919534 - DNA, 15 bp, Homo sapiens
ccactgcactccagc

SEQ ID NO: 919535 - DNA, 15 bp, Homo sapiens
gccactgcactccag

SEQ ID NO: 919536 - DNA, 15 bp, Homo sapiens
cgccactgcactcca

SEQ ID NO: 919537 - DNA, 15 bp, Homo sapiens
gcgccactgcactcc

SEQ ID NO: 919538 - DNA, 15 bp, Homo sapiens
cgcgccactgcactc

SEQ ID NO: 919539 - DNA, 15 bp, Homo sapiens
tcgcgccactgcact

SEQ ID NO: 919540 - DNA, 15 bp, Homo sapiens
atcgcgccactgcac

SEQ ID NO: 919541 - DNA, 15 bp, Homo sapiens
gatcgcgccactgca

SEQ ID NO: 919542 - DNA, 15 bp, Homo sapiens
agatcgcgccactgc

SEQ ID NO: 919543 - DNA, 15 bp, Homo sapiens
gagatcgcgccactg

SEQ ID NO: 919544 - DNA, 15 bp, Homo sapiens
cgagatcgcgccact

SEQ ID NO: 919545 - DNA, 15 bp, Homo sapiens
ccgagatcgcgccac

SEQ ID NO: 919546 - DNA, 15 bp, Homo sapiens
gccgagatcgcgcca

SEQ ID NO: 919547 - DNA, 15 bp, Homo sapiens
agccgagatcgcgcc

SEQ ID NO: 919548 - DNA, 15 bp, Homo sapiens
gagccgagatcgcgc

SEQ ID NO: 919549 - DNA, 15 bp, Homo sapiens
tgagccgagatcgcg

SEQ ID NO: 919550 - DNA, 15 bp, Homo sapiens
gtgagccgagatcgc

SEQ ID NO: 919551 - DNA, 15 bp, Homo sapiens
agtgagccgagatcg

SEQ ID NO: 919552 - DNA, 15 bp, Homo sapiens
cagtgagccgagatc

SEQ ID NO: 919553 - DNA, 15 bp, Homo sapiens
gcagtgagccgagat

SEQ ID NO: 919554 - DNA, 15 bp, Homo sapiens
tgcagtgagccgaga

SEQ ID NO: 919555 - DNA, 15 bp, Homo sapiens
ttgcagtgagccgag

SEQ ID NO: 919556 - DNA, 15 bp, Homo sapiens
cttgcagtgagccga

SEQ ID NO: 919557 - DNA, 15 bp, Homo sapiens
gcttgcagtgagccg

SEQ ID NO: 919558 - DNA, 15 bp, Homo sapiens
agcttgcagtgagcc

SEQ ID NO: 919559 - DNA, 15 bp, Homo sapiens
gagcttgcagtgagc

SEQ ID NO: 919560 - DNA, 15 bp, Homo sapiens
ggagcttgcagtgag

SEQ ID NO: 919561 - DNA, 15 bp, Homo sapiens
cggagcttgcagtga

SEQ ID NO: 919562 - DNA, 15 bp, Homo sapiens
gcggagcttgcagtg

SEQ ID NO: 919563 - DNA, 15 bp, Homo sapiens
ggcggagcttgcagt

SEQ ID NO: 919564 - DNA, 15 bp, Homo sapiens
aggcggagcttgcag

SEQ ID NO: 919565 - DNA, 15 bp, Homo sapiens
gaggcggagcttgca

SEQ ID NO: 919566 - DNA, 15 bp, Homo sapiens
ggaggcggagcttgc

SEQ ID NO: 919567 - DNA, 15 bp, Homo sapiens
gggaggcggagcttg

SEQ ID NO: 919568 - DNA, 15 bp, Homo sapiens
cgggaggcggagctt

SEQ ID NO: 919569 - DNA, 15 bp, Homo sapiens
ccgggaggcggagct

SEQ ID NO: 919570 - DNA, 15 bp, Homo sapiens
cccgggaggcggagc

SEQ ID NO: 919571 - DNA, 15 bp, Homo sapiens
tgaacccgggaggcg

SEQ ID NO: 919572 - DNA, 15 bp, Homo sapiens
atgaacccgggaggc

SEQ ID NO: 919573 - DNA, 15 bp, Homo sapiens
catgaacccgggagg

SEQ ID NO: 919574 - DNA, 15 bp, Homo sapiens
gcatgaacccgggag

SEQ ID NO: 919575 - DNA, 15 bp, Homo sapiens
ggcatgaacccggga

SEQ ID NO: 919576 - DNA, 15 bp, Homo sapiens
tggcatgaacccggg

SEQ ID NO: 919577 - DNA, 15 bp, Homo sapiens
atggcatgaacccgg

SEQ ID NO: 919578 - DNA, 15 bp, Homo sapiens
aatggcatgaacccg

SEQ ID NO: 919579 - DNA, 15 bp, Homo sapiens
gaatggcatgaaccc

SEQ ID NO: 919580 - DNA, 15 bp, Homo sapiens
agaatggcatgaacc

SEQ ID NO: 919581 - DNA, 15 bp, Homo sapiens
gagaatggcatgaac

SEQ ID NO: 919582 - DNA, 15 bp, Homo sapiens
ggagaatggcatgaa

SEQ ID NO: 919583 - DNA, 15 bp, Homo sapiens
aggagaatggcatga

SEQ ID NO: 919584 - DNA, 15 bp, Homo sapiens
caggagaatggcatg

SEQ ID NO: 919585 - DNA, 15 bp, Homo sapiens
gcaggagaatggcat

SEQ ID NO: 919586 - DNA, 15 bp, Homo sapiens
ggcaggagaatggca

SEQ ID NO: 919587 - DNA, 15 bp, Homo sapiens
aggcaggagaatggc

SEQ ID NO: 919588 - DNA, 15 bp, Homo sapiens
gaggcaggagaatgg

SEQ ID NO: 919589 - DNA, 15 bp, Homo sapiens
tgaggcaggagaatg

SEQ ID NO: 919590 - DNA, 15 bp, Homo sapiens
ctgaggcaggagaat

SEQ ID NO: 919591 - DNA, 15 bp, Homo sapiens
gctgaggcaggagaa

SEQ ID NO: 919592 - DNA, 15 bp, Homo sapiens
ggctgaggcaggaga

SEQ ID NO: 919593 - DNA, 15 bp, Homo sapiens
aggctgaggcaggag

SEQ ID NO: 919594 - DNA, 15 bp, Homo sapiens
gaggctgaggcagga

SEQ ID NO: 919595 - DNA, 15 bp, Homo sapiens
ggaggctgaggcagg

SEQ ID NO: 919596 - DNA, 15 bp, Homo sapiens
gggaggctgaggcag

SEQ ID NO: 919597 - DNA, 15 bp, Homo sapiens
tgggaggctgaggca

SEQ ID NO: 919598 - DNA, 15 bp, Homo sapiens
ttgggaggctgaggc

SEQ ID NO: 919599 - DNA, 15 bp, Homo sapiens
cttgggaggctgagg

SEQ ID NO: 919600 - DNA, 15 bp, Homo sapiens
acttgggaggctgag

SEQ ID NO: 919601 - DNA, 15 bp, Homo sapiens
tacttgggaggctga

SEQ ID NO: 919602 - DNA, 15 bp, Homo sapiens
ctacttgggaggctg

SEQ ID NO: 919603 - DNA, 15 bp, Homo sapiens
gctacttgggaggct

SEQ ID NO: 919604 - DNA, 15 bp, Homo sapiens
agctacttgggaggc

SEQ ID NO: 919605 - DNA, 15 bp, Homo sapiens
cagctacttgggagg

SEQ ID NO: 919606 - DNA, 15 bp, Homo sapiens
ccagctacttgggag

SEQ ID NO: 919607 - DNA, 15 bp, Homo sapiens
cccagctacttggga

SEQ ID NO: 919608 - DNA, 15 bp, Homo sapiens
tcccagctacttggg

SEQ ID NO: 919609 - DNA, 15 bp, Homo sapiens
gtcccagctacttgg

SEQ ID NO: 919610 - DNA, 15 bp, Homo sapiens
agtcccagctacttg

SEQ ID NO: 919611 - DNA, 15 bp, Homo sapiens
tagtcccagctactt

SEQ ID NO: 919612 - DNA, 15 bp, Homo sapiens
gtagtcccagctact

SEQ ID NO: 919613 - DNA, 15 bp, Homo sapiens
tgtagtcccagctac

SEQ ID NO: 919614 - DNA, 15 bp, Homo sapiens
ctgtagtcccagcta

SEQ ID NO: 919615 - DNA, 15 bp, Homo sapiens
cctgtagtcccagct

SEQ ID NO: 919616 - DNA, 15 bp, Homo sapiens
gcctgtagtcccagc

SEQ ID NO: 919617 - DNA, 15 bp, Homo sapiens
cgcctgtagtcccag

SEQ ID NO: 919618 - DNA, 15 bp, Homo sapiens
gcgcctgtagtccca

SEQ ID NO: 919619 - DNA, 15 bp, Homo sapiens
ggcgcctgtagtccc

SEQ ID NO: 919620 - DNA, 15 bp, Homo sapiens
gggcgcctgtagtcc

SEQ ID NO: 919621 - DNA, 15 bp, Homo sapiens
cgggcgcctgtagtc

SEQ ID NO: 919622 - DNA, 15 bp, Homo sapiens
gcgggcgcctgtagt

SEQ ID NO: 919623 - DNA, 15 bp, Homo sapiens
ggcgggcgcctgtag

SEQ ID NO: 919624 - DNA, 15 bp, Homo sapiens
tggcgggcgcctgta

SEQ ID NO: 919625 - DNA, 15 bp, Homo sapiens
gtggcgggcgcctgt

SEQ ID NO: 919626 - DNA, 15 bp, Homo sapiens
ggtggcgggcgcctg

SEQ ID NO: 919627 - DNA, 15 bp, Homo sapiens
tggtggcgggcgcct

SEQ ID NO: 919628 - DNA, 15 bp, Homo sapiens
gtggtggcgggcgcc

SEQ ID NO: 919629 - DNA, 15 bp, Homo sapiens
cgtggtggcgggcgc

SEQ ID NO: 919630 - DNA, 15 bp, Homo sapiens
gcgtggtggcgggcg

SEQ ID NO: 919631 - DNA, 15 bp, Homo sapiens
ggcgtggtggcgggc

SEQ ID NO: 919632 - DNA, 15 bp, Homo sapiens
gggcgtggtggcggg

SEQ ID NO: 919633 - DNA, 15 bp, Homo sapiens
cgggcgtggtggcgg

SEQ ID NO: 919634 - DNA, 15 bp, Homo sapiens
ccgggcgtggtggcg

SEQ ID NO: 919635 - DNA, 15 bp, Homo sapiens
gccgggcgtggtggc

SEQ ID NO: 919636 - DNA, 15 bp, Homo sapiens
agccgggcgtggtgg

SEQ ID NO: 919637 - DNA, 15 bp, Homo sapiens
tagccgggcgtggtg

SEQ ID NO: 919638 - DNA, 15 bp, Homo sapiens
ttagccgggcgtggt

SEQ ID NO: 919639 - DNA, 15 bp, Homo sapiens
attagccgggcgtgg

SEQ ID NO: 919640 - DNA, 15 bp, Homo sapiens
aattagccgggcgtg

SEQ ID NO: 919641 - DNA, 15 bp, Homo sapiens
aaattagccgggcgt

SEQ ID NO: 919642 - DNA, 15 bp, Homo sapiens
aaaattagccgggcg

SEQ ID NO: 919643 - DNA, 15 bp, Homo sapiens
aaaaaattagccggg

SEQ ID NO: 919644 - DNA, 15 bp, Homo sapiens
caaaaaattagccgg

SEQ ID NO: 919645 - DNA, 15 bp, Homo sapiens
acaaaaaattagccg

SEQ ID NO: 919646 - DNA, 15 bp, Homo sapiens
tacaaaaaattagcc

SEQ ID NO: 919647 - DNA, 15 bp, Homo sapiens
atacaaaaaattagc

SEQ ID NO: 919648 - DNA, 15 bp, Homo sapiens
aatacaaaaaattag

SEQ ID NO: 919649 - DNA, 15 bp, Homo sapiens
aaatacaaaaaatta

SEQ ID NO: 919650 - DNA, 15 bp, Homo sapiens
aaaatacaaaaaatt

SEQ ID NO: 919651 - DNA, 15 bp, Homo sapiens
aaaaatacaaaaaat

SEQ ID NO: 919652 - DNA, 15 bp, Homo sapiens
taaaaatacaaaaaa

SEQ ID NO: 919653 - DNA, 15 bp, Homo sapiens
ctctactaaaaatac

SEQ ID NO: 919654 - DNA, 15 bp, Homo sapiens
tctctactaaaaata

SEQ ID NO: 919655 - DNA, 15 bp, Homo sapiens
gtctctactaaaaat

SEQ ID NO: 919656 - DNA, 15 bp, Homo sapiens
cgtctctactaaaaa

SEQ ID NO: 919657 - DNA, 15 bp, Homo sapiens
ccgtctctactaaaa

SEQ ID NO: 919658 - DNA, 15 bp, Homo sapiens
cccgtctctactaaa

SEQ ID NO: 919659 - DNA, 15 bp, Homo sapiens
ccccgtctctactaa

SEQ ID NO: 919660 - DNA, 15 bp, Homo sapiens
accccgtctctacta

SEQ ID NO: 919661 - DNA, 15 bp, Homo sapiens
aaccccgtctctact

SEQ ID NO: 919662 - DNA, 15 bp, Homo sapiens
aaaccccgtctctac

SEQ ID NO: 919663 - DNA, 15 bp, Homo sapiens
gaaaccccgtctcta

SEQ ID NO: 919664 - DNA, 15 bp, Homo sapiens
tgaaaccccgtctct

SEQ ID NO: 919665 - DNA, 15 bp, Homo sapiens
gtgaaaccccgtctc

SEQ ID NO: 919666 - DNA, 15 bp, Homo sapiens
ggtgaaaccccgtct

SEQ ID NO: 919667 - DNA, 15 bp, Homo sapiens
cggtgaaaccccgtc

SEQ ID NO: 919668 - DNA, 15 bp, Homo sapiens
acggtgaaaccccgt

SEQ ID NO: 919669 - DNA, 15 bp, Homo sapiens
aacggtgaaaccccg

SEQ ID NO: 919670 - DNA, 15 bp, Homo sapiens
aaacggtgaaacccc

SEQ ID NO: 919671 - DNA, 15 bp, Homo sapiens
aaaacggtgaaaccc

SEQ ID NO: 919672 - DNA, 15 bp, Homo sapiens
taaaacggtgaaacc

SEQ ID NO: 919673 - DNA, 15 bp, Homo sapiens
ctaaaacggtgaaac

SEQ ID NO: 919674 - DNA, 15 bp, Homo sapiens
gctaaaacggtgaaa

SEQ ID NO: 919675 - DNA, 15 bp, Homo sapiens
ggctaaaacggtgaa

SEQ ID NO: 919676 - DNA, 15 bp, Homo sapiens
cggctaaaacggtga

SEQ ID NO: 919677 - DNA, 15 bp, Homo sapiens
ccggctaaaacggtg

SEQ ID NO: 919678 - DNA, 15 bp, Homo sapiens
cccggctaaaacggt

SEQ ID NO: 919679 - DNA, 15 bp, Homo sapiens
tcccggctaaaacgg

SEQ ID NO: 919680 - DNA, 15 bp, Homo sapiens
atcccggctaaaacg

SEQ ID NO: 919681 - DNA, 15 bp, Homo sapiens
catcccggctaaaac

SEQ ID NO: 919682 - DNA, 15 bp, Homo sapiens
ccatcccggctaaaa

SEQ ID NO: 919683 - DNA, 15 bp, Homo sapiens
accatcccggctaaa

SEQ ID NO: 919684 - DNA, 15 bp, Homo sapiens
gaccatcccggctaa

SEQ ID NO: 919685 - DNA, 15 bp, Homo sapiens
agaccatcccggcta

SEQ ID NO: 919686 - DNA, 15 bp, Homo sapiens
gagaccatcccggct

SEQ ID NO: 919687 - DNA, 15 bp, Homo sapiens
cgagaccatcccggc

SEQ ID NO: 919688 - DNA, 15 bp, Homo sapiens
tcgagaccatcccgg

SEQ ID NO: 919689 - DNA, 15 bp, Homo sapiens
atcgagaccatcccg

SEQ ID NO: 919690 - DNA, 15 bp, Homo sapiens
gatcgagaccatccc

SEQ ID NO: 919691 - DNA, 15 bp, Homo sapiens
agatcgagaccatcc

SEQ ID NO: 919692 - DNA, 15 bp, Homo sapiens
aagatcgagaccatc

SEQ ID NO: 919693 - DNA, 15 bp, Homo sapiens
gaagatcgagaccat

SEQ ID NO: 919694 - DNA, 15 bp, Homo sapiens
agaagatcgagacca

SEQ ID NO: 919695 - DNA, 15 bp, Homo sapiens
cagaagatcgagacc

SEQ ID NO: 919696 - DNA, 15 bp, Homo sapiens
tcagaagatcgagac

SEQ ID NO: 919697 - DNA, 15 bp, Homo sapiens
gtcagaagatcgaga

SEQ ID NO: 919698 - DNA, 15 bp, Homo sapiens
ggtcagaagatcgag

SEQ ID NO: 919699 - DNA, 15 bp, Homo sapiens
aggtcagaagatcga

SEQ ID NO: 919700 - DNA, 15 bp, Homo sapiens
gaggtcagaagatcg

SEQ ID NO: 919701 - DNA, 15 bp, Homo sapiens
cgaggtcagaagatc

SEQ ID NO: 919702 - DNA, 15 bp, Homo sapiens
acgaggtcagaagat

SEQ ID NO: 919703 - DNA, 15 bp, Homo sapiens
cacgaggtcagaaga

SEQ ID NO: 919704 - DNA, 15 bp, Homo sapiens
tcacgaggtcagaag

SEQ ID NO: 919705 - DNA, 15 bp, Homo sapiens
atcacgaggtcagaa

SEQ ID NO: 919706 - DNA, 15 bp, Homo sapiens
gatcacgaggtcaga

SEQ ID NO: 919707 - DNA, 15 bp, Homo sapiens
ggatcacgaggtcag

SEQ ID NO: 919708 - DNA, 15 bp, Homo sapiens
cggatcacgaggtca

SEQ ID NO: 919709 - DNA, 15 bp, Homo sapiens
gcggatcacgaggtc

SEQ ID NO: 919710 - DNA, 15 bp, Homo sapiens
ggcggatcacgaggt

SEQ ID NO: 919711 - DNA, 15 bp, Homo sapiens
gggcggatcacgagg

SEQ ID NO: 919712 - DNA, 15 bp, Homo sapiens
cgggcggatcacgag

SEQ ID NO: 919713 - DNA, 15 bp, Homo sapiens
gcgggcggatcacga

SEQ ID NO: 919714 - DNA, 15 bp, Homo sapiens
ggcgggcggatcacg

SEQ ID NO: 919715 - DNA, 15 bp, Homo sapiens
aggcgggcggatcac

SEQ ID NO: 919716 - DNA, 15 bp, Homo sapiens
gaggcgggcggatca

SEQ ID NO: 919717 - DNA, 15 bp, Homo sapiens
cgaggcgggcggatc

SEQ ID NO: 919718 - DNA, 15 bp, Homo sapiens
ccgaggcgggcggat

SEQ ID NO: 919719 - DNA, 15 bp, Homo sapiens
gccgaggcgggcgga

SEQ ID NO: 919720 - DNA, 15 bp, Homo sapiens
ggccgaggcgggcgg

SEQ ID NO: 919721 - DNA, 15 bp, Homo sapiens
aggccgaggcgggcg

SEQ ID NO: 919722 - DNA, 15 bp, Homo sapiens
gaggccgaggcgggc

SEQ ID NO: 919723 - DNA, 15 bp, Homo sapiens
ggaggccgaggcggg

SEQ ID NO: 919724 - DNA, 15 bp, Homo sapiens
gggaggccgaggcgg

SEQ ID NO: 919725 - DNA, 15 bp, Homo sapiens
tgggaggccgaggcg

SEQ ID NO: 919726 - DNA, 15 bp, Homo sapiens
ttgggaggccgaggc

SEQ ID NO: 919727 - DNA, 15 bp, Homo sapiens
tttgggaggccgagg

SEQ ID NO: 919728 - DNA, 15 bp, Homo sapiens
ctttgggaggccgag

SEQ ID NO: 919729 - DNA, 15 bp, Homo sapiens
actttgggaggccga

SEQ ID NO: 919730 - DNA, 15 bp, Homo sapiens
cactttgggaggccg

SEQ ID NO: 919731 - DNA, 15 bp, Homo sapiens
aatcccagcactttg

SEQ ID NO: 919732 - DNA, 15 bp, Homo sapiens
taatcccagcacttt

SEQ ID NO: 919733 - DNA, 15 bp, Homo sapiens
gtaatcccagcactt

SEQ ID NO: 919734 - DNA, 15 bp, Homo sapiens
tgtaatcccagcact

SEQ ID NO: 919735 - DNA, 15 bp, Homo sapiens
ctgtaatcccagcac

SEQ ID NO: 919736 - DNA, 15 bp, Homo sapiens
cctgtaatcccagca

SEQ ID NO: 919737 - DNA, 15 bp, Homo sapiens
cgcctgtaatcccag

SEQ ID NO: 919738 - DNA, 15 bp, Homo sapiens
acgcctgtaatccca

SEQ ID NO: 919739 - DNA, 15 bp, Homo sapiens
cacgcctgtaatccc

SEQ ID NO: 919740 - DNA, 15 bp, Homo sapiens
tcacgcctgtaatcc

SEQ ID NO: 919741 - DNA, 15 bp, Homo sapiens
ctcacgcctgtaatc

SEQ ID NO: 919742 - DNA, 15 bp, Homo sapiens
gctcacgcctgtaat

SEQ ID NO: 919743 - DNA, 15 bp, Homo sapiens
ggctcacgcctgtaa

SEQ ID NO: 919744 - DNA, 15 bp, Homo sapiens
cggtggctcacgcct

SEQ ID NO: 919745 - DNA, 15 bp, Homo sapiens
gcggtggctcacgcc

SEQ ID NO: 919746 - DNA, 15 bp, Homo sapiens
cgcggtggctcacgc

SEQ ID NO: 919747 - DNA, 15 bp, Homo sapiens
gcgcggtggctcacg

SEQ ID NO: 919748 - DNA, 15 bp, Homo sapiens
ggcgcggtggctcac

SEQ ID NO: 919749 - DNA, 15 bp, Homo sapiens
gggcgcggtggctca

SEQ ID NO: 919750 - DNA, 15 bp, Homo sapiens
cgggcgcggtggctc

SEQ ID NO: 919751 - DNA, 15 bp, Homo sapiens
ccgggcgcggtggct

SEQ ID NO: 919752 - DNA, 15 bp, Homo sapiens
gccgggcgcggtggc

SEQ ID NO: 919753 - DNA, 15 bp, Homo sapiens
ggccgggcgcggtgg

SEQ ID NO: 919754 - DNA, 15 bp, Homo sapiens
tggccgggcgcggtg

SEQ ID NO: 919755 - DNA, 15 bp, Homo sapiens
ctggccgggcgcggt

SEQ ID NO: 919756 - DNA, 15 bp, Homo sapiens
cctggccgggcgcgg

SEQ ID NO: 919757 - DNA, 15 bp, Homo sapiens
tcctggccgggcgcg

SEQ ID NO: 919758 - DNA, 15 bp, Homo sapiens
ttcctggccgggcgc

SEQ ID NO: 919759 - DNA, 15 bp, Homo sapiens
tttcctggccgggcg

SEQ ID NO: 919760 - DNA, 15 bp, Homo sapiens
ttttcctggccgggc

SEQ ID NO: 919761 - DNA, 15 bp, Homo sapiens
attttcctggccggg

SEQ ID NO: 919762 - DNA, 15 bp, Homo sapiens
tattttcctggccgg

SEQ ID NO: 919763 - DNA, 15 bp, Homo sapiens
atattttcctggccg

SEQ ID NO: 919764 - DNA, 15 bp, Homo sapiens
aatattttcctggcc

SEQ ID NO: 919765 - DNA, 15 bp, Homo sapiens
aaatattttcctggc

SEQ ID NO: 919766 - DNA, 15 bp, Homo sapiens
aaaatattttcctgg

SEQ ID NO: 919767 - DNA, 15 bp, Homo sapiens
aaaaatattttcctg

SEQ ID NO: 919768 - DNA, 15 bp, Homo sapiens
taaaaatattttcct

SEQ ID NO: 919769 - DNA, 15 bp, Homo sapiens
ataaaaatattttcc

SEQ ID NO: 919770 - DNA, 15 bp, Homo sapiens
aataaaaatattttc

SEQ ID NO: 919771 - DNA, 15 bp, Homo sapiens
caataaaaatatttt

SEQ ID NO: 919772 - DNA, 15 bp, Homo sapiens
acaataaaaatattt

SEQ ID NO: 919773 - DNA, 15 bp, Homo sapiens
cacaataaaaatatt

SEQ ID NO: 919774 - DNA, 15 bp, Homo sapiens
acacaataaaaatat

SEQ ID NO: 919775 - DNA, 15 bp, Homo sapiens
aacacaataaaaata

SEQ ID NO: 919776 - DNA, 15 bp, Homo sapiens
aaacacaataaaaat

SEQ ID NO: 919777 - DNA, 15 bp, Homo sapiens
aaaacacaataaaaa

SEQ ID NO: 919778 - DNA, 15 bp, Homo sapiens
gaaaacacaataaaa

SEQ ID NO: 919779 - DNA, 15 bp, Homo sapiens
tgaaaacacaataaa

SEQ ID NO: 919780 - DNA, 15 bp, Homo sapiens
atgaaaacacaataa

SEQ ID NO: 919781 - DNA, 15 bp, Homo sapiens
aatgaaaacacaata

SEQ ID NO: 919782 - DNA, 15 bp, Homo sapiens
aaatgaaaacacaat

SEQ ID NO: 919783 - DNA, 15 bp, Homo sapiens
gaaatgaaaacacaa

SEQ ID NO: 919784 - DNA, 15 bp, Homo sapiens
agaaatgaaaacaca

SEQ ID NO: 919785 - DNA, 15 bp, Homo sapiens
aagaaatgaaaacac

SEQ ID NO: 919786 - DNA, 15 bp, Homo sapiens
gaagaaatgaaaaca

SEQ ID NO: 919787 - DNA, 15 bp, Homo sapiens
ggaagaaatgaaaac

SEQ ID NO: 919788 - DNA, 15 bp, Homo sapiens
gggaagaaatgaaaa

SEQ ID NO: 919789 - DNA, 15 bp, Homo sapiens
ggggaagaaatgaaa

SEQ ID NO: 919790 - DNA, 15 bp, Homo sapiens
gggggaagaaatgaa

SEQ ID NO: 919791 - DNA, 15 bp, Homo sapiens
agggggaagaaatga

SEQ ID NO: 919792 - DNA, 15 bp, Homo sapiens
aagggggaagaaatg

SEQ ID NO: 919793 - DNA, 15 bp, Homo sapiens
aaagggggaagaaat

SEQ ID NO: 919794 - DNA, 15 bp, Homo sapiens
taaagggggaagaaa

SEQ ID NO: 919795 - DNA, 15 bp, Homo sapiens
ataaagggggaagaa

SEQ ID NO: 919796 - DNA, 15 bp, Homo sapiens
gataaagggggaaga

SEQ ID NO: 919797 - DNA, 15 bp, Homo sapiens
agataaagggggaag

SEQ ID NO: 919798 - DNA, 15 bp, Homo sapiens
gagataaagggggaa

SEQ ID NO: 919799 - DNA, 15 bp, Homo sapiens
tgagataaaggggga

SEQ ID NO: 919800 - DNA, 15 bp, Homo sapiens
atgagataaaggggg

SEQ ID NO: 919801 - DNA, 15 bp, Homo sapiens
aatgagataaagggg

SEQ ID NO: 919802 - DNA, 15 bp, Homo sapiens
gaatgagataaaggg

SEQ ID NO: 919803 - DNA, 15 bp, Homo sapiens
agaatgagataaagg

SEQ ID NO: 919804 - DNA, 15 bp, Homo sapiens
aagaatgagataaag

SEQ ID NO: 919805 - DNA, 15 bp, Homo sapiens
caagaatgagataaa

SEQ ID NO: 919806 - DNA, 15 bp, Homo sapiens
tcaagaatgagataa

SEQ ID NO: 919807 - DNA, 15 bp, Homo sapiens
ttcaagaatgagata

SEQ ID NO: 919808 - DNA, 15 bp, Homo sapiens
gttcaagaatgagat

SEQ ID NO: 919809 - DNA, 15 bp, Homo sapiens
tgttcaagaatgaga

SEQ ID NO: 919810 - DNA, 15 bp, Homo sapiens
atgttcaagaatgag

SEQ ID NO: 919811 - DNA, 15 bp, Homo sapiens
gatgttcaagaatga

SEQ ID NO: 919812 - DNA, 15 bp, Homo sapiens
agatgttcaagaatg

SEQ ID NO: 919813 - DNA, 15 bp, Homo sapiens
tagatgttcaagaat

SEQ ID NO: 919814 - DNA, 15 bp, Homo sapiens
ttagatgttcaagaa

SEQ ID NO: 919815 - DNA, 15 bp, Homo sapiens
attagatgttcaaga

SEQ ID NO: 919816 - DNA, 15 bp, Homo sapiens
gattagatgttcaag

SEQ ID NO: 919817 - DNA, 15 bp, Homo sapiens
agattagatgttcaa

SEQ ID NO: 919818 - DNA, 15 bp, Homo sapiens
agctcttacaaaaag

SEQ ID NO: 919819 - DNA, 15 bp, Homo sapiens
aagctcttacaaaaa

SEQ ID NO: 919820 - DNA, 15 bp, Homo sapiens
caagctcttacaaaa

SEQ ID NO: 919821 - DNA, 15 bp, Homo sapiens
tcaagctcttacaaa

SEQ ID NO: 919822 - DNA, 15 bp, Homo sapiens
ctcaagctcttacaa

SEQ ID NO: 919823 - DNA, 15 bp, Homo sapiens
gctcaagctcttaca

SEQ ID NO: 919824 - DNA, 15 bp, Homo sapiens
tgctcaagctcttac

SEQ ID NO: 919825 - DNA, 15 bp, Homo sapiens
ttgctcaagctctta

SEQ ID NO: 919826 - DNA, 15 bp, Homo sapiens
cttgctcaagctctt

SEQ ID NO: 919827 - DNA, 15 bp, Homo sapiens
acttgctcaagctct

SEQ ID NO: 919828 - DNA, 15 bp, Homo sapiens
gacttgctcaagctc

SEQ ID NO: 919829 - DNA, 15 bp, Homo sapiens
tgacttgctcaagct

SEQ ID NO: 919830 - DNA, 15 bp, Homo sapiens
atgacttgctcaagc

SEQ ID NO: 919831 - DNA, 15 bp, Homo sapiens
gatgacttgctcaag

SEQ ID NO: 919832 - DNA, 15 bp, Homo sapiens
agatgacttgctcaa

SEQ ID NO: 919833 - DNA, 15 bp, Homo sapiens
aagatgacttgctca

SEQ ID NO: 919834 - DNA, 15 bp, Homo sapiens
taagatgacttgctc

SEQ ID NO: 919835 - DNA, 15 bp, Homo sapiens
gtaagatgacttgct

SEQ ID NO: 919836 - DNA, 15 bp, Homo sapiens
ggtaagatgacttgc

SEQ ID NO: 919837 - DNA, 15 bp, Homo sapiens
aggtaagatgacttg

SEQ ID NO: 919838 - DNA, 15 bp, Homo sapiens
taggtaagatgactt

SEQ ID NO: 919839 - DNA, 15 bp, Homo sapiens
ataggtaagatgact

SEQ ID NO: 919840 - DNA, 15 bp, Homo sapiens
gataggtaagatgac

SEQ ID NO: 919841 - DNA, 15 bp, Homo sapiens
agataggtaagatga

SEQ ID NO: 919842 - DNA, 15 bp, Homo sapiens
cagataggtaagatg

SEQ ID NO: 919843 - DNA, 15 bp, Homo sapiens
acagataggtaagat

SEQ ID NO: 919844 - DNA, 15 bp, Homo sapiens
cacagataggtaaga

SEQ ID NO: 919845 - DNA, 15 bp, Homo sapiens
acacagataggtaag

SEQ ID NO: 919846 - DNA, 15 bp, Homo sapiens
gacacagataggtaa

SEQ ID NO: 919847 - DNA, 15 bp, Homo sapiens
agacacagataggta

SEQ ID NO: 919848 - DNA, 15 bp, Homo sapiens
gagacacagataggt

SEQ ID NO: 919849 - DNA, 15 bp, Homo sapiens
tgagacacagatagg

SEQ ID NO: 919850 - DNA, 15 bp, Homo sapiens
ctgagacacagatag

SEQ ID NO: 919851 - DNA, 15 bp, Homo sapiens
actgagacacagata

SEQ ID NO: 919852 - DNA, 15 bp, Homo sapiens
aactgagacacagat

SEQ ID NO: 919853 - DNA, 15 bp, Homo sapiens
aaactgagacacaga

SEQ ID NO: 919854 - DNA, 15 bp, Homo sapiens
gaaactgagacacag

SEQ ID NO: 919855 - DNA, 15 bp, Homo sapiens
ggaaactgagacaca

SEQ ID NO: 919856 - DNA, 15 bp, Homo sapiens
aggaaactgagacac

SEQ ID NO: 919857 - DNA, 15 bp, Homo sapiens
aaggaaactgagaca

SEQ ID NO: 919858 - DNA, 15 bp, Homo sapiens
taaggaaactgagac

SEQ ID NO: 919859 - DNA, 15 bp, Homo sapiens
ataaggaaactgaga

SEQ ID NO: 919860 - DNA, 15 bp, Homo sapiens
gataaggaaactgag

SEQ ID NO: 919861 - DNA, 15 bp, Homo sapiens
agataaggaaactga

SEQ ID NO: 919862 - DNA, 15 bp, Homo sapiens
cagataaggaaactg

SEQ ID NO: 919863 - DNA, 15 bp, Homo sapiens
acagataaggaaact

SEQ ID NO: 919864 - DNA, 15 bp, Homo sapiens
tacagataaggaaac

SEQ ID NO: 919865 - DNA, 15 bp, Homo sapiens
ttacagataaggaaa

SEQ ID NO: 919866 - DNA, 15 bp, Homo sapiens
cttacagataaggaa

SEQ ID NO: 919867 - DNA, 15 bp, Homo sapiens
acttacagataagga

SEQ ID NO: 919868 - DNA, 15 bp, Homo sapiens
aacttacagataagg

SEQ ID NO: 919869 - DNA, 15 bp, Homo sapiens
taacttacagataag

SEQ ID NO: 919870 - DNA, 15 bp, Homo sapiens
gtaacttacagataa

SEQ ID NO: 919871 - DNA, 15 bp, Homo sapiens
agtaacttacagata

SEQ ID NO: 919872 - DNA, 15 bp, Homo sapiens
aagtaacttacagat

SEQ ID NO: 919873 - DNA, 15 bp, Homo sapiens
aaagtaacttacaga

SEQ ID NO: 919874 - DNA, 15 bp, Homo sapiens
caaagtaacttacag

SEQ ID NO: 919875 - DNA, 15 bp, Homo sapiens
acaaagtaacttaca

SEQ ID NO: 919876 - DNA, 15 bp, Homo sapiens
tacaaagtaacttac

SEQ ID NO: 919877 - DNA, 15 bp, Homo sapiens
ttacaaagtaactta

SEQ ID NO: 919878 - DNA, 15 bp, Homo sapiens
cttacaaagtaactt

SEQ ID NO: 919879 - DNA, 15 bp, Homo sapiens
acttacaaagtaact

SEQ ID NO: 919880 - DNA, 15 bp, Homo sapiens
tacttacaaagtaac

SEQ ID NO: 919881 - DNA, 15 bp, Homo sapiens
ttacttacaaagtaa

SEQ ID NO: 919882 - DNA, 15 bp, Homo sapiens
attacttacaaagta

SEQ ID NO: 919883 - DNA, 15 bp, Homo sapiens
tattacttacaaagt

SEQ ID NO: 919884 - DNA, 15 bp, Homo sapiens
gtattacttacaaag

SEQ ID NO: 919885 - DNA, 15 bp, Homo sapiens
ggtattacttacaaa

SEQ ID NO: 919886 - DNA, 15 bp, Homo sapiens
gggtattacttacaa

SEQ ID NO: 919887 - DNA, 15 bp, Homo sapiens
agggtattacttaca

SEQ ID NO: 919888 - DNA, 15 bp, Homo sapiens
aagggtattacttac

SEQ ID NO: 919889 - DNA, 15 bp, Homo sapiens
aaagggtattactta

SEQ ID NO: 919890 - DNA, 15 bp, Homo sapiens
aaaagggtattactt

SEQ ID NO: 919891 - DNA, 15 bp, Homo sapiens
gaaaagggtattact

SEQ ID NO: 919892 - DNA, 15 bp, Homo sapiens
tgaaaagggtattac

SEQ ID NO: 919893 - DNA, 15 bp, Homo sapiens
atgaaaagggtatta

SEQ ID NO: 919894 - DNA, 15 bp, Homo sapiens
tatgaaaagggtatt

SEQ ID NO: 919895 - DNA, 15 bp, Homo sapiens
ctatgaaaagggtat

SEQ ID NO: 919896 - DNA, 15 bp, Homo sapiens
cctatgaaaagggta

SEQ ID NO: 919897 - DNA, 15 bp, Homo sapiens
tcctatgaaaagggt

SEQ ID NO: 919898 - DNA, 15 bp, Homo sapiens
atcctatgaaaaggg

SEQ ID NO: 919899 - DNA, 15 bp, Homo sapiens
aatcctatgaaaagg

SEQ ID NO: 919900 - DNA, 15 bp, Homo sapiens
taatcctatgaaaag

SEQ ID NO: 919901 - DNA, 15 bp, Homo sapiens
ataatcctatgaaaa

SEQ ID NO: 919902 - DNA, 15 bp, Homo sapiens
aataatcctatgaaa

SEQ ID NO: 919903 - DNA, 15 bp, Homo sapiens
caataatcctatgaa

SEQ ID NO: 919904 - DNA, 15 bp, Homo sapiens
acaataatcctatga

SEQ ID NO: 919905 - DNA, 15 bp, Homo sapiens
tacaataatcctatg

SEQ ID NO: 919906 - DNA, 15 bp, Homo sapiens
ttacaataatcctat

SEQ ID NO: 919907 - DNA, 15 bp, Homo sapiens
tttacaataatccta

SEQ ID NO: 919908 - DNA, 15 bp, Homo sapiens
ttttacaataatcct

SEQ ID NO: 919909 - DNA, 15 bp, Homo sapiens
gttttacaataatcc

SEQ ID NO: 919910 - DNA, 15 bp, Homo sapiens
cgttttacaataatc

SEQ ID NO: 919911 - DNA, 15 bp, Homo sapiens
acgttttacaataat

SEQ ID NO: 919912 - DNA, 15 bp, Homo sapiens
tacgttttacaataa

SEQ ID NO: 919913 - DNA, 15 bp, Homo sapiens
ttacgttttacaata

SEQ ID NO: 919914 - DNA, 15 bp, Homo sapiens
tttacgttttacaat

SEQ ID NO: 919915 - DNA, 15 bp, Homo sapiens
atttacgttttacaa

SEQ ID NO: 919916 - DNA, 15 bp, Homo sapiens
catttacgttttaca

SEQ ID NO: 919917 - DNA, 15 bp, Homo sapiens
tcatttacgttttac

SEQ ID NO: 919918 - DNA, 15 bp, Homo sapiens
ttcatttacgtttta

SEQ ID NO: 919919 - DNA, 15 bp, Homo sapiens
attcatttacgtttt

SEQ ID NO: 919920 - DNA, 15 bp, Homo sapiens
aattcatttacgttt

SEQ ID NO: 919921 - DNA, 15 bp, Homo sapiens
taattcatttacgtt

SEQ ID NO: 919922 - DNA, 15 bp, Homo sapiens
ataattcatttacgt

SEQ ID NO: 919923 - DNA, 15 bp, Homo sapiens
aataattcatttacg

SEQ ID NO: 919924 - DNA, 15 bp, Homo sapiens
taataattcatttac

SEQ ID NO: 919925 - DNA, 15 bp, Homo sapiens
ctaataattcattta

SEQ ID NO: 919926 - DNA, 15 bp, Homo sapiens
tctaataattcattt

SEQ ID NO: 919927 - DNA, 15 bp, Homo sapiens
atctaataattcatt

SEQ ID NO: 919928 - DNA, 15 bp, Homo sapiens
catctaataattcat

SEQ ID NO: 919929 - DNA, 15 bp, Homo sapiens
tcatctaataattca

SEQ ID NO: 919930 - DNA, 15 bp, Homo sapiens
ttcatctaataattc

SEQ ID NO: 919931 - DNA, 15 bp, Homo sapiens
tttcatctaataatt

SEQ ID NO: 919932 - DNA, 15 bp, Homo sapiens
ttttcatctaataat

SEQ ID NO: 919933 - DNA, 15 bp, Homo sapiens
attttcatctaataa

SEQ ID NO: 919934 - DNA, 15 bp, Homo sapiens
cattttcatctaata

SEQ ID NO: 919935 - DNA, 15 bp, Homo sapiens
gcattttcatctaat

SEQ ID NO: 919936 - DNA, 15 bp, Homo sapiens
agcattttcatctaa

SEQ ID NO: 919937 - DNA, 15 bp, Homo sapiens
gagcattttcatcta

SEQ ID NO: 919938 - DNA, 15 bp, Homo sapiens
cgagcattttcatct

SEQ ID NO: 919939 - DNA, 15 bp, Homo sapiens
ccgagcattttcatc

SEQ ID NO: 919940 - DNA, 15 bp, Homo sapiens
tccgagcattttcat

SEQ ID NO: 919941 - DNA, 15 bp, Homo sapiens
gtccgagcattttca

SEQ ID NO: 919942 - DNA, 15 bp, Homo sapiens
agtccgagcattttc

SEQ ID NO: 919943 - DNA, 15 bp, Homo sapiens
tagtccgagcatttt

SEQ ID NO: 919944 - DNA, 15 bp, Homo sapiens
ctagtccgagcattt

SEQ ID NO: 919945 - DNA, 15 bp, Homo sapiens
actagtccgagcatt

SEQ ID NO: 919946 - DNA, 15 bp, Homo sapiens
cactagtccgagcat

SEQ ID NO: 919947 - DNA, 15 bp, Homo sapiens
acactagtccgagca

SEQ ID NO: 919948 - DNA, 15 bp, Homo sapiens
cacactagtccgagc

SEQ ID NO: 919949 - DNA, 15 bp, Homo sapiens
acacactagtccgag

SEQ ID NO: 919950 - DNA, 15 bp, Homo sapiens
cacacactagtccga

SEQ ID NO: 919951 - DNA, 15 bp, Homo sapiens
ccacacactagtccg

SEQ ID NO: 919952 - DNA, 15 bp, Homo sapiens
gccacacactagtcc

SEQ ID NO: 919953 - DNA, 15 bp, Homo sapiens
tgccacacactagtc

SEQ ID NO: 919954 - DNA, 15 bp, Homo sapiens
gtgccacacactagt

SEQ ID NO: 919955 - DNA, 15 bp, Homo sapiens
tgtgccacacactag

SEQ ID NO: 919956 - DNA, 15 bp, Homo sapiens
atgtgccacacacta

SEQ ID NO: 919957 - DNA, 15 bp, Homo sapiens
tatgtgccacacact

SEQ ID NO: 919958 - DNA, 15 bp, Homo sapiens
atatgtgccacacac

SEQ ID NO: 919959 - DNA, 15 bp, Homo sapiens
catatgtgccacaca

SEQ ID NO: 919960 - DNA, 15 bp, Homo sapiens
tcatatgtgccacac

SEQ ID NO: 919961 - DNA, 15 bp, Homo sapiens
ttcatatgtgccaca

SEQ ID NO: 919962 - DNA, 15 bp, Homo sapiens
gttcatatgtgccac

SEQ ID NO: 919963 - DNA, 15 bp, Homo sapiens
tgttcatatgtgcca

SEQ ID NO: 919964 - DNA, 15 bp, Homo sapiens
ctgttcatatgtgcc

SEQ ID NO: 919965 - DNA, 15 bp, Homo sapiens
actgttcatatgtgc

SEQ ID NO: 919966 - DNA, 15 bp, Homo sapiens
aactgttcatatgtg

SEQ ID NO: 919967 - DNA, 15 bp, Homo sapiens
aaactgttcatatgt

SEQ ID NO: 919968 - DNA, 15 bp, Homo sapiens
caaactgttcatatg

SEQ ID NO: 919969 - DNA, 15 bp, Homo sapiens
acaaactgttcatat

SEQ ID NO: 919970 - DNA, 15 bp, Homo sapiens
tacaaactgttcata

SEQ ID NO: 919971 - DNA, 15 bp, Homo sapiens
ttacaaactgttcat

SEQ ID NO: 919972 - DNA, 15 bp, Homo sapiens
tttacaaactgttca

SEQ ID NO: 919973 - DNA, 15 bp, Homo sapiens
atttacaaactgttc

SEQ ID NO: 919974 - DNA, 15 bp, Homo sapiens
catttacaaactgtt

SEQ ID NO: 919975 - DNA, 15 bp, Homo sapiens
acatttacaaactgt

SEQ ID NO: 919976 - DNA, 15 bp, Homo sapiens
aacatttacaaactg

SEQ ID NO: 919977 - DNA, 15 bp, Homo sapiens
taacatttacaaact

SEQ ID NO: 919978 - DNA, 15 bp, Homo sapiens
ctaacatttacaaac

SEQ ID NO: 919979 - DNA, 15 bp, Homo sapiens
gctaacatttacaaa

SEQ ID NO: 919980 - DNA, 15 bp, Homo sapiens
agctaacatttacaa

SEQ ID NO: 919981 - DNA, 15 bp, Homo sapiens
cagctaacatttaca

SEQ ID NO: 919982 - DNA, 15 bp, Homo sapiens
acagctaacatttac

SEQ ID NO: 919983 - DNA, 15 bp, Homo sapiens
aacagctaacattta

SEQ ID NO: 919984 - DNA, 15 bp, Homo sapiens
caacagctaacattt

SEQ ID NO: 919985 - DNA, 15 bp, Homo sapiens
acaacagctaacatt

SEQ ID NO: 919986 - DNA, 15 bp, Homo sapiens
aacaacagctaacat

SEQ ID NO: 919987 - DNA, 15 bp, Homo sapiens
taacaacagctaaca

SEQ ID NO: 919988 - DNA, 15 bp, Homo sapiens
ctaacaacagctaac

SEQ ID NO: 919989 - DNA, 15 bp, Homo sapiens
gctaacaacagctaa

SEQ ID NO: 919990 - DNA, 15 bp, Homo sapiens
tgctaacaacagcta

SEQ ID NO: 919991 - DNA, 15 bp, Homo sapiens
atgctaacaacagct

SEQ ID NO: 919992 - DNA, 15 bp, Homo sapiens
gatgctaacaacagc

SEQ ID NO: 919993 - DNA, 15 bp, Homo sapiens
tgatgctaacaacag

SEQ ID NO: 919994 - DNA, 15 bp, Homo sapiens
atgatgctaacaaca

SEQ ID NO: 919995 - DNA, 15 bp, Homo sapiens
aatgatgctaacaac

SEQ ID NO: 919996 - DNA, 15 bp, Homo sapiens
gaatgatgctaacaa

SEQ ID NO: 919997 - DNA, 15 bp, Homo sapiens
tgaatgatgctaaca

SEQ ID NO: 919998 - DNA, 15 bp, Homo sapiens
atgaatgatgctaac

SEQ ID NO: 919999 - DNA, 15 bp, Homo sapiens
gatgaatgatgctaa

SEQ ID NO: 920000 - DNA, 15 bp, Homo sapiens
tgatgaatgatgcta

SEQ ID NO: 920001 - DNA, 15 bp, Homo sapiens
atgatgaatgatgct

SEQ ID NO: 920002 - DNA, 15 bp, Homo sapiens
gatgatgaatgatgc

SEQ ID NO: 920003 - DNA, 15 bp, Homo sapiens
tgatgatgaatgatg

SEQ ID NO: 920004 - DNA, 15 bp, Homo sapiens
atgatgatgaatgat

SEQ ID NO: 920005 - DNA, 15 bp, Homo sapiens
gatgatgatgaatga

SEQ ID NO: 920006 - DNA, 15 bp, Homo sapiens
tgatgatgatgaatg

SEQ ID NO: 920007 - DNA, 15 bp, Homo sapiens
gtgatgatgatgaat

SEQ ID NO: 920008 - DNA, 15 bp, Homo sapiens
tgtgatgatgatgaa

SEQ ID NO: 920009 - DNA, 15 bp, Homo sapiens
ttgtgatgatgatga

SEQ ID NO: 920010 - DNA, 15 bp, Homo sapiens
attgtgatgatgatg

SEQ ID NO: 920011 - DNA, 15 bp, Homo sapiens
gattgtgatgatgat

SEQ ID NO: 920012 - DNA, 15 bp, Homo sapiens
tgattgtgatgatga

SEQ ID NO: 920013 - DNA, 15 bp, Homo sapiens
atgattgtgatgatg

SEQ ID NO: 920014 - DNA, 15 bp, Homo sapiens
gatgattgtgatgat

SEQ ID NO: 920015 - DNA, 15 bp, Homo sapiens
tgatgattgtgatga

SEQ ID NO: 920016 - DNA, 15 bp, Homo sapiens
atgatgattgtgatg

SEQ ID NO: 920017 - DNA, 15 bp, Homo sapiens
aatgatgattgtgat

SEQ ID NO: 920018 - DNA, 15 bp, Homo sapiens
caatgatgattgtga

SEQ ID NO: 920019 - DNA, 15 bp, Homo sapiens
acaatgatgattgtg

SEQ ID NO: 920020 - DNA, 15 bp, Homo sapiens
aacaatgatgattgt

SEQ ID NO: 920021 - DNA, 15 bp, Homo sapiens
gaacaatgatgattg

SEQ ID NO: 920022 - DNA, 15 bp, Homo sapiens
tgaacaatgatgatt

SEQ ID NO: 920023 - DNA, 15 bp, Homo sapiens
atgaacaatgatgat

SEQ ID NO: 920024 - DNA, 15 bp, Homo sapiens
tatgaacaatgatga

SEQ ID NO: 920025 - DNA, 15 bp, Homo sapiens
atatgaacaatgatg

SEQ ID NO: 920026 - DNA, 15 bp, Homo sapiens
tatatgaacaatgat

SEQ ID NO: 920027 - DNA, 15 bp, Homo sapiens
atatatgaacaatga

SEQ ID NO: 920028 - DNA, 15 bp, Homo sapiens
catatatgaacaatg

SEQ ID NO: 920029 - DNA, 15 bp, Homo sapiens
acatatatgaacaat

SEQ ID NO: 920030 - DNA, 15 bp, Homo sapiens
aacatatatgaacaa

SEQ ID NO: 920031 - DNA, 15 bp, Homo sapiens
aaacatatatgaaca

SEQ ID NO: 920032 - DNA, 15 bp, Homo sapiens
taaacatatatgaac

SEQ ID NO: 920033 - DNA, 15 bp, Homo sapiens
ataaacatatatgaa

SEQ ID NO: 920034 - DNA, 15 bp, Homo sapiens
tataaacatatatga

SEQ ID NO: 920035 - DNA, 15 bp, Homo sapiens
ctataaacatatatg

SEQ ID NO: 920036 - DNA, 15 bp, Homo sapiens
cctataaacatatat

SEQ ID NO: 920037 - DNA, 15 bp, Homo sapiens
ccctataaacatata

SEQ ID NO: 920038 - DNA, 15 bp, Homo sapiens
tccctataaacatat

SEQ ID NO: 920039 - DNA, 15 bp, Homo sapiens
ttccctataaacata

SEQ ID NO: 920040 - DNA, 15 bp, Homo sapiens
gttccctataaacat

SEQ ID NO: 920041 - DNA, 15 bp, Homo sapiens
agttccctataaaca

SEQ ID NO: 920042 - DNA, 15 bp, Homo sapiens
tagttccctataaac

SEQ ID NO: 920043 - DNA, 15 bp, Homo sapiens
ttagttccctataaa

SEQ ID NO: 920044 - DNA, 15 bp, Homo sapiens
gttagttccctataa

SEQ ID NO: 920045 - DNA, 15 bp, Homo sapiens
tgttagttccctata

SEQ ID NO: 920046 - DNA, 15 bp, Homo sapiens
atgttagttccctat

SEQ ID NO: 920047 - DNA, 15 bp, Homo sapiens
tatgttagttcccta

SEQ ID NO: 920048 - DNA, 15 bp, Homo sapiens
atatgttagttccct

SEQ ID NO: 920049 - DNA, 15 bp, Homo sapiens
aatatgttagttccc

SEQ ID NO: 920050 - DNA, 15 bp, Homo sapiens
aaatatgttagttcc

SEQ ID NO: 920051 - DNA, 15 bp, Homo sapiens
gaaatatgttagttc

SEQ ID NO: 920052 - DNA, 15 bp, Homo sapiens
agaaatatgttagtt

SEQ ID NO: 920053 - DNA, 15 bp, Homo sapiens
gagaaatatgttagt

SEQ ID NO: 920054 - DNA, 15 bp, Homo sapiens
ggagaaatatgttag

SEQ ID NO: 920055 - DNA, 15 bp, Homo sapiens
aggagaaatatgtta

SEQ ID NO: 920056 - DNA, 15 bp, Homo sapiens
aaggagaaatatgtt

SEQ ID NO: 920057 - DNA, 15 bp, Homo sapiens
taaggagaaatatgt

SEQ ID NO: 920058 - DNA, 15 bp, Homo sapiens
ataaggagaaatatg

SEQ ID NO: 920059 - DNA, 15 bp, Homo sapiens
aataaggagaaatat

SEQ ID NO: 920060 - DNA, 15 bp, Homo sapiens
aaataaggagaaata

SEQ ID NO: 920061 - DNA, 15 bp, Homo sapiens
gaaataaggagaaat

SEQ ID NO: 920062 - DNA, 15 bp, Homo sapiens
agaaataaggagaaa

SEQ ID NO: 920063 - DNA, 15 bp, Homo sapiens
cagaaataaggagaa

SEQ ID NO: 920064 - DNA, 15 bp, Homo sapiens
acagaaataaggaga

SEQ ID NO: 920065 - DNA, 15 bp, Homo sapiens
gacagaaataaggag

SEQ ID NO: 920066 - DNA, 15 bp, Homo sapiens
tgacagaaataagga

SEQ ID NO: 920067 - DNA, 15 bp, Homo sapiens
atgacagaaataagg

SEQ ID NO: 920068 - DNA, 15 bp, Homo sapiens
gatgacagaaataag

SEQ ID NO: 920069 - DNA, 15 bp, Homo sapiens
agatgacagaaataa

SEQ ID NO: 920070 - DNA, 15 bp, Homo sapiens
gagatgacagaaata

SEQ ID NO: 920071 - DNA, 15 bp, Homo sapiens
tgagatgacagaaat

SEQ ID NO: 920072 - DNA, 15 bp, Homo sapiens
atgagatgacagaaa

SEQ ID NO: 920073 - DNA, 15 bp, Homo sapiens
gatgagatgacagaa

SEQ ID NO: 920074 - DNA, 15 bp, Homo sapiens
agatgagatgacaga

SEQ ID NO: 920075 - DNA, 15 bp, Homo sapiens
tagatgagatgacag

SEQ ID NO: 920076 - DNA, 15 bp, Homo sapiens
ttagatgagatgaca

SEQ ID NO: 920077 - DNA, 15 bp, Homo sapiens
tttagatgagatgac

SEQ ID NO: 920078 - DNA, 15 bp, Homo sapiens
atttagatgagatga

SEQ ID NO: 920079 - DNA, 15 bp, Homo sapiens
gatttagatgagatg

SEQ ID NO: 920080 - DNA, 15 bp, Homo sapiens
tgatttagatgagat

SEQ ID NO: 920081 - DNA, 15 bp, Homo sapiens
ttgatttagatgaga

SEQ ID NO: 920082 - DNA, 15 bp, Homo sapiens
attgatttagatgag

SEQ ID NO: 920083 - DNA, 15 bp, Homo sapiens
tattgatttagatga

SEQ ID NO: 920084 - DNA, 15 bp, Homo sapiens
ctattgatttagatg

SEQ ID NO: 920085 - DNA, 15 bp, Homo sapiens
tctattgatttagat

SEQ ID NO: 920086 - DNA, 15 bp, Homo sapiens
ttctattgatttaga

SEQ ID NO: 920087 - DNA, 15 bp, Homo sapiens
attctattgatttag

SEQ ID NO: 920088 - DNA, 15 bp, Homo sapiens
cattctattgattta

SEQ ID NO: 920089 - DNA, 15 bp, Homo sapiens
tcattctattgattt

SEQ ID NO: 920090 - DNA, 15 bp, Homo sapiens
atcattctattgatt

SEQ ID NO: 920091 - DNA, 15 bp, Homo sapiens
aatcattctattgat

SEQ ID NO: 920092 - DNA, 15 bp, Homo sapiens
aaatcattctattga

SEQ ID NO: 920093 - DNA, 15 bp, Homo sapiens
gaaatcattctattg

SEQ ID NO: 920094 - DNA, 15 bp, Homo sapiens
ggaaatcattctatt

SEQ ID NO: 920095 - DNA, 15 bp, Homo sapiens
aggaaatcattctat

SEQ ID NO: 920096 - DNA, 15 bp, Homo sapiens
aaggaaatcattcta

SEQ ID NO: 920097 - DNA, 15 bp, Homo sapiens
taaggaaatcattct

SEQ ID NO: 920098 - DNA, 15 bp, Homo sapiens
ttaaggaaatcattc

SEQ ID NO: 920099 - DNA, 15 bp, Homo sapiens
attaaggaaatcatt

SEQ ID NO: 920100 - DNA, 15 bp, Homo sapiens
tattaaggaaatcat

SEQ ID NO: 920101 - DNA, 15 bp, Homo sapiens
ctattaaggaaatca

SEQ ID NO: 920102 - DNA, 15 bp, Homo sapiens
cctattaaggaaatc

SEQ ID NO: 920103 - DNA, 15 bp, Homo sapiens
tcctattaaggaaat

SEQ ID NO: 920104 - DNA, 15 bp, Homo sapiens
ttcctattaaggaaa

SEQ ID NO: 920105 - DNA, 15 bp, Homo sapiens
attcctattaaggaa

SEQ ID NO: 920106 - DNA, 15 bp, Homo sapiens
aattcctattaagga

SEQ ID NO: 920107 - DNA, 15 bp, Homo sapiens
taattcctattaagg

SEQ ID NO: 920108 - DNA, 15 bp, Homo sapiens
ctaattcctattaag

SEQ ID NO: 920109 - DNA, 15 bp, Homo sapiens
tctaattcctattaa

SEQ ID NO: 920110 - DNA, 15 bp, Homo sapiens
ttctaattcctatta

SEQ ID NO: 920111 - DNA, 15 bp, Homo sapiens
attctaattcctatt

SEQ ID NO: 920112 - DNA, 15 bp, Homo sapiens
tattctaattcctat

SEQ ID NO: 920113 - DNA, 15 bp, Homo sapiens
gtattctaattccta

SEQ ID NO: 920114 - DNA, 15 bp, Homo sapiens
ggtattctaattcct

SEQ ID NO: 920115 - DNA, 15 bp, Homo sapiens
aggtattctaattcc

SEQ ID NO: 920116 - DNA, 15 bp, Homo sapiens
taggtattctaattc

SEQ ID NO: 920117 - DNA, 15 bp, Homo sapiens
ttaggtattctaatt

SEQ ID NO: 920118 - DNA, 15 bp, Homo sapiens
attaggtattctaat

SEQ ID NO: 920119 - DNA, 15 bp, Homo sapiens
gattaggtattctaa

SEQ ID NO: 920120 - DNA, 15 bp, Homo sapiens
tgattaggtattcta

SEQ ID NO: 920121 - DNA, 15 bp, Homo sapiens
ttgattaggtattct

SEQ ID NO: 920122 - DNA, 15 bp, Homo sapiens
tttgattaggtattc

SEQ ID NO: 920123 - DNA, 15 bp, Homo sapiens
ctttgattaggtatt

SEQ ID NO: 920124 - DNA, 15 bp, Homo sapiens
cctttgattaggtat

SEQ ID NO: 920125 - DNA, 15 bp, Homo sapiens
acctttgattaggta

SEQ ID NO: 920126 - DNA, 15 bp, Homo sapiens
cacctttgattaggt

SEQ ID NO: 920127 - DNA, 15 bp, Homo sapiens
tcacctttgattagg

SEQ ID NO: 920128 - DNA, 15 bp, Homo sapiens
atcacctttgattag

SEQ ID NO: 920129 - DNA, 15 bp, Homo sapiens
aatcacctttgatta

SEQ ID NO: 920130 - DNA, 15 bp, Homo sapiens
aaatcacctttgatt

SEQ ID NO: 920131 - DNA, 15 bp, Homo sapiens
taaatcacctttgat

SEQ ID NO: 920132 - DNA, 15 bp, Homo sapiens
ttaaatcacctttga

SEQ ID NO: 920133 - DNA, 15 bp, Homo sapiens
tttaaatcacctttg

SEQ ID NO: 920134 - DNA, 15 bp, Homo sapiens
gtttaaatcaccttt

SEQ ID NO: 920135 - DNA, 15 bp, Homo sapiens
tgtttaaatcacctt

SEQ ID NO: 920136 - DNA, 15 bp, Homo sapiens
gtgtttaaatcacct

SEQ ID NO: 920137 - DNA, 15 bp, Homo sapiens
agtgtttaaatcacc

SEQ ID NO: 920138 - DNA, 15 bp, Homo sapiens
tagtgtttaaatcac

SEQ ID NO: 920139 - DNA, 15 bp, Homo sapiens
ttagtgtttaaatca

SEQ ID NO: 920140 - DNA, 15 bp, Homo sapiens
cttagtgtttaaatc

SEQ ID NO: 920141 - DNA, 15 bp, Homo sapiens
tcttagtgtttaaat

SEQ ID NO: 920142 - DNA, 15 bp, Homo sapiens
ttcttagtgtttaaa

SEQ ID NO: 920143 - DNA, 15 bp, Homo sapiens
attcttagtgtttaa

SEQ ID NO: 920144 - DNA, 15 bp, Homo sapiens
tattcttagtgttta

SEQ ID NO: 920145 - DNA, 15 bp, Homo sapiens
ttattcttagtgttt

SEQ ID NO: 920146 - DNA, 15 bp, Homo sapiens
attattcttagtgtt

SEQ ID NO: 920147 - DNA, 15 bp, Homo sapiens
aattattcttagtgt

SEQ ID NO: 920148 - DNA, 15 bp, Homo sapiens
taattattcttagtg

SEQ ID NO: 920149 - DNA, 15 bp, Homo sapiens
ataattattcttagt

SEQ ID NO: 920150 - DNA, 15 bp, Homo sapiens
aataattattcttag

SEQ ID NO: 920151 - DNA, 15 bp, Homo sapiens
taataattattctta

SEQ ID NO: 920152 - DNA, 15 bp, Homo sapiens
ataataattattctt

SEQ ID NO: 920153 - DNA, 15 bp, Homo sapiens
gataataattattct

SEQ ID NO: 920154 - DNA, 15 bp, Homo sapiens
agataataattattc

SEQ ID NO: 920155 - DNA, 15 bp, Homo sapiens
cagataataattatt

SEQ ID NO: 920156 - DNA, 15 bp, Homo sapiens
tcagataataattat

SEQ ID NO: 920157 - DNA, 15 bp, Homo sapiens
gtcagataataatta

SEQ ID NO: 920158 - DNA, 15 bp, Homo sapiens
ggtcagataataatt

SEQ ID NO: 920159 - DNA, 15 bp, Homo sapiens
aggtcagataataat

SEQ ID NO: 920160 - DNA, 15 bp, Homo sapiens
taggtcagataataa

SEQ ID NO: 920161 - DNA, 15 bp, Homo sapiens
ttaggtcagataata

SEQ ID NO: 920162 - DNA, 15 bp, Homo sapiens
gttaggtcagataat

SEQ ID NO: 920163 - DNA, 15 bp, Homo sapiens
ggttaggtcagataa

SEQ ID NO: 920164 - DNA, 15 bp, Homo sapiens
tggttaggtcagata

SEQ ID NO: 920165 - DNA, 15 bp, Homo sapiens
ctggttaggtcagat

SEQ ID NO: 920166 - DNA, 15 bp, Homo sapiens
tctggttaggtcaga

SEQ ID NO: 920167 - DNA, 15 bp, Homo sapiens
ttctggttaggtcag

SEQ ID NO: 920168 - DNA, 15 bp, Homo sapiens
gttctggttaggtca

SEQ ID NO: 920169 - DNA, 15 bp, Homo sapiens
ggttctggttaggtc

SEQ ID NO: 920170 - DNA, 15 bp, Homo sapiens
tggttctggttaggt

SEQ ID NO: 920171 - DNA, 15 bp, Homo sapiens
gtggttctggttagg

SEQ ID NO: 920172 - DNA, 15 bp, Homo sapiens
tgtggttctggttag

SEQ ID NO: 920173 - DNA, 15 bp, Homo sapiens
ttgtggttctggtta

SEQ ID NO: 920174 - DNA, 15 bp, Homo sapiens
tttgtggttctggtt

SEQ ID NO: 920175 - DNA, 15 bp, Homo sapiens
ctttgtggttctggt

SEQ ID NO: 920176 - DNA, 15 bp, Homo sapiens
gctttgtggttctgg

SEQ ID NO: 920177 - DNA, 15 bp, Homo sapiens
agctttgtggttctg

SEQ ID NO: 920178 - DNA, 15 bp, Homo sapiens
tagctttgtggttct

SEQ ID NO: 920179 - DNA, 15 bp, Homo sapiens
ctagctttgtggttc

SEQ ID NO: 920180 - DNA, 15 bp, Homo sapiens
actagctttgtggtt

SEQ ID NO: 920181 - DNA, 15 bp, Homo sapiens
aactagctttgtggt

SEQ ID NO: 920182 - DNA, 15 bp, Homo sapiens
caactagctttgtgg

SEQ ID NO: 920183 - DNA, 15 bp, Homo sapiens
acaactagctttgtg

SEQ ID NO: 920184 - DNA, 15 bp, Homo sapiens
tacaactagctttgt

SEQ ID NO: 920185 - DNA, 15 bp, Homo sapiens
ctacaactagctttg

SEQ ID NO: 920186 - DNA, 15 bp, Homo sapiens
cctacaactagcttt

SEQ ID NO: 920187 - DNA, 15 bp, Homo sapiens
ccctacaactagctt

SEQ ID NO: 920188 - DNA, 15 bp, Homo sapiens
gccctacaactagct

SEQ ID NO: 920189 - DNA, 15 bp, Homo sapiens
tgccctacaactagc

SEQ ID NO: 920190 - DNA, 15 bp, Homo sapiens
ctgccctacaactag

SEQ ID NO: 920191 - DNA, 15 bp, Homo sapiens
cctgccctacaacta

SEQ ID NO: 920192 - DNA, 15 bp, Homo sapiens
acctgccctacaact

SEQ ID NO: 920193 - DNA, 15 bp, Homo sapiens
gacctgccctacaac

SEQ ID NO: 920194 - DNA, 15 bp, Homo sapiens
tgacctgccctacaa

SEQ ID NO: 920195 - DNA, 15 bp, Homo sapiens
atgacctgccctaca

SEQ ID NO: 920196 - DNA, 15 bp, Homo sapiens
tatgacctgccctac

SEQ ID NO: 920197 - DNA, 15 bp, Homo sapiens
atatgacctgcccta

SEQ ID NO: 920198 - DNA, 15 bp, Homo sapiens
aatatgacctgccct

SEQ ID NO: 920199 - DNA, 15 bp, Homo sapiens
aaatatgacctgccc

SEQ ID NO: 920200 - DNA, 15 bp, Homo sapiens
caaatatgacctgcc

SEQ ID NO: 920201 - DNA, 15 bp, Homo sapiens
tcaaatatgacctgc

SEQ ID NO: 920202 - DNA, 15 bp, Homo sapiens
ttcaaatatgacctg

SEQ ID NO: 920203 - DNA, 15 bp, Homo sapiens
cttcaaatatgacct

SEQ ID NO: 920204 - DNA, 15 bp, Homo sapiens
ccttcaaatatgacc

SEQ ID NO: 920205 - DNA, 15 bp, Homo sapiens
accttcaaatatgac

SEQ ID NO: 920206 - DNA, 15 bp, Homo sapiens
aaccttcaaatatga

SEQ ID NO: 920207 - DNA, 15 bp, Homo sapiens
caaccttcaaatatg

SEQ ID NO: 920208 - DNA, 15 bp, Homo sapiens
acaaccttcaaatat

SEQ ID NO: 920209 - DNA, 15 bp, Homo sapiens
aacaaccttcaaata

SEQ ID NO: 920210 - DNA, 15 bp, Homo sapiens
caacaaccttcaaat

SEQ ID NO: 920211 - DNA, 15 bp, Homo sapiens
acaacaaccttcaaa

SEQ ID NO: 920212 - DNA, 15 bp, Homo sapiens
aacaacaaccttcaa

SEQ ID NO: 920213 - DNA, 15 bp, Homo sapiens
taacaacaaccttca

SEQ ID NO: 920214 - DNA, 15 bp, Homo sapiens
ataacaacaaccttc

SEQ ID NO: 920215 - DNA, 15 bp, Homo sapiens
gataacaacaacctt

SEQ ID NO: 920216 - DNA, 15 bp, Homo sapiens
cgataacaacaacct

SEQ ID NO: 920217 - DNA, 15 bp, Homo sapiens
gcgataacaacaacc

SEQ ID NO: 920218 - DNA, 15 bp, Homo sapiens
ggcgataacaacaac

SEQ ID NO: 920219 - DNA, 15 bp, Homo sapiens
aggcgataacaacaa

SEQ ID NO: 920220 - DNA, 15 bp, Homo sapiens
taggcgataacaaca

SEQ ID NO: 920221 - DNA, 15 bp, Homo sapiens
ataggcgataacaac

SEQ ID NO: 920222 - DNA, 15 bp, Homo sapiens
cataggcgataacaa

SEQ ID NO: 920223 - DNA, 15 bp, Homo sapiens
tcataggcgataaca

SEQ ID NO: 920224 - DNA, 15 bp, Homo sapiens
atcataggcgataac

SEQ ID NO: 920225 - DNA, 15 bp, Homo sapiens
catcataggcgataa

SEQ ID NO: 920226 - DNA, 15 bp, Homo sapiens
ccatcataggcgata

SEQ ID NO: 920227 - DNA, 15 bp, Homo sapiens
accatcataggcgat

SEQ ID NO: 920228 - DNA, 15 bp, Homo sapiens
aaccatcataggcga

SEQ ID NO: 920229 - DNA, 15 bp, Homo sapiens
caaccatcataggcg

SEQ ID NO: 920230 - DNA, 15 bp, Homo sapiens
acaaccatcataggc

SEQ ID NO: 920231 - DNA, 15 bp, Homo sapiens
tacaaccatcatagg

SEQ ID NO: 920232 - DNA, 15 bp, Homo sapiens
ttacaaccatcatag

SEQ ID NO: 920233 - DNA, 15 bp, Homo sapiens
tttacaaccatcata

SEQ ID NO: 920234 - DNA, 15 bp, Homo sapiens
ttttacaaccatcat

SEQ ID NO: 920235 - DNA, 15 bp, Homo sapiens
attttacaaccatca

SEQ ID NO: 920236 - DNA, 15 bp, Homo sapiens
tattttacaaccatc

SEQ ID NO: 920237 - DNA, 15 bp, Homo sapiens
ctattttacaaccat

SEQ ID NO: 920238 - DNA, 15 bp, Homo sapiens
gctattttacaacca

SEQ ID NO: 920239 - DNA, 15 bp, Homo sapiens
agctattttacaacc

SEQ ID NO: 920240 - DNA, 15 bp, Homo sapiens
cagctattttacaac

SEQ ID NO: 920241 - DNA, 15 bp, Homo sapiens
gcagctattttacaa

SEQ ID NO: 920242 - DNA, 15 bp, Homo sapiens
tgcagctattttaca

SEQ ID NO: 920243 - DNA, 15 bp, Homo sapiens
atgcagctattttac

SEQ ID NO: 920244 - DNA, 15 bp, Homo sapiens
catgcagctatttta

SEQ ID NO: 920245 - DNA, 15 bp, Homo sapiens
tcatgcagctatttt

SEQ ID NO: 920246 - DNA, 15 bp, Homo sapiens
ttcatgcagctattt

SEQ ID NO: 920247 - DNA, 15 bp, Homo sapiens
attcatgcagctatt

SEQ ID NO: 920248 - DNA, 15 bp, Homo sapiens
aattcatgcagctat

SEQ ID NO: 920249 - DNA, 15 bp, Homo sapiens
gaattcatgcagcta

SEQ ID NO: 920250 - DNA, 15 bp, Homo sapiens
tgaattcatgcagct

SEQ ID NO: 920251 - DNA, 15 bp, Homo sapiens
ttgaattcatgcagc

SEQ ID NO: 920252 - DNA, 15 bp, Homo sapiens
cttgaattcatgcag

SEQ ID NO: 920253 - DNA, 15 bp, Homo sapiens
tcttgaattcatgca

SEQ ID NO: 920254 - DNA, 15 bp, Homo sapiens
ttcttgaattcatgc

SEQ ID NO: 920255 - DNA, 15 bp, Homo sapiens
tttcttgaattcatg

SEQ ID NO: 920256 - DNA, 15 bp, Homo sapiens
ctttcttgaattcat

SEQ ID NO: 920257 - DNA, 15 bp, Homo sapiens
tctttcttgaattca

SEQ ID NO: 920258 - DNA, 15 bp, Homo sapiens
atctttcttgaattc

SEQ ID NO: 920259 - DNA, 15 bp, Homo sapiens
catctttcttgaatt

SEQ ID NO: 920260 - DNA, 15 bp, Homo sapiens
tcatctttcttgaat

SEQ ID NO: 920261 - DNA, 15 bp, Homo sapiens
atcatctttcttgaa

SEQ ID NO: 920262 - DNA, 15 bp, Homo sapiens
catcatctttcttga

SEQ ID NO: 920263 - DNA, 15 bp, Homo sapiens
acatcatctttcttg

SEQ ID NO: 920264 - DNA, 15 bp, Homo sapiens
cacatcatctttctt

SEQ ID NO: 920265 - DNA, 15 bp, Homo sapiens
gcacatcatctttct

SEQ ID NO: 920266 - DNA, 15 bp, Homo sapiens
ggcacatcatctttc

SEQ ID NO: 920267 - DNA, 15 bp, Homo sapiens
gggcacatcatcttt

SEQ ID NO: 920268 - DNA, 15 bp, Homo sapiens
tgggcacatcatctt

SEQ ID NO: 920269 - DNA, 15 bp, Homo sapiens
atgggcacatcatct

SEQ ID NO: 920270 - DNA, 15 bp, Homo sapiens
aatgggcacatcatc

SEQ ID NO: 920271 - DNA, 15 bp, Homo sapiens
caatgggcacatcat

SEQ ID NO: 920272 - DNA, 15 bp, Homo sapiens
tcaatgggcacatca

SEQ ID NO: 920273 - DNA, 15 bp, Homo sapiens
ttcaatgggcacatc

SEQ ID NO: 920274 - DNA, 15 bp, Homo sapiens
cttcaatgggcacat

SEQ ID NO: 920275 - DNA, 15 bp, Homo sapiens
tcttcaatgggcaca

SEQ ID NO: 920276 - DNA, 15 bp, Homo sapiens
ttcttcaatgggcac

SEQ ID NO: 920277 - DNA, 15 bp, Homo sapiens
cttcttcaatgggca

SEQ ID NO: 920278 - DNA, 15 bp, Homo sapiens
tcttcttcaatgggc

SEQ ID NO: 920279 - DNA, 15 bp, Homo sapiens
ctcttcttcaatggg

SEQ ID NO: 920280 - DNA, 15 bp, Homo sapiens
cctcttcttcaatgg

SEQ ID NO: 920281 - DNA, 15 bp, Homo sapiens
tcctcttcttcaatg

SEQ ID NO: 920282 - DNA, 15 bp, Homo sapiens
ctcctcttcttcaat

SEQ ID NO: 920283 - DNA, 15 bp, Homo sapiens
gctcctcttcttcaa

SEQ ID NO: 920284 - DNA, 15 bp, Homo sapiens
tgctcctcttcttca

SEQ ID NO: 920285 - DNA, 15 bp, Homo sapiens
atgctcctcttcttc

SEQ ID NO: 920286 - DNA, 15 bp, Homo sapiens
aatgctcctcttctt

SEQ ID NO: 920287 - DNA, 15 bp, Homo sapiens
aaatgctcctcttct

SEQ ID NO: 920288 - DNA, 15 bp, Homo sapiens
aaaatgctcctcttc

SEQ ID NO: 920289 - DNA, 15 bp, Homo sapiens
aaaaatgctcctctt

SEQ ID NO: 920290 - DNA, 15 bp, Homo sapiens
aaaaaatgctcctct

SEQ ID NO: 920291 - DNA, 15 bp, Homo sapiens
aaaaaaatgctcctc

SEQ ID NO: 920292 - DNA, 15 bp, Homo sapiens
gaaaaaaatgctcct

SEQ ID NO: 920293 - DNA, 15 bp, Homo sapiens
agaaaaaaatgctcc

SEQ ID NO: 920294 - DNA, 15 bp, Homo sapiens
tagaaaaaaatgctc

SEQ ID NO: 920295 - DNA, 15 bp, Homo sapiens
gtagaaaaaaatgct

SEQ ID NO: 920296 - DNA, 15 bp, Homo sapiens
tgtagaaaaaaatgc

SEQ ID NO: 920297 - DNA, 15 bp, Homo sapiens
atgtagaaaaaaatg

SEQ ID NO: 920298 - DNA, 15 bp, Homo sapiens
tatgtagaaaaaaat

SEQ ID NO: 920299 - DNA, 15 bp, Homo sapiens
ctatgtagaaaaaaa

SEQ ID NO: 920300 - DNA, 15 bp, Homo sapiens
gctatgtagaaaaaa

SEQ ID NO: 920301 - DNA, 15 bp, Homo sapiens
agctatgtagaaaaa

SEQ ID NO: 920302 - DNA, 15 bp, Homo sapiens
aagctatgtagaaaa

SEQ ID NO: 920303 - DNA, 15 bp, Homo sapiens
aaagctatgtagaaa

SEQ ID NO: 920304 - DNA, 15 bp, Homo sapiens
aaaagctatgtagaa

SEQ ID NO: 920305 - DNA, 15 bp, Homo sapiens
taaaagctatgtaga

SEQ ID NO: 920306 - DNA, 15 bp, Homo sapiens
ataaaagctatgtag

SEQ ID NO: 920307 - DNA, 15 bp, Homo sapiens
aataaaagctatgta

SEQ ID NO: 920308 - DNA, 15 bp, Homo sapiens
aaataaaagctatgt

SEQ ID NO: 920309 - DNA, 15 bp, Homo sapiens
aaaataaaagctatg

SEQ ID NO: 920310 - DNA, 15 bp, Homo sapiens
aaaaataaaagctat

SEQ ID NO: 920311 - DNA, 15 bp, Homo sapiens
taaaaataaaagcta

SEQ ID NO: 920312 - DNA, 15 bp, Homo sapiens
ttaaaaataaaagct

SEQ ID NO: 920313 - DNA, 15 bp, Homo sapiens
tttaaaaataaaagc

SEQ ID NO: 920314 - DNA, 15 bp, Homo sapiens
atttaaaaataaaag

SEQ ID NO: 920315 - DNA, 15 bp, Homo sapiens
tatttaaaaataaaa

SEQ ID NO: 920316 - DNA, 15 bp, Homo sapiens
ttatttaaaaataaa

SEQ ID NO: 920317 - DNA, 15 bp, Homo sapiens
tttatttaaaaataa

SEQ ID NO: 920318 - DNA, 15 bp, Homo sapiens
gtttatttaaaaata

SEQ ID NO: 920319 - DNA, 15 bp, Homo sapiens
tgtttatttaaaaat

SEQ ID NO: 920320 - DNA, 15 bp, Homo sapiens
atgtttatttaaaaa

SEQ ID NO: 920321 - DNA, 15 bp, Homo sapiens
aatgtttatttaaaa

SEQ ID NO: 920322 - DNA, 15 bp, Homo sapiens
aaatgtttatttaaa

SEQ ID NO: 920323 - DNA, 15 bp, Homo sapiens
aaaatgtttatttaa

SEQ ID NO: 920324 - DNA, 15 bp, Homo sapiens
aaaaatgtttattta

SEQ ID NO: 920325 - DNA, 15 bp, Homo sapiens
aaaaaatgtttattt

SEQ ID NO: 920326 - DNA, 15 bp, Homo sapiens
aaaaaaatgtttatt

SEQ ID NO: 920327 - DNA, 15 bp, Homo sapiens
gaaaaaaatgtttat

SEQ ID NO: 920328 - DNA, 15 bp, Homo sapiens
agaaaaaaatgttta

SEQ ID NO: 920329 - DNA, 15 bp, Homo sapiens
cagaaaaaaatgttt

SEQ ID NO: 920330 - DNA, 15 bp, Homo sapiens
ccagaaaaaaatgtt

SEQ ID NO: 920331 - DNA, 15 bp, Homo sapiens
accagaaaaaaatgt

SEQ ID NO: 920332 - DNA, 15 bp, Homo sapiens
caccagaaaaaaatg

SEQ ID NO: 920333 - DNA, 15 bp, Homo sapiens
tcaccagaaaaaaat

SEQ ID NO: 920334 - DNA, 15 bp, Homo sapiens
atcaccagaaaaaaa

SEQ ID NO: 920335 - DNA, 15 bp, Homo sapiens
tatcaccagaaaaaa

SEQ ID NO: 920336 - DNA, 15 bp, Homo sapiens
gtatcaccagaaaaa

SEQ ID NO: 920337 - DNA, 15 bp, Homo sapiens
ggtatcaccagaaaa

SEQ ID NO: 920338 - DNA, 15 bp, Homo sapiens
aggtatcaccagaaa

SEQ ID NO: 920339 - DNA, 15 bp, Homo sapiens
caggtatcaccagaa

SEQ ID NO: 920340 - DNA, 15 bp, Homo sapiens
ccaggtatcaccaga

SEQ ID NO: 920341 - DNA, 15 bp, Homo sapiens
gccaggtatcaccag

SEQ ID NO: 920342 - DNA, 15 bp, Homo sapiens
tgccaggtatcacca

SEQ ID NO: 920343 - DNA, 15 bp, Homo sapiens
ctgccaggtatcacc

SEQ ID NO: 920344 - DNA, 15 bp, Homo sapiens
tctgccaggtatcac

SEQ ID NO: 920345 - DNA, 15 bp, Homo sapiens
gtctgccaggtatca

SEQ ID NO: 920346 - DNA, 15 bp, Homo sapiens
tgtctgccaggtatc

SEQ ID NO: 920347 - DNA, 15 bp, Homo sapiens
atgtctgccaggtat

SEQ ID NO: 920348 - DNA, 15 bp, Homo sapiens
aatgtctgccaggta

SEQ ID NO: 920349 - DNA, 15 bp, Homo sapiens
caatgtctgccaggt

SEQ ID NO: 920350 - DNA, 15 bp, Homo sapiens
tcaatgtctgccagg

SEQ ID NO: 920351 - DNA, 15 bp, Homo sapiens
gtcaatgtctgccag

SEQ ID NO: 920352 - DNA, 15 bp, Homo sapiens
agtcaatgtctgcca

SEQ ID NO: 920353 - DNA, 15 bp, Homo sapiens
gagtcaatgtctgcc

SEQ ID NO: 920354 - DNA, 15 bp, Homo sapiens
ggagtcaatgtctgc

SEQ ID NO: 920355 - DNA, 15 bp, Homo sapiens
cggagtcaatgtctg

SEQ ID NO: 920356 - DNA, 15 bp, Homo sapiens
tcggagtcaatgtct

SEQ ID NO: 920357 - DNA, 15 bp, Homo sapiens
atcggagtcaatgtc

SEQ ID NO: 920358 - DNA, 15 bp, Homo sapiens
gatcggagtcaatgt

SEQ ID NO: 920359 - DNA, 15 bp, Homo sapiens
agatcggagtcaatg

SEQ ID NO: 920360 - DNA, 15 bp, Homo sapiens
gagatcggagtcaat

SEQ ID NO: 920361 - DNA, 15 bp, Homo sapiens
tgagatcggagtcaa

SEQ ID NO: 920362 - DNA, 15 bp, Homo sapiens
atgagatcggagtca

SEQ ID NO: 920363 - DNA, 15 bp, Homo sapiens
aatgagatcggagtc

SEQ ID NO: 920364 - DNA, 15 bp, Homo sapiens
aaatgagatcggagt

SEQ ID NO: 920365 - DNA, 15 bp, Homo sapiens
caaatgagatcggag

SEQ ID NO: 920366 - DNA, 15 bp, Homo sapiens
gcaaatgagatcgga

SEQ ID NO: 920367 - DNA, 15 bp, Homo sapiens
agcaaatgagatcgg

SEQ ID NO: 920368 - DNA, 15 bp, Homo sapiens
tagcaaatgagatcg

SEQ ID NO: 920369 - DNA, 15 bp, Homo sapiens
ctagcaaatgagatc

SEQ ID NO: 920370 - DNA, 15 bp, Homo sapiens
tctagcaaatgagat

SEQ ID NO: 920371 - DNA, 15 bp, Homo sapiens
ttctagcaaatgaga

SEQ ID NO: 920372 - DNA, 15 bp, Homo sapiens
attctagcaaatgag

SEQ ID NO: 920373 - DNA, 15 bp, Homo sapiens
aattctagcaaatga

SEQ ID NO: 920374 - DNA, 15 bp, Homo sapiens
caattctagcaaatg

SEQ ID NO: 920375 - DNA, 15 bp, Homo sapiens
ccaattctagcaaat

SEQ ID NO: 920376 - DNA, 15 bp, Homo sapiens
tccaattctagcaaa

SEQ ID NO: 920377 - DNA, 15 bp, Homo sapiens
atccaattctagcaa

SEQ ID NO: 920378 - DNA, 15 bp, Homo sapiens
gatccaattctagca

SEQ ID NO: 920379 - DNA, 15 bp, Homo sapiens
tgatccaattctagc

SEQ ID NO: 920380 - DNA, 15 bp, Homo sapiens
gtgatccaattctag

SEQ ID NO: 920381 - DNA, 15 bp, Homo sapiens
tgtgatccaattcta

SEQ ID NO: 920382 - DNA, 15 bp, Homo sapiens
atgtgatccaattct

SEQ ID NO: 920383 - DNA, 15 bp, Homo sapiens
catgtgatccaattc

SEQ ID NO: 920384 - DNA, 15 bp, Homo sapiens
acatgtgatccaatt

SEQ ID NO: 920385 - DNA, 15 bp, Homo sapiens
gacatgtgatccaat

SEQ ID NO: 920386 - DNA, 15 bp, Homo sapiens
ggacatgtgatccaa

SEQ ID NO: 920387 - DNA, 15 bp, Homo sapiens
tggacatgtgatcca

SEQ ID NO: 920388 - DNA, 15 bp, Homo sapiens
ttggacatgtgatcc

SEQ ID NO: 920389 - DNA, 15 bp, Homo sapiens
cttggacatgtgatc

SEQ ID NO: 920390 - DNA, 15 bp, Homo sapiens
acttggacatgtgat

SEQ ID NO: 920391 - DNA, 15 bp, Homo sapiens
gacttggacatgtga

SEQ ID NO: 920392 - DNA, 15 bp, Homo sapiens
agacttggacatgtg

SEQ ID NO: 920393 - DNA, 15 bp, Homo sapiens
cagacttggacatgt

SEQ ID NO: 920394 - DNA, 15 bp, Homo sapiens
tcagacttggacatg

SEQ ID NO: 920395 - DNA, 15 bp, Homo sapiens
ttcagacttggacat

SEQ ID NO: 920396 - DNA, 15 bp, Homo sapiens
gttcagacttggaca

SEQ ID NO: 920397 - DNA, 15 bp, Homo sapiens
ggttcagacttggac

SEQ ID NO: 920398 - DNA, 15 bp, Homo sapiens
tggttcagacttgga

SEQ ID NO: 920399 - DNA, 15 bp, Homo sapiens
atggttcagacttgg

SEQ ID NO: 920400 - DNA, 15 bp, Homo sapiens
aatggttcagacttg

SEQ ID NO: 920401 - DNA, 15 bp, Homo sapiens
gaatggttcagactt

SEQ ID NO: 920402 - DNA, 15 bp, Homo sapiens
tgaatggttcagact

SEQ ID NO: 920403 - DNA, 15 bp, Homo sapiens
ctgaatggttcagac

SEQ ID NO: 920404 - DNA, 15 bp, Homo sapiens
actgaatggttcaga

SEQ ID NO: 920405 - DNA, 15 bp, Homo sapiens
aactgaatggttcag

SEQ ID NO: 920406 - DNA, 15 bp, Homo sapiens
caactgaatggttca

SEQ ID NO: 920407 - DNA, 15 bp, Homo sapiens
gcaactgaatggttc

SEQ ID NO: 920408 - DNA, 15 bp, Homo sapiens
tgcaactgaatggtt

SEQ ID NO: 920409 - DNA, 15 bp, Homo sapiens
ttgcaactgaatggt

SEQ ID NO: 920410 - DNA, 15 bp, Homo sapiens
tttgcaactgaatgg

SEQ ID NO: 920411 - DNA, 15 bp, Homo sapiens
ctttgcaactgaatg

SEQ ID NO: 920412 - DNA, 15 bp, Homo sapiens
tctttgcaactgaat

SEQ ID NO: 920413 - DNA, 15 bp, Homo sapiens
ctctttgcaactgaa

SEQ ID NO: 920414 - DNA, 15 bp, Homo sapiens
tctctttgcaactga

SEQ ID NO: 920415 - DNA, 15 bp, Homo sapiens
ttctctttgcaactg

SEQ ID NO: 920416 - DNA, 15 bp, Homo sapiens
attctctttgcaact

SEQ ID NO: 920417 - DNA, 15 bp, Homo sapiens
cattctctttgcaac

SEQ ID NO: 920418 - DNA, 15 bp, Homo sapiens
tcattctctttgcaa

SEQ ID NO: 920419 - DNA, 15 bp, Homo sapiens
atcattctctttgca

SEQ ID NO: 920420 - DNA, 15 bp, Homo sapiens
tatcattctctttgc

SEQ ID NO: 920421 - DNA, 15 bp, Homo sapiens
gtatcattctctttg

SEQ ID NO: 920422 - DNA, 15 bp, Homo sapiens
ggtatcattctcttt

SEQ ID NO: 920423 - DNA, 15 bp, Homo sapiens
cggtatcattctctt

SEQ ID NO: 920424 - DNA, 15 bp, Homo sapiens
gcggtatcattctct

SEQ ID NO: 920425 - DNA, 15 bp, Homo sapiens
agcggtatcattctc

SEQ ID NO: 920426 - DNA, 15 bp, Homo sapiens
tagcggtatcattct

SEQ ID NO: 920427 - DNA, 15 bp, Homo sapiens
atagcggtatcattc

SEQ ID NO: 920428 - DNA, 15 bp, Homo sapiens
tatagcggtatcatt

SEQ ID NO: 920429 - DNA, 15 bp, Homo sapiens
gtatagcggtatcat

SEQ ID NO: 920430 - DNA, 15 bp, Homo sapiens
agtatagcggtatca

SEQ ID NO: 920431 - DNA, 15 bp, Homo sapiens
cagtatagcggtatc

SEQ ID NO: 920432 - DNA, 15 bp, Homo sapiens
ccagtatagcggtat

SEQ ID NO: 920433 - DNA, 15 bp, Homo sapiens
cccagtatagcggta

SEQ ID NO: 920434 - DNA, 15 bp, Homo sapiens
acccagtatagcggt

SEQ ID NO: 920435 - DNA, 15 bp, Homo sapiens
aacccagtatagcgg

SEQ ID NO: 920436 - DNA, 15 bp, Homo sapiens
aaacccagtatagcg

SEQ ID NO: 920437 - DNA, 15 bp, Homo sapiens
taaacccagtatagc

SEQ ID NO: 920438 - DNA, 15 bp, Homo sapiens
ataaacccagtatag

SEQ ID NO: 920439 - DNA, 15 bp, Homo sapiens
cataaacccagtata

SEQ ID NO: 920440 - DNA, 15 bp, Homo sapiens
gcataaacccagtat

SEQ ID NO: 920441 - DNA, 15 bp, Homo sapiens
ggcataaacccagta

SEQ ID NO: 920442 - DNA, 15 bp, Homo sapiens
tggcataaacccagt

SEQ ID NO: 920443 - DNA, 15 bp, Homo sapiens
ttggcataaacccag

SEQ ID NO: 920444 - DNA, 15 bp, Homo sapiens
cttggcataaaccca

SEQ ID NO: 920445 - DNA, 15 bp, Homo sapiens
tcttggcataaaccc

SEQ ID NO: 920446 - DNA, 15 bp, Homo sapiens
ttcttggcataaacc

SEQ ID NO: 920447 - DNA, 15 bp, Homo sapiens
gttcttggcataaac

SEQ ID NO: 920448 - DNA, 15 bp, Homo sapiens
tgttcttggcataaa

SEQ ID NO: 920449 - DNA, 15 bp, Homo sapiens
atgttcttggcataa

SEQ ID NO: 920450 - DNA, 15 bp, Homo sapiens
aatgttcttggcata

SEQ ID NO: 920451 - DNA, 15 bp, Homo sapiens
taatgttcttggcat

SEQ ID NO: 920452 - DNA, 15 bp, Homo sapiens
gtaatgttcttggca

SEQ ID NO: 920453 - DNA, 15 bp, Homo sapiens
tgtaatgttcttggc

SEQ ID NO: 920454 - DNA, 15 bp, Homo sapiens
gtgtaatgttcttgg

SEQ ID NO: 920455 - DNA, 15 bp, Homo sapiens
tgtgtaatgttcttg

SEQ ID NO: 920456 - DNA, 15 bp, Homo sapiens
atgtgtaatgttctt

SEQ ID NO: 920457 - DNA, 15 bp, Homo sapiens
catgtgtaatgttct

SEQ ID NO: 920458 - DNA, 15 bp, Homo sapiens
acatgtgtaatgttc

SEQ ID NO: 920459 - DNA, 15 bp, Homo sapiens
aacatgtgtaatgtt

SEQ ID NO: 920460 - DNA, 15 bp, Homo sapiens
aaacatgtgtaatgt

SEQ ID NO: 920461 - DNA, 15 bp, Homo sapiens
caaacatgtgtaatg

SEQ ID NO: 920462 - DNA, 15 bp, Homo sapiens
acaaacatgtgtaat

SEQ ID NO: 920463 - DNA, 15 bp, Homo sapiens
cacaaacatgtgtaa

SEQ ID NO: 920464 - DNA, 15 bp, Homo sapiens
ccacaaacatgtgta

SEQ ID NO: 920465 - DNA, 15 bp, Homo sapiens
tccacaaacatgtgt

SEQ ID NO: 920466 - DNA, 15 bp, Homo sapiens
ttccacaaacatgtg

SEQ ID NO: 920467 - DNA, 15 bp, Homo sapiens
attccacaaacatgt

SEQ ID NO: 920468 - DNA, 15 bp, Homo sapiens
cattccacaaacatg

SEQ ID NO: 920469 - DNA, 15 bp, Homo sapiens
gcattccacaaacat

SEQ ID NO: 920470 - DNA, 15 bp, Homo sapiens
agcattccacaaaca

SEQ ID NO: 920471 - DNA, 15 bp, Homo sapiens
gagcattccacaaac

SEQ ID NO: 920472 - DNA, 15 bp, Homo sapiens
tgagcattccacaaa

SEQ ID NO: 920473 - DNA, 15 bp, Homo sapiens
atgagcattccacaa

SEQ ID NO: 920474 - DNA, 15 bp, Homo sapiens
catgagcattccaca

SEQ ID NO: 920475 - DNA, 15 bp, Homo sapiens
acatgagcattccac

SEQ ID NO: 920476 - DNA, 15 bp, Homo sapiens
cacatgagcattcca

SEQ ID NO: 920477 - DNA, 15 bp, Homo sapiens
acacatgagcattcc

SEQ ID NO: 920478 - DNA, 15 bp, Homo sapiens
tacacatgagcattc

SEQ ID NO: 920479 - DNA, 15 bp, Homo sapiens
ctacacatgagcatt

SEQ ID NO: 920480 - DNA, 15 bp, Homo sapiens
tctacacatgagcat

SEQ ID NO: 920481 - DNA, 15 bp, Homo sapiens
gtctacacatgagca

SEQ ID NO: 920482 - DNA, 15 bp, Homo sapiens
tgtctacacatgagc

SEQ ID NO: 920483 - DNA, 15 bp, Homo sapiens
ttgtctacacatgag

SEQ ID NO: 920484 - DNA, 15 bp, Homo sapiens
gttgtctacacatga

SEQ ID NO: 920485 - DNA, 15 bp, Homo sapiens
tgttgtctacacatg

SEQ ID NO: 920486 - DNA, 15 bp, Homo sapiens
ctgttgtctacacat

SEQ ID NO: 920487 - DNA, 15 bp, Homo sapiens
actgttgtctacaca

SEQ ID NO: 920488 - DNA, 15 bp, Homo sapiens
cactgttgtctacac

SEQ ID NO: 920489 - DNA, 15 bp, Homo sapiens
acactgttgtctaca

SEQ ID NO: 920490 - DNA, 15 bp, Homo sapiens
gacactgttgtctac

SEQ ID NO: 920491 - DNA, 15 bp, Homo sapiens
agacactgttgtcta

SEQ ID NO: 920492 - DNA, 15 bp, Homo sapiens
aagacactgttgtct

SEQ ID NO: 920493 - DNA, 15 bp, Homo sapiens
taagacactgttgtc

SEQ ID NO: 920494 - DNA, 15 bp, Homo sapiens
gtaagacactgttgt

SEQ ID NO: 920495 - DNA, 15 bp, Homo sapiens
tgtaagacactgttg

SEQ ID NO: 920496 - DNA, 15 bp, Homo sapiens
gtgtaagacactgtt

SEQ ID NO: 920497 - DNA, 15 bp, Homo sapiens
tgtgtaagacactgt

SEQ ID NO: 920498 - DNA, 15 bp, Homo sapiens
ttgtgtaagacactg

SEQ ID NO: 920499 - DNA, 15 bp, Homo sapiens
gttgtgtaagacact

SEQ ID NO: 920500 - DNA, 15 bp, Homo sapiens
agttgtgtaagacac

SEQ ID NO: 920501 - DNA, 15 bp, Homo sapiens
aagttgtgtaagaca

SEQ ID NO: 920502 - DNA, 15 bp, Homo sapiens
gaagttgtgtaagac

SEQ ID NO: 920503 - DNA, 15 bp, Homo sapiens
tgaagttgtgtaaga

SEQ ID NO: 920504 - DNA, 15 bp, Homo sapiens
ttgaagttgtgtaag

SEQ ID NO: 920505 - DNA, 15 bp, Homo sapiens
tttgaagttgtgtaa

SEQ ID NO: 920506 - DNA, 15 bp, Homo sapiens
ttttgaagttgtgta

SEQ ID NO: 920507 - DNA, 15 bp, Homo sapiens
tttttgaagttgtgt

SEQ ID NO: 920508 - DNA, 15 bp, Homo sapiens
ttttttgaagttgtg

SEQ ID NO: 920509 - DNA, 15 bp, Homo sapiens
tttttttgaagttgt

SEQ ID NO: 920510 - DNA, 15 bp, Homo sapiens
atttttttgaagttg

SEQ ID NO: 920511 - DNA, 15 bp, Homo sapiens
tatttttttgaagtt

SEQ ID NO: 920512 - DNA, 15 bp, Homo sapiens
ttatttttttgaagt

SEQ ID NO: 920513 - DNA, 15 bp, Homo sapiens
attatttttttgaag

SEQ ID NO: 920514 - DNA, 15 bp, Homo sapiens
aattatttttttgaa

SEQ ID NO: 920515 - DNA, 15 bp, Homo sapiens
aaattatttttttga

SEQ ID NO: 920516 - DNA, 15 bp, Homo sapiens
taaattatttttttg

SEQ ID NO: 920517 - DNA, 15 bp, Homo sapiens
ataaattattttttt

SEQ ID NO: 920518 - DNA, 15 bp, Homo sapiens
tataaattatttttt

SEQ ID NO: 920519 - DNA, 15 bp, Homo sapiens
atataaattattttt

SEQ ID NO: 920520 - DNA, 15 bp, Homo sapiens
tatataaattatttt

SEQ ID NO: 920521 - DNA, 15 bp, Homo sapiens
atatataaattattt

SEQ ID NO: 920522 - DNA, 15 bp, Homo sapiens
tatatataaattatt

SEQ ID NO: 920523 - DNA, 15 bp, Homo sapiens
ttatatataaattat

SEQ ID NO: 920524 - DNA, 15 bp, Homo sapiens
tttatatataaatta

SEQ ID NO: 920525 - DNA, 15 bp, Homo sapiens
atttatatataaatt

SEQ ID NO: 920526 - DNA, 15 bp, Homo sapiens
tatttatatataaat

SEQ ID NO: 920527 - DNA, 15 bp, Homo sapiens
atatttatatataaa

SEQ ID NO: 920528 - DNA, 15 bp, Homo sapiens
catatttatatataa

SEQ ID NO: 920529 - DNA, 15 bp, Homo sapiens
acatatttatatata

SEQ ID NO: 920530 - DNA, 15 bp, Homo sapiens
aacatatttatatat

SEQ ID NO: 920531 - DNA, 15 bp, Homo sapiens
aaacatatttatata

SEQ ID NO: 920532 - DNA, 15 bp, Homo sapiens
aaaacatatttatat

SEQ ID NO: 920533 - DNA, 15 bp, Homo sapiens
taaaacatatttata

SEQ ID NO: 920534 - DNA, 15 bp, Homo sapiens
ttaaaacatatttat

SEQ ID NO: 920535 - DNA, 15 bp, Homo sapiens
tttaaaacatattta

SEQ ID NO: 920536 - DNA, 15 bp, Homo sapiens
atttaaaacatattt

SEQ ID NO: 920537 - DNA, 15 bp, Homo sapiens
aatttaaaacatatt

SEQ ID NO: 920538 - DNA, 15 bp, Homo sapiens
taatttaaaacatat

SEQ ID NO: 920539 - DNA, 15 bp, Homo sapiens
gtaatttaaaacata

SEQ ID NO: 920540 - DNA, 15 bp, Homo sapiens
agtaatttaaaacat

SEQ ID NO: 920541 - DNA, 15 bp, Homo sapiens
aagtaatttaaaaca

SEQ ID NO: 920542 - DNA, 15 bp, Homo sapiens
aaagtaatttaaaac

SEQ ID NO: 920543 - DNA, 15 bp, Homo sapiens
aaaagtaatttaaaa

SEQ ID NO: 920544 - DNA, 15 bp, Homo sapiens
aaaaagtaatttaaa

SEQ ID NO: 920545 - DNA, 15 bp, Homo sapiens
taaaaagtaatttaa

SEQ ID NO: 920546 - DNA, 15 bp, Homo sapiens
ttaaaaagtaattta

SEQ ID NO: 920547 - DNA, 15 bp, Homo sapiens
tttaaaaagtaattt

SEQ ID NO: 920548 - DNA, 15 bp, Homo sapiens
atttaaaaagtaatt

SEQ ID NO: 920549 - DNA, 15 bp, Homo sapiens
aatttaaaaagtaat

SEQ ID NO: 920550 - DNA, 15 bp, Homo sapiens
gaatttaaaaagtaa

SEQ ID NO: 920551 - DNA, 15 bp, Homo sapiens
tgaatttaaaaagta

SEQ ID NO: 920552 - DNA, 15 bp, Homo sapiens
gtgaatttaaaaagt

SEQ ID NO: 920553 - DNA, 15 bp, Homo sapiens
tgtgaatttaaaaag

SEQ ID NO: 920554 - DNA, 15 bp, Homo sapiens
ttgtgaatttaaaaa

SEQ ID NO: 920555 - DNA, 15 bp, Homo sapiens
cttgtgaatttaaaa

SEQ ID NO: 920556 - DNA, 15 bp, Homo sapiens
tcttgtgaatttaaa

SEQ ID NO: 920557 - DNA, 15 bp, Homo sapiens
ttcttgtgaatttaa

SEQ ID NO: 920558 - DNA, 15 bp, Homo sapiens
attcttgtgaattta

SEQ ID NO: 920559 - DNA, 15 bp, Homo sapiens
aattcttgtgaattt

SEQ ID NO: 920560 - DNA, 15 bp, Homo sapiens
aaattcttgtgaatt

SEQ ID NO: 920561 - DNA, 15 bp, Homo sapiens
taaattcttgtgaat

SEQ ID NO: 920562 - DNA, 15 bp, Homo sapiens
ataaattcttgtgaa

SEQ ID NO: 920563 - DNA, 15 bp, Homo sapiens
cataaattcttgtga

SEQ ID NO: 920564 - DNA, 15 bp, Homo sapiens
ccataaattcttgtg

SEQ ID NO: 920565 - DNA, 15 bp, Homo sapiens
accataaattcttgt

SEQ ID NO: 920566 - DNA, 15 bp, Homo sapiens
taccataaattcttg

SEQ ID NO: 920567 - DNA, 15 bp, Homo sapiens
ataccataaattctt

SEQ ID NO: 920568 - DNA, 15 bp, Homo sapiens
tataccataaattct

SEQ ID NO: 920569 - DNA, 15 bp, Homo sapiens
gtataccataaattc

SEQ ID NO: 920570 - DNA, 15 bp, Homo sapiens
tgtataccataaatt

SEQ ID NO: 920571 - DNA, 15 bp, Homo sapiens
ttgtataccataaat

SEQ ID NO: 920572 - DNA, 15 bp, Homo sapiens
gttgtataccataaa

SEQ ID NO: 920573 - DNA, 15 bp, Homo sapiens
tgttgtataccataa

SEQ ID NO: 920574 - DNA, 15 bp, Homo sapiens
atgttgtataccata

SEQ ID NO: 920575 - DNA, 15 bp, Homo sapiens
catgttgtataccat

SEQ ID NO: 920576 - DNA, 15 bp, Homo sapiens
ccatgttgtatacca

SEQ ID NO: 920577 - DNA, 15 bp, Homo sapiens
accatgttgtatacc

SEQ ID NO: 920578 - DNA, 15 bp, Homo sapiens
caccatgttgtatac

SEQ ID NO: 920579 - DNA, 15 bp, Homo sapiens
acaccatgttgtata

SEQ ID NO: 920580 - DNA, 15 bp, Homo sapiens
aacaccatgttgtat

SEQ ID NO: 920581 - DNA, 15 bp, Homo sapiens
gaacaccatgttgta

SEQ ID NO: 920582 - DNA, 15 bp, Homo sapiens
agaacaccatgttgt

SEQ ID NO: 920583 - DNA, 15 bp, Homo sapiens
tagaacaccatgttg

SEQ ID NO: 920584 - DNA, 15 bp, Homo sapiens
atagaacaccatgtt

SEQ ID NO: 920585 - DNA, 15 bp, Homo sapiens
tatagaacaccatgt

SEQ ID NO: 920586 - DNA, 15 bp, Homo sapiens
atatagaacaccatg

SEQ ID NO: 920587 - DNA, 15 bp, Homo sapiens
tatatagaacaccat

SEQ ID NO: 920588 - DNA, 15 bp, Homo sapiens
atatatagaacacca

SEQ ID NO: 920589 - DNA, 15 bp, Homo sapiens
catatatagaacacc

SEQ ID NO: 920590 - DNA, 15 bp, Homo sapiens
acatatatagaacac

SEQ ID NO: 920591 - DNA, 15 bp, Homo sapiens
tacatatatagaaca

SEQ ID NO: 920592 - DNA, 15 bp, Homo sapiens
atacatatatagaac

SEQ ID NO: 920593 - DNA, 15 bp, Homo sapiens
tatacatatatagaa

SEQ ID NO: 920594 - DNA, 15 bp, Homo sapiens
atatacatatataga

SEQ ID NO: 920595 - DNA, 15 bp, Homo sapiens
tatatacatatatag

SEQ ID NO: 920596 - DNA, 15 bp, Homo sapiens
gtatatacatatata

SEQ ID NO: 920597 - DNA, 15 bp, Homo sapiens
agtatatacatatat

SEQ ID NO: 920598 - DNA, 15 bp, Homo sapiens
tagtatatacatata

SEQ ID NO: 920599 - DNA, 15 bp, Homo sapiens
atagtatatacatat

SEQ ID NO: 920600 - DNA, 15 bp, Homo sapiens
catagtatatacata

SEQ ID NO: 920601 - DNA, 15 bp, Homo sapiens
gcatagtatatacat

SEQ ID NO: 920602 - DNA, 15 bp, Homo sapiens
agcatagtatataca

SEQ ID NO: 920603 - DNA, 15 bp, Homo sapiens
tagcatagtatatac

SEQ ID NO: 920604 - DNA, 15 bp, Homo sapiens
atagcatagtatata

SEQ ID NO: 920605 - DNA, 15 bp, Homo sapiens
tatagcatagtatat

SEQ ID NO: 920606 - DNA, 15 bp, Homo sapiens
gtatagcatagtata

SEQ ID NO: 920607 - DNA, 15 bp, Homo sapiens
tgtatagcatagtat

SEQ ID NO: 920608 - DNA, 15 bp, Homo sapiens
ttgtatagcatagta

SEQ ID NO: 920609 - DNA, 15 bp, Homo sapiens
gttgtatagcatagt

SEQ ID NO: 920610 - DNA, 15 bp, Homo sapiens
tgttgtatagcatag

SEQ ID NO: 920611 - DNA, 15 bp, Homo sapiens
atgttgtatagcata

SEQ ID NO: 920612 - DNA, 15 bp, Homo sapiens
catgttgtatagcat

SEQ ID NO: 920613 - DNA, 15 bp, Homo sapiens
ccatgttgtatagca

SEQ ID NO: 920614 - DNA, 15 bp, Homo sapiens
accatgttgtatagc

SEQ ID NO: 920615 - DNA, 15 bp, Homo sapiens
caccatgttgtatag

SEQ ID NO: 920616 - DNA, 15 bp, Homo sapiens
cagtatatacatata

SEQ ID NO: 920617 - DNA, 15 bp, Homo sapiens
acagtatatacatat

SEQ ID NO: 920618 - DNA, 15 bp, Homo sapiens
cacagtatatacata

SEQ ID NO: 920619 - DNA, 15 bp, Homo sapiens
ccacagtatatacat

SEQ ID NO: 920620 - DNA, 15 bp, Homo sapiens
tccacagtatataca

SEQ ID NO: 920621 - DNA, 15 bp, Homo sapiens
ttccacagtatatac

SEQ ID NO: 920622 - DNA, 15 bp, Homo sapiens
attccacagtatata

SEQ ID NO: 920623 - DNA, 15 bp, Homo sapiens
cattccacagtatat

SEQ ID NO: 920624 - DNA, 15 bp, Homo sapiens
ccattccacagtata

SEQ ID NO: 920625 - DNA, 15 bp, Homo sapiens
gccattccacagtat

SEQ ID NO: 920626 - DNA, 15 bp, Homo sapiens
agccattccacagta

SEQ ID NO: 920627 - DNA, 15 bp, Homo sapiens
tagccattccacagt

SEQ ID NO: 920628 - DNA, 15 bp, Homo sapiens
ttagccattccacag

SEQ ID NO: 920629 - DNA, 15 bp, Homo sapiens
tttagccattccaca

SEQ ID NO: 920630 - DNA, 15 bp, Homo sapiens
atttagccattccac

SEQ ID NO: 920631 - DNA, 15 bp, Homo sapiens
gatttagccattcca

SEQ ID NO: 920632 - DNA, 15 bp, Homo sapiens
tgatttagccattcc

SEQ ID NO: 920633 - DNA, 15 bp, Homo sapiens
ttgatttagccattc

SEQ ID NO: 920634 - DNA, 15 bp, Homo sapiens
cttgatttagccatt

SEQ ID NO: 920635 - DNA, 15 bp, Homo sapiens
gcttgatttagccat

SEQ ID NO: 920636 - DNA, 15 bp, Homo sapiens
agcttgatttagcca

SEQ ID NO: 920637 - DNA, 15 bp, Homo sapiens
tagcttgatttagcc

SEQ ID NO: 920638 - DNA, 15 bp, Homo sapiens
gtagcttgatttagc

SEQ ID NO: 920639 - DNA, 15 bp, Homo sapiens
agtagcttgatttag

SEQ ID NO: 920640 - DNA, 15 bp, Homo sapiens
aagtagcttgattta

SEQ ID NO: 920641 - DNA, 15 bp, Homo sapiens
taagtagcttgattt

SEQ ID NO: 920642 - DNA, 15 bp, Homo sapiens
ttaagtagcttgatt

SEQ ID NO: 920643 - DNA, 15 bp, Homo sapiens
gttaagtagcttgat

SEQ ID NO: 920644 - DNA, 15 bp, Homo sapiens
tgttaagtagcttga

SEQ ID NO: 920645 - DNA, 15 bp, Homo sapiens
atgttaagtagcttg

SEQ ID NO: 920646 - DNA, 15 bp, Homo sapiens
tatgttaagtagctt

SEQ ID NO: 920647 - DNA, 15 bp, Homo sapiens
atatgttaagtagct

SEQ ID NO: 920648 - DNA, 15 bp, Homo sapiens
catatgttaagtagc

SEQ ID NO: 920649 - DNA, 15 bp, Homo sapiens
acatatgttaagtag

SEQ ID NO: 920650 - DNA, 15 bp, Homo sapiens
tacatatgttaagta

SEQ ID NO: 920651 - DNA, 15 bp, Homo sapiens
atacatatgttaagt

SEQ ID NO: 920652 - DNA, 15 bp, Homo sapiens
aatacatatgttaag

SEQ ID NO: 920653 - DNA, 15 bp, Homo sapiens
taatacatatgttaa

SEQ ID NO: 920654 - DNA, 15 bp, Homo sapiens
gtaatacatatgtta

SEQ ID NO: 920655 - DNA, 15 bp, Homo sapiens
ggtaatacatatgtt

SEQ ID NO: 920656 - DNA, 15 bp, Homo sapiens
aggtaatacatatgt

SEQ ID NO: 920657 - DNA, 15 bp, Homo sapiens
gaggtaatacatatg

SEQ ID NO: 920658 - DNA, 15 bp, Homo sapiens
cgaggtaatacatat

SEQ ID NO: 920659 - DNA, 15 bp, Homo sapiens
gcgaggtaatacata

SEQ ID NO: 920660 - DNA, 15 bp, Homo sapiens
tgcgaggtaatacat

SEQ ID NO: 920661 - DNA, 15 bp, Homo sapiens
atgcgaggtaataca

SEQ ID NO: 920662 - DNA, 15 bp, Homo sapiens
tatgcgaggtaatac

SEQ ID NO: 920663 - DNA, 15 bp, Homo sapiens
gtatgcgaggtaata

SEQ ID NO: 920664 - DNA, 15 bp, Homo sapiens
agtatgcgaggtaat

SEQ ID NO: 920665 - DNA, 15 bp, Homo sapiens
aagtatgcgaggtaa

SEQ ID NO: 920666 - DNA, 15 bp, Homo sapiens
aaagtatgcgaggta

SEQ ID NO: 920667 - DNA, 15 bp, Homo sapiens
aaaagtatgcgaggt

SEQ ID NO: 920668 - DNA, 15 bp, Homo sapiens
aaaaagtatgcgagg

SEQ ID NO: 920669 - DNA, 15 bp, Homo sapiens
aaaaaagtatgcgag

SEQ ID NO: 920670 - DNA, 15 bp, Homo sapiens
aaaaaaagtatgcga

SEQ ID NO: 920671 - DNA, 15 bp, Homo sapiens
aaaaaaaagtatgcg

SEQ ID NO: 920672 - DNA, 15 bp, Homo sapiens
aaaaaaaaagtatgc

SEQ ID NO: 920673 - DNA, 15 bp, Homo sapiens
aaaaaaaaaagtatg

SEQ ID NO: 920674 - DNA, 15 bp, Homo sapiens
aaaaaaaaaaagtat

SEQ ID NO: 920675 - DNA, 15 bp, Homo sapiens
aaaaaaaaaaaagta

SEQ ID NO: 920676 - DNA, 15 bp, Homo sapiens
aaaaaaaaaaaaagt

SEQ ID NO: 920677 - DNA, 15 bp, Homo sapiens
aaaaaaaaaaaaaag

SEQ ID NO: 920678 - DNA, 15 bp, Homo sapiens
gaaaaaaaaaaaaaa

SEQ ID NO: 920679 - DNA, 15 bp, Homo sapiens
ggaaaaaaaaaaaaa

SEQ ID NO: 920680 - DNA, 15 bp, Homo sapiens
aggaaaaaaaaaaaa

SEQ ID NO: 920681 - DNA, 15 bp, Homo sapiens
aaggaaaaaaaaaaa

SEQ ID NO: 920682 - DNA, 15 bp, Homo sapiens
caaggaaaaaaaaaa

SEQ ID NO: 920683 - DNA, 15 bp, Homo sapiens
tcaaggaaaaaaaaa

SEQ ID NO: 920684 - DNA, 15 bp, Homo sapiens
ctcaaggaaaaaaaa

SEQ ID NO: 920685 - DNA, 15 bp, Homo sapiens
tctcaaggaaaaaaa

SEQ ID NO: 920686 - DNA, 15 bp, Homo sapiens
gtctcaaggaaaaaa

SEQ ID NO: 920687 - DNA, 15 bp, Homo sapiens
tgtctcaaggaaaaa

SEQ ID NO: 920688 - DNA, 15 bp, Homo sapiens
ctgtctcaaggaaaa

SEQ ID NO: 920689 - DNA, 15 bp, Homo sapiens
tctgtctcaaggaaa

SEQ ID NO: 920690 - DNA, 15 bp, Homo sapiens
ctctgtctcaaggaa

SEQ ID NO: 920691 - DNA, 15 bp, Homo sapiens
actctgtctcaagga

SEQ ID NO: 920692 - DNA, 15 bp, Homo sapiens
gactctgtctcaagg

SEQ ID NO: 920693 - DNA, 15 bp, Homo sapiens
agactctgtctcaag

SEQ ID NO: 920694 - DNA, 15 bp, Homo sapiens
aagactctgtctcaa

SEQ ID NO: 920695 - DNA, 15 bp, Homo sapiens
caagactctgtctca

SEQ ID NO: 920696 - DNA, 15 bp, Homo sapiens
gcaagactctgtctc

SEQ ID NO: 920697 - DNA, 15 bp, Homo sapiens
agcaagactctgtct

SEQ ID NO: 920698 - DNA, 15 bp, Homo sapiens
gagcaagactctgtc

SEQ ID NO: 920699 - DNA, 15 bp, Homo sapiens
agagcaagactctgt

SEQ ID NO: 920700 - DNA, 15 bp, Homo sapiens
cagagcaagactctg

SEQ ID NO: 920701 - DNA, 15 bp, Homo sapiens
acagagcaagactct

SEQ ID NO: 920702 - DNA, 15 bp, Homo sapiens
gacagagcaagactc

SEQ ID NO: 920703 - DNA, 15 bp, Homo sapiens
tgacagagcaagact

SEQ ID NO: 920704 - DNA, 15 bp, Homo sapiens
gtgacagagcaagac

SEQ ID NO: 920705 - DNA, 15 bp, Homo sapiens
ggtgacagagcaaga

SEQ ID NO: 920706 - DNA, 15 bp, Homo sapiens
gggtgacagagcaag

SEQ ID NO: 920707 - DNA, 15 bp, Homo sapiens
tgggtgacagagcaa

SEQ ID NO: 920708 - DNA, 15 bp, Homo sapiens
ctgggtgacagagca

SEQ ID NO: 920709 - DNA, 15 bp, Homo sapiens
cctgggtgacagagc

SEQ ID NO: 920710 - DNA, 15 bp, Homo sapiens
gcctgggtgacagag

SEQ ID NO: 920711 - DNA, 15 bp, Homo sapiens
agcctgggtgacaga

SEQ ID NO: 920712 - DNA, 15 bp, Homo sapiens
cagcctgggtgacag

SEQ ID NO: 920713 - DNA, 15 bp, Homo sapiens
ccagcctgggtgaca

SEQ ID NO: 920714 - DNA, 15 bp, Homo sapiens
tccagcctgggtgac

SEQ ID NO: 920715 - DNA, 15 bp, Homo sapiens
ctccagcctgggtga

SEQ ID NO: 920716 - DNA, 15 bp, Homo sapiens
actccagcctgggtg

SEQ ID NO: 920717 - DNA, 15 bp, Homo sapiens
cactccagcctgggt

SEQ ID NO: 920718 - DNA, 15 bp, Homo sapiens
agcgccactgcactc

SEQ ID NO: 920719 - DNA, 15 bp, Homo sapiens
tagcgccactgcact

SEQ ID NO: 920720 - DNA, 15 bp, Homo sapiens
atagcgccactgcac

SEQ ID NO: 920721 - DNA, 15 bp, Homo sapiens
gatagcgccactgca

SEQ ID NO: 920722 - DNA, 15 bp, Homo sapiens
agatagcgccactgc

SEQ ID NO: 920723 - DNA, 15 bp, Homo sapiens
aagatagcgccactg

SEQ ID NO: 920724 - DNA, 15 bp, Homo sapiens
caagatagcgccact

SEQ ID NO: 920725 - DNA, 15 bp, Homo sapiens
ccaagatagcgccac

SEQ ID NO: 920726 - DNA, 15 bp, Homo sapiens
gccaagatagcgcca

SEQ ID NO: 920727 - DNA, 15 bp, Homo sapiens
agccaagatagcgcc

SEQ ID NO: 920728 - DNA, 15 bp, Homo sapiens
ggttgcagtgagcca

SEQ ID NO: 920729 - DNA, 15 bp, Homo sapiens
aggttgcagtgagcc

SEQ ID NO: 920730 - DNA, 15 bp, Homo sapiens
gaggttgcagtgagc

SEQ ID NO: 920731 - DNA, 15 bp, Homo sapiens
agaggttgcagtgag

SEQ ID NO: 920732 - DNA, 15 bp, Homo sapiens
cagaggttgcagtga

SEQ ID NO: 920733 - DNA, 15 bp, Homo sapiens
gcagaggttgcagtg

SEQ ID NO: 920734 - DNA, 15 bp, Homo sapiens
ggcagaggttgcagt

SEQ ID NO: 920735 - DNA, 15 bp, Homo sapiens
aggcagaggttgcag

SEQ ID NO: 920736 - DNA, 15 bp, Homo sapiens
gaggcagaggttgca

SEQ ID NO: 920737 - DNA, 15 bp, Homo sapiens
ggaggcagaggttgc

SEQ ID NO: 920738 - DNA, 15 bp, Homo sapiens
aggaggcagaggttg

SEQ ID NO: 920739 - DNA, 15 bp, Homo sapiens
caggaggcagaggtt

SEQ ID NO: 920740 - DNA, 15 bp, Homo sapiens
ccaggaggcagaggt

SEQ ID NO: 920741 - DNA, 15 bp, Homo sapiens
cccaggaggcagagg

SEQ ID NO: 920742 - DNA, 15 bp, Homo sapiens
acccaggaggcagag

SEQ ID NO: 920743 - DNA, 15 bp, Homo sapiens
gacccaggaggcaga

SEQ ID NO: 920744 - DNA, 15 bp, Homo sapiens
ggacccaggaggcag

SEQ ID NO: 920745 - DNA, 15 bp, Homo sapiens
tggacccaggaggca

SEQ ID NO: 920746 - DNA, 15 bp, Homo sapiens
ttggacccaggaggc

SEQ ID NO: 920747 - DNA, 15 bp, Homo sapiens
cttggacccaggagg

SEQ ID NO: 920748 - DNA, 15 bp, Homo sapiens
acttggacccaggag

SEQ ID NO: 920749 - DNA, 15 bp, Homo sapiens
aacttggacccagga

SEQ ID NO: 920750 - DNA, 15 bp, Homo sapiens
taacttggacccagg

SEQ ID NO: 920751 - DNA, 15 bp, Homo sapiens
ataacttggacccag

SEQ ID NO: 920752 - DNA, 15 bp, Homo sapiens
aataacttggaccca

SEQ ID NO: 920753 - DNA, 15 bp, Homo sapiens
aaataacttggaccc

SEQ ID NO: 920754 - DNA, 15 bp, Homo sapiens
aaaataacttggacc

SEQ ID NO: 920755 - DNA, 15 bp, Homo sapiens
gaaaataacttggac

SEQ ID NO: 920756 - DNA, 15 bp, Homo sapiens
agaaaataacttgga

SEQ ID NO: 920757 - DNA, 15 bp, Homo sapiens
aagaaaataacttgg

SEQ ID NO: 920758 - DNA, 15 bp, Homo sapiens
caagaaaataacttg

SEQ ID NO: 920759 - DNA, 15 bp, Homo sapiens
gcaagaaaataactt

SEQ ID NO: 920760 - DNA, 15 bp, Homo sapiens
ggcaagaaaataact

SEQ ID NO: 920761 - DNA, 15 bp, Homo sapiens
aggcaagaaaataac

SEQ ID NO: 920762 - DNA, 15 bp, Homo sapiens
gaggcaagaaaataa

SEQ ID NO: 920763 - DNA, 15 bp, Homo sapiens
tgaggcaagaaaata

SEQ ID NO: 920764 - DNA, 15 bp, Homo sapiens
ctgaggcaagaaaat

SEQ ID NO: 920765 - DNA, 15 bp, Homo sapiens
gctgaggcaagaaaa

SEQ ID NO: 920766 - DNA, 15 bp, Homo sapiens
ggctgaggcaagaaa

SEQ ID NO: 920767 - DNA, 15 bp, Homo sapiens
aggctgaggcaagaa

SEQ ID NO: 920768 - DNA, 15 bp, Homo sapiens
gaggctgaggcaaga

SEQ ID NO: 920769 - DNA, 15 bp, Homo sapiens
ggaggctgaggcaag

SEQ ID NO: 920770 - DNA, 15 bp, Homo sapiens
gggaggctgaggcaa

SEQ ID NO: 920771 - DNA, 15 bp, Homo sapiens
tcagctacttgggag

SEQ ID NO: 920772 - DNA, 15 bp, Homo sapiens
ctcagctacttggga

SEQ ID NO: 920773 - DNA, 15 bp, Homo sapiens
tctcagctacttggg

SEQ ID NO: 920774 - DNA, 15 bp, Homo sapiens
atctcagctacttgg

SEQ ID NO: 920775 - DNA, 15 bp, Homo sapiens
aatctcagctacttg

SEQ ID NO: 920776 - DNA, 15 bp, Homo sapiens
taatctcagctactt

SEQ ID NO: 920777 - DNA, 15 bp, Homo sapiens
gtaatctcagctact

SEQ ID NO: 920778 - DNA, 15 bp, Homo sapiens
tgtaatctcagctac

SEQ ID NO: 920779 - DNA, 15 bp, Homo sapiens
ctgtaatctcagcta

SEQ ID NO: 920780 - DNA, 15 bp, Homo sapiens
cctgtaatctcagct

SEQ ID NO: 920781 - DNA, 15 bp, Homo sapiens
gcctgtaatctcagc

SEQ ID NO: 920782 - DNA, 15 bp, Homo sapiens
tgcctgtaatctcag

SEQ ID NO: 920783 - DNA, 15 bp, Homo sapiens
atgcctgtaatctca

SEQ ID NO: 920784 - DNA, 15 bp, Homo sapiens
catgcctgtaatctc

SEQ ID NO: 920785 - DNA, 15 bp, Homo sapiens
acatgcctgtaatct

SEQ ID NO: 920786 - DNA, 15 bp, Homo sapiens
tggcacatgcctgta

SEQ ID NO: 920787 - DNA, 15 bp, Homo sapiens
gtggcacatgcctgt

SEQ ID NO: 920788 - DNA, 15 bp, Homo sapiens
ggtggcacatgcctg

SEQ ID NO: 920789 - DNA, 15 bp, Homo sapiens
tggtggcacatgcct

SEQ ID NO: 920790 - DNA, 15 bp, Homo sapiens
gtggtggcacatgcc

SEQ ID NO: 920791 - DNA, 15 bp, Homo sapiens
cgtggtggcacatgc

SEQ ID NO: 920792 - DNA, 15 bp, Homo sapiens
gcgtggtggcacatg

SEQ ID NO: 920793 - DNA, 15 bp, Homo sapiens
ggcgtggtggcacat

SEQ ID NO: 920794 - DNA, 15 bp, Homo sapiens
aggcgtggtggcaca

SEQ ID NO: 920795 - DNA, 15 bp, Homo sapiens
caggcgtggtggcac

SEQ ID NO: 920796 - DNA, 15 bp, Homo sapiens
ccaggcgtggtggca

SEQ ID NO: 920797 - DNA, 15 bp, Homo sapiens
gccaggcgtggtggc

SEQ ID NO: 920798 - DNA, 15 bp, Homo sapiens
agccaggcgtggtgg

SEQ ID NO: 920799 - DNA, 15 bp, Homo sapiens
tagccaggcgtggtg

SEQ ID NO: 920800 - DNA, 15 bp, Homo sapiens
ttagccaggcgtggt

SEQ ID NO: 920801 - DNA, 15 bp, Homo sapiens
attagccaggcgtgg

SEQ ID NO: 920802 - DNA, 15 bp, Homo sapiens
aattagccaggcgtg

SEQ ID NO: 920803 - DNA, 15 bp, Homo sapiens
aaattagccaggcgt

SEQ ID NO: 920804 - DNA, 15 bp, Homo sapiens
aaaattagccaggcg

SEQ ID NO: 920805 - DNA, 15 bp, Homo sapiens
aaaaattagccaggc

SEQ ID NO: 920806 - DNA, 15 bp, Homo sapiens
ttaccaaaaatacaa

SEQ ID NO: 920807 - DNA, 15 bp, Homo sapiens
tttaccaaaaataca

SEQ ID NO: 920808 - DNA, 15 bp, Homo sapiens
ctttaccaaaaatac

SEQ ID NO: 920809 - DNA, 15 bp, Homo sapiens
tctttaccaaaaata

SEQ ID NO: 920810 - DNA, 15 bp, Homo sapiens
gtctttaccaaaaat

SEQ ID NO: 920811 - DNA, 15 bp, Homo sapiens
cgtctttaccaaaaa

SEQ ID NO: 920812 - DNA, 15 bp, Homo sapiens
ccgtctttaccaaaa

SEQ ID NO: 920813 - DNA, 15 bp, Homo sapiens
tccgtctttaccaaa

SEQ ID NO: 920814 - DNA, 15 bp, Homo sapiens
ctccgtctttaccaa

SEQ ID NO: 920815 - DNA, 15 bp, Homo sapiens
actccgtctttacca

SEQ ID NO: 920816 - DNA, 15 bp, Homo sapiens
aactccgtctttacc

SEQ ID NO: 920817 - DNA, 15 bp, Homo sapiens
aaactccgtctttac

SEQ ID NO: 920818 - DNA, 15 bp, Homo sapiens
aaaactccgtcttta

SEQ ID NO: 920819 - DNA, 15 bp, Homo sapiens
caaaactccgtcttt

SEQ ID NO: 920820 - DNA, 15 bp, Homo sapiens
gcaaaactccgtctt

SEQ ID NO: 920821 - DNA, 15 bp, Homo sapiens
ggcaaaactccgtct

SEQ ID NO: 920822 - DNA, 15 bp, Homo sapiens
tggcaaaactccgtc

SEQ ID NO: 920823 - DNA, 15 bp, Homo sapiens
atggcaaaactccgt

SEQ ID NO: 920824 - DNA, 15 bp, Homo sapiens
tatggcaaaactccg

SEQ ID NO: 920825 - DNA, 15 bp, Homo sapiens
atatggcaaaactcc

SEQ ID NO: 920826 - DNA, 15 bp, Homo sapiens
aatatggcaaaactc

SEQ ID NO: 920827 - DNA, 15 bp, Homo sapiens
caatatggcaaaact

SEQ ID NO: 920828 - DNA, 15 bp, Homo sapiens
acaatatggcaaaac

SEQ ID NO: 920829 - DNA, 15 bp, Homo sapiens
gacaatatggcaaaa

SEQ ID NO: 920830 - DNA, 15 bp, Homo sapiens
ggacaatatggcaaa

SEQ ID NO: 920831 - DNA, 15 bp, Homo sapiens
tggacaatatggcaa

SEQ ID NO: 920832 - DNA, 15 bp, Homo sapiens
gtggacaatatggca

SEQ ID NO: 920833 - DNA, 15 bp, Homo sapiens
cgtggacaatatggc

SEQ ID NO: 920834 - DNA, 15 bp, Homo sapiens
gcgtggacaatatgg

SEQ ID NO: 920835 - DNA, 15 bp, Homo sapiens
agcgtggacaatatg

SEQ ID NO: 920836 - DNA, 15 bp, Homo sapiens
tagcgtggacaatat

SEQ ID NO: 920837 - DNA, 15 bp, Homo sapiens
ctagcgtggacaata

SEQ ID NO: 920838 - DNA, 15 bp, Homo sapiens
actagcgtggacaat

SEQ ID NO: 920839 - DNA, 15 bp, Homo sapiens
gactagcgtggacaa

SEQ ID NO: 920840 - DNA, 15 bp, Homo sapiens
agactagcgtggaca

SEQ ID NO: 920841 - DNA, 15 bp, Homo sapiens
gagactagcgtggac

SEQ ID NO: 920842 - DNA, 15 bp, Homo sapiens
tgagactagcgtgga

SEQ ID NO: 920843 - DNA, 15 bp, Homo sapiens
ttgagactagcgtgg

SEQ ID NO: 920844 - DNA, 15 bp, Homo sapiens
tttgagactagcgtg

SEQ ID NO: 920845 - DNA, 15 bp, Homo sapiens
ttttgagactagcgt

SEQ ID NO: 920846 - DNA, 15 bp, Homo sapiens
attttgagactagcg

SEQ ID NO: 920847 - DNA, 15 bp, Homo sapiens
aattttgagactagc

SEQ ID NO: 920848 - DNA, 15 bp, Homo sapiens
gaattttgagactag

SEQ ID NO: 920849 - DNA, 15 bp, Homo sapiens
ggaattttgagacta

SEQ ID NO: 920850 - DNA, 15 bp, Homo sapiens
aggaattttgagact

SEQ ID NO: 920851 - DNA, 15 bp, Homo sapiens
taggaattttgagac

SEQ ID NO: 920852 - DNA, 15 bp, Homo sapiens
ctaggaattttgaga

SEQ ID NO: 920853 - DNA, 15 bp, Homo sapiens
gctaggaattttgag

SEQ ID NO: 920854 - DNA, 15 bp, Homo sapiens
ggctaggaattttga

SEQ ID NO: 920855 - DNA, 15 bp, Homo sapiens
aggctaggaattttg

SEQ ID NO: 920856 - DNA, 15 bp, Homo sapiens
gaggctaggaatttt

SEQ ID NO: 920857 - DNA, 15 bp, Homo sapiens
tgaggctaggaattt

SEQ ID NO: 920858 - DNA, 15 bp, Homo sapiens
ttgaggctaggaatt

SEQ ID NO: 920859 - DNA, 15 bp, Homo sapiens
cttgaggctaggaat

SEQ ID NO: 920860 - DNA, 15 bp, Homo sapiens
gcttgaggctaggaa

SEQ ID NO: 920861 - DNA, 15 bp, Homo sapiens
tgcttgaggctagga

SEQ ID NO: 920862 - DNA, 15 bp, Homo sapiens
ttgcttgaggctagg

SEQ ID NO: 920863 - DNA, 15 bp, Homo sapiens
attgcttgaggctag

SEQ ID NO: 920864 - DNA, 15 bp, Homo sapiens
gattgcttgaggcta

SEQ ID NO: 920865 - DNA, 15 bp, Homo sapiens
agattgcttgaggct

SEQ ID NO: 920866 - DNA, 15 bp, Homo sapiens
cagattgcttgaggc

SEQ ID NO: 920867 - DNA, 15 bp, Homo sapiens
gcagattgcttgagg

SEQ ID NO: 920868 - DNA, 15 bp, Homo sapiens
ggcagattgcttgag

SEQ ID NO: 920869 - DNA, 15 bp, Homo sapiens
gggcagattgcttga

SEQ ID NO: 920870 - DNA, 15 bp, Homo sapiens
tgggcagattgcttg

SEQ ID NO: 920871 - DNA, 15 bp, Homo sapiens
gtgggcagattgctt

SEQ ID NO: 920872 - DNA, 15 bp, Homo sapiens
ggtgggcagattgct

SEQ ID NO: 920873 - DNA, 15 bp, Homo sapiens
aggtgggcagattgc

SEQ ID NO: 920874 - DNA, 15 bp, Homo sapiens
aaggtgggcagattg

SEQ ID NO: 920875 - DNA, 15 bp, Homo sapiens
caaggtgggcagatt

SEQ ID NO: 920876 - DNA, 15 bp, Homo sapiens
ccaaggtgggcagat

SEQ ID NO: 920877 - DNA, 15 bp, Homo sapiens
gccaaggtgggcaga

SEQ ID NO: 920878 - DNA, 15 bp, Homo sapiens
ggccaaggtgggcag

SEQ ID NO: 920879 - DNA, 15 bp, Homo sapiens
aggccaaggtgggca

SEQ ID NO: 920880 - DNA, 15 bp, Homo sapiens
gaggccaaggtgggc

SEQ ID NO: 920881 - DNA, 15 bp, Homo sapiens
ggaggccaaggtggg

SEQ ID NO: 920882 - DNA, 15 bp, Homo sapiens
gggaggccaaggtgg

SEQ ID NO: 920883 - DNA, 15 bp, Homo sapiens
tgggaggccaaggtg

SEQ ID NO: 920884 - DNA, 15 bp, Homo sapiens
ttgggaggccaaggt

SEQ ID NO: 920885 - DNA, 15 bp, Homo sapiens
gctgtaatcccagca

SEQ ID NO: 920886 - DNA, 15 bp, Homo sapiens
tgctgtaatcccagc

SEQ ID NO: 920887 - DNA, 15 bp, Homo sapiens
atgctgtaatcccag

SEQ ID NO: 920888 - DNA, 15 bp, Homo sapiens
tatgctgtaatccca

SEQ ID NO: 920889 - DNA, 15 bp, Homo sapiens
gtatgctgtaatccc

SEQ ID NO: 920890 - DNA, 15 bp, Homo sapiens
agtatgctgtaatcc

SEQ ID NO: 920891 - DNA, 15 bp, Homo sapiens
aagtatgctgtaatc

SEQ ID NO: 920892 - DNA, 15 bp, Homo sapiens
gaagtatgctgtaat

SEQ ID NO: 920893 - DNA, 15 bp, Homo sapiens
agaagtatgctgtaa

SEQ ID NO: 920894 - DNA, 15 bp, Homo sapiens
aagaagtatgctgta

SEQ ID NO: 920895 - DNA, 15 bp, Homo sapiens
gaagaagtatgctgt

SEQ ID NO: 920896 - DNA, 15 bp, Homo sapiens
agaagaagtatgctg

SEQ ID NO: 920897 - DNA, 15 bp, Homo sapiens
aagaagaagtatgct

SEQ ID NO: 920898 - DNA, 15 bp, Homo sapiens
taagaagaagtatgc

SEQ ID NO: 920899 - DNA, 15 bp, Homo sapiens
ataagaagaagtatg

SEQ ID NO: 920900 - DNA, 15 bp, Homo sapiens
aataagaagaagtat

SEQ ID NO: 920901 - DNA, 15 bp, Homo sapiens
aaataagaagaagta

SEQ ID NO: 920902 - DNA, 15 bp, Homo sapiens
aaaataagaagaagt

SEQ ID NO: 920903 - DNA, 15 bp, Homo sapiens
aaaaataagaagaag

SEQ ID NO: 920904 - DNA, 15 bp, Homo sapiens
aaaaaataagaagaa

SEQ ID NO: 920905 - DNA, 15 bp, Homo sapiens
aaaaaaataagaaga

SEQ ID NO: 920906 - DNA, 15 bp, Homo sapiens
aaaaaaaataagaag

SEQ ID NO: 920907 - DNA, 15 bp, Homo sapiens
aaaaaaaaataagaa

SEQ ID NO: 920908 - DNA, 15 bp, Homo sapiens
aaaaaaaaaataaga

SEQ ID NO: 920909 - DNA, 15 bp, Homo sapiens
aaaaaaaaaaataag

SEQ ID NO: 920910 - DNA, 15 bp, Homo sapiens
gcaaaaaaaaaaaaa

SEQ ID NO: 920911 - DNA, 15 bp, Homo sapiens
tgcaaaaaaaaaaaa

SEQ ID NO: 920912 - DNA, 15 bp, Homo sapiens
gtgcaaaaaaaaaaa

SEQ ID NO: 920913 - DNA, 15 bp, Homo sapiens
agtgcaaaaaaaaaa

SEQ ID NO: 920914 - DNA, 15 bp, Homo sapiens
tagtgcaaaaaaaaa

SEQ ID NO: 920915 - DNA, 15 bp, Homo sapiens
ttagtgcaaaaaaaa

SEQ ID NO: 920916 - DNA, 15 bp, Homo sapiens
cttagtgcaaaaaaa

SEQ ID NO: 920917 - DNA, 15 bp, Homo sapiens
tcttagtgcaaaaaa

SEQ ID NO: 920918 - DNA, 15 bp, Homo sapiens
ttcttagtgcaaaaa

SEQ ID NO: 920919 - DNA, 15 bp, Homo sapiens
gttcttagtgcaaaa

SEQ ID NO: 920920 - DNA, 15 bp, Homo sapiens
tgttcttagtgcaaa

SEQ ID NO: 920921 - DNA, 15 bp, Homo sapiens
gtgttcttagtgcaa

SEQ ID NO: 920922 - DNA, 15 bp, Homo sapiens
agtgttcttagtgca

SEQ ID NO: 920923 - DNA, 15 bp, Homo sapiens
aagtgttcttagtgc

SEQ ID NO: 920924 - DNA, 15 bp, Homo sapiens
taagtgttcttagtg

SEQ ID NO: 920925 - DNA, 15 bp, Homo sapiens
ttaagtgttcttagt

SEQ ID NO: 920926 - DNA, 15 bp, Homo sapiens
tttaagtgttcttag

SEQ ID NO: 920927 - DNA, 15 bp, Homo sapiens
ttttaagtgttctta

SEQ ID NO: 920928 - DNA, 15 bp, Homo sapiens
attttaagtgttctt

SEQ ID NO: 920929 - DNA, 15 bp, Homo sapiens
aattttaagtgttct

SEQ ID NO: 920930 - DNA, 15 bp, Homo sapiens
aaattttaagtgttc

SEQ ID NO: 920931 - DNA, 15 bp, Homo sapiens
taaattttaagtgtt

SEQ ID NO: 920932 - DNA, 15 bp, Homo sapiens
gtaaattttaagtgt

SEQ ID NO: 920933 - DNA, 15 bp, Homo sapiens
agtaaattttaagtg

SEQ ID NO: 920934 - DNA, 15 bp, Homo sapiens
gagtaaattttaagt

SEQ ID NO: 920935 - DNA, 15 bp, Homo sapiens
agagtaaattttaag

SEQ ID NO: 920936 - DNA, 15 bp, Homo sapiens
gagagtaaattttaa

SEQ ID NO: 920937 - DNA, 15 bp, Homo sapiens
agagagtaaatttta

SEQ ID NO: 920938 - DNA, 15 bp, Homo sapiens
aagagagtaaatttt

SEQ ID NO: 920939 - DNA, 15 bp, Homo sapiens
taagagagtaaattt

SEQ ID NO: 920940 - DNA, 15 bp, Homo sapiens
ctaagagagtaaatt

SEQ ID NO: 920941 - DNA, 15 bp, Homo sapiens
gctaagagagtaaat

SEQ ID NO: 920942 - DNA, 15 bp, Homo sapiens
tgctaagagagtaaa

SEQ ID NO: 920943 - DNA, 15 bp, Homo sapiens
ttgctaagagagtaa

SEQ ID NO: 920944 - DNA, 15 bp, Homo sapiens
attgctaagagagta

SEQ ID NO: 920945 - DNA, 15 bp, Homo sapiens
aattgctaagagagt

SEQ ID NO: 920946 - DNA, 15 bp, Homo sapiens
aaattgctaagagag

SEQ ID NO: 920947 - DNA, 15 bp, Homo sapiens
aaaattgctaagaga

SEQ ID NO: 920948 - DNA, 15 bp, Homo sapiens
taaaattgctaagag

SEQ ID NO: 920949 - DNA, 15 bp, Homo sapiens
ttaaaattgctaaga

SEQ ID NO: 920950 - DNA, 15 bp, Homo sapiens
tttaaaattgctaag

SEQ ID NO: 920951 - DNA, 15 bp, Homo sapiens
ctttaaaattgctaa

SEQ ID NO: 920952 - DNA, 15 bp, Homo sapiens
actttaaaattgcta

SEQ ID NO: 920953 - DNA, 15 bp, Homo sapiens
tactttaaaattgct

SEQ ID NO: 920954 - DNA, 15 bp, Homo sapiens
atactttaaaattgc

SEQ ID NO: 920955 - DNA, 15 bp, Homo sapiens
tatactttaaaattg

SEQ ID NO: 920956 - DNA, 15 bp, Homo sapiens
atatactttaaaatt

SEQ ID NO: 920957 - DNA, 15 bp, Homo sapiens
tatatactttaaaat

SEQ ID NO: 920958 - DNA, 15 bp, Homo sapiens
ttatatactttaaaa

SEQ ID NO: 920959 - DNA, 15 bp, Homo sapiens
attatatactttaaa

SEQ ID NO: 920960 - DNA, 15 bp, Homo sapiens
tattatatactttaa

SEQ ID NO: 920961 - DNA, 15 bp, Homo sapiens
atattatatacttta

SEQ ID NO: 920962 - DNA, 15 bp, Homo sapiens
tatattatatacttt

SEQ ID NO: 920963 - DNA, 15 bp, Homo sapiens
gtatattatatactt

SEQ ID NO: 920964 - DNA, 15 bp, Homo sapiens
agtatattatatact

SEQ ID NO: 920965 - DNA, 15 bp, Homo sapiens
cagtatattatatac

SEQ ID NO: 920966 - DNA, 15 bp, Homo sapiens
acagtatattatata

SEQ ID NO: 920967 - DNA, 15 bp, Homo sapiens
aacagtatattatat

SEQ ID NO: 920968 - DNA, 15 bp, Homo sapiens
taacagtatattata

SEQ ID NO: 920969 - DNA, 15 bp, Homo sapiens
ataacagtatattat

SEQ ID NO: 920970 - DNA, 15 bp, Homo sapiens
aataacagtatatta

SEQ ID NO: 920971 - DNA, 15 bp, Homo sapiens
taataacagtatatt

SEQ ID NO: 920972 - DNA, 15 bp, Homo sapiens
ttaataacagtatat

SEQ ID NO: 920973 - DNA, 15 bp, Homo sapiens
gttaataacagtata

SEQ ID NO: 920974 - DNA, 15 bp, Homo sapiens
agttaataacagtat

SEQ ID NO: 920975 - DNA, 15 bp, Homo sapiens
aagttaataacagta

SEQ ID NO: 920976 - DNA, 15 bp, Homo sapiens
aaagttaataacagt

SEQ ID NO: 920977 - DNA, 15 bp, Homo sapiens
caaagttaataacag

SEQ ID NO: 920978 - DNA, 15 bp, Homo sapiens
ccaaagttaataaca

SEQ ID NO: 920979 - DNA, 15 bp, Homo sapiens
accaaagttaataac

SEQ ID NO: 920980 - DNA, 15 bp, Homo sapiens
gaccaaagttaataa

SEQ ID NO: 920981 - DNA, 15 bp, Homo sapiens
tgaccaaagttaata

SEQ ID NO: 920982 - DNA, 15 bp, Homo sapiens
gtgaccaaagttaat

SEQ ID NO: 920983 - DNA, 15 bp, Homo sapiens
agtgaccaaagttaa

SEQ ID NO: 920984 - DNA, 15 bp, Homo sapiens
tagtgaccaaagtta

SEQ ID NO: 920985 - DNA, 15 bp, Homo sapiens
atagtgaccaaagtt

SEQ ID NO: 920986 - DNA, 15 bp, Homo sapiens
aatagtgaccaaagt

SEQ ID NO: 920987 - DNA, 15 bp, Homo sapiens
aaatagtgaccaaag

SEQ ID NO: 920988 - DNA, 15 bp, Homo sapiens
aaaatagtgaccaaa

SEQ ID NO: 920989 - DNA, 15 bp, Homo sapiens
taaaatagtgaccaa

SEQ ID NO: 920990 - DNA, 15 bp, Homo sapiens
ttaaaatagtgacca

SEQ ID NO: 920991 - DNA, 15 bp, Homo sapiens
attaaaatagtgacc

SEQ ID NO: 920992 - DNA, 15 bp, Homo sapiens
aattaaaatagtgac

SEQ ID NO: 920993 - DNA, 15 bp, Homo sapiens
taattaaaatagtga

SEQ ID NO: 920994 - DNA, 15 bp, Homo sapiens
ctaattaaaatagtg

SEQ ID NO: 920995 - DNA, 15 bp, Homo sapiens
tctaattaaaatagt

SEQ ID NO: 920996 - DNA, 15 bp, Homo sapiens
gtctaattaaaatag

SEQ ID NO: 920997 - DNA, 15 bp, Homo sapiens
agtctaattaaaata

SEQ ID NO: 920998 - DNA, 15 bp, Homo sapiens
aagtctaattaaaat

SEQ ID NO: 920999 - DNA, 15 bp, Homo sapiens
taagtctaattaaaa

SEQ ID NO: 921000 - DNA, 15 bp, Homo sapiens
ttaagtctaattaaa

SEQ ID NO: 921001 - DNA, 15 bp, Homo sapiens
cttaagtctaattaa

SEQ ID NO: 921002 - DNA, 15 bp, Homo sapiens
tcttaagtctaatta

SEQ ID NO: 921003 - DNA, 15 bp, Homo sapiens
atcttaagtctaatt

SEQ ID NO: 921004 - DNA, 15 bp, Homo sapiens
catcttaagtctaat

SEQ ID NO: 921005 - DNA, 15 bp, Homo sapiens
acatcttaagtctaa

SEQ ID NO: 921006 - DNA, 15 bp, Homo sapiens
cacatcttaagtcta

SEQ ID NO: 921007 - DNA, 15 bp, Homo sapiens
acacatcttaagtct

SEQ ID NO: 921008 - DNA, 15 bp, Homo sapiens
aacacatcttaagtc

SEQ ID NO: 921009 - DNA, 15 bp, Homo sapiens
aaacacatcttaagt

SEQ ID NO: 921010 - DNA, 15 bp, Homo sapiens
caaacacatcttaag

SEQ ID NO: 921011 - DNA, 15 bp, Homo sapiens
acaaacacatcttaa

SEQ ID NO: 921012 - DNA, 15 bp, Homo sapiens
tacaaacacatctta

SEQ ID NO: 921013 - DNA, 15 bp, Homo sapiens
atacaaacacatctt

SEQ ID NO: 921014 - DNA, 15 bp, Homo sapiens
aatacaaacacatct

SEQ ID NO: 921015 - DNA, 15 bp, Homo sapiens
gaatacaaacacatc

SEQ ID NO: 921016 - DNA, 15 bp, Homo sapiens
tgaatacaaacacat

SEQ ID NO: 921017 - DNA, 15 bp, Homo sapiens
ttgaatacaaacaca

SEQ ID NO: 921018 - DNA, 15 bp, Homo sapiens
tttgaatacaaacac

SEQ ID NO: 921019 - DNA, 15 bp, Homo sapiens
atttgaatacaaaca

SEQ ID NO: 921020 - DNA, 15 bp, Homo sapiens
aatttgaatacaaac

SEQ ID NO: 921021 - DNA, 15 bp, Homo sapiens
taatttgaatacaaa

SEQ ID NO: 921022 - DNA, 15 bp, Homo sapiens
ataatttgaatacaa

SEQ ID NO: 921023 - DNA, 15 bp, Homo sapiens
aataatttgaataca

SEQ ID NO: 921024 - DNA, 15 bp, Homo sapiens
aaataatttgaatac

SEQ ID NO: 921025 - DNA, 15 bp, Homo sapiens
aaaataatttgaata

SEQ ID NO: 921026 - DNA, 15 bp, Homo sapiens
caaaataatttgaat

SEQ ID NO: 921027 - DNA, 15 bp, Homo sapiens
acaaaataatttgaa

SEQ ID NO: 921028 - DNA, 15 bp, Homo sapiens
tacaaaataatttga

SEQ ID NO: 921029 - DNA, 15 bp, Homo sapiens
ttacaaaataatttg

SEQ ID NO: 921030 - DNA, 15 bp, Homo sapiens
cttacaaaataattt

SEQ ID NO: 921031 - DNA, 15 bp, Homo sapiens
gcttacaaaataatt

SEQ ID NO: 921032 - DNA, 15 bp, Homo sapiens
tgcttacaaaataat

SEQ ID NO: 921033 - DNA, 15 bp, Homo sapiens
atgcttacaaaataa

SEQ ID NO: 921034 - DNA, 15 bp, Homo sapiens
aatgcttacaaaata

SEQ ID NO: 921035 - DNA, 15 bp, Homo sapiens
aaatgcttacaaaat

SEQ ID NO: 921036 - DNA, 15 bp, Homo sapiens
taaatgcttacaaaa

SEQ ID NO: 921037 - DNA, 15 bp, Homo sapiens
ttaaatgcttacaaa

SEQ ID NO: 921038 - DNA, 15 bp, Homo sapiens
gttaaatgcttacaa

SEQ ID NO: 921039 - DNA, 15 bp, Homo sapiens
tgttaaatgcttaca

SEQ ID NO: 921040 - DNA, 15 bp, Homo sapiens
gtgttaaatgcttac

SEQ ID NO: 921041 - DNA, 15 bp, Homo sapiens
ggtgttaaatgctta

SEQ ID NO: 921042 - DNA, 15 bp, Homo sapiens
gggtgttaaatgctt

SEQ ID NO: 921043 - DNA, 15 bp, Homo sapiens
tgggtgttaaatgct

SEQ ID NO: 921044 - DNA, 15 bp, Homo sapiens
ttgggtgttaaatgc

SEQ ID NO: 921045 - DNA, 15 bp, Homo sapiens
tttgggtgttaaatg

SEQ ID NO: 921046 - DNA, 15 bp, Homo sapiens
atttgggtgttaaat

SEQ ID NO: 921047 - DNA, 15 bp, Homo sapiens
aatttgggtgttaaa

SEQ ID NO: 921048 - DNA, 15 bp, Homo sapiens
aaatttgggtgttaa

SEQ ID NO: 921049 - DNA, 15 bp, Homo sapiens
caaatttgggtgtta

SEQ ID NO: 921050 - DNA, 15 bp, Homo sapiens
tcaaatttgggtgtt

SEQ ID NO: 921051 - DNA, 15 bp, Homo sapiens
ctcaaatttgggtgt

SEQ ID NO: 921052 - DNA, 15 bp, Homo sapiens
tctcaaatttgggtg

SEQ ID NO: 921053 - DNA, 15 bp, Homo sapiens
ctctcaaatttgggt

SEQ ID NO: 921054 - DNA, 15 bp, Homo sapiens
actctcaaatttggg

SEQ ID NO: 921055 - DNA, 15 bp, Homo sapiens
cactctcaaatttgg

SEQ ID NO: 921056 - DNA, 15 bp, Homo sapiens
ccactctcaaatttg

SEQ ID NO: 921057 - DNA, 15 bp, Homo sapiens
cccactctcaaattt

SEQ ID NO: 921058 - DNA, 15 bp, Homo sapiens
ccccactctcaaatt

SEQ ID NO: 921059 - DNA, 15 bp, Homo sapiens
accccactctcaaat

SEQ ID NO: 921060 - DNA, 15 bp, Homo sapiens
gaccccactctcaaa

SEQ ID NO: 921061 - DNA, 15 bp, Homo sapiens
tgaccccactctcaa

SEQ ID NO: 921062 - DNA, 15 bp, Homo sapiens
ctgaccccactctca

SEQ ID NO: 921063 - DNA, 15 bp, Homo sapiens
tctgaccccactctc

SEQ ID NO: 921064 - DNA, 15 bp, Homo sapiens
ttctgaccccactct

SEQ ID NO: 921065 - DNA, 15 bp, Homo sapiens
attctgaccccactc

SEQ ID NO: 921066 - DNA, 15 bp, Homo sapiens
cattctgaccccact

SEQ ID NO: 921067 - DNA, 15 bp, Homo sapiens
acattctgaccccac

SEQ ID NO: 921068 - DNA, 15 bp, Homo sapiens
aacattctgacccca

SEQ ID NO: 921069 - DNA, 15 bp, Homo sapiens
caacattctgacccc

SEQ ID NO: 921070 - DNA, 15 bp, Homo sapiens
ccaacattctgaccc

SEQ ID NO: 921071 - DNA, 15 bp, Homo sapiens
tccaacattctgacc

SEQ ID NO: 921072 - DNA, 15 bp, Homo sapiens
ttccaacattctgac

SEQ ID NO: 921073 - DNA, 15 bp, Homo sapiens
attccaacattctga

SEQ ID NO: 921074 - DNA, 15 bp, Homo sapiens
aattccaacattctg

SEQ ID NO: 921075 - DNA, 15 bp, Homo sapiens
aaattccaacattct

SEQ ID NO: 921076 - DNA, 15 bp, Homo sapiens
caaattccaacattc

SEQ ID NO: 921077 - DNA, 15 bp, Homo sapiens
tcaaattccaacatt

SEQ ID NO: 921078 - DNA, 15 bp, Homo sapiens
atcaaattccaacat

SEQ ID NO: 921079 - DNA, 15 bp, Homo sapiens
aatcaaattccaaca

SEQ ID NO: 921080 - DNA, 15 bp, Homo sapiens
aaatcaaattccaac

SEQ ID NO: 921081 - DNA, 15 bp, Homo sapiens
gaaatcaaattccaa

SEQ ID NO: 921082 - DNA, 15 bp, Homo sapiens
agaaatcaaattcca

SEQ ID NO: 921083 - DNA, 15 bp, Homo sapiens
tagaaatcaaattcc

SEQ ID NO: 921084 - DNA, 15 bp, Homo sapiens
ctagaaatcaaattc

SEQ ID NO: 921085 - DNA, 15 bp, Homo sapiens
tctagaaatcaaatt

SEQ ID NO: 921086 - DNA, 15 bp, Homo sapiens
ttctagaaatcaaat

SEQ ID NO: 921087 - DNA, 15 bp, Homo sapiens
attctagaaatcaaa

SEQ ID NO: 921088 - DNA, 15 bp, Homo sapiens
aattctagaaatcaa

SEQ ID NO: 921089 - DNA, 15 bp, Homo sapiens
taattctagaaatca

SEQ ID NO: 921090 - DNA, 15 bp, Homo sapiens
ctaattctagaaatc

SEQ ID NO: 921091 - DNA, 15 bp, Homo sapiens
actaattctagaaat

SEQ ID NO: 921092 - DNA, 15 bp, Homo sapiens
tactaattctagaaa

SEQ ID NO: 921093 - DNA, 15 bp, Homo sapiens
atactaattctagaa

SEQ ID NO: 921094 - DNA, 15 bp, Homo sapiens
tatactaattctaga

SEQ ID NO: 921095 - DNA, 15 bp, Homo sapiens
ctatactaattctag

SEQ ID NO: 921096 - DNA, 15 bp, Homo sapiens
cctatactaattcta

SEQ ID NO: 921097 - DNA, 15 bp, Homo sapiens
ccctatactaattct

SEQ ID NO: 921098 - DNA, 15 bp, Homo sapiens
accctatactaattc

SEQ ID NO: 921099 - DNA, 15 bp, Homo sapiens
taccctatactaatt

SEQ ID NO: 921100 - DNA, 15 bp, Homo sapiens
ataccctatactaat

SEQ ID NO: 921101 - DNA, 15 bp, Homo sapiens
aataccctatactaa

SEQ ID NO: 921102 - DNA, 15 bp, Homo sapiens
taataccctatacta

SEQ ID NO: 921103 - DNA, 15 bp, Homo sapiens
ataataccctatact

SEQ ID NO: 921104 - DNA, 15 bp, Homo sapiens
aataataccctatac

SEQ ID NO: 921105 - DNA, 15 bp, Homo sapiens
aaataataccctata

SEQ ID NO: 921106 - DNA, 15 bp, Homo sapiens
aaaataataccctat

SEQ ID NO: 921107 - DNA, 15 bp, Homo sapiens
gaaaataatacccta

SEQ ID NO: 921108 - DNA, 15 bp, Homo sapiens
ggaaaataataccct

SEQ ID NO: 921109 - DNA, 15 bp, Homo sapiens
aggaaaataataccc

SEQ ID NO: 921110 - DNA, 15 bp, Homo sapiens
taggaaaataatacc

SEQ ID NO: 921111 - DNA, 15 bp, Homo sapiens
gtaggaaaataatac

SEQ ID NO: 921112 - DNA, 15 bp, Homo sapiens
agtaggaaaataata

SEQ ID NO: 921113 - DNA, 15 bp, Homo sapiens
aagtaggaaaataat

SEQ ID NO: 921114 - DNA, 15 bp, Homo sapiens
aaagtaggaaaataa

SEQ ID NO: 921115 - DNA, 15 bp, Homo sapiens
aaaagtaggaaaata

SEQ ID NO: 921116 - DNA, 15 bp, Homo sapiens
aaaaagtaggaaaat

SEQ ID NO: 921117 - DNA, 15 bp, Homo sapiens
aaaaaagtaggaaaa

SEQ ID NO: 921118 - DNA, 15 bp, Homo sapiens
aaaaaaagtaggaaa

SEQ ID NO: 921119 - DNA, 15 bp, Homo sapiens
gaaaaaaagtaggaa

SEQ ID NO: 921120 - DNA, 15 bp, Homo sapiens
agaaaaaaagtagga

SEQ ID NO: 921121 - DNA, 15 bp, Homo sapiens
cagaaaaaaagtagg

SEQ ID NO: 921122 - DNA, 15 bp, Homo sapiens
acagaaaaaaagtag

SEQ ID NO: 921123 - DNA, 15 bp, Homo sapiens
cacagaaaaaaagta

SEQ ID NO: 921124 - DNA, 15 bp, Homo sapiens
acacagaaaaaaagt

SEQ ID NO: 921125 - DNA, 15 bp, Homo sapiens
aacacagaaaaaaag

SEQ ID NO: 921126 - DNA, 15 bp, Homo sapiens
gaacacagaaaaaaa

SEQ ID NO: 921127 - DNA, 15 bp, Homo sapiens
tgaacacagaaaaaa

SEQ ID NO: 921128 - DNA, 15 bp, Homo sapiens
ttgaacacagaaaaa

SEQ ID NO: 921129 - DNA, 15 bp, Homo sapiens
attgaacacagaaaa

SEQ ID NO: 921130 - DNA, 15 bp, Homo sapiens
tattgaacacagaaa

SEQ ID NO: 921131 - DNA, 15 bp, Homo sapiens
ttattgaacacagaa

SEQ ID NO: 921132 - DNA, 15 bp, Homo sapiens
tttattgaacacaga

SEQ ID NO: 921133 - DNA, 15 bp, Homo sapiens
ttttattgaacacag

SEQ ID NO: 921134 - DNA, 15 bp, Homo sapiens
attttattgaacaca

SEQ ID NO: 921135 - DNA, 15 bp, Homo sapiens
cattttattgaacac

SEQ ID NO: 921136 - DNA, 15 bp, Homo sapiens
acattttattgaaca

SEQ ID NO: 921137 - DNA, 15 bp, Homo sapiens
aacattttattgaac

SEQ ID NO: 921138 - DNA, 15 bp, Homo sapiens
aaacattttattgaa

SEQ ID NO: 921139 - DNA, 15 bp, Homo sapiens
taaacattttattga

SEQ ID NO: 921140 - DNA, 15 bp, Homo sapiens
ataaacattttattg

SEQ ID NO: 921141 - DNA, 15 bp, Homo sapiens
tataaacattttatt

SEQ ID NO: 921142 - DNA, 15 bp, Homo sapiens
ttataaacattttat

SEQ ID NO: 921143 - DNA, 15 bp, Homo sapiens
cttataaacatttta

SEQ ID NO: 921144 - DNA, 15 bp, Homo sapiens
tcttataaacatttt

SEQ ID NO: 921145 - DNA, 15 bp, Homo sapiens
atcttataaacattt

SEQ ID NO: 921146 - DNA, 15 bp, Homo sapiens
aatcttataaacatt

SEQ ID NO: 921147 - DNA, 15 bp, Homo sapiens
gaatcttataaacat

SEQ ID NO: 921148 - DNA, 15 bp, Homo sapiens
tgaatcttataaaca

SEQ ID NO: 921149 - DNA, 15 bp, Homo sapiens
ctgaatcttataaac

SEQ ID NO: 921150 - DNA, 15 bp, Homo sapiens
gctgaatcttataaa

SEQ ID NO: 921151 - DNA, 15 bp, Homo sapiens
agctgaatcttataa

SEQ ID NO: 921152 - DNA, 15 bp, Homo sapiens
aagctgaatcttata

SEQ ID NO: 921153 - DNA, 15 bp, Homo sapiens
gaagctgaatcttat

SEQ ID NO: 921154 - DNA, 15 bp, Homo sapiens
tgaagctgaatctta

SEQ ID NO: 921155 - DNA, 15 bp, Homo sapiens
ttgaagctgaatctt

SEQ ID NO: 921156 - DNA, 15 bp, Homo sapiens
attgaagctgaatct

SEQ ID NO: 921157 - DNA, 15 bp, Homo sapiens
aattgaagctgaatc

SEQ ID NO: 921158 - DNA, 15 bp, Homo sapiens
taattgaagctgaat

SEQ ID NO: 921159 - DNA, 15 bp, Homo sapiens
ataattgaagctgaa

SEQ ID NO: 921160 - DNA, 15 bp, Homo sapiens
tataattgaagctga

SEQ ID NO: 921161 - DNA, 15 bp, Homo sapiens
atataattgaagctg

SEQ ID NO: 921162 - DNA, 15 bp, Homo sapiens
aatataattgaagct

SEQ ID NO: 921163 - DNA, 15 bp, Homo sapiens
taatataattgaagc

SEQ ID NO: 921164 - DNA, 15 bp, Homo sapiens
ataatataattgaag

SEQ ID NO: 921165 - DNA, 15 bp, Homo sapiens
tataatataattgaa

SEQ ID NO: 921166 - DNA, 15 bp, Homo sapiens
ttataatataattga

SEQ ID NO: 921167 - DNA, 15 bp, Homo sapiens
gttataatataattg

SEQ ID NO: 921168 - DNA, 15 bp, Homo sapiens
ggttataatataatt

SEQ ID NO: 921169 - DNA, 15 bp, Homo sapiens
gggttataatataat

SEQ ID NO: 921170 - DNA, 15 bp, Homo sapiens
tgggttataatataa

SEQ ID NO: 921171 - DNA, 15 bp, Homo sapiens
atgggttataatata

SEQ ID NO: 921172 - DNA, 15 bp, Homo sapiens
aatgggttataatat

SEQ ID NO: 921173 - DNA, 15 bp, Homo sapiens
aaatgggttataata

SEQ ID NO: 921174 - DNA, 15 bp, Homo sapiens
taaatgggttataat

SEQ ID NO: 921175 - DNA, 15 bp, Homo sapiens
ctaaatgggttataa

SEQ ID NO: 921176 - DNA, 15 bp, Homo sapiens
actaaatgggttata

SEQ ID NO: 921177 - DNA, 15 bp, Homo sapiens
cactaaatgggttat

SEQ ID NO: 921178 - DNA, 15 bp, Homo sapiens
ccactaaatgggtta

SEQ ID NO: 921179 - DNA, 15 bp, Homo sapiens
accactaaatgggtt

SEQ ID NO: 921180 - DNA, 15 bp, Homo sapiens
caccactaaatgggt

SEQ ID NO: 921181 - DNA, 15 bp, Homo sapiens
tcaccactaaatggg

SEQ ID NO: 921182 - DNA, 15 bp, Homo sapiens
ttcaccactaaatgg

SEQ ID NO: 921183 - DNA, 15 bp, Homo sapiens
attcaccactaaatg

SEQ ID NO: 921184 - DNA, 15 bp, Homo sapiens
gattcaccactaaat

SEQ ID NO: 921185 - DNA, 15 bp, Homo sapiens
tgattcaccactaaa

SEQ ID NO: 921186 - DNA, 15 bp, Homo sapiens
ctgattcaccactaa

SEQ ID NO: 921187 - DNA, 15 bp, Homo sapiens
cctgattcaccacta

SEQ ID NO: 921188 - DNA, 15 bp, Homo sapiens
ccctgattcaccact

SEQ ID NO: 921189 - DNA, 15 bp, Homo sapiens
tccctgattcaccac

SEQ ID NO: 921190 - DNA, 15 bp, Homo sapiens
ttccctgattcacca

SEQ ID NO: 921191 - DNA, 15 bp, Homo sapiens
cttccctgattcacc

SEQ ID NO: 921192 - DNA, 15 bp, Homo sapiens
tcttccctgattcac

SEQ ID NO: 921193 - DNA, 15 bp, Homo sapiens
ttcttccctgattca

SEQ ID NO: 921194 - DNA, 15 bp, Homo sapiens
attcttccctgattc

SEQ ID NO: 921195 - DNA, 15 bp, Homo sapiens
cattcttccctgatt

SEQ ID NO: 921196 - DNA, 15 bp, Homo sapiens
tcattcttccctgat

SEQ ID NO: 921197 - DNA, 15 bp, Homo sapiens
ttcattcttccctga

SEQ ID NO: 921198 - DNA, 15 bp, Homo sapiens
tttcattcttccctg

SEQ ID NO: 921199 - DNA, 15 bp, Homo sapiens
ttttcattcttccct

SEQ ID NO: 921200 - DNA, 15 bp, Homo sapiens
attttcattcttccc

SEQ ID NO: 921201 - DNA, 15 bp, Homo sapiens
tattttcattcttcc

SEQ ID NO: 921202 - DNA, 15 bp, Homo sapiens
ttattttcattcttc

SEQ ID NO: 921203 - DNA, 15 bp, Homo sapiens
attattttcattctt

SEQ ID NO: 921204 - DNA, 15 bp, Homo sapiens
aattattttcattct

SEQ ID NO: 921205 - DNA, 15 bp, Homo sapiens
aaattattttcattc

SEQ ID NO: 921206 - DNA, 15 bp, Homo sapiens
caaattattttcatt

SEQ ID NO: 921207 - DNA, 15 bp, Homo sapiens
tcaaattattttcat

SEQ ID NO: 921208 - DNA, 15 bp, Homo sapiens
atcaaattattttca

SEQ ID NO: 921209 - DNA, 15 bp, Homo sapiens
tatcaaattattttc

SEQ ID NO: 921210 - DNA, 15 bp, Homo sapiens
ttatcaaattatttt

SEQ ID NO: 921211 - DNA, 15 bp, Homo sapiens
gttatcaaattattt

SEQ ID NO: 921212 - DNA, 15 bp, Homo sapiens
agttatcaaattatt

SEQ ID NO: 921213 - DNA, 15 bp, Homo sapiens
aagttatcaaattat

SEQ ID NO: 921214 - DNA, 15 bp, Homo sapiens
aaagttatcaaatta

SEQ ID NO: 921215 - DNA, 15 bp, Homo sapiens
caaagttatcaaatt

SEQ ID NO: 921216 - DNA, 15 bp, Homo sapiens
acaaagttatcaaat

SEQ ID NO: 921217 - DNA, 15 bp, Homo sapiens
aacaaagttatcaaa

SEQ ID NO: 921218 - DNA, 15 bp, Homo sapiens
caacaaagttatcaa

SEQ ID NO: 921219 - DNA, 15 bp, Homo sapiens
gcaacaaagttatca

SEQ ID NO: 921220 - DNA, 15 bp, Homo sapiens
ggcaacaaagttatc

SEQ ID NO: 921221 - DNA, 15 bp, Homo sapiens
aggcaacaaagttat

SEQ ID NO: 921222 - DNA, 15 bp, Homo sapiens
aaggcaacaaagtta

SEQ ID NO: 921223 - DNA, 15 bp, Homo sapiens
caaggcaacaaagtt

SEQ ID NO: 921224 - DNA, 15 bp, Homo sapiens
gcaaggcaacaaagt

SEQ ID NO: 921225 - DNA, 15 bp, Homo sapiens
tgcaaggcaacaaag

SEQ ID NO: 921226 - DNA, 15 bp, Homo sapiens
atgcaaggcaacaaa

SEQ ID NO: 921227 - DNA, 15 bp, Homo sapiens
aatgcaaggcaacaa

SEQ ID NO: 921228 - DNA, 15 bp, Homo sapiens
aaatgcaaggcaaca

SEQ ID NO: 921229 - DNA, 15 bp, Homo sapiens
taaatgcaaggcaac

SEQ ID NO: 921230 - DNA, 15 bp, Homo sapiens
ataaatgcaaggcaa

SEQ ID NO: 921231 - DNA, 15 bp, Homo sapiens
aataaatgcaaggca

SEQ ID NO: 921232 - DNA, 15 bp, Homo sapiens
aaataaatgcaaggc

SEQ ID NO: 921233 - DNA, 15 bp, Homo sapiens
taaataaatgcaagg

SEQ ID NO: 921234 - DNA, 15 bp, Homo sapiens
ttaaataaatgcaag

SEQ ID NO: 921235 - DNA, 15 bp, Homo sapiens
tttaaataaatgcaa

SEQ ID NO: 921236 - DNA, 15 bp, Homo sapiens
ttttaaataaatgca

SEQ ID NO: 921237 - DNA, 15 bp, Homo sapiens
tttttaaataaatgc

SEQ ID NO: 921238 - DNA, 15 bp, Homo sapiens
ttttttaaataaatg

SEQ ID NO: 921239 - DNA, 15 bp, Homo sapiens
attttttaaataaat

SEQ ID NO: 921240 - DNA, 15 bp, Homo sapiens
aattttttaaataaa

SEQ ID NO: 921241 - DNA, 15 bp, Homo sapiens
aaattttttaaataa

SEQ ID NO: 921242 - DNA, 15 bp, Homo sapiens
aaaattttttaaata

SEQ ID NO: 921243 - DNA, 15 bp, Homo sapiens
aaaaattttttaaat

SEQ ID NO: 921244 - DNA, 15 bp, Homo sapiens
taaaaattttttaaa

SEQ ID NO: 921245 - DNA, 15 bp, Homo sapiens
ttaaaaattttttaa

SEQ ID NO: 921246 - DNA, 15 bp, Homo sapiens
attaaaaatttttta

SEQ ID NO: 921247 - DNA, 15 bp, Homo sapiens
aattaaaaatttttt

SEQ ID NO: 921248 - DNA, 15 bp, Homo sapiens
gaattaaaaattttt

SEQ ID NO: 921249 - DNA, 15 bp, Homo sapiens
agaattaaaaatttt

SEQ ID NO: 921250 - DNA, 15 bp, Homo sapiens
tagaattaaaaattt

SEQ ID NO: 921251 - DNA, 15 bp, Homo sapiens
ctagaattaaaaatt

SEQ ID NO: 921252 - DNA, 15 bp, Homo sapiens
cctagaattaaaaat

SEQ ID NO: 921253 - DNA, 15 bp, Homo sapiens
gcctagaattaaaaa

SEQ ID NO: 921254 - DNA, 15 bp, Homo sapiens
agcctagaattaaaa

SEQ ID NO: 921255 - DNA, 15 bp, Homo sapiens
tagcctagaattaaa

SEQ ID NO: 921256 - DNA, 15 bp, Homo sapiens
ttagcctagaattaa

SEQ ID NO: 921257 - DNA, 15 bp, Homo sapiens
tttagcctagaatta

SEQ ID NO: 921258 - DNA, 15 bp, Homo sapiens
gtttagcctagaatt

SEQ ID NO: 921259 - DNA, 15 bp, Homo sapiens
ggtttagcctagaat

SEQ ID NO: 921260 - DNA, 15 bp, Homo sapiens
gggtttagcctagaa

SEQ ID NO: 921261 - DNA, 15 bp, Homo sapiens
agggtttagcctaga

SEQ ID NO: 921262 - DNA, 15 bp, Homo sapiens
aagggtttagcctag

SEQ ID NO: 921263 - DNA, 15 bp, Homo sapiens
aaagggtttagccta

SEQ ID NO: 921264 - DNA, 15 bp, Homo sapiens
aaaagggtttagcct

SEQ ID NO: 921265 - DNA, 15 bp, Homo sapiens
aaaaagggtttagcc

SEQ ID NO: 921266 - DNA, 15 bp, Homo sapiens
taaaaagggtttagc

SEQ ID NO: 921267 - DNA, 15 bp, Homo sapiens
ttaaaaagggtttag

SEQ ID NO: 921268 - DNA, 15 bp, Homo sapiens
tttaaaaagggttta

SEQ ID NO: 921269 - DNA, 15 bp, Homo sapiens
atttaaaaagggttt

SEQ ID NO: 921270 - DNA, 15 bp, Homo sapiens
catttaaaaagggtt

SEQ ID NO: 921271 - DNA, 15 bp, Homo sapiens
tcatttaaaaagggt

SEQ ID NO: 921272 - DNA, 15 bp, Homo sapiens
ttcatttaaaaaggg

SEQ ID NO: 921273 - DNA, 15 bp, Homo sapiens
tttcatttaaaaagg

SEQ ID NO: 921274 - DNA, 15 bp, Homo sapiens
ctttcatttaaaaag

SEQ ID NO: 921275 - DNA, 15 bp, Homo sapiens
actttcatttaaaaa

SEQ ID NO: 921276 - DNA, 15 bp, Homo sapiens
aactttcatttaaaa

SEQ ID NO: 921277 - DNA, 15 bp, Homo sapiens
aaactttcatttaaa

SEQ ID NO: 921278 - DNA, 15 bp, Homo sapiens
taaactttcatttaa

SEQ ID NO: 921279 - DNA, 15 bp, Homo sapiens
ttaaactttcattta

SEQ ID NO: 921280 - DNA, 15 bp, Homo sapiens
gttaaactttcattt

SEQ ID NO: 921281 - DNA, 15 bp, Homo sapiens
agttaaactttcatt

SEQ ID NO: 921282 - DNA, 15 bp, Homo sapiens
aagttaaactttcat

SEQ ID NO: 921283 - DNA, 15 bp, Homo sapiens
gaagttaaactttca

SEQ ID NO: 921284 - DNA, 15 bp, Homo sapiens
agaagttaaactttc

SEQ ID NO: 921285 - DNA, 15 bp, Homo sapiens
aagaagttaaacttt

SEQ ID NO: 921286 - DNA, 15 bp, Homo sapiens
caagaagttaaactt

SEQ ID NO: 921287 - DNA, 15 bp, Homo sapiens
acaagaagttaaact

SEQ ID NO: 921288 - DNA, 15 bp, Homo sapiens
cacaagaagttaaac

SEQ ID NO: 921289 - DNA, 15 bp, Homo sapiens
acacaagaagttaaa

SEQ ID NO: 921290 - DNA, 15 bp, Homo sapiens
aacacaagaagttaa

SEQ ID NO: 921291 - DNA, 15 bp, Homo sapiens
aaacacaagaagtta

SEQ ID NO: 921292 - DNA, 15 bp, Homo sapiens
aaaacacaagaagtt

SEQ ID NO: 921293 - DNA, 15 bp, Homo sapiens
gaaaacacaagaagt

SEQ ID NO: 921294 - DNA, 15 bp, Homo sapiens
tgaaaacacaagaag

SEQ ID NO: 921295 - DNA, 15 bp, Homo sapiens
ctgaaaacacaagaa

SEQ ID NO: 921296 - DNA, 15 bp, Homo sapiens
tctgaaaacacaaga

SEQ ID NO: 921297 - DNA, 15 bp, Homo sapiens
atctgaaaacacaag

SEQ ID NO: 921298 - DNA, 15 bp, Homo sapiens
tatctgaaaacacaa

SEQ ID NO: 921299 - DNA, 15 bp, Homo sapiens
gtatctgaaaacaca

SEQ ID NO: 921300 - DNA, 15 bp, Homo sapiens
agtatctgaaaacac

SEQ ID NO: 921301 - DNA, 15 bp, Homo sapiens
cagtatctgaaaaca

SEQ ID NO: 921302 - DNA, 15 bp, Homo sapiens
tcagtatctgaaaac

SEQ ID NO: 921303 - DNA, 15 bp, Homo sapiens
ttcagtatctgaaaa

SEQ ID NO: 921304 - DNA, 15 bp, Homo sapiens
attcagtatctgaaa

SEQ ID NO: 921305 - DNA, 15 bp, Homo sapiens
tattcagtatctgaa

SEQ ID NO: 921306 - DNA, 15 bp, Homo sapiens
ctattcagtatctga

SEQ ID NO: 921307 - DNA, 15 bp, Homo sapiens
gctattcagtatctg

SEQ ID NO: 921308 - DNA, 15 bp, Homo sapiens
agctattcagtatct

SEQ ID NO: 921309 - DNA, 15 bp, Homo sapiens
tagctattcagtatc

SEQ ID NO: 921310 - DNA, 15 bp, Homo sapiens
atagctattcagtat

SEQ ID NO: 921311 - DNA, 15 bp, Homo sapiens
catagctattcagta

SEQ ID NO: 921312 - DNA, 15 bp, Homo sapiens
tcatagctattcagt

SEQ ID NO: 921313 - DNA, 15 bp, Homo sapiens
atcatagctattcag

SEQ ID NO: 921314 - DNA, 15 bp, Homo sapiens
tatcatagctattca

SEQ ID NO: 921315 - DNA, 15 bp, Homo sapiens
gtatcatagctattc

SEQ ID NO: 921316 - DNA, 15 bp, Homo sapiens
ggtatcatagctatt

SEQ ID NO: 921317 - DNA, 15 bp, Homo sapiens
aggtatcatagctat

SEQ ID NO: 921318 - DNA, 15 bp, Homo sapiens
gaggtatcatagcta

SEQ ID NO: 921319 - DNA, 15 bp, Homo sapiens
agaggtatcatagct

SEQ ID NO: 921320 - DNA, 15 bp, Homo sapiens
aagaggtatcatagc

SEQ ID NO: 921321 - DNA, 15 bp, Homo sapiens
caagaggtatcatag

SEQ ID NO: 921322 - DNA, 15 bp, Homo sapiens
acaagaggtatcata

SEQ ID NO: 921323 - DNA, 15 bp, Homo sapiens
cacaagaggtatcat

SEQ ID NO: 921324 - DNA, 15 bp, Homo sapiens
acacaagaggtatca

SEQ ID NO: 921325 - DNA, 15 bp, Homo sapiens
aacacaagaggtatc

SEQ ID NO: 921326 - DNA, 15 bp, Homo sapiens
caacacaagaggtat

SEQ ID NO: 921327 - DNA, 15 bp, Homo sapiens
tcaacacaagaggta

SEQ ID NO: 921328 - DNA, 15 bp, Homo sapiens
ctcaacacaagaggt

SEQ ID NO: 921329 - DNA, 15 bp, Homo sapiens
tctcaacacaagagg

SEQ ID NO: 921330 - DNA, 15 bp, Homo sapiens
ttctcaacacaagag

SEQ ID NO: 921331 - DNA, 15 bp, Homo sapiens
tttctcaacacaaga

SEQ ID NO: 921332 - DNA, 15 bp, Homo sapiens
ttttctcaacacaag

SEQ ID NO: 921333 - DNA, 15 bp, Homo sapiens
gttttctcaacacaa

SEQ ID NO: 921334 - DNA, 15 bp, Homo sapiens
agttttctcaacaca

SEQ ID NO: 921335 - DNA, 15 bp, Homo sapiens
aagttttctcaacac

SEQ ID NO: 921336 - DNA, 15 bp, Homo sapiens
aaagttttctcaaca

SEQ ID NO: 921337 - DNA, 15 bp, Homo sapiens
taaagttttctcaac

SEQ ID NO: 921338 - DNA, 15 bp, Homo sapiens
ttaaagttttctcaa

SEQ ID NO: 921339 - DNA, 15 bp, Homo sapiens
tttaaagttttctca

SEQ ID NO: 921340 - DNA, 15 bp, Homo sapiens
atttaaagttttctc

SEQ ID NO: 921341 - DNA, 15 bp, Homo sapiens
aatttaaagttttct

SEQ ID NO: 921342 - DNA, 15 bp, Homo sapiens
aaatttaaagttttc

SEQ ID NO: 921343 - DNA, 15 bp, Homo sapiens
caaatttaaagtttt

SEQ ID NO: 921344 - DNA, 15 bp, Homo sapiens
gcaaatttaaagttt

SEQ ID NO: 921345 - DNA, 15 bp, Homo sapiens
tgcaaatttaaagtt

SEQ ID NO: 921346 - DNA, 15 bp, Homo sapiens
atgcaaatttaaagt

SEQ ID NO: 921347 - DNA, 15 bp, Homo sapiens
tatgcaaatttaaag

SEQ ID NO: 921348 - DNA, 15 bp, Homo sapiens
ttatgcaaatttaaa

SEQ ID NO: 921349 - DNA, 15 bp, Homo sapiens
attatgcaaatttaa

SEQ ID NO: 921350 - DNA, 15 bp, Homo sapiens
gattatgcaaattta

SEQ ID NO: 921351 - DNA, 15 bp, Homo sapiens
agattatgcaaattt

SEQ ID NO: 921352 - DNA, 15 bp, Homo sapiens
cagattatgcaaatt

SEQ ID NO: 921353 - DNA, 15 bp, Homo sapiens
tcagattatgcaaat

SEQ ID NO: 921354 - DNA, 15 bp, Homo sapiens
ttcagattatgcaaa

SEQ ID NO: 921355 - DNA, 15 bp, Homo sapiens
cttcagattatgcaa

SEQ ID NO: 921356 - DNA, 15 bp, Homo sapiens
acttcagattatgca

SEQ ID NO: 921357 - DNA, 15 bp, Homo sapiens
aacttcagattatgc

SEQ ID NO: 921358 - DNA, 15 bp, Homo sapiens
taacttcagattatg

SEQ ID NO: 921359 - DNA, 15 bp, Homo sapiens
ataacttcagattat

SEQ ID NO: 921360 - DNA, 15 bp, Homo sapiens
gataacttcagatta

SEQ ID NO: 921361 - DNA, 15 bp, Homo sapiens
agataacttcagatt

SEQ ID NO: 921362 - DNA, 15 bp, Homo sapiens
aagataacttcagat

SEQ ID NO: 921363 - DNA, 15 bp, Homo sapiens
aaagataacttcaga

SEQ ID NO: 921364 - DNA, 15 bp, Homo sapiens
aaaagataacttcag

SEQ ID NO: 921365 - DNA, 15 bp, Homo sapiens
gaaaagataacttca

SEQ ID NO: 921366 - DNA, 15 bp, Homo sapiens
agaaaagataacttc

SEQ ID NO: 921367 - DNA, 15 bp, Homo sapiens
aagaaaagataactt

SEQ ID NO: 921368 - DNA, 15 bp, Homo sapiens
taagaaaagataact

SEQ ID NO: 921369 - DNA, 15 bp, Homo sapiens
ataagaaaagataac

SEQ ID NO: 921370 - DNA, 15 bp, Homo sapiens
tataagaaaagataa

SEQ ID NO: 921371 - DNA, 15 bp, Homo sapiens
ttataagaaaagata

SEQ ID NO: 921372 - DNA, 15 bp, Homo sapiens
tttataagaaaagat

SEQ ID NO: 921373 - DNA, 15 bp, Homo sapiens
gtttataagaaaaga

SEQ ID NO: 921374 - DNA, 15 bp, Homo sapiens
tgtttataagaaaag

SEQ ID NO: 921375 - DNA, 15 bp, Homo sapiens
atgtttataagaaaa

SEQ ID NO: 921376 - DNA, 15 bp, Homo sapiens
aatgtttataagaaa

SEQ ID NO: 921377 - DNA, 15 bp, Homo sapiens
aaatgtttataagaa

SEQ ID NO: 921378 - DNA, 15 bp, Homo sapiens
aaaatgtttataaga

SEQ ID NO: 921379 - DNA, 15 bp, Homo sapiens
taaaatgtttataag

SEQ ID NO: 921380 - DNA, 15 bp, Homo sapiens
ataaaatgtttataa

SEQ ID NO: 921381 - DNA, 15 bp, Homo sapiens
aataaaatgtttata

SEQ ID NO: 921382 - DNA, 15 bp, Homo sapiens
taataaaatgtttat

SEQ ID NO: 921383 - DNA, 15 bp, Homo sapiens
ctaataaaatgttta

SEQ ID NO: 921384 - DNA, 15 bp, Homo sapiens
cctaataaaatgttt

SEQ ID NO: 921385 - DNA, 15 bp, Homo sapiens
acctaataaaatgtt

SEQ ID NO: 921386 - DNA, 15 bp, Homo sapiens
aacctaataaaatgt

SEQ ID NO: 921387 - DNA, 15 bp, Homo sapiens
aaacctaataaaatg

SEQ ID NO: 921388 - DNA, 15 bp, Homo sapiens
taaacctaataaaat

SEQ ID NO: 921389 - DNA, 15 bp, Homo sapiens
gtaaacctaataaaa

SEQ ID NO: 921390 - DNA, 15 bp, Homo sapiens
tgtaaacctaataaa

SEQ ID NO: 921391 - DNA, 15 bp, Homo sapiens
ctgtaaacctaataa

SEQ ID NO: 921392 - DNA, 15 bp, Homo sapiens
actgtaaacctaata

SEQ ID NO: 921393 - DNA, 15 bp, Homo sapiens
tactgtaaacctaat

SEQ ID NO: 921394 - DNA, 15 bp, Homo sapiens
atactgtaaacctaa

SEQ ID NO: 921395 - DNA, 15 bp, Homo sapiens
aatactgtaaaccta

SEQ ID NO: 921396 - DNA, 15 bp, Homo sapiens
caatactgtaaacct

SEQ ID NO: 921397 - DNA, 15 bp, Homo sapiens
acaatactgtaaacc

SEQ ID NO: 921398 - DNA, 15 bp, Homo sapiens
gacaatactgtaaac

SEQ ID NO: 921399 - DNA, 15 bp, Homo sapiens
agacaatactgtaaa

SEQ ID NO: 921400 - DNA, 15 bp, Homo sapiens
aagacaatactgtaa

SEQ ID NO: 921401 - DNA, 15 bp, Homo sapiens
aaagacaatactgta

SEQ ID NO: 921402 - DNA, 15 bp, Homo sapiens
aaaagacaatactgt

SEQ ID NO: 921403 - DNA, 15 bp, Homo sapiens
aaaaagacaatactg

SEQ ID NO: 921404 - DNA, 15 bp, Homo sapiens
caaaaagacaatact

SEQ ID NO: 921405 - DNA, 15 bp, Homo sapiens
acaaaaagacaatac

SEQ ID NO: 921406 - DNA, 15 bp, Homo sapiens
aacaaaaagacaata

SEQ ID NO: 921407 - DNA, 15 bp, Homo sapiens
aaacaaaaagacaat

SEQ ID NO: 921408 - DNA, 15 bp, Homo sapiens
aaaacaaaaagacaa

SEQ ID NO: 921409 - DNA, 15 bp, Homo sapiens
caaaacaaaaagaca

SEQ ID NO: 921410 - DNA, 15 bp, Homo sapiens
acaaaacaaaaagac

SEQ ID NO: 921411 - DNA, 15 bp, Homo sapiens
aacaaaacaaaaaga

SEQ ID NO: 921412 - DNA, 15 bp, Homo sapiens
aaacaaaacaaaaag

SEQ ID NO: 921413 - DNA, 15 bp, Homo sapiens
aaacaaaacaaaaca

SEQ ID NO: 921414 - DNA, 15 bp, Homo sapiens
aaaacaaaacaaaac

SEQ ID NO: 921415 - DNA, 15 bp, Homo sapiens
aaaaacaaaacaaaa

SEQ ID NO: 921416 - DNA, 15 bp, Homo sapiens
taaaaacaaaacaaa

SEQ ID NO: 921417 - DNA, 15 bp, Homo sapiens
ctaaaaacaaaacaa

SEQ ID NO: 921418 - DNA, 15 bp, Homo sapiens
actaaaaacaaaaca

SEQ ID NO: 921419 - DNA, 15 bp, Homo sapiens
cactaaaaacaaaac

SEQ ID NO: 921420 - DNA, 15 bp, Homo sapiens
tcactaaaaacaaaa

SEQ ID NO: 921421 - DNA, 15 bp, Homo sapiens
ttcactaaaaacaaa

SEQ ID NO: 921422 - DNA, 15 bp, Homo sapiens
tttcactaaaaacaa

SEQ ID NO: 921423 - DNA, 15 bp, Homo sapiens
ttttcactaaaaaca

SEQ ID NO: 921424 - DNA, 15 bp, Homo sapiens
cttttcactaaaaac

SEQ ID NO: 921425 - DNA, 15 bp, Homo sapiens
ccttttcactaaaaa

SEQ ID NO: 921426 - DNA, 15 bp, Homo sapiens
tccttttcactaaaa

SEQ ID NO: 921427 - DNA, 15 bp, Homo sapiens
ctccttttcactaaa

SEQ ID NO: 921428 - DNA, 15 bp, Homo sapiens
tctccttttcactaa

SEQ ID NO: 921429 - DNA, 15 bp, Homo sapiens
gtctccttttcacta

SEQ ID NO: 921430 - DNA, 15 bp, Homo sapiens
ggtctccttttcact

SEQ ID NO: 921431 - DNA, 15 bp, Homo sapiens
aggtctccttttcac

SEQ ID NO: 921432 - DNA, 15 bp, Homo sapiens
caggtctccttttca

SEQ ID NO: 921433 - DNA, 15 bp, Homo sapiens
ccaggtctccttttc

SEQ ID NO: 921434 - DNA, 15 bp, Homo sapiens
tccaggtctcctttt

SEQ ID NO: 921435 - DNA, 15 bp, Homo sapiens
ttccaggtctccttt

SEQ ID NO: 921436 - DNA, 15 bp, Homo sapiens
tttccaggtctcctt

SEQ ID NO: 921437 - DNA, 15 bp, Homo sapiens
ttttccaggtctcct

SEQ ID NO: 921438 - DNA, 15 bp, Homo sapiens
gttttccaggtctcc

SEQ ID NO: 921439 - DNA, 15 bp, Homo sapiens
tgttttccaggtctc

SEQ ID NO: 921440 - DNA, 15 bp, Homo sapiens
ctgttttccaggtct

SEQ ID NO: 921441 - DNA, 15 bp, Homo sapiens
tctgttttccaggtc

SEQ ID NO: 921442 - DNA, 15 bp, Homo sapiens
ttctgttttccaggt

SEQ ID NO: 921443 - DNA, 15 bp, Homo sapiens
attctgttttccagg

SEQ ID NO: 921444 - DNA, 15 bp, Homo sapiens
gattctgttttccag

SEQ ID NO: 921445 - DNA, 15 bp, Homo sapiens
agattctgttttcca

SEQ ID NO: 921446 - DNA, 15 bp, Homo sapiens
tagattctgttttcc

SEQ ID NO: 921447 - DNA, 15 bp, Homo sapiens
ttagattctgttttc

SEQ ID NO: 921448 - DNA, 15 bp, Homo sapiens
tttagattctgtttt

SEQ ID NO: 921449 - DNA, 15 bp, Homo sapiens
ttttagattctgttt

SEQ ID NO: 921450 - DNA, 15 bp, Homo sapiens
gttttagattctgtt

SEQ ID NO: 921451 - DNA, 15 bp, Homo sapiens
tgttttagattctgt

SEQ ID NO: 921452 - DNA, 15 bp, Homo sapiens
ttgttttagattctg

SEQ ID NO: 921453 - DNA, 15 bp, Homo sapiens
attgttttagattct

SEQ ID NO: 921454 - DNA, 15 bp, Homo sapiens
tattgttttagattc

SEQ ID NO: 921455 - DNA, 15 bp, Homo sapiens
ttattgttttagatt

SEQ ID NO: 921456 - DNA, 15 bp, Homo sapiens
tttattgttttagat

SEQ ID NO: 921457 - DNA, 15 bp, Homo sapiens
ttttattgttttaga

SEQ ID NO: 921458 - DNA, 15 bp, Homo sapiens
cttttattgttttag

SEQ ID NO: 921459 - DNA, 15 bp, Homo sapiens
tcttttattgtttta

SEQ ID NO: 921460 - DNA, 15 bp, Homo sapiens
ctcttttattgtttt

SEQ ID NO: 921461 - DNA, 15 bp, Homo sapiens
cctcttttattgttt

SEQ ID NO: 921462 - DNA, 15 bp, Homo sapiens
tcctcttttattgtt

SEQ ID NO: 921463 - DNA, 15 bp, Homo sapiens
ttcctcttttattgt

SEQ ID NO: 921464 - DNA, 15 bp, Homo sapiens
tttcctcttttattg

SEQ ID NO: 921465 - DNA, 15 bp, Homo sapiens
ttttcctcttttatt

SEQ ID NO: 921466 - DNA, 15 bp, Homo sapiens
cttttcctcttttat

SEQ ID NO: 921467 - DNA, 15 bp, Homo sapiens
tcttttcctctttta

SEQ ID NO: 921468 - DNA, 15 bp, Homo sapiens
ctcttttcctctttt

SEQ ID NO: 921469 - DNA, 15 bp, Homo sapiens
tctcttttcctcttt

SEQ ID NO: 921470 - DNA, 15 bp, Homo sapiens
ttctcttttcctctt

SEQ ID NO: 921471 - DNA, 15 bp, Homo sapiens
tttctcttttcctct

SEQ ID NO: 921472 - DNA, 15 bp, Homo sapiens
ttttctcttttcctc

SEQ ID NO: 921473 - DNA, 15 bp, Homo sapiens
gttttctcttttcct

SEQ ID NO: 921474 - DNA, 15 bp, Homo sapiens
agttttctcttttcc

SEQ ID NO: 921475 - DNA, 15 bp, Homo sapiens
aagttttctcttttc

SEQ ID NO: 921476 - DNA, 15 bp, Homo sapiens
caagttttctctttt

SEQ ID NO: 921477 - DNA, 15 bp, Homo sapiens
tcaagttttctcttt

SEQ ID NO: 921478 - DNA, 15 bp, Homo sapiens
ctcaagttttctctt

SEQ ID NO: 921479 - DNA, 15 bp, Homo sapiens
cctcaagttttctct

SEQ ID NO: 921480 - DNA, 15 bp, Homo sapiens
tcctcaagttttctc

SEQ ID NO: 921481 - DNA, 15 bp, Homo sapiens
atcctcaagttttct

SEQ ID NO: 921482 - DNA, 15 bp, Homo sapiens
gatcctcaagttttc

SEQ ID NO: 921483 - DNA, 15 bp, Homo sapiens
tgatcctcaagtttt

SEQ ID NO: 921484 - DNA, 15 bp, Homo sapiens
ttgatcctcaagttt

SEQ ID NO: 921485 - DNA, 15 bp, Homo sapiens
cttgatcctcaagtt

SEQ ID NO: 921486 - DNA, 15 bp, Homo sapiens
acttgatcctcaagt

SEQ ID NO: 921487 - DNA, 15 bp, Homo sapiens
gacttgatcctcaag

SEQ ID NO: 921488 - DNA, 15 bp, Homo sapiens
ggacttgatcctcaa

SEQ ID NO: 921489 - DNA, 15 bp, Homo sapiens
tggacttgatcctca

SEQ ID NO: 921490 - DNA, 15 bp, Homo sapiens
ttggacttgatcctc

SEQ ID NO: 921491 - DNA, 15 bp, Homo sapiens
gttggacttgatcct

SEQ ID NO: 921492 - DNA, 15 bp, Homo sapiens
tgttggacttgatcc

SEQ ID NO: 921493 - DNA, 15 bp, Homo sapiens
ttgttggacttgatc

SEQ ID NO: 921494 - DNA, 15 bp, Homo sapiens
cttgttggacttgat

SEQ ID NO: 921495 - DNA, 15 bp, Homo sapiens
tcttgttggacttga

SEQ ID NO: 921496 - DNA, 15 bp, Homo sapiens
atcttgttggacttg

SEQ ID NO: 921497 - DNA, 15 bp, Homo sapiens
catcttgttggactt

SEQ ID NO: 921498 - DNA, 15 bp, Homo sapiens
gcatcttgttggact

SEQ ID NO: 921499 - DNA, 15 bp, Homo sapiens
agcatcttgttggac

SEQ ID NO: 921500 - DNA, 15 bp, Homo sapiens
tagcatcttgttgga

SEQ ID NO: 921501 - DNA, 15 bp, Homo sapiens
atagcatcttgttgg

SEQ ID NO: 921502 - DNA, 15 bp, Homo sapiens
tatagcatcttgttg

SEQ ID NO: 921503 - DNA, 15 bp, Homo sapiens
ttatagcatcttgtt

SEQ ID NO: 921504 - DNA, 15 bp, Homo sapiens
tttatagcatcttgt

SEQ ID NO: 921505 - DNA, 15 bp, Homo sapiens
ttttatagcatcttg

SEQ ID NO: 921506 - DNA, 15 bp, Homo sapiens
cttttatagcatctt

SEQ ID NO: 921507 - DNA, 15 bp, Homo sapiens
acttttatagcatct

SEQ ID NO: 921508 - DNA, 15 bp, Homo sapiens
tacttttatagcatc

SEQ ID NO: 921509 - DNA, 15 bp, Homo sapiens
ttacttttatagcat

SEQ ID NO: 921510 - DNA, 15 bp, Homo sapiens
tttacttttatagca

SEQ ID NO: 921511 - DNA, 15 bp, Homo sapiens
ttttacttttatagc

SEQ ID NO: 921512 - DNA, 15 bp, Homo sapiens
cttttacttttatag

SEQ ID NO: 921513 - DNA, 15 bp, Homo sapiens
tcttttacttttata

SEQ ID NO: 921514 - DNA, 15 bp, Homo sapiens
ttcttttacttttat

SEQ ID NO: 921515 - DNA, 15 bp, Homo sapiens
attcttttactttta

SEQ ID NO: 921516 - DNA, 15 bp, Homo sapiens
tattcttttactttt

SEQ ID NO: 921517 - DNA, 15 bp, Homo sapiens
atattcttttacttt

SEQ ID NO: 921518 - DNA, 15 bp, Homo sapiens
tatattcttttactt

SEQ ID NO: 921519 - DNA, 15 bp, Homo sapiens
ttatattcttttact

SEQ ID NO: 921520 - DNA, 15 bp, Homo sapiens
attatattcttttac

SEQ ID NO: 921521 - DNA, 15 bp, Homo sapiens
cattatattctttta

SEQ ID NO: 921522 - DNA, 15 bp, Homo sapiens
acattatattctttt

SEQ ID NO: 921523 - DNA, 15 bp, Homo sapiens
tacattatattcttt

SEQ ID NO: 921524 - DNA, 15 bp, Homo sapiens
ttacattatattctt

SEQ ID NO: 921525 - DNA, 15 bp, Homo sapiens
cttacattatattct

SEQ ID NO: 921526 - DNA, 15 bp, Homo sapiens
acttacattatattc

SEQ ID NO: 921527 - DNA, 15 bp, Homo sapiens
tacttacattatatt

SEQ ID NO: 921528 - DNA, 15 bp, Homo sapiens
ttacttacattatat

SEQ ID NO: 921529 - DNA, 15 bp, Homo sapiens
tttacttacattata

SEQ ID NO: 921530 - DNA, 15 bp, Homo sapiens
ttttacttacattat

SEQ ID NO: 921531 - DNA, 15 bp, Homo sapiens
gttttacttacatta

SEQ ID NO: 921532 - DNA, 15 bp, Homo sapiens
tgttttacttacatt

SEQ ID NO: 921533 - DNA, 15 bp, Homo sapiens
atgttttacttacat

SEQ ID NO: 921534 - DNA, 15 bp, Homo sapiens
aatgttttacttaca

SEQ ID NO: 921535 - DNA, 15 bp, Homo sapiens
aaatgttttacttac

SEQ ID NO: 921536 - DNA, 15 bp, Homo sapiens
aaaatgttttactta

SEQ ID NO: 921537 - DNA, 15 bp, Homo sapiens
aaaaatgttttactt

SEQ ID NO: 921538 - DNA, 15 bp, Homo sapiens
taaaaatgttttact

SEQ ID NO: 921539 - DNA, 15 bp, Homo sapiens
ttaaaaatgttttac

SEQ ID NO: 921540 - DNA, 15 bp, Homo sapiens
gttaaaaatgtttta

SEQ ID NO: 921541 - DNA, 15 bp, Homo sapiens
tgttaaaaatgtttt

SEQ ID NO: 921542 - DNA, 15 bp, Homo sapiens
atgttaaaaatgttt

SEQ ID NO: 921543 - DNA, 15 bp, Homo sapiens
aatgttaaaaatgtt

SEQ ID NO: 921544 - DNA, 15 bp, Homo sapiens
taatgttaaaaatgt

SEQ ID NO: 921545 - DNA, 15 bp, Homo sapiens
ctaatgttaaaaatg

SEQ ID NO: 921546 - DNA, 15 bp, Homo sapiens
actaatgttaaaaat

SEQ ID NO: 921547 - DNA, 15 bp, Homo sapiens
tactaatgttaaaaa

SEQ ID NO: 921548 - DNA, 15 bp, Homo sapiens
atactaatgttaaaa

SEQ ID NO: 921549 - DNA, 15 bp, Homo sapiens
catactaatgttaaa

SEQ ID NO: 921550 - DNA, 15 bp, Homo sapiens
gcatactaatgttaa

SEQ ID NO: 921551 - DNA, 15 bp, Homo sapiens
tgcatactaatgtta

SEQ ID NO: 921552 - DNA, 15 bp, Homo sapiens
ttgcatactaatgtt

SEQ ID NO: 921553 - DNA, 15 bp, Homo sapiens
attgcatactaatgt

SEQ ID NO: 921554 - DNA, 15 bp, Homo sapiens
tattgcatactaatg

SEQ ID NO: 921555 - DNA, 15 bp, Homo sapiens
atattgcatactaat

SEQ ID NO: 921556 - DNA, 15 bp, Homo sapiens
aatattgcatactaa

SEQ ID NO: 921557 - DNA, 15 bp, Homo sapiens
caatattgcatacta

SEQ ID NO: 921558 - DNA, 15 bp, Homo sapiens
acaatattgcatact

SEQ ID NO: 921559 - DNA, 15 bp, Homo sapiens
tacaatattgcatac

SEQ ID NO: 921560 - DNA, 15 bp, Homo sapiens
gtacaatattgcata

SEQ ID NO: 921561 - DNA, 15 bp, Homo sapiens
tgtacaatattgcat

SEQ ID NO: 921562 - DNA, 15 bp, Homo sapiens
ttgtacaatattgca

SEQ ID NO: 921563 - DNA, 15 bp, Homo sapiens
tttgtacaatattgc

SEQ ID NO: 921564 - DNA, 15 bp, Homo sapiens
ctttgtacaatattg

SEQ ID NO: 921565 - DNA, 15 bp, Homo sapiens
actttgtacaatatt

SEQ ID NO: 921566 - DNA, 15 bp, Homo sapiens
tactttgtacaatat

SEQ ID NO: 921567 - DNA, 15 bp, Homo sapiens
ctactttgtacaata

SEQ ID NO: 921568 - DNA, 15 bp, Homo sapiens
cctactttgtacaat

SEQ ID NO: 921569 - DNA, 15 bp, Homo sapiens
tcctactttgtacaa

SEQ ID NO: 921570 - DNA, 15 bp, Homo sapiens
atcctactttgtaca

SEQ ID NO: 921571 - DNA, 15 bp, Homo sapiens
tatcctactttgtac

SEQ ID NO: 921572 - DNA, 15 bp, Homo sapiens
ctatcctactttgta

SEQ ID NO: 921573 - DNA, 15 bp, Homo sapiens
gctatcctactttgt

SEQ ID NO: 921574 - DNA, 15 bp, Homo sapiens
agctatcctactttg

SEQ ID NO: 921575 - DNA, 15 bp, Homo sapiens
tagctatcctacttt

SEQ ID NO: 921576 - DNA, 15 bp, Homo sapiens
ctagctatcctactt

SEQ ID NO: 921577 - DNA, 15 bp, Homo sapiens
tctagctatcctact

SEQ ID NO: 921578 - DNA, 15 bp, Homo sapiens
atctagctatcctac

SEQ ID NO: 921579 - DNA, 15 bp, Homo sapiens
aatctagctatccta

SEQ ID NO: 921580 - DNA, 15 bp, Homo sapiens
gaatctagctatcct

SEQ ID NO: 921581 - DNA, 15 bp, Homo sapiens
tgaatctagctatcc

SEQ ID NO: 921582 - DNA, 15 bp, Homo sapiens
ttgaatctagctatc

SEQ ID NO: 921583 - DNA, 15 bp, Homo sapiens
gttgaatctagctat

SEQ ID NO: 921584 - DNA, 15 bp, Homo sapiens
tgttgaatctagcta

SEQ ID NO: 921585 - DNA, 15 bp, Homo sapiens
ttgttgaatctagct

SEQ ID NO: 921586 - DNA, 15 bp, Homo sapiens
cttgttgaatctagc

SEQ ID NO: 921587 - DNA, 15 bp, Homo sapiens
acttgttgaatctag

SEQ ID NO: 921588 - DNA, 15 bp, Homo sapiens
tacttgttgaatcta

SEQ ID NO: 921589 - DNA, 15 bp, Homo sapiens
ttacttgttgaatct

SEQ ID NO: 921590 - DNA, 15 bp, Homo sapiens
attacttgttgaatc

SEQ ID NO: 921591 - DNA, 15 bp, Homo sapiens
tattacttgttgaat

SEQ ID NO: 921592 - DNA, 15 bp, Homo sapiens
atattacttgttgaa

SEQ ID NO: 921593 - DNA, 15 bp, Homo sapiens
catattacttgttga

SEQ ID NO: 921594 - DNA, 15 bp, Homo sapiens
ccatattacttgttg

SEQ ID NO: 921595 - DNA, 15 bp, Homo sapiens
tccatattacttgtt

SEQ ID NO: 921596 - DNA, 15 bp, Homo sapiens
atccatattacttgt

SEQ ID NO: 921597 - DNA, 15 bp, Homo sapiens
catccatattacttg

SEQ ID NO: 921598 - DNA, 15 bp, Homo sapiens
acatccatattactt

SEQ ID NO: 921599 - DNA, 15 bp, Homo sapiens
cacatccatattact

SEQ ID NO: 921600 - DNA, 15 bp, Homo sapiens
acacatccatattac

SEQ ID NO: 921601 - DNA, 15 bp, Homo sapiens
gacacatccatatta

SEQ ID NO: 921602 - DNA, 15 bp, Homo sapiens
agacacatccatatt

SEQ ID NO: 921603 - DNA, 15 bp, Homo sapiens
aagacacatccatat

SEQ ID NO: 921604 - DNA, 15 bp, Homo sapiens
aaagacacatccata

SEQ ID NO: 921605 - DNA, 15 bp, Homo sapiens
caaagacacatccat

SEQ ID NO: 921606 - DNA, 15 bp, Homo sapiens
acaaagacacatcca

SEQ ID NO: 921607 - DNA, 15 bp, Homo sapiens
cacaaagacacatcc

SEQ ID NO: 921608 - DNA, 15 bp, Homo sapiens
gcacaaagacacatc

SEQ ID NO: 921609 - DNA, 15 bp, Homo sapiens
tgcacaaagacacat

SEQ ID NO: 921610 - DNA, 15 bp, Homo sapiens
ctgcacaaagacaca

SEQ ID NO: 921611 - DNA, 15 bp, Homo sapiens
tctgcacaaagacac

SEQ ID NO: 921612 - DNA, 15 bp, Homo sapiens
ttctgcacaaagaca

SEQ ID NO: 921613 - DNA, 15 bp, Homo sapiens
attctgcacaaagac

SEQ ID NO: 921614 - DNA, 15 bp, Homo sapiens
aattctgcacaaaga

SEQ ID NO: 921615 - DNA, 15 bp, Homo sapiens
aaattctgcacaaag

SEQ ID NO: 921616 - DNA, 15 bp, Homo sapiens
caaattctgcacaaa

SEQ ID NO: 921617 - DNA, 15 bp, Homo sapiens
gcaaattctgcacaa

SEQ ID NO: 921618 - DNA, 15 bp, Homo sapiens
agcaaattctgcaca

SEQ ID NO: 921619 - DNA, 15 bp, Homo sapiens
gagcaaattctgcac

SEQ ID NO: 921620 - DNA, 15 bp, Homo sapiens
tgagcaaattctgca

SEQ ID NO: 921621 - DNA, 15 bp, Homo sapiens
ttgagcaaattctgc

SEQ ID NO: 921622 - DNA, 15 bp, Homo sapiens
attgagcaaattctg

SEQ ID NO: 921623 - DNA, 15 bp, Homo sapiens
cattgagcaaattct

SEQ ID NO: 921624 - DNA, 15 bp, Homo sapiens
gcattgagcaaattc

SEQ ID NO: 921625 - DNA, 15 bp, Homo sapiens
agcattgagcaaatt

SEQ ID NO: 921626 - DNA, 15 bp, Homo sapiens
gagcattgagcaaat

SEQ ID NO: 921627 - DNA, 15 bp, Homo sapiens
agagcattgagcaaa

SEQ ID NO: 921628 - DNA, 15 bp, Homo sapiens
aagagcattgagcaa

SEQ ID NO: 921629 - DNA, 15 bp, Homo sapiens
gaagagcattgagca

SEQ ID NO: 921630 - DNA, 15 bp, Homo sapiens
tgaagagcattgagc

SEQ ID NO: 921631 - DNA, 15 bp, Homo sapiens
ctgaagagcattgag

SEQ ID NO: 921632 - DNA, 15 bp, Homo sapiens
tctgaagagcattga

SEQ ID NO: 921633 - DNA, 15 bp, Homo sapiens
atctgaagagcattg

SEQ ID NO: 921634 - DNA, 15 bp, Homo sapiens
catctgaagagcatt

SEQ ID NO: 921635 - DNA, 15 bp, Homo sapiens
ccatctgaagagcat

SEQ ID NO: 921636 - DNA, 15 bp, Homo sapiens
tccatctgaagagca

SEQ ID NO: 921637 - DNA, 15 bp, Homo sapiens
atccatctgaagagc

SEQ ID NO: 921638 - DNA, 15 bp, Homo sapiens
aatccatctgaagag

SEQ ID NO: 921639 - DNA, 15 bp, Homo sapiens
gaatccatctgaaga

SEQ ID NO: 921640 - DNA, 15 bp, Homo sapiens
cgaatccatctgaag

SEQ ID NO: 921641 - DNA, 15 bp, Homo sapiens
ccgaatccatctgaa

SEQ ID NO: 921642 - DNA, 15 bp, Homo sapiens
tccgaatccatctga

SEQ ID NO: 921643 - DNA, 15 bp, Homo sapiens
atccgaatccatctg

SEQ ID NO: 921644 - DNA, 15 bp, Homo sapiens
catccgaatccatct

SEQ ID NO: 921645 - DNA, 15 bp, Homo sapiens
tcatccgaatccatc

SEQ ID NO: 921646 - DNA, 15 bp, Homo sapiens
ttcatccgaatccat

SEQ ID NO: 921647 - DNA, 15 bp, Homo sapiens
tttcatccgaatcca

SEQ ID NO: 921648 - DNA, 15 bp, Homo sapiens
atttcatccgaatcc

SEQ ID NO: 921649 - DNA, 15 bp, Homo sapiens
catttcatccgaatc

SEQ ID NO: 921650 - DNA, 15 bp, Homo sapiens
tcatttcatccgaat

SEQ ID NO: 921651 - DNA, 15 bp, Homo sapiens
ttcatttcatccgaa

SEQ ID NO: 921652 - DNA, 15 bp, Homo sapiens
tttcatttcatccga

SEQ ID NO: 921653 - DNA, 15 bp, Homo sapiens
ttttcatttcatccg

SEQ ID NO: 921654 - DNA, 15 bp, Homo sapiens
tttttcatttcatcc

SEQ ID NO: 921655 - DNA, 15 bp, Homo sapiens
ttttttcatttcatc

SEQ ID NO: 921656 - DNA, 15 bp, Homo sapiens
tttttttcatttcat

SEQ ID NO: 921657 - DNA, 15 bp, Homo sapiens
atttttttcatttca

SEQ ID NO: 921658 - DNA, 15 bp, Homo sapiens
tatttttttcatttc

SEQ ID NO: 921659 - DNA, 15 bp, Homo sapiens
gtatttttttcattt

SEQ ID NO: 921660 - DNA, 15 bp, Homo sapiens
agtatttttttcatt

SEQ ID NO: 921661 - DNA, 15 bp, Homo sapiens
aagtatttttttcat

SEQ ID NO: 921662 - DNA, 15 bp, Homo sapiens
caagtatttttttca

SEQ ID NO: 921663 - DNA, 15 bp, Homo sapiens
gcaagtatttttttc

SEQ ID NO: 921664 - DNA, 15 bp, Homo sapiens
tgcaagtattttttt

SEQ ID NO: 921665 - DNA, 15 bp, Homo sapiens
ctgcaagtatttttt

SEQ ID NO: 921666 - DNA, 15 bp, Homo sapiens
tctgcaagtattttt

SEQ ID NO: 921667 - DNA, 15 bp, Homo sapiens
ttctgcaagtatttt

SEQ ID NO: 921668 - DNA, 15 bp, Homo sapiens
tttctgcaagtattt

SEQ ID NO: 921669 - DNA, 15 bp, Homo sapiens
ttttctgcaagtatt

SEQ ID NO: 921670 - DNA, 15 bp, Homo sapiens
attttctgcaagtat

SEQ ID NO: 921671 - DNA, 15 bp, Homo sapiens
tattttctgcaagta

SEQ ID NO: 921672 - DNA, 15 bp, Homo sapiens
ctattttctgcaagt

SEQ ID NO: 921673 - DNA, 15 bp, Homo sapiens
actattttctgcaag

SEQ ID NO: 921674 - DNA, 15 bp, Homo sapiens
tactattttctgcaa

SEQ ID NO: 921675 - DNA, 15 bp, Homo sapiens
ctactattttctgca

SEQ ID NO: 921676 - DNA, 15 bp, Homo sapiens
cctactattttctgc

SEQ ID NO: 921677 - DNA, 15 bp, Homo sapiens
tcctactattttctg

SEQ ID NO: 921678 - DNA, 15 bp, Homo sapiens
ttcctactattttct

SEQ ID NO: 921679 - DNA, 15 bp, Homo sapiens
tttcctactattttc

SEQ ID NO: 921680 - DNA, 15 bp, Homo sapiens
ttttcctactatttt

SEQ ID NO: 921681 - DNA, 15 bp, Homo sapiens
attttcctactattt

SEQ ID NO: 921682 - DNA, 15 bp, Homo sapiens
aattttcctactatt

SEQ ID NO: 921683 - DNA, 15 bp, Homo sapiens
taattttcctactat

SEQ ID NO: 921684 - DNA, 15 bp, Homo sapiens
gtaattttcctacta

SEQ ID NO: 921685 - DNA, 15 bp, Homo sapiens
agtaattttcctact

SEQ ID NO: 921686 - DNA, 15 bp, Homo sapiens
cagtaattttcctac

SEQ ID NO: 921687 - DNA, 15 bp, Homo sapiens
acagtaattttccta

SEQ ID NO: 921688 - DNA, 15 bp, Homo sapiens
aacagtaattttcct

SEQ ID NO: 921689 - DNA, 15 bp, Homo sapiens
aaacagtaattttcc

SEQ ID NO: 921690 - DNA, 15 bp, Homo sapiens
aaaacagtaattttc

SEQ ID NO: 921691 - DNA, 15 bp, Homo sapiens
caaaacagtaatttt

SEQ ID NO: 921692 - DNA, 15 bp, Homo sapiens
gcaaaacagtaattt

SEQ ID NO: 921693 - DNA, 15 bp, Homo sapiens
tgcaaaacagtaatt

SEQ ID NO: 921694 - DNA, 15 bp, Homo sapiens
ttgcaaaacagtaat

SEQ ID NO: 921695 - DNA, 15 bp, Homo sapiens
cttgcaaaacagtaa

SEQ ID NO: 921696 - DNA, 15 bp, Homo sapiens
acttgcaaaacagta

SEQ ID NO: 921697 - DNA, 15 bp, Homo sapiens
cacttgcaaaacagt

SEQ ID NO: 921698 - DNA, 15 bp, Homo sapiens
tcacttgcaaaacag

SEQ ID NO: 921699 - DNA, 15 bp, Homo sapiens
ttcacttgcaaaaca

SEQ ID NO: 921700 - DNA, 15 bp, Homo sapiens
attcacttgcaaaac

SEQ ID NO: 921701 - DNA, 15 bp, Homo sapiens
cattcacttgcaaaa

SEQ ID NO: 921702 - DNA, 15 bp, Homo sapiens
tcattcacttgcaaa

SEQ ID NO: 921703 - DNA, 15 bp, Homo sapiens
ttcattcacttgcaa

SEQ ID NO: 921704 - DNA, 15 bp, Homo sapiens
tttcattcacttgca

SEQ ID NO: 921705 - DNA, 15 bp, Homo sapiens
ttttcattcacttgc

SEQ ID NO: 921706 - DNA, 15 bp, Homo sapiens
tttttcattcacttg

SEQ ID NO: 921707 - DNA, 15 bp, Homo sapiens
atttttcattcactt

SEQ ID NO: 921708 - DNA, 15 bp, Homo sapiens
gatttttcattcact

SEQ ID NO: 921709 - DNA, 15 bp, Homo sapiens
tgatttttcattcac

SEQ ID NO: 921710 - DNA, 15 bp, Homo sapiens
gtgatttttcattca

SEQ ID NO: 921711 - DNA, 15 bp, Homo sapiens
agtgatttttcattc

SEQ ID NO: 921712 - DNA, 15 bp, Homo sapiens
aagtgatttttcatt

SEQ ID NO: 921713 - DNA, 15 bp, Homo sapiens
taagtgatttttcat

SEQ ID NO: 921714 - DNA, 15 bp, Homo sapiens
ataagtgatttttca

SEQ ID NO: 921715 - DNA, 15 bp, Homo sapiens
tataagtgatttttc

SEQ ID NO: 921716 - DNA, 15 bp, Homo sapiens
ttataagtgattttt

SEQ ID NO: 921717 - DNA, 15 bp, Homo sapiens
cttataagtgatttt

SEQ ID NO: 921718 - DNA, 15 bp, Homo sapiens
ccttataagtgattt

SEQ ID NO: 921719 - DNA, 15 bp, Homo sapiens
gccttataagtgatt

SEQ ID NO: 921720 - DNA, 15 bp, Homo sapiens
tgccttataagtgat

SEQ ID NO: 921721 - DNA, 15 bp, Homo sapiens
ttgccttataagtga

SEQ ID NO: 921722 - DNA, 15 bp, Homo sapiens
attgccttataagtg

SEQ ID NO: 921723 - DNA, 15 bp, Homo sapiens
tattgccttataagt

SEQ ID NO: 921724 - DNA, 15 bp, Homo sapiens
atattgccttataag

SEQ ID NO: 921725 - DNA, 15 bp, Homo sapiens
tatattgccttataa

SEQ ID NO: 921726 - DNA, 15 bp, Homo sapiens
gtatattgccttata

SEQ ID NO: 921727 - DNA, 15 bp, Homo sapiens
tgtatattgccttat

SEQ ID NO: 921728 - DNA, 15 bp, Homo sapiens
ttgtatattgcctta

SEQ ID NO: 921729 - DNA, 15 bp, Homo sapiens
gttgtatattgcctt

SEQ ID NO: 921730 - DNA, 15 bp, Homo sapiens
ggttgtatattgcct

SEQ ID NO: 921731 - DNA, 15 bp, Homo sapiens
aggttgtatattgcc

SEQ ID NO: 921732 - DNA, 15 bp, Homo sapiens
aaggttgtatattgc

SEQ ID NO: 921733 - DNA, 15 bp, Homo sapiens
taaggttgtatattg

SEQ ID NO: 921734 - DNA, 15 bp, Homo sapiens
ctaaggttgtatatt

SEQ ID NO: 921735 - DNA, 15 bp, Homo sapiens
actaaggttgtatat

SEQ ID NO: 921736 - DNA, 15 bp, Homo sapiens
tactaaggttgtata

SEQ ID NO: 921737 - DNA, 15 bp, Homo sapiens
ctactaaggttgtat

SEQ ID NO: 921738 - DNA, 15 bp, Homo sapiens
tctactaaggttgta

SEQ ID NO: 921739 - DNA, 15 bp, Homo sapiens
ttctactaaggttgt

SEQ ID NO: 921740 - DNA, 15 bp, Homo sapiens
attctactaaggttg

SEQ ID NO: 921741 - DNA, 15 bp, Homo sapiens
aattctactaaggtt

SEQ ID NO: 921742 - DNA, 15 bp, Homo sapiens
caattctactaaggt

SEQ ID NO: 921743 - DNA, 15 bp, Homo sapiens
ccaattctactaagg

SEQ ID NO: 921744 - DNA, 15 bp, Homo sapiens
tccaattctactaag

SEQ ID NO: 921745 - DNA, 15 bp, Homo sapiens
ctccaattctactaa

SEQ ID NO: 921746 - DNA, 15 bp, Homo sapiens
gctccaattctacta

SEQ ID NO: 921747 - DNA, 15 bp, Homo sapiens
cgctccaattctact

SEQ ID NO: 921748 - DNA, 15 bp, Homo sapiens
tcgctccaattctac

SEQ ID NO: 921749 - DNA, 15 bp, Homo sapiens
gtcgctccaattcta

SEQ ID NO: 921750 - DNA, 15 bp, Homo sapiens
tgtcgctccaattct

SEQ ID NO: 921751 - DNA, 15 bp, Homo sapiens
ttgtcgctccaattc

SEQ ID NO: 921752 - DNA, 15 bp, Homo sapiens
gttgtcgctccaatt

SEQ ID NO: 921753 - DNA, 15 bp, Homo sapiens
agttgtcgctccaat

SEQ ID NO: 921754 - DNA, 15 bp, Homo sapiens
aagttgtcgctccaa

SEQ ID NO: 921755 - DNA, 15 bp, Homo sapiens
taagttgtcgctcca

SEQ ID NO: 921756 - DNA, 15 bp, Homo sapiens
ctaagttgtcgctcc

SEQ ID NO: 921757 - DNA, 15 bp, Homo sapiens
tctaagttgtcgctc

SEQ ID NO: 921758 - DNA, 15 bp, Homo sapiens
ttctaagttgtcgct

SEQ ID NO: 921759 - DNA, 15 bp, Homo sapiens
tttctaagttgtcgc

SEQ ID NO: 921760 - DNA, 15 bp, Homo sapiens
ttttctaagttgtcg

SEQ ID NO: 921761 - DNA, 15 bp, Homo sapiens
cttttctaagttgtc

SEQ ID NO: 921762 - DNA, 15 bp, Homo sapiens
tcttttctaagttgt

SEQ ID NO: 921763 - DNA, 15 bp, Homo sapiens
ttcttttctaagttg

SEQ ID NO: 921764 - DNA, 15 bp, Homo sapiens
tttcttttctaagtt

SEQ ID NO: 921765 - DNA, 15 bp, Homo sapiens
ttttcttttctaagt

SEQ ID NO: 921766 - DNA, 15 bp, Homo sapiens
attttcttttctaag

SEQ ID NO: 921767 - DNA, 15 bp, Homo sapiens
cattttcttttctaa

SEQ ID NO: 921768 - DNA, 15 bp, Homo sapiens
tcattttcttttcta

SEQ ID NO: 921769 - DNA, 15 bp, Homo sapiens
ctcattttcttttct

SEQ ID NO: 921770 - DNA, 15 bp, Homo sapiens
tctcattttcttttc

SEQ ID NO: 921771 - DNA, 15 bp, Homo sapiens
ttctcattttctttt

SEQ ID NO: 921772 - DNA, 15 bp, Homo sapiens
cttctcattttcttt

SEQ ID NO: 921773 - DNA, 15 bp, Homo sapiens
gcttctcattttctt

SEQ ID NO: 921774 - DNA, 15 bp, Homo sapiens
tgcttctcattttct

SEQ ID NO: 921775 - DNA, 15 bp, Homo sapiens
ttgcttctcattttc

SEQ ID NO: 921776 - DNA, 15 bp, Homo sapiens
tttgcttctcatttt

SEQ ID NO: 921777 - DNA, 15 bp, Homo sapiens
ttttgcttctcattt

SEQ ID NO: 921778 - DNA, 15 bp, Homo sapiens
cttttgcttctcatt

SEQ ID NO: 921779 - DNA, 15 bp, Homo sapiens
tcttttgcttctcat

SEQ ID NO: 921780 - DNA, 15 bp, Homo sapiens
ttcttttgcttctca

SEQ ID NO: 921781 - DNA, 15 bp, Homo sapiens
attcttttgcttctc

SEQ ID NO: 921782 - DNA, 15 bp, Homo sapiens
cattcttttgcttct

SEQ ID NO: 921783 - DNA, 15 bp, Homo sapiens
tcattcttttgcttc

SEQ ID NO: 921784 - DNA, 15 bp, Homo sapiens
ttcattcttttgctt

SEQ ID NO: 921785 - DNA, 15 bp, Homo sapiens
attcattcttttgct

SEQ ID NO: 921786 - DNA, 15 bp, Homo sapiens
aattcattcttttgc

SEQ ID NO: 921787 - DNA, 15 bp, Homo sapiens
caattcattcttttg

SEQ ID NO: 921788 - DNA, 15 bp, Homo sapiens
acaattcattctttt

SEQ ID NO: 921789 - DNA, 15 bp, Homo sapiens
aacaattcattcttt

SEQ ID NO: 921790 - DNA, 15 bp, Homo sapiens
caacaattcattctt

SEQ ID NO: 921791 - DNA, 15 bp, Homo sapiens
acaacaattcattct

SEQ ID NO: 921792 - DNA, 15 bp, Homo sapiens
gacaacaattcattc

SEQ ID NO: 921793 - DNA, 15 bp, Homo sapiens
tgacaacaattcatt

SEQ ID NO: 921794 - DNA, 15 bp, Homo sapiens
ttgacaacaattcat

SEQ ID NO: 921795 - DNA, 15 bp, Homo sapiens
attgacaacaattca

SEQ ID NO: 921796 - DNA, 15 bp, Homo sapiens
cattgacaacaattc

SEQ ID NO: 921797 - DNA, 15 bp, Homo sapiens
ccattgacaacaatt

SEQ ID NO: 921798 - DNA, 15 bp, Homo sapiens
tccattgacaacaat

SEQ ID NO: 921799 - DNA, 15 bp, Homo sapiens
ctccattgacaacaa

SEQ ID NO: 921800 - DNA, 15 bp, Homo sapiens
cctccattgacaaca

SEQ ID NO: 921801 - DNA, 15 bp, Homo sapiens
gcctccattgacaac

SEQ ID NO: 921802 - DNA, 15 bp, Homo sapiens
agcctccattgacaa

SEQ ID NO: 921803 - DNA, 15 bp, Homo sapiens
cagcctccattgaca

SEQ ID NO: 921804 - DNA, 15 bp, Homo sapiens
tcagcctccattgac

SEQ ID NO: 921805 - DNA, 15 bp, Homo sapiens
ttcagcctccattga

SEQ ID NO: 921806 - DNA, 15 bp, Homo sapiens
cttcagcctccattg

SEQ ID NO: 921807 - DNA, 15 bp, Homo sapiens
acttcagcctccatt

SEQ ID NO: 921808 - DNA, 15 bp, Homo sapiens
aacttcagcctccat

SEQ ID NO: 921809 - DNA, 15 bp, Homo sapiens
aaacttcagcctcca

SEQ ID NO: 921810 - DNA, 15 bp, Homo sapiens
caaacttcagcctcc

SEQ ID NO: 921811 - DNA, 15 bp, Homo sapiens
acaaacttcagcctc

SEQ ID NO: 921812 - DNA, 15 bp, Homo sapiens
cacaaacttcagcct

SEQ ID NO: 921813 - DNA, 15 bp, Homo sapiens
tcacaaacttcagcc

SEQ ID NO: 921814 - DNA, 15 bp, Homo sapiens
ttcacaaacttcagc

SEQ ID NO: 921815 - DNA, 15 bp, Homo sapiens
tttcacaaacttcag

SEQ ID NO: 921816 - DNA, 15 bp, Homo sapiens
ttttcacaaacttca

SEQ ID NO: 921817 - DNA, 15 bp, Homo sapiens
tttttcacaaacttc

SEQ ID NO: 921818 - DNA, 15 bp, Homo sapiens
ttttttcacaaactt

SEQ ID NO: 921819 - DNA, 15 bp, Homo sapiens
attttttcacaaact

SEQ ID NO: 921820 - DNA, 15 bp, Homo sapiens
aattttttcacaaac

SEQ ID NO: 921821 - DNA, 15 bp, Homo sapiens
caattttttcacaaa

SEQ ID NO: 921822 - DNA, 15 bp, Homo sapiens
ccaattttttcacaa

SEQ ID NO: 921823 - DNA, 15 bp, Homo sapiens
cccaattttttcaca

SEQ ID NO: 921824 - DNA, 15 bp, Homo sapiens
acccaattttttcac

SEQ ID NO: 921825 - DNA, 15 bp, Homo sapiens
cacccaattttttca

SEQ ID NO: 921826 - DNA, 15 bp, Homo sapiens
acacccaattttttc

SEQ ID NO: 921827 - DNA, 15 bp, Homo sapiens
aacacccaatttttt

SEQ ID NO: 921828 - DNA, 15 bp, Homo sapiens
aaacacccaattttt

SEQ ID NO: 921829 - DNA, 15 bp, Homo sapiens
caaacacccaatttt

SEQ ID NO: 921830 - DNA, 15 bp, Homo sapiens
gcaaacacccaattt

SEQ ID NO: 921831 - DNA, 15 bp, Homo sapiens
tgcaaacacccaatt

SEQ ID NO: 921832 - DNA, 15 bp, Homo sapiens
ttgcaaacacccaat

SEQ ID NO: 921833 - DNA, 15 bp, Homo sapiens
tttgcaaacacccaa

SEQ ID NO: 921834 - DNA, 15 bp, Homo sapiens
ctttgcaaacaccca

SEQ ID NO: 921835 - DNA, 15 bp, Homo sapiens
tctttgcaaacaccc

SEQ ID NO: 921836 - DNA, 15 bp, Homo sapiens
atctttgcaaacacc

SEQ ID NO: 921837 - DNA, 15 bp, Homo sapiens
aatctttgcaaacac

SEQ ID NO: 921838 - DNA, 15 bp, Homo sapiens
aaatctttgcaaaca

SEQ ID NO: 921839 - DNA, 15 bp, Homo sapiens
taaatctttgcaaac

SEQ ID NO: 921840 - DNA, 15 bp, Homo sapiens
ttaaatctttgcaaa

SEQ ID NO: 921841 - DNA, 15 bp, Homo sapiens
cttaaatctttgcaa

SEQ ID NO: 921842 - DNA, 15 bp, Homo sapiens
ccttaaatctttgca

SEQ ID NO: 921843 - DNA, 15 bp, Homo sapiens
accttaaatctttgc

SEQ ID NO: 921844 - DNA, 15 bp, Homo sapiens
taccttaaatctttg

SEQ ID NO: 921845 - DNA, 15 bp, Homo sapiens
gtaccttaaatcttt

SEQ ID NO: 921846 - DNA, 15 bp, Homo sapiens
tgtaccttaaatctt

SEQ ID NO: 921847 - DNA, 15 bp, Homo sapiens
atgtaccttaaatct

SEQ ID NO: 921848 - DNA, 15 bp, Homo sapiens
gatgtaccttaaatc

SEQ ID NO: 921849 - DNA, 15 bp, Homo sapiens
agatgtaccttaaat

SEQ ID NO: 921850 - DNA, 15 bp, Homo sapiens
cagatgtaccttaaa

SEQ ID NO: 921851 - DNA, 15 bp, Homo sapiens
tcagatgtaccttaa

SEQ ID NO: 921852 - DNA, 15 bp, Homo sapiens
atcagatgtacctta

SEQ ID NO: 921853 - DNA, 15 bp, Homo sapiens
aatcagatgtacctt

SEQ ID NO: 921854 - DNA, 15 bp, Homo sapiens
gaatcagatgtacct

SEQ ID NO: 921855 - DNA, 15 bp, Homo sapiens
agaatcagatgtacc

SEQ ID NO: 921856 - DNA, 15 bp, Homo sapiens
aagaatcagatgtac

SEQ ID NO: 921857 - DNA, 15 bp, Homo sapiens
taagaatcagatgta

SEQ ID NO: 921858 - DNA, 15 bp, Homo sapiens
ataagaatcagatgt

SEQ ID NO: 921859 - DNA, 15 bp, Homo sapiens
aataagaatcagatg

SEQ ID NO: 921860 - DNA, 15 bp, Homo sapiens
aaataagaatcagat

SEQ ID NO: 921861 - DNA, 15 bp, Homo sapiens
aaaataagaatcaga

SEQ ID NO: 921862 - DNA, 15 bp, Homo sapiens
caaaataagaatcag

SEQ ID NO: 921863 - DNA, 15 bp, Homo sapiens
gcaaaataagaatca

SEQ ID NO: 921864 - DNA, 15 bp, Homo sapiens
agcaaaataagaatc

SEQ ID NO: 921865 - DNA, 15 bp, Homo sapiens
aagcaaaataagaat

SEQ ID NO: 921866 - DNA, 15 bp, Homo sapiens
aaagcaaaataagaa

SEQ ID NO: 921867 - DNA, 15 bp, Homo sapiens
aaaagcaaaataaga

SEQ ID NO: 921868 - DNA, 15 bp, Homo sapiens
aaaaagcaaaataag

SEQ ID NO: 921869 - DNA, 15 bp, Homo sapiens
gaaaaagcaaaataa

SEQ ID NO: 921870 - DNA, 15 bp, Homo sapiens
agaaaaagcaaaata

SEQ ID NO: 921871 - DNA, 15 bp, Homo sapiens
cagaaaaagcaaaat

SEQ ID NO: 921872 - DNA, 15 bp, Homo sapiens
tcagaaaaagcaaaa

SEQ ID NO: 921873 - DNA, 15 bp, Homo sapiens
gtcagaaaaagcaaa

SEQ ID NO: 921874 - DNA, 15 bp, Homo sapiens
agtcagaaaaagcaa

SEQ ID NO: 921875 - DNA, 15 bp, Homo sapiens
tagtcagaaaaagca

SEQ ID NO: 921876 - DNA, 15 bp, Homo sapiens
atagtcagaaaaagc

SEQ ID NO: 921877 - DNA, 15 bp, Homo sapiens
catagtcagaaaaag

SEQ ID NO: 921878 - DNA, 15 bp, Homo sapiens
tcatagtcagaaaaa

SEQ ID NO: 921879 - DNA, 15 bp, Homo sapiens
ttcatagtcagaaaa

SEQ ID NO: 921880 - DNA, 15 bp, Homo sapiens
tttcatagtcagaaa

SEQ ID NO: 921881 - DNA, 15 bp, Homo sapiens
ttttcatagtcagaa

SEQ ID NO: 921882 - DNA, 15 bp, Homo sapiens
tttttcatagtcaga

SEQ ID NO: 921883 - DNA, 15 bp, Homo sapiens
atttttcatagtcag

SEQ ID NO: 921884 - DNA, 15 bp, Homo sapiens
aatttttcatagtca

SEQ ID NO: 921885 - DNA, 15 bp, Homo sapiens
aaatttttcatagtc

SEQ ID NO: 921886 - DNA, 15 bp, Homo sapiens
gaaatttttcatagt

SEQ ID NO: 921887 - DNA, 15 bp, Homo sapiens
tgaaatttttcatag

SEQ ID NO: 921888 - DNA, 15 bp, Homo sapiens
ttgaaatttttcata

SEQ ID NO: 921889 - DNA, 15 bp, Homo sapiens
tttgaaatttttcat

SEQ ID NO: 921890 - DNA, 15 bp, Homo sapiens
atttgaaatttttca

SEQ ID NO: 921891 - DNA, 15 bp, Homo sapiens
tatttgaaatttttc

SEQ ID NO: 921892 - DNA, 15 bp, Homo sapiens
atatttgaaattttt

SEQ ID NO: 921893 - DNA, 15 bp, Homo sapiens
catatttgaaatttt

SEQ ID NO: 921894 - DNA, 15 bp, Homo sapiens
gcatatttgaaattt

SEQ ID NO: 921895 - DNA, 15 bp, Homo sapiens
tgcatatttgaaatt

SEQ ID NO: 921896 - DNA, 15 bp, Homo sapiens
ctgcatatttgaaat

SEQ ID NO: 921897 - DNA, 15 bp, Homo sapiens
tctgcatatttgaaa

SEQ ID NO: 921898 - DNA, 15 bp, Homo sapiens
ttctgcatatttgaa

SEQ ID NO: 921899 - DNA, 15 bp, Homo sapiens
cttctgcatatttga

SEQ ID NO: 921900 - DNA, 15 bp, Homo sapiens
tcttctgcatatttg

SEQ ID NO: 921901 - DNA, 15 bp, Homo sapiens
atcttctgcatattt

SEQ ID NO: 921902 - DNA, 15 bp, Homo sapiens
tatcttctgcatatt

SEQ ID NO: 921903 - DNA, 15 bp, Homo sapiens
ctatcttctgcatat

SEQ ID NO: 921904 - DNA, 15 bp, Homo sapiens
cctatcttctgcata

SEQ ID NO: 921905 - DNA, 15 bp, Homo sapiens
tcctatcttctgcat

SEQ ID NO: 921906 - DNA, 15 bp, Homo sapiens
atcctatcttctgca

SEQ ID NO: 921907 - DNA, 15 bp, Homo sapiens
catcctatcttctgc

SEQ ID NO: 921908 - DNA, 15 bp, Homo sapiens
ccatcctatcttctg

SEQ ID NO: 921909 - DNA, 15 bp, Homo sapiens
accatcctatcttct

SEQ ID NO: 921910 - DNA, 15 bp, Homo sapiens
taccatcctatcttc

SEQ ID NO: 921911 - DNA, 15 bp, Homo sapiens
ataccatcctatctt

SEQ ID NO: 921912 - DNA, 15 bp, Homo sapiens
gataccatcctatct

SEQ ID NO: 921913 - DNA, 15 bp, Homo sapiens
tgataccatcctatc

SEQ ID NO: 921914 - DNA, 15 bp, Homo sapiens
ttgataccatcctat

SEQ ID NO: 921915 - DNA, 15 bp, Homo sapiens
attgataccatccta

SEQ ID NO: 921916 - DNA, 15 bp, Homo sapiens
tattgataccatcct

SEQ ID NO: 921917 - DNA, 15 bp, Homo sapiens
ttattgataccatcc

SEQ ID NO: 921918 - DNA, 15 bp, Homo sapiens
attattgataccatc

SEQ ID NO: 921919 - DNA, 15 bp, Homo sapiens
cattattgataccat

SEQ ID NO: 921920 - DNA, 15 bp, Homo sapiens
gcattattgatacca

SEQ ID NO: 921921 - DNA, 15 bp, Homo sapiens
agcattattgatacc

SEQ ID NO: 921922 - DNA, 15 bp, Homo sapiens
gagcattattgatac

SEQ ID NO: 921923 - DNA, 15 bp, Homo sapiens
tgagcattattgata

SEQ ID NO: 921924 - DNA, 15 bp, Homo sapiens
atgagcattattgat

SEQ ID NO: 921925 - DNA, 15 bp, Homo sapiens
gatgagcattattga

SEQ ID NO: 921926 - DNA, 15 bp, Homo sapiens
tgatgagcattattg

SEQ ID NO: 921927 - DNA, 15 bp, Homo sapiens
gtgatgagcattatt

SEQ ID NO: 921928 - DNA, 15 bp, Homo sapiens
ggtgatgagcattat

SEQ ID NO: 921929 - DNA, 15 bp, Homo sapiens
aggtgatgagcatta

SEQ ID NO: 921930 - DNA, 15 bp, Homo sapiens
caggtgatgagcatt

SEQ ID NO: 921931 - DNA, 15 bp, Homo sapiens
tcaggtgatgagcat

SEQ ID NO: 921932 - DNA, 15 bp, Homo sapiens
ttcaggtgatgagca

SEQ ID NO: 921933 - DNA, 15 bp, Homo sapiens
attcaggtgatgagc

SEQ ID NO: 921934 - DNA, 15 bp, Homo sapiens
aattcaggtgatgag

SEQ ID NO: 921935 - DNA, 15 bp, Homo sapiens
taattcaggtgatga

SEQ ID NO: 921936 - DNA, 15 bp, Homo sapiens
ttaattcaggtgatg

SEQ ID NO: 921937 - DNA, 15 bp, Homo sapiens
attaattcaggtgat

SEQ ID NO: 921938 - DNA, 15 bp, Homo sapiens
tattaattcaggtga

SEQ ID NO: 921939 - DNA, 15 bp, Homo sapiens
ctattaattcaggtg

SEQ ID NO: 921940 - DNA, 15 bp, Homo sapiens
actattaattcaggt

SEQ ID NO: 921941 - DNA, 15 bp, Homo sapiens
aactattaattcagg

SEQ ID NO: 921942 - DNA, 15 bp, Homo sapiens
taactattaattcag

SEQ ID NO: 921943 - DNA, 15 bp, Homo sapiens
ttaactattaattca

SEQ ID NO: 921944 - DNA, 15 bp, Homo sapiens
gttaactattaattc

SEQ ID NO: 921945 - DNA, 15 bp, Homo sapiens
tgttaactattaatt

SEQ ID NO: 921946 - DNA, 15 bp, Homo sapiens
atgttaactattaat

SEQ ID NO: 921947 - DNA, 15 bp, Homo sapiens
aatgttaactattaa

SEQ ID NO: 921948 - DNA, 15 bp, Homo sapiens
aaatgttaactatta

SEQ ID NO: 921949 - DNA, 15 bp, Homo sapiens
taaatgttaactatt

SEQ ID NO: 921950 - DNA, 15 bp, Homo sapiens
ataaatgttaactat

SEQ ID NO: 921951 - DNA, 15 bp, Homo sapiens
aataaatgttaacta

SEQ ID NO: 921952 - DNA, 15 bp, Homo sapiens
taataaatgttaact

SEQ ID NO: 921953 - DNA, 15 bp, Homo sapiens
ttaataaatgttaac

SEQ ID NO: 921954 - DNA, 15 bp, Homo sapiens
gttaataaatgttaa

SEQ ID NO: 921955 - DNA, 15 bp, Homo sapiens
tgttaataaatgtta

SEQ ID NO: 921956 - DNA, 15 bp, Homo sapiens
atgttaataaatgtt

SEQ ID NO: 921957 - DNA, 15 bp, Homo sapiens
aatgttaataaatgt

SEQ ID NO: 921958 - DNA, 15 bp, Homo sapiens
aaatgttaataaatg

SEQ ID NO: 921959 - DNA, 15 bp, Homo sapiens
aaaatgttaataaat

SEQ ID NO: 921960 - DNA, 15 bp, Homo sapiens
caaaatgttaataaa

SEQ ID NO: 921961 - DNA, 15 bp, Homo sapiens
acaaaatgttaataa

SEQ ID NO: 921962 - DNA, 15 bp, Homo sapiens
gacaaaatgttaata

SEQ ID NO: 921963 - DNA, 15 bp, Homo sapiens
tgacaaaatgttaat

SEQ ID NO: 921964 - DNA, 15 bp, Homo sapiens
atgacaaaatgttaa

SEQ ID NO: 921965 - DNA, 15 bp, Homo sapiens
tatgacaaaatgtta

SEQ ID NO: 921966 - DNA, 15 bp, Homo sapiens
ttatgacaaaatgtt

SEQ ID NO: 921967 - DNA, 15 bp, Homo sapiens
attatgacaaaatgt

SEQ ID NO: 921968 - DNA, 15 bp, Homo sapiens
aattatgacaaaatg

SEQ ID NO: 921969 - DNA, 15 bp, Homo sapiens
caattatgacaaaat

SEQ ID NO: 921970 - DNA, 15 bp, Homo sapiens
gcaattatgacaaaa

SEQ ID NO: 921971 - DNA, 15 bp, Homo sapiens
agcaattatgacaaa

SEQ ID NO: 921972 - DNA, 15 bp, Homo sapiens
aagcaattatgacaa

SEQ ID NO: 921973 - DNA, 15 bp, Homo sapiens
gaagcaattatgaca

SEQ ID NO: 921974 - DNA, 15 bp, Homo sapiens
agaagcaattatgac

SEQ ID NO: 921975 - DNA, 15 bp, Homo sapiens
aagaagcaattatga

SEQ ID NO: 921976 - DNA, 15 bp, Homo sapiens
gaagaagcaattatg

SEQ ID NO: 921977 - DNA, 15 bp, Homo sapiens
agaagaagcaattat

SEQ ID NO: 921978 - DNA, 15 bp, Homo sapiens
cagaagaagcaatta

SEQ ID NO: 921979 - DNA, 15 bp, Homo sapiens
tcagaagaagcaatt

SEQ ID NO: 921980 - DNA, 15 bp, Homo sapiens
atcagaagaagcaat

SEQ ID NO: 921981 - DNA, 15 bp, Homo sapiens
aatcagaagaagcaa

SEQ ID NO: 921982 - DNA, 15 bp, Homo sapiens
aaatcagaagaagca

SEQ ID NO: 921983 - DNA, 15 bp, Homo sapiens
aaaatcagaagaagc

SEQ ID NO: 921984 - DNA, 15 bp, Homo sapiens
aaaaatcagaagaag

SEQ ID NO: 921985 - DNA, 15 bp, Homo sapiens
caaaaatcagaagaa

SEQ ID NO: 921986 - DNA, 15 bp, Homo sapiens
acaaaaatcagaaga

SEQ ID NO: 921987 - DNA, 15 bp, Homo sapiens
cacaaaaatcagaag

SEQ ID NO: 921988 - DNA, 15 bp, Homo sapiens
ccacaaaaatcagaa

SEQ ID NO: 921989 - DNA, 15 bp, Homo sapiens
cccacaaaaatcaga

SEQ ID NO: 921990 - DNA, 15 bp, Homo sapiens
tcccacaaaaatcag

SEQ ID NO: 921991 - DNA, 15 bp, Homo sapiens
atcccacaaaaatca

SEQ ID NO: 921992 - DNA, 15 bp, Homo sapiens
catcccacaaaaatc

SEQ ID NO: 921993 - DNA, 15 bp, Homo sapiens
acatcccacaaaaat

SEQ ID NO: 921994 - DNA, 15 bp, Homo sapiens
aacatcccacaaaaa

SEQ ID NO: 921995 - DNA, 15 bp, Homo sapiens
aaacatcccacaaaa

SEQ ID NO: 921996 - DNA, 15 bp, Homo sapiens
caaacatcccacaaa

SEQ ID NO: 921997 - DNA, 15 bp, Homo sapiens
tcaaacatcccacaa

SEQ ID NO: 921998 - DNA, 15 bp, Homo sapiens
ttcaaacatcccaca

SEQ ID NO: 921999 - DNA, 15 bp, Homo sapiens
attcaaacatcccac

SEQ ID NO: 922000 - DNA, 15 bp, Homo sapiens
aattcaaacatccca

SEQ ID NO: 922001 - DNA, 15 bp, Homo sapiens
caattcaaacatccc

SEQ ID NO: 922002 - DNA, 15 bp, Homo sapiens
gcaattcaaacatcc

SEQ ID NO: 922003 - DNA, 15 bp, Homo sapiens
tgcaattcaaacatc

SEQ ID NO: 922004 - DNA, 15 bp, Homo sapiens
ctgcaattcaaacat

SEQ ID NO: 922005 - DNA, 15 bp, Homo sapiens
tctgcaattcaaaca

SEQ ID NO: 922006 - DNA, 15 bp, Homo sapiens
gtctgcaattcaaac

SEQ ID NO: 922007 - DNA, 15 bp, Homo sapiens
tgtctgcaattcaaa

SEQ ID NO: 922008 - DNA, 15 bp, Homo sapiens
atgtctgcaattcaa

SEQ ID NO: 922009 - DNA, 15 bp, Homo sapiens
aatgtctgcaattca

SEQ ID NO: 922010 - DNA, 15 bp, Homo sapiens
gaatgtctgcaattc

SEQ ID NO: 922011 - DNA, 15 bp, Homo sapiens
ggaatgtctgcaatt

SEQ ID NO: 922012 - DNA, 15 bp, Homo sapiens
aggaatgtctgcaat

SEQ ID NO: 922013 - DNA, 15 bp, Homo sapiens
gaggaatgtctgcaa

SEQ ID NO: 922014 - DNA, 15 bp, Homo sapiens
ggaggaatgtctgca

SEQ ID NO: 922015 - DNA, 15 bp, Homo sapiens
gggaggaatgtctgc

SEQ ID NO: 922016 - DNA, 15 bp, Homo sapiens
ggggaggaatgtctg

SEQ ID NO: 922017 - DNA, 15 bp, Homo sapiens
aggggaggaatgtct

SEQ ID NO: 922018 - DNA, 15 bp, Homo sapiens
taggggaggaatgtc

SEQ ID NO: 922019 - DNA, 15 bp, Homo sapiens
ttaggggaggaatgt

SEQ ID NO: 922020 - DNA, 15 bp, Homo sapiens
tttaggggaggaatg

SEQ ID NO: 922021 - DNA, 15 bp, Homo sapiens
atttaggggaggaat

SEQ ID NO: 922022 - DNA, 15 bp, Homo sapiens
tatttaggggaggaa

SEQ ID NO: 922023 - DNA, 15 bp, Homo sapiens
atatttaggggagga

SEQ ID NO: 922024 - DNA, 15 bp, Homo sapiens
aatatttaggggagg

SEQ ID NO: 922025 - DNA, 15 bp, Homo sapiens
aaatatttaggggag

SEQ ID NO: 922026 - DNA, 15 bp, Homo sapiens
taaatatttagggga

SEQ ID NO: 922027 - DNA, 15 bp, Homo sapiens
ttaaatatttagggg

SEQ ID NO: 922028 - DNA, 15 bp, Homo sapiens
attaaatatttaggg

SEQ ID NO: 922029 - DNA, 15 bp, Homo sapiens
cattaaatatttagg

SEQ ID NO: 922030 - DNA, 15 bp, Homo sapiens
acattaaatatttag

SEQ ID NO: 922031 - DNA, 15 bp, Homo sapiens
tacattaaatattta

SEQ ID NO: 922032 - DNA, 15 bp, Homo sapiens
gtacattaaatattt

SEQ ID NO: 922033 - DNA, 15 bp, Homo sapiens
ggtacattaaatatt

SEQ ID NO: 922034 - DNA, 15 bp, Homo sapiens
tgaagtattcttgcc

SEQ ID NO: 922035 - DNA, 15 bp, Homo sapiens
atgaagtattcttgc

SEQ ID NO: 922036 - DNA, 15 bp, Homo sapiens
tatgaagtattcttg

SEQ ID NO: 922037 - DNA, 15 bp, Homo sapiens
ttatgaagtattctt

SEQ ID NO: 922038 - DNA, 15 bp, Homo sapiens
cttatgaagtattct

SEQ ID NO: 922039 - DNA, 15 bp, Homo sapiens
acttatgaagtattc

SEQ ID NO: 922040 - DNA, 15 bp, Homo sapiens
tacttatgaagtatt

SEQ ID NO: 922041 - DNA, 15 bp, Homo sapiens
ctacttatgaagtat

SEQ ID NO: 922042 - DNA, 15 bp, Homo sapiens
actacttatgaagta

SEQ ID NO: 922043 - DNA, 15 bp, Homo sapiens
cactacttatgaagt

SEQ ID NO: 922044 - DNA, 15 bp, Homo sapiens
acactacttatgaag

SEQ ID NO: 922045 - DNA, 15 bp, Homo sapiens
aacactacttatgaa

SEQ ID NO: 922046 - DNA, 15 bp, Homo sapiens
gaacactacttatga

SEQ ID NO: 922047 - DNA, 15 bp, Homo sapiens
agaacactacttatg

SEQ ID NO: 922048 - DNA, 15 bp, Homo sapiens
tagaacactacttat

SEQ ID NO: 922049 - DNA, 15 bp, Homo sapiens
atagaacactactta

SEQ ID NO: 922050 - DNA, 15 bp, Homo sapiens
tatagaacactactt

SEQ ID NO: 922051 - DNA, 15 bp, Homo sapiens
gtatagaacactact

SEQ ID NO: 922052 - DNA, 15 bp, Homo sapiens
agtatagaacactac

SEQ ID NO: 922053 - DNA, 15 bp, Homo sapiens
aagtatagaacacta

SEQ ID NO: 922054 - DNA, 15 bp, Homo sapiens
aaagtatagaacact

SEQ ID NO: 922055 - DNA, 15 bp, Homo sapiens
taaagtatagaacac

SEQ ID NO: 922056 - DNA, 15 bp, Homo sapiens
ataaagtatagaaca

SEQ ID NO: 922057 - DNA, 15 bp, Homo sapiens
tataaagtatagaac

SEQ ID NO: 922058 - DNA, 15 bp, Homo sapiens
atataaagtatagaa

SEQ ID NO: 922059 - DNA, 15 bp, Homo sapiens
aatataaagtataga

SEQ ID NO: 922060 - DNA, 15 bp, Homo sapiens
caatataaagtatag

SEQ ID NO: 922061 - DNA, 15 bp, Homo sapiens
gcaatataaagtata

SEQ ID NO: 922062 - DNA, 15 bp, Homo sapiens
tgcaatataaagtat

SEQ ID NO: 922063 - DNA, 15 bp, Homo sapiens
atgcaatataaagta

SEQ ID NO: 922064 - DNA, 15 bp, Homo sapiens
gatgcaatataaagt

SEQ ID NO: 922065 - DNA, 15 bp, Homo sapiens
tgatgcaatataaag

SEQ ID NO: 922066 - DNA, 15 bp, Homo sapiens
gtgatgcaatataaa

SEQ ID NO: 922067 - DNA, 15 bp, Homo sapiens
agtgatgcaatataa

SEQ ID NO: 922068 - DNA, 15 bp, Homo sapiens
aagtgatgcaatata

SEQ ID NO: 922069 - DNA, 15 bp, Homo sapiens
gaagtgatgcaatat

SEQ ID NO: 922070 - DNA, 15 bp, Homo sapiens
tgaagtgatgcaata

SEQ ID NO: 922071 - DNA, 15 bp, Homo sapiens
ttgaagtgatgcaat

SEQ ID NO: 922072 - DNA, 15 bp, Homo sapiens
cttgaagtgatgcaa

SEQ ID NO: 922073 - DNA, 15 bp, Homo sapiens
tcttgaagtgatgca

SEQ ID NO: 922074 - DNA, 15 bp, Homo sapiens
ctcttgaagtgatgc

SEQ ID NO: 922075 - DNA, 15 bp, Homo sapiens
actcttgaagtgatg

SEQ ID NO: 922076 - DNA, 15 bp, Homo sapiens
tactcttgaagtgat

SEQ ID NO: 922077 - DNA, 15 bp, Homo sapiens
atactcttgaagtga

SEQ ID NO: 922078 - DNA, 15 bp, Homo sapiens
gatactcttgaagtg

SEQ ID NO: 922079 - DNA, 15 bp, Homo sapiens
agatactcttgaagt

SEQ ID NO: 922080 - DNA, 15 bp, Homo sapiens
cagatactcttgaag

SEQ ID NO: 922081 - DNA, 15 bp, Homo sapiens
ccagatactcttgaa

SEQ ID NO: 922082 - DNA, 15 bp, Homo sapiens
accagatactcttga

SEQ ID NO: 922083 - DNA, 15 bp, Homo sapiens
aaccagatactcttg

SEQ ID NO: 922084 - DNA, 15 bp, Homo sapiens
caaccagatactctt

SEQ ID NO: 922085 - DNA, 15 bp, Homo sapiens
acaaccagatactct

SEQ ID NO: 922086 - DNA, 15 bp, Homo sapiens
aacaaccagatactc

SEQ ID NO: 922087 - DNA, 15 bp, Homo sapiens
gaacaaccagatact

SEQ ID NO: 922088 - DNA, 15 bp, Homo sapiens
ggaacaaccagatac

SEQ ID NO: 922089 - DNA, 15 bp, Homo sapiens
tggaacaaccagata

SEQ ID NO: 922090 - DNA, 15 bp, Homo sapiens
atggaacaaccagat

SEQ ID NO: 922091 - DNA, 15 bp, Homo sapiens
catggaacaaccaga

SEQ ID NO: 922092 - DNA, 15 bp, Homo sapiens
acatggaacaaccag

SEQ ID NO: 922093 - DNA, 15 bp, Homo sapiens
aacatggaacaacca

SEQ ID NO: 922094 - DNA, 15 bp, Homo sapiens
aaacatggaacaacc

SEQ ID NO: 922095 - DNA, 15 bp, Homo sapiens
aaaacatggaacaac

SEQ ID NO: 922096 - DNA, 15 bp, Homo sapiens
caaaacatggaacaa

SEQ ID NO: 922097 - DNA, 15 bp, Homo sapiens
acaaaacatggaaca

SEQ ID NO: 922098 - DNA, 15 bp, Homo sapiens
tacaaaacatggaac

SEQ ID NO: 922099 - DNA, 15 bp, Homo sapiens
ttacaaaacatggaa

SEQ ID NO: 922100 - DNA, 15 bp, Homo sapiens
attacaaaacatgga

SEQ ID NO: 922101 - DNA, 15 bp, Homo sapiens
aattacaaaacatgg

SEQ ID NO: 922102 - DNA, 15 bp, Homo sapiens
caattacaaaacatg

SEQ ID NO: 922103 - DNA, 15 bp, Homo sapiens
tcaattacaaaacat

SEQ ID NO: 922104 - DNA, 15 bp, Homo sapiens
atcaattacaaaaca

SEQ ID NO: 922105 - DNA, 15 bp, Homo sapiens
aatcaattacaaaac

SEQ ID NO: 922106 - DNA, 15 bp, Homo sapiens
taatcaattacaaaa

SEQ ID NO: 922107 - DNA, 15 bp, Homo sapiens
gtaatcaattacaaa

SEQ ID NO: 922108 - DNA, 15 bp, Homo sapiens
agtaatcaattacaa

SEQ ID NO: 922109 - DNA, 15 bp, Homo sapiens
gagtaatcaattaca

SEQ ID NO: 922110 - DNA, 15 bp, Homo sapiens
agagtaatcaattac

SEQ ID NO: 922111 - DNA, 15 bp, Homo sapiens
cagagtaatcaatta

SEQ ID NO: 922112 - DNA, 15 bp, Homo sapiens
acagagtaatcaatt

SEQ ID NO: 922113 - DNA, 15 bp, Homo sapiens
aacagagtaatcaat

SEQ ID NO: 922114 - DNA, 15 bp, Homo sapiens
taacagagtaatcaa

SEQ ID NO: 922115 - DNA, 15 bp, Homo sapiens
ttaacagagtaatca

SEQ ID NO: 922116 - DNA, 15 bp, Homo sapiens
cttaacagagtaatc

SEQ ID NO: 922117 - DNA, 15 bp, Homo sapiens
ccttaacagagtaat

SEQ ID NO: 922118 - DNA, 15 bp, Homo sapiens
tccttaacagagtaa

SEQ ID NO: 922119 - DNA, 15 bp, Homo sapiens
ttccttaacagagta

SEQ ID NO: 922120 - DNA, 15 bp, Homo sapiens
tttccttaacagagt

SEQ ID NO: 922121 - DNA, 15 bp, Homo sapiens
ttttccttaacagag

SEQ ID NO: 922122 - DNA, 15 bp, Homo sapiens
cttttccttaacaga

SEQ ID NO: 922123 - DNA, 15 bp, Homo sapiens
tcttttccttaacag

SEQ ID NO: 922124 - DNA, 15 bp, Homo sapiens
gtcttttccttaaca

SEQ ID NO: 922125 - DNA, 15 bp, Homo sapiens
tgtcttttccttaac

SEQ ID NO: 922126 - DNA, 15 bp, Homo sapiens
ttgtcttttccttaa

SEQ ID NO: 922127 - DNA, 15 bp, Homo sapiens
cttgtcttttcctta

SEQ ID NO: 922128 - DNA, 15 bp, Homo sapiens
gcttgtcttttcctt

SEQ ID NO: 922129 - DNA, 15 bp, Homo sapiens
tgcttgtcttttcct

SEQ ID NO: 922130 - DNA, 15 bp, Homo sapiens
ctgcttgtcttttcc

SEQ ID NO: 922131 - DNA, 15 bp, Homo sapiens
tctgcttgtcttttc

SEQ ID NO: 922132 - DNA, 15 bp, Homo sapiens
gtctgcttgtctttt

SEQ ID NO: 922133 - DNA, 15 bp, Homo sapiens
ggtctgcttgtcttt

SEQ ID NO: 922134 - DNA, 15 bp, Homo sapiens
tggtctgcttgtctt

SEQ ID NO: 922135 - DNA, 15 bp, Homo sapiens
ttggtctgcttgtct

SEQ ID NO: 922136 - DNA, 15 bp, Homo sapiens
cttggtctgcttgtc

SEQ ID NO: 922137 - DNA, 15 bp, Homo sapiens
acttggtctgcttgt

SEQ ID NO: 922138 - DNA, 15 bp, Homo sapiens
tacttggtctgcttg

SEQ ID NO: 922139 - DNA, 15 bp, Homo sapiens
atacttggtctgctt

SEQ ID NO: 922140 - DNA, 15 bp, Homo sapiens
catacttggtctgct

SEQ ID NO: 922141 - DNA, 15 bp, Homo sapiens
ccatacttggtctgc

SEQ ID NO: 922142 - DNA, 15 bp, Homo sapiens
accatacttggtctg

SEQ ID NO: 922143 - DNA, 15 bp, Homo sapiens
caccatacttggtct

SEQ ID NO: 922144 - DNA, 15 bp, Homo sapiens
ccaccatacttggtc

SEQ ID NO: 922145 - DNA, 15 bp, Homo sapiens
gccaccatacttggt

SEQ ID NO: 922146 - DNA, 15 bp, Homo sapiens
agccaccatacttgg

SEQ ID NO: 922147 - DNA, 15 bp, Homo sapiens
gagccaccatacttg

SEQ ID NO: 922148 - DNA, 15 bp, Homo sapiens
tgagccaccatactt

SEQ ID NO: 922149 - DNA, 15 bp, Homo sapiens
atgagccaccatact

SEQ ID NO: 922150 - DNA, 15 bp, Homo sapiens
catgagccaccatac

SEQ ID NO: 922151 - DNA, 15 bp, Homo sapiens
gcatgagccaccata

SEQ ID NO: 922152 - DNA, 15 bp, Homo sapiens
ggcatgagccaccat

SEQ ID NO: 922153 - DNA, 15 bp, Homo sapiens
aggcatgagccacca

SEQ ID NO: 922154 - DNA, 15 bp, Homo sapiens
taggcatgagccacc

SEQ ID NO: 922155 - DNA, 15 bp, Homo sapiens
ataggcatgagccac

SEQ ID NO: 922156 - DNA, 15 bp, Homo sapiens
tataggcatgagcca

SEQ ID NO: 922157 - DNA, 15 bp, Homo sapiens
ttataggcatgagcc

SEQ ID NO: 922158 - DNA, 15 bp, Homo sapiens
attataggcatgagc

SEQ ID NO: 922159 - DNA, 15 bp, Homo sapiens
aattataggcatgag

SEQ ID NO: 922160 - DNA, 15 bp, Homo sapiens
gaattataggcatga

SEQ ID NO: 922161 - DNA, 15 bp, Homo sapiens
ggaattataggcatg

SEQ ID NO: 922162 - DNA, 15 bp, Homo sapiens
tggaattataggcat

SEQ ID NO: 922163 - DNA, 15 bp, Homo sapiens
ttggaattataggca

SEQ ID NO: 922164 - DNA, 15 bp, Homo sapiens
gttggaattataggc

SEQ ID NO: 922165 - DNA, 15 bp, Homo sapiens
tgttggaattatagg

SEQ ID NO: 922166 - DNA, 15 bp, Homo sapiens
atgttggaattatag

SEQ ID NO: 922167 - DNA, 15 bp, Homo sapiens
aatgttggaattata

SEQ ID NO: 922168 - DNA, 15 bp, Homo sapiens
aaatgttggaattat

SEQ ID NO: 922169 - DNA, 15 bp, Homo sapiens
aaaatgttggaatta

SEQ ID NO: 922170 - DNA, 15 bp, Homo sapiens
caaaatgttggaatt

SEQ ID NO: 922171 - DNA, 15 bp, Homo sapiens
ccaaaatgttggaat

SEQ ID NO: 922172 - DNA, 15 bp, Homo sapiens
tccaaaatgttggaa

SEQ ID NO: 922173 - DNA, 15 bp, Homo sapiens
ttccaaaatgttgga

SEQ ID NO: 922174 - DNA, 15 bp, Homo sapiens
cttccaaaatgttgg

SEQ ID NO: 922175 - DNA, 15 bp, Homo sapiens
ccttccaaaatgttg

SEQ ID NO: 922176 - DNA, 15 bp, Homo sapiens
gccttccaaaatgtt

SEQ ID NO: 922177 - DNA, 15 bp, Homo sapiens
ggccttccaaaatgt

SEQ ID NO: 922178 - DNA, 15 bp, Homo sapiens
gggccttccaaaatg

SEQ ID NO: 922179 - DNA, 15 bp, Homo sapiens
tgggccttccaaaat

SEQ ID NO: 922180 - DNA, 15 bp, Homo sapiens
ctgggccttccaaaa

SEQ ID NO: 922181 - DNA, 15 bp, Homo sapiens
cctgggccttccaaa

SEQ ID NO: 922182 - DNA, 15 bp, Homo sapiens
gcctgggccttccaa

SEQ ID NO: 922183 - DNA, 15 bp, Homo sapiens
tgcctgggccttcca

SEQ ID NO: 922184 - DNA, 15 bp, Homo sapiens
ctgcctgggccttcc

SEQ ID NO: 922185 - DNA, 15 bp, Homo sapiens
cctgcctgggccttc

SEQ ID NO: 922186 - DNA, 15 bp, Homo sapiens
tcctgcctgggcctt

SEQ ID NO: 922187 - DNA, 15 bp, Homo sapiens
ttcctgcctgggcct

SEQ ID NO: 922188 - DNA, 15 bp, Homo sapiens
tttcctgcctgggcc

SEQ ID NO: 922189 - DNA, 15 bp, Homo sapiens
ttttcctgcctgggc

SEQ ID NO: 922190 - DNA, 15 bp, Homo sapiens
attttcctgcctggg

SEQ ID NO: 922191 - DNA, 15 bp, Homo sapiens
aattttcctgcctgg

SEQ ID NO: 922192 - DNA, 15 bp, Homo sapiens
aaattttcctgcctg

SEQ ID NO: 922193 - DNA, 15 bp, Homo sapiens
gaaattttcctgcct

SEQ ID NO: 922194 - DNA, 15 bp, Homo sapiens
ggaaattttcctgcc

SEQ ID NO: 922195 - DNA, 15 bp, Homo sapiens
aggaaattttcctgc

SEQ ID NO: 922196 - DNA, 15 bp, Homo sapiens
caggaaattttcctg

SEQ ID NO: 922197 - DNA, 15 bp, Homo sapiens
tcaggaaattttcct

SEQ ID NO: 922198 - DNA, 15 bp, Homo sapiens
ctcaggaaattttcc

SEQ ID NO: 922199 - DNA, 15 bp, Homo sapiens
gctcaggaaattttc

SEQ ID NO: 922200 - DNA, 15 bp, Homo sapiens
ggctcaggaaatttt

SEQ ID NO: 922201 - DNA, 15 bp, Homo sapiens
gggctcaggaaattt

SEQ ID NO: 922202 - DNA, 15 bp, Homo sapiens
tgggctcaggaaatt

SEQ ID NO: 922203 - DNA, 15 bp, Homo sapiens
ctgggctcaggaaat

SEQ ID NO: 922204 - DNA, 15 bp, Homo sapiens
tctgggctcaggaaa

SEQ ID NO: 922205 - DNA, 15 bp, Homo sapiens
gtctgggctcaggaa

SEQ ID NO: 922206 - DNA, 15 bp, Homo sapiens
ggtctgggctcagga

SEQ ID NO: 922207 - DNA, 15 bp, Homo sapiens
tggtctgggctcagg

SEQ ID NO: 922208 - DNA, 15 bp, Homo sapiens
ctggtctgggctcag

SEQ ID NO: 922209 - DNA, 15 bp, Homo sapiens
gctggtctgggctca

SEQ ID NO: 922210 - DNA, 15 bp, Homo sapiens
ggctggtctgggctc

SEQ ID NO: 922211 - DNA, 15 bp, Homo sapiens
aggctggtctgggct

SEQ ID NO: 922212 - DNA, 15 bp, Homo sapiens
taggctggtctgggc

SEQ ID NO: 922213 - DNA, 15 bp, Homo sapiens
ctaggctggtctggg

SEQ ID NO: 922214 - DNA, 15 bp, Homo sapiens
cctaggctggtctgg

SEQ ID NO: 922215 - DNA, 15 bp, Homo sapiens
gcctaggctggtctg

SEQ ID NO: 922216 - DNA, 15 bp, Homo sapiens
tgcctaggctggtct

SEQ ID NO: 922217 - DNA, 15 bp, Homo sapiens
ttgcctaggctggtc

SEQ ID NO: 922218 - DNA, 15 bp, Homo sapiens
attgcctaggctggt

SEQ ID NO: 922219 - DNA, 15 bp, Homo sapiens
tattgcctaggctgg

SEQ ID NO: 922220 - DNA, 15 bp, Homo sapiens
atattgcctaggctg

SEQ ID NO: 922221 - DNA, 15 bp, Homo sapiens
tatattgcctaggct

SEQ ID NO: 922222 - DNA, 15 bp, Homo sapiens
ctatattgcctaggc

SEQ ID NO: 922223 - DNA, 15 bp, Homo sapiens
actatattgcctagg

SEQ ID NO: 922224 - DNA, 15 bp, Homo sapiens
cactatattgcctag

SEQ ID NO: 922225 - DNA, 15 bp, Homo sapiens
tcactatattgccta

SEQ ID NO: 922226 - DNA, 15 bp, Homo sapiens
ctcactatattgcct

SEQ ID NO: 922227 - DNA, 15 bp, Homo sapiens
tctcactatattgcc

SEQ ID NO: 922228 - DNA, 15 bp, Homo sapiens
gtctcactatattgc

SEQ ID NO: 922229 - DNA, 15 bp, Homo sapiens
agtctcactatattg

SEQ ID NO: 922230 - DNA, 15 bp, Homo sapiens
gagtctcactatatt

SEQ ID NO: 922231 - DNA, 15 bp, Homo sapiens
ggagtctcactatat

SEQ ID NO: 922232 - DNA, 15 bp, Homo sapiens
cggagtctcactata

SEQ ID NO: 922233 - DNA, 15 bp, Homo sapiens
acggagtctcactat

SEQ ID NO: 922234 - DNA, 15 bp, Homo sapiens
gacggagtctcacta

SEQ ID NO: 922235 - DNA, 15 bp, Homo sapiens
agacggagtctcact

SEQ ID NO: 922236 - DNA, 15 bp, Homo sapiens
gagacggagtctcac

SEQ ID NO: 922237 - DNA, 15 bp, Homo sapiens
agagacggagtctca

SEQ ID NO: 922238 - DNA, 15 bp, Homo sapiens
tagagacggagtctc

SEQ ID NO: 922239 - DNA, 15 bp, Homo sapiens
gtagagacggagtct

SEQ ID NO: 922240 - DNA, 15 bp, Homo sapiens
tgtagagacggagtc

SEQ ID NO: 922241 - DNA, 15 bp, Homo sapiens
ttgtagagacggagt

SEQ ID NO: 922242 - DNA, 15 bp, Homo sapiens
tttgtagagacggag

SEQ ID NO: 922243 - DNA, 15 bp, Homo sapiens
ttttgtagagacgga

SEQ ID NO: 922244 - DNA, 15 bp, Homo sapiens
tttttgtagagacgg

SEQ ID NO: 922245 - DNA, 15 bp, Homo sapiens
ttttttgtagagacg

SEQ ID NO: 922246 - DNA, 15 bp, Homo sapiens
attttttgtagagac

SEQ ID NO: 922247 - DNA, 15 bp, Homo sapiens
cattttttgtagaga

SEQ ID NO: 922248 - DNA, 15 bp, Homo sapiens
acattttttgtagag

SEQ ID NO: 922249 - DNA, 15 bp, Homo sapiens
aacattttttgtaga

SEQ ID NO: 922250 - DNA, 15 bp, Homo sapiens
aaacattttttgtag

SEQ ID NO: 922251 - DNA, 15 bp, Homo sapiens
aaaacattttttgta

SEQ ID NO: 922252 - DNA, 15 bp, Homo sapiens
aaaaacattttttgt

SEQ ID NO: 922253 - DNA, 15 bp, Homo sapiens
aaaaaacattttttg

SEQ ID NO: 922254 - DNA, 15 bp, Homo sapiens
aaaaaaacatttttt

SEQ ID NO: 922255 - DNA, 15 bp, Homo sapiens
aaaaaaaacattttt

SEQ ID NO: 922256 - DNA, 15 bp, Homo sapiens
aaaaaaaaacatttt

SEQ ID NO: 922257 - DNA, 15 bp, Homo sapiens
aaaaaaaaaacattt

SEQ ID NO: 922258 - DNA, 15 bp, Homo sapiens
aaaaaaaaaaacatt

SEQ ID NO: 922259 - DNA, 15 bp, Homo sapiens
caaaaaaaaaaacat

SEQ ID NO: 922260 - DNA, 15 bp, Homo sapiens
acaaaaaaaaaaaca

SEQ ID NO: 922261 - DNA, 15 bp, Homo sapiens
aacaaaaaaaaaaac

SEQ ID NO: 922262 - DNA, 15 bp, Homo sapiens
aaacaaaaaaaaaaa

SEQ ID NO: 922263 - DNA, 15 bp, Homo sapiens
caaacaaaaaaaaaa

SEQ ID NO: 922264 - DNA, 15 bp, Homo sapiens
acaaacaaaaaaaaa

SEQ ID NO: 922265 - DNA, 15 bp, Homo sapiens
aacaaacaaaaaaaa

SEQ ID NO: 922266 - DNA, 15 bp, Homo sapiens
aaacaaacaaaaaaa

SEQ ID NO: 922267 - DNA, 15 bp, Homo sapiens
caaacaaacaaaaaa

SEQ ID NO: 922268 - DNA, 15 bp, Homo sapiens
acaaacaaacaaaaa

SEQ ID NO: 922269 - DNA, 15 bp, Homo sapiens
aacaaacaaacaaaa

SEQ ID NO: 922270 - DNA, 15 bp, Homo sapiens
aaacaaacaaacaaa

SEQ ID NO: 922271 - DNA, 15 bp, Homo sapiens
aaaacaaacaaacaa

SEQ ID NO: 922272 - DNA, 15 bp, Homo sapiens
aaaaacaaacaaaca

SEQ ID NO: 922273 - DNA, 15 bp, Homo sapiens
taaaaacaaacaaac

SEQ ID NO: 922274 - DNA, 15 bp, Homo sapiens
ttaaaaacaaacaaa

SEQ ID NO: 922275 - DNA, 15 bp, Homo sapiens
attaaaaacaaacaa

SEQ ID NO: 922276 - DNA, 15 bp, Homo sapiens
aattaaaaacaaaca

SEQ ID NO: 922277 - DNA, 15 bp, Homo sapiens
taattaaaaacaaac

SEQ ID NO: 922278 - DNA, 15 bp, Homo sapiens
ctaattaaaaacaaa

SEQ ID NO: 922279 - DNA, 15 bp, Homo sapiens
gctaattaaaaacaa

SEQ ID NO: 922280 - DNA, 15 bp, Homo sapiens
agctaattaaaaaca

SEQ ID NO: 922281 - DNA, 15 bp, Homo sapiens
aagctaattaaaaac

SEQ ID NO: 922282 - DNA, 15 bp, Homo sapiens
caagctaattaaaaa

SEQ ID NO: 922283 - DNA, 15 bp, Homo sapiens
ccaagctaattaaaa

SEQ ID NO: 922284 - DNA, 15 bp, Homo sapiens
accaagctaattaaa

SEQ ID NO: 922285 - DNA, 15 bp, Homo sapiens
caccaagctaattaa

SEQ ID NO: 922286 - DNA, 15 bp, Homo sapiens
acaccaagctaatta

SEQ ID NO: 922287 - DNA, 15 bp, Homo sapiens
tacaccaagctaatt

SEQ ID NO: 922288 - DNA, 15 bp, Homo sapiens
ctacaccaagctaat

SEQ ID NO: 922289 - DNA, 15 bp, Homo sapiens
actacaccaagctaa

SEQ ID NO: 922290 - DNA, 15 bp, Homo sapiens
cactacaccaagcta

SEQ ID NO: 922291 - DNA, 15 bp, Homo sapiens
ccactacaccaagct

SEQ ID NO: 922292 - DNA, 15 bp, Homo sapiens
gccactacaccaagc

SEQ ID NO: 922293 - DNA, 15 bp, Homo sapiens
tgccactacaccaag

SEQ ID NO: 922294 - DNA, 15 bp, Homo sapiens
gtgccactacaccaa

SEQ ID NO: 922295 - DNA, 15 bp, Homo sapiens
tgtgccactacacca

SEQ ID NO: 922296 - DNA, 15 bp, Homo sapiens
atgtgccactacacc

SEQ ID NO: 922297 - DNA, 15 bp, Homo sapiens
catgtgccactacac

SEQ ID NO: 922298 - DNA, 15 bp, Homo sapiens
gcatgtgccactaca

SEQ ID NO: 922299 - DNA, 15 bp, Homo sapiens
agcatgtgccactac

SEQ ID NO: 922300 - DNA, 15 bp, Homo sapiens
aagcatgtgccacta

SEQ ID NO: 922301 - DNA, 15 bp, Homo sapiens
caagcatgtgccact

SEQ ID NO: 922302 - DNA, 15 bp, Homo sapiens
acaagcatgtgccac

SEQ ID NO: 922303 - DNA, 15 bp, Homo sapiens
tacaagcatgtgcca

SEQ ID NO: 922304 - DNA, 15 bp, Homo sapiens
ttacaagcatgtgcc

SEQ ID NO: 922305 - DNA, 15 bp, Homo sapiens
attacaagcatgtgc

SEQ ID NO: 922306 - DNA, 15 bp, Homo sapiens
gattacaagcatgtg

SEQ ID NO: 922307 - DNA, 15 bp, Homo sapiens
ggattacaagcatgt

SEQ ID NO: 922308 - DNA, 15 bp, Homo sapiens
gggattacaagcatg

SEQ ID NO: 922309 - DNA, 15 bp, Homo sapiens
tgggattacaagcat

SEQ ID NO: 922310 - DNA, 15 bp, Homo sapiens
ctgggattacaagca

SEQ ID NO: 922311 - DNA, 15 bp, Homo sapiens
gctgggattacaagc

SEQ ID NO: 922312 - DNA, 15 bp, Homo sapiens
agctgggattacaag

SEQ ID NO: 922313 - DNA, 15 bp, Homo sapiens
tagctgggattacaa

SEQ ID NO: 922314 - DNA, 15 bp, Homo sapiens
gtagctgggattaca

SEQ ID NO: 922315 - DNA, 15 bp, Homo sapiens
ggtagctgggattac

SEQ ID NO: 922316 - DNA, 15 bp, Homo sapiens
aggtagctgggatta

SEQ ID NO: 922317 - DNA, 15 bp, Homo sapiens
caggtagctgggatt

SEQ ID NO: 922318 - DNA, 15 bp, Homo sapiens
ccaggtagctgggat

SEQ ID NO: 922319 - DNA, 15 bp, Homo sapiens
cccaggtagctggga

SEQ ID NO: 922320 - DNA, 15 bp, Homo sapiens
tcccaggtagctggg

SEQ ID NO: 922321 - DNA, 15 bp, Homo sapiens
gtcccaggtagctgg

SEQ ID NO: 922322 - DNA, 15 bp, Homo sapiens
tgtcccaggtagctg

SEQ ID NO: 922323 - DNA, 15 bp, Homo sapiens
atgtcccaggtagct

SEQ ID NO: 922324 - DNA, 15 bp, Homo sapiens
aatgtcccaggtagc

SEQ ID NO: 922325 - DNA, 15 bp, Homo sapiens
caatgtcccaggtag

SEQ ID NO: 922326 - DNA, 15 bp, Homo sapiens
tcaatgtcccaggta

SEQ ID NO: 922327 - DNA, 15 bp, Homo sapiens
ctcaatgtcccaggt

SEQ ID NO: 922328 - DNA, 15 bp, Homo sapiens
cctcaatgtcccagg

SEQ ID NO: 922329 - DNA, 15 bp, Homo sapiens
acctcaatgtcccag

SEQ ID NO: 922330 - DNA, 15 bp, Homo sapiens
cacctcaatgtccca

SEQ ID NO: 922331 - DNA, 15 bp, Homo sapiens
ccacctcaatgtccc

SEQ ID NO: 922332 - DNA, 15 bp, Homo sapiens
cccacctcaatgtcc

SEQ ID NO: 922333 - DNA, 15 bp, Homo sapiens
tcccacctcaatgtc

SEQ ID NO: 922334 - DNA, 15 bp, Homo sapiens
ctcccacctcaatgt

SEQ ID NO: 922335 - DNA, 15 bp, Homo sapiens
cctcccacctcaatg

SEQ ID NO: 922336 - DNA, 15 bp, Homo sapiens
tcctcccacctcaat

SEQ ID NO: 922337 - DNA, 15 bp, Homo sapiens
atcctcccacctcaa

SEQ ID NO: 922338 - DNA, 15 bp, Homo sapiens
gatcctcccacctca

SEQ ID NO: 922339 - DNA, 15 bp, Homo sapiens
cgatcctcccacctc

SEQ ID NO: 922340 - DNA, 15 bp, Homo sapiens
gcgatcctcccacct

SEQ ID NO: 922341 - DNA, 15 bp, Homo sapiens
agcgatcctcccacc

SEQ ID NO: 922342 - DNA, 15 bp, Homo sapiens
aagcgatcctcccac

SEQ ID NO: 922343 - DNA, 15 bp, Homo sapiens
caagcgatcctccca

SEQ ID NO: 922344 - DNA, 15 bp, Homo sapiens
tcaagcgatcctccc

SEQ ID NO: 922345 - DNA, 15 bp, Homo sapiens
ctcaagcgatcctcc

SEQ ID NO: 922346 - DNA, 15 bp, Homo sapiens
gctcaagcgatcctc

SEQ ID NO: 922347 - DNA, 15 bp, Homo sapiens
ggctcaagcgatcct

SEQ ID NO: 922348 - DNA, 15 bp, Homo sapiens
gggctcaagcgatcc

SEQ ID NO: 922349 - DNA, 15 bp, Homo sapiens
tgggctcaagcgatc

SEQ ID NO: 922350 - DNA, 15 bp, Homo sapiens
ctgggctcaagcgat

SEQ ID NO: 922351 - DNA, 15 bp, Homo sapiens
cctgggctcaagcga

SEQ ID NO: 922352 - DNA, 15 bp, Homo sapiens
tcctgggctcaagcg

SEQ ID NO: 922353 - DNA, 15 bp, Homo sapiens
ttcctgggctcaagc

SEQ ID NO: 922354 - DNA, 15 bp, Homo sapiens
cttcctgggctcaag

SEQ ID NO: 922355 - DNA, 15 bp, Homo sapiens
acttcctgggctcaa

SEQ ID NO: 922356 - DNA, 15 bp, Homo sapiens
aacttcctgggctca

SEQ ID NO: 922357 - DNA, 15 bp, Homo sapiens
caacttcctgggctc

SEQ ID NO: 922358 - DNA, 15 bp, Homo sapiens
ccaacttcctgggct

SEQ ID NO: 922359 - DNA, 15 bp, Homo sapiens
cccaacttcctgggc

SEQ ID NO: 922360 - DNA, 15 bp, Homo sapiens
ccccaacttcctggg

SEQ ID NO: 922361 - DNA, 15 bp, Homo sapiens
cccccaacttcctgg

SEQ ID NO: 922362 - DNA, 15 bp, Homo sapiens
gcccccaacttcctg

SEQ ID NO: 922363 - DNA, 15 bp, Homo sapiens
agcccccaacttcct

SEQ ID NO: 922364 - DNA, 15 bp, Homo sapiens
cagcccccaacttcc

SEQ ID NO: 922365 - DNA, 15 bp, Homo sapiens
gcagcccccaacttc

SEQ ID NO: 922366 - DNA, 15 bp, Homo sapiens
tgcagcccccaactt

SEQ ID NO: 922367 - DNA, 15 bp, Homo sapiens
ctgcagcccccaact

SEQ ID NO: 922368 - DNA, 15 bp, Homo sapiens
actgcagcccccaac

SEQ ID NO: 922369 - DNA, 15 bp, Homo sapiens
cactgcagcccccaa

SEQ ID NO: 922370 - DNA, 15 bp, Homo sapiens
tcactgcagccccca

SEQ ID NO: 922371 - DNA, 15 bp, Homo sapiens
ctcactgcagccccc

SEQ ID NO: 922372 - DNA, 15 bp, Homo sapiens
gctcactgcagcccc

SEQ ID NO: 922373 - DNA, 15 bp, Homo sapiens
agctcactgcagccc

SEQ ID NO: 922374 - DNA, 15 bp, Homo sapiens
cagctcactgcagcc

SEQ ID NO: 922375 - DNA, 15 bp, Homo sapiens
acagctcactgcagc

SEQ ID NO: 922376 - DNA, 15 bp, Homo sapiens
cacagctcactgcag

SEQ ID NO: 922377 - DNA, 15 bp, Homo sapiens
tcacagctcactgca

SEQ ID NO: 922378 - DNA, 15 bp, Homo sapiens
atcacagctcactgc

SEQ ID NO: 922379 - DNA, 15 bp, Homo sapiens
gatcacagctcactg

SEQ ID NO: 922380 - DNA, 15 bp, Homo sapiens
tgatcacagctcact

SEQ ID NO: 922381 - DNA, 15 bp, Homo sapiens
atgatcacagctcac

SEQ ID NO: 922382 - DNA, 15 bp, Homo sapiens
catgatcacagctca

SEQ ID NO: 922383 - DNA, 15 bp, Homo sapiens
acatgatcacagctc

SEQ ID NO: 922384 - DNA, 15 bp, Homo sapiens
cacatgatcacagct

SEQ ID NO: 922385 - DNA, 15 bp, Homo sapiens
gcacatgatcacagc

SEQ ID NO: 922386 - DNA, 15 bp, Homo sapiens
ggcacatgatcacag

SEQ ID NO: 922387 - DNA, 15 bp, Homo sapiens
tggcacatgatcaca

SEQ ID NO: 922388 - DNA, 15 bp, Homo sapiens
gtggcacatgatcac

SEQ ID NO: 922389 - DNA, 15 bp, Homo sapiens
agtggcacatgatca

SEQ ID NO: 922390 - DNA, 15 bp, Homo sapiens
cagtggcacatgatc

SEQ ID NO: 922391 - DNA, 15 bp, Homo sapiens
tcagtggcacatgat

SEQ ID NO: 922392 - DNA, 15 bp, Homo sapiens
atcagtggcacatga

SEQ ID NO: 922393 - DNA, 15 bp, Homo sapiens
gatcagtggcacatg

SEQ ID NO: 922394 - DNA, 15 bp, Homo sapiens
agatcagtggcacat

SEQ ID NO: 922395 - DNA, 15 bp, Homo sapiens
gagatcagtggcaca

SEQ ID NO: 922396 - DNA, 15 bp, Homo sapiens
ggagatcagtggcac

SEQ ID NO: 922397 - DNA, 15 bp, Homo sapiens
tggagatcagtggca

SEQ ID NO: 922398 - DNA, 15 bp, Homo sapiens
ctggagatcagtggc

SEQ ID NO: 922399 - DNA, 15 bp, Homo sapiens
gctggagatcagtgg

SEQ ID NO: 922400 - DNA, 15 bp, Homo sapiens
ggctggagatcagtg

SEQ ID NO: 922401 - DNA, 15 bp, Homo sapiens
aggctggagatcagt

SEQ ID NO: 922402 - DNA, 15 bp, Homo sapiens
taggctggagatcag

SEQ ID NO: 922403 - DNA, 15 bp, Homo sapiens
ataggctggagatca

SEQ ID NO: 922404 - DNA, 15 bp, Homo sapiens
cataggctggagatc

SEQ ID NO: 922405 - DNA, 15 bp, Homo sapiens
acataggctggagat

SEQ ID NO: 922406 - DNA, 15 bp, Homo sapiens
cacataggctggaga

SEQ ID NO: 922407 - DNA, 15 bp, Homo sapiens
gcacataggctggag

SEQ ID NO: 922408 - DNA, 15 bp, Homo sapiens
ggcacataggctgga

SEQ ID NO: 922409 - DNA, 15 bp, Homo sapiens
aggcacataggctgg

SEQ ID NO: 922410 - DNA, 15 bp, Homo sapiens
caggcacataggctg

SEQ ID NO: 922411 - DNA, 15 bp, Homo sapiens
acaggcacataggct

SEQ ID NO: 922412 - DNA, 15 bp, Homo sapiens
tacaggcacataggc

SEQ ID NO: 922413 - DNA, 15 bp, Homo sapiens
atacaggcacatagg

SEQ ID NO: 922414 - DNA, 15 bp, Homo sapiens
tatacaggcacatag

SEQ ID NO: 922415 - DNA, 15 bp, Homo sapiens
ttatacaggcacata

SEQ ID NO: 922416 - DNA, 15 bp, Homo sapiens
gttatacaggcacat

SEQ ID NO: 922417 - DNA, 15 bp, Homo sapiens
tgttatacaggcaca

SEQ ID NO: 922418 - DNA, 15 bp, Homo sapiens
ctgttatacaggcac

SEQ ID NO: 922419 - DNA, 15 bp, Homo sapiens
tctgttatacaggca

SEQ ID NO: 922420 - DNA, 15 bp, Homo sapiens
ctctgttatacaggc

SEQ ID NO: 922421 - DNA, 15 bp, Homo sapiens
gctctgttatacagg

SEQ ID NO: 922422 - DNA, 15 bp, Homo sapiens
cgctctgttatacag

SEQ ID NO: 922423 - DNA, 15 bp, Homo sapiens
tcgctctgttataca

SEQ ID NO: 922424 - DNA, 15 bp, Homo sapiens
ctcgctctgttatac

SEQ ID NO: 922425 - DNA, 15 bp, Homo sapiens
actcgctctgttata

SEQ ID NO: 922426 - DNA, 15 bp, Homo sapiens
gactcgctctgttat

SEQ ID NO: 922427 - DNA, 15 bp, Homo sapiens
agactcgctctgtta

SEQ ID NO: 922428 - DNA, 15 bp, Homo sapiens
gagactcgctctgtt

SEQ ID NO: 922429 - DNA, 15 bp, Homo sapiens
agagactcgctctgt

SEQ ID NO: 922430 - DNA, 15 bp, Homo sapiens
gagagactcgctctg

SEQ ID NO: 922431 - DNA, 15 bp, Homo sapiens
agagagactcgctct

SEQ ID NO: 922432 - DNA, 15 bp, Homo sapiens
gagagagactcgctc

SEQ ID NO: 922433 - DNA, 15 bp, Homo sapiens
agagagagactcgct

SEQ ID NO: 922434 - DNA, 15 bp, Homo sapiens
aagagagagactcgc

SEQ ID NO: 922435 - DNA, 15 bp, Homo sapiens
taagagagagactcg

SEQ ID NO: 922436 - DNA, 15 bp, Homo sapiens
ttaagagagagactc

SEQ ID NO: 922437 - DNA, 15 bp, Homo sapiens
tttaagagagagact

SEQ ID NO: 922438 - DNA, 15 bp, Homo sapiens
ttttaagagagagac

SEQ ID NO: 922439 - DNA, 15 bp, Homo sapiens
cttttaagagagaga

SEQ ID NO: 922440 - DNA, 15 bp, Homo sapiens
tcttttaagagagag

SEQ ID NO: 922441 - DNA, 15 bp, Homo sapiens
ttcttttaagagaga

SEQ ID NO: 922442 - DNA, 15 bp, Homo sapiens
tttcttttaagagag

SEQ ID NO: 922443 - DNA, 15 bp, Homo sapiens
ttttcttttaagaga

SEQ ID NO: 922444 - DNA, 15 bp, Homo sapiens
tttttcttttaagag

SEQ ID NO: 922445 - DNA, 15 bp, Homo sapiens
ttttttcttttaaga

SEQ ID NO: 922446 - DNA, 15 bp, Homo sapiens
tttttttcttttaag

SEQ ID NO: 922447 - DNA, 15 bp, Homo sapiens
ctttttttcttttaa

SEQ ID NO: 922448 - DNA, 15 bp, Homo sapiens
tctttttttctttta

SEQ ID NO: 922449 - DNA, 15 bp, Homo sapiens
ttctttttttctttt

SEQ ID NO: 922450 - DNA, 15 bp, Homo sapiens
cttctttttttcttt

SEQ ID NO: 922451 - DNA, 15 bp, Homo sapiens
tcttctttttttctt

SEQ ID NO: 922452 - DNA, 15 bp, Homo sapiens
ttcttctttttttct

SEQ ID NO: 922453 - DNA, 15 bp, Homo sapiens
cttcttctttttttc

SEQ ID NO: 922454 - DNA, 15 bp, Homo sapiens
tcttcttcttttttt

SEQ ID NO: 922455 - DNA, 15 bp, Homo sapiens
ttcttcttctttttt

SEQ ID NO: 922456 - DNA, 15 bp, Homo sapiens
cttcttcttcttttt

SEQ ID NO: 922457 - DNA, 15 bp, Homo sapiens
tcttcttcttctttt

SEQ ID NO: 922458 - DNA, 15 bp, Homo sapiens
ttcttcttcttcttt

SEQ ID NO: 922459 - DNA, 15 bp, Homo sapiens
cttcttcttcttctt

SEQ ID NO: 922460 - DNA, 15 bp, Homo sapiens
tcttcttcttcttct

SEQ ID NO: 922461 - DNA, 15 bp, Homo sapiens
ttcttcttcttcttc

SEQ ID NO: 922462 - DNA, 15 bp, Homo sapiens
tttcttcttcttctt

SEQ ID NO: 922463 - DNA, 15 bp, Homo sapiens
ttttcttcttcttct

SEQ ID NO: 922464 - DNA, 15 bp, Homo sapiens
cttttcttcttcttc

SEQ ID NO: 922465 - DNA, 15 bp, Homo sapiens
tcttttcttcttctt

SEQ ID NO: 922466 - DNA, 15 bp, Homo sapiens
atcttttcttcttct

SEQ ID NO: 922467 - DNA, 15 bp, Homo sapiens
tatcttttcttcttc

SEQ ID NO: 922468 - DNA, 15 bp, Homo sapiens
ttatcttttcttctt

SEQ ID NO: 922469 - DNA, 15 bp, Homo sapiens
gttatcttttcttct

SEQ ID NO: 922470 - DNA, 15 bp, Homo sapiens
ggttatcttttcttc

SEQ ID NO: 922471 - DNA, 15 bp, Homo sapiens
tggttatcttttctt

SEQ ID NO: 922472 - DNA, 15 bp, Homo sapiens
atggttatcttttct

SEQ ID NO: 922473 - DNA, 15 bp, Homo sapiens
tatggttatcttttc

SEQ ID NO: 922474 - DNA, 15 bp, Homo sapiens
atatggttatctttt

SEQ ID NO: 922475 - DNA, 15 bp, Homo sapiens
tatatggttatcttt

SEQ ID NO: 922476 - DNA, 15 bp, Homo sapiens
gtatatggttatctt

SEQ ID NO: 922477 - DNA, 15 bp, Homo sapiens
ggtatatggttatct

SEQ ID NO: 922478 - DNA, 15 bp, Homo sapiens
aggtatatggttatc

SEQ ID NO: 922479 - DNA, 15 bp, Homo sapiens
gaggtatatggttat

SEQ ID NO: 922480 - DNA, 15 bp, Homo sapiens
ggaggtatatggtta

SEQ ID NO: 922481 - DNA, 15 bp, Homo sapiens
tggaggtatatggtt

SEQ ID NO: 922482 - DNA, 15 bp, Homo sapiens
atggaggtatatggt

SEQ ID NO: 922483 - DNA, 15 bp, Homo sapiens
aatggaggtatatgg

SEQ ID NO: 922484 - DNA, 15 bp, Homo sapiens
taatggaggtatatg

SEQ ID NO: 922485 - DNA, 15 bp, Homo sapiens
ataatggaggtatat

SEQ ID NO: 922486 - DNA, 15 bp, Homo sapiens
aataatggaggtata

SEQ ID NO: 922487 - DNA, 15 bp, Homo sapiens
taataatggaggtat

SEQ ID NO: 922488 - DNA, 15 bp, Homo sapiens
ttaataatggaggta

SEQ ID NO: 922489 - DNA, 15 bp, Homo sapiens
cttaataatggaggt

SEQ ID NO: 922490 - DNA, 15 bp, Homo sapiens
gcttaataatggagg

SEQ ID NO: 922491 - DNA, 15 bp, Homo sapiens
tgcttaataatggag

SEQ ID NO: 922492 - DNA, 15 bp, Homo sapiens
ttgcttaataatgga

SEQ ID NO: 922493 - DNA, 15 bp, Homo sapiens
attgcttaataatgg

SEQ ID NO: 922494 - DNA, 15 bp, Homo sapiens
aattgcttaataatg

SEQ ID NO: 922495 - DNA, 15 bp, Homo sapiens
aaattgcttaataat

SEQ ID NO: 922496 - DNA, 15 bp, Homo sapiens
taaattgcttaataa

SEQ ID NO: 922497 - DNA, 15 bp, Homo sapiens
ctaaattgcttaata

SEQ ID NO: 922498 - DNA, 15 bp, Homo sapiens
gctaaattgcttaat

SEQ ID NO: 922499 - DNA, 15 bp, Homo sapiens
agctaaattgcttaa

SEQ ID NO: 922500 - DNA, 15 bp, Homo sapiens
tagctaaattgctta

SEQ ID NO: 922501 - DNA, 15 bp, Homo sapiens
ttagctaaattgctt

SEQ ID NO: 922502 - DNA, 15 bp, Homo sapiens
gttagctaaattgct

SEQ ID NO: 922503 - DNA, 15 bp, Homo sapiens
agttagctaaattgc

SEQ ID NO: 922504 - DNA, 15 bp, Homo sapiens
cagttagctaaattg

SEQ ID NO: 922505 - DNA, 15 bp, Homo sapiens
ccagttagctaaatt

SEQ ID NO: 922506 - DNA, 15 bp, Homo sapiens
accagttagctaaat

SEQ ID NO: 922507 - DNA, 15 bp, Homo sapiens
caccagttagctaaa

SEQ ID NO: 922508 - DNA, 15 bp, Homo sapiens
tcaccagttagctaa

SEQ ID NO: 922509 - DNA, 15 bp, Homo sapiens
atcaccagttagcta

SEQ ID NO: 922510 - DNA, 15 bp, Homo sapiens
tatcaccagttagct

SEQ ID NO: 922511 - DNA, 15 bp, Homo sapiens
atatcaccagttagc

SEQ ID NO: 922512 - DNA, 15 bp, Homo sapiens
aatatcaccagttag

SEQ ID NO: 922513 - DNA, 15 bp, Homo sapiens
aaatatcaccagtta

SEQ ID NO: 922514 - DNA, 15 bp, Homo sapiens
aaaatatcaccagtt

SEQ ID NO: 922515 - DNA, 15 bp, Homo sapiens
caaaatatcaccagt

SEQ ID NO: 922516 - DNA, 15 bp, Homo sapiens
ccaaaatatcaccag

SEQ ID NO: 922517 - DNA, 15 bp, Homo sapiens
accaaaatatcacca

SEQ ID NO: 922518 - DNA, 15 bp, Homo sapiens
taccaaaatatcacc

SEQ ID NO: 922519 - DNA, 15 bp, Homo sapiens
gtaccaaaatatcac

SEQ ID NO: 922520 - DNA, 15 bp, Homo sapiens
ggtaccaaaatatca

SEQ ID NO: 922521 - DNA, 15 bp, Homo sapiens
tggtaccaaaatatc

SEQ ID NO: 922522 - DNA, 15 bp, Homo sapiens
atggtaccaaaatat

SEQ ID NO: 922523 - DNA, 15 bp, Homo sapiens
tatggtaccaaaata

SEQ ID NO: 922524 - DNA, 15 bp, Homo sapiens
gtatggtaccaaaat

SEQ ID NO: 922525 - DNA, 15 bp, Homo sapiens
tgtatggtaccaaaa

SEQ ID NO: 922526 - DNA, 15 bp, Homo sapiens
ttgtatggtaccaaa

SEQ ID NO: 922527 - DNA, 15 bp, Homo sapiens
tttgtatggtaccaa

SEQ ID NO: 922528 - DNA, 15 bp, Homo sapiens
atttgtatggtacca

SEQ ID NO: 922529 - DNA, 15 bp, Homo sapiens
tatttgtatggtacc

SEQ ID NO: 922530 - DNA, 15 bp, Homo sapiens
ttatttgtatggtac

SEQ ID NO: 922531 - DNA, 15 bp, Homo sapiens
gttatttgtatggta

SEQ ID NO: 922532 - DNA, 15 bp, Homo sapiens
tgttatttgtatggt

SEQ ID NO: 922533 - DNA, 15 bp, Homo sapiens
ttgttatttgtatgg

SEQ ID NO: 922534 - DNA, 15 bp, Homo sapiens
tttgttatttgtatg

SEQ ID NO: 922535 - DNA, 15 bp, Homo sapiens
atttgttatttgtat

SEQ ID NO: 922536 - DNA, 15 bp, Homo sapiens
aatttgttatttgta

SEQ ID NO: 922537 - DNA, 15 bp, Homo sapiens
taatttgttatttgt

SEQ ID NO: 922538 - DNA, 15 bp, Homo sapiens
ataatttgttatttg

SEQ ID NO: 922539 - DNA, 15 bp, Homo sapiens
aataatttgttattt

SEQ ID NO: 922540 - DNA, 15 bp, Homo sapiens
aaataatttgttatt

SEQ ID NO: 922541 - DNA, 15 bp, Homo sapiens
caaataatttgttat

SEQ ID NO: 922542 - DNA, 15 bp, Homo sapiens
acaaataatttgtta

SEQ ID NO: 922543 - DNA, 15 bp, Homo sapiens
gacaaataatttgtt

SEQ ID NO: 922544 - DNA, 15 bp, Homo sapiens
tgacaaataatttgt

SEQ ID NO: 922545 - DNA, 15 bp, Homo sapiens
ctgacaaataatttg

SEQ ID NO: 922546 - DNA, 15 bp, Homo sapiens
actgacaaataattt

SEQ ID NO: 922547 - DNA, 15 bp, Homo sapiens
gactgacaaataatt

SEQ ID NO: 922548 - DNA, 15 bp, Homo sapiens
ggactgacaaataat

SEQ ID NO: 922549 - DNA, 15 bp, Homo sapiens
aggactgacaaataa

SEQ ID NO: 922550 - DNA, 15 bp, Homo sapiens
taggactgacaaata

SEQ ID NO: 922551 - DNA, 15 bp, Homo sapiens
ttaggactgacaaat

SEQ ID NO: 922552 - DNA, 15 bp, Homo sapiens
attaggactgacaaa

SEQ ID NO: 922553 - DNA, 15 bp, Homo sapiens
cattaggactgacaa

SEQ ID NO: 922554 - DNA, 15 bp, Homo sapiens
tcattaggactgaca

SEQ ID NO: 922555 - DNA, 15 bp, Homo sapiens
atcattaggactgac

SEQ ID NO: 922556 - DNA, 15 bp, Homo sapiens
aatcattaggactga

SEQ ID NO: 922557 - DNA, 15 bp, Homo sapiens
aaatcattaggactg

SEQ ID NO: 922558 - DNA, 15 bp, Homo sapiens
aaaatcattaggact

SEQ ID NO: 922559 - DNA, 15 bp, Homo sapiens
taaaatcattaggac

SEQ ID NO: 922560 - DNA, 15 bp, Homo sapiens
ctaaaatcattagga

SEQ ID NO: 922561 - DNA, 15 bp, Homo sapiens
gctaaaatcattagg

SEQ ID NO: 922562 - DNA, 15 bp, Homo sapiens
tgctaaaatcattag

SEQ ID NO: 922563 - DNA, 15 bp, Homo sapiens
atgctaaaatcatta

SEQ ID NO: 922564 - DNA, 15 bp, Homo sapiens
gatgctaaaatcatt

SEQ ID NO: 922565 - DNA, 15 bp, Homo sapiens
agatgctaaaatcat

SEQ ID NO: 922566 - DNA, 15 bp, Homo sapiens
cagatgctaaaatca

SEQ ID NO: 922567 - DNA, 15 bp, Homo sapiens
gcagatgctaaaatc

SEQ ID NO: 922568 - DNA, 15 bp, Homo sapiens
agcagatgctaaaat

SEQ ID NO: 922569 - DNA, 15 bp, Homo sapiens
cagcagatgctaaaa

SEQ ID NO: 922570 - DNA, 15 bp, Homo sapiens
tcagcagatgctaaa

SEQ ID NO: 922571 - DNA, 15 bp, Homo sapiens
atcagcagatgctaa

SEQ ID NO: 922572 - DNA, 15 bp, Homo sapiens
catcagcagatgcta

SEQ ID NO: 922573 - DNA, 15 bp, Homo sapiens
tcatcagcagatgct

SEQ ID NO: 922574 - DNA, 15 bp, Homo sapiens
atcatcagcagatgc

SEQ ID NO: 922575 - DNA, 15 bp, Homo sapiens
aatcatcagcagatg

SEQ ID NO: 922576 - DNA, 15 bp, Homo sapiens
caatcatcagcagat

SEQ ID NO: 922577 - DNA, 15 bp, Homo sapiens
acaatcatcagcaga

SEQ ID NO: 922578 - DNA, 15 bp, Homo sapiens
aacaatcatcagcag

SEQ ID NO: 922579 - DNA, 15 bp, Homo sapiens
caacaatcatcagca

SEQ ID NO: 922580 - DNA, 15 bp, Homo sapiens
gcaacaatcatcagc

SEQ ID NO: 922581 - DNA, 15 bp, Homo sapiens
ggcaacaatcatcag

SEQ ID NO: 922582 - DNA, 15 bp, Homo sapiens
aggcaacaatcatca

SEQ ID NO: 922583 - DNA, 15 bp, Homo sapiens
taggcaacaatcatc

SEQ ID NO: 922584 - DNA, 15 bp, Homo sapiens
ttaggcaacaatcat

SEQ ID NO: 922585 - DNA, 15 bp, Homo sapiens
gttaggcaacaatca

SEQ ID NO: 922586 - DNA, 15 bp, Homo sapiens
ggttaggcaacaatc

SEQ ID NO: 922587 - DNA, 15 bp, Homo sapiens
gggttaggcaacaat

SEQ ID NO: 922588 - DNA, 15 bp, Homo sapiens
tgggttaggcaacaa

SEQ ID NO: 922589 - DNA, 15 bp, Homo sapiens
ttgggttaggcaaca

SEQ ID NO: 922590 - DNA, 15 bp, Homo sapiens
attgggttaggcaac

SEQ ID NO: 922591 - DNA, 15 bp, Homo sapiens
aattgggttaggcaa

SEQ ID NO: 922592 - DNA, 15 bp, Homo sapiens
taattgggttaggca

SEQ ID NO: 922593 - DNA, 15 bp, Homo sapiens
ataattgggttaggc

SEQ ID NO: 922594 - DNA, 15 bp, Homo sapiens
aataattgggttagg

SEQ ID NO: 922595 - DNA, 15 bp, Homo sapiens
taataattgggttag

SEQ ID NO: 922596 - DNA, 15 bp, Homo sapiens
ttaataattgggtta

SEQ ID NO: 922597 - DNA, 15 bp, Homo sapiens
tttaataattgggtt

SEQ ID NO: 922598 - DNA, 15 bp, Homo sapiens
ttttaataattgggt

SEQ ID NO: 922599 - DNA, 15 bp, Homo sapiens
cttttaataattggg

SEQ ID NO: 922600 - DNA, 15 bp, Homo sapiens
acttttaataattgg

SEQ ID NO: 922601 - DNA, 15 bp, Homo sapiens
aacttttaataattg

SEQ ID NO: 922602 - DNA, 15 bp, Homo sapiens
caacttttaataatt

SEQ ID NO: 922603 - DNA, 15 bp, Homo sapiens
gcaacttttaataat

SEQ ID NO: 922604 - DNA, 15 bp, Homo sapiens
tgcaacttttaataa

SEQ ID NO: 922605 - DNA, 15 bp, Homo sapiens
ttgcaacttttaata

SEQ ID NO: 922606 - DNA, 15 bp, Homo sapiens
tttgcaacttttaat

SEQ ID NO: 922607 - DNA, 15 bp, Homo sapiens
gtttgcaacttttaa

SEQ ID NO: 922608 - DNA, 15 bp, Homo sapiens
tgtttgcaactttta

SEQ ID NO: 922609 - DNA, 15 bp, Homo sapiens
atgtttgcaactttt

SEQ ID NO: 922610 - DNA, 15 bp, Homo sapiens
gatgtttgcaacttt

SEQ ID NO: 922611 - DNA, 15 bp, Homo sapiens
tgatgtttgcaactt

SEQ ID NO: 922612 - DNA, 15 bp, Homo sapiens
atgatgtttgcaact

SEQ ID NO: 922613 - DNA, 15 bp, Homo sapiens
tatgatgtttgcaac

SEQ ID NO: 922614 - DNA, 15 bp, Homo sapiens
ttatgatgtttgcaa

SEQ ID NO: 922615 - DNA, 15 bp, Homo sapiens
attatgatgtttgca

SEQ ID NO: 922616 - DNA, 15 bp, Homo sapiens
aattatgatgtttgc

SEQ ID NO: 922617 - DNA, 15 bp, Homo sapiens
aaattatgatgtttg

SEQ ID NO: 922618 - DNA, 15 bp, Homo sapiens
aaaattatgatgttt

SEQ ID NO: 922619 - DNA, 15 bp, Homo sapiens
gaaaattatgatgtt

SEQ ID NO: 922620 - DNA, 15 bp, Homo sapiens
agaaaattatgatgt

SEQ ID NO: 922621 - DNA, 15 bp, Homo sapiens
tagaaaattatgatg

SEQ ID NO: 922622 - DNA, 15 bp, Homo sapiens
ctagaaaattatgat

SEQ ID NO: 922623 - DNA, 15 bp, Homo sapiens
actagaaaattatga

SEQ ID NO: 922624 - DNA, 15 bp, Homo sapiens
aactagaaaattatg

SEQ ID NO: 922625 - DNA, 15 bp, Homo sapiens
taactagaaaattat

SEQ ID NO: 922626 - DNA, 15 bp, Homo sapiens
ataactagaaaatta

SEQ ID NO: 922627 - DNA, 15 bp, Homo sapiens
tataactagaaaatt

SEQ ID NO: 922628 - DNA, 15 bp, Homo sapiens
atataactagaaaat

SEQ ID NO: 922629 - DNA, 15 bp, Homo sapiens
aatataactagaaaa

SEQ ID NO: 922630 - DNA, 15 bp, Homo sapiens
taatataactagaaa

SEQ ID NO: 922631 - DNA, 15 bp, Homo sapiens
ataatataactagaa

SEQ ID NO: 922632 - DNA, 15 bp, Homo sapiens
cataatataactaga

SEQ ID NO: 922633 - DNA, 15 bp, Homo sapiens
gcataatataactag

SEQ ID NO: 922634 - DNA, 15 bp, Homo sapiens
tgcataatataacta

SEQ ID NO: 922635 - DNA, 15 bp, Homo sapiens
gtgcataatataact

SEQ ID NO: 922636 - DNA, 15 bp, Homo sapiens
agtgcataatataac

SEQ ID NO: 922637 - DNA, 15 bp, Homo sapiens
aagtgcataatataa

SEQ ID NO: 922638 - DNA, 15 bp, Homo sapiens
taagtgcataatata

SEQ ID NO: 922639 - DNA, 15 bp, Homo sapiens
gtaagtgcataatat

SEQ ID NO: 922640 - DNA, 15 bp, Homo sapiens
tgtaagtgcataata

SEQ ID NO: 922641 - DNA, 15 bp, Homo sapiens
atgtaagtgcataat

SEQ ID NO: 922642 - DNA, 15 bp, Homo sapiens
aatgtaagtgcataa

SEQ ID NO: 922643 - DNA, 15 bp, Homo sapiens
aaatgtaagtgcata

SEQ ID NO: 922644 - DNA, 15 bp, Homo sapiens
taaatgtaagtgcat

SEQ ID NO: 922645 - DNA, 15 bp, Homo sapiens
ataaatgtaagtgca

SEQ ID NO: 922646 - DNA, 15 bp, Homo sapiens
aataaatgtaagtgc

SEQ ID NO: 922647 - DNA, 15 bp, Homo sapiens
taataaatgtaagtg

SEQ ID NO: 922648 - DNA, 15 bp, Homo sapiens
ttaataaatgtaagt

SEQ ID NO: 922649 - DNA, 15 bp, Homo sapiens
gttaataaatgtaag

SEQ ID NO: 922650 - DNA, 15 bp, Homo sapiens
tgttaataaatgtaa

SEQ ID NO: 922651 - DNA, 15 bp, Homo sapiens
ctgttaataaatgta

SEQ ID NO: 922652 - DNA, 15 bp, Homo sapiens
tctgttaataaatgt

SEQ ID NO: 922653 - DNA, 15 bp, Homo sapiens
gtctgttaataaatg

SEQ ID NO: 922654 - DNA, 15 bp, Homo sapiens
tgtctgttaataaat

SEQ ID NO: 922655 - DNA, 15 bp, Homo sapiens
atgtctgttaataaa

SEQ ID NO: 922656 - DNA, 15 bp, Homo sapiens
catgtctgttaataa

SEQ ID NO: 922657 - DNA, 15 bp, Homo sapiens
gcatgtctgttaata

SEQ ID NO: 922658 - DNA, 15 bp, Homo sapiens
agcatgtctgttaat

SEQ ID NO: 922659 - DNA, 15 bp, Homo sapiens
aagcatgtctgttaa

SEQ ID NO: 922660 - DNA, 15 bp, Homo sapiens
aaagcatgtctgtta

SEQ ID NO: 922661 - DNA, 15 bp, Homo sapiens
aaaagcatgtctgtt

SEQ ID NO: 922662 - DNA, 15 bp, Homo sapiens
caaaagcatgtctgt

SEQ ID NO: 922663 - DNA, 15 bp, Homo sapiens
acaaaagcatgtctg

SEQ ID NO: 922664 - DNA, 15 bp, Homo sapiens
tacaaaagcatgtct

SEQ ID NO: 922665 - DNA, 15 bp, Homo sapiens
ttacaaaagcatgtc

SEQ ID NO: 922666 - DNA, 15 bp, Homo sapiens
tttacaaaagcatgt

SEQ ID NO: 922667 - DNA, 15 bp, Homo sapiens
ttttacaaaagcatg

SEQ ID NO: 922668 - DNA, 15 bp, Homo sapiens
attttacaaaagcat

SEQ ID NO: 922669 - DNA, 15 bp, Homo sapiens
tattttacaaaagca

SEQ ID NO: 922670 - DNA, 15 bp, Homo sapiens
ttattttacaaaagc

SEQ ID NO: 922671 - DNA, 15 bp, Homo sapiens
tttattttacaaaag

SEQ ID NO: 922672 - DNA, 15 bp, Homo sapiens
atttattttacaaaa

SEQ ID NO: 922673 - DNA, 15 bp, Homo sapiens
tatttattttacaaa

SEQ ID NO: 922674 - DNA, 15 bp, Homo sapiens
ctatttattttacaa

SEQ ID NO: 922675 - DNA, 15 bp, Homo sapiens
gctatttattttaca

SEQ ID NO: 922676 - DNA, 15 bp, Homo sapiens
cgctatttattttac

SEQ ID NO: 922677 - DNA, 15 bp, Homo sapiens
acgctatttatttta

SEQ ID NO: 922678 - DNA, 15 bp, Homo sapiens
aacgctatttatttt

SEQ ID NO: 922679 - DNA, 15 bp, Homo sapiens
aaacgctatttattt

SEQ ID NO: 922680 - DNA, 15 bp, Homo sapiens
gaaacgctatttatt

SEQ ID NO: 922681 - DNA, 15 bp, Homo sapiens
ggaaacgctatttat

SEQ ID NO: 922682 - DNA, 15 bp, Homo sapiens
aggaaacgctattta

SEQ ID NO: 922683 - DNA, 15 bp, Homo sapiens
gaggaaacgctattt

SEQ ID NO: 922684 - DNA, 15 bp, Homo sapiens
tgaggaaacgctatt

SEQ ID NO: 922685 - DNA, 15 bp, Homo sapiens
atgaggaaacgctat

SEQ ID NO: 922686 - DNA, 15 bp, Homo sapiens
aatgaggaaacgcta

SEQ ID NO: 922687 - DNA, 15 bp, Homo sapiens
taatgaggaaacgct

SEQ ID NO: 922688 - DNA, 15 bp, Homo sapiens
ctaatgaggaaacgc

SEQ ID NO: 922689 - DNA, 15 bp, Homo sapiens
gctaatgaggaaacg

SEQ ID NO: 922690 - DNA, 15 bp, Homo sapiens
ggctaatgaggaaac

SEQ ID NO: 922691 - DNA, 15 bp, Homo sapiens
gggctaatgaggaaa

SEQ ID NO: 922692 - DNA, 15 bp, Homo sapiens
tgggctaatgaggaa

SEQ ID NO: 922693 - DNA, 15 bp, Homo sapiens
ctgggctaatgagga

SEQ ID NO: 922694 - DNA, 15 bp, Homo sapiens
cctgggctaatgagg

SEQ ID NO: 922695 - DNA, 15 bp, Homo sapiens
gcctgggctaatgag

SEQ ID NO: 922696 - DNA, 15 bp, Homo sapiens
agcctgggctaatga

SEQ ID NO: 922697 - DNA, 15 bp, Homo sapiens
tagcctgggctaatg

SEQ ID NO: 922698 - DNA, 15 bp, Homo sapiens
atagcctgggctaat

SEQ ID NO: 922699 - DNA, 15 bp, Homo sapiens
aatagcctgggctaa

SEQ ID NO: 922700 - DNA, 15 bp, Homo sapiens
aaatagcctgggcta

SEQ ID NO: 922701 - DNA, 15 bp, Homo sapiens
caaatagcctgggct

SEQ ID NO: 922702 - DNA, 15 bp, Homo sapiens
acaaatagcctgggc

SEQ ID NO: 922703 - DNA, 15 bp, Homo sapiens
aacaaatagcctggg

SEQ ID NO: 922704 - DNA, 15 bp, Homo sapiens
aaacaaatagcctgg

SEQ ID NO: 922705 - DNA, 15 bp, Homo sapiens
taaacaaatagcctg

SEQ ID NO: 922706 - DNA, 15 bp, Homo sapiens
ataaacaaatagcct

SEQ ID NO: 922707 - DNA, 15 bp, Homo sapiens
gataaacaaatagcc

SEQ ID NO: 922708 - DNA, 15 bp, Homo sapiens
agataaacaaatagc

SEQ ID NO: 922709 - DNA, 15 bp, Homo sapiens
aagataaacaaatag

SEQ ID NO: 922710 - DNA, 15 bp, Homo sapiens
caagataaacaaata

SEQ ID NO: 922711 - DNA, 15 bp, Homo sapiens
tcaagataaacaaat

SEQ ID NO: 922712 - DNA, 15 bp, Homo sapiens
ttcaagataaacaaa

SEQ ID NO: 922713 - DNA, 15 bp, Homo sapiens
cttcaagataaacaa

SEQ ID NO: 922714 - DNA, 15 bp, Homo sapiens
acttcaagataaaca

SEQ ID NO: 922715 - DNA, 15 bp, Homo sapiens
aacttcaagataaac

SEQ ID NO: 922716 - DNA, 15 bp, Homo sapiens
aaacttcaagataaa

SEQ ID NO: 922717 - DNA, 15 bp, Homo sapiens
taaacttcaagataa

SEQ ID NO: 922718 - DNA, 15 bp, Homo sapiens
ctaaacttcaagata

SEQ ID NO: 922719 - DNA, 15 bp, Homo sapiens
gctaaacttcaagat

SEQ ID NO: 922720 - DNA, 15 bp, Homo sapiens
agctaaacttcaaga

SEQ ID NO: 922721 - DNA, 15 bp, Homo sapiens
gagctaaacttcaag

SEQ ID NO: 922722 - DNA, 15 bp, Homo sapiens
ggagctaaacttcaa

SEQ ID NO: 922723 - DNA, 15 bp, Homo sapiens
aggagctaaacttca

SEQ ID NO: 922724 - DNA, 15 bp, Homo sapiens
taggagctaaacttc

SEQ ID NO: 922725 - DNA, 15 bp, Homo sapiens
gtaggagctaaactt

SEQ ID NO: 922726 - DNA, 15 bp, Homo sapiens
agtaggagctaaact

SEQ ID NO: 922727 - DNA, 15 bp, Homo sapiens
tagtaggagctaaac

SEQ ID NO: 922728 - DNA, 15 bp, Homo sapiens
gtagtaggagctaaa

SEQ ID NO: 922729 - DNA, 15 bp, Homo sapiens
tgtagtaggagctaa

SEQ ID NO: 922730 - DNA, 15 bp, Homo sapiens
ttgtagtaggagcta

SEQ ID NO: 922731 - DNA, 15 bp, Homo sapiens
tttgtagtaggagct

SEQ ID NO: 922732 - DNA, 15 bp, Homo sapiens
ctttgtagtaggagc

SEQ ID NO: 922733 - DNA, 15 bp, Homo sapiens
cctttgtagtaggag

SEQ ID NO: 922734 - DNA, 15 bp, Homo sapiens
gcctttgtagtagga

SEQ ID NO: 922735 - DNA, 15 bp, Homo sapiens
tgcctttgtagtagg

SEQ ID NO: 922736 - DNA, 15 bp, Homo sapiens
ttgcctttgtagtag

SEQ ID NO: 922737 - DNA, 15 bp, Homo sapiens
cttgcctttgtagta

SEQ ID NO: 922738 - DNA, 15 bp, Homo sapiens
tcttgcctttgtagt

SEQ ID NO: 922739 - DNA, 15 bp, Homo sapiens
atcttgcctttgtag

SEQ ID NO: 922740 - DNA, 15 bp, Homo sapiens
tatcttgcctttgta

SEQ ID NO: 922741 - DNA, 15 bp, Homo sapiens
ttatcttgcctttgt

SEQ ID NO: 922742 - DNA, 15 bp, Homo sapiens
tttatcttgcctttg

SEQ ID NO: 922743 - DNA, 15 bp, Homo sapiens
atttatcttgccttt

SEQ ID NO: 922744 - DNA, 15 bp, Homo sapiens
catttatcttgcctt

SEQ ID NO: 922745 - DNA, 15 bp, Homo sapiens
gcatttatcttgcct

SEQ ID NO: 922746 - DNA, 15 bp, Homo sapiens
agcatttatcttgcc

SEQ ID NO: 922747 - DNA, 15 bp, Homo sapiens
aagcatttatcttgc

SEQ ID NO: 922748 - DNA, 15 bp, Homo sapiens
aaagcatttatcttg

SEQ ID NO: 922749 - DNA, 15 bp, Homo sapiens
aaaagcatttatctt

SEQ ID NO: 922750 - DNA, 15 bp, Homo sapiens
gaaaagcatttatct

SEQ ID NO: 922751 - DNA, 15 bp, Homo sapiens
agaaaagcatttatc

SEQ ID NO: 922752 - DNA, 15 bp, Homo sapiens
gagaaaagcatttat

SEQ ID NO: 922753 - DNA, 15 bp, Homo sapiens
agagaaaagcattta

SEQ ID NO: 922754 - DNA, 15 bp, Homo sapiens
aagagaaaagcattt

SEQ ID NO: 922755 - DNA, 15 bp, Homo sapiens
aaagagaaaagcatt

SEQ ID NO: 922756 - DNA, 15 bp, Homo sapiens
taaagagaaaagcat

SEQ ID NO: 922757 - DNA, 15 bp, Homo sapiens
ttaaagagaaaagca

SEQ ID NO: 922758 - DNA, 15 bp, Homo sapiens
attaaagagaaaagc

SEQ ID NO: 922759 - DNA, 15 bp, Homo sapiens
aattaaagagaaaag

SEQ ID NO: 922760 - DNA, 15 bp, Homo sapiens
taattaaagagaaaa

SEQ ID NO: 922761 - DNA, 15 bp, Homo sapiens
gtaattaaagagaaa

SEQ ID NO: 922762 - DNA, 15 bp, Homo sapiens
ggtaattaaagagaa

SEQ ID NO: 922763 - DNA, 15 bp, Homo sapiens
tggtaattaaagaga

SEQ ID NO: 922764 - DNA, 15 bp, Homo sapiens
ctggtaattaaagag

SEQ ID NO: 922765 - DNA, 15 bp, Homo sapiens
actggtaattaaaga

SEQ ID NO: 922766 - DNA, 15 bp, Homo sapiens
aactggtaattaaag

SEQ ID NO: 922767 - DNA, 15 bp, Homo sapiens
aaactggtaattaaa

SEQ ID NO: 922768 - DNA, 15 bp, Homo sapiens
aaaactggtaattaa

SEQ ID NO: 922769 - DNA, 15 bp, Homo sapiens
gaaaactggtaatta

SEQ ID NO: 922770 - DNA, 15 bp, Homo sapiens
tgaaaactggtaatt

SEQ ID NO: 922771 - DNA, 15 bp, Homo sapiens
ctgaaaactggtaat

SEQ ID NO: 922772 - DNA, 15 bp, Homo sapiens
tctgaaaactggtaa

SEQ ID NO: 922773 - DNA, 15 bp, Homo sapiens
ttctgaaaactggta

SEQ ID NO: 922774 - DNA, 15 bp, Homo sapiens
attctgaaaactggt

SEQ ID NO: 922775 - DNA, 15 bp, Homo sapiens
tattctgaaaactgg

SEQ ID NO: 922776 - DNA, 15 bp, Homo sapiens
gtattctgaaaactg

SEQ ID NO: 922777 - DNA, 15 bp, Homo sapiens
tgtattctgaaaact

SEQ ID NO: 922778 - DNA, 15 bp, Homo sapiens
gtgtattctgaaaac

SEQ ID NO: 922779 - DNA, 15 bp, Homo sapiens
tgtgtattctgaaaa

SEQ ID NO: 922780 - DNA, 15 bp, Homo sapiens
gtgtgtattctgaaa

SEQ ID NO: 922781 - DNA, 15 bp, Homo sapiens
agtgtgtattctgaa

SEQ ID NO: 922782 - DNA, 15 bp, Homo sapiens
aagtgtgtattctga

SEQ ID NO: 922783 - DNA, 15 bp, Homo sapiens
caagtgtgtattctg

SEQ ID NO: 922784 - DNA, 15 bp, Homo sapiens
ccaagtgtgtattct

SEQ ID NO: 922785 - DNA, 15 bp, Homo sapiens
accaagtgtgtattc

SEQ ID NO: 922786 - DNA, 15 bp, Homo sapiens
caccaagtgtgtatt

SEQ ID NO: 922787 - DNA, 15 bp, Homo sapiens
acaccaagtgtgtat

SEQ ID NO: 922788 - DNA, 15 bp, Homo sapiens
tacaccaagtgtgta

SEQ ID NO: 922789 - DNA, 15 bp, Homo sapiens
gtacaccaagtgtgt

SEQ ID NO: 922790 - DNA, 15 bp, Homo sapiens
agtacaccaagtgtg

SEQ ID NO: 922791 - DNA, 15 bp, Homo sapiens
gagtacaccaagtgt

SEQ ID NO: 922792 - DNA, 15 bp, Homo sapiens
agagtacaccaagtg

SEQ ID NO: 922793 - DNA, 15 bp, Homo sapiens
cagagtacaccaagt

SEQ ID NO: 922794 - DNA, 15 bp, Homo sapiens
gcagagtacaccaag

SEQ ID NO: 922795 - DNA, 15 bp, Homo sapiens
tgcagagtacaccaa

SEQ ID NO: 922796 - DNA, 15 bp, Homo sapiens
gtgcagagtacacca

SEQ ID NO: 922797 - DNA, 15 bp, Homo sapiens
agtgcagagtacacc

SEQ ID NO: 922798 - DNA, 15 bp, Homo sapiens
tagtgcagagtacac

SEQ ID NO: 922799 - DNA, 15 bp, Homo sapiens
gtagtgcagagtaca

SEQ ID NO: 922800 - DNA, 15 bp, Homo sapiens
ggtagtgcagagtac

SEQ ID NO: 922801 - DNA, 15 bp, Homo sapiens
aggtagtgcagagta

SEQ ID NO: 922802 - DNA, 15 bp, Homo sapiens
caggtagtgcagagt

SEQ ID NO: 922803 - DNA, 15 bp, Homo sapiens
gcaggtagtgcagag

SEQ ID NO: 922804 - DNA, 15 bp, Homo sapiens
agcaggtagtgcaga

SEQ ID NO: 922805 - DNA, 15 bp, Homo sapiens
aagcaggtagtgcag

SEQ ID NO: 922806 - DNA, 15 bp, Homo sapiens
aaagcaggtagtgca

SEQ ID NO: 922807 - DNA, 15 bp, Homo sapiens
aaaagcaggtagtgc

SEQ ID NO: 922808 - DNA, 15 bp, Homo sapiens
aaaaagcaggtagtg

SEQ ID NO: 922809 - DNA, 15 bp, Homo sapiens
aaaaaagcaggtagt

SEQ ID NO: 922810 - DNA, 15 bp, Homo sapiens
aaaaaaagcaggtag

SEQ ID NO: 922811 - DNA, 15 bp, Homo sapiens
caaaaaaagcaggta

SEQ ID NO: 922812 - DNA, 15 bp, Homo sapiens
acaaaaaaagcaggt

SEQ ID NO: 922813 - DNA, 15 bp, Homo sapiens
gacaaaaaaagcagg

SEQ ID NO: 922814 - DNA, 15 bp, Homo sapiens
ggacaaaaaaagcag

SEQ ID NO: 922815 - DNA, 15 bp, Homo sapiens
gggacaaaaaaagca

SEQ ID NO: 922816 - DNA, 15 bp, Homo sapiens
ggggacaaaaaaagc

SEQ ID NO: 922817 - DNA, 15 bp, Homo sapiens
aggggacaaaaaaag

SEQ ID NO: 922818 - DNA, 15 bp, Homo sapiens
gaggggacaaaaaaa

SEQ ID NO: 922819 - DNA, 15 bp, Homo sapiens
ggaggggacaaaaaa

SEQ ID NO: 922820 - DNA, 15 bp, Homo sapiens
cggaggggacaaaaa

SEQ ID NO: 922821 - DNA, 15 bp, Homo sapiens
gcggaggggacaaaa

SEQ ID NO: 922822 - DNA, 15 bp, Homo sapiens
agcggaggggacaaa

SEQ ID NO: 922823 - DNA, 15 bp, Homo sapiens
aagcggaggggacaa

SEQ ID NO: 922824 - DNA, 15 bp, Homo sapiens
aaagcggaggggaca

SEQ ID NO: 922825 - DNA, 15 bp, Homo sapiens
gaaagcggaggggac

SEQ ID NO: 922826 - DNA, 15 bp, Homo sapiens
agaaagcggagggga

SEQ ID NO: 922827 - DNA, 15 bp, Homo sapiens
gagaaagcggagggg

SEQ ID NO: 922828 - DNA, 15 bp, Homo sapiens
agagaaagcggaggg

SEQ ID NO: 922829 - DNA, 15 bp, Homo sapiens
aagagaaagcggagg

SEQ ID NO: 922830 - DNA, 15 bp, Homo sapiens
aaagagaaagcggag

SEQ ID NO: 922831 - DNA, 15 bp, Homo sapiens
aaaagagaaagcgga

SEQ ID NO: 922832 - DNA, 15 bp, Homo sapiens
aaaaagagaaagcgg

SEQ ID NO: 922833 - DNA, 15 bp, Homo sapiens
aaaaaagagaaagcg

SEQ ID NO: 922834 - DNA, 15 bp, Homo sapiens
taaaaaagagaaagc

SEQ ID NO: 922835 - DNA, 15 bp, Homo sapiens
ttaaaaaagagaaag

SEQ ID NO: 922836 - DNA, 15 bp, Homo sapiens
cttaaaaaagagaaa

SEQ ID NO: 922837 - DNA, 15 bp, Homo sapiens
acttaaaaaagagaa

SEQ ID NO: 922838 - DNA, 15 bp, Homo sapiens
tacttaaaaaagaga

SEQ ID NO: 922839 - DNA, 15 bp, Homo sapiens
atacttaaaaaagag

SEQ ID NO: 922840 - DNA, 15 bp, Homo sapiens
gatacttaaaaaaga

SEQ ID NO: 922841 - DNA, 15 bp, Homo sapiens
tgatacttaaaaaag

SEQ ID NO: 922842 - DNA, 15 bp, Homo sapiens
ctgatacttaaaaaa

SEQ ID NO: 922843 - DNA, 15 bp, Homo sapiens
tctgatacttaaaaa

SEQ ID NO: 922844 - DNA, 15 bp, Homo sapiens
atctgatacttaaaa

SEQ ID NO: 922845 - DNA, 15 bp, Homo sapiens
aatctgatacttaaa

SEQ ID NO: 922846 - DNA, 15 bp, Homo sapiens
taatctgatacttaa

SEQ ID NO: 922847 - DNA, 15 bp, Homo sapiens
ctaatctgatactta

SEQ ID NO: 922848 - DNA, 15 bp, Homo sapiens
tctaatctgatactt

SEQ ID NO: 922849 - DNA, 15 bp, Homo sapiens
gtctaatctgatact

SEQ ID NO: 922850 - DNA, 15 bp, Homo sapiens
agtctaatctgatac

SEQ ID NO: 922851 - DNA, 15 bp, Homo sapiens
gagtctaatctgata

SEQ ID NO: 922852 - DNA, 15 bp, Homo sapiens
tgagtctaatctgat

SEQ ID NO: 922853 - DNA, 15 bp, Homo sapiens
gtgagtctaatctga

SEQ ID NO: 922854 - DNA, 15 bp, Homo sapiens
tgtgagtctaatctg

SEQ ID NO: 922855 - DNA, 15 bp, Homo sapiens
ctgtgagtctaatct

SEQ ID NO: 922856 - DNA, 15 bp, Homo sapiens
tctgtgagtctaatc

SEQ ID NO: 922857 - DNA, 15 bp, Homo sapiens
atctgtgagtctaat

SEQ ID NO: 922858 - DNA, 15 bp, Homo sapiens
aatctgtgagtctaa

SEQ ID NO: 922859 - DNA, 15 bp, Homo sapiens
aaatctgtgagtcta

SEQ ID NO: 922860 - DNA, 15 bp, Homo sapiens
aaaatctgtgagtct

SEQ ID NO: 922861 - DNA, 15 bp, Homo sapiens
aaaaatctgtgagtc

SEQ ID NO: 922862 - DNA, 15 bp, Homo sapiens
taaaaatctgtgagt

SEQ ID NO: 922863 - DNA, 15 bp, Homo sapiens
ttaaaaatctgtgag

SEQ ID NO: 922864 - DNA, 15 bp, Homo sapiens
tttaaaaatctgtga

SEQ ID NO: 922865 - DNA, 15 bp, Homo sapiens
atttaaaaatctgtg

SEQ ID NO: 922866 - DNA, 15 bp, Homo sapiens
tatttaaaaatctgt

SEQ ID NO: 922867 - DNA, 15 bp, Homo sapiens
atatttaaaaatctg

SEQ ID NO: 922868 - DNA, 15 bp, Homo sapiens
aatatttaaaaatct

SEQ ID NO: 922869 - DNA, 15 bp, Homo sapiens
gaatatttaaaaatc

SEQ ID NO: 922870 - DNA, 15 bp, Homo sapiens
ggaatatttaaaaat

SEQ ID NO: 922871 - DNA, 15 bp, Homo sapiens
tggaatatttaaaaa

SEQ ID NO: 922872 - DNA, 15 bp, Homo sapiens
atggaatatttaaaa

SEQ ID NO: 922873 - DNA, 15 bp, Homo sapiens
catggaatatttaaa

SEQ ID NO: 922874 - DNA, 15 bp, Homo sapiens
acatggaatatttaa

SEQ ID NO: 922875 - DNA, 15 bp, Homo sapiens
cacatggaatattta

SEQ ID NO: 922876 - DNA, 15 bp, Homo sapiens
acacatggaatattt

SEQ ID NO: 922877 - DNA, 15 bp, Homo sapiens
aacacatggaatatt

SEQ ID NO: 922878 - DNA, 15 bp, Homo sapiens
aaacacatggaatat

SEQ ID NO: 922879 - DNA, 15 bp, Homo sapiens
aaaacacatggaata

SEQ ID NO: 922880 - DNA, 15 bp, Homo sapiens
taaaacacatggaat

SEQ ID NO: 922881 - DNA, 15 bp, Homo sapiens
ctaaaacacatggaa

SEQ ID NO: 922882 - DNA, 15 bp, Homo sapiens
actaaaacacatgga

SEQ ID NO: 922883 - DNA, 15 bp, Homo sapiens
aactaaaacacatgg

SEQ ID NO: 922884 - DNA, 15 bp, Homo sapiens
caactaaaacacatg

SEQ ID NO: 922885 - DNA, 15 bp, Homo sapiens
ccaactaaaacacat

SEQ ID NO: 922886 - DNA, 15 bp, Homo sapiens
tccaactaaaacaca

SEQ ID NO: 922887 - DNA, 15 bp, Homo sapiens
ctccaactaaaacac

SEQ ID NO: 922888 - DNA, 15 bp, Homo sapiens
actccaactaaaaca

SEQ ID NO: 922889 - DNA, 15 bp, Homo sapiens
gactccaactaaaac

SEQ ID NO: 922890 - DNA, 15 bp, Homo sapiens
tgactccaactaaaa

SEQ ID NO: 922891 - DNA, 15 bp, Homo sapiens
atgactccaactaaa

SEQ ID NO: 922892 - DNA, 15 bp, Homo sapiens
tatgactccaactaa

SEQ ID NO: 922893 - DNA, 15 bp, Homo sapiens
atatgactccaacta

SEQ ID NO: 922894 - DNA, 15 bp, Homo sapiens
aatatgactccaact

SEQ ID NO: 922895 - DNA, 15 bp, Homo sapiens
gaatatgactccaac

SEQ ID NO: 922896 - DNA, 15 bp, Homo sapiens
agaatatgactccaa

SEQ ID NO: 922897 - DNA, 15 bp, Homo sapiens
aagaatatgactcca

SEQ ID NO: 922898 - DNA, 15 bp, Homo sapiens
aaagaatatgactcc

SEQ ID NO: 922899 - DNA, 15 bp, Homo sapiens
aaaagaatatgactc

SEQ ID NO: 922900 - DNA, 15 bp, Homo sapiens
caaaagaatatgact

SEQ ID NO: 922901 - DNA, 15 bp, Homo sapiens
acaaaagaatatgac

SEQ ID NO: 922902 - DNA, 15 bp, Homo sapiens
gacaaaagaatatga

SEQ ID NO: 922903 - DNA, 15 bp, Homo sapiens
agacaaaagaatatg

SEQ ID NO: 922904 - DNA, 15 bp, Homo sapiens
gagacaaaagaatat

SEQ ID NO: 922905 - DNA, 15 bp, Homo sapiens
tgagacaaaagaata

SEQ ID NO: 922906 - DNA, 15 bp, Homo sapiens
ttgagacaaaagaat

SEQ ID NO: 922907 - DNA, 15 bp, Homo sapiens
gttgagacaaaagaa

SEQ ID NO: 922908 - DNA, 15 bp, Homo sapiens
agttgagacaaaaga

SEQ ID NO: 922909 - DNA, 15 bp, Homo sapiens
aagttgagacaaaag

SEQ ID NO: 922910 - DNA, 15 bp, Homo sapiens
aaagttgagacaaaa

SEQ ID NO: 922911 - DNA, 15 bp, Homo sapiens
taaagttgagacaaa

SEQ ID NO: 922912 - DNA, 15 bp, Homo sapiens
ctaaagttgagacaa

SEQ ID NO: 922913 - DNA, 15 bp, Homo sapiens
gctaaagttgagaca

SEQ ID NO: 922914 - DNA, 15 bp, Homo sapiens
ggctaaagttgagac

SEQ ID NO: 922915 - DNA, 15 bp, Homo sapiens
tggctaaagttgaga

SEQ ID NO: 922916 - DNA, 15 bp, Homo sapiens
ttggctaaagttgag

SEQ ID NO: 922917 - DNA, 15 bp, Homo sapiens
tttggctaaagttga

SEQ ID NO: 922918 - DNA, 15 bp, Homo sapiens
ctttggctaaagttg

SEQ ID NO: 922919 - DNA, 15 bp, Homo sapiens
tctttggctaaagtt

SEQ ID NO: 922920 - DNA, 15 bp, Homo sapiens
ctctttggctaaagt

SEQ ID NO: 922921 - DNA, 15 bp, Homo sapiens
tctctttggctaaag

SEQ ID NO: 922922 - DNA, 15 bp, Homo sapiens
ctctctttggctaaa

SEQ ID NO: 922923 - DNA, 15 bp, Homo sapiens
actctctttggctaa

SEQ ID NO: 922924 - DNA, 15 bp, Homo sapiens
gactctctttggcta

SEQ ID NO: 922925 - DNA, 15 bp, Homo sapiens
ggactctctttggct

SEQ ID NO: 922926 - DNA, 15 bp, Homo sapiens
aggactctctttggc

SEQ ID NO: 922927 - DNA, 15 bp, Homo sapiens
aaggactctctttgg

SEQ ID NO: 922928 - DNA, 15 bp, Homo sapiens
aaaggactctctttg

SEQ ID NO: 922929 - DNA, 15 bp, Homo sapiens
taaaggactctcttt

SEQ ID NO: 922930 - DNA, 15 bp, Homo sapiens
ttaaaggactctctt

SEQ ID NO: 922931 - DNA, 15 bp, Homo sapiens
tttaaaggactctct

SEQ ID NO: 922932 - DNA, 15 bp, Homo sapiens
ctttaaaggactctc

SEQ ID NO: 922933 - DNA, 15 bp, Homo sapiens
actttaaaggactct

SEQ ID NO: 922934 - DNA, 15 bp, Homo sapiens
aactttaaaggactc

SEQ ID NO: 922935 - DNA, 15 bp, Homo sapiens
caactttaaaggact

SEQ ID NO: 922936 - DNA, 15 bp, Homo sapiens
tcaactttaaaggac

SEQ ID NO: 922937 - DNA, 15 bp, Homo sapiens
gtcaactttaaagga

SEQ ID NO: 922938 - DNA, 15 bp, Homo sapiens
agtcaactttaaagg

SEQ ID NO: 922939 - DNA, 15 bp, Homo sapiens
gagtcaactttaaag

SEQ ID NO: 922940 - DNA, 15 bp, Homo sapiens
agagtcaactttaaa

SEQ ID NO: 922941 - DNA, 15 bp, Homo sapiens
aagagtcaactttaa

SEQ ID NO: 922942 - DNA, 15 bp, Homo sapiens
taagagtcaacttta

SEQ ID NO: 922943 - DNA, 15 bp, Homo sapiens
ataagagtcaacttt

SEQ ID NO: 922944 - DNA, 15 bp, Homo sapiens
tataagagtcaactt

SEQ ID NO: 922945 - DNA, 15 bp, Homo sapiens
atataagagtcaact

SEQ ID NO: 922946 - DNA, 15 bp, Homo sapiens
aatataagagtcaac

SEQ ID NO: 922947 - DNA, 15 bp, Homo sapiens
caatataagagtcaa

SEQ ID NO: 922948 - DNA, 15 bp, Homo sapiens
acaatataagagtca

SEQ ID NO: 922949 - DNA, 15 bp, Homo sapiens
gacaatataagagtc

SEQ ID NO: 922950 - DNA, 15 bp, Homo sapiens
agacaatataagagt

SEQ ID NO: 922951 - DNA, 15 bp, Homo sapiens
aagacaatataagag

SEQ ID NO: 922952 - DNA, 15 bp, Homo sapiens
caagacaatataaga

SEQ ID NO: 922953 - DNA, 15 bp, Homo sapiens
tcaagacaatataag

SEQ ID NO: 922954 - DNA, 15 bp, Homo sapiens
gtcaagacaatataa

SEQ ID NO: 922955 - DNA, 15 bp, Homo sapiens
tgtcaagacaatata

SEQ ID NO: 922956 - DNA, 15 bp, Homo sapiens
ttgtcaagacaatat

SEQ ID NO: 922957 - DNA, 15 bp, Homo sapiens
tttgtcaagacaata

SEQ ID NO: 922958 - DNA, 15 bp, Homo sapiens
ttttgtcaagacaat

SEQ ID NO: 922959 - DNA, 15 bp, Homo sapiens
tttttgtcaagacaa

SEQ ID NO: 922960 - DNA, 15 bp, Homo sapiens
atttttgtcaagaca

SEQ ID NO: 922961 - DNA, 15 bp, Homo sapiens
aatttttgtcaagac

SEQ ID NO: 922962 - DNA, 15 bp, Homo sapiens
gaatttttgtcaaga

SEQ ID NO: 922963 - DNA, 15 bp, Homo sapiens
tgaatttttgtcaag

SEQ ID NO: 922964 - DNA, 15 bp, Homo sapiens
atgaatttttgtcaa

SEQ ID NO: 922965 - DNA, 15 bp, Homo sapiens
aatgaatttttgtca

SEQ ID NO: 922966 - DNA, 15 bp, Homo sapiens
taatgaatttttgtc

SEQ ID NO: 922967 - DNA, 15 bp, Homo sapiens
ctaatgaatttttgt

SEQ ID NO: 922968 - DNA, 15 bp, Homo sapiens
actaatgaatttttg

SEQ ID NO: 922969 - DNA, 15 bp, Homo sapiens
gactaatgaattttt

SEQ ID NO: 922970 - DNA, 15 bp, Homo sapiens
agactaatgaatttt

SEQ ID NO: 922971 - DNA, 15 bp, Homo sapiens
aagactaatgaattt

SEQ ID NO: 922972 - DNA, 15 bp, Homo sapiens
aaagactaatgaatt

SEQ ID NO: 922973 - DNA, 15 bp, Homo sapiens
aaaagactaatgaat

SEQ ID NO: 922974 - DNA, 15 bp, Homo sapiens
caaaagactaatgaa

SEQ ID NO: 922975 - DNA, 15 bp, Homo sapiens
tcaaaagactaatga

SEQ ID NO: 922976 - DNA, 15 bp, Homo sapiens
ttcaaaagactaatg

SEQ ID NO: 922977 - DNA, 15 bp, Homo sapiens
gttcaaaagactaat

SEQ ID NO: 922978 - DNA, 15 bp, Homo sapiens
cgttcaaaagactaa

SEQ ID NO: 922979 - DNA, 15 bp, Homo sapiens
tcgttcaaaagacta

SEQ ID NO: 922980 - DNA, 15 bp, Homo sapiens
ttcgttcaaaagact

SEQ ID NO: 922981 - DNA, 15 bp, Homo sapiens
cttcgttcaaaagac

SEQ ID NO: 922982 - DNA, 15 bp, Homo sapiens
gcttcgttcaaaaga

SEQ ID NO: 922983 - DNA, 15 bp, Homo sapiens
ggcttcgttcaaaag

SEQ ID NO: 922984 - DNA, 15 bp, Homo sapiens
aggcttcgttcaaaa

SEQ ID NO: 922985 - DNA, 15 bp, Homo sapiens
gaggcttcgttcaaa

SEQ ID NO: 922986 - DNA, 15 bp, Homo sapiens
tgaggcttcgttcaa

SEQ ID NO: 922987 - DNA, 15 bp, Homo sapiens
ttgaggcttcgttca

SEQ ID NO: 922988 - DNA, 15 bp, Homo sapiens
tttgaggcttcgttc

SEQ ID NO: 922989 - DNA, 15 bp, Homo sapiens
ctttgaggcttcgtt

SEQ ID NO: 922990 - DNA, 15 bp, Homo sapiens
gctttgaggcttcgt

SEQ ID NO: 922991 - DNA, 15 bp, Homo sapiens
agctttgaggcttcg

SEQ ID NO: 922992 - DNA, 15 bp, Homo sapiens
aagctttgaggcttc

SEQ ID NO: 922993 - DNA, 15 bp, Homo sapiens
caagctttgaggctt

SEQ ID NO: 922994 - DNA, 15 bp, Homo sapiens
tcaagctttgaggct

SEQ ID NO: 922995 - DNA, 15 bp, Homo sapiens
gtcaagctttgaggc

SEQ ID NO: 922996 - DNA, 15 bp, Homo sapiens
agtcaagctttgagg

SEQ ID NO: 922997 - DNA, 15 bp, Homo sapiens
aagtcaagctttgag

SEQ ID NO: 922998 - DNA, 15 bp, Homo sapiens
caagtcaagctttga

SEQ ID NO: 922999 - DNA, 15 bp, Homo sapiens
acaagtcaagctttg

SEQ ID NO: 923000 - DNA, 15 bp, Homo sapiens
aacaagtcaagcttt

SEQ ID NO: 923001 - DNA, 15 bp, Homo sapiens
aaacaagtcaagctt

SEQ ID NO: 923002 - DNA, 15 bp, Homo sapiens
aaaacaagtcaagct

SEQ ID NO: 923003 - DNA, 15 bp, Homo sapiens
gaaaacaagtcaagc

SEQ ID NO: 923004 - DNA, 15 bp, Homo sapiens
agaaaacaagtcaag

SEQ ID NO: 923005 - DNA, 15 bp, Homo sapiens
tagaaaacaagtcaa

SEQ ID NO: 923006 - DNA, 15 bp, Homo sapiens
ctagaaaacaagtca

SEQ ID NO: 923007 - DNA, 15 bp, Homo sapiens
gctagaaaacaagtc

SEQ ID NO: 923008 - DNA, 15 bp, Homo sapiens
tgctagaaaacaagt

SEQ ID NO: 923009 - DNA, 15 bp, Homo sapiens
atgctagaaaacaag

SEQ ID NO: 923010 - DNA, 15 bp, Homo sapiens
tatgctagaaaacaa

SEQ ID NO: 923011 - DNA, 15 bp, Homo sapiens
ttatgctagaaaaca

SEQ ID NO: 923012 - DNA, 15 bp, Homo sapiens
cttatgctagaaaac

SEQ ID NO: 923013 - DNA, 15 bp, Homo sapiens
tcttatgctagaaaa

SEQ ID NO: 923014 - DNA, 15 bp, Homo sapiens
atcttatgctagaaa

SEQ ID NO: 923015 - DNA, 15 bp, Homo sapiens
catcttatgctagaa

SEQ ID NO: 923016 - DNA, 15 bp, Homo sapiens
acatcttatgctaga

SEQ ID NO: 923017 - DNA, 15 bp, Homo sapiens
gacatcttatgctag

SEQ ID NO: 923018 - DNA, 15 bp, Homo sapiens
agacatcttatgcta

SEQ ID NO: 923019 - DNA, 15 bp, Homo sapiens
aagacatcttatgct

SEQ ID NO: 923020 - DNA, 15 bp, Homo sapiens
taagacatcttatgc

SEQ ID NO: 923021 - DNA, 15 bp, Homo sapiens
ctaagacatcttatg

SEQ ID NO: 923022 - DNA, 15 bp, Homo sapiens
tctaagacatcttat

SEQ ID NO: 923023 - DNA, 15 bp, Homo sapiens
gtctaagacatctta

SEQ ID NO: 923024 - DNA, 15 bp, Homo sapiens
agtctaagacatctt

SEQ ID NO: 923025 - DNA, 15 bp, Homo sapiens
aagtctaagacatct

SEQ ID NO: 923026 - DNA, 15 bp, Homo sapiens
taagtctaagacatc

SEQ ID NO: 923027 - DNA, 15 bp, Homo sapiens
gtaagtctaagacat

SEQ ID NO: 923028 - DNA, 15 bp, Homo sapiens
ggtaagtctaagaca

SEQ ID NO: 923029 - DNA, 15 bp, Homo sapiens
aggtaagtctaagac

SEQ ID NO: 923030 - DNA, 15 bp, Homo sapiens
taggtaagtctaaga

SEQ ID NO: 923031 - DNA, 15 bp, Homo sapiens
gtaggtaagtctaag

SEQ ID NO: 923032 - DNA, 15 bp, Homo sapiens
tgtaggtaagtctaa

SEQ ID NO: 923033 - DNA, 15 bp, Homo sapiens
atgtaggtaagtcta

SEQ ID NO: 923034 - DNA, 15 bp, Homo sapiens
tatgtaggtaagtct

SEQ ID NO: 923035 - DNA, 15 bp, Homo sapiens
gtatgtaggtaagtc

SEQ ID NO: 923036 - DNA, 15 bp, Homo sapiens
agtatgtaggtaagt

SEQ ID NO: 923037 - DNA, 15 bp, Homo sapiens
aagtatgtaggtaag

SEQ ID NO: 923038 - DNA, 15 bp, Homo sapiens
gaagtatgtaggtaa

SEQ ID NO: 923039 - DNA, 15 bp, Homo sapiens
tgaagtatgtaggta

SEQ ID NO: 923040 - DNA, 15 bp, Homo sapiens
atgaagtatgtaggt

SEQ ID NO: 923041 - DNA, 15 bp, Homo sapiens
catgaagtatgtagg

SEQ ID NO: 923042 - DNA, 15 bp, Homo sapiens
gcatgaagtatgtag

SEQ ID NO: 923043 - DNA, 15 bp, Homo sapiens
ggcatgaagtatgta

SEQ ID NO: 923044 - DNA, 15 bp, Homo sapiens
gggcatgaagtatgt

SEQ ID NO: 923045 - DNA, 15 bp, Homo sapiens
tgggcatgaagtatg

SEQ ID NO: 923046 - DNA, 15 bp, Homo sapiens
atgggcatgaagtat

SEQ ID NO: 923047 - DNA, 15 bp, Homo sapiens
tatgggcatgaagta

SEQ ID NO: 923048 - DNA, 15 bp, Homo sapiens
gtatgggcatgaagt

SEQ ID NO: 923049 - DNA, 15 bp, Homo sapiens
agtatgggcatgaag

SEQ ID NO: 923050 - DNA, 15 bp, Homo sapiens
aagtatgggcatgaa

SEQ ID NO: 923051 - DNA, 15 bp, Homo sapiens
caagtatgggcatga

SEQ ID NO: 923052 - DNA, 15 bp, Homo sapiens
ccaagtatgggcatg

SEQ ID NO: 923053 - DNA, 15 bp, Homo sapiens
tccaagtatgggcat

SEQ ID NO: 923054 - DNA, 15 bp, Homo sapiens
ttccaagtatgggca

SEQ ID NO: 923055 - DNA, 15 bp, Homo sapiens
attccaagtatgggc

SEQ ID NO: 923056 - DNA, 15 bp, Homo sapiens
tattccaagtatggg

SEQ ID NO: 923057 - DNA, 15 bp, Homo sapiens
ttattccaagtatgg

SEQ ID NO: 923058 - DNA, 15 bp, Homo sapiens
tttattccaagtatg

SEQ ID NO: 923059 - DNA, 15 bp, Homo sapiens
gtttattccaagtat

SEQ ID NO: 923060 - DNA, 15 bp, Homo sapiens
ggtttattccaagta

SEQ ID NO: 923061 - DNA, 15 bp, Homo sapiens
tggtttattccaagt

SEQ ID NO: 923062 - DNA, 15 bp, Homo sapiens
atggtttattccaag

SEQ ID NO: 923063 - DNA, 15 bp, Homo sapiens
aatggtttattccaa

SEQ ID NO: 923064 - DNA, 15 bp, Homo sapiens
aaatggtttattcca

SEQ ID NO: 923065 - DNA, 15 bp, Homo sapiens
gaaatggtttattcc

SEQ ID NO: 923066 - DNA, 15 bp, Homo sapiens
agaaatggtttattc

SEQ ID NO: 923067 - DNA, 15 bp, Homo sapiens
aagaaatggtttatt

SEQ ID NO: 923068 - DNA, 15 bp, Homo sapiens
aaagaaatggtttat

SEQ ID NO: 923069 - DNA, 15 bp, Homo sapiens
taaagaaatggttta

SEQ ID NO: 923070 - DNA, 15 bp, Homo sapiens
ttaaagaaatggttt

SEQ ID NO: 923071 - DNA, 15 bp, Homo sapiens
tttaaagaaatggtt

SEQ ID NO: 923072 - DNA, 15 bp, Homo sapiens
ctttaaagaaatggt

SEQ ID NO: 923073 - DNA, 15 bp, Homo sapiens
tctttaaagaaatgg

SEQ ID NO: 923074 - DNA, 15 bp, Homo sapiens
ctctttaaagaaatg

SEQ ID NO: 923075 - DNA, 15 bp, Homo sapiens
gctctttaaagaaat

SEQ ID NO: 923076 - DNA, 15 bp, Homo sapiens
ggctctttaaagaaa

SEQ ID NO: 923077 - DNA, 15 bp, Homo sapiens
gggctctttaaagaa

SEQ ID NO: 923078 - DNA, 15 bp, Homo sapiens
tgggctctttaaaga

SEQ ID NO: 923079 - DNA, 15 bp, Homo sapiens
ctgggctctttaaag

SEQ ID NO: 923080 - DNA, 15 bp, Homo sapiens
cctgggctctttaaa

SEQ ID NO: 923081 - DNA, 15 bp, Homo sapiens
acctgggctctttaa

SEQ ID NO: 923082 - DNA, 15 bp, Homo sapiens
aacctgggctcttta

SEQ ID NO: 923083 - DNA, 15 bp, Homo sapiens
gaacctgggctcttt

SEQ ID NO: 923084 - DNA, 15 bp, Homo sapiens
ggaacctgggctctt

SEQ ID NO: 923085 - DNA, 15 bp, Homo sapiens
aggaacctgggctct

SEQ ID NO: 923086 - DNA, 15 bp, Homo sapiens
aaggaacctgggctc

SEQ ID NO: 923087 - DNA, 15 bp, Homo sapiens
aaaggaacctgggct

SEQ ID NO: 923088 - DNA, 15 bp, Homo sapiens
aaaaggaacctgggc

SEQ ID NO: 923089 - DNA, 15 bp, Homo sapiens
taaaaggaacctggg

SEQ ID NO: 923090 - DNA, 15 bp, Homo sapiens
ctaaaaggaacctgg

SEQ ID NO: 923091 - DNA, 15 bp, Homo sapiens
actaaaaggaacctg

SEQ ID NO: 923092 - DNA, 15 bp, Homo sapiens
cactaaaaggaacct

SEQ ID NO: 923093 - DNA, 15 bp, Homo sapiens
ccactaaaaggaacc

SEQ ID NO: 923094 - DNA, 15 bp, Homo sapiens
cccactaaaaggaac

SEQ ID NO: 923095 - DNA, 15 bp, Homo sapiens
ccccactaaaaggaa

SEQ ID NO: 923096 - DNA, 15 bp, Homo sapiens
tccccactaaaagga

SEQ ID NO: 923097 - DNA, 15 bp, Homo sapiens
ttccccactaaaagg

SEQ ID NO: 923098 - DNA, 15 bp, Homo sapiens
cttccccactaaaag

SEQ ID NO: 923099 - DNA, 15 bp, Homo sapiens
ccttccccactaaaa

SEQ ID NO: 923100 - DNA, 15 bp, Homo sapiens
gccttccccactaaa

SEQ ID NO: 923101 - DNA, 15 bp, Homo sapiens
tgccttccccactaa

SEQ ID NO: 923102 - DNA, 15 bp, Homo sapiens
atgccttccccacta

SEQ ID NO: 923103 - DNA, 15 bp, Homo sapiens
aatgccttccccact

SEQ ID NO: 923104 - DNA, 15 bp, Homo sapiens
aaatgccttccccac

SEQ ID NO: 923105 - DNA, 15 bp, Homo sapiens
taaatgccttcccca

SEQ ID NO: 923106 - DNA, 15 bp, Homo sapiens
ctaaatgccttcccc

SEQ ID NO: 923107 - DNA, 15 bp, Homo sapiens
tctaaatgccttccc

SEQ ID NO: 923108 - DNA, 15 bp, Homo sapiens
atctaaatgccttcc

SEQ ID NO: 923109 - DNA, 15 bp, Homo sapiens
tatctaaatgccttc

SEQ ID NO: 923110 - DNA, 15 bp, Homo sapiens
gtatctaaatgcctt

SEQ ID NO: 923111 - DNA, 15 bp, Homo sapiens
ggtatctaaatgcct

SEQ ID NO: 923112 - DNA, 15 bp, Homo sapiens
tggtatctaaatgcc

SEQ ID NO: 923113 - DNA, 15 bp, Homo sapiens
ttggtatctaaatgc

SEQ ID NO: 923114 - DNA, 15 bp, Homo sapiens
tttggtatctaaatg

SEQ ID NO: 923115 - DNA, 15 bp, Homo sapiens
ttttggtatctaaat

SEQ ID NO: 923116 - DNA, 15 bp, Homo sapiens
tttttggtatctaaa

SEQ ID NO: 923117 - DNA, 15 bp, Homo sapiens
gtttttggtatctaa

SEQ ID NO: 923118 - DNA, 15 bp, Homo sapiens
agtttttggtatcta

SEQ ID NO: 923119 - DNA, 15 bp, Homo sapiens
cagtttttggtatct

SEQ ID NO: 923120 - DNA, 15 bp, Homo sapiens
ccagtttttggtatc

SEQ ID NO: 923121 - DNA, 15 bp, Homo sapiens
gccagtttttggtat

SEQ ID NO: 923122 - DNA, 15 bp, Homo sapiens
ggccagtttttggta

SEQ ID NO: 923123 - DNA, 15 bp, Homo sapiens
tggccagtttttggt

SEQ ID NO: 923124 - DNA, 15 bp, Homo sapiens
gtggccagtttttgg

SEQ ID NO: 923125 - DNA, 15 bp, Homo sapiens
agtggccagtttttg

SEQ ID NO: 923126 - DNA, 15 bp, Homo sapiens
cagtggccagttttt

SEQ ID NO: 923127 - DNA, 15 bp, Homo sapiens
ccagtggccagtttt

SEQ ID NO: 923128 - DNA, 15 bp, Homo sapiens
cccagtggccagttt

SEQ ID NO: 923129 - DNA, 15 bp, Homo sapiens
gcccagtggccagtt

SEQ ID NO: 923130 - DNA, 15 bp, Homo sapiens
tgcccagtggccagt

SEQ ID NO: 923131 - DNA, 15 bp, Homo sapiens
atgcccagtggccag

SEQ ID NO: 923132 - DNA, 15 bp, Homo sapiens
gatgcccagtggcca

SEQ ID NO: 923133 - DNA, 15 bp, Homo sapiens
tgatgcccagtggcc

SEQ ID NO: 923134 - DNA, 15 bp, Homo sapiens
atgatgcccagtggc

SEQ ID NO: 923135 - DNA, 15 bp, Homo sapiens
aatgatgcccagtgg

SEQ ID NO: 923136 - DNA, 15 bp, Homo sapiens
caatgatgcccagtg

SEQ ID NO: 923137 - DNA, 15 bp, Homo sapiens
gcaatgatgcccagt

SEQ ID NO: 923138 - DNA, 15 bp, Homo sapiens
agcaatgatgcccag

SEQ ID NO: 923139 - DNA, 15 bp, Homo sapiens
gagcaatgatgccca

SEQ ID NO: 923140 - DNA, 15 bp, Homo sapiens
agagcaatgatgccc

SEQ ID NO: 923141 - DNA, 15 bp, Homo sapiens
gagagcaatgatgcc

SEQ ID NO: 923142 - DNA, 15 bp, Homo sapiens
tgagagcaatgatgc

SEQ ID NO: 923143 - DNA, 15 bp, Homo sapiens
ctgagagcaatgatg

SEQ ID NO: 923144 - DNA, 15 bp, Homo sapiens
tctgagagcaatgat

SEQ ID NO: 923145 - DNA, 15 bp, Homo sapiens
ctctgagagcaatga

SEQ ID NO: 923146 - DNA, 15 bp, Homo sapiens
actctgagagcaatg

SEQ ID NO: 923147 - DNA, 15 bp, Homo sapiens
tactctgagagcaat

SEQ ID NO: 923148 - DNA, 15 bp, Homo sapiens
atactctgagagcaa

SEQ ID NO: 923149 - DNA, 15 bp, Homo sapiens
gatactctgagagca

SEQ ID NO: 923150 - DNA, 15 bp, Homo sapiens
tgatactctgagagc

SEQ ID NO: 923151 - DNA, 15 bp, Homo sapiens
atgatactctgagag

SEQ ID NO: 923152 - DNA, 15 bp, Homo sapiens
aatgatactctgaga

SEQ ID NO: 923153 - DNA, 15 bp, Homo sapiens
caatgatactctgag

SEQ ID NO: 923154 - DNA, 15 bp, Homo sapiens
gcaatgatactctga

SEQ ID NO: 923155 - DNA, 15 bp, Homo sapiens
ggcaatgatactctg

SEQ ID NO: 923156 - DNA, 15 bp, Homo sapiens
tggcaatgatactct

SEQ ID NO: 923157 - DNA, 15 bp, Homo sapiens
gtggcaatgatactc

SEQ ID NO: 923158 - DNA, 15 bp, Homo sapiens
agtggcaatgatact

SEQ ID NO: 923159 - DNA, 15 bp, Homo sapiens
tagtggcaatgatac

SEQ ID NO: 923160 - DNA, 15 bp, Homo sapiens
ctagtggcaatgata

SEQ ID NO: 923161 - DNA, 15 bp, Homo sapiens
actagtggcaatgat

SEQ ID NO: 923162 - DNA, 15 bp, Homo sapiens
gactagtggcaatga

SEQ ID NO: 923163 - DNA, 15 bp, Homo sapiens
agactagtggcaatg

SEQ ID NO: 923164 - DNA, 15 bp, Homo sapiens
gagactagtggcaat

SEQ ID NO: 923165 - DNA, 15 bp, Homo sapiens
agagactagtggcaa

SEQ ID NO: 923166 - DNA, 15 bp, Homo sapiens
gagagactagtggca

SEQ ID NO: 923167 - DNA, 15 bp, Homo sapiens
tgagagactagtggc

SEQ ID NO: 923168 - DNA, 15 bp, Homo sapiens
ctgagagactagtgg

SEQ ID NO: 923169 - DNA, 15 bp, Homo sapiens
actgagagactagtg

SEQ ID NO: 923170 - DNA, 15 bp, Homo sapiens
tactgagagactagt

SEQ ID NO: 923171 - DNA, 15 bp, Homo sapiens
ctactgagagactag

SEQ ID NO: 923172 - DNA, 15 bp, Homo sapiens
tctactgagagacta

SEQ ID NO: 923173 - DNA, 15 bp, Homo sapiens
gtctactgagagact

SEQ ID NO: 923174 - DNA, 15 bp, Homo sapiens
tgtctactgagagac

SEQ ID NO: 923175 - DNA, 15 bp, Homo sapiens
ttgtctactgagaga

SEQ ID NO: 923176 - DNA, 15 bp, Homo sapiens
cttgtctactgagag

SEQ ID NO: 923177 - DNA, 15 bp, Homo sapiens
acttgtctactgaga

SEQ ID NO: 923178 - DNA, 15 bp, Homo sapiens
aacttgtctactgag

SEQ ID NO: 923179 - DNA, 15 bp, Homo sapiens
taacttgtctactga

SEQ ID NO: 923180 - DNA, 15 bp, Homo sapiens
ctaacttgtctactg

SEQ ID NO: 923181 - DNA, 15 bp, Homo sapiens
tctaacttgtctact

SEQ ID NO: 923182 - DNA, 15 bp, Homo sapiens
ttctaacttgtctac

SEQ ID NO: 923183 - DNA, 15 bp, Homo sapiens
tttctaacttgtcta

SEQ ID NO: 923184 - DNA, 15 bp, Homo sapiens
ttttctaacttgtct

SEQ ID NO: 923185 - DNA, 15 bp, Homo sapiens
tttttctaacttgtc

SEQ ID NO: 923186 - DNA, 15 bp, Homo sapiens
atttttctaacttgt

SEQ ID NO: 923187 - DNA, 15 bp, Homo sapiens
tatttttctaacttg

SEQ ID NO: 923188 - DNA, 15 bp, Homo sapiens
atatttttctaactt

SEQ ID NO: 923189 - DNA, 15 bp, Homo sapiens
catatttttctaact

SEQ ID NO: 923190 - DNA, 15 bp, Homo sapiens
acatatttttctaac

SEQ ID NO: 923191 - DNA, 15 bp, Homo sapiens
tacatatttttctaa

SEQ ID NO: 923192 - DNA, 15 bp, Homo sapiens
atacatatttttcta

SEQ ID NO: 923193 - DNA, 15 bp, Homo sapiens
tatacatatttttct

SEQ ID NO: 923194 - DNA, 15 bp, Homo sapiens
atatacatatttttc

SEQ ID NO: 923195 - DNA, 15 bp, Homo sapiens
tatatacatattttt

SEQ ID NO: 923196 - DNA, 15 bp, Homo sapiens
atatatacatatttt

SEQ ID NO: 923197 - DNA, 15 bp, Homo sapiens
aatatatacatattt

SEQ ID NO: 923198 - DNA, 15 bp, Homo sapiens
aaatatatacatatt

SEQ ID NO: 923199 - DNA, 15 bp, Homo sapiens
taaatatatacatat

SEQ ID NO: 923200 - DNA, 15 bp, Homo sapiens
ttaaatatatacata

SEQ ID NO: 923201 - DNA, 15 bp, Homo sapiens
tttaaatatatacat

SEQ ID NO: 923202 - DNA, 15 bp, Homo sapiens
gtttaaatatataca

SEQ ID NO: 923203 - DNA, 15 bp, Homo sapiens
ggtttaaatatatac

SEQ ID NO: 923204 - DNA, 15 bp, Homo sapiens
tggtttaaatatata

SEQ ID NO: 923205 - DNA, 15 bp, Homo sapiens
atggtttaaatatat

SEQ ID NO: 923206 - DNA, 15 bp, Homo sapiens
catggtttaaatata

SEQ ID NO: 923207 - DNA, 15 bp, Homo sapiens
tcatggtttaaatat

SEQ ID NO: 923208 - DNA, 15 bp, Homo sapiens
ctcatggtttaaata

SEQ ID NO: 923209 - DNA, 15 bp, Homo sapiens
actcatggtttaaat

SEQ ID NO: 923210 - DNA, 15 bp, Homo sapiens
aactcatggtttaaa

SEQ ID NO: 923211 - DNA, 15 bp, Homo sapiens
gaactcatggtttaa

SEQ ID NO: 923212 - DNA, 15 bp, Homo sapiens
tgaactcatggttta

SEQ ID NO: 923213 - DNA, 15 bp, Homo sapiens
atgaactcatggttt

SEQ ID NO: 923214 - DNA, 15 bp, Homo sapiens
tatgaactcatggtt

SEQ ID NO: 923215 - DNA, 15 bp, Homo sapiens
atatgaactcatggt

SEQ ID NO: 923216 - DNA, 15 bp, Homo sapiens
aatatgaactcatgg

SEQ ID NO: 923217 - DNA, 15 bp, Homo sapiens
caatatgaactcatg

SEQ ID NO: 923218 - DNA, 15 bp, Homo sapiens
acaatatgaactcat

SEQ ID NO: 923219 - DNA, 15 bp, Homo sapiens
aacaatatgaactca

SEQ ID NO: 923220 - DNA, 15 bp, Homo sapiens
taacaatatgaactc

SEQ ID NO: 923221 - DNA, 15 bp, Homo sapiens
ataacaatatgaact

SEQ ID NO: 923222 - DNA, 15 bp, Homo sapiens
aataacaatatgaac

SEQ ID NO: 923223 - DNA, 15 bp, Homo sapiens
aaataacaatatgaa

SEQ ID NO: 923224 - DNA, 15 bp, Homo sapiens
gaaataacaatatga

SEQ ID NO: 923225 - DNA, 15 bp, Homo sapiens
ggaaataacaatatg

SEQ ID NO: 923226 - DNA, 15 bp, Homo sapiens
tggaaataacaatat

SEQ ID NO: 923227 - DNA, 15 bp, Homo sapiens
ctggaaataacaata

SEQ ID NO: 923228 - DNA, 15 bp, Homo sapiens
actggaaataacaat

SEQ ID NO: 923229 - DNA, 15 bp, Homo sapiens
aactggaaataacaa

SEQ ID NO: 923230 - DNA, 15 bp, Homo sapiens
aaactggaaataaca

SEQ ID NO: 923231 - DNA, 15 bp, Homo sapiens
taaactggaaataac

SEQ ID NO: 923232 - DNA, 15 bp, Homo sapiens
ttaaactggaaataa

SEQ ID NO: 923233 - DNA, 15 bp, Homo sapiens
attaaactggaaata

SEQ ID NO: 923234 - DNA, 15 bp, Homo sapiens
aattaaactggaaat

SEQ ID NO: 923235 - DNA, 15 bp, Homo sapiens
taattaaactggaaa

SEQ ID NO: 923236 - DNA, 15 bp, Homo sapiens
ataattaaactggaa

SEQ ID NO: 923237 - DNA, 15 bp, Homo sapiens
tataattaaactgga

SEQ ID NO: 923238 - DNA, 15 bp, Homo sapiens
ttataattaaactgg

SEQ ID NO: 923239 - DNA, 15 bp, Homo sapiens
gttataattaaactg

SEQ ID NO: 923240 - DNA, 15 bp, Homo sapiens
tgttataattaaact

SEQ ID NO: 923241 - DNA, 15 bp, Homo sapiens
atgttataattaaac

SEQ ID NO: 923242 - DNA, 15 bp, Homo sapiens
aatgttataattaaa

SEQ ID NO: 923243 - DNA, 15 bp, Homo sapiens
taatgttataattaa

SEQ ID NO: 923244 - DNA, 15 bp, Homo sapiens
ataatgttataatta

SEQ ID NO: 923245 - DNA, 15 bp, Homo sapiens
cataatgttataatt

SEQ ID NO: 923246 - DNA, 15 bp, Homo sapiens
ccataatgttataat

SEQ ID NO: 923247 - DNA, 15 bp, Homo sapiens
cccataatgttataa

SEQ ID NO: 923248 - DNA, 15 bp, Homo sapiens
ccccataatgttata

SEQ ID NO: 923249 - DNA, 15 bp, Homo sapiens
accccataatgttat

SEQ ID NO: 923250 - DNA, 15 bp, Homo sapiens
taccccataatgtta

SEQ ID NO: 923251 - DNA, 15 bp, Homo sapiens
ttaccccataatgtt

SEQ ID NO: 923252 - DNA, 15 bp, Homo sapiens
cttaccccataatgt

SEQ ID NO: 923253 - DNA, 15 bp, Homo sapiens
acttaccccataatg

SEQ ID NO: 923254 - DNA, 15 bp, Homo sapiens
tacttaccccataat

SEQ ID NO: 923255 - DNA, 15 bp, Homo sapiens
ttacttaccccataa

SEQ ID NO: 923256 - DNA, 15 bp, Homo sapiens
tttacttaccccata

SEQ ID NO: 923257 - DNA, 15 bp, Homo sapiens
atttacttaccccat

SEQ ID NO: 923258 - DNA, 15 bp, Homo sapiens
tatttacttacccca

SEQ ID NO: 923259 - DNA, 15 bp, Homo sapiens
ctatttacttacccc

SEQ ID NO: 923260 - DNA, 15 bp, Homo sapiens
actatttacttaccc

SEQ ID NO: 923261 - DNA, 15 bp, Homo sapiens
tactatttacttacc

SEQ ID NO: 923262 - DNA, 15 bp, Homo sapiens
atactatttacttac

SEQ ID NO: 923263 - DNA, 15 bp, Homo sapiens
gatactatttactta

SEQ ID NO: 923264 - DNA, 15 bp, Homo sapiens
cgatactatttactt

SEQ ID NO: 923265 - DNA, 15 bp, Homo sapiens
ccgatactatttact

SEQ ID NO: 923266 - DNA, 15 bp, Homo sapiens
tccgatactatttac

SEQ ID NO: 923267 - DNA, 15 bp, Homo sapiens
atccgatactattta

SEQ ID NO: 923268 - DNA, 15 bp, Homo sapiens
aatccgatactattt

SEQ ID NO: 923269 - DNA, 15 bp, Homo sapiens
aaatccgatactatt

SEQ ID NO: 923270 - DNA, 15 bp, Homo sapiens
aaaatccgatactat

SEQ ID NO: 923271 - DNA, 15 bp, Homo sapiens
aaaaatccgatacta

SEQ ID NO: 923272 - DNA, 15 bp, Homo sapiens
taaaaatccgatact

SEQ ID NO: 923273 - DNA, 15 bp, Homo sapiens
gtaaaaatccgatac

SEQ ID NO: 923274 - DNA, 15 bp, Homo sapiens
agtaaaaatccgata

SEQ ID NO: 923275 - DNA, 15 bp, Homo sapiens
tagtaaaaatccgat

SEQ ID NO: 923276 - DNA, 15 bp, Homo sapiens
ttagtaaaaatccga

SEQ ID NO: 923277 - DNA, 15 bp, Homo sapiens
cttagtaaaaatccg

SEQ ID NO: 923278 - DNA, 15 bp, Homo sapiens
gcttagtaaaaatcc

SEQ ID NO: 923279 - DNA, 15 bp, Homo sapiens
agcttagtaaaaatc

SEQ ID NO: 923280 - DNA, 15 bp, Homo sapiens
aagcttagtaaaaat

SEQ ID NO: 923281 - DNA, 15 bp, Homo sapiens
gaagcttagtaaaaa

SEQ ID NO: 923282 - DNA, 15 bp, Homo sapiens
agaagcttagtaaaa

SEQ ID NO: 923283 - DNA, 15 bp, Homo sapiens
aagaagcttagtaaa

SEQ ID NO: 923284 - DNA, 15 bp, Homo sapiens
aaagaagcttagtaa

SEQ ID NO: 923285 - DNA, 15 bp, Homo sapiens
caaagaagcttagta

SEQ ID NO: 923286 - DNA, 15 bp, Homo sapiens
tcaaagaagcttagt

SEQ ID NO: 923287 - DNA, 15 bp, Homo sapiens
atcaaagaagcttag

SEQ ID NO: 923288 - DNA, 15 bp, Homo sapiens
aatcaaagaagctta

SEQ ID NO: 923289 - DNA, 15 bp, Homo sapiens
aaatcaaagaagctt

SEQ ID NO: 923290 - DNA, 15 bp, Homo sapiens
aaaatcaaagaagct

SEQ ID NO: 923291 - DNA, 15 bp, Homo sapiens
caaaatcaaagaagc

SEQ ID NO: 923292 - DNA, 15 bp, Homo sapiens
gcaaaatcaaagaag

SEQ ID NO: 923293 - DNA, 15 bp, Homo sapiens
tgcaaaatcaaagaa

SEQ ID NO: 923294 - DNA, 15 bp, Homo sapiens
gtgcaaaatcaaaga

SEQ ID NO: 923295 - DNA, 15 bp, Homo sapiens
agtgcaaaatcaaag

SEQ ID NO: 923296 - DNA, 15 bp, Homo sapiens
aagtgcaaaatcaaa

SEQ ID NO: 923297 - DNA, 15 bp, Homo sapiens
caagtgcaaaatcaa

SEQ ID NO: 923298 - DNA, 15 bp, Homo sapiens
acaagtgcaaaatca

SEQ ID NO: 923299 - DNA, 15 bp, Homo sapiens
tacaagtgcaaaatc

SEQ ID NO: 923300 - DNA, 15 bp, Homo sapiens
atacaagtgcaaaat

SEQ ID NO: 923301 - DNA, 15 bp, Homo sapiens
aatacaagtgcaaaa

SEQ ID NO: 923302 - DNA, 15 bp, Homo sapiens
aaatacaagtgcaaa

SEQ ID NO: 923303 - DNA, 15 bp, Homo sapiens
aaaatacaagtgcaa

SEQ ID NO: 923304 - DNA, 15 bp, Homo sapiens
aaaaatacaagtgca

SEQ ID NO: 923305 - DNA, 15 bp, Homo sapiens
aaaaaatacaagtgc

SEQ ID NO: 923306 - DNA, 15 bp, Homo sapiens
aaaaaaatacaagtg

SEQ ID NO: 923307 - DNA, 15 bp, Homo sapiens
gaaaaaaatacaagt

SEQ ID NO: 923308 - DNA, 15 bp, Homo sapiens
agaaaaaaatacaag

SEQ ID NO: 923309 - DNA, 15 bp, Homo sapiens
aagaaaaaaatacaa

SEQ ID NO: 923310 - DNA, 15 bp, Homo sapiens
taagaaaaaaataca

SEQ ID NO: 923311 - DNA, 15 bp, Homo sapiens
gtaagaaaaaaatac

SEQ ID NO: 923312 - DNA, 15 bp, Homo sapiens
tgtaagaaaaaaata

SEQ ID NO: 923313 - DNA, 15 bp, Homo sapiens
atgtaagaaaaaaat

SEQ ID NO: 923314 - DNA, 15 bp, Homo sapiens
tatgtaagaaaaaaa

SEQ ID NO: 923315 - DNA, 15 bp, Homo sapiens
ctatgtaagaaaaaa

SEQ ID NO: 923316 - DNA, 15 bp, Homo sapiens
tctatgtaagaaaaa

SEQ ID NO: 923317 - DNA, 15 bp, Homo sapiens
ttctatgtaagaaaa

SEQ ID NO: 923318 - DNA, 15 bp, Homo sapiens
tttctatgtaagaaa

SEQ ID NO: 923319 - DNA, 15 bp, Homo sapiens
ttttctatgtaagaa

SEQ ID NO: 923320 - DNA, 15 bp, Homo sapiens
gttttctatgtaaga

SEQ ID NO: 923321 - DNA, 15 bp, Homo sapiens
ggttttctatgtaag

SEQ ID NO: 923322 - DNA, 15 bp, Homo sapiens
aggttttctatgtaa

SEQ ID NO: 923323 - DNA, 15 bp, Homo sapiens
aaggttttctatgta

SEQ ID NO: 923324 - DNA, 15 bp, Homo sapiens
aaaggttttctatgt

SEQ ID NO: 923325 - DNA, 15 bp, Homo sapiens
taaaggttttctatg

SEQ ID NO: 923326 - DNA, 15 bp, Homo sapiens
ataaaggttttctat

SEQ ID NO: 923327 - DNA, 15 bp, Homo sapiens
aataaaggttttcta

SEQ ID NO: 923328 - DNA, 15 bp, Homo sapiens
taataaaggttttct

SEQ ID NO: 923329 - DNA, 15 bp, Homo sapiens
ataataaaggttttc

SEQ ID NO: 923330 - DNA, 15 bp, Homo sapiens
aataataaaggtttt

SEQ ID NO: 923331 - DNA, 15 bp, Homo sapiens
taataataaaggttt

SEQ ID NO: 923332 - DNA, 15 bp, Homo sapiens
ttaataataaaggtt

SEQ ID NO: 923333 - DNA, 15 bp, Homo sapiens
gttaataataaaggt

SEQ ID NO: 923334 - DNA, 15 bp, Homo sapiens
tgttaataataaagg

SEQ ID NO: 923335 - DNA, 15 bp, Homo sapiens
atgttaataataaag

SEQ ID NO: 923336 - DNA, 15 bp, Homo sapiens
aatgttaataataaa

SEQ ID NO: 923337 - DNA, 15 bp, Homo sapiens
taatgttaataataa

SEQ ID NO: 923338 - DNA, 15 bp, Homo sapiens
ttaatgttaataata

SEQ ID NO: 923339 - DNA, 15 bp, Homo sapiens
tttaatgttaataat

SEQ ID NO: 923340 - DNA, 15 bp, Homo sapiens
ttttaatgttaataa

SEQ ID NO: 923341 - DNA, 15 bp, Homo sapiens
attttaatgttaata

SEQ ID NO: 923342 - DNA, 15 bp, Homo sapiens
tattttaatgttaat

SEQ ID NO: 923343 - DNA, 15 bp, Homo sapiens
atattttaatgttaa

SEQ ID NO: 923344 - DNA, 15 bp, Homo sapiens
aatattttaatgtta

SEQ ID NO: 923345 - DNA, 15 bp, Homo sapiens
aaatattttaatgtt

SEQ ID NO: 923346 - DNA, 15 bp, Homo sapiens
caaatattttaatgt

SEQ ID NO: 923347 - DNA, 15 bp, Homo sapiens
acaaatattttaatg

SEQ ID NO: 923348 - DNA, 15 bp, Homo sapiens
aacaaatattttaat

SEQ ID NO: 923349 - DNA, 15 bp, Homo sapiens
aaacaaatattttaa

SEQ ID NO: 923350 - DNA, 15 bp, Homo sapiens
aaaacaaatatttta

SEQ ID NO: 923351 - DNA, 15 bp, Homo sapiens
taaaacaaatatttt

SEQ ID NO: 923352 - DNA, 15 bp, Homo sapiens
ataaaacaaatattt

SEQ ID NO: 923353 - DNA, 15 bp, Homo sapiens
gataaaacaaatatt

SEQ ID NO: 923354 - DNA, 15 bp, Homo sapiens
ggataaaacaaatat

SEQ ID NO: 923355 - DNA, 15 bp, Homo sapiens
aggataaaacaaata

SEQ ID NO: 923356 - DNA, 15 bp, Homo sapiens
taggataaaacaaat

SEQ ID NO: 923357 - DNA, 15 bp, Homo sapiens
gtaggataaaacaaa

SEQ ID NO: 923358 - DNA, 15 bp, Homo sapiens
tgtaggataaaacaa

SEQ ID NO: 923359 - DNA, 15 bp, Homo sapiens
ttgtaggataaaaca

SEQ ID NO: 923360 - DNA, 15 bp, Homo sapiens
attgtaggataaaac

SEQ ID NO: 923361 - DNA, 15 bp, Homo sapiens
tattgtaggataaaa

SEQ ID NO: 923362 - DNA, 15 bp, Homo sapiens
atattgtaggataaa

SEQ ID NO: 923363 - DNA, 15 bp, Homo sapiens
tatattgtaggataa

SEQ ID NO: 923364 - DNA, 15 bp, Homo sapiens
gtatattgtaggata

SEQ ID NO: 923365 - DNA, 15 bp, Homo sapiens
tgtatattgtaggat

SEQ ID NO: 923366 - DNA, 15 bp, Homo sapiens
atgtatattgtagga

SEQ ID NO: 923367 - DNA, 15 bp, Homo sapiens
tatgtatattgtagg

SEQ ID NO: 923368 - DNA, 15 bp, Homo sapiens
gtatgtatattgtag

SEQ ID NO: 923369 - DNA, 15 bp, Homo sapiens
tgtatgtatattgta

SEQ ID NO: 923370 - DNA, 15 bp, Homo sapiens
ttgtatgtatattgt

SEQ ID NO: 923371 - DNA, 15 bp, Homo sapiens
attgtatgtatattg

SEQ ID NO: 923372 - DNA, 15 bp, Homo sapiens
tattgtatgtatatt

SEQ ID NO: 923373 - DNA, 15 bp, Homo sapiens
ttattgtatgtatat

SEQ ID NO: 923374 - DNA, 15 bp, Homo sapiens
attattgtatgtata

SEQ ID NO: 923375 - DNA, 15 bp, Homo sapiens
aattattgtatgtat

SEQ ID NO: 923376 - DNA, 15 bp, Homo sapiens
aaattattgtatgta

SEQ ID NO: 923377 - DNA, 15 bp, Homo sapiens
caaattattgtatgt

SEQ ID NO: 923378 - DNA, 15 bp, Homo sapiens
tcaaattattgtatg

SEQ ID NO: 923379 - DNA, 15 bp, Homo sapiens
ttcaaattattgtat

SEQ ID NO: 923380 - DNA, 15 bp, Homo sapiens
tttcaaattattgta

SEQ ID NO: 923381 - DNA, 15 bp, Homo sapiens
ttttcaaattattgt

SEQ ID NO: 923382 - DNA, 15 bp, Homo sapiens
tttttcaaattattg

SEQ ID NO: 923383 - DNA, 15 bp, Homo sapiens
atttttcaaattatt

SEQ ID NO: 923384 - DNA, 15 bp, Homo sapiens
tatttttcaaattat

SEQ ID NO: 923385 - DNA, 15 bp, Homo sapiens
ttatttttcaaatta

SEQ ID NO: 923386 - DNA, 15 bp, Homo sapiens
attatttttcaaatt

SEQ ID NO: 923387 - DNA, 15 bp, Homo sapiens
tattatttttcaaat

SEQ ID NO: 923388 - DNA, 15 bp, Homo sapiens
gtattatttttcaaa

SEQ ID NO: 923389 - DNA, 15 bp, Homo sapiens
agtattatttttcaa

SEQ ID NO: 923390 - DNA, 15 bp, Homo sapiens
aagtattatttttca

SEQ ID NO: 923391 - DNA, 15 bp, Homo sapiens
caagtattatttttc

SEQ ID NO: 923392 - DNA, 15 bp, Homo sapiens
tcaagtattattttt

SEQ ID NO: 923393 - DNA, 15 bp, Homo sapiens
ttcaagtattatttt

SEQ ID NO: 923394 - DNA, 15 bp, Homo sapiens
attcaagtattattt

SEQ ID NO: 923395 - DNA, 15 bp, Homo sapiens
aattcaagtattatt

SEQ ID NO: 923396 - DNA, 15 bp, Homo sapiens
caattcaagtattat

SEQ ID NO: 923397 - DNA, 15 bp, Homo sapiens
tcaattcaagtatta

SEQ ID NO: 923398 - DNA, 15 bp, Homo sapiens
atcaattcaagtatt

SEQ ID NO: 923399 - DNA, 15 bp, Homo sapiens
tatcaattcaagtat

SEQ ID NO: 923400 - DNA, 15 bp, Homo sapiens
atatcaattcaagta

SEQ ID NO: 923401 - DNA, 15 bp, Homo sapiens
aatatcaattcaagt

SEQ ID NO: 923402 - DNA, 15 bp, Homo sapiens
taatatcaattcaag

SEQ ID NO: 923403 - DNA, 15 bp, Homo sapiens
ttaatatcaattcaa

SEQ ID NO: 923404 - DNA, 15 bp, Homo sapiens
attaatatcaattca

SEQ ID NO: 923405 - DNA, 15 bp, Homo sapiens
tattaatatcaattc

SEQ ID NO: 923406 - DNA, 15 bp, Homo sapiens
ctattaatatcaatt

SEQ ID NO: 923407 - DNA, 15 bp, Homo sapiens
actattaatatcaat

SEQ ID NO: 923408 - DNA, 15 bp, Homo sapiens
tactattaatatcaa

SEQ ID NO: 923409 - DNA, 15 bp, Homo sapiens
ttactattaatatca

SEQ ID NO: 923410 - DNA, 15 bp, Homo sapiens
gttactattaatatc

SEQ ID NO: 923411 - DNA, 15 bp, Homo sapiens
tgttactattaatat

SEQ ID NO: 923412 - DNA, 15 bp, Homo sapiens
ttgttactattaata

SEQ ID NO: 923413 - DNA, 15 bp, Homo sapiens
gttgttactattaat

SEQ ID NO: 923414 - DNA, 15 bp, Homo sapiens
tgttgttactattaa

SEQ ID NO: 923415 - DNA, 15 bp, Homo sapiens
ttgttgttactatta

SEQ ID NO: 923416 - DNA, 15 bp, Homo sapiens
gttgttgttactatt

SEQ ID NO: 923417 - DNA, 15 bp, Homo sapiens
tgttgttgttactat

SEQ ID NO: 923418 - DNA, 15 bp, Homo sapiens
ctgttgttgttacta

SEQ ID NO: 923419 - DNA, 15 bp, Homo sapiens
gctgttgttgttact

SEQ ID NO: 923420 - DNA, 15 bp, Homo sapiens
tgctgttgttgttac

SEQ ID NO: 923421 - DNA, 15 bp, Homo sapiens
gtgctgttgttgtta

SEQ ID NO: 923422 - DNA, 15 bp, Homo sapiens
agtgctgttgttgtt

SEQ ID NO: 923423 - DNA, 15 bp, Homo sapiens
cagtgctgttgttgt

SEQ ID NO: 923424 - DNA, 15 bp, Homo sapiens
gcagtgctgttgttg

SEQ ID NO: 923425 - DNA, 15 bp, Homo sapiens
agcagtgctgttgtt

SEQ ID NO: 923426 - DNA, 15 bp, Homo sapiens
cagcagtgctgttgt

SEQ ID NO: 923427 - DNA, 15 bp, Homo sapiens
gcagcagtgctgttg

SEQ ID NO: 923428 - DNA, 15 bp, Homo sapiens
ggcagcagtgctgtt

SEQ ID NO: 923429 - DNA, 15 bp, Homo sapiens
tggcagcagtgctgt

SEQ ID NO: 923430 - DNA, 15 bp, Homo sapiens
ttggcagcagtgctg

SEQ ID NO: 923431 - DNA, 15 bp, Homo sapiens
tttggcagcagtgct

SEQ ID NO: 923432 - DNA, 15 bp, Homo sapiens
gtttggcagcagtgc

SEQ ID NO: 923433 - DNA, 15 bp, Homo sapiens
tgtttggcagcagtg

SEQ ID NO: 923434 - DNA, 15 bp, Homo sapiens
atgtttggcagcagt

SEQ ID NO: 923435 - DNA, 15 bp, Homo sapiens
tatgtttggcagcag

SEQ ID NO: 923436 - DNA, 15 bp, Homo sapiens
ctatgtttggcagca

SEQ ID NO: 923437 - DNA, 15 bp, Homo sapiens
actatgtttggcagc

SEQ ID NO: 923438 - DNA, 15 bp, Homo sapiens
aactatgtttggcag

SEQ ID NO: 923439 - DNA, 15 bp, Homo sapiens
aaactatgtttggca

SEQ ID NO: 923440 - DNA, 15 bp, Homo sapiens
taaactatgtttggc

SEQ ID NO: 923441 - DNA, 15 bp, Homo sapiens
ttaaactatgtttgg

SEQ ID NO: 923442 - DNA, 15 bp, Homo sapiens
tttaaactatgtttg

SEQ ID NO: 923443 - DNA, 15 bp, Homo sapiens
ctttaaactatgttt

SEQ ID NO: 923444 - DNA, 15 bp, Homo sapiens
actttaaactatgtt

SEQ ID NO: 923445 - DNA, 15 bp, Homo sapiens
aactttaaactatgt

SEQ ID NO: 923446 - DNA, 15 bp, Homo sapiens
aaactttaaactatg

SEQ ID NO: 923447 - DNA, 15 bp, Homo sapiens
aaaactttaaactat

SEQ ID NO: 923448 - DNA, 15 bp, Homo sapiens
taaaactttaaacta

SEQ ID NO: 923449 - DNA, 15 bp, Homo sapiens
ataaaactttaaact

SEQ ID NO: 923450 - DNA, 15 bp, Homo sapiens
aataaaactttaaac

SEQ ID NO: 923451 - DNA, 15 bp, Homo sapiens
aaataaaactttaaa

SEQ ID NO: 923452 - DNA, 15 bp, Homo sapiens
gaaataaaactttaa

SEQ ID NO: 923453 - DNA, 15 bp, Homo sapiens
tgaaataaaacttta

SEQ ID NO: 923454 - DNA, 15 bp, Homo sapiens
ctgaaataaaacttt

SEQ ID NO: 923455 - DNA, 15 bp, Homo sapiens
cctgaaataaaactt

SEQ ID NO: 923456 - DNA, 15 bp, Homo sapiens
acctgaaataaaact

SEQ ID NO: 923457 - DNA, 15 bp, Homo sapiens
gacctgaaataaaac

SEQ ID NO: 923458 - DNA, 15 bp, Homo sapiens
agacctgaaataaaa

SEQ ID NO: 923459 - DNA, 15 bp, Homo sapiens
aagacctgaaataaa

SEQ ID NO: 923460 - DNA, 15 bp, Homo sapiens
taagacctgaaataa

SEQ ID NO: 923461 - DNA, 15 bp, Homo sapiens
ataagacctgaaata

SEQ ID NO: 923462 - DNA, 15 bp, Homo sapiens
aataagacctgaaat

SEQ ID NO: 923463 - DNA, 15 bp, Homo sapiens
aaataagacctgaaa

SEQ ID NO: 923464 - DNA, 15 bp, Homo sapiens
aaaataagacctgaa

SEQ ID NO: 923465 - DNA, 15 bp, Homo sapiens
gaaaataagacctga

SEQ ID NO: 923466 - DNA, 15 bp, Homo sapiens
agaaaataagacctg

SEQ ID NO: 923467 - DNA, 15 bp, Homo sapiens
aagaaaataagacct

SEQ ID NO: 923468 - DNA, 15 bp, Homo sapiens
gaagaaaataagacc

SEQ ID NO: 923469 - DNA, 15 bp, Homo sapiens
tgaagaaaataagac

SEQ ID NO: 923470 - DNA, 15 bp, Homo sapiens
ctgaagaaaataaga

SEQ ID NO: 923471 - DNA, 15 bp, Homo sapiens
tctgaagaaaataag

SEQ ID NO: 923472 - DNA, 15 bp, Homo sapiens
ttctgaagaaaataa

SEQ ID NO: 923473 - DNA, 15 bp, Homo sapiens
attctgaagaaaata

SEQ ID NO: 923474 - DNA, 15 bp, Homo sapiens
tattctgaagaaaat

SEQ ID NO: 923475 - DNA, 15 bp, Homo sapiens
atattctgaagaaaa

SEQ ID NO: 923476 - DNA, 15 bp, Homo sapiens
tatattctgaagaaa

SEQ ID NO: 923477 - DNA, 15 bp, Homo sapiens
atatattctgaagaa

SEQ ID NO: 923478 - DNA, 15 bp, Homo sapiens
gatatattctgaaga

SEQ ID NO: 923479 - DNA, 15 bp, Homo sapiens
agatatattctgaag

SEQ ID NO: 923480 - DNA, 15 bp, Homo sapiens
aagatatattctgaa

SEQ ID NO: 923481 - DNA, 15 bp, Homo sapiens
caagatatattctga

SEQ ID NO: 923482 - DNA, 15 bp, Homo sapiens
gcaagatatattctg

SEQ ID NO: 923483 - DNA, 15 bp, Homo sapiens
agcaagatatattct

SEQ ID NO: 923484 - DNA, 15 bp, Homo sapiens
cagcaagatatattc

SEQ ID NO: 923485 - DNA, 15 bp, Homo sapiens
tcagcaagatatatt

SEQ ID NO: 923486 - DNA, 15 bp, Homo sapiens
ctcagcaagatatat

SEQ ID NO: 923487 - DNA, 15 bp, Homo sapiens
tctcagcaagatata

SEQ ID NO: 923488 - DNA, 15 bp, Homo sapiens
ttctcagcaagatat

SEQ ID NO: 923489 - DNA, 15 bp, Homo sapiens
attctcagcaagata

SEQ ID NO: 923490 - DNA, 15 bp, Homo sapiens
cattctcagcaagat

SEQ ID NO: 923491 - DNA, 15 bp, Homo sapiens
acattctcagcaaga

SEQ ID NO: 923492 - DNA, 15 bp, Homo sapiens
tacattctcagcaag

SEQ ID NO: 923493 - DNA, 15 bp, Homo sapiens
atacattctcagcaa

SEQ ID NO: 923494 - DNA, 15 bp, Homo sapiens
tatacattctcagca

SEQ ID NO: 923495 - DNA, 15 bp, Homo sapiens
ctatacattctcagc

SEQ ID NO: 923496 - DNA, 15 bp, Homo sapiens
cctatacattctcag

SEQ ID NO: 923497 - DNA, 15 bp, Homo sapiens
gcctatacattctca

SEQ ID NO: 923498 - DNA, 15 bp, Homo sapiens
tgcctatacattctc

SEQ ID NO: 923499 - DNA, 15 bp, Homo sapiens
ttgcctatacattct

SEQ ID NO: 923500 - DNA, 15 bp, Homo sapiens
tttgcctatacattc

SEQ ID NO: 923501 - DNA, 15 bp, Homo sapiens
ctttgcctatacatt

SEQ ID NO: 923502 - DNA, 15 bp, Homo sapiens
actttgcctatacat

SEQ ID NO: 923503 - DNA, 15 bp, Homo sapiens
tactttgcctataca

SEQ ID NO: 923504 - DNA, 15 bp, Homo sapiens
atactttgcctatac

SEQ ID NO: 923505 - DNA, 15 bp, Homo sapiens
aatactttgcctata

SEQ ID NO: 923506 - DNA, 15 bp, Homo sapiens
gaatactttgcctat

SEQ ID NO: 923507 - DNA, 15 bp, Homo sapiens
agaatactttgccta

SEQ ID NO: 923508 - DNA, 15 bp, Homo sapiens
tagaatactttgcct

SEQ ID NO: 923509 - DNA, 15 bp, Homo sapiens
gtagaatactttgcc

SEQ ID NO: 923510 - DNA, 15 bp, Homo sapiens
tgtagaatactttgc

SEQ ID NO: 923511 - DNA, 15 bp, Homo sapiens
gtgtagaatactttg

SEQ ID NO: 923512 - DNA, 15 bp, Homo sapiens
agtgtagaatacttt

SEQ ID NO: 923513 - DNA, 15 bp, Homo sapiens
aagtgtagaatactt

SEQ ID NO: 923514 - DNA, 15 bp, Homo sapiens
taagtgtagaatact

SEQ ID NO: 923515 - DNA, 15 bp, Homo sapiens
gtaagtgtagaatac

SEQ ID NO: 923516 - DNA, 15 bp, Homo sapiens
agtaagtgtagaata

SEQ ID NO: 923517 - DNA, 15 bp, Homo sapiens
aagtaagtgtagaat

SEQ ID NO: 923518 - DNA, 15 bp, Homo sapiens
caagtaagtgtagaa

SEQ ID NO: 923519 - DNA, 15 bp, Homo sapiens
tcaagtaagtgtaga

SEQ ID NO: 923520 - DNA, 15 bp, Homo sapiens
ttcaagtaagtgtag

SEQ ID NO: 923521 - DNA, 15 bp, Homo sapiens
tttcaagtaagtgta

SEQ ID NO: 923522 - DNA, 15 bp, Homo sapiens
atttcaagtaagtgt

SEQ ID NO: 923523 - DNA, 15 bp, Homo sapiens
tatttcaagtaagtg

SEQ ID NO: 923524 - DNA, 15 bp, Homo sapiens
ttatttcaagtaagt

SEQ ID NO: 923525 - DNA, 15 bp, Homo sapiens
attatttcaagtaag

SEQ ID NO: 923526 - DNA, 15 bp, Homo sapiens
aattatttcaagtaa

SEQ ID NO: 923527 - DNA, 15 bp, Homo sapiens
caattatttcaagta

SEQ ID NO: 923528 - DNA, 15 bp, Homo sapiens
acaattatttcaagt

SEQ ID NO: 923529 - DNA, 15 bp, Homo sapiens
gacaattatttcaag

SEQ ID NO: 923530 - DNA, 15 bp, Homo sapiens
agacaattatttcaa

SEQ ID NO: 923531 - DNA, 15 bp, Homo sapiens
aagacaattatttca

SEQ ID NO: 923532 - DNA, 15 bp, Homo sapiens
gaagacaattatttc

SEQ ID NO: 923533 - DNA, 15 bp, Homo sapiens
tgaagacaattattt

SEQ ID NO: 923534 - DNA, 15 bp, Homo sapiens
atgaagacaattatt

SEQ ID NO: 923535 - DNA, 15 bp, Homo sapiens
catgaagacaattat

SEQ ID NO: 923536 - DNA, 15 bp, Homo sapiens
gcatgaagacaatta

SEQ ID NO: 923537 - DNA, 15 bp, Homo sapiens
cgcatgaagacaatt

SEQ ID NO: 923538 - DNA, 15 bp, Homo sapiens
ccgcatgaagacaat

SEQ ID NO: 923539 - DNA, 15 bp, Homo sapiens
accgcatgaagacaa

SEQ ID NO: 923540 - DNA, 15 bp, Homo sapiens
aaccgcatgaagaca

SEQ ID NO: 923541 - DNA, 15 bp, Homo sapiens
taaccgcatgaagac

SEQ ID NO: 923542 - DNA, 15 bp, Homo sapiens
ataaccgcatgaaga

SEQ ID NO: 923543 - DNA, 15 bp, Homo sapiens
cataaccgcatgaag

SEQ ID NO: 923544 - DNA, 15 bp, Homo sapiens
acataaccgcatgaa

SEQ ID NO: 923545 - DNA, 15 bp, Homo sapiens
aacataaccgcatga

SEQ ID NO: 923546 - DNA, 15 bp, Homo sapiens
taacataaccgcatg

SEQ ID NO: 923547 - DNA, 15 bp, Homo sapiens
ataacataaccgcat

SEQ ID NO: 923548 - DNA, 15 bp, Homo sapiens
tataacataaccgca

SEQ ID NO: 923549 - DNA, 15 bp, Homo sapiens
gtataacataaccgc

SEQ ID NO: 923550 - DNA, 15 bp, Homo sapiens
tgtataacataaccg

SEQ ID NO: 923551 - DNA, 15 bp, Homo sapiens
atgtataacataacc

SEQ ID NO: 923552 - DNA, 15 bp, Homo sapiens
aatgtataacataac

SEQ ID NO: 923553 - DNA, 15 bp, Homo sapiens
aaatgtataacataa

SEQ ID NO: 923554 - DNA, 15 bp, Homo sapiens
caaatgtataacata

SEQ ID NO: 923555 - DNA, 15 bp, Homo sapiens
tcaaatgtataacat

SEQ ID NO: 923556 - DNA, 15 bp, Homo sapiens
atcaaatgtataaca

SEQ ID NO: 923557 - DNA, 15 bp, Homo sapiens
tatcaaatgtataac

SEQ ID NO: 923558 - DNA, 15 bp, Homo sapiens
atatcaaatgtataa

SEQ ID NO: 923559 - DNA, 15 bp, Homo sapiens
tatatcaaatgtata

SEQ ID NO: 923560 - DNA, 15 bp, Homo sapiens
atatatcaaatgtat

SEQ ID NO: 923561 - DNA, 15 bp, Homo sapiens
tatatatcaaatgta

SEQ ID NO: 923562 - DNA, 15 bp, Homo sapiens
ctatatatcaaatgt

SEQ ID NO: 923563 - DNA, 15 bp, Homo sapiens
actatatatcaaatg

SEQ ID NO: 923564 - DNA, 15 bp, Homo sapiens
aactatatatcaaat

SEQ ID NO: 923565 - DNA, 15 bp, Homo sapiens
taactatatatcaaa

SEQ ID NO: 923566 - DNA, 15 bp, Homo sapiens
ctaactatatatcaa

SEQ ID NO: 923567 - DNA, 15 bp, Homo sapiens
cctaactatatatca

SEQ ID NO: 923568 - DNA, 15 bp, Homo sapiens
gcctaactatatatc

SEQ ID NO: 923569 - DNA, 15 bp, Homo sapiens
agcctaactatatat

SEQ ID NO: 923570 - DNA, 15 bp, Homo sapiens
gagcctaactatata

SEQ ID NO: 923571 - DNA, 15 bp, Homo sapiens
tgagcctaactatat

SEQ ID NO: 923572 - DNA, 15 bp, Homo sapiens
atgagcctaactata

SEQ ID NO: 923573 - DNA, 15 bp, Homo sapiens
aatgagcctaactat

SEQ ID NO: 923574 - DNA, 15 bp, Homo sapiens
aaatgagcctaacta

SEQ ID NO: 923575 - DNA, 15 bp, Homo sapiens
caaatgagcctaact

SEQ ID NO: 923576 - DNA, 15 bp, Homo sapiens
acaaatgagcctaac

SEQ ID NO: 923577 - DNA, 15 bp, Homo sapiens
aacaaatgagcctaa

SEQ ID NO: 923578 - DNA, 15 bp, Homo sapiens
aaacaaatgagccta

SEQ ID NO: 923579 - DNA, 15 bp, Homo sapiens
aaaacaaatgagcct

SEQ ID NO: 923580 - DNA, 15 bp, Homo sapiens
aaaaacaaatgagcc

SEQ ID NO: 923581 - DNA, 15 bp, Homo sapiens
gaaaaacaaatgagc

SEQ ID NO: 923582 - DNA, 15 bp, Homo sapiens
tgaaaaacaaatgag

SEQ ID NO: 923583 - DNA, 15 bp, Homo sapiens
atgaaaaacaaatga

SEQ ID NO: 923584 - DNA, 15 bp, Homo sapiens
aatgaaaaacaaatg

SEQ ID NO: 923585 - DNA, 15 bp, Homo sapiens
aaatgaaaaacaaat

SEQ ID NO: 923586 - DNA, 15 bp, Homo sapiens
aaaatgaaaaacaaa

SEQ ID NO: 923587 - DNA, 15 bp, Homo sapiens
aaaaatgaaaaacaa

SEQ ID NO: 923588 - DNA, 15 bp, Homo sapiens
aaaaaatgaaaaaca

SEQ ID NO: 923589 - DNA, 15 bp, Homo sapiens
aaaaaaatgaaaaac

SEQ ID NO: 923590 - DNA, 15 bp, Homo sapiens
aaaaaaaatgaaaaa

SEQ ID NO: 923591 - DNA, 15 bp, Homo sapiens
taaaaaaaatgaaaa

SEQ ID NO: 923592 - DNA, 15 bp, Homo sapiens
ataaaaaaaatgaaa

SEQ ID NO: 923593 - DNA, 15 bp, Homo sapiens
aataaaaaaaatgaa

SEQ ID NO: 923594 - DNA, 15 bp, Homo sapiens
aaataaaaaaaatga

SEQ ID NO: 923595 - DNA, 15 bp, Homo sapiens
aaaataaaaaaaatg

SEQ ID NO: 923596 - DNA, 15 bp, Homo sapiens
taaaataaaaaaaat

SEQ ID NO: 923597 - DNA, 15 bp, Homo sapiens
ctaaaataaaaaaaa

SEQ ID NO: 923598 - DNA, 15 bp, Homo sapiens
cctaaaataaaaaaa

SEQ ID NO: 923599 - DNA, 15 bp, Homo sapiens
ccctaaaataaaaaa

SEQ ID NO: 923600 - DNA, 15 bp, Homo sapiens
tccctaaaataaaaa

SEQ ID NO: 923601 - DNA, 15 bp, Homo sapiens
atccctaaaataaaa

SEQ ID NO: 923602 - DNA, 15 bp, Homo sapiens
aatccctaaaataaa

SEQ ID NO: 923603 - DNA, 15 bp, Homo sapiens
aaatccctaaaataa

SEQ ID NO: 923604 - DNA, 15 bp, Homo sapiens
aaaatccctaaaata

SEQ ID NO: 923605 - DNA, 15 bp, Homo sapiens
aaaaatccctaaaat

SEQ ID NO: 923606 - DNA, 15 bp, Homo sapiens
aaaaaatccctaaaa

SEQ ID NO: 923607 - DNA, 15 bp, Homo sapiens
aaaaaaatccctaaa

SEQ ID NO: 923608 - DNA, 15 bp, Homo sapiens
gaaaaaaatccctaa

SEQ ID NO: 923609 - DNA, 15 bp, Homo sapiens
ggaaaaaaatcccta

SEQ ID NO: 923610 - DNA, 15 bp, Homo sapiens
aggaaaaaaatccct

SEQ ID NO: 923611 - DNA, 15 bp, Homo sapiens
aaggaaaaaaatccc

SEQ ID NO: 923612 - DNA, 15 bp, Homo sapiens
aaaggaaaaaaatcc

SEQ ID NO: 923613 - DNA, 15 bp, Homo sapiens
taaaggaaaaaaatc

SEQ ID NO: 923614 - DNA, 15 bp, Homo sapiens
ataaaggaaaaaaat

SEQ ID NO: 923615 - DNA, 15 bp, Homo sapiens
aataaaggaaaaaaa

SEQ ID NO: 923616 - DNA, 15 bp, Homo sapiens
caataaaggaaaaaa

SEQ ID NO: 923617 - DNA, 15 bp, Homo sapiens
tcaataaaggaaaaa

SEQ ID NO: 923618 - DNA, 15 bp, Homo sapiens
ttcaataaaggaaaa

SEQ ID NO: 923619 - DNA, 15 bp, Homo sapiens
attcaataaaggaaa

SEQ ID NO: 923620 - DNA, 15 bp, Homo sapiens
aattcaataaaggaa

SEQ ID NO: 923621 - DNA, 15 bp, Homo sapiens
aaattcaataaagga

SEQ ID NO: 923622 - DNA, 15 bp, Homo sapiens
aaaattcaataaagg

SEQ ID NO: 923623 - DNA, 15 bp, Homo sapiens
taaaattcaataaag

SEQ ID NO: 923624 - DNA, 15 bp, Homo sapiens
ttaaaattcaataaa

SEQ ID NO: 923625 - DNA, 15 bp, Homo sapiens
attaaaattcaataa

SEQ ID NO: 923626 - DNA, 15 bp, Homo sapiens
tattaaaattcaata

SEQ ID NO: 923627 - DNA, 15 bp, Homo sapiens
atattaaaattcaat

SEQ ID NO: 923628 - DNA, 15 bp, Homo sapiens
tatattaaaattcaa

SEQ ID NO: 923629 - DNA, 15 bp, Homo sapiens
atatattaaaattca

SEQ ID NO: 923630 - DNA, 15 bp, Homo sapiens
tatatattaaaattc

SEQ ID NO: 923631 - DNA, 15 bp, Homo sapiens
gtatatattaaaatt

SEQ ID NO: 923632 - DNA, 15 bp, Homo sapiens
tgtatatattaaaat

SEQ ID NO: 923633 - DNA, 15 bp, Homo sapiens
ttgtatatattaaaa

SEQ ID NO: 923634 - DNA, 15 bp, Homo sapiens
attgtatatattaaa

SEQ ID NO: 923635 - DNA, 15 bp, Homo sapiens
tattgtatatattaa

SEQ ID NO: 923636 - DNA, 15 bp, Homo sapiens
atattgtatatatta

SEQ ID NO: 923637 - DNA, 15 bp, Homo sapiens
aatattgtatatatt

SEQ ID NO: 923638 - DNA, 15 bp, Homo sapiens
aaatattgtatatat

SEQ ID NO: 923639 - DNA, 15 bp, Homo sapiens
taaatattgtatata

SEQ ID NO: 923640 - DNA, 15 bp, Homo sapiens
ataaatattgtatat

SEQ ID NO: 923641 - DNA, 15 bp, Homo sapiens
tataaatattgtata

SEQ ID NO: 923642 - DNA, 15 bp, Homo sapiens
atataaatattgtat

SEQ ID NO: 923643 - DNA, 15 bp, Homo sapiens
tatataaatattgta

SEQ ID NO: 923644 - DNA, 15 bp, Homo sapiens
atatataaatattgt

SEQ ID NO: 923645 - DNA, 15 bp, Homo sapiens
catatataaatattg

SEQ ID NO: 923646 - DNA, 15 bp, Homo sapiens
gcatatataaatatt

SEQ ID NO: 923647 - DNA, 15 bp, Homo sapiens
tgcatatataaatat

SEQ ID NO: 923648 - DNA, 15 bp, Homo sapiens
ttgcatatataaata

SEQ ID NO: 923649 - DNA, 15 bp, Homo sapiens
tttgcatatataaat

SEQ ID NO: 923650 - DNA, 15 bp, Homo sapiens
ttttgcatatataaa

SEQ ID NO: 923651 - DNA, 15 bp, Homo sapiens
attttgcatatataa

SEQ ID NO: 923652 - DNA, 15 bp, Homo sapiens
tattttgcatatata

SEQ ID NO: 923653 - DNA, 15 bp, Homo sapiens
atattttgcatatat

SEQ ID NO: 923654 - DNA, 15 bp, Homo sapiens
aatattttgcatata

SEQ ID NO: 923655 - DNA, 15 bp, Homo sapiens
aaatattttgcatat

SEQ ID NO: 923656 - DNA, 15 bp, Homo sapiens
taaatattttgcata

SEQ ID NO: 923657 - DNA, 15 bp, Homo sapiens
ttaaatattttgcat

SEQ ID NO: 923658 - DNA, 15 bp, Homo sapiens
attaaatattttgca

SEQ ID NO: 923659 - DNA, 15 bp, Homo sapiens
gattaaatattttgc

SEQ ID NO: 923660 - DNA, 15 bp, Homo sapiens
tgattaaatattttg

SEQ ID NO: 923661 - DNA, 15 bp, Homo sapiens
ctgattaaatatttt

SEQ ID NO: 923662 - DNA, 15 bp, Homo sapiens
tctgattaaatattt

SEQ ID NO: 923663 - DNA, 15 bp, Homo sapiens
ctctgattaaatatt

SEQ ID NO: 923664 - DNA, 15 bp, Homo sapiens
tctctgattaaatat

SEQ ID NO: 923665 - DNA, 15 bp, Homo sapiens
ttctctgattaaata

SEQ ID NO: 923666 - DNA, 15 bp, Homo sapiens
tttctctgattaaat

SEQ ID NO: 923667 - DNA, 15 bp, Homo sapiens
atttctctgattaaa

SEQ ID NO: 923668 - DNA, 15 bp, Homo sapiens
gatttctctgattaa

SEQ ID NO: 923669 - DNA, 15 bp, Homo sapiens
agatttctctgatta

SEQ ID NO: 923670 - DNA, 15 bp, Homo sapiens
aagatttctctgatt

SEQ ID NO: 923671 - DNA, 15 bp, Homo sapiens
taagatttctctgat

SEQ ID NO: 923672 - DNA, 15 bp, Homo sapiens
ttaagatttctctga

SEQ ID NO: 923673 - DNA, 15 bp, Homo sapiens
attaagatttctctg

SEQ ID NO: 923674 - DNA, 15 bp, Homo sapiens
aattaagatttctct

SEQ ID NO: 923675 - DNA, 15 bp, Homo sapiens
gaattaagatttctc

SEQ ID NO: 923676 - DNA, 15 bp, Homo sapiens
agaattaagatttct

SEQ ID NO: 923677 - DNA, 15 bp, Homo sapiens
cagaattaagatttc

SEQ ID NO: 923678 - DNA, 15 bp, Homo sapiens
ccagaattaagattt

SEQ ID NO: 923679 - DNA, 15 bp, Homo sapiens
accagaattaagatt

SEQ ID NO: 923680 - DNA, 15 bp, Homo sapiens
gaccagaattaagat

SEQ ID NO: 923681 - DNA, 15 bp, Homo sapiens
agaccagaattaaga

SEQ ID NO: 923682 - DNA, 15 bp, Homo sapiens
aagaccagaattaag

SEQ ID NO: 923683 - DNA, 15 bp, Homo sapiens
taagaccagaattaa

SEQ ID NO: 923684 - DNA, 15 bp, Homo sapiens
gtaagaccagaatta

SEQ ID NO: 923685 - DNA, 15 bp, Homo sapiens
cgtaagaccagaatt

SEQ ID NO: 923686 - DNA, 15 bp, Homo sapiens
gcgtaagaccagaat

SEQ ID NO: 923687 - DNA, 15 bp, Homo sapiens
ggcgtaagaccagaa

SEQ ID NO: 923688 - DNA, 15 bp, Homo sapiens
aggcgtaagaccaga

SEQ ID NO: 923689 - DNA, 15 bp, Homo sapiens
aaggcgtaagaccag

SEQ ID NO: 923690 - DNA, 15 bp, Homo sapiens
aaaggcgtaagacca

SEQ ID NO: 923691 - DNA, 15 bp, Homo sapiens
gaaaggcgtaagacc

SEQ ID NO: 923692 - DNA, 15 bp, Homo sapiens
tgaaaggcgtaagac

SEQ ID NO: 923693 - DNA, 15 bp, Homo sapiens
atgaaaggcgtaaga

SEQ ID NO: 923694 - DNA, 15 bp, Homo sapiens
tatgaaaggcgtaag

SEQ ID NO: 923695 - DNA, 15 bp, Homo sapiens
atatgaaaggcgtaa

SEQ ID NO: 923696 - DNA, 15 bp, Homo sapiens
aatatgaaaggcgta

SEQ ID NO: 923697 - DNA, 15 bp, Homo sapiens
taatatgaaaggcgt

SEQ ID NO: 923698 - DNA, 15 bp, Homo sapiens
ataatatgaaaggcg

SEQ ID NO: 923699 - DNA, 15 bp, Homo sapiens
aataatatgaaaggc

SEQ ID NO: 923700 - DNA, 15 bp, Homo sapiens
gaataatatgaaagg

SEQ ID NO: 923701 - DNA, 15 bp, Homo sapiens
agaataatatgaaag

SEQ ID NO: 923702 - DNA, 15 bp, Homo sapiens
cagaataatatgaaa

SEQ ID NO: 923703 - DNA, 15 bp, Homo sapiens
gcagaataatatgaa

SEQ ID NO: 923704 - DNA, 15 bp, Homo sapiens
agcagaataatatga

SEQ ID NO: 923705 - DNA, 15 bp, Homo sapiens
gagcagaataatatg

SEQ ID NO: 923706 - DNA, 15 bp, Homo sapiens
ggagcagaataatat

SEQ ID NO: 923707 - DNA, 15 bp, Homo sapiens
tggagcagaataata

SEQ ID NO: 923708 - DNA, 15 bp, Homo sapiens
gtggagcagaataat

SEQ ID NO: 923709 - DNA, 15 bp, Homo sapiens
ggtggagcagaataa

SEQ ID NO: 923710 - DNA, 15 bp, Homo sapiens
gggtggagcagaata

SEQ ID NO: 923711 - DNA, 15 bp, Homo sapiens
agggtggagcagaat

SEQ ID NO: 923712 - DNA, 15 bp, Homo sapiens
gagggtggagcagaa

SEQ ID NO: 923713 - DNA, 15 bp, Homo sapiens
agagggtggagcaga

SEQ ID NO: 923714 - DNA, 15 bp, Homo sapiens
cagagggtggagcag

SEQ ID NO: 923715 - DNA, 15 bp, Homo sapiens
acagagggtggagca

SEQ ID NO: 923716 - DNA, 15 bp, Homo sapiens
tacagagggtggagc

SEQ ID NO: 923717 - DNA, 15 bp, Homo sapiens
ctacagagggtggag

SEQ ID NO: 923718 - DNA, 15 bp, Homo sapiens
cctacagagggtgga

SEQ ID NO: 923719 - DNA, 15 bp, Homo sapiens
acctacagagggtgg

SEQ ID NO: 923720 - DNA, 15 bp, Homo sapiens
tacctacagagggtg

SEQ ID NO: 923721 - DNA, 15 bp, Homo sapiens
ttacctacagagggt

SEQ ID NO: 923722 - DNA, 15 bp, Homo sapiens
gttacctacagaggg

SEQ ID NO: 923723 - DNA, 15 bp, Homo sapiens
agttacctacagagg

SEQ ID NO: 923724 - DNA, 15 bp, Homo sapiens
aagttacctacagag

SEQ ID NO: 923725 - DNA, 15 bp, Homo sapiens
taagttacctacaga

SEQ ID NO: 923726 - DNA, 15 bp, Homo sapiens
ataagttacctacag

SEQ ID NO: 923727 - DNA, 15 bp, Homo sapiens
aataagttacctaca

SEQ ID NO: 923728 - DNA, 15 bp, Homo sapiens
taataagttacctac

SEQ ID NO: 923729 - DNA, 15 bp, Homo sapiens
ataataagttaccta

SEQ ID NO: 923730 - DNA, 15 bp, Homo sapiens
gataataagttacct

SEQ ID NO: 923731 - DNA, 15 bp, Homo sapiens
agataataagttacc

SEQ ID NO: 923732 - DNA, 15 bp, Homo sapiens
aagataataagttac

SEQ ID NO: 923733 - DNA, 15 bp, Homo sapiens
aaagataataagtta

SEQ ID NO: 923734 - DNA, 15 bp, Homo sapiens
gaaagataataagtt

SEQ ID NO: 923735 - DNA, 15 bp, Homo sapiens
agaaagataataagt

SEQ ID NO: 923736 - DNA, 15 bp, Homo sapiens
gagaaagataataag

SEQ ID NO: 923737 - DNA, 15 bp, Homo sapiens
tgagaaagataataa

SEQ ID NO: 923738 - DNA, 15 bp, Homo sapiens
atgagaaagataata

SEQ ID NO: 923739 - DNA, 15 bp, Homo sapiens
catgagaaagataat

SEQ ID NO: 923740 - DNA, 15 bp, Homo sapiens
acatgagaaagataa

SEQ ID NO: 923741 - DNA, 15 bp, Homo sapiens
aacatgagaaagata

SEQ ID NO: 923742 - DNA, 15 bp, Homo sapiens
aaacatgagaaagat

SEQ ID NO: 923743 - DNA, 15 bp, Homo sapiens
gaaacatgagaaaga

SEQ ID NO: 923744 - DNA, 15 bp, Homo sapiens
ggaaacatgagaaag

SEQ ID NO: 923745 - DNA, 15 bp, Homo sapiens
aggaaacatgagaaa

SEQ ID NO: 923746 - DNA, 15 bp, Homo sapiens
aaggaaacatgagaa

SEQ ID NO: 923747 - DNA, 15 bp, Homo sapiens
aaaggaaacatgaga

SEQ ID NO: 923748 - DNA, 15 bp, Homo sapiens
aaaaggaaacatgag

SEQ ID NO: 923749 - DNA, 15 bp, Homo sapiens
aaaaaggaaacatga

SEQ ID NO: 923750 - DNA, 15 bp, Homo sapiens
caaaaaggaaacatg

SEQ ID NO: 923751 - DNA, 15 bp, Homo sapiens
ccaaaaaggaaacat

SEQ ID NO: 923752 - DNA, 15 bp, Homo sapiens
tccaaaaaggaaaca

SEQ ID NO: 923753 - DNA, 15 bp, Homo sapiens
ttccaaaaaggaaac

SEQ ID NO: 923754 - DNA, 15 bp, Homo sapiens
tttccaaaaaggaaa

SEQ ID NO: 923755 - DNA, 15 bp, Homo sapiens
gtttccaaaaaggaa

SEQ ID NO: 923756 - DNA, 15 bp, Homo sapiens
tgtttccaaaaagga

SEQ ID NO: 923757 - DNA, 15 bp, Homo sapiens
atgtttccaaaaagg

SEQ ID NO: 923758 - DNA, 15 bp, Homo sapiens
tatgtttccaaaaag

SEQ ID NO: 923759 - DNA, 15 bp, Homo sapiens
ttatgtttccaaaaa

SEQ ID NO: 923760 - DNA, 15 bp, Homo sapiens
tttatgtttccaaaa

SEQ ID NO: 923761 - DNA, 15 bp, Homo sapiens
gtttatgtttccaaa

SEQ ID NO: 923762 - DNA, 15 bp, Homo sapiens
tgtttatgtttccaa

SEQ ID NO: 923763 - DNA, 15 bp, Homo sapiens
ttgtttatgtttcca

SEQ ID NO: 923764 - DNA, 15 bp, Homo sapiens
tttgtttatgtttcc

SEQ ID NO: 923765 - DNA, 15 bp, Homo sapiens
ctttgtttatgtttc

SEQ ID NO: 923766 - DNA, 15 bp, Homo sapiens
tctttgtttatgttt

SEQ ID NO: 923767 - DNA, 15 bp, Homo sapiens
gtctttgtttatgtt

SEQ ID NO: 923768 - DNA, 15 bp, Homo sapiens
tgtctttgtttatgt

SEQ ID NO: 923769 - DNA, 15 bp, Homo sapiens
ttgtctttgtttatg

SEQ ID NO: 923770 - DNA, 15 bp, Homo sapiens
cttgtctttgtttat

SEQ ID NO: 923771 - DNA, 15 bp, Homo sapiens
tcttgtctttgttta

SEQ ID NO: 923772 - DNA, 15 bp, Homo sapiens
gtcttgtctttgttt

SEQ ID NO: 923773 - DNA, 15 bp, Homo sapiens
tgtcttgtctttgtt

SEQ ID NO: 923774 - DNA, 15 bp, Homo sapiens
ctgtcttgtctttgt

SEQ ID NO: 923775 - DNA, 15 bp, Homo sapiens
cctgtcttgtctttg

SEQ ID NO: 923776 - DNA, 15 bp, Homo sapiens
acctgtcttgtcttt

SEQ ID NO: 923777 - DNA, 15 bp, Homo sapiens
aacctgtcttgtctt

SEQ ID NO: 923778 - DNA, 15 bp, Homo sapiens
taacctgtcttgtct

SEQ ID NO: 923779 - DNA, 15 bp, Homo sapiens
gtaacctgtcttgtc

SEQ ID NO: 923780 - DNA, 15 bp, Homo sapiens
tgtaacctgtcttgt

SEQ ID NO: 923781 - DNA, 15 bp, Homo sapiens
atgtaacctgtcttg

SEQ ID NO: 923782 - DNA, 15 bp, Homo sapiens
catgtaacctgtctt

SEQ ID NO: 923783 - DNA, 15 bp, Homo sapiens
tcatgtaacctgtct

SEQ ID NO: 923784 - DNA, 15 bp, Homo sapiens
gtcatgtaacctgtc

SEQ ID NO: 923785 - DNA, 15 bp, Homo sapiens
tgtcatgtaacctgt

SEQ ID NO: 923786 - DNA, 15 bp, Homo sapiens
atgtcatgtaacctg

SEQ ID NO: 923787 - DNA, 15 bp, Homo sapiens
catgtcatgtaacct

SEQ ID NO: 923788 - DNA, 15 bp, Homo sapiens
acatgtcatgtaacc

SEQ ID NO: 923789 - DNA, 15 bp, Homo sapiens
tacatgtcatgtaac

SEQ ID NO: 923790 - DNA, 15 bp, Homo sapiens
atacatgtcatgtaa

SEQ ID NO: 923791 - DNA, 15 bp, Homo sapiens
tatacatgtcatgta

SEQ ID NO: 923792 - DNA, 15 bp, Homo sapiens
gtatacatgtcatgt

SEQ ID NO: 923793 - DNA, 15 bp, Homo sapiens
ggtatacatgtcatg

SEQ ID NO: 923794 - DNA, 15 bp, Homo sapiens
gggtatacatgtcat

SEQ ID NO: 923795 - DNA, 15 bp, Homo sapiens
agggtatacatgtca

SEQ ID NO: 923796 - DNA, 15 bp, Homo sapiens
aagggtatacatgtc

SEQ ID NO: 923797 - DNA, 15 bp, Homo sapiens
gaagggtatacatgt

SEQ ID NO: 923798 - DNA, 15 bp, Homo sapiens
agaagggtatacatg

SEQ ID NO: 923799 - DNA, 15 bp, Homo sapiens
cagaagggtatacat

SEQ ID NO: 923800 - DNA, 15 bp, Homo sapiens
gcagaagggtataca

SEQ ID NO: 923801 - DNA, 15 bp, Homo sapiens
tgcagaagggtatac

SEQ ID NO: 923802 - DNA, 15 bp, Homo sapiens
gtgcagaagggtata

SEQ ID NO: 923803 - DNA, 15 bp, Homo sapiens
ggtgcagaagggtat

SEQ ID NO: 923804 - DNA, 15 bp, Homo sapiens
aggtgcagaagggta

SEQ ID NO: 923805 - DNA, 15 bp, Homo sapiens
taggtgcagaagggt

SEQ ID NO: 923806 - DNA, 15 bp, Homo sapiens
ctaggtgcagaaggg

SEQ ID NO: 923807 - DNA, 15 bp, Homo sapiens
actaggtgcagaagg

SEQ ID NO: 923808 - DNA, 15 bp, Homo sapiens
aactaggtgcagaag

SEQ ID NO: 923809 - DNA, 15 bp, Homo sapiens
aaactaggtgcagaa

SEQ ID NO: 923810 - DNA, 15 bp, Homo sapiens
aaaactaggtgcaga

SEQ ID NO: 923811 - DNA, 15 bp, Homo sapiens
taaaactaggtgcag

SEQ ID NO: 923812 - DNA, 15 bp, Homo sapiens
ataaaactaggtgca

SEQ ID NO: 923813 - DNA, 15 bp, Homo sapiens
tataaaactaggtgc

SEQ ID NO: 923814 - DNA, 15 bp, Homo sapiens
gtataaaactaggtg

SEQ ID NO: 923815 - DNA, 15 bp, Homo sapiens
ggtataaaactaggt

SEQ ID NO: 923816 - DNA, 15 bp, Homo sapiens
aggtataaaactagg

SEQ ID NO: 923817 - DNA, 15 bp, Homo sapiens
aaggtataaaactag

SEQ ID NO: 923818 - DNA, 15 bp, Homo sapiens
taaggtataaaacta

SEQ ID NO: 923819 - DNA, 15 bp, Homo sapiens
gtaaggtataaaact

SEQ ID NO: 923820 - DNA, 15 bp, Homo sapiens
ggtaaggtataaaac

SEQ ID NO: 923821 - DNA, 15 bp, Homo sapiens
aggtaaggtataaaa

SEQ ID NO: 923822 - DNA, 15 bp, Homo sapiens
aaggtaaggtataaa

SEQ ID NO: 923823 - DNA, 15 bp, Homo sapiens
caaggtaaggtataa

SEQ ID NO: 923824 - DNA, 15 bp, Homo sapiens
acaaggtaaggtata

SEQ ID NO: 923825 - DNA, 15 bp, Homo sapiens
tacaaggtaaggtat

SEQ ID NO: 923826 - DNA, 15 bp, Homo sapiens
ctacaaggtaaggta

SEQ ID NO: 923827 - DNA, 15 bp, Homo sapiens
actacaaggtaaggt

SEQ ID NO: 923828 - DNA, 15 bp, Homo sapiens
aactacaaggtaagg

SEQ ID NO: 923829 - DNA, 15 bp, Homo sapiens
aaactacaaggtaag

SEQ ID NO: 923830 - DNA, 15 bp, Homo sapiens
taaactacaaggtaa

SEQ ID NO: 923831 - DNA, 15 bp, Homo sapiens
ataaactacaaggta

SEQ ID NO: 923832 - DNA, 15 bp, Homo sapiens
aataaactacaaggt

SEQ ID NO: 923833 - DNA, 15 bp, Homo sapiens
aaataaactacaagg

SEQ ID NO: 923834 - DNA, 15 bp, Homo sapiens
aaaataaactacaag

SEQ ID NO: 923835 - DNA, 15 bp, Homo sapiens
aaaaataaactacaa

SEQ ID NO: 923836 - DNA, 15 bp, Homo sapiens
taaaaataaactaca

SEQ ID NO: 923837 - DNA, 15 bp, Homo sapiens
ttaaaaataaactac

SEQ ID NO: 923838 - DNA, 15 bp, Homo sapiens
cttaaaaataaacta

SEQ ID NO: 923839 - DNA, 15 bp, Homo sapiens
gcttaaaaataaact

SEQ ID NO: 923840 - DNA, 15 bp, Homo sapiens
tgcttaaaaataaac

SEQ ID NO: 923841 - DNA, 15 bp, Homo sapiens
atgcttaaaaataaa

SEQ ID NO: 923842 - DNA, 15 bp, Homo sapiens
catgcttaaaaataa

SEQ ID NO: 923843 - DNA, 15 bp, Homo sapiens
acatgcttaaaaata

SEQ ID NO: 923844 - DNA, 15 bp, Homo sapiens
tacatgcttaaaaat

SEQ ID NO: 923845 - DNA, 15 bp, Homo sapiens
ttacatgcttaaaaa

SEQ ID NO: 923846 - DNA, 15 bp, Homo sapiens
tttacatgcttaaaa

SEQ ID NO: 923847 - DNA, 15 bp, Homo sapiens
atttacatgcttaaa

SEQ ID NO: 923848 - DNA, 15 bp, Homo sapiens
catttacatgcttaa

SEQ ID NO: 923849 - DNA, 15 bp, Homo sapiens
acatttacatgctta

SEQ ID NO: 923850 - DNA, 15 bp, Homo sapiens
aacatttacatgctt

SEQ ID NO: 923851 - DNA, 15 bp, Homo sapiens
gaacatttacatgct

SEQ ID NO: 923852 - DNA, 15 bp, Homo sapiens
tgaacatttacatgc

SEQ ID NO: 923853 - DNA, 15 bp, Homo sapiens
ttgaacatttacatg

SEQ ID NO: 923854 - DNA, 15 bp, Homo sapiens
attgaacatttacat

SEQ ID NO: 923855 - DNA, 15 bp, Homo sapiens
cattgaacatttaca

SEQ ID NO: 923856 - DNA, 15 bp, Homo sapiens
acattgaacatttac

SEQ ID NO: 923857 - DNA, 15 bp, Homo sapiens
aacattgaacattta

SEQ ID NO: 923858 - DNA, 15 bp, Homo sapiens
gaacattgaacattt

SEQ ID NO: 923859 - DNA, 15 bp, Homo sapiens
tgaacattgaacatt

SEQ ID NO: 923860 - DNA, 15 bp, Homo sapiens
atgaacattgaacat

SEQ ID NO: 923861 - DNA, 15 bp, Homo sapiens
catgaacattgaaca

SEQ ID NO: 923862 - DNA, 15 bp, Homo sapiens
tcatgaacattgaac

SEQ ID NO: 923863 - DNA, 15 bp, Homo sapiens
gtcatgaacattgaa

SEQ ID NO: 923864 - DNA, 15 bp, Homo sapiens
agtcatgaacattga

SEQ ID NO: 923865 - DNA, 15 bp, Homo sapiens
tagtcatgaacattg

SEQ ID NO: 923866 - DNA, 15 bp, Homo sapiens
ttagtcatgaacatt

SEQ ID NO: 923867 - DNA, 15 bp, Homo sapiens
tttagtcatgaacat

SEQ ID NO: 923868 - DNA, 15 bp, Homo sapiens
atttagtcatgaaca

SEQ ID NO: 923869 - DNA, 15 bp, Homo sapiens
aatttagtcatgaac

SEQ ID NO: 923870 - DNA, 15 bp, Homo sapiens
aaatttagtcatgaa

SEQ ID NO: 923871 - DNA, 15 bp, Homo sapiens
caaatttagtcatga

SEQ ID NO: 923872 - DNA, 15 bp, Homo sapiens
ccaaatttagtcatg

SEQ ID NO: 923873 - DNA, 15 bp, Homo sapiens
tccaaatttagtcat

SEQ ID NO: 923874 - DNA, 15 bp, Homo sapiens
gtccaaatttagtca

SEQ ID NO: 923875 - DNA, 15 bp, Homo sapiens
tgtccaaatttagtc

SEQ ID NO: 923876 - DNA, 15 bp, Homo sapiens
ctgtccaaatttagt

SEQ ID NO: 923877 - DNA, 15 bp, Homo sapiens
cctgtccaaatttag

SEQ ID NO: 923878 - DNA, 15 bp, Homo sapiens
tcctgtccaaattta

SEQ ID NO: 923879 - DNA, 15 bp, Homo sapiens
atcctgtccaaattt

SEQ ID NO: 923880 - DNA, 15 bp, Homo sapiens
gatcctgtccaaatt

SEQ ID NO: 923881 - DNA, 15 bp, Homo sapiens
tgatcctgtccaaat

SEQ ID NO: 923882 - DNA, 15 bp, Homo sapiens
atgatcctgtccaaa

SEQ ID NO: 923883 - DNA, 15 bp, Homo sapiens
tatgatcctgtccaa

SEQ ID NO: 923884 - DNA, 15 bp, Homo sapiens
ctatgatcctgtcca

SEQ ID NO: 923885 - DNA, 15 bp, Homo sapiens
cctatgatcctgtcc

SEQ ID NO: 923886 - DNA, 15 bp, Homo sapiens
tcctatgatcctgtc

SEQ ID NO: 923887 - DNA, 15 bp, Homo sapiens
ttcctatgatcctgt

SEQ ID NO: 923888 - DNA, 15 bp, Homo sapiens
gttcctatgatcctg

SEQ ID NO: 923889 - DNA, 15 bp, Homo sapiens
tgttcctatgatcct

SEQ ID NO: 923890 - DNA, 15 bp, Homo sapiens
gtgttcctatgatcc

SEQ ID NO: 923891 - DNA, 15 bp, Homo sapiens
tgtgttcctatgatc

SEQ ID NO: 923892 - DNA, 15 bp, Homo sapiens
ctgtgttcctatgat

SEQ ID NO: 923893 - DNA, 15 bp, Homo sapiens
tctgtgttcctatga

SEQ ID NO: 923894 - DNA, 15 bp, Homo sapiens
ttctgtgttcctatg

SEQ ID NO: 923895 - DNA, 15 bp, Homo sapiens
attctgtgttcctat

SEQ ID NO: 923896 - DNA, 15 bp, Homo sapiens
aattctgtgttccta

SEQ ID NO: 923897 - DNA, 15 bp, Homo sapiens
gaattctgtgttcct

SEQ ID NO: 923898 - DNA, 15 bp, Homo sapiens
tgaattctgtgttcc

SEQ ID NO: 923899 - DNA, 15 bp, Homo sapiens
ttgaattctgtgttc

SEQ ID NO: 923900 - DNA, 15 bp, Homo sapiens
tttgaattctgtgtt

SEQ ID NO: 923901 - DNA, 15 bp, Homo sapiens
ctttgaattctgtgt

SEQ ID NO: 923902 - DNA, 15 bp, Homo sapiens
actttgaattctgtg

SEQ ID NO: 923903 - DNA, 15 bp, Homo sapiens
cactttgaattctgt

SEQ ID NO: 923904 - DNA, 15 bp, Homo sapiens
tcactttgaattctg

SEQ ID NO: 923905 - DNA, 15 bp, Homo sapiens
ttcactttgaattct

SEQ ID NO: 923906 - DNA, 15 bp, Homo sapiens
tttcactttgaattc

SEQ ID NO: 923907 - DNA, 15 bp, Homo sapiens
atttcactttgaatt

SEQ ID NO: 923908 - DNA, 15 bp, Homo sapiens
aatttcactttgaat

SEQ ID NO: 923909 - DNA, 15 bp, Homo sapiens
taatttcactttgaa

SEQ ID NO: 923910 - DNA, 15 bp, Homo sapiens
ttaatttcactttga

SEQ ID NO: 923911 - DNA, 15 bp, Homo sapiens
tttaatttcactttg

SEQ ID NO: 923912 - DNA, 15 bp, Homo sapiens
ttttaatttcacttt

SEQ ID NO: 923913 - DNA, 15 bp, Homo sapiens
attttaatttcactt

SEQ ID NO: 923914 - DNA, 15 bp, Homo sapiens
cattttaatttcact

SEQ ID NO: 923915 - DNA, 15 bp, Homo sapiens
ccattttaatttcac

SEQ ID NO: 923916 - DNA, 15 bp, Homo sapiens
cccattttaatttca

SEQ ID NO: 923917 - DNA, 15 bp, Homo sapiens
gcccattttaatttc

SEQ ID NO: 923918 - DNA, 15 bp, Homo sapiens
agcccattttaattt

SEQ ID NO: 923919 - DNA, 15 bp, Homo sapiens
aagcccattttaatt

SEQ ID NO: 923920 - DNA, 15 bp, Homo sapiens
caagcccattttaat

SEQ ID NO: 923921 - DNA, 15 bp, Homo sapiens
ccaagcccattttaa

SEQ ID NO: 923922 - DNA, 15 bp, Homo sapiens
cccaagcccatttta

SEQ ID NO: 923923 - DNA, 15 bp, Homo sapiens
acccaagcccatttt

SEQ ID NO: 923924 - DNA, 15 bp, Homo sapiens
aacccaagcccattt

SEQ ID NO: 923925 - DNA, 15 bp, Homo sapiens
gaacccaagcccatt

SEQ ID NO: 923926 - DNA, 15 bp, Homo sapiens
agaacccaagcccat

SEQ ID NO: 923927 - DNA, 15 bp, Homo sapiens
aagaacccaagccca

SEQ ID NO: 923928 - DNA, 15 bp, Homo sapiens
aaagaacccaagccc

SEQ ID NO: 923929 - DNA, 15 bp, Homo sapiens
taaagaacccaagcc

SEQ ID NO: 923930 - DNA, 15 bp, Homo sapiens
gtaaagaacccaagc

SEQ ID NO: 923931 - DNA, 15 bp, Homo sapiens
agtaaagaacccaag

SEQ ID NO: 923932 - DNA, 15 bp, Homo sapiens
aagtaaagaacccaa

SEQ ID NO: 923933 - DNA, 15 bp, Homo sapiens
aaagtaaagaaccca

SEQ ID NO: 923934 - DNA, 15 bp, Homo sapiens
aatataataattagt

SEQ ID NO: 923935 - DNA, 15 bp, Homo sapiens
aaatataataattag

SEQ ID NO: 923936 - DNA, 15 bp, Homo sapiens
taaatataataatta

SEQ ID NO: 923937 - DNA, 15 bp, Homo sapiens
ttaaatataataatt

SEQ ID NO: 923938 - DNA, 15 bp, Homo sapiens
tttaaatataataat

SEQ ID NO: 923939 - DNA, 15 bp, Homo sapiens
gtttaaatataataa

SEQ ID NO: 923940 - DNA, 15 bp, Homo sapiens
tgtttaaatataata

SEQ ID NO: 923941 - DNA, 15 bp, Homo sapiens
atgtttaaatataat

SEQ ID NO: 923942 - DNA, 15 bp, Homo sapiens
aatgtttaaatataa

SEQ ID NO: 923943 - DNA, 15 bp, Homo sapiens
caatgtttaaatata

SEQ ID NO: 923944 - DNA, 15 bp, Homo sapiens
acaatgtttaaatat

SEQ ID NO: 923945 - DNA, 15 bp, Homo sapiens
tacaatgtttaaata

SEQ ID NO: 923946 - DNA, 15 bp, Homo sapiens
ctacaatgtttaaat

SEQ ID NO: 923947 - DNA, 15 bp, Homo sapiens
actacaatgtttaaa

SEQ ID NO: 923948 - DNA, 15 bp, Homo sapiens
tactacaatgtttaa

SEQ ID NO: 923949 - DNA, 15 bp, Homo sapiens
ctactacaatgttta

SEQ ID NO: 923950 - DNA, 15 bp, Homo sapiens
actactacaatgttt

SEQ ID NO: 923951 - DNA, 15 bp, Homo sapiens
aactactacaatgtt

SEQ ID NO: 923952 - DNA, 15 bp, Homo sapiens
taactactacaatgt

SEQ ID NO: 923953 - DNA, 15 bp, Homo sapiens
ataactactacaatg

SEQ ID NO: 923954 - DNA, 15 bp, Homo sapiens
gataactactacaat

SEQ ID NO: 923955 - DNA, 15 bp, Homo sapiens
tgataactactacaa

SEQ ID NO: 923956 - DNA, 15 bp, Homo sapiens
ctgataactactaca

SEQ ID NO: 923957 - DNA, 15 bp, Homo sapiens
actgataactactac

SEQ ID NO: 923958 - DNA, 15 bp, Homo sapiens
aactgataactacta

SEQ ID NO: 923959 - DNA, 15 bp, Homo sapiens
caactgataactact

SEQ ID NO: 923960 - DNA, 15 bp, Homo sapiens
tcaactgataactac

SEQ ID NO: 923961 - DNA, 15 bp, Homo sapiens
atcaactgataacta

SEQ ID NO: 923962 - DNA, 15 bp, Homo sapiens
aatcaactgataact

SEQ ID NO: 923963 - DNA, 15 bp, Homo sapiens
aaatcaactgataac

SEQ ID NO: 923964 - DNA, 15 bp, Homo sapiens
gaaatcaactgataa

SEQ ID NO: 923965 - DNA, 15 bp, Homo sapiens
agaaatcaactgata

SEQ ID NO: 923966 - DNA, 15 bp, Homo sapiens
tagaaatcaactgat

SEQ ID NO: 923967 - DNA, 15 bp, Homo sapiens
gtagaaatcaactga

SEQ ID NO: 923968 - DNA, 15 bp, Homo sapiens
agtagaaatcaactg

SEQ ID NO: 923969 - DNA, 15 bp, Homo sapiens
cagtagaaatcaact

SEQ ID NO: 923970 - DNA, 15 bp, Homo sapiens
acagtagaaatcaac

SEQ ID NO: 923971 - DNA, 15 bp, Homo sapiens
aacagtagaaatcaa

SEQ ID NO: 923972 - DNA, 15 bp, Homo sapiens
gaacagtagaaatca

SEQ ID NO: 923973 - DNA, 15 bp, Homo sapiens
tgaacagtagaaatc

SEQ ID NO: 923974 - DNA, 15 bp, Homo sapiens
atgaacagtagaaat

SEQ ID NO: 923975 - DNA, 15 bp, Homo sapiens
tatgaacagtagaaa

SEQ ID NO: 923976 - DNA, 15 bp, Homo sapiens
ttatgaacagtagaa

SEQ ID NO: 923977 - DNA, 15 bp, Homo sapiens
attatgaacagtaga

SEQ ID NO: 923978 - DNA, 15 bp, Homo sapiens
aattatgaacagtag

SEQ ID NO: 923979 - DNA, 15 bp, Homo sapiens
taattatgaacagta

SEQ ID NO: 923980 - DNA, 15 bp, Homo sapiens
ataattatgaacagt

SEQ ID NO: 923981 - DNA, 15 bp, Homo sapiens
gataattatgaacag

SEQ ID NO: 923982 - DNA, 15 bp, Homo sapiens
agataattatgaaca

SEQ ID NO: 923983 - DNA, 15 bp, Homo sapiens
aagataattatgaac

SEQ ID NO: 923984 - DNA, 15 bp, Homo sapiens
aaagataattatgaa

SEQ ID NO: 923985 - DNA, 15 bp, Homo sapiens
caaagataattatga

SEQ ID NO: 923986 - DNA, 15 bp, Homo sapiens
tcaaagataattatg

SEQ ID NO: 923987 - DNA, 15 bp, Homo sapiens
atcaaagataattat

SEQ ID NO: 923988 - DNA, 15 bp, Homo sapiens
gatcaaagataatta

SEQ ID NO: 923989 - DNA, 15 bp, Homo sapiens
agatcaaagataatt

SEQ ID NO: 923990 - DNA, 15 bp, Homo sapiens
tagatcaaagataat

SEQ ID NO: 923991 - DNA, 15 bp, Homo sapiens
gtagatcaaagataa

SEQ ID NO: 923992 - DNA, 15 bp, Homo sapiens
tgtagatcaaagata

SEQ ID NO: 923993 - DNA, 15 bp, Homo sapiens
ttgtagatcaaagat

SEQ ID NO: 923994 - DNA, 15 bp, Homo sapiens
cttgtagatcaaaga

SEQ ID NO: 923995 - DNA, 15 bp, Homo sapiens
acttgtagatcaaag

SEQ ID NO: 923996 - DNA, 15 bp, Homo sapiens
tacttgtagatcaaa

SEQ ID NO: 923997 - DNA, 15 bp, Homo sapiens
ctacttgtagatcaa

SEQ ID NO: 923998 - DNA, 15 bp, Homo sapiens
actacttgtagatca

SEQ ID NO: 923999 - DNA, 15 bp, Homo sapiens
cactacttgtagatc

SEQ ID NO: 924000 - DNA, 15 bp, Homo sapiens
ccactacttgtagat

SEQ ID NO: 924001 - DNA, 15 bp, Homo sapiens
cccactacttgtaga

SEQ ID NO: 924002 - DNA, 15 bp, Homo sapiens
gcccactacttgtag

SEQ ID NO: 924003 - DNA, 15 bp, Homo sapiens
ggcccactacttgta

SEQ ID NO: 924004 - DNA, 15 bp, Homo sapiens
gggcccactacttgt

SEQ ID NO: 924005 - DNA, 15 bp, Homo sapiens
tgggcccactacttg

SEQ ID NO: 924006 - DNA, 15 bp, Homo sapiens
gtgggcccactactt

SEQ ID NO: 924007 - DNA, 15 bp, Homo sapiens
tgtgggcccactact

SEQ ID NO: 924008 - DNA, 15 bp, Homo sapiens
atgtgggcccactac

SEQ ID NO: 924009 - DNA, 15 bp, Homo sapiens
aatgtgggcccacta

SEQ ID NO: 924010 - DNA, 15 bp, Homo sapiens
aaatgtgggcccact

SEQ ID NO: 924011 - DNA, 15 bp, Homo sapiens
taaatgtgggcccac

SEQ ID NO: 924012 - DNA, 15 bp, Homo sapiens
gtaaatgtgggccca

SEQ ID NO: 924013 - DNA, 15 bp, Homo sapiens
agtaaatgtgggccc

SEQ ID NO: 924014 - DNA, 15 bp, Homo sapiens
aagtaaatgtgggcc

SEQ ID NO: 924015 - DNA, 15 bp, Homo sapiens
aaagtaaatgtgggc

SEQ ID NO: 924016 - DNA, 15 bp, Homo sapiens
aaaagtaaatgtggg

SEQ ID NO: 924017 - DNA, 15 bp, Homo sapiens
taaaagtaaatgtgg

SEQ ID NO: 924018 - DNA, 15 bp, Homo sapiens
ttaaaagtaaatgtg

SEQ ID NO: 924019 - DNA, 15 bp, Homo sapiens
attaaaagtaaatgt

SEQ ID NO: 924020 - DNA, 15 bp, Homo sapiens
tattaaaagtaaatg

SEQ ID NO: 924021 - DNA, 15 bp, Homo sapiens
atattaaaagtaaat

SEQ ID NO: 924022 - DNA, 15 bp, Homo sapiens
catattaaaagtaaa

SEQ ID NO: 924023 - DNA, 15 bp, Homo sapiens
ccatattaaaagtaa

SEQ ID NO: 924024 - DNA, 15 bp, Homo sapiens
accatattaaaagta

SEQ ID NO: 924025 - DNA, 15 bp, Homo sapiens
aaccatattaaaagt

SEQ ID NO: 924026 - DNA, 15 bp, Homo sapiens
aaaccatattaaaag

SEQ ID NO: 924027 - DNA, 15 bp, Homo sapiens
taaaccatattaaaa

SEQ ID NO: 924028 - DNA, 15 bp, Homo sapiens
ttaaaccatattaaa

SEQ ID NO: 924029 - DNA, 15 bp, Homo sapiens
attaaaccatattaa

SEQ ID NO: 924030 - DNA, 15 bp, Homo sapiens
gattaaaccatatta

SEQ ID NO: 924031 - DNA, 15 bp, Homo sapiens
agattaaaccatatt

SEQ ID NO: 924032 - DNA, 15 bp, Homo sapiens
aagattaaaccatat

SEQ ID NO: 924033 - DNA, 15 bp, Homo sapiens
gaagattaaaccata

SEQ ID NO: 924034 - DNA, 15 bp, Homo sapiens
tgaagattaaaccat

SEQ ID NO: 924035 - DNA, 15 bp, Homo sapiens
atgaagattaaacca

SEQ ID NO: 924036 - DNA, 15 bp, Homo sapiens
aatgaagattaaacc

SEQ ID NO: 924037 - DNA, 15 bp, Homo sapiens
aaatgaagattaaac

SEQ ID NO: 924038 - DNA, 15 bp, Homo sapiens
taaatgaagattaaa

SEQ ID NO: 924039 - DNA, 15 bp, Homo sapiens
ctaaatgaagattaa

SEQ ID NO: 924040 - DNA, 15 bp, Homo sapiens
tctaaatgaagatta

SEQ ID NO: 924041 - DNA, 15 bp, Homo sapiens
ttctaaatgaagatt

SEQ ID NO: 924042 - DNA, 15 bp, Homo sapiens
tttctaaatgaagat

SEQ ID NO: 924043 - DNA, 15 bp, Homo sapiens
ctttctaaatgaaga

SEQ ID NO: 924044 - DNA, 15 bp, Homo sapiens
tctttctaaatgaag

SEQ ID NO: 924045 - DNA, 15 bp, Homo sapiens
ttctttctaaatgaa

SEQ ID NO: 924046 - DNA, 15 bp, Homo sapiens
attctttctaaatga

SEQ ID NO: 924047 - DNA, 15 bp, Homo sapiens
aattctttctaaatg

SEQ ID NO: 924048 - DNA, 15 bp, Homo sapiens
taattctttctaaat

SEQ ID NO: 924049 - DNA, 15 bp, Homo sapiens
ttaattctttctaaa

SEQ ID NO: 924050 - DNA, 15 bp, Homo sapiens
tttaattctttctaa

SEQ ID NO: 924051 - DNA, 15 bp, Homo sapiens
atttaattctttcta

SEQ ID NO: 924052 - DNA, 15 bp, Homo sapiens
catttaattctttct

SEQ ID NO: 924053 - DNA, 15 bp, Homo sapiens
tcatttaattctttc

SEQ ID NO: 924054 - DNA, 15 bp, Homo sapiens
ttcatttaattcttt

SEQ ID NO: 924055 - DNA, 15 bp, Homo sapiens
tttcatttaattctt

SEQ ID NO: 924056 - DNA, 15 bp, Homo sapiens
ttttcatttaattct

SEQ ID NO: 924057 - DNA, 15 bp, Homo sapiens
tttttcatttaattc

SEQ ID NO: 924058 - DNA, 15 bp, Homo sapiens
atttttcatttaatt

SEQ ID NO: 924059 - DNA, 15 bp, Homo sapiens
tatttttcatttaat

SEQ ID NO: 924060 - DNA, 15 bp, Homo sapiens
ttatttttcatttaa

SEQ ID NO: 924061 - DNA, 15 bp, Homo sapiens
attatttttcattta

SEQ ID NO: 924062 - DNA, 15 bp, Homo sapiens
aattatttttcattt

SEQ ID NO: 924063 - DNA, 15 bp, Homo sapiens
taattatttttcatt

SEQ ID NO: 924064 - DNA, 15 bp, Homo sapiens
ataattatttttcat

SEQ ID NO: 924065 - DNA, 15 bp, Homo sapiens
gataattatttttca

SEQ ID NO: 924066 - DNA, 15 bp, Homo sapiens
agataattatttttc

SEQ ID NO: 924067 - DNA, 15 bp, Homo sapiens
aagataattattttt

SEQ ID NO: 924068 - DNA, 15 bp, Homo sapiens
caagataattatttt

SEQ ID NO: 924069 - DNA, 15 bp, Homo sapiens
gcaagataattattt

SEQ ID NO: 924070 - DNA, 15 bp, Homo sapiens
tgcaagataattatt

SEQ ID NO: 924071 - DNA, 15 bp, Homo sapiens
ttgcaagataattat

SEQ ID NO: 924072 - DNA, 15 bp, Homo sapiens
gttgcaagataatta

SEQ ID NO: 924073 - DNA, 15 bp, Homo sapiens
agttgcaagataatt

SEQ ID NO: 924074 - DNA, 15 bp, Homo sapiens
tagttgcaagataat

SEQ ID NO: 924075 - DNA, 15 bp, Homo sapiens
gtagttgcaagataa

SEQ ID NO: 924076 - DNA, 15 bp, Homo sapiens
tgtagttgcaagata

SEQ ID NO: 924077 - DNA, 15 bp, Homo sapiens
atgtagttgcaagat

SEQ ID NO: 924078 - DNA, 15 bp, Homo sapiens
gatgtagttgcaaga

SEQ ID NO: 924079 - DNA, 15 bp, Homo sapiens
ggatgtagttgcaag

SEQ ID NO: 924080 - DNA, 15 bp, Homo sapiens
aggatgtagttgcaa

SEQ ID NO: 924081 - DNA, 15 bp, Homo sapiens
caggatgtagttgca

SEQ ID NO: 924082 - DNA, 15 bp, Homo sapiens
acaggatgtagttgc

SEQ ID NO: 924083 - DNA, 15 bp, Homo sapiens
aacaggatgtagttg

SEQ ID NO: 924084 - DNA, 15 bp, Homo sapiens
gaacaggatgtagtt

SEQ ID NO: 924085 - DNA, 15 bp, Homo sapiens
agaacaggatgtagt

SEQ ID NO: 924086 - DNA, 15 bp, Homo sapiens
gagaacaggatgtag

SEQ ID NO: 924087 - DNA, 15 bp, Homo sapiens
agagaacaggatgta

SEQ ID NO: 924088 - DNA, 15 bp, Homo sapiens
tagagaacaggatgt

SEQ ID NO: 924089 - DNA, 15 bp, Homo sapiens
ctagagaacaggatg

SEQ ID NO: 924090 - DNA, 15 bp, Homo sapiens
cctagagaacaggat

SEQ ID NO: 924091 - DNA, 15 bp, Homo sapiens
gcctagagaacagga

SEQ ID NO: 924092 - DNA, 15 bp, Homo sapiens
agcctagagaacagg

SEQ ID NO: 924093 - DNA, 15 bp, Homo sapiens
tagcctagagaacag

SEQ ID NO: 924094 - DNA, 15 bp, Homo sapiens
ctagcctagagaaca

SEQ ID NO: 924095 - DNA, 15 bp, Homo sapiens
tctagcctagagaac

SEQ ID NO: 924096 - DNA, 15 bp, Homo sapiens
ttctagcctagagaa

SEQ ID NO: 924097 - DNA, 15 bp, Homo sapiens
tttctagcctagaga

SEQ ID NO: 924098 - DNA, 15 bp, Homo sapiens
gtttctagcctagag

SEQ ID NO: 924099 - DNA, 15 bp, Homo sapiens
tgtttctagcctaga

SEQ ID NO: 924100 - DNA, 15 bp, Homo sapiens
atgtttctagcctag

SEQ ID NO: 924101 - DNA, 15 bp, Homo sapiens
aatgtttctagccta

SEQ ID NO: 924102 - DNA, 15 bp, Homo sapiens
aaatgtttctagcct

SEQ ID NO: 924103 - DNA, 15 bp, Homo sapiens
taaatgtttctagcc

SEQ ID NO: 924104 - DNA, 15 bp, Homo sapiens
ctaaatgtttctagc

SEQ ID NO: 924105 - DNA, 15 bp, Homo sapiens
cctaaatgtttctag

SEQ ID NO: 924106 - DNA, 15 bp, Homo sapiens
tcctaaatgtttcta

SEQ ID NO: 924107 - DNA, 15 bp, Homo sapiens
atcctaaatgtttct

SEQ ID NO: 924108 - DNA, 15 bp, Homo sapiens
aatcctaaatgtttc

SEQ ID NO: 924109 - DNA, 15 bp, Homo sapiens
aaatcctaaatgttt

SEQ ID NO: 924110 - DNA, 15 bp, Homo sapiens
gaaatcctaaatgtt

SEQ ID NO: 924111 - DNA, 15 bp, Homo sapiens
agaaatcctaaatgt

SEQ ID NO: 924112 - DNA, 15 bp, Homo sapiens
cagaaatcctaaatg

SEQ ID NO: 924113 - DNA, 15 bp, Homo sapiens
acagaaatcctaaat

SEQ ID NO: 924114 - DNA, 15 bp, Homo sapiens
aacagaaatcctaaa

SEQ ID NO: 924115 - DNA, 15 bp, Homo sapiens
aaacagaaatcctaa

SEQ ID NO: 924116 - DNA, 15 bp, Homo sapiens
aaaacagaaatccta

SEQ ID NO: 924117 - DNA, 15 bp, Homo sapiens
aaaaacagaaatcct

SEQ ID NO: 924118 - DNA, 15 bp, Homo sapiens
caaaaacagaaatcc

SEQ ID NO: 924119 - DNA, 15 bp, Homo sapiens
tcaaaaacagaaatc

SEQ ID NO: 924120 - DNA, 15 bp, Homo sapiens
ttcaaaaacagaaat

SEQ ID NO: 924121 - DNA, 15 bp, Homo sapiens
tttcaaaaacagaaa

SEQ ID NO: 924122 - DNA, 15 bp, Homo sapiens
ctttcaaaaacagaa

SEQ ID NO: 924123 - DNA, 15 bp, Homo sapiens
actttcaaaaacaga

SEQ ID NO: 924124 - DNA, 15 bp, Homo sapiens
tactttcaaaaacag

SEQ ID NO: 924125 - DNA, 15 bp, Homo sapiens
ttactttcaaaaaca

SEQ ID NO: 924126 - DNA, 15 bp, Homo sapiens
attactttcaaaaac

SEQ ID NO: 924127 - DNA, 15 bp, Homo sapiens
tattactttcaaaaa

SEQ ID NO: 924128 - DNA, 15 bp, Homo sapiens
gtattactttcaaaa

SEQ ID NO: 924129 - DNA, 15 bp, Homo sapiens
ggtattactttcaaa

SEQ ID NO: 924130 - DNA, 15 bp, Homo sapiens
tggtattactttcaa

SEQ ID NO: 924131 - DNA, 15 bp, Homo sapiens
ttggtattactttca

SEQ ID NO: 924132 - DNA, 15 bp, Homo sapiens
tttggtattactttc

SEQ ID NO: 924133 - DNA, 15 bp, Homo sapiens
ctttggtattacttt

SEQ ID NO: 924134 - DNA, 15 bp, Homo sapiens
actttggtattactt

SEQ ID NO: 924135 - DNA, 15 bp, Homo sapiens
aactttggtattact

SEQ ID NO: 924136 - DNA, 15 bp, Homo sapiens
gaactttggtattac

SEQ ID NO: 924137 - DNA, 15 bp, Homo sapiens
ggaactttggtatta

SEQ ID NO: 924138 - DNA, 15 bp, Homo sapiens
tggaactttggtatt

SEQ ID NO: 924139 - DNA, 15 bp, Homo sapiens
ttggaactttggtat

SEQ ID NO: 924140 - DNA, 15 bp, Homo sapiens
attggaactttggta

SEQ ID NO: 924141 - DNA, 15 bp, Homo sapiens
cattggaactttggt

SEQ ID NO: 924142 - DNA, 15 bp, Homo sapiens
tcattggaactttgg

SEQ ID NO: 924143 - DNA, 15 bp, Homo sapiens
gtcattggaactttg

SEQ ID NO: 924144 - DNA, 15 bp, Homo sapiens
ggtcattggaacttt

SEQ ID NO: 924145 - DNA, 15 bp, Homo sapiens
aggtcattggaactt

SEQ ID NO: 924146 - DNA, 15 bp, Homo sapiens
caggtcattggaact

SEQ ID NO: 924147 - DNA, 15 bp, Homo sapiens
gcaggtcattggaac

SEQ ID NO: 924148 - DNA, 15 bp, Homo sapiens
agcaggtcattggaa

SEQ ID NO: 924149 - DNA, 15 bp, Homo sapiens
aagcaggtcattgga

SEQ ID NO: 924150 - DNA, 15 bp, Homo sapiens
taagcaggtcattgg

SEQ ID NO: 924151 - DNA, 15 bp, Homo sapiens
ataagcaggtcattg

SEQ ID NO: 924152 - DNA, 15 bp, Homo sapiens
tataagcaggtcatt

SEQ ID NO: 924153 - DNA, 15 bp, Homo sapiens
ctataagcaggtcat

SEQ ID NO: 924154 - DNA, 15 bp, Homo sapiens
actataagcaggtca

SEQ ID NO: 924155 - DNA, 15 bp, Homo sapiens
gactataagcaggtc

SEQ ID NO: 924156 - DNA, 15 bp, Homo sapiens
tgactataagcaggt

SEQ ID NO: 924157 - DNA, 15 bp, Homo sapiens
ctgactataagcagg

SEQ ID NO: 924158 - DNA, 15 bp, Homo sapiens
actgactataagcag

SEQ ID NO: 924159 - DNA, 15 bp, Homo sapiens
cactgactataagca

SEQ ID NO: 924160 - DNA, 15 bp, Homo sapiens
acactgactataagc

SEQ ID NO: 924161 - DNA, 15 bp, Homo sapiens
aacactgactataag

SEQ ID NO: 924162 - DNA, 15 bp, Homo sapiens
gaacactgactataa

SEQ ID NO: 924163 - DNA, 15 bp, Homo sapiens
tgaacactgactata

SEQ ID NO: 924164 - DNA, 15 bp, Homo sapiens
ttgaacactgactat

SEQ ID NO: 924165 - DNA, 15 bp, Homo sapiens
attgaacactgacta

SEQ ID NO: 924166 - DNA, 15 bp, Homo sapiens
tattgaacactgact

SEQ ID NO: 924167 - DNA, 15 bp, Homo sapiens
ttattgaacactgac

SEQ ID NO: 924168 - DNA, 15 bp, Homo sapiens
tttattgaacactga

SEQ ID NO: 924169 - DNA, 15 bp, Homo sapiens
gtttattgaacactg

SEQ ID NO: 924170 - DNA, 15 bp, Homo sapiens
cgtttattgaacact

SEQ ID NO: 924171 - DNA, 15 bp, Homo sapiens
acgtttattgaacac

SEQ ID NO: 924172 - DNA, 15 bp, Homo sapiens
tacgtttattgaaca

SEQ ID NO: 924173 - DNA, 15 bp, Homo sapiens
atacgtttattgaac

SEQ ID NO: 924174 - DNA, 15 bp, Homo sapiens
tatacgtttattgaa

SEQ ID NO: 924175 - DNA, 15 bp, Homo sapiens
ttatacgtttattga

SEQ ID NO: 924176 - DNA, 15 bp, Homo sapiens
gttatacgtttattg

SEQ ID NO: 924177 - DNA, 15 bp, Homo sapiens
tgttatacgtttatt

SEQ ID NO: 924178 - DNA, 15 bp, Homo sapiens
ttgttatacgtttat

SEQ ID NO: 924179 - DNA, 15 bp, Homo sapiens
tttgttatacgttta

SEQ ID NO: 924180 - DNA, 15 bp, Homo sapiens
atttgttatacgttt

SEQ ID NO: 924181 - DNA, 15 bp, Homo sapiens
catttgttatacgtt

SEQ ID NO: 924182 - DNA, 15 bp, Homo sapiens
tcatttgttatacgt

SEQ ID NO: 924183 - DNA, 15 bp, Homo sapiens
ttcatttgttatacg

SEQ ID NO: 924184 - DNA, 15 bp, Homo sapiens
tttcatttgttatac

SEQ ID NO: 924185 - DNA, 15 bp, Homo sapiens
ctttcatttgttata

SEQ ID NO: 924186 - DNA, 15 bp, Homo sapiens
actttcatttgttat

SEQ ID NO: 924187 - DNA, 15 bp, Homo sapiens
cactttcatttgtta

SEQ ID NO: 924188 - DNA, 15 bp, Homo sapiens
tcactttcatttgtt

SEQ ID NO: 924189 - DNA, 15 bp, Homo sapiens
ttcactttcatttgt

SEQ ID NO: 924190 - DNA, 15 bp, Homo sapiens
attcactttcatttg

SEQ ID NO: 924191 - DNA, 15 bp, Homo sapiens
tattcactttcattt

SEQ ID NO: 924192 - DNA, 15 bp, Homo sapiens
atattcactttcatt

SEQ ID NO: 924193 - DNA, 15 bp, Homo sapiens
aatattcactttcat

SEQ ID NO: 924194 - DNA, 15 bp, Homo sapiens
taatattcactttca

SEQ ID NO: 924195 - DNA, 15 bp, Homo sapiens
ctaatattcactttc

SEQ ID NO: 924196 - DNA, 15 bp, Homo sapiens
actaatattcacttt

SEQ ID NO: 924197 - DNA, 15 bp, Homo sapiens
cactaatattcactt

SEQ ID NO: 924198 - DNA, 15 bp, Homo sapiens
tcactaatattcact

SEQ ID NO: 924199 - DNA, 15 bp, Homo sapiens
atcactaatattcac

SEQ ID NO: 924200 - DNA, 15 bp, Homo sapiens
catcactaatattca

SEQ ID NO: 924201 - DNA, 15 bp, Homo sapiens
acatcactaatattc

SEQ ID NO: 924202 - DNA, 15 bp, Homo sapiens
gacatcactaatatt

SEQ ID NO: 924203 - DNA, 15 bp, Homo sapiens
ggacatcactaatat

SEQ ID NO: 924204 - DNA, 15 bp, Homo sapiens
tggacatcactaata

SEQ ID NO: 924205 - DNA, 15 bp, Homo sapiens
atggacatcactaat

SEQ ID NO: 924206 - DNA, 15 bp, Homo sapiens
aatggacatcactaa

SEQ ID NO: 924207 - DNA, 15 bp, Homo sapiens
gaatggacatcacta

SEQ ID NO: 924208 - DNA, 15 bp, Homo sapiens
ggaatggacatcact

SEQ ID NO: 924209 - DNA, 15 bp, Homo sapiens
tggaatggacatcac

SEQ ID NO: 924210 - DNA, 15 bp, Homo sapiens
ttggaatggacatca

SEQ ID NO: 924211 - DNA, 15 bp, Homo sapiens
gttggaatggacatc

SEQ ID NO: 924212 - DNA, 15 bp, Homo sapiens
tgttggaatggacat

SEQ ID NO: 924213 - DNA, 15 bp, Homo sapiens
atgttggaatggaca

SEQ ID NO: 924214 - DNA, 15 bp, Homo sapiens
tatgttggaatggac

SEQ ID NO: 924215 - DNA, 15 bp, Homo sapiens
ttatgttggaatgga

SEQ ID NO: 924216 - DNA, 15 bp, Homo sapiens
attatgttggaatgg

SEQ ID NO: 924217 - DNA, 15 bp, Homo sapiens
aattatgttggaatg

SEQ ID NO: 924218 - DNA, 15 bp, Homo sapiens
aaattatgttggaat

SEQ ID NO: 924219 - DNA, 15 bp, Homo sapiens
caaattatgttggaa

SEQ ID NO: 924220 - DNA, 15 bp, Homo sapiens
tcaaattatgttgga

SEQ ID NO: 924221 - DNA, 15 bp, Homo sapiens
ttcaaattatgttgg

SEQ ID NO: 924222 - DNA, 15 bp, Homo sapiens
cttcaaattatgttg

SEQ ID NO: 924223 - DNA, 15 bp, Homo sapiens
tcttcaaattatgtt

SEQ ID NO: 924224 - DNA, 15 bp, Homo sapiens
atcttcaaattatgt

SEQ ID NO: 924225 - DNA, 15 bp, Homo sapiens
aatcttcaaattatg

SEQ ID NO: 924226 - DNA, 15 bp, Homo sapiens
aaatcttcaaattat

SEQ ID NO: 924227 - DNA, 15 bp, Homo sapiens
aaaatcttcaaatta

SEQ ID NO: 924228 - DNA, 15 bp, Homo sapiens
aaaaatcttcaaatt

SEQ ID NO: 924229 - DNA, 15 bp, Homo sapiens
taaaaatcttcaaat

SEQ ID NO: 924230 - DNA, 15 bp, Homo sapiens
ataaaaatcttcaaa

SEQ ID NO: 924231 - DNA, 15 bp, Homo sapiens
aataaaaatcttcaa

SEQ ID NO: 924232 - DNA, 15 bp, Homo sapiens
caataaaaatcttca

SEQ ID NO: 924233 - DNA, 15 bp, Homo sapiens
acaataaaaatcttc

SEQ ID NO: 924234 - DNA, 15 bp, Homo sapiens
tacaataaaaatctt

SEQ ID NO: 924235 - DNA, 15 bp, Homo sapiens
ttacaataaaaatct

SEQ ID NO: 924236 - DNA, 15 bp, Homo sapiens
tttacaataaaaatc

SEQ ID NO: 924237 - DNA, 15 bp, Homo sapiens
ttttacaataaaaat

SEQ ID NO: 924238 - DNA, 15 bp, Homo sapiens
attttacaataaaaa

SEQ ID NO: 924239 - DNA, 15 bp, Homo sapiens
gattttacaataaaa

SEQ ID NO: 924240 - DNA, 15 bp, Homo sapiens
ggattttacaataaa

SEQ ID NO: 924241 - DNA, 15 bp, Homo sapiens
gggattttacaataa

SEQ ID NO: 924242 - DNA, 15 bp, Homo sapiens
tgggattttacaata

SEQ ID NO: 924243 - DNA, 15 bp, Homo sapiens
gtgggattttacaat

SEQ ID NO: 924244 - DNA, 15 bp, Homo sapiens
tgtgggattttacaa

SEQ ID NO: 924245 - DNA, 15 bp, Homo sapiens
atgtgggattttaca

SEQ ID NO: 924246 - DNA, 15 bp, Homo sapiens
tatgtgggattttac

SEQ ID NO: 924247 - DNA, 15 bp, Homo sapiens
atatgtgggatttta

SEQ ID NO: 924248 - DNA, 15 bp, Homo sapiens
aatatgtgggatttt

SEQ ID NO: 924249 - DNA, 15 bp, Homo sapiens
aaatatgtgggattt

SEQ ID NO: 924250 - DNA, 15 bp, Homo sapiens
caaatatgtgggatt

SEQ ID NO: 924251 - DNA, 15 bp, Homo sapiens
acaaatatgtgggat

SEQ ID NO: 924252 - DNA, 15 bp, Homo sapiens
tacaaatatgtggga

SEQ ID NO: 924253 - DNA, 15 bp, Homo sapiens
ctacaaatatgtggg

SEQ ID NO: 924254 - DNA, 15 bp, Homo sapiens
tctacaaatatgtgg

SEQ ID NO: 924255 - DNA, 15 bp, Homo sapiens
ttctacaaatatgtg

SEQ ID NO: 924256 - DNA, 15 bp, Homo sapiens
tttctacaaatatgt

SEQ ID NO: 924257 - DNA, 15 bp, Homo sapiens
ttttctacaaatatg

SEQ ID NO: 924258 - DNA, 15 bp, Homo sapiens
cttttctacaaatat

SEQ ID NO: 924259 - DNA, 15 bp, Homo sapiens
acttttctacaaata

SEQ ID NO: 924260 - DNA, 15 bp, Homo sapiens
gacttttctacaaat

SEQ ID NO: 924261 - DNA, 15 bp, Homo sapiens
agacttttctacaaa

SEQ ID NO: 924262 - DNA, 15 bp, Homo sapiens
tagacttttctacaa

SEQ ID NO: 924263 - DNA, 15 bp, Homo sapiens
atagacttttctaca

SEQ ID NO: 924264 - DNA, 15 bp, Homo sapiens
catagacttttctac

SEQ ID NO: 924265 - DNA, 15 bp, Homo sapiens
ccatagacttttcta

SEQ ID NO: 924266 - DNA, 15 bp, Homo sapiens
tccatagacttttct

SEQ ID NO: 924267 - DNA, 15 bp, Homo sapiens
ttccatagacttttc

SEQ ID NO: 924268 - DNA, 15 bp, Homo sapiens
tttccatagactttt

SEQ ID NO: 924269 - DNA, 15 bp, Homo sapiens
atttccatagacttt

SEQ ID NO: 924270 - DNA, 15 bp, Homo sapiens
gatttccatagactt

SEQ ID NO: 924271 - DNA, 15 bp, Homo sapiens
ggatttccatagact

SEQ ID NO: 924272 - DNA, 15 bp, Homo sapiens
aggatttccatagac

SEQ ID NO: 924273 - DNA, 15 bp, Homo sapiens
taggatttccataga

SEQ ID NO: 924274 - DNA, 15 bp, Homo sapiens
ttaggatttccatag

SEQ ID NO: 924275 - DNA, 15 bp, Homo sapiens
tttaggatttccata

SEQ ID NO: 924276 - DNA, 15 bp, Homo sapiens
atttaggatttccat

SEQ ID NO: 924277 - DNA, 15 bp, Homo sapiens
tatttaggatttcca

SEQ ID NO: 924278 - DNA, 15 bp, Homo sapiens
ttatttaggatttcc

SEQ ID NO: 924279 - DNA, 15 bp, Homo sapiens
cttatttaggatttc

SEQ ID NO: 924280 - DNA, 15 bp, Homo sapiens
tcttatttaggattt

SEQ ID NO: 924281 - DNA, 15 bp, Homo sapiens
atcttatttaggatt

SEQ ID NO: 924282 - DNA, 15 bp, Homo sapiens
aatcttatttaggat

SEQ ID NO: 924283 - DNA, 15 bp, Homo sapiens
aaatcttatttagga

SEQ ID NO: 924284 - DNA, 15 bp, Homo sapiens
aaaatcttatttagg

SEQ ID NO: 924285 - DNA, 15 bp, Homo sapiens
caaaatcttatttag

SEQ ID NO: 924286 - DNA, 15 bp, Homo sapiens
acaaaatcttattta

SEQ ID NO: 924287 - DNA, 15 bp, Homo sapiens
gacaaaatcttattt

SEQ ID NO: 924288 - DNA, 15 bp, Homo sapiens
tgacaaaatcttatt

SEQ ID NO: 924289 - DNA, 15 bp, Homo sapiens
atgacaaaatcttat

SEQ ID NO: 924290 - DNA, 15 bp, Homo sapiens
catgacaaaatctta

SEQ ID NO: 924291 - DNA, 15 bp, Homo sapiens
acatgacaaaatctt

SEQ ID NO: 924292 - DNA, 15 bp, Homo sapiens
tacatgacaaaatct

SEQ ID NO: 924293 - DNA, 15 bp, Homo sapiens
ctacatgacaaaatc

SEQ ID NO: 924294 - DNA, 15 bp, Homo sapiens
actacatgacaaaat

SEQ ID NO: 924295 - DNA, 15 bp, Homo sapiens
aactacatgacaaaa

SEQ ID NO: 924296 - DNA, 15 bp, Homo sapiens
aaactacatgacaaa

SEQ ID NO: 924297 - DNA, 15 bp, Homo sapiens
caaactacatgacaa

SEQ ID NO: 924298 - DNA, 15 bp, Homo sapiens
tcaaactacatgaca

SEQ ID NO: 924299 - DNA, 15 bp, Homo sapiens
gtcaaactacatgac

SEQ ID NO: 924300 - DNA, 15 bp, Homo sapiens
tgtcaaactacatga

SEQ ID NO: 924301 - DNA, 15 bp, Homo sapiens
ttgtcaaactacatg

SEQ ID NO: 924302 - DNA, 15 bp, Homo sapiens
tttgtcaaactacat

SEQ ID NO: 924303 - DNA, 15 bp, Homo sapiens
ttttgtcaaactaca

SEQ ID NO: 924304 - DNA, 15 bp, Homo sapiens
cttttgtcaaactac

SEQ ID NO: 924305 - DNA, 15 bp, Homo sapiens
tcttttgtcaaacta

SEQ ID NO: 924306 - DNA, 15 bp, Homo sapiens
atcttttgtcaaact

SEQ ID NO: 924307 - DNA, 15 bp, Homo sapiens
tatcttttgtcaaac

SEQ ID NO: 924308 - DNA, 15 bp, Homo sapiens
ttatcttttgtcaaa

SEQ ID NO: 924309 - DNA, 15 bp, Homo sapiens
gttatcttttgtcaa

SEQ ID NO: 924310 - DNA, 15 bp, Homo sapiens
tgttatcttttgtca

SEQ ID NO: 924311 - DNA, 15 bp, Homo sapiens
atgttatcttttgtc

SEQ ID NO: 924312 - DNA, 15 bp, Homo sapiens
aatgttatcttttgt

SEQ ID NO: 924313 - DNA, 15 bp, Homo sapiens
caatgttatcttttg

SEQ ID NO: 924314 - DNA, 15 bp, Homo sapiens
acaatgttatctttt

SEQ ID NO: 924315 - DNA, 15 bp, Homo sapiens
cacaatgttatcttt

SEQ ID NO: 924316 - DNA, 15 bp, Homo sapiens
acacaatgttatctt

SEQ ID NO: 924317 - DNA, 15 bp, Homo sapiens
gacacaatgttatct

SEQ ID NO: 924318 - DNA, 15 bp, Homo sapiens
agacacaatgttatc

SEQ ID NO: 924319 - DNA, 15 bp, Homo sapiens
aagacacaatgttat

SEQ ID NO: 924320 - DNA, 15 bp, Homo sapiens
taagacacaatgtta

SEQ ID NO: 924321 - DNA, 15 bp, Homo sapiens
ataagacacaatgtt

SEQ ID NO: 924322 - DNA, 15 bp, Homo sapiens
aataagacacaatgt

SEQ ID NO: 924323 - DNA, 15 bp, Homo sapiens
aaataagacacaatg

SEQ ID NO: 924324 - DNA, 15 bp, Homo sapiens
aaaataagacacaat

SEQ ID NO: 924325 - DNA, 15 bp, Homo sapiens
taaaataagacacaa

SEQ ID NO: 924326 - DNA, 15 bp, Homo sapiens
ataaaataagacaca

SEQ ID NO: 924327 - DNA, 15 bp, Homo sapiens
aataaaataagacac

SEQ ID NO: 924328 - DNA, 15 bp, Homo sapiens
aaataaaataagaca

SEQ ID NO: 924329 - DNA, 15 bp, Homo sapiens
aaaataaaataagac

SEQ ID NO: 924330 - DNA, 15 bp, Homo sapiens
taaaataaaataaga

SEQ ID NO: 924331 - DNA, 15 bp, Homo sapiens
ctaaaataaaataag

SEQ ID NO: 924332 - DNA, 15 bp, Homo sapiens
tctaaaataaaataa

SEQ ID NO: 924333 - DNA, 15 bp, Homo sapiens
ttctaaaataaaata

SEQ ID NO: 924334 - DNA, 15 bp, Homo sapiens
attctaaaataaaat

SEQ ID NO: 924335 - DNA, 15 bp, Homo sapiens
cattctaaaataaaa

SEQ ID NO: 924336 - DNA, 15 bp, Homo sapiens
ccattctaaaataaa

SEQ ID NO: 924337 - DNA, 15 bp, Homo sapiens
gccattctaaaataa

SEQ ID NO: 924338 - DNA, 15 bp, Homo sapiens
ggccattctaaaata

SEQ ID NO: 924339 - DNA, 15 bp, Homo sapiens
tggccattctaaaat

SEQ ID NO: 924340 - DNA, 15 bp, Homo sapiens
atggccattctaaaa

SEQ ID NO: 924341 - DNA, 15 bp, Homo sapiens
aatggccattctaaa

SEQ ID NO: 924342 - DNA, 15 bp, Homo sapiens
taatggccattctaa

SEQ ID NO: 924343 - DNA, 15 bp, Homo sapiens
gtaatggccattcta

SEQ ID NO: 924344 - DNA, 15 bp, Homo sapiens
agtaatggccattct

SEQ ID NO: 924345 - DNA, 15 bp, Homo sapiens
aagtaatggccattc

SEQ ID NO: 924346 - DNA, 15 bp, Homo sapiens
aaagtaatggccatt

SEQ ID NO: 924347 - DNA, 15 bp, Homo sapiens
gaaagtaatggccat

SEQ ID NO: 924348 - DNA, 15 bp, Homo sapiens
tgaaagtaatggcca

SEQ ID NO: 924349 - DNA, 15 bp, Homo sapiens
ttgaaagtaatggcc

SEQ ID NO: 924350 - DNA, 15 bp, Homo sapiens
attgaaagtaatggc

SEQ ID NO: 924351 - DNA, 15 bp, Homo sapiens
aattgaaagtaatgg

SEQ ID NO: 924352 - DNA, 15 bp, Homo sapiens
taattgaaagtaatg

SEQ ID NO: 924353 - DNA, 15 bp, Homo sapiens
ttaattgaaagtaat

SEQ ID NO: 924354 - DNA, 15 bp, Homo sapiens
tttaattgaaagtaa

SEQ ID NO: 924355 - DNA, 15 bp, Homo sapiens
ttttaattgaaagta

SEQ ID NO: 924356 - DNA, 15 bp, Homo sapiens
attttaattgaaagt

SEQ ID NO: 924357 - DNA, 15 bp, Homo sapiens
gattttaattgaaag

SEQ ID NO: 924358 - DNA, 15 bp, Homo sapiens
tgattttaattgaaa

SEQ ID NO: 924359 - DNA, 15 bp, Homo sapiens
atgattttaattgaa

SEQ ID NO: 924360 - DNA, 15 bp, Homo sapiens
aatgattttaattga

SEQ ID NO: 924361 - DNA, 15 bp, Homo sapiens
taatgattttaattg

SEQ ID NO: 924362 - DNA, 15 bp, Homo sapiens
ataatgattttaatt

SEQ ID NO: 924363 - DNA, 15 bp, Homo sapiens
gataatgattttaat

SEQ ID NO: 924364 - DNA, 15 bp, Homo sapiens
tgataatgattttaa

SEQ ID NO: 924365 - DNA, 15 bp, Homo sapiens
atgataatgatttta

SEQ ID NO: 924366 - DNA, 15 bp, Homo sapiens
gatgataatgatttt

SEQ ID NO: 924367 - DNA, 15 bp, Homo sapiens
tgatgataatgattt

SEQ ID NO: 924368 - DNA, 15 bp, Homo sapiens
ttgatgataatgatt

SEQ ID NO: 924369 - DNA, 15 bp, Homo sapiens
attgatgataatgat

SEQ ID NO: 924370 - DNA, 15 bp, Homo sapiens
cattgatgataatga

SEQ ID NO: 924371 - DNA, 15 bp, Homo sapiens
ccattgatgataatg

SEQ ID NO: 924372 - DNA, 15 bp, Homo sapiens
tccattgatgataat

SEQ ID NO: 924373 - DNA, 15 bp, Homo sapiens
ctccattgatgataa

SEQ ID NO: 924374 - DNA, 15 bp, Homo sapiens
cctccattgatgata

SEQ ID NO: 924375 - DNA, 15 bp, Homo sapiens
tcctccattgatgat

SEQ ID NO: 924376 - DNA, 15 bp, Homo sapiens
ttcctccattgatga

SEQ ID NO: 924377 - DNA, 15 bp, Homo sapiens
attcctccattgatg

SEQ ID NO: 924378 - DNA, 15 bp, Homo sapiens
cattcctccattgat

SEQ ID NO: 924379 - DNA, 15 bp, Homo sapiens
acattcctccattga

SEQ ID NO: 924380 - DNA, 15 bp, Homo sapiens
aacattcctccattg

SEQ ID NO: 924381 - DNA, 15 bp, Homo sapiens
taacattcctccatt

SEQ ID NO: 924382 - DNA, 15 bp, Homo sapiens
ataacattcctccat

SEQ ID NO: 924383 - DNA, 15 bp, Homo sapiens
aataacattcctcca

SEQ ID NO: 924384 - DNA, 15 bp, Homo sapiens
aaataacattcctcc

SEQ ID NO: 924385 - DNA, 15 bp, Homo sapiens
caaataacattcctc

SEQ ID NO: 924386 - DNA, 15 bp, Homo sapiens
acaaataacattcct

SEQ ID NO: 924387 - DNA, 15 bp, Homo sapiens
aacaaataacattcc

SEQ ID NO: 924388 - DNA, 15 bp, Homo sapiens
taacaaataacattc

SEQ ID NO: 924389 - DNA, 15 bp, Homo sapiens
ttaacaaataacatt

SEQ ID NO: 924390 - DNA, 15 bp, Homo sapiens
attaacaaataacat

SEQ ID NO: 924391 - DNA, 15 bp, Homo sapiens
tattaacaaataaca

SEQ ID NO: 924392 - DNA, 15 bp, Homo sapiens
atattaacaaataac

SEQ ID NO: 924393 - DNA, 15 bp, Homo sapiens
tatattaacaaataa

SEQ ID NO: 924394 - DNA, 15 bp, Homo sapiens
ctatattaacaaata

SEQ ID NO: 924395 - DNA, 15 bp, Homo sapiens
gctatattaacaaat

SEQ ID NO: 924396 - DNA, 15 bp, Homo sapiens
tgctatattaacaaa

SEQ ID NO: 924397 - DNA, 15 bp, Homo sapiens
atgctatattaacaa

SEQ ID NO: 924398 - DNA, 15 bp, Homo sapiens
aatgctatattaaca

SEQ ID NO: 924399 - DNA, 15 bp, Homo sapiens
aaatgctatattaac

SEQ ID NO: 924400 - DNA, 15 bp, Homo sapiens
taaatgctatattaa

SEQ ID NO: 924401 - DNA, 15 bp, Homo sapiens
ataaatgctatatta

SEQ ID NO: 924402 - DNA, 15 bp, Homo sapiens
tataaatgctatatt

SEQ ID NO: 924403 - DNA, 15 bp, Homo sapiens
atataaatgctatat

SEQ ID NO: 924404 - DNA, 15 bp, Homo sapiens
aatataaatgctata

SEQ ID NO: 924405 - DNA, 15 bp, Homo sapiens
aaatataaatgctat

SEQ ID NO: 924406 - DNA, 15 bp, Homo sapiens
caaatataaatgcta

SEQ ID NO: 924407 - DNA, 15 bp, Homo sapiens
acaaatataaatgct

SEQ ID NO: 924408 - DNA, 15 bp, Homo sapiens
cacaaatataaatgc

SEQ ID NO: 924409 - DNA, 15 bp, Homo sapiens
acacaaatataaatg

SEQ ID NO: 924410 - DNA, 15 bp, Homo sapiens
tacacaaatataaat

SEQ ID NO: 924411 - DNA, 15 bp, Homo sapiens
atacacaaatataaa

SEQ ID NO: 924412 - DNA, 15 bp, Homo sapiens
tatacacaaatataa

SEQ ID NO: 924413 - DNA, 15 bp, Homo sapiens
atatacacaaatata

SEQ ID NO: 924414 - DNA, 15 bp, Homo sapiens
tatatacacaaatat

SEQ ID NO: 924415 - DNA, 15 bp, Homo sapiens
ttatatacacaaata

SEQ ID NO: 924416 - DNA, 15 bp, Homo sapiens
tttatatacacaaat

SEQ ID NO: 924417 - DNA, 15 bp, Homo sapiens
atttatatacacaaa

SEQ ID NO: 924418 - DNA, 15 bp, Homo sapiens
aatttatatacacaa

SEQ ID NO: 924419 - DNA, 15 bp, Homo sapiens
caatttatatacaca

SEQ ID NO: 924420 - DNA, 15 bp, Homo sapiens
acaatttatatacac

SEQ ID NO: 924421 - DNA, 15 bp, Homo sapiens
tacaatttatataca

SEQ ID NO: 924422 - DNA, 15 bp, Homo sapiens
ttacaatttatatac

SEQ ID NO: 924423 - DNA, 15 bp, Homo sapiens
tttacaatttatata

SEQ ID NO: 924424 - DNA, 15 bp, Homo sapiens
atttacaatttatat

SEQ ID NO: 924425 - DNA, 15 bp, Homo sapiens
gatttacaatttata

SEQ ID NO: 924426 - DNA, 15 bp, Homo sapiens
agatttacaatttat

SEQ ID NO: 924427 - DNA, 15 bp, Homo sapiens
aagatttacaattta

SEQ ID NO: 924428 - DNA, 15 bp, Homo sapiens
taagatttacaattt

SEQ ID NO: 924429 - DNA, 15 bp, Homo sapiens
ctaagatttacaatt

SEQ ID NO: 924430 - DNA, 15 bp, Homo sapiens
cctaagatttacaat

SEQ ID NO: 924431 - DNA, 15 bp, Homo sapiens
acctaagatttacaa

SEQ ID NO: 924432 - DNA, 15 bp, Homo sapiens
tacctaagatttaca

SEQ ID NO: 924433 - DNA, 15 bp, Homo sapiens
ttacctaagatttac

SEQ ID NO: 924434 - DNA, 15 bp, Homo sapiens
attacctaagattta

SEQ ID NO: 924435 - DNA, 15 bp, Homo sapiens
gattacctaagattt

SEQ ID NO: 924436 - DNA, 15 bp, Homo sapiens
tgattacctaagatt

SEQ ID NO: 924437 - DNA, 15 bp, Homo sapiens
ttgattacctaagat

SEQ ID NO: 924438 - DNA, 15 bp, Homo sapiens
gttgattacctaaga

SEQ ID NO: 924439 - DNA, 15 bp, Homo sapiens
agttgattacctaag

SEQ ID NO: 924440 - DNA, 15 bp, Homo sapiens
cagttgattacctaa

SEQ ID NO: 924441 - DNA, 15 bp, Homo sapiens
ccagttgattaccta

SEQ ID NO: 924442 - DNA, 15 bp, Homo sapiens
gccagttgattacct

SEQ ID NO: 924443 - DNA, 15 bp, Homo sapiens
tgccagttgattacc

SEQ ID NO: 924444 - DNA, 15 bp, Homo sapiens
atgccagttgattac

SEQ ID NO: 924445 - DNA, 15 bp, Homo sapiens
tatgccagttgatta

SEQ ID NO: 924446 - DNA, 15 bp, Homo sapiens
atatgccagttgatt

SEQ ID NO: 924447 - DNA, 15 bp, Homo sapiens
catatgccagttgat

SEQ ID NO: 924448 - DNA, 15 bp, Homo sapiens
tcatatgccagttga

SEQ ID NO: 924449 - DNA, 15 bp, Homo sapiens
ttcatatgccagttg

SEQ ID NO: 924450 - DNA, 15 bp, Homo sapiens
tttcatatgccagtt

SEQ ID NO: 924451 - DNA, 15 bp, Homo sapiens
ttttcatatgccagt

SEQ ID NO: 924452 - DNA, 15 bp, Homo sapiens
attttcatatgccag

SEQ ID NO: 924453 - DNA, 15 bp, Homo sapiens
tattttcatatgcca

SEQ ID NO: 924454 - DNA, 15 bp, Homo sapiens
ctattttcatatgcc

SEQ ID NO: 924455 - DNA, 15 bp, Homo sapiens
tctattttcatatgc

SEQ ID NO: 924456 - DNA, 15 bp, Homo sapiens
ttctattttcatatg

SEQ ID NO: 924457 - DNA, 15 bp, Homo sapiens
cttctattttcatat

SEQ ID NO: 924458 - DNA, 15 bp, Homo sapiens
tcttctattttcata

SEQ ID NO: 924459 - DNA, 15 bp, Homo sapiens
ttcttctattttcat

SEQ ID NO: 924460 - DNA, 15 bp, Homo sapiens
gttcttctattttca

SEQ ID NO: 924461 - DNA, 15 bp, Homo sapiens
agttcttctattttc

SEQ ID NO: 924462 - DNA, 15 bp, Homo sapiens
aagttcttctatttt

SEQ ID NO: 924463 - DNA, 15 bp, Homo sapiens
gaagttcttctattt

SEQ ID NO: 924464 - DNA, 15 bp, Homo sapiens
cgaagttcttctatt

SEQ ID NO: 924465 - DNA, 15 bp, Homo sapiens
acgaagttcttctat

SEQ ID NO: 924466 - DNA, 15 bp, Homo sapiens
gacgaagttcttcta

SEQ ID NO: 924467 - DNA, 15 bp, Homo sapiens
agacgaagttcttct

SEQ ID NO: 924468 - DNA, 15 bp, Homo sapiens
aagacgaagttcttc

SEQ ID NO: 924469 - DNA, 15 bp, Homo sapiens
gaagacgaagttctt

SEQ ID NO: 924470 - DNA, 15 bp, Homo sapiens
tgaagacgaagttct

SEQ ID NO: 924471 - DNA, 15 bp, Homo sapiens
ttgaagacgaagttc

SEQ ID NO: 924472 - DNA, 15 bp, Homo sapiens
cttgaagacgaagtt

SEQ ID NO: 924473 - DNA, 15 bp, Homo sapiens
tcttgaagacgaagt

SEQ ID NO: 924474 - DNA, 15 bp, Homo sapiens
ttcttgaagacgaag

SEQ ID NO: 924475 - DNA, 15 bp, Homo sapiens
gttcttgaagacgaa

SEQ ID NO: 924476 - DNA, 15 bp, Homo sapiens
agttcttgaagacga

SEQ ID NO: 924477 - DNA, 15 bp, Homo sapiens
aagttcttgaagacg

SEQ ID NO: 924478 - DNA, 15 bp, Homo sapiens
taagttcttgaagac

SEQ ID NO: 924479 - DNA, 15 bp, Homo sapiens
ttaagttcttgaaga

SEQ ID NO: 924480 - DNA, 15 bp, Homo sapiens
tttaagttcttgaag

SEQ ID NO: 924481 - DNA, 15 bp, Homo sapiens
gtttaagttcttgaa

SEQ ID NO: 924482 - DNA, 15 bp, Homo sapiens
agtttaagttcttga

SEQ ID NO: 924483 - DNA, 15 bp, Homo sapiens
tagtttaagttcttg

SEQ ID NO: 924484 - DNA, 15 bp, Homo sapiens
ttagtttaagttctt

SEQ ID NO: 924485 - DNA, 15 bp, Homo sapiens
tttagtttaagttct

SEQ ID NO: 924486 - DNA, 15 bp, Homo sapiens
atttagtttaagttc

SEQ ID NO: 924487 - DNA, 15 bp, Homo sapiens
gatttagtttaagtt

SEQ ID NO: 924488 - DNA, 15 bp, Homo sapiens
cgatttagtttaagt

SEQ ID NO: 924489 - DNA, 15 bp, Homo sapiens
ccgatttagtttaag

SEQ ID NO: 924490 - DNA, 15 bp, Homo sapiens
cccgatttagtttaa

SEQ ID NO: 924491 - DNA, 15 bp, Homo sapiens
tcccgatttagttta

SEQ ID NO: 924492 - DNA, 15 bp, Homo sapiens
ttcccgatttagttt

SEQ ID NO: 924493 - DNA, 15 bp, Homo sapiens
attcccgatttagtt

SEQ ID NO: 924494 - DNA, 15 bp, Homo sapiens
aattcccgatttagt

SEQ ID NO: 924495 - DNA, 15 bp, Homo sapiens
taattcccgatttag

SEQ ID NO: 924496 - DNA, 15 bp, Homo sapiens
ctaattcccgattta

SEQ ID NO: 924497 - DNA, 15 bp, Homo sapiens
actaattcccgattt

SEQ ID NO: 924498 - DNA, 15 bp, Homo sapiens
gactaattcccgatt

SEQ ID NO: 924499 - DNA, 15 bp, Homo sapiens
tgactaattcccgat

SEQ ID NO: 924500 - DNA, 15 bp, Homo sapiens
ttgactaattcccga

SEQ ID NO: 924501 - DNA, 15 bp, Homo sapiens
cttgactaattcccg

SEQ ID NO: 924502 - DNA, 15 bp, Homo sapiens
ccttgactaattccc

SEQ ID NO: 924503 - DNA, 15 bp, Homo sapiens
tccttgactaattcc

SEQ ID NO: 924504 - DNA, 15 bp, Homo sapiens
atccttgactaattc

SEQ ID NO: 924505 - DNA, 15 bp, Homo sapiens
tatccttgactaatt

SEQ ID NO: 924506 - DNA, 15 bp, Homo sapiens
ttatccttgactaat

SEQ ID NO: 924507 - DNA, 15 bp, Homo sapiens
tttatccttgactaa

SEQ ID NO: 924508 - DNA, 15 bp, Homo sapiens
ctttatccttgacta

SEQ ID NO: 924509 - DNA, 15 bp, Homo sapiens
tctttatccttgact

SEQ ID NO: 924510 - DNA, 15 bp, Homo sapiens
ttctttatccttgac

SEQ ID NO: 924511 - DNA, 15 bp, Homo sapiens
cttctttatccttga

SEQ ID NO: 924512 - DNA, 15 bp, Homo sapiens
tcttctttatccttg

SEQ ID NO: 924513 - DNA, 15 bp, Homo sapiens
ttcttctttatcctt

SEQ ID NO: 924514 - DNA, 15 bp, Homo sapiens
tttcttctttatcct

SEQ ID NO: 924515 - DNA, 15 bp, Homo sapiens
atttcttctttatcc

SEQ ID NO: 924516 - DNA, 15 bp, Homo sapiens
tatttcttctttatc

SEQ ID NO: 924517 - DNA, 15 bp, Homo sapiens
ttatttcttctttat

SEQ ID NO: 924518 - DNA, 15 bp, Homo sapiens
tttatttcttcttta

SEQ ID NO: 924519 - DNA, 15 bp, Homo sapiens
ttttatttcttcttt

SEQ ID NO: 924520 - DNA, 15 bp, Homo sapiens
attttatttcttctt

SEQ ID NO: 924521 - DNA, 15 bp, Homo sapiens
tattttatttcttct

SEQ ID NO: 924522 - DNA, 15 bp, Homo sapiens
atattttatttcttc

SEQ ID NO: 924523 - DNA, 15 bp, Homo sapiens
aatattttatttctt

SEQ ID NO: 924524 - DNA, 15 bp, Homo sapiens
aaatattttatttct

SEQ ID NO: 924525 - DNA, 15 bp, Homo sapiens
caaatattttatttc

SEQ ID NO: 924526 - DNA, 15 bp, Homo sapiens
tcaaatattttattt

SEQ ID NO: 924527 - DNA, 15 bp, Homo sapiens
ttcaaatattttatt

SEQ ID NO: 924528 - DNA, 15 bp, Homo sapiens
attcaaatattttat

SEQ ID NO: 924529 - DNA, 15 bp, Homo sapiens
tattcaaatatttta

SEQ ID NO: 924530 - DNA, 15 bp, Homo sapiens
ttattcaaatatttt

SEQ ID NO: 924531 - DNA, 15 bp, Homo sapiens
gttattcaaatattt

SEQ ID NO: 924532 - DNA, 15 bp, Homo sapiens
tgttattcaaatatt

SEQ ID NO: 924533 - DNA, 15 bp, Homo sapiens
atgttattcaaatat

SEQ ID NO: 924534 - DNA, 15 bp, Homo sapiens
tatgttattcaaata

SEQ ID NO: 924535 - DNA, 15 bp, Homo sapiens
ttatgttattcaaat

SEQ ID NO: 924536 - DNA, 15 bp, Homo sapiens
attatgttattcaaa

SEQ ID NO: 924537 - DNA, 15 bp, Homo sapiens
aattatgttattcaa

SEQ ID NO: 924538 - DNA, 15 bp, Homo sapiens
aaattatgttattca

SEQ ID NO: 924539 - DNA, 15 bp, Homo sapiens
gaaattatgttattc

SEQ ID NO: 924540 - DNA, 15 bp, Homo sapiens
agaaattatgttatt

SEQ ID NO: 924541 - DNA, 15 bp, Homo sapiens
cagaaattatgttat

SEQ ID NO: 924542 - DNA, 15 bp, Homo sapiens
tcagaaattatgtta

SEQ ID NO: 924543 - DNA, 15 bp, Homo sapiens
ttcagaaattatgtt

SEQ ID NO: 924544 - DNA, 15 bp, Homo sapiens
attcagaaattatgt

SEQ ID NO: 924545 - DNA, 15 bp, Homo sapiens
tattcagaaattatg

SEQ ID NO: 924546 - DNA, 15 bp, Homo sapiens
atattcagaaattat

SEQ ID NO: 924547 - DNA, 15 bp, Homo sapiens
catattcagaaatta

SEQ ID NO: 924548 - DNA, 15 bp, Homo sapiens
tcatattcagaaatt

SEQ ID NO: 924549 - DNA, 15 bp, Homo sapiens
ttcatattcagaaat

SEQ ID NO: 924550 - DNA, 15 bp, Homo sapiens
gttcatattcagaaa

SEQ ID NO: 924551 - DNA, 15 bp, Homo sapiens
cgttcatattcagaa

SEQ ID NO: 924552 - DNA, 15 bp, Homo sapiens
acgttcatattcaga

SEQ ID NO: 924553 - DNA, 15 bp, Homo sapiens
tacgttcatattcag

SEQ ID NO: 924554 - DNA, 15 bp, Homo sapiens
gtacgttcatattca

SEQ ID NO: 924555 - DNA, 15 bp, Homo sapiens
tgtacgttcatattc

SEQ ID NO: 924556 - DNA, 15 bp, Homo sapiens
ttgtacgttcatatt

SEQ ID NO: 924557 - DNA, 15 bp, Homo sapiens
attgtacgttcatat

SEQ ID NO: 924558 - DNA, 15 bp, Homo sapiens
gattgtacgttcata

SEQ ID NO: 924559 - DNA, 15 bp, Homo sapiens
tgattgtacgttcat

SEQ ID NO: 924560 - DNA, 15 bp, Homo sapiens
ctgattgtacgttca

SEQ ID NO: 924561 - DNA, 15 bp, Homo sapiens
gctgattgtacgttc

SEQ ID NO: 924562 - DNA, 15 bp, Homo sapiens
tgctgattgtacgtt

SEQ ID NO: 924563 - DNA, 15 bp, Homo sapiens
ctgctgattgtacgt

SEQ ID NO: 924564 - DNA, 15 bp, Homo sapiens
actgctgattgtacg

SEQ ID NO: 924565 - DNA, 15 bp, Homo sapiens
gactgctgattgtac

SEQ ID NO: 924566 - DNA, 15 bp, Homo sapiens
agactgctgattgta

SEQ ID NO: 924567 - DNA, 15 bp, Homo sapiens
aagactgctgattgt

SEQ ID NO: 924568 - DNA, 15 bp, Homo sapiens
caagactgctgattg

SEQ ID NO: 924569 - DNA, 15 bp, Homo sapiens
tcaagactgctgatt

SEQ ID NO: 924570 - DNA, 15 bp, Homo sapiens
ttcaagactgctgat

SEQ ID NO: 924571 - DNA, 15 bp, Homo sapiens
cttcaagactgctga

SEQ ID NO: 924572 - DNA, 15 bp, Homo sapiens
tcttcaagactgctg

SEQ ID NO: 924573 - DNA, 15 bp, Homo sapiens
ttcttcaagactgct

SEQ ID NO: 924574 - DNA, 15 bp, Homo sapiens
cttcttcaagactgc

SEQ ID NO: 924575 - DNA, 15 bp, Homo sapiens
tcttcttcaagactg

SEQ ID NO: 924576 - DNA, 15 bp, Homo sapiens
ttcttcttcaagact

SEQ ID NO: 924577 - DNA, 15 bp, Homo sapiens
tttcttcttcaagac

SEQ ID NO: 924578 - DNA, 15 bp, Homo sapiens
atttcttcttcaaga

SEQ ID NO: 924579 - DNA, 15 bp, Homo sapiens
aatttcttcttcaag

SEQ ID NO: 924580 - DNA, 15 bp, Homo sapiens
caatttcttcttcaa

SEQ ID NO: 924581 - DNA, 15 bp, Homo sapiens
acaatttcttcttca

SEQ ID NO: 924582 - DNA, 15 bp, Homo sapiens
cacaatttcttcttc

SEQ ID NO: 924583 - DNA, 15 bp, Homo sapiens
gcacaatttcttctt

SEQ ID NO: 924584 - DNA, 15 bp, Homo sapiens
tgcacaatttcttct

SEQ ID NO: 924585 - DNA, 15 bp, Homo sapiens
ttgcacaatttcttc

SEQ ID NO: 924586 - DNA, 15 bp, Homo sapiens
gttgcacaatttctt

SEQ ID NO: 924587 - DNA, 15 bp, Homo sapiens
tgttgcacaatttct

SEQ ID NO: 924588 - DNA, 15 bp, Homo sapiens
ctgttgcacaatttc

SEQ ID NO: 924589 - DNA, 15 bp, Homo sapiens
tctgttgcacaattt

SEQ ID NO: 924590 - DNA, 15 bp, Homo sapiens
ttctgttgcacaatt

SEQ ID NO: 924591 - DNA, 15 bp, Homo sapiens
gttctgttgcacaat

SEQ ID NO: 924592 - DNA, 15 bp, Homo sapiens
tgttctgttgcacaa

SEQ ID NO: 924593 - DNA, 15 bp, Homo sapiens
ttgttctgttgcaca

SEQ ID NO: 924594 - DNA, 15 bp, Homo sapiens
cttgttctgttgcac

SEQ ID NO: 924595 - DNA, 15 bp, Homo sapiens
ccttgttctgttgca

SEQ ID NO: 924596 - DNA, 15 bp, Homo sapiens
accttgttctgttgc

SEQ ID NO: 924597 - DNA, 15 bp, Homo sapiens
aaccttgttctgttg

SEQ ID NO: 924598 - DNA, 15 bp, Homo sapiens
aaaccttgttctgtt

SEQ ID NO: 924599 - DNA, 15 bp, Homo sapiens
aaaaccttgttctgt

SEQ ID NO: 924600 - DNA, 15 bp, Homo sapiens
taaaaccttgttctg

SEQ ID NO: 924601 - DNA, 15 bp, Homo sapiens
ataaaaccttgttct

SEQ ID NO: 924602 - DNA, 15 bp, Homo sapiens
aataaaaccttgttc

SEQ ID NO: 924603 - DNA, 15 bp, Homo sapiens
aaataaaaccttgtt

SEQ ID NO: 924604 - DNA, 15 bp, Homo sapiens
aaaataaaaccttgt

SEQ ID NO: 924605 - DNA, 15 bp, Homo sapiens
taaaataaaaccttg

SEQ ID NO: 924606 - DNA, 15 bp, Homo sapiens
ataaaataaaacctt

SEQ ID NO: 924607 - DNA, 15 bp, Homo sapiens
tataaaataaaacct

SEQ ID NO: 924608 - DNA, 15 bp, Homo sapiens
atataaaataaaacc

SEQ ID NO: 924609 - DNA, 15 bp, Homo sapiens
aatataaaataaaac

SEQ ID NO: 924610 - DNA, 15 bp, Homo sapiens
aaatataaaataaaa

SEQ ID NO: 924611 - DNA, 15 bp, Homo sapiens
taaatataaaataaa

SEQ ID NO: 924612 - DNA, 15 bp, Homo sapiens
ataaatataaaataa

SEQ ID NO: 924613 - DNA, 15 bp, Homo sapiens
aataaatataaaata

SEQ ID NO: 924614 - DNA, 15 bp, Homo sapiens
aaataaatataaaat

SEQ ID NO: 924615 - DNA, 15 bp, Homo sapiens
gaaataaatataaaa

SEQ ID NO: 924616 - DNA, 15 bp, Homo sapiens
tgaaataaatataaa

SEQ ID NO: 924617 - DNA, 15 bp, Homo sapiens
atgaaataaatataa

SEQ ID NO: 924618 - DNA, 15 bp, Homo sapiens
aatgaaataaatata

SEQ ID NO: 924619 - DNA, 15 bp, Homo sapiens
aaatgaaataaatat

SEQ ID NO: 924620 - DNA, 15 bp, Homo sapiens
aaaatgaaataaata

SEQ ID NO: 924621 - DNA, 15 bp, Homo sapiens
aaaaatgaaataaat

SEQ ID NO: 924622 - DNA, 15 bp, Homo sapiens
aaaaaatgaaataaa

SEQ ID NO: 924623 - DNA, 15 bp, Homo sapiens
aaaaaaatgaaataa

SEQ ID NO: 924624 - DNA, 15 bp, Homo sapiens
gaaaaaaatgaaata

SEQ ID NO: 924625 - DNA, 15 bp, Homo sapiens
ggaaaaaaatgaaat

SEQ ID NO: 924626 - DNA, 15 bp, Homo sapiens
gggaaaaaaatgaaa

SEQ ID NO: 924627 - DNA, 15 bp, Homo sapiens
agggaaaaaaatgaa

SEQ ID NO: 924628 - DNA, 15 bp, Homo sapiens
tagggaaaaaaatga

SEQ ID NO: 924629 - DNA, 15 bp, Homo sapiens
ttagggaaaaaaatg

SEQ ID NO: 924630 - DNA, 15 bp, Homo sapiens
cttagggaaaaaaat

SEQ ID NO: 924631 - DNA, 15 bp, Homo sapiens
acttagggaaaaaaa

SEQ ID NO: 924632 - DNA, 15 bp, Homo sapiens
aacttagggaaaaaa

SEQ ID NO: 924633 - DNA, 15 bp, Homo sapiens
aaacttagggaaaaa

SEQ ID NO: 924634 - DNA, 15 bp, Homo sapiens
aaaacttagggaaaa

SEQ ID NO: 924635 - DNA, 15 bp, Homo sapiens
aaaaacttagggaaa

SEQ ID NO: 924636 - DNA, 15 bp, Homo sapiens
aaaaaacttagggaa

SEQ ID NO: 924637 - DNA, 15 bp, Homo sapiens
aaaaaaacttaggga

SEQ ID NO: 924638 - DNA, 15 bp, Homo sapiens
aaaaaaaacttaggg

SEQ ID NO: 924639 - DNA, 15 bp, Homo sapiens
aaaaaaaaacttagg

SEQ ID NO: 924640 - DNA, 15 bp, Homo sapiens
aaaaaaaaaacttag

SEQ ID NO: 924641 - DNA, 15 bp, Homo sapiens
aaaaaaaaaaactta

SEQ ID NO: 924642 - DNA, 15 bp, Homo sapiens
aaaaaaaaaaaactt

SEQ ID NO: 924643 - DNA, 15 bp, Homo sapiens
aaaaaaaaaaaaact

SEQ ID NO: 924644 - DNA, 15 bp, Homo sapiens
aaaaaaaaaaaaaac

SEQ ID NO: 924645 - DNA, 15 bp, Homo sapiens
gactccatctcaaaa

SEQ ID NO: 924646 - DNA, 15 bp, Homo sapiens
gagactccatctcaa

SEQ ID NO: 924647 - DNA, 15 bp, Homo sapiens
tgagactccatctca

SEQ ID NO: 924648 - DNA, 15 bp, Homo sapiens
gtgagactccatctc

SEQ ID NO: 924649 - DNA, 15 bp, Homo sapiens
agtgagactccatct

SEQ ID NO: 924650 - DNA, 15 bp, Homo sapiens
gagtgagactccatc

SEQ ID NO: 924651 - DNA, 15 bp, Homo sapiens
agagtgagactccat

SEQ ID NO: 924652 - DNA, 15 bp, Homo sapiens
cagagtgagactcca

SEQ ID NO: 924653 - DNA, 15 bp, Homo sapiens
acagagtgagactcc

SEQ ID NO: 924654 - DNA, 15 bp, Homo sapiens
gacagagtgagactc

SEQ ID NO: 924655 - DNA, 15 bp, Homo sapiens
cgacagagtgagact

SEQ ID NO: 924656 - DNA, 15 bp, Homo sapiens
gcgacagagtgagac

SEQ ID NO: 924657 - DNA, 15 bp, Homo sapiens
ggcgacagagtgaga

SEQ ID NO: 924658 - DNA, 15 bp, Homo sapiens
gggcgacagagtgag

SEQ ID NO: 924659 - DNA, 15 bp, Homo sapiens
tgggcgacagagtga

SEQ ID NO: 924660 - DNA, 15 bp, Homo sapiens
ctgggcgacagagtg

SEQ ID NO: 924661 - DNA, 15 bp, Homo sapiens
tctgggcgacagagt

SEQ ID NO: 924662 - DNA, 15 bp, Homo sapiens
gtctgggcgacagag

SEQ ID NO: 924663 - DNA, 15 bp, Homo sapiens
agtctgggcgacaga

SEQ ID NO: 924664 - DNA, 15 bp, Homo sapiens
cagtctgggcgacag

SEQ ID NO: 924665 - DNA, 15 bp, Homo sapiens
ccagtctgggcgaca

SEQ ID NO: 924666 - DNA, 15 bp, Homo sapiens
tccagtctgggcgac

SEQ ID NO: 924667 - DNA, 15 bp, Homo sapiens
ctccagtctgggcga

SEQ ID NO: 924668 - DNA, 15 bp, Homo sapiens
actccagtctgggcg

SEQ ID NO: 924669 - DNA, 15 bp, Homo sapiens
cactccagtctgggc

SEQ ID NO: 924670 - DNA, 15 bp, Homo sapiens
gcactccagtctggg

SEQ ID NO: 924671 - DNA, 15 bp, Homo sapiens
tgcactccagtctgg

SEQ ID NO: 924672 - DNA, 15 bp, Homo sapiens
ctgcactccagtctg

SEQ ID NO: 924673 - DNA, 15 bp, Homo sapiens
actgcactccagtct

SEQ ID NO: 924674 - DNA, 15 bp, Homo sapiens
cactgcactccagtc

SEQ ID NO: 924675 - DNA, 15 bp, Homo sapiens
ccactgcactccagt

SEQ ID NO: 924676 - DNA, 15 bp, Homo sapiens
acgccactgcactcc

SEQ ID NO: 924677 - DNA, 15 bp, Homo sapiens
cacgccactgcactc

SEQ ID NO: 924678 - DNA, 15 bp, Homo sapiens
tcacgccactgcact

SEQ ID NO: 924679 - DNA, 15 bp, Homo sapiens
atcacgccactgcac

SEQ ID NO: 924680 - DNA, 15 bp, Homo sapiens
gatcacgccactgca

SEQ ID NO: 924681 - DNA, 15 bp, Homo sapiens
agatcacgccactgc

SEQ ID NO: 924682 - DNA, 15 bp, Homo sapiens
gagatcacgccactg

SEQ ID NO: 924683 - DNA, 15 bp, Homo sapiens
cgagatcacgccact

SEQ ID NO: 924684 - DNA, 15 bp, Homo sapiens
ccgagatcacgccac

SEQ ID NO: 924685 - DNA, 15 bp, Homo sapiens
gccgagatcacgcca

SEQ ID NO: 924686 - DNA, 15 bp, Homo sapiens
agccgagatcacgcc

SEQ ID NO: 924687 - DNA, 15 bp, Homo sapiens
gagccgagatcacgc

SEQ ID NO: 924688 - DNA, 15 bp, Homo sapiens
tgagccgagatcacg

SEQ ID NO: 924689 - DNA, 15 bp, Homo sapiens
gtgagccgagatcac

SEQ ID NO: 924690 - DNA, 15 bp, Homo sapiens
agtgagccgagatca

SEQ ID NO: 924691 - DNA, 15 bp, Homo sapiens
agagcttgcagtgag

SEQ ID NO: 924692 - DNA, 15 bp, Homo sapiens
cagagcttgcagtga

SEQ ID NO: 924693 - DNA, 15 bp, Homo sapiens
gcagagcttgcagtg

SEQ ID NO: 924694 - DNA, 15 bp, Homo sapiens
ggcagagcttgcagt

SEQ ID NO: 924695 - DNA, 15 bp, Homo sapiens
aggcagagcttgcag

SEQ ID NO: 924696 - DNA, 15 bp, Homo sapiens
gaggcagagcttgca

SEQ ID NO: 924697 - DNA, 15 bp, Homo sapiens
ggaggcagagcttgc

SEQ ID NO: 924698 - DNA, 15 bp, Homo sapiens
gggaggcagagcttg

SEQ ID NO: 924699 - DNA, 15 bp, Homo sapiens
cgggaggcagagctt

SEQ ID NO: 924700 - DNA, 15 bp, Homo sapiens
ccgggaggcagagct

SEQ ID NO: 924701 - DNA, 15 bp, Homo sapiens
cccgggaggcagagc

SEQ ID NO: 924702 - DNA, 15 bp, Homo sapiens
acccgggaggcagag

SEQ ID NO: 924703 - DNA, 15 bp, Homo sapiens
aacccgggaggcaga

SEQ ID NO: 924704 - DNA, 15 bp, Homo sapiens
gaacccgggaggcag

SEQ ID NO: 924705 - DNA, 15 bp, Homo sapiens
tgaacccgggaggca

SEQ ID NO: 924706 - DNA, 15 bp, Homo sapiens
ggtgcctgtagtccc

SEQ ID NO: 924707 - DNA, 15 bp, Homo sapiens
gggtgcctgtagtcc

SEQ ID NO: 924708 - DNA, 15 bp, Homo sapiens
cgggtgcctgtagtc

SEQ ID NO: 924709 - DNA, 15 bp, Homo sapiens
gcgggtgcctgtagt

SEQ ID NO: 924710 - DNA, 15 bp, Homo sapiens
ggcgggtgcctgtag

SEQ ID NO: 924711 - DNA, 15 bp, Homo sapiens
tggcgggtgcctgta

SEQ ID NO: 924712 - DNA, 15 bp, Homo sapiens
gtggcgggtgcctgt

SEQ ID NO: 924713 - DNA, 15 bp, Homo sapiens
ggtggcgggtgcctg

SEQ ID NO: 924714 - DNA, 15 bp, Homo sapiens
cggtggcgggtgcct

SEQ ID NO: 924715 - DNA, 15 bp, Homo sapiens
acggtggcgggtgcc

SEQ ID NO: 924716 - DNA, 15 bp, Homo sapiens
cacggtggcgggtgc

SEQ ID NO: 924717 - DNA, 15 bp, Homo sapiens
gcacggtggcgggtg

SEQ ID NO: 924718 - DNA, 15 bp, Homo sapiens
ggcacggtggcgggt

SEQ ID NO: 924719 - DNA, 15 bp, Homo sapiens
aggcacggtggcggg

SEQ ID NO: 924720 - DNA, 15 bp, Homo sapiens
caggcacggtggcgg

SEQ ID NO: 924721 - DNA, 15 bp, Homo sapiens
ccaggcacggtggcg

SEQ ID NO: 924722 - DNA, 15 bp, Homo sapiens
gccaggcacggtggc

SEQ ID NO: 924723 - DNA, 15 bp, Homo sapiens
agccaggcacggtgg

SEQ ID NO: 924724 - DNA, 15 bp, Homo sapiens
tagccaggcacggtg

SEQ ID NO: 924725 - DNA, 15 bp, Homo sapiens
ttagccaggcacggt

SEQ ID NO: 924726 - DNA, 15 bp, Homo sapiens
attagccaggcacgg

SEQ ID NO: 924727 - DNA, 15 bp, Homo sapiens
aattagccaggcacg

SEQ ID NO: 924728 - DNA, 15 bp, Homo sapiens
aaattagccaggcac

SEQ ID NO: 924729 - DNA, 15 bp, Homo sapiens
aaaattagccaggca

SEQ ID NO: 924730 - DNA, 15 bp, Homo sapiens
aaaaaattagccagg

SEQ ID NO: 924731 - DNA, 15 bp, Homo sapiens
caaaaaattagccag

SEQ ID NO: 924732 - DNA, 15 bp, Homo sapiens
acaaaaaattagcca

SEQ ID NO: 924733 - DNA, 15 bp, Homo sapiens
tggtgaaaccccgtc

SEQ ID NO: 924734 - DNA, 15 bp, Homo sapiens
atggtgaaaccccgt

SEQ ID NO: 924735 - DNA, 15 bp, Homo sapiens
tatggtgaaaccccg

SEQ ID NO: 924736 - DNA, 15 bp, Homo sapiens
atatggtgaaacccc

SEQ ID NO: 924737 - DNA, 15 bp, Homo sapiens
aatatggtgaaaccc

SEQ ID NO: 924738 - DNA, 15 bp, Homo sapiens
taatatggtgaaacc

SEQ ID NO: 924739 - DNA, 15 bp, Homo sapiens
ctaatatggtgaaac

SEQ ID NO: 924740 - DNA, 15 bp, Homo sapiens
gctaatatggtgaaa

SEQ ID NO: 924741 - DNA, 15 bp, Homo sapiens
ggctaatatggtgaa

SEQ ID NO: 924742 - DNA, 15 bp, Homo sapiens
tggctaatatggtga

SEQ ID NO: 924743 - DNA, 15 bp, Homo sapiens
ctggctaatatggtg

SEQ ID NO: 924744 - DNA, 15 bp, Homo sapiens
cctggctaatatggt

SEQ ID NO: 924745 - DNA, 15 bp, Homo sapiens
tcctggctaatatgg

SEQ ID NO: 924746 - DNA, 15 bp, Homo sapiens
atcctggctaatatg

SEQ ID NO: 924747 - DNA, 15 bp, Homo sapiens
catcctggctaatat

SEQ ID NO: 924748 - DNA, 15 bp, Homo sapiens
ccatcctggctaata

SEQ ID NO: 924749 - DNA, 15 bp, Homo sapiens
accatcctggctaat

SEQ ID NO: 924750 - DNA, 15 bp, Homo sapiens
gaccatcctggctaa

SEQ ID NO: 924751 - DNA, 15 bp, Homo sapiens
agaccatcctggcta

SEQ ID NO: 924752 - DNA, 15 bp, Homo sapiens
aagaccatcctggct

SEQ ID NO: 924753 - DNA, 15 bp, Homo sapiens
caagaccatcctggc

SEQ ID NO: 924754 - DNA, 15 bp, Homo sapiens
tcaagaccatcctgg

SEQ ID NO: 924755 - DNA, 15 bp, Homo sapiens
atcaagaccatcctg

SEQ ID NO: 924756 - DNA, 15 bp, Homo sapiens
gatcaagaccatcct

SEQ ID NO: 924757 - DNA, 15 bp, Homo sapiens
agatcaagaccatcc

SEQ ID NO: 924758 - DNA, 15 bp, Homo sapiens
gagatcaagaccatc

SEQ ID NO: 924759 - DNA, 15 bp, Homo sapiens
ggagatcaagaccat

SEQ ID NO: 924760 - DNA, 15 bp, Homo sapiens
aggagatcaagacca

SEQ ID NO: 924761 - DNA, 15 bp, Homo sapiens
caggagatcaagacc

SEQ ID NO: 924762 - DNA, 15 bp, Homo sapiens
tcaggagatcaagac

SEQ ID NO: 924763 - DNA, 15 bp, Homo sapiens
gtcaggagatcaaga

SEQ ID NO: 924764 - DNA, 15 bp, Homo sapiens
ggtcaggagatcaag

SEQ ID NO: 924765 - DNA, 15 bp, Homo sapiens
aggtcaggagatcaa

SEQ ID NO: 924766 - DNA, 15 bp, Homo sapiens
gaggtcaggagatca

SEQ ID NO: 924767 - DNA, 15 bp, Homo sapiens
tgaggtcaggagatc

SEQ ID NO: 924768 - DNA, 15 bp, Homo sapiens
atgaggtcaggagat

SEQ ID NO: 924769 - DNA, 15 bp, Homo sapiens
catgaggtcaggaga

SEQ ID NO: 924770 - DNA, 15 bp, Homo sapiens
tcatgaggtcaggag

SEQ ID NO: 924771 - DNA, 15 bp, Homo sapiens
atcatgaggtcagga

SEQ ID NO: 924772 - DNA, 15 bp, Homo sapiens
gatcatgaggtcagg

SEQ ID NO: 924773 - DNA, 15 bp, Homo sapiens
ggatcatgaggtcag

SEQ ID NO: 924774 - DNA, 15 bp, Homo sapiens
cggatcatgaggtca

SEQ ID NO: 924775 - DNA, 15 bp, Homo sapiens
gcggatcatgaggtc

SEQ ID NO: 924776 - DNA, 15 bp, Homo sapiens
ggcggatcatgaggt

SEQ ID NO: 924777 - DNA, 15 bp, Homo sapiens
gggcggatcatgagg

SEQ ID NO: 924778 - DNA, 15 bp, Homo sapiens
cgggcggatcatgag

SEQ ID NO: 924779 - DNA, 15 bp, Homo sapiens
gcgggcggatcatga

SEQ ID NO: 924780 - DNA, 15 bp, Homo sapiens
ggcgggcggatcatg

SEQ ID NO: 924781 - DNA, 15 bp, Homo sapiens
aggcgggcggatcat

SEQ ID NO: 924782 - DNA, 15 bp, Homo sapiens
gggctcacgcctgta

SEQ ID NO: 924783 - DNA, 15 bp, Homo sapiens
ggggctcacgcctgt

SEQ ID NO: 924784 - DNA, 15 bp, Homo sapiens
aggggctcacgcctg

SEQ ID NO: 924785 - DNA, 15 bp, Homo sapiens
taggggctcacgcct

SEQ ID NO: 924786 - DNA, 15 bp, Homo sapiens
ttaggggctcacgcc

SEQ ID NO: 924787 - DNA, 15 bp, Homo sapiens
cttaggggctcacgc

SEQ ID NO: 924788 - DNA, 15 bp, Homo sapiens
tcttaggggctcacg

SEQ ID NO: 924789 - DNA, 15 bp, Homo sapiens
atcttaggggctcac

SEQ ID NO: 924790 - DNA, 15 bp, Homo sapiens
aatcttaggggctca

SEQ ID NO: 924791 - DNA, 15 bp, Homo sapiens
aaatcttaggggctc

SEQ ID NO: 924792 - DNA, 15 bp, Homo sapiens
aaaatcttaggggct

SEQ ID NO: 924793 - DNA, 15 bp, Homo sapiens
taaaatcttaggggc

SEQ ID NO: 924794 - DNA, 15 bp, Homo sapiens
ttaaaatcttagggg

SEQ ID NO: 924795 - DNA, 15 bp, Homo sapiens
tttaaaatcttaggg

SEQ ID NO: 924796 - DNA, 15 bp, Homo sapiens
gtttaaaatcttagg

SEQ ID NO: 924797 - DNA, 15 bp, Homo sapiens
tgtttaaaatcttag

SEQ ID NO: 924798 - DNA, 15 bp, Homo sapiens
ttgtttaaaatctta

SEQ ID NO: 924799 - DNA, 15 bp, Homo sapiens
cttgtttaaaatctt

SEQ ID NO: 924800 - DNA, 15 bp, Homo sapiens
tcttgtttaaaatct

SEQ ID NO: 924801 - DNA, 15 bp, Homo sapiens
ttcttgtttaaaatc

SEQ ID NO: 924802 - DNA, 15 bp, Homo sapiens
attcttgtttaaaat

SEQ ID NO: 924803 - DNA, 15 bp, Homo sapiens
tattcttgtttaaaa

SEQ ID NO: 924804 - DNA, 15 bp, Homo sapiens
atattcttgtttaaa

SEQ ID NO: 924805 - DNA, 15 bp, Homo sapiens
aatattcttgtttaa

SEQ ID NO: 924806 - DNA, 15 bp, Homo sapiens
caatattcttgttta

SEQ ID NO: 924807 - DNA, 15 bp, Homo sapiens
gcaatattcttgttt

SEQ ID NO: 924808 - DNA, 15 bp, Homo sapiens
tgcaatattcttgtt

SEQ ID NO: 924809 - DNA, 15 bp, Homo sapiens
gtgcaatattcttgt

SEQ ID NO: 924810 - DNA, 15 bp, Homo sapiens
tgtgcaatattcttg

SEQ ID NO: 924811 - DNA, 15 bp, Homo sapiens
ttgtgcaatattctt

SEQ ID NO: 924812 - DNA, 15 bp, Homo sapiens
tttgtgcaatattct

SEQ ID NO: 924813 - DNA, 15 bp, Homo sapiens
atttgtgcaatattc

SEQ ID NO: 924814 - DNA, 15 bp, Homo sapiens
catttgtgcaatatt

SEQ ID NO: 924815 - DNA, 15 bp, Homo sapiens
tcatttgtgcaatat

SEQ ID NO: 924816 - DNA, 15 bp, Homo sapiens
gtcatttgtgcaata

SEQ ID NO: 924817 - DNA, 15 bp, Homo sapiens
agtcatttgtgcaat

SEQ ID NO: 924818 - DNA, 15 bp, Homo sapiens
tagtcatttgtgcaa

SEQ ID NO: 924819 - DNA, 15 bp, Homo sapiens
atagtcatttgtgca

SEQ ID NO: 924820 - DNA, 15 bp, Homo sapiens
catagtcatttgtgc

SEQ ID NO: 924821 - DNA, 15 bp, Homo sapiens
acatagtcatttgtg

SEQ ID NO: 924822 - DNA, 15 bp, Homo sapiens
aacatagtcatttgt

SEQ ID NO: 924823 - DNA, 15 bp, Homo sapiens
taacatagtcatttg

SEQ ID NO: 924824 - DNA, 15 bp, Homo sapiens
ataacatagtcattt

SEQ ID NO: 924825 - DNA, 15 bp, Homo sapiens
gataacatagtcatt

SEQ ID NO: 924826 - DNA, 15 bp, Homo sapiens
ggataacatagtcat

SEQ ID NO: 924827 - DNA, 15 bp, Homo sapiens
aggataacatagtca

SEQ ID NO: 924828 - DNA, 15 bp, Homo sapiens
aaggataacatagtc

SEQ ID NO: 924829 - DNA, 15 bp, Homo sapiens
gaaggataacatagt

SEQ ID NO: 924830 - DNA, 15 bp, Homo sapiens
agaaggataacatag

SEQ ID NO: 924831 - DNA, 15 bp, Homo sapiens
tagaaggataacata

SEQ ID NO: 924832 - DNA, 15 bp, Homo sapiens
ttagaaggataacat

SEQ ID NO: 924833 - DNA, 15 bp, Homo sapiens
attagaaggataaca

SEQ ID NO: 924834 - DNA, 15 bp, Homo sapiens
aattagaaggataac

SEQ ID NO: 924835 - DNA, 15 bp, Homo sapiens
taattagaaggataa

SEQ ID NO: 924836 - DNA, 15 bp, Homo sapiens
ttaattagaaggata

SEQ ID NO: 924837 - DNA, 15 bp, Homo sapiens
cttaattagaaggat

SEQ ID NO: 924838 - DNA, 15 bp, Homo sapiens
acttaattagaagga

SEQ ID NO: 924839 - DNA, 15 bp, Homo sapiens
cacttaattagaagg

SEQ ID NO: 924840 - DNA, 15 bp, Homo sapiens
gcacttaattagaag

SEQ ID NO: 924841 - DNA, 15 bp, Homo sapiens
tgcacttaattagaa

SEQ ID NO: 924842 - DNA, 15 bp, Homo sapiens
gtgcacttaattaga

SEQ ID NO: 924843 - DNA, 15 bp, Homo sapiens
ggtgcacttaattag

SEQ ID NO: 924844 - DNA, 15 bp, Homo sapiens
aggtgcacttaatta

SEQ ID NO: 924845 - DNA, 15 bp, Homo sapiens
aaggtgcacttaatt

SEQ ID NO: 924846 - DNA, 15 bp, Homo sapiens
gaaggtgcacttaat

SEQ ID NO: 924847 - DNA, 15 bp, Homo sapiens
ggaaggtgcacttaa

SEQ ID NO: 924848 - DNA, 15 bp, Homo sapiens
tggaaggtgcactta

SEQ ID NO: 924849 - DNA, 15 bp, Homo sapiens
atggaaggtgcactt

SEQ ID NO: 924850 - DNA, 15 bp, Homo sapiens
aatggaaggtgcact

SEQ ID NO: 924851 - DNA, 15 bp, Homo sapiens
taatggaaggtgcac

SEQ ID NO: 924852 - DNA, 15 bp, Homo sapiens
gtaatggaaggtgca

SEQ ID NO: 924853 - DNA, 15 bp, Homo sapiens
agtaatggaaggtgc

SEQ ID NO: 924854 - DNA, 15 bp, Homo sapiens
tagtaatggaaggtg

SEQ ID NO: 924855 - DNA, 15 bp, Homo sapiens
ttagtaatggaaggt

SEQ ID NO: 924856 - DNA, 15 bp, Homo sapiens
attagtaatggaagg

SEQ ID NO: 924857 - DNA, 15 bp, Homo sapiens
aattagtaatggaag

SEQ ID NO: 924858 - DNA, 15 bp, Homo sapiens
caattagtaatggaa

SEQ ID NO: 924859 - DNA, 15 bp, Homo sapiens
tcaattagtaatgga

SEQ ID NO: 924860 - DNA, 15 bp, Homo sapiens
atcaattagtaatgg

SEQ ID NO: 924861 - DNA, 15 bp, Homo sapiens
aatcaattagtaatg

SEQ ID NO: 924862 - DNA, 15 bp, Homo sapiens
taatcaattagtaat

SEQ ID NO: 924863 - DNA, 15 bp, Homo sapiens
ataatcaattagtaa

SEQ ID NO: 924864 - DNA, 15 bp, Homo sapiens
tataatcaattagta

SEQ ID NO: 924865 - DNA, 15 bp, Homo sapiens
atataatcaattagt

SEQ ID NO: 924866 - DNA, 15 bp, Homo sapiens
tatataatcaattag

SEQ ID NO: 924867 - DNA, 15 bp, Homo sapiens
ttatataatcaatta

SEQ ID NO: 924868 - DNA, 15 bp, Homo sapiens
attatataatcaatt

SEQ ID NO: 924869 - DNA, 15 bp, Homo sapiens
tattatataatcaat

SEQ ID NO: 924870 - DNA, 15 bp, Homo sapiens
ttattatataatcaa

SEQ ID NO: 924871 - DNA, 15 bp, Homo sapiens
attattatataatca

SEQ ID NO: 924872 - DNA, 15 bp, Homo sapiens
aattattatataatc

SEQ ID NO: 924873 - DNA, 15 bp, Homo sapiens
aaattattatataat

SEQ ID NO: 924874 - DNA, 15 bp, Homo sapiens
caaattattatataa

SEQ ID NO: 924875 - DNA, 15 bp, Homo sapiens
acaaattattatata

SEQ ID NO: 924876 - DNA, 15 bp, Homo sapiens
aacaaattattatat

SEQ ID NO: 924877 - DNA, 15 bp, Homo sapiens
aaacaaattattata

SEQ ID NO: 924878 - DNA, 15 bp, Homo sapiens
aaaacaaattattat

SEQ ID NO: 924879 - DNA, 15 bp, Homo sapiens
aaaaacaaattatta

SEQ ID NO: 924880 - DNA, 15 bp, Homo sapiens
aaaaaacaaattatt

SEQ ID NO: 924881 - DNA, 15 bp, Homo sapiens
taaaaaacaaattat

SEQ ID NO: 924882 - DNA, 15 bp, Homo sapiens
ataaaaaacaaatta

SEQ ID NO: 924883 - DNA, 15 bp, Homo sapiens
aataaaaaacaaatt

SEQ ID NO: 924884 - DNA, 15 bp, Homo sapiens
aaaataaaaaacaaa

SEQ ID NO: 924885 - DNA, 15 bp, Homo sapiens
gaaaataaaaaacaa

SEQ ID NO: 924886 - DNA, 15 bp, Homo sapiens
agaaaataaaaaaca

SEQ ID NO: 924887 - DNA, 15 bp, Homo sapiens
tagaaaataaaaaac

SEQ ID NO: 924888 - DNA, 15 bp, Homo sapiens
ttagaaaataaaaaa

SEQ ID NO: 924889 - DNA, 15 bp, Homo sapiens
tttagaaaataaaaa

SEQ ID NO: 924890 - DNA, 15 bp, Homo sapiens
gtttagaaaataaaa

SEQ ID NO: 924891 - DNA, 15 bp, Homo sapiens
agtttagaaaataaa

SEQ ID NO: 924892 - DNA, 15 bp, Homo sapiens
tagtttagaaaataa

SEQ ID NO: 924893 - DNA, 15 bp, Homo sapiens
atagtttagaaaata

SEQ ID NO: 924894 - DNA, 15 bp, Homo sapiens
aatagtttagaaaat

SEQ ID NO: 924895 - DNA, 15 bp, Homo sapiens
gaatagtttagaaaa

SEQ ID NO: 924896 - DNA, 15 bp, Homo sapiens
agaatagtttagaaa

SEQ ID NO: 924897 - DNA, 15 bp, Homo sapiens
tagaatagtttagaa

SEQ ID NO: 924898 - DNA, 15 bp, Homo sapiens
ttagaatagtttaga

SEQ ID NO: 924899 - DNA, 15 bp, Homo sapiens
tttagaatagtttag

SEQ ID NO: 924900 - DNA, 15 bp, Homo sapiens
ttttagaatagttta

SEQ ID NO: 924901 - DNA, 15 bp, Homo sapiens
tttttagaatagttt

SEQ ID NO: 924902 - DNA, 15 bp, Homo sapiens
atttttagaatagtt

SEQ ID NO: 924903 - DNA, 15 bp, Homo sapiens
aatttttagaatagt

SEQ ID NO: 924904 - DNA, 15 bp, Homo sapiens
gaatttttagaatag

SEQ ID NO: 924905 - DNA, 15 bp, Homo sapiens
tgaatttttagaata

SEQ ID NO: 924906 - DNA, 15 bp, Homo sapiens
atgaatttttagaat

SEQ ID NO: 924907 - DNA, 15 bp, Homo sapiens
tatgaatttttagaa

SEQ ID NO: 924908 - DNA, 15 bp, Homo sapiens
atatgaatttttaga

SEQ ID NO: 924909 - DNA, 15 bp, Homo sapiens
aatatgaatttttag

SEQ ID NO: 924910 - DNA, 15 bp, Homo sapiens
aaatatgaattttta

SEQ ID NO: 924911 - DNA, 15 bp, Homo sapiens
taaatatgaattttt

SEQ ID NO: 924912 - DNA, 15 bp, Homo sapiens
ataaatatgaatttt

SEQ ID NO: 924913 - DNA, 15 bp, Homo sapiens
aataaatatgaattt

SEQ ID NO: 924914 - DNA, 15 bp, Homo sapiens
aaataaatatgaatt

SEQ ID NO: 924915 - DNA, 15 bp, Homo sapiens
taaataaatatgaat

SEQ ID NO: 924916 - DNA, 15 bp, Homo sapiens
ctaaataaatatgaa

SEQ ID NO: 924917 - DNA, 15 bp, Homo sapiens
gctaaataaatatga

SEQ ID NO: 924918 - DNA, 15 bp, Homo sapiens
agctaaataaatatg

SEQ ID NO: 924919 - DNA, 15 bp, Homo sapiens
aagctaaataaatat

SEQ ID NO: 924920 - DNA, 15 bp, Homo sapiens
aaagctaaataaata

SEQ ID NO: 924921 - DNA, 15 bp, Homo sapiens
aaaagctaaataaat

SEQ ID NO: 924922 - DNA, 15 bp, Homo sapiens
taaaagctaaataaa

SEQ ID NO: 924923 - DNA, 15 bp, Homo sapiens
ataaaagctaaataa

SEQ ID NO: 924924 - DNA, 15 bp, Homo sapiens
tataaaagctaaata

SEQ ID NO: 924925 - DNA, 15 bp, Homo sapiens
ttataaaagctaaat

SEQ ID NO: 924926 - DNA, 15 bp, Homo sapiens
gttataaaagctaaa

SEQ ID NO: 924927 - DNA, 15 bp, Homo sapiens
tgttataaaagctaa

SEQ ID NO: 924928 - DNA, 15 bp, Homo sapiens
ctgttataaaagcta

SEQ ID NO: 924929 - DNA, 15 bp, Homo sapiens
actgttataaaagct

SEQ ID NO: 924930 - DNA, 15 bp, Homo sapiens
tactgttataaaagc

SEQ ID NO: 924931 - DNA, 15 bp, Homo sapiens
ctactgttataaaag

SEQ ID NO: 924932 - DNA, 15 bp, Homo sapiens
actactgttataaaa

SEQ ID NO: 924933 - DNA, 15 bp, Homo sapiens
gactactgttataaa

SEQ ID NO: 924934 - DNA, 15 bp, Homo sapiens
agactactgttataa

SEQ ID NO: 924935 - DNA, 15 bp, Homo sapiens
aagactactgttata

SEQ ID NO: 924936 - DNA, 15 bp, Homo sapiens
taagactactgttat

SEQ ID NO: 924937 - DNA, 15 bp, Homo sapiens
ttaagactactgtta

SEQ ID NO: 924938 - DNA, 15 bp, Homo sapiens
attaagactactgtt

SEQ ID NO: 924939 - DNA, 15 bp, Homo sapiens
gattaagactactgt

SEQ ID NO: 924940 - DNA, 15 bp, Homo sapiens
agattaagactactg

SEQ ID NO: 924941 - DNA, 15 bp, Homo sapiens
aagattaagactact

SEQ ID NO: 924942 - DNA, 15 bp, Homo sapiens
taagattaagactac

SEQ ID NO: 924943 - DNA, 15 bp, Homo sapiens
ttaagattaagacta

SEQ ID NO: 924944 - DNA, 15 bp, Homo sapiens
tttaagattaagact

SEQ ID NO: 924945 - DNA, 15 bp, Homo sapiens
ttttaagattaagac

SEQ ID NO: 924946 - DNA, 15 bp, Homo sapiens
tttttaagattaaga

SEQ ID NO: 924947 - DNA, 15 bp, Homo sapiens
gtttttaagattaag

SEQ ID NO: 924948 - DNA, 15 bp, Homo sapiens
cgtttttaagattaa

SEQ ID NO: 924949 - DNA, 15 bp, Homo sapiens
ccgtttttaagatta

SEQ ID NO: 924950 - DNA, 15 bp, Homo sapiens
gccgtttttaagatt

SEQ ID NO: 924951 - DNA, 15 bp, Homo sapiens
tgccgtttttaagat

SEQ ID NO: 924952 - DNA, 15 bp, Homo sapiens
ttgccgtttttaaga

SEQ ID NO: 924953 - DNA, 15 bp, Homo sapiens
attgccgtttttaag

SEQ ID NO: 924954 - DNA, 15 bp, Homo sapiens
tattgccgtttttaa

SEQ ID NO: 924955 - DNA, 15 bp, Homo sapiens
gtattgccgttttta

SEQ ID NO: 924956 - DNA, 15 bp, Homo sapiens
tgtattgccgttttt

SEQ ID NO: 924957 - DNA, 15 bp, Homo sapiens
atgtattgccgtttt

SEQ ID NO: 924958 - DNA, 15 bp, Homo sapiens
tatgtattgccgttt

SEQ ID NO: 924959 - DNA, 15 bp, Homo sapiens
ttatgtattgccgtt

SEQ ID NO: 924960 - DNA, 15 bp, Homo sapiens
cttatgtattgccgt

SEQ ID NO: 924961 - DNA, 15 bp, Homo sapiens
gcttatgtattgccg

SEQ ID NO: 924962 - DNA, 15 bp, Homo sapiens
tgcttatgtattgcc

SEQ ID NO: 924963 - DNA, 15 bp, Homo sapiens
ttgcttatgtattgc

SEQ ID NO: 924964 - DNA, 15 bp, Homo sapiens
gttgcttatgtattg

SEQ ID NO: 924965 - DNA, 15 bp, Homo sapiens
ggttgcttatgtatt

SEQ ID NO: 924966 - DNA, 15 bp, Homo sapiens
aggttgcttatgtat

SEQ ID NO: 924967 - DNA, 15 bp, Homo sapiens
gaggttgcttatgta

SEQ ID NO: 924968 - DNA, 15 bp, Homo sapiens
tgaggttgcttatgt

SEQ ID NO: 924969 - DNA, 15 bp, Homo sapiens
atgaggttgcttatg

SEQ ID NO: 924970 - DNA, 15 bp, Homo sapiens
aatgaggttgcttat

SEQ ID NO: 924971 - DNA, 15 bp, Homo sapiens
aaatgaggttgctta

SEQ ID NO: 924972 - DNA, 15 bp, Homo sapiens
caaatgaggttgctt

SEQ ID NO: 924973 - DNA, 15 bp, Homo sapiens
ccaaatgaggttgct

SEQ ID NO: 924974 - DNA, 15 bp, Homo sapiens
accaaatgaggttgc

SEQ ID NO: 924975 - DNA, 15 bp, Homo sapiens
taccaaatgaggttg

SEQ ID NO: 924976 - DNA, 15 bp, Homo sapiens
ttaccaaatgaggtt

SEQ ID NO: 924977 - DNA, 15 bp, Homo sapiens
cttaccaaatgaggt

SEQ ID NO: 924978 - DNA, 15 bp, Homo sapiens
acttaccaaatgagg

SEQ ID NO: 924979 - DNA, 15 bp, Homo sapiens
aacttaccaaatgag

SEQ ID NO: 924980 - DNA, 15 bp, Homo sapiens
taacttaccaaatga

SEQ ID NO: 924981 - DNA, 15 bp, Homo sapiens
ttaacttaccaaatg

SEQ ID NO: 924982 - DNA, 15 bp, Homo sapiens
attaacttaccaaat

SEQ ID NO: 924983 - DNA, 15 bp, Homo sapiens
aattaacttaccaaa

SEQ ID NO: 924984 - DNA, 15 bp, Homo sapiens
aaattaacttaccaa

SEQ ID NO: 924985 - DNA, 15 bp, Homo sapiens
aaaattaacttacca

SEQ ID NO: 924986 - DNA, 15 bp, Homo sapiens
aaaaattaacttacc

SEQ ID NO: 924987 - DNA, 15 bp, Homo sapiens
taaaaattaacttac

SEQ ID NO: 924988 - DNA, 15 bp, Homo sapiens
ataaaaattaactta

SEQ ID NO: 924989 - DNA, 15 bp, Homo sapiens
aataaaaattaactt

SEQ ID NO: 924990 - DNA, 15 bp, Homo sapiens
aaataaaaattaact

SEQ ID NO: 924991 - DNA, 15 bp, Homo sapiens
aaaataaaaattaac

SEQ ID NO: 924992 - DNA, 15 bp, Homo sapiens
caaaataaaaattaa

SEQ ID NO: 924993 - DNA, 15 bp, Homo sapiens
tcaaaataaaaatta

SEQ ID NO: 924994 - DNA, 15 bp, Homo sapiens
atcaaaataaaaatt

SEQ ID NO: 924995 - DNA, 15 bp, Homo sapiens
tatcaaaataaaaat

SEQ ID NO: 924996 - DNA, 15 bp, Homo sapiens
atatcaaaataaaaa

SEQ ID NO: 924997 - DNA, 15 bp, Homo sapiens
aatatcaaaataaaa

SEQ ID NO: 924998 - DNA, 15 bp, Homo sapiens
caatatcaaaataaa

SEQ ID NO: 924999 - DNA, 15 bp, Homo sapiens
ccaatatcaaaataa

SEQ ID NO: 925000 - DNA, 15 bp, Homo sapiens
accaatatcaaaata

SEQ ID NO: 925001 - DNA, 15 bp, Homo sapiens
aaccaatatcaaaat

SEQ ID NO: 925002 - DNA, 15 bp, Homo sapiens
taaccaatatcaaaa

SEQ ID NO: 925003 - DNA, 15 bp, Homo sapiens
ataaccaatatcaaa

SEQ ID NO: 925004 - DNA, 15 bp, Homo sapiens
aataaccaatatcaa

SEQ ID NO: 925005 - DNA, 15 bp, Homo sapiens
aaataaccaatatca

SEQ ID NO: 925006 - DNA, 15 bp, Homo sapiens
caaataaccaatatc

SEQ ID NO: 925007 - DNA, 15 bp, Homo sapiens
tcaaataaccaatat

SEQ ID NO: 925008 - DNA, 15 bp, Homo sapiens
gtcaaataaccaata

SEQ ID NO: 925009 - DNA, 15 bp, Homo sapiens
agtcaaataaccaat

SEQ ID NO: 925010 - DNA, 15 bp, Homo sapiens
aagtcaaataaccaa

SEQ ID NO: 925011 - DNA, 15 bp, Homo sapiens
aaagtcaaataacca

SEQ ID NO: 925012 - DNA, 15 bp, Homo sapiens
aaaagtcaaataacc

SEQ ID NO: 925013 - DNA, 15 bp, Homo sapiens
gaaaagtcaaataac

SEQ ID NO: 925014 - DNA, 15 bp, Homo sapiens
tgaaaagtcaaataa

SEQ ID NO: 925015 - DNA, 15 bp, Homo sapiens
gtgaaaagtcaaata

SEQ ID NO: 925016 - DNA, 15 bp, Homo sapiens
tgtgaaaagtcaaat

SEQ ID NO: 925017 - DNA, 15 bp, Homo sapiens
ctgtgaaaagtcaaa

SEQ ID NO: 925018 - DNA, 15 bp, Homo sapiens
actgtgaaaagtcaa

SEQ ID NO: 925019 - DNA, 15 bp, Homo sapiens
aactgtgaaaagtca

SEQ ID NO: 925020 - DNA, 15 bp, Homo sapiens
gaactgtgaaaagtc

SEQ ID NO: 925021 - DNA, 15 bp, Homo sapiens
ggaactgtgaaaagt

SEQ ID NO: 925022 - DNA, 15 bp, Homo sapiens
tggaactgtgaaaag

SEQ ID NO: 925023 - DNA, 15 bp, Homo sapiens
gtggaactgtgaaaa

SEQ ID NO: 925024 - DNA, 15 bp, Homo sapiens
cgtggaactgtgaaa

SEQ ID NO: 925025 - DNA, 15 bp, Homo sapiens
acgtggaactgtgaa

SEQ ID NO: 925026 - DNA, 15 bp, Homo sapiens
aacgtggaactgtga

SEQ ID NO: 925027 - DNA, 15 bp, Homo sapiens
aaacgtggaactgtg

SEQ ID NO: 925028 - DNA, 15 bp, Homo sapiens
gaaacgtggaactgt

SEQ ID NO: 925029 - DNA, 15 bp, Homo sapiens
agaaacgtggaactg

SEQ ID NO: 925030 - DNA, 15 bp, Homo sapiens
tagaaacgtggaact

SEQ ID NO: 925031 - DNA, 15 bp, Homo sapiens
gtagaaacgtggaac

SEQ ID NO: 925032 - DNA, 15 bp, Homo sapiens
agtagaaacgtggaa

SEQ ID NO: 925033 - DNA, 15 bp, Homo sapiens
cagtagaaacgtgga

SEQ ID NO: 925034 - DNA, 15 bp, Homo sapiens
ccagtagaaacgtgg

SEQ ID NO: 925035 - DNA, 15 bp, Homo sapiens
gccagtagaaacgtg

SEQ ID NO: 925036 - DNA, 15 bp, Homo sapiens
agccagtagaaacgt

SEQ ID NO: 925037 - DNA, 15 bp, Homo sapiens
gagccagtagaaacg

SEQ ID NO: 925038 - DNA, 15 bp, Homo sapiens
agagccagtagaaac

SEQ ID NO: 925039 - DNA, 15 bp, Homo sapiens
gagagccagtagaaa

SEQ ID NO: 925040 - DNA, 15 bp, Homo sapiens
tgagagccagtagaa

SEQ ID NO: 925041 - DNA, 15 bp, Homo sapiens
gtgagagccagtaga

SEQ ID NO: 925042 - DNA, 15 bp, Homo sapiens
agtgagagccagtag

SEQ ID NO: 925043 - DNA, 15 bp, Homo sapiens
cagtgagagccagta

SEQ ID NO: 925044 - DNA, 15 bp, Homo sapiens
tcagtgagagccagt

SEQ ID NO: 925045 - DNA, 15 bp, Homo sapiens
atcagtgagagccag

SEQ ID NO: 925046 - DNA, 15 bp, Homo sapiens
tatcagtgagagcca

SEQ ID NO: 925047 - DNA, 15 bp, Homo sapiens
ctatcagtgagagcc

SEQ ID NO: 925048 - DNA, 15 bp, Homo sapiens
tctatcagtgagagc

SEQ ID NO: 925049 - DNA, 15 bp, Homo sapiens
ctctatcagtgagag

SEQ ID NO: 925050 - DNA, 15 bp, Homo sapiens
actctatcagtgaga

SEQ ID NO: 925051 - DNA, 15 bp, Homo sapiens
tactctatcagtgag

SEQ ID NO: 925052 - DNA, 15 bp, Homo sapiens
ttactctatcagtga

SEQ ID NO: 925053 - DNA, 15 bp, Homo sapiens
cttactctatcagtg

SEQ ID NO: 925054 - DNA, 15 bp, Homo sapiens
tcttactctatcagt

SEQ ID NO: 925055 - DNA, 15 bp, Homo sapiens
ttcttactctatcag

SEQ ID NO: 925056 - DNA, 15 bp, Homo sapiens
cttcttactctatca

SEQ ID NO: 925057 - DNA, 15 bp, Homo sapiens
acttcttactctatc

SEQ ID NO: 925058 - DNA, 15 bp, Homo sapiens
gacttcttactctat

SEQ ID NO: 925059 - DNA, 15 bp, Homo sapiens
tgacttcttactcta

SEQ ID NO: 925060 - DNA, 15 bp, Homo sapiens
ctgacttcttactct

SEQ ID NO: 925061 - DNA, 15 bp, Homo sapiens
gctgacttcttactc

SEQ ID NO: 925062 - DNA, 15 bp, Homo sapiens
agctgacttcttact

SEQ ID NO: 925063 - DNA, 15 bp, Homo sapiens
aagctgacttcttac

SEQ ID NO: 925064 - DNA, 15 bp, Homo sapiens
gaagctgacttctta

SEQ ID NO: 925065 - DNA, 15 bp, Homo sapiens
agaagctgacttctt

SEQ ID NO: 925066 - DNA, 15 bp, Homo sapiens
aagaagctgacttct

SEQ ID NO: 925067 - DNA, 15 bp, Homo sapiens
taagaagctgacttc

SEQ ID NO: 925068 - DNA, 15 bp, Homo sapiens
ataagaagctgactt

SEQ ID NO: 925069 - DNA, 15 bp, Homo sapiens
tataagaagctgact

SEQ ID NO: 925070 - DNA, 15 bp, Homo sapiens
ctataagaagctgac

SEQ ID NO: 925071 - DNA, 15 bp, Homo sapiens
tctataagaagctga

SEQ ID NO: 925072 - DNA, 15 bp, Homo sapiens
ttctataagaagctg

SEQ ID NO: 925073 - DNA, 15 bp, Homo sapiens
attctataagaagct

SEQ ID NO: 925074 - DNA, 15 bp, Homo sapiens
tattctataagaagc

SEQ ID NO: 925075 - DNA, 15 bp, Homo sapiens
ttattctataagaag

SEQ ID NO: 925076 - DNA, 15 bp, Homo sapiens
tttattctataagaa

SEQ ID NO: 925077 - DNA, 15 bp, Homo sapiens
ctttattctataaga

SEQ ID NO: 925078 - DNA, 15 bp, Homo sapiens
actttattctataag

SEQ ID NO: 925079 - DNA, 15 bp, Homo sapiens
tactttattctataa

SEQ ID NO: 925080 - DNA, 15 bp, Homo sapiens
atactttattctata

SEQ ID NO: 925081 - DNA, 15 bp, Homo sapiens
tatactttattctat

SEQ ID NO: 925082 - DNA, 15 bp, Homo sapiens
atatactttattcta

SEQ ID NO: 925083 - DNA, 15 bp, Homo sapiens
tatatactttattct

SEQ ID NO: 925084 - DNA, 15 bp, Homo sapiens
gtatatactttattc

SEQ ID NO: 925085 - DNA, 15 bp, Homo sapiens
agtatatactttatt

SEQ ID NO: 925086 - DNA, 15 bp, Homo sapiens
aagtatatactttat

SEQ ID NO: 925087 - DNA, 15 bp, Homo sapiens
gaagtatatacttta

SEQ ID NO: 925088 - DNA, 15 bp, Homo sapiens
tgaagtatatacttt

SEQ ID NO: 925089 - DNA, 15 bp, Homo sapiens
ctgaagtatatactt

SEQ ID NO: 925090 - DNA, 15 bp, Homo sapiens
tctgaagtatatact

SEQ ID NO: 925091 - DNA, 15 bp, Homo sapiens
ctctgaagtatatac

SEQ ID NO: 925092 - DNA, 15 bp, Homo sapiens
tctctgaagtatata

SEQ ID NO: 925093 - DNA, 15 bp, Homo sapiens
gtctctgaagtatat

SEQ ID NO: 925094 - DNA, 15 bp, Homo sapiens
tgtctctgaagtata

SEQ ID NO: 925095 - DNA, 15 bp, Homo sapiens
ctgtctctgaagtat

SEQ ID NO: 925096 - DNA, 15 bp, Homo sapiens
tctgtctctgaagta

SEQ ID NO: 925097 - DNA, 15 bp, Homo sapiens
atctgtctctgaagt

SEQ ID NO: 925098 - DNA, 15 bp, Homo sapiens
catctgtctctgaag

SEQ ID NO: 925099 - DNA, 15 bp, Homo sapiens
tcatctgtctctgaa

SEQ ID NO: 925100 - DNA, 15 bp, Homo sapiens
ttcatctgtctctga

SEQ ID NO: 925101 - DNA, 15 bp, Homo sapiens
tttcatctgtctctg

SEQ ID NO: 925102 - DNA, 15 bp, Homo sapiens
atttcatctgtctct

SEQ ID NO: 925103 - DNA, 15 bp, Homo sapiens
aatttcatctgtctc

SEQ ID NO: 925104 - DNA, 15 bp, Homo sapiens
gaatttcatctgtct

SEQ ID NO: 925105 - DNA, 15 bp, Homo sapiens
cgaatttcatctgtc

SEQ ID NO: 925106 - DNA, 15 bp, Homo sapiens
acgaatttcatctgt

SEQ ID NO: 925107 - DNA, 15 bp, Homo sapiens
gacgaatttcatctg

SEQ ID NO: 925108 - DNA, 15 bp, Homo sapiens
tgacgaatttcatct

SEQ ID NO: 925109 - DNA, 15 bp, Homo sapiens
ttgacgaatttcatc

SEQ ID NO: 925110 - DNA, 15 bp, Homo sapiens
tttgacgaatttcat

SEQ ID NO: 925111 - DNA, 15 bp, Homo sapiens
gtttgacgaatttca

SEQ ID NO: 925112 - DNA, 15 bp, Homo sapiens
tgtttgacgaatttc

SEQ ID NO: 925113 - DNA, 15 bp, Homo sapiens
atgtttgacgaattt

SEQ ID NO: 925114 - DNA, 15 bp, Homo sapiens
tatgtttgacgaatt

SEQ ID NO: 925115 - DNA, 15 bp, Homo sapiens
atatgtttgacgaat

SEQ ID NO: 925116 - DNA, 15 bp, Homo sapiens
catatgtttgacgaa

SEQ ID NO: 925117 - DNA, 15 bp, Homo sapiens
tcatatgtttgacga

SEQ ID NO: 925118 - DNA, 15 bp, Homo sapiens
gtcatatgtttgacg

SEQ ID NO: 925119 - DNA, 15 bp, Homo sapiens
agtcatatgtttgac

SEQ ID NO: 925120 - DNA, 15 bp, Homo sapiens
cagtcatatgtttga

SEQ ID NO: 925121 - DNA, 15 bp, Homo sapiens
acagtcatatgtttg

SEQ ID NO: 925122 - DNA, 15 bp, Homo sapiens
gacagtcatatgttt

SEQ ID NO: 925123 - DNA, 15 bp, Homo sapiens
agacagtcatatgtt

SEQ ID NO: 925124 - DNA, 15 bp, Homo sapiens
gagacagtcatatgt

SEQ ID NO: 925125 - DNA, 15 bp, Homo sapiens
tgagacagtcatatg

SEQ ID NO: 925126 - DNA, 15 bp, Homo sapiens
ctgagacagtcatat

SEQ ID NO: 925127 - DNA, 15 bp, Homo sapiens
tctgagacagtcata

SEQ ID NO: 925128 - DNA, 15 bp, Homo sapiens
ctctgagacagtcat

SEQ ID NO: 925129 - DNA, 15 bp, Homo sapiens
tctctgagacagtca

SEQ ID NO: 925130 - DNA, 15 bp, Homo sapiens
atctctgagacagtc

SEQ ID NO: 925131 - DNA, 15 bp, Homo sapiens
aatctctgagacagt

SEQ ID NO: 925132 - DNA, 15 bp, Homo sapiens
caatctctgagacag

SEQ ID NO: 925133 - DNA, 15 bp, Homo sapiens
acaatctctgagaca

SEQ ID NO: 925134 - DNA, 15 bp, Homo sapiens
aacaatctctgagac

SEQ ID NO: 925135 - DNA, 15 bp, Homo sapiens
gaacaatctctgaga

SEQ ID NO: 925136 - DNA, 15 bp, Homo sapiens
ggaacaatctctgag

SEQ ID NO: 925137 - DNA, 15 bp, Homo sapiens
gggaacaatctctga

SEQ ID NO: 925138 - DNA, 15 bp, Homo sapiens
ggggaacaatctctg

SEQ ID NO: 925139 - DNA, 15 bp, Homo sapiens
gggggaacaatctct

SEQ ID NO: 925140 - DNA, 15 bp, Homo sapiens
agggggaacaatctc

SEQ ID NO: 925141 - DNA, 15 bp, Homo sapiens
cagggggaacaatct

SEQ ID NO: 925142 - DNA, 15 bp, Homo sapiens
gcagggggaacaatc

SEQ ID NO: 925143 - DNA, 15 bp, Homo sapiens
agcagggggaacaat

SEQ ID NO: 925144 - DNA, 15 bp, Homo sapiens
aagcagggggaacaa

SEQ ID NO: 925145 - DNA, 15 bp, Homo sapiens
taagcagggggaaca

SEQ ID NO: 925146 - DNA, 15 bp, Homo sapiens
ttaagcagggggaac

SEQ ID NO: 925147 - DNA, 15 bp, Homo sapiens
tttaagcagggggaa

SEQ ID NO: 925148 - DNA, 15 bp, Homo sapiens
atttaagcaggggga

SEQ ID NO: 925149 - DNA, 15 bp, Homo sapiens
aatttaagcaggggg

SEQ ID NO: 925150 - DNA, 15 bp, Homo sapiens
caatttaagcagggg

SEQ ID NO: 925151 - DNA, 15 bp, Homo sapiens
acaatttaagcaggg

SEQ ID NO: 925152 - DNA, 15 bp, Homo sapiens
aacaatttaagcagg

SEQ ID NO: 925153 - DNA, 15 bp, Homo sapiens
gaacaatttaagcag

SEQ ID NO: 925154 - DNA, 15 bp, Homo sapiens
agaacaatttaagca

SEQ ID NO: 925155 - DNA, 15 bp, Homo sapiens
aagaacaatttaagc

SEQ ID NO: 925156 - DNA, 15 bp, Homo sapiens
taagaacaatttaag

SEQ ID NO: 925157 - DNA, 15 bp, Homo sapiens
gtaagaacaatttaa

SEQ ID NO: 925158 - DNA, 15 bp, Homo sapiens
ggtaagaacaattta

SEQ ID NO: 925159 - DNA, 15 bp, Homo sapiens
gggtaagaacaattt

SEQ ID NO: 925160 - DNA, 15 bp, Homo sapiens
agggtaagaacaatt

SEQ ID NO: 925161 - DNA, 15 bp, Homo sapiens
tagggtaagaacaat

SEQ ID NO: 925162 - DNA, 15 bp, Homo sapiens
ctagggtaagaacaa

SEQ ID NO: 925163 - DNA, 15 bp, Homo sapiens
tctagggtaagaaca

SEQ ID NO: 925164 - DNA, 15 bp, Homo sapiens
atctagggtaagaac

SEQ ID NO: 925165 - DNA, 15 bp, Homo sapiens
tatctagggtaagaa

SEQ ID NO: 925166 - DNA, 15 bp, Homo sapiens
gtatctagggtaaga

SEQ ID NO: 925167 - DNA, 15 bp, Homo sapiens
ggtatctagggtaag

SEQ ID NO: 925168 - DNA, 15 bp, Homo sapiens
aggtatctagggtaa

SEQ ID NO: 925169 - DNA, 15 bp, Homo sapiens
aaggtatctagggta

SEQ ID NO: 925170 - DNA, 15 bp, Homo sapiens
aaaggtatctagggt

SEQ ID NO: 925171 - DNA, 15 bp, Homo sapiens
caaaggtatctaggg

SEQ ID NO: 925172 - DNA, 15 bp, Homo sapiens
ccaaaggtatctagg

SEQ ID NO: 925173 - DNA, 15 bp, Homo sapiens
accaaaggtatctag

SEQ ID NO: 925174 - DNA, 15 bp, Homo sapiens
taccaaaggtatcta

SEQ ID NO: 925175 - DNA, 15 bp, Homo sapiens
ataccaaaggtatct

SEQ ID NO: 925176 - DNA, 15 bp, Homo sapiens
aataccaaaggtatc

SEQ ID NO: 925177 - DNA, 15 bp, Homo sapiens
aaataccaaaggtat

SEQ ID NO: 925178 - DNA, 15 bp, Homo sapiens
taaataccaaaggta

SEQ ID NO: 925179 - DNA, 15 bp, Homo sapiens
gtaaataccaaaggt

SEQ ID NO: 925180 - DNA, 15 bp, Homo sapiens
tgtaaataccaaagg

SEQ ID NO: 925181 - DNA, 15 bp, Homo sapiens
gtgtaaataccaaag

SEQ ID NO: 925182 - DNA, 15 bp, Homo sapiens
agtgtaaataccaaa

SEQ ID NO: 925183 - DNA, 15 bp, Homo sapiens
cagtgtaaataccaa

SEQ ID NO: 925184 - DNA, 15 bp, Homo sapiens
acagtgtaaatacca

SEQ ID NO: 925185 - DNA, 15 bp, Homo sapiens
gacagtgtaaatacc

SEQ ID NO: 925186 - DNA, 15 bp, Homo sapiens
tgacagtgtaaatac

SEQ ID NO: 925187 - DNA, 15 bp, Homo sapiens
ctgacagtgtaaata

SEQ ID NO: 925188 - DNA, 15 bp, Homo sapiens
actgacagtgtaaat

SEQ ID NO: 925189 - DNA, 15 bp, Homo sapiens
cactgacagtgtaaa

SEQ ID NO: 925190 - DNA, 15 bp, Homo sapiens
gcactgacagtgtaa

SEQ ID NO: 925191 - DNA, 15 bp, Homo sapiens
ggcactgacagtgta

SEQ ID NO: 925192 - DNA, 15 bp, Homo sapiens
aggcactgacagtgt

SEQ ID NO: 925193 - DNA, 15 bp, Homo sapiens
caggcactgacagtg

SEQ ID NO: 925194 - DNA, 15 bp, Homo sapiens
gcaggcactgacagt

SEQ ID NO: 925195 - DNA, 15 bp, Homo sapiens
tgcaggcactgacag

SEQ ID NO: 925196 - DNA, 15 bp, Homo sapiens
ctgcaggcactgaca

SEQ ID NO: 925197 - DNA, 15 bp, Homo sapiens
cctgcaggcactgac

SEQ ID NO: 925198 - DNA, 15 bp, Homo sapiens
acctgcaggcactga

SEQ ID NO: 925199 - DNA, 15 bp, Homo sapiens
gacctgcaggcactg

SEQ ID NO: 925200 - DNA, 15 bp, Homo sapiens
agacctgcaggcact

SEQ ID NO: 925201 - DNA, 15 bp, Homo sapiens
aagacctgcaggcac

SEQ ID NO: 925202 - DNA, 15 bp, Homo sapiens
taagacctgcaggca

SEQ ID NO: 925203 - DNA, 15 bp, Homo sapiens
ctaagacctgcaggc

SEQ ID NO: 925204 - DNA, 15 bp, Homo sapiens
gctaagacctgcagg

SEQ ID NO: 925205 - DNA, 15 bp, Homo sapiens
agctaagacctgcag

SEQ ID NO: 925206 - DNA, 15 bp, Homo sapiens
gagctaagacctgca

SEQ ID NO: 925207 - DNA, 15 bp, Homo sapiens
tgagctaagacctgc

SEQ ID NO: 925208 - DNA, 15 bp, Homo sapiens
ttgagctaagacctg

SEQ ID NO: 925209 - DNA, 15 bp, Homo sapiens
tttgagctaagacct

SEQ ID NO: 925210 - DNA, 15 bp, Homo sapiens
atttgagctaagacc

SEQ ID NO: 925211 - DNA, 15 bp, Homo sapiens
catttgagctaagac

SEQ ID NO: 925212 - DNA, 15 bp, Homo sapiens
acatttgagctaaga

SEQ ID NO: 925213 - DNA, 15 bp, Homo sapiens
gacatttgagctaag

SEQ ID NO: 925214 - DNA, 15 bp, Homo sapiens
agacatttgagctaa

SEQ ID NO: 925215 - DNA, 15 bp, Homo sapiens
aagacatttgagcta

SEQ ID NO: 925216 - DNA, 15 bp, Homo sapiens
taagacatttgagct

SEQ ID NO: 925217 - DNA, 15 bp, Homo sapiens
gtaagacatttgagc

SEQ ID NO: 925218 - DNA, 15 bp, Homo sapiens
ggtaagacatttgag

SEQ ID NO: 925219 - DNA, 15 bp, Homo sapiens
aggtaagacatttga

SEQ ID NO: 925220 - DNA, 15 bp, Homo sapiens
aaggtaagacatttg

SEQ ID NO: 925221 - DNA, 15 bp, Homo sapiens
taaggtaagacattt

SEQ ID NO: 925222 - DNA, 15 bp, Homo sapiens
ataaggtaagacatt

SEQ ID NO: 925223 - DNA, 15 bp, Homo sapiens
gataaggtaagacat

SEQ ID NO: 925224 - DNA, 15 bp, Homo sapiens
tgataaggtaagaca

SEQ ID NO: 925225 - DNA, 15 bp, Homo sapiens
ctgataaggtaagac

SEQ ID NO: 925226 - DNA, 15 bp, Homo sapiens
actgataaggtaaga

SEQ ID NO: 925227 - DNA, 15 bp, Homo sapiens
cactgataaggtaag

SEQ ID NO: 925228 - DNA, 15 bp, Homo sapiens
acactgataaggtaa

SEQ ID NO: 925229 - DNA, 15 bp, Homo sapiens
tacactgataaggta

SEQ ID NO: 925230 - DNA, 15 bp, Homo sapiens
atacactgataaggt

SEQ ID NO: 925231 - DNA, 15 bp, Homo sapiens
gatacactgataagg

SEQ ID NO: 925232 - DNA, 15 bp, Homo sapiens
ggatacactgataag

SEQ ID NO: 925233 - DNA, 15 bp, Homo sapiens
aggatacactgataa

SEQ ID NO: 925234 - DNA, 15 bp, Homo sapiens
aaggatacactgata

SEQ ID NO: 925235 - DNA, 15 bp, Homo sapiens
gaaggatacactgat

SEQ ID NO: 925236 - DNA, 15 bp, Homo sapiens
tgaaggatacactga

SEQ ID NO: 925237 - DNA, 15 bp, Homo sapiens
gtgaaggatacactg

SEQ ID NO: 925238 - DNA, 15 bp, Homo sapiens
ggtgaaggatacact

SEQ ID NO: 925239 - DNA, 15 bp, Homo sapiens
tggtgaaggatacac

SEQ ID NO: 925240 - DNA, 15 bp, Homo sapiens
ctggtgaaggataca

SEQ ID NO: 925241 - DNA, 15 bp, Homo sapiens
gctggtgaaggatac

SEQ ID NO: 925242 - DNA, 15 bp, Homo sapiens
ggctggtgaaggata

SEQ ID NO: 925243 - DNA, 15 bp, Homo sapiens
tggctggtgaaggat

SEQ ID NO: 925244 - DNA, 15 bp, Homo sapiens
gtggctggtgaagga

SEQ ID NO: 925245 - DNA, 15 bp, Homo sapiens
ggtggctggtgaagg

SEQ ID NO: 925246 - DNA, 15 bp, Homo sapiens
aggtggctggtgaag

SEQ ID NO: 925247 - DNA, 15 bp, Homo sapiens
taggtggctggtgaa

SEQ ID NO: 925248 - DNA, 15 bp, Homo sapiens
ttaggtggctggtga

SEQ ID NO: 925249 - DNA, 15 bp, Homo sapiens
attaggtggctggtg

SEQ ID NO: 925250 - DNA, 15 bp, Homo sapiens
tattaggtggctggt

SEQ ID NO: 925251 - DNA, 15 bp, Homo sapiens
atattaggtggctgg

SEQ ID NO: 925252 - DNA, 15 bp, Homo sapiens
tatattaggtggctg

SEQ ID NO: 925253 - DNA, 15 bp, Homo sapiens
gtatattaggtggct

SEQ ID NO: 925254 - DNA, 15 bp, Homo sapiens
tgtatattaggtggc

SEQ ID NO: 925255 - DNA, 15 bp, Homo sapiens
ttgtatattaggtgg

SEQ ID NO: 925256 - DNA, 15 bp, Homo sapiens
gttgtatattaggtg

SEQ ID NO: 925257 - DNA, 15 bp, Homo sapiens
tgttgtatattaggt

SEQ ID NO: 925258 - DNA, 15 bp, Homo sapiens
ctgttgtatattagg

SEQ ID NO: 925259 - DNA, 15 bp, Homo sapiens
actgttgtatattag

SEQ ID NO: 925260 - DNA, 15 bp, Homo sapiens
tactgttgtatatta

SEQ ID NO: 925261 - DNA, 15 bp, Homo sapiens
ttactgttgtatatt

SEQ ID NO: 925262 - DNA, 15 bp, Homo sapiens
tttactgttgtatat

SEQ ID NO: 925263 - DNA, 15 bp, Homo sapiens
atttactgttgtata

SEQ ID NO: 925264 - DNA, 15 bp, Homo sapiens
gatttactgttgtat

SEQ ID NO: 925265 - DNA, 15 bp, Homo sapiens
ggatttactgttgta

SEQ ID NO: 925266 - DNA, 15 bp, Homo sapiens
aggatttactgttgt

SEQ ID NO: 925267 - DNA, 15 bp, Homo sapiens
taggatttactgttg

SEQ ID NO: 925268 - DNA, 15 bp, Homo sapiens
gtaggatttactgtt

SEQ ID NO: 925269 - DNA, 15 bp, Homo sapiens
agtaggatttactgt

SEQ ID NO: 925270 - DNA, 15 bp, Homo sapiens
tagtaggatttactg

SEQ ID NO: 925271 - DNA, 15 bp, Homo sapiens
atagtaggatttact

SEQ ID NO: 925272 - DNA, 15 bp, Homo sapiens
gatagtaggatttac

SEQ ID NO: 925273 - DNA, 15 bp, Homo sapiens
ggatagtaggattta

SEQ ID NO: 925274 - DNA, 15 bp, Homo sapiens
tggatagtaggattt

SEQ ID NO: 925275 - DNA, 15 bp, Homo sapiens
ctggatagtaggatt

SEQ ID NO: 925276 - DNA, 15 bp, Homo sapiens
tctggatagtaggat

SEQ ID NO: 925277 - DNA, 15 bp, Homo sapiens
atctggatagtagga

SEQ ID NO: 925278 - DNA, 15 bp, Homo sapiens
aatctggatagtagg

SEQ ID NO: 925279 - DNA, 15 bp, Homo sapiens
gaatctggatagtag

SEQ ID NO: 925280 - DNA, 15 bp, Homo sapiens
ggaatctggatagta

SEQ ID NO: 925281 - DNA, 15 bp, Homo sapiens
aggaatctggatagt

SEQ ID NO: 925282 - DNA, 15 bp, Homo sapiens
taggaatctggatag

SEQ ID NO: 925283 - DNA, 15 bp, Homo sapiens
ttaggaatctggata

SEQ ID NO: 925284 - DNA, 15 bp, Homo sapiens
tttaggaatctggat

SEQ ID NO: 925285 - DNA, 15 bp, Homo sapiens
atttaggaatctgga

SEQ ID NO: 925286 - DNA, 15 bp, Homo sapiens
tatttaggaatctgg

SEQ ID NO: 925287 - DNA, 15 bp, Homo sapiens
ctatttaggaatctg

SEQ ID NO: 925288 - DNA, 15 bp, Homo sapiens
tctatttaggaatct

SEQ ID NO: 925289 - DNA, 15 bp, Homo sapiens
ctctatttaggaatc

SEQ ID NO: 925290 - DNA, 15 bp, Homo sapiens
tctctatttaggaat

SEQ ID NO: 925291 - DNA, 15 bp, Homo sapiens
atctctatttaggaa

SEQ ID NO: 925292 - DNA, 15 bp, Homo sapiens
aatctctatttagga

SEQ ID NO: 925293 - DNA, 15 bp, Homo sapiens
taatctctatttagg

SEQ ID NO: 925294 - DNA, 15 bp, Homo sapiens
ttaatctctatttag

SEQ ID NO: 925295 - DNA, 15 bp, Homo sapiens
attaatctctattta

SEQ ID NO: 925296 - DNA, 15 bp, Homo sapiens
aattaatctctattt

SEQ ID NO: 925297 - DNA, 15 bp, Homo sapiens
taattaatctctatt

SEQ ID NO: 925298 - DNA, 15 bp, Homo sapiens
ttaattaatctctat

SEQ ID NO: 925299 - DNA, 15 bp, Homo sapiens
gttaattaatctcta

SEQ ID NO: 925300 - DNA, 15 bp, Homo sapiens
agttaattaatctct

SEQ ID NO: 925301 - DNA, 15 bp, Homo sapiens
aagttaattaatctc

SEQ ID NO: 925302 - DNA, 15 bp, Homo sapiens
taagttaattaatct

SEQ ID NO: 925303 - DNA, 15 bp, Homo sapiens
ttaagttaattaatc

SEQ ID NO: 925304 - DNA, 15 bp, Homo sapiens
attaagttaattaat

SEQ ID NO: 925305 - DNA, 15 bp, Homo sapiens
aattaagttaattaa

SEQ ID NO: 925306 - DNA, 15 bp, Homo sapiens
aaattaagttaatta

SEQ ID NO: 925307 - DNA, 15 bp, Homo sapiens
aaaattaagttaatt

SEQ ID NO: 925308 - DNA, 15 bp, Homo sapiens
aaaaattaagttaat

SEQ ID NO: 925309 - DNA, 15 bp, Homo sapiens
gaaaaattaagttaa

SEQ ID NO: 925310 - DNA, 15 bp, Homo sapiens
agaaaaattaagtta

SEQ ID NO: 925311 - DNA, 15 bp, Homo sapiens
gagaaaaattaagtt

SEQ ID NO: 925312 - DNA, 15 bp, Homo sapiens
ggagaaaaattaagt

SEQ ID NO: 925313 - DNA, 15 bp, Homo sapiens
tggagaaaaattaag

SEQ ID NO: 925314 - DNA, 15 bp, Homo sapiens
ttggagaaaaattaa

SEQ ID NO: 925315 - DNA, 15 bp, Homo sapiens
tttggagaaaaatta

SEQ ID NO: 925316 - DNA, 15 bp, Homo sapiens
ctttggagaaaaatt

SEQ ID NO: 925317 - DNA, 15 bp, Homo sapiens
actttggagaaaaat

SEQ ID NO: 925318 - DNA, 15 bp, Homo sapiens
cactttggagaaaaa

SEQ ID NO: 925319 - DNA, 15 bp, Homo sapiens
gcactttggagaaaa

SEQ ID NO: 925320 - DNA, 15 bp, Homo sapiens
agcactttggagaaa

SEQ ID NO: 925321 - DNA, 15 bp, Homo sapiens
aagcactttggagaa

SEQ ID NO: 925322 - DNA, 15 bp, Homo sapiens
caagcactttggaga

SEQ ID NO: 925323 - DNA, 15 bp, Homo sapiens
acaagcactttggag

SEQ ID NO: 925324 - DNA, 15 bp, Homo sapiens
tacaagcactttgga

SEQ ID NO: 925325 - DNA, 15 bp, Homo sapiens
ttacaagcactttgg

SEQ ID NO: 925326 - DNA, 15 bp, Homo sapiens
gttacaagcactttg

SEQ ID NO: 925327 - DNA, 15 bp, Homo sapiens
ggttacaagcacttt

SEQ ID NO: 925328 - DNA, 15 bp, Homo sapiens
aggttacaagcactt

SEQ ID NO: 925329 - DNA, 15 bp, Homo sapiens
aaggttacaagcact

SEQ ID NO: 925330 - DNA, 15 bp, Homo sapiens
gaaggttacaagcac

SEQ ID NO: 925331 - DNA, 15 bp, Homo sapiens
agaaggttacaagca

SEQ ID NO: 925332 - DNA, 15 bp, Homo sapiens
cagaaggttacaagc

SEQ ID NO: 925333 - DNA, 15 bp, Homo sapiens
tcagaaggttacaag

SEQ ID NO: 925334 - DNA, 15 bp, Homo sapiens
gtcagaaggttacaa

SEQ ID NO: 925335 - DNA, 15 bp, Homo sapiens
cgtcagaaggttaca

SEQ ID NO: 925336 - DNA, 15 bp, Homo sapiens
acgtcagaaggttac

SEQ ID NO: 925337 - DNA, 15 bp, Homo sapiens
tacgtcagaaggtta

SEQ ID NO: 925338 - DNA, 15 bp, Homo sapiens
atacgtcagaaggtt

SEQ ID NO: 925339 - DNA, 15 bp, Homo sapiens
aatacgtcagaaggt

SEQ ID NO: 925340 - DNA, 15 bp, Homo sapiens
taatacgtcagaagg

SEQ ID NO: 925341 - DNA, 15 bp, Homo sapiens
gtaatacgtcagaag

SEQ ID NO: 925342 - DNA, 15 bp, Homo sapiens
tgtaatacgtcagaa

SEQ ID NO: 925343 - DNA, 15 bp, Homo sapiens
atgtaatacgtcaga

SEQ ID NO: 925344 - DNA, 15 bp, Homo sapiens
tatgtaatacgtcag

SEQ ID NO: 925345 - DNA, 15 bp, Homo sapiens
gtatgtaatacgtca

SEQ ID NO: 925346 - DNA, 15 bp, Homo sapiens
agtatgtaatacgtc

SEQ ID NO: 925347 - DNA, 15 bp, Homo sapiens
aagtatgtaatacgt

SEQ ID NO: 925348 - DNA, 15 bp, Homo sapiens
taagtatgtaatacg

SEQ ID NO: 925349 - DNA, 15 bp, Homo sapiens
gtaagtatgtaatac

SEQ ID NO: 925350 - DNA, 15 bp, Homo sapiens
agtaagtatgtaata

SEQ ID NO: 925351 - DNA, 15 bp, Homo sapiens
cagtaagtatgtaat

SEQ ID NO: 925352 - DNA, 15 bp, Homo sapiens
ccagtaagtatgtaa

SEQ ID NO: 925353 - DNA, 15 bp, Homo sapiens
accagtaagtatgta

SEQ ID NO: 925354 - DNA, 15 bp, Homo sapiens
aaccagtaagtatgt

SEQ ID NO: 925355 - DNA, 15 bp, Homo sapiens
aaaccagtaagtatg

SEQ ID NO: 925356 - DNA, 15 bp, Homo sapiens
taaaccagtaagtat

SEQ ID NO: 925357 - DNA, 15 bp, Homo sapiens
ataaaccagtaagta

SEQ ID NO: 925358 - DNA, 15 bp, Homo sapiens
aataaaccagtaagt

SEQ ID NO: 925359 - DNA, 15 bp, Homo sapiens
taataaaccagtaag

SEQ ID NO: 925360 - DNA, 15 bp, Homo sapiens
ataataaaccagtaa

SEQ ID NO: 925361 - DNA, 15 bp, Homo sapiens
aataataaaccagta

SEQ ID NO: 925362 - DNA, 15 bp, Homo sapiens
caataataaaccagt

SEQ ID NO: 925363 - DNA, 15 bp, Homo sapiens
tcaataataaaccag

SEQ ID NO: 925364 - DNA, 15 bp, Homo sapiens
gtcaataataaacca

SEQ ID NO: 925365 - DNA, 15 bp, Homo sapiens
agtcaataataaacc

SEQ ID NO: 925366 - DNA, 15 bp, Homo sapiens
cagtcaataataaac

SEQ ID NO: 925367 - DNA, 15 bp, Homo sapiens
acagtcaataataaa

SEQ ID NO: 925368 - DNA, 15 bp, Homo sapiens
gacagtcaataataa

SEQ ID NO: 925369 - DNA, 15 bp, Homo sapiens
agacagtcaataata

SEQ ID NO: 925370 - DNA, 15 bp, Homo sapiens
aagacagtcaataat

SEQ ID NO: 925371 - DNA, 15 bp, Homo sapiens
aaagacagtcaataa

SEQ ID NO: 925372 - DNA, 15 bp, Homo sapiens
gaaagacagtcaata

SEQ ID NO: 925373 - DNA, 15 bp, Homo sapiens
ggaaagacagtcaat

SEQ ID NO: 925374 - DNA, 15 bp, Homo sapiens
aggaaagacagtcaa

SEQ ID NO: 925375 - DNA, 15 bp, Homo sapiens
aaggaaagacagtca

SEQ ID NO: 925376 - DNA, 15 bp, Homo sapiens
gaaggaaagacagtc

SEQ ID NO: 925377 - DNA, 15 bp, Homo sapiens
cgaaggaaagacagt

SEQ ID NO: 925378 - DNA, 15 bp, Homo sapiens
gcgaaggaaagacag

SEQ ID NO: 925379 - DNA, 15 bp, Homo sapiens
ggcgaaggaaagaca

SEQ ID NO: 925380 - DNA, 15 bp, Homo sapiens
tggcgaaggaaagac

SEQ ID NO: 925381 - DNA, 15 bp, Homo sapiens
ctggcgaaggaaaga

SEQ ID NO: 925382 - DNA, 15 bp, Homo sapiens
tctggcgaaggaaag

SEQ ID NO: 925383 - DNA, 15 bp, Homo sapiens
ttctggcgaaggaaa

SEQ ID NO: 925384 - DNA, 15 bp, Homo sapiens
attctggcgaaggaa

SEQ ID NO: 925385 - DNA, 15 bp, Homo sapiens
cattctggcgaagga

SEQ ID NO: 925386 - DNA, 15 bp, Homo sapiens
gcattctggcgaagg

SEQ ID NO: 925387 - DNA, 15 bp, Homo sapiens
tgcattctggcgaag

SEQ ID NO: 925388 - DNA, 15 bp, Homo sapiens
ttgcattctggcgaa

SEQ ID NO: 925389 - DNA, 15 bp, Homo sapiens
cttgcattctggcga

SEQ ID NO: 925390 - DNA, 15 bp, Homo sapiens
acttgcattctggcg

SEQ ID NO: 925391 - DNA, 15 bp, Homo sapiens
aacttgcattctggc

SEQ ID NO: 925392 - DNA, 15 bp, Homo sapiens
gaacttgcattctgg

SEQ ID NO: 925393 - DNA, 15 bp, Homo sapiens
ggaacttgcattctg

SEQ ID NO: 925394 - DNA, 15 bp, Homo sapiens
cggaacttgcattct

SEQ ID NO: 925395 - DNA, 15 bp, Homo sapiens
acggaacttgcattc

SEQ ID NO: 925396 - DNA, 15 bp, Homo sapiens
cacggaacttgcatt

SEQ ID NO: 925397 - DNA, 15 bp, Homo sapiens
ccacggaacttgcat

SEQ ID NO: 925398 - DNA, 15 bp, Homo sapiens
accacggaacttgca

SEQ ID NO: 925399 - DNA, 15 bp, Homo sapiens
caccacggaacttgc

SEQ ID NO: 925400 - DNA, 15 bp, Homo sapiens
tcaccacggaacttg

SEQ ID NO: 925401 - DNA, 15 bp, Homo sapiens
gtcaccacggaactt

SEQ ID NO: 925402 - DNA, 15 bp, Homo sapiens
tgtcaccacggaact

SEQ ID NO: 925403 - DNA, 15 bp, Homo sapiens
gtgtcaccacggaac

SEQ ID NO: 925404 - DNA, 15 bp, Homo sapiens
cgtgtcaccacggaa

SEQ ID NO: 925405 - DNA, 15 bp, Homo sapiens
ccgtgtcaccacgga

SEQ ID NO: 925406 - DNA, 15 bp, Homo sapiens
tccgtgtcaccacgg

SEQ ID NO: 925407 - DNA, 15 bp, Homo sapiens
gtccgtgtcaccacg

SEQ ID NO: 925408 - DNA, 15 bp, Homo sapiens
agtccgtgtcaccac

SEQ ID NO: 925409 - DNA, 15 bp, Homo sapiens
aagtccgtgtcacca

SEQ ID NO: 925410 - DNA, 15 bp, Homo sapiens
caagtccgtgtcacc

SEQ ID NO: 925411 - DNA, 15 bp, Homo sapiens
ccaagtccgtgtcac

SEQ ID NO: 925412 - DNA, 15 bp, Homo sapiens
accaagtccgtgtca

SEQ ID NO: 925413 - DNA, 15 bp, Homo sapiens
aaccaagtccgtgtc

SEQ ID NO: 925414 - DNA, 15 bp, Homo sapiens
aaaccaagtccgtgt

SEQ ID NO: 925415 - DNA, 15 bp, Homo sapiens
aaaaccaagtccgtg

SEQ ID NO: 925416 - DNA, 15 bp, Homo sapiens
caaaaccaagtccgt

SEQ ID NO: 925417 - DNA, 15 bp, Homo sapiens
acaaaaccaagtccg

SEQ ID NO: 925418 - DNA, 15 bp, Homo sapiens
aacaaaaccaagtcc

SEQ ID NO: 925419 - DNA, 15 bp, Homo sapiens
aaacaaaaccaagtc

SEQ ID NO: 925420 - DNA, 15 bp, Homo sapiens
taaacaaaaccaagt

SEQ ID NO: 925421 - DNA, 15 bp, Homo sapiens
gtaaacaaaaccaag

SEQ ID NO: 925422 - DNA, 15 bp, Homo sapiens
agtaaacaaaaccaa

SEQ ID NO: 925423 - DNA, 15 bp, Homo sapiens
cagtaaacaaaacca

SEQ ID NO: 925424 - DNA, 15 bp, Homo sapiens
gcagtaaacaaaacc

SEQ ID NO: 925425 - DNA, 15 bp, Homo sapiens
ggcagtaaacaaaac

SEQ ID NO: 925426 - DNA, 15 bp, Homo sapiens
tggcagtaaacaaaa

SEQ ID NO: 925427 - DNA, 15 bp, Homo sapiens
atggcagtaaacaaa

SEQ ID NO: 925428 - DNA, 15 bp, Homo sapiens
catggcagtaaacaa

SEQ ID NO: 925429 - DNA, 15 bp, Homo sapiens
acatggcagtaaaca

SEQ ID NO: 925430 - DNA, 15 bp, Homo sapiens
aacatggcagtaaac

SEQ ID NO: 925431 - DNA, 15 bp, Homo sapiens
aaacatggcagtaaa

SEQ ID NO: 925432 - DNA, 15 bp, Homo sapiens
caaacatggcagtaa

SEQ ID NO: 925433 - DNA, 15 bp, Homo sapiens
acaaacatggcagta

SEQ ID NO: 925434 - DNA, 15 bp, Homo sapiens
tacaaacatggcagt

SEQ ID NO: 925435 - DNA, 15 bp, Homo sapiens
atacaaacatggcag

SEQ ID NO: 925436 - DNA, 15 bp, Homo sapiens
aatacaaacatggca

SEQ ID NO: 925437 - DNA, 15 bp, Homo sapiens
aaatacaaacatggc

SEQ ID NO: 925438 - DNA, 15 bp, Homo sapiens
gaaatacaaacatgg

SEQ ID NO: 925439 - DNA, 15 bp, Homo sapiens
ggaaatacaaacatg

SEQ ID NO: 925440 - DNA, 15 bp, Homo sapiens
aggaaatacaaacat

SEQ ID NO: 925441 - DNA, 15 bp, Homo sapiens
taggaaatacaaaca

SEQ ID NO: 925442 - DNA, 15 bp, Homo sapiens
ctaggaaatacaaac

SEQ ID NO: 925443 - DNA, 15 bp, Homo sapiens
tctaggaaatacaaa

SEQ ID NO: 925444 - DNA, 15 bp, Homo sapiens
ttctaggaaatacaa

SEQ ID NO: 925445 - DNA, 15 bp, Homo sapiens
attctaggaaataca

SEQ ID NO: 925446 - DNA, 15 bp, Homo sapiens
cattctaggaaatac

SEQ ID NO: 925447 - DNA, 15 bp, Homo sapiens
tcattctaggaaata

SEQ ID NO: 925448 - DNA, 15 bp, Homo sapiens
atcattctaggaaat

SEQ ID NO: 925449 - DNA, 15 bp, Homo sapiens
catcattctaggaaa

SEQ ID NO: 925450 - DNA, 15 bp, Homo sapiens
gcatcattctaggaa

SEQ ID NO: 925451 - DNA, 15 bp, Homo sapiens
agcatcattctagga

SEQ ID NO: 925452 - DNA, 15 bp, Homo sapiens
aagcatcattctagg

SEQ ID NO: 925453 - DNA, 15 bp, Homo sapiens
caagcatcattctag

SEQ ID NO: 925454 - DNA, 15 bp, Homo sapiens
ccaagcatcattcta

SEQ ID NO: 925455 - DNA, 15 bp, Homo sapiens
gccaagcatcattct

SEQ ID NO: 925456 - DNA, 15 bp, Homo sapiens
tgccaagcatcattc

SEQ ID NO: 925457 - DNA, 15 bp, Homo sapiens
gtgccaagcatcatt

SEQ ID NO: 925458 - DNA, 15 bp, Homo sapiens
tgtgccaagcatcat

SEQ ID NO: 925459 - DNA, 15 bp, Homo sapiens
atgtgccaagcatca

SEQ ID NO: 925460 - DNA, 15 bp, Homo sapiens
tatgtgccaagcatc

SEQ ID NO: 925461 - DNA, 15 bp, Homo sapiens
ttatgtgccaagcat

SEQ ID NO: 925462 - DNA, 15 bp, Homo sapiens
attatgtgccaagca

SEQ ID NO: 925463 - DNA, 15 bp, Homo sapiens
tattatgtgccaagc

SEQ ID NO: 925464 - DNA, 15 bp, Homo sapiens
atattatgtgccaag

SEQ ID NO: 925465 - DNA, 15 bp, Homo sapiens
tatattatgtgccaa

SEQ ID NO: 925466 - DNA, 15 bp, Homo sapiens
atatattatgtgcca

SEQ ID NO: 925467 - DNA, 15 bp, Homo sapiens
catatattatgtgcc

SEQ ID NO: 925468 - DNA, 15 bp, Homo sapiens
acatatattatgtgc

SEQ ID NO: 925469 - DNA, 15 bp, Homo sapiens
gacatatattatgtg

SEQ ID NO: 925470 - DNA, 15 bp, Homo sapiens
tgacatatattatgt

SEQ ID NO: 925471 - DNA, 15 bp, Homo sapiens
atgacatatattatg

SEQ ID NO: 925472 - DNA, 15 bp, Homo sapiens
gatgacatatattat

SEQ ID NO: 925473 - DNA, 15 bp, Homo sapiens
tgatgacatatatta

SEQ ID NO: 925474 - DNA, 15 bp, Homo sapiens
ttgatgacatatatt

SEQ ID NO: 925475 - DNA, 15 bp, Homo sapiens
tttgatgacatatat

SEQ ID NO: 925476 - DNA, 15 bp, Homo sapiens
atttgatgacatata

SEQ ID NO: 925477 - DNA, 15 bp, Homo sapiens
tatttgatgacatat

SEQ ID NO: 925478 - DNA, 15 bp, Homo sapiens
atatttgatgacata

SEQ ID NO: 925479 - DNA, 15 bp, Homo sapiens
gatatttgatgacat

SEQ ID NO: 925480 - DNA, 15 bp, Homo sapiens
agatatttgatgaca

SEQ ID NO: 925481 - DNA, 15 bp, Homo sapiens
aagatatttgatgac

SEQ ID NO: 925482 - DNA, 15 bp, Homo sapiens
aaagatatttgatga

SEQ ID NO: 925483 - DNA, 15 bp, Homo sapiens
gaaagatatttgatg

SEQ ID NO: 925484 - DNA, 15 bp, Homo sapiens
cgaaagatatttgat

SEQ ID NO: 925485 - DNA, 15 bp, Homo sapiens
acgaaagatatttga

SEQ ID NO: 925486 - DNA, 15 bp, Homo sapiens
tacgaaagatatttg

SEQ ID NO: 925487 - DNA, 15 bp, Homo sapiens
atacgaaagatattt

SEQ ID NO: 925488 - DNA, 15 bp, Homo sapiens
tatacgaaagatatt

SEQ ID NO: 925489 - DNA, 15 bp, Homo sapiens
ctatacgaaagatat

SEQ ID NO: 925490 - DNA, 15 bp, Homo sapiens
gctatacgaaagata

SEQ ID NO: 925491 - DNA, 15 bp, Homo sapiens
agctatacgaaagat

SEQ ID NO: 925492 - DNA, 15 bp, Homo sapiens
cagctatacgaaaga

SEQ ID NO: 925493 - DNA, 15 bp, Homo sapiens
tcagctatacgaaag

SEQ ID NO: 925494 - DNA, 15 bp, Homo sapiens
ttcagctatacgaaa

SEQ ID NO: 925495 - DNA, 15 bp, Homo sapiens
gttcagctatacgaa

SEQ ID NO: 925496 - DNA, 15 bp, Homo sapiens
cgttcagctatacga

SEQ ID NO: 925497 - DNA, 15 bp, Homo sapiens
ccgttcagctatacg

SEQ ID NO: 925498 - DNA, 15 bp, Homo sapiens
tccgttcagctatac

SEQ ID NO: 925499 - DNA, 15 bp, Homo sapiens
atccgttcagctata

SEQ ID NO: 925500 - DNA, 15 bp, Homo sapiens
catccgttcagctat

SEQ ID NO: 925501 - DNA, 15 bp, Homo sapiens
ccatccgttcagcta

SEQ ID NO: 925502 - DNA, 15 bp, Homo sapiens
tccatccgttcagct

SEQ ID NO: 925503 - DNA, 15 bp, Homo sapiens
atccatccgttcagc

SEQ ID NO: 925504 - DNA, 15 bp, Homo sapiens
catccatccgttcag

SEQ ID NO: 925505 - DNA, 15 bp, Homo sapiens
ccatccatccgttca

SEQ ID NO: 925506 - DNA, 15 bp, Homo sapiens
tccatccatccgttc

SEQ ID NO: 925507 - DNA, 15 bp, Homo sapiens
atccatccatccgtt

SEQ ID NO: 925508 - DNA, 15 bp, Homo sapiens
catccatccatccgt

SEQ ID NO: 925509 - DNA, 15 bp, Homo sapiens
ccatccatccatccg

SEQ ID NO: 925510 - DNA, 15 bp, Homo sapiens
tccatccatccatcc

SEQ ID NO: 925511 - DNA, 15 bp, Homo sapiens
atccatccatccatc

SEQ ID NO: 925512 - DNA, 15 bp, Homo sapiens
catccatccatccat

SEQ ID NO: 925513 - DNA, 15 bp, Homo sapiens
ccatccatccatcca

SEQ ID NO: 925514 - DNA, 15 bp, Homo sapiens
tatccatccatccat

SEQ ID NO: 925515 - DNA, 15 bp, Homo sapiens
ctatccatccatcca

SEQ ID NO: 925516 - DNA, 15 bp, Homo sapiens
tctatccatccatcc

SEQ ID NO: 925517 - DNA, 15 bp, Homo sapiens
gtctatccatccatc

SEQ ID NO: 925518 - DNA, 15 bp, Homo sapiens
agtctatccatccat

SEQ ID NO: 925519 - DNA, 15 bp, Homo sapiens
cagtctatccatcca

SEQ ID NO: 925520 - DNA, 15 bp, Homo sapiens
tcagtctatccatcc

SEQ ID NO: 925521 - DNA, 15 bp, Homo sapiens
ttcagtctatccatc

SEQ ID NO: 925522 - DNA, 15 bp, Homo sapiens
tttcagtctatccat

SEQ ID NO: 925523 - DNA, 15 bp, Homo sapiens
atttcagtctatcca

SEQ ID NO: 925524 - DNA, 15 bp, Homo sapiens
gatttcagtctatcc

SEQ ID NO: 925525 - DNA, 15 bp, Homo sapiens
ggatttcagtctatc

SEQ ID NO: 925526 - DNA, 15 bp, Homo sapiens
aggatttcagtctat

SEQ ID NO: 925527 - DNA, 15 bp, Homo sapiens
aaggatttcagtcta

SEQ ID NO: 925528 - DNA, 15 bp, Homo sapiens
taaggatttcagtct

SEQ ID NO: 925529 - DNA, 15 bp, Homo sapiens
gtaaggatttcagtc

SEQ ID NO: 925530 - DNA, 15 bp, Homo sapiens
agtaaggatttcagt

SEQ ID NO: 925531 - DNA, 15 bp, Homo sapiens
aagtaaggatttcag

SEQ ID NO: 925532 - DNA, 15 bp, Homo sapiens
gaagtaaggatttca

SEQ ID NO: 925533 - DNA, 15 bp, Homo sapiens
tgaagtaaggatttc

SEQ ID NO: 925534 - DNA, 15 bp, Homo sapiens
gtgaagtaaggattt

SEQ ID NO: 925535 - DNA, 15 bp, Homo sapiens
tgtgaagtaaggatt

SEQ ID NO: 925536 - DNA, 15 bp, Homo sapiens
atgtgaagtaaggat

SEQ ID NO: 925537 - DNA, 15 bp, Homo sapiens
gatgtgaagtaagga

SEQ ID NO: 925538 - DNA, 15 bp, Homo sapiens
agatgtgaagtaagg

SEQ ID NO: 925539 - DNA, 15 bp, Homo sapiens
cagatgtgaagtaag

SEQ ID NO: 925540 - DNA, 15 bp, Homo sapiens
gcagatgtgaagtaa

SEQ ID NO: 925541 - DNA, 15 bp, Homo sapiens
ggcagatgtgaagta

SEQ ID NO: 925542 - DNA, 15 bp, Homo sapiens
aggcagatgtgaagt

SEQ ID NO: 925543 - DNA, 15 bp, Homo sapiens
aaggcagatgtgaag

SEQ ID NO: 925544 - DNA, 15 bp, Homo sapiens
aaaggcagatgtgaa

SEQ ID NO: 925545 - DNA, 15 bp, Homo sapiens
caaaggcagatgtga

SEQ ID NO: 925546 - DNA, 15 bp, Homo sapiens
acaaaggcagatgtg

SEQ ID NO: 925547 - DNA, 15 bp, Homo sapiens
cacaaaggcagatgt

SEQ ID NO: 925548 - DNA, 15 bp, Homo sapiens
tcacaaaggcagatg

SEQ ID NO: 925549 - DNA, 15 bp, Homo sapiens
atcacaaaggcagat

SEQ ID NO: 925550 - DNA, 15 bp, Homo sapiens
gatcacaaaggcaga

SEQ ID NO: 925551 - DNA, 15 bp, Homo sapiens
agatcacaaaggcag

SEQ ID NO: 925552 - DNA, 15 bp, Homo sapiens
aagatcacaaaggca

SEQ ID NO: 925553 - DNA, 15 bp, Homo sapiens
taagatcacaaaggc

SEQ ID NO: 925554 - DNA, 15 bp, Homo sapiens
gtaagatcacaaagg

SEQ ID NO: 925555 - DNA, 15 bp, Homo sapiens
tgtaagatcacaaag

SEQ ID NO: 925556 - DNA, 15 bp, Homo sapiens
gtgtaagatcacaaa

SEQ ID NO: 925557 - DNA, 15 bp, Homo sapiens
tgtgtaagatcacaa

SEQ ID NO: 925558 - DNA, 15 bp, Homo sapiens
ttgtgtaagatcaca

SEQ ID NO: 925559 - DNA, 15 bp, Homo sapiens
cttgtgtaagatcac

SEQ ID NO: 925560 - DNA, 15 bp, Homo sapiens
acttgtgtaagatca

SEQ ID NO: 925561 - DNA, 15 bp, Homo sapiens
aacttgtgtaagatc

SEQ ID NO: 925562 - DNA, 15 bp, Homo sapiens
taacttgtgtaagat

SEQ ID NO: 925563 - DNA, 15 bp, Homo sapiens
gtaacttgtgtaaga

SEQ ID NO: 925564 - DNA, 15 bp, Homo sapiens
agtaacttgtgtaag

SEQ ID NO: 925565 - DNA, 15 bp, Homo sapiens
aagtaacttgtgtaa

SEQ ID NO: 925566 - DNA, 15 bp, Homo sapiens
gaagtaacttgtgta

SEQ ID NO: 925567 - DNA, 15 bp, Homo sapiens
tgaagtaacttgtgt

SEQ ID NO: 925568 - DNA, 15 bp, Homo sapiens
gtgaagtaacttgtg

SEQ ID NO: 925569 - DNA, 15 bp, Homo sapiens
ggtgaagtaacttgt

SEQ ID NO: 925570 - DNA, 15 bp, Homo sapiens
aggtgaagtaacttg

SEQ ID NO: 925571 - DNA, 15 bp, Homo sapiens
gaggtgaagtaactt

SEQ ID NO: 925572 - DNA, 15 bp, Homo sapiens
agaggtgaagtaact

SEQ ID NO: 925573 - DNA, 15 bp, Homo sapiens
gagaggtgaagtaac

SEQ ID NO: 925574 - DNA, 15 bp, Homo sapiens
agagaggtgaagtaa

SEQ ID NO: 925575 - DNA, 15 bp, Homo sapiens
cagagaggtgaagta

SEQ ID NO: 925576 - DNA, 15 bp, Homo sapiens
tcagagaggtgaagt

SEQ ID NO: 925577 - DNA, 15 bp, Homo sapiens
ctcagagaggtgaag

SEQ ID NO: 925578 - DNA, 15 bp, Homo sapiens
actcagagaggtgaa

SEQ ID NO: 925579 - DNA, 15 bp, Homo sapiens
aactcagagaggtga

SEQ ID NO: 925580 - DNA, 15 bp, Homo sapiens
aaactcagagaggtg

SEQ ID NO: 925581 - DNA, 15 bp, Homo sapiens
caaactcagagaggt

SEQ ID NO: 925582 - DNA, 15 bp, Homo sapiens
acaaactcagagagg

SEQ ID NO: 925583 - DNA, 15 bp, Homo sapiens
tacaaactcagagag

SEQ ID NO: 925584 - DNA, 15 bp, Homo sapiens
atacaaactcagaga

SEQ ID NO: 925585 - DNA, 15 bp, Homo sapiens
aatacaaactcagag

SEQ ID NO: 925586 - DNA, 15 bp, Homo sapiens
aaatacaaactcaga

SEQ ID NO: 925587 - DNA, 15 bp, Homo sapiens
aaaatacaaactcag

SEQ ID NO: 925588 - DNA, 15 bp, Homo sapiens
aaaaatacaaactca

SEQ ID NO: 925589 - DNA, 15 bp, Homo sapiens
aaaaaatacaaactc

SEQ ID NO: 925590 - DNA, 15 bp, Homo sapiens
aaaaaaatacaaact

SEQ ID NO: 925591 - DNA, 15 bp, Homo sapiens
gaaaaaaatacaaac

SEQ ID NO: 925592 - DNA, 15 bp, Homo sapiens
ggaaaaaaatacaaa

SEQ ID NO: 925593 - DNA, 15 bp, Homo sapiens
tggaaaaaaatacaa

SEQ ID NO: 925594 - DNA, 15 bp, Homo sapiens
atggaaaaaaataca

SEQ ID NO: 925595 - DNA, 15 bp, Homo sapiens
tatggaaaaaaatac

SEQ ID NO: 925596 - DNA, 15 bp, Homo sapiens
ttatggaaaaaaata

SEQ ID NO: 925597 - DNA, 15 bp, Homo sapiens
tttatggaaaaaaat

SEQ ID NO: 925598 - DNA, 15 bp, Homo sapiens
ttttatggaaaaaaa

SEQ ID NO: 925599 - DNA, 15 bp, Homo sapiens
cttttatggaaaaaa

SEQ ID NO: 925600 - DNA, 15 bp, Homo sapiens
ccttttatggaaaaa

SEQ ID NO: 925601 - DNA, 15 bp, Homo sapiens
tccttttatggaaaa

SEQ ID NO: 925602 - DNA, 15 bp, Homo sapiens
ttccttttatggaaa

SEQ ID NO: 925603 - DNA, 15 bp, Homo sapiens
tttccttttatggaa

SEQ ID NO: 925604 - DNA, 15 bp, Homo sapiens
ttttccttttatgga

SEQ ID NO: 925605 - DNA, 15 bp, Homo sapiens
attttccttttatgg

SEQ ID NO: 925606 - DNA, 15 bp, Homo sapiens
tattttccttttatg

SEQ ID NO: 925607 - DNA, 15 bp, Homo sapiens
ttattttccttttat

SEQ ID NO: 925608 - DNA, 15 bp, Homo sapiens
attattttcctttta

SEQ ID NO: 925609 - DNA, 15 bp, Homo sapiens
aattattttcctttt

SEQ ID NO: 925610 - DNA, 15 bp, Homo sapiens
taattattttccttt

SEQ ID NO: 925611 - DNA, 15 bp, Homo sapiens
gtaattattttcctt

SEQ ID NO: 925612 - DNA, 15 bp, Homo sapiens
tgtaattattttcct

SEQ ID NO: 925613 - DNA, 15 bp, Homo sapiens
ctgtaattattttcc

SEQ ID NO: 925614 - DNA, 15 bp, Homo sapiens
actgtaattattttc

SEQ ID NO: 925615 - DNA, 15 bp, Homo sapiens
aactgtaattatttt

SEQ ID NO: 925616 - DNA, 15 bp, Homo sapiens
aaactgtaattattt

SEQ ID NO: 925617 - DNA, 15 bp, Homo sapiens
gaaactgtaattatt

SEQ ID NO: 925618 - DNA, 15 bp, Homo sapiens
agaaactgtaattat

SEQ ID NO: 925619 - DNA, 15 bp, Homo sapiens
aagaaactgtaatta

SEQ ID NO: 925620 - DNA, 15 bp, Homo sapiens
gaagaaactgtaatt

SEQ ID NO: 925621 - DNA, 15 bp, Homo sapiens
tgaagaaactgtaat

SEQ ID NO: 925622 - DNA, 15 bp, Homo sapiens
ttgaagaaactgtaa

SEQ ID NO: 925623 - DNA, 15 bp, Homo sapiens
attgaagaaactgta

SEQ ID NO: 925624 - DNA, 15 bp, Homo sapiens
cattgaagaaactgt

SEQ ID NO: 925625 - DNA, 15 bp, Homo sapiens
acattgaagaaactg

SEQ ID NO: 925626 - DNA, 15 bp, Homo sapiens
cacattgaagaaact

SEQ ID NO: 925627 - DNA, 15 bp, Homo sapiens
acacattgaagaaac

SEQ ID NO: 925628 - DNA, 15 bp, Homo sapiens
aacacattgaagaaa

SEQ ID NO: 925629 - DNA, 15 bp, Homo sapiens
caacacattgaagaa

SEQ ID NO: 925630 - DNA, 15 bp, Homo sapiens
acaacacattgaaga

SEQ ID NO: 925631 - DNA, 15 bp, Homo sapiens
cacaacacattgaag

SEQ ID NO: 925632 - DNA, 15 bp, Homo sapiens
tcacaacacattgaa

SEQ ID NO: 925633 - DNA, 15 bp, Homo sapiens
ctcacaacacattga

SEQ ID NO: 925634 - DNA, 15 bp, Homo sapiens
cctcacaacacattg

SEQ ID NO: 925635 - DNA, 15 bp, Homo sapiens
tcctcacaacacatt

SEQ ID NO: 925636 - DNA, 15 bp, Homo sapiens
atcctcacaacacat

SEQ ID NO: 925637 - DNA, 15 bp, Homo sapiens
aatcctcacaacaca

SEQ ID NO: 925638 - DNA, 15 bp, Homo sapiens
taatcctcacaacac

SEQ ID NO: 925639 - DNA, 15 bp, Homo sapiens
ctaatcctcacaaca

SEQ ID NO: 925640 - DNA, 15 bp, Homo sapiens
tctaatcctcacaac

SEQ ID NO: 925641 - DNA, 15 bp, Homo sapiens
atctaatcctcacaa

SEQ ID NO: 925642 - DNA, 15 bp, Homo sapiens
tatctaatcctcaca

SEQ ID NO: 925643 - DNA, 15 bp, Homo sapiens
ttatctaatcctcac

SEQ ID NO: 925644 - DNA, 15 bp, Homo sapiens
cttatctaatcctca

SEQ ID NO: 925645 - DNA, 15 bp, Homo sapiens
tcttatctaatcctc

SEQ ID NO: 925646 - DNA, 15 bp, Homo sapiens
ttcttatctaatcct

SEQ ID NO: 925647 - DNA, 15 bp, Homo sapiens
tttcttatctaatcc

SEQ ID NO: 925648 - DNA, 15 bp, Homo sapiens
ttttcttatctaatc

SEQ ID NO: 925649 - DNA, 15 bp, Homo sapiens
attttcttatctaat

SEQ ID NO: 925650 - DNA, 15 bp, Homo sapiens
tattttcttatctaa

SEQ ID NO: 925651 - DNA, 15 bp, Homo sapiens
atattttcttatcta

SEQ ID NO: 925652 - DNA, 15 bp, Homo sapiens
tatattttcttatct

SEQ ID NO: 925653 - DNA, 15 bp, Homo sapiens
atatattttcttatc

SEQ ID NO: 925654 - DNA, 15 bp, Homo sapiens
tatatattttcttat

SEQ ID NO: 925655 - DNA, 15 bp, Homo sapiens
atatatattttctta

SEQ ID NO: 925656 - DNA, 15 bp, Homo sapiens
tatatatattttctt

SEQ ID NO: 925657 - DNA, 15 bp, Homo sapiens
ttatatatattttct

SEQ ID NO: 925658 - DNA, 15 bp, Homo sapiens
tttatatatattttc

SEQ ID NO: 925659 - DNA, 15 bp, Homo sapiens
ttttatatatatttt

SEQ ID NO: 925660 - DNA, 15 bp, Homo sapiens
attttatatatattt

SEQ ID NO: 925661 - DNA, 15 bp, Homo sapiens
cattttatatatatt

SEQ ID NO: 925662 - DNA, 15 bp, Homo sapiens
gcattttatatatat

SEQ ID NO: 925663 - DNA, 15 bp, Homo sapiens
ggcattttatatata

SEQ ID NO: 925664 - DNA, 15 bp, Homo sapiens
aggcattttatatat

SEQ ID NO: 925665 - DNA, 15 bp, Homo sapiens
caggcattttatata

SEQ ID NO: 925666 - DNA, 15 bp, Homo sapiens
acaggcattttatat

SEQ ID NO: 925667 - DNA, 15 bp, Homo sapiens
aacaggcattttata

SEQ ID NO: 925668 - DNA, 15 bp, Homo sapiens
taacaggcattttat

SEQ ID NO: 925669 - DNA, 15 bp, Homo sapiens
ataacaggcatttta

SEQ ID NO: 925670 - DNA, 15 bp, Homo sapiens
cataacaggcatttt

SEQ ID NO: 925671 - DNA, 15 bp, Homo sapiens
acataacaggcattt

SEQ ID NO: 925672 - DNA, 15 bp, Homo sapiens
cacataacaggcatt

SEQ ID NO: 925673 - DNA, 15 bp, Homo sapiens
gcacataacaggcat

SEQ ID NO: 925674 - DNA, 15 bp, Homo sapiens
ggcacataacaggca

SEQ ID NO: 925675 - DNA, 15 bp, Homo sapiens
aggcacataacaggc

SEQ ID NO: 925676 - DNA, 15 bp, Homo sapiens
caggcacataacagg

SEQ ID NO: 925677 - DNA, 15 bp, Homo sapiens
tcaggcacataacag

SEQ ID NO: 925678 - DNA, 15 bp, Homo sapiens
atcaggcacataaca

SEQ ID NO: 925679 - DNA, 15 bp, Homo sapiens
catcaggcacataac

SEQ ID NO: 925680 - DNA, 15 bp, Homo sapiens
acatcaggcacataa

SEQ ID NO: 925681 - DNA, 15 bp, Homo sapiens
gacatcaggcacata

SEQ ID NO: 925682 - DNA, 15 bp, Homo sapiens
agacatcaggcacat

SEQ ID NO: 925683 - DNA, 15 bp, Homo sapiens
aagacatcaggcaca

SEQ ID NO: 925684 - DNA, 15 bp, Homo sapiens
gaagacatcaggcac

SEQ ID NO: 925685 - DNA, 15 bp, Homo sapiens
cgaagacatcaggca

SEQ ID NO: 925686 - DNA, 15 bp, Homo sapiens
acgaagacatcaggc

SEQ ID NO: 925687 - DNA, 15 bp, Homo sapiens
cacgaagacatcagg

SEQ ID NO: 925688 - DNA, 15 bp, Homo sapiens
acacgaagacatcag

SEQ ID NO: 925689 - DNA, 15 bp, Homo sapiens
tacacgaagacatca

SEQ ID NO: 925690 - DNA, 15 bp, Homo sapiens
atacacgaagacatc

SEQ ID NO: 925691 - DNA, 15 bp, Homo sapiens
catacacgaagacat

SEQ ID NO: 925692 - DNA, 15 bp, Homo sapiens
acatacacgaagaca

SEQ ID NO: 925693 - DNA, 15 bp, Homo sapiens
cacatacacgaagac

SEQ ID NO: 925694 - DNA, 15 bp, Homo sapiens
acacatacacgaaga

SEQ ID NO: 925695 - DNA, 15 bp, Homo sapiens
gacacatacacgaag

SEQ ID NO: 925696 - DNA, 15 bp, Homo sapiens
agacacatacacgaa

SEQ ID NO: 925697 - DNA, 15 bp, Homo sapiens
cagacacatacacga

SEQ ID NO: 925698 - DNA, 15 bp, Homo sapiens
tcagacacatacacg

SEQ ID NO: 925699 - DNA, 15 bp, Homo sapiens
gtcagacacatacac

SEQ ID NO: 925700 - DNA, 15 bp, Homo sapiens
tgtcagacacataca

SEQ ID NO: 925701 - DNA, 15 bp, Homo sapiens
gtgtcagacacatac

SEQ ID NO: 925702 - DNA, 15 bp, Homo sapiens
tgtgtcagacacata

SEQ ID NO: 925703 - DNA, 15 bp, Homo sapiens
ttgtgtcagacacat

SEQ ID NO: 925704 - DNA, 15 bp, Homo sapiens
tttgtgtcagacaca

SEQ ID NO: 925705 - DNA, 15 bp, Homo sapiens
atttgtgtcagacac

SEQ ID NO: 925706 - DNA, 15 bp, Homo sapiens
aatttgtgtcagaca

SEQ ID NO: 925707 - DNA, 15 bp, Homo sapiens
caatttgtgtcagac

SEQ ID NO: 925708 - DNA, 15 bp, Homo sapiens
acaatttgtgtcaga

SEQ ID NO: 925709 - DNA, 15 bp, Homo sapiens
gacaatttgtgtcag

SEQ ID NO: 925710 - DNA, 15 bp, Homo sapiens
ggacaatttgtgtca

SEQ ID NO: 925711 - DNA, 15 bp, Homo sapiens
aggacaatttgtgtc

SEQ ID NO: 925712 - DNA, 15 bp, Homo sapiens
aaggacaatttgtgt

SEQ ID NO: 925713 - DNA, 15 bp, Homo sapiens
aaaggacaatttgtg

SEQ ID NO: 925714 - DNA, 15 bp, Homo sapiens
aaaaggacaatttgt

SEQ ID NO: 925715 - DNA, 15 bp, Homo sapiens
aaaaaggacaatttg

SEQ ID NO: 925716 - DNA, 15 bp, Homo sapiens
aaaaaaggacaattt

SEQ ID NO: 925717 - DNA, 15 bp, Homo sapiens
aaaaaaaggacaatt

SEQ ID NO: 925718 - DNA, 15 bp, Homo sapiens
taaaaaaaggacaat

SEQ ID NO: 925719 - DNA, 15 bp, Homo sapiens
ctaaaaaaaggacaa

SEQ ID NO: 925720 - DNA, 15 bp, Homo sapiens
actaaaaaaaggaca

SEQ ID NO: 925721 - DNA, 15 bp, Homo sapiens
aactaaaaaaaggac

SEQ ID NO: 925722 - DNA, 15 bp, Homo sapiens
aaactaaaaaaagga

SEQ ID NO: 925723 - DNA, 15 bp, Homo sapiens
gaaactaaaaaaagg

SEQ ID NO: 925724 - DNA, 15 bp, Homo sapiens
tgaaactaaaaaaag

SEQ ID NO: 925725 - DNA, 15 bp, Homo sapiens
atgaaactaaaaaaa

SEQ ID NO: 925726 - DNA, 15 bp, Homo sapiens
catgaaactaaaaaa

SEQ ID NO: 925727 - DNA, 15 bp, Homo sapiens
tcatgaaactaaaaa

SEQ ID NO: 925728 - DNA, 15 bp, Homo sapiens
ttcatgaaactaaaa

SEQ ID NO: 925729 - DNA, 15 bp, Homo sapiens
cttcatgaaactaaa

SEQ ID NO: 925730 - DNA, 15 bp, Homo sapiens
tcttcatgaaactaa

SEQ ID NO: 925731 - DNA, 15 bp, Homo sapiens
ttcttcatgaaacta

SEQ ID NO: 925732 - DNA, 15 bp, Homo sapiens
tttcttcatgaaact

SEQ ID NO: 925733 - DNA, 15 bp, Homo sapiens
ctttcttcatgaaac

SEQ ID NO: 925734 - DNA, 15 bp, Homo sapiens
tctttcttcatgaaa

SEQ ID NO: 925735 - DNA, 15 bp, Homo sapiens
gtctttcttcatgaa

SEQ ID NO: 925736 - DNA, 15 bp, Homo sapiens
tgtctttcttcatga

SEQ ID NO: 925737 - DNA, 15 bp, Homo sapiens
ttgtctttcttcatg

SEQ ID NO: 925738 - DNA, 15 bp, Homo sapiens
tttgtctttcttcat

SEQ ID NO: 925739 - DNA, 15 bp, Homo sapiens
atttgtctttcttca

SEQ ID NO: 925740 - DNA, 15 bp, Homo sapiens
catttgtctttcttc

SEQ ID NO: 925741 - DNA, 15 bp, Homo sapiens
ccatttgtctttctt

SEQ ID NO: 925742 - DNA, 15 bp, Homo sapiens
gccatttgtctttct

SEQ ID NO: 925743 - DNA, 15 bp, Homo sapiens
ggccatttgtctttc

SEQ ID NO: 925744 - DNA, 15 bp, Homo sapiens
aggccatttgtcttt

SEQ ID NO: 925745 - DNA, 15 bp, Homo sapiens
caggccatttgtctt

SEQ ID NO: 925746 - DNA, 15 bp, Homo sapiens
ccaggccatttgtct

SEQ ID NO: 925747 - DNA, 15 bp, Homo sapiens
cccaggccatttgtc

SEQ ID NO: 925748 - DNA, 15 bp, Homo sapiens
tcccaggccatttgt

SEQ ID NO: 925749 - DNA, 15 bp, Homo sapiens
atcccaggccatttg

SEQ ID NO: 925750 - DNA, 15 bp, Homo sapiens
gatcccaggccattt

SEQ ID NO: 925751 - DNA, 15 bp, Homo sapiens
tgatcccaggccatt

SEQ ID NO: 925752 - DNA, 15 bp, Homo sapiens
ttgatcccaggccat

SEQ ID NO: 925753 - DNA, 15 bp, Homo sapiens
tttgatcccaggcca

SEQ ID NO: 925754 - DNA, 15 bp, Homo sapiens
ctttgatcccaggcc

SEQ ID NO: 925755 - DNA, 15 bp, Homo sapiens
tctttgatcccaggc

SEQ ID NO: 925756 - DNA, 15 bp, Homo sapiens
ctctttgatcccagg

SEQ ID NO: 925757 - DNA, 15 bp, Homo sapiens
tctctttgatcccag

SEQ ID NO: 925758 - DNA, 15 bp, Homo sapiens
ttctctttgatccca

SEQ ID NO: 925759 - DNA, 15 bp, Homo sapiens
cttctctttgatccc

SEQ ID NO: 925760 - DNA, 15 bp, Homo sapiens
acttctctttgatcc

SEQ ID NO: 925761 - DNA, 15 bp, Homo sapiens
aacttctctttgatc

SEQ ID NO: 925762 - DNA, 15 bp, Homo sapiens
caacttctctttgat

SEQ ID NO: 925763 - DNA, 15 bp, Homo sapiens
tcaacttctctttga

SEQ ID NO: 925764 - DNA, 15 bp, Homo sapiens
gtcaacttctctttg

SEQ ID NO: 925765 - DNA, 15 bp, Homo sapiens
ggtcaacttctcttt

SEQ ID NO: 925766 - DNA, 15 bp, Homo sapiens
aggtcaacttctctt

SEQ ID NO: 925767 - DNA, 15 bp, Homo sapiens
caggtcaacttctct

SEQ ID NO: 925768 - DNA, 15 bp, Homo sapiens
ccaggtcaacttctc

SEQ ID NO: 925769 - DNA, 15 bp, Homo sapiens
tccaggtcaacttct

SEQ ID NO: 925770 - DNA, 15 bp, Homo sapiens
ttccaggtcaacttc

SEQ ID NO: 925771 - DNA, 15 bp, Homo sapiens
gttccaggtcaactt

SEQ ID NO: 925772 - DNA, 15 bp, Homo sapiens
cgttccaggtcaact

SEQ ID NO: 925773 - DNA, 15 bp, Homo sapiens
gcgttccaggtcaac

SEQ ID NO: 925774 - DNA, 15 bp, Homo sapiens
ggcgttccaggtcaa

SEQ ID NO: 925775 - DNA, 15 bp, Homo sapiens
tggcgttccaggtca

SEQ ID NO: 925776 - DNA, 15 bp, Homo sapiens
ttggcgttccaggtc

SEQ ID NO: 925777 - DNA, 15 bp, Homo sapiens
gttggcgttccaggt

SEQ ID NO: 925778 - DNA, 15 bp, Homo sapiens
agttggcgttccagg

SEQ ID NO: 925779 - DNA, 15 bp, Homo sapiens
tagttggcgttccag

SEQ ID NO: 925780 - DNA, 15 bp, Homo sapiens
ctagttggcgttcca

SEQ ID NO: 925781 - DNA, 15 bp, Homo sapiens
tctagttggcgttcc

SEQ ID NO: 925782 - DNA, 15 bp, Homo sapiens
gtctagttggcgttc

SEQ ID NO: 925783 - DNA, 15 bp, Homo sapiens
tgtctagttggcgtt

SEQ ID NO: 925784 - DNA, 15 bp, Homo sapiens
atgtctagttggcgt

SEQ ID NO: 925785 - DNA, 15 bp, Homo sapiens
aatgtctagttggcg

SEQ ID NO: 925786 - DNA, 15 bp, Homo sapiens
aaatgtctagttggc

SEQ ID NO: 925787 - DNA, 15 bp, Homo sapiens
aaaatgtctagttgg

SEQ ID NO: 925788 - DNA, 15 bp, Homo sapiens
aaaaatgtctagttg

SEQ ID NO: 925789 - DNA, 15 bp, Homo sapiens
caaaaatgtctagtt

SEQ ID NO: 925790 - DNA, 15 bp, Homo sapiens
tcaaaaatgtctagt

SEQ ID NO: 925791 - DNA, 15 bp, Homo sapiens
gtcaaaaatgtctag

SEQ ID NO: 925792 - DNA, 15 bp, Homo sapiens
ggtcaaaaatgtcta

SEQ ID NO: 925793 - DNA, 15 bp, Homo sapiens
cggtcaaaaatgtct

SEQ ID NO: 925794 - DNA, 15 bp, Homo sapiens
acggtcaaaaatgtc

SEQ ID NO: 925795 - DNA, 15 bp, Homo sapiens
gacggtcaaaaatgt

SEQ ID NO: 925796 - DNA, 15 bp, Homo sapiens
tgacggtcaaaaatg

SEQ ID NO: 925797 - DNA, 15 bp, Homo sapiens
ctgacggtcaaaaat

SEQ ID NO: 925798 - DNA, 15 bp, Homo sapiens
gctgacggtcaaaaa

SEQ ID NO: 925799 - DNA, 15 bp, Homo sapiens
tgctgacggtcaaaa

SEQ ID NO: 925800 - DNA, 15 bp, Homo sapiens
ttgctgacggtcaaa

SEQ ID NO: 925801 - DNA, 15 bp, Homo sapiens
tttgctgacggtcaa

SEQ ID NO: 925802 - DNA, 15 bp, Homo sapiens
ttttgctgacggtca

SEQ ID NO: 925803 - DNA, 15 bp, Homo sapiens
attttgctgacggtc

SEQ ID NO: 925804 - DNA, 15 bp, Homo sapiens
cattttgctgacggt

SEQ ID NO: 925805 - DNA, 15 bp, Homo sapiens
tcattttgctgacgg

SEQ ID NO: 925806 - DNA, 15 bp, Homo sapiens
ttcattttgctgacg

SEQ ID NO: 925807 - DNA, 15 bp, Homo sapiens
tttcattttgctgac

SEQ ID NO: 925808 - DNA, 15 bp, Homo sapiens
atttcattttgctga

SEQ ID NO: 925809 - DNA, 15 bp, Homo sapiens
tatttcattttgctg

SEQ ID NO: 925810 - DNA, 15 bp, Homo sapiens
gtatttcattttgct

SEQ ID NO: 925811 - DNA, 15 bp, Homo sapiens
agtatttcattttgc

SEQ ID NO: 925812 - DNA, 15 bp, Homo sapiens
tagtatttcattttg

SEQ ID NO: 925813 - DNA, 15 bp, Homo sapiens
ttagtatttcatttt

SEQ ID NO: 925814 - DNA, 15 bp, Homo sapiens
tttagtatttcattt

SEQ ID NO: 925815 - DNA, 15 bp, Homo sapiens
atttagtatttcatt

SEQ ID NO: 925816 - DNA, 15 bp, Homo sapiens
catttagtatttcat

SEQ ID NO: 925817 - DNA, 15 bp, Homo sapiens
gcatttagtatttca

SEQ ID NO: 925818 - DNA, 15 bp, Homo sapiens
cgcatttagtatttc

SEQ ID NO: 925819 - DNA, 15 bp, Homo sapiens
ccgcatttagtattt

SEQ ID NO: 925820 - DNA, 15 bp, Homo sapiens
gccgcatttagtatt

SEQ ID NO: 925821 - DNA, 15 bp, Homo sapiens
tgccgcatttagtat

SEQ ID NO: 925822 - DNA, 15 bp, Homo sapiens
gtgccgcatttagta

SEQ ID NO: 925823 - DNA, 15 bp, Homo sapiens
tgtgccgcatttagt

SEQ ID NO: 925824 - DNA, 15 bp, Homo sapiens
ttgtgccgcatttag

SEQ ID NO: 925825 - DNA, 15 bp, Homo sapiens
tttgtgccgcattta

SEQ ID NO: 925826 - DNA, 15 bp, Homo sapiens
ttttgtgccgcattt

SEQ ID NO: 925827 - DNA, 15 bp, Homo sapiens
cttttgtgccgcatt

SEQ ID NO: 925828 - DNA, 15 bp, Homo sapiens
ccttttgtgccgcat

SEQ ID NO: 925829 - DNA, 15 bp, Homo sapiens
accttttgtgccgca

SEQ ID NO: 925830 - DNA, 15 bp, Homo sapiens
taccttttgtgccgc

SEQ ID NO: 925831 - DNA, 15 bp, Homo sapiens
ataccttttgtgccg

SEQ ID NO: 925832 - DNA, 15 bp, Homo sapiens
cataccttttgtgcc

SEQ ID NO: 925833 - DNA, 15 bp, Homo sapiens
tcataccttttgtgc

SEQ ID NO: 925834 - DNA, 15 bp, Homo sapiens
ttcataccttttgtg

SEQ ID NO: 925835 - DNA, 15 bp, Homo sapiens
attcataccttttgt

SEQ ID NO: 925836 - DNA, 15 bp, Homo sapiens
cattcataccttttg

SEQ ID NO: 925837 - DNA, 15 bp, Homo sapiens
tcattcatacctttt

SEQ ID NO: 925838 - DNA, 15 bp, Homo sapiens
atcattcataccttt

SEQ ID NO: 925839 - DNA, 15 bp, Homo sapiens
aatcattcatacctt

SEQ ID NO: 925840 - DNA, 15 bp, Homo sapiens
taatcattcatacct

SEQ ID NO: 925841 - DNA, 15 bp, Homo sapiens
ttaatcattcatacc

SEQ ID NO: 925842 - DNA, 15 bp, Homo sapiens
attaatcattcatac

SEQ ID NO: 925843 - DNA, 15 bp, Homo sapiens
gattaatcattcata

SEQ ID NO: 925844 - DNA, 15 bp, Homo sapiens
agattaatcattcat

SEQ ID NO: 925845 - DNA, 15 bp, Homo sapiens
aagattaatcattca

SEQ ID NO: 925846 - DNA, 15 bp, Homo sapiens
caagattaatcattc

SEQ ID NO: 925847 - DNA, 15 bp, Homo sapiens
acaagattaatcatt

SEQ ID NO: 925848 - DNA, 15 bp, Homo sapiens
aacaagattaatcat

SEQ ID NO: 925849 - DNA, 15 bp, Homo sapiens
aaacaagattaatca

SEQ ID NO: 925850 - DNA, 15 bp, Homo sapiens
caaacaagattaatc

SEQ ID NO: 925851 - DNA, 15 bp, Homo sapiens
acaaacaagattaat

SEQ ID NO: 925852 - DNA, 15 bp, Homo sapiens
aacaaacaagattaa

SEQ ID NO: 925853 - DNA, 15 bp, Homo sapiens
taacaaacaagatta

SEQ ID NO: 925854 - DNA, 15 bp, Homo sapiens
gtaacaaacaagatt

SEQ ID NO: 925855 - DNA, 15 bp, Homo sapiens
agtaacaaacaagat

SEQ ID NO: 925856 - DNA, 15 bp, Homo sapiens
gagtaacaaacaaga

SEQ ID NO: 925857 - DNA, 15 bp, Homo sapiens
agagtaacaaacaag

SEQ ID NO: 925858 - DNA, 15 bp, Homo sapiens
cagagtaacaaacaa

SEQ ID NO: 925859 - DNA, 15 bp, Homo sapiens
acagagtaacaaaca

SEQ ID NO: 925860 - DNA, 15 bp, Homo sapiens
tacagagtaacaaac

SEQ ID NO: 925861 - DNA, 15 bp, Homo sapiens
ctacagagtaacaaa

SEQ ID NO: 925862 - DNA, 15 bp, Homo sapiens
gctacagagtaacaa

SEQ ID NO: 925863 - DNA, 15 bp, Homo sapiens
tgctacagagtaaca

SEQ ID NO: 925864 - DNA, 15 bp, Homo sapiens
atgctacagagtaac

SEQ ID NO: 925865 - DNA, 15 bp, Homo sapiens
tatgctacagagtaa

SEQ ID NO: 925866 - DNA, 15 bp, Homo sapiens
ctatgctacagagta

SEQ ID NO: 925867 - DNA, 15 bp, Homo sapiens
actatgctacagagt

SEQ ID NO: 925868 - DNA, 15 bp, Homo sapiens
gactatgctacagag

SEQ ID NO: 925869 - DNA, 15 bp, Homo sapiens
agactatgctacaga

SEQ ID NO: 925870 - DNA, 15 bp, Homo sapiens
tagactatgctacag

SEQ ID NO: 925871 - DNA, 15 bp, Homo sapiens
ctagactatgctaca

SEQ ID NO: 925872 - DNA, 15 bp, Homo sapiens
tctagactatgctac

SEQ ID NO: 925873 - DNA, 15 bp, Homo sapiens
ctctagactatgcta

SEQ ID NO: 925874 - DNA, 15 bp, Homo sapiens
actctagactatgct

SEQ ID NO: 925875 - DNA, 15 bp, Homo sapiens
cactctagactatgc

SEQ ID NO: 925876 - DNA, 15 bp, Homo sapiens
acactctagactatg

SEQ ID NO: 925877 - DNA, 15 bp, Homo sapiens
aacactctagactat

SEQ ID NO: 925878 - DNA, 15 bp, Homo sapiens
taacactctagacta

SEQ ID NO: 925879 - DNA, 15 bp, Homo sapiens
ttaacactctagact

SEQ ID NO: 925880 - DNA, 15 bp, Homo sapiens
gttaacactctagac

SEQ ID NO: 925881 - DNA, 15 bp, Homo sapiens
agttaacactctaga

SEQ ID NO: 925882 - DNA, 15 bp, Homo sapiens
gagttaacactctag

SEQ ID NO: 925883 - DNA, 15 bp, Homo sapiens
tgagttaacactcta

SEQ ID NO: 925884 - DNA, 15 bp, Homo sapiens
gtgagttaacactct

SEQ ID NO: 925885 - DNA, 15 bp, Homo sapiens
tgtgagttaacactc

SEQ ID NO: 925886 - DNA, 15 bp, Homo sapiens
ctgtgagttaacact

SEQ ID NO: 925887 - DNA, 15 bp, Homo sapiens
tctgtgagttaacac

SEQ ID NO: 925888 - DNA, 15 bp, Homo sapiens
ttctgtgagttaaca

SEQ ID NO: 925889 - DNA, 15 bp, Homo sapiens
tttctgtgagttaac

SEQ ID NO: 925890 - DNA, 15 bp, Homo sapiens
atttctgtgagttaa

SEQ ID NO: 925891 - DNA, 15 bp, Homo sapiens
tatttctgtgagtta

SEQ ID NO: 925892 - DNA, 15 bp, Homo sapiens
atatttctgtgagtt

SEQ ID NO: 925893 - DNA, 15 bp, Homo sapiens
aatatttctgtgagt

SEQ ID NO: 925894 - DNA, 15 bp, Homo sapiens
aaatatttctgtgag

SEQ ID NO: 925895 - DNA, 15 bp, Homo sapiens
gaaatatttctgtga

SEQ ID NO: 925896 - DNA, 15 bp, Homo sapiens
ggaaatatttctgtg

SEQ ID NO: 925897 - DNA, 15 bp, Homo sapiens
aggaaatatttctgt

SEQ ID NO: 925898 - DNA, 15 bp, Homo sapiens
caggaaatatttctg

SEQ ID NO: 925899 - DNA, 15 bp, Homo sapiens
acaggaaatatttct

SEQ ID NO: 925900 - DNA, 15 bp, Homo sapiens
tacaggaaatatttc

SEQ ID NO: 925901 - DNA, 15 bp, Homo sapiens
atacaggaaatattt

SEQ ID NO: 925902 - DNA, 15 bp, Homo sapiens
gatacaggaaatatt

SEQ ID NO: 925903 - DNA, 15 bp, Homo sapiens
tgatacaggaaatat

SEQ ID NO: 925904 - DNA, 15 bp, Homo sapiens
ctgatacaggaaata

SEQ ID NO: 925905 - DNA, 15 bp, Homo sapiens
tctgatacaggaaat

SEQ ID NO: 925906 - DNA, 15 bp, Homo sapiens
atctgatacaggaaa

SEQ ID NO: 925907 - DNA, 15 bp, Homo sapiens
catctgatacaggaa

SEQ ID NO: 925908 - DNA, 15 bp, Homo sapiens
acatctgatacagga

SEQ ID NO: 925909 - DNA, 15 bp, Homo sapiens
tacatctgatacagg

SEQ ID NO: 925910 - DNA, 15 bp, Homo sapiens
ttacatctgatacag

SEQ ID NO: 925911 - DNA, 15 bp, Homo sapiens
attacatctgataca

SEQ ID NO: 925912 - DNA, 15 bp, Homo sapiens
aattacatctgatac

SEQ ID NO: 925913 - DNA, 15 bp, Homo sapiens
aaattacatctgata

SEQ ID NO: 925914 - DNA, 15 bp, Homo sapiens
aaaattacatctgat

SEQ ID NO: 925915 - DNA, 15 bp, Homo sapiens
taaaattacatctga

SEQ ID NO: 925916 - DNA, 15 bp, Homo sapiens
ttaaaattacatctg

SEQ ID NO: 925917 - DNA, 15 bp, Homo sapiens
attaaaattacatct

SEQ ID NO: 925918 - DNA, 15 bp, Homo sapiens
aattaaaattacatc

SEQ ID NO: 925919 - DNA, 15 bp, Homo sapiens
caattaaaattacat

SEQ ID NO: 925920 - DNA, 15 bp, Homo sapiens
tcaattaaaattaca

SEQ ID NO: 925921 - DNA, 15 bp, Homo sapiens
atcaattaaaattac

SEQ ID NO: 925922 - DNA, 15 bp, Homo sapiens
catcaattaaaatta

SEQ ID NO: 925923 - DNA, 15 bp, Homo sapiens
acatcaattaaaatt

SEQ ID NO: 925924 - DNA, 15 bp, Homo sapiens
aacatcaattaaaat

SEQ ID NO: 925925 - DNA, 15 bp, Homo sapiens
taacatcaattaaaa

SEQ ID NO: 925926 - DNA, 15 bp, Homo sapiens
ataacatcaattaaa

SEQ ID NO: 925927 - DNA, 15 bp, Homo sapiens
tataacatcaattaa

SEQ ID NO: 925928 - DNA, 15 bp, Homo sapiens
atataacatcaatta

SEQ ID NO: 925929 - DNA, 15 bp, Homo sapiens
aatataacatcaatt

SEQ ID NO: 925930 - DNA, 15 bp, Homo sapiens
caatataacatcaat

SEQ ID NO: 925931 - DNA, 15 bp, Homo sapiens
acaatataacatcaa

SEQ ID NO: 925932 - DNA, 15 bp, Homo sapiens
tacaatataacatca

SEQ ID NO: 925933 - DNA, 15 bp, Homo sapiens
atacaatataacatc

SEQ ID NO: 925934 - DNA, 15 bp, Homo sapiens
tatacaatataacat

SEQ ID NO: 925935 - DNA, 15 bp, Homo sapiens
atatacaatataaca

SEQ ID NO: 925936 - DNA, 15 bp, Homo sapiens
aatatacaatataac

SEQ ID NO: 925937 - DNA, 15 bp, Homo sapiens
aaatatacaatataa

SEQ ID NO: 925938 - DNA, 15 bp, Homo sapiens
taaatatacaatata

SEQ ID NO: 925939 - DNA, 15 bp, Homo sapiens
ttaaatatacaatat

SEQ ID NO: 925940 - DNA, 15 bp, Homo sapiens
tttaaatatacaata

SEQ ID NO: 925941 - DNA, 15 bp, Homo sapiens
ttttaaatatacaat

SEQ ID NO: 925942 - DNA, 15 bp, Homo sapiens
attttaaatatacaa

SEQ ID NO: 925943 - DNA, 15 bp, Homo sapiens
tattttaaatataca

SEQ ID NO: 925944 - DNA, 15 bp, Homo sapiens
atattttaaatatac

SEQ ID NO: 925945 - DNA, 15 bp, Homo sapiens
tatattttaaatata

SEQ ID NO: 925946 - DNA, 15 bp, Homo sapiens
ttatattttaaatat

SEQ ID NO: 925947 - DNA, 15 bp, Homo sapiens
cttatattttaaata

SEQ ID NO: 925948 - DNA, 15 bp, Homo sapiens
tcttatattttaaat

SEQ ID NO: 925949 - DNA, 15 bp, Homo sapiens
ctcttatattttaaa

SEQ ID NO: 925950 - DNA, 15 bp, Homo sapiens
cctcttatattttaa

SEQ ID NO: 925951 - DNA, 15 bp, Homo sapiens
ccctcttatatttta

SEQ ID NO: 925952 - DNA, 15 bp, Homo sapiens
cccctcttatatttt

SEQ ID NO: 925953 - DNA, 15 bp, Homo sapiens
acccctcttatattt

SEQ ID NO: 925954 - DNA, 15 bp, Homo sapiens
aacccctcttatatt

SEQ ID NO: 925955 - DNA, 15 bp, Homo sapiens
aaacccctcttatat

SEQ ID NO: 925956 - DNA, 15 bp, Homo sapiens
taaacccctcttata

SEQ ID NO: 925957 - DNA, 15 bp, Homo sapiens
ttaaacccctcttat

SEQ ID NO: 925958 - DNA, 15 bp, Homo sapiens
attaaacccctctta

SEQ ID NO: 925959 - DNA, 15 bp, Homo sapiens
gattaaacccctctt

SEQ ID NO: 925960 - DNA, 15 bp, Homo sapiens
agattaaacccctct

SEQ ID NO: 925961 - DNA, 15 bp, Homo sapiens
tagattaaacccctc

SEQ ID NO: 925962 - DNA, 15 bp, Homo sapiens
atagattaaacccct

SEQ ID NO: 925963 - DNA, 15 bp, Homo sapiens
catagattaaacccc

SEQ ID NO: 925964 - DNA, 15 bp, Homo sapiens
acatagattaaaccc

SEQ ID NO: 925965 - DNA, 15 bp, Homo sapiens
aacatagattaaacc

SEQ ID NO: 925966 - DNA, 15 bp, Homo sapiens
aaacatagattaaac

SEQ ID NO: 925967 - DNA, 15 bp, Homo sapiens
aaaacatagattaaa

SEQ ID NO: 925968 - DNA, 15 bp, Homo sapiens
taaaacatagattaa

SEQ ID NO: 925969 - DNA, 15 bp, Homo sapiens
ataaaacatagatta

SEQ ID NO: 925970 - DNA, 15 bp, Homo sapiens
gataaaacatagatt

SEQ ID NO: 925971 - DNA, 15 bp, Homo sapiens
tgataaaacatagat

SEQ ID NO: 925972 - DNA, 15 bp, Homo sapiens
atgataaaacataga

SEQ ID NO: 925973 - DNA, 15 bp, Homo sapiens
tatgataaaacatag

SEQ ID NO: 925974 - DNA, 15 bp, Homo sapiens
gtatgataaaacata

SEQ ID NO: 925975 - DNA, 15 bp, Homo sapiens
tgtatgataaaacat

SEQ ID NO: 925976 - DNA, 15 bp, Homo sapiens
ctgtatgataaaaca

SEQ ID NO: 925977 - DNA, 15 bp, Homo sapiens
gctgtatgataaaac

SEQ ID NO: 925978 - DNA, 15 bp, Homo sapiens
agctgtatgataaaa

SEQ ID NO: 925979 - DNA, 15 bp, Homo sapiens
cagctgtatgataaa

SEQ ID NO: 925980 - DNA, 15 bp, Homo sapiens
acagctgtatgataa

SEQ ID NO: 925981 - DNA, 15 bp, Homo sapiens
tacagctgtatgata

SEQ ID NO: 925982 - DNA, 15 bp, Homo sapiens
ttacagctgtatgat

SEQ ID NO: 925983 - DNA, 15 bp, Homo sapiens
tttacagctgtatga

SEQ ID NO: 925984 - DNA, 15 bp, Homo sapiens
ttttacagctgtatg

SEQ ID NO: 925985 - DNA, 15 bp, Homo sapiens
tttttacagctgtat

SEQ ID NO: 925986 - DNA, 15 bp, Homo sapiens
atttttacagctgta

SEQ ID NO: 925987 - DNA, 15 bp, Homo sapiens
aatttttacagctgt

SEQ ID NO: 925988 - DNA, 15 bp, Homo sapiens
taatttttacagctg

SEQ ID NO: 925989 - DNA, 15 bp, Homo sapiens
ttaatttttacagct

SEQ ID NO: 925990 - DNA, 15 bp, Homo sapiens
attaatttttacagc

SEQ ID NO: 925991 - DNA, 15 bp, Homo sapiens
tattaatttttacag

SEQ ID NO: 925992 - DNA, 15 bp, Homo sapiens
ctattaatttttaca

SEQ ID NO: 925993 - DNA, 15 bp, Homo sapiens
actattaatttttac

SEQ ID NO: 925994 - DNA, 15 bp, Homo sapiens
aactattaattttta

SEQ ID NO: 925995 - DNA, 15 bp, Homo sapiens
taactattaattttt

SEQ ID NO: 925996 - DNA, 15 bp, Homo sapiens
gtaactattaatttt

SEQ ID NO: 925997 - DNA, 15 bp, Homo sapiens
agtaactattaattt

SEQ ID NO: 925998 - DNA, 15 bp, Homo sapiens
gagtaactattaatt

SEQ ID NO: 925999 - DNA, 15 bp, Homo sapiens
agagtaactattaat

SEQ ID NO: 926000 - DNA, 15 bp, Homo sapiens
gagagtaactattaa

SEQ ID NO: 926001 - DNA, 15 bp, Homo sapiens
tgagagtaactatta

SEQ ID NO: 926002 - DNA, 15 bp, Homo sapiens
ttgagagtaactatt

SEQ ID NO: 926003 - DNA, 15 bp, Homo sapiens
attgagagtaactat

SEQ ID NO: 926004 - DNA, 15 bp, Homo sapiens
cattgagagtaacta

SEQ ID NO: 926005 - DNA, 15 bp, Homo sapiens
gcattgagagtaact

SEQ ID NO: 926006 - DNA, 15 bp, Homo sapiens
agcattgagagtaac

SEQ ID NO: 926007 - DNA, 15 bp, Homo sapiens
cagcattgagagtaa

SEQ ID NO: 926008 - DNA, 15 bp, Homo sapiens
gcagcattgagagta

SEQ ID NO: 926009 - DNA, 15 bp, Homo sapiens
tgcagcattgagagt

SEQ ID NO: 926010 - DNA, 15 bp, Homo sapiens
ttgcagcattgagag

SEQ ID NO: 926011 - DNA, 15 bp, Homo sapiens
gttgcagcattgaga

SEQ ID NO: 926012 - DNA, 15 bp, Homo sapiens
agttgcagcattgag

SEQ ID NO: 926013 - DNA, 15 bp, Homo sapiens
cagttgcagcattga

SEQ ID NO: 926014 - DNA, 15 bp, Homo sapiens
gcagttgcagcattg

SEQ ID NO: 926015 - DNA, 15 bp, Homo sapiens
agcagttgcagcatt

SEQ ID NO: 926016 - DNA, 15 bp, Homo sapiens
aagcagttgcagcat

SEQ ID NO: 926017 - DNA, 15 bp, Homo sapiens
aaagcagttgcagca

SEQ ID NO: 926018 - DNA, 15 bp, Homo sapiens
aaaagcagttgcagc

SEQ ID NO: 926019 - DNA, 15 bp, Homo sapiens
aaaaagcagttgcag

SEQ ID NO: 926020 - DNA, 15 bp, Homo sapiens
aaaaaagcagttgca

SEQ ID NO: 926021 - DNA, 15 bp, Homo sapiens
taaaaaagcagttgc

SEQ ID NO: 926022 - DNA, 15 bp, Homo sapiens
ttaaaaaagcagttg

SEQ ID NO: 926023 - DNA, 15 bp, Homo sapiens
tttaaaaaagcagtt

SEQ ID NO: 926024 - DNA, 15 bp, Homo sapiens
ttttaaaaaagcagt

SEQ ID NO: 926025 - DNA, 15 bp, Homo sapiens
tttttaaaaaagcag

SEQ ID NO: 926026 - DNA, 15 bp, Homo sapiens
ttttttaaaaaagca

SEQ ID NO: 926027 - DNA, 15 bp, Homo sapiens
gttttttaaaaaagc

SEQ ID NO: 926028 - DNA, 15 bp, Homo sapiens
tgttttttaaaaaag

SEQ ID NO: 926029 - DNA, 15 bp, Homo sapiens
atgttttttaaaaaa

SEQ ID NO: 926030 - DNA, 15 bp, Homo sapiens
tatgttttttaaaaa

SEQ ID NO: 926031 - DNA, 15 bp, Homo sapiens
gtatgttttttaaaa

SEQ ID NO: 926032 - DNA, 15 bp, Homo sapiens
agtatgttttttaaa

SEQ ID NO: 926033 - DNA, 15 bp, Homo sapiens
tagtatgttttttaa

SEQ ID NO: 926034 - DNA, 15 bp, Homo sapiens
atagtatgtttttta

SEQ ID NO: 926035 - DNA, 15 bp, Homo sapiens
aatagtatgtttttt

SEQ ID NO: 926036 - DNA, 15 bp, Homo sapiens
aaatagtatgttttt

SEQ ID NO: 926037 - DNA, 15 bp, Homo sapiens
gaaatagtatgtttt

SEQ ID NO: 926038 - DNA, 15 bp, Homo sapiens
agaaatagtatgttt

SEQ ID NO: 926039 - DNA, 15 bp, Homo sapiens
aagaaatagtatgtt

SEQ ID NO: 926040 - DNA, 15 bp, Homo sapiens
taagaaatagtatgt

SEQ ID NO: 926041 - DNA, 15 bp, Homo sapiens
ttaagaaatagtatg

SEQ ID NO: 926042 - DNA, 15 bp, Homo sapiens
attaagaaatagtat

SEQ ID NO: 926043 - DNA, 15 bp, Homo sapiens
tattaagaaatagta

SEQ ID NO: 926044 - DNA, 15 bp, Homo sapiens
ctattaagaaatagt

SEQ ID NO: 926045 - DNA, 15 bp, Homo sapiens
actattaagaaatag

SEQ ID NO: 926046 - DNA, 15 bp, Homo sapiens
aactattaagaaata

SEQ ID NO: 926047 - DNA, 15 bp, Homo sapiens
aaactattaagaaat

SEQ ID NO: 926048 - DNA, 15 bp, Homo sapiens
caaactattaagaaa

SEQ ID NO: 926049 - DNA, 15 bp, Homo sapiens
tcaaactattaagaa

SEQ ID NO: 926050 - DNA, 15 bp, Homo sapiens
ttcaaactattaaga

SEQ ID NO: 926051 - DNA, 15 bp, Homo sapiens
cttcaaactattaag

SEQ ID NO: 926052 - DNA, 15 bp, Homo sapiens
tcttcaaactattaa

SEQ ID NO: 926053 - DNA, 15 bp, Homo sapiens
ttcttcaaactatta

SEQ ID NO: 926054 - DNA, 15 bp, Homo sapiens
cttcttcaaactatt

SEQ ID NO: 926055 - DNA, 15 bp, Homo sapiens
gcttcttcaaactat

SEQ ID NO: 926056 - DNA, 15 bp, Homo sapiens
agcttcttcaaacta

SEQ ID NO: 926057 - DNA, 15 bp, Homo sapiens
tagcttcttcaaact

SEQ ID NO: 926058 - DNA, 15 bp, Homo sapiens
gtagcttcttcaaac

SEQ ID NO: 926059 - DNA, 15 bp, Homo sapiens
tgtagcttcttcaaa

SEQ ID NO: 926060 - DNA, 15 bp, Homo sapiens
ctgtagcttcttcaa

SEQ ID NO: 926061 - DNA, 15 bp, Homo sapiens
cctgtagcttcttca

SEQ ID NO: 926062 - DNA, 15 bp, Homo sapiens
tcctgtagcttcttc

SEQ ID NO: 926063 - DNA, 15 bp, Homo sapiens
atcctgtagcttctt

SEQ ID NO: 926064 - DNA, 15 bp, Homo sapiens
gatcctgtagcttct

SEQ ID NO: 926065 - DNA, 15 bp, Homo sapiens
tgatcctgtagcttc

SEQ ID NO: 926066 - DNA, 15 bp, Homo sapiens
ttgatcctgtagctt

SEQ ID NO: 926067 - DNA, 15 bp, Homo sapiens
attgatcctgtagct

SEQ ID NO: 926068 - DNA, 15 bp, Homo sapiens
gattgatcctgtagc

SEQ ID NO: 926069 - DNA, 15 bp, Homo sapiens
ggattgatcctgtag

SEQ ID NO: 926070 - DNA, 15 bp, Homo sapiens
gggattgatcctgta

SEQ ID NO: 926071 - DNA, 15 bp, Homo sapiens
agggattgatcctgt

SEQ ID NO: 926072 - DNA, 15 bp, Homo sapiens
cagggattgatcctg

SEQ ID NO: 926073 - DNA, 15 bp, Homo sapiens
tcagggattgatcct

SEQ ID NO: 926074 - DNA, 15 bp, Homo sapiens
gtcagggattgatcc

SEQ ID NO: 926075 - DNA, 15 bp, Homo sapiens
ggtcagggattgatc

SEQ ID NO: 926076 - DNA, 15 bp, Homo sapiens
gggtcagggattgat

SEQ ID NO: 926077 - DNA, 15 bp, Homo sapiens
agggtcagggattga

SEQ ID NO: 926078 - DNA, 15 bp, Homo sapiens
tagggtcagggattg

SEQ ID NO: 926079 - DNA, 15 bp, Homo sapiens
ctagggtcagggatt

SEQ ID NO: 926080 - DNA, 15 bp, Homo sapiens
actagggtcagggat

SEQ ID NO: 926081 - DNA, 15 bp, Homo sapiens
aactagggtcaggga

SEQ ID NO: 926082 - DNA, 15 bp, Homo sapiens
aaactagggtcaggg

SEQ ID NO: 926083 - DNA, 15 bp, Homo sapiens
caaactagggtcagg

SEQ ID NO: 926084 - DNA, 15 bp, Homo sapiens
gcaaactagggtcag

SEQ ID NO: 926085 - DNA, 15 bp, Homo sapiens
ggcaaactagggtca

SEQ ID NO: 926086 - DNA, 15 bp, Homo sapiens
gggcaaactagggtc

SEQ ID NO: 926087 - DNA, 15 bp, Homo sapiens
ggggcaaactagggt

SEQ ID NO: 926088 - DNA, 15 bp, Homo sapiens
aggggcaaactaggg

SEQ ID NO: 926089 - DNA, 15 bp, Homo sapiens
aaggggcaaactagg

SEQ ID NO: 926090 - DNA, 15 bp, Homo sapiens
gaaggggcaaactag

SEQ ID NO: 926091 - DNA, 15 bp, Homo sapiens
ggaaggggcaaacta

SEQ ID NO: 926092 - DNA, 15 bp, Homo sapiens
tggaaggggcaaact

SEQ ID NO: 926093 - DNA, 15 bp, Homo sapiens
ttggaaggggcaaac

SEQ ID NO: 926094 - DNA, 15 bp, Homo sapiens
tttggaaggggcaaa

SEQ ID NO: 926095 - DNA, 15 bp, Homo sapiens
atttggaaggggcaa

SEQ ID NO: 926096 - DNA, 15 bp, Homo sapiens
gatttggaaggggca

SEQ ID NO: 926097 - DNA, 15 bp, Homo sapiens
tgatttggaaggggc

SEQ ID NO: 926098 - DNA, 15 bp, Homo sapiens
ttgatttggaagggg

SEQ ID NO: 926099 - DNA, 15 bp, Homo sapiens
gttgatttggaaggg

SEQ ID NO: 926100 - DNA, 15 bp, Homo sapiens
agttgatttggaagg

SEQ ID NO: 926101 - DNA, 15 bp, Homo sapiens
aagttgatttggaag

SEQ ID NO: 926102 - DNA, 15 bp, Homo sapiens
caagttgatttggaa

SEQ ID NO: 926103 - DNA, 15 bp, Homo sapiens
tcaagttgatttgga

SEQ ID NO: 926104 - DNA, 15 bp, Homo sapiens
ctcaagttgatttgg

SEQ ID NO: 926105 - DNA, 15 bp, Homo sapiens
tctcaagttgatttg

SEQ ID NO: 926106 - DNA, 15 bp, Homo sapiens
atctcaagttgattt

SEQ ID NO: 926107 - DNA, 15 bp, Homo sapiens
gatctcaagttgatt

SEQ ID NO: 926108 - DNA, 15 bp, Homo sapiens
cgatctcaagttgat

SEQ ID NO: 926109 - DNA, 15 bp, Homo sapiens
gcgatctcaagttga

SEQ ID NO: 926110 - DNA, 15 bp, Homo sapiens
agcgatctcaagttg

SEQ ID NO: 926111 - DNA, 15 bp, Homo sapiens
gagcgatctcaagtt

SEQ ID NO: 926112 - DNA, 15 bp, Homo sapiens
agagcgatctcaagt

SEQ ID NO: 926113 - DNA, 15 bp, Homo sapiens
tagagcgatctcaag

SEQ ID NO: 926114 - DNA, 15 bp, Homo sapiens
ttagagcgatctcaa

SEQ ID NO: 926115 - DNA, 15 bp, Homo sapiens
cttagagcgatctca

SEQ ID NO: 926116 - DNA, 15 bp, Homo sapiens
ccttagagcgatctc

SEQ ID NO: 926117 - DNA, 15 bp, Homo sapiens
tccttagagcgatct

SEQ ID NO: 926118 - DNA, 15 bp, Homo sapiens
ttccttagagcgatc

SEQ ID NO: 926119 - DNA, 15 bp, Homo sapiens
tttccttagagcgat

SEQ ID NO: 926120 - DNA, 15 bp, Homo sapiens
ttttccttagagcga

SEQ ID NO: 926121 - DNA, 15 bp, Homo sapiens
attttccttagagcg

SEQ ID NO: 926122 - DNA, 15 bp, Homo sapiens
aattttccttagagc

SEQ ID NO: 926123 - DNA, 15 bp, Homo sapiens
taattttccttagag

SEQ ID NO: 926124 - DNA, 15 bp, Homo sapiens
ttaattttccttaga

SEQ ID NO: 926125 - DNA, 15 bp, Homo sapiens
cttaattttccttag

SEQ ID NO: 926126 - DNA, 15 bp, Homo sapiens
ccttaattttcctta

SEQ ID NO: 926127 - DNA, 15 bp, Homo sapiens
tccttaattttcctt

SEQ ID NO: 926128 - DNA, 15 bp, Homo sapiens
ctccttaattttcct

SEQ ID NO: 926129 - DNA, 15 bp, Homo sapiens
tctccttaattttcc

SEQ ID NO: 926130 - DNA, 15 bp, Homo sapiens
ttctccttaattttc

SEQ ID NO: 926131 - DNA, 15 bp, Homo sapiens
gttctccttaatttt

SEQ ID NO: 926132 - DNA, 15 bp, Homo sapiens
tgttctccttaattt

SEQ ID NO: 926133 - DNA, 15 bp, Homo sapiens
atgttctccttaatt

SEQ ID NO: 926134 - DNA, 15 bp, Homo sapiens
aatgttctccttaat

SEQ ID NO: 926135 - DNA, 15 bp, Homo sapiens
gaatgttctccttaa

SEQ ID NO: 926136 - DNA, 15 bp, Homo sapiens
cgaatgttctcctta

SEQ ID NO: 926137 - DNA, 15 bp, Homo sapiens
tcgaatgttctcctt

SEQ ID NO: 926138 - DNA, 15 bp, Homo sapiens
ttcgaatgttctcct

SEQ ID NO: 926139 - DNA, 15 bp, Homo sapiens
attcgaatgttctcc

SEQ ID NO: 926140 - DNA, 15 bp, Homo sapiens
tattcgaatgttctc

SEQ ID NO: 926141 - DNA, 15 bp, Homo sapiens
ttattcgaatgttct

SEQ ID NO: 926142 - DNA, 15 bp, Homo sapiens
attattcgaatgttc

SEQ ID NO: 926143 - DNA, 15 bp, Homo sapiens
aattattcgaatgtt

SEQ ID NO: 926144 - DNA, 15 bp, Homo sapiens
gaattattcgaatgt

SEQ ID NO: 926145 - DNA, 15 bp, Homo sapiens
agaattattcgaatg

SEQ ID NO: 926146 - DNA, 15 bp, Homo sapiens
tagaattattcgaat

SEQ ID NO: 926147 - DNA, 15 bp, Homo sapiens
ctagaattattcgaa

SEQ ID NO: 926148 - DNA, 15 bp, Homo sapiens
tctagaattattcga

SEQ ID NO: 926149 - DNA, 15 bp, Homo sapiens
ttctagaattattcg

SEQ ID NO: 926150 - DNA, 15 bp, Homo sapiens
tttctagaattattc

SEQ ID NO: 926151 - DNA, 15 bp, Homo sapiens
gtttctagaattatt

SEQ ID NO: 926152 - DNA, 15 bp, Homo sapiens
tgtttctagaattat

SEQ ID NO: 926153 - DNA, 15 bp, Homo sapiens
gtgtttctagaatta

SEQ ID NO: 926154 - DNA, 15 bp, Homo sapiens
cgtgtttctagaatt

SEQ ID NO: 926155 - DNA, 15 bp, Homo sapiens
ccgtgtttctagaat

SEQ ID NO: 926156 - DNA, 15 bp, Homo sapiens
cccgtgtttctagaa

SEQ ID NO: 926157 - DNA, 15 bp, Homo sapiens
gcccgtgtttctaga

SEQ ID NO: 926158 - DNA, 15 bp, Homo sapiens
tgcccgtgtttctag

SEQ ID NO: 926159 - DNA, 15 bp, Homo sapiens
ttgcccgtgtttcta

SEQ ID NO: 926160 - DNA, 15 bp, Homo sapiens
gttgcccgtgtttct

SEQ ID NO: 926161 - DNA, 15 bp, Homo sapiens
agttgcccgtgtttc

SEQ ID NO: 926162 - DNA, 15 bp, Homo sapiens
aagttgcccgtgttt

SEQ ID NO: 926163 - DNA, 15 bp, Homo sapiens
caagttgcccgtgtt

SEQ ID NO: 926164 - DNA, 15 bp, Homo sapiens
gcaagttgcccgtgt

SEQ ID NO: 926165 - DNA, 15 bp, Homo sapiens
tgcaagttgcccgtg

SEQ ID NO: 926166 - DNA, 15 bp, Homo sapiens
ttgcaagttgcccgt

SEQ ID NO: 926167 - DNA, 15 bp, Homo sapiens
tttgcaagttgcccg

SEQ ID NO: 926168 - DNA, 15 bp, Homo sapiens
atttgcaagttgccc

SEQ ID NO: 926169 - DNA, 15 bp, Homo sapiens
gatttgcaagttgcc

SEQ ID NO: 926170 - DNA, 15 bp, Homo sapiens
tgatttgcaagttgc

SEQ ID NO: 926171 - DNA, 15 bp, Homo sapiens
gtgatttgcaagttg

SEQ ID NO: 926172 - DNA, 15 bp, Homo sapiens
agtgatttgcaagtt

SEQ ID NO: 926173 - DNA, 15 bp, Homo sapiens
tagtgatttgcaagt

SEQ ID NO: 926174 - DNA, 15 bp, Homo sapiens
ctagtgatttgcaag

SEQ ID NO: 926175 - DNA, 15 bp, Homo sapiens
tctagtgatttgcaa

SEQ ID NO: 926176 - DNA, 15 bp, Homo sapiens
ttctagtgatttgca

SEQ ID NO: 926177 - DNA, 15 bp, Homo sapiens
cttctagtgatttgc

SEQ ID NO: 926178 - DNA, 15 bp, Homo sapiens
tcttctagtgatttg

SEQ ID NO: 926179 - DNA, 15 bp, Homo sapiens
ctcttctagtgattt

SEQ ID NO: 926180 - DNA, 15 bp, Homo sapiens
cctcttctagtgatt

SEQ ID NO: 926181 - DNA, 15 bp, Homo sapiens
acctcttctagtgat

SEQ ID NO: 926182 - DNA, 15 bp, Homo sapiens
tacctcttctagtga

SEQ ID NO: 926183 - DNA, 15 bp, Homo sapiens
ttacctcttctagtg

SEQ ID NO: 926184 - DNA, 15 bp, Homo sapiens
attacctcttctagt

SEQ ID NO: 926185 - DNA, 15 bp, Homo sapiens
aattacctcttctag

SEQ ID NO: 926186 - DNA, 15 bp, Homo sapiens
taattacctcttcta

SEQ ID NO: 926187 - DNA, 15 bp, Homo sapiens
ctaattacctcttct

SEQ ID NO: 926188 - DNA, 15 bp, Homo sapiens
tctaattacctcttc

SEQ ID NO: 926189 - DNA, 15 bp, Homo sapiens
ttctaattacctctt

SEQ ID NO: 926190 - DNA, 15 bp, Homo sapiens
cttctaattacctct

SEQ ID NO: 926191 - DNA, 15 bp, Homo sapiens
tcttctaattacctc

SEQ ID NO: 926192 - DNA, 15 bp, Homo sapiens
ttcttctaattacct

SEQ ID NO: 926193 - DNA, 15 bp, Homo sapiens
attcttctaattacc

SEQ ID NO: 926194 - DNA, 15 bp, Homo sapiens
aattcttctaattac

SEQ ID NO: 926195 - DNA, 15 bp, Homo sapiens
aaattcttctaatta

SEQ ID NO: 926196 - DNA, 15 bp, Homo sapiens
caaattcttctaatt

SEQ ID NO: 926197 - DNA, 15 bp, Homo sapiens
gcaaattcttctaat

SEQ ID NO: 926198 - DNA, 15 bp, Homo sapiens
tgcaaattcttctaa

SEQ ID NO: 926199 - DNA, 15 bp, Homo sapiens
atgcaaattcttcta

SEQ ID NO: 926200 - DNA, 15 bp, Homo sapiens
aatgcaaattcttct

SEQ ID NO: 926201 - DNA, 15 bp, Homo sapiens
aaatgcaaattcttc

SEQ ID NO: 926202 - DNA, 15 bp, Homo sapiens
aaaatgcaaattctt

SEQ ID NO: 926203 - DNA, 15 bp, Homo sapiens
caaaatgcaaattct

SEQ ID NO: 926204 - DNA, 15 bp, Homo sapiens
tcaaaatgcaaattc

SEQ ID NO: 926205 - DNA, 15 bp, Homo sapiens
atcaaaatgcaaatt

SEQ ID NO: 926206 - DNA, 15 bp, Homo sapiens
aatcaaaatgcaaat

SEQ ID NO: 926207 - DNA, 15 bp, Homo sapiens
taatcaaaatgcaaa

SEQ ID NO: 926208 - DNA, 15 bp, Homo sapiens
ctaatcaaaatgcaa

SEQ ID NO: 926209 - DNA, 15 bp, Homo sapiens
actaatcaaaatgca

SEQ ID NO: 926210 - DNA, 15 bp, Homo sapiens
cactaatcaaaatgc

SEQ ID NO: 926211 - DNA, 15 bp, Homo sapiens
acactaatcaaaatg

SEQ ID NO: 926212 - DNA, 15 bp, Homo sapiens
tacactaatcaaaat

SEQ ID NO: 926213 - DNA, 15 bp, Homo sapiens
atacactaatcaaaa

SEQ ID NO: 926214 - DNA, 15 bp, Homo sapiens
aatacactaatcaaa

SEQ ID NO: 926215 - DNA, 15 bp, Homo sapiens
taatacactaatcaa

SEQ ID NO: 926216 - DNA, 15 bp, Homo sapiens
ataatacactaatca

SEQ ID NO: 926217 - DNA, 15 bp, Homo sapiens
aataatacactaatc

SEQ ID NO: 926218 - DNA, 15 bp, Homo sapiens
aaataatacactaat

SEQ ID NO: 926219 - DNA, 15 bp, Homo sapiens
caaataatacactaa

SEQ ID NO: 926220 - DNA, 15 bp, Homo sapiens
ccaaataatacacta

SEQ ID NO: 926221 - DNA, 15 bp, Homo sapiens
accaaataatacact

SEQ ID NO: 926222 - DNA, 15 bp, Homo sapiens
taccaaataatacac

SEQ ID NO: 926223 - DNA, 15 bp, Homo sapiens
ataccaaataataca

SEQ ID NO: 926224 - DNA, 15 bp, Homo sapiens
cataccaaataatac

SEQ ID NO: 926225 - DNA, 15 bp, Homo sapiens
acataccaaataata

SEQ ID NO: 926226 - DNA, 15 bp, Homo sapiens
aacataccaaataat

SEQ ID NO: 926227 - DNA, 15 bp, Homo sapiens
aaacataccaaataa

SEQ ID NO: 926228 - DNA, 15 bp, Homo sapiens
caaacataccaaata

SEQ ID NO: 926229 - DNA, 15 bp, Homo sapiens
ccaaacataccaaat

SEQ ID NO: 926230 - DNA, 15 bp, Homo sapiens
cccaaacataccaaa

SEQ ID NO: 926231 - DNA, 15 bp, Homo sapiens
ccccaaacataccaa

SEQ ID NO: 926232 - DNA, 15 bp, Homo sapiens
cccccaaacatacca

SEQ ID NO: 926233 - DNA, 15 bp, Homo sapiens
ccccccaaacatacc

SEQ ID NO: 926234 - DNA, 15 bp, Homo sapiens
gccccccaaacatac

SEQ ID NO: 926235 - DNA, 15 bp, Homo sapiens
agccccccaaacata

SEQ ID NO: 926236 - DNA, 15 bp, Homo sapiens
aagccccccaaacat

SEQ ID NO: 926237 - DNA, 15 bp, Homo sapiens
aaagccccccaaaca

SEQ ID NO: 926238 - DNA, 15 bp, Homo sapiens
gaaagccccccaaac

SEQ ID NO: 926239 - DNA, 15 bp, Homo sapiens
agaaagccccccaaa

SEQ ID NO: 926240 - DNA, 15 bp, Homo sapiens
tagaaagccccccaa

SEQ ID NO: 926241 - DNA, 15 bp, Homo sapiens
ttagaaagcccccca

SEQ ID NO: 926242 - DNA, 15 bp, Homo sapiens
tttagaaagcccccc

SEQ ID NO: 926243 - DNA, 15 bp, Homo sapiens
atttagaaagccccc

SEQ ID NO: 926244 - DNA, 15 bp, Homo sapiens
tatttagaaagcccc

SEQ ID NO: 926245 - DNA, 15 bp, Homo sapiens
ttatttagaaagccc

SEQ ID NO: 926246 - DNA, 15 bp, Homo sapiens
attatttagaaagcc

SEQ ID NO: 926247 - DNA, 15 bp, Homo sapiens
tattatttagaaagc

SEQ ID NO: 926248 - DNA, 15 bp, Homo sapiens
atattatttagaaag

SEQ ID NO: 926249 - DNA, 15 bp, Homo sapiens
aatattatttagaaa

SEQ ID NO: 926250 - DNA, 15 bp, Homo sapiens
aaatattatttagaa

SEQ ID NO: 926251 - DNA, 15 bp, Homo sapiens
gaaatattatttaga

SEQ ID NO: 926252 - DNA, 15 bp, Homo sapiens
agaaatattatttag

SEQ ID NO: 926253 - DNA, 15 bp, Homo sapiens
aagaaatattattta

SEQ ID NO: 926254 - DNA, 15 bp, Homo sapiens
aaagaaatattattt

SEQ ID NO: 926255 - DNA, 15 bp, Homo sapiens
taaagaaatattatt

SEQ ID NO: 926256 - DNA, 15 bp, Homo sapiens
ataaagaaatattat

SEQ ID NO: 926257 - DNA, 15 bp, Homo sapiens
cataaagaaatatta

SEQ ID NO: 926258 - DNA, 15 bp, Homo sapiens
tcataaagaaatatt

SEQ ID NO: 926259 - DNA, 15 bp, Homo sapiens
ctcataaagaaatat

SEQ ID NO: 926260 - DNA, 15 bp, Homo sapiens
cctcataaagaaata

SEQ ID NO: 926261 - DNA, 15 bp, Homo sapiens
ccctcataaagaaat

SEQ ID NO: 926262 - DNA, 15 bp, Homo sapiens
gccctcataaagaaa

SEQ ID NO: 926263 - DNA, 15 bp, Homo sapiens
tgccctcataaagaa

SEQ ID NO: 926264 - DNA, 15 bp, Homo sapiens
ttgccctcataaaga

SEQ ID NO: 926265 - DNA, 15 bp, Homo sapiens
attgccctcataaag

SEQ ID NO: 926266 - DNA, 15 bp, Homo sapiens
cattgccctcataaa

SEQ ID NO: 926267 - DNA, 15 bp, Homo sapiens
gcattgccctcataa

SEQ ID NO: 926268 - DNA, 15 bp, Homo sapiens
tgcattgccctcata

SEQ ID NO: 926269 - DNA, 15 bp, Homo sapiens
atgcattgccctcat

SEQ ID NO: 926270 - DNA, 15 bp, Homo sapiens
tatgcattgccctca

SEQ ID NO: 926271 - DNA, 15 bp, Homo sapiens
ctatgcattgccctc

SEQ ID NO: 926272 - DNA, 15 bp, Homo sapiens
tctatgcattgccct

SEQ ID NO: 926273 - DNA, 15 bp, Homo sapiens
ttctatgcattgccc

SEQ ID NO: 926274 - DNA, 15 bp, Homo sapiens
attctatgcattgcc

SEQ ID NO: 926275 - DNA, 15 bp, Homo sapiens
cattctatgcattgc

SEQ ID NO: 926276 - DNA, 15 bp, Homo sapiens
tcattctatgcattg

SEQ ID NO: 926277 - DNA, 15 bp, Homo sapiens
atcattctatgcatt

SEQ ID NO: 926278 - DNA, 15 bp, Homo sapiens
catcattctatgcat

SEQ ID NO: 926279 - DNA, 15 bp, Homo sapiens
tcatcattctatgca

SEQ ID NO: 926280 - DNA, 15 bp, Homo sapiens
ttcatcattctatgc

SEQ ID NO: 926281 - DNA, 15 bp, Homo sapiens
attcatcattctatg

SEQ ID NO: 926282 - DNA, 15 bp, Homo sapiens
gattcatcattctat

SEQ ID NO: 926283 - DNA, 15 bp, Homo sapiens
agattcatcattcta

SEQ ID NO: 926284 - DNA, 15 bp, Homo sapiens
tagattcatcattct

SEQ ID NO: 926285 - DNA, 15 bp, Homo sapiens
atagattcatcattc

SEQ ID NO: 926286 - DNA, 15 bp, Homo sapiens
aatagattcatcatt

SEQ ID NO: 926287 - DNA, 15 bp, Homo sapiens
caatagattcatcat

SEQ ID NO: 926288 - DNA, 15 bp, Homo sapiens
gcaatagattcatca

SEQ ID NO: 926289 - DNA, 15 bp, Homo sapiens
agcaatagattcatc

SEQ ID NO: 926290 - DNA, 15 bp, Homo sapiens
tagcaatagattcat

SEQ ID NO: 926291 - DNA, 15 bp, Homo sapiens
ttagcaatagattca

SEQ ID NO: 926292 - DNA, 15 bp, Homo sapiens
attagcaatagattc

SEQ ID NO: 926293 - DNA, 15 bp, Homo sapiens
aattagcaatagatt

SEQ ID NO: 926294 - DNA, 15 bp, Homo sapiens
aaattagcaatagat

SEQ ID NO: 926295 - DNA, 15 bp, Homo sapiens
gaaattagcaataga

SEQ ID NO: 926296 - DNA, 15 bp, Homo sapiens
tgaaattagcaatag

SEQ ID NO: 926297 - DNA, 15 bp, Homo sapiens
gtgaaattagcaata

SEQ ID NO: 926298 - DNA, 15 bp, Homo sapiens
agtgaaattagcaat

SEQ ID NO: 926299 - DNA, 15 bp, Homo sapiens
tagtgaaattagcaa

SEQ ID NO: 926300 - DNA, 15 bp, Homo sapiens
atagtgaaattagca

SEQ ID NO: 926301 - DNA, 15 bp, Homo sapiens
aatagtgaaattagc

SEQ ID NO: 926302 - DNA, 15 bp, Homo sapiens
aaatagtgaaattag

SEQ ID NO: 926303 - DNA, 15 bp, Homo sapiens
aaaatagtgaaatta

SEQ ID NO: 926304 - DNA, 15 bp, Homo sapiens
aaaaatagtgaaatt

SEQ ID NO: 926305 - DNA, 15 bp, Homo sapiens
gaaaaatagtgaaat

SEQ ID NO: 926306 - DNA, 15 bp, Homo sapiens
agaaaaatagtgaaa

SEQ ID NO: 926307 - DNA, 15 bp, Homo sapiens
tagaaaaatagtgaa

SEQ ID NO: 926308 - DNA, 15 bp, Homo sapiens
atagaaaaatagtga

SEQ ID NO: 926309 - DNA, 15 bp, Homo sapiens
aatagaaaaatagtg

SEQ ID NO: 926310 - DNA, 15 bp, Homo sapiens
gaatagaaaaatagt

SEQ ID NO: 926311 - DNA, 15 bp, Homo sapiens
agaatagaaaaatag

SEQ ID NO: 926312 - DNA, 15 bp, Homo sapiens
gagaatagaaaaata

SEQ ID NO: 926313 - DNA, 15 bp, Homo sapiens
ggagaatagaaaaat

SEQ ID NO: 926314 - DNA, 15 bp, Homo sapiens
aggagaatagaaaaa

SEQ ID NO: 926315 - DNA, 15 bp, Homo sapiens
taggagaatagaaaa

SEQ ID NO: 926316 - DNA, 15 bp, Homo sapiens
ataggagaatagaaa

SEQ ID NO: 926317 - DNA, 15 bp, Homo sapiens
tataggagaatagaa

SEQ ID NO: 926318 - DNA, 15 bp, Homo sapiens
ttataggagaataga

SEQ ID NO: 926319 - DNA, 15 bp, Homo sapiens
attataggagaatag

SEQ ID NO: 926320 - DNA, 15 bp, Homo sapiens
cattataggagaata

SEQ ID NO: 926321 - DNA, 15 bp, Homo sapiens
acattataggagaat

SEQ ID NO: 926322 - DNA, 15 bp, Homo sapiens
aacattataggagaa

SEQ ID NO: 926323 - DNA, 15 bp, Homo sapiens
aaacattataggaga

SEQ ID NO: 926324 - DNA, 15 bp, Homo sapiens
gaaacattataggag

SEQ ID NO: 926325 - DNA, 15 bp, Homo sapiens
agaaacattatagga

SEQ ID NO: 926326 - DNA, 15 bp, Homo sapiens
tagaaacattatagg

SEQ ID NO: 926327 - DNA, 15 bp, Homo sapiens
ttagaaacattatag

SEQ ID NO: 926328 - DNA, 15 bp, Homo sapiens
attagaaacattata

SEQ ID NO: 926329 - DNA, 15 bp, Homo sapiens
tattagaaacattat

SEQ ID NO: 926330 - DNA, 15 bp, Homo sapiens
ctattagaaacatta

SEQ ID NO: 926331 - DNA, 15 bp, Homo sapiens
gctattagaaacatt

SEQ ID NO: 926332 - DNA, 15 bp, Homo sapiens
ggctattagaaacat

SEQ ID NO: 926333 - DNA, 15 bp, Homo sapiens
tggctattagaaaca

SEQ ID NO: 926334 - DNA, 15 bp, Homo sapiens
ttggctattagaaac

SEQ ID NO: 926335 - DNA, 15 bp, Homo sapiens
attggctattagaaa

SEQ ID NO: 926336 - DNA, 15 bp, Homo sapiens
tattggctattagaa

SEQ ID NO: 926337 - DNA, 15 bp, Homo sapiens
ttattggctattaga

SEQ ID NO: 926338 - DNA, 15 bp, Homo sapiens
attattggctattag

SEQ ID NO: 926339 - DNA, 15 bp, Homo sapiens
cattattggctatta

SEQ ID NO: 926340 - DNA, 15 bp, Homo sapiens
tcattattggctatt

SEQ ID NO: 926341 - DNA, 15 bp, Homo sapiens
ttcattattggctat

SEQ ID NO: 926342 - DNA, 15 bp, Homo sapiens
gttcattattggcta

SEQ ID NO: 926343 - DNA, 15 bp, Homo sapiens
tgttcattattggct

SEQ ID NO: 926344 - DNA, 15 bp, Homo sapiens
ctgttcattattggc

SEQ ID NO: 926345 - DNA, 15 bp, Homo sapiens
gctgttcattattgg

SEQ ID NO: 926346 - DNA, 15 bp, Homo sapiens
tgctgttcattattg

SEQ ID NO: 926347 - DNA, 15 bp, Homo sapiens
ctgctgttcattatt

SEQ ID NO: 926348 - DNA, 15 bp, Homo sapiens
tctgctgttcattat

SEQ ID NO: 926349 - DNA, 15 bp, Homo sapiens
atctgctgttcatta

SEQ ID NO: 926350 - DNA, 15 bp, Homo sapiens
tatctgctgttcatt

SEQ ID NO: 926351 - DNA, 15 bp, Homo sapiens
atatctgctgttcat

SEQ ID NO: 926352 - DNA, 15 bp, Homo sapiens
tatatctgctgttca

SEQ ID NO: 926353 - DNA, 15 bp, Homo sapiens
ctatatctgctgttc

SEQ ID NO: 926354 - DNA, 15 bp, Homo sapiens
actatatctgctgtt

SEQ ID NO: 926355 - DNA, 15 bp, Homo sapiens
aactatatctgctgt

SEQ ID NO: 926356 - DNA, 15 bp, Homo sapiens
taactatatctgctg

SEQ ID NO: 926357 - DNA, 15 bp, Homo sapiens
ttaactatatctgct

SEQ ID NO: 926358 - DNA, 15 bp, Homo sapiens
attaactatatctgc

SEQ ID NO: 926359 - DNA, 15 bp, Homo sapiens
aattaactatatctg

SEQ ID NO: 926360 - DNA, 15 bp, Homo sapiens
aaattaactatatct

SEQ ID NO: 926361 - DNA, 15 bp, Homo sapiens
caaattaactatatc

SEQ ID NO: 926362 - DNA, 15 bp, Homo sapiens
tcaaattaactatat

SEQ ID NO: 926363 - DNA, 15 bp, Homo sapiens
ttcaaattaactata

SEQ ID NO: 926364 - DNA, 15 bp, Homo sapiens
attcaaattaactat

SEQ ID NO: 926365 - DNA, 15 bp, Homo sapiens
aattcaaattaacta

SEQ ID NO: 926366 - DNA, 15 bp, Homo sapiens
gaattcaaattaact

SEQ ID NO: 926367 - DNA, 15 bp, Homo sapiens
tgaattcaaattaac

SEQ ID NO: 926368 - DNA, 15 bp, Homo sapiens
gtgaattcaaattaa

SEQ ID NO: 926369 - DNA, 15 bp, Homo sapiens
agtgaattcaaatta

SEQ ID NO: 926370 - DNA, 15 bp, Homo sapiens
tagtgaattcaaatt

SEQ ID NO: 926371 - DNA, 15 bp, Homo sapiens
atagtgaattcaaat

SEQ ID NO: 926372 - DNA, 15 bp, Homo sapiens
aatagtgaattcaaa

SEQ ID NO: 926373 - DNA, 15 bp, Homo sapiens
aaatagtgaattcaa

SEQ ID NO: 926374 - DNA, 15 bp, Homo sapiens
taaatagtgaattca

SEQ ID NO: 926375 - DNA, 15 bp, Homo sapiens
ttaaatagtgaattc

SEQ ID NO: 926376 - DNA, 15 bp, Homo sapiens
attaaatagtgaatt

SEQ ID NO: 926377 - DNA, 15 bp, Homo sapiens
aattaaatagtgaat

SEQ ID NO: 926378 - DNA, 15 bp, Homo sapiens
taattaaatagtgaa

SEQ ID NO: 926379 - DNA, 15 bp, Homo sapiens
ataattaaatagtga

SEQ ID NO: 926380 - DNA, 15 bp, Homo sapiens
aataattaaatagtg

SEQ ID NO: 926381 - DNA, 15 bp, Homo sapiens
taataattaaatagt

SEQ ID NO: 926382 - DNA, 15 bp, Homo sapiens
ctaataattaaatag

SEQ ID NO: 926383 - DNA, 15 bp, Homo sapiens
actaataattaaata

SEQ ID NO: 926384 - DNA, 15 bp, Homo sapiens
aactaataattaaat

SEQ ID NO: 926385 - DNA, 15 bp, Homo sapiens
caactaataattaaa

SEQ ID NO: 926386 - DNA, 15 bp, Homo sapiens
ccaactaataattaa

SEQ ID NO: 926387 - DNA, 15 bp, Homo sapiens
accaactaataatta

SEQ ID NO: 926388 - DNA, 15 bp, Homo sapiens
taccaactaataatt

SEQ ID NO: 926389 - DNA, 15 bp, Homo sapiens
gtaccaactaataat

SEQ ID NO: 926390 - DNA, 15 bp, Homo sapiens
ggtaccaactaataa

SEQ ID NO: 926391 - DNA, 15 bp, Homo sapiens
aggtaccaactaata

SEQ ID NO: 926392 - DNA, 15 bp, Homo sapiens
aaggtaccaactaat

SEQ ID NO: 926393 - DNA, 15 bp, Homo sapiens
aaaggtaccaactaa

SEQ ID NO: 926394 - DNA, 15 bp, Homo sapiens
gaaaggtaccaacta

SEQ ID NO: 926395 - DNA, 15 bp, Homo sapiens
cgaaaggtaccaact

SEQ ID NO: 926396 - DNA, 15 bp, Homo sapiens
ccgaaaggtaccaac

SEQ ID NO: 926397 - DNA, 15 bp, Homo sapiens
accgaaaggtaccaa

SEQ ID NO: 926398 - DNA, 15 bp, Homo sapiens
taccgaaaggtacca

SEQ ID NO: 926399 - DNA, 15 bp, Homo sapiens
gtaccgaaaggtacc

SEQ ID NO: 926400 - DNA, 15 bp, Homo sapiens
tgtaccgaaaggtac

SEQ ID NO: 926401 - DNA, 15 bp, Homo sapiens
gtgtaccgaaaggta

SEQ ID NO: 926402 - DNA, 15 bp, Homo sapiens
agtgtaccgaaaggt

SEQ ID NO: 926403 - DNA, 15 bp, Homo sapiens
cagtgtaccgaaagg

SEQ ID NO: 926404 - DNA, 15 bp, Homo sapiens
tcagtgtaccgaaag

SEQ ID NO: 926405 - DNA, 15 bp, Homo sapiens
ttcagtgtaccgaaa

SEQ ID NO: 926406 - DNA, 15 bp, Homo sapiens
attcagtgtaccgaa

SEQ ID NO: 926407 - DNA, 15 bp, Homo sapiens
tattcagtgtaccga

SEQ ID NO: 926408 - DNA, 15 bp, Homo sapiens
atattcagtgtaccg

SEQ ID NO: 926409 - DNA, 15 bp, Homo sapiens
catattcagtgtacc

SEQ ID NO: 926410 - DNA, 15 bp, Homo sapiens
tcatattcagtgtac

SEQ ID NO: 926411 - DNA, 15 bp, Homo sapiens
ttcatattcagtgta

SEQ ID NO: 926412 - DNA, 15 bp, Homo sapiens
tttcatattcagtgt

SEQ ID NO: 926413 - DNA, 15 bp, Homo sapiens
ctttcatattcagtg

SEQ ID NO: 926414 - DNA, 15 bp, Homo sapiens
cctttcatattcagt

SEQ ID NO: 926415 - DNA, 15 bp, Homo sapiens
tcctttcatattcag

SEQ ID NO: 926416 - DNA, 15 bp, Homo sapiens
ttcctttcatattca

SEQ ID NO: 926417 - DNA, 15 bp, Homo sapiens
tttcctttcatattc

SEQ ID NO: 926418 - DNA, 15 bp, Homo sapiens
atttcctttcatatt

SEQ ID NO: 926419 - DNA, 15 bp, Homo sapiens
tatttcctttcatat

SEQ ID NO: 926420 - DNA, 15 bp, Homo sapiens
ttatttcctttcata

SEQ ID NO: 926421 - DNA, 15 bp, Homo sapiens
tttatttcctttcat

SEQ ID NO: 926422 - DNA, 15 bp, Homo sapiens
ttttatttcctttca

SEQ ID NO: 926423 - DNA, 15 bp, Homo sapiens
tttttatttcctttc

SEQ ID NO: 926424 - DNA, 15 bp, Homo sapiens
ctttttatttccttt

SEQ ID NO: 926425 - DNA, 15 bp, Homo sapiens
gctttttatttcctt

SEQ ID NO: 926426 - DNA, 15 bp, Homo sapiens
tgctttttatttcct

SEQ ID NO: 926427 - DNA, 15 bp, Homo sapiens
atgctttttatttcc

SEQ ID NO: 926428 - DNA, 15 bp, Homo sapiens
aatgctttttatttc

SEQ ID NO: 926429 - DNA, 15 bp, Homo sapiens
aaatgctttttattt

SEQ ID NO: 926430 - DNA, 15 bp, Homo sapiens
taaatgctttttatt

SEQ ID NO: 926431 - DNA, 15 bp, Homo sapiens
ttaaatgctttttat

SEQ ID NO: 926432 - DNA, 15 bp, Homo sapiens
attaaatgcttttta

SEQ ID NO: 926433 - DNA, 15 bp, Homo sapiens
aattaaatgcttttt

SEQ ID NO: 926434 - DNA, 15 bp, Homo sapiens
caattaaatgctttt

SEQ ID NO: 926435 - DNA, 15 bp, Homo sapiens
acaattaaatgcttt

SEQ ID NO: 926436 - DNA, 15 bp, Homo sapiens
tacaattaaatgctt

SEQ ID NO: 926437 - DNA, 15 bp, Homo sapiens
ctacaattaaatgct

SEQ ID NO: 926438 - DNA, 15 bp, Homo sapiens
actacaattaaatgc

SEQ ID NO: 926439 - DNA, 15 bp, Homo sapiens
aactacaattaaatg

SEQ ID NO: 926440 - DNA, 15 bp, Homo sapiens
gaactacaattaaat

SEQ ID NO: 926441 - DNA, 15 bp, Homo sapiens
agaactacaattaaa

SEQ ID NO: 926442 - DNA, 15 bp, Homo sapiens
tagaactacaattaa

SEQ ID NO: 926443 - DNA, 15 bp, Homo sapiens
atagaactacaatta

SEQ ID NO: 926444 - DNA, 15 bp, Homo sapiens
catagaactacaatt

SEQ ID NO: 926445 - DNA, 15 bp, Homo sapiens
tcatagaactacaat

SEQ ID NO: 926446 - DNA, 15 bp, Homo sapiens
ctcatagaactacaa

SEQ ID NO: 926447 - DNA, 15 bp, Homo sapiens
gctcatagaactaca

SEQ ID NO: 926448 - DNA, 15 bp, Homo sapiens
tgctcatagaactac

SEQ ID NO: 926449 - DNA, 15 bp, Homo sapiens
ttgctcatagaacta

SEQ ID NO: 926450 - DNA, 15 bp, Homo sapiens
attgctcatagaact

SEQ ID NO: 926451 - DNA, 15 bp, Homo sapiens
tattgctcatagaac

SEQ ID NO: 926452 - DNA, 15 bp, Homo sapiens
atattgctcatagaa

SEQ ID NO: 926453 - DNA, 15 bp, Homo sapiens
tatattgctcataga

SEQ ID NO: 926454 - DNA, 15 bp, Homo sapiens
atatattgctcatag

SEQ ID NO: 926455 - DNA, 15 bp, Homo sapiens
aatatattgctcata

SEQ ID NO: 926456 - DNA, 15 bp, Homo sapiens
gaatatattgctcat

SEQ ID NO: 926457 - DNA, 15 bp, Homo sapiens
agaatatattgctca

SEQ ID NO: 926458 - DNA, 15 bp, Homo sapiens
gagaatatattgctc

SEQ ID NO: 926459 - DNA, 15 bp, Homo sapiens
agagaatatattgct

SEQ ID NO: 926460 - DNA, 15 bp, Homo sapiens
aagagaatatattgc

SEQ ID NO: 926461 - DNA, 15 bp, Homo sapiens
taagagaatatattg

SEQ ID NO: 926462 - DNA, 15 bp, Homo sapiens
ataagagaatatatt

SEQ ID NO: 926463 - DNA, 15 bp, Homo sapiens
tataagagaatatat

SEQ ID NO: 926464 - DNA, 15 bp, Homo sapiens
atataagagaatata

SEQ ID NO: 926465 - DNA, 15 bp, Homo sapiens
catataagagaatat

SEQ ID NO: 926466 - DNA, 15 bp, Homo sapiens
tcatataagagaata

SEQ ID NO: 926467 - DNA, 15 bp, Homo sapiens
atcatataagagaat

SEQ ID NO: 926468 - DNA, 15 bp, Homo sapiens
gatcatataagagaa

SEQ ID NO: 926469 - DNA, 15 bp, Homo sapiens
agatcatataagaga

SEQ ID NO: 926470 - DNA, 15 bp, Homo sapiens
gagatcatataagag

SEQ ID NO: 926471 - DNA, 15 bp, Homo sapiens
agagatcatataaga

SEQ ID NO: 926472 - DNA, 15 bp, Homo sapiens
aagagatcatataag

SEQ ID NO: 926473 - DNA, 15 bp, Homo sapiens
aaagagatcatataa

SEQ ID NO: 926474 - DNA, 15 bp, Homo sapiens
taaagagatcatata

SEQ ID NO: 926475 - DNA, 15 bp, Homo sapiens
ataaagagatcatat

SEQ ID NO: 926476 - DNA, 15 bp, Homo sapiens
aataaagagatcata

SEQ ID NO: 926477 - DNA, 15 bp, Homo sapiens
gaataaagagatcat

SEQ ID NO: 926478 - DNA, 15 bp, Homo sapiens
agaataaagagatca

SEQ ID NO: 926479 - DNA, 15 bp, Homo sapiens
aagaataaagagatc

SEQ ID NO: 926480 - DNA, 15 bp, Homo sapiens
taagaataaagagat

SEQ ID NO: 926481 - DNA, 15 bp, Homo sapiens
gtaagaataaagaga

SEQ ID NO: 926482 - DNA, 15 bp, Homo sapiens
agtaagaataaagag

SEQ ID NO: 926483 - DNA, 15 bp, Homo sapiens
aagtaagaataaaga

SEQ ID NO: 926484 - DNA, 15 bp, Homo sapiens
aaagtaagaataaag

SEQ ID NO: 926485 - DNA, 15 bp, Homo sapiens
aaaagtaagaataaa

SEQ ID NO: 926486 - DNA, 15 bp, Homo sapiens
aaaaagtaagaataa

SEQ ID NO: 926487 - DNA, 15 bp, Homo sapiens
aaaaaagtaagaata

SEQ ID NO: 926488 - DNA, 15 bp, Homo sapiens
caaaaaagtaagaat

SEQ ID NO: 926489 - DNA, 15 bp, Homo sapiens
ccaaaaaagtaagaa

SEQ ID NO: 926490 - DNA, 15 bp, Homo sapiens
accaaaaaagtaaga

SEQ ID NO: 926491 - DNA, 15 bp, Homo sapiens
aaccaaaaaagtaag

SEQ ID NO: 926492 - DNA, 15 bp, Homo sapiens
aaaccaaaaaagtaa

SEQ ID NO: 926493 - DNA, 15 bp, Homo sapiens
aaaaccaaaaaagta

SEQ ID NO: 926494 - DNA, 15 bp, Homo sapiens
taaaaccaaaaaagt

SEQ ID NO: 926495 - DNA, 15 bp, Homo sapiens
ataaaaccaaaaaag

SEQ ID NO: 926496 - DNA, 15 bp, Homo sapiens
aataaaaccaaaaaa

SEQ ID NO: 926497 - DNA, 15 bp, Homo sapiens
aaataaaaccaaaaa

SEQ ID NO: 926498 - DNA, 15 bp, Homo sapiens
aaaataaaaccaaaa

SEQ ID NO: 926499 - DNA, 15 bp, Homo sapiens
caaaataaaaccaaa

SEQ ID NO: 926500 - DNA, 15 bp, Homo sapiens
tcaaaataaaaccaa

SEQ ID NO: 926501 - DNA, 15 bp, Homo sapiens
ttcaaaataaaacca

SEQ ID NO: 926502 - DNA, 15 bp, Homo sapiens
cttcaaaataaaacc

SEQ ID NO: 926503 - DNA, 15 bp, Homo sapiens
acttcaaaataaaac

SEQ ID NO: 926504 - DNA, 15 bp, Homo sapiens
cacttcaaaataaaa

SEQ ID NO: 926505 - DNA, 15 bp, Homo sapiens
gcacttcaaaataaa

SEQ ID NO: 926506 - DNA, 15 bp, Homo sapiens
tgcacttcaaaataa

SEQ ID NO: 926507 - DNA, 15 bp, Homo sapiens
atgcacttcaaaata

SEQ ID NO: 926508 - DNA, 15 bp, Homo sapiens
catgcacttcaaaat

SEQ ID NO: 926509 - DNA, 15 bp, Homo sapiens
acatgcacttcaaaa

SEQ ID NO: 926510 - DNA, 15 bp, Homo sapiens
aacatgcacttcaaa

SEQ ID NO: 926511 - DNA, 15 bp, Homo sapiens
taacatgcacttcaa

SEQ ID NO: 926512 - DNA, 15 bp, Homo sapiens
gtaacatgcacttca

SEQ ID NO: 926513 - DNA, 15 bp, Homo sapiens
tgtaacatgcacttc

SEQ ID NO: 926514 - DNA, 15 bp, Homo sapiens
atgtaacatgcactt

SEQ ID NO: 926515 - DNA, 15 bp, Homo sapiens
tatgtaacatgcact

SEQ ID NO: 926516 - DNA, 15 bp, Homo sapiens
ttatgtaacatgcac

SEQ ID NO: 926517 - DNA, 15 bp, Homo sapiens
attatgtaacatgca

SEQ ID NO: 926518 - DNA, 15 bp, Homo sapiens
gattatgtaacatgc

SEQ ID NO: 926519 - DNA, 15 bp, Homo sapiens
agattatgtaacatg

SEQ ID NO: 926520 - DNA, 15 bp, Homo sapiens
tagattatgtaacat

SEQ ID NO: 926521 - DNA, 15 bp, Homo sapiens
atagattatgtaaca

SEQ ID NO: 926522 - DNA, 15 bp, Homo sapiens
catagattatgtaac

SEQ ID NO: 926523 - DNA, 15 bp, Homo sapiens
tcatagattatgtaa

SEQ ID NO: 926524 - DNA, 15 bp, Homo sapiens
ttcatagattatgta

SEQ ID NO: 926525 - DNA, 15 bp, Homo sapiens
attcatagattatgt

SEQ ID NO: 926526 - DNA, 15 bp, Homo sapiens
gattcatagattatg

SEQ ID NO: 926527 - DNA, 15 bp, Homo sapiens
tgattcatagattat

SEQ ID NO: 926528 - DNA, 15 bp, Homo sapiens
ttgattcatagatta

SEQ ID NO: 926529 - DNA, 15 bp, Homo sapiens
attgattcatagatt

SEQ ID NO: 926530 - DNA, 15 bp, Homo sapiens
aattgattcatagat

SEQ ID NO: 926531 - DNA, 15 bp, Homo sapiens
aaattgattcataga

SEQ ID NO: 926532 - DNA, 15 bp, Homo sapiens
aaaattgattcatag

SEQ ID NO: 926533 - DNA, 15 bp, Homo sapiens
gaaaattgattcata

SEQ ID NO: 926534 - DNA, 15 bp, Homo sapiens
tgaaaattgattcat

SEQ ID NO: 926535 - DNA, 15 bp, Homo sapiens
ctgaaaattgattca

SEQ ID NO: 926536 - DNA, 15 bp, Homo sapiens
actgaaaattgattc

SEQ ID NO: 926537 - DNA, 15 bp, Homo sapiens
aactgaaaattgatt

SEQ ID NO: 926538 - DNA, 15 bp, Homo sapiens
gaactgaaaattgat

SEQ ID NO: 926539 - DNA, 15 bp, Homo sapiens
tgaactgaaaattga

SEQ ID NO: 926540 - DNA, 15 bp, Homo sapiens
atgaactgaaaattg

SEQ ID NO: 926541 - DNA, 15 bp, Homo sapiens
aatgaactgaaaatt

SEQ ID NO: 926542 - DNA, 15 bp, Homo sapiens
caatgaactgaaaat

SEQ ID NO: 926543 - DNA, 15 bp, Homo sapiens
gcaatgaactgaaaa

SEQ ID NO: 926544 - DNA, 15 bp, Homo sapiens
ggcaatgaactgaaa

SEQ ID NO: 926545 - DNA, 15 bp, Homo sapiens
aggcaatgaactgaa

SEQ ID NO: 926546 - DNA, 15 bp, Homo sapiens
aaggcaatgaactga

SEQ ID NO: 926547 - DNA, 15 bp, Homo sapiens
aaaggcaatgaactg

SEQ ID NO: 926548 - DNA, 15 bp, Homo sapiens
taaaggcaatgaact

SEQ ID NO: 926549 - DNA, 15 bp, Homo sapiens
ttaaaggcaatgaac

SEQ ID NO: 926550 - DNA, 15 bp, Homo sapiens
attaaaggcaatgaa

SEQ ID NO: 926551 - DNA, 15 bp, Homo sapiens
cattaaaggcaatga

SEQ ID NO: 926552 - DNA, 15 bp, Homo sapiens
gcattaaaggcaatg

SEQ ID NO: 926553 - DNA, 15 bp, Homo sapiens
tgcattaaaggcaat

SEQ ID NO: 926554 - DNA, 15 bp, Homo sapiens
atgcattaaaggcaa

SEQ ID NO: 926555 - DNA, 15 bp, Homo sapiens
catgcattaaaggca

SEQ ID NO: 926556 - DNA, 15 bp, Homo sapiens
ccatgcattaaaggc

SEQ ID NO: 926557 - DNA, 15 bp, Homo sapiens
accatgcattaaagg

SEQ ID NO: 926558 - DNA, 15 bp, Homo sapiens
aaccatgcattaaag

SEQ ID NO: 926559 - DNA, 15 bp, Homo sapiens
taaccatgcattaaa

SEQ ID NO: 926560 - DNA, 15 bp, Homo sapiens
ttaaccatgcattaa

SEQ ID NO: 926561 - DNA, 15 bp, Homo sapiens
tttaaccatgcatta

SEQ ID NO: 926562 - DNA, 15 bp, Homo sapiens
ctttaaccatgcatt

SEQ ID NO: 926563 - DNA, 15 bp, Homo sapiens
cctttaaccatgcat

SEQ ID NO: 926564 - DNA, 15 bp, Homo sapiens
ccctttaaccatgca

SEQ ID NO: 926565 - DNA, 15 bp, Homo sapiens
accctttaaccatgc

SEQ ID NO: 926566 - DNA, 15 bp, Homo sapiens
aaccctttaaccatg

SEQ ID NO: 926567 - DNA, 15 bp, Homo sapiens
caaccctttaaccat

SEQ ID NO: 926568 - DNA, 15 bp, Homo sapiens
tcaaccctttaacca

SEQ ID NO: 926569 - DNA, 15 bp, Homo sapiens
ttcaaccctttaacc

SEQ ID NO: 926570 - DNA, 15 bp, Homo sapiens
cttcaaccctttaac

SEQ ID NO: 926571 - DNA, 15 bp, Homo sapiens
ccttcaaccctttaa

SEQ ID NO: 926572 - DNA, 15 bp, Homo sapiens
accttcaacccttta

SEQ ID NO: 926573 - DNA, 15 bp, Homo sapiens
taccttcaacccttt

SEQ ID NO: 926574 - DNA, 15 bp, Homo sapiens
ttaccttcaaccctt

SEQ ID NO: 926575 - DNA, 15 bp, Homo sapiens
tttaccttcaaccct

SEQ ID NO: 926576 - DNA, 15 bp, Homo sapiens
atttaccttcaaccc

SEQ ID NO: 926577 - DNA, 15 bp, Homo sapiens
aatttaccttcaacc

SEQ ID NO: 926578 - DNA, 15 bp, Homo sapiens
taatttaccttcaac

SEQ ID NO: 926579 - DNA, 15 bp, Homo sapiens
ctaatttaccttcaa

SEQ ID NO: 926580 - DNA, 15 bp, Homo sapiens
tctaatttaccttca

SEQ ID NO: 926581 - DNA, 15 bp, Homo sapiens
ttctaatttaccttc

SEQ ID NO: 926582 - DNA, 15 bp, Homo sapiens
tttctaatttacctt

SEQ ID NO: 926583 - DNA, 15 bp, Homo sapiens
atttctaatttacct

SEQ ID NO: 926584 - DNA, 15 bp, Homo sapiens
aatttctaatttacc

SEQ ID NO: 926585 - DNA, 15 bp, Homo sapiens
taatttctaatttac

SEQ ID NO: 926586 - DNA, 15 bp, Homo sapiens
gtaatttctaattta

SEQ ID NO: 926587 - DNA, 15 bp, Homo sapiens
agtaatttctaattt

SEQ ID NO: 926588 - DNA, 15 bp, Homo sapiens
aagtaatttctaatt

SEQ ID NO: 926589 - DNA, 15 bp, Homo sapiens
aaagtaatttctaat

SEQ ID NO: 926590 - DNA, 15 bp, Homo sapiens
gaaagtaatttctaa

SEQ ID NO: 926591 - DNA, 15 bp, Homo sapiens
agaaagtaatttcta

SEQ ID NO: 926592 - DNA, 15 bp, Homo sapiens
cagaaagtaatttct

SEQ ID NO: 926593 - DNA, 15 bp, Homo sapiens
acagaaagtaatttc

SEQ ID NO: 926594 - DNA, 15 bp, Homo sapiens
aacagaaagtaattt

SEQ ID NO: 926595 - DNA, 15 bp, Homo sapiens
aaacagaaagtaatt

SEQ ID NO: 926596 - DNA, 15 bp, Homo sapiens
aaaacagaaagtaat

SEQ ID NO: 926597 - DNA, 15 bp, Homo sapiens
taaaacagaaagtaa

SEQ ID NO: 926598 - DNA, 15 bp, Homo sapiens
ttaaaacagaaagta

SEQ ID NO: 926599 - DNA, 15 bp, Homo sapiens
gttaaaacagaaagt

SEQ ID NO: 926600 - DNA, 15 bp, Homo sapiens
ggttaaaacagaaag

SEQ ID NO: 926601 - DNA, 15 bp, Homo sapiens
aggttaaaacagaaa

SEQ ID NO: 926602 - DNA, 15 bp, Homo sapiens
taggttaaaacagaa

SEQ ID NO: 926603 - DNA, 15 bp, Homo sapiens
ctaggttaaaacaga

SEQ ID NO: 926604 - DNA, 15 bp, Homo sapiens
tctaggttaaaacag

SEQ ID NO: 926605 - DNA, 15 bp, Homo sapiens
atctaggttaaaaca

SEQ ID NO: 926606 - DNA, 15 bp, Homo sapiens
gatctaggttaaaac

SEQ ID NO: 926607 - DNA, 15 bp, Homo sapiens
agatctaggttaaaa

SEQ ID NO: 926608 - DNA, 15 bp, Homo sapiens
aagatctaggttaaa

SEQ ID NO: 926609 - DNA, 15 bp, Homo sapiens
caagatctaggttaa

SEQ ID NO: 926610 - DNA, 15 bp, Homo sapiens
tcaagatctaggtta

SEQ ID NO: 926611 - DNA, 15 bp, Homo sapiens
ttcaagatctaggtt

SEQ ID NO: 926612 - DNA, 15 bp, Homo sapiens
attcaagatctaggt

SEQ ID NO: 926613 - DNA, 15 bp, Homo sapiens
aattcaagatctagg

SEQ ID NO: 926614 - DNA, 15 bp, Homo sapiens
aaattcaagatctag

SEQ ID NO: 926615 - DNA, 15 bp, Homo sapiens
caaattcaagatcta

SEQ ID NO: 926616 - DNA, 15 bp, Homo sapiens
tcaaattcaagatct

SEQ ID NO: 926617 - DNA, 15 bp, Homo sapiens
atcaaattcaagatc

SEQ ID NO: 926618 - DNA, 15 bp, Homo sapiens
aatcaaattcaagat

SEQ ID NO: 926619 - DNA, 15 bp, Homo sapiens
taatcaaattcaaga

SEQ ID NO: 926620 - DNA, 15 bp, Homo sapiens
ctaatcaaattcaag

SEQ ID NO: 926621 - DNA, 15 bp, Homo sapiens
actaatcaaattcaa

SEQ ID NO: 926622 - DNA, 15 bp, Homo sapiens
tactaatcaaattca

SEQ ID NO: 926623 - DNA, 15 bp, Homo sapiens
ctactaatcaaattc

SEQ ID NO: 926624 - DNA, 15 bp, Homo sapiens
cctactaatcaaatt

SEQ ID NO: 926625 - DNA, 15 bp, Homo sapiens
acctactaatcaaat

SEQ ID NO: 926626 - DNA, 15 bp, Homo sapiens
cacctactaatcaaa

SEQ ID NO: 926627 - DNA, 15 bp, Homo sapiens
tcacctactaatcaa

SEQ ID NO: 926628 - DNA, 15 bp, Homo sapiens
atcacctactaatca

SEQ ID NO: 926629 - DNA, 15 bp, Homo sapiens
gatcacctactaatc

SEQ ID NO: 926630 - DNA, 15 bp, Homo sapiens
tgatcacctactaat

SEQ ID NO: 926631 - DNA, 15 bp, Homo sapiens
ttgatcacctactaa

SEQ ID NO: 926632 - DNA, 15 bp, Homo sapiens
tttgatcacctacta

SEQ ID NO: 926633 - DNA, 15 bp, Homo sapiens
atttgatcacctact

SEQ ID NO: 926634 - DNA, 15 bp, Homo sapiens
gatttgatcacctac

SEQ ID NO: 926635 - DNA, 15 bp, Homo sapiens
agatttgatcaccta

SEQ ID NO: 926636 - DNA, 15 bp, Homo sapiens
cagatttgatcacct

SEQ ID NO: 926637 - DNA, 15 bp, Homo sapiens
acagatttgatcacc

SEQ ID NO: 926638 - DNA, 15 bp, Homo sapiens
gacagatttgatcac

SEQ ID NO: 926639 - DNA, 15 bp, Homo sapiens
tgacagatttgatca

SEQ ID NO: 926640 - DNA, 15 bp, Homo sapiens
atgacagatttgatc

SEQ ID NO: 926641 - DNA, 15 bp, Homo sapiens
gatgacagatttgat

SEQ ID NO: 926642 - DNA, 15 bp, Homo sapiens
agatgacagatttga

SEQ ID NO: 926643 - DNA, 15 bp, Homo sapiens
aagatgacagatttg

SEQ ID NO: 926644 - DNA, 15 bp, Homo sapiens
gaagatgacagattt

SEQ ID NO: 926645 - DNA, 15 bp, Homo sapiens
tgaagatgacagatt

SEQ ID NO: 926646 - DNA, 15 bp, Homo sapiens
atgaagatgacagat

SEQ ID NO: 926647 - DNA, 15 bp, Homo sapiens
aatgaagatgacaga

SEQ ID NO: 926648 - DNA, 15 bp, Homo sapiens
taatgaagatgacag

SEQ ID NO: 926649 - DNA, 15 bp, Homo sapiens
ttaatgaagatgaca

SEQ ID NO: 926650 - DNA, 15 bp, Homo sapiens
tttaatgaagatgac

SEQ ID NO: 926651 - DNA, 15 bp, Homo sapiens
atttaatgaagatga

SEQ ID NO: 926652 - DNA, 15 bp, Homo sapiens
aatttaatgaagatg

SEQ ID NO: 926653 - DNA, 15 bp, Homo sapiens
taatttaatgaagat

SEQ ID NO: 926654 - DNA, 15 bp, Homo sapiens
ataatttaatgaaga

SEQ ID NO: 926655 - DNA, 15 bp, Homo sapiens
aataatttaatgaag

SEQ ID NO: 926656 - DNA, 15 bp, Homo sapiens
gaataatttaatgaa

SEQ ID NO: 926657 - DNA, 15 bp, Homo sapiens
tgaataatttaatga

SEQ ID NO: 926658 - DNA, 15 bp, Homo sapiens
ctgaataatttaatg

SEQ ID NO: 926659 - DNA, 15 bp, Homo sapiens
tctgaataatttaat

SEQ ID NO: 926660 - DNA, 15 bp, Homo sapiens
ttctgaataatttaa

SEQ ID NO: 926661 - DNA, 15 bp, Homo sapiens
tttctgaataattta

SEQ ID NO: 926662 - DNA, 15 bp, Homo sapiens
ttttctgaataattt

SEQ ID NO: 926663 - DNA, 15 bp, Homo sapiens
attttctgaataatt

SEQ ID NO: 926664 - DNA, 15 bp, Homo sapiens
tattttctgaataat

SEQ ID NO: 926665 - DNA, 15 bp, Homo sapiens
ttattttctgaataa

SEQ ID NO: 926666 - DNA, 15 bp, Homo sapiens
attattttctgaata

SEQ ID NO: 926667 - DNA, 15 bp, Homo sapiens
cattattttctgaat

SEQ ID NO: 926668 - DNA, 15 bp, Homo sapiens
acattattttctgaa

SEQ ID NO: 926669 - DNA, 15 bp, Homo sapiens
tacattattttctga

SEQ ID NO: 926670 - DNA, 15 bp, Homo sapiens
ttacattattttctg

SEQ ID NO: 926671 - DNA, 15 bp, Homo sapiens
tttacattattttct

SEQ ID NO: 926672 - DNA, 15 bp, Homo sapiens
gtttacattattttc

SEQ ID NO: 926673 - DNA, 15 bp, Homo sapiens
agtttacattatttt

SEQ ID NO: 926674 - DNA, 15 bp, Homo sapiens
cagtttacattattt

SEQ ID NO: 926675 - DNA, 15 bp, Homo sapiens
tcagtttacattatt

SEQ ID NO: 926676 - DNA, 15 bp, Homo sapiens
ttcagtttacattat

SEQ ID NO: 926677 - DNA, 15 bp, Homo sapiens
attcagtttacatta

SEQ ID NO: 926678 - DNA, 15 bp, Homo sapiens
cattcagtttacatt

SEQ ID NO: 926679 - DNA, 15 bp, Homo sapiens
acattcagtttacat

SEQ ID NO: 926680 - DNA, 15 bp, Homo sapiens
cacattcagtttaca

SEQ ID NO: 926681 - DNA, 15 bp, Homo sapiens
acacattcagtttac

SEQ ID NO: 926682 - DNA, 15 bp, Homo sapiens
aacacattcagttta

SEQ ID NO: 926683 - DNA, 15 bp, Homo sapiens
aaacacattcagttt

SEQ ID NO: 926684 - DNA, 15 bp, Homo sapiens
aaaacacattcagtt

SEQ ID NO: 926685 - DNA, 15 bp, Homo sapiens
gaaaacacattcagt

SEQ ID NO: 926686 - DNA, 15 bp, Homo sapiens
tgaaaacacattcag

SEQ ID NO: 926687 - DNA, 15 bp, Homo sapiens
atgaaaacacattca

SEQ ID NO: 926688 - DNA, 15 bp, Homo sapiens
aatgaaaacacattc

SEQ ID NO: 926689 - DNA, 15 bp, Homo sapiens
aaatgaaaacacatt

SEQ ID NO: 926690 - DNA, 15 bp, Homo sapiens
aaaatgaaaacacat

SEQ ID NO: 926691 - DNA, 15 bp, Homo sapiens
taaaatgaaaacaca

SEQ ID NO: 926692 - DNA, 15 bp, Homo sapiens
ctaaaatgaaaacac

SEQ ID NO: 926693 - DNA, 15 bp, Homo sapiens
actaaaatgaaaaca

SEQ ID NO: 926694 - DNA, 15 bp, Homo sapiens
aactaaaatgaaaac

SEQ ID NO: 926695 - DNA, 15 bp, Homo sapiens
aaactaaaatgaaaa

SEQ ID NO: 926696 - DNA, 15 bp, Homo sapiens
aaaactaaaatgaaa

SEQ ID NO: 926697 - DNA, 15 bp, Homo sapiens
gaaaactaaaatgaa

SEQ ID NO: 926698 - DNA, 15 bp, Homo sapiens
tgaaaactaaaatga

SEQ ID NO: 926699 - DNA, 15 bp, Homo sapiens
atgaaaactaaaatg

SEQ ID NO: 926700 - DNA, 15 bp, Homo sapiens
gatgaaaactaaaat

SEQ ID NO: 926701 - DNA, 15 bp, Homo sapiens
agatgaaaactaaaa

SEQ ID NO: 926702 - DNA, 15 bp, Homo sapiens
tagatgaaaactaaa

SEQ ID NO: 926703 - DNA, 15 bp, Homo sapiens
ttagatgaaaactaa

SEQ ID NO: 926704 - DNA, 15 bp, Homo sapiens
tttagatgaaaacta

SEQ ID NO: 926705 - DNA, 15 bp, Homo sapiens
atttagatgaaaact

SEQ ID NO: 926706 - DNA, 15 bp, Homo sapiens
tatttagatgaaaac

SEQ ID NO: 926707 - DNA, 15 bp, Homo sapiens
ttatttagatgaaaa

SEQ ID NO: 926708 - DNA, 15 bp, Homo sapiens
tttatttagatgaaa

SEQ ID NO: 926709 - DNA, 15 bp, Homo sapiens
gtttatttagatgaa

SEQ ID NO: 926710 - DNA, 15 bp, Homo sapiens
agtttatttagatga

SEQ ID NO: 926711 - DNA, 15 bp, Homo sapiens
cagtttatttagatg

SEQ ID NO: 926712 - DNA, 15 bp, Homo sapiens
gcagtttatttagat

SEQ ID NO: 926713 - DNA, 15 bp, Homo sapiens
tgcagtttatttaga

SEQ ID NO: 926714 - DNA, 15 bp, Homo sapiens
ttgcagtttatttag

SEQ ID NO: 926715 - DNA, 15 bp, Homo sapiens
tttgcagtttattta

SEQ ID NO: 926716 - DNA, 15 bp, Homo sapiens
atttgcagtttattt

SEQ ID NO: 926717 - DNA, 15 bp, Homo sapiens
tatttgcagtttatt

SEQ ID NO: 926718 - DNA, 15 bp, Homo sapiens
gtatttgcagtttat

SEQ ID NO: 926719 - DNA, 15 bp, Homo sapiens
tgtatttgcagttta

SEQ ID NO: 926720 - DNA, 15 bp, Homo sapiens
atgtatttgcagttt

SEQ ID NO: 926721 - DNA, 15 bp, Homo sapiens
aatgtatttgcagtt

SEQ ID NO: 926722 - DNA, 15 bp, Homo sapiens
aaatgtatttgcagt

SEQ ID NO: 926723 - DNA, 15 bp, Homo sapiens
taaatgtatttgcag

SEQ ID NO: 926724 - DNA, 15 bp, Homo sapiens
ttaaatgtatttgca

SEQ ID NO: 926725 - DNA, 15 bp, Homo sapiens
tttaaatgtatttgc

SEQ ID NO: 926726 - DNA, 15 bp, Homo sapiens
ttttaaatgtatttg

SEQ ID NO: 926727 - DNA, 15 bp, Homo sapiens
attttaaatgtattt

SEQ ID NO: 926728 - DNA, 15 bp, Homo sapiens
tattttaaatgtatt

SEQ ID NO: 926729 - DNA, 15 bp, Homo sapiens
atattttaaatgtat

SEQ ID NO: 926730 - DNA, 15 bp, Homo sapiens
tatattttaaatgta

SEQ ID NO: 926731 - DNA, 15 bp, Homo sapiens
gtatattttaaatgt

SEQ ID NO: 926732 - DNA, 15 bp, Homo sapiens
tgtatattttaaatg

SEQ ID NO: 926733 - DNA, 15 bp, Homo sapiens
atgtatattttaaat

SEQ ID NO: 926734 - DNA, 15 bp, Homo sapiens
tatgtatattttaaa

SEQ ID NO: 926735 - DNA, 15 bp, Homo sapiens
ttatgtatattttaa

SEQ ID NO: 926736 - DNA, 15 bp, Homo sapiens
tttatgtatatttta

SEQ ID NO: 926737 - DNA, 15 bp, Homo sapiens
ctttatgtatatttt

SEQ ID NO: 926738 - DNA, 15 bp, Homo sapiens
tctttatgtatattt

SEQ ID NO: 926739 - DNA, 15 bp, Homo sapiens
ttctttatgtatatt

SEQ ID NO: 926740 - DNA, 15 bp, Homo sapiens
cttctttatgtatat

SEQ ID NO: 926741 - DNA, 15 bp, Homo sapiens
acttctttatgtata

SEQ ID NO: 926742 - DNA, 15 bp, Homo sapiens
aacttctttatgtat

SEQ ID NO: 926743 - DNA, 15 bp, Homo sapiens
aaacttctttatgta

SEQ ID NO: 926744 - DNA, 15 bp, Homo sapiens
aaaacttctttatgt

SEQ ID NO: 926745 - DNA, 15 bp, Homo sapiens
aaaaacttctttatg

SEQ ID NO: 926746 - DNA, 15 bp, Homo sapiens
gaaaaacttctttat

SEQ ID NO: 926747 - DNA, 15 bp, Homo sapiens
tgaaaaacttcttta

SEQ ID NO: 926748 - DNA, 15 bp, Homo sapiens
ttgaaaaacttcttt

SEQ ID NO: 926749 - DNA, 15 bp, Homo sapiens
cttgaaaaacttctt

SEQ ID NO: 926750 - DNA, 15 bp, Homo sapiens
acttgaaaaacttct

SEQ ID NO: 926751 - DNA, 15 bp, Homo sapiens
tacttgaaaaacttc

SEQ ID NO: 926752 - DNA, 15 bp, Homo sapiens
ttacttgaaaaactt

SEQ ID NO: 926753 - DNA, 15 bp, Homo sapiens
tttacttgaaaaact

SEQ ID NO: 926754 - DNA, 15 bp, Homo sapiens
ttttacttgaaaaac

SEQ ID NO: 926755 - DNA, 15 bp, Homo sapiens
gttttacttgaaaaa

SEQ ID NO: 926756 - DNA, 15 bp, Homo sapiens
agttttacttgaaaa

SEQ ID NO: 926757 - DNA, 15 bp, Homo sapiens
cagttttacttgaaa

SEQ ID NO: 926758 - DNA, 15 bp, Homo sapiens
acagttttacttgaa

SEQ ID NO: 926759 - DNA, 15 bp, Homo sapiens
tacagttttacttga

SEQ ID NO: 926760 - DNA, 15 bp, Homo sapiens
gtacagttttacttg

SEQ ID NO: 926761 - DNA, 15 bp, Homo sapiens
tgtacagttttactt

SEQ ID NO: 926762 - DNA, 15 bp, Homo sapiens
atgtacagttttact

SEQ ID NO: 926763 - DNA, 15 bp, Homo sapiens
aatgtacagttttac

SEQ ID NO: 926764 - DNA, 15 bp, Homo sapiens
aaatgtacagtttta

SEQ ID NO: 926765 - DNA, 15 bp, Homo sapiens
aaaatgtacagtttt

SEQ ID NO: 926766 - DNA, 15 bp, Homo sapiens
aaaaatgtacagttt

SEQ ID NO: 926767 - DNA, 15 bp, Homo sapiens
taaaaatgtacagtt

SEQ ID NO: 926768 - DNA, 15 bp, Homo sapiens
ttaaaaatgtacagt

SEQ ID NO: 926769 - DNA, 15 bp, Homo sapiens
attaaaaatgtacag

SEQ ID NO: 926770 - DNA, 15 bp, Homo sapiens
gattaaaaatgtaca

SEQ ID NO: 926771 - DNA, 15 bp, Homo sapiens
tgattaaaaatgtac

SEQ ID NO: 926772 - DNA, 15 bp, Homo sapiens
atgattaaaaatgta

SEQ ID NO: 926773 - DNA, 15 bp, Homo sapiens
aatgattaaaaatgt

SEQ ID NO: 926774 - DNA, 15 bp, Homo sapiens
aaatgattaaaaatg

SEQ ID NO: 926775 - DNA, 15 bp, Homo sapiens
gaaatgattaaaaat

SEQ ID NO: 926776 - DNA, 15 bp, Homo sapiens
tgaaatgattaaaaa

SEQ ID NO: 926777 - DNA, 15 bp, Homo sapiens
ctgaaatgattaaaa

SEQ ID NO: 926778 - DNA, 15 bp, Homo sapiens
cctgaaatgattaaa

SEQ ID NO: 926779 - DNA, 15 bp, Homo sapiens
tcctgaaatgattaa

SEQ ID NO: 926780 - DNA, 15 bp, Homo sapiens
ttcctgaaatgatta

SEQ ID NO: 926781 - DNA, 15 bp, Homo sapiens
tttcctgaaatgatt

SEQ ID NO: 926782 - DNA, 15 bp, Homo sapiens
gtttcctgaaatgat

SEQ ID NO: 926783 - DNA, 15 bp, Homo sapiens
cgtttcctgaaatga

SEQ ID NO: 926784 - DNA, 15 bp, Homo sapiens
acgtttcctgaaatg

SEQ ID NO: 926785 - DNA, 15 bp, Homo sapiens
tacgtttcctgaaat

SEQ ID NO: 926786 - DNA, 15 bp, Homo sapiens
ctacgtttcctgaaa

SEQ ID NO: 926787 - DNA, 15 bp, Homo sapiens
tctacgtttcctgaa

SEQ ID NO: 926788 - DNA, 15 bp, Homo sapiens
atctacgtttcctga

SEQ ID NO: 926789 - DNA, 15 bp, Homo sapiens
aatctacgtttcctg

SEQ ID NO: 926790 - DNA, 15 bp, Homo sapiens
aaatctacgtttcct

SEQ ID NO: 926791 - DNA, 15 bp, Homo sapiens
aaaatctacgtttcc

SEQ ID NO: 926792 - DNA, 15 bp, Homo sapiens
gaaaatctacgtttc

SEQ ID NO: 926793 - DNA, 15 bp, Homo sapiens
agaaaatctacgttt

SEQ ID NO: 926794 - DNA, 15 bp, Homo sapiens
aagaaaatctacgtt

SEQ ID NO: 926795 - DNA, 15 bp, Homo sapiens
gaagaaaatctacgt

SEQ ID NO: 926796 - DNA, 15 bp, Homo sapiens
tgaagaaaatctacg

SEQ ID NO: 926797 - DNA, 15 bp, Homo sapiens
ctgaagaaaatctac

SEQ ID NO: 926798 - DNA, 15 bp, Homo sapiens
actgaagaaaatcta

SEQ ID NO: 926799 - DNA, 15 bp, Homo sapiens
tactgaagaaaatct

SEQ ID NO: 926800 - DNA, 15 bp, Homo sapiens
ttactgaagaaaatc

SEQ ID NO: 926801 - DNA, 15 bp, Homo sapiens
attactgaagaaaat

SEQ ID NO: 926802 - DNA, 15 bp, Homo sapiens
aattactgaagaaaa

SEQ ID NO: 926803 - DNA, 15 bp, Homo sapiens
aaattactgaagaaa

SEQ ID NO: 926804 - DNA, 15 bp, Homo sapiens
aaaattactgaagaa

SEQ ID NO: 926805 - DNA, 15 bp, Homo sapiens
taaaattactgaaga

SEQ ID NO: 926806 - DNA, 15 bp, Homo sapiens
ttaaaattactgaag

SEQ ID NO: 926807 - DNA, 15 bp, Homo sapiens
cttaaaattactgaa

SEQ ID NO: 926808 - DNA, 15 bp, Homo sapiens
tcttaaaattactga

SEQ ID NO: 926809 - DNA, 15 bp, Homo sapiens
atcttaaaattactg

SEQ ID NO: 926810 - DNA, 15 bp, Homo sapiens
aatcttaaaattact

SEQ ID NO: 926811 - DNA, 15 bp, Homo sapiens
aaatcttaaaattac

SEQ ID NO: 926812 - DNA, 15 bp, Homo sapiens
caaatcttaaaatta

SEQ ID NO: 926813 - DNA, 15 bp, Homo sapiens
acaaatcttaaaatt

SEQ ID NO: 926814 - DNA, 15 bp, Homo sapiens
gacaaatcttaaaat

SEQ ID NO: 926815 - DNA, 15 bp, Homo sapiens
tgacaaatcttaaaa

SEQ ID NO: 926816 - DNA, 15 bp, Homo sapiens
atgacaaatcttaaa

SEQ ID NO: 926817 - DNA, 15 bp, Homo sapiens
aatgacaaatcttaa

SEQ ID NO: 926818 - DNA, 15 bp, Homo sapiens
aaatgacaaatctta

SEQ ID NO: 926819 - DNA, 15 bp, Homo sapiens
taaatgacaaatctt

SEQ ID NO: 926820 - DNA, 15 bp, Homo sapiens
ataaatgacaaatct

SEQ ID NO: 926821 - DNA, 15 bp, Homo sapiens
cataaatgacaaatc

SEQ ID NO: 926822 - DNA, 15 bp, Homo sapiens
acataaatgacaaat

SEQ ID NO: 926823 - DNA, 15 bp, Homo sapiens
cacataaatgacaaa

SEQ ID NO: 926824 - DNA, 15 bp, Homo sapiens
tcacataaatgacaa

SEQ ID NO: 926825 - DNA, 15 bp, Homo sapiens
ttcacataaatgaca

SEQ ID NO: 926826 - DNA, 15 bp, Homo sapiens
attcacataaatgac

SEQ ID NO: 926827 - DNA, 15 bp, Homo sapiens
aattcacataaatga

SEQ ID NO: 926828 - DNA, 15 bp, Homo sapiens
caattcacataaatg

SEQ ID NO: 926829 - DNA, 15 bp, Homo sapiens
gcaattcacataaat

SEQ ID NO: 926830 - DNA, 15 bp, Homo sapiens
ggcaattcacataaa

SEQ ID NO: 926831 - DNA, 15 bp, Homo sapiens
tggcaattcacataa

SEQ ID NO: 926832 - DNA, 15 bp, Homo sapiens
atggcaattcacata

SEQ ID NO: 926833 - DNA, 15 bp, Homo sapiens
aatggcaattcacat

SEQ ID NO: 926834 - DNA, 15 bp, Homo sapiens
caatggcaattcaca

SEQ ID NO: 926835 - DNA, 15 bp, Homo sapiens
tcaatggcaattcac

SEQ ID NO: 926836 - DNA, 15 bp, Homo sapiens
ttcaatggcaattca

SEQ ID NO: 926837 - DNA, 15 bp, Homo sapiens
attcaatggcaattc

SEQ ID NO: 926838 - DNA, 15 bp, Homo sapiens
aattcaatggcaatt

SEQ ID NO: 926839 - DNA, 15 bp, Homo sapiens
taattcaatggcaat

SEQ ID NO: 926840 - DNA, 15 bp, Homo sapiens
gtaattcaatggcaa

SEQ ID NO: 926841 - DNA, 15 bp, Homo sapiens
agtaattcaatggca

SEQ ID NO: 926842 - DNA, 15 bp, Homo sapiens
aagtaattcaatggc

SEQ ID NO: 926843 - DNA, 15 bp, Homo sapiens
taagtaattcaatgg

SEQ ID NO: 926844 - DNA, 15 bp, Homo sapiens
ttaagtaattcaatg

SEQ ID NO: 926845 - DNA, 15 bp, Homo sapiens
attaagtaattcaat

SEQ ID NO: 926846 - DNA, 15 bp, Homo sapiens
aattaagtaattcaa

SEQ ID NO: 926847 - DNA, 15 bp, Homo sapiens
aaattaagtaattca

SEQ ID NO: 926848 - DNA, 15 bp, Homo sapiens
taaattaagtaattc

SEQ ID NO: 926849 - DNA, 15 bp, Homo sapiens
ttaaattaagtaatt

SEQ ID NO: 926850 - DNA, 15 bp, Homo sapiens
tttaaattaagtaat

SEQ ID NO: 926851 - DNA, 15 bp, Homo sapiens
ttttaaattaagtaa

SEQ ID NO: 926852 - DNA, 15 bp, Homo sapiens
attttaaattaagta

SEQ ID NO: 926853 - DNA, 15 bp, Homo sapiens
tattttaaattaagt

SEQ ID NO: 926854 - DNA, 15 bp, Homo sapiens
gtattttaaattaag

SEQ ID NO: 926855 - DNA, 15 bp, Homo sapiens
agtattttaaattaa

SEQ ID NO: 926856 - DNA, 15 bp, Homo sapiens
gagtattttaaatta

SEQ ID NO: 926857 - DNA, 15 bp, Homo sapiens
tgagtattttaaatt

SEQ ID NO: 926858 - DNA, 15 bp, Homo sapiens
gtgagtattttaaat

SEQ ID NO: 926859 - DNA, 15 bp, Homo sapiens
ggtgagtattttaaa

SEQ ID NO: 926860 - DNA, 15 bp, Homo sapiens
aggtgagtattttaa

SEQ ID NO: 926861 - DNA, 15 bp, Homo sapiens
aaggtgagtatttta

SEQ ID NO: 926862 - DNA, 15 bp, Homo sapiens
taaggtgagtatttt

SEQ ID NO: 926863 - DNA, 15 bp, Homo sapiens
ttaaggtgagtattt

SEQ ID NO: 926864 - DNA, 15 bp, Homo sapiens
attaaggtgagtatt

SEQ ID NO: 926865 - DNA, 15 bp, Homo sapiens
gattaaggtgagtat

SEQ ID NO: 926866 - DNA, 15 bp, Homo sapiens
ggattaaggtgagta

SEQ ID NO: 926867 - DNA, 15 bp, Homo sapiens
aggattaaggtgagt

SEQ ID NO: 926868 - DNA, 15 bp, Homo sapiens
gaggattaaggtgag

SEQ ID NO: 926869 - DNA, 15 bp, Homo sapiens
agaggattaaggtga

SEQ ID NO: 926870 - DNA, 15 bp, Homo sapiens
aagaggattaaggtg

SEQ ID NO: 926871 - DNA, 15 bp, Homo sapiens
caagaggattaaggt

SEQ ID NO: 926872 - DNA, 15 bp, Homo sapiens
tcaagaggattaagg

SEQ ID NO: 926873 - DNA, 15 bp, Homo sapiens
ttcaagaggattaag

SEQ ID NO: 926874 - DNA, 15 bp, Homo sapiens
cttcaagaggattaa

SEQ ID NO: 926875 - DNA, 15 bp, Homo sapiens
tcttcaagaggatta

SEQ ID NO: 926876 - DNA, 15 bp, Homo sapiens
ctcttcaagaggatt

SEQ ID NO: 926877 - DNA, 15 bp, Homo sapiens
actcttcaagaggat

SEQ ID NO: 926878 - DNA, 15 bp, Homo sapiens
tactcttcaagagga

SEQ ID NO: 926879 - DNA, 15 bp, Homo sapiens
ttactcttcaagagg

SEQ ID NO: 926880 - DNA, 15 bp, Homo sapiens
tttactcttcaagag

SEQ ID NO: 926881 - DNA, 15 bp, Homo sapiens
ttttactcttcaaga

SEQ ID NO: 926882 - DNA, 15 bp, Homo sapiens
tttttactcttcaag

SEQ ID NO: 926883 - DNA, 15 bp, Homo sapiens
atttttactcttcaa

SEQ ID NO: 926884 - DNA, 15 bp, Homo sapiens
aatttttactcttca

SEQ ID NO: 926885 - DNA, 15 bp, Homo sapiens
aaatttttactcttc

SEQ ID NO: 926886 - DNA, 15 bp, Homo sapiens
aaaatttttactctt

SEQ ID NO: 926887 - DNA, 15 bp, Homo sapiens
aaaaatttttactct

SEQ ID NO: 926888 - DNA, 15 bp, Homo sapiens
gaaaaatttttactc

SEQ ID NO: 926889 - DNA, 15 bp, Homo sapiens
agaaaaatttttact

SEQ ID NO: 926890 - DNA, 15 bp, Homo sapiens
cagaaaaatttttac

SEQ ID NO: 926891 - DNA, 15 bp, Homo sapiens
acagaaaaattttta

SEQ ID NO: 926892 - DNA, 15 bp, Homo sapiens
aacagaaaaattttt

SEQ ID NO: 926893 - DNA, 15 bp, Homo sapiens
aaacagaaaaatttt

SEQ ID NO: 926894 - DNA, 15 bp, Homo sapiens
aaaacagaaaaattt

SEQ ID NO: 926895 - DNA, 15 bp, Homo sapiens
aaaaacagaaaaatt

SEQ ID NO: 926896 - DNA, 15 bp, Homo sapiens
aaaaaacagaaaaat

SEQ ID NO: 926897 - DNA, 15 bp, Homo sapiens
aaaaaaacagaaaaa

SEQ ID NO: 926898 - DNA, 15 bp, Homo sapiens
gaaaaaaacagaaaa

SEQ ID NO: 926899 - DNA, 15 bp, Homo sapiens
agaaaaaaacagaaa

SEQ ID NO: 926900 - DNA, 15 bp, Homo sapiens
gagaaaaaaacagaa

SEQ ID NO: 926901 - DNA, 15 bp, Homo sapiens
agagaaaaaaacaga

SEQ ID NO: 926902 - DNA, 15 bp, Homo sapiens
aagagaaaaaaacag

SEQ ID NO: 926903 - DNA, 15 bp, Homo sapiens
aaagagaaaaaaaca

SEQ ID NO: 926904 - DNA, 15 bp, Homo sapiens
caaagagaaaaaaac

SEQ ID NO: 926905 - DNA, 15 bp, Homo sapiens
acaaagagaaaaaaa

SEQ ID NO: 926906 - DNA, 15 bp, Homo sapiens
aacaaagagaaaaaa

SEQ ID NO: 926907 - DNA, 15 bp, Homo sapiens
aaacaaagagaaaaa

SEQ ID NO: 926908 - DNA, 15 bp, Homo sapiens
aaaacaaagagaaaa

SEQ ID NO: 926909 - DNA, 15 bp, Homo sapiens
taaaacaaagagaaa

SEQ ID NO: 926910 - DNA, 15 bp, Homo sapiens
ttaaaacaaagagaa

SEQ ID NO: 926911 - DNA, 15 bp, Homo sapiens
attaaaacaaagaga

SEQ ID NO: 926912 - DNA, 15 bp, Homo sapiens
tattaaaacaaagag

SEQ ID NO: 926913 - DNA, 15 bp, Homo sapiens
ttattaaaacaaaga

SEQ ID NO: 926914 - DNA, 15 bp, Homo sapiens
cttattaaaacaaag

SEQ ID NO: 926915 - DNA, 15 bp, Homo sapiens
gcttattaaaacaaa

SEQ ID NO: 926916 - DNA, 15 bp, Homo sapiens
agcttattaaaacaa

SEQ ID NO: 926917 - DNA, 15 bp, Homo sapiens
cagcttattaaaaca

SEQ ID NO: 926918 - DNA, 15 bp, Homo sapiens
gcagcttattaaaac

SEQ ID NO: 926919 - DNA, 15 bp, Homo sapiens
cgcagcttattaaaa

SEQ ID NO: 926920 - DNA, 15 bp, Homo sapiens
ccgcagcttattaaa

SEQ ID NO: 926921 - DNA, 15 bp, Homo sapiens
tccgcagcttattaa

SEQ ID NO: 926922 - DNA, 15 bp, Homo sapiens
atccgcagcttatta

SEQ ID NO: 926923 - DNA, 15 bp, Homo sapiens
aatccgcagcttatt

SEQ ID NO: 926924 - DNA, 15 bp, Homo sapiens
aaatccgcagcttat

SEQ ID NO: 926925 - DNA, 15 bp, Homo sapiens
aaaatccgcagctta

SEQ ID NO: 926926 - DNA, 15 bp, Homo sapiens
taaaatccgcagctt

SEQ ID NO: 926927 - DNA, 15 bp, Homo sapiens
ataaaatccgcagct

SEQ ID NO: 926928 - DNA, 15 bp, Homo sapiens
tataaaatccgcagc

SEQ ID NO: 926929 - DNA, 15 bp, Homo sapiens
atataaaatccgcag

SEQ ID NO: 926930 - DNA, 15 bp, Homo sapiens
aatataaaatccgca

SEQ ID NO: 926931 - DNA, 15 bp, Homo sapiens
gaatataaaatccgc

SEQ ID NO: 926932 - DNA, 15 bp, Homo sapiens
cgaatataaaatccg

SEQ ID NO: 926933 - DNA, 15 bp, Homo sapiens
acgaatataaaatcc

SEQ ID NO: 926934 - DNA, 15 bp, Homo sapiens
tacgaatataaaatc

SEQ ID NO: 926935 - DNA, 15 bp, Homo sapiens
ttacgaatataaaat

SEQ ID NO: 926936 - DNA, 15 bp, Homo sapiens
attacgaatataaaa

SEQ ID NO: 926937 - DNA, 15 bp, Homo sapiens
aattacgaatataaa

SEQ ID NO: 926938 - DNA, 15 bp, Homo sapiens
aaattacgaatataa

SEQ ID NO: 926939 - DNA, 15 bp, Homo sapiens
taaattacgaatata

SEQ ID NO: 926940 - DNA, 15 bp, Homo sapiens
ataaattacgaatat

SEQ ID NO: 926941 - DNA, 15 bp, Homo sapiens
aataaattacgaata

SEQ ID NO: 926942 - DNA, 15 bp, Homo sapiens
caataaattacgaat

SEQ ID NO: 926943 - DNA, 15 bp, Homo sapiens
tcaataaattacgaa

SEQ ID NO: 926944 - DNA, 15 bp, Homo sapiens
ctcaataaattacga

SEQ ID NO: 926945 - DNA, 15 bp, Homo sapiens
actcaataaattacg

SEQ ID NO: 926946 - DNA, 15 bp, Homo sapiens
aactcaataaattac

SEQ ID NO: 926947 - DNA, 15 bp, Homo sapiens
caactcaataaatta

SEQ ID NO: 926948 - DNA, 15 bp, Homo sapiens
ccaactcaataaatt

SEQ ID NO: 926949 - DNA, 15 bp, Homo sapiens
cccaactcaataaat

SEQ ID NO: 926950 - DNA, 15 bp, Homo sapiens
gcccaactcaataaa

SEQ ID NO: 926951 - DNA, 15 bp, Homo sapiens
ggcccaactcaataa

SEQ ID NO: 926952 - DNA, 15 bp, Homo sapiens
aggcccaactcaata

SEQ ID NO: 926953 - DNA, 15 bp, Homo sapiens
gaggcccaactcaat

SEQ ID NO: 926954 - DNA, 15 bp, Homo sapiens
agaggcccaactcaa

SEQ ID NO: 926955 - DNA, 15 bp, Homo sapiens
tagaggcccaactca

SEQ ID NO: 926956 - DNA, 15 bp, Homo sapiens
ttagaggcccaactc

SEQ ID NO: 926957 - DNA, 15 bp, Homo sapiens
tttagaggcccaact

SEQ ID NO: 926958 - DNA, 15 bp, Homo sapiens
ttttagaggcccaac

SEQ ID NO: 926959 - DNA, 15 bp, Homo sapiens
attttagaggcccaa

SEQ ID NO: 926960 - DNA, 15 bp, Homo sapiens
aattttagaggccca

SEQ ID NO: 926961 - DNA, 15 bp, Homo sapiens
gaattttagaggccc

SEQ ID NO: 926962 - DNA, 15 bp, Homo sapiens
ggaattttagaggcc

SEQ ID NO: 926963 - DNA, 15 bp, Homo sapiens
tggaattttagaggc

SEQ ID NO: 926964 - DNA, 15 bp, Homo sapiens
ctggaattttagagg

SEQ ID NO: 926965 - DNA, 15 bp, Homo sapiens
actggaattttagag

SEQ ID NO: 926966 - DNA, 15 bp, Homo sapiens
aactggaattttaga

SEQ ID NO: 926967 - DNA, 15 bp, Homo sapiens
aaactggaattttag

SEQ ID NO: 926968 - DNA, 15 bp, Homo sapiens
aaaactggaatttta

SEQ ID NO: 926969 - DNA, 15 bp, Homo sapiens
caaaactggaatttt

SEQ ID NO: 926970 - DNA, 15 bp, Homo sapiens
acaaaactggaattt

SEQ ID NO: 926971 - DNA, 15 bp, Homo sapiens
tacaaaactggaatt

SEQ ID NO: 926972 - DNA, 15 bp, Homo sapiens
gtacaaaactggaat

SEQ ID NO: 926973 - DNA, 15 bp, Homo sapiens
agtacaaaactggaa

SEQ ID NO: 926974 - DNA, 15 bp, Homo sapiens
aagtacaaaactgga

SEQ ID NO: 926975 - DNA, 15 bp, Homo sapiens
taagtacaaaactgg

SEQ ID NO: 926976 - DNA, 15 bp, Homo sapiens
ttaagtacaaaactg

SEQ ID NO: 926977 - DNA, 15 bp, Homo sapiens
gttaagtacaaaact

SEQ ID NO: 926978 - DNA, 15 bp, Homo sapiens
agttaagtacaaaac

SEQ ID NO: 926979 - DNA, 15 bp, Homo sapiens
cagttaagtacaaaa

SEQ ID NO: 926980 - DNA, 15 bp, Homo sapiens
tcagttaagtacaaa

SEQ ID NO: 926981 - DNA, 15 bp, Homo sapiens
gtcagttaagtacaa

SEQ ID NO: 926982 - DNA, 15 bp, Homo sapiens
agtcagttaagtaca

SEQ ID NO: 926983 - DNA, 15 bp, Homo sapiens
aagtcagttaagtac

SEQ ID NO: 926984 - DNA, 15 bp, Homo sapiens
taagtcagttaagta

SEQ ID NO: 926985 - DNA, 15 bp, Homo sapiens
ataagtcagttaagt

SEQ ID NO: 926986 - DNA, 15 bp, Homo sapiens
tataagtcagttaag

SEQ ID NO: 926987 - DNA, 15 bp, Homo sapiens
ctataagtcagttaa

SEQ ID NO: 926988 - DNA, 15 bp, Homo sapiens
tctataagtcagtta

SEQ ID NO: 926989 - DNA, 15 bp, Homo sapiens
atctataagtcagtt

SEQ ID NO: 926990 - DNA, 15 bp, Homo sapiens
aatctataagtcagt

SEQ ID NO: 926991 - DNA, 15 bp, Homo sapiens
taatctataagtcag

SEQ ID NO: 926992 - DNA, 15 bp, Homo sapiens
ctaatctataagtca

SEQ ID NO: 926993 - DNA, 15 bp, Homo sapiens
actaatctataagtc

SEQ ID NO: 926994 - DNA, 15 bp, Homo sapiens
gactaatctataagt

SEQ ID NO: 926995 - DNA, 15 bp, Homo sapiens
agactaatctataag

SEQ ID NO: 926996 - DNA, 15 bp, Homo sapiens
gagactaatctataa

SEQ ID NO: 926997 - DNA, 15 bp, Homo sapiens
ggagactaatctata

SEQ ID NO: 926998 - DNA, 15 bp, Homo sapiens
aggagactaatctat

SEQ ID NO: 926999 - DNA, 15 bp, Homo sapiens
taggagactaatcta

SEQ ID NO: 927000 - DNA, 15 bp, Homo sapiens
ttaggagactaatct

SEQ ID NO: 927001 - DNA, 15 bp, Homo sapiens
attaggagactaatc

SEQ ID NO: 927002 - DNA, 15 bp, Homo sapiens
cattaggagactaat

SEQ ID NO: 927003 - DNA, 15 bp, Homo sapiens
gcattaggagactaa

SEQ ID NO: 927004 - DNA, 15 bp, Homo sapiens
agcattaggagacta

SEQ ID NO: 927005 - DNA, 15 bp, Homo sapiens
gagcattaggagact

SEQ ID NO: 927006 - DNA, 15 bp, Homo sapiens
agagcattaggagac

SEQ ID NO: 927007 - DNA, 15 bp, Homo sapiens
cagagcattaggaga

SEQ ID NO: 927008 - DNA, 15 bp, Homo sapiens
gcagagcattaggag

SEQ ID NO: 927009 - DNA, 15 bp, Homo sapiens
agcagagcattagga

SEQ ID NO: 927010 - DNA, 15 bp, Homo sapiens
tagcagagcattagg

SEQ ID NO: 927011 - DNA, 15 bp, Homo sapiens
ctagcagagcattag

SEQ ID NO: 927012 - DNA, 15 bp, Homo sapiens
actagcagagcatta

SEQ ID NO: 927013 - DNA, 15 bp, Homo sapiens
gactagcagagcatt

SEQ ID NO: 927014 - DNA, 15 bp, Homo sapiens
tgactagcagagcat

SEQ ID NO: 927015 - DNA, 15 bp, Homo sapiens
ttgactagcagagca

SEQ ID NO: 927016 - DNA, 15 bp, Homo sapiens
attgactagcagagc

SEQ ID NO: 927017 - DNA, 15 bp, Homo sapiens
cattgactagcagag

SEQ ID NO: 927018 - DNA, 15 bp, Homo sapiens
ccattgactagcaga

SEQ ID NO: 927019 - DNA, 15 bp, Homo sapiens
tccattgactagcag

SEQ ID NO: 927020 - DNA, 15 bp, Homo sapiens
gtccattgactagca

SEQ ID NO: 927021 - DNA, 15 bp, Homo sapiens
ggtccattgactagc

SEQ ID NO: 927022 - DNA, 15 bp, Homo sapiens
tggtccattgactag

SEQ ID NO: 927023 - DNA, 15 bp, Homo sapiens
ttggtccattgacta

SEQ ID NO: 927024 - DNA, 15 bp, Homo sapiens
tttggtccattgact

SEQ ID NO: 927025 - DNA, 15 bp, Homo sapiens
ttttggtccattgac

SEQ ID NO: 927026 - DNA, 15 bp, Homo sapiens
attttggtccattga

SEQ ID NO: 927027 - DNA, 15 bp, Homo sapiens
tattttggtccattg

SEQ ID NO: 927028 - DNA, 15 bp, Homo sapiens
ttattttggtccatt

SEQ ID NO: 927029 - DNA, 15 bp, Homo sapiens
tttattttggtccat

SEQ ID NO: 927030 - DNA, 15 bp, Homo sapiens
ttttattttggtcca

SEQ ID NO: 927031 - DNA, 15 bp, Homo sapiens
cttttattttggtcc

SEQ ID NO: 927032 - DNA, 15 bp, Homo sapiens
tcttttattttggtc

SEQ ID NO: 927033 - DNA, 15 bp, Homo sapiens
ttcttttattttggt

SEQ ID NO: 927034 - DNA, 15 bp, Homo sapiens
tttcttttattttgg

SEQ ID NO: 927035 - DNA, 15 bp, Homo sapiens
atttcttttattttg

SEQ ID NO: 927036 - DNA, 15 bp, Homo sapiens
tatttcttttatttt

SEQ ID NO: 927037 - DNA, 15 bp, Homo sapiens
ttatttcttttattt

SEQ ID NO: 927038 - DNA, 15 bp, Homo sapiens
attatttcttttatt

SEQ ID NO: 927039 - DNA, 15 bp, Homo sapiens
aattatttcttttat

SEQ ID NO: 927040 - DNA, 15 bp, Homo sapiens
aaattatttctttta

SEQ ID NO: 927041 - DNA, 15 bp, Homo sapiens
taaattatttctttt

SEQ ID NO: 927042 - DNA, 15 bp, Homo sapiens
ataaattatttcttt

SEQ ID NO: 927043 - DNA, 15 bp, Homo sapiens
aataaattatttctt

SEQ ID NO: 927044 - DNA, 15 bp, Homo sapiens
taataaattatttct

SEQ ID NO: 927045 - DNA, 15 bp, Homo sapiens
gtaataaattatttc

SEQ ID NO: 927046 - DNA, 15 bp, Homo sapiens
tgtaataaattattt

SEQ ID NO: 927047 - DNA, 15 bp, Homo sapiens
atgtaataaattatt

SEQ ID NO: 927048 - DNA, 15 bp, Homo sapiens
tatgtaataaattat

SEQ ID NO: 927049 - DNA, 15 bp, Homo sapiens
atatgtaataaatta

SEQ ID NO: 927050 - DNA, 15 bp, Homo sapiens
aatatgtaataaatt

SEQ ID NO: 927051 - DNA, 15 bp, Homo sapiens
gaatatgtaataaat

SEQ ID NO: 927052 - DNA, 15 bp, Homo sapiens
agaatatgtaataaa

SEQ ID NO: 927053 - DNA, 15 bp, Homo sapiens
aagaatatgtaataa

SEQ ID NO: 927054 - DNA, 15 bp, Homo sapiens
gaagaatatgtaata

SEQ ID NO: 927055 - DNA, 15 bp, Homo sapiens
ggaagaatatgtaat

SEQ ID NO: 927056 - DNA, 15 bp, Homo sapiens
aggaagaatatgtaa

SEQ ID NO: 927057 - DNA, 15 bp, Homo sapiens
taggaagaatatgta

SEQ ID NO: 927058 - DNA, 15 bp, Homo sapiens
ttaggaagaatatgt

SEQ ID NO: 927059 - DNA, 15 bp, Homo sapiens
tttaggaagaatatg

SEQ ID NO: 927060 - DNA, 15 bp, Homo sapiens
atttaggaagaatat

SEQ ID NO: 927061 - DNA, 15 bp, Homo sapiens
gatttaggaagaata

SEQ ID NO: 927062 - DNA, 15 bp, Homo sapiens
agatttaggaagaat

SEQ ID NO: 927063 - DNA, 15 bp, Homo sapiens
tagatttaggaagaa

SEQ ID NO: 927064 - DNA, 15 bp, Homo sapiens
ctagatttaggaaga

SEQ ID NO: 927065 - DNA, 15 bp, Homo sapiens
actagatttaggaag

SEQ ID NO: 927066 - DNA, 15 bp, Homo sapiens
tactagatttaggaa

SEQ ID NO: 927067 - DNA, 15 bp, Homo sapiens
gtactagatttagga

SEQ ID NO: 927068 - DNA, 15 bp, Homo sapiens
ggtactagatttagg

SEQ ID NO: 927069 - DNA, 15 bp, Homo sapiens
tggtactagatttag

SEQ ID NO: 927070 - DNA, 15 bp, Homo sapiens
gtggtactagattta

SEQ ID NO: 927071 - DNA, 15 bp, Homo sapiens
ggtggtactagattt

SEQ ID NO: 927072 - DNA, 15 bp, Homo sapiens
tggtggtactagatt

SEQ ID NO: 927073 - DNA, 15 bp, Homo sapiens
atggtggtactagat

SEQ ID NO: 927074 - DNA, 15 bp, Homo sapiens
tatggtggtactaga

SEQ ID NO: 927075 - DNA, 15 bp, Homo sapiens
gtatggtggtactag

SEQ ID NO: 927076 - DNA, 15 bp, Homo sapiens
tgtatggtggtacta

SEQ ID NO: 927077 - DNA, 15 bp, Homo sapiens
atgtatggtggtact

SEQ ID NO: 927078 - DNA, 15 bp, Homo sapiens
catgtatggtggtac

SEQ ID NO: 927079 - DNA, 15 bp, Homo sapiens
acatgtatggtggta

SEQ ID NO: 927080 - DNA, 15 bp, Homo sapiens
tacatgtatggtggt

SEQ ID NO: 927081 - DNA, 15 bp, Homo sapiens
atacatgtatggtgg

SEQ ID NO: 927082 - DNA, 15 bp, Homo sapiens
tatacatgtatggtg

SEQ ID NO: 927083 - DNA, 15 bp, Homo sapiens
ttatacatgtatggt

SEQ ID NO: 927084 - DNA, 15 bp, Homo sapiens
attatacatgtatgg

SEQ ID NO: 927085 - DNA, 15 bp, Homo sapiens
aattatacatgtatg

SEQ ID NO: 927086 - DNA, 15 bp, Homo sapiens
gaattatacatgtat

SEQ ID NO: 927087 - DNA, 15 bp, Homo sapiens
agaattatacatgta

SEQ ID NO: 927088 - DNA, 15 bp, Homo sapiens
tagaattatacatgt

SEQ ID NO: 927089 - DNA, 15 bp, Homo sapiens
ttagaattatacatg

SEQ ID NO: 927090 - DNA, 15 bp, Homo sapiens
tttagaattatacat

SEQ ID NO: 927091 - DNA, 15 bp, Homo sapiens
gtttagaattataca

SEQ ID NO: 927092 - DNA, 15 bp, Homo sapiens
agtttagaattatac

SEQ ID NO: 927093 - DNA, 15 bp, Homo sapiens
cagtttagaattata

SEQ ID NO: 927094 - DNA, 15 bp, Homo sapiens
acagtttagaattat

SEQ ID NO: 927095 - DNA, 15 bp, Homo sapiens
tacagtttagaatta

SEQ ID NO: 927096 - DNA, 15 bp, Homo sapiens
ttacagtttagaatt

SEQ ID NO: 927097 - DNA, 15 bp, Homo sapiens
attacagtttagaat

SEQ ID NO: 927098 - DNA, 15 bp, Homo sapiens
tattacagtttagaa

SEQ ID NO: 927099 - DNA, 15 bp, Homo sapiens
atattacagtttaga

SEQ ID NO: 927100 - DNA, 15 bp, Homo sapiens
gatattacagtttag

SEQ ID NO: 927101 - DNA, 15 bp, Homo sapiens
agatattacagttta

SEQ ID NO: 927102 - DNA, 15 bp, Homo sapiens
gagatattacagttt

SEQ ID NO: 927103 - DNA, 15 bp, Homo sapiens
tgagatattacagtt

SEQ ID NO: 927104 - DNA, 15 bp, Homo sapiens
ttgagatattacagt

SEQ ID NO: 927105 - DNA, 15 bp, Homo sapiens
attgagatattacag

SEQ ID NO: 927106 - DNA, 15 bp, Homo sapiens
tattgagatattaca

SEQ ID NO: 927107 - DNA, 15 bp, Homo sapiens
ttattgagatattac

SEQ ID NO: 927108 - DNA, 15 bp, Homo sapiens
tttattgagatatta

SEQ ID NO: 927109 - DNA, 15 bp, Homo sapiens
ctttattgagatatt

SEQ ID NO: 927110 - DNA, 15 bp, Homo sapiens
actttattgagatat

SEQ ID NO: 927111 - DNA, 15 bp, Homo sapiens
tactttattgagata

SEQ ID NO: 927112 - DNA, 15 bp, Homo sapiens
gtactttattgagat

SEQ ID NO: 927113 - DNA, 15 bp, Homo sapiens
ggtactttattgaga

SEQ ID NO: 927114 - DNA, 15 bp, Homo sapiens
aggtactttattgag

SEQ ID NO: 927115 - DNA, 15 bp, Homo sapiens
aaggtactttattga

SEQ ID NO: 927116 - DNA, 15 bp, Homo sapiens
taaggtactttattg

SEQ ID NO: 927117 - DNA, 15 bp, Homo sapiens
ttaaggtactttatt

SEQ ID NO: 927118 - DNA, 15 bp, Homo sapiens
attaaggtactttat

SEQ ID NO: 927119 - DNA, 15 bp, Homo sapiens
aattaaggtacttta

SEQ ID NO: 927120 - DNA, 15 bp, Homo sapiens
taattaaggtacttt

SEQ ID NO: 927121 - DNA, 15 bp, Homo sapiens
ttaattaaggtactt

SEQ ID NO: 927122 - DNA, 15 bp, Homo sapiens
tttaattaaggtact

SEQ ID NO: 927123 - DNA, 15 bp, Homo sapiens
atttaattaaggtac

SEQ ID NO: 927124 - DNA, 15 bp, Homo sapiens
aatttaattaaggta

SEQ ID NO: 927125 - DNA, 15 bp, Homo sapiens
aaatttaattaaggt

SEQ ID NO: 927126 - DNA, 15 bp, Homo sapiens
aaaatttaattaagg

SEQ ID NO: 927127 - DNA, 15 bp, Homo sapiens
taaaatttaattaag

SEQ ID NO: 927128 - DNA, 15 bp, Homo sapiens
ataaaatttaattaa

SEQ ID NO: 927129 - DNA, 15 bp, Homo sapiens
cataaaatttaatta

SEQ ID NO: 927130 - DNA, 15 bp, Homo sapiens
acataaaatttaatt

SEQ ID NO: 927131 - DNA, 15 bp, Homo sapiens
aacataaaatttaat

SEQ ID NO: 927132 - DNA, 15 bp, Homo sapiens
gaacataaaatttaa

SEQ ID NO: 927133 - DNA, 15 bp, Homo sapiens
tgaacataaaattta

SEQ ID NO: 927134 - DNA, 15 bp, Homo sapiens
atgaacataaaattt

SEQ ID NO: 927135 - DNA, 15 bp, Homo sapiens
gatgaacataaaatt

SEQ ID NO: 927136 - DNA, 15 bp, Homo sapiens
tgatgaacataaaat

SEQ ID NO: 927137 - DNA, 15 bp, Homo sapiens
atgatgaacataaaa

SEQ ID NO: 927138 - DNA, 15 bp, Homo sapiens
tatgatgaacataaa

SEQ ID NO: 927139 - DNA, 15 bp, Homo sapiens
ttatgatgaacataa

SEQ ID NO: 927140 - DNA, 15 bp, Homo sapiens
gttatgatgaacata

SEQ ID NO: 927141 - DNA, 15 bp, Homo sapiens
tgttatgatgaacat

SEQ ID NO: 927142 - DNA, 15 bp, Homo sapiens
ttgttatgatgaaca

SEQ ID NO: 927143 - DNA, 15 bp, Homo sapiens
attgttatgatgaac

SEQ ID NO: 927144 - DNA, 15 bp, Homo sapiens
cattgttatgatgaa

SEQ ID NO: 927145 - DNA, 15 bp, Homo sapiens
tcattgttatgatga

SEQ ID NO: 927146 - DNA, 15 bp, Homo sapiens
ttcattgttatgatg

SEQ ID NO: 927147 - DNA, 15 bp, Homo sapiens
cttcattgttatgat

SEQ ID NO: 927148 - DNA, 15 bp, Homo sapiens
acttcattgttatga

SEQ ID NO: 927149 - DNA, 15 bp, Homo sapiens
aacttcattgttatg

SEQ ID NO: 927150 - DNA, 15 bp, Homo sapiens
aaacttcattgttat

SEQ ID NO: 927151 - DNA, 15 bp, Homo sapiens
gaaacttcattgtta

SEQ ID NO: 927152 - DNA, 15 bp, Homo sapiens
agaaacttcattgtt

SEQ ID NO: 927153 - DNA, 15 bp, Homo sapiens
tagaaacttcattgt

SEQ ID NO: 927154 - DNA, 15 bp, Homo sapiens
ctagaaacttcattg

SEQ ID NO: 927155 - DNA, 15 bp, Homo sapiens
gctagaaacttcatt

SEQ ID NO: 927156 - DNA, 15 bp, Homo sapiens
tgctagaaacttcat

SEQ ID NO: 927157 - DNA, 15 bp, Homo sapiens
atgctagaaacttca

SEQ ID NO: 927158 - DNA, 15 bp, Homo sapiens
tatgctagaaacttc

SEQ ID NO: 927159 - DNA, 15 bp, Homo sapiens
atatgctagaaactt

SEQ ID NO: 927160 - DNA, 15 bp, Homo sapiens
catatgctagaaact

SEQ ID NO: 927161 - DNA, 15 bp, Homo sapiens
acatatgctagaaac

SEQ ID NO: 927162 - DNA, 15 bp, Homo sapiens
tacatatgctagaaa

SEQ ID NO: 927163 - DNA, 15 bp, Homo sapiens
ttacatatgctagaa

SEQ ID NO: 927164 - DNA, 15 bp, Homo sapiens
attacatatgctaga

SEQ ID NO: 927165 - DNA, 15 bp, Homo sapiens
tattacatatgctag

SEQ ID NO: 927166 - DNA, 15 bp, Homo sapiens
ctattacatatgcta

SEQ ID NO: 927167 - DNA, 15 bp, Homo sapiens
actattacatatgct

SEQ ID NO: 927168 - DNA, 15 bp, Homo sapiens
gactattacatatgc

SEQ ID NO: 927169 - DNA, 15 bp, Homo sapiens
agactattacatatg

SEQ ID NO: 927170 - DNA, 15 bp, Homo sapiens
aagactattacatat

SEQ ID NO: 927171 - DNA, 15 bp, Homo sapiens
taagactattacata

SEQ ID NO: 927172 - DNA, 15 bp, Homo sapiens
ataagactattacat

SEQ ID NO: 927173 - DNA, 15 bp, Homo sapiens
tataagactattaca

SEQ ID NO: 927174 - DNA, 15 bp, Homo sapiens
ttataagactattac

SEQ ID NO: 927175 - DNA, 15 bp, Homo sapiens
tttataagactatta

SEQ ID NO: 927176 - DNA, 15 bp, Homo sapiens
atttataagactatt

SEQ ID NO: 927177 - DNA, 15 bp, Homo sapiens
tatttataagactat

SEQ ID NO: 927178 - DNA, 15 bp, Homo sapiens
ttatttataagacta

SEQ ID NO: 927179 - DNA, 15 bp, Homo sapiens
cttatttataagact

SEQ ID NO: 927180 - DNA, 15 bp, Homo sapiens
gcttatttataagac

SEQ ID NO: 927181 - DNA, 15 bp, Homo sapiens
tgcttatttataaga

SEQ ID NO: 927182 - DNA, 15 bp, Homo sapiens
atgcttatttataag

SEQ ID NO: 927183 - DNA, 15 bp, Homo sapiens
catgcttatttataa

SEQ ID NO: 927184 - DNA, 15 bp, Homo sapiens
gcatgcttatttata

SEQ ID NO: 927185 - DNA, 15 bp, Homo sapiens
tgcatgcttatttat

SEQ ID NO: 927186 - DNA, 15 bp, Homo sapiens
ttgcatgcttattta

SEQ ID NO: 927187 - DNA, 15 bp, Homo sapiens
tttgcatgcttattt

SEQ ID NO: 927188 - DNA, 15 bp, Homo sapiens
atttgcatgcttatt

SEQ ID NO: 927189 - DNA, 15 bp, Homo sapiens
tatttgcatgcttat

SEQ ID NO: 927190 - DNA, 15 bp, Homo sapiens
ttatttgcatgctta

SEQ ID NO: 927191 - DNA, 15 bp, Homo sapiens
gttatttgcatgctt

SEQ ID NO: 927192 - DNA, 15 bp, Homo sapiens
agttatttgcatgct

SEQ ID NO: 927193 - DNA, 15 bp, Homo sapiens
cagttatttgcatgc

SEQ ID NO: 927194 - DNA, 15 bp, Homo sapiens
gcagttatttgcatg

SEQ ID NO: 927195 - DNA, 15 bp, Homo sapiens
agcagttatttgcat

SEQ ID NO: 927196 - DNA, 15 bp, Homo sapiens
cagcagttatttgca

SEQ ID NO: 927197 - DNA, 15 bp, Homo sapiens
acagcagttatttgc

SEQ ID NO: 927198 - DNA, 15 bp, Homo sapiens
gacagcagttatttg

SEQ ID NO: 927199 - DNA, 15 bp, Homo sapiens
tgacagcagttattt

SEQ ID NO: 927200 - DNA, 15 bp, Homo sapiens
ttgacagcagttatt

SEQ ID NO: 927201 - DNA, 15 bp, Homo sapiens
attgacagcagttat

SEQ ID NO: 927202 - DNA, 15 bp, Homo sapiens
aattgacagcagtta

SEQ ID NO: 927203 - DNA, 15 bp, Homo sapiens
taattgacagcagtt

SEQ ID NO: 927204 - DNA, 15 bp, Homo sapiens
ctaattgacagcagt

SEQ ID NO: 927205 - DNA, 15 bp, Homo sapiens
tctaattgacagcag

SEQ ID NO: 927206 - DNA, 15 bp, Homo sapiens
ttctaattgacagca

SEQ ID NO: 927207 - DNA, 15 bp, Homo sapiens
attctaattgacagc

SEQ ID NO: 927208 - DNA, 15 bp, Homo sapiens
aattctaattgacag

SEQ ID NO: 927209 - DNA, 15 bp, Homo sapiens
taattctaattgaca

SEQ ID NO: 927210 - DNA, 15 bp, Homo sapiens
ctaattctaattgac

SEQ ID NO: 927211 - DNA, 15 bp, Homo sapiens
actaattctaattga

SEQ ID NO: 927212 - DNA, 15 bp, Homo sapiens
gactaattctaattg

SEQ ID NO: 927213 - DNA, 15 bp, Homo sapiens
tgactaattctaatt

SEQ ID NO: 927214 - DNA, 15 bp, Homo sapiens
ctgactaattctaat

SEQ ID NO: 927215 - DNA, 15 bp, Homo sapiens
actgactaattctaa

SEQ ID NO: 927216 - DNA, 15 bp, Homo sapiens
aactgactaattcta

SEQ ID NO: 927217 - DNA, 15 bp, Homo sapiens
aaactgactaattct

SEQ ID NO: 927218 - DNA, 15 bp, Homo sapiens
taaactgactaattc

SEQ ID NO: 927219 - DNA, 15 bp, Homo sapiens
ttaaactgactaatt

SEQ ID NO: 927220 - DNA, 15 bp, Homo sapiens
gttaaactgactaat

SEQ ID NO: 927221 - DNA, 15 bp, Homo sapiens
ggttaaactgactaa

SEQ ID NO: 927222 - DNA, 15 bp, Homo sapiens
aggttaaactgacta

SEQ ID NO: 927223 - DNA, 15 bp, Homo sapiens
aaggttaaactgact

SEQ ID NO: 927224 - DNA, 15 bp, Homo sapiens
taaggttaaactgac

SEQ ID NO: 927225 - DNA, 15 bp, Homo sapiens
ataaggttaaactga

SEQ ID NO: 927226 - DNA, 15 bp, Homo sapiens
aataaggttaaactg

SEQ ID NO: 927227 - DNA, 15 bp, Homo sapiens
taataaggttaaact

SEQ ID NO: 927228 - DNA, 15 bp, Homo sapiens
ttaataaggttaaac

SEQ ID NO: 927229 - DNA, 15 bp, Homo sapiens
cttaataaggttaaa

SEQ ID NO: 927230 - DNA, 15 bp, Homo sapiens
acttaataaggttaa

SEQ ID NO: 927231 - DNA, 15 bp, Homo sapiens
tacttaataaggtta

SEQ ID NO: 927232 - DNA, 15 bp, Homo sapiens
atacttaataaggtt

SEQ ID NO: 927233 - DNA, 15 bp, Homo sapiens
gatacttaataaggt

SEQ ID NO: 927234 - DNA, 15 bp, Homo sapiens
tgatacttaataagg

SEQ ID NO: 927235 - DNA, 15 bp, Homo sapiens
ttgatacttaataag

SEQ ID NO: 927236 - DNA, 15 bp, Homo sapiens
tttgatacttaataa

SEQ ID NO: 927237 - DNA, 15 bp, Homo sapiens
atttgatacttaata

SEQ ID NO: 927238 - DNA, 15 bp, Homo sapiens
catttgatacttaat

SEQ ID NO: 927239 - DNA, 15 bp, Homo sapiens
ccatttgatacttaa

SEQ ID NO: 927240 - DNA, 15 bp, Homo sapiens
gccatttgatactta

SEQ ID NO: 927241 - DNA, 15 bp, Homo sapiens
agccatttgatactt

SEQ ID NO: 927242 - DNA, 15 bp, Homo sapiens
tagccatttgatact

SEQ ID NO: 927243 - DNA, 15 bp, Homo sapiens
atagccatttgatac

SEQ ID NO: 927244 - DNA, 15 bp, Homo sapiens
aatagccatttgata

SEQ ID NO: 927245 - DNA, 15 bp, Homo sapiens
caatagccatttgat

SEQ ID NO: 927246 - DNA, 15 bp, Homo sapiens
acaatagccatttga

SEQ ID NO: 927247 - DNA, 15 bp, Homo sapiens
tacaatagccatttg

SEQ ID NO: 927248 - DNA, 15 bp, Homo sapiens
gtacaatagccattt

SEQ ID NO: 927249 - DNA, 15 bp, Homo sapiens
tgtacaatagccatt

SEQ ID NO: 927250 - DNA, 15 bp, Homo sapiens
atgtacaatagccat

SEQ ID NO: 927251 - DNA, 15 bp, Homo sapiens
tatgtacaatagcca

SEQ ID NO: 927252 - DNA, 15 bp, Homo sapiens
atatgtacaatagcc

SEQ ID NO: 927253 - DNA, 15 bp, Homo sapiens
catatgtacaatagc

SEQ ID NO: 927254 - DNA, 15 bp, Homo sapiens
tcatatgtacaatag

SEQ ID NO: 927255 - DNA, 15 bp, Homo sapiens
atcatatgtacaata

SEQ ID NO: 927256 - DNA, 15 bp, Homo sapiens
catcatatgtacaat

SEQ ID NO: 927257 - DNA, 15 bp, Homo sapiens
acatcatatgtacaa

SEQ ID NO: 927258 - DNA, 15 bp, Homo sapiens
cacatcatatgtaca

SEQ ID NO: 927259 - DNA, 15 bp, Homo sapiens
tcacatcatatgtac

SEQ ID NO: 927260 - DNA, 15 bp, Homo sapiens
ttcacatcatatgta

SEQ ID NO: 927261 - DNA, 15 bp, Homo sapiens
tttcacatcatatgt

SEQ ID NO: 927262 - DNA, 15 bp, Homo sapiens
ttttcacatcatatg

SEQ ID NO: 927263 - DNA, 15 bp, Homo sapiens
tttttcacatcatat

SEQ ID NO: 927264 - DNA, 15 bp, Homo sapiens
atttttcacatcata

SEQ ID NO: 927265 - DNA, 15 bp, Homo sapiens
tatttttcacatcat

SEQ ID NO: 927266 - DNA, 15 bp, Homo sapiens
ttatttttcacatca

SEQ ID NO: 927267 - DNA, 15 bp, Homo sapiens
tttatttttcacatc

SEQ ID NO: 927268 - DNA, 15 bp, Homo sapiens
ctttatttttcacat

SEQ ID NO: 927269 - DNA, 15 bp, Homo sapiens
actttatttttcaca

SEQ ID NO: 927270 - DNA, 15 bp, Homo sapiens
cactttatttttcac

SEQ ID NO: 927271 - DNA, 15 bp, Homo sapiens
tcactttatttttca

SEQ ID NO: 927272 - DNA, 15 bp, Homo sapiens
ttcactttatttttc

SEQ ID NO: 927273 - DNA, 15 bp, Homo sapiens
attcactttattttt

SEQ ID NO: 927274 - DNA, 15 bp, Homo sapiens
aattcactttatttt

SEQ ID NO: 927275 - DNA, 15 bp, Homo sapiens
aaattcactttattt

SEQ ID NO: 927276 - DNA, 15 bp, Homo sapiens
aaaattcactttatt

SEQ ID NO: 927277 - DNA, 15 bp, Homo sapiens
aaaaattcactttat

SEQ ID NO: 927278 - DNA, 15 bp, Homo sapiens
aaaaaattcacttta

SEQ ID NO: 927279 - DNA, 15 bp, Homo sapiens
aaaaaaattcacttt

SEQ ID NO: 927280 - DNA, 15 bp, Homo sapiens
aaaaaaaattcactt

SEQ ID NO: 927281 - DNA, 15 bp, Homo sapiens
caaaaaaaattcact

SEQ ID NO: 927282 - DNA, 15 bp, Homo sapiens
ccaaaaaaaattcac

SEQ ID NO: 927283 - DNA, 15 bp, Homo sapiens
gccaaaaaaaattca

SEQ ID NO: 927284 - DNA, 15 bp, Homo sapiens
agccaaaaaaaattc

SEQ ID NO: 927285 - DNA, 15 bp, Homo sapiens
tagccaaaaaaaatt

SEQ ID NO: 927286 - DNA, 15 bp, Homo sapiens
ttagccaaaaaaaat

SEQ ID NO: 927287 - DNA, 15 bp, Homo sapiens
attagccaaaaaaaa

SEQ ID NO: 927288 - DNA, 15 bp, Homo sapiens
tattagccaaaaaaa

SEQ ID NO: 927289 - DNA, 15 bp, Homo sapiens
ttattagccaaaaaa

SEQ ID NO: 927290 - DNA, 15 bp, Homo sapiens
gttattagccaaaaa

SEQ ID NO: 927291 - DNA, 15 bp, Homo sapiens
agttattagccaaaa

SEQ ID NO: 927292 - DNA, 15 bp, Homo sapiens
tagttattagccaaa

SEQ ID NO: 927293 - DNA, 15 bp, Homo sapiens
ttagttattagccaa

SEQ ID NO: 927294 - DNA, 15 bp, Homo sapiens
attagttattagcca

SEQ ID NO: 927295 - DNA, 15 bp, Homo sapiens
gattagttattagcc

SEQ ID NO: 927296 - DNA, 15 bp, Homo sapiens
agattagttattagc

SEQ ID NO: 927297 - DNA, 15 bp, Homo sapiens
tagattagttattag

SEQ ID NO: 927298 - DNA, 15 bp, Homo sapiens
ttagattagttatta

SEQ ID NO: 927299 - DNA, 15 bp, Homo sapiens
tttagattagttatt

SEQ ID NO: 927300 - DNA, 15 bp, Homo sapiens
ttttagattagttat

SEQ ID NO: 927301 - DNA, 15 bp, Homo sapiens
attttagattagtta

SEQ ID NO: 927302 - DNA, 15 bp, Homo sapiens
aattttagattagtt

SEQ ID NO: 927303 - DNA, 15 bp, Homo sapiens
gaattttagattagt

SEQ ID NO: 927304 - DNA, 15 bp, Homo sapiens
tgaattttagattag

SEQ ID NO: 927305 - DNA, 15 bp, Homo sapiens
ctgaattttagatta

SEQ ID NO: 927306 - DNA, 15 bp, Homo sapiens
tctgaattttagatt

SEQ ID NO: 927307 - DNA, 15 bp, Homo sapiens
atctgaattttagat

SEQ ID NO: 927308 - DNA, 15 bp, Homo sapiens
catctgaattttaga

SEQ ID NO: 927309 - DNA, 15 bp, Homo sapiens
tcatctgaattttag

SEQ ID NO: 927310 - DNA, 15 bp, Homo sapiens
ttcatctgaatttta

SEQ ID NO: 927311 - DNA, 15 bp, Homo sapiens
cttcatctgaatttt

SEQ ID NO: 927312 - DNA, 15 bp, Homo sapiens
gcttcatctgaattt

SEQ ID NO: 927313 - DNA, 15 bp, Homo sapiens
tgcttcatctgaatt

SEQ ID NO: 927314 - DNA, 15 bp, Homo sapiens
atgcttcatctgaat

SEQ ID NO: 927315 - DNA, 15 bp, Homo sapiens
aatgcttcatctgaa

SEQ ID NO: 927316 - DNA, 15 bp, Homo sapiens
aaatgcttcatctga

SEQ ID NO: 927317 - DNA, 15 bp, Homo sapiens
aaaatgcttcatctg

SEQ ID NO: 927318 - DNA, 15 bp, Homo sapiens
taaaatgcttcatct

SEQ ID NO: 927319 - DNA, 15 bp, Homo sapiens
ttaaaatgcttcatc

SEQ ID NO: 927320 - DNA, 15 bp, Homo sapiens
tttaaaatgcttcat

SEQ ID NO: 927321 - DNA, 15 bp, Homo sapiens
ctttaaaatgcttca

SEQ ID NO: 927322 - DNA, 15 bp, Homo sapiens
cctttaaaatgcttc

SEQ ID NO: 927323 - DNA, 15 bp, Homo sapiens
ccctttaaaatgctt

SEQ ID NO: 927324 - DNA, 15 bp, Homo sapiens
tccctttaaaatgct

SEQ ID NO: 927325 - DNA, 15 bp, Homo sapiens
ttccctttaaaatgc

SEQ ID NO: 927326 - DNA, 15 bp, Homo sapiens
tttccctttaaaatg

SEQ ID NO: 927327 - DNA, 15 bp, Homo sapiens
ttttccctttaaaat

SEQ ID NO: 927328 - DNA, 15 bp, Homo sapiens
tttttccctttaaaa

SEQ ID NO: 927329 - DNA, 15 bp, Homo sapiens
ctttttccctttaaa

SEQ ID NO: 927330 - DNA, 15 bp, Homo sapiens
tctttttccctttaa

SEQ ID NO: 927331 - DNA, 15 bp, Homo sapiens
atctttttcccttta

SEQ ID NO: 927332 - DNA, 15 bp, Homo sapiens
tatctttttcccttt

SEQ ID NO: 927333 - DNA, 15 bp, Homo sapiens
gtatctttttccctt

SEQ ID NO: 927334 - DNA, 15 bp, Homo sapiens
agtatctttttccct

SEQ ID NO: 927335 - DNA, 15 bp, Homo sapiens
aagtatctttttccc

SEQ ID NO: 927336 - DNA, 15 bp, Homo sapiens
aaagtatctttttcc

SEQ ID NO: 927337 - DNA, 15 bp, Homo sapiens
taaagtatctttttc

SEQ ID NO: 927338 - DNA, 15 bp, Homo sapiens
ttaaagtatcttttt

SEQ ID NO: 927339 - DNA, 15 bp, Homo sapiens
attaaagtatctttt

SEQ ID NO: 927340 - DNA, 15 bp, Homo sapiens
cattaaagtatcttt

SEQ ID NO: 927341 - DNA, 15 bp, Homo sapiens
tcattaaagtatctt

SEQ ID NO: 927342 - DNA, 15 bp, Homo sapiens
atcattaaagtatct

SEQ ID NO: 927343 - DNA, 15 bp, Homo sapiens
aatcattaaagtatc

SEQ ID NO: 927344 - DNA, 15 bp, Homo sapiens
aaatcattaaagtat

SEQ ID NO: 927345 - DNA, 15 bp, Homo sapiens
taaatcattaaagta

SEQ ID NO: 927346 - DNA, 15 bp, Homo sapiens
ataaatcattaaagt

SEQ ID NO: 927347 - DNA, 15 bp, Homo sapiens
aataaatcattaaag

SEQ ID NO: 927348 - DNA, 15 bp, Homo sapiens
taataaatcattaaa

SEQ ID NO: 927349 - DNA, 15 bp, Homo sapiens
ataataaatcattaa

SEQ ID NO: 927350 - DNA, 15 bp, Homo sapiens
tataataaatcatta

SEQ ID NO: 927351 - DNA, 15 bp, Homo sapiens
ttataataaatcatt

SEQ ID NO: 927352 - DNA, 15 bp, Homo sapiens
attataataaatcat

SEQ ID NO: 927353 - DNA, 15 bp, Homo sapiens
aattataataaatca

SEQ ID NO: 927354 - DNA, 15 bp, Homo sapiens
aaattataataaatc

SEQ ID NO: 927355 - DNA, 15 bp, Homo sapiens
taaattataataaat

SEQ ID NO: 927356 - DNA, 15 bp, Homo sapiens
ttaaattataataaa

SEQ ID NO: 927357 - DNA, 15 bp, Homo sapiens
attaaattataataa

SEQ ID NO: 927358 - DNA, 15 bp, Homo sapiens
gattaaattataata

SEQ ID NO: 927359 - DNA, 15 bp, Homo sapiens
tgattaaattataat

SEQ ID NO: 927360 - DNA, 15 bp, Homo sapiens
atgattaaattataa

SEQ ID NO: 927361 - DNA, 15 bp, Homo sapiens
aatgattaaattata

SEQ ID NO: 927362 - DNA, 15 bp, Homo sapiens
caatgattaaattat

SEQ ID NO: 927363 - DNA, 15 bp, Homo sapiens
gcaatgattaaatta

SEQ ID NO: 927364 - DNA, 15 bp, Homo sapiens
tgcaatgattaaatt

SEQ ID NO: 927365 - DNA, 15 bp, Homo sapiens
ctgcaatgattaaat

SEQ ID NO: 927366 - DNA, 15 bp, Homo sapiens
tctgcaatgattaaa

SEQ ID NO: 927367 - DNA, 15 bp, Homo sapiens
ttctgcaatgattaa

SEQ ID NO: 927368 - DNA, 15 bp, Homo sapiens
tttctgcaatgatta

SEQ ID NO: 927369 - DNA, 15 bp, Homo sapiens
gtttctgcaatgatt

SEQ ID NO: 927370 - DNA, 15 bp, Homo sapiens
agtttctgcaatgat

SEQ ID NO: 927371 - DNA, 15 bp, Homo sapiens
tagtttctgcaatga

SEQ ID NO: 927372 - DNA, 15 bp, Homo sapiens
ttagtttctgcaatg

SEQ ID NO: 927373 - DNA, 15 bp, Homo sapiens
tttagtttctgcaat

SEQ ID NO: 927374 - DNA, 15 bp, Homo sapiens
ttttagtttctgcaa

SEQ ID NO: 927375 - DNA, 15 bp, Homo sapiens
cttttagtttctgca

SEQ ID NO: 927376 - DNA, 15 bp, Homo sapiens
tcttttagtttctgc

SEQ ID NO: 927377 - DNA, 15 bp, Homo sapiens
ctcttttagtttctg

SEQ ID NO: 927378 - DNA, 15 bp, Homo sapiens
tctcttttagtttct

SEQ ID NO: 927379 - DNA, 15 bp, Homo sapiens
ttctcttttagtttc

SEQ ID NO: 927380 - DNA, 15 bp, Homo sapiens
tttctcttttagttt

SEQ ID NO: 927381 - DNA, 15 bp, Homo sapiens
ctttctcttttagtt

SEQ ID NO: 927382 - DNA, 15 bp, Homo sapiens
tctttctcttttagt

SEQ ID NO: 927383 - DNA, 15 bp, Homo sapiens
ttctttctcttttag

SEQ ID NO: 927384 - DNA, 15 bp, Homo sapiens
attctttctctttta

SEQ ID NO: 927385 - DNA, 15 bp, Homo sapiens
gattctttctctttt

SEQ ID NO: 927386 - DNA, 15 bp, Homo sapiens
agattctttctcttt

SEQ ID NO: 927387 - DNA, 15 bp, Homo sapiens
cagattctttctctt

SEQ ID NO: 927388 - DNA, 15 bp, Homo sapiens
gcagattctttctct

SEQ ID NO: 927389 - DNA, 15 bp, Homo sapiens
agcagattctttctc

SEQ ID NO: 927390 - DNA, 15 bp, Homo sapiens
aagcagattctttct

SEQ ID NO: 927391 - DNA, 15 bp, Homo sapiens
aaagcagattctttc

SEQ ID NO: 927392 - DNA, 15 bp, Homo sapiens
taaagcagattcttt

SEQ ID NO: 927393 - DNA, 15 bp, Homo sapiens
ttaaagcagattctt

SEQ ID NO: 927394 - DNA, 15 bp, Homo sapiens
cttaaagcagattct

SEQ ID NO: 927395 - DNA, 15 bp, Homo sapiens
ccttaaagcagattc

SEQ ID NO: 927396 - DNA, 15 bp, Homo sapiens
accttaaagcagatt

SEQ ID NO: 927397 - DNA, 15 bp, Homo sapiens
aaccttaaagcagat

SEQ ID NO: 927398 - DNA, 15 bp, Homo sapiens
taaccttaaagcaga

SEQ ID NO: 927399 - DNA, 15 bp, Homo sapiens
ctaaccttaaagcag

SEQ ID NO: 927400 - DNA, 15 bp, Homo sapiens
gctaaccttaaagca

SEQ ID NO: 927401 - DNA, 15 bp, Homo sapiens
tgctaaccttaaagc

SEQ ID NO: 927402 - DNA, 15 bp, Homo sapiens
ctgctaaccttaaag

SEQ ID NO: 927403 - DNA, 15 bp, Homo sapiens
tctgctaaccttaaa

SEQ ID NO: 927404 - DNA, 15 bp, Homo sapiens
ttctgctaaccttaa

SEQ ID NO: 927405 - DNA, 15 bp, Homo sapiens
gttctgctaacctta

SEQ ID NO: 927406 - DNA, 15 bp, Homo sapiens
tgttctgctaacctt

SEQ ID NO: 927407 - DNA, 15 bp, Homo sapiens
ttgttctgctaacct

SEQ ID NO: 927408 - DNA, 15 bp, Homo sapiens
tttgttctgctaacc

SEQ ID NO: 927409 - DNA, 15 bp, Homo sapiens
ttttgttctgctaac

SEQ ID NO: 927410 - DNA, 15 bp, Homo sapiens
attttgttctgctaa

SEQ ID NO: 927411 - DNA, 15 bp, Homo sapiens
tattttgttctgcta

SEQ ID NO: 927412 - DNA, 15 bp, Homo sapiens
atattttgttctgct

SEQ ID NO: 927413 - DNA, 15 bp, Homo sapiens
tatattttgttctgc

SEQ ID NO: 927414 - DNA, 15 bp, Homo sapiens
gtatattttgttctg

SEQ ID NO: 927415 - DNA, 15 bp, Homo sapiens
agtatattttgttct

SEQ ID NO: 927416 - DNA, 15 bp, Homo sapiens
cagtatattttgttc

SEQ ID NO: 927417 - DNA, 15 bp, Homo sapiens
acagtatattttgtt

SEQ ID NO: 927418 - DNA, 15 bp, Homo sapiens
gacagtatattttgt

SEQ ID NO: 927419 - DNA, 15 bp, Homo sapiens
tgacagtatattttg

SEQ ID NO: 927420 - DNA, 15 bp, Homo sapiens
ttgacagtatatttt

SEQ ID NO: 927421 - DNA, 15 bp, Homo sapiens
cttgacagtatattt

SEQ ID NO: 927422 - DNA, 15 bp, Homo sapiens
tcttgacagtatatt

SEQ ID NO: 927423 - DNA, 15 bp, Homo sapiens
ctcttgacagtatat

SEQ ID NO: 927424 - DNA, 15 bp, Homo sapiens
tctcttgacagtata

SEQ ID NO: 927425 - DNA, 15 bp, Homo sapiens
gtctcttgacagtat

SEQ ID NO: 927426 - DNA, 15 bp, Homo sapiens
tgtctcttgacagta

SEQ ID NO: 927427 - DNA, 15 bp, Homo sapiens
ttgtctcttgacagt

SEQ ID NO: 927428 - DNA, 15 bp, Homo sapiens
tttgtctcttgacag

SEQ ID NO: 927429 - DNA, 15 bp, Homo sapiens
ctttgtctcttgaca

SEQ ID NO: 927430 - DNA, 15 bp, Homo sapiens
actttgtctcttgac

SEQ ID NO: 927431 - DNA, 15 bp, Homo sapiens
tactttgtctcttga

SEQ ID NO: 927432 - DNA, 15 bp, Homo sapiens
ttactttgtctcttg

SEQ ID NO: 927433 - DNA, 15 bp, Homo sapiens
attactttgtctctt

SEQ ID NO: 927434 - DNA, 15 bp, Homo sapiens
gattactttgtctct

SEQ ID NO: 927435 - DNA, 15 bp, Homo sapiens
tgattactttgtctc

SEQ ID NO: 927436 - DNA, 15 bp, Homo sapiens
ttgattactttgtct

SEQ ID NO: 927437 - DNA, 15 bp, Homo sapiens
attgattactttgtc

SEQ ID NO: 927438 - DNA, 15 bp, Homo sapiens
cattgattactttgt

SEQ ID NO: 927439 - DNA, 15 bp, Homo sapiens
tcattgattactttg

SEQ ID NO: 927440 - DNA, 15 bp, Homo sapiens
ttcattgattacttt

SEQ ID NO: 927441 - DNA, 15 bp, Homo sapiens
gttcattgattactt

SEQ ID NO: 927442 - DNA, 15 bp, Homo sapiens
agttcattgattact

SEQ ID NO: 927443 - DNA, 15 bp, Homo sapiens
cagttcattgattac

SEQ ID NO: 927444 - DNA, 15 bp, Homo sapiens
tcagttcattgatta

SEQ ID NO: 927445 - DNA, 15 bp, Homo sapiens
ctcagttcattgatt

SEQ ID NO: 927446 - DNA, 15 bp, Homo sapiens
cctcagttcattgat

SEQ ID NO: 927447 - DNA, 15 bp, Homo sapiens
gcctcagttcattga

SEQ ID NO: 927448 - DNA, 15 bp, Homo sapiens
agcctcagttcattg

SEQ ID NO: 927449 - DNA, 15 bp, Homo sapiens
aagcctcagttcatt

SEQ ID NO: 927450 - DNA, 15 bp, Homo sapiens
gaagcctcagttcat

SEQ ID NO: 927451 - DNA, 15 bp, Homo sapiens
cgaagcctcagttca

SEQ ID NO: 927452 - DNA, 15 bp, Homo sapiens
tcgaagcctcagttc

SEQ ID NO: 927453 - DNA, 15 bp, Homo sapiens
atcgaagcctcagtt

SEQ ID NO: 927454 - DNA, 15 bp, Homo sapiens
aatcgaagcctcagt

SEQ ID NO: 927455 - DNA, 15 bp, Homo sapiens
caatcgaagcctcag

SEQ ID NO: 927456 - DNA, 15 bp, Homo sapiens
gcaatcgaagcctca

SEQ ID NO: 927457 - DNA, 15 bp, Homo sapiens
ggcaatcgaagcctc

SEQ ID NO: 927458 - DNA, 15 bp, Homo sapiens
aggcaatcgaagcct

SEQ ID NO: 927459 - DNA, 15 bp, Homo sapiens
caggcaatcgaagcc

SEQ ID NO: 927460 - DNA, 15 bp, Homo sapiens
gcaggcaatcgaagc

SEQ ID NO: 927461 - DNA, 15 bp, Homo sapiens
ggcaggcaatcgaag

SEQ ID NO: 927462 - DNA, 15 bp, Homo sapiens
tggcaggcaatcgaa

SEQ ID NO: 927463 - DNA, 15 bp, Homo sapiens
gtggcaggcaatcga

SEQ ID NO: 927464 - DNA, 15 bp, Homo sapiens
agtggcaggcaatcg

SEQ ID NO: 927465 - DNA, 15 bp, Homo sapiens
cagtggcaggcaatc

SEQ ID NO: 927466 - DNA, 15 bp, Homo sapiens
gcagtggcaggcaat

SEQ ID NO: 927467 - DNA, 15 bp, Homo sapiens
tgcagtggcaggcaa

SEQ ID NO: 927468 - DNA, 15 bp, Homo sapiens
ctgcagtggcaggca

SEQ ID NO: 927469 - DNA, 15 bp, Homo sapiens
tctgcagtggcaggc

SEQ ID NO: 927470 - DNA, 15 bp, Homo sapiens
ttctgcagtggcagg

SEQ ID NO: 927471 - DNA, 15 bp, Homo sapiens
tttctgcagtggcag

SEQ ID NO: 927472 - DNA, 15 bp, Homo sapiens
ctttctgcagtggca

SEQ ID NO: 927473 - DNA, 15 bp, Homo sapiens
tctttctgcagtggc

SEQ ID NO: 927474 - DNA, 15 bp, Homo sapiens
ctctttctgcagtgg

SEQ ID NO: 927475 - DNA, 15 bp, Homo sapiens
tctctttctgcagtg

SEQ ID NO: 927476 - DNA, 15 bp, Homo sapiens
ttctctttctgcagt

SEQ ID NO: 927477 - DNA, 15 bp, Homo sapiens
tttctctttctgcag

SEQ ID NO: 927478 - DNA, 15 bp, Homo sapiens
ttttctctttctgca

SEQ ID NO: 927479 - DNA, 15 bp, Homo sapiens
cttttctctttctgc

SEQ ID NO: 927480 - DNA, 15 bp, Homo sapiens
gcttttctctttctg

SEQ ID NO: 927481 - DNA, 15 bp, Homo sapiens
agcttttctctttct

SEQ ID NO: 927482 - DNA, 15 bp, Homo sapiens
gagcttttctctttc

SEQ ID NO: 927483 - DNA, 15 bp, Homo sapiens
tgagcttttctcttt

SEQ ID NO: 927484 - DNA, 15 bp, Homo sapiens
atgagcttttctctt

SEQ ID NO: 927485 - DNA, 15 bp, Homo sapiens
tatgagcttttctct

SEQ ID NO: 927486 - DNA, 15 bp, Homo sapiens
ctatgagcttttctc

SEQ ID NO: 927487 - DNA, 15 bp, Homo sapiens
gctatgagcttttct

SEQ ID NO: 927488 - DNA, 15 bp, Homo sapiens
agctatgagcttttc

SEQ ID NO: 927489 - DNA, 15 bp, Homo sapiens
cagctatgagctttt

SEQ ID NO: 927490 - DNA, 15 bp, Homo sapiens
tcagctatgagcttt

SEQ ID NO: 927491 - DNA, 15 bp, Homo sapiens
ctcagctatgagctt

SEQ ID NO: 927492 - DNA, 15 bp, Homo sapiens
gctcagctatgagct

SEQ ID NO: 927493 - DNA, 15 bp, Homo sapiens
agctcagctatgagc

SEQ ID NO: 927494 - DNA, 15 bp, Homo sapiens
tagctcagctatgag

SEQ ID NO: 927495 - DNA, 15 bp, Homo sapiens
ctagctcagctatga

SEQ ID NO: 927496 - DNA, 15 bp, Homo sapiens
cctagctcagctatg

SEQ ID NO: 927497 - DNA, 15 bp, Homo sapiens
gcctagctcagctat

SEQ ID NO: 927498 - DNA, 15 bp, Homo sapiens
tgcctagctcagcta

SEQ ID NO: 927499 - DNA, 15 bp, Homo sapiens
ctgcctagctcagct

SEQ ID NO: 927500 - DNA, 15 bp, Homo sapiens
tctgcctagctcagc

SEQ ID NO: 927501 - DNA, 15 bp, Homo sapiens
ttctgcctagctcag

SEQ ID NO: 927502 - DNA, 15 bp, Homo sapiens
tttctgcctagctca

SEQ ID NO: 927503 - DNA, 15 bp, Homo sapiens
ttttctgcctagctc

SEQ ID NO: 927504 - DNA, 15 bp, Homo sapiens
cttttctgcctagct

SEQ ID NO: 927505 - DNA, 15 bp, Homo sapiens
tcttttctgcctagc

SEQ ID NO: 927506 - DNA, 15 bp, Homo sapiens
ctcttttctgcctag

SEQ ID NO: 927507 - DNA, 15 bp, Homo sapiens
tctcttttctgccta

SEQ ID NO: 927508 - DNA, 15 bp, Homo sapiens
atctcttttctgcct

SEQ ID NO: 927509 - DNA, 15 bp, Homo sapiens
catctcttttctgcc

SEQ ID NO: 927510 - DNA, 15 bp, Homo sapiens
ccatctcttttctgc

SEQ ID NO: 927511 - DNA, 15 bp, Homo sapiens
tccatctcttttctg

SEQ ID NO: 927512 - DNA, 15 bp, Homo sapiens
ttccatctcttttct

SEQ ID NO: 927513 - DNA, 15 bp, Homo sapiens
gttccatctcttttc

SEQ ID NO: 927514 - DNA, 15 bp, Homo sapiens
ggttccatctctttt

SEQ ID NO: 927515 - DNA, 15 bp, Homo sapiens
tggttccatctcttt

SEQ ID NO: 927516 - DNA, 15 bp, Homo sapiens
ttggttccatctctt

SEQ ID NO: 927517 - DNA, 15 bp, Homo sapiens
tttggttccatctct

SEQ ID NO: 927518 - DNA, 15 bp, Homo sapiens
ttttggttccatctc

SEQ ID NO: 927519 - DNA, 15 bp, Homo sapiens
attttggttccatct

SEQ ID NO: 927520 - DNA, 15 bp, Homo sapiens
gattttggttccatc

SEQ ID NO: 927521 - DNA, 15 bp, Homo sapiens
agattttggttccat

SEQ ID NO: 927522 - DNA, 15 bp, Homo sapiens
gagattttggttcca

SEQ ID NO: 927523 - DNA, 15 bp, Homo sapiens
tgagattttggttcc

SEQ ID NO: 927524 - DNA, 15 bp, Homo sapiens
gtgagattttggttc

SEQ ID NO: 927525 - DNA, 15 bp, Homo sapiens
ggtgagattttggtt

SEQ ID NO: 927526 - DNA, 15 bp, Homo sapiens
tggtgagattttggt

SEQ ID NO: 927527 - DNA, 15 bp, Homo sapiens
gtggtgagattttgg

SEQ ID NO: 927528 - DNA, 15 bp, Homo sapiens
tgtggtgagattttg

SEQ ID NO: 927529 - DNA, 15 bp, Homo sapiens
gtgtggtgagatttt

SEQ ID NO: 927530 - DNA, 15 bp, Homo sapiens
tgtgtggtgagattt

SEQ ID NO: 927531 - DNA, 15 bp, Homo sapiens
atgtgtggtgagatt

SEQ ID NO: 927532 - DNA, 15 bp, Homo sapiens
aatgtgtggtgagat

SEQ ID NO: 927533 - DNA, 15 bp, Homo sapiens
caatgtgtggtgaga

SEQ ID NO: 927534 - DNA, 15 bp, Homo sapiens
tcaatgtgtggtgag

SEQ ID NO: 927535 - DNA, 15 bp, Homo sapiens
ttcaatgtgtggtga

SEQ ID NO: 927536 - DNA, 15 bp, Homo sapiens
tttcaatgtgtggtg

SEQ ID NO: 927537 - DNA, 15 bp, Homo sapiens
ttttcaatgtgtggt

SEQ ID NO: 927538 - DNA, 15 bp, Homo sapiens
attttcaatgtgtgg

SEQ ID NO: 927539 - DNA, 15 bp, Homo sapiens
aattttcaatgtgtg

SEQ ID NO: 927540 - DNA, 15 bp, Homo sapiens
caattttcaatgtgt

SEQ ID NO: 927541 - DNA, 15 bp, Homo sapiens
gcaattttcaatgtg

SEQ ID NO: 927542 - DNA, 15 bp, Homo sapiens
agcaattttcaatgt

SEQ ID NO: 927543 - DNA, 15 bp, Homo sapiens
gagcaattttcaatg

SEQ ID NO: 927544 - DNA, 15 bp, Homo sapiens
tgagcaattttcaat

SEQ ID NO: 927545 - DNA, 15 bp, Homo sapiens
atgagcaattttcaa

SEQ ID NO: 927546 - DNA, 15 bp, Homo sapiens
gatgagcaattttca

SEQ ID NO: 927547 - DNA, 15 bp, Homo sapiens
tgatgagcaattttc

SEQ ID NO: 927548 - DNA, 15 bp, Homo sapiens
ttgatgagcaatttt

SEQ ID NO: 927549 - DNA, 15 bp, Homo sapiens
tttgatgagcaattt

SEQ ID NO: 927550 - DNA, 15 bp, Homo sapiens
gtttgatgagcaatt

SEQ ID NO: 927551 - DNA, 15 bp, Homo sapiens
ggtttgatgagcaat

SEQ ID NO: 927552 - DNA, 15 bp, Homo sapiens
tggtttgatgagcaa

SEQ ID NO: 927553 - DNA, 15 bp, Homo sapiens
atggtttgatgagca

SEQ ID NO: 927554 - DNA, 15 bp, Homo sapiens
aatggtttgatgagc

SEQ ID NO: 927555 - DNA, 15 bp, Homo sapiens
caatggtttgatgag

SEQ ID NO: 927556 - DNA, 15 bp, Homo sapiens
gcaatggtttgatga

SEQ ID NO: 927557 - DNA, 15 bp, Homo sapiens
tgcaatggtttgatg

SEQ ID NO: 927558 - DNA, 15 bp, Homo sapiens
ttgcaatggtttgat

SEQ ID NO: 927559 - DNA, 15 bp, Homo sapiens
tttgcaatggtttga

SEQ ID NO: 927560 - DNA, 15 bp, Homo sapiens
gtttgcaatggtttg

SEQ ID NO: 927561 - DNA, 15 bp, Homo sapiens
tgtttgcaatggttt

SEQ ID NO: 927562 - DNA, 15 bp, Homo sapiens
atgtttgcaatggtt

SEQ ID NO: 927563 - DNA, 15 bp, Homo sapiens
catgtttgcaatggt

SEQ ID NO: 927564 - DNA, 15 bp, Homo sapiens
gcatgtttgcaatgg

SEQ ID NO: 927565 - DNA, 15 bp, Homo sapiens
tgcatgtttgcaatg

SEQ ID NO: 927566 - DNA, 15 bp, Homo sapiens
ttgcatgtttgcaat

SEQ ID NO: 927567 - DNA, 15 bp, Homo sapiens
cttgcatgtttgcaa

SEQ ID NO: 927568 - DNA, 15 bp, Homo sapiens
gcttgcatgtttgca

SEQ ID NO: 927569 - DNA, 15 bp, Homo sapiens
tgcttgcatgtttgc

SEQ ID NO: 927570 - DNA, 15 bp, Homo sapiens
ttgcttgcatgtttg

SEQ ID NO: 927571 - DNA, 15 bp, Homo sapiens
cttgcttgcatgttt

SEQ ID NO: 927572 - DNA, 15 bp, Homo sapiens
ccttgcttgcatgtt

SEQ ID NO: 927573 - DNA, 15 bp, Homo sapiens
accttgcttgcatgt

SEQ ID NO: 927574 - DNA, 15 bp, Homo sapiens
aaccttgcttgcatg

SEQ ID NO: 927575 - DNA, 15 bp, Homo sapiens
taaccttgcttgcat

SEQ ID NO: 927576 - DNA, 15 bp, Homo sapiens
ttaaccttgcttgca

SEQ ID NO: 927577 - DNA, 15 bp, Homo sapiens
tttaaccttgcttgc

SEQ ID NO: 927578 - DNA, 15 bp, Homo sapiens
atttaaccttgcttg

SEQ ID NO: 927579 - DNA, 15 bp, Homo sapiens
gatttaaccttgctt

SEQ ID NO: 927580 - DNA, 15 bp, Homo sapiens
tgatttaaccttgct

SEQ ID NO: 927581 - DNA, 15 bp, Homo sapiens
ttgatttaaccttgc

SEQ ID NO: 927582 - DNA, 15 bp, Homo sapiens
tttgatttaaccttg

SEQ ID NO: 927583 - DNA, 15 bp, Homo sapiens
ttttgatttaacctt

SEQ ID NO: 927584 - DNA, 15 bp, Homo sapiens
tttttgatttaacct

SEQ ID NO: 927585 - DNA, 15 bp, Homo sapiens
ctttttgatttaacc

SEQ ID NO: 927586 - DNA, 15 bp, Homo sapiens
tctttttgatttaac

SEQ ID NO: 927587 - DNA, 15 bp, Homo sapiens
ttctttttgatttaa

SEQ ID NO: 927588 - DNA, 15 bp, Homo sapiens
cttctttttgattta

SEQ ID NO: 927589 - DNA, 15 bp, Homo sapiens
tcttctttttgattt

SEQ ID NO: 927590 - DNA, 15 bp, Homo sapiens
ttcttctttttgatt

SEQ ID NO: 927591 - DNA, 15 bp, Homo sapiens
cttcttctttttgat

SEQ ID NO: 927592 - DNA, 15 bp, Homo sapiens
acttcttctttttga

SEQ ID NO: 927593 - DNA, 15 bp, Homo sapiens
tacttcttctttttg

SEQ ID NO: 927594 - DNA, 15 bp, Homo sapiens
atacttcttcttttt

SEQ ID NO: 927595 - DNA, 15 bp, Homo sapiens
aatacttcttctttt

SEQ ID NO: 927596 - DNA, 15 bp, Homo sapiens
taatacttcttcttt

SEQ ID NO: 927597 - DNA, 15 bp, Homo sapiens
ttaatacttcttctt

SEQ ID NO: 927598 - DNA, 15 bp, Homo sapiens
tttaatacttcttct

SEQ ID NO: 927599 - DNA, 15 bp, Homo sapiens
ctttaatacttcttc

SEQ ID NO: 927600 - DNA, 15 bp, Homo sapiens
tctttaatacttctt

SEQ ID NO: 927601 - DNA, 15 bp, Homo sapiens
ttctttaatacttct

SEQ ID NO: 927602 - DNA, 15 bp, Homo sapiens
cttctttaatacttc

SEQ ID NO: 927603 - DNA, 15 bp, Homo sapiens
acttctttaatactt

SEQ ID NO: 927604 - DNA, 15 bp, Homo sapiens
tacttctttaatact

SEQ ID NO: 927605 - DNA, 15 bp, Homo sapiens
atacttctttaatac

SEQ ID NO: 927606 - DNA, 15 bp, Homo sapiens
gatacttctttaata

SEQ ID NO: 927607 - DNA, 15 bp, Homo sapiens
tgatacttctttaat

SEQ ID NO: 927608 - DNA, 15 bp, Homo sapiens
ttgatacttctttaa

SEQ ID NO: 927609 - DNA, 15 bp, Homo sapiens
gttgatacttcttta

SEQ ID NO: 927610 - DNA, 15 bp, Homo sapiens
cgttgatacttcttt

SEQ ID NO: 927611 - DNA, 15 bp, Homo sapiens
acgttgatacttctt

SEQ ID NO: 927612 - DNA, 15 bp, Homo sapiens
gacgttgatacttct

SEQ ID NO: 927613 - DNA, 15 bp, Homo sapiens
agacgttgatacttc

SEQ ID NO: 927614 - DNA, 15 bp, Homo sapiens
aagacgttgatactt

SEQ ID NO: 927615 - DNA, 15 bp, Homo sapiens
gaagacgttgatact

SEQ ID NO: 927616 - DNA, 15 bp, Homo sapiens
agaagacgttgatac

SEQ ID NO: 927617 - DNA, 15 bp, Homo sapiens
tagaagacgttgata

SEQ ID NO: 927618 - DNA, 15 bp, Homo sapiens
ctagaagacgttgat

SEQ ID NO: 927619 - DNA, 15 bp, Homo sapiens
tctagaagacgttga

SEQ ID NO: 927620 - DNA, 15 bp, Homo sapiens
ttctagaagacgttg

SEQ ID NO: 927621 - DNA, 15 bp, Homo sapiens
tttctagaagacgtt

SEQ ID NO: 927622 - DNA, 15 bp, Homo sapiens
ttttctagaagacgt

SEQ ID NO: 927623 - DNA, 15 bp, Homo sapiens
tttttctagaagacg

SEQ ID NO: 927624 - DNA, 15 bp, Homo sapiens
ctttttctagaagac

SEQ ID NO: 927625 - DNA, 15 bp, Homo sapiens
gctttttctagaaga

SEQ ID NO: 927626 - DNA, 15 bp, Homo sapiens
ggctttttctagaag

SEQ ID NO: 927627 - DNA, 15 bp, Homo sapiens
tggctttttctagaa

SEQ ID NO: 927628 - DNA, 15 bp, Homo sapiens
ctggctttttctaga

SEQ ID NO: 927629 - DNA, 15 bp, Homo sapiens
tctggctttttctag

SEQ ID NO: 927630 - DNA, 15 bp, Homo sapiens
ctctggctttttcta

SEQ ID NO: 927631 - DNA, 15 bp, Homo sapiens
tctctggctttttct

SEQ ID NO: 927632 - DNA, 15 bp, Homo sapiens
ctctctggctttttc

SEQ ID NO: 927633 - DNA, 15 bp, Homo sapiens
cctctctggcttttt

SEQ ID NO: 927634 - DNA, 15 bp, Homo sapiens
acctctctggctttt

SEQ ID NO: 927635 - DNA, 15 bp, Homo sapiens
tacctctctggcttt

SEQ ID NO: 927636 - DNA, 15 bp, Homo sapiens
atacctctctggctt

SEQ ID NO: 927637 - DNA, 15 bp, Homo sapiens
aatacctctctggct

SEQ ID NO: 927638 - DNA, 15 bp, Homo sapiens
aaatacctctctggc

SEQ ID NO: 927639 - DNA, 15 bp, Homo sapiens
aaaatacctctctgg

SEQ ID NO: 927640 - DNA, 15 bp, Homo sapiens
taaaatacctctctg

SEQ ID NO: 927641 - DNA, 15 bp, Homo sapiens
ataaaatacctctct

SEQ ID NO: 927642 - DNA, 15 bp, Homo sapiens
aataaaatacctctc

SEQ ID NO: 927643 - DNA, 15 bp, Homo sapiens
taataaaatacctct

SEQ ID NO: 927644 - DNA, 15 bp, Homo sapiens
ataataaaatacctc

SEQ ID NO: 927645 - DNA, 15 bp, Homo sapiens
tataataaaatacct

SEQ ID NO: 927646 - DNA, 15 bp, Homo sapiens
atataataaaatacc

SEQ ID NO: 927647 - DNA, 15 bp, Homo sapiens
aatataataaaatac

SEQ ID NO: 927648 - DNA, 15 bp, Homo sapiens
taatataataaaata

SEQ ID NO: 927649 - DNA, 15 bp, Homo sapiens
ataatataataaaat

SEQ ID NO: 927650 - DNA, 15 bp, Homo sapiens
cataatataataaaa

SEQ ID NO: 927651 - DNA, 15 bp, Homo sapiens
tcataatataataaa

SEQ ID NO: 927652 - DNA, 15 bp, Homo sapiens
ctcataatataataa

SEQ ID NO: 927653 - DNA, 15 bp, Homo sapiens
actcataatataata

SEQ ID NO: 927654 - DNA, 15 bp, Homo sapiens
aactcataatataat

SEQ ID NO: 927655 - DNA, 15 bp, Homo sapiens
taactcataatataa

SEQ ID NO: 927656 - DNA, 15 bp, Homo sapiens
ataactcataatata

SEQ ID NO: 927657 - DNA, 15 bp, Homo sapiens
cataactcataatat

SEQ ID NO: 927658 - DNA, 15 bp, Homo sapiens
gcataactcataata

SEQ ID NO: 927659 - DNA, 15 bp, Homo sapiens
agcataactcataat

SEQ ID NO: 927660 - DNA, 15 bp, Homo sapiens
cagcataactcataa

SEQ ID NO: 927661 - DNA, 15 bp, Homo sapiens
acagcataactcata

SEQ ID NO: 927662 - DNA, 15 bp, Homo sapiens
aacagcataactcat

SEQ ID NO: 927663 - DNA, 15 bp, Homo sapiens
taacagcataactca

SEQ ID NO: 927664 - DNA, 15 bp, Homo sapiens
ataacagcataactc

SEQ ID NO: 927665 - DNA, 15 bp, Homo sapiens
gataacagcataact

SEQ ID NO: 927666 - DNA, 15 bp, Homo sapiens
ggataacagcataac

SEQ ID NO: 927667 - DNA, 15 bp, Homo sapiens
tggataacagcataa

SEQ ID NO: 927668 - DNA, 15 bp, Homo sapiens
atggataacagcata

SEQ ID NO: 927669 - DNA, 15 bp, Homo sapiens
aatggataacagcat

SEQ ID NO: 927670 - DNA, 15 bp, Homo sapiens
taatggataacagca

SEQ ID NO: 927671 - DNA, 15 bp, Homo sapiens
ctaatggataacagc

SEQ ID NO: 927672 - DNA, 15 bp, Homo sapiens
actaatggataacag

SEQ ID NO: 927673 - DNA, 15 bp, Homo sapiens
aactaatggataaca

SEQ ID NO: 927674 - DNA, 15 bp, Homo sapiens
aaactaatggataac

SEQ ID NO: 927675 - DNA, 15 bp, Homo sapiens
aaaactaatggataa

SEQ ID NO: 927676 - DNA, 15 bp, Homo sapiens
aaaaactaatggata

SEQ ID NO: 927677 - DNA, 15 bp, Homo sapiens
aaaaaactaatggat

SEQ ID NO: 927678 - DNA, 15 bp, Homo sapiens
aaaaaaactaatgga

SEQ ID NO: 927679 - DNA, 15 bp, Homo sapiens
taaaaaaactaatgg

SEQ ID NO: 927680 - DNA, 15 bp, Homo sapiens
ttaaaaaaactaatg

SEQ ID NO: 927681 - DNA, 15 bp, Homo sapiens
cttaaaaaaactaat

SEQ ID NO: 927682 - DNA, 15 bp, Homo sapiens
gcttaaaaaaactaa

SEQ ID NO: 927683 - DNA, 15 bp, Homo sapiens
tgcttaaaaaaacta

SEQ ID NO: 927684 - DNA, 15 bp, Homo sapiens
ttgcttaaaaaaact

SEQ ID NO: 927685 - DNA, 15 bp, Homo sapiens
tttgcttaaaaaaac

SEQ ID NO: 927686 - DNA, 15 bp, Homo sapiens
atttgcttaaaaaaa

SEQ ID NO: 927687 - DNA, 15 bp, Homo sapiens
catttgcttaaaaaa

SEQ ID NO: 927688 - DNA, 15 bp, Homo sapiens
gcatttgcttaaaaa

SEQ ID NO: 927689 - DNA, 15 bp, Homo sapiens
agcatttgcttaaaa

SEQ ID NO: 927690 - DNA, 15 bp, Homo sapiens
tagcatttgcttaaa

SEQ ID NO: 927691 - DNA, 15 bp, Homo sapiens
ttagcatttgcttaa

SEQ ID NO: 927692 - DNA, 15 bp, Homo sapiens
tttagcatttgctta

SEQ ID NO: 927693 - DNA, 15 bp, Homo sapiens
atttagcatttgctt

SEQ ID NO: 927694 - DNA, 15 bp, Homo sapiens
tatttagcatttgct

SEQ ID NO: 927695 - DNA, 15 bp, Homo sapiens
atatttagcatttgc

SEQ ID NO: 927696 - DNA, 15 bp, Homo sapiens
aatatttagcatttg

SEQ ID NO: 927697 - DNA, 15 bp, Homo sapiens
taatatttagcattt

SEQ ID NO: 927698 - DNA, 15 bp, Homo sapiens
ataatatttagcatt

SEQ ID NO: 927699 - DNA, 15 bp, Homo sapiens
aataatatttagcat

SEQ ID NO: 927700 - DNA, 15 bp, Homo sapiens
aaataatatttagca

SEQ ID NO: 927701 - DNA, 15 bp, Homo sapiens
aaaataatatttagc

SEQ ID NO: 927702 - DNA, 15 bp, Homo sapiens
taaaataatatttag

SEQ ID NO: 927703 - DNA, 15 bp, Homo sapiens
gtaaaataatattta

SEQ ID NO: 927704 - DNA, 15 bp, Homo sapiens
ggtaaaataatattt

SEQ ID NO: 927705 - DNA, 15 bp, Homo sapiens
gggtaaaataatatt

SEQ ID NO: 927706 - DNA, 15 bp, Homo sapiens
agggtaaaataatat

SEQ ID NO: 927707 - DNA, 15 bp, Homo sapiens
tagggtaaaataata

SEQ ID NO: 927708 - DNA, 15 bp, Homo sapiens
ttagggtaaaataat

SEQ ID NO: 927709 - DNA, 15 bp, Homo sapiens
tttagggtaaaataa

SEQ ID NO: 927710 - DNA, 15 bp, Homo sapiens
ctttagggtaaaata

SEQ ID NO: 927711 - DNA, 15 bp, Homo sapiens
actttagggtaaaat

SEQ ID NO: 927712 - DNA, 15 bp, Homo sapiens
cactttagggtaaaa

SEQ ID NO: 927713 - DNA, 15 bp, Homo sapiens
ccactttagggtaaa

SEQ ID NO: 927714 - DNA, 15 bp, Homo sapiens
accactttagggtaa

SEQ ID NO: 927715 - DNA, 15 bp, Homo sapiens
taccactttagggta

SEQ ID NO: 927716 - DNA, 15 bp, Homo sapiens
ataccactttagggt

SEQ ID NO: 927717 - DNA, 15 bp, Homo sapiens
aataccactttaggg

SEQ ID NO: 927718 - DNA, 15 bp, Homo sapiens
aaataccactttagg

SEQ ID NO: 927719 - DNA, 15 bp, Homo sapiens
gaaataccactttag

SEQ ID NO: 927720 - DNA, 15 bp, Homo sapiens
agaaataccacttta

SEQ ID NO: 927721 - DNA, 15 bp, Homo sapiens
aagaaataccacttt

SEQ ID NO: 927722 - DNA, 15 bp, Homo sapiens
aaagaaataccactt

SEQ ID NO: 927723 - DNA, 15 bp, Homo sapiens
aaaagaaataccact

SEQ ID NO: 927724 - DNA, 15 bp, Homo sapiens
gaaaagaaataccac

SEQ ID NO: 927725 - DNA, 15 bp, Homo sapiens
agaaaagaaatacca

SEQ ID NO: 927726 - DNA, 15 bp, Homo sapiens
aagaaaagaaatacc

SEQ ID NO: 927727 - DNA, 15 bp, Homo sapiens
caagaaaagaaatac

SEQ ID NO: 927728 - DNA, 15 bp, Homo sapiens
gcaagaaaagaaata

SEQ ID NO: 927729 - DNA, 15 bp, Homo sapiens
agcaagaaaagaaat

SEQ ID NO: 927730 - DNA, 15 bp, Homo sapiens
aagcaagaaaagaaa

SEQ ID NO: 927731 - DNA, 15 bp, Homo sapiens
aaagcaagaaaagaa

SEQ ID NO: 927732 - DNA, 15 bp, Homo sapiens
gaaagcaagaaaaga

SEQ ID NO: 927733 - DNA, 15 bp, Homo sapiens
tgaaagcaagaaaag

SEQ ID NO: 927734 - DNA, 15 bp, Homo sapiens
ttgaaagcaagaaaa

SEQ ID NO: 927735 - DNA, 15 bp, Homo sapiens
tttgaaagcaagaaa

SEQ ID NO: 927736 - DNA, 15 bp, Homo sapiens
atttgaaagcaagaa

SEQ ID NO: 927737 - DNA, 15 bp, Homo sapiens
catttgaaagcaaga

SEQ ID NO: 927738 - DNA, 15 bp, Homo sapiens
tcatttgaaagcaag

SEQ ID NO: 927739 - DNA, 15 bp, Homo sapiens
atcatttgaaagcaa

SEQ ID NO: 927740 - DNA, 15 bp, Homo sapiens
aatcatttgaaagca

SEQ ID NO: 927741 - DNA, 15 bp, Homo sapiens
gaatcatttgaaagc

SEQ ID NO: 927742 - DNA, 15 bp, Homo sapiens
agaatcatttgaaag

SEQ ID NO: 927743 - DNA, 15 bp, Homo sapiens
tagaatcatttgaaa

SEQ ID NO: 927744 - DNA, 15 bp, Homo sapiens
atagaatcatttgaa

SEQ ID NO: 927745 - DNA, 15 bp, Homo sapiens
aatagaatcatttga

SEQ ID NO: 927746 - DNA, 15 bp, Homo sapiens
aaatagaatcatttg

SEQ ID NO: 927747 - DNA, 15 bp, Homo sapiens
taaatagaatcattt

SEQ ID NO: 927748 - DNA, 15 bp, Homo sapiens
ttaaatagaatcatt

SEQ ID NO: 927749 - DNA, 15 bp, Homo sapiens
cttaaatagaatcat

SEQ ID NO: 927750 - DNA, 15 bp, Homo sapiens
tcttaaatagaatca

SEQ ID NO: 927751 - DNA, 15 bp, Homo sapiens
ttcttaaatagaatc

SEQ ID NO: 927752 - DNA, 15 bp, Homo sapiens
attcttaaatagaat

SEQ ID NO: 927753 - DNA, 15 bp, Homo sapiens
aattcttaaatagaa

SEQ ID NO: 927754 - DNA, 15 bp, Homo sapiens
caattcttaaataga

SEQ ID NO: 927755 - DNA, 15 bp, Homo sapiens
acaattcttaaatag

SEQ ID NO: 927756 - DNA, 15 bp, Homo sapiens
aacaattcttaaata

SEQ ID NO: 927757 - DNA, 15 bp, Homo sapiens
taacaattcttaaat

SEQ ID NO: 927758 - DNA, 15 bp, Homo sapiens
gtaacaattcttaaa

SEQ ID NO: 927759 - DNA, 15 bp, Homo sapiens
agtaacaattcttaa

SEQ ID NO: 927760 - DNA, 15 bp, Homo sapiens
aagtaacaattctta

SEQ ID NO: 927761 - DNA, 15 bp, Homo sapiens
caagtaacaattctt

SEQ ID NO: 927762 - DNA, 15 bp, Homo sapiens
gcaagtaacaattct

SEQ ID NO: 927763 - DNA, 15 bp, Homo sapiens
tgcaagtaacaattc

SEQ ID NO: 927764 - DNA, 15 bp, Homo sapiens
atgcaagtaacaatt

SEQ ID NO: 927765 - DNA, 15 bp, Homo sapiens
catgcaagtaacaat

SEQ ID NO: 927766 - DNA, 15 bp, Homo sapiens
acatgcaagtaacaa

SEQ ID NO: 927767 - DNA, 15 bp, Homo sapiens
cacatgcaagtaaca

SEQ ID NO: 927768 - DNA, 15 bp, Homo sapiens
tcacatgcaagtaac

SEQ ID NO: 927769 - DNA, 15 bp, Homo sapiens
atcacatgcaagtaa

SEQ ID NO: 927770 - DNA, 15 bp, Homo sapiens
aatcacatgcaagta

SEQ ID NO: 927771 - DNA, 15 bp, Homo sapiens
caatcacatgcaagt

SEQ ID NO: 927772 - DNA, 15 bp, Homo sapiens
ccaatcacatgcaag

SEQ ID NO: 927773 - DNA, 15 bp, Homo sapiens
tccaatcacatgcaa

SEQ ID NO: 927774 - DNA, 15 bp, Homo sapiens
atccaatcacatgca

SEQ ID NO: 927775 - DNA, 15 bp, Homo sapiens
aatccaatcacatgc

SEQ ID NO: 927776 - DNA, 15 bp, Homo sapiens
taatccaatcacatg

SEQ ID NO: 927777 - DNA, 15 bp, Homo sapiens
gtaatccaatcacat

SEQ ID NO: 927778 - DNA, 15 bp, Homo sapiens
tgtaatccaatcaca

SEQ ID NO: 927779 - DNA, 15 bp, Homo sapiens
gtgtaatccaatcac

SEQ ID NO: 927780 - DNA, 15 bp, Homo sapiens
ggtgtaatccaatca

SEQ ID NO: 927781 - DNA, 15 bp, Homo sapiens
aggtgtaatccaatc

SEQ ID NO: 927782 - DNA, 15 bp, Homo sapiens
gaggtgtaatccaat

SEQ ID NO: 927783 - DNA, 15 bp, Homo sapiens
agaggtgtaatccaa

SEQ ID NO: 927784 - DNA, 15 bp, Homo sapiens
cagaggtgtaatcca

SEQ ID NO: 927785 - DNA, 15 bp, Homo sapiens
acagaggtgtaatcc

SEQ ID NO: 927786 - DNA, 15 bp, Homo sapiens
gacagaggtgtaatc

SEQ ID NO: 927787 - DNA, 15 bp, Homo sapiens
tgacagaggtgtaat

SEQ ID NO: 927788 - DNA, 15 bp, Homo sapiens
ctgacagaggtgtaa

SEQ ID NO: 927789 - DNA, 15 bp, Homo sapiens
actgacagaggtgta

SEQ ID NO: 927790 - DNA, 15 bp, Homo sapiens
tactgacagaggtgt

SEQ ID NO: 927791 - DNA, 15 bp, Homo sapiens
ttactgacagaggtg

SEQ ID NO: 927792 - DNA, 15 bp, Homo sapiens
tttactgacagaggt

SEQ ID NO: 927793 - DNA, 15 bp, Homo sapiens
ttttactgacagagg

SEQ ID NO: 927794 - DNA, 15 bp, Homo sapiens
gttttactgacagag

SEQ ID NO: 927795 - DNA, 15 bp, Homo sapiens
agttttactgacaga

SEQ ID NO: 927796 - DNA, 15 bp, Homo sapiens
cagttttactgacag

SEQ ID NO: 927797 - DNA, 15 bp, Homo sapiens
ccagttttactgaca

SEQ ID NO: 927798 - DNA, 15 bp, Homo sapiens
tccagttttactgac

SEQ ID NO: 927799 - DNA, 15 bp, Homo sapiens
ttccagttttactga

SEQ ID NO: 927800 - DNA, 15 bp, Homo sapiens
cttccagttttactg

SEQ ID NO: 927801 - DNA, 15 bp, Homo sapiens
acttccagttttact

SEQ ID NO: 927802 - DNA, 15 bp, Homo sapiens
aacttccagttttac

SEQ ID NO: 927803 - DNA, 15 bp, Homo sapiens
aaacttccagtttta

SEQ ID NO: 927804 - DNA, 15 bp, Homo sapiens
caaacttccagtttt

SEQ ID NO: 927805 - DNA, 15 bp, Homo sapiens
acaaacttccagttt

SEQ ID NO: 927806 - DNA, 15 bp, Homo sapiens
cacaaacttccagtt

SEQ ID NO: 927807 - DNA, 15 bp, Homo sapiens
acacaaacttccagt

SEQ ID NO: 927808 - DNA, 15 bp, Homo sapiens
tacacaaacttccag

SEQ ID NO: 927809 - DNA, 15 bp, Homo sapiens
gtacacaaacttcca

SEQ ID NO: 927810 - DNA, 15 bp, Homo sapiens
tgtacacaaacttcc

SEQ ID NO: 927811 - DNA, 15 bp, Homo sapiens
atgtacacaaacttc

SEQ ID NO: 927812 - DNA, 15 bp, Homo sapiens
catgtacacaaactt

SEQ ID NO: 927813 - DNA, 15 bp, Homo sapiens
acatgtacacaaact

SEQ ID NO: 927814 - DNA, 15 bp, Homo sapiens
tacatgtacacaaac

SEQ ID NO: 927815 - DNA, 15 bp, Homo sapiens
atacatgtacacaaa

SEQ ID NO: 927816 - DNA, 15 bp, Homo sapiens
gatacatgtacacaa

SEQ ID NO: 927817 - DNA, 15 bp, Homo sapiens
agatacatgtacaca

SEQ ID NO: 927818 - DNA, 15 bp, Homo sapiens
aagatacatgtacac

SEQ ID NO: 927819 - DNA, 15 bp, Homo sapiens
aaagatacatgtaca

SEQ ID NO: 927820 - DNA, 15 bp, Homo sapiens
gaaagatacatgtac

SEQ ID NO: 927821 - DNA, 15 bp, Homo sapiens
agaaagatacatgta

SEQ ID NO: 927822 - DNA, 15 bp, Homo sapiens
tagaaagatacatgt

SEQ ID NO: 927823 - DNA, 15 bp, Homo sapiens
atagaaagatacatg

SEQ ID NO: 927824 - DNA, 15 bp, Homo sapiens
aatagaaagatacat

SEQ ID NO: 927825 - DNA, 15 bp, Homo sapiens
taatagaaagataca

SEQ ID NO: 927826 - DNA, 15 bp, Homo sapiens
ataatagaaagatac

SEQ ID NO: 927827 - DNA, 15 bp, Homo sapiens
tataatagaaagata

SEQ ID NO: 927828 - DNA, 15 bp, Homo sapiens
gtataatagaaagat

SEQ ID NO: 927829 - DNA, 15 bp, Homo sapiens
tgtataatagaaaga

SEQ ID NO: 927830 - DNA, 15 bp, Homo sapiens
gtgtataatagaaag

SEQ ID NO: 927831 - DNA, 15 bp, Homo sapiens
agtgtataatagaaa

SEQ ID NO: 927832 - DNA, 15 bp, Homo sapiens
cagtgtataatagaa

SEQ ID NO: 927833 - DNA, 15 bp, Homo sapiens
tcagtgtataataga

SEQ ID NO: 927834 - DNA, 15 bp, Homo sapiens
gtcagtgtataatag

SEQ ID NO: 927835 - DNA, 15 bp, Homo sapiens
agtcagtgtataata

SEQ ID NO: 927836 - DNA, 15 bp, Homo sapiens
tagtcagtgtataat

SEQ ID NO: 927837 - DNA, 15 bp, Homo sapiens
ttagtcagtgtataa

SEQ ID NO: 927838 - DNA, 15 bp, Homo sapiens
tttagtcagtgtata

SEQ ID NO: 927839 - DNA, 15 bp, Homo sapiens
gtttagtcagtgtat

SEQ ID NO: 927840 - DNA, 15 bp, Homo sapiens
ggtttagtcagtgta

SEQ ID NO: 927841 - DNA, 15 bp, Homo sapiens
tggtttagtcagtgt

SEQ ID NO: 927842 - DNA, 15 bp, Homo sapiens
gtggtttagtcagtg

SEQ ID NO: 927843 - DNA, 15 bp, Homo sapiens
cgtggtttagtcagt

SEQ ID NO: 927844 - DNA, 15 bp, Homo sapiens
tcgtggtttagtcag

SEQ ID NO: 927845 - DNA, 15 bp, Homo sapiens
ctcgtggtttagtca

SEQ ID NO: 927846 - DNA, 15 bp, Homo sapiens
actcgtggtttagtc

SEQ ID NO: 927847 - DNA, 15 bp, Homo sapiens
tactcgtggtttagt

SEQ ID NO: 927848 - DNA, 15 bp, Homo sapiens
ctactcgtggtttag

SEQ ID NO: 927849 - DNA, 15 bp, Homo sapiens
gctactcgtggttta

SEQ ID NO: 927850 - DNA, 15 bp, Homo sapiens
agctactcgtggttt

SEQ ID NO: 927851 - DNA, 15 bp, Homo sapiens
tagctactcgtggtt

SEQ ID NO: 927852 - DNA, 15 bp, Homo sapiens
atagctactcgtggt

SEQ ID NO: 927853 - DNA, 15 bp, Homo sapiens
gatagctactcgtgg

SEQ ID NO: 927854 - DNA, 15 bp, Homo sapiens
tgatagctactcgtg

SEQ ID NO: 927855 - DNA, 15 bp, Homo sapiens
atgatagctactcgt

SEQ ID NO: 927856 - DNA, 15 bp, Homo sapiens
catgatagctactcg

SEQ ID NO: 927857 - DNA, 15 bp, Homo sapiens
ccatgatagctactc

SEQ ID NO: 927858 - DNA, 15 bp, Homo sapiens
accatgatagctact

SEQ ID NO: 927859 - DNA, 15 bp, Homo sapiens
caccatgatagctac

SEQ ID NO: 927860 - DNA, 15 bp, Homo sapiens
tcaccatgatagcta

SEQ ID NO: 927861 - DNA, 15 bp, Homo sapiens
ttcaccatgatagct

SEQ ID NO: 927862 - DNA, 15 bp, Homo sapiens
tttcaccatgatagc

SEQ ID NO: 927863 - DNA, 15 bp, Homo sapiens
atttcaccatgatag

SEQ ID NO: 927864 - DNA, 15 bp, Homo sapiens
gatttcaccatgata

SEQ ID NO: 927865 - DNA, 15 bp, Homo sapiens
tgatttcaccatgat

SEQ ID NO: 927866 - DNA, 15 bp, Homo sapiens
atgatttcaccatga

SEQ ID NO: 927867 - DNA, 15 bp, Homo sapiens
tatgatttcaccatg

SEQ ID NO: 927868 - DNA, 15 bp, Homo sapiens
atatgatttcaccat

SEQ ID NO: 927869 - DNA, 15 bp, Homo sapiens
catatgatttcacca

SEQ ID NO: 927870 - DNA, 15 bp, Homo sapiens
tcatatgatttcacc

SEQ ID NO: 927871 - DNA, 15 bp, Homo sapiens
atcatatgatttcac

SEQ ID NO: 927872 - DNA, 15 bp, Homo sapiens
aatcatatgatttca

SEQ ID NO: 927873 - DNA, 15 bp, Homo sapiens
aaatcatatgatttc

SEQ ID NO: 927874 - DNA, 15 bp, Homo sapiens
aaaatcatatgattt

SEQ ID NO: 927875 - DNA, 15 bp, Homo sapiens
caaaatcatatgatt

SEQ ID NO: 927876 - DNA, 15 bp, Homo sapiens
tcaaaatcatatgat

SEQ ID NO: 927877 - DNA, 15 bp, Homo sapiens
ttcaaaatcatatga

SEQ ID NO: 927878 - DNA, 15 bp, Homo sapiens
tttcaaaatcatatg

SEQ ID NO: 927879 - DNA, 15 bp, Homo sapiens
ttttcaaaatcatat

SEQ ID NO: 927880 - DNA, 15 bp, Homo sapiens
tttttcaaaatcata

SEQ ID NO: 927881 - DNA, 15 bp, Homo sapiens
atttttcaaaatcat

SEQ ID NO: 927882 - DNA, 15 bp, Homo sapiens
tatttttcaaaatca

SEQ ID NO: 927883 - DNA, 15 bp, Homo sapiens
atatttttcaaaatc

SEQ ID NO: 927884 - DNA, 15 bp, Homo sapiens
aatatttttcaaaat

SEQ ID NO: 927885 - DNA, 15 bp, Homo sapiens
aaatatttttcaaaa

SEQ ID NO: 927886 - DNA, 15 bp, Homo sapiens
aaaatatttttcaaa

SEQ ID NO: 927887 - DNA, 15 bp, Homo sapiens
taaaatatttttcaa

SEQ ID NO: 927888 - DNA, 15 bp, Homo sapiens
ttaaaatatttttca

SEQ ID NO: 927889 - DNA, 15 bp, Homo sapiens
attaaaatatttttc

SEQ ID NO: 927890 - DNA, 15 bp, Homo sapiens
aattaaaatattttt

SEQ ID NO: 927891 - DNA, 15 bp, Homo sapiens
caattaaaatatttt

SEQ ID NO: 927892 - DNA, 15 bp, Homo sapiens
tcaattaaaatattt

SEQ ID NO: 927893 - DNA, 15 bp, Homo sapiens
ctcaattaaaatatt

SEQ ID NO: 927894 - DNA, 15 bp, Homo sapiens
actcaattaaaatat

SEQ ID NO: 927895 - DNA, 15 bp, Homo sapiens
aactcaattaaaata

SEQ ID NO: 927896 - DNA, 15 bp, Homo sapiens
aaactcaattaaaat

SEQ ID NO: 927897 - DNA, 15 bp, Homo sapiens
taaactcaattaaaa

SEQ ID NO: 927898 - DNA, 15 bp, Homo sapiens
ataaactcaattaaa

SEQ ID NO: 927899 - DNA, 15 bp, Homo sapiens
tataaactcaattaa

SEQ ID NO: 927900 - DNA, 15 bp, Homo sapiens
ctataaactcaatta

SEQ ID NO: 927901 - DNA, 15 bp, Homo sapiens
cctataaactcaatt

SEQ ID NO: 927902 - DNA, 15 bp, Homo sapiens
acctataaactcaat

SEQ ID NO: 927903 - DNA, 15 bp, Homo sapiens
cacctataaactcaa

SEQ ID NO: 927904 - DNA, 15 bp, Homo sapiens
tcacctataaactca

SEQ ID NO: 927905 - DNA, 15 bp, Homo sapiens
ctcacctataaactc

SEQ ID NO: 927906 - DNA, 15 bp, Homo sapiens
cctcacctataaact

SEQ ID NO: 927907 - DNA, 15 bp, Homo sapiens
tcctcacctataaac

SEQ ID NO: 927908 - DNA, 15 bp, Homo sapiens
atcctcacctataaa

SEQ ID NO: 927909 - DNA, 15 bp, Homo sapiens
aatcctcacctataa

SEQ ID NO: 927910 - DNA, 15 bp, Homo sapiens
caatcctcacctata

SEQ ID NO: 927911 - DNA, 15 bp, Homo sapiens
tcaatcctcacctat

SEQ ID NO: 927912 - DNA, 15 bp, Homo sapiens
ctcaatcctcaccta

SEQ ID NO: 927913 - DNA, 15 bp, Homo sapiens
cctcaatcctcacct

SEQ ID NO: 927914 - DNA, 15 bp, Homo sapiens
gcctcaatcctcacc

SEQ ID NO: 927915 - DNA, 15 bp, Homo sapiens
tgcctcaatcctcac

SEQ ID NO: 927916 - DNA, 15 bp, Homo sapiens
ttgcctcaatcctca

SEQ ID NO: 927917 - DNA, 15 bp, Homo sapiens
attgcctcaatcctc

SEQ ID NO: 927918 - DNA, 15 bp, Homo sapiens
tattgcctcaatcct

SEQ ID NO: 927919 - DNA, 15 bp, Homo sapiens
ctattgcctcaatcc

SEQ ID NO: 927920 - DNA, 15 bp, Homo sapiens
cctattgcctcaatc

SEQ ID NO: 927921 - DNA, 15 bp, Homo sapiens
ccctattgcctcaat

SEQ ID NO: 927922 - DNA, 15 bp, Homo sapiens
accctattgcctcaa

SEQ ID NO: 927923 - DNA, 15 bp, Homo sapiens
caccctattgcctca

SEQ ID NO: 927924 - DNA, 15 bp, Homo sapiens
ccaccctattgcctc

SEQ ID NO: 927925 - DNA, 15 bp, Homo sapiens
tccaccctattgcct

SEQ ID NO: 927926 - DNA, 15 bp, Homo sapiens
ttccaccctattgcc

SEQ ID NO: 927927 - DNA, 15 bp, Homo sapiens
attccaccctattgc

SEQ ID NO: 927928 - DNA, 15 bp, Homo sapiens
cattccaccctattg

SEQ ID NO: 927929 - DNA, 15 bp, Homo sapiens
tcattccaccctatt

SEQ ID NO: 927930 - DNA, 15 bp, Homo sapiens
ttcattccaccctat

SEQ ID NO: 927931 - DNA, 15 bp, Homo sapiens
tttcattccacccta

SEQ ID NO: 927932 - DNA, 15 bp, Homo sapiens
atttcattccaccct

SEQ ID NO: 927933 - DNA, 15 bp, Homo sapiens
tatttcattccaccc

SEQ ID NO: 927934 - DNA, 15 bp, Homo sapiens
atatttcattccacc

SEQ ID NO: 927935 - DNA, 15 bp, Homo sapiens
tatatttcattccac

SEQ ID NO: 927936 - DNA, 15 bp, Homo sapiens
atatatttcattcca

SEQ ID NO: 927937 - DNA, 15 bp, Homo sapiens
gatatatttcattcc

SEQ ID NO: 927938 - DNA, 15 bp, Homo sapiens
tgatatatttcattc

SEQ ID NO: 927939 - DNA, 15 bp, Homo sapiens
gtgatatatttcatt

SEQ ID NO: 927940 - DNA, 15 bp, Homo sapiens
tgtgatatatttcat

SEQ ID NO: 927941 - DNA, 15 bp, Homo sapiens
gtgtgatatatttca

SEQ ID NO: 927942 - DNA, 15 bp, Homo sapiens
ggtgtgatatatttc

SEQ ID NO: 927943 - DNA, 15 bp, Homo sapiens
cggtgtgatatattt

SEQ ID NO: 927944 - DNA, 15 bp, Homo sapiens
ccggtgtgatatatt

SEQ ID NO: 927945 - DNA, 15 bp, Homo sapiens
accggtgtgatatat

SEQ ID NO: 927946 - DNA, 15 bp, Homo sapiens
taccggtgtgatata

SEQ ID NO: 927947 - DNA, 15 bp, Homo sapiens
ttaccggtgtgatat

SEQ ID NO: 927948 - DNA, 15 bp, Homo sapiens
attaccggtgtgata

SEQ ID NO: 927949 - DNA, 15 bp, Homo sapiens
gattaccggtgtgat

SEQ ID NO: 927950 - DNA, 15 bp, Homo sapiens
tgattaccggtgtga

SEQ ID NO: 927951 - DNA, 15 bp, Homo sapiens
ctgattaccggtgtg

SEQ ID NO: 927952 - DNA, 15 bp, Homo sapiens
actgattaccggtgt

SEQ ID NO: 927953 - DNA, 15 bp, Homo sapiens
tactgattaccggtg

SEQ ID NO: 927954 - DNA, 15 bp, Homo sapiens
ctactgattaccggt

SEQ ID NO: 927955 - DNA, 15 bp, Homo sapiens
tctactgattaccgg

SEQ ID NO: 927956 - DNA, 15 bp, Homo sapiens
ttctactgattaccg

SEQ ID NO: 927957 - DNA, 15 bp, Homo sapiens
tttctactgattacc

SEQ ID NO: 927958 - DNA, 15 bp, Homo sapiens
atttctactgattac

SEQ ID NO: 927959 - DNA, 15 bp, Homo sapiens
gatttctactgatta

SEQ ID NO: 927960 - DNA, 15 bp, Homo sapiens
tgatttctactgatt

SEQ ID NO: 927961 - DNA, 15 bp, Homo sapiens
ctgatttctactgat

SEQ ID NO: 927962 - DNA, 15 bp, Homo sapiens
tctgatttctactga

SEQ ID NO: 927963 - DNA, 15 bp, Homo sapiens
atctgatttctactg

SEQ ID NO: 927964 - DNA, 15 bp, Homo sapiens
aatctgatttctact

SEQ ID NO: 927965 - DNA, 15 bp, Homo sapiens
aaatctgatttctac

SEQ ID NO: 927966 - DNA, 15 bp, Homo sapiens
caaatctgatttcta

SEQ ID NO: 927967 - DNA, 15 bp, Homo sapiens
acaaatctgatttct

SEQ ID NO: 927968 - DNA, 15 bp, Homo sapiens
aacaaatctgatttc

SEQ ID NO: 927969 - DNA, 15 bp, Homo sapiens
taacaaatctgattt

SEQ ID NO: 927970 - DNA, 15 bp, Homo sapiens
ctaacaaatctgatt

SEQ ID NO: 927971 - DNA, 15 bp, Homo sapiens
tctaacaaatctgat

SEQ ID NO: 927972 - DNA, 15 bp, Homo sapiens
ttctaacaaatctga

SEQ ID NO: 927973 - DNA, 15 bp, Homo sapiens
gttctaacaaatctg

SEQ ID NO: 927974 - DNA, 15 bp, Homo sapiens
agttctaacaaatct

SEQ ID NO: 927975 - DNA, 15 bp, Homo sapiens
aagttctaacaaatc

SEQ ID NO: 927976 - DNA, 15 bp, Homo sapiens
gaagttctaacaaat

SEQ ID NO: 927977 - DNA, 15 bp, Homo sapiens
cgaagttctaacaaa

SEQ ID NO: 927978 - DNA, 15 bp, Homo sapiens
acgaagttctaacaa

SEQ ID NO: 927979 - DNA, 15 bp, Homo sapiens
cacgaagttctaaca

SEQ ID NO: 927980 - DNA, 15 bp, Homo sapiens
ccacgaagttctaac

SEQ ID NO: 927981 - DNA, 15 bp, Homo sapiens
cccacgaagttctaa

SEQ ID NO: 927982 - DNA, 15 bp, Homo sapiens
ccccacgaagttcta

SEQ ID NO: 927983 - DNA, 15 bp, Homo sapiens
cccccacgaagttct

SEQ ID NO: 927984 - DNA, 15 bp, Homo sapiens
tcccccacgaagttc

SEQ ID NO: 927985 - DNA, 15 bp, Homo sapiens
ttcccccacgaagtt

SEQ ID NO: 927986 - DNA, 15 bp, Homo sapiens
tttcccccacgaagt

SEQ ID NO: 927987 - DNA, 15 bp, Homo sapiens
ctttcccccacgaag

SEQ ID NO: 927988 - DNA, 15 bp, Homo sapiens
gctttcccccacgaa

SEQ ID NO: 927989 - DNA, 15 bp, Homo sapiens
agctttcccccacga

SEQ ID NO: 927990 - DNA, 15 bp, Homo sapiens
tagctttcccccacg

SEQ ID NO: 927991 - DNA, 15 bp, Homo sapiens
ttagctttcccccac

SEQ ID NO: 927992 - DNA, 15 bp, Homo sapiens
gttagctttccccca

SEQ ID NO: 927993 - DNA, 15 bp, Homo sapiens
tgttagctttccccc

SEQ ID NO: 927994 - DNA, 15 bp, Homo sapiens
atgttagctttcccc

SEQ ID NO: 927995 - DNA, 15 bp, Homo sapiens
aatgttagctttccc

SEQ ID NO: 927996 - DNA, 15 bp, Homo sapiens
aaatgttagctttcc

SEQ ID NO: 927997 - DNA, 15 bp, Homo sapiens
taaatgttagctttc

SEQ ID NO: 927998 - DNA, 15 bp, Homo sapiens
ttaaatgttagcttt

SEQ ID NO: 927999 - DNA, 15 bp, Homo sapiens
attaaatgttagctt

SEQ ID NO: 928000 - DNA, 15 bp, Homo sapiens
aattaaatgttagct

SEQ ID NO: 928001 - DNA, 15 bp, Homo sapiens
aaattaaatgttagc

SEQ ID NO: 928002 - DNA, 15 bp, Homo sapiens
aaaattaaatgttag

SEQ ID NO: 928003 - DNA, 15 bp, Homo sapiens
aaaaattaaatgtta

SEQ ID NO: 928004 - DNA, 15 bp, Homo sapiens
aaaaaattaaatgtt

SEQ ID NO: 928005 - DNA, 15 bp, Homo sapiens
gaaaaaattaaatgt

SEQ ID NO: 928006 - DNA, 15 bp, Homo sapiens
agaaaaaattaaatg

SEQ ID NO: 928007 - DNA, 15 bp, Homo sapiens
tagaaaaaattaaat

SEQ ID NO: 928008 - DNA, 15 bp, Homo sapiens
ctagaaaaaattaaa

SEQ ID NO: 928009 - DNA, 15 bp, Homo sapiens
tctagaaaaaattaa

SEQ ID NO: 928010 - DNA, 15 bp, Homo sapiens
ttctagaaaaaatta

SEQ ID NO: 928011 - DNA, 15 bp, Homo sapiens
cttctagaaaaaatt

SEQ ID NO: 928012 - DNA, 15 bp, Homo sapiens
acttctagaaaaaat

SEQ ID NO: 928013 - DNA, 15 bp, Homo sapiens
tacttctagaaaaaa

SEQ ID NO: 928014 - DNA, 15 bp, Homo sapiens
ttacttctagaaaaa

SEQ ID NO: 928015 - DNA, 15 bp, Homo sapiens
cttacttctagaaaa

SEQ ID NO: 928016 - DNA, 15 bp, Homo sapiens
acttacttctagaaa

SEQ ID NO: 928017 - DNA, 15 bp, Homo sapiens
aacttacttctagaa

SEQ ID NO: 928018 - DNA, 15 bp, Homo sapiens
taacttacttctaga

SEQ ID NO: 928019 - DNA, 15 bp, Homo sapiens
ttaacttacttctag

SEQ ID NO: 928020 - DNA, 15 bp, Homo sapiens
tttaacttacttcta

SEQ ID NO: 928021 - DNA, 15 bp, Homo sapiens
ttttaacttacttct

SEQ ID NO: 928022 - DNA, 15 bp, Homo sapiens
cttttaacttacttc

SEQ ID NO: 928023 - DNA, 15 bp, Homo sapiens
tcttttaacttactt

SEQ ID NO: 928024 - DNA, 15 bp, Homo sapiens
atcttttaacttact

SEQ ID NO: 928025 - DNA, 15 bp, Homo sapiens
catcttttaacttac

SEQ ID NO: 928026 - DNA, 15 bp, Homo sapiens
tcatcttttaactta

SEQ ID NO: 928027 - DNA, 15 bp, Homo sapiens
atcatcttttaactt

SEQ ID NO: 928028 - DNA, 15 bp, Homo sapiens
tatcatcttttaact

SEQ ID NO: 928029 - DNA, 15 bp, Homo sapiens
ctatcatcttttaac

SEQ ID NO: 928030 - DNA, 15 bp, Homo sapiens
tctatcatcttttaa

SEQ ID NO: 928031 - DNA, 15 bp, Homo sapiens
atctatcatctttta

SEQ ID NO: 928032 - DNA, 15 bp, Homo sapiens
tatctatcatctttt

SEQ ID NO: 928033 - DNA, 15 bp, Homo sapiens
gtatctatcatcttt

SEQ ID NO: 928034 - DNA, 15 bp, Homo sapiens
tgtatctatcatctt

SEQ ID NO: 928035 - DNA, 15 bp, Homo sapiens
atgtatctatcatct

SEQ ID NO: 928036 - DNA, 15 bp, Homo sapiens
catgtatctatcatc

SEQ ID NO: 928037 - DNA, 15 bp, Homo sapiens
acatgtatctatcat

SEQ ID NO: 928038 - DNA, 15 bp, Homo sapiens
gacatgtatctatca

SEQ ID NO: 928039 - DNA, 15 bp, Homo sapiens
tgacatgtatctatc

SEQ ID NO: 928040 - DNA, 15 bp, Homo sapiens
atgacatgtatctat

SEQ ID NO: 928041 - DNA, 15 bp, Homo sapiens
aatgacatgtatcta

SEQ ID NO: 928042 - DNA, 15 bp, Homo sapiens
gaatgacatgtatct

SEQ ID NO: 928043 - DNA, 15 bp, Homo sapiens
agaatgacatgtatc

SEQ ID NO: 928044 - DNA, 15 bp, Homo sapiens
tagaatgacatgtat

SEQ ID NO: 928045 - DNA, 15 bp, Homo sapiens
ttagaatgacatgta

SEQ ID NO: 928046 - DNA, 15 bp, Homo sapiens
attagaatgacatgt

SEQ ID NO: 928047 - DNA, 15 bp, Homo sapiens
cattagaatgacatg

SEQ ID NO: 928048 - DNA, 15 bp, Homo sapiens
acattagaatgacat

SEQ ID NO: 928049 - DNA, 15 bp, Homo sapiens
aacattagaatgaca

SEQ ID NO: 928050 - DNA, 15 bp, Homo sapiens
taacattagaatgac

SEQ ID NO: 928051 - DNA, 15 bp, Homo sapiens
ttaacattagaatga

SEQ ID NO: 928052 - DNA, 15 bp, Homo sapiens
cttaacattagaatg

SEQ ID NO: 928053 - DNA, 15 bp, Homo sapiens
tcttaacattagaat

SEQ ID NO: 928054 - DNA, 15 bp, Homo sapiens
ttcttaacattagaa

SEQ ID NO: 928055 - DNA, 15 bp, Homo sapiens
attcttaacattaga

SEQ ID NO: 928056 - DNA, 15 bp, Homo sapiens
tattcttaacattag

SEQ ID NO: 928057 - DNA, 15 bp, Homo sapiens
ttattcttaacatta

SEQ ID NO: 928058 - DNA, 15 bp, Homo sapiens
tttattcttaacatt

SEQ ID NO: 928059 - DNA, 15 bp, Homo sapiens
atttattcttaacat

SEQ ID NO: 928060 - DNA, 15 bp, Homo sapiens
aatttattcttaaca

SEQ ID NO: 928061 - DNA, 15 bp, Homo sapiens
taatttattcttaac

SEQ ID NO: 928062 - DNA, 15 bp, Homo sapiens
ataatttattcttaa

SEQ ID NO: 928063 - DNA, 15 bp, Homo sapiens
cataatttattctta

SEQ ID NO: 928064 - DNA, 15 bp, Homo sapiens
tcataatttattctt

SEQ ID NO: 928065 - DNA, 15 bp, Homo sapiens
ttcataatttattct

SEQ ID NO: 928066 - DNA, 15 bp, Homo sapiens
gttcataatttattc

SEQ ID NO: 928067 - DNA, 15 bp, Homo sapiens
agttcataatttatt

SEQ ID NO: 928068 - DNA, 15 bp, Homo sapiens
cagttcataatttat

SEQ ID NO: 928069 - DNA, 15 bp, Homo sapiens
tcagttcataattta

SEQ ID NO: 928070 - DNA, 15 bp, Homo sapiens
ctcagttcataattt

SEQ ID NO: 928071 - DNA, 15 bp, Homo sapiens
cctcagttcataatt

SEQ ID NO: 928072 - DNA, 15 bp, Homo sapiens
gcctcagttcataat

SEQ ID NO: 928073 - DNA, 15 bp, Homo sapiens
agcctcagttcataa

SEQ ID NO: 928074 - DNA, 15 bp, Homo sapiens
cagcctcagttcata

SEQ ID NO: 928075 - DNA, 15 bp, Homo sapiens
ccagcctcagttcat

SEQ ID NO: 928076 - DNA, 15 bp, Homo sapiens
cccagcctcagttca

SEQ ID NO: 928077 - DNA, 15 bp, Homo sapiens
gcccagcctcagttc

SEQ ID NO: 928078 - DNA, 15 bp, Homo sapiens
agcccagcctcagtt

SEQ ID NO: 928079 - DNA, 15 bp, Homo sapiens
aagcccagcctcagt

SEQ ID NO: 928080 - DNA, 15 bp, Homo sapiens
caagcccagcctcag

SEQ ID NO: 928081 - DNA, 15 bp, Homo sapiens
acaagcccagcctca

SEQ ID NO: 928082 - DNA, 15 bp, Homo sapiens
gacaagcccagcctc

SEQ ID NO: 928083 - DNA, 15 bp, Homo sapiens
tgacaagcccagcct

SEQ ID NO: 928084 - DNA, 15 bp, Homo sapiens
ttgacaagcccagcc

SEQ ID NO: 928085 - DNA, 15 bp, Homo sapiens
gttgacaagcccagc

SEQ ID NO: 928086 - DNA, 15 bp, Homo sapiens
agttgacaagcccag

SEQ ID NO: 928087 - DNA, 15 bp, Homo sapiens
aagttgacaagccca

SEQ ID NO: 928088 - DNA, 15 bp, Homo sapiens
caagttgacaagccc

SEQ ID NO: 928089 - DNA, 15 bp, Homo sapiens
tcaagttgacaagcc

SEQ ID NO: 928090 - DNA, 15 bp, Homo sapiens
ttcaagttgacaagc

SEQ ID NO: 928091 - DNA, 15 bp, Homo sapiens
gttcaagttgacaag

SEQ ID NO: 928092 - DNA, 15 bp, Homo sapiens
tgttcaagttgacaa

SEQ ID NO: 928093 - DNA, 15 bp, Homo sapiens
atgttcaagttgaca

SEQ ID NO: 928094 - DNA, 15 bp, Homo sapiens
aatgttcaagttgac

SEQ ID NO: 928095 - DNA, 15 bp, Homo sapiens
caatgttcaagttga

SEQ ID NO: 928096 - DNA, 15 bp, Homo sapiens
acaatgttcaagttg

SEQ ID NO: 928097 - DNA, 15 bp, Homo sapiens
gacaatgttcaagtt

SEQ ID NO: 928098 - DNA, 15 bp, Homo sapiens
agacaatgttcaagt

SEQ ID NO: 928099 - DNA, 15 bp, Homo sapiens
cagacaatgttcaag

SEQ ID NO: 928100 - DNA, 15 bp, Homo sapiens
tcagacaatgttcaa

SEQ ID NO: 928101 - DNA, 15 bp, Homo sapiens
ctcagacaatgttca

SEQ ID NO: 928102 - DNA, 15 bp, Homo sapiens
cctcagacaatgttc

SEQ ID NO: 928103 - DNA, 15 bp, Homo sapiens
ccctcagacaatgtt

SEQ ID NO: 928104 - DNA, 15 bp, Homo sapiens
cccctcagacaatgt

SEQ ID NO: 928105 - DNA, 15 bp, Homo sapiens
tcccctcagacaatg

SEQ ID NO: 928106 - DNA, 15 bp, Homo sapiens
gtcccctcagacaat

SEQ ID NO: 928107 - DNA, 15 bp, Homo sapiens
tgtcccctcagacaa

SEQ ID NO: 928108 - DNA, 15 bp, Homo sapiens
atgtcccctcagaca

SEQ ID NO: 928109 - DNA, 15 bp, Homo sapiens
catgtcccctcagac

SEQ ID NO: 928110 - DNA, 15 bp, Homo sapiens
gcatgtcccctcaga

SEQ ID NO: 928111 - DNA, 15 bp, Homo sapiens
tgcatgtcccctcag

SEQ ID NO: 928112 - DNA, 15 bp, Homo sapiens
atgcatgtcccctca

SEQ ID NO: 928113 - DNA, 15 bp, Homo sapiens
tatgcatgtcccctc

SEQ ID NO: 928114 - DNA, 15 bp, Homo sapiens
gtatgcatgtcccct

SEQ ID NO: 928115 - DNA, 15 bp, Homo sapiens
ggtatgcatgtcccc

SEQ ID NO: 928116 - DNA, 15 bp, Homo sapiens
tggtatgcatgtccc

SEQ ID NO: 928117 - DNA, 15 bp, Homo sapiens
ctggtatgcatgtcc

SEQ ID NO: 928118 - DNA, 15 bp, Homo sapiens
actggtatgcatgtc

SEQ ID NO: 928119 - DNA, 15 bp, Homo sapiens
gactggtatgcatgt

SEQ ID NO: 928120 - DNA, 15 bp, Homo sapiens
agactggtatgcatg

SEQ ID NO: 928121 - DNA, 15 bp, Homo sapiens
tagactggtatgcat

SEQ ID NO: 928122 - DNA, 15 bp, Homo sapiens
ctagactggtatgca

SEQ ID NO: 928123 - DNA, 15 bp, Homo sapiens
tctagactggtatgc

SEQ ID NO: 928124 - DNA, 15 bp, Homo sapiens
atctagactggtatg

SEQ ID NO: 928125 - DNA, 15 bp, Homo sapiens
tatctagactggtat

SEQ ID NO: 928126 - DNA, 15 bp, Homo sapiens
gtatctagactggta

SEQ ID NO: 928127 - DNA, 15 bp, Homo sapiens
tgtatctagactggt

SEQ ID NO: 928128 - DNA, 15 bp, Homo sapiens
atgtatctagactgg

SEQ ID NO: 928129 - DNA, 15 bp, Homo sapiens
tatgtatctagactg

SEQ ID NO: 928130 - DNA, 15 bp, Homo sapiens
gtatgtatctagact

SEQ ID NO: 928131 - DNA, 15 bp, Homo sapiens
tgtatgtatctagac

SEQ ID NO: 928132 - DNA, 15 bp, Homo sapiens
atgtatgtatctaga

SEQ ID NO: 928133 - DNA, 15 bp, Homo sapiens
tatgtatgtatctag

SEQ ID NO: 928134 - DNA, 15 bp, Homo sapiens
atatgtatgtatcta

SEQ ID NO: 928135 - DNA, 15 bp, Homo sapiens
tatatgtatgtatct

SEQ ID NO: 928136 - DNA, 15 bp, Homo sapiens
atatatgtatgtatc

SEQ ID NO: 928137 - DNA, 15 bp, Homo sapiens
catatatgtatgtat

SEQ ID NO: 928138 - DNA, 15 bp, Homo sapiens
ccatatatgtatgta

SEQ ID NO: 928139 - DNA, 15 bp, Homo sapiens
tccatatatgtatgt

SEQ ID NO: 928140 - DNA, 15 bp, Homo sapiens
ctccatatatgtatg

SEQ ID NO: 928141 - DNA, 15 bp, Homo sapiens
tctccatatatgtat

SEQ ID NO: 928142 - DNA, 15 bp, Homo sapiens
atctccatatatgta

SEQ ID NO: 928143 - DNA, 15 bp, Homo sapiens
tatctccatatatgt

SEQ ID NO: 928144 - DNA, 15 bp, Homo sapiens
gtatctccatatatg

SEQ ID NO: 928145 - DNA, 15 bp, Homo sapiens
agtatctccatatat

SEQ ID NO: 928146 - DNA, 15 bp, Homo sapiens
cagtatctccatata

SEQ ID NO: 928147 - DNA, 15 bp, Homo sapiens
acagtatctccatat

SEQ ID NO: 928148 - DNA, 15 bp, Homo sapiens
aacagtatctccata

SEQ ID NO: 928149 - DNA, 15 bp, Homo sapiens
aaacagtatctccat

SEQ ID NO: 928150 - DNA, 15 bp, Homo sapiens
gaaacagtatctcca

SEQ ID NO: 928151 - DNA, 15 bp, Homo sapiens
agaaacagtatctcc

SEQ ID NO: 928152 - DNA, 15 bp, Homo sapiens
aagaaacagtatctc

SEQ ID NO: 928153 - DNA, 15 bp, Homo sapiens
gaagaaacagtatct

SEQ ID NO: 928154 - DNA, 15 bp, Homo sapiens
ggaagaaacagtatc

SEQ ID NO: 928155 - DNA, 15 bp, Homo sapiens
aggaagaaacagtat

SEQ ID NO: 928156 - DNA, 15 bp, Homo sapiens
gaggaagaaacagta

SEQ ID NO: 928157 - DNA, 15 bp, Homo sapiens
tgaggaagaaacagt

SEQ ID NO: 928158 - DNA, 15 bp, Homo sapiens
atgaggaagaaacag

SEQ ID NO: 928159 - DNA, 15 bp, Homo sapiens
gatgaggaagaaaca

SEQ ID NO: 928160 - DNA, 15 bp, Homo sapiens
agatgaggaagaaac

SEQ ID NO: 928161 - DNA, 15 bp, Homo sapiens
gagatgaggaagaaa

SEQ ID NO: 928162 - DNA, 15 bp, Homo sapiens
tgagatgaggaagaa

SEQ ID NO: 928163 - DNA, 15 bp, Homo sapiens
ttgagatgaggaaga

SEQ ID NO: 928164 - DNA, 15 bp, Homo sapiens
tttgagatgaggaag

SEQ ID NO: 928165 - DNA, 15 bp, Homo sapiens
ctttgagatgaggaa

SEQ ID NO: 928166 - DNA, 15 bp, Homo sapiens
cctttgagatgagga

SEQ ID NO: 928167 - DNA, 15 bp, Homo sapiens
tcctttgagatgagg

SEQ ID NO: 928168 - DNA, 15 bp, Homo sapiens
ttcctttgagatgag

SEQ ID NO: 928169 - DNA, 15 bp, Homo sapiens
attcctttgagatga

SEQ ID NO: 928170 - DNA, 15 bp, Homo sapiens
aattcctttgagatg

SEQ ID NO: 928171 - DNA, 15 bp, Homo sapiens
aaattcctttgagat

SEQ ID NO: 928172 - DNA, 15 bp, Homo sapiens
aaaattcctttgaga

SEQ ID NO: 928173 - DNA, 15 bp, Homo sapiens
taaaattcctttgag

SEQ ID NO: 928174 - DNA, 15 bp, Homo sapiens
ctaaaattcctttga

SEQ ID NO: 928175 - DNA, 15 bp, Homo sapiens
tctaaaattcctttg

SEQ ID NO: 928176 - DNA, 15 bp, Homo sapiens
ttctaaaattccttt

SEQ ID NO: 928177 - DNA, 15 bp, Homo sapiens
cttctaaaattcctt

SEQ ID NO: 928178 - DNA, 15 bp, Homo sapiens
tcttctaaaattcct

SEQ ID NO: 928179 - DNA, 15 bp, Homo sapiens
atcttctaaaattcc

SEQ ID NO: 928180 - DNA, 15 bp, Homo sapiens
aatcttctaaaattc

SEQ ID NO: 928181 - DNA, 15 bp, Homo sapiens
caatcttctaaaatt

SEQ ID NO: 928182 - DNA, 15 bp, Homo sapiens
tcaatcttctaaaat

SEQ ID NO: 928183 - DNA, 15 bp, Homo sapiens
ttcaatcttctaaaa

SEQ ID NO: 928184 - DNA, 15 bp, Homo sapiens
cttcaatcttctaaa

SEQ ID NO: 928185 - DNA, 15 bp, Homo sapiens
tcttcaatcttctaa

SEQ ID NO: 928186 - DNA, 15 bp, Homo sapiens
ctcttcaatcttcta

SEQ ID NO: 928187 - DNA, 15 bp, Homo sapiens
tctcttcaatcttct

SEQ ID NO: 928188 - DNA, 15 bp, Homo sapiens
ttctcttcaatcttc

SEQ ID NO: 928189 - DNA, 15 bp, Homo sapiens
tttctcttcaatctt

SEQ ID NO: 928190 - DNA, 15 bp, Homo sapiens
ttttctcttcaatct

SEQ ID NO: 928191 - DNA, 15 bp, Homo sapiens
attttctcttcaatc

SEQ ID NO: 928192 - DNA, 15 bp, Homo sapiens
tattttctcttcaat

SEQ ID NO: 928193 - DNA, 15 bp, Homo sapiens
atattttctcttcaa

SEQ ID NO: 928194 - DNA, 15 bp, Homo sapiens
tatattttctcttca

SEQ ID NO: 928195 - DNA, 15 bp, Homo sapiens
atatattttctcttc

SEQ ID NO: 928196 - DNA, 15 bp, Homo sapiens
tatatattttctctt

SEQ ID NO: 928197 - DNA, 15 bp, Homo sapiens
ttatatattttctct

SEQ ID NO: 928198 - DNA, 15 bp, Homo sapiens
cttatatattttctc

SEQ ID NO: 928199 - DNA, 15 bp, Homo sapiens
ccttatatattttct

SEQ ID NO: 928200 - DNA, 15 bp, Homo sapiens
accttatatattttc

SEQ ID NO: 928201 - DNA, 15 bp, Homo sapiens
gaccttatatatttt

SEQ ID NO: 928202 - DNA, 15 bp, Homo sapiens
agaccttatatattt

SEQ ID NO: 928203 - DNA, 15 bp, Homo sapiens
aagaccttatatatt

SEQ ID NO: 928204 - DNA, 15 bp, Homo sapiens
gaagaccttatatat

SEQ ID NO: 928205 - DNA, 15 bp, Homo sapiens
tgaagaccttatata

SEQ ID NO: 928206 - DNA, 15 bp, Homo sapiens
ttgaagaccttatat

SEQ ID NO: 928207 - DNA, 15 bp, Homo sapiens
tttgaagaccttata

SEQ ID NO: 928208 - DNA, 15 bp, Homo sapiens
ttttgaagaccttat

SEQ ID NO: 928209 - DNA, 15 bp, Homo sapiens
attttgaagacctta

SEQ ID NO: 928210 - DNA, 15 bp, Homo sapiens
cattttgaagacctt

SEQ ID NO: 928211 - DNA, 15 bp, Homo sapiens
acattttgaagacct

SEQ ID NO: 928212 - DNA, 15 bp, Homo sapiens
cacattttgaagacc

SEQ ID NO: 928213 - DNA, 15 bp, Homo sapiens
tcacattttgaagac

SEQ ID NO: 928214 - DNA, 15 bp, Homo sapiens
ttcacattttgaaga

SEQ ID NO: 928215 - DNA, 15 bp, Homo sapiens
attcacattttgaag

SEQ ID NO: 928216 - DNA, 15 bp, Homo sapiens
aattcacattttgaa

SEQ ID NO: 928217 - DNA, 15 bp, Homo sapiens
aaattcacattttga

SEQ ID NO: 928218 - DNA, 15 bp, Homo sapiens
caaattcacattttg

SEQ ID NO: 928219 - DNA, 15 bp, Homo sapiens
acaaattcacatttt

SEQ ID NO: 928220 - DNA, 15 bp, Homo sapiens
aacaaattcacattt

SEQ ID NO: 928221 - DNA, 15 bp, Homo sapiens
aaacaaattcacatt

SEQ ID NO: 928222 - DNA, 15 bp, Homo sapiens
aaaacaaattcacat

SEQ ID NO: 928223 - DNA, 15 bp, Homo sapiens
taaaacaaattcaca

SEQ ID NO: 928224 - DNA, 15 bp, Homo sapiens
ttaaaacaaattcac

SEQ ID NO: 928225 - DNA, 15 bp, Homo sapiens
attaaaacaaattca

SEQ ID NO: 928226 - DNA, 15 bp, Homo sapiens
gattaaaacaaattc

SEQ ID NO: 928227 - DNA, 15 bp, Homo sapiens
tgattaaaacaaatt

SEQ ID NO: 928228 - DNA, 15 bp, Homo sapiens
gtgattaaaacaaat

SEQ ID NO: 928229 - DNA, 15 bp, Homo sapiens
tgtgattaaaacaaa

SEQ ID NO: 928230 - DNA, 15 bp, Homo sapiens
ttgtgattaaaacaa

SEQ ID NO: 928231 - DNA, 15 bp, Homo sapiens
attgtgattaaaaca

SEQ ID NO: 928232 - DNA, 15 bp, Homo sapiens
aattgtgattaaaac

SEQ ID NO: 928233 - DNA, 15 bp, Homo sapiens
aaattgtgattaaaa

SEQ ID NO: 928234 - DNA, 15 bp, Homo sapiens
taaattgtgattaaa

SEQ ID NO: 928235 - DNA, 15 bp, Homo sapiens
ttaaattgtgattaa

SEQ ID NO: 928236 - DNA, 15 bp, Homo sapiens
cttaaattgtgatta

SEQ ID NO: 928237 - DNA, 15 bp, Homo sapiens
tcttaaattgtgatt

SEQ ID NO: 928238 - DNA, 15 bp, Homo sapiens
atcttaaattgtgat

SEQ ID NO: 928239 - DNA, 15 bp, Homo sapiens
tatcttaaattgtga

SEQ ID NO: 928240 - DNA, 15 bp, Homo sapiens
atatcttaaattgtg

SEQ ID NO: 928241 - DNA, 15 bp, Homo sapiens
tatatcttaaattgt

SEQ ID NO: 928242 - DNA, 15 bp, Homo sapiens
ctatatcttaaattg

SEQ ID NO: 928243 - DNA, 15 bp, Homo sapiens
actatatcttaaatt

SEQ ID NO: 928244 - DNA, 15 bp, Homo sapiens
aactatatcttaaat

SEQ ID NO: 928245 - DNA, 15 bp, Homo sapiens
aaactatatcttaaa

SEQ ID NO: 928246 - DNA, 15 bp, Homo sapiens
gaaactatatcttaa

SEQ ID NO: 928247 - DNA, 15 bp, Homo sapiens
cgaaactatatctta

SEQ ID NO: 928248 - DNA, 15 bp, Homo sapiens
tcgaaactatatctt

SEQ ID NO: 928249 - DNA, 15 bp, Homo sapiens
atcgaaactatatct

SEQ ID NO: 928250 - DNA, 15 bp, Homo sapiens
aatcgaaactatatc

SEQ ID NO: 928251 - DNA, 15 bp, Homo sapiens
aaatcgaaactatat

SEQ ID NO: 928252 - DNA, 15 bp, Homo sapiens
aaaatcgaaactata

SEQ ID NO: 928253 - DNA, 15 bp, Homo sapiens
gaaaatcgaaactat

SEQ ID NO: 928254 - DNA, 15 bp, Homo sapiens
agaaaatcgaaacta

SEQ ID NO: 928255 - DNA, 15 bp, Homo sapiens
cagaaaatcgaaact

SEQ ID NO: 928256 - DNA, 15 bp, Homo sapiens
acagaaaatcgaaac

SEQ ID NO: 928257 - DNA, 15 bp, Homo sapiens
tacagaaaatcgaaa

SEQ ID NO: 928258 - DNA, 15 bp, Homo sapiens
ttacagaaaatcgaa

SEQ ID NO: 928259 - DNA, 15 bp, Homo sapiens
tttacagaaaatcga

SEQ ID NO: 928260 - DNA, 15 bp, Homo sapiens
ttttacagaaaatcg

SEQ ID NO: 928261 - DNA, 15 bp, Homo sapiens
gttttacagaaaatc

SEQ ID NO: 928262 - DNA, 15 bp, Homo sapiens
tgttttacagaaaat

SEQ ID NO: 928263 - DNA, 15 bp, Homo sapiens
ctgttttacagaaaa

SEQ ID NO: 928264 - DNA, 15 bp, Homo sapiens
cctgttttacagaaa

SEQ ID NO: 928265 - DNA, 15 bp, Homo sapiens
tcctgttttacagaa

SEQ ID NO: 928266 - DNA, 15 bp, Homo sapiens
ctcctgttttacaga

SEQ ID NO: 928267 - DNA, 15 bp, Homo sapiens
gctcctgttttacag

SEQ ID NO: 928268 - DNA, 15 bp, Homo sapiens
tgctcctgttttaca

SEQ ID NO: 928269 - DNA, 15 bp, Homo sapiens
ttgctcctgttttac

SEQ ID NO: 928270 - DNA, 15 bp, Homo sapiens
tttgctcctgtttta

SEQ ID NO: 928271 - DNA, 15 bp, Homo sapiens
ctttgctcctgtttt

SEQ ID NO: 928272 - DNA, 15 bp, Homo sapiens
tctttgctcctgttt

SEQ ID NO: 928273 - DNA, 15 bp, Homo sapiens
ctctttgctcctgtt

SEQ ID NO: 928274 - DNA, 15 bp, Homo sapiens
tctctttgctcctgt

SEQ ID NO: 928275 - DNA, 15 bp, Homo sapiens
ttctctttgctcctg

SEQ ID NO: 928276 - DNA, 15 bp, Homo sapiens
tttctctttgctcct

SEQ ID NO: 928277 - DNA, 15 bp, Homo sapiens
atttctctttgctcc

SEQ ID NO: 928278 - DNA, 15 bp, Homo sapiens
aatttctctttgctc

SEQ ID NO: 928279 - DNA, 15 bp, Homo sapiens
caatttctctttgct

SEQ ID NO: 928280 - DNA, 15 bp, Homo sapiens
acaatttctctttgc

SEQ ID NO: 928281 - DNA, 15 bp, Homo sapiens
cacaatttctctttg

SEQ ID NO: 928282 - DNA, 15 bp, Homo sapiens
tcacaatttctcttt

SEQ ID NO: 928283 - DNA, 15 bp, Homo sapiens
ttcacaatttctctt

SEQ ID NO: 928284 - DNA, 15 bp, Homo sapiens
cttcacaatttctct

SEQ ID NO: 928285 - DNA, 15 bp, Homo sapiens
tcttcacaatttctc

SEQ ID NO: 928286 - DNA, 15 bp, Homo sapiens
ttcttcacaatttct

SEQ ID NO: 928287 - DNA, 15 bp, Homo sapiens
tttcttcacaatttc

SEQ ID NO: 928288 - DNA, 15 bp, Homo sapiens
gtttcttcacaattt

SEQ ID NO: 928289 - DNA, 15 bp, Homo sapiens
tgtttcttcacaatt

SEQ ID NO: 928290 - DNA, 15 bp, Homo sapiens
atgtttcttcacaat

SEQ ID NO: 928291 - DNA, 15 bp, Homo sapiens
catgtttcttcacaa

SEQ ID NO: 928292 - DNA, 15 bp, Homo sapiens
tcatgtttcttcaca

SEQ ID NO: 928293 - DNA, 15 bp, Homo sapiens
ctcatgtttcttcac

SEQ ID NO: 928294 - DNA, 15 bp, Homo sapiens
cctcatgtttcttca

SEQ ID NO: 928295 - DNA, 15 bp, Homo sapiens
tcctcatgtttcttc

SEQ ID NO: 928296 - DNA, 15 bp, Homo sapiens
ttcctcatgtttctt

SEQ ID NO: 928297 - DNA, 15 bp, Homo sapiens
cttcctcatgtttct

SEQ ID NO: 928298 - DNA, 15 bp, Homo sapiens
tcttcctcatgtttc

SEQ ID NO: 928299 - DNA, 15 bp, Homo sapiens
gtcttcctcatgttt

SEQ ID NO: 928300 - DNA, 15 bp, Homo sapiens
ggtcttcctcatgtt

SEQ ID NO: 928301 - DNA, 15 bp, Homo sapiens
aggtcttcctcatgt

SEQ ID NO: 928302 - DNA, 15 bp, Homo sapiens
aaggtcttcctcatg

SEQ ID NO: 928303 - DNA, 15 bp, Homo sapiens
gaaggtcttcctcat

SEQ ID NO: 928304 - DNA, 15 bp, Homo sapiens
tgaaggtcttcctca

SEQ ID NO: 928305 - DNA, 15 bp, Homo sapiens
atgaaggtcttcctc

SEQ ID NO: 928306 - DNA, 15 bp, Homo sapiens
tatgaaggtcttcct

SEQ ID NO: 928307 - DNA, 15 bp, Homo sapiens
atatgaaggtcttcc

SEQ ID NO: 928308 - DNA, 15 bp, Homo sapiens
aatatgaaggtcttc

SEQ ID NO: 928309 - DNA, 15 bp, Homo sapiens
gaatatgaaggtctt

SEQ ID NO: 928310 - DNA, 15 bp, Homo sapiens
agaatatgaaggtct

SEQ ID NO: 928311 - DNA, 15 bp, Homo sapiens
aagaatatgaaggtc

SEQ ID NO: 928312 - DNA, 15 bp, Homo sapiens
gaagaatatgaaggt

SEQ ID NO: 928313 - DNA, 15 bp, Homo sapiens
tgaagaatatgaagg

SEQ ID NO: 928314 - DNA, 15 bp, Homo sapiens
atgaagaatatgaag

SEQ ID NO: 928315 - DNA, 15 bp, Homo sapiens
gatgaagaatatgaa

SEQ ID NO: 928316 - DNA, 15 bp, Homo sapiens
tgatgaagaatatga

SEQ ID NO: 928317 - DNA, 15 bp, Homo sapiens
gtgatgaagaatatg

SEQ ID NO: 928318 - DNA, 15 bp, Homo sapiens
tgtgatgaagaatat

SEQ ID NO: 928319 - DNA, 15 bp, Homo sapiens
ctgtgatgaagaata

SEQ ID NO: 928320 - DNA, 15 bp, Homo sapiens
tctgtgatgaagaat

SEQ ID NO: 928321 - DNA, 15 bp, Homo sapiens
atctgtgatgaagaa

SEQ ID NO: 928322 - DNA, 15 bp, Homo sapiens
aatctgtgatgaaga

SEQ ID NO: 928323 - DNA, 15 bp, Homo sapiens
taatctgtgatgaag

SEQ ID NO: 928324 - DNA, 15 bp, Homo sapiens
ctaatctgtgatgaa

SEQ ID NO: 928325 - DNA, 15 bp, Homo sapiens
tctaatctgtgatga

SEQ ID NO: 928326 - DNA, 15 bp, Homo sapiens
ttctaatctgtgatg

SEQ ID NO: 928327 - DNA, 15 bp, Homo sapiens
gttctaatctgtgat

SEQ ID NO: 928328 - DNA, 15 bp, Homo sapiens
agttctaatctgtga

SEQ ID NO: 928329 - DNA, 15 bp, Homo sapiens
tagttctaatctgtg

SEQ ID NO: 928330 - DNA, 15 bp, Homo sapiens
gtagttctaatctgt

SEQ ID NO: 928331 - DNA, 15 bp, Homo sapiens
tgtagttctaatctg

SEQ ID NO: 928332 - DNA, 15 bp, Homo sapiens
ctgtagttctaatct

SEQ ID NO: 928333 - DNA, 15 bp, Homo sapiens
cctgtagttctaatc

SEQ ID NO: 928334 - DNA, 15 bp, Homo sapiens
gcctgtagttctaat

SEQ ID NO: 928335 - DNA, 15 bp, Homo sapiens
agcctgtagttctaa

SEQ ID NO: 928336 - DNA, 15 bp, Homo sapiens
cagcctgtagttcta

SEQ ID NO: 928337 - DNA, 15 bp, Homo sapiens
tcagcctgtagttct

SEQ ID NO: 928338 - DNA, 15 bp, Homo sapiens
atcagcctgtagttc

SEQ ID NO: 928339 - DNA, 15 bp, Homo sapiens
tatcagcctgtagtt

SEQ ID NO: 928340 - DNA, 15 bp, Homo sapiens
ctatcagcctgtagt

SEQ ID NO: 928341 - DNA, 15 bp, Homo sapiens
actatcagcctgtag

SEQ ID NO: 928342 - DNA, 15 bp, Homo sapiens
aactatcagcctgta

SEQ ID NO: 928343 - DNA, 15 bp, Homo sapiens
gaactatcagcctgt

SEQ ID NO: 928344 - DNA, 15 bp, Homo sapiens
tgaactatcagcctg

SEQ ID NO: 928345 - DNA, 15 bp, Homo sapiens
gtgaactatcagcct

SEQ ID NO: 928346 - DNA, 15 bp, Homo sapiens
agtgaactatcagcc

SEQ ID NO: 928347 - DNA, 15 bp, Homo sapiens
tagtgaactatcagc

SEQ ID NO: 928348 - DNA, 15 bp, Homo sapiens
ttagtgaactatcag

SEQ ID NO: 928349 - DNA, 15 bp, Homo sapiens
tttagtgaactatca

SEQ ID NO: 928350 - DNA, 15 bp, Homo sapiens
atttagtgaactatc

SEQ ID NO: 928351 - DNA, 15 bp, Homo sapiens
tatttagtgaactat

SEQ ID NO: 928352 - DNA, 15 bp, Homo sapiens
ttatttagtgaacta

SEQ ID NO: 928353 - DNA, 15 bp, Homo sapiens
tttatttagtgaact

SEQ ID NO: 928354 - DNA, 15 bp, Homo sapiens
atttatttagtgaac

SEQ ID NO: 928355 - DNA, 15 bp, Homo sapiens
aatttatttagtgaa

SEQ ID NO: 928356 - DNA, 15 bp, Homo sapiens
gaatttatttagtga

SEQ ID NO: 928357 - DNA, 15 bp, Homo sapiens
tgaatttatttagtg

SEQ ID NO: 928358 - DNA, 15 bp, Homo sapiens
ttgaatttatttagt

SEQ ID NO: 928359 - DNA, 15 bp, Homo sapiens
tttgaatttatttag

SEQ ID NO: 928360 - DNA, 15 bp, Homo sapiens
gtttgaatttattta

SEQ ID NO: 928361 - DNA, 15 bp, Homo sapiens
tgtttgaatttattt

SEQ ID NO: 928362 - DNA, 15 bp, Homo sapiens
ttgtttgaatttatt

SEQ ID NO: 928363 - DNA, 15 bp, Homo sapiens
tttgtttgaatttat

SEQ ID NO: 928364 - DNA, 15 bp, Homo sapiens
gtttgtttgaattta

SEQ ID NO: 928365 - DNA, 15 bp, Homo sapiens
cgtttgtttgaattt

SEQ ID NO: 928366 - DNA, 15 bp, Homo sapiens
ccgtttgtttgaatt

SEQ ID NO: 928367 - DNA, 15 bp, Homo sapiens
gccgtttgtttgaat

SEQ ID NO: 928368 - DNA, 15 bp, Homo sapiens
agccgtttgtttgaa

SEQ ID NO: 928369 - DNA, 15 bp, Homo sapiens
aagccgtttgtttga

SEQ ID NO: 928370 - DNA, 15 bp, Homo sapiens
caagccgtttgtttg

SEQ ID NO: 928371 - DNA, 15 bp, Homo sapiens
ccaagccgtttgttt

SEQ ID NO: 928372 - DNA, 15 bp, Homo sapiens
cccaagccgtttgtt

SEQ ID NO: 928373 - DNA, 15 bp, Homo sapiens
acccaagccgtttgt

SEQ ID NO: 928374 - DNA, 15 bp, Homo sapiens
tacccaagccgtttg

SEQ ID NO: 928375 - DNA, 15 bp, Homo sapiens
ttacccaagccgttt

SEQ ID NO: 928376 - DNA, 15 bp, Homo sapiens
cttacccaagccgtt

SEQ ID NO: 928377 - DNA, 15 bp, Homo sapiens
tcttacccaagccgt

SEQ ID NO: 928378 - DNA, 15 bp, Homo sapiens
atcttacccaagccg

SEQ ID NO: 928379 - DNA, 15 bp, Homo sapiens
aatcttacccaagcc

SEQ ID NO: 928380 - DNA, 15 bp, Homo sapiens
gaatcttacccaagc

SEQ ID NO: 928381 - DNA, 15 bp, Homo sapiens
agaatcttacccaag

SEQ ID NO: 928382 - DNA, 15 bp, Homo sapiens
tagaatcttacccaa

SEQ ID NO: 928383 - DNA, 15 bp, Homo sapiens
ttagaatcttaccca

SEQ ID NO: 928384 - DNA, 15 bp, Homo sapiens
cttagaatcttaccc

SEQ ID NO: 928385 - DNA, 15 bp, Homo sapiens
tcttagaatcttacc

SEQ ID NO: 928386 - DNA, 15 bp, Homo sapiens
ttcttagaatcttac

SEQ ID NO: 928387 - DNA, 15 bp, Homo sapiens
gttcttagaatctta

SEQ ID NO: 928388 - DNA, 15 bp, Homo sapiens
agttcttagaatctt

SEQ ID NO: 928389 - DNA, 15 bp, Homo sapiens
aagttcttagaatct

SEQ ID NO: 928390 - DNA, 15 bp, Homo sapiens
aaagttcttagaatc

SEQ ID NO: 928391 - DNA, 15 bp, Homo sapiens
caaagttcttagaat

SEQ ID NO: 928392 - DNA, 15 bp, Homo sapiens
acaaagttcttagaa

SEQ ID NO: 928393 - DNA, 15 bp, Homo sapiens
aacaaagttcttaga

SEQ ID NO: 928394 - DNA, 15 bp, Homo sapiens
gaacaaagttcttag

SEQ ID NO: 928395 - DNA, 15 bp, Homo sapiens
ggaacaaagttctta

SEQ ID NO: 928396 - DNA, 15 bp, Homo sapiens
tggaacaaagttctt

SEQ ID NO: 928397 - DNA, 15 bp, Homo sapiens
atggaacaaagttct

SEQ ID NO: 928398 - DNA, 15 bp, Homo sapiens
aatggaacaaagttc

SEQ ID NO: 928399 - DNA, 15 bp, Homo sapiens
gaatggaacaaagtt

SEQ ID NO: 928400 - DNA, 15 bp, Homo sapiens
agaatggaacaaagt

SEQ ID NO: 928401 - DNA, 15 bp, Homo sapiens
aagaatggaacaaag

SEQ ID NO: 928402 - DNA, 15 bp, Homo sapiens
aaagaatggaacaaa

SEQ ID NO: 928403 - DNA, 15 bp, Homo sapiens
taaagaatggaacaa

SEQ ID NO: 928404 - DNA, 15 bp, Homo sapiens
ataaagaatggaaca

SEQ ID NO: 928405 - DNA, 15 bp, Homo sapiens
aataaagaatggaac

SEQ ID NO: 928406 - DNA, 15 bp, Homo sapiens
caataaagaatggaa

SEQ ID NO: 928407 - DNA, 15 bp, Homo sapiens
tcaataaagaatgga

SEQ ID NO: 928408 - DNA, 15 bp, Homo sapiens
atcaataaagaatgg

SEQ ID NO: 928409 - DNA, 15 bp, Homo sapiens
aatcaataaagaatg

SEQ ID NO: 928410 - DNA, 15 bp, Homo sapiens
aaatcaataaagaat

SEQ ID NO: 928411 - DNA, 15 bp, Homo sapiens
aaaatcaataaagaa

SEQ ID NO: 928412 - DNA, 15 bp, Homo sapiens
aaaaatcaataaaga

SEQ ID NO: 928413 - DNA, 15 bp, Homo sapiens
caaaaatcaataaag

SEQ ID NO: 928414 - DNA, 15 bp, Homo sapiens
acaaaaatcaataaa

SEQ ID NO: 928415 - DNA, 15 bp, Homo sapiens
cacaaaaatcaataa

SEQ ID NO: 928416 - DNA, 15 bp, Homo sapiens
tcacaaaaatcaata

SEQ ID NO: 928417 - DNA, 15 bp, Homo sapiens
gtcacaaaaatcaat

SEQ ID NO: 928418 - DNA, 15 bp, Homo sapiens
ggtcacaaaaatcaa

SEQ ID NO: 928419 - DNA, 15 bp, Homo sapiens
tggtcacaaaaatca

SEQ ID NO: 928420 - DNA, 15 bp, Homo sapiens
atggtcacaaaaatc

SEQ ID NO: 928421 - DNA, 15 bp, Homo sapiens
catggtcacaaaaat

SEQ ID NO: 928422 - DNA, 15 bp, Homo sapiens
acatggtcacaaaaa

SEQ ID NO: 928423 - DNA, 15 bp, Homo sapiens
tacatggtcacaaaa

SEQ ID NO: 928424 - DNA, 15 bp, Homo sapiens
ttacatggtcacaaa

SEQ ID NO: 928425 - DNA, 15 bp, Homo sapiens
tttacatggtcacaa

SEQ ID NO: 928426 - DNA, 15 bp, Homo sapiens
atttacatggtcaca

SEQ ID NO: 928427 - DNA, 15 bp, Homo sapiens
aatttacatggtcac

SEQ ID NO: 928428 - DNA, 15 bp, Homo sapiens
taatttacatggtca

SEQ ID NO: 928429 - DNA, 15 bp, Homo sapiens
ttaatttacatggtc

SEQ ID NO: 928430 - DNA, 15 bp, Homo sapiens
tttaatttacatggt

SEQ ID NO: 928431 - DNA, 15 bp, Homo sapiens
ttttaatttacatgg

SEQ ID NO: 928432 - DNA, 15 bp, Homo sapiens
attttaatttacatg

SEQ ID NO: 928433 - DNA, 15 bp, Homo sapiens
aattttaatttacat

SEQ ID NO: 928434 - DNA, 15 bp, Homo sapiens
gaattttaatttaca

SEQ ID NO: 928435 - DNA, 15 bp, Homo sapiens
tgaattttaatttac

SEQ ID NO: 928436 - DNA, 15 bp, Homo sapiens
ctgaattttaattta

SEQ ID NO: 928437 - DNA, 15 bp, Homo sapiens
gctgaattttaattt

SEQ ID NO: 928438 - DNA, 15 bp, Homo sapiens
agctgaattttaatt

SEQ ID NO: 928439 - DNA, 15 bp, Homo sapiens
gagctgaattttaat

SEQ ID NO: 928440 - DNA, 15 bp, Homo sapiens
agagctgaattttaa

SEQ ID NO: 928441 - DNA, 15 bp, Homo sapiens
gagagctgaatttta

SEQ ID NO: 928442 - DNA, 15 bp, Homo sapiens
agagagctgaatttt

SEQ ID NO: 928443 - DNA, 15 bp, Homo sapiens
aagagagctgaattt

SEQ ID NO: 928444 - DNA, 15 bp, Homo sapiens
gaagagagctgaatt

SEQ ID NO: 928445 - DNA, 15 bp, Homo sapiens
agaagagagctgaat

SEQ ID NO: 928446 - DNA, 15 bp, Homo sapiens
aagaagagagctgaa

SEQ ID NO: 928447 - DNA, 15 bp, Homo sapiens
aaagaagagagctga

SEQ ID NO: 928448 - DNA, 15 bp, Homo sapiens
aaaagaagagagctg

SEQ ID NO: 928449 - DNA, 15 bp, Homo sapiens
aaaaagaagagagct

SEQ ID NO: 928450 - DNA, 15 bp, Homo sapiens
aaaaaagaagagagc

SEQ ID NO: 928451 - DNA, 15 bp, Homo sapiens
caaaaaagaagagag

SEQ ID NO: 928452 - DNA, 15 bp, Homo sapiens
ccaaaaaagaagaga

SEQ ID NO: 928453 - DNA, 15 bp, Homo sapiens
tccaaaaaagaagag

SEQ ID NO: 928454 - DNA, 15 bp, Homo sapiens
ttccaaaaaagaaga

SEQ ID NO: 928455 - DNA, 15 bp, Homo sapiens
attccaaaaaagaag

SEQ ID NO: 928456 - DNA, 15 bp, Homo sapiens
cattccaaaaaagaa

SEQ ID NO: 928457 - DNA, 15 bp, Homo sapiens
ccattccaaaaaaga

SEQ ID NO: 928458 - DNA, 15 bp, Homo sapiens
tccattccaaaaaag

SEQ ID NO: 928459 - DNA, 15 bp, Homo sapiens
ttccattccaaaaaa

SEQ ID NO: 928460 - DNA, 15 bp, Homo sapiens
cttccattccaaaaa

SEQ ID NO: 928461 - DNA, 15 bp, Homo sapiens
acttccattccaaaa

SEQ ID NO: 928462 - DNA, 15 bp, Homo sapiens
aacttccattccaaa

SEQ ID NO: 928463 - DNA, 15 bp, Homo sapiens
taacttccattccaa

SEQ ID NO: 928464 - DNA, 15 bp, Homo sapiens
gtaacttccattcca

SEQ ID NO: 928465 - DNA, 15 bp, Homo sapiens
ggtaacttccattcc

SEQ ID NO: 928466 - DNA, 15 bp, Homo sapiens
gggtaacttccattc

SEQ ID NO: 928467 - DNA, 15 bp, Homo sapiens
agggtaacttccatt

SEQ ID NO: 928468 - DNA, 15 bp, Homo sapiens
aagggtaacttccat

SEQ ID NO: 928469 - DNA, 15 bp, Homo sapiens
aaagggtaacttcca

SEQ ID NO: 928470 - DNA, 15 bp, Homo sapiens
aaaagggtaacttcc

SEQ ID NO: 928471 - DNA, 15 bp, Homo sapiens
aaaaagggtaacttc

SEQ ID NO: 928472 - DNA, 15 bp, Homo sapiens
caaaaagggtaactt

SEQ ID NO: 928473 - DNA, 15 bp, Homo sapiens
acaaaaagggtaact

SEQ ID NO: 928474 - DNA, 15 bp, Homo sapiens
aacaaaaagggtaac

SEQ ID NO: 928475 - DNA, 15 bp, Homo sapiens
caacaaaaagggtaa

SEQ ID NO: 928476 - DNA, 15 bp, Homo sapiens
gcaacaaaaagggta

SEQ ID NO: 928477 - DNA, 15 bp, Homo sapiens
ggcaacaaaaagggt

SEQ ID NO: 928478 - DNA, 15 bp, Homo sapiens
tggcaacaaaaaggg

SEQ ID NO: 928479 - DNA, 15 bp, Homo sapiens
ttggcaacaaaaagg

SEQ ID NO: 928480 - DNA, 15 bp, Homo sapiens
tttggcaacaaaaag

SEQ ID NO: 928481 - DNA, 15 bp, Homo sapiens
ttttggcaacaaaaa

SEQ ID NO: 928482 - DNA, 15 bp, Homo sapiens
attttggcaacaaaa

SEQ ID NO: 928483 - DNA, 15 bp, Homo sapiens
tattttggcaacaaa

SEQ ID NO: 928484 - DNA, 15 bp, Homo sapiens
ttattttggcaacaa

SEQ ID NO: 928485 - DNA, 15 bp, Homo sapiens
attattttggcaaca

SEQ ID NO: 928486 - DNA, 15 bp, Homo sapiens
gattattttggcaac

SEQ ID NO: 928487 - DNA, 15 bp, Homo sapiens
agattattttggcaa

SEQ ID NO: 928488 - DNA, 15 bp, Homo sapiens
aagattattttggca

SEQ ID NO: 928489 - DNA, 15 bp, Homo sapiens
gaagattattttggc

SEQ ID NO: 928490 - DNA, 15 bp, Homo sapiens
agaagattattttgg

SEQ ID NO: 928491 - DNA, 15 bp, Homo sapiens
cagaagattattttg

SEQ ID NO: 928492 - DNA, 15 bp, Homo sapiens
tcagaagattatttt

SEQ ID NO: 928493 - DNA, 15 bp, Homo sapiens
ttcagaagattattt

SEQ ID NO: 928494 - DNA, 15 bp, Homo sapiens
tttcagaagattatt

SEQ ID NO: 928495 - DNA, 15 bp, Homo sapiens
ttttcagaagattat

SEQ ID NO: 928496 - DNA, 15 bp, Homo sapiens
gttttcagaagatta

SEQ ID NO: 928497 - DNA, 15 bp, Homo sapiens
tgttttcagaagatt

SEQ ID NO: 928498 - DNA, 15 bp, Homo sapiens
atgttttcagaagat

SEQ ID NO: 928499 - DNA, 15 bp, Homo sapiens
tatgttttcagaaga

SEQ ID NO: 928500 - DNA, 15 bp, Homo sapiens
ctatgttttcagaag

SEQ ID NO: 928501 - DNA, 15 bp, Homo sapiens
gctatgttttcagaa

SEQ ID NO: 928502 - DNA, 15 bp, Homo sapiens
agctatgttttcaga

SEQ ID NO: 928503 - DNA, 15 bp, Homo sapiens
gagctatgttttcag

SEQ ID NO: 928504 - DNA, 15 bp, Homo sapiens
agagctatgttttca

SEQ ID NO: 928505 - DNA, 15 bp, Homo sapiens
cagagctatgttttc

SEQ ID NO: 928506 - DNA, 15 bp, Homo sapiens
tcagagctatgtttt

SEQ ID NO: 928507 - DNA, 15 bp, Homo sapiens
atcagagctatgttt

SEQ ID NO: 928508 - DNA, 15 bp, Homo sapiens
gatcagagctatgtt

SEQ ID NO: 928509 - DNA, 15 bp, Homo sapiens
tgatcagagctatgt

SEQ ID NO: 928510 - DNA, 15 bp, Homo sapiens
atgatcagagctatg

SEQ ID NO: 928511 - DNA, 15 bp, Homo sapiens
aatgatcagagctat

SEQ ID NO: 928512 - DNA, 15 bp, Homo sapiens
gaatgatcagagcta

SEQ ID NO: 928513 - DNA, 15 bp, Homo sapiens
agaatgatcagagct

SEQ ID NO: 928514 - DNA, 15 bp, Homo sapiens
aagaatgatcagagc

SEQ ID NO: 928515 - DNA, 15 bp, Homo sapiens
gaagaatgatcagag

SEQ ID NO: 928516 - DNA, 15 bp, Homo sapiens
ggaagaatgatcaga

SEQ ID NO: 928517 - DNA, 15 bp, Homo sapiens
aggaagaatgatcag

SEQ ID NO: 928518 - DNA, 15 bp, Homo sapiens
gaggaagaatgatca

SEQ ID NO: 928519 - DNA, 15 bp, Homo sapiens
ggaggaagaatgatc

SEQ ID NO: 928520 - DNA, 15 bp, Homo sapiens
aggaggaagaatgat

SEQ ID NO: 928521 - DNA, 15 bp, Homo sapiens
caggaggaagaatga

SEQ ID NO: 928522 - DNA, 15 bp, Homo sapiens
acaggaggaagaatg

SEQ ID NO: 928523 - DNA, 15 bp, Homo sapiens
tacaggaggaagaat

SEQ ID NO: 928524 - DNA, 15 bp, Homo sapiens
ctacaggaggaagaa

SEQ ID NO: 928525 - DNA, 15 bp, Homo sapiens
gctacaggaggaaga

SEQ ID NO: 928526 - DNA, 15 bp, Homo sapiens
agctacaggaggaag

SEQ ID NO: 928527 - DNA, 15 bp, Homo sapiens
gagctacaggaggaa

SEQ ID NO: 928528 - DNA, 15 bp, Homo sapiens
tgagctacaggagga

SEQ ID NO: 928529 - DNA, 15 bp, Homo sapiens
gtgagctacaggagg

SEQ ID NO: 928530 - DNA, 15 bp, Homo sapiens
ggtgagctacaggag

SEQ ID NO: 928531 - DNA, 15 bp, Homo sapiens
cggtgagctacagga

SEQ ID NO: 928532 - DNA, 15 bp, Homo sapiens
gcggtgagctacagg

SEQ ID NO: 928533 - DNA, 15 bp, Homo sapiens
agcggtgagctacag

SEQ ID NO: 928534 - DNA, 15 bp, Homo sapiens
cagcggtgagctaca

SEQ ID NO: 928535 - DNA, 15 bp, Homo sapiens
acagcggtgagctac

SEQ ID NO: 928536 - DNA, 15 bp, Homo sapiens
aacagcggtgagcta

SEQ ID NO: 928537 - DNA, 15 bp, Homo sapiens
gaacagcggtgagct

SEQ ID NO: 928538 - DNA, 15 bp, Homo sapiens
tgaacagcggtgagc

SEQ ID NO: 928539 - DNA, 15 bp, Homo sapiens
gtgaacagcggtgag

SEQ ID NO: 928540 - DNA, 15 bp, Homo sapiens
tgtgaacagcggtga

SEQ ID NO: 928541 - DNA, 15 bp, Homo sapiens
ttgtgaacagcggtg

SEQ ID NO: 928542 - DNA, 15 bp, Homo sapiens
tttgtgaacagcggt

SEQ ID NO: 928543 - DNA, 15 bp, Homo sapiens
ttttgtgaacagcgg

SEQ ID NO: 928544 - DNA, 15 bp, Homo sapiens
attttgtgaacagcg

SEQ ID NO: 928545 - DNA, 15 bp, Homo sapiens
aattttgtgaacagc

SEQ ID NO: 928546 - DNA, 15 bp, Homo sapiens
taattttgtgaacag

SEQ ID NO: 928547 - DNA, 15 bp, Homo sapiens
ataattttgtgaaca

SEQ ID NO: 928548 - DNA, 15 bp, Homo sapiens
tataattttgtgaac

SEQ ID NO: 928549 - DNA, 15 bp, Homo sapiens
atataattttgtgaa

SEQ ID NO: 928550 - DNA, 15 bp, Homo sapiens
aatataattttgtga

SEQ ID NO: 928551 - DNA, 15 bp, Homo sapiens
aaatataattttgtg

SEQ ID NO: 928552 - DNA, 15 bp, Homo sapiens
taaatataattttgt

SEQ ID NO: 928553 - DNA, 15 bp, Homo sapiens
ataaatataattttg

SEQ ID NO: 928554 - DNA, 15 bp, Homo sapiens
tataaatataatttt

SEQ ID NO: 928555 - DNA, 15 bp, Homo sapiens
ttataaatataattt

SEQ ID NO: 928556 - DNA, 15 bp, Homo sapiens
attataaatataatt

SEQ ID NO: 928557 - DNA, 15 bp, Homo sapiens
aattataaatataat

SEQ ID NO: 928558 - DNA, 15 bp, Homo sapiens
gaattataaatataa

SEQ ID NO: 928559 - DNA, 15 bp, Homo sapiens
agaattataaatata

SEQ ID NO: 928560 - DNA, 15 bp, Homo sapiens
aagaattataaatat

SEQ ID NO: 928561 - DNA, 15 bp, Homo sapiens
taagaattataaata

SEQ ID NO: 928562 - DNA, 15 bp, Homo sapiens
ctaagaattataaat

SEQ ID NO: 928563 - DNA, 15 bp, Homo sapiens
gctaagaattataaa

SEQ ID NO: 928564 - DNA, 15 bp, Homo sapiens
ggctaagaattataa

SEQ ID NO: 928565 - DNA, 15 bp, Homo sapiens
tggctaagaattata

SEQ ID NO: 928566 - DNA, 15 bp, Homo sapiens
atggctaagaattat

SEQ ID NO: 928567 - DNA, 15 bp, Homo sapiens
catggctaagaatta

SEQ ID NO: 928568 - DNA, 15 bp, Homo sapiens
acatggctaagaatt

SEQ ID NO: 928569 - DNA, 15 bp, Homo sapiens
tacatggctaagaat

SEQ ID NO: 928570 - DNA, 15 bp, Homo sapiens
gtacatggctaagaa

SEQ ID NO: 928571 - DNA, 15 bp, Homo sapiens
agtacatggctaaga

SEQ ID NO: 928572 - DNA, 15 bp, Homo sapiens
gagtacatggctaag

SEQ ID NO: 928573 - DNA, 15 bp, Homo sapiens
tgagtacatggctaa

SEQ ID NO: 928574 - DNA, 15 bp, Homo sapiens
ttgagtacatggcta

SEQ ID NO: 928575 - DNA, 15 bp, Homo sapiens
attgagtacatggct

SEQ ID NO: 928576 - DNA, 15 bp, Homo sapiens
gattgagtacatggc

SEQ ID NO: 928577 - DNA, 15 bp, Homo sapiens
agattgagtacatgg

SEQ ID NO: 928578 - DNA, 15 bp, Homo sapiens
cagattgagtacatg

SEQ ID NO: 928579 - DNA, 15 bp, Homo sapiens
gcagattgagtacat

SEQ ID NO: 928580 - DNA, 15 bp, Homo sapiens
agcagattgagtaca

SEQ ID NO: 928581 - DNA, 15 bp, Homo sapiens
tagcagattgagtac

SEQ ID NO: 928582 - DNA, 15 bp, Homo sapiens
atagcagattgagta

SEQ ID NO: 928583 - DNA, 15 bp, Homo sapiens
catagcagattgagt

SEQ ID NO: 928584 - DNA, 15 bp, Homo sapiens
tcatagcagattgag

SEQ ID NO: 928585 - DNA, 15 bp, Homo sapiens
ttcatagcagattga

SEQ ID NO: 928586 - DNA, 15 bp, Homo sapiens
gttcatagcagattg

SEQ ID NO: 928587 - DNA, 15 bp, Homo sapiens
ggttcatagcagatt

SEQ ID NO: 928588 - DNA, 15 bp, Homo sapiens
aggttcatagcagat

SEQ ID NO: 928589 - DNA, 15 bp, Homo sapiens
taggttcatagcaga

SEQ ID NO: 928590 - DNA, 15 bp, Homo sapiens
gtaggttcatagcag

SEQ ID NO: 928591 - DNA, 15 bp, Homo sapiens
ggtaggttcatagca

SEQ ID NO: 928592 - DNA, 15 bp, Homo sapiens
aggtaggttcatagc

SEQ ID NO: 928593 - DNA, 15 bp, Homo sapiens
caggtaggttcatag

SEQ ID NO: 928594 - DNA, 15 bp, Homo sapiens
gcaggtaggttcata

SEQ ID NO: 928595 - DNA, 15 bp, Homo sapiens
ggcaggtaggttcat

SEQ ID NO: 928596 - DNA, 15 bp, Homo sapiens
aggcaggtaggttca

SEQ ID NO: 928597 - DNA, 15 bp, Homo sapiens
aaggcaggtaggttc

SEQ ID NO: 928598 - DNA, 15 bp, Homo sapiens
aaaggcaggtaggtt

SEQ ID NO: 928599 - DNA, 15 bp, Homo sapiens
gaaaggcaggtaggt

SEQ ID NO: 928600 - DNA, 15 bp, Homo sapiens
agaaaggcaggtagg

SEQ ID NO: 928601 - DNA, 15 bp, Homo sapiens
aagaaaggcaggtag

SEQ ID NO: 928602 - DNA, 15 bp, Homo sapiens
aaagaaaggcaggta

SEQ ID NO: 928603 - DNA, 15 bp, Homo sapiens
aaaagaaaggcaggt

SEQ ID NO: 928604 - DNA, 15 bp, Homo sapiens
gaaaagaaaggcagg

SEQ ID NO: 928605 - DNA, 15 bp, Homo sapiens
tgaaaagaaaggcag

SEQ ID NO: 928606 - DNA, 15 bp, Homo sapiens
ttgaaaagaaaggca

SEQ ID NO: 928607 - DNA, 15 bp, Homo sapiens
tttgaaaagaaaggc

SEQ ID NO: 928608 - DNA, 15 bp, Homo sapiens
atttgaaaagaaagg

SEQ ID NO: 928609 - DNA, 15 bp, Homo sapiens
aatttgaaaagaaag

SEQ ID NO: 928610 - DNA, 15 bp, Homo sapiens
gaatttgaaaagaaa

SEQ ID NO: 928611 - DNA, 15 bp, Homo sapiens
agaatttgaaaagaa

SEQ ID NO: 928612 - DNA, 15 bp, Homo sapiens
tagaatttgaaaaga

SEQ ID NO: 928613 - DNA, 15 bp, Homo sapiens
gtagaatttgaaaag

SEQ ID NO: 928614 - DNA, 15 bp, Homo sapiens
agtagaatttgaaaa

SEQ ID NO: 928615 - DNA, 15 bp, Homo sapiens
gagtagaatttgaaa

SEQ ID NO: 928616 - DNA, 15 bp, Homo sapiens
tgagtagaatttgaa

SEQ ID NO: 928617 - DNA, 15 bp, Homo sapiens
gtgagtagaatttga

SEQ ID NO: 928618 - DNA, 15 bp, Homo sapiens
agtgagtagaatttg

SEQ ID NO: 928619 - DNA, 15 bp, Homo sapiens
cagtgagtagaattt

SEQ ID NO: 928620 - DNA, 15 bp, Homo sapiens
acagtgagtagaatt

SEQ ID NO: 928621 - DNA, 15 bp, Homo sapiens
cacagtgagtagaat

SEQ ID NO: 928622 - DNA, 15 bp, Homo sapiens
tcacagtgagtagaa

SEQ ID NO: 928623 - DNA, 15 bp, Homo sapiens
ctcacagtgagtaga

SEQ ID NO: 928624 - DNA, 15 bp, Homo sapiens
actcacagtgagtag

SEQ ID NO: 928625 - DNA, 15 bp, Homo sapiens
aactcacagtgagta

SEQ ID NO: 928626 - DNA, 15 bp, Homo sapiens
aaactcacagtgagt

SEQ ID NO: 928627 - DNA, 15 bp, Homo sapiens
taaactcacagtgag

SEQ ID NO: 928628 - DNA, 15 bp, Homo sapiens
ctaaactcacagtga

SEQ ID NO: 928629 - DNA, 15 bp, Homo sapiens
gctaaactcacagtg

SEQ ID NO: 928630 - DNA, 15 bp, Homo sapiens
agctaaactcacagt

SEQ ID NO: 928631 - DNA, 15 bp, Homo sapiens
tagctaaactcacag

SEQ ID NO: 928632 - DNA, 15 bp, Homo sapiens
atagctaaactcaca

SEQ ID NO: 928633 - DNA, 15 bp, Homo sapiens
tatagctaaactcac

SEQ ID NO: 928634 - DNA, 15 bp, Homo sapiens
atatagctaaactca

SEQ ID NO: 928635 - DNA, 15 bp, Homo sapiens
gatatagctaaactc

SEQ ID NO: 928636 - DNA, 15 bp, Homo sapiens
agatatagctaaact

SEQ ID NO: 928637 - DNA, 15 bp, Homo sapiens
tagatatagctaaac

SEQ ID NO: 928638 - DNA, 15 bp, Homo sapiens
ttagatatagctaaa

SEQ ID NO: 928639 - DNA, 15 bp, Homo sapiens
gttagatatagctaa

SEQ ID NO: 928640 - DNA, 15 bp, Homo sapiens
agttagatatagcta

SEQ ID NO: 928641 - DNA, 15 bp, Homo sapiens
aagttagatatagct

SEQ ID NO: 928642 - DNA, 15 bp, Homo sapiens
gaagttagatatagc

SEQ ID NO: 928643 - DNA, 15 bp, Homo sapiens
ggaagttagatatag

SEQ ID NO: 928644 - DNA, 15 bp, Homo sapiens
tggaagttagatata

SEQ ID NO: 928645 - DNA, 15 bp, Homo sapiens
ctggaagttagatat

SEQ ID NO: 928646 - DNA, 15 bp, Homo sapiens
tctggaagttagata

SEQ ID NO: 928647 - DNA, 15 bp, Homo sapiens
ttctggaagttagat

SEQ ID NO: 928648 - DNA, 15 bp, Homo sapiens
attctggaagttaga

SEQ ID NO: 928649 - DNA, 15 bp, Homo sapiens
aattctggaagttag

SEQ ID NO: 928650 - DNA, 15 bp, Homo sapiens
gaattctggaagtta

SEQ ID NO: 928651 - DNA, 15 bp, Homo sapiens
tgaattctggaagtt

SEQ ID NO: 928652 - DNA, 15 bp, Homo sapiens
ctgaattctggaagt

SEQ ID NO: 928653 - DNA, 15 bp, Homo sapiens
gctgaattctggaag

SEQ ID NO: 928654 - DNA, 15 bp, Homo sapiens
agctgaattctggaa

SEQ ID NO: 928655 - DNA, 15 bp, Homo sapiens
gagctgaattctgga

SEQ ID NO: 928656 - DNA, 15 bp, Homo sapiens
tgagctgaattctgg

SEQ ID NO: 928657 - DNA, 15 bp, Homo sapiens
atgagctgaattctg

SEQ ID NO: 928658 - DNA, 15 bp, Homo sapiens
tatgagctgaattct

SEQ ID NO: 928659 - DNA, 15 bp, Homo sapiens
atatgagctgaattc

SEQ ID NO: 928660 - DNA, 15 bp, Homo sapiens
aatatgagctgaatt

SEQ ID NO: 928661 - DNA, 15 bp, Homo sapiens
aaatatgagctgaat

SEQ ID NO: 928662 - DNA, 15 bp, Homo sapiens
caaatatgagctgaa

SEQ ID NO: 928663 - DNA, 15 bp, Homo sapiens
gcaaatatgagctga

SEQ ID NO: 928664 - DNA, 15 bp, Homo sapiens
ggcaaatatgagctg

SEQ ID NO: 928665 - DNA, 15 bp, Homo sapiens
aggcaaatatgagct

SEQ ID NO: 928666 - DNA, 15 bp, Homo sapiens
gaggcaaatatgagc

SEQ ID NO: 928667 - DNA, 15 bp, Homo sapiens
agaggcaaatatgag

SEQ ID NO: 928668 - DNA, 15 bp, Homo sapiens
aagaggcaaatatga

SEQ ID NO: 928669 - DNA, 15 bp, Homo sapiens
aaagaggcaaatatg

SEQ ID NO: 928670 - DNA, 15 bp, Homo sapiens
aaaagaggcaaatat

SEQ ID NO: 928671 - DNA, 15 bp, Homo sapiens
caaaagaggcaaata

SEQ ID NO: 928672 - DNA, 15 bp, Homo sapiens
tcaaaagaggcaaat

SEQ ID NO: 928673 - DNA, 15 bp, Homo sapiens
gtcaaaagaggcaaa

SEQ ID NO: 928674 - DNA, 15 bp, Homo sapiens
ggtcaaaagaggcaa

SEQ ID NO: 928675 - DNA, 15 bp, Homo sapiens
tggtcaaaagaggca

SEQ ID NO: 928676 - DNA, 15 bp, Homo sapiens
atggtcaaaagaggc

SEQ ID NO: 928677 - DNA, 15 bp, Homo sapiens
aatggtcaaaagagg

SEQ ID NO: 928678 - DNA, 15 bp, Homo sapiens
gaatggtcaaaagag

SEQ ID NO: 928679 - DNA, 15 bp, Homo sapiens
agaatggtcaaaaga

SEQ ID NO: 928680 - DNA, 15 bp, Homo sapiens
cagaatggtcaaaag

SEQ ID NO: 928681 - DNA, 15 bp, Homo sapiens
acagaatggtcaaaa

SEQ ID NO: 928682 - DNA, 15 bp, Homo sapiens
aacagaatggtcaaa

SEQ ID NO: 928683 - DNA, 15 bp, Homo sapiens
gaacagaatggtcaa

SEQ ID NO: 928684 - DNA, 15 bp, Homo sapiens
ggaacagaatggtca

SEQ ID NO: 928685 - DNA, 15 bp, Homo sapiens
tggaacagaatggtc

SEQ ID NO: 928686 - DNA, 15 bp, Homo sapiens
atggaacagaatggt

SEQ ID NO: 928687 - DNA, 15 bp, Homo sapiens
tatggaacagaatgg

SEQ ID NO: 928688 - DNA, 15 bp, Homo sapiens
atatggaacagaatg

SEQ ID NO: 928689 - DNA, 15 bp, Homo sapiens
catatggaacagaat

SEQ ID NO: 928690 - DNA, 15 bp, Homo sapiens
acatatggaacagaa

SEQ ID NO: 928691 - DNA, 15 bp, Homo sapiens
tacatatggaacaga

SEQ ID NO: 928692 - DNA, 15 bp, Homo sapiens
atacatatggaacag

SEQ ID NO: 928693 - DNA, 15 bp, Homo sapiens
catacatatggaaca

SEQ ID NO: 928694 - DNA, 15 bp, Homo sapiens
tcatacatatggaac

SEQ ID NO: 928695 - DNA, 15 bp, Homo sapiens
ttcatacatatggaa

SEQ ID NO: 928696 - DNA, 15 bp, Homo sapiens
tttcatacatatgga

SEQ ID NO: 928697 - DNA, 15 bp, Homo sapiens
atttcatacatatgg

SEQ ID NO: 928698 - DNA, 15 bp, Homo sapiens
catttcatacatatg

SEQ ID NO: 928699 - DNA, 15 bp, Homo sapiens
tcatttcatacatat

SEQ ID NO: 928700 - DNA, 15 bp, Homo sapiens
gtcatttcatacata

SEQ ID NO: 928701 - DNA, 15 bp, Homo sapiens
tgtcatttcatacat

SEQ ID NO: 928702 - DNA, 15 bp, Homo sapiens
atgtcatttcataca

SEQ ID NO: 928703 - DNA, 15 bp, Homo sapiens
catgtcatttcatac

SEQ ID NO: 928704 - DNA, 15 bp, Homo sapiens
acatgtcatttcata

SEQ ID NO: 928705 - DNA, 15 bp, Homo sapiens
gacatgtcatttcat

SEQ ID NO: 928706 - DNA, 15 bp, Homo sapiens
agacatgtcatttca

SEQ ID NO: 928707 - DNA, 15 bp, Homo sapiens
aagacatgtcatttc

SEQ ID NO: 928708 - DNA, 15 bp, Homo sapiens
aaagacatgtcattt

SEQ ID NO: 928709 - DNA, 15 bp, Homo sapiens
gaaagacatgtcatt

SEQ ID NO: 928710 - DNA, 15 bp, Homo sapiens
tgaaagacatgtcat

SEQ ID NO: 928711 - DNA, 15 bp, Homo sapiens
atgaaagacatgtca

SEQ ID NO: 928712 - DNA, 15 bp, Homo sapiens
gatgaaagacatgtc

SEQ ID NO: 928713 - DNA, 15 bp, Homo sapiens
agatgaaagacatgt

SEQ ID NO: 928714 - DNA, 15 bp, Homo sapiens
aagatgaaagacatg

SEQ ID NO: 928715 - DNA, 15 bp, Homo sapiens
aaagatgaaagacat

SEQ ID NO: 928716 - DNA, 15 bp, Homo sapiens
aaaagatgaaagaca

SEQ ID NO: 928717 - DNA, 15 bp, Homo sapiens
taaaagatgaaagac

SEQ ID NO: 928718 - DNA, 15 bp, Homo sapiens
ttaaaagatgaaaga

SEQ ID NO: 928719 - DNA, 15 bp, Homo sapiens
attaaaagatgaaag

SEQ ID NO: 928720 - DNA, 15 bp, Homo sapiens
cattaaaagatgaaa

SEQ ID NO: 928721 - DNA, 15 bp, Homo sapiens
acattaaaagatgaa

SEQ ID NO: 928722 - DNA, 15 bp, Homo sapiens
cacattaaaagatga

SEQ ID NO: 928723 - DNA, 15 bp, Homo sapiens
acacattaaaagatg

SEQ ID NO: 928724 - DNA, 15 bp, Homo sapiens
tacacattaaaagat

SEQ ID NO: 928725 - DNA, 15 bp, Homo sapiens
ttacacattaaaaga

SEQ ID NO: 928726 - DNA, 15 bp, Homo sapiens
gttacacattaaaag

SEQ ID NO: 928727 - DNA, 15 bp, Homo sapiens
ggttacacattaaaa

SEQ ID NO: 928728 - DNA, 15 bp, Homo sapiens
aggttacacattaaa

SEQ ID NO: 928729 - DNA, 15 bp, Homo sapiens
aaggttacacattaa

SEQ ID NO: 928730 - DNA, 15 bp, Homo sapiens
taaggttacacatta

SEQ ID NO: 928731 - DNA, 15 bp, Homo sapiens
ctaaggttacacatt

SEQ ID NO: 928732 - DNA, 15 bp, Homo sapiens
gctaaggttacacat

SEQ ID NO: 928733 - DNA, 15 bp, Homo sapiens
tgctaaggttacaca

SEQ ID NO: 928734 - DNA, 15 bp, Homo sapiens
atgctaaggttacac

SEQ ID NO: 928735 - DNA, 15 bp, Homo sapiens
tatgctaaggttaca

SEQ ID NO: 928736 - DNA, 15 bp, Homo sapiens
atatgctaaggttac

SEQ ID NO: 928737 - DNA, 15 bp, Homo sapiens
aatatgctaaggtta

SEQ ID NO: 928738 - DNA, 15 bp, Homo sapiens
aaatatgctaaggtt

SEQ ID NO: 928739 - DNA, 15 bp, Homo sapiens
caaatatgctaaggt

SEQ ID NO: 928740 - DNA, 15 bp, Homo sapiens
tcaaatatgctaagg

SEQ ID NO: 928741 - DNA, 15 bp, Homo sapiens
ctcaaatatgctaag

SEQ ID NO: 928742 - DNA, 15 bp, Homo sapiens
gctcaaatatgctaa

SEQ ID NO: 928743 - DNA, 15 bp, Homo sapiens
tgctcaaatatgcta

SEQ ID NO: 928744 - DNA, 15 bp, Homo sapiens
atgctcaaatatgct

SEQ ID NO: 928745 - DNA, 15 bp, Homo sapiens
aatgctcaaatatgc

SEQ ID NO: 928746 - DNA, 15 bp, Homo sapiens
taatgctcaaatatg

SEQ ID NO: 928747 - DNA, 15 bp, Homo sapiens
gtaatgctcaaatat

SEQ ID NO: 928748 - DNA, 15 bp, Homo sapiens
ggtaatgctcaaata

SEQ ID NO: 928749 - DNA, 15 bp, Homo sapiens
aggtaatgctcaaat

SEQ ID NO: 928750 - DNA, 15 bp, Homo sapiens
gaggtaatgctcaaa

SEQ ID NO: 928751 - DNA, 15 bp, Homo sapiens
cgaggtaatgctcaa

SEQ ID NO: 928752 - DNA, 15 bp, Homo sapiens
acgaggtaatgctca

SEQ ID NO: 928753 - DNA, 15 bp, Homo sapiens
aacgaggtaatgctc

SEQ ID NO: 928754 - DNA, 15 bp, Homo sapiens
taacgaggtaatgct

SEQ ID NO: 928755 - DNA, 15 bp, Homo sapiens
ttaacgaggtaatgc

SEQ ID NO: 928756 - DNA, 15 bp, Homo sapiens
attaacgaggtaatg

SEQ ID NO: 928757 - DNA, 15 bp, Homo sapiens
aattaacgaggtaat

SEQ ID NO: 928758 - DNA, 15 bp, Homo sapiens
gaattaacgaggtaa

SEQ ID NO: 928759 - DNA, 15 bp, Homo sapiens
cgaattaacgaggta

SEQ ID NO: 928760 - DNA, 15 bp, Homo sapiens
ccgaattaacgaggt

SEQ ID NO: 928761 - DNA, 15 bp, Homo sapiens
accgaattaacgagg

SEQ ID NO: 928762 - DNA, 15 bp, Homo sapiens
gaccgaattaacgag

SEQ ID NO: 928763 - DNA, 15 bp, Homo sapiens
tgaccgaattaacga

SEQ ID NO: 928764 - DNA, 15 bp, Homo sapiens
ttgaccgaattaacg

SEQ ID NO: 928765 - DNA, 15 bp, Homo sapiens
gttgaccgaattaac

SEQ ID NO: 928766 - DNA, 15 bp, Homo sapiens
tgttgaccgaattaa

SEQ ID NO: 928767 - DNA, 15 bp, Homo sapiens
gtgttgaccgaatta

SEQ ID NO: 928768 - DNA, 15 bp, Homo sapiens
agtgttgaccgaatt

SEQ ID NO: 928769 - DNA, 15 bp, Homo sapiens
aagtgttgaccgaat

SEQ ID NO: 928770 - DNA, 15 bp, Homo sapiens
taagtgttgaccgaa

SEQ ID NO: 928771 - DNA, 15 bp, Homo sapiens
ataagtgttgaccga

SEQ ID NO: 928772 - DNA, 15 bp, Homo sapiens
aataagtgttgaccg

SEQ ID NO: 928773 - DNA, 15 bp, Homo sapiens
caataagtgttgacc

SEQ ID NO: 928774 - DNA, 15 bp, Homo sapiens
tcaataagtgttgac

SEQ ID NO: 928775 - DNA, 15 bp, Homo sapiens
atcaataagtgttga

SEQ ID NO: 928776 - DNA, 15 bp, Homo sapiens
gatcaataagtgttg

SEQ ID NO: 928777 - DNA, 15 bp, Homo sapiens
agatcaataagtgtt

SEQ ID NO: 928778 - DNA, 15 bp, Homo sapiens
gagatcaataagtgt

SEQ ID NO: 928779 - DNA, 15 bp, Homo sapiens
ggagatcaataagtg

SEQ ID NO: 928780 - DNA, 15 bp, Homo sapiens
aggagatcaataagt

SEQ ID NO: 928781 - DNA, 15 bp, Homo sapiens
caggagatcaataag

SEQ ID NO: 928782 - DNA, 15 bp, Homo sapiens
gcaggagatcaataa

SEQ ID NO: 928783 - DNA, 15 bp, Homo sapiens
agcaggagatcaata

SEQ ID NO: 928784 - DNA, 15 bp, Homo sapiens
tagcaggagatcaat

SEQ ID NO: 928785 - DNA, 15 bp, Homo sapiens
gtagcaggagatcaa

SEQ ID NO: 928786 - DNA, 15 bp, Homo sapiens
cgtagcaggagatca

SEQ ID NO: 928787 - DNA, 15 bp, Homo sapiens
acgtagcaggagatc

SEQ ID NO: 928788 - DNA, 15 bp, Homo sapiens
cacgtagcaggagat

SEQ ID NO: 928789 - DNA, 15 bp, Homo sapiens
gcacgtagcaggaga

SEQ ID NO: 928790 - DNA, 15 bp, Homo sapiens
tgcacgtagcaggag

SEQ ID NO: 928791 - DNA, 15 bp, Homo sapiens
ctgcacgtagcagga

SEQ ID NO: 928792 - DNA, 15 bp, Homo sapiens
tctgcacgtagcagg

SEQ ID NO: 928793 - DNA, 15 bp, Homo sapiens
gtctgcacgtagcag

SEQ ID NO: 928794 - DNA, 15 bp, Homo sapiens
tgtctgcacgtagca

SEQ ID NO: 928795 - DNA, 15 bp, Homo sapiens
atgtctgcacgtagc

SEQ ID NO: 928796 - DNA, 15 bp, Homo sapiens
aatgtctgcacgtag

SEQ ID NO: 928797 - DNA, 15 bp, Homo sapiens
aaatgtctgcacgta

SEQ ID NO: 928798 - DNA, 15 bp, Homo sapiens
aaaatgtctgcacgt

SEQ ID NO: 928799 - DNA, 15 bp, Homo sapiens
caaaatgtctgcacg

SEQ ID NO: 928800 - DNA, 15 bp, Homo sapiens
gcaaaatgtctgcac

SEQ ID NO: 928801 - DNA, 15 bp, Homo sapiens
agcaaaatgtctgca

SEQ ID NO: 928802 - DNA, 15 bp, Homo sapiens
tagcaaaatgtctgc

SEQ ID NO: 928803 - DNA, 15 bp, Homo sapiens
ctagcaaaatgtctg

SEQ ID NO: 928804 - DNA, 15 bp, Homo sapiens
gctagcaaaatgtct

SEQ ID NO: 928805 - DNA, 15 bp, Homo sapiens
agctagcaaaatgtc

SEQ ID NO: 928806 - DNA, 15 bp, Homo sapiens
tagctagcaaaatgt

SEQ ID NO: 928807 - DNA, 15 bp, Homo sapiens
atagctagcaaaatg

SEQ ID NO: 928808 - DNA, 15 bp, Homo sapiens
aatagctagcaaaat

SEQ ID NO: 928809 - DNA, 15 bp, Homo sapiens
caatagctagcaaaa

SEQ ID NO: 928810 - DNA, 15 bp, Homo sapiens
acaatagctagcaaa

SEQ ID NO: 928811 - DNA, 15 bp, Homo sapiens
tacaatagctagcaa

SEQ ID NO: 928812 - DNA, 15 bp, Homo sapiens
ttacaatagctagca

SEQ ID NO: 928813 - DNA, 15 bp, Homo sapiens
tttacaatagctagc

SEQ ID NO: 928814 - DNA, 15 bp, Homo sapiens
atttacaatagctag

SEQ ID NO: 928815 - DNA, 15 bp, Homo sapiens
tatttacaatagcta

SEQ ID NO: 928816 - DNA, 15 bp, Homo sapiens
gtatttacaatagct

SEQ ID NO: 928817 - DNA, 15 bp, Homo sapiens
tgtatttacaatagc

SEQ ID NO: 928818 - DNA, 15 bp, Homo sapiens
ttgtatttacaatag

SEQ ID NO: 928819 - DNA, 15 bp, Homo sapiens
tttgtatttacaata

SEQ ID NO: 928820 - DNA, 15 bp, Homo sapiens
atttgtatttacaat

SEQ ID NO: 928821 - DNA, 15 bp, Homo sapiens
tatttgtatttacaa

SEQ ID NO: 928822 - DNA, 15 bp, Homo sapiens
ttatttgtatttaca

SEQ ID NO: 928823 - DNA, 15 bp, Homo sapiens
attatttgtatttac

SEQ ID NO: 928824 - DNA, 15 bp, Homo sapiens
tattatttgtattta

SEQ ID NO: 928825 - DNA, 15 bp, Homo sapiens
ttattatttgtattt

SEQ ID NO: 928826 - DNA, 15 bp, Homo sapiens
tttattatttgtatt

SEQ ID NO: 928827 - DNA, 15 bp, Homo sapiens
ctttattatttgtat

SEQ ID NO: 928828 - DNA, 15 bp, Homo sapiens
actttattatttgta

SEQ ID NO: 928829 - DNA, 15 bp, Homo sapiens
gactttattatttgt

SEQ ID NO: 928830 - DNA, 15 bp, Homo sapiens
agactttattatttg

SEQ ID NO: 928831 - DNA, 15 bp, Homo sapiens
cagactttattattt

SEQ ID NO: 928832 - DNA, 15 bp, Homo sapiens
gcagactttattatt

SEQ ID NO: 928833 - DNA, 15 bp, Homo sapiens
tgcagactttattat

SEQ ID NO: 928834 - DNA, 15 bp, Homo sapiens
atgcagactttatta

SEQ ID NO: 928835 - DNA, 15 bp, Homo sapiens
aatgcagactttatt

SEQ ID NO: 928836 - DNA, 15 bp, Homo sapiens
aaatgcagactttat

SEQ ID NO: 928837 - DNA, 15 bp, Homo sapiens
gaaatgcagacttta

SEQ ID NO: 928838 - DNA, 15 bp, Homo sapiens
ggaaatgcagacttt

SEQ ID NO: 928839 - DNA, 15 bp, Homo sapiens
aggaaatgcagactt

SEQ ID NO: 928840 - DNA, 15 bp, Homo sapiens
caggaaatgcagact

SEQ ID NO: 928841 - DNA, 15 bp, Homo sapiens
acaggaaatgcagac

SEQ ID NO: 928842 - DNA, 15 bp, Homo sapiens
gacaggaaatgcaga

SEQ ID NO: 928843 - DNA, 15 bp, Homo sapiens
agacaggaaatgcag

SEQ ID NO: 928844 - DNA, 15 bp, Homo sapiens
aagacaggaaatgca

SEQ ID NO: 928845 - DNA, 15 bp, Homo sapiens
gaagacaggaaatgc

SEQ ID NO: 928846 - DNA, 15 bp, Homo sapiens
agaagacaggaaatg

SEQ ID NO: 928847 - DNA, 15 bp, Homo sapiens
aagaagacaggaaat

SEQ ID NO: 928848 - DNA, 15 bp, Homo sapiens
aaagaagacaggaaa

SEQ ID NO: 928849 - DNA, 15 bp, Homo sapiens
taaagaagacaggaa

SEQ ID NO: 928850 - DNA, 15 bp, Homo sapiens
ttaaagaagacagga

SEQ ID NO: 928851 - DNA, 15 bp, Homo sapiens
cttaaagaagacagg

SEQ ID NO: 928852 - DNA, 15 bp, Homo sapiens
gcttaaagaagacag

SEQ ID NO: 928853 - DNA, 15 bp, Homo sapiens
ggcttaaagaagaca

SEQ ID NO: 928854 - DNA, 15 bp, Homo sapiens
aggcttaaagaagac

SEQ ID NO: 928855 - DNA, 15 bp, Homo sapiens
aaggcttaaagaaga

SEQ ID NO: 928856 - DNA, 15 bp, Homo sapiens
gaaggcttaaagaag

SEQ ID NO: 928857 - DNA, 15 bp, Homo sapiens
tgaaggcttaaagaa

SEQ ID NO: 928858 - DNA, 15 bp, Homo sapiens
atgaaggcttaaaga

SEQ ID NO: 928859 - DNA, 15 bp, Homo sapiens
aatgaaggcttaaag

SEQ ID NO: 928860 - DNA, 15 bp, Homo sapiens
caatgaaggcttaaa

SEQ ID NO: 928861 - DNA, 15 bp, Homo sapiens
gcaatgaaggcttaa

SEQ ID NO: 928862 - DNA, 15 bp, Homo sapiens
ggcaatgaaggctta

SEQ ID NO: 928863 - DNA, 15 bp, Homo sapiens
aggcaatgaaggctt

SEQ ID NO: 928864 - DNA, 15 bp, Homo sapiens
taggcaatgaaggct

SEQ ID NO: 928865 - DNA, 15 bp, Homo sapiens
ataggcaatgaaggc

SEQ ID NO: 928866 - DNA, 15 bp, Homo sapiens
aataggcaatgaagg

SEQ ID NO: 928867 - DNA, 15 bp, Homo sapiens
taataggcaatgaag

SEQ ID NO: 928868 - DNA, 15 bp, Homo sapiens
ttaataggcaatgaa

SEQ ID NO: 928869 - DNA, 15 bp, Homo sapiens
tttaataggcaatga

SEQ ID NO: 928870 - DNA, 15 bp, Homo sapiens
atttaataggcaatg

SEQ ID NO: 928871 - DNA, 15 bp, Homo sapiens
gatttaataggcaat

SEQ ID NO: 928872 - DNA, 15 bp, Homo sapiens
tgatttaataggcaa

SEQ ID NO: 928873 - DNA, 15 bp, Homo sapiens
atgatttaataggca

SEQ ID NO: 928874 - DNA, 15 bp, Homo sapiens
aatgatttaataggc

SEQ ID NO: 928875 - DNA, 15 bp, Homo sapiens
taatgatttaatagg

SEQ ID NO: 928876 - DNA, 15 bp, Homo sapiens
gtaatgatttaatag

SEQ ID NO: 928877 - DNA, 15 bp, Homo sapiens
tgtaatgatttaata

SEQ ID NO: 928878 - DNA, 15 bp, Homo sapiens
atgtaatgatttaat

SEQ ID NO: 928879 - DNA, 15 bp, Homo sapiens
aatgtaatgatttaa

SEQ ID NO: 928880 - DNA, 15 bp, Homo sapiens
aaatgtaatgattta

SEQ ID NO: 928881 - DNA, 15 bp, Homo sapiens
aaaatgtaatgattt

SEQ ID NO: 928882 - DNA, 15 bp, Homo sapiens
taaaatgtaatgatt

SEQ ID NO: 928883 - DNA, 15 bp, Homo sapiens
ctaaaatgtaatgat

SEQ ID NO: 928884 - DNA, 15 bp, Homo sapiens
tctaaaatgtaatga

SEQ ID NO: 928885 - DNA, 15 bp, Homo sapiens
atctaaaatgtaatg

SEQ ID NO: 928886 - DNA, 15 bp, Homo sapiens
aatctaaaatgtaat

SEQ ID NO: 928887 - DNA, 15 bp, Homo sapiens
taatctaaaatgtaa

SEQ ID NO: 928888 - DNA, 15 bp, Homo sapiens
ctaatctaaaatgta

SEQ ID NO: 928889 - DNA, 15 bp, Homo sapiens
tctaatctaaaatgt

SEQ ID NO: 928890 - DNA, 15 bp, Homo sapiens
atctaatctaaaatg

SEQ ID NO: 928891 - DNA, 15 bp, Homo sapiens
tatctaatctaaaat

SEQ ID NO: 928892 - DNA, 15 bp, Homo sapiens
atatctaatctaaaa

SEQ ID NO: 928893 - DNA, 15 bp, Homo sapiens
aatatctaatctaaa

SEQ ID NO: 928894 - DNA, 15 bp, Homo sapiens
taatatctaatctaa

SEQ ID NO: 928895 - DNA, 15 bp, Homo sapiens
ataatatctaatcta

SEQ ID NO: 928896 - DNA, 15 bp, Homo sapiens
tataatatctaatct

SEQ ID NO: 928897 - DNA, 15 bp, Homo sapiens
atataatatctaatc

SEQ ID NO: 928898 - DNA, 15 bp, Homo sapiens
aatataatatctaat

SEQ ID NO: 928899 - DNA, 15 bp, Homo sapiens
aaatataatatctaa

SEQ ID NO: 928900 - DNA, 15 bp, Homo sapiens
aaaatataatatcta

SEQ ID NO: 928901 - DNA, 15 bp, Homo sapiens
caaaatataatatct

SEQ ID NO: 928902 - DNA, 15 bp, Homo sapiens
tcaaaatataatatc

SEQ ID NO: 928903 - DNA, 15 bp, Homo sapiens
atcaaaatataatat

SEQ ID NO: 928904 - DNA, 15 bp, Homo sapiens
gatcaaaatataata

SEQ ID NO: 928905 - DNA, 15 bp, Homo sapiens
tgatcaaaatataat

SEQ ID NO: 928906 - DNA, 15 bp, Homo sapiens
atgatcaaaatataa

SEQ ID NO: 928907 - DNA, 15 bp, Homo sapiens
aatgatcaaaatata

SEQ ID NO: 928908 - DNA, 15 bp, Homo sapiens
aaatgatcaaaatat

SEQ ID NO: 928909 - DNA, 15 bp, Homo sapiens
caaatgatcaaaata

SEQ ID NO: 928910 - DNA, 15 bp, Homo sapiens
tcaaatgatcaaaat

SEQ ID NO: 928911 - DNA, 15 bp, Homo sapiens
ctcaaatgatcaaaa

SEQ ID NO: 928912 - DNA, 15 bp, Homo sapiens
cctcaaatgatcaaa

SEQ ID NO: 928913 - DNA, 15 bp, Homo sapiens
tcctcaaatgatcaa

SEQ ID NO: 928914 - DNA, 15 bp, Homo sapiens
ttcctcaaatgatca

SEQ ID NO: 928915 - DNA, 15 bp, Homo sapiens
gttcctcaaatgatc

SEQ ID NO: 928916 - DNA, 15 bp, Homo sapiens
ggttcctcaaatgat

SEQ ID NO: 928917 - DNA, 15 bp, Homo sapiens
tggttcctcaaatga

SEQ ID NO: 928918 - DNA, 15 bp, Homo sapiens
ttggttcctcaaatg

SEQ ID NO: 928919 - DNA, 15 bp, Homo sapiens
tttggttcctcaaat

SEQ ID NO: 928920 - DNA, 15 bp, Homo sapiens
atttggttcctcaaa

SEQ ID NO: 928921 - DNA, 15 bp, Homo sapiens
aatttggttcctcaa

SEQ ID NO: 928922 - DNA, 15 bp, Homo sapiens
taatttggttcctca

SEQ ID NO: 928923 - DNA, 15 bp, Homo sapiens
ttaatttggttcctc

SEQ ID NO: 928924 - DNA, 15 bp, Homo sapiens
tttaatttggttcct

SEQ ID NO: 928925 - DNA, 15 bp, Homo sapiens
ttttaatttggttcc

SEQ ID NO: 928926 - DNA, 15 bp, Homo sapiens
tttttaatttggttc

SEQ ID NO: 928927 - DNA, 15 bp, Homo sapiens
atttttaatttggtt

SEQ ID NO: 928928 - DNA, 15 bp, Homo sapiens
tatttttaatttggt

SEQ ID NO: 928929 - DNA, 15 bp, Homo sapiens
atatttttaatttgg

SEQ ID NO: 928930 - DNA, 15 bp, Homo sapiens
catatttttaatttg

SEQ ID NO: 928931 - DNA, 15 bp, Homo sapiens
ccatatttttaattt

SEQ ID NO: 928932 - DNA, 15 bp, Homo sapiens
tccatatttttaatt

SEQ ID NO: 928933 - DNA, 15 bp, Homo sapiens
ttccatatttttaat

SEQ ID NO: 928934 - DNA, 15 bp, Homo sapiens
attccatatttttaa

SEQ ID NO: 928935 - DNA, 15 bp, Homo sapiens
tattccatattttta

SEQ ID NO: 928936 - DNA, 15 bp, Homo sapiens
ttattccatattttt

SEQ ID NO: 928937 - DNA, 15 bp, Homo sapiens
cttattccatatttt

SEQ ID NO: 928938 - DNA, 15 bp, Homo sapiens
acttattccatattt

SEQ ID NO: 928939 - DNA, 15 bp, Homo sapiens
tacttattccatatt

SEQ ID NO: 928940 - DNA, 15 bp, Homo sapiens
atacttattccatat

SEQ ID NO: 928941 - DNA, 15 bp, Homo sapiens
catacttattccata

SEQ ID NO: 928942 - DNA, 15 bp, Homo sapiens
ccatacttattccat

SEQ ID NO: 928943 - DNA, 15 bp, Homo sapiens
gccatacttattcca

SEQ ID NO: 928944 - DNA, 15 bp, Homo sapiens
tgccatacttattcc

SEQ ID NO: 928945 - DNA, 15 bp, Homo sapiens
atgccatacttattc

SEQ ID NO: 928946 - DNA, 15 bp, Homo sapiens
aatgccatacttatt

SEQ ID NO: 928947 - DNA, 15 bp, Homo sapiens
caatgccatacttat

SEQ ID NO: 928948 - DNA, 15 bp, Homo sapiens
tcaatgccatactta

SEQ ID NO: 928949 - DNA, 15 bp, Homo sapiens
ttcaatgccatactt

SEQ ID NO: 928950 - DNA, 15 bp, Homo sapiens
attcaatgccatact

SEQ ID NO: 928951 - DNA, 15 bp, Homo sapiens
aattcaatgccatac

SEQ ID NO: 928952 - DNA, 15 bp, Homo sapiens
taattcaatgccata

SEQ ID NO: 928953 - DNA, 15 bp, Homo sapiens
ataattcaatgccat

SEQ ID NO: 928954 - DNA, 15 bp, Homo sapiens
tataattcaatgcca

SEQ ID NO: 928955 - DNA, 15 bp, Homo sapiens
gtataattcaatgcc

SEQ ID NO: 928956 - DNA, 15 bp, Homo sapiens
tgtataattcaatgc

SEQ ID NO: 928957 - DNA, 15 bp, Homo sapiens
atgtataattcaatg

SEQ ID NO: 928958 - DNA, 15 bp, Homo sapiens
catgtataattcaat

SEQ ID NO: 928959 - DNA, 15 bp, Homo sapiens
gcatgtataattcaa

SEQ ID NO: 928960 - DNA, 15 bp, Homo sapiens
ggcatgtataattca

SEQ ID NO: 928961 - DNA, 15 bp, Homo sapiens
aggcatgtataattc

SEQ ID NO: 928962 - DNA, 15 bp, Homo sapiens
taggcatgtataatt

SEQ ID NO: 928963 - DNA, 15 bp, Homo sapiens
ataggcatgtataat

SEQ ID NO: 928964 - DNA, 15 bp, Homo sapiens
aataggcatgtataa

SEQ ID NO: 928965 - DNA, 15 bp, Homo sapiens
caataggcatgtata

SEQ ID NO: 928966 - DNA, 15 bp, Homo sapiens
gcaataggcatgtat

SEQ ID NO: 928967 - DNA, 15 bp, Homo sapiens
agcaataggcatgta

SEQ ID NO: 928968 - DNA, 15 bp, Homo sapiens
tagcaataggcatgt

SEQ ID NO: 928969 - DNA, 15 bp, Homo sapiens
ttagcaataggcatg

SEQ ID NO: 928970 - DNA, 15 bp, Homo sapiens
attagcaataggcat

SEQ ID NO: 928971 - DNA, 15 bp, Homo sapiens
tattagcaataggca

SEQ ID NO: 928972 - DNA, 15 bp, Homo sapiens
atattagcaataggc

SEQ ID NO: 928973 - DNA, 15 bp, Homo sapiens
tatattagcaatagg

SEQ ID NO: 928974 - DNA, 15 bp, Homo sapiens
atatattagcaatag

SEQ ID NO: 928975 - DNA, 15 bp, Homo sapiens
aatatattagcaata

SEQ ID NO: 928976 - DNA, 15 bp, Homo sapiens
gaatatattagcaat

SEQ ID NO: 928977 - DNA, 15 bp, Homo sapiens
tgaatatattagcaa

SEQ ID NO: 928978 - DNA, 15 bp, Homo sapiens
atgaatatattagca

SEQ ID NO: 928979 - DNA, 15 bp, Homo sapiens
tatgaatatattagc

SEQ ID NO: 928980 - DNA, 15 bp, Homo sapiens
atatgaatatattag

SEQ ID NO: 928981 - DNA, 15 bp, Homo sapiens
aatatgaatatatta

SEQ ID NO: 928982 - DNA, 15 bp, Homo sapiens
aaatatgaatatatt

SEQ ID NO: 928983 - DNA, 15 bp, Homo sapiens
aaaatatgaatatat

SEQ ID NO: 928984 - DNA, 15 bp, Homo sapiens
taaaatatgaatata

SEQ ID NO: 928985 - DNA, 15 bp, Homo sapiens
ataaaatatgaatat

SEQ ID NO: 928986 - DNA, 15 bp, Homo sapiens
tataaaatatgaata

SEQ ID NO: 928987 - DNA, 15 bp, Homo sapiens
ctataaaatatgaat

SEQ ID NO: 928988 - DNA, 15 bp, Homo sapiens
cctataaaatatgaa

SEQ ID NO: 928989 - DNA, 15 bp, Homo sapiens
tcctataaaatatga

SEQ ID NO: 928990 - DNA, 15 bp, Homo sapiens
atcctataaaatatg

SEQ ID NO: 928991 - DNA, 15 bp, Homo sapiens
aatcctataaaatat

SEQ ID NO: 928992 - DNA, 15 bp, Homo sapiens
aaatcctataaaata

SEQ ID NO: 928993 - DNA, 15 bp, Homo sapiens
taaatcctataaaat

SEQ ID NO: 928994 - DNA, 15 bp, Homo sapiens
ttaaatcctataaaa

SEQ ID NO: 928995 - DNA, 15 bp, Homo sapiens
attaaatcctataaa

SEQ ID NO: 928996 - DNA, 15 bp, Homo sapiens
cattaaatcctataa

SEQ ID NO: 928997 - DNA, 15 bp, Homo sapiens
tcattaaatcctata

SEQ ID NO: 928998 - DNA, 15 bp, Homo sapiens
ttcattaaatcctat

SEQ ID NO: 928999 - DNA, 15 bp, Homo sapiens
tttcattaaatccta

SEQ ID NO: 929000 - DNA, 15 bp, Homo sapiens
gtttcattaaatcct

SEQ ID NO: 929001 - DNA, 15 bp, Homo sapiens
tgtttcattaaatcc

SEQ ID NO: 929002 - DNA, 15 bp, Homo sapiens
ctgtttcattaaatc

SEQ ID NO: 929003 - DNA, 15 bp, Homo sapiens
actgtttcattaaat

SEQ ID NO: 929004 - DNA, 15 bp, Homo sapiens
gactgtttcattaaa

SEQ ID NO: 929005 - DNA, 15 bp, Homo sapiens
agactgtttcattaa

SEQ ID NO: 929006 - DNA, 15 bp, Homo sapiens
gagactgtttcatta

SEQ ID NO: 929007 - DNA, 15 bp, Homo sapiens
ggagactgtttcatt

SEQ ID NO: 929008 - DNA, 15 bp, Homo sapiens
gggagactgtttcat

SEQ ID NO: 929009 - DNA, 15 bp, Homo sapiens
tgggagactgtttca

SEQ ID NO: 929010 - DNA, 15 bp, Homo sapiens
gtgggagactgtttc

SEQ ID NO: 929011 - DNA, 15 bp, Homo sapiens
agtgggagactgttt

SEQ ID NO: 929012 - DNA, 15 bp, Homo sapiens
gagtgggagactgtt

SEQ ID NO: 929013 - DNA, 15 bp, Homo sapiens
ggagtgggagactgt

SEQ ID NO: 929014 - DNA, 15 bp, Homo sapiens
tggagtgggagactg

SEQ ID NO: 929015 - DNA, 15 bp, Homo sapiens
ctggagtgggagact

SEQ ID NO: 929016 - DNA, 15 bp, Homo sapiens
actggagtgggagac

SEQ ID NO: 929017 - DNA, 15 bp, Homo sapiens
aactggagtgggaga

SEQ ID NO: 929018 - DNA, 15 bp, Homo sapiens
gaactggagtgggag

SEQ ID NO: 929019 - DNA, 15 bp, Homo sapiens
ggaactggagtggga

SEQ ID NO: 929020 - DNA, 15 bp, Homo sapiens
aggaactggagtggg

SEQ ID NO: 929021 - DNA, 15 bp, Homo sapiens
taggaactggagtgg

SEQ ID NO: 929022 - DNA, 15 bp, Homo sapiens
gtaggaactggagtg

SEQ ID NO: 929023 - DNA, 15 bp, Homo sapiens
ggtaggaactggagt

SEQ ID NO: 929024 - DNA, 15 bp, Homo sapiens
tggtaggaactggag

SEQ ID NO: 929025 - DNA, 15 bp, Homo sapiens
ttggtaggaactgga

SEQ ID NO: 929026 - DNA, 15 bp, Homo sapiens
gttggtaggaactgg

SEQ ID NO: 929027 - DNA, 15 bp, Homo sapiens
tgttggtaggaactg

SEQ ID NO: 929028 - DNA, 15 bp, Homo sapiens
ttgttggtaggaact

SEQ ID NO: 929029 - DNA, 15 bp, Homo sapiens
cttgttggtaggaac

SEQ ID NO: 929030 - DNA, 15 bp, Homo sapiens
gcttgttggtaggaa

SEQ ID NO: 929031 - DNA, 15 bp, Homo sapiens
tgcttgttggtagga

SEQ ID NO: 929032 - DNA, 15 bp, Homo sapiens
atgcttgttggtagg

SEQ ID NO: 929033 - DNA, 15 bp, Homo sapiens
aatgcttgttggtag

SEQ ID NO: 929034 - DNA, 15 bp, Homo sapiens
aaatgcttgttggta

SEQ ID NO: 929035 - DNA, 15 bp, Homo sapiens
aaaatgcttgttggt

SEQ ID NO: 929036 - DNA, 15 bp, Homo sapiens
taaaatgcttgttgg

SEQ ID NO: 929037 - DNA, 15 bp, Homo sapiens
ataaaatgcttgttg

SEQ ID NO: 929038 - DNA, 15 bp, Homo sapiens
aataaaatgcttgtt

SEQ ID NO: 929039 - DNA, 15 bp, Homo sapiens
gaataaaatgcttgt

SEQ ID NO: 929040 - DNA, 15 bp, Homo sapiens
cgaataaaatgcttg

SEQ ID NO: 929041 - DNA, 15 bp, Homo sapiens
acgaataaaatgctt

SEQ ID NO: 929042 - DNA, 15 bp, Homo sapiens
gacgaataaaatgct

SEQ ID NO: 929043 - DNA, 15 bp, Homo sapiens
agacgaataaaatgc

SEQ ID NO: 929044 - DNA, 15 bp, Homo sapiens
cagacgaataaaatg

SEQ ID NO: 929045 - DNA, 15 bp, Homo sapiens
ccagacgaataaaat

SEQ ID NO: 929046 - DNA, 15 bp, Homo sapiens
gccagacgaataaaa

SEQ ID NO: 929047 - DNA, 15 bp, Homo sapiens
agccagacgaataaa

SEQ ID NO: 929048 - DNA, 15 bp, Homo sapiens
cagccagacgaataa

SEQ ID NO: 929049 - DNA, 15 bp, Homo sapiens
tcagccagacgaata

SEQ ID NO: 929050 - DNA, 15 bp, Homo sapiens
ctcagccagacgaat

SEQ ID NO: 929051 - DNA, 15 bp, Homo sapiens
tctcagccagacgaa

SEQ ID NO: 929052 - DNA, 15 bp, Homo sapiens
atctcagccagacga

SEQ ID NO: 929053 - DNA, 15 bp, Homo sapiens
catctcagccagacg

SEQ ID NO: 929054 - DNA, 15 bp, Homo sapiens
ccatctcagccagac

SEQ ID NO: 929055 - DNA, 15 bp, Homo sapiens
tccatctcagccaga

SEQ ID NO: 929056 - DNA, 15 bp, Homo sapiens
ttccatctcagccag

SEQ ID NO: 929057 - DNA, 15 bp, Homo sapiens
gttccatctcagcca

SEQ ID NO: 929058 - DNA, 15 bp, Homo sapiens
tgttccatctcagcc

SEQ ID NO: 929059 - DNA, 15 bp, Homo sapiens
ctgttccatctcagc

SEQ ID NO: 929060 - DNA, 15 bp, Homo sapiens
tctgttccatctcag

SEQ ID NO: 929061 - DNA, 15 bp, Homo sapiens
gtctgttccatctca

SEQ ID NO: 929062 - DNA, 15 bp, Homo sapiens
tgtctgttccatctc

SEQ ID NO: 929063 - DNA, 15 bp, Homo sapiens
ctgtctgttccatct

SEQ ID NO: 929064 - DNA, 15 bp, Homo sapiens
actgtctgttccatc

SEQ ID NO: 929065 - DNA, 15 bp, Homo sapiens
tactgtctgttccat

SEQ ID NO: 929066 - DNA, 15 bp, Homo sapiens
ctactgtctgttcca

SEQ ID NO: 929067 - DNA, 15 bp, Homo sapiens
gctactgtctgttcc

SEQ ID NO: 929068 - DNA, 15 bp, Homo sapiens
tgctactgtctgttc

SEQ ID NO: 929069 - DNA, 15 bp, Homo sapiens
ctgctactgtctgtt

SEQ ID NO: 929070 - DNA, 15 bp, Homo sapiens
tctgctactgtctgt

SEQ ID NO: 929071 - DNA, 15 bp, Homo sapiens
ttctgctactgtctg

SEQ ID NO: 929072 - DNA, 15 bp, Homo sapiens
gttctgctactgtct

SEQ ID NO: 929073 - DNA, 15 bp, Homo sapiens
tgttctgctactgtc

SEQ ID NO: 929074 - DNA, 15 bp, Homo sapiens
ttgttctgctactgt

SEQ ID NO: 929075 - DNA, 15 bp, Homo sapiens
cttgttctgctactg

SEQ ID NO: 929076 - DNA, 15 bp, Homo sapiens
tcttgttctgctact

SEQ ID NO: 929077 - DNA, 15 bp, Homo sapiens
atcttgttctgctac

SEQ ID NO: 929078 - DNA, 15 bp, Homo sapiens
catcttgttctgcta

SEQ ID NO: 929079 - DNA, 15 bp, Homo sapiens
tcatcttgttctgct

SEQ ID NO: 929080 - DNA, 15 bp, Homo sapiens
gtcatcttgttctgc

SEQ ID NO: 929081 - DNA, 15 bp, Homo sapiens
agtcatcttgttctg

SEQ ID NO: 929082 - DNA, 15 bp, Homo sapiens
gagtcatcttgttct

SEQ ID NO: 929083 - DNA, 15 bp, Homo sapiens
agagtcatcttgttc

SEQ ID NO: 929084 - DNA, 15 bp, Homo sapiens
gagagtcatcttgtt

SEQ ID NO: 929085 - DNA, 15 bp, Homo sapiens
agagagtcatcttgt

SEQ ID NO: 929086 - DNA, 15 bp, Homo sapiens
aagagagtcatcttg

SEQ ID NO: 929087 - DNA, 15 bp, Homo sapiens
aaagagagtcatctt

SEQ ID NO: 929088 - DNA, 15 bp, Homo sapiens
gaaagagagtcatct

SEQ ID NO: 929089 - DNA, 15 bp, Homo sapiens
ggaaagagagtcatc

SEQ ID NO: 929090 - DNA, 15 bp, Homo sapiens
aggaaagagagtcat

SEQ ID NO: 929091 - DNA, 15 bp, Homo sapiens
gaggaaagagagtca

SEQ ID NO: 929092 - DNA, 15 bp, Homo sapiens
tgaggaaagagagtc

SEQ ID NO: 929093 - DNA, 15 bp, Homo sapiens
gtgaggaaagagagt

SEQ ID NO: 929094 - DNA, 15 bp, Homo sapiens
agtgaggaaagagag

SEQ ID NO: 929095 - DNA, 15 bp, Homo sapiens
gagtgaggaaagaga

SEQ ID NO: 929096 - DNA, 15 bp, Homo sapiens
agagtgaggaaagag

SEQ ID NO: 929097 - DNA, 15 bp, Homo sapiens
aagagtgaggaaaga

SEQ ID NO: 929098 - DNA, 15 bp, Homo sapiens
caagagtgaggaaag

SEQ ID NO: 929099 - DNA, 15 bp, Homo sapiens
ccaagagtgaggaaa

SEQ ID NO: 929100 - DNA, 15 bp, Homo sapiens
accaagagtgaggaa

SEQ ID NO: 929101 - DNA, 15 bp, Homo sapiens
gaccaagagtgagga

SEQ ID NO: 929102 - DNA, 15 bp, Homo sapiens
tgaccaagagtgagg

SEQ ID NO: 929103 - DNA, 15 bp, Homo sapiens
ttgaccaagagtgag

SEQ ID NO: 929104 - DNA, 15 bp, Homo sapiens
tttgaccaagagtga

SEQ ID NO: 929105 - DNA, 15 bp, Homo sapiens
gtttgaccaagagtg

SEQ ID NO: 929106 - DNA, 15 bp, Homo sapiens
agtttgaccaagagt

SEQ ID NO: 929107 - DNA, 15 bp, Homo sapiens
tagtttgaccaagag

SEQ ID NO: 929108 - DNA, 15 bp, Homo sapiens
ttagtttgaccaaga

SEQ ID NO: 929109 - DNA, 15 bp, Homo sapiens
tttagtttgaccaag

SEQ ID NO: 929110 - DNA, 15 bp, Homo sapiens
ctttagtttgaccaa

SEQ ID NO: 929111 - DNA, 15 bp, Homo sapiens
tctttagtttgacca

SEQ ID NO: 929112 - DNA, 15 bp, Homo sapiens
ttctttagtttgacc

SEQ ID NO: 929113 - DNA, 15 bp, Homo sapiens
tttctttagtttgac

SEQ ID NO: 929114 - DNA, 15 bp, Homo sapiens
ctttctttagtttga

SEQ ID NO: 929115 - DNA, 15 bp, Homo sapiens
actttctttagtttg

SEQ ID NO: 929116 - DNA, 15 bp, Homo sapiens
tactttctttagttt

SEQ ID NO: 929117 - DNA, 15 bp, Homo sapiens
atactttctttagtt

SEQ ID NO: 929118 - DNA, 15 bp, Homo sapiens
gatactttctttagt

SEQ ID NO: 929119 - DNA, 15 bp, Homo sapiens
tgatactttctttag

SEQ ID NO: 929120 - DNA, 15 bp, Homo sapiens
gtgatactttcttta

SEQ ID NO: 929121 - DNA, 15 bp, Homo sapiens
tgtgatactttcttt

SEQ ID NO: 929122 - DNA, 15 bp, Homo sapiens
ttgtgatactttctt

SEQ ID NO: 929123 - DNA, 15 bp, Homo sapiens
cttgtgatactttct

SEQ ID NO: 929124 - DNA, 15 bp, Homo sapiens
tcttgtgatactttc

SEQ ID NO: 929125 - DNA, 15 bp, Homo sapiens
atcttgtgatacttt

SEQ ID NO: 929126 - DNA, 15 bp, Homo sapiens
aatcttgtgatactt

SEQ ID NO: 929127 - DNA, 15 bp, Homo sapiens
aaatcttgtgatact

SEQ ID NO: 929128 - DNA, 15 bp, Homo sapiens
caaatcttgtgatac

SEQ ID NO: 929129 - DNA, 15 bp, Homo sapiens
ccaaatcttgtgata

SEQ ID NO: 929130 - DNA, 15 bp, Homo sapiens
tccaaatcttgtgat

SEQ ID NO: 929131 - DNA, 15 bp, Homo sapiens
ctccaaatcttgtga

SEQ ID NO: 929132 - DNA, 15 bp, Homo sapiens
tctccaaatcttgtg

SEQ ID NO: 929133 - DNA, 15 bp, Homo sapiens
ctctccaaatcttgt

SEQ ID NO: 929134 - DNA, 15 bp, Homo sapiens
tctctccaaatcttg

SEQ ID NO: 929135 - DNA, 15 bp, Homo sapiens
gtctctccaaatctt

SEQ ID NO: 929136 - DNA, 15 bp, Homo sapiens
tgtctctccaaatct

SEQ ID NO: 929137 - DNA, 15 bp, Homo sapiens
ttgtctctccaaatc

SEQ ID NO: 929138 - DNA, 15 bp, Homo sapiens
tttgtctctccaaat

SEQ ID NO: 929139 - DNA, 15 bp, Homo sapiens
ctttgtctctccaaa

SEQ ID NO: 929140 - DNA, 15 bp, Homo sapiens
tctttgtctctccaa

SEQ ID NO: 929141 - DNA, 15 bp, Homo sapiens
ctctttgtctctcca

SEQ ID NO: 929142 - DNA, 15 bp, Homo sapiens
tctctttgtctctcc

SEQ ID NO: 929143 - DNA, 15 bp, Homo sapiens
ttctctttgtctctc

SEQ ID NO: 929144 - DNA, 15 bp, Homo sapiens
tttctctttgtctct

SEQ ID NO: 929145 - DNA, 15 bp, Homo sapiens
atttctctttgtctc

SEQ ID NO: 929146 - DNA, 15 bp, Homo sapiens
gatttctctttgtct

SEQ ID NO: 929147 - DNA, 15 bp, Homo sapiens
tgatttctctttgtc

SEQ ID NO: 929148 - DNA, 15 bp, Homo sapiens
gtgatttctctttgt

SEQ ID NO: 929149 - DNA, 15 bp, Homo sapiens
agtgatttctctttg

SEQ ID NO: 929150 - DNA, 15 bp, Homo sapiens
cagtgatttctcttt

SEQ ID NO: 929151 - DNA, 15 bp, Homo sapiens
tcagtgatttctctt

SEQ ID NO: 929152 - DNA, 15 bp, Homo sapiens
ttcagtgatttctct

SEQ ID NO: 929153 - DNA, 15 bp, Homo sapiens
attcagtgatttctc

SEQ ID NO: 929154 - DNA, 15 bp, Homo sapiens
aattcagtgatttct

SEQ ID NO: 929155 - DNA, 15 bp, Homo sapiens
taattcagtgatttc

SEQ ID NO: 929156 - DNA, 15 bp, Homo sapiens
ttaattcagtgattt

SEQ ID NO: 929157 - DNA, 15 bp, Homo sapiens
tttaattcagtgatt

SEQ ID NO: 929158 - DNA, 15 bp, Homo sapiens
ttttaattcagtgat

SEQ ID NO: 929159 - DNA, 15 bp, Homo sapiens
cttttaattcagtga

SEQ ID NO: 929160 - DNA, 15 bp, Homo sapiens
acttttaattcagtg

SEQ ID NO: 929161 - DNA, 15 bp, Homo sapiens
tacttttaattcagt

SEQ ID NO: 929162 - DNA, 15 bp, Homo sapiens
ttacttttaattcag

SEQ ID NO: 929163 - DNA, 15 bp, Homo sapiens
tttacttttaattca

SEQ ID NO: 929164 - DNA, 15 bp, Homo sapiens
ttttacttttaattc

SEQ ID NO: 929165 - DNA, 15 bp, Homo sapiens
cttttacttttaatt

SEQ ID NO: 929166 - DNA, 15 bp, Homo sapiens
tcttttacttttaat

SEQ ID NO: 929167 - DNA, 15 bp, Homo sapiens
ttcttttacttttaa

SEQ ID NO: 929168 - DNA, 15 bp, Homo sapiens
aattcttttactttt

SEQ ID NO: 929169 - DNA, 15 bp, Homo sapiens
aaattcttttacttt

SEQ ID NO: 929170 - DNA, 15 bp, Homo sapiens
caaattcttttactt

SEQ ID NO: 929171 - DNA, 15 bp, Homo sapiens
tcaaattcttttact

SEQ ID NO: 929172 - DNA, 15 bp, Homo sapiens
ttcaaattcttttac

SEQ ID NO: 929173 - DNA, 15 bp, Homo sapiens
tttcaaattctttta

SEQ ID NO: 929174 - DNA, 15 bp, Homo sapiens
ttttcaaattctttt

SEQ ID NO: 929175 - DNA, 15 bp, Homo sapiens
attttcaaattcttt

SEQ ID NO: 929176 - DNA, 15 bp, Homo sapiens
tattttcaaattctt

SEQ ID NO: 929177 - DNA, 15 bp, Homo sapiens
atattttcaaattct

SEQ ID NO: 929178 - DNA, 15 bp, Homo sapiens
gatattttcaaattc

SEQ ID NO: 929179 - DNA, 15 bp, Homo sapiens
tgatattttcaaatt

SEQ ID NO: 929180 - DNA, 15 bp, Homo sapiens
ttgatattttcaaat

SEQ ID NO: 929181 - DNA, 15 bp, Homo sapiens
tttgatattttcaaa

SEQ ID NO: 929182 - DNA, 15 bp, Homo sapiens
atttgatattttcaa

SEQ ID NO: 929183 - DNA, 15 bp, Homo sapiens
aatttgatattttca

SEQ ID NO: 929184 - DNA, 15 bp, Homo sapiens
taatttgatattttc

SEQ ID NO: 929185 - DNA, 15 bp, Homo sapiens
gtaatttgatatttt

SEQ ID NO: 929186 - DNA, 15 bp, Homo sapiens
tgtaatttgatattt

SEQ ID NO: 929187 - DNA, 15 bp, Homo sapiens
ctgtaatttgatatt

SEQ ID NO: 929188 - DNA, 15 bp, Homo sapiens
actgtaatttgatat

SEQ ID NO: 929189 - DNA, 15 bp, Homo sapiens
tactgtaatttgata

SEQ ID NO: 929190 - DNA, 15 bp, Homo sapiens
ttactgtaatttgat

SEQ ID NO: 929191 - DNA, 15 bp, Homo sapiens
cttactgtaatttga

SEQ ID NO: 929192 - DNA, 15 bp, Homo sapiens
acttactgtaatttg

SEQ ID NO: 929193 - DNA, 15 bp, Homo sapiens
gacttactgtaattt

SEQ ID NO: 929194 - DNA, 15 bp, Homo sapiens
agacttactgtaatt

SEQ ID NO: 929195 - DNA, 15 bp, Homo sapiens
aagacttactgtaat

SEQ ID NO: 929196 - DNA, 15 bp, Homo sapiens
gaagacttactgtaa

SEQ ID NO: 929197 - DNA, 15 bp, Homo sapiens
cgaagacttactgta

SEQ ID NO: 929198 - DNA, 15 bp, Homo sapiens
tcgaagacttactgt

SEQ ID NO: 929199 - DNA, 15 bp, Homo sapiens
ttcgaagacttactg

SEQ ID NO: 929200 - DNA, 15 bp, Homo sapiens
tttcgaagacttact

SEQ ID NO: 929201 - DNA, 15 bp, Homo sapiens
atttcgaagacttac

SEQ ID NO: 929202 - DNA, 15 bp, Homo sapiens
catttcgaagactta

SEQ ID NO: 929203 - DNA, 15 bp, Homo sapiens
acatttcgaagactt

SEQ ID NO: 929204 - DNA, 15 bp, Homo sapiens
tacatttcgaagact

SEQ ID NO: 929205 - DNA, 15 bp, Homo sapiens
atacatttcgaagac

SEQ ID NO: 929206 - DNA, 15 bp, Homo sapiens
aatacatttcgaaga

SEQ ID NO: 929207 - DNA, 15 bp, Homo sapiens
caatacatttcgaag

SEQ ID NO: 929208 - DNA, 15 bp, Homo sapiens
acaatacatttcgaa

SEQ ID NO: 929209 - DNA, 15 bp, Homo sapiens
tacaatacatttcga

SEQ ID NO: 929210 - DNA, 15 bp, Homo sapiens
ttacaatacatttcg

SEQ ID NO: 929211 - DNA, 15 bp, Homo sapiens
tttacaatacatttc

SEQ ID NO: 929212 - DNA, 15 bp, Homo sapiens
ttttacaatacattt

SEQ ID NO: 929213 - DNA, 15 bp, Homo sapiens
tttttacaatacatt

SEQ ID NO: 929214 - DNA, 15 bp, Homo sapiens
atttttacaatacat

SEQ ID NO: 929215 - DNA, 15 bp, Homo sapiens
tatttttacaataca

SEQ ID NO: 929216 - DNA, 15 bp, Homo sapiens
ctatttttacaatac

SEQ ID NO: 929217 - DNA, 15 bp, Homo sapiens
cctatttttacaata

SEQ ID NO: 929218 - DNA, 15 bp, Homo sapiens
gcctatttttacaat

SEQ ID NO: 929219 - DNA, 15 bp, Homo sapiens
tgcctatttttacaa

SEQ ID NO: 929220 - DNA, 15 bp, Homo sapiens
ttgcctatttttaca

SEQ ID NO: 929221 - DNA, 15 bp, Homo sapiens
tttgcctatttttac

SEQ ID NO: 929222 - DNA, 15 bp, Homo sapiens
atttgcctattttta

SEQ ID NO: 929223 - DNA, 15 bp, Homo sapiens
catttgcctattttt

SEQ ID NO: 929224 - DNA, 15 bp, Homo sapiens
tcatttgcctatttt

SEQ ID NO: 929225 - DNA, 15 bp, Homo sapiens
atcatttgcctattt

SEQ ID NO: 929226 - DNA, 15 bp, Homo sapiens
tatcatttgcctatt

SEQ ID NO: 929227 - DNA, 15 bp, Homo sapiens
ttatcatttgcctat

SEQ ID NO: 929228 - DNA, 15 bp, Homo sapiens
cttatcatttgccta

SEQ ID NO: 929229 - DNA, 15 bp, Homo sapiens
acttatcatttgcct

SEQ ID NO: 929230 - DNA, 15 bp, Homo sapiens
cacttatcatttgcc

SEQ ID NO: 929231 - DNA, 15 bp, Homo sapiens
tcacttatcatttgc

SEQ ID NO: 929232 - DNA, 15 bp, Homo sapiens
atcacttatcatttg

SEQ ID NO: 929233 - DNA, 15 bp, Homo sapiens
tatcacttatcattt

SEQ ID NO: 929234 - DNA, 15 bp, Homo sapiens
atatcacttatcatt

SEQ ID NO: 929235 - DNA, 15 bp, Homo sapiens
tatatcacttatcat

SEQ ID NO: 929236 - DNA, 15 bp, Homo sapiens
ttatatcacttatca

SEQ ID NO: 929237 - DNA, 15 bp, Homo sapiens
attatatcacttatc

SEQ ID NO: 929238 - DNA, 15 bp, Homo sapiens
cattatatcacttat

SEQ ID NO: 929239 - DNA, 15 bp, Homo sapiens
tcattatatcactta

SEQ ID NO: 929240 - DNA, 15 bp, Homo sapiens
ttcattatatcactt

SEQ ID NO: 929241 - DNA, 15 bp, Homo sapiens
cttcattatatcact

SEQ ID NO: 929242 - DNA, 15 bp, Homo sapiens
tcttcattatatcac

SEQ ID NO: 929243 - DNA, 15 bp, Homo sapiens
atcttcattatatca

SEQ ID NO: 929244 - DNA, 15 bp, Homo sapiens
tatcttcattatatc

SEQ ID NO: 929245 - DNA, 15 bp, Homo sapiens
ttatcttcattatat

SEQ ID NO: 929246 - DNA, 15 bp, Homo sapiens
tttatcttcattata

SEQ ID NO: 929247 - DNA, 15 bp, Homo sapiens
gtttatcttcattat

SEQ ID NO: 929248 - DNA, 15 bp, Homo sapiens
tgtttatcttcatta

SEQ ID NO: 929249 - DNA, 15 bp, Homo sapiens
atgtttatcttcatt

SEQ ID NO: 929250 - DNA, 15 bp, Homo sapiens
tatgtttatcttcat

SEQ ID NO: 929251 - DNA, 15 bp, Homo sapiens
ttatgtttatcttca

SEQ ID NO: 929252 - DNA, 15 bp, Homo sapiens
cttatgtttatcttc

SEQ ID NO: 929253 - DNA, 15 bp, Homo sapiens
acttatgtttatctt

SEQ ID NO: 929254 - DNA, 15 bp, Homo sapiens
cacttatgtttatct

SEQ ID NO: 929255 - DNA, 15 bp, Homo sapiens
acacttatgtttatc

SEQ ID NO: 929256 - DNA, 15 bp, Homo sapiens
aacacttatgtttat

SEQ ID NO: 929257 - DNA, 15 bp, Homo sapiens
aaacacttatgttta

SEQ ID NO: 929258 - DNA, 15 bp, Homo sapiens
caaacacttatgttt

SEQ ID NO: 929259 - DNA, 15 bp, Homo sapiens
gcaaacacttatgtt

SEQ ID NO: 929260 - DNA, 15 bp, Homo sapiens
agcaaacacttatgt

SEQ ID NO: 929261 - DNA, 15 bp, Homo sapiens
tagcaaacacttatg

SEQ ID NO: 929262 - DNA, 15 bp, Homo sapiens
atagcaaacacttat

SEQ ID NO: 929263 - DNA, 15 bp, Homo sapiens
catagcaaacactta

SEQ ID NO: 929264 - DNA, 15 bp, Homo sapiens
gcatagcaaacactt

SEQ ID NO: 929265 - DNA, 15 bp, Homo sapiens
ggcatagcaaacact

SEQ ID NO: 929266 - DNA, 15 bp, Homo sapiens
tggcatagcaaacac

SEQ ID NO: 929267 - DNA, 15 bp, Homo sapiens
ctggcatagcaaaca

SEQ ID NO: 929268 - DNA, 15 bp, Homo sapiens
cctggcatagcaaac

SEQ ID NO: 929269 - DNA, 15 bp, Homo sapiens
gcctggcatagcaaa

SEQ ID NO: 929270 - DNA, 15 bp, Homo sapiens
tgcctggcatagcaa

SEQ ID NO: 929271 - DNA, 15 bp, Homo sapiens
gtgcctggcatagca

SEQ ID NO: 929272 - DNA, 15 bp, Homo sapiens
agtgcctggcatagc

SEQ ID NO: 929273 - DNA, 15 bp, Homo sapiens
cagtgcctggcatag

SEQ ID NO: 929274 - DNA, 15 bp, Homo sapiens
acagtgcctggcata

SEQ ID NO: 929275 - DNA, 15 bp, Homo sapiens
aacagtgcctggcat

SEQ ID NO: 929276 - DNA, 15 bp, Homo sapiens
gaacagtgcctggca

SEQ ID NO: 929277 - DNA, 15 bp, Homo sapiens
agaacagtgcctggc

SEQ ID NO: 929278 - DNA, 15 bp, Homo sapiens
tagaacagtgcctgg

SEQ ID NO: 929279 - DNA, 15 bp, Homo sapiens
ttagaacagtgcctg

SEQ ID NO: 929280 - DNA, 15 bp, Homo sapiens
cttagaacagtgcct

SEQ ID NO: 929281 - DNA, 15 bp, Homo sapiens
tcttagaacagtgcc

SEQ ID NO: 929282 - DNA, 15 bp, Homo sapiens
gtcttagaacagtgc

SEQ ID NO: 929283 - DNA, 15 bp, Homo sapiens
agtcttagaacagtg

SEQ ID NO: 929284 - DNA, 15 bp, Homo sapiens
aagtcttagaacagt

SEQ ID NO: 929285 - DNA, 15 bp, Homo sapiens
aaagtcttagaacag

SEQ ID NO: 929286 - DNA, 15 bp, Homo sapiens
aaaagtcttagaaca

SEQ ID NO: 929287 - DNA, 15 bp, Homo sapiens
taaaagtcttagaac

SEQ ID NO: 929288 - DNA, 15 bp, Homo sapiens
ttaaaagtcttagaa

SEQ ID NO: 929289 - DNA, 15 bp, Homo sapiens
cttaaaagtcttaga

SEQ ID NO: 929290 - DNA, 15 bp, Homo sapiens
acttaaaagtcttag

SEQ ID NO: 929291 - DNA, 15 bp, Homo sapiens
tacttaaaagtctta

SEQ ID NO: 929292 - DNA, 15 bp, Homo sapiens
atacttaaaagtctt

SEQ ID NO: 929293 - DNA, 15 bp, Homo sapiens
tatacttaaaagtct

SEQ ID NO: 929294 - DNA, 15 bp, Homo sapiens
atatacttaaaagtc

SEQ ID NO: 929295 - DNA, 15 bp, Homo sapiens
aatatacttaaaagt

SEQ ID NO: 929296 - DNA, 15 bp, Homo sapiens
caatatacttaaaag

SEQ ID NO: 929297 - DNA, 15 bp, Homo sapiens
acaatatacttaaaa

SEQ ID NO: 929298 - DNA, 15 bp, Homo sapiens
gacaatatacttaaa

SEQ ID NO: 929299 - DNA, 15 bp, Homo sapiens
agacaatatacttaa

SEQ ID NO: 929300 - DNA, 15 bp, Homo sapiens
gagacaatatactta

SEQ ID NO: 929301 - DNA, 15 bp, Homo sapiens
tgagacaatatactt

SEQ ID NO: 929302 - DNA, 15 bp, Homo sapiens
atgagacaatatact

SEQ ID NO: 929303 - DNA, 15 bp, Homo sapiens
aatgagacaatatac

SEQ ID NO: 929304 - DNA, 15 bp, Homo sapiens
aaatgagacaatata

SEQ ID NO: 929305 - DNA, 15 bp, Homo sapiens
aaaatgagacaatat

SEQ ID NO: 929306 - DNA, 15 bp, Homo sapiens
aaaaatgagacaata

SEQ ID NO: 929307 - DNA, 15 bp, Homo sapiens
taaaaatgagacaat

SEQ ID NO: 929308 - DNA, 15 bp, Homo sapiens
ataaaaatgagacaa

SEQ ID NO: 929309 - DNA, 15 bp, Homo sapiens
gataaaaatgagaca

SEQ ID NO: 929310 - DNA, 15 bp, Homo sapiens
ggataaaaatgagac

SEQ ID NO: 929311 - DNA, 15 bp, Homo sapiens
aggataaaaatgaga

SEQ ID NO: 929312 - DNA, 15 bp, Homo sapiens
gaggataaaaatgag

SEQ ID NO: 929313 - DNA, 15 bp, Homo sapiens
tgaggataaaaatga

SEQ ID NO: 929314 - DNA, 15 bp, Homo sapiens
ctgaggataaaaatg

SEQ ID NO: 929315 - DNA, 15 bp, Homo sapiens
cctgaggataaaaat

SEQ ID NO: 929316 - DNA, 15 bp, Homo sapiens
tcctgaggataaaaa

SEQ ID NO: 929317 - DNA, 15 bp, Homo sapiens
gtcctgaggataaaa

SEQ ID NO: 929318 - DNA, 15 bp, Homo sapiens
agtcctgaggataaa

SEQ ID NO: 929319 - DNA, 15 bp, Homo sapiens
cagtcctgaggataa

SEQ ID NO: 929320 - DNA, 15 bp, Homo sapiens
gcagtcctgaggata

SEQ ID NO: 929321 - DNA, 15 bp, Homo sapiens
agcagtcctgaggat

SEQ ID NO: 929322 - DNA, 15 bp, Homo sapiens
cagcagtcctgagga

SEQ ID NO: 929323 - DNA, 15 bp, Homo sapiens
ccagcagtcctgagg

SEQ ID NO: 929324 - DNA, 15 bp, Homo sapiens
accagcagtcctgag

SEQ ID NO: 929325 - DNA, 15 bp, Homo sapiens
aaccagcagtcctga

SEQ ID NO: 929326 - DNA, 15 bp, Homo sapiens
taaccagcagtcctg

SEQ ID NO: 929327 - DNA, 15 bp, Homo sapiens
gtaaccagcagtcct

SEQ ID NO: 929328 - DNA, 15 bp, Homo sapiens
tgtaaccagcagtcc

SEQ ID NO: 929329 - DNA, 15 bp, Homo sapiens
atgtaaccagcagtc

SEQ ID NO: 929330 - DNA, 15 bp, Homo sapiens
tatgtaaccagcagt

SEQ ID NO: 929331 - DNA, 15 bp, Homo sapiens
atatgtaaccagcag

SEQ ID NO: 929332 - DNA, 15 bp, Homo sapiens
catatgtaaccagca

SEQ ID NO: 929333 - DNA, 15 bp, Homo sapiens
acatatgtaaccagc

SEQ ID NO: 929334 - DNA, 15 bp, Homo sapiens
aacatatgtaaccag

SEQ ID NO: 929335 - DNA, 15 bp, Homo sapiens
taacatatgtaacca

SEQ ID NO: 929336 - DNA, 15 bp, Homo sapiens
ataacatatgtaacc

SEQ ID NO: 929337 - DNA, 15 bp, Homo sapiens
gataacatatgtaac

SEQ ID NO: 929338 - DNA, 15 bp, Homo sapiens
tgataacatatgtaa

SEQ ID NO: 929339 - DNA, 15 bp, Homo sapiens
atgataacatatgta

SEQ ID NO: 929340 - DNA, 15 bp, Homo sapiens
aatgataacatatgt

SEQ ID NO: 929341 - DNA, 15 bp, Homo sapiens
aaatgataacatatg

SEQ ID NO: 929342 - DNA, 15 bp, Homo sapiens
aaaatgataacatat

SEQ ID NO: 929343 - DNA, 15 bp, Homo sapiens
gaaaatgataacata

SEQ ID NO: 929344 - DNA, 15 bp, Homo sapiens
ggaaaatgataacat

SEQ ID NO: 929345 - DNA, 15 bp, Homo sapiens
gggaaaatgataaca

SEQ ID NO: 929346 - DNA, 15 bp, Homo sapiens
ggggaaaatgataac

SEQ ID NO: 929347 - DNA, 15 bp, Homo sapiens
tggggaaaatgataa

SEQ ID NO: 929348 - DNA, 15 bp, Homo sapiens
atggggaaaatgata

SEQ ID NO: 929349 - DNA, 15 bp, Homo sapiens
aatggggaaaatgat

SEQ ID NO: 929350 - DNA, 15 bp, Homo sapiens
aaatggggaaaatga

SEQ ID NO: 929351 - DNA, 15 bp, Homo sapiens
aaaatggggaaaatg

SEQ ID NO: 929352 - DNA, 15 bp, Homo sapiens
taaaatggggaaaat

SEQ ID NO: 929353 - DNA, 15 bp, Homo sapiens
ttaaaatggggaaaa

SEQ ID NO: 929354 - DNA, 15 bp, Homo sapiens
tttaaaatggggaaa

SEQ ID NO: 929355 - DNA, 15 bp, Homo sapiens
ctttaaaatggggaa

SEQ ID NO: 929356 - DNA, 15 bp, Homo sapiens
tctttaaaatgggga

SEQ ID NO: 929357 - DNA, 15 bp, Homo sapiens
ctctttaaaatgggg

SEQ ID NO: 929358 - DNA, 15 bp, Homo sapiens
tctctttaaaatggg

SEQ ID NO: 929359 - DNA, 15 bp, Homo sapiens
ctctctttaaaatgg

SEQ ID NO: 929360 - DNA, 15 bp, Homo sapiens
cctctctttaaaatg

SEQ ID NO: 929361 - DNA, 15 bp, Homo sapiens
tcctctctttaaaat

SEQ ID NO: 929362 - DNA, 15 bp, Homo sapiens
atcctctctttaaaa

SEQ ID NO: 929363 - DNA, 15 bp, Homo sapiens
tatcctctctttaaa

SEQ ID NO: 929364 - DNA, 15 bp, Homo sapiens
atatcctctctttaa

SEQ ID NO: 929365 - DNA, 15 bp, Homo sapiens
catatcctctcttta

SEQ ID NO: 929366 - DNA, 15 bp, Homo sapiens
ccatatcctctcttt

SEQ ID NO: 929367 - DNA, 15 bp, Homo sapiens
gccatatcctctctt

SEQ ID NO: 929368 - DNA, 15 bp, Homo sapiens
ggccatatcctctct

SEQ ID NO: 929369 - DNA, 15 bp, Homo sapiens
aggccatatcctctc

SEQ ID NO: 929370 - DNA, 15 bp, Homo sapiens
gaggccatatcctct

SEQ ID NO: 929371 - DNA, 15 bp, Homo sapiens
tgaggccatatcctc

SEQ ID NO: 929372 - DNA, 15 bp, Homo sapiens
ctgaggccatatcct

SEQ ID NO: 929373 - DNA, 15 bp, Homo sapiens
cctgaggccatatcc

SEQ ID NO: 929374 - DNA, 15 bp, Homo sapiens
tcctgaggccatatc

SEQ ID NO: 929375 - DNA, 15 bp, Homo sapiens
ttcctgaggccatat

SEQ ID NO: 929376 - DNA, 15 bp, Homo sapiens
attcctgaggccata

SEQ ID NO: 929377 - DNA, 15 bp, Homo sapiens
cattcctgaggccat

SEQ ID NO: 929378 - DNA, 15 bp, Homo sapiens
gcattcctgaggcca

SEQ ID NO: 929379 - DNA, 15 bp, Homo sapiens
agcattcctgaggcc

SEQ ID NO: 929380 - DNA, 15 bp, Homo sapiens
aagcattcctgaggc

SEQ ID NO: 929381 - DNA, 15 bp, Homo sapiens
taagcattcctgagg

SEQ ID NO: 929382 - DNA, 15 bp, Homo sapiens
ttaagcattcctgag

SEQ ID NO: 929383 - DNA, 15 bp, Homo sapiens
attaagcattcctga

SEQ ID NO: 929384 - DNA, 15 bp, Homo sapiens
tattaagcattcctg

SEQ ID NO: 929385 - DNA, 15 bp, Homo sapiens
ctattaagcattcct

SEQ ID NO: 929386 - DNA, 15 bp, Homo sapiens
gctattaagcattcc

SEQ ID NO: 929387 - DNA, 15 bp, Homo sapiens
tgctattaagcattc

SEQ ID NO: 929388 - DNA, 15 bp, Homo sapiens
atgctattaagcatt

SEQ ID NO: 929389 - DNA, 15 bp, Homo sapiens
catgctattaagcat

SEQ ID NO: 929390 - DNA, 15 bp, Homo sapiens
acatgctattaagca

SEQ ID NO: 929391 - DNA, 15 bp, Homo sapiens
gacatgctattaagc

SEQ ID NO: 929392 - DNA, 15 bp, Homo sapiens
agacatgctattaag

SEQ ID NO: 929393 - DNA, 15 bp, Homo sapiens
cagacatgctattaa

SEQ ID NO: 929394 - DNA, 15 bp, Homo sapiens
ccagacatgctatta

SEQ ID NO: 929395 - DNA, 15 bp, Homo sapiens
cccagacatgctatt

SEQ ID NO: 929396 - DNA, 15 bp, Homo sapiens
ccccagacatgctat

SEQ ID NO: 929397 - DNA, 15 bp, Homo sapiens
cccccagacatgcta

SEQ ID NO: 929398 - DNA, 15 bp, Homo sapiens
acccccagacatgct

SEQ ID NO: 929399 - DNA, 15 bp, Homo sapiens
tacccccagacatgc

SEQ ID NO: 929400 - DNA, 15 bp, Homo sapiens
ctacccccagacatg

SEQ ID NO: 929401 - DNA, 15 bp, Homo sapiens
tctacccccagacat

SEQ ID NO: 929402 - DNA, 15 bp, Homo sapiens
atctacccccagaca

SEQ ID NO: 929403 - DNA, 15 bp, Homo sapiens
catctacccccagac

SEQ ID NO: 929404 - DNA, 15 bp, Homo sapiens
ccatctacccccaga

SEQ ID NO: 929405 - DNA, 15 bp, Homo sapiens
cccatctacccccag

SEQ ID NO: 929406 - DNA, 15 bp, Homo sapiens
tcccatctaccccca

SEQ ID NO: 929407 - DNA, 15 bp, Homo sapiens
ttcccatctaccccc

SEQ ID NO: 929408 - DNA, 15 bp, Homo sapiens
tttcccatctacccc

SEQ ID NO: 929409 - DNA, 15 bp, Homo sapiens
ctttcccatctaccc

SEQ ID NO: 929410 - DNA, 15 bp, Homo sapiens
gctttcccatctacc

SEQ ID NO: 929411 - DNA, 15 bp, Homo sapiens
ggctttcccatctac

SEQ ID NO: 929412 - DNA, 15 bp, Homo sapiens
tggctttcccatcta

SEQ ID NO: 929413 - DNA, 15 bp, Homo sapiens
atggctttcccatct

SEQ ID NO: 929414 - DNA, 15 bp, Homo sapiens
tatggctttcccatc

SEQ ID NO: 929415 - DNA, 15 bp, Homo sapiens
ttatggctttcccat

SEQ ID NO: 929416 - DNA, 15 bp, Homo sapiens
attatggctttccca

SEQ ID NO: 929417 - DNA, 15 bp, Homo sapiens
aattatggctttccc

SEQ ID NO: 929418 - DNA, 15 bp, Homo sapiens
aaattatggctttcc

SEQ ID NO: 929419 - DNA, 15 bp, Homo sapiens
caaattatggctttc

SEQ ID NO: 929420 - DNA, 15 bp, Homo sapiens
tcaaattatggcttt

SEQ ID NO: 929421 - DNA, 15 bp, Homo sapiens
ttcaaattatggctt

SEQ ID NO: 929422 - DNA, 15 bp, Homo sapiens
tttcaaattatggct

SEQ ID NO: 929423 - DNA, 15 bp, Homo sapiens
gtttcaaattatggc

SEQ ID NO: 929424 - DNA, 15 bp, Homo sapiens
agtttcaaattatgg

SEQ ID NO: 929425 - DNA, 15 bp, Homo sapiens
tagtttcaaattatg

SEQ ID NO: 929426 - DNA, 15 bp, Homo sapiens
ctagtttcaaattat

SEQ ID NO: 929427 - DNA, 15 bp, Homo sapiens
actagtttcaaatta

SEQ ID NO: 929428 - DNA, 15 bp, Homo sapiens
gactagtttcaaatt

SEQ ID NO: 929429 - DNA, 15 bp, Homo sapiens
tgactagtttcaaat

SEQ ID NO: 929430 - DNA, 15 bp, Homo sapiens
ctgactagtttcaaa

SEQ ID NO: 929431 - DNA, 15 bp, Homo sapiens
actgactagtttcaa

SEQ ID NO: 929432 - DNA, 15 bp, Homo sapiens
gactgactagtttca

SEQ ID NO: 929433 - DNA, 15 bp, Homo sapiens
agactgactagtttc

SEQ ID NO: 929434 - DNA, 15 bp, Homo sapiens
cagactgactagttt

SEQ ID NO: 929435 - DNA, 15 bp, Homo sapiens
tcagactgactagtt

SEQ ID NO: 929436 - DNA, 15 bp, Homo sapiens
gtcagactgactagt

SEQ ID NO: 929437 - DNA, 15 bp, Homo sapiens
agtcagactgactag

SEQ ID NO: 929438 - DNA, 15 bp, Homo sapiens
gagtcagactgacta

SEQ ID NO: 929439 - DNA, 15 bp, Homo sapiens
tgagtcagactgact

SEQ ID NO: 929440 - DNA, 15 bp, Homo sapiens
ttgagtcagactgac

SEQ ID NO: 929441 - DNA, 15 bp, Homo sapiens
tttgagtcagactga

SEQ ID NO: 929442 - DNA, 15 bp, Homo sapiens
ttttgagtcagactg

SEQ ID NO: 929443 - DNA, 15 bp, Homo sapiens
cttttgagtcagact

SEQ ID NO: 929444 - DNA, 15 bp, Homo sapiens
gcttttgagtcagac

SEQ ID NO: 929445 - DNA, 15 bp, Homo sapiens
ggcttttgagtcaga

SEQ ID NO: 929446 - DNA, 15 bp, Homo sapiens
tggcttttgagtcag

SEQ ID NO: 929447 - DNA, 15 bp, Homo sapiens
ttggcttttgagtca

SEQ ID NO: 929448 - DNA, 15 bp, Homo sapiens
attggcttttgagtc

SEQ ID NO: 929449 - DNA, 15 bp, Homo sapiens
tattggcttttgagt

SEQ ID NO: 929450 - DNA, 15 bp, Homo sapiens
gtattggcttttgag

SEQ ID NO: 929451 - DNA, 15 bp, Homo sapiens
tgtattggcttttga

SEQ ID NO: 929452 - DNA, 15 bp, Homo sapiens
ttgtattggcttttg

SEQ ID NO: 929453 - DNA, 15 bp, Homo sapiens
tttgtattggctttt

SEQ ID NO: 929454 - DNA, 15 bp, Homo sapiens
atttgtattggcttt

SEQ ID NO: 929455 - DNA, 15 bp, Homo sapiens
aatttgtattggctt

SEQ ID NO: 929456 - DNA, 15 bp, Homo sapiens
gaatttgtattggct

SEQ ID NO: 929457 - DNA, 15 bp, Homo sapiens
agaatttgtattggc

SEQ ID NO: 929458 - DNA, 15 bp, Homo sapiens
aagaatttgtattgg

SEQ ID NO: 929459 - DNA, 15 bp, Homo sapiens
aaagaatttgtattg

SEQ ID NO: 929460 - DNA, 15 bp, Homo sapiens
aaaagaatttgtatt

SEQ ID NO: 929461 - DNA, 15 bp, Homo sapiens
gaaaagaatttgtat

SEQ ID NO: 929462 - DNA, 15 bp, Homo sapiens
ggaaaagaatttgta

SEQ ID NO: 929463 - DNA, 15 bp, Homo sapiens
tggaaaagaatttgt

SEQ ID NO: 929464 - DNA, 15 bp, Homo sapiens
ctggaaaagaatttg

SEQ ID NO: 929465 - DNA, 15 bp, Homo sapiens
tctggaaaagaattt

SEQ ID NO: 929466 - DNA, 15 bp, Homo sapiens
ttctggaaaagaatt

SEQ ID NO: 929467 - DNA, 15 bp, Homo sapiens
attctggaaaagaat

SEQ ID NO: 929468 - DNA, 15 bp, Homo sapiens
gattctggaaaagaa

SEQ ID NO: 929469 - DNA, 15 bp, Homo sapiens
agattctggaaaaga

SEQ ID NO: 929470 - DNA, 15 bp, Homo sapiens
gagattctggaaaag

SEQ ID NO: 929471 - DNA, 15 bp, Homo sapiens
tgagattctggaaaa

SEQ ID NO: 929472 - DNA, 15 bp, Homo sapiens
atgagattctggaaa

SEQ ID NO: 929473 - DNA, 15 bp, Homo sapiens
aatgagattctggaa

SEQ ID NO: 929474 - DNA, 15 bp, Homo sapiens
aaatgagattctgga

SEQ ID NO: 929475 - DNA, 15 bp, Homo sapiens
aaaatgagattctgg

SEQ ID NO: 929476 - DNA, 15 bp, Homo sapiens
aaaaatgagattctg

SEQ ID NO: 929477 - DNA, 15 bp, Homo sapiens
taaaaatgagattct

SEQ ID NO: 929478 - DNA, 15 bp, Homo sapiens
gtaaaaatgagattc

SEQ ID NO: 929479 - DNA, 15 bp, Homo sapiens
ggtaaaaatgagatt

SEQ ID NO: 929480 - DNA, 15 bp, Homo sapiens
aggtaaaaatgagat

SEQ ID NO: 929481 - DNA, 15 bp, Homo sapiens
aaggtaaaaatgaga

SEQ ID NO: 929482 - DNA, 15 bp, Homo sapiens
gaaggtaaaaatgag

SEQ ID NO: 929483 - DNA, 15 bp, Homo sapiens
agaaggtaaaaatga

SEQ ID NO: 929484 - DNA, 15 bp, Homo sapiens
aagaaggtaaaaatg

SEQ ID NO: 929485 - DNA, 15 bp, Homo sapiens
aaagaaggtaaaaat

SEQ ID NO: 929486 - DNA, 15 bp, Homo sapiens
caaagaaggtaaaaa

SEQ ID NO: 929487 - DNA, 15 bp, Homo sapiens
tcaaagaaggtaaaa

SEQ ID NO: 929488 - DNA, 15 bp, Homo sapiens
ctcaaagaaggtaaa

SEQ ID NO: 929489 - DNA, 15 bp, Homo sapiens
gctcaaagaaggtaa

SEQ ID NO: 929490 - DNA, 15 bp, Homo sapiens
ggctcaaagaaggta

SEQ ID NO: 929491 - DNA, 15 bp, Homo sapiens
aggctcaaagaaggt

SEQ ID NO: 929492 - DNA, 15 bp, Homo sapiens
gaggctcaaagaagg

SEQ ID NO: 929493 - DNA, 15 bp, Homo sapiens
tgaggctcaaagaag

SEQ ID NO: 929494 - DNA, 15 bp, Homo sapiens
ctgaggctcaaagaa

SEQ ID NO: 929495 - DNA, 15 bp, Homo sapiens
actgaggctcaaaga

SEQ ID NO: 929496 - DNA, 15 bp, Homo sapiens
aactgaggctcaaag

SEQ ID NO: 929497 - DNA, 15 bp, Homo sapiens
aaactgaggctcaaa

SEQ ID NO: 929498 - DNA, 15 bp, Homo sapiens
gaaactgaggctcaa

SEQ ID NO: 929499 - DNA, 15 bp, Homo sapiens
tgaaactgaggctca

SEQ ID NO: 929500 - DNA, 15 bp, Homo sapiens
atgaaactgaggctc

SEQ ID NO: 929501 - DNA, 15 bp, Homo sapiens
gatgaaactgaggct

SEQ ID NO: 929502 - DNA, 15 bp, Homo sapiens
agatgaaactgaggc

SEQ ID NO: 929503 - DNA, 15 bp, Homo sapiens
aagatgaaactgagg

SEQ ID NO: 929504 - DNA, 15 bp, Homo sapiens
taagatgaaactgag

SEQ ID NO: 929505 - DNA, 15 bp, Homo sapiens
ataagatgaaactga

SEQ ID NO: 929506 - DNA, 15 bp, Homo sapiens
aataagatgaaactg

SEQ ID NO: 929507 - DNA, 15 bp, Homo sapiens
aaataagatgaaact

SEQ ID NO: 929508 - DNA, 15 bp, Homo sapiens
taaataagatgaaac

SEQ ID NO: 929509 - DNA, 15 bp, Homo sapiens
ataaataagatgaaa

SEQ ID NO: 929510 - DNA, 15 bp, Homo sapiens
aataaataagatgaa

SEQ ID NO: 929511 - DNA, 15 bp, Homo sapiens
aaataaataagatga

SEQ ID NO: 929512 - DNA, 15 bp, Homo sapiens
taaataaataagatg

SEQ ID NO: 929513 - DNA, 15 bp, Homo sapiens
ataaataaataagat

SEQ ID NO: 929514 - DNA, 15 bp, Homo sapiens
aataaataaataaga

SEQ ID NO: 929515 - DNA, 15 bp, Homo sapiens
aaataaataaataag

SEQ ID NO: 929516 - DNA, 15 bp, Homo sapiens
aaaataaataaataa

SEQ ID NO: 929517 - DNA, 15 bp, Homo sapiens
aaaaataaataaata

SEQ ID NO: 929518 - DNA, 15 bp, Homo sapiens
taaaaataaataaat

SEQ ID NO: 929519 - DNA, 15 bp, Homo sapiens
ataaaaataaataaa

SEQ ID NO: 929520 - DNA, 15 bp, Homo sapiens
aataaaaataaataa

SEQ ID NO: 929521 - DNA, 15 bp, Homo sapiens
aaataaaaataaata

SEQ ID NO: 929522 - DNA, 15 bp, Homo sapiens
aaaataaaaataaat

SEQ ID NO: 929523 - DNA, 15 bp, Homo sapiens
aaaaataaaaataaa

SEQ ID NO: 929524 - DNA, 15 bp, Homo sapiens
caaaaataaaaataa

SEQ ID NO: 929525 - DNA, 15 bp, Homo sapiens
tcaaaaataaaaata

SEQ ID NO: 929526 - DNA, 15 bp, Homo sapiens
ctcaaaaataaaaat

SEQ ID NO: 929527 - DNA, 15 bp, Homo sapiens
tctcaaaaataaaaa

SEQ ID NO: 929528 - DNA, 15 bp, Homo sapiens
gtctcaaaaataaaa

SEQ ID NO: 929529 - DNA, 15 bp, Homo sapiens
tgtctcaaaaataaa

SEQ ID NO: 929530 - DNA, 15 bp, Homo sapiens
ttgtctcaaaaataa

SEQ ID NO: 929531 - DNA, 15 bp, Homo sapiens
cttgtctcaaaaata

SEQ ID NO: 929532 - DNA, 15 bp, Homo sapiens
ccttgtctcaaaaat

SEQ ID NO: 929533 - DNA, 15 bp, Homo sapiens
accttgtctcaaaaa

SEQ ID NO: 929534 - DNA, 15 bp, Homo sapiens
gaccttgtctcaaaa

SEQ ID NO: 929535 - DNA, 15 bp, Homo sapiens
agaccttgtctcaaa

SEQ ID NO: 929536 - DNA, 15 bp, Homo sapiens
cagaccttgtctcaa

SEQ ID NO: 929537 - DNA, 15 bp, Homo sapiens
ccagaccttgtctca

SEQ ID NO: 929538 - DNA, 15 bp, Homo sapiens
gccagaccttgtctc

SEQ ID NO: 929539 - DNA, 15 bp, Homo sapiens
agccagaccttgtct

SEQ ID NO: 929540 - DNA, 15 bp, Homo sapiens
gagccagaccttgtc

SEQ ID NO: 929541 - DNA, 15 bp, Homo sapiens
agagccagaccttgt

SEQ ID NO: 929542 - DNA, 15 bp, Homo sapiens
tagagccagaccttg

SEQ ID NO: 929543 - DNA, 15 bp, Homo sapiens
atagagccagacctt

SEQ ID NO: 929544 - DNA, 15 bp, Homo sapiens
aatagagccagacct

SEQ ID NO: 929545 - DNA, 15 bp, Homo sapiens
aaatagagccagacc

SEQ ID NO: 929546 - DNA, 15 bp, Homo sapiens
gaaatagagccagac

SEQ ID NO: 929547 - DNA, 15 bp, Homo sapiens
ggaaatagagccaga

SEQ ID NO: 929548 - DNA, 15 bp, Homo sapiens
aggaaatagagccag

SEQ ID NO: 929549 - DNA, 15 bp, Homo sapiens
taggaaatagagcca

SEQ ID NO: 929550 - DNA, 15 bp, Homo sapiens
ctaggaaatagagcc

SEQ ID NO: 929551 - DNA, 15 bp, Homo sapiens
cctaggaaatagagc

SEQ ID NO: 929552 - DNA, 15 bp, Homo sapiens
gcctaggaaatagag

SEQ ID NO: 929553 - DNA, 15 bp, Homo sapiens
agcctaggaaataga

SEQ ID NO: 929554 - DNA, 15 bp, Homo sapiens
cagcctaggaaatag

SEQ ID NO: 929555 - DNA, 15 bp, Homo sapiens
ccagcctaggaaata

SEQ ID NO: 929556 - DNA, 15 bp, Homo sapiens
tccagcctaggaaat

SEQ ID NO: 929557 - DNA, 15 bp, Homo sapiens
ctccagcctaggaaa

SEQ ID NO: 929558 - DNA, 15 bp, Homo sapiens
actccagcctaggaa

SEQ ID NO: 929559 - DNA, 15 bp, Homo sapiens
cactccagcctagga

SEQ ID NO: 929560 - DNA, 15 bp, Homo sapiens
gcactccagcctagg

SEQ ID NO: 929561 - DNA, 15 bp, Homo sapiens
tgcactccagcctag

SEQ ID NO: 929562 - DNA, 15 bp, Homo sapiens
ctgcactccagccta

SEQ ID NO: 929563 - DNA, 15 bp, Homo sapiens
tcactgcactccagc

SEQ ID NO: 929564 - DNA, 15 bp, Homo sapiens
gtcactgcactccag

SEQ ID NO: 929565 - DNA, 15 bp, Homo sapiens
tgtcactgcactcca

SEQ ID NO: 929566 - DNA, 15 bp, Homo sapiens
atgtcactgcactcc

SEQ ID NO: 929567 - DNA, 15 bp, Homo sapiens
tatgtcactgcactc

SEQ ID NO: 929568 - DNA, 15 bp, Homo sapiens
ttatgtcactgcact

SEQ ID NO: 929569 - DNA, 15 bp, Homo sapiens
attatgtcactgcac

SEQ ID NO: 929570 - DNA, 15 bp, Homo sapiens
gattatgtcactgca

SEQ ID NO: 929571 - DNA, 15 bp, Homo sapiens
agattatgtcactgc

SEQ ID NO: 929572 - DNA, 15 bp, Homo sapiens
gagattatgtcactg

SEQ ID NO: 929573 - DNA, 15 bp, Homo sapiens
tgagattatgtcact

SEQ ID NO: 929574 - DNA, 15 bp, Homo sapiens
ctgagattatgtcac

SEQ ID NO: 929575 - DNA, 15 bp, Homo sapiens
gctgagattatgtca

SEQ ID NO: 929576 - DNA, 15 bp, Homo sapiens
agctgagattatgtc

SEQ ID NO: 929577 - DNA, 15 bp, Homo sapiens
gagctgagattatgt

SEQ ID NO: 929578 - DNA, 15 bp, Homo sapiens
tgagctgagattatg

SEQ ID NO: 929579 - DNA, 15 bp, Homo sapiens
gtgagctgagattat

SEQ ID NO: 929580 - DNA, 15 bp, Homo sapiens
agtgagctgagatta

SEQ ID NO: 929581 - DNA, 15 bp, Homo sapiens
aaggttgcagtgagc

SEQ ID NO: 929582 - DNA, 15 bp, Homo sapiens
caaggttgcagtgag

SEQ ID NO: 929583 - DNA, 15 bp, Homo sapiens
tcaaggttgcagtga

SEQ ID NO: 929584 - DNA, 15 bp, Homo sapiens
gtcaaggttgcagtg

SEQ ID NO: 929585 - DNA, 15 bp, Homo sapiens
ggtcaaggttgcagt

SEQ ID NO: 929586 - DNA, 15 bp, Homo sapiens
aggtcaaggttgcag

SEQ ID NO: 929587 - DNA, 15 bp, Homo sapiens
aaggtcaaggttgca

SEQ ID NO: 929588 - DNA, 15 bp, Homo sapiens
gaaggtcaaggttgc

SEQ ID NO: 929589 - DNA, 15 bp, Homo sapiens
ggaaggtcaaggttg

SEQ ID NO: 929590 - DNA, 15 bp, Homo sapiens
tggaaggtcaaggtt

SEQ ID NO: 929591 - DNA, 15 bp, Homo sapiens
ctggaaggtcaaggt

SEQ ID NO: 929592 - DNA, 15 bp, Homo sapiens
cctggaaggtcaagg

SEQ ID NO: 929593 - DNA, 15 bp, Homo sapiens
gcctggaaggtcaag

SEQ ID NO: 929594 - DNA, 15 bp, Homo sapiens
agcctggaaggtcaa

SEQ ID NO: 929595 - DNA, 15 bp, Homo sapiens
gagcctggaaggtca

SEQ ID NO: 929596 - DNA, 15 bp, Homo sapiens
tgagcctggaaggtc

SEQ ID NO: 929597 - DNA, 15 bp, Homo sapiens
ttgagcctggaaggt

SEQ ID NO: 929598 - DNA, 15 bp, Homo sapiens
tttgagcctggaagg

SEQ ID NO: 929599 - DNA, 15 bp, Homo sapiens
gtttgagcctggaag

SEQ ID NO: 929600 - DNA, 15 bp, Homo sapiens
ggtttgagcctggaa

SEQ ID NO: 929601 - DNA, 15 bp, Homo sapiens
tggtttgagcctgga

SEQ ID NO: 929602 - DNA, 15 bp, Homo sapiens
atggtttgagcctgg

SEQ ID NO: 929603 - DNA, 15 bp, Homo sapiens
gatggtttgagcctg

SEQ ID NO: 929604 - DNA, 15 bp, Homo sapiens
agatggtttgagcct

SEQ ID NO: 929605 - DNA, 15 bp, Homo sapiens
aagatggtttgagcc

SEQ ID NO: 929606 - DNA, 15 bp, Homo sapiens
gaagatggtttgagc

SEQ ID NO: 929607 - DNA, 15 bp, Homo sapiens
ggaagatggtttgag

SEQ ID NO: 929608 - DNA, 15 bp, Homo sapiens
gggaagatggtttga

SEQ ID NO: 929609 - DNA, 15 bp, Homo sapiens
tgggaagatggtttg

SEQ ID NO: 929610 - DNA, 15 bp, Homo sapiens
gtgggaagatggttt

SEQ ID NO: 929611 - DNA, 15 bp, Homo sapiens
ggtgggaagatggtt

SEQ ID NO: 929612 - DNA, 15 bp, Homo sapiens
aggtgggaagatggt

SEQ ID NO: 929613 - DNA, 15 bp, Homo sapiens
gaggtgggaagatgg

SEQ ID NO: 929614 - DNA, 15 bp, Homo sapiens
tgaggtgggaagatg

SEQ ID NO: 929615 - DNA, 15 bp, Homo sapiens
ctgaggtgggaagat

SEQ ID NO: 929616 - DNA, 15 bp, Homo sapiens
gctgaggtgggaaga

SEQ ID NO: 929617 - DNA, 15 bp, Homo sapiens
ggctgaggtgggaag

SEQ ID NO: 929618 - DNA, 15 bp, Homo sapiens
aggctgaggtgggaa

SEQ ID NO: 929619 - DNA, 15 bp, Homo sapiens
caggctgaggtggga

SEQ ID NO: 929620 - DNA, 15 bp, Homo sapiens
gcaggctgaggtggg

SEQ ID NO: 929621 - DNA, 15 bp, Homo sapiens
tgcaggctgaggtgg

SEQ ID NO: 929622 - DNA, 15 bp, Homo sapiens
ctgcaggctgaggtg

SEQ ID NO: 929623 - DNA, 15 bp, Homo sapiens
tctgcaggctgaggt

SEQ ID NO: 929624 - DNA, 15 bp, Homo sapiens
ctctgcaggctgagg

SEQ ID NO: 929625 - DNA, 15 bp, Homo sapiens
actctgcaggctgag

SEQ ID NO: 929626 - DNA, 15 bp, Homo sapiens
tactctgcaggctga

SEQ ID NO: 929627 - DNA, 15 bp, Homo sapiens
ctactctgcaggctg

SEQ ID NO: 929628 - DNA, 15 bp, Homo sapiens
gctactctgcaggct

SEQ ID NO: 929629 - DNA, 15 bp, Homo sapiens
agctactctgcaggc

SEQ ID NO: 929630 - DNA, 15 bp, Homo sapiens
cagctactctgcagg

SEQ ID NO: 929631 - DNA, 15 bp, Homo sapiens
ccagctactctgcag

SEQ ID NO: 929632 - DNA, 15 bp, Homo sapiens
gccagctactctgca

SEQ ID NO: 929633 - DNA, 15 bp, Homo sapiens
tgccagctactctgc

SEQ ID NO: 929634 - DNA, 15 bp, Homo sapiens
gtgccagctactctg

SEQ ID NO: 929635 - DNA, 15 bp, Homo sapiens
agtgccagctactct

SEQ ID NO: 929636 - DNA, 15 bp, Homo sapiens
tagtgccagctactc

SEQ ID NO: 929637 - DNA, 15 bp, Homo sapiens
gtagtgccagctact

SEQ ID NO: 929638 - DNA, 15 bp, Homo sapiens
tgtagtgccagctac

SEQ ID NO: 929639 - DNA, 15 bp, Homo sapiens
ctgtagtgccagcta

SEQ ID NO: 929640 - DNA, 15 bp, Homo sapiens
cctgtagtgccagct

SEQ ID NO: 929641 - DNA, 15 bp, Homo sapiens
gcctgtagtgccagc

SEQ ID NO: 929642 - DNA, 15 bp, Homo sapiens
tgcctgtagtgccag

SEQ ID NO: 929643 - DNA, 15 bp, Homo sapiens
ctgcctgtagtgcca

SEQ ID NO: 929644 - DNA, 15 bp, Homo sapiens
cctgcctgtagtgcc

SEQ ID NO: 929645 - DNA, 15 bp, Homo sapiens
acctgcctgtagtgc

SEQ ID NO: 929646 - DNA, 15 bp, Homo sapiens
cacctgcctgtagtg

SEQ ID NO: 929647 - DNA, 15 bp, Homo sapiens
gcacctgcctgtagt

SEQ ID NO: 929648 - DNA, 15 bp, Homo sapiens
ggcacctgcctgtag

SEQ ID NO: 929649 - DNA, 15 bp, Homo sapiens
tggcacctgcctgta

SEQ ID NO: 929650 - DNA, 15 bp, Homo sapiens
gtggcacctgcctgt

SEQ ID NO: 929651 - DNA, 15 bp, Homo sapiens
ggtggcacctgcctg

SEQ ID NO: 929652 - DNA, 15 bp, Homo sapiens
tggtggcacctgcct

SEQ ID NO: 929653 - DNA, 15 bp, Homo sapiens
gtggtggcacctgcc

SEQ ID NO: 929654 - DNA, 15 bp, Homo sapiens
tgtggtggcacctgc

SEQ ID NO: 929655 - DNA, 15 bp, Homo sapiens
gtgtggtggcacctg

SEQ ID NO: 929656 - DNA, 15 bp, Homo sapiens
ggtgtggtggcacct

SEQ ID NO: 929657 - DNA, 15 bp, Homo sapiens
aggtgtggtggcacc

SEQ ID NO: 929658 - DNA, 15 bp, Homo sapiens
caggtgtggtggcac

SEQ ID NO: 929659 - DNA, 15 bp, Homo sapiens
ccaggtgtggtggca

SEQ ID NO: 929660 - DNA, 15 bp, Homo sapiens
cccaggtgtggtggc

SEQ ID NO: 929661 - DNA, 15 bp, Homo sapiens
acccaggtgtggtgg

SEQ ID NO: 929662 - DNA, 15 bp, Homo sapiens
tacccaggtgtggtg

SEQ ID NO: 929663 - DNA, 15 bp, Homo sapiens
ctacccaggtgtggt

SEQ ID NO: 929664 - DNA, 15 bp, Homo sapiens
actacccaggtgtgg

SEQ ID NO: 929665 - DNA, 15 bp, Homo sapiens
aactacccaggtgtg

SEQ ID NO: 929666 - DNA, 15 bp, Homo sapiens
aaactacccaggtgt

SEQ ID NO: 929667 - DNA, 15 bp, Homo sapiens
aaaactacccaggtg

SEQ ID NO: 929668 - DNA, 15 bp, Homo sapiens
aaaaactacccaggt

SEQ ID NO: 929669 - DNA, 15 bp, Homo sapiens
aaaaaactacccagg

SEQ ID NO: 929670 - DNA, 15 bp, Homo sapiens
aaaaaaactacccag

SEQ ID NO: 929671 - DNA, 15 bp, Homo sapiens
caaaaaaactaccca

SEQ ID NO: 929672 - DNA, 15 bp, Homo sapiens
acaaaaaaactaccc

SEQ ID NO: 929673 - DNA, 15 bp, Homo sapiens
tacaaaaaaactacc

SEQ ID NO: 929674 - DNA, 15 bp, Homo sapiens
atacaaaaaaactac

SEQ ID NO: 929675 - DNA, 15 bp, Homo sapiens
aatacaaaaaaacta

SEQ ID NO: 929676 - DNA, 15 bp, Homo sapiens
aaatacaaaaaaact

SEQ ID NO: 929677 - DNA, 15 bp, Homo sapiens
aaaatacaaaaaaac

SEQ ID NO: 929678 - DNA, 15 bp, Homo sapiens
aaaaatacaaaaaaa

SEQ ID NO: 929679 - DNA, 15 bp, Homo sapiens
caaaaatacaaaaaa

SEQ ID NO: 929680 - DNA, 15 bp, Homo sapiens
acaaaaatacaaaaa

SEQ ID NO: 929681 - DNA, 15 bp, Homo sapiens
tacaaaaatacaaaa

SEQ ID NO: 929682 - DNA, 15 bp, Homo sapiens
ctacaaaaatacaaa

SEQ ID NO: 929683 - DNA, 15 bp, Homo sapiens
tctacaaaaatacaa

SEQ ID NO: 929684 - DNA, 15 bp, Homo sapiens
ctctacaaaaataca

SEQ ID NO: 929685 - DNA, 15 bp, Homo sapiens
tctctacaaaaatac

SEQ ID NO: 929686 - DNA, 15 bp, Homo sapiens
gtctctacaaaaata

SEQ ID NO: 929687 - DNA, 15 bp, Homo sapiens
tgtctctacaaaaat

SEQ ID NO: 929688 - DNA, 15 bp, Homo sapiens
aaccttgtctctaca

SEQ ID NO: 929689 - DNA, 15 bp, Homo sapiens
aaaccttgtctctac

SEQ ID NO: 929690 - DNA, 15 bp, Homo sapiens
gaaaccttgtctcta

SEQ ID NO: 929691 - DNA, 15 bp, Homo sapiens
agaaaccttgtctct

SEQ ID NO: 929692 - DNA, 15 bp, Homo sapiens
gagaaaccttgtctc

SEQ ID NO: 929693 - DNA, 15 bp, Homo sapiens
ggagaaaccttgtct

SEQ ID NO: 929694 - DNA, 15 bp, Homo sapiens
tggagaaaccttgtc

SEQ ID NO: 929695 - DNA, 15 bp, Homo sapiens
atggagaaaccttgt

SEQ ID NO: 929696 - DNA, 15 bp, Homo sapiens
catggagaaaccttg

SEQ ID NO: 929697 - DNA, 15 bp, Homo sapiens
acatggagaaacctt

SEQ ID NO: 929698 - DNA, 15 bp, Homo sapiens
aacatggagaaacct

SEQ ID NO: 929699 - DNA, 15 bp, Homo sapiens
caacatggagaaacc

SEQ ID NO: 929700 - DNA, 15 bp, Homo sapiens
gcaacatggagaaac

SEQ ID NO: 929701 - DNA, 15 bp, Homo sapiens
ggcaacatggagaaa

SEQ ID NO: 929702 - DNA, 15 bp, Homo sapiens
gggcaacatggagaa

SEQ ID NO: 929703 - DNA, 15 bp, Homo sapiens
tgggcaacatggaga

SEQ ID NO: 929704 - DNA, 15 bp, Homo sapiens
ctgggcaacatggag

SEQ ID NO: 929705 - DNA, 15 bp, Homo sapiens
cctgggcaacatgga

SEQ ID NO: 929706 - DNA, 15 bp, Homo sapiens
gcctgggcaacatgg

SEQ ID NO: 929707 - DNA, 15 bp, Homo sapiens
agcctgggcaacatg

SEQ ID NO: 929708 - DNA, 15 bp, Homo sapiens
cagcctgggcaacat

SEQ ID NO: 929709 - DNA, 15 bp, Homo sapiens
cgagttcaagaccag

SEQ ID NO: 929710 - DNA, 15 bp, Homo sapiens
acgagttcaagacca

SEQ ID NO: 929711 - DNA, 15 bp, Homo sapiens
cacgagttcaagacc

SEQ ID NO: 929712 - DNA, 15 bp, Homo sapiens
tcacgagttcaagac

SEQ ID NO: 929713 - DNA, 15 bp, Homo sapiens
ctcacgagttcaaga

SEQ ID NO: 929714 - DNA, 15 bp, Homo sapiens
gctcacgagttcaag

SEQ ID NO: 929715 - DNA, 15 bp, Homo sapiens
agctcacgagttcaa

SEQ ID NO: 929716 - DNA, 15 bp, Homo sapiens
gagctcacgagttca

SEQ ID NO: 929717 - DNA, 15 bp, Homo sapiens
tgagctcacgagttc

SEQ ID NO: 929718 - DNA, 15 bp, Homo sapiens
ttgagctcacgagtt

SEQ ID NO: 929719 - DNA, 15 bp, Homo sapiens
cttgagctcacgagt

SEQ ID NO: 929720 - DNA, 15 bp, Homo sapiens
acttgagctcacgag

SEQ ID NO: 929721 - DNA, 15 bp, Homo sapiens
cacttgagctcacga

SEQ ID NO: 929722 - DNA, 15 bp, Homo sapiens
tcacttgagctcacg

SEQ ID NO: 929723 - DNA, 15 bp, Homo sapiens
atcacttgagctcac

SEQ ID NO: 929724 - DNA, 15 bp, Homo sapiens
gatcacttgagctca

SEQ ID NO: 929725 - DNA, 15 bp, Homo sapiens
ggatcacttgagctc

SEQ ID NO: 929726 - DNA, 15 bp, Homo sapiens
cggatcacttgagct

SEQ ID NO: 929727 - DNA, 15 bp, Homo sapiens
gcggatcacttgagc

SEQ ID NO: 929728 - DNA, 15 bp, Homo sapiens
ggcggatcacttgag

SEQ ID NO: 929729 - DNA, 15 bp, Homo sapiens
gggcggatcacttga

SEQ ID NO: 929730 - DNA, 15 bp, Homo sapiens
tgggcggatcacttg

SEQ ID NO: 929731 - DNA, 15 bp, Homo sapiens
gtgggcggatcactt

SEQ ID NO: 929732 - DNA, 15 bp, Homo sapiens
agtgggcggatcact

SEQ ID NO: 929733 - DNA, 15 bp, Homo sapiens
aagtgggcggatcac

SEQ ID NO: 929734 - DNA, 15 bp, Homo sapiens
gaagtgggcggatca

SEQ ID NO: 929735 - DNA, 15 bp, Homo sapiens
cgaagtgggcggatc

SEQ ID NO: 929736 - DNA, 15 bp, Homo sapiens
ccgaagtgggcggat

SEQ ID NO: 929737 - DNA, 15 bp, Homo sapiens
gccgaagtgggcgga

SEQ ID NO: 929738 - DNA, 15 bp, Homo sapiens
ggccgaagtgggcgg

SEQ ID NO: 929739 - DNA, 15 bp, Homo sapiens
aggccgaagtgggcg

SEQ ID NO: 929740 - DNA, 15 bp, Homo sapiens
gaggccgaagtgggc

SEQ ID NO: 929741 - DNA, 15 bp, Homo sapiens
ggaggccgaagtggg

SEQ ID NO: 929742 - DNA, 15 bp, Homo sapiens
gggaggccgaagtgg

SEQ ID NO: 929743 - DNA, 15 bp, Homo sapiens
tgggaggccgaagtg

SEQ ID NO: 929744 - DNA, 15 bp, Homo sapiens
ttgggaggccgaagt

SEQ ID NO: 929745 - DNA, 15 bp, Homo sapiens
tttgggaggccgaag

SEQ ID NO: 929746 - DNA, 15 bp, Homo sapiens
ctttgggaggccgaa

SEQ ID NO: 929747 - DNA, 15 bp, Homo sapiens
ggcctgtaatcccag

SEQ ID NO: 929748 - DNA, 15 bp, Homo sapiens
aggcctgtaatccca

SEQ ID NO: 929749 - DNA, 15 bp, Homo sapiens
caggcctgtaatccc

SEQ ID NO: 929750 - DNA, 15 bp, Homo sapiens
tcaggcctgtaatcc

SEQ ID NO: 929751 - DNA, 15 bp, Homo sapiens
ctcaggcctgtaatc

SEQ ID NO: 929752 - DNA, 15 bp, Homo sapiens
gctcaggcctgtaat

SEQ ID NO: 929753 - DNA, 15 bp, Homo sapiens
ggctcaggcctgtaa

SEQ ID NO: 929754 - DNA, 15 bp, Homo sapiens
tggctcaggcctgta

SEQ ID NO: 929755 - DNA, 15 bp, Homo sapiens
atggctcaggcctgt

SEQ ID NO: 929756 - DNA, 15 bp, Homo sapiens
aatggctcaggcctg

SEQ ID NO: 929757 - DNA, 15 bp, Homo sapiens
caatggctcaggcct

SEQ ID NO: 929758 - DNA, 15 bp, Homo sapiens
gcaatggctcaggcc

SEQ ID NO: 929759 - DNA, 15 bp, Homo sapiens
tgcaatggctcaggc

SEQ ID NO: 929760 - DNA, 15 bp, Homo sapiens
gtgcaatggctcagg

SEQ ID NO: 929761 - DNA, 15 bp, Homo sapiens
ggtgcaatggctcag

SEQ ID NO: 929762 - DNA, 15 bp, Homo sapiens
gggtgcaatggctca

SEQ ID NO: 929763 - DNA, 15 bp, Homo sapiens
tgggtgcaatggctc

SEQ ID NO: 929764 - DNA, 15 bp, Homo sapiens
ctgggtgcaatggct

SEQ ID NO: 929765 - DNA, 15 bp, Homo sapiens
gctgggtgcaatggc

SEQ ID NO: 929766 - DNA, 15 bp, Homo sapiens
ggctgggtgcaatgg

SEQ ID NO: 929767 - DNA, 15 bp, Homo sapiens
aggctgggtgcaatg

SEQ ID NO: 929768 - DNA, 15 bp, Homo sapiens
gaggctgggtgcaat

SEQ ID NO: 929769 - DNA, 15 bp, Homo sapiens
tgaggctgggtgcaa

SEQ ID NO: 929770 - DNA, 15 bp, Homo sapiens
atgaggctgggtgca

SEQ ID NO: 929771 - DNA, 15 bp, Homo sapiens
gatgaggctgggtgc

SEQ ID NO: 929772 - DNA, 15 bp, Homo sapiens
tgatgaggctgggtg

SEQ ID NO: 929773 - DNA, 15 bp, Homo sapiens
atgatgaggctgggt

SEQ ID NO: 929774 - DNA, 15 bp, Homo sapiens
gatgatgaggctggg

SEQ ID NO: 929775 - DNA, 15 bp, Homo sapiens
agatgatgaggctgg

SEQ ID NO: 929776 - DNA, 15 bp, Homo sapiens
aagatgatgaggctg

SEQ ID NO: 929777 - DNA, 15 bp, Homo sapiens
aaagatgatgaggct

SEQ ID NO: 929778 - DNA, 15 bp, Homo sapiens
taaagatgatgaggc

SEQ ID NO: 929779 - DNA, 15 bp, Homo sapiens
ttaaagatgatgagg

SEQ ID NO: 929780 - DNA, 15 bp, Homo sapiens
tttaaagatgatgag

SEQ ID NO: 929781 - DNA, 15 bp, Homo sapiens
ttttaaagatgatga

SEQ ID NO: 929782 - DNA, 15 bp, Homo sapiens
attttaaagatgatg

SEQ ID NO: 929783 - DNA, 15 bp, Homo sapiens
cattttaaagatgat

SEQ ID NO: 929784 - DNA, 15 bp, Homo sapiens
ccattttaaagatga

SEQ ID NO: 929785 - DNA, 15 bp, Homo sapiens
tccattttaaagatg

SEQ ID NO: 929786 - DNA, 15 bp, Homo sapiens
ttccattttaaagat

SEQ ID NO: 929787 - DNA, 15 bp, Homo sapiens
tttccattttaaaga

SEQ ID NO: 929788 - DNA, 15 bp, Homo sapiens
atttccattttaaag

SEQ ID NO: 929789 - DNA, 15 bp, Homo sapiens
tatttccattttaaa

SEQ ID NO: 929790 - DNA, 15 bp, Homo sapiens
ttatttccattttaa

SEQ ID NO: 929791 - DNA, 15 bp, Homo sapiens
attatttccatttta

SEQ ID NO: 929792 - DNA, 15 bp, Homo sapiens
tattatttccatttt

SEQ ID NO: 929793 - DNA, 15 bp, Homo sapiens
ttattatttccattt

SEQ ID NO: 929794 - DNA, 15 bp, Homo sapiens
attattatttccatt

SEQ ID NO: 929795 - DNA, 15 bp, Homo sapiens
tattattatttccat

SEQ ID NO: 929796 - DNA, 15 bp, Homo sapiens
gtattattatttcca

SEQ ID NO: 929797 - DNA, 15 bp, Homo sapiens
agtattattatttcc

SEQ ID NO: 929798 - DNA, 15 bp, Homo sapiens
aagtattattatttc

SEQ ID NO: 929799 - DNA, 15 bp, Homo sapiens
taagtattattattt

SEQ ID NO: 929800 - DNA, 15 bp, Homo sapiens
gtaagtattattatt

SEQ ID NO: 929801 - DNA, 15 bp, Homo sapiens
ggtaagtattattat

SEQ ID NO: 929802 - DNA, 15 bp, Homo sapiens
gggtaagtattatta

SEQ ID NO: 929803 - DNA, 15 bp, Homo sapiens
agggtaagtattatt

SEQ ID NO: 929804 - DNA, 15 bp, Homo sapiens
cagggtaagtattat

SEQ ID NO: 929805 - DNA, 15 bp, Homo sapiens
ccagggtaagtatta

SEQ ID NO: 929806 - DNA, 15 bp, Homo sapiens
gccagggtaagtatt

SEQ ID NO: 929807 - DNA, 15 bp, Homo sapiens
ggccagggtaagtat

SEQ ID NO: 929808 - DNA, 15 bp, Homo sapiens
gggccagggtaagta

SEQ ID NO: 929809 - DNA, 15 bp, Homo sapiens
agggccagggtaagt

SEQ ID NO: 929810 - DNA, 15 bp, Homo sapiens
aagggccagggtaag

SEQ ID NO: 929811 - DNA, 15 bp, Homo sapiens
aaagggccagggtaa

SEQ ID NO: 929812 - DNA, 15 bp, Homo sapiens
gaaagggccagggta

SEQ ID NO: 929813 - DNA, 15 bp, Homo sapiens
tgaaagggccagggt

SEQ ID NO: 929814 - DNA, 15 bp, Homo sapiens
ctgaaagggccaggg

SEQ ID NO: 929815 - DNA, 15 bp, Homo sapiens
cctgaaagggccagg

SEQ ID NO: 929816 - DNA, 15 bp, Homo sapiens
ccctgaaagggccag

SEQ ID NO: 929817 - DNA, 15 bp, Homo sapiens
accctgaaagggcca

SEQ ID NO: 929818 - DNA, 15 bp, Homo sapiens
caccctgaaagggcc

SEQ ID NO: 929819 - DNA, 15 bp, Homo sapiens
ccaccctgaaagggc

SEQ ID NO: 929820 - DNA, 15 bp, Homo sapiens
accaccctgaaaggg

SEQ ID NO: 929821 - DNA, 15 bp, Homo sapiens
aaccaccctgaaagg

SEQ ID NO: 929822 - DNA, 15 bp, Homo sapiens
taaccaccctgaaag

SEQ ID NO: 929823 - DNA, 15 bp, Homo sapiens
ataaccaccctgaaa

SEQ ID NO: 929824 - DNA, 15 bp, Homo sapiens
tataaccaccctgaa

SEQ ID NO: 929825 - DNA, 15 bp, Homo sapiens
atataaccaccctga

SEQ ID NO: 929826 - DNA, 15 bp, Homo sapiens
catataaccaccctg

SEQ ID NO: 929827 - DNA, 15 bp, Homo sapiens
tcatataaccaccct

SEQ ID NO: 929828 - DNA, 15 bp, Homo sapiens
ttcatataaccaccc

SEQ ID NO: 929829 - DNA, 15 bp, Homo sapiens
cttcatataaccacc

SEQ ID NO: 929830 - DNA, 15 bp, Homo sapiens
ccttcatataaccac

SEQ ID NO: 929831 - DNA, 15 bp, Homo sapiens
accttcatataacca

SEQ ID NO: 929832 - DNA, 15 bp, Homo sapiens
gaccttcatataacc

SEQ ID NO: 929833 - DNA, 15 bp, Homo sapiens
tgaccttcatataac

SEQ ID NO: 929834 - DNA, 15 bp, Homo sapiens
ttgaccttcatataa

SEQ ID NO: 929835 - DNA, 15 bp, Homo sapiens
tttgaccttcatata

SEQ ID NO: 929836 - DNA, 15 bp, Homo sapiens
atttgaccttcatat

SEQ ID NO: 929837 - DNA, 15 bp, Homo sapiens
aatttgaccttcata

SEQ ID NO: 929838 - DNA, 15 bp, Homo sapiens
taatttgaccttcat

SEQ ID NO: 929839 - DNA, 15 bp, Homo sapiens
ataatttgaccttca

SEQ ID NO: 929840 - DNA, 15 bp, Homo sapiens
tataatttgaccttc

SEQ ID NO: 929841 - DNA, 15 bp, Homo sapiens
gtataatttgacctt

SEQ ID NO: 929842 - DNA, 15 bp, Homo sapiens
ggtataatttgacct

SEQ ID NO: 929843 - DNA, 15 bp, Homo sapiens
cggtataatttgacc

SEQ ID NO: 929844 - DNA, 15 bp, Homo sapiens
acggtataatttgac

SEQ ID NO: 929845 - DNA, 15 bp, Homo sapiens
cacggtataatttga

SEQ ID NO: 929846 - DNA, 15 bp, Homo sapiens
acacggtataatttg

SEQ ID NO: 929847 - DNA, 15 bp, Homo sapiens
tacacggtataattt

SEQ ID NO: 929848 - DNA, 15 bp, Homo sapiens
atacacggtataatt

SEQ ID NO: 929849 - DNA, 15 bp, Homo sapiens
catacacggtataat

SEQ ID NO: 929850 - DNA, 15 bp, Homo sapiens
tcatacacggtataa

SEQ ID NO: 929851 - DNA, 15 bp, Homo sapiens
ttcatacacggtata

SEQ ID NO: 929852 - DNA, 15 bp, Homo sapiens
tttcatacacggtat

SEQ ID NO: 929853 - DNA, 15 bp, Homo sapiens
ctttcatacacggta

SEQ ID NO: 929854 - DNA, 15 bp, Homo sapiens
actttcatacacggt

SEQ ID NO: 929855 - DNA, 15 bp, Homo sapiens
tactttcatacacgg

SEQ ID NO: 929856 - DNA, 15 bp, Homo sapiens
ttactttcatacacg

SEQ ID NO: 929857 - DNA, 15 bp, Homo sapiens
attactttcatacac

SEQ ID NO: 929858 - DNA, 15 bp, Homo sapiens
aattactttcataca

SEQ ID NO: 929859 - DNA, 15 bp, Homo sapiens
aaattactttcatac

SEQ ID NO: 929860 - DNA, 15 bp, Homo sapiens
caaattactttcata

SEQ ID NO: 929861 - DNA, 15 bp, Homo sapiens
tcaaattactttcat

SEQ ID NO: 929862 - DNA, 15 bp, Homo sapiens
ttcaaattactttca

SEQ ID NO: 929863 - DNA, 15 bp, Homo sapiens
tttcaaattactttc

SEQ ID NO: 929864 - DNA, 15 bp, Homo sapiens
ttttcaaattacttt

SEQ ID NO: 929865 - DNA, 15 bp, Homo sapiens
gttttcaaattactt

SEQ ID NO: 929866 - DNA, 15 bp, Homo sapiens
agttttcaaattact

SEQ ID NO: 929867 - DNA, 15 bp, Homo sapiens
cagttttcaaattac

SEQ ID NO: 929868 - DNA, 15 bp, Homo sapiens
acagttttcaaatta

SEQ ID NO: 929869 - DNA, 15 bp, Homo sapiens
tacagttttcaaatt

SEQ ID NO: 929870 - DNA, 15 bp, Homo sapiens
ttacagttttcaaat

SEQ ID NO: 929871 - DNA, 15 bp, Homo sapiens
tttacagttttcaaa

SEQ ID NO: 929872 - DNA, 15 bp, Homo sapiens
ttttacagttttcaa

SEQ ID NO: 929873 - DNA, 15 bp, Homo sapiens
attttacagttttca

SEQ ID NO: 929874 - DNA, 15 bp, Homo sapiens
tattttacagttttc

SEQ ID NO: 929875 - DNA, 15 bp, Homo sapiens
ttattttacagtttt

SEQ ID NO: 929876 - DNA, 15 bp, Homo sapiens
gttattttacagttt

SEQ ID NO: 929877 - DNA, 15 bp, Homo sapiens
tgttattttacagtt

SEQ ID NO: 929878 - DNA, 15 bp, Homo sapiens
atgttattttacagt

SEQ ID NO: 929879 - DNA, 15 bp, Homo sapiens
tatgttattttacag

SEQ ID NO: 929880 - DNA, 15 bp, Homo sapiens
gtatgttattttaca

SEQ ID NO: 929881 - DNA, 15 bp, Homo sapiens
tgtatgttattttac

SEQ ID NO: 929882 - DNA, 15 bp, Homo sapiens
ctgtatgttatttta

SEQ ID NO: 929883 - DNA, 15 bp, Homo sapiens
tctgtatgttatttt

SEQ ID NO: 929884 - DNA, 15 bp, Homo sapiens
atctgtatgttattt

SEQ ID NO: 929885 - DNA, 15 bp, Homo sapiens
tatctgtatgttatt

SEQ ID NO: 929886 - DNA, 15 bp, Homo sapiens
ctatctgtatgttat

SEQ ID NO: 929887 - DNA, 15 bp, Homo sapiens
tctatctgtatgtta

SEQ ID NO: 929888 - DNA, 15 bp, Homo sapiens
ttctatctgtatgtt

SEQ ID NO: 929889 - DNA, 15 bp, Homo sapiens
tttctatctgtatgt

SEQ ID NO: 929890 - DNA, 15 bp, Homo sapiens
ttttctatctgtatg

SEQ ID NO: 929891 - DNA, 15 bp, Homo sapiens
gttttctatctgtat

SEQ ID NO: 929892 - DNA, 15 bp, Homo sapiens
agttttctatctgta

SEQ ID NO: 929893 - DNA, 15 bp, Homo sapiens
aagttttctatctgt

SEQ ID NO: 929894 - DNA, 15 bp, Homo sapiens
aaagttttctatctg

SEQ ID NO: 929895 - DNA, 15 bp, Homo sapiens
aaaagttttctatct

SEQ ID NO: 929896 - DNA, 15 bp, Homo sapiens
caaaagttttctatc

SEQ ID NO: 929897 - DNA, 15 bp, Homo sapiens
tcaaaagttttctat

SEQ ID NO: 929898 - DNA, 15 bp, Homo sapiens
atcaaaagttttcta

SEQ ID NO: 929899 - DNA, 15 bp, Homo sapiens
aatcaaaagttttct

SEQ ID NO: 929900 - DNA, 15 bp, Homo sapiens
taatcaaaagttttc

SEQ ID NO: 929901 - DNA, 15 bp, Homo sapiens
gtaatcaaaagtttt

SEQ ID NO: 929902 - DNA, 15 bp, Homo sapiens
tgtaatcaaaagttt

SEQ ID NO: 929903 - DNA, 15 bp, Homo sapiens
gtgtaatcaaaagtt

SEQ ID NO: 929904 - DNA, 15 bp, Homo sapiens
tgtgtaatcaaaagt

SEQ ID NO: 929905 - DNA, 15 bp, Homo sapiens
gtgtgtaatcaaaag

SEQ ID NO: 929906 - DNA, 15 bp, Homo sapiens
agtgtgtaatcaaaa

SEQ ID NO: 929907 - DNA, 15 bp, Homo sapiens
aagtgtgtaatcaaa

SEQ ID NO: 929908 - DNA, 15 bp, Homo sapiens
taagtgtgtaatcaa

SEQ ID NO: 929909 - DNA, 15 bp, Homo sapiens
ataagtgtgtaatca

SEQ ID NO: 929910 - DNA, 15 bp, Homo sapiens
tataagtgtgtaatc

SEQ ID NO: 929911 - DNA, 15 bp, Homo sapiens
ttataagtgtgtaat

SEQ ID NO: 929912 - DNA, 15 bp, Homo sapiens
cttataagtgtgtaa

SEQ ID NO: 929913 - DNA, 15 bp, Homo sapiens
tcttataagtgtgta

SEQ ID NO: 929914 - DNA, 15 bp, Homo sapiens
ctcttataagtgtgt

SEQ ID NO: 929915 - DNA, 15 bp, Homo sapiens
actcttataagtgtg

SEQ ID NO: 929916 - DNA, 15 bp, Homo sapiens
cactcttataagtgt

SEQ ID NO: 929917 - DNA, 15 bp, Homo sapiens
acactcttataagtg

SEQ ID NO: 929918 - DNA, 15 bp, Homo sapiens
gacactcttataagt

SEQ ID NO: 929919 - DNA, 15 bp, Homo sapiens
agacactcttataag

SEQ ID NO: 929920 - DNA, 15 bp, Homo sapiens
cagacactcttataa

SEQ ID NO: 929921 - DNA, 15 bp, Homo sapiens
acagacactcttata

SEQ ID NO: 929922 - DNA, 15 bp, Homo sapiens
gacagacactcttat

SEQ ID NO: 929923 - DNA, 15 bp, Homo sapiens
tgacagacactctta

SEQ ID NO: 929924 - DNA, 15 bp, Homo sapiens
atgacagacactctt

SEQ ID NO: 929925 - DNA, 15 bp, Homo sapiens
tatgacagacactct

SEQ ID NO: 929926 - DNA, 15 bp, Homo sapiens
atatgacagacactc

SEQ ID NO: 929927 - DNA, 15 bp, Homo sapiens
tatatgacagacact

SEQ ID NO: 929928 - DNA, 15 bp, Homo sapiens
ttatatgacagacac

SEQ ID NO: 929929 - DNA, 15 bp, Homo sapiens
attatatgacagaca

SEQ ID NO: 929930 - DNA, 15 bp, Homo sapiens
tattatatgacagac

SEQ ID NO: 929931 - DNA, 15 bp, Homo sapiens
ctattatatgacaga

SEQ ID NO: 929932 - DNA, 15 bp, Homo sapiens
tctattatatgacag

SEQ ID NO: 929933 - DNA, 15 bp, Homo sapiens
ctctattatatgaca

SEQ ID NO: 929934 - DNA, 15 bp, Homo sapiens
tctctattatatgac

SEQ ID NO: 929935 - DNA, 15 bp, Homo sapiens
atctctattatatga

SEQ ID NO: 929936 - DNA, 15 bp, Homo sapiens
aatctctattatatg

SEQ ID NO: 929937 - DNA, 15 bp, Homo sapiens
gaatctctattatat

SEQ ID NO: 929938 - DNA, 15 bp, Homo sapiens
agaatctctattata

SEQ ID NO: 929939 - DNA, 15 bp, Homo sapiens
tagaatctctattat

SEQ ID NO: 929940 - DNA, 15 bp, Homo sapiens
ttagaatctctatta

SEQ ID NO: 929941 - DNA, 15 bp, Homo sapiens
tttagaatctctatt

SEQ ID NO: 929942 - DNA, 15 bp, Homo sapiens
gtttagaatctctat

SEQ ID NO: 929943 - DNA, 15 bp, Homo sapiens
tgtttagaatctcta

SEQ ID NO: 929944 - DNA, 15 bp, Homo sapiens
atgtttagaatctct

SEQ ID NO: 929945 - DNA, 15 bp, Homo sapiens
aatgtttagaatctc

SEQ ID NO: 929946 - DNA, 15 bp, Homo sapiens
caatgtttagaatct

SEQ ID NO: 929947 - DNA, 15 bp, Homo sapiens
acaatgtttagaatc

SEQ ID NO: 929948 - DNA, 15 bp, Homo sapiens
aacaatgtttagaat

SEQ ID NO: 929949 - DNA, 15 bp, Homo sapiens
gaacaatgtttagaa

SEQ ID NO: 929950 - DNA, 15 bp, Homo sapiens
tgaacaatgtttaga

SEQ ID NO: 929951 - DNA, 15 bp, Homo sapiens
ttgaacaatgtttag

SEQ ID NO: 929952 - DNA, 15 bp, Homo sapiens
gttgaacaatgttta

SEQ ID NO: 929953 - DNA, 15 bp, Homo sapiens
ggttgaacaatgttt

SEQ ID NO: 929954 - DNA, 15 bp, Homo sapiens
tggttgaacaatgtt

SEQ ID NO: 929955 - DNA, 15 bp, Homo sapiens
gtggttgaacaatgt

SEQ ID NO: 929956 - DNA, 15 bp, Homo sapiens
agtggttgaacaatg

SEQ ID NO: 929957 - DNA, 15 bp, Homo sapiens
aagtggttgaacaat

SEQ ID NO: 929958 - DNA, 15 bp, Homo sapiens
aaagtggttgaacaa

SEQ ID NO: 929959 - DNA, 15 bp, Homo sapiens
taaagtggttgaaca

SEQ ID NO: 929960 - DNA, 15 bp, Homo sapiens
ataaagtggttgaac

SEQ ID NO: 929961 - DNA, 15 bp, Homo sapiens
gataaagtggttgaa

SEQ ID NO: 929962 - DNA, 15 bp, Homo sapiens
tgataaagtggttga

SEQ ID NO: 929963 - DNA, 15 bp, Homo sapiens
ctgataaagtggttg

SEQ ID NO: 929964 - DNA, 15 bp, Homo sapiens
tctgataaagtggtt

SEQ ID NO: 929965 - DNA, 15 bp, Homo sapiens
ttctgataaagtggt

SEQ ID NO: 929966 - DNA, 15 bp, Homo sapiens
gttctgataaagtgg

SEQ ID NO: 929967 - DNA, 15 bp, Homo sapiens
cgttctgataaagtg

SEQ ID NO: 929968 - DNA, 15 bp, Homo sapiens
acgttctgataaagt

SEQ ID NO: 929969 - DNA, 15 bp, Homo sapiens
tacgttctgataaag

SEQ ID NO: 929970 - DNA, 15 bp, Homo sapiens
ctacgttctgataaa

SEQ ID NO: 929971 - DNA, 15 bp, Homo sapiens
tctacgttctgataa

SEQ ID NO: 929972 - DNA, 15 bp, Homo sapiens
atctacgttctgata

SEQ ID NO: 929973 - DNA, 15 bp, Homo sapiens
aatctacgttctgat

SEQ ID NO: 929974 - DNA, 15 bp, Homo sapiens
aaatctacgttctga

SEQ ID NO: 929975 - DNA, 15 bp, Homo sapiens
aaaatctacgttctg

SEQ ID NO: 929976 - DNA, 15 bp, Homo sapiens
taaaatctacgttct

SEQ ID NO: 929977 - DNA, 15 bp, Homo sapiens
ttaaaatctacgttc

SEQ ID NO: 929978 - DNA, 15 bp, Homo sapiens
tttaaaatctacgtt

SEQ ID NO: 929979 - DNA, 15 bp, Homo sapiens
gtttaaaatctacgt

SEQ ID NO: 929980 - DNA, 15 bp, Homo sapiens
agtttaaaatctacg

SEQ ID NO: 929981 - DNA, 15 bp, Homo sapiens
gagtttaaaatctac

SEQ ID NO: 929982 - DNA, 15 bp, Homo sapiens
tgagtttaaaatcta

SEQ ID NO: 929983 - DNA, 15 bp, Homo sapiens
ttgagtttaaaatct

SEQ ID NO: 929984 - DNA, 15 bp, Homo sapiens
tttgagtttaaaatc

SEQ ID NO: 929985 - DNA, 15 bp, Homo sapiens
ttttgagtttaaaat

SEQ ID NO: 929986 - DNA, 15 bp, Homo sapiens
attttgagtttaaaa

SEQ ID NO: 929987 - DNA, 15 bp, Homo sapiens
tattttgagtttaaa

SEQ ID NO: 929988 - DNA, 15 bp, Homo sapiens
ctattttgagtttaa

SEQ ID NO: 929989 - DNA, 15 bp, Homo sapiens
cctattttgagttta

SEQ ID NO: 929990 - DNA, 15 bp, Homo sapiens
acctattttgagttt

SEQ ID NO: 929991 - DNA, 15 bp, Homo sapiens
aacctattttgagtt

SEQ ID NO: 929992 - DNA, 15 bp, Homo sapiens
aaacctattttgagt

SEQ ID NO: 929993 - DNA, 15 bp, Homo sapiens
taaacctattttgag

SEQ ID NO: 929994 - DNA, 15 bp, Homo sapiens
ataaacctattttga

SEQ ID NO: 929995 - DNA, 15 bp, Homo sapiens
tataaacctattttg

SEQ ID NO: 929996 - DNA, 15 bp, Homo sapiens
ctataaacctatttt

SEQ ID NO: 929997 - DNA, 15 bp, Homo sapiens
actataaacctattt

SEQ ID NO: 929998 - DNA, 15 bp, Homo sapiens
aactataaacctatt

SEQ ID NO: 929999 - DNA, 15 bp, Homo sapiens
taactataaacctat

SEQ ID NO: 930000 - DNA, 15 bp, Homo sapiens
ctaactataaaccta

SEQ ID NO: 930001 - DNA, 15 bp, Homo sapiens
cctaactataaacct

SEQ ID NO: 930002 - DNA, 15 bp, Homo sapiens
acctaactataaacc

SEQ ID NO: 930003 - DNA, 15 bp, Homo sapiens
tacctaactataaac

SEQ ID NO: 930004 - DNA, 15 bp, Homo sapiens
ctacctaactataaa

SEQ ID NO: 930005 - DNA, 15 bp, Homo sapiens
actacctaactataa

SEQ ID NO: 930006 - DNA, 15 bp, Homo sapiens
aactacctaactata

SEQ ID NO: 930007 - DNA, 15 bp, Homo sapiens
aaactacctaactat

SEQ ID NO: 930008 - DNA, 15 bp, Homo sapiens
gaaactacctaacta

SEQ ID NO: 930009 - DNA, 15 bp, Homo sapiens
agaaactacctaact

SEQ ID NO: 930010 - DNA, 15 bp, Homo sapiens
tagaaactacctaac

SEQ ID NO: 930011 - DNA, 15 bp, Homo sapiens
ttagaaactacctaa

SEQ ID NO: 930012 - DNA, 15 bp, Homo sapiens
attagaaactaccta

SEQ ID NO: 930013 - DNA, 15 bp, Homo sapiens
gattagaaactacct

SEQ ID NO: 930014 - DNA, 15 bp, Homo sapiens
tgattagaaactacc

SEQ ID NO: 930015 - DNA, 15 bp, Homo sapiens
atgattagaaactac

SEQ ID NO: 930016 - DNA, 15 bp, Homo sapiens
aatgattagaaacta

SEQ ID NO: 930017 - DNA, 15 bp, Homo sapiens
taatgattagaaact

SEQ ID NO: 930018 - DNA, 15 bp, Homo sapiens
ataatgattagaaac

SEQ ID NO: 930019 - DNA, 15 bp, Homo sapiens
tataatgattagaaa

SEQ ID NO: 930020 - DNA, 15 bp, Homo sapiens
ttataatgattagaa

SEQ ID NO: 930021 - DNA, 15 bp, Homo sapiens
attataatgattaga

SEQ ID NO: 930022 - DNA, 15 bp, Homo sapiens
tattataatgattag

SEQ ID NO: 930023 - DNA, 15 bp, Homo sapiens
atattataatgatta

SEQ ID NO: 930024 - DNA, 15 bp, Homo sapiens
aatattataatgatt

SEQ ID NO: 930025 - DNA, 15 bp, Homo sapiens
taatattataatgat

SEQ ID NO: 930026 - DNA, 15 bp, Homo sapiens
ataatattataatga

SEQ ID NO: 930027 - DNA, 15 bp, Homo sapiens
gataatattataatg

SEQ ID NO: 930028 - DNA, 15 bp, Homo sapiens
agataatattataat

SEQ ID NO: 930029 - DNA, 15 bp, Homo sapiens
gagataatattataa

SEQ ID NO: 930030 - DNA, 15 bp, Homo sapiens
agagataatattata

SEQ ID NO: 930031 - DNA, 15 bp, Homo sapiens
tagagataatattat

SEQ ID NO: 930032 - DNA, 15 bp, Homo sapiens
atagagataatatta

SEQ ID NO: 930033 - DNA, 15 bp, Homo sapiens
catagagataatatt

SEQ ID NO: 930034 - DNA, 15 bp, Homo sapiens
ccatagagataatat

SEQ ID NO: 930035 - DNA, 15 bp, Homo sapiens
cccatagagataata

SEQ ID NO: 930036 - DNA, 15 bp, Homo sapiens
gcccatagagataat

SEQ ID NO: 930037 - DNA, 15 bp, Homo sapiens
ggcccatagagataa

SEQ ID NO: 930038 - DNA, 15 bp, Homo sapiens
aggcccatagagata

SEQ ID NO: 930039 - DNA, 15 bp, Homo sapiens
taggcccatagagat

SEQ ID NO: 930040 - DNA, 15 bp, Homo sapiens
ttaggcccatagaga

SEQ ID NO: 930041 - DNA, 15 bp, Homo sapiens
tttaggcccatagag

SEQ ID NO: 930042 - DNA, 15 bp, Homo sapiens
atttaggcccataga

SEQ ID NO: 930043 - DNA, 15 bp, Homo sapiens
aatttaggcccatag

SEQ ID NO: 930044 - DNA, 15 bp, Homo sapiens
aaatttaggcccata

SEQ ID NO: 930045 - DNA, 15 bp, Homo sapiens
aaaatttaggcccat

SEQ ID NO: 930046 - DNA, 15 bp, Homo sapiens
taaaatttaggccca

SEQ ID NO: 930047 - DNA, 15 bp, Homo sapiens
ataaaatttaggccc

SEQ ID NO: 930048 - DNA, 15 bp, Homo sapiens
aataaaatttaggcc

SEQ ID NO: 930049 - DNA, 15 bp, Homo sapiens
taataaaatttaggc

SEQ ID NO: 930050 - DNA, 15 bp, Homo sapiens
ataataaaatttagg

SEQ ID NO: 930051 - DNA, 15 bp, Homo sapiens
gataataaaatttag

SEQ ID NO: 930052 - DNA, 15 bp, Homo sapiens
agataataaaattta

SEQ ID NO: 930053 - DNA, 15 bp, Homo sapiens
cagataataaaattt

SEQ ID NO: 930054 - DNA, 15 bp, Homo sapiens
tcagataataaaatt

SEQ ID NO: 930055 - DNA, 15 bp, Homo sapiens
ttcagataataaaat

SEQ ID NO: 930056 - DNA, 15 bp, Homo sapiens
tttcagataataaaa

SEQ ID NO: 930057 - DNA, 15 bp, Homo sapiens
ttttcagataataaa

SEQ ID NO: 930058 - DNA, 15 bp, Homo sapiens
tttttcagataataa

SEQ ID NO: 930059 - DNA, 15 bp, Homo sapiens
ttttttcagataata

SEQ ID NO: 930060 - DNA, 15 bp, Homo sapiens
gttttttcagataat

SEQ ID NO: 930061 - DNA, 15 bp, Homo sapiens
tgttttttcagataa

SEQ ID NO: 930062 - DNA, 15 bp, Homo sapiens
atgttttttcagata

SEQ ID NO: 930063 - DNA, 15 bp, Homo sapiens
catgttttttcagat

SEQ ID NO: 930064 - DNA, 15 bp, Homo sapiens
tcatgttttttcaga

SEQ ID NO: 930065 - DNA, 15 bp, Homo sapiens
ctcatgttttttcag

SEQ ID NO: 930066 - DNA, 15 bp, Homo sapiens
tctcatgttttttca

SEQ ID NO: 930067 - DNA, 15 bp, Homo sapiens
ttctcatgttttttc

SEQ ID NO: 930068 - DNA, 15 bp, Homo sapiens
tttctcatgtttttt

SEQ ID NO: 930069 - DNA, 15 bp, Homo sapiens
ttttctcatgttttt

SEQ ID NO: 930070 - DNA, 15 bp, Homo sapiens
attttctcatgtttt

SEQ ID NO: 930071 - DNA, 15 bp, Homo sapiens
aattttctcatgttt

SEQ ID NO: 930072 - DNA, 15 bp, Homo sapiens
caattttctcatgtt

SEQ ID NO: 930073 - DNA, 15 bp, Homo sapiens
tcaattttctcatgt

SEQ ID NO: 930074 - DNA, 15 bp, Homo sapiens
ttcaattttctcatg

SEQ ID NO: 930075 - DNA, 15 bp, Homo sapiens
gttcaattttctcat

SEQ ID NO: 930076 - DNA, 15 bp, Homo sapiens
agttcaattttctca

SEQ ID NO: 930077 - DNA, 15 bp, Homo sapiens
cagttcaattttctc

SEQ ID NO: 930078 - DNA, 15 bp, Homo sapiens
gcagttcaattttct

SEQ ID NO: 930079 - DNA, 15 bp, Homo sapiens
agcagttcaattttc

SEQ ID NO: 930080 - DNA, 15 bp, Homo sapiens
aagcagttcaatttt

SEQ ID NO: 930081 - DNA, 15 bp, Homo sapiens
caagcagttcaattt

SEQ ID NO: 930082 - DNA, 15 bp, Homo sapiens
tcaagcagttcaatt

SEQ ID NO: 930083 - DNA, 15 bp, Homo sapiens
gtcaagcagttcaat

SEQ ID NO: 930084 - DNA, 15 bp, Homo sapiens
agtcaagcagttcaa

SEQ ID NO: 930085 - DNA, 15 bp, Homo sapiens
aagtcaagcagttca

SEQ ID NO: 930086 - DNA, 15 bp, Homo sapiens
taagtcaagcagttc

SEQ ID NO: 930087 - DNA, 15 bp, Homo sapiens
ataagtcaagcagtt

SEQ ID NO: 930088 - DNA, 15 bp, Homo sapiens
tataagtcaagcagt

SEQ ID NO: 930089 - DNA, 15 bp, Homo sapiens
ttataagtcaagcag

SEQ ID NO: 930090 - DNA, 15 bp, Homo sapiens
attataagtcaagca

SEQ ID NO: 930091 - DNA, 15 bp, Homo sapiens
aattataagtcaagc

SEQ ID NO: 930092 - DNA, 15 bp, Homo sapiens
gaattataagtcaag

SEQ ID NO: 930093 - DNA, 15 bp, Homo sapiens
ggaattataagtcaa

SEQ ID NO: 930094 - DNA, 15 bp, Homo sapiens
tggaattataagtca

SEQ ID NO: 930095 - DNA, 15 bp, Homo sapiens
atggaattataagtc

SEQ ID NO: 930096 - DNA, 15 bp, Homo sapiens
aatggaattataagt

SEQ ID NO: 930097 - DNA, 15 bp, Homo sapiens
aaatggaattataag

SEQ ID NO: 930098 - DNA, 15 bp, Homo sapiens
gaaatggaattataa

SEQ ID NO: 930099 - DNA, 15 bp, Homo sapiens
tgaaatggaattata

SEQ ID NO: 930100 - DNA, 15 bp, Homo sapiens
ctgaaatggaattat

SEQ ID NO: 930101 - DNA, 15 bp, Homo sapiens
gctgaaatggaatta

SEQ ID NO: 930102 - DNA, 15 bp, Homo sapiens
agctgaaatggaatt

SEQ ID NO: 930103 - DNA, 15 bp, Homo sapiens
gagctgaaatggaat

SEQ ID NO: 930104 - DNA, 15 bp, Homo sapiens
agagctgaaatggaa

SEQ ID NO: 930105 - DNA, 15 bp, Homo sapiens
gagagctgaaatgga

SEQ ID NO: 930106 - DNA, 15 bp, Homo sapiens
tgagagctgaaatgg

SEQ ID NO: 930107 - DNA, 15 bp, Homo sapiens
ttgagagctgaaatg

SEQ ID NO: 930108 - DNA, 15 bp, Homo sapiens
cttgagagctgaaat

SEQ ID NO: 930109 - DNA, 15 bp, Homo sapiens
gcttgagagctgaaa

SEQ ID NO: 930110 - DNA, 15 bp, Homo sapiens
ggcttgagagctgaa

SEQ ID NO: 930111 - DNA, 15 bp, Homo sapiens
gggcttgagagctga

SEQ ID NO: 930112 - DNA, 15 bp, Homo sapiens
ggggcttgagagctg

SEQ ID NO: 930113 - DNA, 15 bp, Homo sapiens
aggggcttgagagct

SEQ ID NO: 930114 - DNA, 15 bp, Homo sapiens
caggggcttgagagc

SEQ ID NO: 930115 - DNA, 15 bp, Homo sapiens
gcaggggcttgagag

SEQ ID NO: 930116 - DNA, 15 bp, Homo sapiens
agcaggggcttgaga

SEQ ID NO: 930117 - DNA, 15 bp, Homo sapiens
tagcaggggcttgag

SEQ ID NO: 930118 - DNA, 15 bp, Homo sapiens
ctagcaggggcttga

SEQ ID NO: 930119 - DNA, 15 bp, Homo sapiens
tctagcaggggcttg

SEQ ID NO: 930120 - DNA, 15 bp, Homo sapiens
ctctagcaggggctt

SEQ ID NO: 930121 - DNA, 15 bp, Homo sapiens
actctagcaggggct

SEQ ID NO: 930122 - DNA, 15 bp, Homo sapiens
gactctagcaggggc

SEQ ID NO: 930123 - DNA, 15 bp, Homo sapiens
agactctagcagggg

SEQ ID NO: 930124 - DNA, 15 bp, Homo sapiens
aagactctagcaggg

SEQ ID NO: 930125 - DNA, 15 bp, Homo sapiens
aaagactctagcagg

SEQ ID NO: 930126 - DNA, 15 bp, Homo sapiens
caaagactctagcag

SEQ ID NO: 930127 - DNA, 15 bp, Homo sapiens
tcaaagactctagca

SEQ ID NO: 930128 - DNA, 15 bp, Homo sapiens
atcaaagactctagc

SEQ ID NO: 930129 - DNA, 15 bp, Homo sapiens
aatcaaagactctag

SEQ ID NO: 930130 - DNA, 15 bp, Homo sapiens
gaatcaaagactcta

SEQ ID NO: 930131 - DNA, 15 bp, Homo sapiens
agaatcaaagactct

SEQ ID NO: 930132 - DNA, 15 bp, Homo sapiens
aagaatcaaagactc

SEQ ID NO: 930133 - DNA, 15 bp, Homo sapiens
aaagaatcaaagact

SEQ ID NO: 930134 - DNA, 15 bp, Homo sapiens
taaagaatcaaagac

SEQ ID NO: 930135 - DNA, 15 bp, Homo sapiens
gtaaagaatcaaaga

SEQ ID NO: 930136 - DNA, 15 bp, Homo sapiens
agtaaagaatcaaag

SEQ ID NO: 930137 - DNA, 15 bp, Homo sapiens
gagtaaagaatcaaa

SEQ ID NO: 930138 - DNA, 15 bp, Homo sapiens
tgagtaaagaatcaa

SEQ ID NO: 930139 - DNA, 15 bp, Homo sapiens
gtgagtaaagaatca

SEQ ID NO: 930140 - DNA, 15 bp, Homo sapiens
agtgagtaaagaatc

SEQ ID NO: 930141 - DNA, 15 bp, Homo sapiens
aagtgagtaaagaat

SEQ ID NO: 930142 - DNA, 15 bp, Homo sapiens
taagtgagtaaagaa

SEQ ID NO: 930143 - DNA, 15 bp, Homo sapiens
ataagtgagtaaaga

SEQ ID NO: 930144 - DNA, 15 bp, Homo sapiens
aataagtgagtaaag

SEQ ID NO: 930145 - DNA, 15 bp, Homo sapiens
gaataagtgagtaaa

SEQ ID NO: 930146 - DNA, 15 bp, Homo sapiens
tgaataagtgagtaa

SEQ ID NO: 930147 - DNA, 15 bp, Homo sapiens
ttgaataagtgagta

SEQ ID NO: 930148 - DNA, 15 bp, Homo sapiens
tttgaataagtgagt

SEQ ID NO: 930149 - DNA, 15 bp, Homo sapiens
atttgaataagtgag

SEQ ID NO: 930150 - DNA, 15 bp, Homo sapiens
catttgaataagtga

SEQ ID NO: 930151 - DNA, 15 bp, Homo sapiens
gcatttgaataagtg

SEQ ID NO: 930152 - DNA, 15 bp, Homo sapiens
ggcatttgaataagt

SEQ ID NO: 930153 - DNA, 15 bp, Homo sapiens
aggcatttgaataag

SEQ ID NO: 930154 - DNA, 15 bp, Homo sapiens
gaggcatttgaataa

SEQ ID NO: 930155 - DNA, 15 bp, Homo sapiens
agaggcatttgaata

SEQ ID NO: 930156 - DNA, 15 bp, Homo sapiens
cagaggcatttgaat

SEQ ID NO: 930157 - DNA, 15 bp, Homo sapiens
tcagaggcatttgaa

SEQ ID NO: 930158 - DNA, 15 bp, Homo sapiens
gtcagaggcatttga

SEQ ID NO: 930159 - DNA, 15 bp, Homo sapiens
tgtcagaggcatttg

SEQ ID NO: 930160 - DNA, 15 bp, Homo sapiens
ctgtcagaggcattt

SEQ ID NO: 930161 - DNA, 15 bp, Homo sapiens
tctgtcagaggcatt

SEQ ID NO: 930162 - DNA, 15 bp, Homo sapiens
ttctgtcagaggcat

SEQ ID NO: 930163 - DNA, 15 bp, Homo sapiens
attctgtcagaggca

SEQ ID NO: 930164 - DNA, 15 bp, Homo sapiens
aattctgtcagaggc

SEQ ID NO: 930165 - DNA, 15 bp, Homo sapiens
taattctgtcagagg

SEQ ID NO: 930166 - DNA, 15 bp, Homo sapiens
ttaattctgtcagag

SEQ ID NO: 930167 - DNA, 15 bp, Homo sapiens
gttaattctgtcaga

SEQ ID NO: 930168 - DNA, 15 bp, Homo sapiens
tgttaattctgtcag

SEQ ID NO: 930169 - DNA, 15 bp, Homo sapiens
gtgttaattctgtca

SEQ ID NO: 930170 - DNA, 15 bp, Homo sapiens
agtgttaattctgtc

SEQ ID NO: 930171 - DNA, 15 bp, Homo sapiens
tagtgttaattctgt

SEQ ID NO: 930172 - DNA, 15 bp, Homo sapiens
atagtgttaattctg

SEQ ID NO: 930173 - DNA, 15 bp, Homo sapiens
aatagtgttaattct

SEQ ID NO: 930174 - DNA, 15 bp, Homo sapiens
aaatagtgttaattc

SEQ ID NO: 930175 - DNA, 15 bp, Homo sapiens
aaaatagtgttaatt

SEQ ID NO: 930176 - DNA, 15 bp, Homo sapiens
aaaaatagtgttaat

SEQ ID NO: 930177 - DNA, 15 bp, Homo sapiens
caaaaatagtgttaa

SEQ ID NO: 930178 - DNA, 15 bp, Homo sapiens
gcaaaaatagtgtta

SEQ ID NO: 930179 - DNA, 15 bp, Homo sapiens
agcaaaaatagtgtt

SEQ ID NO: 930180 - DNA, 15 bp, Homo sapiens
aagcaaaaatagtgt

SEQ ID NO: 930181 - DNA, 15 bp, Homo sapiens
aaagcaaaaatagtg

SEQ ID NO: 930182 - DNA, 15 bp, Homo sapiens
caaagcaaaaatagt

SEQ ID NO: 930183 - DNA, 15 bp, Homo sapiens
gcaaagcaaaaatag

SEQ ID NO: 930184 - DNA, 15 bp, Homo sapiens
agcaaagcaaaaata

SEQ ID NO: 930185 - DNA, 15 bp, Homo sapiens
tagcaaagcaaaaat

SEQ ID NO: 930186 - DNA, 15 bp, Homo sapiens
ttagcaaagcaaaaa

SEQ ID NO: 930187 - DNA, 15 bp, Homo sapiens
cttagcaaagcaaaa

SEQ ID NO: 930188 - DNA, 15 bp, Homo sapiens
ccttagcaaagcaaa

SEQ ID NO: 930189 - DNA, 15 bp, Homo sapiens
tccttagcaaagcaa

SEQ ID NO: 930190 - DNA, 15 bp, Homo sapiens
ctccttagcaaagca

SEQ ID NO: 930191 - DNA, 15 bp, Homo sapiens
gctccttagcaaagc

SEQ ID NO: 930192 - DNA, 15 bp, Homo sapiens
agctccttagcaaag

SEQ ID NO: 930193 - DNA, 15 bp, Homo sapiens
cagctccttagcaaa

SEQ ID NO: 930194 - DNA, 15 bp, Homo sapiens
gcagctccttagcaa

SEQ ID NO: 930195 - DNA, 15 bp, Homo sapiens
ggcagctccttagca

SEQ ID NO: 930196 - DNA, 15 bp, Homo sapiens
tggcagctccttagc

SEQ ID NO: 930197 - DNA, 15 bp, Homo sapiens
gtggcagctccttag

SEQ ID NO: 930198 - DNA, 15 bp, Homo sapiens
agtggcagctcctta

SEQ ID NO: 930199 - DNA, 15 bp, Homo sapiens
cagtggcagctcctt

SEQ ID NO: 930200 - DNA, 15 bp, Homo sapiens
acagtggcagctcct

SEQ ID NO: 930201 - DNA, 15 bp, Homo sapiens
aacagtggcagctcc

SEQ ID NO: 930202 - DNA, 15 bp, Homo sapiens
taacagtggcagctc

SEQ ID NO: 930203 - DNA, 15 bp, Homo sapiens
ttaacagtggcagct

SEQ ID NO: 930204 - DNA, 15 bp, Homo sapiens
cttaacagtggcagc

SEQ ID NO: 930205 - DNA, 15 bp, Homo sapiens
tcttaacagtggcag

SEQ ID NO: 930206 - DNA, 15 bp, Homo sapiens
ttcttaacagtggca

SEQ ID NO: 930207 - DNA, 15 bp, Homo sapiens
tttcttaacagtggc

SEQ ID NO: 930208 - DNA, 15 bp, Homo sapiens
atttcttaacagtgg

SEQ ID NO: 930209 - DNA, 15 bp, Homo sapiens
aatttcttaacagtg

SEQ ID NO: 930210 - DNA, 15 bp, Homo sapiens
taatttcttaacagt

SEQ ID NO: 930211 - DNA, 15 bp, Homo sapiens
gtaatttcttaacag

SEQ ID NO: 930212 - DNA, 15 bp, Homo sapiens
agtaatttcttaaca

SEQ ID NO: 930213 - DNA, 15 bp, Homo sapiens
gagtaatttcttaac

SEQ ID NO: 930214 - DNA, 15 bp, Homo sapiens
agagtaatttcttaa

SEQ ID NO: 930215 - DNA, 15 bp, Homo sapiens
gagagtaatttctta

SEQ ID NO: 930216 - DNA, 15 bp, Homo sapiens
agagagtaatttctt

SEQ ID NO: 930217 - DNA, 15 bp, Homo sapiens
tagagagtaatttct

SEQ ID NO: 930218 - DNA, 15 bp, Homo sapiens
ttagagagtaatttc

SEQ ID NO: 930219 - DNA, 15 bp, Homo sapiens
tttagagagtaattt

SEQ ID NO: 930220 - DNA, 15 bp, Homo sapiens
ttttagagagtaatt

SEQ ID NO: 930221 - DNA, 15 bp, Homo sapiens
cttttagagagtaat

SEQ ID NO: 930222 - DNA, 15 bp, Homo sapiens
tcttttagagagtaa

SEQ ID NO: 930223 - DNA, 15 bp, Homo sapiens
ttcttttagagagta

SEQ ID NO: 930224 - DNA, 15 bp, Homo sapiens
tttcttttagagagt

SEQ ID NO: 930225 - DNA, 15 bp, Homo sapiens
ctttcttttagagag

SEQ ID NO: 930226 - DNA, 15 bp, Homo sapiens
tctttcttttagaga

SEQ ID NO: 930227 - DNA, 15 bp, Homo sapiens
ttctttcttttagag

SEQ ID NO: 930228 - DNA, 15 bp, Homo sapiens
tttctttcttttaga

SEQ ID NO: 930229 - DNA, 15 bp, Homo sapiens
ttttctttcttttag

SEQ ID NO: 930230 - DNA, 15 bp, Homo sapiens
attttctttctttta

SEQ ID NO: 930231 - DNA, 15 bp, Homo sapiens
aattttctttctttt

SEQ ID NO: 930232 - DNA, 15 bp, Homo sapiens
caattttctttcttt

SEQ ID NO: 930233 - DNA, 15 bp, Homo sapiens
ccaattttctttctt

SEQ ID NO: 930234 - DNA, 15 bp, Homo sapiens
gccaattttctttct

SEQ ID NO: 930235 - DNA, 15 bp, Homo sapiens
tgccaattttctttc

SEQ ID NO: 930236 - DNA, 15 bp, Homo sapiens
ttgccaattttcttt

SEQ ID NO: 930237 - DNA, 15 bp, Homo sapiens
gttgccaattttctt

SEQ ID NO: 930238 - DNA, 15 bp, Homo sapiens
tgttgccaattttct

SEQ ID NO: 930239 - DNA, 15 bp, Homo sapiens
ctgttgccaattttc

SEQ ID NO: 930240 - DNA, 15 bp, Homo sapiens
gctgttgccaatttt

SEQ ID NO: 930241 - DNA, 15 bp, Homo sapiens
tgctgttgccaattt

SEQ ID NO: 930242 - DNA, 15 bp, Homo sapiens
atgctgttgccaatt

SEQ ID NO: 930243 - DNA, 15 bp, Homo sapiens
tatgctgttgccaat

SEQ ID NO: 930244 - DNA, 15 bp, Homo sapiens
atatgctgttgccaa

SEQ ID NO: 930245 - DNA, 15 bp, Homo sapiens
catatgctgttgcca

SEQ ID NO: 930246 - DNA, 15 bp, Homo sapiens
acatatgctgttgcc

SEQ ID NO: 930247 - DNA, 15 bp, Homo sapiens
cacatatgctgttgc

SEQ ID NO: 930248 - DNA, 15 bp, Homo sapiens
acacatatgctgttg

SEQ ID NO: 930249 - DNA, 15 bp, Homo sapiens
tacacatatgctgtt

SEQ ID NO: 930250 - DNA, 15 bp, Homo sapiens
atacacatatgctgt

SEQ ID NO: 930251 - DNA, 15 bp, Homo sapiens
aatacacatatgctg

SEQ ID NO: 930252 - DNA, 15 bp, Homo sapiens
aaatacacatatgct

SEQ ID NO: 930253 - DNA, 15 bp, Homo sapiens
aaaatacacatatgc

SEQ ID NO: 930254 - DNA, 15 bp, Homo sapiens
gaaaatacacatatg

SEQ ID NO: 930255 - DNA, 15 bp, Homo sapiens
tgaaaatacacatat

SEQ ID NO: 930256 - DNA, 15 bp, Homo sapiens
ctgaaaatacacata

SEQ ID NO: 930257 - DNA, 15 bp, Homo sapiens
actgaaaatacacat

SEQ ID NO: 930258 - DNA, 15 bp, Homo sapiens
gactgaaaatacaca

SEQ ID NO: 930259 - DNA, 15 bp, Homo sapiens
agactgaaaatacac

SEQ ID NO: 930260 - DNA, 15 bp, Homo sapiens
gagactgaaaataca

SEQ ID NO: 930261 - DNA, 15 bp, Homo sapiens
agagactgaaaatac

SEQ ID NO: 930262 - DNA, 15 bp, Homo sapiens
aagagactgaaaata

SEQ ID NO: 930263 - DNA, 15 bp, Homo sapiens
aaagagactgaaaat

SEQ ID NO: 930264 - DNA, 15 bp, Homo sapiens
aaaagagactgaaaa

SEQ ID NO: 930265 - DNA, 15 bp, Homo sapiens
gaaaagagactgaaa

SEQ ID NO: 930266 - DNA, 15 bp, Homo sapiens
ggaaaagagactgaa

SEQ ID NO: 930267 - DNA, 15 bp, Homo sapiens
aggaaaagagactga

SEQ ID NO: 930268 - DNA, 15 bp, Homo sapiens
gaggaaaagagactg

SEQ ID NO: 930269 - DNA, 15 bp, Homo sapiens
tgaggaaaagagact

SEQ ID NO: 930270 - DNA, 15 bp, Homo sapiens
gtgaggaaaagagac

SEQ ID NO: 930271 - DNA, 15 bp, Homo sapiens
agtgaggaaaagaga

SEQ ID NO: 930272 - DNA, 15 bp, Homo sapiens
gagtgaggaaaagag

SEQ ID NO: 930273 - DNA, 15 bp, Homo sapiens
agagtgaggaaaaga

SEQ ID NO: 930274 - DNA, 15 bp, Homo sapiens
tagagtgaggaaaag

SEQ ID NO: 930275 - DNA, 15 bp, Homo sapiens
atagagtgaggaaaa

SEQ ID NO: 930276 - DNA, 15 bp, Homo sapiens
aatagagtgaggaaa

SEQ ID NO: 930277 - DNA, 15 bp, Homo sapiens
taatagagtgaggaa

SEQ ID NO: 930278 - DNA, 15 bp, Homo sapiens
ttaatagagtgagga

SEQ ID NO: 930279 - DNA, 15 bp, Homo sapiens
tttaatagagtgagg

SEQ ID NO: 930280 - DNA, 15 bp, Homo sapiens
atttaatagagtgag

SEQ ID NO: 930281 - DNA, 15 bp, Homo sapiens
aatttaatagagtga

SEQ ID NO: 930282 - DNA, 15 bp, Homo sapiens
aaatttaatagagtg

SEQ ID NO: 930283 - DNA, 15 bp, Homo sapiens
aaaatttaatagagt

SEQ ID NO: 930284 - DNA, 15 bp, Homo sapiens
caaaatttaatagag

SEQ ID NO: 930285 - DNA, 15 bp, Homo sapiens
acaaaatttaataga

SEQ ID NO: 930286 - DNA, 15 bp, Homo sapiens
tacaaaatttaatag

SEQ ID NO: 930287 - DNA, 15 bp, Homo sapiens
gtacaaaatttaata

SEQ ID NO: 930288 - DNA, 15 bp, Homo sapiens
tgtacaaaatttaat

SEQ ID NO: 930289 - DNA, 15 bp, Homo sapiens
ttgtacaaaatttaa

SEQ ID NO: 930290 - DNA, 15 bp, Homo sapiens
cttgtacaaaattta

SEQ ID NO: 930291 - DNA, 15 bp, Homo sapiens
tcttgtacaaaattt

SEQ ID NO: 930292 - DNA, 15 bp, Homo sapiens
ctcttgtacaaaatt

SEQ ID NO: 930293 - DNA, 15 bp, Homo sapiens
tctcttgtacaaaat

SEQ ID NO: 930294 - DNA, 15 bp, Homo sapiens
atctcttgtacaaaa

SEQ ID NO: 930295 - DNA, 15 bp, Homo sapiens
catctcttgtacaaa

SEQ ID NO: 930296 - DNA, 15 bp, Homo sapiens
acatctcttgtacaa

SEQ ID NO: 930297 - DNA, 15 bp, Homo sapiens
aacatctcttgtaca

SEQ ID NO: 930298 - DNA, 15 bp, Homo sapiens
taacatctcttgtac

SEQ ID NO: 930299 - DNA, 15 bp, Homo sapiens
ataacatctcttgta

SEQ ID NO: 930300 - DNA, 15 bp, Homo sapiens
aataacatctcttgt

SEQ ID NO: 930301 - DNA, 15 bp, Homo sapiens
aaataacatctcttg

SEQ ID NO: 930302 - DNA, 15 bp, Homo sapiens
aaaataacatctctt

SEQ ID NO: 930303 - DNA, 15 bp, Homo sapiens
aaaaataacatctct

SEQ ID NO: 930304 - DNA, 15 bp, Homo sapiens
caaaaataacatctc

SEQ ID NO: 930305 - DNA, 15 bp, Homo sapiens
ccaaaaataacatct

SEQ ID NO: 930306 - DNA, 15 bp, Homo sapiens
accaaaaataacatc

SEQ ID NO: 930307 - DNA, 15 bp, Homo sapiens
gaccaaaaataacat

SEQ ID NO: 930308 - DNA, 15 bp, Homo sapiens
agaccaaaaataaca

SEQ ID NO: 930309 - DNA, 15 bp, Homo sapiens
tagaccaaaaataac

SEQ ID NO: 930310 - DNA, 15 bp, Homo sapiens
ctagaccaaaaataa

SEQ ID NO: 930311 - DNA, 15 bp, Homo sapiens
actagaccaaaaata

SEQ ID NO: 930312 - DNA, 15 bp, Homo sapiens
tactagaccaaaaat

SEQ ID NO: 930313 - DNA, 15 bp, Homo sapiens
ttactagaccaaaaa

SEQ ID NO: 930314 - DNA, 15 bp, Homo sapiens
tttactagaccaaaa

SEQ ID NO: 930315 - DNA, 15 bp, Homo sapiens
atttactagaccaaa

SEQ ID NO: 930316 - DNA, 15 bp, Homo sapiens
aatttactagaccaa

SEQ ID NO: 930317 - DNA, 15 bp, Homo sapiens
aaatttactagacca

SEQ ID NO: 930318 - DNA, 15 bp, Homo sapiens
gaaatttactagacc

SEQ ID NO: 930319 - DNA, 15 bp, Homo sapiens
agaaatttactagac

SEQ ID NO: 930320 - DNA, 15 bp, Homo sapiens
cagaaatttactaga

SEQ ID NO: 930321 - DNA, 15 bp, Homo sapiens
acagaaatttactag

SEQ ID NO: 930322 - DNA, 15 bp, Homo sapiens
gacagaaatttacta

SEQ ID NO: 930323 - DNA, 15 bp, Homo sapiens
tgacagaaatttact

SEQ ID NO: 930324 - DNA, 15 bp, Homo sapiens
atgacagaaatttac

SEQ ID NO: 930325 - DNA, 15 bp, Homo sapiens
catgacagaaattta

SEQ ID NO: 930326 - DNA, 15 bp, Homo sapiens
acatgacagaaattt

SEQ ID NO: 930327 - DNA, 15 bp, Homo sapiens
aacatgacagaaatt

SEQ ID NO: 930328 - DNA, 15 bp, Homo sapiens
aaacatgacagaaat

SEQ ID NO: 930329 - DNA, 15 bp, Homo sapiens
aaaacatgacagaaa

SEQ ID NO: 930330 - DNA, 15 bp, Homo sapiens
caaaacatgacagaa

SEQ ID NO: 930331 - DNA, 15 bp, Homo sapiens
ccaaaacatgacaga

SEQ ID NO: 930332 - DNA, 15 bp, Homo sapiens
tccaaaacatgacag

SEQ ID NO: 930333 - DNA, 15 bp, Homo sapiens
ctccaaaacatgaca

SEQ ID NO: 930334 - DNA, 15 bp, Homo sapiens
actccaaaacatgac

SEQ ID NO: 930335 - DNA, 15 bp, Homo sapiens
tactccaaaacatga

SEQ ID NO: 930336 - DNA, 15 bp, Homo sapiens
atactccaaaacatg

SEQ ID NO: 930337 - DNA, 15 bp, Homo sapiens
tatactccaaaacat

SEQ ID NO: 930338 - DNA, 15 bp, Homo sapiens
ttatactccaaaaca

SEQ ID NO: 930339 - DNA, 15 bp, Homo sapiens
tttatactccaaaac

SEQ ID NO: 930340 - DNA, 15 bp, Homo sapiens
ttttatactccaaaa

SEQ ID NO: 930341 - DNA, 15 bp, Homo sapiens
attttatactccaaa

SEQ ID NO: 930342 - DNA, 15 bp, Homo sapiens
aattttatactccaa

SEQ ID NO: 930343 - DNA, 15 bp, Homo sapiens
taattttatactcca

SEQ ID NO: 930344 - DNA, 15 bp, Homo sapiens
gtaattttatactcc

SEQ ID NO: 930345 - DNA, 15 bp, Homo sapiens
agtaattttatactc

SEQ ID NO: 930346 - DNA, 15 bp, Homo sapiens
aagtaattttatact

SEQ ID NO: 930347 - DNA, 15 bp, Homo sapiens
caagtaattttatac

SEQ ID NO: 930348 - DNA, 15 bp, Homo sapiens
acaagtaattttata

SEQ ID NO: 930349 - DNA, 15 bp, Homo sapiens
cacaagtaattttat

SEQ ID NO: 930350 - DNA, 15 bp, Homo sapiens
gcacaagtaatttta

SEQ ID NO: 930351 - DNA, 15 bp, Homo sapiens
agcacaagtaatttt

SEQ ID NO: 930352 - DNA, 15 bp, Homo sapiens
aagcacaagtaattt

SEQ ID NO: 930353 - DNA, 15 bp, Homo sapiens
aaagcacaagtaatt

SEQ ID NO: 930354 - DNA, 15 bp, Homo sapiens
aaaagcacaagtaat

SEQ ID NO: 930355 - DNA, 15 bp, Homo sapiens
caaaagcacaagtaa

SEQ ID NO: 930356 - DNA, 15 bp, Homo sapiens
gcaaaagcacaagta

SEQ ID NO: 930357 - DNA, 15 bp, Homo sapiens
tgcaaaagcacaagt

SEQ ID NO: 930358 - DNA, 15 bp, Homo sapiens
atgcaaaagcacaag

SEQ ID NO: 930359 - DNA, 15 bp, Homo sapiens
gatgcaaaagcacaa

SEQ ID NO: 930360 - DNA, 15 bp, Homo sapiens
agatgcaaaagcaca

SEQ ID NO: 930361 - DNA, 15 bp, Homo sapiens
tagatgcaaaagcac

SEQ ID NO: 930362 - DNA, 15 bp, Homo sapiens
ttagatgcaaaagca

SEQ ID NO: 930363 - DNA, 15 bp, Homo sapiens
attagatgcaaaagc

SEQ ID NO: 930364 - DNA, 15 bp, Homo sapiens
aattagatgcaaaag

SEQ ID NO: 930365 - DNA, 15 bp, Homo sapiens
aaattagatgcaaaa

SEQ ID NO: 930366 - DNA, 15 bp, Homo sapiens
caaattagatgcaaa

SEQ ID NO: 930367 - DNA, 15 bp, Homo sapiens
acaaattagatgcaa

SEQ ID NO: 930368 - DNA, 15 bp, Homo sapiens
cacaaattagatgca

SEQ ID NO: 930369 - DNA, 15 bp, Homo sapiens
ccacaaattagatgc

SEQ ID NO: 930370 - DNA, 15 bp, Homo sapiens
cccacaaattagatg

SEQ ID NO: 930371 - DNA, 15 bp, Homo sapiens
acccacaaattagat

SEQ ID NO: 930372 - DNA, 15 bp, Homo sapiens
cacccacaaattaga

SEQ ID NO: 930373 - DNA, 15 bp, Homo sapiens
acacccacaaattag

SEQ ID NO: 930374 - DNA, 15 bp, Homo sapiens
tacacccacaaatta

SEQ ID NO: 930375 - DNA, 15 bp, Homo sapiens
ctacacccacaaatt

SEQ ID NO: 930376 - DNA, 15 bp, Homo sapiens
tctacacccacaaat

SEQ ID NO: 930377 - DNA, 15 bp, Homo sapiens
ttctacacccacaaa

SEQ ID NO: 930378 - DNA, 15 bp, Homo sapiens
tttctacacccacaa

SEQ ID NO: 930379 - DNA, 15 bp, Homo sapiens
ttttctacacccaca

SEQ ID NO: 930380 - DNA, 15 bp, Homo sapiens
attttctacacccac

SEQ ID NO: 930381 - DNA, 15 bp, Homo sapiens
gattttctacaccca

SEQ ID NO: 930382 - DNA, 15 bp, Homo sapiens
tgattttctacaccc

SEQ ID NO: 930383 - DNA, 15 bp, Homo sapiens
atgattttctacacc

SEQ ID NO: 930384 - DNA, 15 bp, Homo sapiens
tatgattttctacac

SEQ ID NO: 930385 - DNA, 15 bp, Homo sapiens
ttatgattttctaca

SEQ ID NO: 930386 - DNA, 15 bp, Homo sapiens
attatgattttctac

SEQ ID NO: 930387 - DNA, 15 bp, Homo sapiens
gattatgattttcta

SEQ ID NO: 930388 - DNA, 15 bp, Homo sapiens
agattatgattttct

SEQ ID NO: 930389 - DNA, 15 bp, Homo sapiens
aagattatgattttc

SEQ ID NO: 930390 - DNA, 15 bp, Homo sapiens
aaagattatgatttt

SEQ ID NO: 930391 - DNA, 15 bp, Homo sapiens
aaaagattatgattt

SEQ ID NO: 930392 - DNA, 15 bp, Homo sapiens
caaaagattatgatt

SEQ ID NO: 930393 - DNA, 15 bp, Homo sapiens
tcaaaagattatgat

SEQ ID NO: 930394 - DNA, 15 bp, Homo sapiens
ttcaaaagattatga

SEQ ID NO: 930395 - DNA, 15 bp, Homo sapiens
tttcaaaagattatg

SEQ ID NO: 930396 - DNA, 15 bp, Homo sapiens
atttcaaaagattat

SEQ ID NO: 930397 - DNA, 15 bp, Homo sapiens
tatttcaaaagatta

SEQ ID NO: 930398 - DNA, 15 bp, Homo sapiens
gtatttcaaaagatt

SEQ ID NO: 930399 - DNA, 15 bp, Homo sapiens
ggtatttcaaaagat

SEQ ID NO: 930400 - DNA, 15 bp, Homo sapiens
aggtatttcaaaaga

SEQ ID NO: 930401 - DNA, 15 bp, Homo sapiens
aaggtatttcaaaag

SEQ ID NO: 930402 - DNA, 15 bp, Homo sapiens
taaggtatttcaaaa

SEQ ID NO: 930403 - DNA, 15 bp, Homo sapiens
ataaggtatttcaaa

SEQ ID NO: 930404 - DNA, 15 bp, Homo sapiens
tataaggtatttcaa

SEQ ID NO: 930405 - DNA, 15 bp, Homo sapiens
atataaggtatttca

SEQ ID NO: 930406 - DNA, 15 bp, Homo sapiens
tatataaggtatttc

SEQ ID NO: 930407 - DNA, 15 bp, Homo sapiens
ttatataaggtattt

SEQ ID NO: 930408 - DNA, 15 bp, Homo sapiens
attatataaggtatt

SEQ ID NO: 930409 - DNA, 15 bp, Homo sapiens
tattatataaggtat

SEQ ID NO: 930410 - DNA, 15 bp, Homo sapiens
gtattatataaggta

SEQ ID NO: 930411 - DNA, 15 bp, Homo sapiens
tgtattatataaggt

SEQ ID NO: 930412 - DNA, 15 bp, Homo sapiens
atgtattatataagg

SEQ ID NO: 930413 - DNA, 15 bp, Homo sapiens
aatgtattatataag

SEQ ID NO: 930414 - DNA, 15 bp, Homo sapiens
aaatgtattatataa

SEQ ID NO: 930415 - DNA, 15 bp, Homo sapiens
aaaatgtattatata

SEQ ID NO: 930416 - DNA, 15 bp, Homo sapiens
aaaaatgtattatat

SEQ ID NO: 930417 - DNA, 15 bp, Homo sapiens
aaaaaatgtattata

SEQ ID NO: 930418 - DNA, 15 bp, Homo sapiens
aaaaaaatgtattat

SEQ ID NO: 930419 - DNA, 15 bp, Homo sapiens
caaaaaaatgtatta

SEQ ID NO: 930420 - DNA, 15 bp, Homo sapiens
gcaaaaaaatgtatt

SEQ ID NO: 930421 - DNA, 15 bp, Homo sapiens
ggcaaaaaaatgtat

SEQ ID NO: 930422 - DNA, 15 bp, Homo sapiens
tggcaaaaaaatgta

SEQ ID NO: 930423 - DNA, 15 bp, Homo sapiens
gtggcaaaaaaatgt

SEQ ID NO: 930424 - DNA, 15 bp, Homo sapiens
tgtggcaaaaaaatg

SEQ ID NO: 930425 - DNA, 15 bp, Homo sapiens
ctgtggcaaaaaaat

SEQ ID NO: 930426 - DNA, 15 bp, Homo sapiens
cctgtggcaaaaaaa

SEQ ID NO: 930427 - DNA, 15 bp, Homo sapiens
tcctgtggcaaaaaa

SEQ ID NO: 930428 - DNA, 15 bp, Homo sapiens
ttcctgtggcaaaaa

SEQ ID NO: 930429 - DNA, 15 bp, Homo sapiens
tttcctgtggcaaaa

SEQ ID NO: 930430 - DNA, 15 bp, Homo sapiens
atttcctgtggcaaa

SEQ ID NO: 930431 - DNA, 15 bp, Homo sapiens
tatttcctgtggcaa

SEQ ID NO: 930432 - DNA, 15 bp, Homo sapiens
gtatttcctgtggca

SEQ ID NO: 930433 - DNA, 15 bp, Homo sapiens
agtatttcctgtggc

SEQ ID NO: 930434 - DNA, 15 bp, Homo sapiens
aagtatttcctgtgg

SEQ ID NO: 930435 - DNA, 15 bp, Homo sapiens
caagtatttcctgtg

SEQ ID NO: 930436 - DNA, 15 bp, Homo sapiens
tcaagtatttcctgt

SEQ ID NO: 930437 - DNA, 15 bp, Homo sapiens
ttcaagtatttcctg

SEQ ID NO: 930438 - DNA, 15 bp, Homo sapiens
cttcaagtatttcct

SEQ ID NO: 930439 - DNA, 15 bp, Homo sapiens
acttcaagtatttcc

SEQ ID NO: 930440 - DNA, 15 bp, Homo sapiens
aacttcaagtatttc

SEQ ID NO: 930441 - DNA, 15 bp, Homo sapiens
taacttcaagtattt

SEQ ID NO: 930442 - DNA, 15 bp, Homo sapiens
ataacttcaagtatt

SEQ ID NO: 930443 - DNA, 15 bp, Homo sapiens
aataacttcaagtat

SEQ ID NO: 930444 - DNA, 15 bp, Homo sapiens
caataacttcaagta

SEQ ID NO: 930445 - DNA, 15 bp, Homo sapiens
acaataacttcaagt

SEQ ID NO: 930446 - DNA, 15 bp, Homo sapiens
aacaataacttcaag

SEQ ID NO: 930447 - DNA, 15 bp, Homo sapiens
caacaataacttcaa

SEQ ID NO: 930448 - DNA, 15 bp, Homo sapiens
acaacaataacttca

SEQ ID NO: 930449 - DNA, 15 bp, Homo sapiens
cacaacaataacttc

SEQ ID NO: 930450 - DNA, 15 bp, Homo sapiens
acacaacaataactt

SEQ ID NO: 930451 - DNA, 15 bp, Homo sapiens
tacacaacaataact

SEQ ID NO: 930452 - DNA, 15 bp, Homo sapiens
gtacacaacaataac

SEQ ID NO: 930453 - DNA, 15 bp, Homo sapiens
ggtacacaacaataa

SEQ ID NO: 930454 - DNA, 15 bp, Homo sapiens
aggtacacaacaata

SEQ ID NO: 930455 - DNA, 15 bp, Homo sapiens
aaggtacacaacaat

SEQ ID NO: 930456 - DNA, 15 bp, Homo sapiens
taaggtacacaacaa

SEQ ID NO: 930457 - DNA, 15 bp, Homo sapiens
gtaaggtacacaaca

SEQ ID NO: 930458 - DNA, 15 bp, Homo sapiens
cgtaaggtacacaac

SEQ ID NO: 930459 - DNA, 15 bp, Homo sapiens
acgtaaggtacacaa

SEQ ID NO: 930460 - DNA, 15 bp, Homo sapiens
gacgtaaggtacaca

SEQ ID NO: 930461 - DNA, 15 bp, Homo sapiens
tgacgtaaggtacac

SEQ ID NO: 930462 - DNA, 15 bp, Homo sapiens
atgacgtaaggtaca

SEQ ID NO: 930463 - DNA, 15 bp, Homo sapiens
aatgacgtaaggtac

SEQ ID NO: 930464 - DNA, 15 bp, Homo sapiens
aaatgacgtaaggta

SEQ ID NO: 930465 - DNA, 15 bp, Homo sapiens
aaaatgacgtaaggt

SEQ ID NO: 930466 - DNA, 15 bp, Homo sapiens
taaaatgacgtaagg

SEQ ID NO: 930467 - DNA, 15 bp, Homo sapiens
ctaaaatgacgtaag

SEQ ID NO: 930468 - DNA, 15 bp, Homo sapiens
actaaaatgacgtaa

SEQ ID NO: 930469 - DNA, 15 bp, Homo sapiens
gactaaaatgacgta

SEQ ID NO: 930470 - DNA, 15 bp, Homo sapiens
ggactaaaatgacgt

SEQ ID NO: 930471 - DNA, 15 bp, Homo sapiens
tggactaaaatgacg

SEQ ID NO: 930472 - DNA, 15 bp, Homo sapiens
ttggactaaaatgac

SEQ ID NO: 930473 - DNA, 15 bp, Homo sapiens
tttggactaaaatga

SEQ ID NO: 930474 - DNA, 15 bp, Homo sapiens
ttttggactaaaatg

SEQ ID NO: 930475 - DNA, 15 bp, Homo sapiens
attttggactaaaat

SEQ ID NO: 930476 - DNA, 15 bp, Homo sapiens
aattttggactaaaa

SEQ ID NO: 930477 - DNA, 15 bp, Homo sapiens
taattttggactaaa

SEQ ID NO: 930478 - DNA, 15 bp, Homo sapiens
ataattttggactaa

SEQ ID NO: 930479 - DNA, 15 bp, Homo sapiens
tataattttggacta

SEQ ID NO: 930480 - DNA, 15 bp, Homo sapiens
gtataattttggact

SEQ ID NO: 930481 - DNA, 15 bp, Homo sapiens
agtataattttggac

SEQ ID NO: 930482 - DNA, 15 bp, Homo sapiens
aagtataattttgga

SEQ ID NO: 930483 - DNA, 15 bp, Homo sapiens
caagtataattttgg

SEQ ID NO: 930484 - DNA, 15 bp, Homo sapiens
acaagtataattttg

SEQ ID NO: 930485 - DNA, 15 bp, Homo sapiens
cacaagtataatttt

SEQ ID NO: 930486 - DNA, 15 bp, Homo sapiens
acacaagtataattt

SEQ ID NO: 930487 - DNA, 15 bp, Homo sapiens
aacacaagtataatt

SEQ ID NO: 930488 - DNA, 15 bp, Homo sapiens
gaacacaagtataat

SEQ ID NO: 930489 - DNA, 15 bp, Homo sapiens
agaacacaagtataa

SEQ ID NO: 930490 - DNA, 15 bp, Homo sapiens
gagaacacaagtata

SEQ ID NO: 930491 - DNA, 15 bp, Homo sapiens
agagaacacaagtat

SEQ ID NO: 930492 - DNA, 15 bp, Homo sapiens
cagagaacacaagta

SEQ ID NO: 930493 - DNA, 15 bp, Homo sapiens
acagagaacacaagt

SEQ ID NO: 930494 - DNA, 15 bp, Homo sapiens
cacagagaacacaag

SEQ ID NO: 930495 - DNA, 15 bp, Homo sapiens
acacagagaacacaa

SEQ ID NO: 930496 - DNA, 15 bp, Homo sapiens
cacacagagaacaca

SEQ ID NO: 930497 - DNA, 15 bp, Homo sapiens
gcacacagagaacac

SEQ ID NO: 930498 - DNA, 15 bp, Homo sapiens
tgcacacagagaaca

SEQ ID NO: 930499 - DNA, 15 bp, Homo sapiens
atgcacacagagaac

SEQ ID NO: 930500 - DNA, 15 bp, Homo sapiens
tatgcacacagagaa

SEQ ID NO: 930501 - DNA, 15 bp, Homo sapiens
atatgcacacagaga

SEQ ID NO: 930502 - DNA, 15 bp, Homo sapiens
aatatgcacacagag

SEQ ID NO: 930503 - DNA, 15 bp, Homo sapiens
aaatatgcacacaga

SEQ ID NO: 930504 - DNA, 15 bp, Homo sapiens
aaaatatgcacacag

SEQ ID NO: 930505 - DNA, 15 bp, Homo sapiens
caaaatatgcacaca

SEQ ID NO: 930506 - DNA, 15 bp, Homo sapiens
tcaaaatatgcacac

SEQ ID NO: 930507 - DNA, 15 bp, Homo sapiens
atcaaaatatgcaca

SEQ ID NO: 930508 - DNA, 15 bp, Homo sapiens
tatcaaaatatgcac

SEQ ID NO: 930509 - DNA, 15 bp, Homo sapiens
atatcaaaatatgca

SEQ ID NO: 930510 - DNA, 15 bp, Homo sapiens
catatcaaaatatgc

SEQ ID NO: 930511 - DNA, 15 bp, Homo sapiens
acatatcaaaatatg

SEQ ID NO: 930512 - DNA, 15 bp, Homo sapiens
tacatatcaaaatat

SEQ ID NO: 930513 - DNA, 15 bp, Homo sapiens
atacatatcaaaata

SEQ ID NO: 930514 - DNA, 15 bp, Homo sapiens
aatacatatcaaaat

SEQ ID NO: 930515 - DNA, 15 bp, Homo sapiens
taatacatatcaaaa

SEQ ID NO: 930516 - DNA, 15 bp, Homo sapiens
ctaatacatatcaaa

SEQ ID NO: 930517 - DNA, 15 bp, Homo sapiens
cctaatacatatcaa

SEQ ID NO: 930518 - DNA, 15 bp, Homo sapiens
tcctaatacatatca

SEQ ID NO: 930519 - DNA, 15 bp, Homo sapiens
ctcctaatacatatc

SEQ ID NO: 930520 - DNA, 15 bp, Homo sapiens
tctcctaatacatat

SEQ ID NO: 930521 - DNA, 15 bp, Homo sapiens
atctcctaatacata

SEQ ID NO: 930522 - DNA, 15 bp, Homo sapiens
aatctcctaatacat

SEQ ID NO: 930523 - DNA, 15 bp, Homo sapiens
taatctcctaataca

SEQ ID NO: 930524 - DNA, 15 bp, Homo sapiens
ataatctcctaatac

SEQ ID NO: 930525 - DNA, 15 bp, Homo sapiens
cataatctcctaata

SEQ ID NO: 930526 - DNA, 15 bp, Homo sapiens
ccataatctcctaat

SEQ ID NO: 930527 - DNA, 15 bp, Homo sapiens
tccataatctcctaa

SEQ ID NO: 930528 - DNA, 15 bp, Homo sapiens
atccataatctccta

SEQ ID NO: 930529 - DNA, 15 bp, Homo sapiens
gatccataatctcct

SEQ ID NO: 930530 - DNA, 15 bp, Homo sapiens
agatccataatctcc

SEQ ID NO: 930531 - DNA, 15 bp, Homo sapiens
cagatccataatctc

SEQ ID NO: 930532 - DNA, 15 bp, Homo sapiens
acagatccataatct

SEQ ID NO: 930533 - DNA, 15 bp, Homo sapiens
cacagatccataatc

SEQ ID NO: 930534 - DNA, 15 bp, Homo sapiens
acacagatccataat

SEQ ID NO: 930535 - DNA, 15 bp, Homo sapiens
cacacagatccataa

SEQ ID NO: 930536 - DNA, 15 bp, Homo sapiens
tcacacagatccata

SEQ ID NO: 930537 - DNA, 15 bp, Homo sapiens
atcacacagatccat

SEQ ID NO: 930538 - DNA, 15 bp, Homo sapiens
aatcacacagatcca

SEQ ID NO: 930539 - DNA, 15 bp, Homo sapiens
aaatcacacagatcc

SEQ ID NO: 930540 - DNA, 15 bp, Homo sapiens
gaaatcacacagatc

SEQ ID NO: 930541 - DNA, 15 bp, Homo sapiens
agaaatcacacagat

SEQ ID NO: 930542 - DNA, 15 bp, Homo sapiens
aagaaatcacacaga

SEQ ID NO: 930543 - DNA, 15 bp, Homo sapiens
taagaaatcacacag

SEQ ID NO: 930544 - DNA, 15 bp, Homo sapiens
ttaagaaatcacaca

SEQ ID NO: 930545 - DNA, 15 bp, Homo sapiens
cttaagaaatcacac

SEQ ID NO: 930546 - DNA, 15 bp, Homo sapiens
acttaagaaatcaca

SEQ ID NO: 930547 - DNA, 15 bp, Homo sapiens
tacttaagaaatcac

SEQ ID NO: 930548 - DNA, 15 bp, Homo sapiens
ttacttaagaaatca

SEQ ID NO: 930549 - DNA, 15 bp, Homo sapiens
tttacttaagaaatc

SEQ ID NO: 930550 - DNA, 15 bp, Homo sapiens
atttacttaagaaat

SEQ ID NO: 930551 - DNA, 15 bp, Homo sapiens
gatttacttaagaaa

SEQ ID NO: 930552 - DNA, 15 bp, Homo sapiens
ggatttacttaagaa

SEQ ID NO: 930553 - DNA, 15 bp, Homo sapiens
aggatttacttaaga

SEQ ID NO: 930554 - DNA, 15 bp, Homo sapiens
caggatttacttaag

SEQ ID NO: 930555 - DNA, 15 bp, Homo sapiens
tcaggatttacttaa

SEQ ID NO: 930556 - DNA, 15 bp, Homo sapiens
atcaggatttactta

SEQ ID NO: 930557 - DNA, 15 bp, Homo sapiens
tatcaggatttactt

SEQ ID NO: 930558 - DNA, 15 bp, Homo sapiens
atatcaggatttact

SEQ ID NO: 930559 - DNA, 15 bp, Homo sapiens
aatatcaggatttac

SEQ ID NO: 930560 - DNA, 15 bp, Homo sapiens
aaatatcaggattta

SEQ ID NO: 930561 - DNA, 15 bp, Homo sapiens
aaaatatcaggattt

SEQ ID NO: 930562 - DNA, 15 bp, Homo sapiens
gaaaatatcaggatt

SEQ ID NO: 930563 - DNA, 15 bp, Homo sapiens
tgaaaatatcaggat

SEQ ID NO: 930564 - DNA, 15 bp, Homo sapiens
gtgaaaatatcagga

SEQ ID NO: 930565 - DNA, 15 bp, Homo sapiens
tgtgaaaatatcagg

SEQ ID NO: 930566 - DNA, 15 bp, Homo sapiens
ttgtgaaaatatcag

SEQ ID NO: 930567 - DNA, 15 bp, Homo sapiens
attgtgaaaatatca

SEQ ID NO: 930568 - DNA, 15 bp, Homo sapiens
aattgtgaaaatatc

SEQ ID NO: 930569 - DNA, 15 bp, Homo sapiens
aaattgtgaaaatat

SEQ ID NO: 930570 - DNA, 15 bp, Homo sapiens
caaattgtgaaaata

SEQ ID NO: 930571 - DNA, 15 bp, Homo sapiens
tcaaattgtgaaaat

SEQ ID NO: 930572 - DNA, 15 bp, Homo sapiens
atcaaattgtgaaaa

SEQ ID NO: 930573 - DNA, 15 bp, Homo sapiens
catcaaattgtgaaa

SEQ ID NO: 930574 - DNA, 15 bp, Homo sapiens
tcatcaaattgtgaa

SEQ ID NO: 930575 - DNA, 15 bp, Homo sapiens
atcatcaaattgtga

SEQ ID NO: 930576 - DNA, 15 bp, Homo sapiens
catcatcaaattgtg

SEQ ID NO: 930577 - DNA, 15 bp, Homo sapiens
tcatcatcaaattgt

SEQ ID NO: 930578 - DNA, 15 bp, Homo sapiens
gtcatcatcaaattg

SEQ ID NO: 930579 - DNA, 15 bp, Homo sapiens
agtcatcatcaaatt

SEQ ID NO: 930580 - DNA, 15 bp, Homo sapiens
gagtcatcatcaaat

SEQ ID NO: 930581 - DNA, 15 bp, Homo sapiens
agagtcatcatcaaa

SEQ ID NO: 930582 - DNA, 15 bp, Homo sapiens
aagagtcatcatcaa

SEQ ID NO: 930583 - DNA, 15 bp, Homo sapiens
aaagagtcatcatca

SEQ ID NO: 930584 - DNA, 15 bp, Homo sapiens
taaagagtcatcatc

SEQ ID NO: 930585 - DNA, 15 bp, Homo sapiens
ttaaagagtcatcat

SEQ ID NO: 930586 - DNA, 15 bp, Homo sapiens
tttaaagagtcatca

SEQ ID NO: 930587 - DNA, 15 bp, Homo sapiens
ctttaaagagtcatc

SEQ ID NO: 930588 - DNA, 15 bp, Homo sapiens
actttaaagagtcat

SEQ ID NO: 930589 - DNA, 15 bp, Homo sapiens
aactttaaagagtca

SEQ ID NO: 930590 - DNA, 15 bp, Homo sapiens
taactttaaagagtc

SEQ ID NO: 930591 - DNA, 15 bp, Homo sapiens
ctaactttaaagagt

SEQ ID NO: 930592 - DNA, 15 bp, Homo sapiens
tctaactttaaagag

SEQ ID NO: 930593 - DNA, 15 bp, Homo sapiens
gtctaactttaaaga

SEQ ID NO: 930594 - DNA, 15 bp, Homo sapiens
agtctaactttaaag

SEQ ID NO: 930595 - DNA, 15 bp, Homo sapiens
aagtctaactttaaa

SEQ ID NO: 930596 - DNA, 15 bp, Homo sapiens
taagtctaactttaa

SEQ ID NO: 930597 - DNA, 15 bp, Homo sapiens
ttaagtctaacttta

SEQ ID NO: 930598 - DNA, 15 bp, Homo sapiens
cttaagtctaacttt

SEQ ID NO: 930599 - DNA, 15 bp, Homo sapiens
acttaagtctaactt

SEQ ID NO: 930600 - DNA, 15 bp, Homo sapiens
aacttaagtctaact

SEQ ID NO: 930601 - DNA, 15 bp, Homo sapiens
aaacttaagtctaac

SEQ ID NO: 930602 - DNA, 15 bp, Homo sapiens
aaaacttaagtctaa

SEQ ID NO: 930603 - DNA, 15 bp, Homo sapiens
caaaacttaagtcta

SEQ ID NO: 930604 - DNA, 15 bp, Homo sapiens
gcaaaacttaagtct

SEQ ID NO: 930605 - DNA, 15 bp, Homo sapiens
ggcaaaacttaagtc

SEQ ID NO: 930606 - DNA, 15 bp, Homo sapiens
tggcaaaacttaagt

SEQ ID NO: 930607 - DNA, 15 bp, Homo sapiens
ttggcaaaacttaag

SEQ ID NO: 930608 - DNA, 15 bp, Homo sapiens
tttggcaaaacttaa

SEQ ID NO: 930609 - DNA, 15 bp, Homo sapiens
ttttggcaaaactta

SEQ ID NO: 930610 - DNA, 15 bp, Homo sapiens
cttttggcaaaactt

SEQ ID NO: 930611 - DNA, 15 bp, Homo sapiens
gcttttggcaaaact

SEQ ID NO: 930612 - DNA, 15 bp, Homo sapiens
tgcttttggcaaaac

SEQ ID NO: 930613 - DNA, 15 bp, Homo sapiens
ttgcttttggcaaaa

SEQ ID NO: 930614 - DNA, 15 bp, Homo sapiens
cttgcttttggcaaa

SEQ ID NO: 930615 - DNA, 15 bp, Homo sapiens
tcttgcttttggcaa

SEQ ID NO: 930616 - DNA, 15 bp, Homo sapiens
ttcttgcttttggca

SEQ ID NO: 930617 - DNA, 15 bp, Homo sapiens
cttcttgcttttggc

SEQ ID NO: 930618 - DNA, 15 bp, Homo sapiens
gcttcttgcttttgg

SEQ ID NO: 930619 - DNA, 15 bp, Homo sapiens
ggcttcttgcttttg

SEQ ID NO: 930620 - DNA, 15 bp, Homo sapiens
aggcttcttgctttt

SEQ ID NO: 930621 - DNA, 15 bp, Homo sapiens
gaggcttcttgcttt

SEQ ID NO: 930622 - DNA, 15 bp, Homo sapiens
tgaggcttcttgctt

SEQ ID NO: 930623 - DNA, 15 bp, Homo sapiens
ttgaggcttcttgct

SEQ ID NO: 930624 - DNA, 15 bp, Homo sapiens
tttgaggcttcttgc

SEQ ID NO: 930625 - DNA, 15 bp, Homo sapiens
ctttgaggcttcttg

SEQ ID NO: 930626 - DNA, 15 bp, Homo sapiens
tctttgaggcttctt

SEQ ID NO: 930627 - DNA, 15 bp, Homo sapiens
ctctttgaggcttct

SEQ ID NO: 930628 - DNA, 15 bp, Homo sapiens
actctttgaggcttc

SEQ ID NO: 930629 - DNA, 15 bp, Homo sapiens
tactctttgaggctt

SEQ ID NO: 930630 - DNA, 15 bp, Homo sapiens
ttactctttgaggct

SEQ ID NO: 930631 - DNA, 15 bp, Homo sapiens
gttactctttgaggc

SEQ ID NO: 930632 - DNA, 15 bp, Homo sapiens
tgttactctttgagg

SEQ ID NO: 930633 - DNA, 15 bp, Homo sapiens
atgttactctttgag

SEQ ID NO: 930634 - DNA, 15 bp, Homo sapiens
aatgttactctttga

SEQ ID NO: 930635 - DNA, 15 bp, Homo sapiens
aaatgttactctttg

SEQ ID NO: 930636 - DNA, 15 bp, Homo sapiens
caaatgttactcttt

SEQ ID NO: 930637 - DNA, 15 bp, Homo sapiens
acaaatgttactctt

SEQ ID NO: 930638 - DNA, 15 bp, Homo sapiens
aacaaatgttactct

SEQ ID NO: 930639 - DNA, 15 bp, Homo sapiens
gaacaaatgttactc

SEQ ID NO: 930640 - DNA, 15 bp, Homo sapiens
tgaacaaatgttact

SEQ ID NO: 930641 - DNA, 15 bp, Homo sapiens
atgaacaaatgttac

SEQ ID NO: 930642 - DNA, 15 bp, Homo sapiens
catgaacaaatgtta

SEQ ID NO: 930643 - DNA, 15 bp, Homo sapiens
acatgaacaaatgtt

SEQ ID NO: 930644 - DNA, 15 bp, Homo sapiens
gacatgaacaaatgt

SEQ ID NO: 930645 - DNA, 15 bp, Homo sapiens
agacatgaacaaatg

SEQ ID NO: 930646 - DNA, 15 bp, Homo sapiens
aagacatgaacaaat

SEQ ID NO: 930647 - DNA, 15 bp, Homo sapiens
taagacatgaacaaa

SEQ ID NO: 930648 - DNA, 15 bp, Homo sapiens
ttaagacatgaacaa

SEQ ID NO: 930649 - DNA, 15 bp, Homo sapiens
gttaagacatgaaca

SEQ ID NO: 930650 - DNA, 15 bp, Homo sapiens
tgttaagacatgaac

SEQ ID NO: 930651 - DNA, 15 bp, Homo sapiens
gtgttaagacatgaa

SEQ ID NO: 930652 - DNA, 15 bp, Homo sapiens
agtgttaagacatga

SEQ ID NO: 930653 - DNA, 15 bp, Homo sapiens
tagtgttaagacatg

SEQ ID NO: 930654 - DNA, 15 bp, Homo sapiens
atagtgttaagacat

SEQ ID NO: 930655 - DNA, 15 bp, Homo sapiens
gatagtgttaagaca

SEQ ID NO: 930656 - DNA, 15 bp, Homo sapiens
agatagtgttaagac

SEQ ID NO: 930657 - DNA, 15 bp, Homo sapiens
gagatagtgttaaga

SEQ ID NO: 930658 - DNA, 15 bp, Homo sapiens
ggagatagtgttaag

SEQ ID NO: 930659 - DNA, 15 bp, Homo sapiens
gggagatagtgttaa

SEQ ID NO: 930660 - DNA, 15 bp, Homo sapiens
agggagatagtgtta

SEQ ID NO: 930661 - DNA, 15 bp, Homo sapiens
gagggagatagtgtt

SEQ ID NO: 930662 - DNA, 15 bp, Homo sapiens
agagggagatagtgt

SEQ ID NO: 930663 - DNA, 15 bp, Homo sapiens
aagagggagatagtg

SEQ ID NO: 930664 - DNA, 15 bp, Homo sapiens
taagagggagatagt

SEQ ID NO: 930665 - DNA, 15 bp, Homo sapiens
ataagagggagatag

SEQ ID NO: 930666 - DNA, 15 bp, Homo sapiens
aataagagggagata

SEQ ID NO: 930667 - DNA, 15 bp, Homo sapiens
caataagagggagat

SEQ ID NO: 930668 - DNA, 15 bp, Homo sapiens
ccaataagagggaga

SEQ ID NO: 930669 - DNA, 15 bp, Homo sapiens
accaataagagggag

SEQ ID NO: 930670 - DNA, 15 bp, Homo sapiens
gaccaataagaggga

SEQ ID NO: 930671 - DNA, 15 bp, Homo sapiens
tgaccaataagaggg

SEQ ID NO: 930672 - DNA, 15 bp, Homo sapiens
ctgaccaataagagg

SEQ ID NO: 930673 - DNA, 15 bp, Homo sapiens
tctgaccaataagag

SEQ ID NO: 930674 - DNA, 15 bp, Homo sapiens
ttctgaccaataaga

SEQ ID NO: 930675 - DNA, 15 bp, Homo sapiens
attctgaccaataag

SEQ ID NO: 930676 - DNA, 15 bp, Homo sapiens
gattctgaccaataa

SEQ ID NO: 930677 - DNA, 15 bp, Homo sapiens
agattctgaccaata

SEQ ID NO: 930678 - DNA, 15 bp, Homo sapiens
gagattctgaccaat

SEQ ID NO: 930679 - DNA, 15 bp, Homo sapiens
tgagattctgaccaa

SEQ ID NO: 930680 - DNA, 15 bp, Homo sapiens
ctgagattctgacca

SEQ ID NO: 930681 - DNA, 15 bp, Homo sapiens
actgagattctgacc

SEQ ID NO: 930682 - DNA, 15 bp, Homo sapiens
tactgagattctgac

SEQ ID NO: 930683 - DNA, 15 bp, Homo sapiens
atactgagattctga

SEQ ID NO: 930684 - DNA, 15 bp, Homo sapiens
catactgagattctg

SEQ ID NO: 930685 - DNA, 15 bp, Homo sapiens
ccatactgagattct

SEQ ID NO: 930686 - DNA, 15 bp, Homo sapiens
tccatactgagattc

SEQ ID NO: 930687 - DNA, 15 bp, Homo sapiens
atccatactgagatt

SEQ ID NO: 930688 - DNA, 15 bp, Homo sapiens
catccatactgagat

SEQ ID NO: 930689 - DNA, 15 bp, Homo sapiens
gcatccatactgaga

SEQ ID NO: 930690 - DNA, 15 bp, Homo sapiens
tgcatccatactgag

SEQ ID NO: 930691 - DNA, 15 bp, Homo sapiens
ctgcatccatactga

SEQ ID NO: 930692 - DNA, 15 bp, Homo sapiens
actgcatccatactg

SEQ ID NO: 930693 - DNA, 15 bp, Homo sapiens
cactgcatccatact

SEQ ID NO: 930694 - DNA, 15 bp, Homo sapiens
acactgcatccatac

SEQ ID NO: 930695 - DNA, 15 bp, Homo sapiens
gacactgcatccata

SEQ ID NO: 930696 - DNA, 15 bp, Homo sapiens
ggacactgcatccat

SEQ ID NO: 930697 - DNA, 15 bp, Homo sapiens
tggacactgcatcca

SEQ ID NO: 930698 - DNA, 15 bp, Homo sapiens
atggacactgcatcc

SEQ ID NO: 930699 - DNA, 15 bp, Homo sapiens
tatggacactgcatc

SEQ ID NO: 930700 - DNA, 15 bp, Homo sapiens
atatggacactgcat

SEQ ID NO: 930701 - DNA, 15 bp, Homo sapiens
catatggacactgca

SEQ ID NO: 930702 - DNA, 15 bp, Homo sapiens
gcatatggacactgc

SEQ ID NO: 930703 - DNA, 15 bp, Homo sapiens
tgcatatggacactg

SEQ ID NO: 930704 - DNA, 15 bp, Homo sapiens
gtgcatatggacact

SEQ ID NO: 930705 - DNA, 15 bp, Homo sapiens
tgtgcatatggacac

SEQ ID NO: 930706 - DNA, 15 bp, Homo sapiens
ttgtgcatatggaca

SEQ ID NO: 930707 - DNA, 15 bp, Homo sapiens
gttgtgcatatggac

SEQ ID NO: 930708 - DNA, 15 bp, Homo sapiens
tgttgtgcatatgga

SEQ ID NO: 930709 - DNA, 15 bp, Homo sapiens
ttgttgtgcatatgg

SEQ ID NO: 930710 - DNA, 15 bp, Homo sapiens
attgttgtgcatatg

SEQ ID NO: 930711 - DNA, 15 bp, Homo sapiens
tattgttgtgcatat

SEQ ID NO: 930712 - DNA, 15 bp, Homo sapiens
atattgttgtgcata

SEQ ID NO: 930713 - DNA, 15 bp, Homo sapiens
tatattgttgtgcat

SEQ ID NO: 930714 - DNA, 15 bp, Homo sapiens
atatattgttgtgca

SEQ ID NO: 930715 - DNA, 15 bp, Homo sapiens
aatatattgttgtgc

SEQ ID NO: 930716 - DNA, 15 bp, Homo sapiens
taatatattgttgtg

SEQ ID NO: 930717 - DNA, 15 bp, Homo sapiens
ttaatatattgttgt

SEQ ID NO: 930718 - DNA, 15 bp, Homo sapiens
attaatatattgttg

SEQ ID NO: 930719 - DNA, 15 bp, Homo sapiens
aattaatatattgtt

SEQ ID NO: 930720 - DNA, 15 bp, Homo sapiens
gaattaatatattgt

SEQ ID NO: 930721 - DNA, 15 bp, Homo sapiens
tgaattaatatattg

SEQ ID NO: 930722 - DNA, 15 bp, Homo sapiens
ctgaattaatatatt

SEQ ID NO: 930723 - DNA, 15 bp, Homo sapiens
actgaattaatatat

SEQ ID NO: 930724 - DNA, 15 bp, Homo sapiens
aactgaattaatata

SEQ ID NO: 930725 - DNA, 15 bp, Homo sapiens
aaactgaattaatat

SEQ ID NO: 930726 - DNA, 15 bp, Homo sapiens
taaactgaattaata

SEQ ID NO: 930727 - DNA, 15 bp, Homo sapiens
ttaaactgaattaat

SEQ ID NO: 930728 - DNA, 15 bp, Homo sapiens
gttaaactgaattaa

SEQ ID NO: 930729 - DNA, 15 bp, Homo sapiens
tgttaaactgaatta

SEQ ID NO: 930730 - DNA, 15 bp, Homo sapiens
ctgttaaactgaatt

SEQ ID NO: 930731 - DNA, 15 bp, Homo sapiens
tctgttaaactgaat

SEQ ID NO: 930732 - DNA, 15 bp, Homo sapiens
gtctgttaaactgaa

SEQ ID NO: 930733 - DNA, 15 bp, Homo sapiens
agtctgttaaactga

SEQ ID NO: 930734 - DNA, 15 bp, Homo sapiens
aagtctgttaaactg

SEQ ID NO: 930735 - DNA, 15 bp, Homo sapiens
taagtctgttaaact

SEQ ID NO: 930736 - DNA, 15 bp, Homo sapiens
ttaagtctgttaaac

SEQ ID NO: 930737 - DNA, 15 bp, Homo sapiens
attaagtctgttaaa

SEQ ID NO: 930738 - DNA, 15 bp, Homo sapiens
cattaagtctgttaa

SEQ ID NO: 930739 - DNA, 15 bp, Homo sapiens
gcattaagtctgtta

SEQ ID NO: 930740 - DNA, 15 bp, Homo sapiens
agcattaagtctgtt

SEQ ID NO: 930741 - DNA, 15 bp, Homo sapiens
cagcattaagtctgt

SEQ ID NO: 930742 - DNA, 15 bp, Homo sapiens
tcagcattaagtctg

SEQ ID NO: 930743 - DNA, 15 bp, Homo sapiens
ttcagcattaagtct

SEQ ID NO: 930744 - DNA, 15 bp, Homo sapiens
attcagcattaagtc

SEQ ID NO: 930745 - DNA, 15 bp, Homo sapiens
tattcagcattaagt

SEQ ID NO: 930746 - DNA, 15 bp, Homo sapiens
ttattcagcattaag

SEQ ID NO: 930747 - DNA, 15 bp, Homo sapiens
cttattcagcattaa

SEQ ID NO: 930748 - DNA, 15 bp, Homo sapiens
gcttattcagcatta

SEQ ID NO: 930749 - DNA, 15 bp, Homo sapiens
tgcttattcagcatt

SEQ ID NO: 930750 - DNA, 15 bp, Homo sapiens
ttgcttattcagcat

SEQ ID NO: 930751 - DNA, 15 bp, Homo sapiens
attgcttattcagca

SEQ ID NO: 930752 - DNA, 15 bp, Homo sapiens
tattgcttattcagc

SEQ ID NO: 930753 - DNA, 15 bp, Homo sapiens
ttattgcttattcag

SEQ ID NO: 930754 - DNA, 15 bp, Homo sapiens
cttattgcttattca

SEQ ID NO: 930755 - DNA, 15 bp, Homo sapiens
tcttattgcttattc

SEQ ID NO: 930756 - DNA, 15 bp, Homo sapiens
atcttattgcttatt

SEQ ID NO: 930757 - DNA, 15 bp, Homo sapiens
aatcttattgcttat

SEQ ID NO: 930758 - DNA, 15 bp, Homo sapiens
taatcttattgctta

SEQ ID NO: 930759 - DNA, 15 bp, Homo sapiens
ttaatcttattgctt

SEQ ID NO: 930760 - DNA, 15 bp, Homo sapiens
attaatcttattgct

SEQ ID NO: 930761 - DNA, 15 bp, Homo sapiens
aattaatcttattgc

SEQ ID NO: 930762 - DNA, 15 bp, Homo sapiens
caattaatcttattg

SEQ ID NO: 930763 - DNA, 15 bp, Homo sapiens
tcaattaatcttatt

SEQ ID NO: 930764 - DNA, 15 bp, Homo sapiens
ttcaattaatcttat

SEQ ID NO: 930765 - DNA, 15 bp, Homo sapiens
attcaattaatctta

SEQ ID NO: 930766 - DNA, 15 bp, Homo sapiens
aattcaattaatctt

SEQ ID NO: 930767 - DNA, 15 bp, Homo sapiens
taattcaattaatct

SEQ ID NO: 930768 - DNA, 15 bp, Homo sapiens
ttaattcaattaatc

SEQ ID NO: 930769 - DNA, 15 bp, Homo sapiens
gttaattcaattaat

SEQ ID NO: 930770 - DNA, 15 bp, Homo sapiens
agttaattcaattaa

SEQ ID NO: 930771 - DNA, 15 bp, Homo sapiens
tagttaattcaatta

SEQ ID NO: 930772 - DNA, 15 bp, Homo sapiens
ttagttaattcaatt

SEQ ID NO: 930773 - DNA, 15 bp, Homo sapiens
tttagttaattcaat

SEQ ID NO: 930774 - DNA, 15 bp, Homo sapiens
atttagttaattcaa

SEQ ID NO: 930775 - DNA, 15 bp, Homo sapiens
gatttagttaattca

SEQ ID NO: 930776 - DNA, 15 bp, Homo sapiens
agatttagttaattc

SEQ ID NO: 930777 - DNA, 15 bp, Homo sapiens
aagatttagttaatt

SEQ ID NO: 930778 - DNA, 15 bp, Homo sapiens
aaagatttagttaat

SEQ ID NO: 930779 - DNA, 15 bp, Homo sapiens
aaaagatttagttaa

SEQ ID NO: 930780 - DNA, 15 bp, Homo sapiens
caaaagatttagtta

SEQ ID NO: 930781 - DNA, 15 bp, Homo sapiens
tcaaaagatttagtt

SEQ ID NO: 930782 - DNA, 15 bp, Homo sapiens
atcaaaagatttagt

SEQ ID NO: 930783 - DNA, 15 bp, Homo sapiens
tatcaaaagatttag

SEQ ID NO: 930784 - DNA, 15 bp, Homo sapiens
ctatcaaaagattta

SEQ ID NO: 930785 - DNA, 15 bp, Homo sapiens
actatcaaaagattt

SEQ ID NO: 930786 - DNA, 15 bp, Homo sapiens
tactatcaaaagatt

SEQ ID NO: 930787 - DNA, 15 bp, Homo sapiens
atactatcaaaagat

SEQ ID NO: 930788 - DNA, 15 bp, Homo sapiens
gatactatcaaaaga

SEQ ID NO: 930789 - DNA, 15 bp, Homo sapiens
ggatactatcaaaag

SEQ ID NO: 930790 - DNA, 15 bp, Homo sapiens
tggatactatcaaaa

SEQ ID NO: 930791 - DNA, 15 bp, Homo sapiens
gtggatactatcaaa

SEQ ID NO: 930792 - DNA, 15 bp, Homo sapiens
agtggatactatcaa

SEQ ID NO: 930793 - DNA, 15 bp, Homo sapiens
aagtggatactatca

SEQ ID NO: 930794 - DNA, 15 bp, Homo sapiens
gaagtggatactatc

SEQ ID NO: 930795 - DNA, 15 bp, Homo sapiens
ggaagtggatactat

SEQ ID NO: 930796 - DNA, 15 bp, Homo sapiens
tggaagtggatacta

SEQ ID NO: 930797 - DNA, 15 bp, Homo sapiens
atggaagtggatact

SEQ ID NO: 930798 - DNA, 15 bp, Homo sapiens
tatggaagtggatac

SEQ ID NO: 930799 - DNA, 15 bp, Homo sapiens
atatggaagtggata

SEQ ID NO: 930800 - DNA, 15 bp, Homo sapiens
tatatggaagtggat

SEQ ID NO: 930801 - DNA, 15 bp, Homo sapiens
atatatggaagtgga

SEQ ID NO: 930802 - DNA, 15 bp, Homo sapiens
tatatatggaagtgg

SEQ ID NO: 930803 - DNA, 15 bp, Homo sapiens
atatatatggaagtg

SEQ ID NO: 930804 - DNA, 15 bp, Homo sapiens
tatatatatggaagt

SEQ ID NO: 930805 - DNA, 15 bp, Homo sapiens
ctatatatatggaag

SEQ ID NO: 930806 - DNA, 15 bp, Homo sapiens
actatatatatggaa

SEQ ID NO: 930807 - DNA, 15 bp, Homo sapiens
aactatatatatgga

SEQ ID NO: 930808 - DNA, 15 bp, Homo sapiens
taactatatatatgg

SEQ ID NO: 930809 - DNA, 15 bp, Homo sapiens
ataactatatatatg

SEQ ID NO: 930810 - DNA, 15 bp, Homo sapiens
tataactatatatat

SEQ ID NO: 930811 - DNA, 15 bp, Homo sapiens
ctataactatatata

SEQ ID NO: 930812 - DNA, 15 bp, Homo sapiens
tctataactatatat

SEQ ID NO: 930813 - DNA, 15 bp, Homo sapiens
atctataactatata

SEQ ID NO: 930814 - DNA, 15 bp, Homo sapiens
tatctataactatat

SEQ ID NO: 930815 - DNA, 15 bp, Homo sapiens
atatctataactata

SEQ ID NO: 930816 - DNA, 15 bp, Homo sapiens
tatatctataactat

SEQ ID NO: 930817 - DNA, 15 bp, Homo sapiens
ttatatctataacta

SEQ ID NO: 930818 - DNA, 15 bp, Homo sapiens
attatatctataact

SEQ ID NO: 930819 - DNA, 15 bp, Homo sapiens
cattatatctataac

SEQ ID NO: 930820 - DNA, 15 bp, Homo sapiens
gcattatatctataa

SEQ ID NO: 930821 - DNA, 15 bp, Homo sapiens
agcattatatctata

SEQ ID NO: 930822 - DNA, 15 bp, Homo sapiens
tagcattatatctat

SEQ ID NO: 930823 - DNA, 15 bp, Homo sapiens
ctagcattatatcta

SEQ ID NO: 930824 - DNA, 15 bp, Homo sapiens
actagcattatatct

SEQ ID NO: 930825 - DNA, 15 bp, Homo sapiens
cactagcattatatc

SEQ ID NO: 930826 - DNA, 15 bp, Homo sapiens
tcactagcattatat

SEQ ID NO: 930827 - DNA, 15 bp, Homo sapiens
ttcactagcattata

SEQ ID NO: 930828 - DNA, 15 bp, Homo sapiens
attcactagcattat

SEQ ID NO: 930829 - DNA, 15 bp, Homo sapiens
aattcactagcatta

SEQ ID NO: 930830 - DNA, 15 bp, Homo sapiens
aaattcactagcatt

SEQ ID NO: 930831 - DNA, 15 bp, Homo sapiens
caaattcactagcat

SEQ ID NO: 930832 - DNA, 15 bp, Homo sapiens
tcaaattcactagca

SEQ ID NO: 930833 - DNA, 15 bp, Homo sapiens
ttcaaattcactagc

SEQ ID NO: 930834 - DNA, 15 bp, Homo sapiens
gttcaaattcactag

SEQ ID NO: 930835 - DNA, 15 bp, Homo sapiens
ggttcaaattcacta

SEQ ID NO: 930836 - DNA, 15 bp, Homo sapiens
tggttcaaattcact

SEQ ID NO: 930837 - DNA, 15 bp, Homo sapiens
atggttcaaattcac

SEQ ID NO: 930838 - DNA, 15 bp, Homo sapiens
tatggttcaaattca

SEQ ID NO: 930839 - DNA, 15 bp, Homo sapiens
ttatggttcaaattc

SEQ ID NO: 930840 - DNA, 15 bp, Homo sapiens
tttatggttcaaatt

SEQ ID NO: 930841 - DNA, 15 bp, Homo sapiens
gtttatggttcaaat

SEQ ID NO: 930842 - DNA, 15 bp, Homo sapiens
tgtttatggttcaaa

SEQ ID NO: 930843 - DNA, 15 bp, Homo sapiens
ttgtttatggttcaa

SEQ ID NO: 930844 - DNA, 15 bp, Homo sapiens
tttgtttatggttca

SEQ ID NO: 930845 - DNA, 15 bp, Homo sapiens
atttgtttatggttc

SEQ ID NO: 930846 - DNA, 15 bp, Homo sapiens
aatttgtttatggtt

SEQ ID NO: 930847 - DNA, 15 bp, Homo sapiens
taatttgtttatggt

SEQ ID NO: 930848 - DNA, 15 bp, Homo sapiens
ttaatttgtttatgg

SEQ ID NO: 930849 - DNA, 15 bp, Homo sapiens
attaatttgtttatg

SEQ ID NO: 930850 - DNA, 15 bp, Homo sapiens
tattaatttgtttat

SEQ ID NO: 930851 - DNA, 15 bp, Homo sapiens
ttattaatttgttta

SEQ ID NO: 930852 - DNA, 15 bp, Homo sapiens
attattaatttgttt

SEQ ID NO: 930853 - DNA, 15 bp, Homo sapiens
tattattaatttgtt

SEQ ID NO: 930854 - DNA, 15 bp, Homo sapiens
gtattattaatttgt

SEQ ID NO: 930855 - DNA, 15 bp, Homo sapiens
tgtattattaatttg

SEQ ID NO: 930856 - DNA, 15 bp, Homo sapiens
atgtattattaattt

SEQ ID NO: 930857 - DNA, 15 bp, Homo sapiens
catgtattattaatt

SEQ ID NO: 930858 - DNA, 15 bp, Homo sapiens
acatgtattattaat

SEQ ID NO: 930859 - DNA, 15 bp, Homo sapiens
cacatgtattattaa

SEQ ID NO: 930860 - DNA, 15 bp, Homo sapiens
tcacatgtattatta

SEQ ID NO: 930861 - DNA, 15 bp, Homo sapiens
atcacatgtattatt

SEQ ID NO: 930862 - DNA, 15 bp, Homo sapiens
aatcacatgtattat

SEQ ID NO: 930863 - DNA, 15 bp, Homo sapiens
aaatcacatgtatta

SEQ ID NO: 930864 - DNA, 15 bp, Homo sapiens
gaaatcacatgtatt

SEQ ID NO: 930865 - DNA, 15 bp, Homo sapiens
agaaatcacatgtat

SEQ ID NO: 930866 - DNA, 15 bp, Homo sapiens
cagaaatcacatgta

SEQ ID NO: 930867 - DNA, 15 bp, Homo sapiens
acagaaatcacatgt

SEQ ID NO: 930868 - DNA, 15 bp, Homo sapiens
cacagaaatcacatg

SEQ ID NO: 930869 - DNA, 15 bp, Homo sapiens
tcacagaaatcacat

SEQ ID NO: 930870 - DNA, 15 bp, Homo sapiens
ttcacagaaatcaca

SEQ ID NO: 930871 - DNA, 15 bp, Homo sapiens
tttcacagaaatcac

SEQ ID NO: 930872 - DNA, 15 bp, Homo sapiens
ttttcacagaaatca

SEQ ID NO: 930873 - DNA, 15 bp, Homo sapiens
attttcacagaaatc

SEQ ID NO: 930874 - DNA, 15 bp, Homo sapiens
aattttcacagaaat

SEQ ID NO: 930875 - DNA, 15 bp, Homo sapiens
aaattttcacagaaa

SEQ ID NO: 930876 - DNA, 15 bp, Homo sapiens
taaattttcacagaa

SEQ ID NO: 930877 - DNA, 15 bp, Homo sapiens
ataaattttcacaga

SEQ ID NO: 930878 - DNA, 15 bp, Homo sapiens
tataaattttcacag

SEQ ID NO: 930879 - DNA, 15 bp, Homo sapiens
atataaattttcaca

SEQ ID NO: 930880 - DNA, 15 bp, Homo sapiens
aatataaattttcac

SEQ ID NO: 930881 - DNA, 15 bp, Homo sapiens
taatataaattttca

SEQ ID NO: 930882 - DNA, 15 bp, Homo sapiens
ctaatataaattttc

SEQ ID NO: 930883 - DNA, 15 bp, Homo sapiens
actaatataaatttt

SEQ ID NO: 930884 - DNA, 15 bp, Homo sapiens
gactaatataaattt

SEQ ID NO: 930885 - DNA, 15 bp, Homo sapiens
agactaatataaatt

SEQ ID NO: 930886 - DNA, 15 bp, Homo sapiens
aagactaatataaat

SEQ ID NO: 930887 - DNA, 15 bp, Homo sapiens
aaagactaatataaa

SEQ ID NO: 930888 - DNA, 15 bp, Homo sapiens
aaaagactaatataa

SEQ ID NO: 930889 - DNA, 15 bp, Homo sapiens
gaaaagactaatata

SEQ ID NO: 930890 - DNA, 15 bp, Homo sapiens
tgaaaagactaatat

SEQ ID NO: 930891 - DNA, 15 bp, Homo sapiens
ttgaaaagactaata

SEQ ID NO: 930892 - DNA, 15 bp, Homo sapiens
attgaaaagactaat

SEQ ID NO: 930893 - DNA, 15 bp, Homo sapiens
tattgaaaagactaa

SEQ ID NO: 930894 - DNA, 15 bp, Homo sapiens
atattgaaaagacta

SEQ ID NO: 930895 - DNA, 15 bp, Homo sapiens
catattgaaaagact

SEQ ID NO: 930896 - DNA, 15 bp, Homo sapiens
acatattgaaaagac

SEQ ID NO: 930897 - DNA, 15 bp, Homo sapiens
gacatattgaaaaga

SEQ ID NO: 930898 - DNA, 15 bp, Homo sapiens
tgacatattgaaaag

SEQ ID NO: 930899 - DNA, 15 bp, Homo sapiens
ttgacatattgaaaa

SEQ ID NO: 930900 - DNA, 15 bp, Homo sapiens
attgacatattgaaa

SEQ ID NO: 930901 - DNA, 15 bp, Homo sapiens
tattgacatattgaa

SEQ ID NO: 930902 - DNA, 15 bp, Homo sapiens
atattgacatattga

SEQ ID NO: 930903 - DNA, 15 bp, Homo sapiens
tatattgacatattg

SEQ ID NO: 930904 - DNA, 15 bp, Homo sapiens
ctatattgacatatt

SEQ ID NO: 930905 - DNA, 15 bp, Homo sapiens
cctatattgacatat

SEQ ID NO: 930906 - DNA, 15 bp, Homo sapiens
ccctatattgacata

SEQ ID NO: 930907 - DNA, 15 bp, Homo sapiens
gccctatattgacat

SEQ ID NO: 930908 - DNA, 15 bp, Homo sapiens
tgccctatattgaca

SEQ ID NO: 930909 - DNA, 15 bp, Homo sapiens
ctgccctatattgac

SEQ ID NO: 930910 - DNA, 15 bp, Homo sapiens
actgccctatattga

SEQ ID NO: 930911 - DNA, 15 bp, Homo sapiens
tactgccctatattg

SEQ ID NO: 930912 - DNA, 15 bp, Homo sapiens
atactgccctatatt

SEQ ID NO: 930913 - DNA, 15 bp, Homo sapiens
aatactgccctatat

SEQ ID NO: 930914 - DNA, 15 bp, Homo sapiens
aaatactgccctata

SEQ ID NO: 930915 - DNA, 15 bp, Homo sapiens
gaaatactgccctat

SEQ ID NO: 930916 - DNA, 15 bp, Homo sapiens
agaaatactgcccta

SEQ ID NO: 930917 - DNA, 15 bp, Homo sapiens
gagaaatactgccct

SEQ ID NO: 930918 - DNA, 15 bp, Homo sapiens
tgagaaatactgccc

SEQ ID NO: 930919 - DNA, 15 bp, Homo sapiens
ttgagaaatactgcc

SEQ ID NO: 930920 - DNA, 15 bp, Homo sapiens
tttgagaaatactgc

SEQ ID NO: 930921 - DNA, 15 bp, Homo sapiens
atttgagaaatactg

SEQ ID NO: 930922 - DNA, 15 bp, Homo sapiens
tatttgagaaatact

SEQ ID NO: 930923 - DNA, 15 bp, Homo sapiens
atatttgagaaatac

SEQ ID NO: 930924 - DNA, 15 bp, Homo sapiens
tatatttgagaaata

SEQ ID NO: 930925 - DNA, 15 bp, Homo sapiens
ctatatttgagaaat

SEQ ID NO: 930926 - DNA, 15 bp, Homo sapiens
tctatatttgagaaa

SEQ ID NO: 930927 - DNA, 15 bp, Homo sapiens
ctctatatttgagaa

SEQ ID NO: 930928 - DNA, 15 bp, Homo sapiens
cctctatatttgaga

SEQ ID NO: 930929 - DNA, 15 bp, Homo sapiens
tcctctatatttgag

SEQ ID NO: 930930 - DNA, 15 bp, Homo sapiens
atcctctatatttga

SEQ ID NO: 930931 - DNA, 15 bp, Homo sapiens
gatcctctatatttg

SEQ ID NO: 930932 - DNA, 15 bp, Homo sapiens
tgatcctctatattt

SEQ ID NO: 930933 - DNA, 15 bp, Homo sapiens
ctgatcctctatatt

SEQ ID NO: 930934 - DNA, 15 bp, Homo sapiens
actgatcctctatat

SEQ ID NO: 930935 - DNA, 15 bp, Homo sapiens
aactgatcctctata

SEQ ID NO: 930936 - DNA, 15 bp, Homo sapiens
aaactgatcctctat

SEQ ID NO: 930937 - DNA, 15 bp, Homo sapiens
aaaactgatcctcta

SEQ ID NO: 930938 - DNA, 15 bp, Homo sapiens
aaaaactgatcctct

SEQ ID NO: 930939 - DNA, 15 bp, Homo sapiens
gaaaaactgatcctc

SEQ ID NO: 930940 - DNA, 15 bp, Homo sapiens
tgaaaaactgatcct

SEQ ID NO: 930941 - DNA, 15 bp, Homo sapiens
gtgaaaaactgatcc

SEQ ID NO: 930942 - DNA, 15 bp, Homo sapiens
ggtgaaaaactgatc

SEQ ID NO: 930943 - DNA, 15 bp, Homo sapiens
tggtgaaaaactgat

SEQ ID NO: 930944 - DNA, 15 bp, Homo sapiens
atggtgaaaaactga

SEQ ID NO: 930945 - DNA, 15 bp, Homo sapiens
aatggtgaaaaactg

SEQ ID NO: 930946 - DNA, 15 bp, Homo sapiens
caatggtgaaaaact

SEQ ID NO: 930947 - DNA, 15 bp, Homo sapiens
acaatggtgaaaaac

SEQ ID NO: 930948 - DNA, 15 bp, Homo sapiens
gacaatggtgaaaaa

SEQ ID NO: 930949 - DNA, 15 bp, Homo sapiens
ggacaatggtgaaaa

SEQ ID NO: 930950 - DNA, 15 bp, Homo sapiens
gggacaatggtgaaa

SEQ ID NO: 930951 - DNA, 15 bp, Homo sapiens
agggacaatggtgaa

SEQ ID NO: 930952 - DNA, 15 bp, Homo sapiens
gagggacaatggtga

SEQ ID NO: 930953 - DNA, 15 bp, Homo sapiens
agagggacaatggtg

SEQ ID NO: 930954 - DNA, 15 bp, Homo sapiens
aagagggacaatggt

SEQ ID NO: 930955 - DNA, 15 bp, Homo sapiens
caagagggacaatgg

SEQ ID NO: 930956 - DNA, 15 bp, Homo sapiens
ccaagagggacaatg

SEQ ID NO: 930957 - DNA, 15 bp, Homo sapiens
cccaagagggacaat

SEQ ID NO: 930958 - DNA, 15 bp, Homo sapiens
ccccaagagggacaa

SEQ ID NO: 930959 - DNA, 15 bp, Homo sapiens
tccccaagagggaca

SEQ ID NO: 930960 - DNA, 15 bp, Homo sapiens
gtccccaagagggac

SEQ ID NO: 930961 - DNA, 15 bp, Homo sapiens
tgtccccaagaggga

SEQ ID NO: 930962 - DNA, 15 bp, Homo sapiens
atgtccccaagaggg

SEQ ID NO: 930963 - DNA, 15 bp, Homo sapiens
aatgtccccaagagg

SEQ ID NO: 930964 - DNA, 15 bp, Homo sapiens
aaatgtccccaagag

SEQ ID NO: 930965 - DNA, 15 bp, Homo sapiens
caaatgtccccaaga

SEQ ID NO: 930966 - DNA, 15 bp, Homo sapiens
ccaaatgtccccaag

SEQ ID NO: 930967 - DNA, 15 bp, Homo sapiens
gccaaatgtccccaa

SEQ ID NO: 930968 - DNA, 15 bp, Homo sapiens
cgccaaatgtcccca

SEQ ID NO: 930969 - DNA, 15 bp, Homo sapiens
tcgccaaatgtcccc

SEQ ID NO: 930970 - DNA, 15 bp, Homo sapiens
atcgccaaatgtccc

SEQ ID NO: 930971 - DNA, 15 bp, Homo sapiens
catcgccaaatgtcc

SEQ ID NO: 930972 - DNA, 15 bp, Homo sapiens
acatcgccaaatgtc

SEQ ID NO: 930973 - DNA, 15 bp, Homo sapiens
gacatcgccaaatgt

SEQ ID NO: 930974 - DNA, 15 bp, Homo sapiens
agacatcgccaaatg

SEQ ID NO: 930975 - DNA, 15 bp, Homo sapiens
cagacatcgccaaat

SEQ ID NO: 930976 - DNA, 15 bp, Homo sapiens
ccagacatcgccaaa

SEQ ID NO: 930977 - DNA, 15 bp, Homo sapiens
tccagacatcgccaa

SEQ ID NO: 930978 - DNA, 15 bp, Homo sapiens
ctccagacatcgcca

SEQ ID NO: 930979 - DNA, 15 bp, Homo sapiens
tctccagacatcgcc

SEQ ID NO: 930980 - DNA, 15 bp, Homo sapiens
gtctccagacatcgc

SEQ ID NO: 930981 - DNA, 15 bp, Homo sapiens
tgtctccagacatcg

SEQ ID NO: 930982 - DNA, 15 bp, Homo sapiens
atgtctccagacatc

SEQ ID NO: 930983 - DNA, 15 bp, Homo sapiens
aatgtctccagacat

SEQ ID NO: 930984 - DNA, 15 bp, Homo sapiens
aaatgtctccagaca

SEQ ID NO: 930985 - DNA, 15 bp, Homo sapiens
aaaatgtctccagac

SEQ ID NO: 930986 - DNA, 15 bp, Homo sapiens
aaaaatgtctccaga

SEQ ID NO: 930987 - DNA, 15 bp, Homo sapiens
caaaaatgtctccag

SEQ ID NO: 930988 - DNA, 15 bp, Homo sapiens
tcaaaaatgtctcca

SEQ ID NO: 930989 - DNA, 15 bp, Homo sapiens
atcaaaaatgtctcc

SEQ ID NO: 930990 - DNA, 15 bp, Homo sapiens
aatcaaaaatgtctc

SEQ ID NO: 930991 - DNA, 15 bp, Homo sapiens
caatcaaaaatgtct

SEQ ID NO: 930992 - DNA, 15 bp, Homo sapiens
acaatcaaaaatgtc

SEQ ID NO: 930993 - DNA, 15 bp, Homo sapiens
gacaatcaaaaatgt

SEQ ID NO: 930994 - DNA, 15 bp, Homo sapiens
tgacaatcaaaaatg

SEQ ID NO: 930995 - DNA, 15 bp, Homo sapiens
atgacaatcaaaaat

SEQ ID NO: 930996 - DNA, 15 bp, Homo sapiens
catgacaatcaaaaa

SEQ ID NO: 930997 - DNA, 15 bp, Homo sapiens
ccatgacaatcaaaa

SEQ ID NO: 930998 - DNA, 15 bp, Homo sapiens
gccatgacaatcaaa

SEQ ID NO: 930999 - DNA, 15 bp, Homo sapiens
agccatgacaatcaa

SEQ ID NO: 931000 - DNA, 15 bp, Homo sapiens
gagccatgacaatca

SEQ ID NO: 931001 - DNA, 15 bp, Homo sapiens
cgagccatgacaatc

SEQ ID NO: 931002 - DNA, 15 bp, Homo sapiens
ccgagccatgacaat

SEQ ID NO: 931003 - DNA, 15 bp, Homo sapiens
cccgagccatgacaa

SEQ ID NO: 931004 - DNA, 15 bp, Homo sapiens
ccccgagccatgaca

SEQ ID NO: 931005 - DNA, 15 bp, Homo sapiens
cccccgagccatgac

SEQ ID NO: 931006 - DNA, 15 bp, Homo sapiens
acccccgagccatga

SEQ ID NO: 931007 - DNA, 15 bp, Homo sapiens
cacccccgagccatg

SEQ ID NO: 931008 - DNA, 15 bp, Homo sapiens
gcacccccgagccat

SEQ ID NO: 931009 - DNA, 15 bp, Homo sapiens
agcacccccgagcca

SEQ ID NO: 931010 - DNA, 15 bp, Homo sapiens
tagcacccccgagcc

SEQ ID NO: 931011 - DNA, 15 bp, Homo sapiens
gtagcacccccgagc

SEQ ID NO: 931012 - DNA, 15 bp, Homo sapiens
agtagcacccccgag

SEQ ID NO: 931013 - DNA, 15 bp, Homo sapiens
cagtagcacccccga

SEQ ID NO: 931014 - DNA, 15 bp, Homo sapiens
ccagtagcacccccg

SEQ ID NO: 931015 - DNA, 15 bp, Homo sapiens
accagtagcaccccc

SEQ ID NO: 931016 - DNA, 15 bp, Homo sapiens
taccagtagcacccc

SEQ ID NO: 931017 - DNA, 15 bp, Homo sapiens
ataccagtagcaccc

SEQ ID NO: 931018 - DNA, 15 bp, Homo sapiens
gataccagtagcacc

SEQ ID NO: 931019 - DNA, 15 bp, Homo sapiens
ggataccagtagcac

SEQ ID NO: 931020 - DNA, 15 bp, Homo sapiens
tggataccagtagca

SEQ ID NO: 931021 - DNA, 15 bp, Homo sapiens
ctggataccagtagc

SEQ ID NO: 931022 - DNA, 15 bp, Homo sapiens
actggataccagtag

SEQ ID NO: 931023 - DNA, 15 bp, Homo sapiens
cactggataccagta

SEQ ID NO: 931024 - DNA, 15 bp, Homo sapiens
ccactggataccagt

SEQ ID NO: 931025 - DNA, 15 bp, Homo sapiens
cccactggataccag

SEQ ID NO: 931026 - DNA, 15 bp, Homo sapiens
acccactggatacca

SEQ ID NO: 931027 - DNA, 15 bp, Homo sapiens
tacccactggatacc

SEQ ID NO: 931028 - DNA, 15 bp, Homo sapiens
ctacccactggatac

SEQ ID NO: 931029 - DNA, 15 bp, Homo sapiens
tctacccactggata

SEQ ID NO: 931030 - DNA, 15 bp, Homo sapiens
ttctacccactggat

SEQ ID NO: 931031 - DNA, 15 bp, Homo sapiens
attctacccactgga

SEQ ID NO: 931032 - DNA, 15 bp, Homo sapiens
gattctacccactgg

SEQ ID NO: 931033 - DNA, 15 bp, Homo sapiens
tgattctacccactg

SEQ ID NO: 931034 - DNA, 15 bp, Homo sapiens
ttgattctacccact

SEQ ID NO: 931035 - DNA, 15 bp, Homo sapiens
tttgattctacccac

SEQ ID NO: 931036 - DNA, 15 bp, Homo sapiens
ttttgattctaccca

SEQ ID NO: 931037 - DNA, 15 bp, Homo sapiens
cttttgattctaccc

SEQ ID NO: 931038 - DNA, 15 bp, Homo sapiens
tcttttgattctacc

SEQ ID NO: 931039 - DNA, 15 bp, Homo sapiens
atcttttgattctac

SEQ ID NO: 931040 - DNA, 15 bp, Homo sapiens
catcttttgattcta

SEQ ID NO: 931041 - DNA, 15 bp, Homo sapiens
gcatcttttgattct

SEQ ID NO: 931042 - DNA, 15 bp, Homo sapiens
agcatcttttgattc

SEQ ID NO: 931043 - DNA, 15 bp, Homo sapiens
cagcatcttttgatt

SEQ ID NO: 931044 - DNA, 15 bp, Homo sapiens
gcagcatcttttgat

SEQ ID NO: 931045 - DNA, 15 bp, Homo sapiens
agcagcatcttttga

SEQ ID NO: 931046 - DNA, 15 bp, Homo sapiens
tagcagcatcttttg

SEQ ID NO: 931047 - DNA, 15 bp, Homo sapiens
ttagcagcatctttt

SEQ ID NO: 931048 - DNA, 15 bp, Homo sapiens
tttagcagcatcttt

SEQ ID NO: 931049 - DNA, 15 bp, Homo sapiens
gtttagcagcatctt

SEQ ID NO: 931050 - DNA, 15 bp, Homo sapiens
tgtttagcagcatct

SEQ ID NO: 931051 - DNA, 15 bp, Homo sapiens
atgtttagcagcatc

SEQ ID NO: 931052 - DNA, 15 bp, Homo sapiens
gatgtttagcagcat

SEQ ID NO: 931053 - DNA, 15 bp, Homo sapiens
ggatgtttagcagca

SEQ ID NO: 931054 - DNA, 15 bp, Homo sapiens
aggatgtttagcagc

SEQ ID NO: 931055 - DNA, 15 bp, Homo sapiens
taggatgtttagcag

SEQ ID NO: 931056 - DNA, 15 bp, Homo sapiens
ataggatgtttagca

SEQ ID NO: 931057 - DNA, 15 bp, Homo sapiens
gataggatgtttagc

SEQ ID NO: 931058 - DNA, 15 bp, Homo sapiens
tgataggatgtttag

SEQ ID NO: 931059 - DNA, 15 bp, Homo sapiens
atgataggatgttta

SEQ ID NO: 931060 - DNA, 15 bp, Homo sapiens
catgataggatgttt

SEQ ID NO: 931061 - DNA, 15 bp, Homo sapiens
gcatgataggatgtt

SEQ ID NO: 931062 - DNA, 15 bp, Homo sapiens
tgcatgataggatgt

SEQ ID NO: 931063 - DNA, 15 bp, Homo sapiens
gtgcatgataggatg

SEQ ID NO: 931064 - DNA, 15 bp, Homo sapiens
tgtgcatgataggat

SEQ ID NO: 931065 - DNA, 15 bp, Homo sapiens
ttgtgcatgatagga

SEQ ID NO: 931066 - DNA, 15 bp, Homo sapiens
cttgtgcatgatagg

SEQ ID NO: 931067 - DNA, 15 bp, Homo sapiens
ccttgtgcatgatag

SEQ ID NO: 931068 - DNA, 15 bp, Homo sapiens
gccttgtgcatgata

SEQ ID NO: 931069 - DNA, 15 bp, Homo sapiens
tgccttgtgcatgat

SEQ ID NO: 931070 - DNA, 15 bp, Homo sapiens
ctgccttgtgcatga

SEQ ID NO: 931071 - DNA, 15 bp, Homo sapiens
gctgccttgtgcatg

SEQ ID NO: 931072 - DNA, 15 bp, Homo sapiens
ggctgccttgtgcat

SEQ ID NO: 931073 - DNA, 15 bp, Homo sapiens
gggctgccttgtgca

SEQ ID NO: 931074 - DNA, 15 bp, Homo sapiens
ggggctgccttgtgc

SEQ ID NO: 931075 - DNA, 15 bp, Homo sapiens
tggggctgccttgtg

SEQ ID NO: 931076 - DNA, 15 bp, Homo sapiens
gtggggctgccttgt

SEQ ID NO: 931077 - DNA, 15 bp, Homo sapiens
ggtggggctgccttg

SEQ ID NO: 931078 - DNA, 15 bp, Homo sapiens
tggtggggctgcctt

SEQ ID NO: 931079 - DNA, 15 bp, Homo sapiens
gtggtggggctgcct

SEQ ID NO: 931080 - DNA, 15 bp, Homo sapiens
ggtggtggggctgcc

SEQ ID NO: 931081 - DNA, 15 bp, Homo sapiens
tggtggtggggctgc

SEQ ID NO: 931082 - DNA, 15 bp, Homo sapiens
ttggtggtggggctg

SEQ ID NO: 931083 - DNA, 15 bp, Homo sapiens
gttggtggtggggct

SEQ ID NO: 931084 - DNA, 15 bp, Homo sapiens
tgttggtggtggggc

SEQ ID NO: 931085 - DNA, 15 bp, Homo sapiens
ttgttggtggtgggg

SEQ ID NO: 931086 - DNA, 15 bp, Homo sapiens
tttgttggtggtggg

SEQ ID NO: 931087 - DNA, 15 bp, Homo sapiens
ctttgttggtggtgg

SEQ ID NO: 931088 - DNA, 15 bp, Homo sapiens
tctttgttggtggtg

SEQ ID NO: 931089 - DNA, 15 bp, Homo sapiens
ttctttgttggtggt

SEQ ID NO: 931090 - DNA, 15 bp, Homo sapiens
attctttgttggtgg

SEQ ID NO: 931091 - DNA, 15 bp, Homo sapiens
aattctttgttggtg

SEQ ID NO: 931092 - DNA, 15 bp, Homo sapiens
taattctttgttggt

SEQ ID NO: 931093 - DNA, 15 bp, Homo sapiens
ataattctttgttgg

SEQ ID NO: 931094 - DNA, 15 bp, Homo sapiens
gataattctttgttg

SEQ ID NO: 931095 - DNA, 15 bp, Homo sapiens
ggataattctttgtt

SEQ ID NO: 931096 - DNA, 15 bp, Homo sapiens
tggataattctttgt

SEQ ID NO: 931097 - DNA, 15 bp, Homo sapiens
ctggataattctttg

SEQ ID NO: 931098 - DNA, 15 bp, Homo sapiens
actggataattcttt

SEQ ID NO: 931099 - DNA, 15 bp, Homo sapiens
gactggataattctt

SEQ ID NO: 931100 - DNA, 15 bp, Homo sapiens
tgactggataattct

SEQ ID NO: 931101 - DNA, 15 bp, Homo sapiens
ttgactggataattc

SEQ ID NO: 931102 - DNA, 15 bp, Homo sapiens
tttgactggataatt

SEQ ID NO: 931103 - DNA, 15 bp, Homo sapiens
ttttgactggataat

SEQ ID NO: 931104 - DNA, 15 bp, Homo sapiens
tttttgactggataa

SEQ ID NO: 931105 - DNA, 15 bp, Homo sapiens
atttttgactggata

SEQ ID NO: 931106 - DNA, 15 bp, Homo sapiens
catttttgactggat

SEQ ID NO: 931107 - DNA, 15 bp, Homo sapiens
acatttttgactgga

SEQ ID NO: 931108 - DNA, 15 bp, Homo sapiens
aacatttttgactgg

SEQ ID NO: 931109 - DNA, 15 bp, Homo sapiens
taacatttttgactg

SEQ ID NO: 931110 - DNA, 15 bp, Homo sapiens
gtaacatttttgact

SEQ ID NO: 931111 - DNA, 15 bp, Homo sapiens
agtaacatttttgac

SEQ ID NO: 931112 - DNA, 15 bp, Homo sapiens
tagtaacatttttga

SEQ ID NO: 931113 - DNA, 15 bp, Homo sapiens
ctagtaacatttttg

SEQ ID NO: 931114 - DNA, 15 bp, Homo sapiens
actagtaacattttt

SEQ ID NO: 931115 - DNA, 15 bp, Homo sapiens
tactagtaacatttt

SEQ ID NO: 931116 - DNA, 15 bp, Homo sapiens
ctactagtaacattt

SEQ ID NO: 931117 - DNA, 15 bp, Homo sapiens
actactagtaacatt

SEQ ID NO: 931118 - DNA, 15 bp, Homo sapiens
tactactagtaacat

SEQ ID NO: 931119 - DNA, 15 bp, Homo sapiens
atactactagtaaca

SEQ ID NO: 931120 - DNA, 15 bp, Homo sapiens
catactactagtaac

SEQ ID NO: 931121 - DNA, 15 bp, Homo sapiens
ccatactactagtaa

SEQ ID NO: 931122 - DNA, 15 bp, Homo sapiens
accatactactagta

SEQ ID NO: 931123 - DNA, 15 bp, Homo sapiens
aaccatactactagt

SEQ ID NO: 931124 - DNA, 15 bp, Homo sapiens
taaccatactactag

SEQ ID NO: 931125 - DNA, 15 bp, Homo sapiens
ctaaccatactacta

SEQ ID NO: 931126 - DNA, 15 bp, Homo sapiens
cctaaccatactact

SEQ ID NO: 931127 - DNA, 15 bp, Homo sapiens
tcctaaccatactac

SEQ ID NO: 931128 - DNA, 15 bp, Homo sapiens
ttcctaaccatacta

SEQ ID NO: 931129 - DNA, 15 bp, Homo sapiens
tttcctaaccatact

SEQ ID NO: 931130 - DNA, 15 bp, Homo sapiens
gtttcctaaccatac

SEQ ID NO: 931131 - DNA, 15 bp, Homo sapiens
agtttcctaaccata

SEQ ID NO: 931132 - DNA, 15 bp, Homo sapiens
tagtttcctaaccat

SEQ ID NO: 931133 - DNA, 15 bp, Homo sapiens
atagtttcctaacca

SEQ ID NO: 931134 - DNA, 15 bp, Homo sapiens
gatagtttcctaacc

SEQ ID NO: 931135 - DNA, 15 bp, Homo sapiens
tgatagtttcctaac

SEQ ID NO: 931136 - DNA, 15 bp, Homo sapiens
atgatagtttcctaa

SEQ ID NO: 931137 - DNA, 15 bp, Homo sapiens
tatgatagtttccta

SEQ ID NO: 931138 - DNA, 15 bp, Homo sapiens
atatgatagtttcct

SEQ ID NO: 931139 - DNA, 15 bp, Homo sapiens
tatatgatagtttcc

SEQ ID NO: 931140 - DNA, 15 bp, Homo sapiens
ctatatgatagtttc

SEQ ID NO: 931141 - DNA, 15 bp, Homo sapiens
tctatatgatagttt

SEQ ID NO: 931142 - DNA, 15 bp, Homo sapiens
ctctatatgatagtt

SEQ ID NO: 931143 - DNA, 15 bp, Homo sapiens
cctctatatgatagt

SEQ ID NO: 931144 - DNA, 15 bp, Homo sapiens
tcctctatatgatag

SEQ ID NO: 931145 - DNA, 15 bp, Homo sapiens
ttcctctatatgata

SEQ ID NO: 931146 - DNA, 15 bp, Homo sapiens
cttcctctatatgat

SEQ ID NO: 931147 - DNA, 15 bp, Homo sapiens
gcttcctctatatga

SEQ ID NO: 931148 - DNA, 15 bp, Homo sapiens
tgcttcctctatatg

SEQ ID NO: 931149 - DNA, 15 bp, Homo sapiens
ttgcttcctctatat

SEQ ID NO: 931150 - DNA, 15 bp, Homo sapiens
attgcttcctctata

SEQ ID NO: 931151 - DNA, 15 bp, Homo sapiens
gattgcttcctctat

SEQ ID NO: 931152 - DNA, 15 bp, Homo sapiens
tgattgcttcctcta

SEQ ID NO: 931153 - DNA, 15 bp, Homo sapiens
gtgattgcttcctct

SEQ ID NO: 931154 - DNA, 15 bp, Homo sapiens
tgtgattgcttcctc

SEQ ID NO: 931155 - DNA, 15 bp, Homo sapiens
atgtgattgcttcct

SEQ ID NO: 931156 - DNA, 15 bp, Homo sapiens
aatgtgattgcttcc

SEQ ID NO: 931157 - DNA, 15 bp, Homo sapiens
aaatgtgattgcttc

SEQ ID NO: 931158 - DNA, 15 bp, Homo sapiens
aaaatgtgattgctt

SEQ ID NO: 931159 - DNA, 15 bp, Homo sapiens
taaaatgtgattgct

SEQ ID NO: 931160 - DNA, 15 bp, Homo sapiens
gtaaaatgtgattgc

SEQ ID NO: 931161 - DNA, 15 bp, Homo sapiens
tgtaaaatgtgattg

SEQ ID NO: 931162 - DNA, 15 bp, Homo sapiens
ttgtaaaatgtgatt

SEQ ID NO: 931163 - DNA, 15 bp, Homo sapiens
cttgtaaaatgtgat

SEQ ID NO: 931164 - DNA, 15 bp, Homo sapiens
tcttgtaaaatgtga

SEQ ID NO: 931165 - DNA, 15 bp, Homo sapiens
ctcttgtaaaatgtg

SEQ ID NO: 931166 - DNA, 15 bp, Homo sapiens
gctcttgtaaaatgt

SEQ ID NO: 931167 - DNA, 15 bp, Homo sapiens
ggctcttgtaaaatg

SEQ ID NO: 931168 - DNA, 15 bp, Homo sapiens
tggctcttgtaaaat

SEQ ID NO: 931169 - DNA, 15 bp, Homo sapiens
atggctcttgtaaaa

SEQ ID NO: 931170 - DNA, 15 bp, Homo sapiens
tatggctcttgtaaa

SEQ ID NO: 931171 - DNA, 15 bp, Homo sapiens
ttatggctcttgtaa

SEQ ID NO: 931172 - DNA, 15 bp, Homo sapiens
attatggctcttgta

SEQ ID NO: 931173 - DNA, 15 bp, Homo sapiens
tattatggctcttgt

SEQ ID NO: 931174 - DNA, 15 bp, Homo sapiens
atattatggctcttg

SEQ ID NO: 931175 - DNA, 15 bp, Homo sapiens
aatattatggctctt

SEQ ID NO: 931176 - DNA, 15 bp, Homo sapiens
aaatattatggctct

SEQ ID NO: 931177 - DNA, 15 bp, Homo sapiens
taaatattatggctc

SEQ ID NO: 931178 - DNA, 15 bp, Homo sapiens
ttaaatattatggct

SEQ ID NO: 931179 - DNA, 15 bp, Homo sapiens
tttaaatattatggc

SEQ ID NO: 931180 - DNA, 15 bp, Homo sapiens
ttttaaatattatgg

SEQ ID NO: 931181 - DNA, 15 bp, Homo sapiens
attttaaatattatg

SEQ ID NO: 931182 - DNA, 15 bp, Homo sapiens
cattttaaatattat

SEQ ID NO: 931183 - DNA, 15 bp, Homo sapiens
gcattttaaatatta

SEQ ID NO: 931184 - DNA, 15 bp, Homo sapiens
ggcattttaaatatt

SEQ ID NO: 931185 - DNA, 15 bp, Homo sapiens
aggcattttaaatat

SEQ ID NO: 931186 - DNA, 15 bp, Homo sapiens
aaggcattttaaata

SEQ ID NO: 931187 - DNA, 15 bp, Homo sapiens
aaaggcattttaaat

SEQ ID NO: 931188 - DNA, 15 bp, Homo sapiens
aaaaggcattttaaa

SEQ ID NO: 931189 - DNA, 15 bp, Homo sapiens
aaaaaggcattttaa

SEQ ID NO: 931190 - DNA, 15 bp, Homo sapiens
caaaaaggcatttta

SEQ ID NO: 931191 - DNA, 15 bp, Homo sapiens
acaaaaaggcatttt

SEQ ID NO: 931192 - DNA, 15 bp, Homo sapiens
aacaaaaaggcattt

SEQ ID NO: 931193 - DNA, 15 bp, Homo sapiens
gaacaaaaaggcatt

SEQ ID NO: 931194 - DNA, 15 bp, Homo sapiens
tgaacaaaaaggcat

SEQ ID NO: 931195 - DNA, 15 bp, Homo sapiens
atgaacaaaaaggca

SEQ ID NO: 931196 - DNA, 15 bp, Homo sapiens
aatgaacaaaaaggc

SEQ ID NO: 931197 - DNA, 15 bp, Homo sapiens
gaatgaacaaaaagg

SEQ ID NO: 931198 - DNA, 15 bp, Homo sapiens
agaatgaacaaaaag

SEQ ID NO: 931199 - DNA, 15 bp, Homo sapiens
gagaatgaacaaaaa

SEQ ID NO: 931200 - DNA, 15 bp, Homo sapiens
agagaatgaacaaaa

SEQ ID NO: 931201 - DNA, 15 bp, Homo sapiens
cagagaatgaacaaa

SEQ ID NO: 931202 - DNA, 15 bp, Homo sapiens
acagagaatgaacaa

SEQ ID NO: 931203 - DNA, 15 bp, Homo sapiens
tacagagaatgaaca

SEQ ID NO: 931204 - DNA, 15 bp, Homo sapiens
atacagagaatgaac

SEQ ID NO: 931205 - DNA, 15 bp, Homo sapiens
tatacagagaatgaa

SEQ ID NO: 931206 - DNA, 15 bp, Homo sapiens
atatacagagaatga

SEQ ID NO: 931207 - DNA, 15 bp, Homo sapiens
aatatacagagaatg

SEQ ID NO: 931208 - DNA, 15 bp, Homo sapiens
aaatatacagagaat

SEQ ID NO: 931209 - DNA, 15 bp, Homo sapiens
caaatatacagagaa

SEQ ID NO: 931210 - DNA, 15 bp, Homo sapiens
tcaaatatacagaga

SEQ ID NO: 931211 - DNA, 15 bp, Homo sapiens
gtcaaatatacagag

SEQ ID NO: 931212 - DNA, 15 bp, Homo sapiens
agtcaaatatacaga

SEQ ID NO: 931213 - DNA, 15 bp, Homo sapiens
tagtcaaatatacag

SEQ ID NO: 931214 - DNA, 15 bp, Homo sapiens
ctagtcaaatataca

SEQ ID NO: 931215 - DNA, 15 bp, Homo sapiens
tctagtcaaatatac

SEQ ID NO: 931216 - DNA, 15 bp, Homo sapiens
ctctagtcaaatata

SEQ ID NO: 931217 - DNA, 15 bp, Homo sapiens
actctagtcaaatat

SEQ ID NO: 931218 - DNA, 15 bp, Homo sapiens
gactctagtcaaata

SEQ ID NO: 931219 - DNA, 15 bp, Homo sapiens
tgactctagtcaaat

SEQ ID NO: 931220 - DNA, 15 bp, Homo sapiens
gtgactctagtcaaa

SEQ ID NO: 931221 - DNA, 15 bp, Homo sapiens
tgtgactctagtcaa

SEQ ID NO: 931222 - DNA, 15 bp, Homo sapiens
ttgtgactctagtca

SEQ ID NO: 931223 - DNA, 15 bp, Homo sapiens
tttgtgactctagtc

SEQ ID NO: 931224 - DNA, 15 bp, Homo sapiens
ttttgtgactctagt

SEQ ID NO: 931225 - DNA, 15 bp, Homo sapiens
attttgtgactctag

SEQ ID NO: 931226 - DNA, 15 bp, Homo sapiens
tattttgtgactcta

SEQ ID NO: 931227 - DNA, 15 bp, Homo sapiens
ttattttgtgactct

SEQ ID NO: 931228 - DNA, 15 bp, Homo sapiens
gttattttgtgactc

SEQ ID NO: 931229 - DNA, 15 bp, Homo sapiens
agttattttgtgact

SEQ ID NO: 931230 - DNA, 15 bp, Homo sapiens
aagttattttgtgac

SEQ ID NO: 931231 - DNA, 15 bp, Homo sapiens
caagttattttgtga

SEQ ID NO: 931232 - DNA, 15 bp, Homo sapiens
tcaagttattttgtg

SEQ ID NO: 931233 - DNA, 15 bp, Homo sapiens
atcaagttattttgt

SEQ ID NO: 931234 - DNA, 15 bp, Homo sapiens
tatcaagttattttg

SEQ ID NO: 931235 - DNA, 15 bp, Homo sapiens
ttatcaagttatttt

SEQ ID NO: 931236 - DNA, 15 bp, Homo sapiens
cttatcaagttattt

SEQ ID NO: 931237 - DNA, 15 bp, Homo sapiens
tcttatcaagttatt

SEQ ID NO: 931238 - DNA, 15 bp, Homo sapiens
atcttatcaagttat

SEQ ID NO: 931239 - DNA, 15 bp, Homo sapiens
aatcttatcaagtta

SEQ ID NO: 931240 - DNA, 15 bp, Homo sapiens
caatcttatcaagtt

SEQ ID NO: 931241 - DNA, 15 bp, Homo sapiens
acaatcttatcaagt

SEQ ID NO: 931242 - DNA, 15 bp, Homo sapiens
aacaatcttatcaag

SEQ ID NO: 931243 - DNA, 15 bp, Homo sapiens
caacaatcttatcaa

SEQ ID NO: 931244 - DNA, 15 bp, Homo sapiens
gcaacaatcttatca

SEQ ID NO: 931245 - DNA, 15 bp, Homo sapiens
ggcaacaatcttatc

SEQ ID NO: 931246 - DNA, 15 bp, Homo sapiens
tggcaacaatcttat

SEQ ID NO: 931247 - DNA, 15 bp, Homo sapiens
ttggcaacaatctta

SEQ ID NO: 931248 - DNA, 15 bp, Homo sapiens
tttggcaacaatctt

SEQ ID NO: 931249 - DNA, 15 bp, Homo sapiens
ttttggcaacaatct

SEQ ID NO: 931250 - DNA, 15 bp, Homo sapiens
tttttggcaacaatc

SEQ ID NO: 931251 - DNA, 15 bp, Homo sapiens
atttttggcaacaat

SEQ ID NO: 931252 - DNA, 15 bp, Homo sapiens
tatttttggcaacaa

SEQ ID NO: 931253 - DNA, 15 bp, Homo sapiens
atatttttggcaaca

SEQ ID NO: 931254 - DNA, 15 bp, Homo sapiens
aatatttttggcaac

SEQ ID NO: 931255 - DNA, 15 bp, Homo sapiens
taatatttttggcaa

SEQ ID NO: 931256 - DNA, 15 bp, Homo sapiens
ctaatatttttggca

SEQ ID NO: 931257 - DNA, 15 bp, Homo sapiens
tctaatatttttggc

SEQ ID NO: 931258 - DNA, 15 bp, Homo sapiens
ttctaatatttttgg

SEQ ID NO: 931259 - DNA, 15 bp, Homo sapiens
tttctaatatttttg

SEQ ID NO: 931260 - DNA, 15 bp, Homo sapiens
gtttctaatattttt

SEQ ID NO: 931261 - DNA, 15 bp, Homo sapiens
agtttctaatatttt

SEQ ID NO: 931262 - DNA, 15 bp, Homo sapiens
tagtttctaatattt

SEQ ID NO: 931263 - DNA, 15 bp, Homo sapiens
ctagtttctaatatt

SEQ ID NO: 931264 - DNA, 15 bp, Homo sapiens
tctagtttctaatat

SEQ ID NO: 931265 - DNA, 15 bp, Homo sapiens
ttctagtttctaata

SEQ ID NO: 931266 - DNA, 15 bp, Homo sapiens
cttctagtttctaat

SEQ ID NO: 931267 - DNA, 15 bp, Homo sapiens
tcttctagtttctaa

SEQ ID NO: 931268 - DNA, 15 bp, Homo sapiens
ttcttctagtttcta

SEQ ID NO: 931269 - DNA, 15 bp, Homo sapiens
tttcttctagtttct

SEQ ID NO: 931270 - DNA, 15 bp, Homo sapiens
ttttcttctagtttc

SEQ ID NO: 931271 - DNA, 15 bp, Homo sapiens
tttttcttctagttt

SEQ ID NO: 931272 - DNA, 15 bp, Homo sapiens
atttttcttctagtt

SEQ ID NO: 931273 - DNA, 15 bp, Homo sapiens
catttttcttctagt

SEQ ID NO: 931274 - DNA, 15 bp, Homo sapiens
acatttttcttctag

SEQ ID NO: 931275 - DNA, 15 bp, Homo sapiens
cacatttttcttcta

SEQ ID NO: 931276 - DNA, 15 bp, Homo sapiens
acacatttttcttct

SEQ ID NO: 931277 - DNA, 15 bp, Homo sapiens
aacacatttttcttc

SEQ ID NO: 931278 - DNA, 15 bp, Homo sapiens
caacacatttttctt

SEQ ID NO: 931279 - DNA, 15 bp, Homo sapiens
acaacacatttttct

SEQ ID NO: 931280 - DNA, 15 bp, Homo sapiens
aacaacacatttttc

SEQ ID NO: 931281 - DNA, 15 bp, Homo sapiens
taacaacacattttt

SEQ ID NO: 931282 - DNA, 15 bp, Homo sapiens
ttaacaacacatttt

SEQ ID NO: 931283 - DNA, 15 bp, Homo sapiens
cttaacaacacattt

SEQ ID NO: 931284 - DNA, 15 bp, Homo sapiens
acttaacaacacatt

SEQ ID NO: 931285 - DNA, 15 bp, Homo sapiens
gacttaacaacacat

SEQ ID NO: 931286 - DNA, 15 bp, Homo sapiens
agacttaacaacaca

SEQ ID NO: 931287 - DNA, 15 bp, Homo sapiens
tagacttaacaacac

SEQ ID NO: 931288 - DNA, 15 bp, Homo sapiens
ttagacttaacaaca

SEQ ID NO: 931289 - DNA, 15 bp, Homo sapiens
cttagacttaacaac

SEQ ID NO: 931290 - DNA, 15 bp, Homo sapiens
tcttagacttaacaa

SEQ ID NO: 931291 - DNA, 15 bp, Homo sapiens
ctcttagacttaaca

SEQ ID NO: 931292 - DNA, 15 bp, Homo sapiens
actcttagacttaac

SEQ ID NO: 931293 - DNA, 15 bp, Homo sapiens
tactcttagacttaa

SEQ ID NO: 931294 - DNA, 15 bp, Homo sapiens
ctactcttagactta

SEQ ID NO: 931295 - DNA, 15 bp, Homo sapiens
actactcttagactt

SEQ ID NO: 931296 - DNA, 15 bp, Homo sapiens
aactactcttagact

SEQ ID NO: 931297 - DNA, 15 bp, Homo sapiens
taactactcttagac

SEQ ID NO: 931298 - DNA, 15 bp, Homo sapiens
ttaactactcttaga

SEQ ID NO: 931299 - DNA, 15 bp, Homo sapiens
tttaactactcttag

SEQ ID NO: 931300 - DNA, 15 bp, Homo sapiens
atttaactactctta

SEQ ID NO: 931301 - DNA, 15 bp, Homo sapiens
catttaactactctt

SEQ ID NO: 931302 - DNA, 15 bp, Homo sapiens
tcatttaactactct

SEQ ID NO: 931303 - DNA, 15 bp, Homo sapiens
ttcatttaactactc

SEQ ID NO: 931304 - DNA, 15 bp, Homo sapiens
tttcatttaactact

SEQ ID NO: 931305 - DNA, 15 bp, Homo sapiens
atttcatttaactac

SEQ ID NO: 931306 - DNA, 15 bp, Homo sapiens
tatttcatttaacta

SEQ ID NO: 931307 - DNA, 15 bp, Homo sapiens
ttatttcatttaact

SEQ ID NO: 931308 - DNA, 15 bp, Homo sapiens
tttatttcatttaac

SEQ ID NO: 931309 - DNA, 15 bp, Homo sapiens
ctttatttcatttaa

SEQ ID NO: 931310 - DNA, 15 bp, Homo sapiens
tctttatttcattta

SEQ ID NO: 931311 - DNA, 15 bp, Homo sapiens
ttctttatttcattt

SEQ ID NO: 931312 - DNA, 15 bp, Homo sapiens
attctttatttcatt

SEQ ID NO: 931313 - DNA, 15 bp, Homo sapiens
aattctttatttcat

SEQ ID NO: 931314 - DNA, 15 bp, Homo sapiens
taattctttatttca

SEQ ID NO: 931315 - DNA, 15 bp, Homo sapiens
ataattctttatttc

SEQ ID NO: 931316 - DNA, 15 bp, Homo sapiens
aataattctttattt

SEQ ID NO: 931317 - DNA, 15 bp, Homo sapiens
gaataattctttatt

SEQ ID NO: 931318 - DNA, 15 bp, Homo sapiens
agaataattctttat

SEQ ID NO: 931319 - DNA, 15 bp, Homo sapiens
aagaataattcttta

SEQ ID NO: 931320 - DNA, 15 bp, Homo sapiens
gaagaataattcttt

SEQ ID NO: 931321 - DNA, 15 bp, Homo sapiens
agaagaataattctt

SEQ ID NO: 931322 - DNA, 15 bp, Homo sapiens
aagaagaataattct

SEQ ID NO: 931323 - DNA, 15 bp, Homo sapiens
aaagaagaataattc

SEQ ID NO: 931324 - DNA, 15 bp, Homo sapiens
caaagaagaataatt

SEQ ID NO: 931325 - DNA, 15 bp, Homo sapiens
ccaaagaagaataat

SEQ ID NO: 931326 - DNA, 15 bp, Homo sapiens
tccaaagaagaataa

SEQ ID NO: 931327 - DNA, 15 bp, Homo sapiens
atccaaagaagaata

SEQ ID NO: 931328 - DNA, 15 bp, Homo sapiens
aatccaaagaagaat

SEQ ID NO: 931329 - DNA, 15 bp, Homo sapiens
aaatccaaagaagaa

SEQ ID NO: 931330 - DNA, 15 bp, Homo sapiens
caaatccaaagaaga

SEQ ID NO: 931331 - DNA, 15 bp, Homo sapiens
ccaaatccaaagaag

SEQ ID NO: 931332 - DNA, 15 bp, Homo sapiens
tccaaatccaaagaa

SEQ ID NO: 931333 - DNA, 15 bp, Homo sapiens
atccaaatccaaaga

SEQ ID NO: 931334 - DNA, 15 bp, Homo sapiens
catccaaatccaaag

SEQ ID NO: 931335 - DNA, 15 bp, Homo sapiens
gcatccaaatccaaa

SEQ ID NO: 931336 - DNA, 15 bp, Homo sapiens
ggcatccaaatccaa

SEQ ID NO: 931337 - DNA, 15 bp, Homo sapiens
aggcatccaaatcca

SEQ ID NO: 931338 - DNA, 15 bp, Homo sapiens
caggcatccaaatcc

SEQ ID NO: 931339 - DNA, 15 bp, Homo sapiens
gcaggcatccaaatc

SEQ ID NO: 931340 - DNA, 15 bp, Homo sapiens
tgcaggcatccaaat

SEQ ID NO: 931341 - DNA, 15 bp, Homo sapiens
atgcaggcatccaaa

SEQ ID NO: 931342 - DNA, 15 bp, Homo sapiens
gatgcaggcatccaa

SEQ ID NO: 931343 - DNA, 15 bp, Homo sapiens
tgatgcaggcatcca

SEQ ID NO: 931344 - DNA, 15 bp, Homo sapiens
ttgatgcaggcatcc

SEQ ID NO: 931345 - DNA, 15 bp, Homo sapiens
cttgatgcaggcatc

SEQ ID NO: 931346 - DNA, 15 bp, Homo sapiens
tcttgatgcaggcat

SEQ ID NO: 931347 - DNA, 15 bp, Homo sapiens
atcttgatgcaggca

SEQ ID NO: 931348 - DNA, 15 bp, Homo sapiens
aatcttgatgcaggc

SEQ ID NO: 931349 - DNA, 15 bp, Homo sapiens
aaatcttgatgcagg

SEQ ID NO: 931350 - DNA, 15 bp, Homo sapiens
taaatcttgatgcag

SEQ ID NO: 931351 - DNA, 15 bp, Homo sapiens
ctaaatcttgatgca

SEQ ID NO: 931352 - DNA, 15 bp, Homo sapiens
tctaaatcttgatgc

SEQ ID NO: 931353 - DNA, 15 bp, Homo sapiens
atctaaatcttgatg

SEQ ID NO: 931354 - DNA, 15 bp, Homo sapiens
aatctaaatcttgat

SEQ ID NO: 931355 - DNA, 15 bp, Homo sapiens
caatctaaatcttga

SEQ ID NO: 931356 - DNA, 15 bp, Homo sapiens
acaatctaaatcttg

SEQ ID NO: 931357 - DNA, 15 bp, Homo sapiens
tacaatctaaatctt

SEQ ID NO: 931358 - DNA, 15 bp, Homo sapiens
ttacaatctaaatct

SEQ ID NO: 931359 - DNA, 15 bp, Homo sapiens
cttacaatctaaatc

SEQ ID NO: 931360 - DNA, 15 bp, Homo sapiens
ccttacaatctaaat

SEQ ID NO: 931361 - DNA, 15 bp, Homo sapiens
tccttacaatctaaa

SEQ ID NO: 931362 - DNA, 15 bp, Homo sapiens
atccttacaatctaa

SEQ ID NO: 931363 - DNA, 15 bp, Homo sapiens
tatccttacaatcta

SEQ ID NO: 931364 - DNA, 15 bp, Homo sapiens
gtatccttacaatct

SEQ ID NO: 931365 - DNA, 15 bp, Homo sapiens
agtatccttacaatc

SEQ ID NO: 931366 - DNA, 15 bp, Homo sapiens
aagtatccttacaat

SEQ ID NO: 931367 - DNA, 15 bp, Homo sapiens
taagtatccttacaa

SEQ ID NO: 931368 - DNA, 15 bp, Homo sapiens
ctaagtatccttaca

SEQ ID NO: 931369 - DNA, 15 bp, Homo sapiens
cctaagtatccttac

SEQ ID NO: 931370 - DNA, 15 bp, Homo sapiens
tcctaagtatcctta

SEQ ID NO: 931371 - DNA, 15 bp, Homo sapiens
gtcctaagtatcctt

SEQ ID NO: 931372 - DNA, 15 bp, Homo sapiens
agtcctaagtatcct

SEQ ID NO: 931373 - DNA, 15 bp, Homo sapiens
cagtcctaagtatcc

SEQ ID NO: 931374 - DNA, 15 bp, Homo sapiens
tcagtcctaagtatc

SEQ ID NO: 931375 - DNA, 15 bp, Homo sapiens
ttcagtcctaagtat

SEQ ID NO: 931376 - DNA, 15 bp, Homo sapiens
gttcagtcctaagta

SEQ ID NO: 931377 - DNA, 15 bp, Homo sapiens
tgttcagtcctaagt

SEQ ID NO: 931378 - DNA, 15 bp, Homo sapiens
atgttcagtcctaag

SEQ ID NO: 931379 - DNA, 15 bp, Homo sapiens
aatgttcagtcctaa

SEQ ID NO: 931380 - DNA, 15 bp, Homo sapiens
aaatgttcagtccta

SEQ ID NO: 931381 - DNA, 15 bp, Homo sapiens
caaatgttcagtcct

SEQ ID NO: 931382 - DNA, 15 bp, Homo sapiens
gcaaatgttcagtcc

SEQ ID NO: 931383 - DNA, 15 bp, Homo sapiens
agcaaatgttcagtc

SEQ ID NO: 931384 - DNA, 15 bp, Homo sapiens
gagcaaatgttcagt

SEQ ID NO: 931385 - DNA, 15 bp, Homo sapiens
agagcaaatgttcag

SEQ ID NO: 931386 - DNA, 15 bp, Homo sapiens
tagagcaaatgttca

SEQ ID NO: 931387 - DNA, 15 bp, Homo sapiens
atagagcaaatgttc

SEQ ID NO: 931388 - DNA, 15 bp, Homo sapiens
tatagagcaaatgtt

SEQ ID NO: 931389 - DNA, 15 bp, Homo sapiens
atatagagcaaatgt

SEQ ID NO: 931390 - DNA, 15 bp, Homo sapiens
catatagagcaaatg

SEQ ID NO: 931391 - DNA, 15 bp, Homo sapiens
tcatatagagcaaat

SEQ ID NO: 931392 - DNA, 15 bp, Homo sapiens
ttcatatagagcaaa

SEQ ID NO: 931393 - DNA, 15 bp, Homo sapiens
tttcatatagagcaa

SEQ ID NO: 931394 - DNA, 15 bp, Homo sapiens
atttcatatagagca

SEQ ID NO: 931395 - DNA, 15 bp, Homo sapiens
aatttcatatagagc

SEQ ID NO: 931396 - DNA, 15 bp, Homo sapiens
aaatttcatatagag

SEQ ID NO: 931397 - DNA, 15 bp, Homo sapiens
caaatttcatataga

SEQ ID NO: 931398 - DNA, 15 bp, Homo sapiens
acaaatttcatatag

SEQ ID NO: 931399 - DNA, 15 bp, Homo sapiens
tacaaatttcatata

SEQ ID NO: 931400 - DNA, 15 bp, Homo sapiens
atacaaatttcatat

SEQ ID NO: 931401 - DNA, 15 bp, Homo sapiens
aatacaaatttcata

SEQ ID NO: 931402 - DNA, 15 bp, Homo sapiens
taatacaaatttcat

SEQ ID NO: 931403 - DNA, 15 bp, Homo sapiens
ttaatacaaatttca

SEQ ID NO: 931404 - DNA, 15 bp, Homo sapiens
attaatacaaatttc

SEQ ID NO: 931405 - DNA, 15 bp, Homo sapiens
gattaatacaaattt

SEQ ID NO: 931406 - DNA, 15 bp, Homo sapiens
tgattaatacaaatt

SEQ ID NO: 931407 - DNA, 15 bp, Homo sapiens
ttgattaatacaaat

SEQ ID NO: 931408 - DNA, 15 bp, Homo sapiens
cttgattaatacaaa

SEQ ID NO: 931409 - DNA, 15 bp, Homo sapiens
ccttgattaatacaa

SEQ ID NO: 931410 - DNA, 15 bp, Homo sapiens
accttgattaataca

SEQ ID NO: 931411 - DNA, 15 bp, Homo sapiens
taccttgattaatac

SEQ ID NO: 931412 - DNA, 15 bp, Homo sapiens
ataccttgattaata

SEQ ID NO: 931413 - DNA, 15 bp, Homo sapiens
cataccttgattaat

SEQ ID NO: 931414 - DNA, 15 bp, Homo sapiens
tcataccttgattaa

SEQ ID NO: 931415 - DNA, 15 bp, Homo sapiens
ttcataccttgatta

SEQ ID NO: 931416 - DNA, 15 bp, Homo sapiens
attcataccttgatt

SEQ ID NO: 931417 - DNA, 15 bp, Homo sapiens
aattcataccttgat

SEQ ID NO: 931418 - DNA, 15 bp, Homo sapiens
caattcataccttga

SEQ ID NO: 931419 - DNA, 15 bp, Homo sapiens
gcaattcataccttg

SEQ ID NO: 931420 - DNA, 15 bp, Homo sapiens
tgcaattcatacctt

SEQ ID NO: 931421 - DNA, 15 bp, Homo sapiens
ctgcaattcatacct

SEQ ID NO: 931422 - DNA, 15 bp, Homo sapiens
gctgcaattcatacc

SEQ ID NO: 931423 - DNA, 15 bp, Homo sapiens
tgctgcaattcatac

SEQ ID NO: 931424 - DNA, 15 bp, Homo sapiens
ttgctgcaattcata

SEQ ID NO: 931425 - DNA, 15 bp, Homo sapiens
gttgctgcaattcat

SEQ ID NO: 931426 - DNA, 15 bp, Homo sapiens
ggttgctgcaattca

SEQ ID NO: 931427 - DNA, 15 bp, Homo sapiens
tggttgctgcaattc

SEQ ID NO: 931428 - DNA, 15 bp, Homo sapiens
gtggttgctgcaatt

SEQ ID NO: 931429 - DNA, 15 bp, Homo sapiens
agtggttgctgcaat

SEQ ID NO: 931430 - DNA, 15 bp, Homo sapiens
gagtggttgctgcaa

SEQ ID NO: 931431 - DNA, 15 bp, Homo sapiens
agagtggttgctgca

SEQ ID NO: 931432 - DNA, 15 bp, Homo sapiens
tagagtggttgctgc

SEQ ID NO: 931433 - DNA, 15 bp, Homo sapiens
atagagtggttgctg

SEQ ID NO: 931434 - DNA, 15 bp, Homo sapiens
aatagagtggttgct

SEQ ID NO: 931435 - DNA, 15 bp, Homo sapiens
taatagagtggttgc

SEQ ID NO: 931436 - DNA, 15 bp, Homo sapiens
ttaatagagtggttg

SEQ ID NO: 931437 - DNA, 15 bp, Homo sapiens
attaatagagtggtt

SEQ ID NO: 931438 - DNA, 15 bp, Homo sapiens
aattaatagagtggt

SEQ ID NO: 931439 - DNA, 15 bp, Homo sapiens
taattaatagagtgg

SEQ ID NO: 931440 - DNA, 15 bp, Homo sapiens
gtaattaatagagtg

SEQ ID NO: 931441 - DNA, 15 bp, Homo sapiens
tgtaattaatagagt

SEQ ID NO: 931442 - DNA, 15 bp, Homo sapiens
atgtaattaatagag

SEQ ID NO: 931443 - DNA, 15 bp, Homo sapiens
tatgtaattaataga

SEQ ID NO: 931444 - DNA, 15 bp, Homo sapiens
atatgtaattaatag

SEQ ID NO: 931445 - DNA, 15 bp, Homo sapiens
catatgtaattaata

SEQ ID NO: 931446 - DNA, 15 bp, Homo sapiens
acatatgtaattaat

SEQ ID NO: 931447 - DNA, 15 bp, Homo sapiens
aacatatgtaattaa

SEQ ID NO: 931448 - DNA, 15 bp, Homo sapiens
aaacatatgtaatta

SEQ ID NO: 931449 - DNA, 15 bp, Homo sapiens
caaacatatgtaatt

SEQ ID NO: 931450 - DNA, 15 bp, Homo sapiens
ccaaacatatgtaat

SEQ ID NO: 931451 - DNA, 15 bp, Homo sapiens
gccaaacatatgtaa

SEQ ID NO: 931452 - DNA, 15 bp, Homo sapiens
ggccaaacatatgta

SEQ ID NO: 931453 - DNA, 15 bp, Homo sapiens
tggccaaacatatgt

SEQ ID NO: 931454 - DNA, 15 bp, Homo sapiens
ctggccaaacatatg

SEQ ID NO: 931455 - DNA, 15 bp, Homo sapiens
cctggccaaacatat

SEQ ID NO: 931456 - DNA, 15 bp, Homo sapiens
acctggccaaacata

SEQ ID NO: 931457 - DNA, 15 bp, Homo sapiens
cacctggccaaacat

SEQ ID NO: 931458 - DNA, 15 bp, Homo sapiens
acacctggccaaaca

SEQ ID NO: 931459 - DNA, 15 bp, Homo sapiens
cacacctggccaaac

SEQ ID NO: 931460 - DNA, 15 bp, Homo sapiens
ccacacctggccaaa

SEQ ID NO: 931461 - DNA, 15 bp, Homo sapiens
accacacctggccaa

SEQ ID NO: 931462 - DNA, 15 bp, Homo sapiens
caccacacctggcca

SEQ ID NO: 931463 - DNA, 15 bp, Homo sapiens
ccaccacacctggcc

SEQ ID NO: 931464 - DNA, 15 bp, Homo sapiens
gccaccacacctggc

SEQ ID NO: 931465 - DNA, 15 bp, Homo sapiens
agccaccacacctgg

SEQ ID NO: 931466 - DNA, 15 bp, Homo sapiens
gagccaccacacctg

SEQ ID NO: 931467 - DNA, 15 bp, Homo sapiens
tgagccaccacacct

SEQ ID NO: 931468 - DNA, 15 bp, Homo sapiens
gtgagccaccacacc

SEQ ID NO: 931469 - DNA, 15 bp, Homo sapiens
tgtgagccaccacac

SEQ ID NO: 931470 - DNA, 15 bp, Homo sapiens
gtgtgagccaccaca

SEQ ID NO: 931471 - DNA, 15 bp, Homo sapiens
ggtgtgagccaccac

SEQ ID NO: 931472 - DNA, 15 bp, Homo sapiens
aggtgtgagccacca

SEQ ID NO: 931473 - DNA, 15 bp, Homo sapiens
caggtgtgagccacc

SEQ ID NO: 931474 - DNA, 15 bp, Homo sapiens
gattacaggtgtgag

SEQ ID NO: 931475 - DNA, 15 bp, Homo sapiens
ggattacaggtgtga

SEQ ID NO: 931476 - DNA, 15 bp, Homo sapiens
gggattacaggtgtg

SEQ ID NO: 931477 - DNA, 15 bp, Homo sapiens
tgggattacaggtgt

SEQ ID NO: 931478 - DNA, 15 bp, Homo sapiens
ctgggattacaggtg

SEQ ID NO: 931479 - DNA, 15 bp, Homo sapiens
gctgggattacaggt

SEQ ID NO: 931480 - DNA, 15 bp, Homo sapiens
ttgctgggattacag

SEQ ID NO: 931481 - DNA, 15 bp, Homo sapiens
attgctgggattaca

SEQ ID NO: 931482 - DNA, 15 bp, Homo sapiens
aattgctgggattac

SEQ ID NO: 931483 - DNA, 15 bp, Homo sapiens
aaattgctgggatta

SEQ ID NO: 931484 - DNA, 15 bp, Homo sapiens
caaattgctgggatt

SEQ ID NO: 931485 - DNA, 15 bp, Homo sapiens
ccaaattgctgggat

SEQ ID NO: 931486 - DNA, 15 bp, Homo sapiens
cccaaattgctggga

SEQ ID NO: 931487 - DNA, 15 bp, Homo sapiens
tcccaaattgctggg

SEQ ID NO: 931488 - DNA, 15 bp, Homo sapiens
atcccaaattgctgg

SEQ ID NO: 931489 - DNA, 15 bp, Homo sapiens
catcccaaattgctg

SEQ ID NO: 931490 - DNA, 15 bp, Homo sapiens
gcatcccaaattgct

SEQ ID NO: 931491 - DNA, 15 bp, Homo sapiens
ggcatcccaaattgc

SEQ ID NO: 931492 - DNA, 15 bp, Homo sapiens
tggcatcccaaattg

SEQ ID NO: 931493 - DNA, 15 bp, Homo sapiens
ttggcatcccaaatt

SEQ ID NO: 931494 - DNA, 15 bp, Homo sapiens
tttggcatcccaaat

SEQ ID NO: 931495 - DNA, 15 bp, Homo sapiens
ctttggcatcccaaa

SEQ ID NO: 931496 - DNA, 15 bp, Homo sapiens
gctttggcatcccaa

SEQ ID NO: 931497 - DNA, 15 bp, Homo sapiens
cgctttggcatccca

SEQ ID NO: 931498 - DNA, 15 bp, Homo sapiens
ccgctttggcatccc

SEQ ID NO: 931499 - DNA, 15 bp, Homo sapiens
cccgctttggcatcc

SEQ ID NO: 931500 - DNA, 15 bp, Homo sapiens
gcccgctttggcatc

SEQ ID NO: 931501 - DNA, 15 bp, Homo sapiens
agcccgctttggcat

SEQ ID NO: 931502 - DNA, 15 bp, Homo sapiens
aagcccgctttggca

SEQ ID NO: 931503 - DNA, 15 bp, Homo sapiens
taagcccgctttggc

SEQ ID NO: 931504 - DNA, 15 bp, Homo sapiens
ataagcccgctttgg

SEQ ID NO: 931505 - DNA, 15 bp, Homo sapiens
gataagcccgctttg

SEQ ID NO: 931506 - DNA, 15 bp, Homo sapiens
tgataagcccgcttt

SEQ ID NO: 931507 - DNA, 15 bp, Homo sapiens
gtgataagcccgctt

SEQ ID NO: 931508 - DNA, 15 bp, Homo sapiens
ggtgataagcccgct

SEQ ID NO: 931509 - DNA, 15 bp, Homo sapiens
aggtgataagcccgc

SEQ ID NO: 931510 - DNA, 15 bp, Homo sapiens
caggtgataagcccg

SEQ ID NO: 931511 - DNA, 15 bp, Homo sapiens
tcaggtgataagccc

SEQ ID NO: 931512 - DNA, 15 bp, Homo sapiens
ctcaggtgataagcc

SEQ ID NO: 931513 - DNA, 15 bp, Homo sapiens
cctcaggtgataagc

SEQ ID NO: 931514 - DNA, 15 bp, Homo sapiens
acctcaggtgataag

SEQ ID NO: 931515 - DNA, 15 bp, Homo sapiens
gacctcaggtgataa

SEQ ID NO: 931516 - DNA, 15 bp, Homo sapiens
tgacctcaggtgata

SEQ ID NO: 931517 - DNA, 15 bp, Homo sapiens
atgacctcaggtgat

SEQ ID NO: 931518 - DNA, 15 bp, Homo sapiens
catgacctcaggtga

SEQ ID NO: 931519 - DNA, 15 bp, Homo sapiens
gcatgacctcaggtg

SEQ ID NO: 931520 - DNA, 15 bp, Homo sapiens
cgcatgacctcaggt

SEQ ID NO: 931521 - DNA, 15 bp, Homo sapiens
acgcatgacctcagg

SEQ ID NO: 931522 - DNA, 15 bp, Homo sapiens
aacgcatgacctcag

SEQ ID NO: 931523 - DNA, 15 bp, Homo sapiens
gaacgcatgacctca

SEQ ID NO: 931524 - DNA, 15 bp, Homo sapiens
tgaacgcatgacctc

SEQ ID NO: 931525 - DNA, 15 bp, Homo sapiens
ttgaacgcatgacct

SEQ ID NO: 931526 - DNA, 15 bp, Homo sapiens
tttgaacgcatgacc

SEQ ID NO: 931527 - DNA, 15 bp, Homo sapiens
gtttgaacgcatgac

SEQ ID NO: 931528 - DNA, 15 bp, Homo sapiens
agtttgaacgcatga

SEQ ID NO: 931529 - DNA, 15 bp, Homo sapiens
cagtttgaacgcatg

SEQ ID NO: 931530 - DNA, 15 bp, Homo sapiens
ccagtttgaacgcat

SEQ ID NO: 931531 - DNA, 15 bp, Homo sapiens
gccagtttgaacgca

SEQ ID NO: 931532 - DNA, 15 bp, Homo sapiens
ggccagtttgaacgc

SEQ ID NO: 931533 - DNA, 15 bp, Homo sapiens
aggccagtttgaacg

SEQ ID NO: 931534 - DNA, 15 bp, Homo sapiens
caggccagtttgaac

SEQ ID NO: 931535 - DNA, 15 bp, Homo sapiens
ccaggccagtttgaa

SEQ ID NO: 931536 - DNA, 15 bp, Homo sapiens
gccaggccagtttga

SEQ ID NO: 931537 - DNA, 15 bp, Homo sapiens
ggccaggccagtttg

SEQ ID NO: 931538 - DNA, 15 bp, Homo sapiens
tggccaggccagttt

SEQ ID NO: 931539 - DNA, 15 bp, Homo sapiens
ttggccaggccagtt

SEQ ID NO: 931540 - DNA, 15 bp, Homo sapiens
gttggccaggccagt

SEQ ID NO: 931541 - DNA, 15 bp, Homo sapiens
tgttggccaggccag

SEQ ID NO: 931542 - DNA, 15 bp, Homo sapiens
atgttggccaggcca

SEQ ID NO: 931543 - DNA, 15 bp, Homo sapiens
catgttggccaggcc

SEQ ID NO: 931544 - DNA, 15 bp, Homo sapiens
accatgttggccagg

SEQ ID NO: 931545 - DNA, 15 bp, Homo sapiens
caccatgttggccag

SEQ ID NO: 931546 - DNA, 15 bp, Homo sapiens
tcaccatgttggcca

SEQ ID NO: 931547 - DNA, 15 bp, Homo sapiens
ttcaccatgttggcc

SEQ ID NO: 931548 - DNA, 15 bp, Homo sapiens
tttcaccatgttggc

SEQ ID NO: 931549 - DNA, 15 bp, Homo sapiens
gtttcaccatgttgg

SEQ ID NO: 931550 - DNA, 15 bp, Homo sapiens
ggtttcaccatgttg

SEQ ID NO: 931551 - DNA, 15 bp, Homo sapiens
gggtttcaccatgtt

SEQ ID NO: 931552 - DNA, 15 bp, Homo sapiens
ggggtttcaccatgt

SEQ ID NO: 931553 - DNA, 15 bp, Homo sapiens
tggggtttcaccatg

SEQ ID NO: 931554 - DNA, 15 bp, Homo sapiens
tttttagtagagatg

SEQ ID NO: 931555 - DNA, 15 bp, Homo sapiens
atttttagtagagat

SEQ ID NO: 931556 - DNA, 15 bp, Homo sapiens
agctaatttttgtat

SEQ ID NO: 931557 - DNA, 15 bp, Homo sapiens
cagctaatttttgta

SEQ ID NO: 931558 - DNA, 15 bp, Homo sapiens
ccagctaatttttgt

SEQ ID NO: 931559 - DNA, 15 bp, Homo sapiens
cccagctaatttttg

SEQ ID NO: 931560 - DNA, 15 bp, Homo sapiens
gcccagctaattttt

SEQ ID NO: 931561 - DNA, 15 bp, Homo sapiens
ggcccagctaatttt

SEQ ID NO: 931562 - DNA, 15 bp, Homo sapiens
aggcccagctaattt

SEQ ID NO: 931563 - DNA, 15 bp, Homo sapiens
caggcccagctaatt

SEQ ID NO: 931564 - DNA, 15 bp, Homo sapiens
tcaggcccagctaat

SEQ ID NO: 931565 - DNA, 15 bp, Homo sapiens
atcaggcccagctaa

SEQ ID NO: 931566 - DNA, 15 bp, Homo sapiens
catcaggcccagcta

SEQ ID NO: 931567 - DNA, 15 bp, Homo sapiens
ccatcaggcccagct

SEQ ID NO: 931568 - DNA, 15 bp, Homo sapiens
accatcaggcccagc

SEQ ID NO: 931569 - DNA, 15 bp, Homo sapiens
caccatcaggcccag

SEQ ID NO: 931570 - DNA, 15 bp, Homo sapiens
gcaccatcaggccca

SEQ ID NO: 931571 - DNA, 15 bp, Homo sapiens
tgcaccatcaggccc

SEQ ID NO: 931572 - DNA, 15 bp, Homo sapiens
gtgcaccatcaggcc

SEQ ID NO: 931573 - DNA, 15 bp, Homo sapiens
cgtgcaccatcaggc

SEQ ID NO: 931574 - DNA, 15 bp, Homo sapiens
gcgtgcaccatcagg

SEQ ID NO: 931575 - DNA, 15 bp, Homo sapiens
ggcgtgcaccatcag

SEQ ID NO: 931576 - DNA, 15 bp, Homo sapiens
gggcgtgcaccatca

SEQ ID NO: 931577 - DNA, 15 bp, Homo sapiens
cgggcgtgcaccatc

SEQ ID NO: 931578 - DNA, 15 bp, Homo sapiens
acgggcgtgcaccat

SEQ ID NO: 931579 - DNA, 15 bp, Homo sapiens
tacgggcgtgcacca

SEQ ID NO: 931580 - DNA, 15 bp, Homo sapiens
ctacgggcgtgcacc

SEQ ID NO: 931581 - DNA, 15 bp, Homo sapiens
actacgggcgtgcac

SEQ ID NO: 931582 - DNA, 15 bp, Homo sapiens
gactacgggcgtgca

SEQ ID NO: 931583 - DNA, 15 bp, Homo sapiens
ggactacgggcgtgc

SEQ ID NO: 931584 - DNA, 15 bp, Homo sapiens
gggactacgggcgtg

SEQ ID NO: 931585 - DNA, 15 bp, Homo sapiens
tgggactacgggcgt

SEQ ID NO: 931586 - DNA, 15 bp, Homo sapiens
ctgggactacgggcg

SEQ ID NO: 931587 - DNA, 15 bp, Homo sapiens
gctgggactacgggc

SEQ ID NO: 931588 - DNA, 15 bp, Homo sapiens
agctgggactacggg

SEQ ID NO: 931589 - DNA, 15 bp, Homo sapiens
tagctgggactacgg

SEQ ID NO: 931590 - DNA, 15 bp, Homo sapiens
gtagctgggactacg

SEQ ID NO: 931591 - DNA, 15 bp, Homo sapiens
ttcctgagtagctgg

SEQ ID NO: 931592 - DNA, 15 bp, Homo sapiens
cttcctgagtagctg

SEQ ID NO: 931593 - DNA, 15 bp, Homo sapiens
acttcctgagtagct

SEQ ID NO: 931594 - DNA, 15 bp, Homo sapiens
aacttcctgagtagc

SEQ ID NO: 931595 - DNA, 15 bp, Homo sapiens
caacttcctgagtag

SEQ ID NO: 931596 - DNA, 15 bp, Homo sapiens
tcaacttcctgagta

SEQ ID NO: 931597 - DNA, 15 bp, Homo sapiens
ctcaacttcctgagt

SEQ ID NO: 931598 - DNA, 15 bp, Homo sapiens
cctcaacttcctgag

SEQ ID NO: 931599 - DNA, 15 bp, Homo sapiens
gcctcaacttcctga

SEQ ID NO: 931600 - DNA, 15 bp, Homo sapiens
tgcctcaacttcctg

SEQ ID NO: 931601 - DNA, 15 bp, Homo sapiens
ttgcctcaacttcct

SEQ ID NO: 931602 - DNA, 15 bp, Homo sapiens
tttgcctcaacttcc

SEQ ID NO: 931603 - DNA, 15 bp, Homo sapiens
ttttgcctcaacttc

SEQ ID NO: 931604 - DNA, 15 bp, Homo sapiens
tttttgcctcaactt

SEQ ID NO: 931605 - DNA, 15 bp, Homo sapiens
ttttttgcctcaact

SEQ ID NO: 931606 - DNA, 15 bp, Homo sapiens
tttttttgcctcaac

SEQ ID NO: 931607 - DNA, 15 bp, Homo sapiens
atttttttgcctcaa

SEQ ID NO: 931608 - DNA, 15 bp, Homo sapiens
gatttttttgcctca

SEQ ID NO: 931609 - DNA, 15 bp, Homo sapiens
tgatttttttgcctc

SEQ ID NO: 931610 - DNA, 15 bp, Homo sapiens
gtgatttttttgcct

SEQ ID NO: 931611 - DNA, 15 bp, Homo sapiens
agtgatttttttgcc

SEQ ID NO: 931612 - DNA, 15 bp, Homo sapiens
aagtgatttttttgc

SEQ ID NO: 931613 - DNA, 15 bp, Homo sapiens
caagtgatttttttg

SEQ ID NO: 931614 - DNA, 15 bp, Homo sapiens
tcaagtgattttttt

SEQ ID NO: 931615 - DNA, 15 bp, Homo sapiens
ttcaagtgatttttt

SEQ ID NO: 931616 - DNA, 15 bp, Homo sapiens
attcaagtgattttt

SEQ ID NO: 931617 - DNA, 15 bp, Homo sapiens
gattcaagtgatttt

SEQ ID NO: 931618 - DNA, 15 bp, Homo sapiens
agattcaagtgattt

SEQ ID NO: 931619 - DNA, 15 bp, Homo sapiens
cagattcaagtgatt

SEQ ID NO: 931620 - DNA, 15 bp, Homo sapiens
ccagattcaagtgat

SEQ ID NO: 931621 - DNA, 15 bp, Homo sapiens
cccagattcaagtga

SEQ ID NO: 931622 - DNA, 15 bp, Homo sapiens
tcccagattcaagtg

SEQ ID NO: 931623 - DNA, 15 bp, Homo sapiens
ctcccagattcaagt

SEQ ID NO: 931624 - DNA, 15 bp, Homo sapiens
cctcccagattcaag

SEQ ID NO: 931625 - DNA, 15 bp, Homo sapiens
gcctcccagattcaa

SEQ ID NO: 931626 - DNA, 15 bp, Homo sapiens
tgcctcccagattca

SEQ ID NO: 931627 - DNA, 15 bp, Homo sapiens
ctgcctcccagattc

SEQ ID NO: 931628 - DNA, 15 bp, Homo sapiens
tctgcctcccagatt

SEQ ID NO: 931629 - DNA, 15 bp, Homo sapiens
ctctgcctcccagat

SEQ ID NO: 931630 - DNA, 15 bp, Homo sapiens
cctctgcctcccaga

SEQ ID NO: 931631 - DNA, 15 bp, Homo sapiens
acctctgcctcccag

SEQ ID NO: 931632 - DNA, 15 bp, Homo sapiens
aacctctgcctccca

SEQ ID NO: 931633 - DNA, 15 bp, Homo sapiens
gactgcaacctctgc

SEQ ID NO: 931634 - DNA, 15 bp, Homo sapiens
tgactgcaacctctg

SEQ ID NO: 931635 - DNA, 15 bp, Homo sapiens
ctgactgcaacctct

SEQ ID NO: 931636 - DNA, 15 bp, Homo sapiens
gctgactgcaacctc

SEQ ID NO: 931637 - DNA, 15 bp, Homo sapiens
ggctgactgcaacct

SEQ ID NO: 931638 - DNA, 15 bp, Homo sapiens
cggctgactgcaacc

SEQ ID NO: 931639 - DNA, 15 bp, Homo sapiens
tcggctgactgcaac

SEQ ID NO: 931640 - DNA, 15 bp, Homo sapiens
ctcggctgactgcaa

SEQ ID NO: 931641 - DNA, 15 bp, Homo sapiens
tctcggctgactgca

SEQ ID NO: 931642 - DNA, 15 bp, Homo sapiens
atctcggctgactgc

SEQ ID NO: 931643 - DNA, 15 bp, Homo sapiens
aatctcggctgactg

SEQ ID NO: 931644 - DNA, 15 bp, Homo sapiens
caatctcggctgact

SEQ ID NO: 931645 - DNA, 15 bp, Homo sapiens
gcaatctcggctgac

SEQ ID NO: 931646 - DNA, 15 bp, Homo sapiens
cgcaatctcggctga

SEQ ID NO: 931647 - DNA, 15 bp, Homo sapiens
gcgcaatctcggctg

SEQ ID NO: 931648 - DNA, 15 bp, Homo sapiens
agcgcaatctcggct

SEQ ID NO: 931649 - DNA, 15 bp, Homo sapiens
cagcgcaatctcggc

SEQ ID NO: 931650 - DNA, 15 bp, Homo sapiens
gcagcgcaatctcgg

SEQ ID NO: 931651 - DNA, 15 bp, Homo sapiens
agcagcgcaatctcg

SEQ ID NO: 931652 - DNA, 15 bp, Homo sapiens
cagcagcgcaatctc

SEQ ID NO: 931653 - DNA, 15 bp, Homo sapiens
gcagcagcgcaatct

SEQ ID NO: 931654 - DNA, 15 bp, Homo sapiens
tgcagcagcgcaatc

SEQ ID NO: 931655 - DNA, 15 bp, Homo sapiens
gtgcagcagcgcaat

SEQ ID NO: 931656 - DNA, 15 bp, Homo sapiens
agtgcagcagcgcaa

SEQ ID NO: 931657 - DNA, 15 bp, Homo sapiens
gagtgcagcagcgca

SEQ ID NO: 931658 - DNA, 15 bp, Homo sapiens
ggagtgcagcagcgc

SEQ ID NO: 931659 - DNA, 15 bp, Homo sapiens
tggagtgcagcagcg

SEQ ID NO: 931660 - DNA, 15 bp, Homo sapiens
ctggagtgcagcagc

SEQ ID NO: 931661 - DNA, 15 bp, Homo sapiens
gctggagtgcagcag

SEQ ID NO: 931662 - DNA, 15 bp, Homo sapiens
ggctggagtgcagca

SEQ ID NO: 931663 - DNA, 15 bp, Homo sapiens
aggctggagtgcagc

SEQ ID NO: 931664 - DNA, 15 bp, Homo sapiens
ctgtcacccaggctg

SEQ ID NO: 931665 - DNA, 15 bp, Homo sapiens
tctgtcacccaggct

SEQ ID NO: 931666 - DNA, 15 bp, Homo sapiens
ctctgtcacccaggc

SEQ ID NO: 931667 - DNA, 15 bp, Homo sapiens
actctgtcacccagg

SEQ ID NO: 931668 - DNA, 15 bp, Homo sapiens
cactctgtcacccag

SEQ ID NO: 931669 - DNA, 15 bp, Homo sapiens
ctcactctgtcaccc

SEQ ID NO: 931670 - DNA, 15 bp, Homo sapiens
tctcactctgtcacc

SEQ ID NO: 931671 - DNA, 15 bp, Homo sapiens
gtctcactctgtcac

SEQ ID NO: 931672 - DNA, 15 bp, Homo sapiens
agtctcactctgtca

SEQ ID NO: 931673 - DNA, 15 bp, Homo sapiens
cagtctcactctgtc

SEQ ID NO: 931674 - DNA, 15 bp, Homo sapiens
ccagtctcactctgt

SEQ ID NO: 931675 - DNA, 15 bp, Homo sapiens
cccagtctcactctg

SEQ ID NO: 931676 - DNA, 15 bp, Homo sapiens
acccagtctcactct

SEQ ID NO: 931677 - DNA, 15 bp, Homo sapiens
gacccagtctcactc

SEQ ID NO: 931678 - DNA, 15 bp, Homo sapiens
agacccagtctcact

SEQ ID NO: 931679 - DNA, 15 bp, Homo sapiens
gagacccagtctcac

SEQ ID NO: 931680 - DNA, 15 bp, Homo sapiens
tgagacccagtctca

SEQ ID NO: 931681 - DNA, 15 bp, Homo sapiens
ttgagacccagtctc

SEQ ID NO: 931682 - DNA, 15 bp, Homo sapiens
tttgagacccagtct

SEQ ID NO: 931683 - DNA, 15 bp, Homo sapiens
ttttgagacccagtc

SEQ ID NO: 931684 - DNA, 15 bp, Homo sapiens
tttttgagacccagt

SEQ ID NO: 931685 - DNA, 15 bp, Homo sapiens
ttttttgagacccag

SEQ ID NO: 931686 - DNA, 15 bp, Homo sapiens
tttttttgagaccca

SEQ ID NO: 931687 - DNA, 15 bp, Homo sapiens
atttttttgagaccc

SEQ ID NO: 931688 - DNA, 15 bp, Homo sapiens
aatttttttgagacc

SEQ ID NO: 931689 - DNA, 15 bp, Homo sapiens
taatttttttgagac

SEQ ID NO: 931690 - DNA, 15 bp, Homo sapiens
ttaatttttttgaga

SEQ ID NO: 931691 - DNA, 15 bp, Homo sapiens
tttaatttttttgag

SEQ ID NO: 931692 - DNA, 15 bp, Homo sapiens
ttttaatttttttga

SEQ ID NO: 931693 - DNA, 15 bp, Homo sapiens
tttttaatttttttg

SEQ ID NO: 931694 - DNA, 15 bp, Homo sapiens
atttttaattttttt

SEQ ID NO: 931695 - DNA, 15 bp, Homo sapiens
aatttttaatttttt

SEQ ID NO: 931696 - DNA, 15 bp, Homo sapiens
taatttttaattttt

SEQ ID NO: 931697 - DNA, 15 bp, Homo sapiens
ttaatttttaatttt

SEQ ID NO: 931698 - DNA, 15 bp, Homo sapiens
tttaatttttaattt

SEQ ID NO: 931699 - DNA, 15 bp, Homo sapiens
ttttaatttttaatt

SEQ ID NO: 931700 - DNA, 15 bp, Homo sapiens
tttttaatttttaat

SEQ ID NO: 931701 - DNA, 15 bp, Homo sapiens
ttttttaatttttaa

SEQ ID NO: 931702 - DNA, 15 bp, Homo sapiens
gttttttaattttta

SEQ ID NO: 931703 - DNA, 15 bp, Homo sapiens
tgttttttaattttt

SEQ ID NO: 931704 - DNA, 15 bp, Homo sapiens
gtgttttttaatttt

SEQ ID NO: 931705 - DNA, 15 bp, Homo sapiens
tgtgttttttaattt

SEQ ID NO: 931706 - DNA, 15 bp, Homo sapiens
gtgtgttttttaatt

SEQ ID NO: 931707 - DNA, 15 bp, Homo sapiens
tgtgtgttttttaat

SEQ ID NO: 931708 - DNA, 15 bp, Homo sapiens
gtgtgtgttttttaa

SEQ ID NO: 931709 - DNA, 15 bp, Homo sapiens
tgtgtgtgtttttta

SEQ ID NO: 931710 - DNA, 15 bp, Homo sapiens
gtgtgtgtgtttttt

SEQ ID NO: 931711 - DNA, 15 bp, Homo sapiens
tgtgtgtgtgttttt

SEQ ID NO: 931712 - DNA, 15 bp, Homo sapiens
gtgtgtgtgtgtttt

SEQ ID NO: 931713 - DNA, 15 bp, Homo sapiens
tgtgtgtgtgtgttt

SEQ ID NO: 931714 - DNA, 15 bp, Homo sapiens
atgtgtgtgtgtgtt

SEQ ID NO: 931715 - DNA, 15 bp, Homo sapiens
tatgtgtgtgtgtgt

SEQ ID NO: 931716 - DNA, 15 bp, Homo sapiens
atatgtgtgtgtgtg

SEQ ID NO: 931717 - DNA, 15 bp, Homo sapiens
catatgtgtgtgtgt

SEQ ID NO: 931718 - DNA, 15 bp, Homo sapiens
acatatgtgtgtgtg

SEQ ID NO: 931719 - DNA, 15 bp, Homo sapiens
aacatatgtgtgtgt

SEQ ID NO: 931720 - DNA, 15 bp, Homo sapiens
aaacatatgtgtgtg

SEQ ID NO: 931721 - DNA, 15 bp, Homo sapiens
taaacatatgtgtgt

SEQ ID NO: 931722 - DNA, 15 bp, Homo sapiens
ataaacatatgtgtg

SEQ ID NO: 931723 - DNA, 15 bp, Homo sapiens
aataaacatatgtgt

SEQ ID NO: 931724 - DNA, 15 bp, Homo sapiens
aaataaacatatgtg

SEQ ID NO: 931725 - DNA, 15 bp, Homo sapiens
taaataaacatatgt

SEQ ID NO: 931726 - DNA, 15 bp, Homo sapiens
gtaaataaacatatg

SEQ ID NO: 931727 - DNA, 15 bp, Homo sapiens
tgtaaataaacatat

SEQ ID NO: 931728 - DNA, 15 bp, Homo sapiens
gatgtaaataaacat

SEQ ID NO: 931729 - DNA, 15 bp, Homo sapiens
tgatgtaaataaaca

SEQ ID NO: 931730 - DNA, 15 bp, Homo sapiens
ctgatgtaaataaac

SEQ ID NO: 931731 - DNA, 15 bp, Homo sapiens
cctgatgtaaataaa

SEQ ID NO: 931732 - DNA, 15 bp, Homo sapiens
gcctgatgtaaataa

SEQ ID NO: 931733 - DNA, 15 bp, Homo sapiens
agcctgatgtaaata

SEQ ID NO: 931734 - DNA, 15 bp, Homo sapiens
aagcctgatgtaaat

SEQ ID NO: 931735 - DNA, 15 bp, Homo sapiens
gaagcctgatgtaaa

SEQ ID NO: 931736 - DNA, 15 bp, Homo sapiens
tgaagcctgatgtaa

SEQ ID NO: 931737 - DNA, 15 bp, Homo sapiens
ttgaagcctgatgta

SEQ ID NO: 931738 - DNA, 15 bp, Homo sapiens
cttgaagcctgatgt

SEQ ID NO: 931739 - DNA, 15 bp, Homo sapiens
tcttgaagcctgatg

SEQ ID NO: 931740 - DNA, 15 bp, Homo sapiens
ttcttgaagcctgat

SEQ ID NO: 931741 - DNA, 15 bp, Homo sapiens
tttcttgaagcctga

SEQ ID NO: 931742 - DNA, 15 bp, Homo sapiens
ttttcttgaagcctg

SEQ ID NO: 931743 - DNA, 15 bp, Homo sapiens
gttttcttgaagcct

SEQ ID NO: 931744 - DNA, 15 bp, Homo sapiens
ggttttcttgaagcc

SEQ ID NO: 931745 - DNA, 15 bp, Homo sapiens
tggttttcttgaagc

SEQ ID NO: 931746 - DNA, 15 bp, Homo sapiens
atggttttcttgaag

SEQ ID NO: 931747 - DNA, 15 bp, Homo sapiens
catggttttcttgaa

SEQ ID NO: 931748 - DNA, 15 bp, Homo sapiens
tcatggttttcttga

SEQ ID NO: 931749 - DNA, 15 bp, Homo sapiens
ttcatggttttcttg

SEQ ID NO: 931750 - DNA, 15 bp, Homo sapiens
cttcatggttttctt

SEQ ID NO: 931751 - DNA, 15 bp, Homo sapiens
tcttcatggttttct

SEQ ID NO: 931752 - DNA, 15 bp, Homo sapiens
atcttcatggttttc

SEQ ID NO: 931753 - DNA, 15 bp, Homo sapiens
catcttcatggtttt

SEQ ID NO: 931754 - DNA, 15 bp, Homo sapiens
tcatcttcatggttt

SEQ ID NO: 931755 - DNA, 15 bp, Homo sapiens
ttcatcttcatggtt

SEQ ID NO: 931756 - DNA, 15 bp, Homo sapiens
cttcatcttcatggt

SEQ ID NO: 931757 - DNA, 15 bp, Homo sapiens
acttcatcttcatgg

SEQ ID NO: 931758 - DNA, 15 bp, Homo sapiens
cacttcatcttcatg

SEQ ID NO: 931759 - DNA, 15 bp, Homo sapiens
tcacttcatcttcat

SEQ ID NO: 931760 - DNA, 15 bp, Homo sapiens
ttcacttcatcttca

SEQ ID NO: 931761 - DNA, 15 bp, Homo sapiens
tttcacttcatcttc

SEQ ID NO: 931762 - DNA, 15 bp, Homo sapiens
ttttcacttcatctt

SEQ ID NO: 931763 - DNA, 15 bp, Homo sapiens
tttttcacttcatct

SEQ ID NO: 931764 - DNA, 15 bp, Homo sapiens
ttttttcacttcatc

SEQ ID NO: 931765 - DNA, 15 bp, Homo sapiens
cttttttcacttcat

SEQ ID NO: 931766 - DNA, 15 bp, Homo sapiens
acttttttcacttca

SEQ ID NO: 931767 - DNA, 15 bp, Homo sapiens
tacttttttcacttc

SEQ ID NO: 931768 - DNA, 15 bp, Homo sapiens
ttacttttttcactt

SEQ ID NO: 931769 - DNA, 15 bp, Homo sapiens
tttacttttttcact

SEQ ID NO: 931770 - DNA, 15 bp, Homo sapiens
ttttacttttttcac

SEQ ID NO: 931771 - DNA, 15 bp, Homo sapiens
cttttacttttttca

SEQ ID NO: 931772 - DNA, 15 bp, Homo sapiens
gcttttacttttttc

SEQ ID NO: 931773 - DNA, 15 bp, Homo sapiens
cgcttttactttttt

SEQ ID NO: 931774 - DNA, 15 bp, Homo sapiens
ccgcttttacttttt

SEQ ID NO: 931775 - DNA, 15 bp, Homo sapiens
tccgcttttactttt

SEQ ID NO: 931776 - DNA, 15 bp, Homo sapiens
ttccgcttttacttt

SEQ ID NO: 931777 - DNA, 15 bp, Homo sapiens
cttccgcttttactt

SEQ ID NO: 931778 - DNA, 15 bp, Homo sapiens
acttccgcttttact

SEQ ID NO: 931779 - DNA, 15 bp, Homo sapiens
tacttccgcttttac

SEQ ID NO: 931780 - DNA, 15 bp, Homo sapiens
ctacttccgctttta

SEQ ID NO: 931781 - DNA, 15 bp, Homo sapiens
tctacttccgctttt

SEQ ID NO: 931782 - DNA, 15 bp, Homo sapiens
ctctacttccgcttt

SEQ ID NO: 931783 - DNA, 15 bp, Homo sapiens
cctctacttccgctt

SEQ ID NO: 931784 - DNA, 15 bp, Homo sapiens
tcctctacttccgct

SEQ ID NO: 931785 - DNA, 15 bp, Homo sapiens
atcctctacttccgc

SEQ ID NO: 931786 - DNA, 15 bp, Homo sapiens
aatcctctacttccg

SEQ ID NO: 931787 - DNA, 15 bp, Homo sapiens
aaatcctctacttcc

SEQ ID NO: 931788 - DNA, 15 bp, Homo sapiens
taaatcctctacttc

SEQ ID NO: 931789 - DNA, 15 bp, Homo sapiens
ttaaatcctctactt

SEQ ID NO: 931790 - DNA, 15 bp, Homo sapiens
tttaaatcctctact

SEQ ID NO: 931791 - DNA, 15 bp, Homo sapiens
ctttaaatcctctac

SEQ ID NO: 931792 - DNA, 15 bp, Homo sapiens
actttaaatcctcta

SEQ ID NO: 931793 - DNA, 15 bp, Homo sapiens
tactttaaatcctct

SEQ ID NO: 931794 - DNA, 15 bp, Homo sapiens
atactttaaatcctc

SEQ ID NO: 931795 - DNA, 15 bp, Homo sapiens
gatactttaaatcct

SEQ ID NO: 931796 - DNA, 15 bp, Homo sapiens
agatactttaaatcc

SEQ ID NO: 931797 - DNA, 15 bp, Homo sapiens
aagatactttaaatc

SEQ ID NO: 931798 - DNA, 15 bp, Homo sapiens
gaagatactttaaat

SEQ ID NO: 931799 - DNA, 15 bp, Homo sapiens
agaagatactttaaa

SEQ ID NO: 931800 - DNA, 15 bp, Homo sapiens
cagaagatactttaa

SEQ ID NO: 931801 - DNA, 15 bp, Homo sapiens
ccagaagatacttta

SEQ ID NO: 931802 - DNA, 15 bp, Homo sapiens
tccagaagatacttt

SEQ ID NO: 931803 - DNA, 15 bp, Homo sapiens
gtccagaagatactt

SEQ ID NO: 931804 - DNA, 15 bp, Homo sapiens
ggtccagaagatact

SEQ ID NO: 931805 - DNA, 15 bp, Homo sapiens
tggtccagaagatac

SEQ ID NO: 931806 - DNA, 15 bp, Homo sapiens
ctggtccagaagata

SEQ ID NO: 931807 - DNA, 15 bp, Homo sapiens
actggtccagaagat

SEQ ID NO: 931808 - DNA, 15 bp, Homo sapiens
gactggtccagaaga

SEQ ID NO: 931809 - DNA, 15 bp, Homo sapiens
tgactggtccagaag

SEQ ID NO: 931810 - DNA, 15 bp, Homo sapiens
gtgactggtccagaa

SEQ ID NO: 931811 - DNA, 15 bp, Homo sapiens
tgtgactggtccaga

SEQ ID NO: 931812 - DNA, 15 bp, Homo sapiens
ttgtgactggtccag

SEQ ID NO: 931813 - DNA, 15 bp, Homo sapiens
tttgtgactggtcca

SEQ ID NO: 931814 - DNA, 15 bp, Homo sapiens
ttttgtgactggtcc

SEQ ID NO: 931815 - DNA, 15 bp, Homo sapiens
cttttgtgactggtc

SEQ ID NO: 931816 - DNA, 15 bp, Homo sapiens
ccttttgtgactggt

SEQ ID NO: 931817 - DNA, 15 bp, Homo sapiens
tccttttgtgactgg

SEQ ID NO: 931818 - DNA, 15 bp, Homo sapiens
ctccttttgtgactg

SEQ ID NO: 931819 - DNA, 15 bp, Homo sapiens
actccttttgtgact

SEQ ID NO: 931820 - DNA, 15 bp, Homo sapiens
gactccttttgtgac

SEQ ID NO: 931821 - DNA, 15 bp, Homo sapiens
tgactccttttgtga

SEQ ID NO: 931822 - DNA, 15 bp, Homo sapiens
gtgactccttttgtg

SEQ ID NO: 931823 - DNA, 15 bp, Homo sapiens
tgtgactccttttgt

SEQ ID NO: 931824 - DNA, 15 bp, Homo sapiens
ctgtgactccttttg

SEQ ID NO: 931825 - DNA, 15 bp, Homo sapiens
actgtgactcctttt

SEQ ID NO: 931826 - DNA, 15 bp, Homo sapiens
cactgtgactccttt

SEQ ID NO: 931827 - DNA, 15 bp, Homo sapiens
acactgtgactcctt

SEQ ID NO: 931828 - DNA, 15 bp, Homo sapiens
aacactgtgactcct

SEQ ID NO: 931829 - DNA, 15 bp, Homo sapiens
aaacactgtgactcc

SEQ ID NO: 931830 - DNA, 15 bp, Homo sapiens
taaacactgtgactc

SEQ ID NO: 931831 - DNA, 15 bp, Homo sapiens
ttaaacactgtgact

SEQ ID NO: 931832 - DNA, 15 bp, Homo sapiens
tttaaacactgtgac

SEQ ID NO: 931833 - DNA, 15 bp, Homo sapiens
ttttaaacactgtga

SEQ ID NO: 931834 - DNA, 15 bp, Homo sapiens
attttaaacactgtg

SEQ ID NO: 931835 - DNA, 15 bp, Homo sapiens
gattttaaacactgt

SEQ ID NO: 931836 - DNA, 15 bp, Homo sapiens
agattttaaacactg

SEQ ID NO: 931837 - DNA, 15 bp, Homo sapiens
cagattttaaacact

SEQ ID NO: 931838 - DNA, 15 bp, Homo sapiens
tcagattttaaacac

SEQ ID NO: 931839 - DNA, 15 bp, Homo sapiens
ttcagattttaaaca

SEQ ID NO: 931840 - DNA, 15 bp, Homo sapiens
gttcagattttaaac

SEQ ID NO: 931841 - DNA, 15 bp, Homo sapiens
agttcagattttaaa

SEQ ID NO: 931842 - DNA, 15 bp, Homo sapiens
aagttcagattttaa

SEQ ID NO: 931843 - DNA, 15 bp, Homo sapiens
gaagttcagatttta

SEQ ID NO: 931844 - DNA, 15 bp, Homo sapiens
tgaagttcagatttt

SEQ ID NO: 931845 - DNA, 15 bp, Homo sapiens
ctgaagttcagattt

SEQ ID NO: 931846 - DNA, 15 bp, Homo sapiens
cctgaagttcagatt

SEQ ID NO: 931847 - DNA, 15 bp, Homo sapiens
gcctgaagttcagat

SEQ ID NO: 931848 - DNA, 15 bp, Homo sapiens
agcctgaagttcaga

SEQ ID NO: 931849 - DNA, 15 bp, Homo sapiens
gagcctgaagttcag

SEQ ID NO: 931850 - DNA, 15 bp, Homo sapiens
tgagcctgaagttca

SEQ ID NO: 931851 - DNA, 15 bp, Homo sapiens
ttgagcctgaagttc

SEQ ID NO: 931852 - DNA, 15 bp, Homo sapiens
tttgagcctgaagtt

SEQ ID NO: 931853 - DNA, 15 bp, Homo sapiens
ttttgagcctgaagt

SEQ ID NO: 931854 - DNA, 15 bp, Homo sapiens
tttttgagcctgaag

SEQ ID NO: 931855 - DNA, 15 bp, Homo sapiens
ctttttgagcctgaa

SEQ ID NO: 931856 - DNA, 15 bp, Homo sapiens
tctttttgagcctga

SEQ ID NO: 931857 - DNA, 15 bp, Homo sapiens
ttctttttgagcctg

SEQ ID NO: 931858 - DNA, 15 bp, Homo sapiens
cttctttttgagcct

SEQ ID NO: 931859 - DNA, 15 bp, Homo sapiens
gcttctttttgagcc

SEQ ID NO: 931860 - DNA, 15 bp, Homo sapiens
tgcttctttttgagc

SEQ ID NO: 931861 - DNA, 15 bp, Homo sapiens
ttgcttctttttgag

SEQ ID NO: 931862 - DNA, 15 bp, Homo sapiens
tttgcttctttttga

SEQ ID NO: 931863 - DNA, 15 bp, Homo sapiens
atttgcttctttttg

SEQ ID NO: 931864 - DNA, 15 bp, Homo sapiens
aatttgcttcttttt

SEQ ID NO: 931865 - DNA, 15 bp, Homo sapiens
gaatttgcttctttt

SEQ ID NO: 931866 - DNA, 15 bp, Homo sapiens
tgaatttgcttcttt

SEQ ID NO: 931867 - DNA, 15 bp, Homo sapiens
ttgaatttgcttctt

SEQ ID NO: 931868 - DNA, 15 bp, Homo sapiens
cttgaatttgcttct

SEQ ID NO: 931869 - DNA, 15 bp, Homo sapiens
tcttgaatttgcttc

SEQ ID NO: 931870 - DNA, 15 bp, Homo sapiens
ctcttgaatttgctt

SEQ ID NO: 931871 - DNA, 15 bp, Homo sapiens
gctcttgaatttgct

SEQ ID NO: 931872 - DNA, 15 bp, Homo sapiens
agctcttgaatttgc

SEQ ID NO: 931873 - DNA, 15 bp, Homo sapiens
gagctcttgaatttg

SEQ ID NO: 931874 - DNA, 15 bp, Homo sapiens
ggagctcttgaattt

SEQ ID NO: 931875 - DNA, 15 bp, Homo sapiens
tggagctcttgaatt

SEQ ID NO: 931876 - DNA, 15 bp, Homo sapiens
ttggagctcttgaat

SEQ ID NO: 931877 - DNA, 15 bp, Homo sapiens
gttggagctcttgaa

SEQ ID NO: 931878 - DNA, 15 bp, Homo sapiens
tgttggagctcttga

SEQ ID NO: 931879 - DNA, 15 bp, Homo sapiens
ttgttggagctcttg

SEQ ID NO: 931880 - DNA, 15 bp, Homo sapiens
gttgttggagctctt

SEQ ID NO: 931881 - DNA, 15 bp, Homo sapiens
agttgttggagctct

SEQ ID NO: 931882 - DNA, 15 bp, Homo sapiens
tagttgttggagctc

SEQ ID NO: 931883 - DNA, 15 bp, Homo sapiens
gtagttgttggagct

SEQ ID NO: 931884 - DNA, 15 bp, Homo sapiens
tgtagttgttggagc

SEQ ID NO: 931885 - DNA, 15 bp, Homo sapiens
ttgtagttgttggag

SEQ ID NO: 931886 - DNA, 15 bp, Homo sapiens
attgtagttgttgga

SEQ ID NO: 931887 - DNA, 15 bp, Homo sapiens
cattgtagttgttgg

SEQ ID NO: 931888 - DNA, 15 bp, Homo sapiens
tcattgtagttgttg

SEQ ID NO: 931889 - DNA, 15 bp, Homo sapiens
ctcattgtagttgtt

SEQ ID NO: 931890 - DNA, 15 bp, Homo sapiens
tctcattgtagttgt

SEQ ID NO: 931891 - DNA, 15 bp, Homo sapiens
ttctcattgtagttg

SEQ ID NO: 931892 - DNA, 15 bp, Homo sapiens
tttctcattgtagtt

SEQ ID NO: 931893 - DNA, 15 bp, Homo sapiens
atttctcattgtagt

SEQ ID NO: 931894 - DNA, 15 bp, Homo sapiens
gatttctcattgtag

SEQ ID NO: 931895 - DNA, 15 bp, Homo sapiens
agatttctcattgta

SEQ ID NO: 931896 - DNA, 15 bp, Homo sapiens
tagatttctcattgt

SEQ ID NO: 931897 - DNA, 15 bp, Homo sapiens
ctagatttctcattg

SEQ ID NO: 931898 - DNA, 15 bp, Homo sapiens
actagatttctcatt

SEQ ID NO: 931899 - DNA, 15 bp, Homo sapiens
tactagatttctcat

SEQ ID NO: 931900 - DNA, 15 bp, Homo sapiens
ctactagatttctca

SEQ ID NO: 931901 - DNA, 15 bp, Homo sapiens
tctactagatttctc

SEQ ID NO: 931902 - DNA, 15 bp, Homo sapiens
ttctactagatttct

SEQ ID NO: 931903 - DNA, 15 bp, Homo sapiens
gttctactagatttc

SEQ ID NO: 931904 - DNA, 15 bp, Homo sapiens
cgttctactagattt

SEQ ID NO: 931905 - DNA, 15 bp, Homo sapiens
ccgttctactagatt

SEQ ID NO: 931906 - DNA, 15 bp, Homo sapiens
gccgttctactagat

SEQ ID NO: 931907 - DNA, 15 bp, Homo sapiens
agccgttctactaga

SEQ ID NO: 931908 - DNA, 15 bp, Homo sapiens
tagccgttctactag

SEQ ID NO: 931909 - DNA, 15 bp, Homo sapiens
ttagccgttctacta

SEQ ID NO: 931910 - DNA, 15 bp, Homo sapiens
tttagccgttctact

SEQ ID NO: 931911 - DNA, 15 bp, Homo sapiens
ctttagccgttctac

SEQ ID NO: 931912 - DNA, 15 bp, Homo sapiens
tctttagccgttcta

SEQ ID NO: 931913 - DNA, 15 bp, Homo sapiens
ctctttagccgttct

SEQ ID NO: 931914 - DNA, 15 bp, Homo sapiens
gctctttagccgttc

SEQ ID NO: 931915 - DNA, 15 bp, Homo sapiens
ggctctttagccgtt

SEQ ID NO: 931916 - DNA, 15 bp, Homo sapiens
tggctctttagccgt

SEQ ID NO: 931917 - DNA, 15 bp, Homo sapiens
ttggctctttagccg

SEQ ID NO: 931918 - DNA, 15 bp, Homo sapiens
attggctctttagcc

SEQ ID NO: 931919 - DNA, 15 bp, Homo sapiens
aattggctctttagc

SEQ ID NO: 931920 - DNA, 15 bp, Homo sapiens
taattggctctttag

SEQ ID NO: 931921 - DNA, 15 bp, Homo sapiens
ctaattggctcttta

SEQ ID NO: 931922 - DNA, 15 bp, Homo sapiens
gctaattggctcttt

SEQ ID NO: 931923 - DNA, 15 bp, Homo sapiens
ggctaattggctctt

SEQ ID NO: 931924 - DNA, 15 bp, Homo sapiens
aggctaattggctct

SEQ ID NO: 931925 - DNA, 15 bp, Homo sapiens
aaggctaattggctc

SEQ ID NO: 931926 - DNA, 15 bp, Homo sapiens
caaggctaattggct

SEQ ID NO: 931927 - DNA, 15 bp, Homo sapiens
tcaaggctaattggc

SEQ ID NO: 931928 - DNA, 15 bp, Homo sapiens
ttcaaggctaattgg

SEQ ID NO: 931929 - DNA, 15 bp, Homo sapiens
cttcaaggctaattg

SEQ ID NO: 931930 - DNA, 15 bp, Homo sapiens
ccttcaaggctaatt

SEQ ID NO: 931931 - DNA, 15 bp, Homo sapiens
tccttcaaggctaat

SEQ ID NO: 931932 - DNA, 15 bp, Homo sapiens
ctccttcaaggctaa

SEQ ID NO: 931933 - DNA, 15 bp, Homo sapiens
tctccttcaaggcta

SEQ ID NO: 931934 - DNA, 15 bp, Homo sapiens
ttctccttcaaggct

SEQ ID NO: 931935 - DNA, 15 bp, Homo sapiens
tttctccttcaaggc

SEQ ID NO: 931936 - DNA, 15 bp, Homo sapiens
gtttctccttcaagg

SEQ ID NO: 931937 - DNA, 15 bp, Homo sapiens
tgtttctccttcaag

SEQ ID NO: 931938 - DNA, 15 bp, Homo sapiens
ttgtttctccttcaa

SEQ ID NO: 931939 - DNA, 15 bp, Homo sapiens
gttgtttctccttca

SEQ ID NO: 931940 - DNA, 15 bp, Homo sapiens
tgttgtttctccttc

SEQ ID NO: 931941 - DNA, 15 bp, Homo sapiens
ctgttgtttctcctt

SEQ ID NO: 931942 - DNA, 15 bp, Homo sapiens
tctgttgtttctcct

SEQ ID NO: 931943 - DNA, 15 bp, Homo sapiens
ttctgttgtttctcc

SEQ ID NO: 931944 - DNA, 15 bp, Homo sapiens
tttctgttgtttctc

SEQ ID NO: 931945 - DNA, 15 bp, Homo sapiens
ctttctgttgtttct

SEQ ID NO: 931946 - DNA, 15 bp, Homo sapiens
actttctgttgtttc

SEQ ID NO: 931947 - DNA, 15 bp, Homo sapiens
tactttctgttgttt

SEQ ID NO: 931948 - DNA, 15 bp, Homo sapiens
ttactttctgttgtt

SEQ ID NO: 931949 - DNA, 15 bp, Homo sapiens
cttactttctgttgt

SEQ ID NO: 931950 - DNA, 15 bp, Homo sapiens
acttactttctgttg

SEQ ID NO: 931951 - DNA, 15 bp, Homo sapiens
tacttactttctgtt

SEQ ID NO: 931952 - DNA, 15 bp, Homo sapiens
ttacttactttctgt

SEQ ID NO: 931953 - DNA, 15 bp, Homo sapiens
gttacttactttctg

SEQ ID NO: 931954 - DNA, 15 bp, Homo sapiens
tgttacttactttct

SEQ ID NO: 931955 - DNA, 15 bp, Homo sapiens
ttgttacttactttc

SEQ ID NO: 931956 - DNA, 15 bp, Homo sapiens
gttgttacttacttt

SEQ ID NO: 931957 - DNA, 15 bp, Homo sapiens
tgttgttacttactt

SEQ ID NO: 931958 - DNA, 15 bp, Homo sapiens
ctgttgttacttact

SEQ ID NO: 931959 - DNA, 15 bp, Homo sapiens
tctgttgttacttac

SEQ ID NO: 931960 - DNA, 15 bp, Homo sapiens
ttctgttgttactta

SEQ ID NO: 931961 - DNA, 15 bp, Homo sapiens
tttctgttgttactt

SEQ ID NO: 931962 - DNA, 15 bp, Homo sapiens
ttttctgttgttact

SEQ ID NO: 931963 - DNA, 15 bp, Homo sapiens
attttctgttgttac

SEQ ID NO: 931964 - DNA, 15 bp, Homo sapiens
aattttctgttgtta

SEQ ID NO: 931965 - DNA, 15 bp, Homo sapiens
taattttctgttgtt

SEQ ID NO: 931966 - DNA, 15 bp, Homo sapiens
ataattttctgttgt

SEQ ID NO: 931967 - DNA, 15 bp, Homo sapiens
gataattttctgttg

SEQ ID NO: 931968 - DNA, 15 bp, Homo sapiens
tgataattttctgtt

SEQ ID NO: 931969 - DNA, 15 bp, Homo sapiens
ttgataattttctgt

SEQ ID NO: 931970 - DNA, 15 bp, Homo sapiens
gttgataattttctg

SEQ ID NO: 931971 - DNA, 15 bp, Homo sapiens
tgttgataattttct

SEQ ID NO: 931972 - DNA, 15 bp, Homo sapiens
atgttgataattttc

SEQ ID NO: 931973 - DNA, 15 bp, Homo sapiens
aatgttgataatttt

SEQ ID NO: 931974 - DNA, 15 bp, Homo sapiens
aaatgttgataattt

SEQ ID NO: 931975 - DNA, 15 bp, Homo sapiens
taaatgttgataatt

SEQ ID NO: 931976 - DNA, 15 bp, Homo sapiens
ctaaatgttgataat

SEQ ID NO: 931977 - DNA, 15 bp, Homo sapiens
cctaaatgttgataa

SEQ ID NO: 931978 - DNA, 15 bp, Homo sapiens
tcctaaatgttgata

SEQ ID NO: 931979 - DNA, 15 bp, Homo sapiens
ttcctaaatgttgat

SEQ ID NO: 931980 - DNA, 15 bp, Homo sapiens
tttcctaaatgttga

SEQ ID NO: 931981 - DNA, 15 bp, Homo sapiens
ttttcctaaatgttg

SEQ ID NO: 931982 - DNA, 15 bp, Homo sapiens
tttttcctaaatgtt

SEQ ID NO: 931983 - DNA, 15 bp, Homo sapiens
atttttcctaaatgt

SEQ ID NO: 931984 - DNA, 15 bp, Homo sapiens
tatttttcctaaatg

SEQ ID NO: 931985 - DNA, 15 bp, Homo sapiens
atatttttcctaaat

SEQ ID NO: 931986 - DNA, 15 bp, Homo sapiens
catatttttcctaaa

SEQ ID NO: 931987 - DNA, 15 bp, Homo sapiens
acatatttttcctaa

SEQ ID NO: 931988 - DNA, 15 bp, Homo sapiens
cacatatttttccta

SEQ ID NO: 931989 - DNA, 15 bp, Homo sapiens
ccacatatttttcct

SEQ ID NO: 931990 - DNA, 15 bp, Homo sapiens
accacatatttttcc

SEQ ID NO: 931991 - DNA, 15 bp, Homo sapiens
taccacatatttttc

SEQ ID NO: 931992 - DNA, 15 bp, Homo sapiens
ctaccacatattttt

SEQ ID NO: 931993 - DNA, 15 bp, Homo sapiens
tctaccacatatttt

SEQ ID NO: 931994 - DNA, 15 bp, Homo sapiens
atctaccacatattt

SEQ ID NO: 931995 - DNA, 15 bp, Homo sapiens
aatctaccacatatt

SEQ ID NO: 931996 - DNA, 15 bp, Homo sapiens
caatctaccacatat

SEQ ID NO: 931997 - DNA, 15 bp, Homo sapiens
gcaatctaccacata

SEQ ID NO: 931998 - DNA, 15 bp, Homo sapiens
agcaatctaccacat

SEQ ID NO: 931999 - DNA, 15 bp, Homo sapiens
aagcaatctaccaca

SEQ ID NO: 932000 - DNA, 15 bp, Homo sapiens
aaagcaatctaccac

SEQ ID NO: 932001 - DNA, 15 bp, Homo sapiens
aaaagcaatctacca

SEQ ID NO: 932002 - DNA, 15 bp, Homo sapiens
taaaagcaatctacc

SEQ ID NO: 932003 - DNA, 15 bp, Homo sapiens
ctaaaagcaatctac

SEQ ID NO: 932004 - DNA, 15 bp, Homo sapiens
tctaaaagcaatcta

SEQ ID NO: 932005 - DNA, 15 bp, Homo sapiens
ctctaaaagcaatct

SEQ ID NO: 932006 - DNA, 15 bp, Homo sapiens
tctctaaaagcaatc

SEQ ID NO: 932007 - DNA, 15 bp, Homo sapiens
ttctctaaaagcaat

SEQ ID NO: 932008 - DNA, 15 bp, Homo sapiens
cttctctaaaagcaa

SEQ ID NO: 932009 - DNA, 15 bp, Homo sapiens
tcttctctaaaagca

SEQ ID NO: 932010 - DNA, 15 bp, Homo sapiens
atcttctctaaaagc

SEQ ID NO: 932011 - DNA, 15 bp, Homo sapiens
aatcttctctaaaag

SEQ ID NO: 932012 - DNA, 15 bp, Homo sapiens
aaatcttctctaaaa

SEQ ID NO: 932013 - DNA, 15 bp, Homo sapiens
caaatcttctctaaa

SEQ ID NO: 932014 - DNA, 15 bp, Homo sapiens
acaaatcttctctaa

SEQ ID NO: 932015 - DNA, 15 bp, Homo sapiens
tacaaatcttctcta

SEQ ID NO: 932016 - DNA, 15 bp, Homo sapiens
ttacaaatcttctct

SEQ ID NO: 932017 - DNA, 15 bp, Homo sapiens
tttacaaatcttctc

SEQ ID NO: 932018 - DNA, 15 bp, Homo sapiens
atttacaaatcttct

SEQ ID NO: 932019 - DNA, 15 bp, Homo sapiens
aatttacaaatcttc

SEQ ID NO: 932020 - DNA, 15 bp, Homo sapiens
aaatttacaaatctt

SEQ ID NO: 932021 - DNA, 15 bp, Homo sapiens
taaatttacaaatct

SEQ ID NO: 932022 - DNA, 15 bp, Homo sapiens
ataaatttacaaatc

SEQ ID NO: 932023 - DNA, 15 bp, Homo sapiens
tataaatttacaaat

SEQ ID NO: 932024 - DNA, 15 bp, Homo sapiens
ttataaatttacaaa

SEQ ID NO: 932025 - DNA, 15 bp, Homo sapiens
tttataaatttacaa

SEQ ID NO: 932026 - DNA, 15 bp, Homo sapiens
ttttataaatttaca

SEQ ID NO: 932027 - DNA, 15 bp, Homo sapiens
cttttataaatttac

SEQ ID NO: 932028 - DNA, 15 bp, Homo sapiens
tcttttataaattta

SEQ ID NO: 932029 - DNA, 15 bp, Homo sapiens
atcttttataaattt

SEQ ID NO: 932030 - DNA, 15 bp, Homo sapiens
catcttttataaatt

SEQ ID NO: 932031 - DNA, 15 bp, Homo sapiens
ccatcttttataaat

SEQ ID NO: 932032 - DNA, 15 bp, Homo sapiens
accatcttttataaa

SEQ ID NO: 932033 - DNA, 15 bp, Homo sapiens
taccatcttttataa

SEQ ID NO: 932034 - DNA, 15 bp, Homo sapiens
ctaccatcttttata

SEQ ID NO: 932035 - DNA, 15 bp, Homo sapiens
actaccatcttttat

SEQ ID NO: 932036 - DNA, 15 bp, Homo sapiens
tactaccatctttta

SEQ ID NO: 932037 - DNA, 15 bp, Homo sapiens
atactaccatctttt

SEQ ID NO: 932038 - DNA, 15 bp, Homo sapiens
tatactaccatcttt

SEQ ID NO: 932039 - DNA, 15 bp, Homo sapiens
ttatactaccatctt

SEQ ID NO: 932040 - DNA, 15 bp, Homo sapiens
tttatactaccatct

SEQ ID NO: 932041 - DNA, 15 bp, Homo sapiens
atttatactaccatc

SEQ ID NO: 932042 - DNA, 15 bp, Homo sapiens
gatttatactaccat

SEQ ID NO: 932043 - DNA, 15 bp, Homo sapiens
agatttatactacca

SEQ ID NO: 932044 - DNA, 15 bp, Homo sapiens
gagatttatactacc

SEQ ID NO: 932045 - DNA, 15 bp, Homo sapiens
ggagatttatactac

SEQ ID NO: 932046 - DNA, 15 bp, Homo sapiens
cggagatttatacta

SEQ ID NO: 932047 - DNA, 15 bp, Homo sapiens
acggagatttatact

SEQ ID NO: 932048 - DNA, 15 bp, Homo sapiens
cacggagatttatac

SEQ ID NO: 932049 - DNA, 15 bp, Homo sapiens
acacggagatttata

SEQ ID NO: 932050 - DNA, 15 bp, Homo sapiens
aacacggagatttat

SEQ ID NO: 932051 - DNA, 15 bp, Homo sapiens
caacacggagattta

SEQ ID NO: 932052 - DNA, 15 bp, Homo sapiens
acaacacggagattt

SEQ ID NO: 932053 - DNA, 15 bp, Homo sapiens
tacaacacggagatt

SEQ ID NO: 932054 - DNA, 15 bp, Homo sapiens
ttacaacacggagat

SEQ ID NO: 932055 - DNA, 15 bp, Homo sapiens
attacaacacggaga

SEQ ID NO: 932056 - DNA, 15 bp, Homo sapiens
tattacaacacggag

SEQ ID NO: 932057 - DNA, 15 bp, Homo sapiens
ttattacaacacgga

SEQ ID NO: 932058 - DNA, 15 bp, Homo sapiens
tttattacaacacgg

SEQ ID NO: 932059 - DNA, 15 bp, Homo sapiens
ttttattacaacacg

SEQ ID NO: 932060 - DNA, 15 bp, Homo sapiens
tttttattacaacac

SEQ ID NO: 932061 - DNA, 15 bp, Homo sapiens
ctttttattacaaca

SEQ ID NO: 932062 - DNA, 15 bp, Homo sapiens
actttttattacaac

SEQ ID NO: 932063 - DNA, 15 bp, Homo sapiens
tactttttattacaa

SEQ ID NO: 932064 - DNA, 15 bp, Homo sapiens
atactttttattaca

SEQ ID NO: 932065 - DNA, 15 bp, Homo sapiens
catactttttattac

SEQ ID NO: 932066 - DNA, 15 bp, Homo sapiens
tcatactttttatta

SEQ ID NO: 932067 - DNA, 15 bp, Homo sapiens
ctcatactttttatt

SEQ ID NO: 932068 - DNA, 15 bp, Homo sapiens
gctcatactttttat

SEQ ID NO: 932069 - DNA, 15 bp, Homo sapiens
agctcatacttttta

SEQ ID NO: 932070 - DNA, 15 bp, Homo sapiens
aagctcatacttttt

SEQ ID NO: 932071 - DNA, 15 bp, Homo sapiens
aaagctcatactttt

SEQ ID NO: 932072 - DNA, 15 bp, Homo sapiens
taaagctcatacttt

SEQ ID NO: 932073 - DNA, 15 bp, Homo sapiens
ataaagctcatactt

SEQ ID NO: 932074 - DNA, 15 bp, Homo sapiens
gataaagctcatact

SEQ ID NO: 932075 - DNA, 15 bp, Homo sapiens
agataaagctcatac

SEQ ID NO: 932076 - DNA, 15 bp, Homo sapiens
aagataaagctcata

SEQ ID NO: 932077 - DNA, 15 bp, Homo sapiens
taagataaagctcat

SEQ ID NO: 932078 - DNA, 15 bp, Homo sapiens
ataagataaagctca

SEQ ID NO: 932079 - DNA, 15 bp, Homo sapiens
cataagataaagctc

SEQ ID NO: 932080 - DNA, 15 bp, Homo sapiens
gcataagataaagct

SEQ ID NO: 932081 - DNA, 15 bp, Homo sapiens
agcataagataaagc

SEQ ID NO: 932082 - DNA, 15 bp, Homo sapiens
cagcataagataaag

SEQ ID NO: 932083 - DNA, 15 bp, Homo sapiens
acagcataagataaa

SEQ ID NO: 932084 - DNA, 15 bp, Homo sapiens
aacagcataagataa

SEQ ID NO: 932085 - DNA, 15 bp, Homo sapiens
taacagcataagata

SEQ ID NO: 932086 - DNA, 15 bp, Homo sapiens
ttaacagcataagat

SEQ ID NO: 932087 - DNA, 15 bp, Homo sapiens
tttaacagcataaga

SEQ ID NO: 932088 - DNA, 15 bp, Homo sapiens
gtttaacagcataag

SEQ ID NO: 932089 - DNA, 15 bp, Homo sapiens
tgtttaacagcataa

SEQ ID NO: 932090 - DNA, 15 bp, Homo sapiens
ttgtttaacagcata

SEQ ID NO: 932091 - DNA, 15 bp, Homo sapiens
cttgtttaacagcat

SEQ ID NO: 932092 - DNA, 15 bp, Homo sapiens
ccttgtttaacagca

SEQ ID NO: 932093 - DNA, 15 bp, Homo sapiens
accttgtttaacagc

SEQ ID NO: 932094 - DNA, 15 bp, Homo sapiens
taccttgtttaacag

SEQ ID NO: 932095 - DNA, 15 bp, Homo sapiens
ataccttgtttaaca

SEQ ID NO: 932096 - DNA, 15 bp, Homo sapiens
aataccttgtttaac

SEQ ID NO: 932097 - DNA, 15 bp, Homo sapiens
aaataccttgtttaa

SEQ ID NO: 932098 - DNA, 15 bp, Homo sapiens
aaaataccttgttta

SEQ ID NO: 932099 - DNA, 15 bp, Homo sapiens
taaaataccttgttt

SEQ ID NO: 932100 - DNA, 15 bp, Homo sapiens
ctaaaataccttgtt

SEQ ID NO: 932101 - DNA, 15 bp, Homo sapiens
tctaaaataccttgt

SEQ ID NO: 932102 - DNA, 15 bp, Homo sapiens
gtctaaaataccttg

SEQ ID NO: 932103 - DNA, 15 bp, Homo sapiens
tgtctaaaatacctt

SEQ ID NO: 932104 - DNA, 15 bp, Homo sapiens
ttgtctaaaatacct

SEQ ID NO: 932105 - DNA, 15 bp, Homo sapiens
attgtctaaaatacc

SEQ ID NO: 932106 - DNA, 15 bp, Homo sapiens
cattgtctaaaatac

SEQ ID NO: 932107 - DNA, 15 bp, Homo sapiens
gcattgtctaaaata

SEQ ID NO: 932108 - DNA, 15 bp, Homo sapiens
agcattgtctaaaat

SEQ ID NO: 932109 - DNA, 15 bp, Homo sapiens
cagcattgtctaaaa

SEQ ID NO: 932110 - DNA, 15 bp, Homo sapiens
acagcattgtctaaa

SEQ ID NO: 932111 - DNA, 15 bp, Homo sapiens
aacagcattgtctaa

SEQ ID NO: 932112 - DNA, 15 bp, Homo sapiens
aaacagcattgtcta

SEQ ID NO: 932113 - DNA, 15 bp, Homo sapiens
aaaacagcattgtct

SEQ ID NO: 932114 - DNA, 15 bp, Homo sapiens
aaaaacagcattgtc

SEQ ID NO: 932115 - DNA, 15 bp, Homo sapiens
caaaaacagcattgt

SEQ ID NO: 932116 - DNA, 15 bp, Homo sapiens
acaaaaacagcattg

SEQ ID NO: 932117 - DNA, 15 bp, Homo sapiens
cacaaaaacagcatt

SEQ ID NO: 932118 - DNA, 15 bp, Homo sapiens
ccacaaaaacagcat

SEQ ID NO: 932119 - DNA, 15 bp, Homo sapiens
cccacaaaaacagca

SEQ ID NO: 932120 - DNA, 15 bp, Homo sapiens
gcccacaaaaacagc

SEQ ID NO: 932121 - DNA, 15 bp, Homo sapiens
tgcccacaaaaacag

SEQ ID NO: 932122 - DNA, 15 bp, Homo sapiens
ctgcccacaaaaaca

SEQ ID NO: 932123 - DNA, 15 bp, Homo sapiens
tctgcccacaaaaac

SEQ ID NO: 932124 - DNA, 15 bp, Homo sapiens
atctgcccacaaaaa

SEQ ID NO: 932125 - DNA, 15 bp, Homo sapiens
tatctgcccacaaaa

SEQ ID NO: 932126 - DNA, 15 bp, Homo sapiens
atatctgcccacaaa

SEQ ID NO: 932127 - DNA, 15 bp, Homo sapiens
tatatctgcccacaa

SEQ ID NO: 932128 - DNA, 15 bp, Homo sapiens
ctatatctgcccaca

SEQ ID NO: 932129 - DNA, 15 bp, Homo sapiens
actatatctgcccac

SEQ ID NO: 932130 - DNA, 15 bp, Homo sapiens
gactatatctgccca

SEQ ID NO: 932131 - DNA, 15 bp, Homo sapiens
ggactatatctgccc

SEQ ID NO: 932132 - DNA, 15 bp, Homo sapiens
tggactatatctgcc

SEQ ID NO: 932133 - DNA, 15 bp, Homo sapiens
ttggactatatctgc

SEQ ID NO: 932134 - DNA, 15 bp, Homo sapiens
attggactatatctg

SEQ ID NO: 932135 - DNA, 15 bp, Homo sapiens
aattggactatatct

SEQ ID NO: 932136 - DNA, 15 bp, Homo sapiens
aaattggactatatc

SEQ ID NO: 932137 - DNA, 15 bp, Homo sapiens
taaattggactatat

SEQ ID NO: 932138 - DNA, 15 bp, Homo sapiens
ataaattggactata

SEQ ID NO: 932139 - DNA, 15 bp, Homo sapiens
gataaattggactat

SEQ ID NO: 932140 - DNA, 15 bp, Homo sapiens
agataaattggacta

SEQ ID NO: 932141 - DNA, 15 bp, Homo sapiens
aagataaattggact

SEQ ID NO: 932142 - DNA, 15 bp, Homo sapiens
aaagataaattggac

SEQ ID NO: 932143 - DNA, 15 bp, Homo sapiens
aaaagataaattgga

SEQ ID NO: 932144 - DNA, 15 bp, Homo sapiens
aaaaagataaattgg

SEQ ID NO: 932145 - DNA, 15 bp, Homo sapiens
taaaaagataaattg

SEQ ID NO: 932146 - DNA, 15 bp, Homo sapiens
ataaaaagataaatt

SEQ ID NO: 932147 - DNA, 15 bp, Homo sapiens
cataaaaagataaat

SEQ ID NO: 932148 - DNA, 15 bp, Homo sapiens
acataaaaagataaa

SEQ ID NO: 932149 - DNA, 15 bp, Homo sapiens
aacataaaaagataa

SEQ ID NO: 932150 - DNA, 15 bp, Homo sapiens
aaacataaaaagata

SEQ ID NO: 932151 - DNA, 15 bp, Homo sapiens
aaaacataaaaagat

SEQ ID NO: 932152 - DNA, 15 bp, Homo sapiens
gaaaacataaaaaga

SEQ ID NO: 932153 - DNA, 15 bp, Homo sapiens
cgaaaacataaaaag

SEQ ID NO: 932154 - DNA, 15 bp, Homo sapiens
acgaaaacataaaaa

SEQ ID NO: 932155 - DNA, 15 bp, Homo sapiens
gacgaaaacataaaa

SEQ ID NO: 932156 - DNA, 15 bp, Homo sapiens
tgacgaaaacataaa

SEQ ID NO: 932157 - DNA, 15 bp, Homo sapiens
ttgacgaaaacataa

SEQ ID NO: 932158 - DNA, 15 bp, Homo sapiens
attgacgaaaacata

SEQ ID NO: 932159 - DNA, 15 bp, Homo sapiens
gattgacgaaaacat

SEQ ID NO: 932160 - DNA, 15 bp, Homo sapiens
agattgacgaaaaca

SEQ ID NO: 932161 - DNA, 15 bp, Homo sapiens
cagattgacgaaaac

SEQ ID NO: 932162 - DNA, 15 bp, Homo sapiens
tcagattgacgaaaa

SEQ ID NO: 932163 - DNA, 15 bp, Homo sapiens
atcagattgacgaaa

SEQ ID NO: 932164 - DNA, 15 bp, Homo sapiens
aatcagattgacgaa

SEQ ID NO: 932165 - DNA, 15 bp, Homo sapiens
aaatcagattgacga

SEQ ID NO: 932166 - DNA, 15 bp, Homo sapiens
caaatcagattgacg

SEQ ID NO: 932167 - DNA, 15 bp, Homo sapiens
acaaatcagattgac

SEQ ID NO: 932168 - DNA, 15 bp, Homo sapiens
cacaaatcagattga

SEQ ID NO: 932169 - DNA, 15 bp, Homo sapiens
tcacaaatcagattg

SEQ ID NO: 932170 - DNA, 15 bp, Homo sapiens
ttcacaaatcagatt

SEQ ID NO: 932171 - DNA, 15 bp, Homo sapiens
attcacaaatcagat

SEQ ID NO: 932172 - DNA, 15 bp, Homo sapiens
aattcacaaatcaga

SEQ ID NO: 932173 - DNA, 15 bp, Homo sapiens
taattcacaaatcag

SEQ ID NO: 932174 - DNA, 15 bp, Homo sapiens
ataattcacaaatca

SEQ ID NO: 932175 - DNA, 15 bp, Homo sapiens
gataattcacaaatc

SEQ ID NO: 932176 - DNA, 15 bp, Homo sapiens
agataattcacaaat

SEQ ID NO: 932177 - DNA, 15 bp, Homo sapiens
tagataattcacaaa

SEQ ID NO: 932178 - DNA, 15 bp, Homo sapiens
atagataattcacaa

SEQ ID NO: 932179 - DNA, 15 bp, Homo sapiens
tatagataattcaca

SEQ ID NO: 932180 - DNA, 15 bp, Homo sapiens
atatagataattcac

SEQ ID NO: 932181 - DNA, 15 bp, Homo sapiens
catatagataattca

SEQ ID NO: 932182 - DNA, 15 bp, Homo sapiens
tcatatagataattc

SEQ ID NO: 932183 - DNA, 15 bp, Homo sapiens
ttcatatagataatt

SEQ ID NO: 932184 - DNA, 15 bp, Homo sapiens
cttcatatagataat

SEQ ID NO: 932185 - DNA, 15 bp, Homo sapiens
acttcatatagataa

SEQ ID NO: 932186 - DNA, 15 bp, Homo sapiens
aacttcatatagata

SEQ ID NO: 932187 - DNA, 15 bp, Homo sapiens
taacttcatatagat

SEQ ID NO: 932188 - DNA, 15 bp, Homo sapiens
ctaacttcatataga

SEQ ID NO: 932189 - DNA, 15 bp, Homo sapiens
cctaacttcatatag

SEQ ID NO: 932190 - DNA, 15 bp, Homo sapiens
tcctaacttcatata

SEQ ID NO: 932191 - DNA, 15 bp, Homo sapiens
ttcctaacttcatat

SEQ ID NO: 932192 - DNA, 15 bp, Homo sapiens
tttcctaacttcata

SEQ ID NO: 932193 - DNA, 15 bp, Homo sapiens
ttttcctaacttcat

SEQ ID NO: 932194 - DNA, 15 bp, Homo sapiens
tttttcctaacttca

SEQ ID NO: 932195 - DNA, 15 bp, Homo sapiens
atttttcctaacttc

SEQ ID NO: 932196 - DNA, 15 bp, Homo sapiens
gatttttcctaactt

SEQ ID NO: 932197 - DNA, 15 bp, Homo sapiens
agatttttcctaact

SEQ ID NO: 932198 - DNA, 15 bp, Homo sapiens
aagatttttcctaac

SEQ ID NO: 932199 - DNA, 15 bp, Homo sapiens
taagatttttcctaa

SEQ ID NO: 932200 - DNA, 15 bp, Homo sapiens
ttaagatttttccta

SEQ ID NO: 932201 - DNA, 15 bp, Homo sapiens
attaagatttttcct

SEQ ID NO: 932202 - DNA, 15 bp, Homo sapiens
cattaagatttttcc

SEQ ID NO: 932203 - DNA, 15 bp, Homo sapiens
acattaagatttttc

SEQ ID NO: 932204 - DNA, 15 bp, Homo sapiens
tacattaagattttt

SEQ ID NO: 932205 - DNA, 15 bp, Homo sapiens
gtacattaagatttt

SEQ ID NO: 932206 - DNA, 15 bp, Homo sapiens
tgtacattaagattt

SEQ ID NO: 932207 - DNA, 15 bp, Homo sapiens
atgtacattaagatt

SEQ ID NO: 932208 - DNA, 15 bp, Homo sapiens
aatgtacattaagat

SEQ ID NO: 932209 - DNA, 15 bp, Homo sapiens
taatgtacattaaga

SEQ ID NO: 932210 - DNA, 15 bp, Homo sapiens
gtaatgtacattaag

SEQ ID NO: 932211 - DNA, 15 bp, Homo sapiens
tgtaatgtacattaa

SEQ ID NO: 932212 - DNA, 15 bp, Homo sapiens
ttgtaatgtacatta

SEQ ID NO: 932213 - DNA, 15 bp, Homo sapiens
tttgtaatgtacatt

SEQ ID NO: 932214 - DNA, 15 bp, Homo sapiens
ttttgtaatgtacat

SEQ ID NO: 932215 - DNA, 15 bp, Homo sapiens
tttttgtaatgtaca

SEQ ID NO: 932216 - DNA, 15 bp, Homo sapiens
atttttgtaatgtac

SEQ ID NO: 932217 - DNA, 15 bp, Homo sapiens
tatttttgtaatgta

SEQ ID NO: 932218 - DNA, 15 bp, Homo sapiens
atatttttgtaatgt

SEQ ID NO: 932219 - DNA, 15 bp, Homo sapiens
tatatttttgtaatg

SEQ ID NO: 932220 - DNA, 15 bp, Homo sapiens
ttatatttttgtaat

SEQ ID NO: 932221 - DNA, 15 bp, Homo sapiens
attatatttttgtaa

SEQ ID NO: 932222 - DNA, 15 bp, Homo sapiens
tattatatttttgta

SEQ ID NO: 932223 - DNA, 15 bp, Homo sapiens
atattatatttttgt

SEQ ID NO: 932224 - DNA, 15 bp, Homo sapiens
tatattatatttttg

SEQ ID NO: 932225 - DNA, 15 bp, Homo sapiens
atatattatattttt

SEQ ID NO: 932226 - DNA, 15 bp, Homo sapiens
tatatattatatttt

SEQ ID NO: 932227 - DNA, 15 bp, Homo sapiens
atatatattatattt

SEQ ID NO: 932228 - DNA, 15 bp, Homo sapiens
aatatatattatatt

SEQ ID NO: 932229 - DNA, 15 bp, Homo sapiens
taatatatattatat

SEQ ID NO: 932230 - DNA, 15 bp, Homo sapiens
gtaatatatattata

SEQ ID NO: 932231 - DNA, 15 bp, Homo sapiens
tgtaatatatattat

SEQ ID NO: 932232 - DNA, 15 bp, Homo sapiens
atgtaatatatatta

SEQ ID NO: 932233 - DNA, 15 bp, Homo sapiens
aatgtaatatatatt

SEQ ID NO: 932234 - DNA, 15 bp, Homo sapiens
caatgtaatatatat

SEQ ID NO: 932235 - DNA, 15 bp, Homo sapiens
acaatgtaatatata

SEQ ID NO: 932236 - DNA, 15 bp, Homo sapiens
tacaatgtaatatat

SEQ ID NO: 932237 - DNA, 15 bp, Homo sapiens
atacaatgtaatata

SEQ ID NO: 932238 - DNA, 15 bp, Homo sapiens
aatacaatgtaatat

SEQ ID NO: 932239 - DNA, 15 bp, Homo sapiens
aaatacaatgtaata

SEQ ID NO: 932240 - DNA, 15 bp, Homo sapiens
aaaatacaatgtaat

SEQ ID NO: 932241 - DNA, 15 bp, Homo sapiens
gaaaatacaatgtaa

SEQ ID NO: 932242 - DNA, 15 bp, Homo sapiens
agaaaatacaatgta

SEQ ID NO: 932243 - DNA, 15 bp, Homo sapiens
aagaaaatacaatgt

SEQ ID NO: 932244 - DNA, 15 bp, Homo sapiens
aaagaaaatacaatg

SEQ ID NO: 932245 - DNA, 15 bp, Homo sapiens
aaaagaaaatacaat

SEQ ID NO: 932246 - DNA, 15 bp, Homo sapiens
aaaaagaaaatacaa

SEQ ID NO: 932247 - DNA, 15 bp, Homo sapiens
aaaaaagaaaataca

SEQ ID NO: 932248 - DNA, 15 bp, Homo sapiens
aaaaaaagaaaatac

SEQ ID NO: 932249 - DNA, 15 bp, Homo sapiens
gaaaaaaagaaaata

SEQ ID NO: 932250 - DNA, 15 bp, Homo sapiens
agaaaaaaagaaaat

SEQ ID NO: 932251 - DNA, 15 bp, Homo sapiens
tagaaaaaaagaaaa

SEQ ID NO: 932252 - DNA, 15 bp, Homo sapiens
gtagaaaaaaagaaa

SEQ ID NO: 932253 - DNA, 15 bp, Homo sapiens
agtagaaaaaaagaa

SEQ ID NO: 932254 - DNA, 15 bp, Homo sapiens
cagtagaaaaaaaga

SEQ ID NO: 932255 - DNA, 15 bp, Homo sapiens
ccagtagaaaaaaag

SEQ ID NO: 932256 - DNA, 15 bp, Homo sapiens
tccagtagaaaaaaa

SEQ ID NO: 932257 - DNA, 15 bp, Homo sapiens
ttccagtagaaaaaa

SEQ ID NO: 932258 - DNA, 15 bp, Homo sapiens
attccagtagaaaaa

SEQ ID NO: 932259 - DNA, 15 bp, Homo sapiens
aattccagtagaaaa

SEQ ID NO: 932260 - DNA, 15 bp, Homo sapiens
aaattccagtagaaa

SEQ ID NO: 932261 - DNA, 15 bp, Homo sapiens
aaaattccagtagaa

SEQ ID NO: 932262 - DNA, 15 bp, Homo sapiens
taaaattccagtaga

SEQ ID NO: 932263 - DNA, 15 bp, Homo sapiens
ataaaattccagtag

SEQ ID NO: 932264 - DNA, 15 bp, Homo sapiens
cataaaattccagta

SEQ ID NO: 932265 - DNA, 15 bp, Homo sapiens
gcataaaattccagt

SEQ ID NO: 932266 - DNA, 15 bp, Homo sapiens
agcataaaattccag

SEQ ID NO: 932267 - DNA, 15 bp, Homo sapiens
tagcataaaattcca

SEQ ID NO: 932268 - DNA, 15 bp, Homo sapiens
gtagcataaaattcc

SEQ ID NO: 932269 - DNA, 15 bp, Homo sapiens
agtagcataaaattc

SEQ ID NO: 932270 - DNA, 15 bp, Homo sapiens
cagtagcataaaatt

SEQ ID NO: 932271 - DNA, 15 bp, Homo sapiens
tcagtagcataaaat

SEQ ID NO: 932272 - DNA, 15 bp, Homo sapiens
ctcagtagcataaaa

SEQ ID NO: 932273 - DNA, 15 bp, Homo sapiens
cctcagtagcataaa

SEQ ID NO: 932274 - DNA, 15 bp, Homo sapiens
gcctcagtagcataa

SEQ ID NO: 932275 - DNA, 15 bp, Homo sapiens
agcctcagtagcata

SEQ ID NO: 932276 - DNA, 15 bp, Homo sapiens
tagcctcagtagcat

SEQ ID NO: 932277 - DNA, 15 bp, Homo sapiens
atagcctcagtagca

SEQ ID NO: 932278 - DNA, 15 bp, Homo sapiens
aatagcctcagtagc

SEQ ID NO: 932279 - DNA, 15 bp, Homo sapiens
aaatagcctcagtag

SEQ ID NO: 932280 - DNA, 15 bp, Homo sapiens
aaaatagcctcagta

SEQ ID NO: 932281 - DNA, 15 bp, Homo sapiens
aaaaatagcctcagt

SEQ ID NO: 932282 - DNA, 15 bp, Homo sapiens
taaaaatagcctcag

SEQ ID NO: 932283 - DNA, 15 bp, Homo sapiens
ttaaaaatagcctca

SEQ ID NO: 932284 - DNA, 15 bp, Homo sapiens
gttaaaaatagcctc

SEQ ID NO: 932285 - DNA, 15 bp, Homo sapiens
tgttaaaaatagcct

SEQ ID NO: 932286 - DNA, 15 bp, Homo sapiens
ttgttaaaaatagcc

SEQ ID NO: 932287 - DNA, 15 bp, Homo sapiens
tttgttaaaaatagc

SEQ ID NO: 932288 - DNA, 15 bp, Homo sapiens
atttgttaaaaatag

SEQ ID NO: 932289 - DNA, 15 bp, Homo sapiens
catttgttaaaaata

SEQ ID NO: 932290 - DNA, 15 bp, Homo sapiens
tcatttgttaaaaat

SEQ ID NO: 932291 - DNA, 15 bp, Homo sapiens
ttcatttgttaaaaa

SEQ ID NO: 932292 - DNA, 15 bp, Homo sapiens
gttcatttgttaaaa

SEQ ID NO: 932293 - DNA, 15 bp, Homo sapiens
tgttcatttgttaaa

SEQ ID NO: 932294 - DNA, 15 bp, Homo sapiens
ttgttcatttgttaa

SEQ ID NO: 932295 - DNA, 15 bp, Homo sapiens
attgttcatttgtta

SEQ ID NO: 932296 - DNA, 15 bp, Homo sapiens
aattgttcatttgtt

SEQ ID NO: 932297 - DNA, 15 bp, Homo sapiens
aaattgttcatttgt

SEQ ID NO: 932298 - DNA, 15 bp, Homo sapiens
aaaattgttcatttg

SEQ ID NO: 932299 - DNA, 15 bp, Homo sapiens
caaaattgttcattt

SEQ ID NO: 932300 - DNA, 15 bp, Homo sapiens
tcaaaattgttcatt

SEQ ID NO: 932301 - DNA, 15 bp, Homo sapiens
ttcaaaattgttcat

SEQ ID NO: 932302 - DNA, 15 bp, Homo sapiens
gttcaaaattgttca

SEQ ID NO: 932303 - DNA, 15 bp, Homo sapiens
tgttcaaaattgttc

SEQ ID NO: 932304 - DNA, 15 bp, Homo sapiens
ttgttcaaaattgtt

SEQ ID NO: 932305 - DNA, 15 bp, Homo sapiens
attgttcaaaattgt

SEQ ID NO: 932306 - DNA, 15 bp, Homo sapiens
aattgttcaaaattg

SEQ ID NO: 932307 - DNA, 15 bp, Homo sapiens
aaattgttcaaaatt

SEQ ID NO: 932308 - DNA, 15 bp, Homo sapiens
caaattgttcaaaat

SEQ ID NO: 932309 - DNA, 15 bp, Homo sapiens
tcaaattgttcaaaa

SEQ ID NO: 932310 - DNA, 15 bp, Homo sapiens
ctcaaattgttcaaa

SEQ ID NO: 932311 - DNA, 15 bp, Homo sapiens
cctcaaattgttcaa

SEQ ID NO: 932312 - DNA, 15 bp, Homo sapiens
ccctcaaattgttca

SEQ ID NO: 932313 - DNA, 15 bp, Homo sapiens
tccctcaaattgttc

SEQ ID NO: 932314 - DNA, 15 bp, Homo sapiens
atccctcaaattgtt

SEQ ID NO: 932315 - DNA, 15 bp, Homo sapiens
aatccctcaaattgt

SEQ ID NO: 932316 - DNA, 15 bp, Homo sapiens
caatccctcaaattg

SEQ ID NO: 932317 - DNA, 15 bp, Homo sapiens
tcaatccctcaaatt

SEQ ID NO: 932318 - DNA, 15 bp, Homo sapiens
ctcaatccctcaaat

SEQ ID NO: 932319 - DNA, 15 bp, Homo sapiens
cctcaatccctcaaa

SEQ ID NO: 932320 - DNA, 15 bp, Homo sapiens
ccctcaatccctcaa

SEQ ID NO: 932321 - DNA, 15 bp, Homo sapiens
tccctcaatccctca

SEQ ID NO: 932322 - DNA, 15 bp, Homo sapiens
ttccctcaatccctc

SEQ ID NO: 932323 - DNA, 15 bp, Homo sapiens
cttccctcaatccct

SEQ ID NO: 932324 - DNA, 15 bp, Homo sapiens
acttccctcaatccc

SEQ ID NO: 932325 - DNA, 15 bp, Homo sapiens
tacttccctcaatcc

SEQ ID NO: 932326 - DNA, 15 bp, Homo sapiens
atacttccctcaatc

SEQ ID NO: 932327 - DNA, 15 bp, Homo sapiens
catacttccctcaat

SEQ ID NO: 932328 - DNA, 15 bp, Homo sapiens
tcatacttccctcaa

SEQ ID NO: 932329 - DNA, 15 bp, Homo sapiens
atcatacttccctca

SEQ ID NO: 932330 - DNA, 15 bp, Homo sapiens
tatcatacttccctc

SEQ ID NO: 932331 - DNA, 15 bp, Homo sapiens
ttatcatacttccct

SEQ ID NO: 932332 - DNA, 15 bp, Homo sapiens
attatcatacttccc

SEQ ID NO: 932333 - DNA, 15 bp, Homo sapiens
cattatcatacttcc

SEQ ID NO: 932334 - DNA, 15 bp, Homo sapiens
tcattatcatacttc

SEQ ID NO: 932335 - DNA, 15 bp, Homo sapiens
gtcattatcatactt

SEQ ID NO: 932336 - DNA, 15 bp, Homo sapiens
tgtcattatcatact

SEQ ID NO: 932337 - DNA, 15 bp, Homo sapiens
ttgtcattatcatac

SEQ ID NO: 932338 - DNA, 15 bp, Homo sapiens
tttgtcattatcata

SEQ ID NO: 932339 - DNA, 15 bp, Homo sapiens
ttttgtcattatcat

SEQ ID NO: 932340 - DNA, 15 bp, Homo sapiens
tttttgtcattatca

SEQ ID NO: 932341 - DNA, 15 bp, Homo sapiens
ctttttgtcattatc

SEQ ID NO: 932342 - DNA, 15 bp, Homo sapiens
cctttttgtcattat

SEQ ID NO: 932343 - DNA, 15 bp, Homo sapiens
ccctttttgtcatta

SEQ ID NO: 932344 - DNA, 15 bp, Homo sapiens
tccctttttgtcatt

SEQ ID NO: 932345 - DNA, 15 bp, Homo sapiens
atccctttttgtcat

SEQ ID NO: 932346 - DNA, 15 bp, Homo sapiens
catccctttttgtca

SEQ ID NO: 932347 - DNA, 15 bp, Homo sapiens
tcatccctttttgtc

SEQ ID NO: 932348 - DNA, 15 bp, Homo sapiens
ttcatccctttttgt

SEQ ID NO: 932349 - DNA, 15 bp, Homo sapiens
tttcatccctttttg

SEQ ID NO: 932350 - DNA, 15 bp, Homo sapiens
ttttcatcccttttt

SEQ ID NO: 932351 - DNA, 15 bp, Homo sapiens
tttttcatccctttt

SEQ ID NO: 932352 - DNA, 15 bp, Homo sapiens
ttttttcatcccttt

SEQ ID NO: 932353 - DNA, 15 bp, Homo sapiens
cttttttcatccctt

SEQ ID NO: 932354 - DNA, 15 bp, Homo sapiens
ccttttttcatccct

SEQ ID NO: 932355 - DNA, 15 bp, Homo sapiens
cccttttttcatccc

SEQ ID NO: 932356 - DNA, 15 bp, Homo sapiens
ccccttttttcatcc

SEQ ID NO: 932357 - DNA, 15 bp, Homo sapiens
cccccttttttcatc

SEQ ID NO: 932358 - DNA, 15 bp, Homo sapiens
acccccttttttcat

SEQ ID NO: 932359 - DNA, 15 bp, Homo sapiens
gacccccttttttca

SEQ ID NO: 932360 - DNA, 15 bp, Homo sapiens
tgacccccttttttc

SEQ ID NO: 932361 - DNA, 15 bp, Homo sapiens
atgaccccctttttt

SEQ ID NO: 932362 - DNA, 15 bp, Homo sapiens
tatgacccccttttt

SEQ ID NO: 932363 - DNA, 15 bp, Homo sapiens
ctatgaccccctttt

SEQ ID NO: 932364 - DNA, 15 bp, Homo sapiens
tctatgacccccttt

SEQ ID NO: 932365 - DNA, 15 bp, Homo sapiens
ctctatgaccccctt

SEQ ID NO: 932366 - DNA, 15 bp, Homo sapiens
tctctatgaccccct

SEQ ID NO: 932367 - DNA, 15 bp, Homo sapiens
atctctatgaccccc

SEQ ID NO: 932368 - DNA, 15 bp, Homo sapiens
catctctatgacccc

SEQ ID NO: 932369 - DNA, 15 bp, Homo sapiens
acatctctatgaccc

SEQ ID NO: 932370 - DNA, 15 bp, Homo sapiens
aacatctctatgacc

SEQ ID NO: 932371 - DNA, 15 bp, Homo sapiens
aaacatctctatgac

SEQ ID NO: 932372 - DNA, 15 bp, Homo sapiens
aaaacatctctatga

SEQ ID NO: 932373 - DNA, 15 bp, Homo sapiens
aaaaacatctctatg

SEQ ID NO: 932374 - DNA, 15 bp, Homo sapiens
caaaaacatctctat

SEQ ID NO: 932375 - DNA, 15 bp, Homo sapiens
acaaaaacatctcta

SEQ ID NO: 932376 - DNA, 15 bp, Homo sapiens
cacaaaaacatctct

SEQ ID NO: 932377 - DNA, 15 bp, Homo sapiens
tcacaaaaacatctc

SEQ ID NO: 932378 - DNA, 15 bp, Homo sapiens
ctcacaaaaacatct

SEQ ID NO: 932379 - DNA, 15 bp, Homo sapiens
tctcacaaaaacatc

SEQ ID NO: 932380 - DNA, 15 bp, Homo sapiens
ttctcacaaaaacat

SEQ ID NO: 932381 - DNA, 15 bp, Homo sapiens
cttctcacaaaaaca

SEQ ID NO: 932382 - DNA, 15 bp, Homo sapiens
ccttctcacaaaaac

SEQ ID NO: 932383 - DNA, 15 bp, Homo sapiens
tccttctcacaaaaa

SEQ ID NO: 932384 - DNA, 15 bp, Homo sapiens
ctccttctcacaaaa

SEQ ID NO: 932385 - DNA, 15 bp, Homo sapiens
actccttctcacaaa

SEQ ID NO: 932386 - DNA, 15 bp, Homo sapiens
aactccttctcacaa

SEQ ID NO: 932387 - DNA, 15 bp, Homo sapiens
caactccttctcaca

SEQ ID NO: 932388 - DNA, 15 bp, Homo sapiens
ccaactccttctcac

SEQ ID NO: 932389 - DNA, 15 bp, Homo sapiens
accaactccttctca

SEQ ID NO: 932390 - DNA, 15 bp, Homo sapiens
gaccaactccttctc

SEQ ID NO: 932391 - DNA, 15 bp, Homo sapiens
tgaccaactccttct

SEQ ID NO: 932392 - DNA, 15 bp, Homo sapiens
ctgaccaactccttc

SEQ ID NO: 932393 - DNA, 15 bp, Homo sapiens
actgaccaactcctt

SEQ ID NO: 932394 - DNA, 15 bp, Homo sapiens
cactgaccaactcct

SEQ ID NO: 932395 - DNA, 15 bp, Homo sapiens
acactgaccaactcc

SEQ ID NO: 932396 - DNA, 15 bp, Homo sapiens
tacactgaccaactc

SEQ ID NO: 932397 - DNA, 15 bp, Homo sapiens
atacactgaccaact

SEQ ID NO: 932398 - DNA, 15 bp, Homo sapiens
aatacactgaccaac

SEQ ID NO: 932399 - DNA, 15 bp, Homo sapiens
gaatacactgaccaa

SEQ ID NO: 932400 - DNA, 15 bp, Homo sapiens
agaatacactgacca

SEQ ID NO: 932401 - DNA, 15 bp, Homo sapiens
cagaatacactgacc

SEQ ID NO: 932402 - DNA, 15 bp, Homo sapiens
tcagaatacactgac

SEQ ID NO: 932403 - DNA, 15 bp, Homo sapiens
atcagaatacactga

SEQ ID NO: 932404 - DNA, 15 bp, Homo sapiens
aatcagaatacactg

SEQ ID NO: 932405 - DNA, 15 bp, Homo sapiens
aaatcagaatacact

SEQ ID NO: 932406 - DNA, 15 bp, Homo sapiens
taaatcagaatacac

SEQ ID NO: 932407 - DNA, 15 bp, Homo sapiens
ataaatcagaataca

SEQ ID NO: 932408 - DNA, 15 bp, Homo sapiens
aataaatcagaatac

SEQ ID NO: 932409 - DNA, 15 bp, Homo sapiens
taataaatcagaata

SEQ ID NO: 932410 - DNA, 15 bp, Homo sapiens
ctaataaatcagaat

SEQ ID NO: 932411 - DNA, 15 bp, Homo sapiens
cctaataaatcagaa

SEQ ID NO: 932412 - DNA, 15 bp, Homo sapiens
ccctaataaatcaga

SEQ ID NO: 932413 - DNA, 15 bp, Homo sapiens
accctaataaatcag

SEQ ID NO: 932414 - DNA, 15 bp, Homo sapiens
aaccctaataaatca

SEQ ID NO: 932415 - DNA, 15 bp, Homo sapiens
aaaccctaataaatc

SEQ ID NO: 932416 - DNA, 15 bp, Homo sapiens
aaaaccctaataaat

SEQ ID NO: 932417 - DNA, 15 bp, Homo sapiens
aaaaaaccctaataa

SEQ ID NO: 932418 - DNA, 15 bp, Homo sapiens
aaaaaaaccctaata

SEQ ID NO: 932419 - DNA, 15 bp, Homo sapiens
aaaaaaaaccctaat

SEQ ID NO: 932420 - DNA, 15 bp, Homo sapiens
taaaaaaaaccctaa

SEQ ID NO: 932421 - DNA, 15 bp, Homo sapiens
ctaaaaaaaacccta

SEQ ID NO: 932422 - DNA, 15 bp, Homo sapiens
actaaaaaaaaccct

SEQ ID NO: 932423 - DNA, 15 bp, Homo sapiens
aactaaaaaaaaccc

SEQ ID NO: 932424 - DNA, 15 bp, Homo sapiens
aaactaaaaaaaacc

SEQ ID NO: 932425 - DNA, 15 bp, Homo sapiens
taaactaaaaaaaac

SEQ ID NO: 932426 - DNA, 15 bp, Homo sapiens
ataaactaaaaaaaa

SEQ ID NO: 932427 - DNA, 15 bp, Homo sapiens
gataaactaaaaaaa

SEQ ID NO: 932428 - DNA, 15 bp, Homo sapiens
agataaactaaaaaa

SEQ ID NO: 932429 - DNA, 15 bp, Homo sapiens
gagataaactaaaaa

SEQ ID NO: 932430 - DNA, 15 bp, Homo sapiens
tgagataaactaaaa

SEQ ID NO: 932431 - DNA, 15 bp, Homo sapiens
ctgagataaactaaa

SEQ ID NO: 932432 - DNA, 15 bp, Homo sapiens
tctgagataaactaa

SEQ ID NO: 932433 - DNA, 15 bp, Homo sapiens
atctgagataaacta

SEQ ID NO: 932434 - DNA, 15 bp, Homo sapiens
aatctgagataaact

SEQ ID NO: 932435 - DNA, 15 bp, Homo sapiens
aaatctgagataaac

SEQ ID NO: 932436 - DNA, 15 bp, Homo sapiens
caaatctgagataaa

SEQ ID NO: 932437 - DNA, 15 bp, Homo sapiens
tcaaatctgagataa

SEQ ID NO: 932438 - DNA, 15 bp, Homo sapiens
atcaaatctgagata

SEQ ID NO: 932439 - DNA, 15 bp, Homo sapiens
gatcaaatctgagat

SEQ ID NO: 932440 - DNA, 15 bp, Homo sapiens
agatcaaatctgaga

SEQ ID NO: 932441 - DNA, 15 bp, Homo sapiens
tagatcaaatctgag

SEQ ID NO: 932442 - DNA, 15 bp, Homo sapiens
atagatcaaatctga

SEQ ID NO: 932443 - DNA, 15 bp, Homo sapiens
aatagatcaaatctg

SEQ ID NO: 932444 - DNA, 15 bp, Homo sapiens
aaatagatcaaatct

SEQ ID NO: 932445 - DNA, 15 bp, Homo sapiens
taaatagatcaaatc

SEQ ID NO: 932446 - DNA, 15 bp, Homo sapiens
ttaaatagatcaaat

SEQ ID NO: 932447 - DNA, 15 bp, Homo sapiens
tttaaatagatcaaa

SEQ ID NO: 932448 - DNA, 15 bp, Homo sapiens
atttaaatagatcaa

SEQ ID NO: 932449 - DNA, 15 bp, Homo sapiens
aatttaaatagatca

SEQ ID NO: 932450 - DNA, 15 bp, Homo sapiens
caatttaaatagatc

SEQ ID NO: 932451 - DNA, 15 bp, Homo sapiens
acaatttaaatagat

SEQ ID NO: 932452 - DNA, 15 bp, Homo sapiens
aacaatttaaataga

SEQ ID NO: 932453 - DNA, 15 bp, Homo sapiens
aaacaatttaaatag

SEQ ID NO: 932454 - DNA, 15 bp, Homo sapiens
aaaacaatttaaata

SEQ ID NO: 932455 - DNA, 15 bp, Homo sapiens
taaaacaatttaaat

SEQ ID NO: 932456 - DNA, 15 bp, Homo sapiens
ctaaaacaatttaaa

SEQ ID NO: 932457 - DNA, 15 bp, Homo sapiens
tctaaaacaatttaa

SEQ ID NO: 932458 - DNA, 15 bp, Homo sapiens
ttctaaaacaattta

SEQ ID NO: 932459 - DNA, 15 bp, Homo sapiens
cttctaaaacaattt

SEQ ID NO: 932460 - DNA, 15 bp, Homo sapiens
tcttctaaaacaatt

SEQ ID NO: 932461 - DNA, 15 bp, Homo sapiens
atcttctaaaacaat

SEQ ID NO: 932462 - DNA, 15 bp, Homo sapiens
catcttctaaaacaa

SEQ ID NO: 932463 - DNA, 15 bp, Homo sapiens
gcatcttctaaaaca

SEQ ID NO: 932464 - DNA, 15 bp, Homo sapiens
agcatcttctaaaac

SEQ ID NO: 932465 - DNA, 15 bp, Homo sapiens
cagcatcttctaaaa

SEQ ID NO: 932466 - DNA, 15 bp, Homo sapiens
ccagcatcttctaaa

SEQ ID NO: 932467 - DNA, 15 bp, Homo sapiens
accagcatcttctaa

SEQ ID NO: 932468 - DNA, 15 bp, Homo sapiens
caccagcatcttcta

SEQ ID NO: 932469 - DNA, 15 bp, Homo sapiens
acaccagcatcttct

SEQ ID NO: 932470 - DNA, 15 bp, Homo sapiens
aacaccagcatcttc

SEQ ID NO: 932471 - DNA, 15 bp, Homo sapiens
aaacaccagcatctt

SEQ ID NO: 932472 - DNA, 15 bp, Homo sapiens
aaaacaccagcatct

SEQ ID NO: 932473 - DNA, 15 bp, Homo sapiens
aaaaacaccagcatc

SEQ ID NO: 932474 - DNA, 15 bp, Homo sapiens
gaaaaacaccagcat

SEQ ID NO: 932475 - DNA, 15 bp, Homo sapiens
agaaaaacaccagca

SEQ ID NO: 932476 - DNA, 15 bp, Homo sapiens
cagaaaaacaccagc

SEQ ID NO: 932477 - DNA, 15 bp, Homo sapiens
acagaaaaacaccag

SEQ ID NO: 932478 - DNA, 15 bp, Homo sapiens
cacagaaaaacacca

SEQ ID NO: 932479 - DNA, 15 bp, Homo sapiens
gcacagaaaaacacc

SEQ ID NO: 932480 - DNA, 15 bp, Homo sapiens
agcacagaaaaacac

SEQ ID NO: 932481 - DNA, 15 bp, Homo sapiens
tagcacagaaaaaca

SEQ ID NO: 932482 - DNA, 15 bp, Homo sapiens
ctagcacagaaaaac

SEQ ID NO: 932483 - DNA, 15 bp, Homo sapiens
gctagcacagaaaaa

SEQ ID NO: 932484 - DNA, 15 bp, Homo sapiens
agctagcacagaaaa

SEQ ID NO: 932485 - DNA, 15 bp, Homo sapiens
tagctagcacagaaa

SEQ ID NO: 932486 - DNA, 15 bp, Homo sapiens
atagctagcacagaa

SEQ ID NO: 932487 - DNA, 15 bp, Homo sapiens
catagctagcacaga

SEQ ID NO: 932488 - DNA, 15 bp, Homo sapiens
tcatagctagcacag

SEQ ID NO: 932489 - DNA, 15 bp, Homo sapiens
ttcatagctagcaca

SEQ ID NO: 932490 - DNA, 15 bp, Homo sapiens
tttcatagctagcac

SEQ ID NO: 932491 - DNA, 15 bp, Homo sapiens
atttcatagctagca

SEQ ID NO: 932492 - DNA, 15 bp, Homo sapiens
aatttcatagctagc

SEQ ID NO: 932493 - DNA, 15 bp, Homo sapiens
aaatttcatagctag

SEQ ID NO: 932494 - DNA, 15 bp, Homo sapiens
taaatttcatagcta

SEQ ID NO: 932495 - DNA, 15 bp, Homo sapiens
ataaatttcatagct

SEQ ID NO: 932496 - DNA, 15 bp, Homo sapiens
cataaatttcatagc

SEQ ID NO: 932497 - DNA, 15 bp, Homo sapiens
ccataaatttcatag

SEQ ID NO: 932498 - DNA, 15 bp, Homo sapiens
cccataaatttcata

SEQ ID NO: 932499 - DNA, 15 bp, Homo sapiens
acccataaatttcat

SEQ ID NO: 932500 - DNA, 15 bp, Homo sapiens
tacccataaatttca

SEQ ID NO: 932501 - DNA, 15 bp, Homo sapiens
ttacccataaatttc

SEQ ID NO: 932502 - DNA, 15 bp, Homo sapiens
tttacccataaattt

SEQ ID NO: 932503 - DNA, 15 bp, Homo sapiens
gtttacccataaatt

SEQ ID NO: 932504 - DNA, 15 bp, Homo sapiens
agtttacccataaat

SEQ ID NO: 932505 - DNA, 15 bp, Homo sapiens
aagtttacccataaa

SEQ ID NO: 932506 - DNA, 15 bp, Homo sapiens
aaagtttacccataa

SEQ ID NO: 932507 - DNA, 15 bp, Homo sapiens
taaagtttacccata

SEQ ID NO: 932508 - DNA, 15 bp, Homo sapiens
ttaaagtttacccat

SEQ ID NO: 932509 - DNA, 15 bp, Homo sapiens
cttaaagtttaccca

SEQ ID NO: 932510 - DNA, 15 bp, Homo sapiens
gcttaaagtttaccc

SEQ ID NO: 932511 - DNA, 15 bp, Homo sapiens
ggcttaaagtttacc

SEQ ID NO: 932512 - DNA, 15 bp, Homo sapiens
aggcttaaagtttac

SEQ ID NO: 932513 - DNA, 15 bp, Homo sapiens
aaggcttaaagttta

SEQ ID NO: 932514 - DNA, 15 bp, Homo sapiens
aaaggcttaaagttt

SEQ ID NO: 932515 - DNA, 15 bp, Homo sapiens
gaaaggcttaaagtt

SEQ ID NO: 932516 - DNA, 15 bp, Homo sapiens
ggaaaggcttaaagt

SEQ ID NO: 932517 - DNA, 15 bp, Homo sapiens
aggaaaggcttaaag

SEQ ID NO: 932518 - DNA, 15 bp, Homo sapiens
taggaaaggcttaaa

SEQ ID NO: 932519 - DNA, 15 bp, Homo sapiens
ctaggaaaggcttaa

SEQ ID NO: 932520 - DNA, 15 bp, Homo sapiens
actaggaaaggctta

SEQ ID NO: 932521 - DNA, 15 bp, Homo sapiens
gactaggaaaggctt

SEQ ID NO: 932522 - DNA, 15 bp, Homo sapiens
ggactaggaaaggct

SEQ ID NO: 932523 - DNA, 15 bp, Homo sapiens
aggactaggaaaggc

SEQ ID NO: 932524 - DNA, 15 bp, Homo sapiens
aaggactaggaaagg

SEQ ID NO: 932525 - DNA, 15 bp, Homo sapiens
aaaggactaggaaag

SEQ ID NO: 932526 - DNA, 15 bp, Homo sapiens
aaaaggactaggaaa

SEQ ID NO: 932527 - DNA, 15 bp, Homo sapiens
caaaaggactaggaa

SEQ ID NO: 932528 - DNA, 15 bp, Homo sapiens
acaaaaggactagga

SEQ ID NO: 932529 - DNA, 15 bp, Homo sapiens
aacaaaaggactagg

SEQ ID NO: 932530 - DNA, 15 bp, Homo sapiens
caacaaaaggactag

SEQ ID NO: 932531 - DNA, 15 bp, Homo sapiens
acaacaaaaggacta

SEQ ID NO: 932532 - DNA, 15 bp, Homo sapiens
gacaacaaaaggact

SEQ ID NO: 932533 - DNA, 15 bp, Homo sapiens
agacaacaaaaggac

SEQ ID NO: 932534 - DNA, 15 bp, Homo sapiens
tagacaacaaaagga

SEQ ID NO: 932535 - DNA, 15 bp, Homo sapiens
gtagacaacaaaagg

SEQ ID NO: 932536 - DNA, 15 bp, Homo sapiens
ggtagacaacaaaag

SEQ ID NO: 932537 - DNA, 15 bp, Homo sapiens
aggtagacaacaaaa

SEQ ID NO: 932538 - DNA, 15 bp, Homo sapiens
taggtagacaacaaa

SEQ ID NO: 932539 - DNA, 15 bp, Homo sapiens
ttaggtagacaacaa

SEQ ID NO: 932540 - DNA, 15 bp, Homo sapiens
tttaggtagacaaca

SEQ ID NO: 932541 - DNA, 15 bp, Homo sapiens
atttaggtagacaac

SEQ ID NO: 932542 - DNA, 15 bp, Homo sapiens
aatttaggtagacaa

SEQ ID NO: 932543 - DNA, 15 bp, Homo sapiens
gaatttaggtagaca

SEQ ID NO: 932544 - DNA, 15 bp, Homo sapiens
tgaatttaggtagac

SEQ ID NO: 932545 - DNA, 15 bp, Homo sapiens
ttgaatttaggtaga

SEQ ID NO: 932546 - DNA, 15 bp, Homo sapiens
attgaatttaggtag

SEQ ID NO: 932547 - DNA, 15 bp, Homo sapiens
aattgaatttaggta

SEQ ID NO: 932548 - DNA, 15 bp, Homo sapiens
taattgaatttaggt

SEQ ID NO: 932549 - DNA, 15 bp, Homo sapiens
ttaattgaatttagg

SEQ ID NO: 932550 - DNA, 15 bp, Homo sapiens
attaattgaatttag

SEQ ID NO: 932551 - DNA, 15 bp, Homo sapiens
aattaattgaattta

SEQ ID NO: 932552 - DNA, 15 bp, Homo sapiens
aaattaattgaattt

SEQ ID NO: 932553 - DNA, 15 bp, Homo sapiens
gaaattaattgaatt

SEQ ID NO: 932554 - DNA, 15 bp, Homo sapiens
tgaaattaattgaat

SEQ ID NO: 932555 - DNA, 15 bp, Homo sapiens
atgaaattaattgaa

SEQ ID NO: 932556 - DNA, 15 bp, Homo sapiens
tatgaaattaattga

SEQ ID NO: 932557 - DNA, 15 bp, Homo sapiens
atatgaaattaattg

SEQ ID NO: 932558 - DNA, 15 bp, Homo sapiens
catatgaaattaatt

SEQ ID NO: 932559 - DNA, 15 bp, Homo sapiens
ccatatgaaattaat

SEQ ID NO: 932560 - DNA, 15 bp, Homo sapiens
tccatatgaaattaa

SEQ ID NO: 932561 - DNA, 15 bp, Homo sapiens
ttccatatgaaatta

SEQ ID NO: 932562 - DNA, 15 bp, Homo sapiens
cttccatatgaaatt

SEQ ID NO: 932563 - DNA, 15 bp, Homo sapiens
ccttccatatgaaat

SEQ ID NO: 932564 - DNA, 15 bp, Homo sapiens
tccttccatatgaaa

SEQ ID NO: 932565 - DNA, 15 bp, Homo sapiens
atccttccatatgaa

SEQ ID NO: 932566 - DNA, 15 bp, Homo sapiens
catccttccatatga

SEQ ID NO: 932567 - DNA, 15 bp, Homo sapiens
acatccttccatatg

SEQ ID NO: 932568 - DNA, 15 bp, Homo sapiens
tacatccttccatat

SEQ ID NO: 932569 - DNA, 15 bp, Homo sapiens
ctacatccttccata

SEQ ID NO: 932570 - DNA, 15 bp, Homo sapiens
actacatccttccat

SEQ ID NO: 932571 - DNA, 15 bp, Homo sapiens
tactacatccttcca

SEQ ID NO: 932572 - DNA, 15 bp, Homo sapiens
ttactacatccttcc

SEQ ID NO: 932573 - DNA, 15 bp, Homo sapiens
cttactacatccttc

SEQ ID NO: 932574 - DNA, 15 bp, Homo sapiens
acttactacatcctt

SEQ ID NO: 932575 - DNA, 15 bp, Homo sapiens
cacttactacatcct

SEQ ID NO: 932576 - DNA, 15 bp, Homo sapiens
tcacttactacatcc

SEQ ID NO: 932577 - DNA, 15 bp, Homo sapiens
ctcacttactacatc

SEQ ID NO: 932578 - DNA, 15 bp, Homo sapiens
actcacttactacat

SEQ ID NO: 932579 - DNA, 15 bp, Homo sapiens
tactcacttactaca

SEQ ID NO: 932580 - DNA, 15 bp, Homo sapiens
ttactcacttactac

SEQ ID NO: 932581 - DNA, 15 bp, Homo sapiens
attactcacttacta

SEQ ID NO: 932582 - DNA, 15 bp, Homo sapiens
tattactcacttact

SEQ ID NO: 932583 - DNA, 15 bp, Homo sapiens
atattactcacttac

SEQ ID NO: 932584 - DNA, 15 bp, Homo sapiens
tatattactcactta

SEQ ID NO: 932585 - DNA, 15 bp, Homo sapiens
ttatattactcactt

SEQ ID NO: 932586 - DNA, 15 bp, Homo sapiens
tttatattactcact

SEQ ID NO: 932587 - DNA, 15 bp, Homo sapiens
atttatattactcac

SEQ ID NO: 932588 - DNA, 15 bp, Homo sapiens
tatttatattactca

SEQ ID NO: 932589 - DNA, 15 bp, Homo sapiens
atatttatattactc

SEQ ID NO: 932590 - DNA, 15 bp, Homo sapiens
gatatttatattact

SEQ ID NO: 932591 - DNA, 15 bp, Homo sapiens
agatatttatattac

SEQ ID NO: 932592 - DNA, 15 bp, Homo sapiens
tagatatttatatta

SEQ ID NO: 932593 - DNA, 15 bp, Homo sapiens
ttagatatttatatt

SEQ ID NO: 932594 - DNA, 15 bp, Homo sapiens
tttagatatttatat

SEQ ID NO: 932595 - DNA, 15 bp, Homo sapiens
ttttagatatttata

SEQ ID NO: 932596 - DNA, 15 bp, Homo sapiens
attttagatatttat

SEQ ID NO: 932597 - DNA, 15 bp, Homo sapiens
aattttagatattta

SEQ ID NO: 932598 - DNA, 15 bp, Homo sapiens
caattttagatattt

SEQ ID NO: 932599 - DNA, 15 bp, Homo sapiens
ccaattttagatatt

SEQ ID NO: 932600 - DNA, 15 bp, Homo sapiens
tccaattttagatat

SEQ ID NO: 932601 - DNA, 15 bp, Homo sapiens
atccaattttagata

SEQ ID NO: 932602 - DNA, 15 bp, Homo sapiens
catccaattttagat

SEQ ID NO: 932603 - DNA, 15 bp, Homo sapiens
acatccaattttaga

SEQ ID NO: 932604 - DNA, 15 bp, Homo sapiens
aacatccaattttag

SEQ ID NO: 932605 - DNA, 15 bp, Homo sapiens
aaacatccaatttta

SEQ ID NO: 932606 - DNA, 15 bp, Homo sapiens
caaacatccaatttt

SEQ ID NO: 932607 - DNA, 15 bp, Homo sapiens
tcaaacatccaattt

SEQ ID NO: 932608 - DNA, 15 bp, Homo sapiens
ttcaaacatccaatt

SEQ ID NO: 932609 - DNA, 15 bp, Homo sapiens
tttcaaacatccaat

SEQ ID NO: 932610 - DNA, 15 bp, Homo sapiens
ttttcaaacatccaa

SEQ ID NO: 932611 - DNA, 15 bp, Homo sapiens
gttttcaaacatcca

SEQ ID NO: 932612 - DNA, 15 bp, Homo sapiens
tgttttcaaacatcc

SEQ ID NO: 932613 - DNA, 15 bp, Homo sapiens
ttgttttcaaacatc

SEQ ID NO: 932614 - DNA, 15 bp, Homo sapiens
tttgttttcaaacat

SEQ ID NO: 932615 - DNA, 15 bp, Homo sapiens
ttttgttttcaaaca

SEQ ID NO: 932616 - DNA, 15 bp, Homo sapiens
gttttgttttcaaac

SEQ ID NO: 932617 - DNA, 15 bp, Homo sapiens
tgttttgttttcaaa

SEQ ID NO: 932618 - DNA, 15 bp, Homo sapiens
atgttttgttttcaa

SEQ ID NO: 932619 - DNA, 15 bp, Homo sapiens
tatgttttgttttca

SEQ ID NO: 932620 - DNA, 15 bp, Homo sapiens
gtatgttttgttttc

SEQ ID NO: 932621 - DNA, 15 bp, Homo sapiens
ggtatgttttgtttt

SEQ ID NO: 932622 - DNA, 15 bp, Homo sapiens
aggtatgttttgttt

SEQ ID NO: 932623 - DNA, 15 bp, Homo sapiens
caggtatgttttgtt

SEQ ID NO: 932624 - DNA, 15 bp, Homo sapiens
acaggtatgttttgt

SEQ ID NO: 932625 - DNA, 15 bp, Homo sapiens
aacaggtatgttttg

SEQ ID NO: 932626 - DNA, 15 bp, Homo sapiens
aaacaggtatgtttt

SEQ ID NO: 932627 - DNA, 15 bp, Homo sapiens
aaaacaggtatgttt

SEQ ID NO: 932628 - DNA, 15 bp, Homo sapiens
aaaaacaggtatgtt

SEQ ID NO: 932629 - DNA, 15 bp, Homo sapiens
aaaaaacaggtatgt

SEQ ID NO: 932630 - DNA, 15 bp, Homo sapiens
caaaaaacaggtatg

SEQ ID NO: 932631 - DNA, 15 bp, Homo sapiens
acaaaaaacaggtat

SEQ ID NO: 932632 - DNA, 15 bp, Homo sapiens
tacaaaaaacaggta

SEQ ID NO: 932633 - DNA, 15 bp, Homo sapiens
ttacaaaaaacaggt

SEQ ID NO: 932634 - DNA, 15 bp, Homo sapiens
attacaaaaaacagg

SEQ ID NO: 932635 - DNA, 15 bp, Homo sapiens
tattacaaaaaacag

SEQ ID NO: 932636 - DNA, 15 bp, Homo sapiens
ctattacaaaaaaca

SEQ ID NO: 932637 - DNA, 15 bp, Homo sapiens
gctattacaaaaaac

SEQ ID NO: 932638 - DNA, 15 bp, Homo sapiens
agctattacaaaaaa

SEQ ID NO: 932639 - DNA, 15 bp, Homo sapiens
aagctattacaaaaa

SEQ ID NO: 932640 - DNA, 15 bp, Homo sapiens
caagctattacaaaa

SEQ ID NO: 932641 - DNA, 15 bp, Homo sapiens
tcaagctattacaaa

SEQ ID NO: 932642 - DNA, 15 bp, Homo sapiens
atcaagctattacaa

SEQ ID NO: 932643 - DNA, 15 bp, Homo sapiens
aatcaagctattaca

SEQ ID NO: 932644 - DNA, 15 bp, Homo sapiens
aaatcaagctattac

SEQ ID NO: 932645 - DNA, 15 bp, Homo sapiens
taaatcaagctatta

SEQ ID NO: 932646 - DNA, 15 bp, Homo sapiens
ttaaatcaagctatt

SEQ ID NO: 932647 - DNA, 15 bp, Homo sapiens
attaaatcaagctat

SEQ ID NO: 932648 - DNA, 15 bp, Homo sapiens
cattaaatcaagcta

SEQ ID NO: 932649 - DNA, 15 bp, Homo sapiens
gcattaaatcaagct

SEQ ID NO: 932650 - DNA, 15 bp, Homo sapiens
agcattaaatcaagc

SEQ ID NO: 932651 - DNA, 15 bp, Homo sapiens
cagcattaaatcaag

SEQ ID NO: 932652 - DNA, 15 bp, Homo sapiens
tcagcattaaatcaa

SEQ ID NO: 932653 - DNA, 15 bp, Homo sapiens
ctcagcattaaatca

SEQ ID NO: 932654 - DNA, 15 bp, Homo sapiens
actcagcattaaatc

SEQ ID NO: 932655 - DNA, 15 bp, Homo sapiens
aactcagcattaaat

SEQ ID NO: 932656 - DNA, 15 bp, Homo sapiens
gaactcagcattaaa

SEQ ID NO: 932657 - DNA, 15 bp, Homo sapiens
agaactcagcattaa

SEQ ID NO: 932658 - DNA, 15 bp, Homo sapiens
gagaactcagcatta

SEQ ID NO: 932659 - DNA, 15 bp, Homo sapiens
tgagaactcagcatt

SEQ ID NO: 932660 - DNA, 15 bp, Homo sapiens
ttgagaactcagcat

SEQ ID NO: 932661 - DNA, 15 bp, Homo sapiens
tttgagaactcagca

SEQ ID NO: 932662 - DNA, 15 bp, Homo sapiens
ttttgagaactcagc

SEQ ID NO: 932663 - DNA, 15 bp, Homo sapiens
gattttgagaactca

SEQ ID NO: 932664 - DNA, 15 bp, Homo sapiens
tgattttgagaactc

SEQ ID NO: 932665 - DNA, 15 bp, Homo sapiens
atgattttgagaact

SEQ ID NO: 932666 - DNA, 15 bp, Homo sapiens
aatgattttgagaac

SEQ ID NO: 932667 - DNA, 15 bp, Homo sapiens
taatgattttgagaa

SEQ ID NO: 932668 - DNA, 15 bp, Homo sapiens
ataatgattttgaga

SEQ ID NO: 932669 - DNA, 15 bp, Homo sapiens
aataatgattttgag

SEQ ID NO: 932670 - DNA, 15 bp, Homo sapiens
taataatgattttga

SEQ ID NO: 932671 - DNA, 15 bp, Homo sapiens
ttaataatgattttg

SEQ ID NO: 932672 - DNA, 15 bp, Homo sapiens
cttaataatgatttt

SEQ ID NO: 932673 - DNA, 15 bp, Homo sapiens
tcttaataatgattt

SEQ ID NO: 932674 - DNA, 15 bp, Homo sapiens
atcttaataatgatt

SEQ ID NO: 932675 - DNA, 15 bp, Homo sapiens
aatcttaataatgat

SEQ ID NO: 932676 - DNA, 15 bp, Homo sapiens
aaatcttaataatga

SEQ ID NO: 932677 - DNA, 15 bp, Homo sapiens
aaaatcttaataatg

SEQ ID NO: 932678 - DNA, 15 bp, Homo sapiens
caaaatcttaataat

SEQ ID NO: 932679 - DNA, 15 bp, Homo sapiens
tcaaaatcttaataa

SEQ ID NO: 932680 - DNA, 15 bp, Homo sapiens
ttcaaaatcttaata

SEQ ID NO: 932681 - DNA, 15 bp, Homo sapiens
gttcaaaatcttaat

SEQ ID NO: 932682 - DNA, 15 bp, Homo sapiens
agttcaaaatcttaa

SEQ ID NO: 932683 - DNA, 15 bp, Homo sapiens
aagttcaaaatctta

SEQ ID NO: 932684 - DNA, 15 bp, Homo sapiens
aaagttcaaaatctt

SEQ ID NO: 932685 - DNA, 15 bp, Homo sapiens
gaaagttcaaaatct

SEQ ID NO: 932686 - DNA, 15 bp, Homo sapiens
tgaaagttcaaaatc

SEQ ID NO: 932687 - DNA, 15 bp, Homo sapiens
gtgaaagttcaaaat

SEQ ID NO: 932688 - DNA, 15 bp, Homo sapiens
tgtgaaagttcaaaa

SEQ ID NO: 932689 - DNA, 15 bp, Homo sapiens
atgtgaaagttcaaa

SEQ ID NO: 932690 - DNA, 15 bp, Homo sapiens
aatgtgaaagttcaa

SEQ ID NO: 932691 - DNA, 15 bp, Homo sapiens
gaatgtgaaagttca

SEQ ID NO: 932692 - DNA, 15 bp, Homo sapiens
tgaatgtgaaagttc

SEQ ID NO: 932693 - DNA, 15 bp, Homo sapiens
ttgaatgtgaaagtt

SEQ ID NO: 932694 - DNA, 15 bp, Homo sapiens
attgaatgtgaaagt

SEQ ID NO: 932695 - DNA, 15 bp, Homo sapiens
cattgaatgtgaaag

SEQ ID NO: 932696 - DNA, 15 bp, Homo sapiens
acattgaatgtgaaa

SEQ ID NO: 932697 - DNA, 15 bp, Homo sapiens
cacattgaatgtgaa

SEQ ID NO: 932698 - DNA, 15 bp, Homo sapiens
ccacattgaatgtga

SEQ ID NO: 932699 - DNA, 15 bp, Homo sapiens
tccacattgaatgtg

SEQ ID NO: 932700 - DNA, 15 bp, Homo sapiens
ttccacattgaatgt

SEQ ID NO: 932701 - DNA, 15 bp, Homo sapiens
tttccacattgaatg

SEQ ID NO: 932702 - DNA, 15 bp, Homo sapiens
ctttccacattgaat

SEQ ID NO: 932703 - DNA, 15 bp, Homo sapiens
tctttccacattgaa

SEQ ID NO: 932704 - DNA, 15 bp, Homo sapiens
ttctttccacattga

SEQ ID NO: 932705 - DNA, 15 bp, Homo sapiens
attctttccacattg

SEQ ID NO: 932706 - DNA, 15 bp, Homo sapiens
aattctttccacatt

SEQ ID NO: 932707 - DNA, 15 bp, Homo sapiens
caattctttccacat

SEQ ID NO: 932708 - DNA, 15 bp, Homo sapiens
tcaattctttccaca

SEQ ID NO: 932709 - DNA, 15 bp, Homo sapiens
ctcaattctttccac

SEQ ID NO: 932710 - DNA, 15 bp, Homo sapiens
actcaattctttcca

SEQ ID NO: 932711 - DNA, 15 bp, Homo sapiens
cactcaattctttcc

SEQ ID NO: 932712 - DNA, 15 bp, Homo sapiens
acactcaattctttc

SEQ ID NO: 932713 - DNA, 15 bp, Homo sapiens
tacactcaattcttt

SEQ ID NO: 932714 - DNA, 15 bp, Homo sapiens
ttacactcaattctt

SEQ ID NO: 932715 - DNA, 15 bp, Homo sapiens
attacactcaattct

SEQ ID NO: 932716 - DNA, 15 bp, Homo sapiens
aattacactcaattc

SEQ ID NO: 932717 - DNA, 15 bp, Homo sapiens
taattacactcaatt

SEQ ID NO: 932718 - DNA, 15 bp, Homo sapiens
gtaattacactcaat

SEQ ID NO: 932719 - DNA, 15 bp, Homo sapiens
tgtaattacactcaa

SEQ ID NO: 932720 - DNA, 15 bp, Homo sapiens
ttgtaattacactca

SEQ ID NO: 932721 - DNA, 15 bp, Homo sapiens
tttgtaattacactc

SEQ ID NO: 932722 - DNA, 15 bp, Homo sapiens
ttttgtaattacact

SEQ ID NO: 932723 - DNA, 15 bp, Homo sapiens
cttttgtaattacac

SEQ ID NO: 932724 - DNA, 15 bp, Homo sapiens
tcttttgtaattaca

SEQ ID NO: 932725 - DNA, 15 bp, Homo sapiens
atcttttgtaattac

SEQ ID NO: 932726 - DNA, 15 bp, Homo sapiens
aatcttttgtaatta

SEQ ID NO: 932727 - DNA, 15 bp, Homo sapiens
aaatcttttgtaatt

SEQ ID NO: 932728 - DNA, 15 bp, Homo sapiens
taaatcttttgtaat

SEQ ID NO: 932729 - DNA, 15 bp, Homo sapiens
ataaatcttttgtaa

SEQ ID NO: 932730 - DNA, 15 bp, Homo sapiens
aataaatcttttgta

SEQ ID NO: 932731 - DNA, 15 bp, Homo sapiens
aaataaatcttttgt

SEQ ID NO: 932732 - DNA, 15 bp, Homo sapiens
caaataaatcttttg

SEQ ID NO: 932733 - DNA, 15 bp, Homo sapiens
tcaaataaatctttt

SEQ ID NO: 932734 - DNA, 15 bp, Homo sapiens
ttcaaataaatcttt

SEQ ID NO: 932735 - DNA, 15 bp, Homo sapiens
tttcaaataaatctt

SEQ ID NO: 932736 - DNA, 15 bp, Homo sapiens
ttttcaaataaatct

SEQ ID NO: 932737 - DNA, 15 bp, Homo sapiens
tttttcaaataaatc

SEQ ID NO: 932738 - DNA, 15 bp, Homo sapiens
ctttttcaaataaat

SEQ ID NO: 932739 - DNA, 15 bp, Homo sapiens
actttttcaaataaa

SEQ ID NO: 932740 - DNA, 15 bp, Homo sapiens
aactttttcaaataa

SEQ ID NO: 932741 - DNA, 15 bp, Homo sapiens
caactttttcaaata

SEQ ID NO: 932742 - DNA, 15 bp, Homo sapiens
tcaactttttcaaat

SEQ ID NO: 932743 - DNA, 15 bp, Homo sapiens
ctcaactttttcaaa

SEQ ID NO: 932744 - DNA, 15 bp, Homo sapiens
actcaactttttcaa

SEQ ID NO: 932745 - DNA, 15 bp, Homo sapiens
aactcaactttttca

SEQ ID NO: 932746 - DNA, 15 bp, Homo sapiens
caactcaactttttc

SEQ ID NO: 932747 - DNA, 15 bp, Homo sapiens
acaactcaacttttt

SEQ ID NO: 932748 - DNA, 15 bp, Homo sapiens
aacaactcaactttt

SEQ ID NO: 932749 - DNA, 15 bp, Homo sapiens
taacaactcaacttt

SEQ ID NO: 932750 - DNA, 15 bp, Homo sapiens
ttaacaactcaactt

SEQ ID NO: 932751 - DNA, 15 bp, Homo sapiens
attaacaactcaact

SEQ ID NO: 932752 - DNA, 15 bp, Homo sapiens
aattaacaactcaac

SEQ ID NO: 932753 - DNA, 15 bp, Homo sapiens
aaattaacaactcaa

SEQ ID NO: 932754 - DNA, 15 bp, Homo sapiens
caaattaacaactca

SEQ ID NO: 932755 - DNA, 15 bp, Homo sapiens
acaaattaacaactc

SEQ ID NO: 932756 - DNA, 15 bp, Homo sapiens
cacaaattaacaact

SEQ ID NO: 932757 - DNA, 15 bp, Homo sapiens
tcacaaattaacaac

SEQ ID NO: 932758 - DNA, 15 bp, Homo sapiens
ttcacaaattaacaa

SEQ ID NO: 932759 - DNA, 15 bp, Homo sapiens
tttcacaaattaaca

SEQ ID NO: 932760 - DNA, 15 bp, Homo sapiens
atttcacaaattaac

SEQ ID NO: 932761 - DNA, 15 bp, Homo sapiens
tatttcacaaattaa

SEQ ID NO: 932762 - DNA, 15 bp, Homo sapiens
atatttcacaaatta

SEQ ID NO: 932763 - DNA, 15 bp, Homo sapiens
catatttcacaaatt

SEQ ID NO: 932764 - DNA, 15 bp, Homo sapiens
acatatttcacaaat

SEQ ID NO: 932765 - DNA, 15 bp, Homo sapiens
aacatatttcacaaa

SEQ ID NO: 932766 - DNA, 15 bp, Homo sapiens
gaacatatttcacaa

SEQ ID NO: 932767 - DNA, 15 bp, Homo sapiens
ggaacatatttcaca

SEQ ID NO: 932768 - DNA, 15 bp, Homo sapiens
tggaacatatttcac

SEQ ID NO: 932769 - DNA, 15 bp, Homo sapiens
atggaacatatttca

SEQ ID NO: 932770 - DNA, 15 bp, Homo sapiens
aatggaacatatttc

SEQ ID NO: 932771 - DNA, 15 bp, Homo sapiens
taatggaacatattt

SEQ ID NO: 932772 - DNA, 15 bp, Homo sapiens
ttaatggaacatatt

SEQ ID NO: 932773 - DNA, 15 bp, Homo sapiens
tttaatggaacatat

SEQ ID NO: 932774 - DNA, 15 bp, Homo sapiens
gtttaatggaacata

SEQ ID NO: 932775 - DNA, 15 bp, Homo sapiens
agtttaatggaacat

SEQ ID NO: 932776 - DNA, 15 bp, Homo sapiens
gagtttaatggaaca

SEQ ID NO: 932777 - DNA, 15 bp, Homo sapiens
tgagtttaatggaac

SEQ ID NO: 932778 - DNA, 15 bp, Homo sapiens
atgagtttaatggaa

SEQ ID NO: 932779 - DNA, 15 bp, Homo sapiens
tatgagtttaatgga

SEQ ID NO: 932780 - DNA, 15 bp, Homo sapiens
ttatgagtttaatgg

SEQ ID NO: 932781 - DNA, 15 bp, Homo sapiens
attatgagtttaatg

SEQ ID NO: 932782 - DNA, 15 bp, Homo sapiens
tattatgagtttaat

SEQ ID NO: 932783 - DNA, 15 bp, Homo sapiens
atattatgagtttaa

SEQ ID NO: 932784 - DNA, 15 bp, Homo sapiens
aatattatgagttta

SEQ ID NO: 932785 - DNA, 15 bp, Homo sapiens
aaatattatgagttt

SEQ ID NO: 932786 - DNA, 15 bp, Homo sapiens
aaaatattatgagtt

SEQ ID NO: 932787 - DNA, 15 bp, Homo sapiens
taaaatattatgagt

SEQ ID NO: 932788 - DNA, 15 bp, Homo sapiens
ctaaaatattatgag

SEQ ID NO: 932789 - DNA, 15 bp, Homo sapiens
tctaaaatattatga

SEQ ID NO: 932790 - DNA, 15 bp, Homo sapiens
ttctaaaatattatg

SEQ ID NO: 932791 - DNA, 15 bp, Homo sapiens
tttctaaaatattat

SEQ ID NO: 932792 - DNA, 15 bp, Homo sapiens
ttttctaaaatatta

SEQ ID NO: 932793 - DNA, 15 bp, Homo sapiens
tttttctaaaatatt

SEQ ID NO: 932794 - DNA, 15 bp, Homo sapiens
atttttctaaaatat

SEQ ID NO: 932795 - DNA, 15 bp, Homo sapiens
tatttttctaaaata

SEQ ID NO: 932796 - DNA, 15 bp, Homo sapiens
ctatttttctaaaat

SEQ ID NO: 932797 - DNA, 15 bp, Homo sapiens
actatttttctaaaa

SEQ ID NO: 932798 - DNA, 15 bp, Homo sapiens
tactatttttctaaa

SEQ ID NO: 932799 - DNA, 15 bp, Homo sapiens
ctactatttttctaa

SEQ ID NO: 932800 - DNA, 15 bp, Homo sapiens
cctactatttttcta

SEQ ID NO: 932801 - DNA, 15 bp, Homo sapiens
tcctactatttttct

SEQ ID NO: 932802 - DNA, 15 bp, Homo sapiens
ttcctactatttttc

SEQ ID NO: 932803 - DNA, 15 bp, Homo sapiens
cttcctactattttt

SEQ ID NO: 932804 - DNA, 15 bp, Homo sapiens
acttcctactatttt

SEQ ID NO: 932805 - DNA, 15 bp, Homo sapiens
tacttcctactattt

SEQ ID NO: 932806 - DNA, 15 bp, Homo sapiens
ttacttcctactatt

SEQ ID NO: 932807 - DNA, 15 bp, Homo sapiens
attacttcctactat

SEQ ID NO: 932808 - DNA, 15 bp, Homo sapiens
tattacttcctacta

SEQ ID NO: 932809 - DNA, 15 bp, Homo sapiens
ttattacttcctact

SEQ ID NO: 932810 - DNA, 15 bp, Homo sapiens
tttattacttcctac

SEQ ID NO: 932811 - DNA, 15 bp, Homo sapiens
ctttattacttccta

SEQ ID NO: 932812 - DNA, 15 bp, Homo sapiens
gctttattacttcct

SEQ ID NO: 932813 - DNA, 15 bp, Homo sapiens
agctttattacttcc

SEQ ID NO: 932814 - DNA, 15 bp, Homo sapiens
aagctttattacttc

SEQ ID NO: 932815 - DNA, 15 bp, Homo sapiens
caagctttattactt

SEQ ID NO: 932816 - DNA, 15 bp, Homo sapiens
acaagctttattact

SEQ ID NO: 932817 - DNA, 15 bp, Homo sapiens
aacaagctttattac

SEQ ID NO: 932818 - DNA, 15 bp, Homo sapiens
aaacaagctttatta

SEQ ID NO: 932819 - DNA, 15 bp, Homo sapiens
taaacaagctttatt

SEQ ID NO: 932820 - DNA, 15 bp, Homo sapiens
ataaacaagctttat

SEQ ID NO: 932821 - DNA, 15 bp, Homo sapiens
aataaacaagcttta

SEQ ID NO: 932822 - DNA, 15 bp, Homo sapiens
aaataaacaagcttt

SEQ ID NO: 932823 - DNA, 15 bp, Homo sapiens
aaaataaacaagctt

SEQ ID NO: 932824 - DNA, 15 bp, Homo sapiens
aaaaataaacaagct

SEQ ID NO: 932825 - DNA, 15 bp, Homo sapiens
aaaaaataaacaagc

SEQ ID NO: 932826 - DNA, 15 bp, Homo sapiens
taaaaaataaacaag

SEQ ID NO: 932827 - DNA, 15 bp, Homo sapiens
ataaaaaataaacaa

SEQ ID NO: 932828 - DNA, 15 bp, Homo sapiens
tataaaaaataaaca

SEQ ID NO: 932829 - DNA, 15 bp, Homo sapiens
atataaaaaataaac

SEQ ID NO: 932830 - DNA, 15 bp, Homo sapiens
gatataaaaaataaa

SEQ ID NO: 932831 - DNA, 15 bp, Homo sapiens
tgatataaaaaataa

SEQ ID NO: 932832 - DNA, 15 bp, Homo sapiens
atgatataaaaaata

SEQ ID NO: 932833 - DNA, 15 bp, Homo sapiens
tatgatataaaaaat

SEQ ID NO: 932834 - DNA, 15 bp, Homo sapiens
atatgatataaaaaa

SEQ ID NO: 932835 - DNA, 15 bp, Homo sapiens
tatatgatataaaaa

SEQ ID NO: 932836 - DNA, 15 bp, Homo sapiens
atatatgatataaaa

SEQ ID NO: 932837 - DNA, 15 bp, Homo sapiens
aatatatgatataaa

SEQ ID NO: 932838 - DNA, 15 bp, Homo sapiens
gaatatatgatataa

SEQ ID NO: 932839 - DNA, 15 bp, Homo sapiens
tgaatatatgatata

SEQ ID NO: 932840 - DNA, 15 bp, Homo sapiens
atgaatatatgatat

SEQ ID NO: 932841 - DNA, 15 bp, Homo sapiens
tatgaatatatgata

SEQ ID NO: 932842 - DNA, 15 bp, Homo sapiens
atatgaatatatgat

SEQ ID NO: 932843 - DNA, 15 bp, Homo sapiens
tatatgaatatatga

SEQ ID NO: 932844 - DNA, 15 bp, Homo sapiens
ttatatgaatatatg

SEQ ID NO: 932845 - DNA, 15 bp, Homo sapiens
tttatatgaatatat

SEQ ID NO: 932846 - DNA, 15 bp, Homo sapiens
ttttatatgaatata

SEQ ID NO: 932847 - DNA, 15 bp, Homo sapiens
attttatatgaatat

SEQ ID NO: 932848 - DNA, 15 bp, Homo sapiens
cattttatatgaata

SEQ ID NO: 932849 - DNA, 15 bp, Homo sapiens
acattttatatgaat

SEQ ID NO: 932850 - DNA, 15 bp, Homo sapiens
gacattttatatgaa

SEQ ID NO: 932851 - DNA, 15 bp, Homo sapiens
tgacattttatatga

SEQ ID NO: 932852 - DNA, 15 bp, Homo sapiens
ctgacattttatatg

SEQ ID NO: 932853 - DNA, 15 bp, Homo sapiens
actgacattttatat

SEQ ID NO: 932854 - DNA, 15 bp, Homo sapiens
aactgacattttata

SEQ ID NO: 932855 - DNA, 15 bp, Homo sapiens
aaactgacattttat

SEQ ID NO: 932856 - DNA, 15 bp, Homo sapiens
aaaactgacatttta

SEQ ID NO: 932857 - DNA, 15 bp, Homo sapiens
gaaaactgacatttt

SEQ ID NO: 932858 - DNA, 15 bp, Homo sapiens
ggaaaactgacattt

SEQ ID NO: 932859 - DNA, 15 bp, Homo sapiens
aggaaaactgacatt

SEQ ID NO: 932860 - DNA, 15 bp, Homo sapiens
aaggaaaactgacat

SEQ ID NO: 932861 - DNA, 15 bp, Homo sapiens
aaaggaaaactgaca

SEQ ID NO: 932862 - DNA, 15 bp, Homo sapiens
taaaggaaaactgac

SEQ ID NO: 932863 - DNA, 15 bp, Homo sapiens
ttaaaggaaaactga

SEQ ID NO: 932864 - DNA, 15 bp, Homo sapiens
tttaaaggaaaactg

SEQ ID NO: 932865 - DNA, 15 bp, Homo sapiens
ttttaaaggaaaact

SEQ ID NO: 932866 - DNA, 15 bp, Homo sapiens
tttttaaaggaaaac

SEQ ID NO: 932867 - DNA, 15 bp, Homo sapiens
atttttaaaggaaaa

SEQ ID NO: 932868 - DNA, 15 bp, Homo sapiens
aatttttaaaggaaa

SEQ ID NO: 932869 - DNA, 15 bp, Homo sapiens
taatttttaaaggaa

SEQ ID NO: 932870 - DNA, 15 bp, Homo sapiens
gtaatttttaaagga

SEQ ID NO: 932871 - DNA, 15 bp, Homo sapiens
tgtaatttttaaagg

SEQ ID NO: 932872 - DNA, 15 bp, Homo sapiens
atgtaatttttaaag

SEQ ID NO: 932873 - DNA, 15 bp, Homo sapiens
aatgtaatttttaaa

SEQ ID NO: 932874 - DNA, 15 bp, Homo sapiens
aaatgtaatttttaa

SEQ ID NO: 932875 - DNA, 15 bp, Homo sapiens
aaaatgtaattttta

SEQ ID NO: 932876 - DNA, 15 bp, Homo sapiens
aaaaatgtaattttt

SEQ ID NO: 932877 - DNA, 15 bp, Homo sapiens
aaaaaatgtaatttt

SEQ ID NO: 932878 - DNA, 15 bp, Homo sapiens
aaaaaaatgtaattt

SEQ ID NO: 932879 - DNA, 15 bp, Homo sapiens
aaaaaaaatgtaatt

SEQ ID NO: 932880 - DNA, 15 bp, Homo sapiens
aaaaaaaaatgtaat

SEQ ID NO: 932881 - DNA, 15 bp, Homo sapiens
aaaaaaaaaatgtaa

SEQ ID NO: 932882 - DNA, 15 bp, Homo sapiens
caaaaaaaaaatgta

SEQ ID NO: 932883 - DNA, 15 bp, Homo sapiens
ccaaaaaaaaaatgt

SEQ ID NO: 932884 - DNA, 15 bp, Homo sapiens
accaaaaaaaaaatg

SEQ ID NO: 932885 - DNA, 15 bp, Homo sapiens
aaccaaaaaaaaaat

SEQ ID NO: 932886 - DNA, 15 bp, Homo sapiens
taaccaaaaaaaaaa

SEQ ID NO: 932887 - DNA, 15 bp, Homo sapiens
ttaaccaaaaaaaaa

SEQ ID NO: 932888 - DNA, 15 bp, Homo sapiens
attaaccaaaaaaaa

SEQ ID NO: 932889 - DNA, 15 bp, Homo sapiens
aattaaccaaaaaaa

SEQ ID NO: 932890 - DNA, 15 bp, Homo sapiens
aaattaaccaaaaaa

SEQ ID NO: 932891 - DNA, 15 bp, Homo sapiens
aaaattaaccaaaaa

SEQ ID NO: 932892 - DNA, 15 bp, Homo sapiens
aaaaattaaccaaaa

SEQ ID NO: 932893 - DNA, 15 bp, Homo sapiens
taaaaattaaccaaa

SEQ ID NO: 932894 - DNA, 15 bp, Homo sapiens
ctaaaaattaaccaa

SEQ ID NO: 932895 - DNA, 15 bp, Homo sapiens
cctaaaaattaacca

SEQ ID NO: 932896 - DNA, 15 bp, Homo sapiens
gcctaaaaattaacc

SEQ ID NO: 932897 - DNA, 15 bp, Homo sapiens
tgcctaaaaattaac

SEQ ID NO: 932898 - DNA, 15 bp, Homo sapiens
gtgcctaaaaattaa

SEQ ID NO: 932899 - DNA, 15 bp, Homo sapiens
agtgcctaaaaatta

SEQ ID NO: 932900 - DNA, 15 bp, Homo sapiens
aagtgcctaaaaatt

SEQ ID NO: 932901 - DNA, 15 bp, Homo sapiens
taagtgcctaaaaat

SEQ ID NO: 932902 - DNA, 15 bp, Homo sapiens
ctaagtgcctaaaaa

SEQ ID NO: 932903 - DNA, 15 bp, Homo sapiens
actaagtgcctaaaa

SEQ ID NO: 932904 - DNA, 15 bp, Homo sapiens
gactaagtgcctaaa

SEQ ID NO: 932905 - DNA, 15 bp, Homo sapiens
cgactaagtgcctaa

SEQ ID NO: 932906 - DNA, 15 bp, Homo sapiens
ccgactaagtgccta

SEQ ID NO: 932907 - DNA, 15 bp, Homo sapiens
cccgactaagtgcct

SEQ ID NO: 932908 - DNA, 15 bp, Homo sapiens
gcccgactaagtgcc

SEQ ID NO: 932909 - DNA, 15 bp, Homo sapiens
tgcccgactaagtgc

SEQ ID NO: 932910 - DNA, 15 bp, Homo sapiens
gtgcccgactaagtg

SEQ ID NO: 932911 - DNA, 15 bp, Homo sapiens
agtgcccgactaagt

SEQ ID NO: 932912 - DNA, 15 bp, Homo sapiens
aagtgcccgactaag

SEQ ID NO: 932913 - DNA, 15 bp, Homo sapiens
aaagtgcccgactaa

SEQ ID NO: 932914 - DNA, 15 bp, Homo sapiens
aaaagtgcccgacta

SEQ ID NO: 932915 - DNA, 15 bp, Homo sapiens
taaaagtgcccgact

SEQ ID NO: 932916 - DNA, 15 bp, Homo sapiens
ctaaaagtgcccgac

SEQ ID NO: 932917 - DNA, 15 bp, Homo sapiens
tctaaaagtgcccga

SEQ ID NO: 932918 - DNA, 15 bp, Homo sapiens
ttctaaaagtgcccg

SEQ ID NO: 932919 - DNA, 15 bp, Homo sapiens
gttctaaaagtgccc

SEQ ID NO: 932920 - DNA, 15 bp, Homo sapiens
agttctaaaagtgcc

SEQ ID NO: 932921 - DNA, 15 bp, Homo sapiens
gagttctaaaagtgc

SEQ ID NO: 932922 - DNA, 15 bp, Homo sapiens
ggagttctaaaagtg

SEQ ID NO: 932923 - DNA, 15 bp, Homo sapiens
cggagttctaaaagt

SEQ ID NO: 932924 - DNA, 15 bp, Homo sapiens
ccggagttctaaaag

SEQ ID NO: 932925 - DNA, 15 bp, Homo sapiens
cccggagttctaaaa

SEQ ID NO: 932926 - DNA, 15 bp, Homo sapiens
gcccggagttctaaa

SEQ ID NO: 932927 - DNA, 15 bp, Homo sapiens
tgcccggagttctaa

SEQ ID NO: 932928 - DNA, 15 bp, Homo sapiens
ctgcccggagttcta

SEQ ID NO: 932929 - DNA, 15 bp, Homo sapiens
tctgcccggagttct

SEQ ID NO: 932930 - DNA, 15 bp, Homo sapiens
ttctgcccggagttc

SEQ ID NO: 932931 - DNA, 15 bp, Homo sapiens
tttctgcccggagtt

SEQ ID NO: 932932 - DNA, 15 bp, Homo sapiens
atttctgcccggagt

SEQ ID NO: 932933 - DNA, 15 bp, Homo sapiens
catttctgcccggag

SEQ ID NO: 932934 - DNA, 15 bp, Homo sapiens
tcatttctgcccgga

SEQ ID NO: 932935 - DNA, 15 bp, Homo sapiens
gtcatttctgcccgg

SEQ ID NO: 932936 - DNA, 15 bp, Homo sapiens
tgtcatttctgcccg

SEQ ID NO: 932937 - DNA, 15 bp, Homo sapiens
ctgtcatttctgccc

SEQ ID NO: 932938 - DNA, 15 bp, Homo sapiens
gctgtcatttctgcc

SEQ ID NO: 932939 - DNA, 15 bp, Homo sapiens
tgctgtcatttctgc

SEQ ID NO: 932940 - DNA, 15 bp, Homo sapiens
ctgctgtcatttctg

SEQ ID NO: 932941 - DNA, 15 bp, Homo sapiens
gctgctgtcatttct

SEQ ID NO: 932942 - DNA, 15 bp, Homo sapiens
agctgctgtcatttc

SEQ ID NO: 932943 - DNA, 15 bp, Homo sapiens
cagctgctgtcattt

SEQ ID NO: 932944 - DNA, 15 bp, Homo sapiens
gcagctgctgtcatt

SEQ ID NO: 932945 - DNA, 15 bp, Homo sapiens
agcagctgctgtcat

SEQ ID NO: 932946 - DNA, 15 bp, Homo sapiens
cagcagctgctgtca

SEQ ID NO: 932947 - DNA, 15 bp, Homo sapiens
tcagcagctgctgtc

SEQ ID NO: 932948 - DNA, 15 bp, Homo sapiens
ttcagcagctgctgt

SEQ ID NO: 932949 - DNA, 15 bp, Homo sapiens
cttcagcagctgctg

SEQ ID NO: 932950 - DNA, 15 bp, Homo sapiens
tcttcagcagctgct

SEQ ID NO: 932951 - DNA, 15 bp, Homo sapiens
ttcttcagcagctgc

SEQ ID NO: 932952 - DNA, 15 bp, Homo sapiens
gttcttcagcagctg

SEQ ID NO: 932953 - DNA, 15 bp, Homo sapiens
cgttcttcagcagct

SEQ ID NO: 932954 - DNA, 15 bp, Homo sapiens
acgttcttcagcagc

SEQ ID NO: 932955 - DNA, 15 bp, Homo sapiens
tacgttcttcagcag

SEQ ID NO: 932956 - DNA, 15 bp, Homo sapiens
atacgttcttcagca

SEQ ID NO: 932957 - DNA, 15 bp, Homo sapiens
aatacgttcttcagc

SEQ ID NO: 932958 - DNA, 15 bp, Homo sapiens
taatacgttcttcag

SEQ ID NO: 932959 - DNA, 15 bp, Homo sapiens
ataatacgttcttca

SEQ ID NO: 932960 - DNA, 15 bp, Homo sapiens
aataatacgttcttc

SEQ ID NO: 932961 - DNA, 15 bp, Homo sapiens
aaataatacgttctt

SEQ ID NO: 932962 - DNA, 15 bp, Homo sapiens
gaaataatacgttct

SEQ ID NO: 932963 - DNA, 15 bp, Homo sapiens
agaaataatacgttc

SEQ ID NO: 932964 - DNA, 15 bp, Homo sapiens
cagaaataatacgtt

SEQ ID NO: 932965 - DNA, 15 bp, Homo sapiens
gcagaaataatacgt

SEQ ID NO: 932966 - DNA, 15 bp, Homo sapiens
tgcagaaataatacg

SEQ ID NO: 932967 - DNA, 15 bp, Homo sapiens
ttgcagaaataatac

SEQ ID NO: 932968 - DNA, 15 bp, Homo sapiens
gttgcagaaataata

SEQ ID NO: 932969 - DNA, 15 bp, Homo sapiens
agttgcagaaataat

SEQ ID NO: 932970 - DNA, 15 bp, Homo sapiens
aagttgcagaaataa

SEQ ID NO: 932971 - DNA, 15 bp, Homo sapiens
gaagttgcagaaata

SEQ ID NO: 932972 - DNA, 15 bp, Homo sapiens
agaagttgcagaaat

SEQ ID NO: 932973 - DNA, 15 bp, Homo sapiens
gagaagttgcagaaa

SEQ ID NO: 932974 - DNA, 15 bp, Homo sapiens
tgagaagttgcagaa

SEQ ID NO: 932975 - DNA, 15 bp, Homo sapiens
ttgagaagttgcaga

SEQ ID NO: 932976 - DNA, 15 bp, Homo sapiens
tttgagaagttgcag

SEQ ID NO: 932977 - DNA, 15 bp, Homo sapiens
ttttgagaagttgca

SEQ ID NO: 932978 - DNA, 15 bp, Homo sapiens
tttttgagaagttgc

SEQ ID NO: 932979 - DNA, 15 bp, Homo sapiens
ctttttgagaagttg

SEQ ID NO: 932980 - DNA, 15 bp, Homo sapiens
tctttttgagaagtt

SEQ ID NO: 932981 - DNA, 15 bp, Homo sapiens
ctctttttgagaagt

SEQ ID NO: 932982 - DNA, 15 bp, Homo sapiens
cctctttttgagaag

SEQ ID NO: 932983 - DNA, 15 bp, Homo sapiens
gcctctttttgagaa

SEQ ID NO: 932984 - DNA, 15 bp, Homo sapiens
ggcctctttttgaga

SEQ ID NO: 932985 - DNA, 15 bp, Homo sapiens
gggcctctttttgag

SEQ ID NO: 932986 - DNA, 15 bp, Homo sapiens
tgggcctctttttga

SEQ ID NO: 932987 - DNA, 15 bp, Homo sapiens
atgggcctctttttg

SEQ ID NO: 932988 - DNA, 15 bp, Homo sapiens
gatgggcctcttttt

SEQ ID NO: 932989 - DNA, 15 bp, Homo sapiens
agatgggcctctttt

SEQ ID NO: 932990 - DNA, 15 bp, Homo sapiens
gagatgggcctcttt

SEQ ID NO: 932991 - DNA, 15 bp, Homo sapiens
tgagatgggcctctt

SEQ ID NO: 932992 - DNA, 15 bp, Homo sapiens
ttgagatgggcctct

SEQ ID NO: 932993 - DNA, 15 bp, Homo sapiens
attgagatgggcctc

SEQ ID NO: 932994 - DNA, 15 bp, Homo sapiens
cattgagatgggcct

SEQ ID NO: 932995 - DNA, 15 bp, Homo sapiens
acattgagatgggcc

SEQ ID NO: 932996 - DNA, 15 bp, Homo sapiens
aacattgagatgggc

SEQ ID NO: 932997 - DNA, 15 bp, Homo sapiens
gaacattgagatggg

SEQ ID NO: 932998 - DNA, 15 bp, Homo sapiens
tgaacattgagatgg

SEQ ID NO: 932999 - DNA, 15 bp, Homo sapiens
ttgaacattgagatg

SEQ ID NO: 933000 - DNA, 15 bp, Homo sapiens
gttgaacattgagat

SEQ ID NO: 933001 - DNA, 15 bp, Homo sapiens
tgttgaacattgaga

SEQ ID NO: 933002 - DNA, 15 bp, Homo sapiens
ttgttgaacattgag

SEQ ID NO: 933003 - DNA, 15 bp, Homo sapiens
tttgttgaacattga

SEQ ID NO: 933004 - DNA, 15 bp, Homo sapiens
atttgttgaacattg

SEQ ID NO: 933005 - DNA, 15 bp, Homo sapiens
gatttgttgaacatt

SEQ ID NO: 933006 - DNA, 15 bp, Homo sapiens
cgatttgttgaacat

SEQ ID NO: 933007 - DNA, 15 bp, Homo sapiens
acgatttgttgaaca

SEQ ID NO: 933008 - DNA, 15 bp, Homo sapiens
aacgatttgttgaac

SEQ ID NO: 933009 - DNA, 15 bp, Homo sapiens
caacgatttgttgaa

SEQ ID NO: 933010 - DNA, 15 bp, Homo sapiens
tcaacgatttgttga

SEQ ID NO: 933011 - DNA, 15 bp, Homo sapiens
atcaacgatttgttg

SEQ ID NO: 933012 - DNA, 15 bp, Homo sapiens
gatcaacgatttgtt

SEQ ID NO: 933013 - DNA, 15 bp, Homo sapiens
cgatcaacgatttgt

SEQ ID NO: 933014 - DNA, 15 bp, Homo sapiens
tcgatcaacgatttg

SEQ ID NO: 933015 - DNA, 15 bp, Homo sapiens
gtcgatcaacgattt

SEQ ID NO: 933016 - DNA, 15 bp, Homo sapiens
tgtcgatcaacgatt

SEQ ID NO: 933017 - DNA, 15 bp, Homo sapiens
atgtcgatcaacgat

SEQ ID NO: 933018 - DNA, 15 bp, Homo sapiens
tatgtcgatcaacga

SEQ ID NO: 933019 - DNA, 15 bp, Homo sapiens
gtatgtcgatcaacg

SEQ ID NO: 933020 - DNA, 15 bp, Homo sapiens
agtatgtcgatcaac

SEQ ID NO: 933021 - DNA, 15 bp, Homo sapiens
tagtatgtcgatcaa

SEQ ID NO: 933022 - DNA, 15 bp, Homo sapiens
ctagtatgtcgatca

SEQ ID NO: 933023 - DNA, 15 bp, Homo sapiens
tctagtatgtcgatc

SEQ ID NO: 933024 - DNA, 15 bp, Homo sapiens
ctctagtatgtcgat

SEQ ID NO: 933025 - DNA, 15 bp, Homo sapiens
tctctagtatgtcga

SEQ ID NO: 933026 - DNA, 15 bp, Homo sapiens
ctctctagtatgtcg

SEQ ID NO: 933027 - DNA, 15 bp, Homo sapiens
gctctctagtatgtc

SEQ ID NO: 933028 - DNA, 15 bp, Homo sapiens
agctctctagtatgt

SEQ ID NO: 933029 - DNA, 15 bp, Homo sapiens
tagctctctagtatg

SEQ ID NO: 933030 - DNA, 15 bp, Homo sapiens
ttagctctctagtat

SEQ ID NO: 933031 - DNA, 15 bp, Homo sapiens
tttagctctctagta

SEQ ID NO: 933032 - DNA, 15 bp, Homo sapiens
ctttagctctctagt

SEQ ID NO: 933033 - DNA, 15 bp, Homo sapiens
cctttagctctctag

SEQ ID NO: 933034 - DNA, 15 bp, Homo sapiens
acctttagctctcta

SEQ ID NO: 933035 - DNA, 15 bp, Homo sapiens
cacctttagctctct

SEQ ID NO: 933036 - DNA, 15 bp, Homo sapiens
tcacctttagctctc

SEQ ID NO: 933037 - DNA, 15 bp, Homo sapiens
ttcacctttagctct

SEQ ID NO: 933038 - DNA, 15 bp, Homo sapiens
gttcacctttagctc

SEQ ID NO: 933039 - DNA, 15 bp, Homo sapiens
tgttcacctttagct

SEQ ID NO: 933040 - DNA, 15 bp, Homo sapiens
atgttcacctttagc

SEQ ID NO: 933041 - DNA, 15 bp, Homo sapiens
gatgttcacctttag

SEQ ID NO: 933042 - DNA, 15 bp, Homo sapiens
tgatgttcaccttta

SEQ ID NO: 933043 - DNA, 15 bp, Homo sapiens
ttgatgttcaccttt

SEQ ID NO: 933044 - DNA, 15 bp, Homo sapiens
gttgatgttcacctt

SEQ ID NO: 933045 - DNA, 15 bp, Homo sapiens
tgttgatgttcacct

SEQ ID NO: 933046 - DNA, 15 bp, Homo sapiens
gtgttgatgttcacc

SEQ ID NO: 933047 - DNA, 15 bp, Homo sapiens
cgtgttgatgttcac

SEQ ID NO: 933048 - DNA, 15 bp, Homo sapiens
acgtgttgatgttca

SEQ ID NO: 933049 - DNA, 15 bp, Homo sapiens
cacgtgttgatgttc

SEQ ID NO: 933050 - DNA, 15 bp, Homo sapiens
acacgtgttgatgtt

SEQ ID NO: 933051 - DNA, 15 bp, Homo sapiens
aacacgtgttgatgt

SEQ ID NO: 933052 - DNA, 15 bp, Homo sapiens
taacacgtgttgatg

SEQ ID NO: 933053 - DNA, 15 bp, Homo sapiens
ttaacacgtgttgat

SEQ ID NO: 933054 - DNA, 15 bp, Homo sapiens
attaacacgtgttga

SEQ ID NO: 933055 - DNA, 15 bp, Homo sapiens
cattaacacgtgttg

SEQ ID NO: 933056 - DNA, 15 bp, Homo sapiens
acattaacacgtgtt

SEQ ID NO: 933057 - DNA, 15 bp, Homo sapiens
tacattaacacgtgt

SEQ ID NO: 933058 - DNA, 15 bp, Homo sapiens
ttacattaacacgtg

SEQ ID NO: 933059 - DNA, 15 bp, Homo sapiens
gttacattaacacgt

SEQ ID NO: 933060 - DNA, 15 bp, Homo sapiens
tgttacattaacacg

SEQ ID NO: 933061 - DNA, 15 bp, Homo sapiens
ttgttacattaacac

SEQ ID NO: 933062 - DNA, 15 bp, Homo sapiens
tttgttacattaaca

SEQ ID NO: 933063 - DNA, 15 bp, Homo sapiens
ttttgttacattaac

SEQ ID NO: 933064 - DNA, 15 bp, Homo sapiens
attttgttacattaa

SEQ ID NO: 933065 - DNA, 15 bp, Homo sapiens
aattttgttacatta

SEQ ID NO: 933066 - DNA, 15 bp, Homo sapiens
aaattttgttacatt

SEQ ID NO: 933067 - DNA, 15 bp, Homo sapiens
gaaattttgttacat

SEQ ID NO: 933068 - DNA, 15 bp, Homo sapiens
agaaattttgttaca

SEQ ID NO: 933069 - DNA, 15 bp, Homo sapiens
cagaaattttgttac

SEQ ID NO: 933070 - DNA, 15 bp, Homo sapiens
tcagaaattttgtta

SEQ ID NO: 933071 - DNA, 15 bp, Homo sapiens
atcagaaattttgtt

SEQ ID NO: 933072 - DNA, 15 bp, Homo sapiens
tatcagaaattttgt

SEQ ID NO: 933073 - DNA, 15 bp, Homo sapiens
ttatcagaaattttg

SEQ ID NO: 933074 - DNA, 15 bp, Homo sapiens
attatcagaaatttt

SEQ ID NO: 933075 - DNA, 15 bp, Homo sapiens
aattatcagaaattt

SEQ ID NO: 933076 - DNA, 15 bp, Homo sapiens
gaattatcagaaatt

SEQ ID NO: 933077 - DNA, 15 bp, Homo sapiens
ggaattatcagaaat

SEQ ID NO: 933078 - DNA, 15 bp, Homo sapiens
aggaattatcagaaa

SEQ ID NO: 933079 - DNA, 15 bp, Homo sapiens
taggaattatcagaa

SEQ ID NO: 933080 - DNA, 15 bp, Homo sapiens
ataggaattatcaga

SEQ ID NO: 933081 - DNA, 15 bp, Homo sapiens
aataggaattatcag

SEQ ID NO: 933082 - DNA, 15 bp, Homo sapiens
caataggaattatca

SEQ ID NO: 933083 - DNA, 15 bp, Homo sapiens
ccaataggaattatc

SEQ ID NO: 933084 - DNA, 15 bp, Homo sapiens
tccaataggaattat

SEQ ID NO: 933085 - DNA, 15 bp, Homo sapiens
ttccaataggaatta

SEQ ID NO: 933086 - DNA, 15 bp, Homo sapiens
cttccaataggaatt

SEQ ID NO: 933087 - DNA, 15 bp, Homo sapiens
tcttccaataggaat

SEQ ID NO: 933088 - DNA, 15 bp, Homo sapiens
ctcttccaataggaa

SEQ ID NO: 933089 - DNA, 15 bp, Homo sapiens
tctcttccaatagga

SEQ ID NO: 933090 - DNA, 15 bp, Homo sapiens
ttctcttccaatagg

SEQ ID NO: 933091 - DNA, 15 bp, Homo sapiens
attctcttccaatag

SEQ ID NO: 933092 - DNA, 15 bp, Homo sapiens
aattctcttccaata

SEQ ID NO: 933093 - DNA, 15 bp, Homo sapiens
gaattctcttccaat

SEQ ID NO: 933094 - DNA, 15 bp, Homo sapiens
tgaattctcttccaa

SEQ ID NO: 933095 - DNA, 15 bp, Homo sapiens
gtgaattctcttcca

SEQ ID NO: 933096 - DNA, 15 bp, Homo sapiens
agtgaattctcttcc

SEQ ID NO: 933097 - DNA, 15 bp, Homo sapiens
tagtgaattctcttc

SEQ ID NO: 933098 - DNA, 15 bp, Homo sapiens
atagtgaattctctt

SEQ ID NO: 933099 - DNA, 15 bp, Homo sapiens
catagtgaattctct

SEQ ID NO: 933100 - DNA, 15 bp, Homo sapiens
tcatagtgaattctc

SEQ ID NO: 933101 - DNA, 15 bp, Homo sapiens
atcatagtgaattct

SEQ ID NO: 933102 - DNA, 15 bp, Homo sapiens
tatcatagtgaattc

SEQ ID NO: 933103 - DNA, 15 bp, Homo sapiens
atatcatagtgaatt

SEQ ID NO: 933104 - DNA, 15 bp, Homo sapiens
tatatcatagtgaat

SEQ ID NO: 933105 - DNA, 15 bp, Homo sapiens
atatatcatagtgaa

SEQ ID NO: 933106 - DNA, 15 bp, Homo sapiens
tatatatcatagtga

SEQ ID NO: 933107 - DNA, 15 bp, Homo sapiens
ctatatatcatagtg

SEQ ID NO: 933108 - DNA, 15 bp, Homo sapiens
actatatatcatagt

SEQ ID NO: 933109 - DNA, 15 bp, Homo sapiens
tactatatatcatag

SEQ ID NO: 933110 - DNA, 15 bp, Homo sapiens
ttactatatatcata

SEQ ID NO: 933111 - DNA, 15 bp, Homo sapiens
attactatatatcat

SEQ ID NO: 933112 - DNA, 15 bp, Homo sapiens
aattactatatatca

SEQ ID NO: 933113 - DNA, 15 bp, Homo sapiens
aaattactatatatc

SEQ ID NO: 933114 - DNA, 15 bp, Homo sapiens
aaaattactatatat

SEQ ID NO: 933115 - DNA, 15 bp, Homo sapiens
caaaattactatata

SEQ ID NO: 933116 - DNA, 15 bp, Homo sapiens
acaaaattactatat

SEQ ID NO: 933117 - DNA, 15 bp, Homo sapiens
aacaaaattactata

SEQ ID NO: 933118 - DNA, 15 bp, Homo sapiens
caacaaaattactat

SEQ ID NO: 933119 - DNA, 15 bp, Homo sapiens
tcaacaaaattacta

SEQ ID NO: 933120 - DNA, 15 bp, Homo sapiens
atcaacaaaattact

SEQ ID NO: 933121 - DNA, 15 bp, Homo sapiens
catcaacaaaattac

SEQ ID NO: 933122 - DNA, 15 bp, Homo sapiens
tcatcaacaaaatta

SEQ ID NO: 933123 - DNA, 15 bp, Homo sapiens
ttcatcaacaaaatt

SEQ ID NO: 933124 - DNA, 15 bp, Homo sapiens
attcatcaacaaaat

SEQ ID NO: 933125 - DNA, 15 bp, Homo sapiens
tattcatcaacaaaa

SEQ ID NO: 933126 - DNA, 15 bp, Homo sapiens
ctattcatcaacaaa

SEQ ID NO: 933127 - DNA, 15 bp, Homo sapiens
cctattcatcaacaa

SEQ ID NO: 933128 - DNA, 15 bp, Homo sapiens
ccctattcatcaaca

SEQ ID NO: 933129 - DNA, 15 bp, Homo sapiens
tccctattcatcaac

SEQ ID NO: 933130 - DNA, 15 bp, Homo sapiens
ttccctattcatcaa

SEQ ID NO: 933131 - DNA, 15 bp, Homo sapiens
attccctattcatca

SEQ ID NO: 933132 - DNA, 15 bp, Homo sapiens
aattccctattcatc

SEQ ID NO: 933133 - DNA, 15 bp, Homo sapiens
aaattccctattcat

SEQ ID NO: 933134 - DNA, 15 bp, Homo sapiens
taaattccctattca

SEQ ID NO: 933135 - DNA, 15 bp, Homo sapiens
ataaattccctattc

SEQ ID NO: 933136 - DNA, 15 bp, Homo sapiens
tataaattccctatt

SEQ ID NO: 933137 - DNA, 15 bp, Homo sapiens
ttataaattccctat

SEQ ID NO: 933138 - DNA, 15 bp, Homo sapiens
attataaattcccta

SEQ ID NO: 933139 - DNA, 15 bp, Homo sapiens
cattataaattccct

SEQ ID NO: 933140 - DNA, 15 bp, Homo sapiens
gcattataaattccc

SEQ ID NO: 933141 - DNA, 15 bp, Homo sapiens
tgcattataaattcc

SEQ ID NO: 933142 - DNA, 15 bp, Homo sapiens
gtgcattataaattc

SEQ ID NO: 933143 - DNA, 15 bp, Homo sapiens
agtgcattataaatt

SEQ ID NO: 933144 - DNA, 15 bp, Homo sapiens
cagtgcattataaat

SEQ ID NO: 933145 - DNA, 15 bp, Homo sapiens
acagtgcattataaa

SEQ ID NO: 933146 - DNA, 15 bp, Homo sapiens
aacagtgcattataa

SEQ ID NO: 933147 - DNA, 15 bp, Homo sapiens
caacagtgcattata

SEQ ID NO: 933148 - DNA, 15 bp, Homo sapiens
ccaacagtgcattat

SEQ ID NO: 933149 - DNA, 15 bp, Homo sapiens
accaacagtgcatta

SEQ ID NO: 933150 - DNA, 15 bp, Homo sapiens
caccaacagtgcatt

SEQ ID NO: 933151 - DNA, 15 bp, Homo sapiens
ccaccaacagtgcat

SEQ ID NO: 933152 - DNA, 15 bp, Homo sapiens
gccaccaacagtgca

SEQ ID NO: 933153 - DNA, 15 bp, Homo sapiens
agccaccaacagtgc

SEQ ID NO: 933154 - DNA, 15 bp, Homo sapiens
tagccaccaacagtg

SEQ ID NO: 933155 - DNA, 15 bp, Homo sapiens
ctagccaccaacagt

SEQ ID NO: 933156 - DNA, 15 bp, Homo sapiens
tctagccaccaacag

SEQ ID NO: 933157 - DNA, 15 bp, Homo sapiens
gtctagccaccaaca

SEQ ID NO: 933158 - DNA, 15 bp, Homo sapiens
tgtctagccaccaac

SEQ ID NO: 933159 - DNA, 15 bp, Homo sapiens
atgtctagccaccaa

SEQ ID NO: 933160 - DNA, 15 bp, Homo sapiens
tatgtctagccacca

SEQ ID NO: 933161 - DNA, 15 bp, Homo sapiens
ctatgtctagccacc

SEQ ID NO: 933162 - DNA, 15 bp, Homo sapiens
tctatgtctagccac

SEQ ID NO: 933163 - DNA, 15 bp, Homo sapiens
gtctatgtctagcca

SEQ ID NO: 933164 - DNA, 15 bp, Homo sapiens
tgtctatgtctagcc

SEQ ID NO: 933165 - DNA, 15 bp, Homo sapiens
gtgtctatgtctagc

SEQ ID NO: 933166 - DNA, 15 bp, Homo sapiens
tgtgtctatgtctag

SEQ ID NO: 933167 - DNA, 15 bp, Homo sapiens
gtgtgtctatgtcta

SEQ ID NO: 933168 - DNA, 15 bp, Homo sapiens
tgtgtgtctatgtct

SEQ ID NO: 933169 - DNA, 15 bp, Homo sapiens
gtgtgtgtctatgtc

SEQ ID NO: 933170 - DNA, 15 bp, Homo sapiens
tgtgtgtgtctatgt

SEQ ID NO: 933171 - DNA, 15 bp, Homo sapiens
atgtgtgtgtctatg

SEQ ID NO: 933172 - DNA, 15 bp, Homo sapiens
catgtgtgtgtctat

SEQ ID NO: 933173 - DNA, 15 bp, Homo sapiens
gcatgtgtgtgtcta

SEQ ID NO: 933174 - DNA, 15 bp, Homo sapiens
tgcatgtgtgtgtct

SEQ ID NO: 933175 - DNA, 15 bp, Homo sapiens
atgcatgtgtgtgtc

SEQ ID NO: 933176 - DNA, 15 bp, Homo sapiens
aatgcatgtgtgtgt

SEQ ID NO: 933177 - DNA, 15 bp, Homo sapiens
aaatgcatgtgtgtg

SEQ ID NO: 933178 - DNA, 15 bp, Homo sapiens
aaaatgcatgtgtgt

SEQ ID NO: 933179 - DNA, 15 bp, Homo sapiens
aaaaatgcatgtgtg

SEQ ID NO: 933180 - DNA, 15 bp, Homo sapiens
gaaaaatgcatgtgt

SEQ ID NO: 933181 - DNA, 15 bp, Homo sapiens
tgaaaaatgcatgtg

SEQ ID NO: 933182 - DNA, 15 bp, Homo sapiens
ttgaaaaatgcatgt

SEQ ID NO: 933183 - DNA, 15 bp, Homo sapiens
gttgaaaaatgcatg

SEQ ID NO: 933184 - DNA, 15 bp, Homo sapiens
tgttgaaaaatgcat

SEQ ID NO: 933185 - DNA, 15 bp, Homo sapiens
ttgttgaaaaatgca

SEQ ID NO: 933186 - DNA, 15 bp, Homo sapiens
attgttgaaaaatgc

SEQ ID NO: 933187 - DNA, 15 bp, Homo sapiens
tattgttgaaaaatg

SEQ ID NO: 933188 - DNA, 15 bp, Homo sapiens
ttattgttgaaaaat

SEQ ID NO: 933189 - DNA, 15 bp, Homo sapiens
cttattgttgaaaaa

SEQ ID NO: 933190 - DNA, 15 bp, Homo sapiens
acttattgttgaaaa

SEQ ID NO: 933191 - DNA, 15 bp, Homo sapiens
gacttattgttgaaa

SEQ ID NO: 933192 - DNA, 15 bp, Homo sapiens
agacttattgttgaa

SEQ ID NO: 933193 - DNA, 15 bp, Homo sapiens
gagacttattgttga

SEQ ID NO: 933194 - DNA, 15 bp, Homo sapiens
agagacttattgttg

SEQ ID NO: 933195 - DNA, 15 bp, Homo sapiens
aagagacttattgtt

SEQ ID NO: 933196 - DNA, 15 bp, Homo sapiens
aaagagacttattgt

SEQ ID NO: 933197 - DNA, 15 bp, Homo sapiens
taaagagacttattg

SEQ ID NO: 933198 - DNA, 15 bp, Homo sapiens
ataaagagacttatt

SEQ ID NO: 933199 - DNA, 15 bp, Homo sapiens
cataaagagacttat

SEQ ID NO: 933200 - DNA, 15 bp, Homo sapiens
tcataaagagactta

SEQ ID NO: 933201 - DNA, 15 bp, Homo sapiens
atcataaagagactt

SEQ ID NO: 933202 - DNA, 15 bp, Homo sapiens
tatcataaagagact

SEQ ID NO: 933203 - DNA, 15 bp, Homo sapiens
gtatcataaagagac

SEQ ID NO: 933204 - DNA, 15 bp, Homo sapiens
agtatcataaagaga

SEQ ID NO: 933205 - DNA, 15 bp, Homo sapiens
gagtatcataaagag

SEQ ID NO: 933206 - DNA, 15 bp, Homo sapiens
tgagtatcataaaga

SEQ ID NO: 933207 - DNA, 15 bp, Homo sapiens
atgagtatcataaag

SEQ ID NO: 933208 - DNA, 15 bp, Homo sapiens
aatgagtatcataaa

SEQ ID NO: 933209 - DNA, 15 bp, Homo sapiens
aaatgagtatcataa

SEQ ID NO: 933210 - DNA, 15 bp, Homo sapiens
taaatgagtatcata

SEQ ID NO: 933211 - DNA, 15 bp, Homo sapiens
gtaaatgagtatcat

SEQ ID NO: 933212 - DNA, 15 bp, Homo sapiens
agtaaatgagtatca

SEQ ID NO: 933213 - DNA, 15 bp, Homo sapiens
cagtaaatgagtatc

SEQ ID NO: 933214 - DNA, 15 bp, Homo sapiens
tcagtaaatgagtat

SEQ ID NO: 933215 - DNA, 15 bp, Homo sapiens
atcagtaaatgagta

SEQ ID NO: 933216 - DNA, 15 bp, Homo sapiens
aatcagtaaatgagt

SEQ ID NO: 933217 - DNA, 15 bp, Homo sapiens
taatcagtaaatgag

SEQ ID NO: 933218 - DNA, 15 bp, Homo sapiens
ataatcagtaaatga

SEQ ID NO: 933219 - DNA, 15 bp, Homo sapiens
gataatcagtaaatg

SEQ ID NO: 933220 - DNA, 15 bp, Homo sapiens
tgataatcagtaaat

SEQ ID NO: 933221 - DNA, 15 bp, Homo sapiens
atgataatcagtaaa

SEQ ID NO: 933222 - DNA, 15 bp, Homo sapiens
gatgataatcagtaa

SEQ ID NO: 933223 - DNA, 15 bp, Homo sapiens
agatgataatcagta

SEQ ID NO: 933224 - DNA, 15 bp, Homo sapiens
aagatgataatcagt

SEQ ID NO: 933225 - DNA, 15 bp, Homo sapiens
caagatgataatcag

SEQ ID NO: 933226 - DNA, 15 bp, Homo sapiens
ccaagatgataatca

SEQ ID NO: 933227 - DNA, 15 bp, Homo sapiens
cccaagatgataatc

SEQ ID NO: 933228 - DNA, 15 bp, Homo sapiens
ccccaagatgataat

SEQ ID NO: 933229 - DNA, 15 bp, Homo sapiens
tccccaagatgataa

SEQ ID NO: 933230 - DNA, 15 bp, Homo sapiens
atccccaagatgata

SEQ ID NO: 933231 - DNA, 15 bp, Homo sapiens
aatccccaagatgat

SEQ ID NO: 933232 - DNA, 15 bp, Homo sapiens
taatccccaagatga

SEQ ID NO: 933233 - DNA, 15 bp, Homo sapiens
ctaatccccaagatg

SEQ ID NO: 933234 - DNA, 15 bp, Homo sapiens
cctaatccccaagat

SEQ ID NO: 933235 - DNA, 15 bp, Homo sapiens
tcctaatccccaaga

SEQ ID NO: 933236 - DNA, 15 bp, Homo sapiens
ttcctaatccccaag

SEQ ID NO: 933237 - DNA, 15 bp, Homo sapiens
tttcctaatccccaa

SEQ ID NO: 933238 - DNA, 15 bp, Homo sapiens
ctttcctaatcccca

SEQ ID NO: 933239 - DNA, 15 bp, Homo sapiens
cctttcctaatcccc

SEQ ID NO: 933240 - DNA, 15 bp, Homo sapiens
tcctttcctaatccc

SEQ ID NO: 933241 - DNA, 15 bp, Homo sapiens
atcctttcctaatcc

SEQ ID NO: 933242 - DNA, 15 bp, Homo sapiens
tatcctttcctaatc

SEQ ID NO: 933243 - DNA, 15 bp, Homo sapiens
ctatcctttcctaat

SEQ ID NO: 933244 - DNA, 15 bp, Homo sapiens
cctatcctttcctaa

SEQ ID NO: 933245 - DNA, 15 bp, Homo sapiens
gcctatcctttccta

SEQ ID NO: 933246 - DNA, 15 bp, Homo sapiens
ggcctatcctttcct

SEQ ID NO: 933247 - DNA, 15 bp, Homo sapiens
tggcctatcctttcc

SEQ ID NO: 933248 - DNA, 15 bp, Homo sapiens
atggcctatcctttc

SEQ ID NO: 933249 - DNA, 15 bp, Homo sapiens
aatggcctatccttt

SEQ ID NO: 933250 - DNA, 15 bp, Homo sapiens
taatggcctatcctt

SEQ ID NO: 933251 - DNA, 15 bp, Homo sapiens
ataatggcctatcct

SEQ ID NO: 933252 - DNA, 15 bp, Homo sapiens
cataatggcctatcc

SEQ ID NO: 933253 - DNA, 15 bp, Homo sapiens
tcataatggcctatc

SEQ ID NO: 933254 - DNA, 15 bp, Homo sapiens
ttcataatggcctat

SEQ ID NO: 933255 - DNA, 15 bp, Homo sapiens
gttcataatggccta

SEQ ID NO: 933256 - DNA, 15 bp, Homo sapiens
agttcataatggcct

SEQ ID NO: 933257 - DNA, 15 bp, Homo sapiens
tagttcataatggcc

SEQ ID NO: 933258 - DNA, 15 bp, Homo sapiens
gtagttcataatggc

SEQ ID NO: 933259 - DNA, 15 bp, Homo sapiens
agtagttcataatgg

SEQ ID NO: 933260 - DNA, 15 bp, Homo sapiens
cagtagttcataatg

SEQ ID NO: 933261 - DNA, 15 bp, Homo sapiens
acagtagttcataat

SEQ ID NO: 933262 - DNA, 15 bp, Homo sapiens
aacagtagttcataa

SEQ ID NO: 933263 - DNA, 15 bp, Homo sapiens
aaacagtagttcata

SEQ ID NO: 933264 - DNA, 15 bp, Homo sapiens
gaaacagtagttcat

SEQ ID NO: 933265 - DNA, 15 bp, Homo sapiens
agaaacagtagttca

SEQ ID NO: 933266 - DNA, 15 bp, Homo sapiens
tagaaacagtagttc

SEQ ID NO: 933267 - DNA, 15 bp, Homo sapiens
ttagaaacagtagtt

SEQ ID NO: 933268 - DNA, 15 bp, Homo sapiens
attagaaacagtagt

SEQ ID NO: 933269 - DNA, 15 bp, Homo sapiens
cattagaaacagtag

SEQ ID NO: 933270 - DNA, 15 bp, Homo sapiens
tcattagaaacagta

SEQ ID NO: 933271 - DNA, 15 bp, Homo sapiens
ttcattagaaacagt

SEQ ID NO: 933272 - DNA, 15 bp, Homo sapiens
tttcattagaaacag

SEQ ID NO: 933273 - DNA, 15 bp, Homo sapiens
aatttcattagaaac

SEQ ID NO: 933274 - DNA, 15 bp, Homo sapiens
taatttcattagaaa

SEQ ID NO: 933275 - DNA, 15 bp, Homo sapiens
ttaatttcattagaa

SEQ ID NO: 933276 - DNA, 15 bp, Homo sapiens
tttaatttcattaga

SEQ ID NO: 933277 - DNA, 15 bp, Homo sapiens
atttaatttcattag

SEQ ID NO: 933278 - DNA, 15 bp, Homo sapiens
aatttaatttcatta

SEQ ID NO: 933279 - DNA, 15 bp, Homo sapiens
aaatttaatttcatt

SEQ ID NO: 933280 - DNA, 15 bp, Homo sapiens
taaatttaatttcat

SEQ ID NO: 933281 - DNA, 15 bp, Homo sapiens
ttaaatttaatttca

SEQ ID NO: 933282 - DNA, 15 bp, Homo sapiens
cttaaatttaatttc

SEQ ID NO: 933283 - DNA, 15 bp, Homo sapiens
tcttaaatttaattt

SEQ ID NO: 933284 - DNA, 15 bp, Homo sapiens
ttcttaaatttaatt

SEQ ID NO: 933285 - DNA, 15 bp, Homo sapiens
tttcttaaatttaat

SEQ ID NO: 933286 - DNA, 15 bp, Homo sapiens
atttcttaaatttaa

SEQ ID NO: 933287 - DNA, 15 bp, Homo sapiens
tatttcttaaattta

SEQ ID NO: 933288 - DNA, 15 bp, Homo sapiens
atatttcttaaattt

SEQ ID NO: 933289 - DNA, 15 bp, Homo sapiens
aatatttcttaaatt

SEQ ID NO: 933290 - DNA, 15 bp, Homo sapiens
aaatatttcttaaat

SEQ ID NO: 933291 - DNA, 15 bp, Homo sapiens
aaaatatttcttaaa

SEQ ID NO: 933292 - DNA, 15 bp, Homo sapiens
taaaatatttcttaa

SEQ ID NO: 933293 - DNA, 15 bp, Homo sapiens
gtaaaatatttctta

SEQ ID NO: 933294 - DNA, 15 bp, Homo sapiens
agtaaaatatttctt

SEQ ID NO: 933295 - DNA, 15 bp, Homo sapiens
aagtaaaatatttct

SEQ ID NO: 933296 - DNA, 15 bp, Homo sapiens
taagtaaaatatttc

SEQ ID NO: 933297 - DNA, 15 bp, Homo sapiens
ctaagtaaaatattt

SEQ ID NO: 933298 - DNA, 15 bp, Homo sapiens
cctaagtaaaatatt

SEQ ID NO: 933299 - DNA, 15 bp, Homo sapiens
tcctaagtaaaatat

SEQ ID NO: 933300 - DNA, 15 bp, Homo sapiens
atcctaagtaaaata

SEQ ID NO: 933301 - DNA, 15 bp, Homo sapiens
aatcctaagtaaaat

SEQ ID NO: 933302 - DNA, 15 bp, Homo sapiens
aaatcctaagtaaaa

SEQ ID NO: 933303 - DNA, 15 bp, Homo sapiens
aaaatcctaagtaaa

SEQ ID NO: 933304 - DNA, 15 bp, Homo sapiens
aaaaatcctaagtaa

SEQ ID NO: 933305 - DNA, 15 bp, Homo sapiens
aaaaaatcctaagta

SEQ ID NO: 933306 - DNA, 15 bp, Homo sapiens
aaaaaaatcctaagt

SEQ ID NO: 933307 - DNA, 15 bp, Homo sapiens
aaaaaaaatcctaag

SEQ ID NO: 933308 - DNA, 15 bp, Homo sapiens
taaaaaaaatcctaa

SEQ ID NO: 933309 - DNA, 15 bp, Homo sapiens
ttaaaaaaaatccta

SEQ ID NO: 933310 - DNA, 15 bp, Homo sapiens
cttaaaaaaaatcct

SEQ ID NO: 933311 - DNA, 15 bp, Homo sapiens
tcttaaaaaaaatcc

SEQ ID NO: 933312 - DNA, 15 bp, Homo sapiens
gtcttaaaaaaaatc

SEQ ID NO: 933313 - DNA, 15 bp, Homo sapiens
agtcttaaaaaaaat

SEQ ID NO: 933314 - DNA, 15 bp, Homo sapiens
aagtcttaaaaaaaa

SEQ ID NO: 933315 - DNA, 15 bp, Homo sapiens
aaagtcttaaaaaaa

SEQ ID NO: 933316 - DNA, 15 bp, Homo sapiens
taaagtcttaaaaaa

SEQ ID NO: 933317 - DNA, 15 bp, Homo sapiens
ataaagtcttaaaaa

SEQ ID NO: 933318 - DNA, 15 bp, Homo sapiens
aataaagtcttaaaa

SEQ ID NO: 933319 - DNA, 15 bp, Homo sapiens
taataaagtcttaaa

SEQ ID NO: 933320 - DNA, 15 bp, Homo sapiens
ataataaagtcttaa

SEQ ID NO: 933321 - DNA, 15 bp, Homo sapiens
aataataaagtctta

SEQ ID NO: 933322 - DNA, 15 bp, Homo sapiens
aaataataaagtctt

SEQ ID NO: 933323 - DNA, 15 bp, Homo sapiens
aaaataataaagtct

SEQ ID NO: 933324 - DNA, 15 bp, Homo sapiens
aaaaataataaagtc

SEQ ID NO: 933325 - DNA, 15 bp, Homo sapiens
aaaaaataataaagt

SEQ ID NO: 933326 - DNA, 15 bp, Homo sapiens
aaaaaaataataaag

SEQ ID NO: 933327 - DNA, 15 bp, Homo sapiens
taaaaaaataataaa

SEQ ID NO: 933328 - DNA, 15 bp, Homo sapiens
ctaaaaaaataataa

SEQ ID NO: 933329 - DNA, 15 bp, Homo sapiens
tctaaaaaaataata

SEQ ID NO: 933330 - DNA, 15 bp, Homo sapiens
ctctaaaaaaataat

SEQ ID NO: 933331 - DNA, 15 bp, Homo sapiens
gctctaaaaaaataa

SEQ ID NO: 933332 - DNA, 15 bp, Homo sapiens
tgctctaaaaaaata

SEQ ID NO: 933333 - DNA, 15 bp, Homo sapiens
ttgctctaaaaaaat

SEQ ID NO: 933334 - DNA, 15 bp, Homo sapiens
attgctctaaaaaaa

SEQ ID NO: 933335 - DNA, 15 bp, Homo sapiens
aattgctctaaaaaa

SEQ ID NO: 933336 - DNA, 15 bp, Homo sapiens
aaattgctctaaaaa

SEQ ID NO: 933337 - DNA, 15 bp, Homo sapiens
aaaattgctctaaaa

SEQ ID NO: 933338 - DNA, 15 bp, Homo sapiens
taaaattgctctaaa

SEQ ID NO: 933339 - DNA, 15 bp, Homo sapiens
ctaaaattgctctaa

SEQ ID NO: 933340 - DNA, 15 bp, Homo sapiens
cctaaaattgctcta

SEQ ID NO: 933341 - DNA, 15 bp, Homo sapiens
acctaaaattgctct

SEQ ID NO: 933342 - DNA, 15 bp, Homo sapiens
aacctaaaattgctc

SEQ ID NO: 933343 - DNA, 15 bp, Homo sapiens
gaacctaaaattgct

SEQ ID NO: 933344 - DNA, 15 bp, Homo sapiens
tgaacctaaaattgc

SEQ ID NO: 933345 - DNA, 15 bp, Homo sapiens
gtgaacctaaaattg

SEQ ID NO: 933346 - DNA, 15 bp, Homo sapiens
tgtgaacctaaaatt

SEQ ID NO: 933347 - DNA, 15 bp, Homo sapiens
ctgtgaacctaaaat

SEQ ID NO: 933348 - DNA, 15 bp, Homo sapiens
gctgtgaacctaaaa

SEQ ID NO: 933349 - DNA, 15 bp, Homo sapiens
tgctgtgaacctaaa

SEQ ID NO: 933350 - DNA, 15 bp, Homo sapiens
ttgctgtgaacctaa

SEQ ID NO: 933351 - DNA, 15 bp, Homo sapiens
tttgctgtgaaccta

SEQ ID NO: 933352 - DNA, 15 bp, Homo sapiens
ttttgctgtgaacct

SEQ ID NO: 933353 - DNA, 15 bp, Homo sapiens
attttgctgtgaacc

SEQ ID NO: 933354 - DNA, 15 bp, Homo sapiens
aattttgctgtgaac

SEQ ID NO: 933355 - DNA, 15 bp, Homo sapiens
caattttgctgtgaa

SEQ ID NO: 933356 - DNA, 15 bp, Homo sapiens
tcaattttgctgtga

SEQ ID NO: 933357 - DNA, 15 bp, Homo sapiens
ctcaattttgctgtg

SEQ ID NO: 933358 - DNA, 15 bp, Homo sapiens
tctcaattttgctgt

SEQ ID NO: 933359 - DNA, 15 bp, Homo sapiens
ctctcaattttgctg

SEQ ID NO: 933360 - DNA, 15 bp, Homo sapiens
cctctcaattttgct

SEQ ID NO: 933361 - DNA, 15 bp, Homo sapiens
tcctctcaattttgc

SEQ ID NO: 933362 - DNA, 15 bp, Homo sapiens
ttcctctcaattttg

SEQ ID NO: 933363 - DNA, 15 bp, Homo sapiens
cttcctctcaatttt

SEQ ID NO: 933364 - DNA, 15 bp, Homo sapiens
ccttcctctcaattt

SEQ ID NO: 933365 - DNA, 15 bp, Homo sapiens
accttcctctcaatt

SEQ ID NO: 933366 - DNA, 15 bp, Homo sapiens
taccttcctctcaat

SEQ ID NO: 933367 - DNA, 15 bp, Homo sapiens
gtaccttcctctcaa

SEQ ID NO: 933368 - DNA, 15 bp, Homo sapiens
tgtaccttcctctca

SEQ ID NO: 933369 - DNA, 15 bp, Homo sapiens
ctgtaccttcctctc

SEQ ID NO: 933370 - DNA, 15 bp, Homo sapiens
tctgtaccttcctct

SEQ ID NO: 933371 - DNA, 15 bp, Homo sapiens
ctctgtaccttcctc

SEQ ID NO: 933372 - DNA, 15 bp, Homo sapiens
tctctgtaccttcct

SEQ ID NO: 933373 - DNA, 15 bp, Homo sapiens
atctctgtaccttcc

SEQ ID NO: 933374 - DNA, 15 bp, Homo sapiens
aatctctgtaccttc

SEQ ID NO: 933375 - DNA, 15 bp, Homo sapiens
aaatctctgtacctt

SEQ ID NO: 933376 - DNA, 15 bp, Homo sapiens
gaaatctctgtacct

SEQ ID NO: 933377 - DNA, 15 bp, Homo sapiens
ggaaatctctgtacc

SEQ ID NO: 933378 - DNA, 15 bp, Homo sapiens
aggaaatctctgtac

SEQ ID NO: 933379 - DNA, 15 bp, Homo sapiens
caggaaatctctgta

SEQ ID NO: 933380 - DNA, 15 bp, Homo sapiens
acaggaaatctctgt

SEQ ID NO: 933381 - DNA, 15 bp, Homo sapiens
tacaggaaatctctg

SEQ ID NO: 933382 - DNA, 15 bp, Homo sapiens
atacaggaaatctct

SEQ ID NO: 933383 - DNA, 15 bp, Homo sapiens
tatacaggaaatctc

SEQ ID NO: 933384 - DNA, 15 bp, Homo sapiens
atatacaggaaatct

SEQ ID NO: 933385 - DNA, 15 bp, Homo sapiens
gatatacaggaaatc

SEQ ID NO: 933386 - DNA, 15 bp, Homo sapiens
agatatacaggaaat

SEQ ID NO: 933387 - DNA, 15 bp, Homo sapiens
gagatatacaggaaa

SEQ ID NO: 933388 - DNA, 15 bp, Homo sapiens
ggagatatacaggaa

SEQ ID NO: 933389 - DNA, 15 bp, Homo sapiens
aggagatatacagga

SEQ ID NO: 933390 - DNA, 15 bp, Homo sapiens
taggagatatacagg

SEQ ID NO: 933391 - DNA, 15 bp, Homo sapiens
gtaggagatatacag

SEQ ID NO: 933392 - DNA, 15 bp, Homo sapiens
ggtaggagatataca

SEQ ID NO: 933393 - DNA, 15 bp, Homo sapiens
gggtaggagatatac

SEQ ID NO: 933394 - DNA, 15 bp, Homo sapiens
agggtaggagatata

SEQ ID NO: 933395 - DNA, 15 bp, Homo sapiens
cagggtaggagatat

SEQ ID NO: 933396 - DNA, 15 bp, Homo sapiens
tcagggtaggagata

SEQ ID NO: 933397 - DNA, 15 bp, Homo sapiens
ttcagggtaggagat

SEQ ID NO: 933398 - DNA, 15 bp, Homo sapiens
tttcagggtaggaga

SEQ ID NO: 933399 - DNA, 15 bp, Homo sapiens
ctttcagggtaggag

SEQ ID NO: 933400 - DNA, 15 bp, Homo sapiens
actttcagggtagga

SEQ ID NO: 933401 - DNA, 15 bp, Homo sapiens
cactttcagggtagg

SEQ ID NO: 933402 - DNA, 15 bp, Homo sapiens
ccactttcagggtag

SEQ ID NO: 933403 - DNA, 15 bp, Homo sapiens
accactttcagggta

SEQ ID NO: 933404 - DNA, 15 bp, Homo sapiens
taccactttcagggt

SEQ ID NO: 933405 - DNA, 15 bp, Homo sapiens
gtaccactttcaggg

SEQ ID NO: 933406 - DNA, 15 bp, Homo sapiens
tgtaccactttcagg

SEQ ID NO: 933407 - DNA, 15 bp, Homo sapiens
atgtaccactttcag

SEQ ID NO: 933408 - DNA, 15 bp, Homo sapiens
aatgtaccactttca

SEQ ID NO: 933409 - DNA, 15 bp, Homo sapiens
aaatgtaccactttc

SEQ ID NO: 933410 - DNA, 15 bp, Homo sapiens
caaatgtaccacttt

SEQ ID NO: 933411 - DNA, 15 bp, Homo sapiens
acaaatgtaccactt

SEQ ID NO: 933412 - DNA, 15 bp, Homo sapiens
aacaaatgtaccact

SEQ ID NO: 933413 - DNA, 15 bp, Homo sapiens
taacaaatgtaccac

SEQ ID NO: 933414 - DNA, 15 bp, Homo sapiens
ttaacaaatgtacca

SEQ ID NO: 933415 - DNA, 15 bp, Homo sapiens
tttaacaaatgtacc

SEQ ID NO: 933416 - DNA, 15 bp, Homo sapiens
ttttaacaaatgtac

SEQ ID NO: 933417 - DNA, 15 bp, Homo sapiens
attttaacaaatgta

SEQ ID NO: 933418 - DNA, 15 bp, Homo sapiens
aattttaacaaatgt

SEQ ID NO: 933419 - DNA, 15 bp, Homo sapiens
caattttaacaaatg

SEQ ID NO: 933420 - DNA, 15 bp, Homo sapiens
tcaattttaacaaat

SEQ ID NO: 933421 - DNA, 15 bp, Homo sapiens
atcaattttaacaaa

SEQ ID NO: 933422 - DNA, 15 bp, Homo sapiens
catcaattttaacaa

SEQ ID NO: 933423 - DNA, 15 bp, Homo sapiens
tcatcaattttaaca

SEQ ID NO: 933424 - DNA, 15 bp, Homo sapiens
ttcatcaattttaac

SEQ ID NO: 933425 - DNA, 15 bp, Homo sapiens
gttcatcaattttaa

SEQ ID NO: 933426 - DNA, 15 bp, Homo sapiens
ggttcatcaatttta

SEQ ID NO: 933427 - DNA, 15 bp, Homo sapiens
aggttcatcaatttt

SEQ ID NO: 933428 - DNA, 15 bp, Homo sapiens
taggttcatcaattt

SEQ ID NO: 933429 - DNA, 15 bp, Homo sapiens
ataggttcatcaatt

SEQ ID NO: 933430 - DNA, 15 bp, Homo sapiens
tataggttcatcaat

SEQ ID NO: 933431 - DNA, 15 bp, Homo sapiens
atataggttcatcaa

SEQ ID NO: 933432 - DNA, 15 bp, Homo sapiens
aatataggttcatca

SEQ ID NO: 933433 - DNA, 15 bp, Homo sapiens
caatataggttcatc

SEQ ID NO: 933434 - DNA, 15 bp, Homo sapiens
tcaatataggttcat

SEQ ID NO: 933435 - DNA, 15 bp, Homo sapiens
atcaatataggttca

SEQ ID NO: 933436 - DNA, 15 bp, Homo sapiens
tatcaatataggttc

SEQ ID NO: 933437 - DNA, 15 bp, Homo sapiens
gtatcaatataggtt

SEQ ID NO: 933438 - DNA, 15 bp, Homo sapiens
tgtatcaatataggt

SEQ ID NO: 933439 - DNA, 15 bp, Homo sapiens
atgtatcaatatagg

SEQ ID NO: 933440 - DNA, 15 bp, Homo sapiens
gatgtatcaatatag

SEQ ID NO: 933441 - DNA, 15 bp, Homo sapiens
tgatgtatcaatata

SEQ ID NO: 933442 - DNA, 15 bp, Homo sapiens
atgatgtatcaatat

SEQ ID NO: 933443 - DNA, 15 bp, Homo sapiens
tatgatgtatcaata

SEQ ID NO: 933444 - DNA, 15 bp, Homo sapiens
ttatgatgtatcaat

SEQ ID NO: 933445 - DNA, 15 bp, Homo sapiens
attatgatgtatcaa

SEQ ID NO: 933446 - DNA, 15 bp, Homo sapiens
gattatgatgtatca

SEQ ID NO: 933447 - DNA, 15 bp, Homo sapiens
tgattatgatgtatc

SEQ ID NO: 933448 - DNA, 15 bp, Homo sapiens
gtgattatgatgtat

SEQ ID NO: 933449 - DNA, 15 bp, Homo sapiens
ggtgattatgatgta

SEQ ID NO: 933450 - DNA, 15 bp, Homo sapiens
gggtgattatgatgt

SEQ ID NO: 933451 - DNA, 15 bp, Homo sapiens
tgggtgattatgatg

SEQ ID NO: 933452 - DNA, 15 bp, Homo sapiens
ttgggtgattatgat

SEQ ID NO: 933453 - DNA, 15 bp, Homo sapiens
tttgggtgattatga

SEQ ID NO: 933454 - DNA, 15 bp, Homo sapiens
ctttgggtgattatg

SEQ ID NO: 933455 - DNA, 15 bp, Homo sapiens
actttgggtgattat

SEQ ID NO: 933456 - DNA, 15 bp, Homo sapiens
gactttgggtgatta

SEQ ID NO: 933457 - DNA, 15 bp, Homo sapiens
ggactttgggtgatt

SEQ ID NO: 933458 - DNA, 15 bp, Homo sapiens
tggactttgggtgat

SEQ ID NO: 933459 - DNA, 15 bp, Homo sapiens
ttggactttgggtga

SEQ ID NO: 933460 - DNA, 15 bp, Homo sapiens
cttggactttgggtg

SEQ ID NO: 933461 - DNA, 15 bp, Homo sapiens
acttggactttgggt

SEQ ID NO: 933462 - DNA, 15 bp, Homo sapiens
aacttggactttggg

SEQ ID NO: 933463 - DNA, 15 bp, Homo sapiens
aaacttggactttgg

SEQ ID NO: 933464 - DNA, 15 bp, Homo sapiens
taaacttggactttg

SEQ ID NO: 933465 - DNA, 15 bp, Homo sapiens
gtaaacttggacttt

SEQ ID NO: 933466 - DNA, 15 bp, Homo sapiens
ggtaaacttggactt

SEQ ID NO: 933467 - DNA, 15 bp, Homo sapiens
aggtaaacttggact

SEQ ID NO: 933468 - DNA, 15 bp, Homo sapiens
gaggtaaacttggac

SEQ ID NO: 933469 - DNA, 15 bp, Homo sapiens
agaggtaaacttgga

SEQ ID NO: 933470 - DNA, 15 bp, Homo sapiens
tagaggtaaacttgg

SEQ ID NO: 933471 - DNA, 15 bp, Homo sapiens
atagaggtaaacttg

SEQ ID NO: 933472 - DNA, 15 bp, Homo sapiens
aatagaggtaaactt

SEQ ID NO: 933473 - DNA, 15 bp, Homo sapiens
aaatagaggtaaact

SEQ ID NO: 933474 - DNA, 15 bp, Homo sapiens
aaaatagaggtaaac

SEQ ID NO: 933475 - DNA, 15 bp, Homo sapiens
taaaatagaggtaaa

SEQ ID NO: 933476 - DNA, 15 bp, Homo sapiens
ctaaaatagaggtaa

SEQ ID NO: 933477 - DNA, 15 bp, Homo sapiens
gctaaaatagaggta

SEQ ID NO: 933478 - DNA, 15 bp, Homo sapiens
agctaaaatagaggt

SEQ ID NO: 933479 - DNA, 15 bp, Homo sapiens
gagctaaaatagagg

SEQ ID NO: 933480 - DNA, 15 bp, Homo sapiens
agagctaaaatagag

SEQ ID NO: 933481 - DNA, 15 bp, Homo sapiens
aagagctaaaataga

SEQ ID NO: 933482 - DNA, 15 bp, Homo sapiens
caagagctaaaatag

SEQ ID NO: 933483 - DNA, 15 bp, Homo sapiens
ccaagagctaaaata

SEQ ID NO: 933484 - DNA, 15 bp, Homo sapiens
accaagagctaaaat

SEQ ID NO: 933485 - DNA, 15 bp, Homo sapiens
taccaagagctaaaa

SEQ ID NO: 933486 - DNA, 15 bp, Homo sapiens
ataccaagagctaaa

SEQ ID NO: 933487 - DNA, 15 bp, Homo sapiens
aataccaagagctaa

SEQ ID NO: 933488 - DNA, 15 bp, Homo sapiens
aaataccaagagcta

SEQ ID NO: 933489 - DNA, 15 bp, Homo sapiens
aaaataccaagagct

SEQ ID NO: 933490 - DNA, 15 bp, Homo sapiens
taaaataccaagagc

SEQ ID NO: 933491 - DNA, 15 bp, Homo sapiens
gtaaaataccaagag

SEQ ID NO: 933492 - DNA, 15 bp, Homo sapiens
tgtaaaataccaaga

SEQ ID NO: 933493 - DNA, 15 bp, Homo sapiens
gtgtaaaataccaag

SEQ ID NO: 933494 - DNA, 15 bp, Homo sapiens
agtgtaaaataccaa

SEQ ID NO: 933495 - DNA, 15 bp, Homo sapiens
gagtgtaaaatacca

SEQ ID NO: 933496 - DNA, 15 bp, Homo sapiens
agagtgtaaaatacc

SEQ ID NO: 933497 - DNA, 15 bp, Homo sapiens
cagagtgtaaaatac

SEQ ID NO: 933498 - DNA, 15 bp, Homo sapiens
acagagtgtaaaata

SEQ ID NO: 933499 - DNA, 15 bp, Homo sapiens
cacagagtgtaaaat

SEQ ID NO: 933500 - DNA, 15 bp, Homo sapiens
acacagagtgtaaaa

SEQ ID NO: 933501 - DNA, 15 bp, Homo sapiens
cacacagagtgtaaa

SEQ ID NO: 933502 - DNA, 15 bp, Homo sapiens
acacacagagtgtaa

SEQ ID NO: 933503 - DNA, 15 bp, Homo sapiens
aacacacagagtgta

SEQ ID NO: 933504 - DNA, 15 bp, Homo sapiens
aaacacacagagtgt

SEQ ID NO: 933505 - DNA, 15 bp, Homo sapiens
taaacacacagagtg

SEQ ID NO: 933506 - DNA, 15 bp, Homo sapiens
ctaaacacacagagt

SEQ ID NO: 933507 - DNA, 15 bp, Homo sapiens
tctaaacacacagag

SEQ ID NO: 933508 - DNA, 15 bp, Homo sapiens
gtctaaacacacaga

SEQ ID NO: 933509 - DNA, 15 bp, Homo sapiens
tgtctaaacacacag

SEQ ID NO: 933510 - DNA, 15 bp, Homo sapiens
ttgtctaaacacaca

SEQ ID NO: 933511 - DNA, 15 bp, Homo sapiens
tttgtctaaacacac

SEQ ID NO: 933512 - DNA, 15 bp, Homo sapiens
atttgtctaaacaca

SEQ ID NO: 933513 - DNA, 15 bp, Homo sapiens
catttgtctaaacac

SEQ ID NO: 933514 - DNA, 15 bp, Homo sapiens
acatttgtctaaaca

SEQ ID NO: 933515 - DNA, 15 bp, Homo sapiens
tacatttgtctaaac

SEQ ID NO: 933516 - DNA, 15 bp, Homo sapiens
atacatttgtctaaa

SEQ ID NO: 933517 - DNA, 15 bp, Homo sapiens
tatacatttgtctaa

SEQ ID NO: 933518 - DNA, 15 bp, Homo sapiens
ttatacatttgtcta

SEQ ID NO: 933519 - DNA, 15 bp, Homo sapiens
attatacatttgtct

SEQ ID NO: 933520 - DNA, 15 bp, Homo sapiens
cattatacatttgtc

SEQ ID NO: 933521 - DNA, 15 bp, Homo sapiens
tcattatacatttgt

SEQ ID NO: 933522 - DNA, 15 bp, Homo sapiens
atcattatacatttg

SEQ ID NO: 933523 - DNA, 15 bp, Homo sapiens
tatcattatacattt

SEQ ID NO: 933524 - DNA, 15 bp, Homo sapiens
atatcattatacatt

SEQ ID NO: 933525 - DNA, 15 bp, Homo sapiens
catatcattatacat

SEQ ID NO: 933526 - DNA, 15 bp, Homo sapiens
acatatcattataca

SEQ ID NO: 933527 - DNA, 15 bp, Homo sapiens
tacatatcattatac

SEQ ID NO: 933528 - DNA, 15 bp, Homo sapiens
atacatatcattata

SEQ ID NO: 933529 - DNA, 15 bp, Homo sapiens
gatacatatcattat

SEQ ID NO: 933530 - DNA, 15 bp, Homo sapiens
ggatacatatcatta

SEQ ID NO: 933531 - DNA, 15 bp, Homo sapiens
tggatacatatcatt

SEQ ID NO: 933532 - DNA, 15 bp, Homo sapiens
atggatacatatcat

SEQ ID NO: 933533 - DNA, 15 bp, Homo sapiens
gatggatacatatca

SEQ ID NO: 933534 - DNA, 15 bp, Homo sapiens
tgatggatacatatc

SEQ ID NO: 933535 - DNA, 15 bp, Homo sapiens
atgatggatacatat

SEQ ID NO: 933536 - DNA, 15 bp, Homo sapiens
aatgatggatacata

SEQ ID NO: 933537 - DNA, 15 bp, Homo sapiens
taatgatggatacat

SEQ ID NO: 933538 - DNA, 15 bp, Homo sapiens
ataatgatggataca

SEQ ID NO: 933539 - DNA, 15 bp, Homo sapiens
tataatgatggatac

SEQ ID NO: 933540 - DNA, 15 bp, Homo sapiens
ctataatgatggata

SEQ ID NO: 933541 - DNA, 15 bp, Homo sapiens
actataatgatggat

SEQ ID NO: 933542 - DNA, 15 bp, Homo sapiens
tactataatgatgga

SEQ ID NO: 933543 - DNA, 15 bp, Homo sapiens
atactataatgatgg

SEQ ID NO: 933544 - DNA, 15 bp, Homo sapiens
aatactataatgatg

SEQ ID NO: 933545 - DNA, 15 bp, Homo sapiens
taatactataatgat

SEQ ID NO: 933546 - DNA, 15 bp, Homo sapiens
ataatactataatga

SEQ ID NO: 933547 - DNA, 15 bp, Homo sapiens
tataatactataatg

SEQ ID NO: 933548 - DNA, 15 bp, Homo sapiens
gtataatactataat

SEQ ID NO: 933549 - DNA, 15 bp, Homo sapiens
tgtataatactataa

SEQ ID NO: 933550 - DNA, 15 bp, Homo sapiens
ctgtataatactata

SEQ ID NO: 933551 - DNA, 15 bp, Homo sapiens
cctgtataatactat

SEQ ID NO: 933552 - DNA, 15 bp, Homo sapiens
ccctgtataatacta

SEQ ID NO: 933553 - DNA, 15 bp, Homo sapiens
accctgtataatact

SEQ ID NO: 933554 - DNA, 15 bp, Homo sapiens
taccctgtataatac

SEQ ID NO: 933555 - DNA, 15 bp, Homo sapiens
ataccctgtataata

SEQ ID NO: 933556 - DNA, 15 bp, Homo sapiens
aataccctgtataat

SEQ ID NO: 933557 - DNA, 15 bp, Homo sapiens
aaataccctgtataa

SEQ ID NO: 933558 - DNA, 15 bp, Homo sapiens
aaaataccctgtata

SEQ ID NO: 933559 - DNA, 15 bp, Homo sapiens
gaaaataccctgtat

SEQ ID NO: 933560 - DNA, 15 bp, Homo sapiens
tgaaaataccctgta

SEQ ID NO: 933561 - DNA, 15 bp, Homo sapiens
gtgaaaataccctgt

SEQ ID NO: 933562 - DNA, 15 bp, Homo sapiens
agtgaaaataccctg

SEQ ID NO: 933563 - DNA, 15 bp, Homo sapiens
cagtgaaaataccct

SEQ ID NO: 933564 - DNA, 15 bp, Homo sapiens
gcagtgaaaataccc

SEQ ID NO: 933565 - DNA, 15 bp, Homo sapiens
ggcagtgaaaatacc

SEQ ID NO: 933566 - DNA, 15 bp, Homo sapiens
gggcagtgaaaatac

SEQ ID NO: 933567 - DNA, 15 bp, Homo sapiens
agggcagtgaaaata

SEQ ID NO: 933568 - DNA, 15 bp, Homo sapiens
tagggcagtgaaaat

SEQ ID NO: 933569 - DNA, 15 bp, Homo sapiens
ttagggcagtgaaaa

SEQ ID NO: 933570 - DNA, 15 bp, Homo sapiens
tttagggcagtgaaa

SEQ ID NO: 933571 - DNA, 15 bp, Homo sapiens
ttttagggcagtgaa

SEQ ID NO: 933572 - DNA, 15 bp, Homo sapiens
tttttagggcagtga

SEQ ID NO: 933573 - DNA, 15 bp, Homo sapiens
atttttagggcagtg

SEQ ID NO: 933574 - DNA, 15 bp, Homo sapiens
gatttttagggcagt

SEQ ID NO: 933575 - DNA, 15 bp, Homo sapiens
agatttttagggcag

SEQ ID NO: 933576 - DNA, 15 bp, Homo sapiens
aagatttttagggca

SEQ ID NO: 933577 - DNA, 15 bp, Homo sapiens
gaagatttttagggc

SEQ ID NO: 933578 - DNA, 15 bp, Homo sapiens
agaagatttttaggg

SEQ ID NO: 933579 - DNA, 15 bp, Homo sapiens
cagaagatttttagg

SEQ ID NO: 933580 - DNA, 15 bp, Homo sapiens
acagaagatttttag

SEQ ID NO: 933581 - DNA, 15 bp, Homo sapiens
cacagaagattttta

SEQ ID NO: 933582 - DNA, 15 bp, Homo sapiens
gcacagaagattttt

SEQ ID NO: 933583 - DNA, 15 bp, Homo sapiens
ggcacagaagatttt

SEQ ID NO: 933584 - DNA, 15 bp, Homo sapiens
aggcacagaagattt

SEQ ID NO: 933585 - DNA, 15 bp, Homo sapiens
gaggcacagaagatt

SEQ ID NO: 933586 - DNA, 15 bp, Homo sapiens
agaggcacagaagat

SEQ ID NO: 933587 - DNA, 15 bp, Homo sapiens
gagaggcacagaaga

SEQ ID NO: 933588 - DNA, 15 bp, Homo sapiens
agagaggcacagaag

SEQ ID NO: 933589 - DNA, 15 bp, Homo sapiens
aagagaggcacagaa

SEQ ID NO: 933590 - DNA, 15 bp, Homo sapiens
gaagagaggcacaga

SEQ ID NO: 933591 - DNA, 15 bp, Homo sapiens
agaagagaggcacag

SEQ ID NO: 933592 - DNA, 15 bp, Homo sapiens
aagaagagaggcaca

SEQ ID NO: 933593 - DNA, 15 bp, Homo sapiens
gaagaagagaggcac

SEQ ID NO: 933594 - DNA, 15 bp, Homo sapiens
tgaagaagagaggca

SEQ ID NO: 933595 - DNA, 15 bp, Homo sapiens
atgaagaagagaggc

SEQ ID NO: 933596 - DNA, 15 bp, Homo sapiens
aatgaagaagagagg

SEQ ID NO: 933597 - DNA, 15 bp, Homo sapiens
gaatgaagaagagag

SEQ ID NO: 933598 - DNA, 15 bp, Homo sapiens
ggaatgaagaagaga

SEQ ID NO: 933599 - DNA, 15 bp, Homo sapiens
aggaatgaagaagag

SEQ ID NO: 933600 - DNA, 15 bp, Homo sapiens
aaggaatgaagaaga

SEQ ID NO: 933601 - DNA, 15 bp, Homo sapiens
gaaggaatgaagaag

SEQ ID NO: 933602 - DNA, 15 bp, Homo sapiens
ggaaggaatgaagaa

SEQ ID NO: 933603 - DNA, 15 bp, Homo sapiens
aggaaggaatgaaga

SEQ ID NO: 933604 - DNA, 15 bp, Homo sapiens
gaggaaggaatgaag

SEQ ID NO: 933605 - DNA, 15 bp, Homo sapiens
agaggaaggaatgaa

SEQ ID NO: 933606 - DNA, 15 bp, Homo sapiens
cagaggaaggaatga

SEQ ID NO: 933607 - DNA, 15 bp, Homo sapiens
gcagaggaaggaatg

SEQ ID NO: 933608 - DNA, 15 bp, Homo sapiens
tgcagaggaaggaat

SEQ ID NO: 933609 - DNA, 15 bp, Homo sapiens
gtgcagaggaaggaa

SEQ ID NO: 933610 - DNA, 15 bp, Homo sapiens
ggtgcagaggaagga

SEQ ID NO: 933611 - DNA, 15 bp, Homo sapiens
aggtgcagaggaagg

SEQ ID NO: 933612 - DNA, 15 bp, Homo sapiens
gaggtgcagaggaag

SEQ ID NO: 933613 - DNA, 15 bp, Homo sapiens
tgaggtgcagaggaa

SEQ ID NO: 933614 - DNA, 15 bp, Homo sapiens
gtgaggtgcagagga

SEQ ID NO: 933615 - DNA, 15 bp, Homo sapiens
ggtgaggtgcagagg

SEQ ID NO: 933616 - DNA, 15 bp, Homo sapiens
tggtgaggtgcagag

SEQ ID NO: 933617 - DNA, 15 bp, Homo sapiens
ttggtgaggtgcaga

SEQ ID NO: 933618 - DNA, 15 bp, Homo sapiens
tttggtgaggtgcag

SEQ ID NO: 933619 - DNA, 15 bp, Homo sapiens
gtttggtgaggtgca

SEQ ID NO: 933620 - DNA, 15 bp, Homo sapiens
ggtttggtgaggtgc

SEQ ID NO: 933621 - DNA, 15 bp, Homo sapiens
gggtttggtgaggtg

SEQ ID NO: 933622 - DNA, 15 bp, Homo sapiens
ggggtttggtgaggt

SEQ ID NO: 933623 - DNA, 15 bp, Homo sapiens
aggggtttggtgagg

SEQ ID NO: 933624 - DNA, 15 bp, Homo sapiens
caggggtttggtgag

SEQ ID NO: 933625 - DNA, 15 bp, Homo sapiens
ccaggggtttggtga

SEQ ID NO: 933626 - DNA, 15 bp, Homo sapiens
gccaggggtttggtg

SEQ ID NO: 933627 - DNA, 15 bp, Homo sapiens
tgccaggggtttggt

SEQ ID NO: 933628 - DNA, 15 bp, Homo sapiens
ttgccaggggtttgg

SEQ ID NO: 933629 - DNA, 15 bp, Homo sapiens
gttgccaggggtttg

SEQ ID NO: 933630 - DNA, 15 bp, Homo sapiens
ggttgccaggggttt

SEQ ID NO: 933631 - DNA, 15 bp, Homo sapiens
tggttgccaggggtt

SEQ ID NO: 933632 - DNA, 15 bp, Homo sapiens
ctggttgccaggggt

SEQ ID NO: 933633 - DNA, 15 bp, Homo sapiens
actggttgccagggg

SEQ ID NO: 933634 - DNA, 15 bp, Homo sapiens
cactggttgccaggg

SEQ ID NO: 933635 - DNA, 15 bp, Homo sapiens
tcactggttgccagg

SEQ ID NO: 933636 - DNA, 15 bp, Homo sapiens
atcactggttgccag

SEQ ID NO: 933637 - DNA, 15 bp, Homo sapiens
gatcactggttgcca

SEQ ID NO: 933638 - DNA, 15 bp, Homo sapiens
agatcactggttgcc

SEQ ID NO: 933639 - DNA, 15 bp, Homo sapiens
aagatcactggttgc

SEQ ID NO: 933640 - DNA, 15 bp, Homo sapiens
aaagatcactggttg

SEQ ID NO: 933641 - DNA, 15 bp, Homo sapiens
aaaagatcactggtt

SEQ ID NO: 933642 - DNA, 15 bp, Homo sapiens
aaaaagatcactggt

SEQ ID NO: 933643 - DNA, 15 bp, Homo sapiens
taaaaagatcactgg

SEQ ID NO: 933644 - DNA, 15 bp, Homo sapiens
gtaaaaagatcactg

SEQ ID NO: 933645 - DNA, 15 bp, Homo sapiens
agtaaaaagatcact

SEQ ID NO: 933646 - DNA, 15 bp, Homo sapiens
cagtaaaaagatcac

SEQ ID NO: 933647 - DNA, 15 bp, Homo sapiens
acagtaaaaagatca

SEQ ID NO: 933648 - DNA, 15 bp, Homo sapiens
gacagtaaaaagatc

SEQ ID NO: 933649 - DNA, 15 bp, Homo sapiens
agacagtaaaaagat

SEQ ID NO: 933650 - DNA, 15 bp, Homo sapiens
gagacagtaaaaaga

SEQ ID NO: 933651 - DNA, 15 bp, Homo sapiens
ggagacagtaaaaag

SEQ ID NO: 933652 - DNA, 15 bp, Homo sapiens
tggagacagtaaaaa

SEQ ID NO: 933653 - DNA, 15 bp, Homo sapiens
atggagacagtaaaa

SEQ ID NO: 933654 - DNA, 15 bp, Homo sapiens
tatggagacagtaaa

SEQ ID NO: 933655 - DNA, 15 bp, Homo sapiens
ctatggagacagtaa

SEQ ID NO: 933656 - DNA, 15 bp, Homo sapiens
actatggagacagta

SEQ ID NO: 933657 - DNA, 15 bp, Homo sapiens
aactatggagacagt

SEQ ID NO: 933658 - DNA, 15 bp, Homo sapiens
aaactatggagacag

SEQ ID NO: 933659 - DNA, 15 bp, Homo sapiens
gaaactatggagaca

SEQ ID NO: 933660 - DNA, 15 bp, Homo sapiens
tgaaactatggagac

SEQ ID NO: 933661 - DNA, 15 bp, Homo sapiens
gtgaaactatggaga

SEQ ID NO: 933662 - DNA, 15 bp, Homo sapiens
ggtgaaactatggag

SEQ ID NO: 933663 - DNA, 15 bp, Homo sapiens
aggtgaaactatgga

SEQ ID NO: 933664 - DNA, 15 bp, Homo sapiens
aaggtgaaactatgg

SEQ ID NO: 933665 - DNA, 15 bp, Homo sapiens
aaaggtgaaactatg

SEQ ID NO: 933666 - DNA, 15 bp, Homo sapiens
aaaaggtgaaactat

SEQ ID NO: 933667 - DNA, 15 bp, Homo sapiens
gaaaaggtgaaacta

SEQ ID NO: 933668 - DNA, 15 bp, Homo sapiens
ggaaaaggtgaaact

SEQ ID NO: 933669 - DNA, 15 bp, Homo sapiens
tggaaaaggtgaaac

SEQ ID NO: 933670 - DNA, 15 bp, Homo sapiens
ctggaaaaggtgaaa

SEQ ID NO: 933671 - DNA, 15 bp, Homo sapiens
tctggaaaaggtgaa

SEQ ID NO: 933672 - DNA, 15 bp, Homo sapiens
ttctggaaaaggtga

SEQ ID NO: 933673 - DNA, 15 bp, Homo sapiens
attctggaaaaggtg

SEQ ID NO: 933674 - DNA, 15 bp, Homo sapiens
tattctggaaaaggt

SEQ ID NO: 933675 - DNA, 15 bp, Homo sapiens
atattctggaaaagg

SEQ ID NO: 933676 - DNA, 15 bp, Homo sapiens
catattctggaaaag

SEQ ID NO: 933677 - DNA, 15 bp, Homo sapiens
acatattctggaaaa

SEQ ID NO: 933678 - DNA, 15 bp, Homo sapiens
aacatattctggaaa

SEQ ID NO: 933679 - DNA, 15 bp, Homo sapiens
taacatattctggaa

SEQ ID NO: 933680 - DNA, 15 bp, Homo sapiens
ataacatattctgga

SEQ ID NO: 933681 - DNA, 15 bp, Homo sapiens
tataacatattctgg

SEQ ID NO: 933682 - DNA, 15 bp, Homo sapiens
ctataacatattctg

SEQ ID NO: 933683 - DNA, 15 bp, Homo sapiens
tctataacatattct

SEQ ID NO: 933684 - DNA, 15 bp, Homo sapiens
atctataacatattc

SEQ ID NO: 933685 - DNA, 15 bp, Homo sapiens
catctataacatatt

SEQ ID NO: 933686 - DNA, 15 bp, Homo sapiens
ccatctataacatat

SEQ ID NO: 933687 - DNA, 15 bp, Homo sapiens
tccatctataacata

SEQ ID NO: 933688 - DNA, 15 bp, Homo sapiens
ttccatctataacat

SEQ ID NO: 933689 - DNA, 15 bp, Homo sapiens
tttccatctataaca

SEQ ID NO: 933690 - DNA, 15 bp, Homo sapiens
gtttccatctataac

SEQ ID NO: 933691 - DNA, 15 bp, Homo sapiens
tgtttccatctataa

SEQ ID NO: 933692 - DNA, 15 bp, Homo sapiens
atgtttccatctata

SEQ ID NO: 933693 - DNA, 15 bp, Homo sapiens
tatgtttccatctat

SEQ ID NO: 933694 - DNA, 15 bp, Homo sapiens
gtatgtttccatcta

SEQ ID NO: 933695 - DNA, 15 bp, Homo sapiens
tgtatgtttccatct

SEQ ID NO: 933696 - DNA, 15 bp, Homo sapiens
ctgtatgtttccatc

SEQ ID NO: 933697 - DNA, 15 bp, Homo sapiens
actgtatgtttccat

SEQ ID NO: 933698 - DNA, 15 bp, Homo sapiens
cactgtatgtttcca

SEQ ID NO: 933699 - DNA, 15 bp, Homo sapiens
acactgtatgtttcc

SEQ ID NO: 933700 - DNA, 15 bp, Homo sapiens
cacactgtatgtttc

SEQ ID NO: 933701 - DNA, 15 bp, Homo sapiens
acacactgtatgttt

SEQ ID NO: 933702 - DNA, 15 bp, Homo sapiens
gacacactgtatgtt

SEQ ID NO: 933703 - DNA, 15 bp, Homo sapiens
ggacacactgtatgt

SEQ ID NO: 933704 - DNA, 15 bp, Homo sapiens
gggacacactgtatg

SEQ ID NO: 933705 - DNA, 15 bp, Homo sapiens
ggggacacactgtat

SEQ ID NO: 933706 - DNA, 15 bp, Homo sapiens
tggggacacactgta

SEQ ID NO: 933707 - DNA, 15 bp, Homo sapiens
atggggacacactgt

SEQ ID NO: 933708 - DNA, 15 bp, Homo sapiens
gatggggacacactg

SEQ ID NO: 933709 - DNA, 15 bp, Homo sapiens
tgatggggacacact

SEQ ID NO: 933710 - DNA, 15 bp, Homo sapiens
atgatggggacacac

SEQ ID NO: 933711 - DNA, 15 bp, Homo sapiens
aatgatggggacaca

SEQ ID NO: 933712 - DNA, 15 bp, Homo sapiens
gaatgatggggacac

SEQ ID NO: 933713 - DNA, 15 bp, Homo sapiens
agaatgatggggaca

SEQ ID NO: 933714 - DNA, 15 bp, Homo sapiens
gagaatgatggggac

SEQ ID NO: 933715 - DNA, 15 bp, Homo sapiens
tgagaatgatgggga

SEQ ID NO: 933716 - DNA, 15 bp, Homo sapiens
gtgagaatgatgggg

SEQ ID NO: 933717 - DNA, 15 bp, Homo sapiens
ggtgagaatgatggg

SEQ ID NO: 933718 - DNA, 15 bp, Homo sapiens
tggtgagaatgatgg

SEQ ID NO: 933719 - DNA, 15 bp, Homo sapiens
atggtgagaatgatg

SEQ ID NO: 933720 - DNA, 15 bp, Homo sapiens
tatggtgagaatgat

SEQ ID NO: 933721 - DNA, 15 bp, Homo sapiens
ctatggtgagaatga

SEQ ID NO: 933722 - DNA, 15 bp, Homo sapiens
cctatggtgagaatg

SEQ ID NO: 933723 - DNA, 15 bp, Homo sapiens
tcctatggtgagaat

SEQ ID NO: 933724 - DNA, 15 bp, Homo sapiens
gtcctatggtgagaa

SEQ ID NO: 933725 - DNA, 15 bp, Homo sapiens
tgtcctatggtgaga

SEQ ID NO: 933726 - DNA, 15 bp, Homo sapiens
ctgtcctatggtgag

SEQ ID NO: 933727 - DNA, 15 bp, Homo sapiens
gctgtcctatggtga

SEQ ID NO: 933728 - DNA, 15 bp, Homo sapiens
agctgtcctatggtg

SEQ ID NO: 933729 - DNA, 15 bp, Homo sapiens
tagctgtcctatggt

SEQ ID NO: 933730 - DNA, 15 bp, Homo sapiens
ctagctgtcctatgg

SEQ ID NO: 933731 - DNA, 15 bp, Homo sapiens
cctagctgtcctatg

SEQ ID NO: 933732 - DNA, 15 bp, Homo sapiens
tcctagctgtcctat

SEQ ID NO: 933733 - DNA, 15 bp, Homo sapiens
ttcctagctgtccta

SEQ ID NO: 933734 - DNA, 15 bp, Homo sapiens
gttcctagctgtcct

SEQ ID NO: 933735 - DNA, 15 bp, Homo sapiens
agttcctagctgtcc

SEQ ID NO: 933736 - DNA, 15 bp, Homo sapiens
gagttcctagctgtc

SEQ ID NO: 933737 - DNA, 15 bp, Homo sapiens
ggagttcctagctgt

SEQ ID NO: 933738 - DNA, 15 bp, Homo sapiens
aggagttcctagctg

SEQ ID NO: 933739 - DNA, 15 bp, Homo sapiens
aaggagttcctagct

SEQ ID NO: 933740 - DNA, 15 bp, Homo sapiens
aaaggagttcctagc

SEQ ID NO: 933741 - DNA, 15 bp, Homo sapiens
gaaaggagttcctag

SEQ ID NO: 933742 - DNA, 15 bp, Homo sapiens
agaaaggagttccta

SEQ ID NO: 933743 - DNA, 15 bp, Homo sapiens
tagaaaggagttcct

SEQ ID NO: 933744 - DNA, 15 bp, Homo sapiens
ctagaaaggagttcc

SEQ ID NO: 933745 - DNA, 15 bp, Homo sapiens
actagaaaggagttc

SEQ ID NO: 933746 - DNA, 15 bp, Homo sapiens
cactagaaaggagtt

SEQ ID NO: 933747 - DNA, 15 bp, Homo sapiens
ccactagaaaggagt

SEQ ID NO: 933748 - DNA, 15 bp, Homo sapiens
gccactagaaaggag

SEQ ID NO: 933749 - DNA, 15 bp, Homo sapiens
tgccactagaaagga

SEQ ID NO: 933750 - DNA, 15 bp, Homo sapiens
atgccactagaaagg

SEQ ID NO: 933751 - DNA, 15 bp, Homo sapiens
tatgccactagaaag

SEQ ID NO: 933752 - DNA, 15 bp, Homo sapiens
gtatgccactagaaa

SEQ ID NO: 933753 - DNA, 15 bp, Homo sapiens
tgtatgccactagaa

SEQ ID NO: 933754 - DNA, 15 bp, Homo sapiens
atgtatgccactaga

SEQ ID NO: 933755 - DNA, 15 bp, Homo sapiens
tatgtatgccactag

SEQ ID NO: 933756 - DNA, 15 bp, Homo sapiens
atatgtatgccacta

SEQ ID NO: 933757 - DNA, 15 bp, Homo sapiens
aatatgtatgccact

SEQ ID NO: 933758 - DNA, 15 bp, Homo sapiens
caatatgtatgccac

SEQ ID NO: 933759 - DNA, 15 bp, Homo sapiens
acaatatgtatgcca

SEQ ID NO: 933760 - DNA, 15 bp, Homo sapiens
gacaatatgtatgcc

SEQ ID NO: 933761 - DNA, 15 bp, Homo sapiens
agacaatatgtatgc

SEQ ID NO: 933762 - DNA, 15 bp, Homo sapiens
tagacaatatgtatg

SEQ ID NO: 933763 - DNA, 15 bp, Homo sapiens
ctagacaatatgtat

SEQ ID NO: 933764 - DNA, 15 bp, Homo sapiens
actagacaatatgta

SEQ ID NO: 933765 - DNA, 15 bp, Homo sapiens
tactagacaatatgt

SEQ ID NO: 933766 - DNA, 15 bp, Homo sapiens
atactagacaatatg

SEQ ID NO: 933767 - DNA, 15 bp, Homo sapiens
aatactagacaatat

SEQ ID NO: 933768 - DNA, 15 bp, Homo sapiens
caatactagacaata

SEQ ID NO: 933769 - DNA, 15 bp, Homo sapiens
acaatactagacaat

SEQ ID NO: 933770 - DNA, 15 bp, Homo sapiens
tacaatactagacaa

SEQ ID NO: 933771 - DNA, 15 bp, Homo sapiens
ttacaatactagaca

SEQ ID NO: 933772 - DNA, 15 bp, Homo sapiens
cttacaatactagac

SEQ ID NO: 933773 - DNA, 15 bp, Homo sapiens
acttacaatactaga

SEQ ID NO: 933774 - DNA, 15 bp, Homo sapiens
aacttacaatactag

SEQ ID NO: 933775 - DNA, 15 bp, Homo sapiens
taacttacaatacta

SEQ ID NO: 933776 - DNA, 15 bp, Homo sapiens
gtaacttacaatact

SEQ ID NO: 933777 - DNA, 15 bp, Homo sapiens
ggtaacttacaatac

SEQ ID NO: 933778 - DNA, 15 bp, Homo sapiens
gggtaacttacaata

SEQ ID NO: 933779 - DNA, 15 bp, Homo sapiens
agggtaacttacaat

SEQ ID NO: 933780 - DNA, 15 bp, Homo sapiens
aagggtaacttacaa

SEQ ID NO: 933781 - DNA, 15 bp, Homo sapiens
aaagggtaacttaca

SEQ ID NO: 933782 - DNA, 15 bp, Homo sapiens
aaaagggtaacttac

SEQ ID NO: 933783 - DNA, 15 bp, Homo sapiens
taaaagggtaactta

SEQ ID NO: 933784 - DNA, 15 bp, Homo sapiens
ataaaagggtaactt

SEQ ID NO: 933785 - DNA, 15 bp, Homo sapiens
tataaaagggtaact

SEQ ID NO: 933786 - DNA, 15 bp, Homo sapiens
atataaaagggtaac

SEQ ID NO: 933787 - DNA, 15 bp, Homo sapiens
gatataaaagggtaa

SEQ ID NO: 933788 - DNA, 15 bp, Homo sapiens
ttttttaccttattt

SEQ ID NO: 933789 - DNA, 15 bp, Homo sapiens
attttttaccttatt

SEQ ID NO: 933790 - DNA, 15 bp, Homo sapiens
aattttttaccttat

SEQ ID NO: 933791 - DNA, 15 bp, Homo sapiens
caattttttacctta

SEQ ID NO: 933792 - DNA, 15 bp, Homo sapiens
tcaattttttacctt

SEQ ID NO: 933793 - DNA, 15 bp, Homo sapiens
gtcaattttttacct

SEQ ID NO: 933794 - DNA, 15 bp, Homo sapiens
agtcaattttttacc

SEQ ID NO: 933795 - DNA, 15 bp, Homo sapiens
tagtcaattttttac

SEQ ID NO: 933796 - DNA, 15 bp, Homo sapiens
ctagtcaatttttta

SEQ ID NO: 933797 - DNA, 15 bp, Homo sapiens
actagtcaatttttt

SEQ ID NO: 933798 - DNA, 15 bp, Homo sapiens
tactagtcaattttt

SEQ ID NO: 933799 - DNA, 15 bp, Homo sapiens
atactagtcaatttt

SEQ ID NO: 933800 - DNA, 15 bp, Homo sapiens
aatactagtcaattt

SEQ ID NO: 933801 - DNA, 15 bp, Homo sapiens
taatactagtcaatt

SEQ ID NO: 933802 - DNA, 15 bp, Homo sapiens
ctaatactagtcaat

SEQ ID NO: 933803 - DNA, 15 bp, Homo sapiens
tctaatactagtcaa

SEQ ID NO: 933804 - DNA, 15 bp, Homo sapiens
ctctaatactagtca

SEQ ID NO: 933805 - DNA, 15 bp, Homo sapiens
tctctaatactagtc

SEQ ID NO: 933806 - DNA, 15 bp, Homo sapiens
gtctctaatactagt

SEQ ID NO: 933807 - DNA, 15 bp, Homo sapiens
tgtctctaatactag

SEQ ID NO: 933808 - DNA, 15 bp, Homo sapiens
ttgtctctaatacta

SEQ ID NO: 933809 - DNA, 15 bp, Homo sapiens
cttgtctctaatact

SEQ ID NO: 933810 - DNA, 15 bp, Homo sapiens
tcttgtctctaatac

SEQ ID NO: 933811 - DNA, 15 bp, Homo sapiens
ttcttgtctctaata

SEQ ID NO: 933812 - DNA, 15 bp, Homo sapiens
attcttgtctctaat

SEQ ID NO: 933813 - DNA, 15 bp, Homo sapiens
aattcttgtctctaa

SEQ ID NO: 933814 - DNA, 15 bp, Homo sapiens
caattcttgtctcta

SEQ ID NO: 933815 - DNA, 15 bp, Homo sapiens
ccaattcttgtctct

SEQ ID NO: 933816 - DNA, 15 bp, Homo sapiens
tccaattcttgtctc

SEQ ID NO: 933817 - DNA, 15 bp, Homo sapiens
ctccaattcttgtct

SEQ ID NO: 933818 - DNA, 15 bp, Homo sapiens
tctccaattcttgtc

SEQ ID NO: 933819 - DNA, 15 bp, Homo sapiens
ttctccaattcttgt

SEQ ID NO: 933820 - DNA, 15 bp, Homo sapiens
attctccaattcttg

SEQ ID NO: 933821 - DNA, 15 bp, Homo sapiens
tattctccaattctt

SEQ ID NO: 933822 - DNA, 15 bp, Homo sapiens
atattctccaattct

SEQ ID NO: 933823 - DNA, 15 bp, Homo sapiens
tatattctccaattc

SEQ ID NO: 933824 - DNA, 15 bp, Homo sapiens
ctatattctccaatt

SEQ ID NO: 933825 - DNA, 15 bp, Homo sapiens
actatattctccaat

SEQ ID NO: 933826 - DNA, 15 bp, Homo sapiens
aactatattctccaa

SEQ ID NO: 933827 - DNA, 15 bp, Homo sapiens
gaactatattctcca

SEQ ID NO: 933828 - DNA, 15 bp, Homo sapiens
agaactatattctcc

SEQ ID NO: 933829 - DNA, 15 bp, Homo sapiens
gagaactatattctc

SEQ ID NO: 933830 - DNA, 15 bp, Homo sapiens
agagaactatattct

SEQ ID NO: 933831 - DNA, 15 bp, Homo sapiens
tagagaactatattc

SEQ ID NO: 933832 - DNA, 15 bp, Homo sapiens
ctagagaactatatt

SEQ ID NO: 933833 - DNA, 15 bp, Homo sapiens
actagagaactatat

SEQ ID NO: 933834 - DNA, 15 bp, Homo sapiens
tactagagaactata

SEQ ID NO: 933835 - DNA, 15 bp, Homo sapiens
atactagagaactat

SEQ ID NO: 933836 - DNA, 15 bp, Homo sapiens
aatactagagaacta

SEQ ID NO: 933837 - DNA, 15 bp, Homo sapiens
gaatactagagaact

SEQ ID NO: 933838 - DNA, 15 bp, Homo sapiens
cgaatactagagaac

SEQ ID NO: 933839 - DNA, 15 bp, Homo sapiens
tcgaatactagagaa

SEQ ID NO: 933840 - DNA, 15 bp, Homo sapiens
ctcgaatactagaga

SEQ ID NO: 933841 - DNA, 15 bp, Homo sapiens
tctcgaatactagag

SEQ ID NO: 933842 - DNA, 15 bp, Homo sapiens
ttctcgaatactaga

SEQ ID NO: 933843 - DNA, 15 bp, Homo sapiens
tttctcgaatactag

SEQ ID NO: 933844 - DNA, 15 bp, Homo sapiens
ctttctcgaatacta

SEQ ID NO: 933845 - DNA, 15 bp, Homo sapiens
actttctcgaatact

SEQ ID NO: 933846 - DNA, 15 bp, Homo sapiens
gactttctcgaatac

SEQ ID NO: 933847 - DNA, 15 bp, Homo sapiens
cgactttctcgaata

SEQ ID NO: 933848 - DNA, 15 bp, Homo sapiens
acgactttctcgaat

SEQ ID NO: 933849 - DNA, 15 bp, Homo sapiens
aacgactttctcgaa

SEQ ID NO: 933850 - DNA, 15 bp, Homo sapiens
aaacgactttctcga

SEQ ID NO: 933851 - DNA, 15 bp, Homo sapiens
aaaacgactttctcg

SEQ ID NO: 933852 - DNA, 15 bp, Homo sapiens
caaaacgactttctc

SEQ ID NO: 933853 - DNA, 15 bp, Homo sapiens
tcaaaacgactttct

SEQ ID NO: 933854 - DNA, 15 bp, Homo sapiens
atcaaaacgactttc

SEQ ID NO: 933855 - DNA, 15 bp, Homo sapiens
tatcaaaacgacttt

SEQ ID NO: 933856 - DNA, 15 bp, Homo sapiens
ctatcaaaacgactt

SEQ ID NO: 933857 - DNA, 15 bp, Homo sapiens
cctatcaaaacgact

SEQ ID NO: 933858 - DNA, 15 bp, Homo sapiens
tcctatcaaaacgac

SEQ ID NO: 933859 - DNA, 15 bp, Homo sapiens
gtcctatcaaaacga

SEQ ID NO: 933860 - DNA, 15 bp, Homo sapiens
tgtcctatcaaaacg

SEQ ID NO: 933861 - DNA, 15 bp, Homo sapiens
ttgtcctatcaaaac

SEQ ID NO: 933862 - DNA, 15 bp, Homo sapiens
gttgtcctatcaaaa

SEQ ID NO: 933863 - DNA, 15 bp, Homo sapiens
agttgtcctatcaaa

SEQ ID NO: 933864 - DNA, 15 bp, Homo sapiens
tagttgtcctatcaa

SEQ ID NO: 933865 - DNA, 15 bp, Homo sapiens
ttagttgtcctatca

SEQ ID NO: 933866 - DNA, 15 bp, Homo sapiens
attagttgtcctatc

SEQ ID NO: 933867 - DNA, 15 bp, Homo sapiens
gattagttgtcctat

SEQ ID NO: 933868 - DNA, 15 bp, Homo sapiens
agattagttgtccta

SEQ ID NO: 933869 - DNA, 15 bp, Homo sapiens
aagattagttgtcct

SEQ ID NO: 933870 - DNA, 15 bp, Homo sapiens
taagattagttgtcc

SEQ ID NO: 933871 - DNA, 15 bp, Homo sapiens
ctaagattagttgtc

SEQ ID NO: 933872 - DNA, 15 bp, Homo sapiens
actaagattagttgt

SEQ ID NO: 933873 - DNA, 15 bp, Homo sapiens
cactaagattagttg

SEQ ID NO: 933874 - DNA, 15 bp, Homo sapiens
tcactaagattagtt

SEQ ID NO: 933875 - DNA, 15 bp, Homo sapiens
ctcactaagattagt

SEQ ID NO: 933876 - DNA, 15 bp, Homo sapiens
tctcactaagattag

SEQ ID NO: 933877 - DNA, 15 bp, Homo sapiens
ttctcactaagatta

SEQ ID NO: 933878 - DNA, 15 bp, Homo sapiens
attctcactaagatt

SEQ ID NO: 933879 - DNA, 15 bp, Homo sapiens
aattctcactaagat

SEQ ID NO: 933880 - DNA, 15 bp, Homo sapiens
aaattctcactaaga

SEQ ID NO: 933881 - DNA, 15 bp, Homo sapiens
caaattctcactaag

SEQ ID NO: 933882 - DNA, 15 bp, Homo sapiens
ccaaattctcactaa

SEQ ID NO: 933883 - DNA, 15 bp, Homo sapiens
gccaaattctcacta

SEQ ID NO: 933884 - DNA, 15 bp, Homo sapiens
agccaaattctcact

SEQ ID NO: 933885 - DNA, 15 bp, Homo sapiens
aagccaaattctcac

SEQ ID NO: 933886 - DNA, 15 bp, Homo sapiens
aaagccaaattctca

SEQ ID NO: 933887 - DNA, 15 bp, Homo sapiens
taaagccaaattctc

SEQ ID NO: 933888 - DNA, 15 bp, Homo sapiens
ataaagccaaattct

SEQ ID NO: 933889 - DNA, 15 bp, Homo sapiens
aataaagccaaattc

SEQ ID NO: 933890 - DNA, 15 bp, Homo sapiens
aaataaagccaaatt

SEQ ID NO: 933891 - DNA, 15 bp, Homo sapiens
gaaataaagccaaat

SEQ ID NO: 933892 - DNA, 15 bp, Homo sapiens
tgaaataaagccaaa

SEQ ID NO: 933893 - DNA, 15 bp, Homo sapiens
atgaaataaagccaa

SEQ ID NO: 933894 - DNA, 15 bp, Homo sapiens
tatgaaataaagcca

SEQ ID NO: 933895 - DNA, 15 bp, Homo sapiens
atatgaaataaagcc

SEQ ID NO: 933896 - DNA, 15 bp, Homo sapiens
aatatgaaataaagc

SEQ ID NO: 933897 - DNA, 15 bp, Homo sapiens
aaatatgaaataaag

SEQ ID NO: 933898 - DNA, 15 bp, Homo sapiens
aaaatatgaaataaa

SEQ ID NO: 933899 - DNA, 15 bp, Homo sapiens
aaaaatatgaaataa

SEQ ID NO: 933900 - DNA, 15 bp, Homo sapiens
aaaaaatatgaaata

SEQ ID NO: 933901 - DNA, 15 bp, Homo sapiens
aaaaaaatatgaaat

SEQ ID NO: 933902 - DNA, 15 bp, Homo sapiens
taaaaaaatatgaaa

SEQ ID NO: 933903 - DNA, 15 bp, Homo sapiens
ttaaaaaaatatgaa

SEQ ID NO: 933904 - DNA, 15 bp, Homo sapiens
attaaaaaaatatga

SEQ ID NO: 933905 - DNA, 15 bp, Homo sapiens
aattaaaaaaatatg

SEQ ID NO: 933906 - DNA, 15 bp, Homo sapiens
aaattaaaaaaatat

SEQ ID NO: 933907 - DNA, 15 bp, Homo sapiens
aaaattaaaaaaata

SEQ ID NO: 933908 - DNA, 15 bp, Homo sapiens
aaaaattaaaaaaat

SEQ ID NO: 933909 - DNA, 15 bp, Homo sapiens
aaaaaattaaaaaaa

SEQ ID NO: 933910 - DNA, 15 bp, Homo sapiens
caaaaaattaaaaaa

SEQ ID NO: 933911 - DNA, 15 bp, Homo sapiens
tcaaaaaattaaaaa

SEQ ID NO: 933912 - DNA, 15 bp, Homo sapiens
ctcaaaaaattaaaa

SEQ ID NO: 933913 - DNA, 15 bp, Homo sapiens
tctcaaaaaattaaa

SEQ ID NO: 933914 - DNA, 15 bp, Homo sapiens
atctcaaaaaattaa

SEQ ID NO: 933915 - DNA, 15 bp, Homo sapiens
catctcaaaaaatta

SEQ ID NO: 933916 - DNA, 15 bp, Homo sapiens
tcatctcaaaaaatt

SEQ ID NO: 933917 - DNA, 15 bp, Homo sapiens
gtcatctcaaaaaat

SEQ ID NO: 933918 - DNA, 15 bp, Homo sapiens
cgtcatctcaaaaaa

SEQ ID NO: 933919 - DNA, 15 bp, Homo sapiens
acgtcatctcaaaaa

SEQ ID NO: 933920 - DNA, 15 bp, Homo sapiens
gacgtcatctcaaaa

SEQ ID NO: 933921 - DNA, 15 bp, Homo sapiens
agacgtcatctcaaa

SEQ ID NO: 933922 - DNA, 15 bp, Homo sapiens
aagacgtcatctcaa

SEQ ID NO: 933923 - DNA, 15 bp, Homo sapiens
taagacgtcatctca

SEQ ID NO: 933924 - DNA, 15 bp, Homo sapiens
gtaagacgtcatctc

SEQ ID NO: 933925 - DNA, 15 bp, Homo sapiens
agtaagacgtcatct

SEQ ID NO: 933926 - DNA, 15 bp, Homo sapiens
tagtaagacgtcatc

SEQ ID NO: 933927 - DNA, 15 bp, Homo sapiens
atagtaagacgtcat

SEQ ID NO: 933928 - DNA, 15 bp, Homo sapiens
catagtaagacgtca

SEQ ID NO: 933929 - DNA, 15 bp, Homo sapiens
acatagtaagacgtc

SEQ ID NO: 933930 - DNA, 15 bp, Homo sapiens
aacatagtaagacgt

SEQ ID NO: 933931 - DNA, 15 bp, Homo sapiens
caacatagtaagacg

SEQ ID NO: 933932 - DNA, 15 bp, Homo sapiens
gcaacatagtaagac

SEQ ID NO: 933933 - DNA, 15 bp, Homo sapiens
ggcaacatagtaaga

SEQ ID NO: 933934 - DNA, 15 bp, Homo sapiens
gggcaacatagtaag

SEQ ID NO: 933935 - DNA, 15 bp, Homo sapiens
agggcaacatagtaa

SEQ ID NO: 933936 - DNA, 15 bp, Homo sapiens
cagggcaacatagta

SEQ ID NO: 933937 - DNA, 15 bp, Homo sapiens
ccagggcaacatagt

SEQ ID NO: 933938 - DNA, 15 bp, Homo sapiens
gccagggcaacatag

SEQ ID NO: 933939 - DNA, 15 bp, Homo sapiens
agccagggcaacata

SEQ ID NO: 933940 - DNA, 15 bp, Homo sapiens
cagccagggcaacat

SEQ ID NO: 933941 - DNA, 15 bp, Homo sapiens
ccagccagggcaaca

SEQ ID NO: 933942 - DNA, 15 bp, Homo sapiens
accagccagggcaac

SEQ ID NO: 933943 - DNA, 15 bp, Homo sapiens
gaccagccagggcaa

SEQ ID NO: 933944 - DNA, 15 bp, Homo sapiens
agaccagccagggca

SEQ ID NO: 933945 - DNA, 15 bp, Homo sapiens
aagaccagccagggc

SEQ ID NO: 933946 - DNA, 15 bp, Homo sapiens
aaagaccagccaggg

SEQ ID NO: 933947 - DNA, 15 bp, Homo sapiens
caaagaccagccagg

SEQ ID NO: 933948 - DNA, 15 bp, Homo sapiens
tcaaagaccagccag

SEQ ID NO: 933949 - DNA, 15 bp, Homo sapiens
ttcaaagaccagcca

SEQ ID NO: 933950 - DNA, 15 bp, Homo sapiens
gttcaaagaccagcc

SEQ ID NO: 933951 - DNA, 15 bp, Homo sapiens
agttcaaagaccagc

SEQ ID NO: 933952 - DNA, 15 bp, Homo sapiens
gagttcaaagaccag

SEQ ID NO: 933953 - DNA, 15 bp, Homo sapiens
agagttcaaagacca

SEQ ID NO: 933954 - DNA, 15 bp, Homo sapiens
cagagttcaaagacc

SEQ ID NO: 933955 - DNA, 15 bp, Homo sapiens
ccagagttcaaagac

SEQ ID NO: 933956 - DNA, 15 bp, Homo sapiens
cccagagttcaaaga

SEQ ID NO: 933957 - DNA, 15 bp, Homo sapiens
gcccagagttcaaag

SEQ ID NO: 933958 - DNA, 15 bp, Homo sapiens
agcccagagttcaaa

SEQ ID NO: 933959 - DNA, 15 bp, Homo sapiens
gagcccagagttcaa

SEQ ID NO: 933960 - DNA, 15 bp, Homo sapiens
tgagcccagagttca

SEQ ID NO: 933961 - DNA, 15 bp, Homo sapiens
ttgagcccagagttc

SEQ ID NO: 933962 - DNA, 15 bp, Homo sapiens
tttgagcccagagtt

SEQ ID NO: 933963 - DNA, 15 bp, Homo sapiens
gtttgagcccagagt

SEQ ID NO: 933964 - DNA, 15 bp, Homo sapiens
tgtttgagcccagag

SEQ ID NO: 933965 - DNA, 15 bp, Homo sapiens
ttgtttgagcccaga

SEQ ID NO: 933966 - DNA, 15 bp, Homo sapiens
attgtttgagcccag

SEQ ID NO: 933967 - DNA, 15 bp, Homo sapiens
gattgtttgagccca

SEQ ID NO: 933968 - DNA, 15 bp, Homo sapiens
agattgtttgagccc

SEQ ID NO: 933969 - DNA, 15 bp, Homo sapiens
aagattgtttgagcc

SEQ ID NO: 933970 - DNA, 15 bp, Homo sapiens
gaagattgtttgagc

SEQ ID NO: 933971 - DNA, 15 bp, Homo sapiens
ggaagattgtttgag

SEQ ID NO: 933972 - DNA, 15 bp, Homo sapiens
aggaagattgtttga

SEQ ID NO: 933973 - DNA, 15 bp, Homo sapiens
caggaagattgtttg

SEQ ID NO: 933974 - DNA, 15 bp, Homo sapiens
gcaggaagattgttt

SEQ ID NO: 933975 - DNA, 15 bp, Homo sapiens
ggcaggaagattgtt

SEQ ID NO: 933976 - DNA, 15 bp, Homo sapiens
aggcaggaagattgt

SEQ ID NO: 933977 - DNA, 15 bp, Homo sapiens
gaggcaggaagattg

SEQ ID NO: 933978 - DNA, 15 bp, Homo sapiens
cgaggcaggaagatt

SEQ ID NO: 933979 - DNA, 15 bp, Homo sapiens
ccgaggcaggaagat

SEQ ID NO: 933980 - DNA, 15 bp, Homo sapiens
gccgaggcaggaaga

SEQ ID NO: 933981 - DNA, 15 bp, Homo sapiens
ggccgaggcaggaag

SEQ ID NO: 933982 - DNA, 15 bp, Homo sapiens
aggccgaggcaggaa

SEQ ID NO: 933983 - DNA, 15 bp, Homo sapiens
gaggccgaggcagga

SEQ ID NO: 933984 - DNA, 15 bp, Homo sapiens
ggaggccgaggcagg

SEQ ID NO: 933985 - DNA, 15 bp, Homo sapiens
gggaggccgaggcag

SEQ ID NO: 933986 - DNA, 15 bp, Homo sapiens
tgggaggccgaggca

SEQ ID NO: 933987 - DNA, 15 bp, Homo sapiens
tcagcactttgggag

SEQ ID NO: 933988 - DNA, 15 bp, Homo sapiens
ctcagcactttggga

SEQ ID NO: 933989 - DNA, 15 bp, Homo sapiens
tctcagcactttggg

SEQ ID NO: 933990 - DNA, 15 bp, Homo sapiens
atctcagcactttgg

SEQ ID NO: 933991 - DNA, 15 bp, Homo sapiens
aatctcagcactttg

SEQ ID NO: 933992 - DNA, 15 bp, Homo sapiens
ataatctcagcactt

SEQ ID NO: 933993 - DNA, 15 bp, Homo sapiens
tataatctcagcact

SEQ ID NO: 933994 - DNA, 15 bp, Homo sapiens
ttataatctcagcac

SEQ ID NO: 933995 - DNA, 15 bp, Homo sapiens
cttataatctcagca

SEQ ID NO: 933996 - DNA, 15 bp, Homo sapiens
gcttataatctcagc

SEQ ID NO: 933997 - DNA, 15 bp, Homo sapiens
tgcttataatctcag

SEQ ID NO: 933998 - DNA, 15 bp, Homo sapiens
atgcttataatctca

SEQ ID NO: 933999 - DNA, 15 bp, Homo sapiens
catgcttataatctc

SEQ ID NO: 934000 - DNA, 15 bp, Homo sapiens
tcatgcttataatct

SEQ ID NO: 934001 - DNA, 15 bp, Homo sapiens
ctcatgcttataatc

SEQ ID NO: 934002 - DNA, 15 bp, Homo sapiens
gctcatgcttataat

SEQ ID NO: 934003 - DNA, 15 bp, Homo sapiens
ggctcatgcttataa

SEQ ID NO: 934004 - DNA, 15 bp, Homo sapiens
tggctcatgcttata

SEQ ID NO: 934005 - DNA, 15 bp, Homo sapiens
atggctcatgcttat

SEQ ID NO: 934006 - DNA, 15 bp, Homo sapiens
gatggctcatgctta

SEQ ID NO: 934007 - DNA, 15 bp, Homo sapiens
agatggctcatgctt

SEQ ID NO: 934008 - DNA, 15 bp, Homo sapiens
gagatggctcatgct

SEQ ID NO: 934009 - DNA, 15 bp, Homo sapiens
ggagatggctcatgc

SEQ ID NO: 934010 - DNA, 15 bp, Homo sapiens
gggagatggctcatg

SEQ ID NO: 934011 - DNA, 15 bp, Homo sapiens
ggggagatggctcat

SEQ ID NO: 934012 - DNA, 15 bp, Homo sapiens
tggggagatggctca

SEQ ID NO: 934013 - DNA, 15 bp, Homo sapiens
ctggggagatggctc

SEQ ID NO: 934014 - DNA, 15 bp, Homo sapiens
cctggggagatggct

SEQ ID NO: 934015 - DNA, 15 bp, Homo sapiens
tcctggggagatggc

SEQ ID NO: 934016 - DNA, 15 bp, Homo sapiens
ttcctggggagatgg

SEQ ID NO: 934017 - DNA, 15 bp, Homo sapiens
attcctggggagatg

SEQ ID NO: 934018 - DNA, 15 bp, Homo sapiens
aattcctggggagat

SEQ ID NO: 934019 - DNA, 15 bp, Homo sapiens
aaattcctggggaga

SEQ ID NO: 934020 - DNA, 15 bp, Homo sapiens
caaattcctggggag

SEQ ID NO: 934021 - DNA, 15 bp, Homo sapiens
tcaaattcctgggga

SEQ ID NO: 934022 - DNA, 15 bp, Homo sapiens
gtcaaattcctgggg

SEQ ID NO: 934023 - DNA, 15 bp, Homo sapiens
agtcaaattcctggg

SEQ ID NO: 934024 - DNA, 15 bp, Homo sapiens
aagtcaaattcctgg

SEQ ID NO: 934025 - DNA, 15 bp, Homo sapiens
aaagtcaaattcctg

SEQ ID NO: 934026 - DNA, 15 bp, Homo sapiens
taaagtcaaattcct

SEQ ID NO: 934027 - DNA, 15 bp, Homo sapiens
ttaaagtcaaattcc

SEQ ID NO: 934028 - DNA, 15 bp, Homo sapiens
tttaaagtcaaattc

SEQ ID NO: 934029 - DNA, 15 bp, Homo sapiens
gtttaaagtcaaatt

SEQ ID NO: 934030 - DNA, 15 bp, Homo sapiens
ggtttaaagtcaaat

SEQ ID NO: 934031 - DNA, 15 bp, Homo sapiens
tggtttaaagtcaaa

SEQ ID NO: 934032 - DNA, 15 bp, Homo sapiens
atggtttaaagtcaa

SEQ ID NO: 934033 - DNA, 15 bp, Homo sapiens
catggtttaaagtca

SEQ ID NO: 934034 - DNA, 15 bp, Homo sapiens
ccatggtttaaagtc

SEQ ID NO: 934035 - DNA, 15 bp, Homo sapiens
accatggtttaaagt

SEQ ID NO: 934036 - DNA, 15 bp, Homo sapiens
aaccatggtttaaag

SEQ ID NO: 934037 - DNA, 15 bp, Homo sapiens
gaaccatggtttaaa

SEQ ID NO: 934038 - DNA, 15 bp, Homo sapiens
agaaccatggtttaa

SEQ ID NO: 934039 - DNA, 15 bp, Homo sapiens
gagaaccatggttta

SEQ ID NO: 934040 - DNA, 15 bp, Homo sapiens
tgagaaccatggttt

SEQ ID NO: 934041 - DNA, 15 bp, Homo sapiens
ttgagaaccatggtt

SEQ ID NO: 934042 - DNA, 15 bp, Homo sapiens
gttgagaaccatggt

SEQ ID NO: 934043 - DNA, 15 bp, Homo sapiens
ggttgagaaccatgg

SEQ ID NO: 934044 - DNA, 15 bp, Homo sapiens
gggttgagaaccatg

SEQ ID NO: 934045 - DNA, 15 bp, Homo sapiens
agggttgagaaccat

SEQ ID NO: 934046 - DNA, 15 bp, Homo sapiens
aagggttgagaacca

SEQ ID NO: 934047 - DNA, 15 bp, Homo sapiens
aaagggttgagaacc

SEQ ID NO: 934048 - DNA, 15 bp, Homo sapiens
gaaagggttgagaac

SEQ ID NO: 934049 - DNA, 15 bp, Homo sapiens
tgaaagggttgagaa

SEQ ID NO: 934050 - DNA, 15 bp, Homo sapiens
ctgaaagggttgaga

SEQ ID NO: 934051 - DNA, 15 bp, Homo sapiens
tctgaaagggttgag

SEQ ID NO: 934052 - DNA, 15 bp, Homo sapiens
atctgaaagggttga

SEQ ID NO: 934053 - DNA, 15 bp, Homo sapiens
aatctgaaagggttg

SEQ ID NO: 934054 - DNA, 15 bp, Homo sapiens
gaatctgaaagggtt

SEQ ID NO: 934055 - DNA, 15 bp, Homo sapiens
tgaatctgaaagggt

SEQ ID NO: 934056 - DNA, 15 bp, Homo sapiens
ttgaatctgaaaggg

SEQ ID NO: 934057 - DNA, 15 bp, Homo sapiens
gttgaatctgaaagg

SEQ ID NO: 934058 - DNA, 15 bp, Homo sapiens
tgttgaatctgaaag

SEQ ID NO: 934059 - DNA, 15 bp, Homo sapiens
atgttgaatctgaaa

SEQ ID NO: 934060 - DNA, 15 bp, Homo sapiens
aatgttgaatctgaa

SEQ ID NO: 934061 - DNA, 15 bp, Homo sapiens
gaatgttgaatctga

SEQ ID NO: 934062 - DNA, 15 bp, Homo sapiens
ggaatgttgaatctg

SEQ ID NO: 934063 - DNA, 15 bp, Homo sapiens
gggaatgttgaatct

SEQ ID NO: 934064 - DNA, 15 bp, Homo sapiens
agggaatgttgaatc

SEQ ID NO: 934065 - DNA, 15 bp, Homo sapiens
aagggaatgttgaat

SEQ ID NO: 934066 - DNA, 15 bp, Homo sapiens
aaagggaatgttgaa

SEQ ID NO: 934067 - DNA, 15 bp, Homo sapiens
taaagggaatgttga

SEQ ID NO: 934068 - DNA, 15 bp, Homo sapiens
ttaaagggaatgttg

SEQ ID NO: 934069 - DNA, 15 bp, Homo sapiens
attaaagggaatgtt

SEQ ID NO: 934070 - DNA, 15 bp, Homo sapiens
tattaaagggaatgt

SEQ ID NO: 934071 - DNA, 15 bp, Homo sapiens
ttattaaagggaatg

SEQ ID NO: 934072 - DNA, 15 bp, Homo sapiens
tttattaaagggaat

SEQ ID NO: 934073 - DNA, 15 bp, Homo sapiens
ttttattaaagggaa

SEQ ID NO: 934074 - DNA, 15 bp, Homo sapiens
tttttattaaaggga

SEQ ID NO: 934075 - DNA, 15 bp, Homo sapiens
ttttttattaaaggg

SEQ ID NO: 934076 - DNA, 15 bp, Homo sapiens
attttttattaaagg

SEQ ID NO: 934077 - DNA, 15 bp, Homo sapiens
tattttttattaaag

SEQ ID NO: 934078 - DNA, 15 bp, Homo sapiens
atattttttattaaa

SEQ ID NO: 934079 - DNA, 15 bp, Homo sapiens
tatattttttattaa

SEQ ID NO: 934080 - DNA, 15 bp, Homo sapiens
ttatattttttatta

SEQ ID NO: 934081 - DNA, 15 bp, Homo sapiens
attatattttttatt

SEQ ID NO: 934082 - DNA, 15 bp, Homo sapiens
cattatattttttat

SEQ ID NO: 934083 - DNA, 15 bp, Homo sapiens
acattatatttttta

SEQ ID NO: 934084 - DNA, 15 bp, Homo sapiens
aacattatatttttt

SEQ ID NO: 934085 - DNA, 15 bp, Homo sapiens
aaacattatattttt

SEQ ID NO: 934086 - DNA, 15 bp, Homo sapiens
gaaacattatatttt

SEQ ID NO: 934087 - DNA, 15 bp, Homo sapiens
tgaaacattatattt

SEQ ID NO: 934088 - DNA, 15 bp, Homo sapiens
atgaaacattatatt

SEQ ID NO: 934089 - DNA, 15 bp, Homo sapiens
tatgaaacattatat

SEQ ID NO: 934090 - DNA, 15 bp, Homo sapiens
ttatgaaacattata

SEQ ID NO: 934091 - DNA, 15 bp, Homo sapiens
attatgaaacattat

SEQ ID NO: 934092 - DNA, 15 bp, Homo sapiens
aattatgaaacatta

SEQ ID NO: 934093 - DNA, 15 bp, Homo sapiens
aaattatgaaacatt

SEQ ID NO: 934094 - DNA, 15 bp, Homo sapiens
gaaattatgaaacat

SEQ ID NO: 934095 - DNA, 15 bp, Homo sapiens
ggaaattatgaaaca

SEQ ID NO: 934096 - DNA, 15 bp, Homo sapiens
gggaaattatgaaac

SEQ ID NO: 934097 - DNA, 15 bp, Homo sapiens
ggggaaattatgaaa

SEQ ID NO: 934098 - DNA, 15 bp, Homo sapiens
aggggaaattatgaa

SEQ ID NO: 934099 - DNA, 15 bp, Homo sapiens
aaggggaaattatga

SEQ ID NO: 934100 - DNA, 15 bp, Homo sapiens
aaaggggaaattatg

SEQ ID NO: 934101 - DNA, 15 bp, Homo sapiens
taaaggggaaattat

SEQ ID NO: 934102 - DNA, 15 bp, Homo sapiens
gtaaaggggaaatta

SEQ ID NO: 934103 - DNA, 15 bp, Homo sapiens
agtaaaggggaaatt

SEQ ID NO: 934104 - DNA, 15 bp, Homo sapiens
tagtaaaggggaaat

SEQ ID NO: 934105 - DNA, 15 bp, Homo sapiens
atagtaaaggggaaa

SEQ ID NO: 934106 - DNA, 15 bp, Homo sapiens
aatagtaaaggggaa

SEQ ID NO: 934107 - DNA, 15 bp, Homo sapiens
taatagtaaagggga

SEQ ID NO: 934108 - DNA, 15 bp, Homo sapiens
ataatagtaaagggg

SEQ ID NO: 934109 - DNA, 15 bp, Homo sapiens
tataatagtaaaggg

SEQ ID NO: 934110 - DNA, 15 bp, Homo sapiens
ttataatagtaaagg

SEQ ID NO: 934111 - DNA, 15 bp, Homo sapiens
attataatagtaaag

SEQ ID NO: 934112 - DNA, 15 bp, Homo sapiens
aattataatagtaaa

SEQ ID NO: 934113 - DNA, 15 bp, Homo sapiens
caattataatagtaa

SEQ ID NO: 934114 - DNA, 15 bp, Homo sapiens
tcaattataatagta

SEQ ID NO: 934115 - DNA, 15 bp, Homo sapiens
ttcaattataatagt

SEQ ID NO: 934116 - DNA, 15 bp, Homo sapiens
tttcaattataatag

SEQ ID NO: 934117 - DNA, 15 bp, Homo sapiens
atttcaattataata

SEQ ID NO: 934118 - DNA, 15 bp, Homo sapiens
catttcaattataat

SEQ ID NO: 934119 - DNA, 15 bp, Homo sapiens
gcatttcaattataa

SEQ ID NO: 934120 - DNA, 15 bp, Homo sapiens
tgcatttcaattata

SEQ ID NO: 934121 - DNA, 15 bp, Homo sapiens
atgcatttcaattat

SEQ ID NO: 934122 - DNA, 15 bp, Homo sapiens
tatgcatttcaatta

SEQ ID NO: 934123 - DNA, 15 bp, Homo sapiens
ctatgcatttcaatt

SEQ ID NO: 934124 - DNA, 15 bp, Homo sapiens
actatgcatttcaat

SEQ ID NO: 934125 - DNA, 15 bp, Homo sapiens
aactatgcatttcaa

SEQ ID NO: 934126 - DNA, 15 bp, Homo sapiens
taactatgcatttca

SEQ ID NO: 934127 - DNA, 15 bp, Homo sapiens
ttaactatgcatttc

SEQ ID NO: 934128 - DNA, 15 bp, Homo sapiens
gttaactatgcattt

SEQ ID NO: 934129 - DNA, 15 bp, Homo sapiens
tgttaactatgcatt

SEQ ID NO: 934130 - DNA, 15 bp, Homo sapiens
atgttaactatgcat

SEQ ID NO: 934131 - DNA, 15 bp, Homo sapiens
tatgttaactatgca

SEQ ID NO: 934132 - DNA, 15 bp, Homo sapiens
ttatgttaactatgc

SEQ ID NO: 934133 - DNA, 15 bp, Homo sapiens
tttatgttaactatg

SEQ ID NO: 934134 - DNA, 15 bp, Homo sapiens
gtttatgttaactat

SEQ ID NO: 934135 - DNA, 15 bp, Homo sapiens
agtttatgttaacta

SEQ ID NO: 934136 - DNA, 15 bp, Homo sapiens
gagtttatgttaact

SEQ ID NO: 934137 - DNA, 15 bp, Homo sapiens
agagtttatgttaac

SEQ ID NO: 934138 - DNA, 15 bp, Homo sapiens
tagagtttatgttaa

SEQ ID NO: 934139 - DNA, 15 bp, Homo sapiens
gtagagtttatgtta

SEQ ID NO: 934140 - DNA, 15 bp, Homo sapiens
ggtagagtttatgtt

SEQ ID NO: 934141 - DNA, 15 bp, Homo sapiens
aggtagagtttatgt

SEQ ID NO: 934142 - DNA, 15 bp, Homo sapiens
taggtagagtttatg

SEQ ID NO: 934143 - DNA, 15 bp, Homo sapiens
gtaggtagagtttat

SEQ ID NO: 934144 - DNA, 15 bp, Homo sapiens
agtaggtagagttta

SEQ ID NO: 934145 - DNA, 15 bp, Homo sapiens
aagtaggtagagttt

SEQ ID NO: 934146 - DNA, 15 bp, Homo sapiens
taagtaggtagagtt

SEQ ID NO: 934147 - DNA, 15 bp, Homo sapiens
gtaagtaggtagagt

SEQ ID NO: 934148 - DNA, 15 bp, Homo sapiens
tgtaagtaggtagag

SEQ ID NO: 934149 - DNA, 15 bp, Homo sapiens
atgtaagtaggtaga

SEQ ID NO: 934150 - DNA, 15 bp, Homo sapiens
tatgtaagtaggtag

SEQ ID NO: 934151 - DNA, 15 bp, Homo sapiens
ttatgtaagtaggta

SEQ ID NO: 934152 - DNA, 15 bp, Homo sapiens
attatgtaagtaggt

SEQ ID NO: 934153 - DNA, 15 bp, Homo sapiens
aattatgtaagtagg

SEQ ID NO: 934154 - DNA, 15 bp, Homo sapiens
aaattatgtaagtag

SEQ ID NO: 934155 - DNA, 15 bp, Homo sapiens
gaaattatgtaagta

SEQ ID NO: 934156 - DNA, 15 bp, Homo sapiens
tgaaattatgtaagt

SEQ ID NO: 934157 - DNA, 15 bp, Homo sapiens
ttgaaattatgtaag

SEQ ID NO: 934158 - DNA, 15 bp, Homo sapiens
tttgaaattatgtaa

SEQ ID NO: 934159 - DNA, 15 bp, Homo sapiens
ttttgaaattatgta

SEQ ID NO: 934160 - DNA, 15 bp, Homo sapiens
tttttgaaattatgt

SEQ ID NO: 934161 - DNA, 15 bp, Homo sapiens
atttttgaaattatg

SEQ ID NO: 934162 - DNA, 15 bp, Homo sapiens
catttttgaaattat

SEQ ID NO: 934163 - DNA, 15 bp, Homo sapiens
acatttttgaaatta

SEQ ID NO: 934164 - DNA, 15 bp, Homo sapiens
gacatttttgaaatt

SEQ ID NO: 934165 - DNA, 15 bp, Homo sapiens
tgacatttttgaaat

SEQ ID NO: 934166 - DNA, 15 bp, Homo sapiens
atgacatttttgaaa

SEQ ID NO: 934167 - DNA, 15 bp, Homo sapiens
aatgacatttttgaa

SEQ ID NO: 934168 - DNA, 15 bp, Homo sapiens
taatgacatttttga

SEQ ID NO: 934169 - DNA, 15 bp, Homo sapiens
ataatgacatttttg

SEQ ID NO: 934170 - DNA, 15 bp, Homo sapiens
cataatgacattttt

SEQ ID NO: 934171 - DNA, 15 bp, Homo sapiens
tcataatgacatttt

SEQ ID NO: 934172 - DNA, 15 bp, Homo sapiens
ttcataatgacattt

SEQ ID NO: 934173 - DNA, 15 bp, Homo sapiens
attcataatgacatt

SEQ ID NO: 934174 - DNA, 15 bp, Homo sapiens
cattcataatgacat

SEQ ID NO: 934175 - DNA, 15 bp, Homo sapiens
acattcataatgaca

SEQ ID NO: 934176 - DNA, 15 bp, Homo sapiens
gacattcataatgac

SEQ ID NO: 934177 - DNA, 15 bp, Homo sapiens
ggacattcataatga

SEQ ID NO: 934178 - DNA, 15 bp, Homo sapiens
aggacattcataatg

SEQ ID NO: 934179 - DNA, 15 bp, Homo sapiens
taggacattcataat

SEQ ID NO: 934180 - DNA, 15 bp, Homo sapiens
tttaggacattcata

SEQ ID NO: 934181 - DNA, 15 bp, Homo sapiens
atttaggacattcat

SEQ ID NO: 934182 - DNA, 15 bp, Homo sapiens
catttaggacattca

SEQ ID NO: 934183 - DNA, 15 bp, Homo sapiens
tcatttaggacattc

SEQ ID NO: 934184 - DNA, 15 bp, Homo sapiens
ttcatttaggacatt

SEQ ID NO: 934185 - DNA, 15 bp, Homo sapiens
tttcatttaggacat

SEQ ID NO: 934186 - DNA, 15 bp, Homo sapiens
atttcatttaggaca

SEQ ID NO: 934187 - DNA, 15 bp, Homo sapiens
tatttcatttaggac

SEQ ID NO: 934188 - DNA, 15 bp, Homo sapiens
atatttcatttagga

SEQ ID NO: 934189 - DNA, 15 bp, Homo sapiens
tatatttcatttagg

SEQ ID NO: 934190 - DNA, 15 bp, Homo sapiens
atatatttcatttag

SEQ ID NO: 934191 - DNA, 15 bp, Homo sapiens
tatatatttcattta

SEQ ID NO: 934192 - DNA, 15 bp, Homo sapiens
ctatatatttcattt

SEQ ID NO: 934193 - DNA, 15 bp, Homo sapiens
cctatatatttcatt

SEQ ID NO: 934194 - DNA, 15 bp, Homo sapiens
ccctatatatttcat

SEQ ID NO: 934195 - DNA, 15 bp, Homo sapiens
cccctatatatttca

SEQ ID NO: 934196 - DNA, 15 bp, Homo sapiens
ccccctatatatttc

SEQ ID NO: 934197 - DNA, 15 bp, Homo sapiens
tccccctatatattt

SEQ ID NO: 934198 - DNA, 15 bp, Homo sapiens
ttccccctatatatt

SEQ ID NO: 934199 - DNA, 15 bp, Homo sapiens
gttccccctatatat

SEQ ID NO: 934200 - DNA, 15 bp, Homo sapiens
tgttccccctatata

SEQ ID NO: 934201 - DNA, 15 bp, Homo sapiens
atgttccccctatat

SEQ ID NO: 934202 - DNA, 15 bp, Homo sapiens
tatgttccccctata

SEQ ID NO: 934203 - DNA, 15 bp, Homo sapiens
ttatgttccccctat

SEQ ID NO: 934204 - DNA, 15 bp, Homo sapiens
tttatgttcccccta

SEQ ID NO: 934205 - DNA, 15 bp, Homo sapiens
ttttatgttccccct

SEQ ID NO: 934206 - DNA, 15 bp, Homo sapiens
cttttatgttccccc

SEQ ID NO: 934207 - DNA, 15 bp, Homo sapiens
ccttttatgttcccc

SEQ ID NO: 934208 - DNA, 15 bp, Homo sapiens
tccttttatgttccc

SEQ ID NO: 934209 - DNA, 15 bp, Homo sapiens
ttccttttatgttcc

SEQ ID NO: 934210 - DNA, 15 bp, Homo sapiens
attccttttatgttc

SEQ ID NO: 934211 - DNA, 15 bp, Homo sapiens
tattccttttatgtt

SEQ ID NO: 934212 - DNA, 15 bp, Homo sapiens
atattccttttatgt

SEQ ID NO: 934213 - DNA, 15 bp, Homo sapiens
aatattccttttatg

SEQ ID NO: 934214 - DNA, 15 bp, Homo sapiens
gaatattccttttat

SEQ ID NO: 934215 - DNA, 15 bp, Homo sapiens
tgaatattcctttta

SEQ ID NO: 934216 - DNA, 15 bp, Homo sapiens
atgaatattcctttt

SEQ ID NO: 934217 - DNA, 15 bp, Homo sapiens
tatgaatattccttt

SEQ ID NO: 934218 - DNA, 15 bp, Homo sapiens
atatgaatattcctt

SEQ ID NO: 934219 - DNA, 15 bp, Homo sapiens
aatatgaatattcct

SEQ ID NO: 934220 - DNA, 15 bp, Homo sapiens
aaatatgaatattcc

SEQ ID NO: 934221 - DNA, 15 bp, Homo sapiens
gaaatatgaatattc

SEQ ID NO: 934222 - DNA, 15 bp, Homo sapiens
tgaaatatgaatatt

SEQ ID NO: 934223 - DNA, 15 bp, Homo sapiens
ttgaaatatgaatat

SEQ ID NO: 934224 - DNA, 15 bp, Homo sapiens
gttgaaatatgaata

SEQ ID NO: 934225 - DNA, 15 bp, Homo sapiens
tgttgaaatatgaat

SEQ ID NO: 934226 - DNA, 15 bp, Homo sapiens
atgttgaaatatgaa

SEQ ID NO: 934227 - DNA, 15 bp, Homo sapiens
catgttgaaatatga

SEQ ID NO: 934228 - DNA, 15 bp, Homo sapiens
acatgttgaaatatg

SEQ ID NO: 934229 - DNA, 15 bp, Homo sapiens
tacatgttgaaatat

SEQ ID NO: 934230 - DNA, 15 bp, Homo sapiens
ttacatgttgaaata

SEQ ID NO: 934231 - DNA, 15 bp, Homo sapiens
tttacatgttgaaat

SEQ ID NO: 934232 - DNA, 15 bp, Homo sapiens
atttacatgttgaaa

SEQ ID NO: 934233 - DNA, 15 bp, Homo sapiens
catttacatgttgaa

SEQ ID NO: 934234 - DNA, 15 bp, Homo sapiens
gcatttacatgttga

SEQ ID NO: 934235 - DNA, 15 bp, Homo sapiens
agcatttacatgttg

SEQ ID NO: 934236 - DNA, 15 bp, Homo sapiens
aagcatttacatgtt

SEQ ID NO: 934237 - DNA, 15 bp, Homo sapiens
aaagcatttacatgt

SEQ ID NO: 934238 - DNA, 15 bp, Homo sapiens
caaagcatttacatg

SEQ ID NO: 934239 - DNA, 15 bp, Homo sapiens
ccaaagcatttacat

SEQ ID NO: 934240 - DNA, 15 bp, Homo sapiens
gccaaagcatttaca

SEQ ID NO: 934241 - DNA, 15 bp, Homo sapiens
tgccaaagcatttac

SEQ ID NO: 934242 - DNA, 15 bp, Homo sapiens
atgccaaagcattta

SEQ ID NO: 934243 - DNA, 15 bp, Homo sapiens
catgccaaagcattt

SEQ ID NO: 934244 - DNA, 15 bp, Homo sapiens
tcatgccaaagcatt

SEQ ID NO: 934245 - DNA, 15 bp, Homo sapiens
gtcatgccaaagcat

SEQ ID NO: 934246 - DNA, 15 bp, Homo sapiens
agtcatgccaaagca

SEQ ID NO: 934247 - DNA, 15 bp, Homo sapiens
gagtcatgccaaagc

SEQ ID NO: 934248 - DNA, 15 bp, Homo sapiens
ggagtcatgccaaag

SEQ ID NO: 934249 - DNA, 15 bp, Homo sapiens
tggagtcatgccaaa

SEQ ID NO: 934250 - DNA, 15 bp, Homo sapiens
atggagtcatgccaa

SEQ ID NO: 934251 - DNA, 15 bp, Homo sapiens
aatggagtcatgcca

SEQ ID NO: 934252 - DNA, 15 bp, Homo sapiens
caatggagtcatgcc

SEQ ID NO: 934253 - DNA, 15 bp, Homo sapiens
ccaatggagtcatgc

SEQ ID NO: 934254 - DNA, 15 bp, Homo sapiens
tccaatggagtcatg

SEQ ID NO: 934255 - DNA, 15 bp, Homo sapiens
ttccaatggagtcat

SEQ ID NO: 934256 - DNA, 15 bp, Homo sapiens
tttccaatggagtca

SEQ ID NO: 934257 - DNA, 15 bp, Homo sapiens
ttttccaatggagtc

SEQ ID NO: 934258 - DNA, 15 bp, Homo sapiens
attttccaatggagt

SEQ ID NO: 934259 - DNA, 15 bp, Homo sapiens
tattttccaatggag

SEQ ID NO: 934260 - DNA, 15 bp, Homo sapiens
atattttccaatgga

SEQ ID NO: 934261 - DNA, 15 bp, Homo sapiens
tatattttccaatgg

SEQ ID NO: 934262 - DNA, 15 bp, Homo sapiens
ttatattttccaatg

SEQ ID NO: 934263 - DNA, 15 bp, Homo sapiens
attatattttccaat

SEQ ID NO: 934264 - DNA, 15 bp, Homo sapiens
cattatattttccaa

SEQ ID NO: 934265 - DNA, 15 bp, Homo sapiens
tcattatattttcca

SEQ ID NO: 934266 - DNA, 15 bp, Homo sapiens
ttcattatattttcc

SEQ ID NO: 934267 - DNA, 15 bp, Homo sapiens
gttcattatattttc

SEQ ID NO: 934268 - DNA, 15 bp, Homo sapiens
agttcattatatttt

SEQ ID NO: 934269 - DNA, 15 bp, Homo sapiens
tagttcattatattt

SEQ ID NO: 934270 - DNA, 15 bp, Homo sapiens
ctagttcattatatt

SEQ ID NO: 934271 - DNA, 15 bp, Homo sapiens
actagttcattatat

SEQ ID NO: 934272 - DNA, 15 bp, Homo sapiens
gactagttcattata

SEQ ID NO: 934273 - DNA, 15 bp, Homo sapiens
tgactagttcattat

SEQ ID NO: 934274 - DNA, 15 bp, Homo sapiens
atgactagttcatta

SEQ ID NO: 934275 - DNA, 15 bp, Homo sapiens
catgactagttcatt

SEQ ID NO: 934276 - DNA, 15 bp, Homo sapiens
acatgactagttcat

SEQ ID NO: 934277 - DNA, 15 bp, Homo sapiens
cacatgactagttca

SEQ ID NO: 934278 - DNA, 15 bp, Homo sapiens
gcacatgactagttc

SEQ ID NO: 934279 - DNA, 15 bp, Homo sapiens
agcacatgactagtt

SEQ ID NO: 934280 - DNA, 15 bp, Homo sapiens
aagcacatgactagt

SEQ ID NO: 934281 - DNA, 15 bp, Homo sapiens
caagcacatgactag

SEQ ID NO: 934282 - DNA, 15 bp, Homo sapiens
gcaagcacatgacta

SEQ ID NO: 934283 - DNA, 15 bp, Homo sapiens
tgcaagcacatgact

SEQ ID NO: 934284 - DNA, 15 bp, Homo sapiens
gtgcaagcacatgac

SEQ ID NO: 934285 - DNA, 15 bp, Homo sapiens
ggtgcaagcacatga

SEQ ID NO: 934286 - DNA, 15 bp, Homo sapiens
aggtgcaagcacatg

SEQ ID NO: 934287 - DNA, 15 bp, Homo sapiens
aaggtgcaagcacat

SEQ ID NO: 934288 - DNA, 15 bp, Homo sapiens
gaaggtgcaagcaca

SEQ ID NO: 934289 - DNA, 15 bp, Homo sapiens
tgaaggtgcaagcac

SEQ ID NO: 934290 - DNA, 15 bp, Homo sapiens
atgaaggtgcaagca

SEQ ID NO: 934291 - DNA, 15 bp, Homo sapiens
aatgaaggtgcaagc

SEQ ID NO: 934292 - DNA, 15 bp, Homo sapiens
taatgaaggtgcaag

SEQ ID NO: 934293 - DNA, 15 bp, Homo sapiens
ttaatgaaggtgcaa

SEQ ID NO: 934294 - DNA, 15 bp, Homo sapiens
attaatgaaggtgca

SEQ ID NO: 934295 - DNA, 15 bp, Homo sapiens
cattaatgaaggtgc

SEQ ID NO: 934296 - DNA, 15 bp, Homo sapiens
acattaatgaaggtg

SEQ ID NO: 934297 - DNA, 15 bp, Homo sapiens
cacattaatgaaggt

SEQ ID NO: 934298 - DNA, 15 bp, Homo sapiens
tcacattaatgaagg

SEQ ID NO: 934299 - DNA, 15 bp, Homo sapiens
ctcacattaatgaag

SEQ ID NO: 934300 - DNA, 15 bp, Homo sapiens
actcacattaatgaa

SEQ ID NO: 934301 - DNA, 15 bp, Homo sapiens
aactcacattaatga

SEQ ID NO: 934302 - DNA, 15 bp, Homo sapiens
gaactcacattaatg

SEQ ID NO: 934303 - DNA, 15 bp, Homo sapiens
tgaactcacattaat

SEQ ID NO: 934304 - DNA, 15 bp, Homo sapiens
ttgaactcacattaa

SEQ ID NO: 934305 - DNA, 15 bp, Homo sapiens
tttgaactcacatta

SEQ ID NO: 934306 - DNA, 15 bp, Homo sapiens
ctttgaactcacatt

SEQ ID NO: 934307 - DNA, 15 bp, Homo sapiens
gctttgaactcacat

SEQ ID NO: 934308 - DNA, 15 bp, Homo sapiens
agctttgaactcaca

SEQ ID NO: 934309 - DNA, 15 bp, Homo sapiens
tagctttgaactcac

SEQ ID NO: 934310 - DNA, 15 bp, Homo sapiens
gtagctttgaactca

SEQ ID NO: 934311 - DNA, 15 bp, Homo sapiens
cgtagctttgaactc

SEQ ID NO: 934312 - DNA, 15 bp, Homo sapiens
tcgtagctttgaact

SEQ ID NO: 934313 - DNA, 15 bp, Homo sapiens
atcgtagctttgaac

SEQ ID NO: 934314 - DNA, 15 bp, Homo sapiens
aatcgtagctttgaa

SEQ ID NO: 934315 - DNA, 15 bp, Homo sapiens
caatcgtagctttga

SEQ ID NO: 934316 - DNA, 15 bp, Homo sapiens
gcaatcgtagctttg

SEQ ID NO: 934317 - DNA, 15 bp, Homo sapiens
tgcaatcgtagcttt

SEQ ID NO: 934318 - DNA, 15 bp, Homo sapiens
ctgcaatcgtagctt

SEQ ID NO: 934319 - DNA, 15 bp, Homo sapiens
tctgcaatcgtagct

SEQ ID NO: 934320 - DNA, 15 bp, Homo sapiens
gtctgcaatcgtagc

SEQ ID NO: 934321 - DNA, 15 bp, Homo sapiens
agtctgcaatcgtag

SEQ ID NO: 934322 - DNA, 15 bp, Homo sapiens
cagtctgcaatcgta

SEQ ID NO: 934323 - DNA, 15 bp, Homo sapiens
tcagtctgcaatcgt

SEQ ID NO: 934324 - DNA, 15 bp, Homo sapiens
gtcagtctgcaatcg

SEQ ID NO: 934325 - DNA, 15 bp, Homo sapiens
tgtcagtctgcaatc

SEQ ID NO: 934326 - DNA, 15 bp, Homo sapiens
gtgtcagtctgcaat

SEQ ID NO: 934327 - DNA, 15 bp, Homo sapiens
tgtgtcagtctgcaa

SEQ ID NO: 934328 - DNA, 15 bp, Homo sapiens
ttgtgtcagtctgca

SEQ ID NO: 934329 - DNA, 15 bp, Homo sapiens
tttgtgtcagtctgc

SEQ ID NO: 934330 - DNA, 15 bp, Homo sapiens
atttgtgtcagtctg

SEQ ID NO: 934331 - DNA, 15 bp, Homo sapiens
catttgtgtcagtct

SEQ ID NO: 934332 - DNA, 15 bp, Homo sapiens
acatttgtgtcagtc

SEQ ID NO: 934333 - DNA, 15 bp, Homo sapiens
cacatttgtgtcagt

SEQ ID NO: 934334 - DNA, 15 bp, Homo sapiens
acacatttgtgtcag

SEQ ID NO: 934335 - DNA, 15 bp, Homo sapiens
aacacatttgtgtca

SEQ ID NO: 934336 - DNA, 15 bp, Homo sapiens
gaacacatttgtgtc

SEQ ID NO: 934337 - DNA, 15 bp, Homo sapiens
agaacacatttgtgt

SEQ ID NO: 934338 - DNA, 15 bp, Homo sapiens
tagaacacatttgtg

SEQ ID NO: 934339 - DNA, 15 bp, Homo sapiens
atagaacacatttgt

SEQ ID NO: 934340 - DNA, 15 bp, Homo sapiens
aatagaacacatttg

SEQ ID NO: 934341 - DNA, 15 bp, Homo sapiens
caatagaacacattt

SEQ ID NO: 934342 - DNA, 15 bp, Homo sapiens
ccaatagaacacatt

SEQ ID NO: 934343 - DNA, 15 bp, Homo sapiens
gccaatagaacacat

SEQ ID NO: 934344 - DNA, 15 bp, Homo sapiens
tgccaatagaacaca

SEQ ID NO: 934345 - DNA, 15 bp, Homo sapiens
ttgccaatagaacac

SEQ ID NO: 934346 - DNA, 15 bp, Homo sapiens
gttgccaatagaaca

SEQ ID NO: 934347 - DNA, 15 bp, Homo sapiens
agttgccaatagaac

SEQ ID NO: 934348 - DNA, 15 bp, Homo sapiens
cagttgccaatagaa

SEQ ID NO: 934349 - DNA, 15 bp, Homo sapiens
tcagttgccaataga

SEQ ID NO: 934350 - DNA, 15 bp, Homo sapiens
atcagttgccaatag

SEQ ID NO: 934351 - DNA, 15 bp, Homo sapiens
catcagttgccaata

SEQ ID NO: 934352 - DNA, 15 bp, Homo sapiens
ccatcagttgccaat

SEQ ID NO: 934353 - DNA, 15 bp, Homo sapiens
cccatcagttgccaa

SEQ ID NO: 934354 - DNA, 15 bp, Homo sapiens
acccatcagttgcca

SEQ ID NO: 934355 - DNA, 15 bp, Homo sapiens
gacccatcagttgcc

SEQ ID NO: 934356 - DNA, 15 bp, Homo sapiens
tgacccatcagttgc

SEQ ID NO: 934357 - DNA, 15 bp, Homo sapiens
atgacccatcagttg

SEQ ID NO: 934358 - DNA, 15 bp, Homo sapiens
catgacccatcagtt

SEQ ID NO: 934359 - DNA, 15 bp, Homo sapiens
tcatgacccatcagt

SEQ ID NO: 934360 - DNA, 15 bp, Homo sapiens
atcatgacccatcag

SEQ ID NO: 934361 - DNA, 15 bp, Homo sapiens
catcatgacccatca

SEQ ID NO: 934362 - DNA, 15 bp, Homo sapiens
ccatcatgacccatc

SEQ ID NO: 934363 - DNA, 15 bp, Homo sapiens
accatcatgacccat

SEQ ID NO: 934364 - DNA, 15 bp, Homo sapiens
taccatcatgaccca

SEQ ID NO: 934365 - DNA, 15 bp, Homo sapiens
ataccatcatgaccc

SEQ ID NO: 934366 - DNA, 15 bp, Homo sapiens
aataccatcatgacc

SEQ ID NO: 934367 - DNA, 15 bp, Homo sapiens
caataccatcatgac

SEQ ID NO: 934368 - DNA, 15 bp, Homo sapiens
gcaataccatcatga

SEQ ID NO: 934369 - DNA, 15 bp, Homo sapiens
ggcaataccatcatg

SEQ ID NO: 934370 - DNA, 15 bp, Homo sapiens
tggcaataccatcat

SEQ ID NO: 934371 - DNA, 15 bp, Homo sapiens
atggcaataccatca

SEQ ID NO: 934372 - DNA, 15 bp, Homo sapiens
aatggcaataccatc

SEQ ID NO: 934373 - DNA, 15 bp, Homo sapiens
aaatggcaataccat

SEQ ID NO: 934374 - DNA, 15 bp, Homo sapiens
caaatggcaatacca

SEQ ID NO: 934375 - DNA, 15 bp, Homo sapiens
acaaatggcaatacc

SEQ ID NO: 934376 - DNA, 15 bp, Homo sapiens
tacaaatggcaatac

SEQ ID NO: 934377 - DNA, 15 bp, Homo sapiens
ttacaaatggcaata

SEQ ID NO: 934378 - DNA, 15 bp, Homo sapiens
attacaaatggcaat

SEQ ID NO: 934379 - DNA, 15 bp, Homo sapiens
aattacaaatggcaa

SEQ ID NO: 934380 - DNA, 15 bp, Homo sapiens
aaattacaaatggca

SEQ ID NO: 934381 - DNA, 15 bp, Homo sapiens
caaattacaaatggc

SEQ ID NO: 934382 - DNA, 15 bp, Homo sapiens
tcaaattacaaatgg

SEQ ID NO: 934383 - DNA, 15 bp, Homo sapiens
atcaaattacaaatg

SEQ ID NO: 934384 - DNA, 15 bp, Homo sapiens
aatcaaattacaaat

SEQ ID NO: 934385 - DNA, 15 bp, Homo sapiens
aaatcaaattacaaa

SEQ ID NO: 934386 - DNA, 15 bp, Homo sapiens
gaaatcaaattacaa

SEQ ID NO: 934387 - DNA, 15 bp, Homo sapiens
ggaaatcaaattaca

SEQ ID NO: 934388 - DNA, 15 bp, Homo sapiens
tggaaatcaaattac

SEQ ID NO: 934389 - DNA, 15 bp, Homo sapiens
ttggaaatcaaatta

SEQ ID NO: 934390 - DNA, 15 bp, Homo sapiens
tttggaaatcaaatt

SEQ ID NO: 934391 - DNA, 15 bp, Homo sapiens
ttttggaaatcaaat

SEQ ID NO: 934392 - DNA, 15 bp, Homo sapiens
attttggaaatcaaa

SEQ ID NO: 934393 - DNA, 15 bp, Homo sapiens
cattttggaaatcaa

SEQ ID NO: 934394 - DNA, 15 bp, Homo sapiens
ccattttggaaatca

SEQ ID NO: 934395 - DNA, 15 bp, Homo sapiens
accattttggaaatc

SEQ ID NO: 934396 - DNA, 15 bp, Homo sapiens
taccattttggaaat

SEQ ID NO: 934397 - DNA, 15 bp, Homo sapiens
ttaccattttggaaa

SEQ ID NO: 934398 - DNA, 15 bp, Homo sapiens
tttaccattttggaa

SEQ ID NO: 934399 - DNA, 15 bp, Homo sapiens
gtttaccattttgga

SEQ ID NO: 934400 - DNA, 15 bp, Homo sapiens
tgtttaccattttgg

SEQ ID NO: 934401 - DNA, 15 bp, Homo sapiens
ttgtttaccattttg

SEQ ID NO: 934402 - DNA, 15 bp, Homo sapiens
tttgtttaccatttt

SEQ ID NO: 934403 - DNA, 15 bp, Homo sapiens
atttgtttaccattt

SEQ ID NO: 934404 - DNA, 15 bp, Homo sapiens
aatttgtttaccatt

SEQ ID NO: 934405 - DNA, 15 bp, Homo sapiens
caatttgtttaccat

SEQ ID NO: 934406 - DNA, 15 bp, Homo sapiens
acaatttgtttacca

SEQ ID NO: 934407 - DNA, 15 bp, Homo sapiens
aacaatttgtttacc

SEQ ID NO: 934408 - DNA, 15 bp, Homo sapiens
caacaatttgtttac

SEQ ID NO: 934409 - DNA, 15 bp, Homo sapiens
ccaacaatttgttta

SEQ ID NO: 934410 - DNA, 15 bp, Homo sapiens
accaacaatttgttt

SEQ ID NO: 934411 - DNA, 15 bp, Homo sapiens
caccaacaatttgtt

SEQ ID NO: 934412 - DNA, 15 bp, Homo sapiens
gcaccaacaatttgt

SEQ ID NO: 934413 - DNA, 15 bp, Homo sapiens
tgcaccaacaatttg

SEQ ID NO: 934414 - DNA, 15 bp, Homo sapiens
ctgcaccaacaattt

SEQ ID NO: 934415 - DNA, 15 bp, Homo sapiens
actgcaccaacaatt

SEQ ID NO: 934416 - DNA, 15 bp, Homo sapiens
aactgcaccaacaat

SEQ ID NO: 934417 - DNA, 15 bp, Homo sapiens
gaactgcaccaacaa

SEQ ID NO: 934418 - DNA, 15 bp, Homo sapiens
agaactgcaccaaca

SEQ ID NO: 934419 - DNA, 15 bp, Homo sapiens
gagaactgcaccaac

SEQ ID NO: 934420 - DNA, 15 bp, Homo sapiens
tgagaactgcaccaa

SEQ ID NO: 934421 - DNA, 15 bp, Homo sapiens
ctgagaactgcacca

SEQ ID NO: 934422 - DNA, 15 bp, Homo sapiens
gctgagaactgcacc

SEQ ID NO: 934423 - DNA, 15 bp, Homo sapiens
tgctgagaactgcac

SEQ ID NO: 934424 - DNA, 15 bp, Homo sapiens
ttgctgagaactgca

SEQ ID NO: 934425 - DNA, 15 bp, Homo sapiens
tttgctgagaactgc

SEQ ID NO: 934426 - DNA, 15 bp, Homo sapiens
ttttgctgagaactg

SEQ ID NO: 934427 - DNA, 15 bp, Homo sapiens
gttttgctgagaact

SEQ ID NO: 934428 - DNA, 15 bp, Homo sapiens
tgttttgctgagaac

SEQ ID NO: 934429 - DNA, 15 bp, Homo sapiens
ttgttttgctgagaa

SEQ ID NO: 934430 - DNA, 15 bp, Homo sapiens
attgttttgctgaga

SEQ ID NO: 934431 - DNA, 15 bp, Homo sapiens
cattgttttgctgag

SEQ ID NO: 934432 - DNA, 15 bp, Homo sapiens
acattgttttgctga

SEQ ID NO: 934433 - DNA, 15 bp, Homo sapiens
gacattgttttgctg

SEQ ID NO: 934434 - DNA, 15 bp, Homo sapiens
agacattgttttgct

SEQ ID NO: 934435 - DNA, 15 bp, Homo sapiens
tagacattgttttgc

SEQ ID NO: 934436 - DNA, 15 bp, Homo sapiens
atagacattgttttg

SEQ ID NO: 934437 - DNA, 15 bp, Homo sapiens
tatagacattgtttt

SEQ ID NO: 934438 - DNA, 15 bp, Homo sapiens
ttatagacattgttt

SEQ ID NO: 934439 - DNA, 15 bp, Homo sapiens
attatagacattgtt

SEQ ID NO: 934440 - DNA, 15 bp, Homo sapiens
gattatagacattgt

SEQ ID NO: 934441 - DNA, 15 bp, Homo sapiens
agattatagacattg

SEQ ID NO: 934442 - DNA, 15 bp, Homo sapiens
aagattatagacatt

SEQ ID NO: 934443 - DNA, 15 bp, Homo sapiens
taagattatagacat

SEQ ID NO: 934444 - DNA, 15 bp, Homo sapiens
gtaagattatagaca

SEQ ID NO: 934445 - DNA, 15 bp, Homo sapiens
ggtaagattatagac

SEQ ID NO: 934446 - DNA, 15 bp, Homo sapiens
aggtaagattataga

SEQ ID NO: 934447 - DNA, 15 bp, Homo sapiens
aaggtaagattatag

SEQ ID NO: 934448 - DNA, 15 bp, Homo sapiens
aaaggtaagattata

SEQ ID NO: 934449 - DNA, 15 bp, Homo sapiens
aaaaggtaagattat

SEQ ID NO: 934450 - DNA, 15 bp, Homo sapiens
taaaaggtaagatta

SEQ ID NO: 934451 - DNA, 15 bp, Homo sapiens
ataaaaggtaagatt

SEQ ID NO: 934452 - DNA, 15 bp, Homo sapiens
tataaaaggtaagat

SEQ ID NO: 934453 - DNA, 15 bp, Homo sapiens
ttataaaaggtaaga

SEQ ID NO: 934454 - DNA, 15 bp, Homo sapiens
cttataaaaggtaag

SEQ ID NO: 934455 - DNA, 15 bp, Homo sapiens
tcttataaaaggtaa

SEQ ID NO: 934456 - DNA, 15 bp, Homo sapiens
gtcttataaaaggta

SEQ ID NO: 934457 - DNA, 15 bp, Homo sapiens
agtcttataaaaggt

SEQ ID NO: 934458 - DNA, 15 bp, Homo sapiens
cagtcttataaaagg

SEQ ID NO: 934459 - DNA, 15 bp, Homo sapiens
acagtcttataaaag

SEQ ID NO: 934460 - DNA, 15 bp, Homo sapiens
aacagtcttataaaa

SEQ ID NO: 934461 - DNA, 15 bp, Homo sapiens
caacagtcttataaa

SEQ ID NO: 934462 - DNA, 15 bp, Homo sapiens
acaacagtcttataa

SEQ ID NO: 934463 - DNA, 15 bp, Homo sapiens
tacaacagtcttata

SEQ ID NO: 934464 - DNA, 15 bp, Homo sapiens
atacaacagtcttat

SEQ ID NO: 934465 - DNA, 15 bp, Homo sapiens
aatacaacagtctta

SEQ ID NO: 934466 - DNA, 15 bp, Homo sapiens
gaatacaacagtctt

SEQ ID NO: 934467 - DNA, 15 bp, Homo sapiens
ggaatacaacagtct

SEQ ID NO: 934468 - DNA, 15 bp, Homo sapiens
aggaatacaacagtc

SEQ ID NO: 934469 - DNA, 15 bp, Homo sapiens
taggaatacaacagt

SEQ ID NO: 934470 - DNA, 15 bp, Homo sapiens
ctaggaatacaacag

SEQ ID NO: 934471 - DNA, 15 bp, Homo sapiens
tctaggaatacaaca

SEQ ID NO: 934472 - DNA, 15 bp, Homo sapiens
ttctaggaatacaac

SEQ ID NO: 934473 - DNA, 15 bp, Homo sapiens
tttctaggaatacaa

SEQ ID NO: 934474 - DNA, 15 bp, Homo sapiens
ttttctaggaataca

SEQ ID NO: 934475 - DNA, 15 bp, Homo sapiens
gttttctaggaatac

SEQ ID NO: 934476 - DNA, 15 bp, Homo sapiens
agttttctaggaata

SEQ ID NO: 934477 - DNA, 15 bp, Homo sapiens
aagttttctaggaat

SEQ ID NO: 934478 - DNA, 15 bp, Homo sapiens
taagttttctaggaa

SEQ ID NO: 934479 - DNA, 15 bp, Homo sapiens
ctaagttttctagga

SEQ ID NO: 934480 - DNA, 15 bp, Homo sapiens
actaagttttctagg

SEQ ID NO: 934481 - DNA, 15 bp, Homo sapiens
cactaagttttctag

SEQ ID NO: 934482 - DNA, 15 bp, Homo sapiens
acactaagttttcta

SEQ ID NO: 934483 - DNA, 15 bp, Homo sapiens
tacactaagttttct

SEQ ID NO: 934484 - DNA, 15 bp, Homo sapiens
atacactaagttttc

SEQ ID NO: 934485 - DNA, 15 bp, Homo sapiens
tatacactaagtttt

SEQ ID NO: 934486 - DNA, 15 bp, Homo sapiens
ctatacactaagttt

SEQ ID NO: 934487 - DNA, 15 bp, Homo sapiens
actatacactaagtt

SEQ ID NO: 934488 - DNA, 15 bp, Homo sapiens
tactatacactaagt

SEQ ID NO: 934489 - DNA, 15 bp, Homo sapiens
ttactatacactaag

SEQ ID NO: 934490 - DNA, 15 bp, Homo sapiens
tttactatacactaa

SEQ ID NO: 934491 - DNA, 15 bp, Homo sapiens
ttttactatacacta

SEQ ID NO: 934492 - DNA, 15 bp, Homo sapiens
gttttactatacact

SEQ ID NO: 934493 - DNA, 15 bp, Homo sapiens
ggttttactatacac

SEQ ID NO: 934494 - DNA, 15 bp, Homo sapiens
tggttttactataca

SEQ ID NO: 934495 - DNA, 15 bp, Homo sapiens
atggttttactatac

SEQ ID NO: 934496 - DNA, 15 bp, Homo sapiens
aatggttttactata

SEQ ID NO: 934497 - DNA, 15 bp, Homo sapiens
taatggttttactat

SEQ ID NO: 934498 - DNA, 15 bp, Homo sapiens
ttaatggttttacta

SEQ ID NO: 934499 - DNA, 15 bp, Homo sapiens
tttaatggttttact

SEQ ID NO: 934500 - DNA, 15 bp, Homo sapiens
ttttaatggttttac

SEQ ID NO: 934501 - DNA, 15 bp, Homo sapiens
tttttaatggtttta

SEQ ID NO: 934502 - DNA, 15 bp, Homo sapiens
ttttttaatggtttt

SEQ ID NO: 934503 - DNA, 15 bp, Homo sapiens
attttttaatggttt

SEQ ID NO: 934504 - DNA, 15 bp, Homo sapiens
aattttttaatggtt

SEQ ID NO: 934505 - DNA, 15 bp, Homo sapiens
taattttttaatggt

SEQ ID NO: 934506 - DNA, 15 bp, Homo sapiens
gtaattttttaatgg

SEQ ID NO: 934507 - DNA, 15 bp, Homo sapiens
agtaattttttaatg

SEQ ID NO: 934508 - DNA, 15 bp, Homo sapiens
aagtaattttttaat

SEQ ID NO: 934509 - DNA, 15 bp, Homo sapiens
taagtaattttttaa

SEQ ID NO: 934510 - DNA, 15 bp, Homo sapiens
ctaagtaatttttta

SEQ ID NO: 934511 - DNA, 15 bp, Homo sapiens
actaagtaatttttt

SEQ ID NO: 934512 - DNA, 15 bp, Homo sapiens
cactaagtaattttt

SEQ ID NO: 934513 - DNA, 15 bp, Homo sapiens
acactaagtaatttt

SEQ ID NO: 934514 - DNA, 15 bp, Homo sapiens
cacactaagtaattt

SEQ ID NO: 934515 - DNA, 15 bp, Homo sapiens
tcacactaagtaatt

SEQ ID NO: 934516 - DNA, 15 bp, Homo sapiens
ttcacactaagtaat

SEQ ID NO: 934517 - DNA, 15 bp, Homo sapiens
attcacactaagtaa

SEQ ID NO: 934518 - DNA, 15 bp, Homo sapiens
tattcacactaagta

SEQ ID NO: 934519 - DNA, 15 bp, Homo sapiens
atattcacactaagt

SEQ ID NO: 934520 - DNA, 15 bp, Homo sapiens
catattcacactaag

SEQ ID NO: 934521 - DNA, 15 bp, Homo sapiens
acatattcacactaa

SEQ ID NO: 934522 - DNA, 15 bp, Homo sapiens
aacatattcacacta

SEQ ID NO: 934523 - DNA, 15 bp, Homo sapiens
taacatattcacact

SEQ ID NO: 934524 - DNA, 15 bp, Homo sapiens
ctaacatattcacac

SEQ ID NO: 934525 - DNA, 15 bp, Homo sapiens
actaacatattcaca

SEQ ID NO: 934526 - DNA, 15 bp, Homo sapiens
aactaacatattcac

SEQ ID NO: 934527 - DNA, 15 bp, Homo sapiens
caactaacatattca

SEQ ID NO: 934528 - DNA, 15 bp, Homo sapiens
ccaactaacatattc

SEQ ID NO: 934529 - DNA, 15 bp, Homo sapiens
tccaactaacatatt

SEQ ID NO: 934530 - DNA, 15 bp, Homo sapiens
ctccaactaacatat

SEQ ID NO: 934531 - DNA, 15 bp, Homo sapiens
tctccaactaacata

SEQ ID NO: 934532 - DNA, 15 bp, Homo sapiens
atctccaactaacat

SEQ ID NO: 934533 - DNA, 15 bp, Homo sapiens
tatctccaactaaca

SEQ ID NO: 934534 - DNA, 15 bp, Homo sapiens
ttatctccaactaac

SEQ ID NO: 934535 - DNA, 15 bp, Homo sapiens
tttatctccaactaa

SEQ ID NO: 934536 - DNA, 15 bp, Homo sapiens
atttatctccaacta

SEQ ID NO: 934537 - DNA, 15 bp, Homo sapiens
aatttatctccaact

SEQ ID NO: 934538 - DNA, 15 bp, Homo sapiens
gaatttatctccaac

SEQ ID NO: 934539 - DNA, 15 bp, Homo sapiens
agaatttatctccaa

SEQ ID NO: 934540 - DNA, 15 bp, Homo sapiens
aagaatttatctcca

SEQ ID NO: 934541 - DNA, 15 bp, Homo sapiens
taagaatttatctcc

SEQ ID NO: 934542 - DNA, 15 bp, Homo sapiens
ctaagaatttatctc

SEQ ID NO: 934543 - DNA, 15 bp, Homo sapiens
gctaagaatttatct

SEQ ID NO: 934544 - DNA, 15 bp, Homo sapiens
agctaagaatttatc

SEQ ID NO: 934545 - DNA, 15 bp, Homo sapiens
gagctaagaatttat

SEQ ID NO: 934546 - DNA, 15 bp, Homo sapiens
tgagctaagaattta

SEQ ID NO: 934547 - DNA, 15 bp, Homo sapiens
ctgagctaagaattt

SEQ ID NO: 934548 - DNA, 15 bp, Homo sapiens
tctgagctaagaatt

SEQ ID NO: 934549 - DNA, 15 bp, Homo sapiens
gtctgagctaagaat

SEQ ID NO: 934550 - DNA, 15 bp, Homo sapiens
ggtctgagctaagaa

SEQ ID NO: 934551 - DNA, 15 bp, Homo sapiens
tggtctgagctaaga

SEQ ID NO: 934552 - DNA, 15 bp, Homo sapiens
ctggtctgagctaag

SEQ ID NO: 934553 - DNA, 15 bp, Homo sapiens
actggtctgagctaa

SEQ ID NO: 934554 - DNA, 15 bp, Homo sapiens
cactggtctgagcta

SEQ ID NO: 934555 - DNA, 15 bp, Homo sapiens
acactggtctgagct

SEQ ID NO: 934556 - DNA, 15 bp, Homo sapiens
tacactggtctgagc

SEQ ID NO: 934557 - DNA, 15 bp, Homo sapiens
ttacactggtctgag

SEQ ID NO: 934558 - DNA, 15 bp, Homo sapiens
cttacactggtctga

SEQ ID NO: 934559 - DNA, 15 bp, Homo sapiens
gcttacactggtctg

SEQ ID NO: 934560 - DNA, 15 bp, Homo sapiens
tgcttacactggtct

SEQ ID NO: 934561 - DNA, 15 bp, Homo sapiens
ctgcttacactggtc

SEQ ID NO: 934562 - DNA, 15 bp, Homo sapiens
tctgcttacactggt

SEQ ID NO: 934563 - DNA, 15 bp, Homo sapiens
ttctgcttacactgg

SEQ ID NO: 934564 - DNA, 15 bp, Homo sapiens
attctgcttacactg

SEQ ID NO: 934565 - DNA, 15 bp, Homo sapiens
aattctgcttacact

SEQ ID NO: 934566 - DNA, 15 bp, Homo sapiens
aaattctgcttacac

SEQ ID NO: 934567 - DNA, 15 bp, Homo sapiens
aaaattctgcttaca

SEQ ID NO: 934568 - DNA, 15 bp, Homo sapiens
aaaaattctgcttac

SEQ ID NO: 934569 - DNA, 15 bp, Homo sapiens
aaaaaattctgctta

SEQ ID NO: 934570 - DNA, 15 bp, Homo sapiens
taaaaaattctgctt

SEQ ID NO: 934571 - DNA, 15 bp, Homo sapiens
gtaaaaaattctgct

SEQ ID NO: 934572 - DNA, 15 bp, Homo sapiens
agtaaaaaattctgc

SEQ ID NO: 934573 - DNA, 15 bp, Homo sapiens
cagtaaaaaattctg

SEQ ID NO: 934574 - DNA, 15 bp, Homo sapiens
acagtaaaaaattct

SEQ ID NO: 934575 - DNA, 15 bp, Homo sapiens
tacagtaaaaaattc

SEQ ID NO: 934576 - DNA, 15 bp, Homo sapiens
atacagtaaaaaatt

SEQ ID NO: 934577 - DNA, 15 bp, Homo sapiens
aatacagtaaaaaat

SEQ ID NO: 934578 - DNA, 15 bp, Homo sapiens
taatacagtaaaaaa

SEQ ID NO: 934579 - DNA, 15 bp, Homo sapiens
ttaatacagtaaaaa

SEQ ID NO: 934580 - DNA, 15 bp, Homo sapiens
attaatacagtaaaa

SEQ ID NO: 934581 - DNA, 15 bp, Homo sapiens
tattaatacagtaaa

SEQ ID NO: 934582 - DNA, 15 bp, Homo sapiens
atattaatacagtaa

SEQ ID NO: 934583 - DNA, 15 bp, Homo sapiens
gatattaatacagta

SEQ ID NO: 934584 - DNA, 15 bp, Homo sapiens
ggatattaatacagt

SEQ ID NO: 934585 - DNA, 15 bp, Homo sapiens
tggatattaatacag

SEQ ID NO: 934586 - DNA, 15 bp, Homo sapiens
ctggatattaataca

SEQ ID NO: 934587 - DNA, 15 bp, Homo sapiens
actggatattaatac

SEQ ID NO: 934588 - DNA, 15 bp, Homo sapiens
tactggatattaata

SEQ ID NO: 934589 - DNA, 15 bp, Homo sapiens
ctactggatattaat

SEQ ID NO: 934590 - DNA, 15 bp, Homo sapiens
tctactggatattaa

SEQ ID NO: 934591 - DNA, 15 bp, Homo sapiens
ttctactggatatta

SEQ ID NO: 934592 - DNA, 15 bp, Homo sapiens
gttctactggatatt

SEQ ID NO: 934593 - DNA, 15 bp, Homo sapiens
tgttctactggatat

SEQ ID NO: 934594 - DNA, 15 bp, Homo sapiens
atgttctactggata

SEQ ID NO: 934595 - DNA, 15 bp, Homo sapiens
aatgttctactggat

SEQ ID NO: 934596 - DNA, 15 bp, Homo sapiens
aaatgttctactgga

SEQ ID NO: 934597 - DNA, 15 bp, Homo sapiens
caaatgttctactgg

SEQ ID NO: 934598 - DNA, 15 bp, Homo sapiens
tcaaatgttctactg

SEQ ID NO: 934599 - DNA, 15 bp, Homo sapiens
ttcaaatgttctact

SEQ ID NO: 934600 - DNA, 15 bp, Homo sapiens
tttcaaatgttctac

SEQ ID NO: 934601 - DNA, 15 bp, Homo sapiens
ctttcaaatgttcta

SEQ ID NO: 934602 - DNA, 15 bp, Homo sapiens
actttcaaatgttct

SEQ ID NO: 934603 - DNA, 15 bp, Homo sapiens
aactttcaaatgttc

SEQ ID NO: 934604 - DNA, 15 bp, Homo sapiens
caactttcaaatgtt

SEQ ID NO: 934605 - DNA, 15 bp, Homo sapiens
acaactttcaaatgt

SEQ ID NO: 934606 - DNA, 15 bp, Homo sapiens
aacaactttcaaatg

SEQ ID NO: 934607 - DNA, 15 bp, Homo sapiens
gaacaactttcaaat

SEQ ID NO: 934608 - DNA, 15 bp, Homo sapiens
tgaacaactttcaaa

SEQ ID NO: 934609 - DNA, 15 bp, Homo sapiens
ctgaacaactttcaa

SEQ ID NO: 934610 - DNA, 15 bp, Homo sapiens
actgaacaactttca

SEQ ID NO: 934611 - DNA, 15 bp, Homo sapiens
cactgaacaactttc

SEQ ID NO: 934612 - DNA, 15 bp, Homo sapiens
gcactgaacaacttt

SEQ ID NO: 934613 - DNA, 15 bp, Homo sapiens
tgcactgaacaactt

SEQ ID NO: 934614 - DNA, 15 bp, Homo sapiens
atgcactgaacaact

SEQ ID NO: 934615 - DNA, 15 bp, Homo sapiens
catgcactgaacaac

SEQ ID NO: 934616 - DNA, 15 bp, Homo sapiens
tcatgcactgaacaa

SEQ ID NO: 934617 - DNA, 15 bp, Homo sapiens
ctcatgcactgaaca

SEQ ID NO: 934618 - DNA, 15 bp, Homo sapiens
tctcatgcactgaac

SEQ ID NO: 934619 - DNA, 15 bp, Homo sapiens
gtctcatgcactgaa

SEQ ID NO: 934620 - DNA, 15 bp, Homo sapiens
agtctcatgcactga

SEQ ID NO: 934621 - DNA, 15 bp, Homo sapiens
tagtctcatgcactg

SEQ ID NO: 934622 - DNA, 15 bp, Homo sapiens
atagtctcatgcact

SEQ ID NO: 934623 - DNA, 15 bp, Homo sapiens
aatagtctcatgcac

SEQ ID NO: 934624 - DNA, 15 bp, Homo sapiens
gaatagtctcatgca

SEQ ID NO: 934625 - DNA, 15 bp, Homo sapiens
agaatagtctcatgc

SEQ ID NO: 934626 - DNA, 15 bp, Homo sapiens
cagaatagtctcatg

SEQ ID NO: 934627 - DNA, 15 bp, Homo sapiens
gcagaatagtctcat

SEQ ID NO: 934628 - DNA, 15 bp, Homo sapiens
tgcagaatagtctca

SEQ ID NO: 934629 - DNA, 15 bp, Homo sapiens
atgcagaatagtctc

SEQ ID NO: 934630 - DNA, 15 bp, Homo sapiens
aatgcagaatagtct

SEQ ID NO: 934631 - DNA, 15 bp, Homo sapiens
caatgcagaatagtc

SEQ ID NO: 934632 - DNA, 15 bp, Homo sapiens
ccaatgcagaatagt

SEQ ID NO: 934633 - DNA, 15 bp, Homo sapiens
tccaatgcagaatag

SEQ ID NO: 934634 - DNA, 15 bp, Homo sapiens
atccaatgcagaata

SEQ ID NO: 934635 - DNA, 15 bp, Homo sapiens
tatccaatgcagaat

SEQ ID NO: 934636 - DNA, 15 bp, Homo sapiens
ctatccaatgcagaa

SEQ ID NO: 934637 - DNA, 15 bp, Homo sapiens
cctatccaatgcaga

SEQ ID NO: 934638 - DNA, 15 bp, Homo sapiens
gcctatccaatgcag

SEQ ID NO: 934639 - DNA, 15 bp, Homo sapiens
agcctatccaatgca

SEQ ID NO: 934640 - DNA, 15 bp, Homo sapiens
aagcctatccaatgc

SEQ ID NO: 934641 - DNA, 15 bp, Homo sapiens
aaagcctatccaatg

SEQ ID NO: 934642 - DNA, 15 bp, Homo sapiens
gaaagcctatccaat

SEQ ID NO: 934643 - DNA, 15 bp, Homo sapiens
agaaagcctatccaa

SEQ ID NO: 934644 - DNA, 15 bp, Homo sapiens
aagaaagcctatcca

SEQ ID NO: 934645 - DNA, 15 bp, Homo sapiens
aaagaaagcctatcc

SEQ ID NO: 934646 - DNA, 15 bp, Homo sapiens
caaagaaagcctatc

SEQ ID NO: 934647 - DNA, 15 bp, Homo sapiens
ccaaagaaagcctat

SEQ ID NO: 934648 - DNA, 15 bp, Homo sapiens
gccaaagaaagccta

SEQ ID NO: 934649 - DNA, 15 bp, Homo sapiens
agccaaagaaagcct

SEQ ID NO: 934650 - DNA, 15 bp, Homo sapiens
gagccaaagaaagcc

SEQ ID NO: 934651 - DNA, 15 bp, Homo sapiens
ggagccaaagaaagc

SEQ ID NO: 934652 - DNA, 15 bp, Homo sapiens
aggagccaaagaaag

SEQ ID NO: 934653 - DNA, 15 bp, Homo sapiens
aaggagccaaagaaa

SEQ ID NO: 934654 - DNA, 15 bp, Homo sapiens
aaaggagccaaagaa

SEQ ID NO: 934655 - DNA, 15 bp, Homo sapiens
taaaggagccaaaga

SEQ ID NO: 934656 - DNA, 15 bp, Homo sapiens
ataaaggagccaaag

SEQ ID NO: 934657 - DNA, 15 bp, Homo sapiens
gataaaggagccaaa

SEQ ID NO: 934658 - DNA, 15 bp, Homo sapiens
tgataaaggagccaa

SEQ ID NO: 934659 - DNA, 15 bp, Homo sapiens
atgataaaggagcca

SEQ ID NO: 934660 - DNA, 15 bp, Homo sapiens
tatgataaaggagcc

SEQ ID NO: 934661 - DNA, 15 bp, Homo sapiens
ctatgataaaggagc

SEQ ID NO: 934662 - DNA, 15 bp, Homo sapiens
actatgataaaggag

SEQ ID NO: 934663 - DNA, 15 bp, Homo sapiens
aactatgataaagga

SEQ ID NO: 934664 - DNA, 15 bp, Homo sapiens
taactatgataaagg

SEQ ID NO: 934665 - DNA, 15 bp, Homo sapiens
ataactatgataaag

SEQ ID NO: 934666 - DNA, 15 bp, Homo sapiens
tataactatgataaa

SEQ ID NO: 934667 - DNA, 15 bp, Homo sapiens
ttataactatgataa

SEQ ID NO: 934668 - DNA, 15 bp, Homo sapiens
attataactatgata

SEQ ID NO: 934669 - DNA, 15 bp, Homo sapiens
tattataactatgat

SEQ ID NO: 934670 - DNA, 15 bp, Homo sapiens
ttattataactatga

SEQ ID NO: 934671 - DNA, 15 bp, Homo sapiens
tttattataactatg

SEQ ID NO: 934672 - DNA, 15 bp, Homo sapiens
gtttattataactat

SEQ ID NO: 934673 - DNA, 15 bp, Homo sapiens
ggtttattataacta

SEQ ID NO: 934674 - DNA, 15 bp, Homo sapiens
tggtttattataact

SEQ ID NO: 934675 - DNA, 15 bp, Homo sapiens
atggtttattataac

SEQ ID NO: 934676 - DNA, 15 bp, Homo sapiens
catggtttattataa

SEQ ID NO: 934677 - DNA, 15 bp, Homo sapiens
tcatggtttattata

SEQ ID NO: 934678 - DNA, 15 bp, Homo sapiens
gtcatggtttattat

SEQ ID NO: 934679 - DNA, 15 bp, Homo sapiens
tgtcatggtttatta

SEQ ID NO: 934680 - DNA, 15 bp, Homo sapiens
gtgtcatggtttatt

SEQ ID NO: 934681 - DNA, 15 bp, Homo sapiens
ggtgtcatggtttat

SEQ ID NO: 934682 - DNA, 15 bp, Homo sapiens
aggtgtcatggttta

SEQ ID NO: 934683 - DNA, 15 bp, Homo sapiens
taggtgtcatggttt

SEQ ID NO: 934684 - DNA, 15 bp, Homo sapiens
gtaggtgtcatggtt

SEQ ID NO: 934685 - DNA, 15 bp, Homo sapiens
ggtaggtgtcatggt

SEQ ID NO: 934686 - DNA, 15 bp, Homo sapiens
gggtaggtgtcatgg

SEQ ID NO: 934687 - DNA, 15 bp, Homo sapiens
ggggtaggtgtcatg

SEQ ID NO: 934688 - DNA, 15 bp, Homo sapiens
aggggtaggtgtcat

SEQ ID NO: 934689 - DNA, 15 bp, Homo sapiens
caggggtaggtgtca

SEQ ID NO: 934690 - DNA, 15 bp, Homo sapiens
tcaggggtaggtgtc

SEQ ID NO: 934691 - DNA, 15 bp, Homo sapiens
ttcaggggtaggtgt

SEQ ID NO: 934692 - DNA, 15 bp, Homo sapiens
tttcaggggtaggtg

SEQ ID NO: 934693 - DNA, 15 bp, Homo sapiens
atttcaggggtaggt

SEQ ID NO: 934694 - DNA, 15 bp, Homo sapiens
catttcaggggtagg

SEQ ID NO: 934695 - DNA, 15 bp, Homo sapiens
gcatttcaggggtag

SEQ ID NO: 934696 - DNA, 15 bp, Homo sapiens
ggcatttcaggggta

SEQ ID NO: 934697 - DNA, 15 bp, Homo sapiens
gggcatttcaggggt

SEQ ID NO: 934698 - DNA, 15 bp, Homo sapiens
agggcatttcagggg

SEQ ID NO: 934699 - DNA, 15 bp, Homo sapiens
tagggcatttcaggg

SEQ ID NO: 934700 - DNA, 15 bp, Homo sapiens
ttagggcatttcagg

SEQ ID NO: 934701 - DNA, 15 bp, Homo sapiens
attagggcatttcag

SEQ ID NO: 934702 - DNA, 15 bp, Homo sapiens
aattagggcatttca

SEQ ID NO: 934703 - DNA, 15 bp, Homo sapiens
gaattagggcatttc

SEQ ID NO: 934704 - DNA, 15 bp, Homo sapiens
ggaattagggcattt

SEQ ID NO: 934705 - DNA, 15 bp, Homo sapiens
gggaattagggcatt

SEQ ID NO: 934706 - DNA, 15 bp, Homo sapiens
agggaattagggcat

SEQ ID NO: 934707 - DNA, 15 bp, Homo sapiens
aagggaattagggca

SEQ ID NO: 934708 - DNA, 15 bp, Homo sapiens
gaagggaattagggc

SEQ ID NO: 934709 - DNA, 15 bp, Homo sapiens
ggaagggaattaggg

SEQ ID NO: 934710 - DNA, 15 bp, Homo sapiens
cggaagggaattagg

SEQ ID NO: 934711 - DNA, 15 bp, Homo sapiens
acggaagggaattag

SEQ ID NO: 934712 - DNA, 15 bp, Homo sapiens
aacggaagggaatta

SEQ ID NO: 934713 - DNA, 15 bp, Homo sapiens
aaacggaagggaatt

SEQ ID NO: 934714 - DNA, 15 bp, Homo sapiens
gaaacggaagggaat

SEQ ID NO: 934715 - DNA, 15 bp, Homo sapiens
agaaacggaagggaa

SEQ ID NO: 934716 - DNA, 15 bp, Homo sapiens
aagaaacggaaggga

SEQ ID NO: 934717 - DNA, 15 bp, Homo sapiens
aaagaaacggaaggg

SEQ ID NO: 934718 - DNA, 15 bp, Homo sapiens
aaaagaaacggaagg

SEQ ID NO: 934719 - DNA, 15 bp, Homo sapiens
aaaaagaaacggaag

SEQ ID NO: 934720 - DNA, 15 bp, Homo sapiens
gaaaaagaaacggaa

SEQ ID NO: 934721 - DNA, 15 bp, Homo sapiens
agaaaaagaaacgga

SEQ ID NO: 934722 - DNA, 15 bp, Homo sapiens
aagaaaaagaaacgg

SEQ ID NO: 934723 - DNA, 15 bp, Homo sapiens
aaagaaaaagaaacg

SEQ ID NO: 934724 - DNA, 15 bp, Homo sapiens
aaaagaaaaagaaac

SEQ ID NO: 934725 - DNA, 15 bp, Homo sapiens
aaaaagaaaaagaaa

SEQ ID NO: 934726 - DNA, 15 bp, Homo sapiens
aaaaaagaaaaagaa

SEQ ID NO: 934727 - DNA, 15 bp, Homo sapiens
gaaaaaagaaaaaga

SEQ ID NO: 934728 - DNA, 15 bp, Homo sapiens
agaaaaaagaaaaag

SEQ ID NO: 934729 - DNA, 15 bp, Homo sapiens
aagaaaaaagaaaaa

SEQ ID NO: 934730 - DNA, 15 bp, Homo sapiens
aaagaaaaaagaaaa

SEQ ID NO: 934731 - DNA, 15 bp, Homo sapiens
aaaagaaaaaagaaa

SEQ ID NO: 934732 - DNA, 15 bp, Homo sapiens
aaaaagaaaaaagaa

SEQ ID NO: 934733 - DNA, 15 bp, Homo sapiens
taaaaagaaaaaaga

SEQ ID NO: 934734 - DNA, 15 bp, Homo sapiens
ctaaaaagaaaaaag

SEQ ID NO: 934735 - DNA, 15 bp, Homo sapiens
gctaaaaagaaaaaa

SEQ ID NO: 934736 - DNA, 15 bp, Homo sapiens
tgctaaaaagaaaaa

SEQ ID NO: 934737 - DNA, 15 bp, Homo sapiens
gtgctaaaaagaaaa

SEQ ID NO: 934738 - DNA, 15 bp, Homo sapiens
agtgctaaaaagaaa

SEQ ID NO: 934739 - DNA, 15 bp, Homo sapiens
aagtgctaaaaagaa

SEQ ID NO: 934740 - DNA, 15 bp, Homo sapiens
taagtgctaaaaaga

SEQ ID NO: 934741 - DNA, 15 bp, Homo sapiens
ttaagtgctaaaaag

SEQ ID NO: 934742 - DNA, 15 bp, Homo sapiens
tttaagtgctaaaaa

SEQ ID NO: 934743 - DNA, 15 bp, Homo sapiens
ttttaagtgctaaaa

SEQ ID NO: 934744 - DNA, 15 bp, Homo sapiens
gttttaagtgctaaa

SEQ ID NO: 934745 - DNA, 15 bp, Homo sapiens
agttttaagtgctaa

SEQ ID NO: 934746 - DNA, 15 bp, Homo sapiens
tagttttaagtgcta

SEQ ID NO: 934747 - DNA, 15 bp, Homo sapiens
ctagttttaagtgct

SEQ ID NO: 934748 - DNA, 15 bp, Homo sapiens
gctagttttaagtgc

SEQ ID NO: 934749 - DNA, 15 bp, Homo sapiens
agctagttttaagtg

SEQ ID NO: 934750 - DNA, 15 bp, Homo sapiens
tagctagttttaagt

SEQ ID NO: 934751 - DNA, 15 bp, Homo sapiens
ttagctagttttaag

SEQ ID NO: 934752 - DNA, 15 bp, Homo sapiens
gttagctagttttaa

SEQ ID NO: 934753 - DNA, 15 bp, Homo sapiens
agttagctagtttta

SEQ ID NO: 934754 - DNA, 15 bp, Homo sapiens
aagttagctagtttt

SEQ ID NO: 934755 - DNA, 15 bp, Homo sapiens
taagttagctagttt

SEQ ID NO: 934756 - DNA, 15 bp, Homo sapiens
gtaagttagctagtt

SEQ ID NO: 934757 - DNA, 15 bp, Homo sapiens
agtaagttagctagt

SEQ ID NO: 934758 - DNA, 15 bp, Homo sapiens
tagtaagttagctag

SEQ ID NO: 934759 - DNA, 15 bp, Homo sapiens
gtagtaagttagcta

SEQ ID NO: 934760 - DNA, 15 bp, Homo sapiens
tgtagtaagttagct

SEQ ID NO: 934761 - DNA, 15 bp, Homo sapiens
ttgtagtaagttagc

SEQ ID NO: 934762 - DNA, 15 bp, Homo sapiens
tttgtagtaagttag

SEQ ID NO: 934763 - DNA, 15 bp, Homo sapiens
ttttgtagtaagtta

SEQ ID NO: 934764 - DNA, 15 bp, Homo sapiens
attttgtagtaagtt

SEQ ID NO: 934765 - DNA, 15 bp, Homo sapiens
tattttgtagtaagt

SEQ ID NO: 934766 - DNA, 15 bp, Homo sapiens
ctattttgtagtaag

SEQ ID NO: 934767 - DNA, 15 bp, Homo sapiens
tctattttgtagtaa

SEQ ID NO: 934768 - DNA, 15 bp, Homo sapiens
atctattttgtagta

SEQ ID NO: 934769 - DNA, 15 bp, Homo sapiens
aatctattttgtagt

SEQ ID NO: 934770 - DNA, 15 bp, Homo sapiens
aaatctattttgtag

SEQ ID NO: 934771 - DNA, 15 bp, Homo sapiens
taaatctattttgta

SEQ ID NO: 934772 - DNA, 15 bp, Homo sapiens
ctaaatctattttgt

SEQ ID NO: 934773 - DNA, 15 bp, Homo sapiens
tctaaatctattttg

SEQ ID NO: 934774 - DNA, 15 bp, Homo sapiens
atctaaatctatttt

SEQ ID NO: 934775 - DNA, 15 bp, Homo sapiens
aatctaaatctattt

SEQ ID NO: 934776 - DNA, 15 bp, Homo sapiens
aaatctaaatctatt

SEQ ID NO: 934777 - DNA, 15 bp, Homo sapiens
taaatctaaatctat

SEQ ID NO: 934778 - DNA, 15 bp, Homo sapiens
ataaatctaaatcta

SEQ ID NO: 934779 - DNA, 15 bp, Homo sapiens
aataaatctaaatct

SEQ ID NO: 934780 - DNA, 15 bp, Homo sapiens
aaataaatctaaatc

SEQ ID NO: 934781 - DNA, 15 bp, Homo sapiens
gaaataaatctaaat

SEQ ID NO: 934782 - DNA, 15 bp, Homo sapiens
agaaataaatctaaa

SEQ ID NO: 934783 - DNA, 15 bp, Homo sapiens
aagaaataaatctaa

SEQ ID NO: 934784 - DNA, 15 bp, Homo sapiens
caagaaataaatcta

SEQ ID NO: 934785 - DNA, 15 bp, Homo sapiens
acaagaaataaatct

SEQ ID NO: 934786 - DNA, 15 bp, Homo sapiens
aacaagaaataaatc

SEQ ID NO: 934787 - DNA, 15 bp, Homo sapiens
aaacaagaaataaat

SEQ ID NO: 934788 - DNA, 15 bp, Homo sapiens
aaaacaagaaataaa

SEQ ID NO: 934789 - DNA, 15 bp, Homo sapiens
caaaacaagaaataa

SEQ ID NO: 934790 - DNA, 15 bp, Homo sapiens
acaaaacaagaaata

SEQ ID NO: 934791 - DNA, 15 bp, Homo sapiens
aacaaaacaagaaat

SEQ ID NO: 934792 - DNA, 15 bp, Homo sapiens
taacaaaacaagaaa

SEQ ID NO: 934793 - DNA, 15 bp, Homo sapiens
ataacaaaacaagaa

SEQ ID NO: 934794 - DNA, 15 bp, Homo sapiens
gataacaaaacaaga

SEQ ID NO: 934795 - DNA, 15 bp, Homo sapiens
agataacaaaacaag

SEQ ID NO: 934796 - DNA, 15 bp, Homo sapiens
cagataacaaaacaa

SEQ ID NO: 934797 - DNA, 15 bp, Homo sapiens
acagataacaaaaca

SEQ ID NO: 934798 - DNA, 15 bp, Homo sapiens
tacagataacaaaac

SEQ ID NO: 934799 - DNA, 15 bp, Homo sapiens
atacagataacaaaa

SEQ ID NO: 934800 - DNA, 15 bp, Homo sapiens
gatacagataacaaa

SEQ ID NO: 934801 - DNA, 15 bp, Homo sapiens
cgatacagataacaa

SEQ ID NO: 934802 - DNA, 15 bp, Homo sapiens
acgatacagataaca

SEQ ID NO: 934803 - DNA, 15 bp, Homo sapiens
aacgatacagataac

SEQ ID NO: 934804 - DNA, 15 bp, Homo sapiens
aaacgatacagataa

SEQ ID NO: 934805 - DNA, 15 bp, Homo sapiens
caaacgatacagata

SEQ ID NO: 934806 - DNA, 15 bp, Homo sapiens
gcaaacgatacagat

SEQ ID NO: 934807 - DNA, 15 bp, Homo sapiens
agcaaacgatacaga

SEQ ID NO: 934808 - DNA, 15 bp, Homo sapiens
gagcaaacgatacag

SEQ ID NO: 934809 - DNA, 15 bp, Homo sapiens
ggagcaaacgataca

SEQ ID NO: 934810 - DNA, 15 bp, Homo sapiens
gggagcaaacgatac

SEQ ID NO: 934811 - DNA, 15 bp, Homo sapiens
agggagcaaacgata

SEQ ID NO: 934812 - DNA, 15 bp, Homo sapiens
aagggagcaaacgat

SEQ ID NO: 934813 - DNA, 15 bp, Homo sapiens
gaagggagcaaacga

SEQ ID NO: 934814 - DNA, 15 bp, Homo sapiens
agaagggagcaaacg

SEQ ID NO: 934815 - DNA, 15 bp, Homo sapiens
gagaagggagcaaac

SEQ ID NO: 934816 - DNA, 15 bp, Homo sapiens
ggagaagggagcaaa

SEQ ID NO: 934817 - DNA, 15 bp, Homo sapiens
gggagaagggagcaa

SEQ ID NO: 934818 - DNA, 15 bp, Homo sapiens
ggggagaagggagca

SEQ ID NO: 934819 - DNA, 15 bp, Homo sapiens
tggggagaagggagc

SEQ ID NO: 934820 - DNA, 15 bp, Homo sapiens
ttggggagaagggag

SEQ ID NO: 934821 - DNA, 15 bp, Homo sapiens
attggggagaaggga

SEQ ID NO: 934822 - DNA, 15 bp, Homo sapiens
gattggggagaaggg

SEQ ID NO: 934823 - DNA, 15 bp, Homo sapiens
agattggggagaagg

SEQ ID NO: 934824 - DNA, 15 bp, Homo sapiens
tagattggggagaag

SEQ ID NO: 934825 - DNA, 15 bp, Homo sapiens
atagattggggagaa

SEQ ID NO: 934826 - DNA, 15 bp, Homo sapiens
gatagattggggaga

SEQ ID NO: 934827 - DNA, 15 bp, Homo sapiens
agatagattggggag

SEQ ID NO: 934828 - DNA, 15 bp, Homo sapiens
tagatagattgggga

SEQ ID NO: 934829 - DNA, 15 bp, Homo sapiens
ttagatagattgggg

SEQ ID NO: 934830 - DNA, 15 bp, Homo sapiens
gttagatagattggg

SEQ ID NO: 934831 - DNA, 15 bp, Homo sapiens
ggttagatagattgg

SEQ ID NO: 934832 - DNA, 15 bp, Homo sapiens
tggttagatagattg

SEQ ID NO: 934833 - DNA, 15 bp, Homo sapiens
ttggttagatagatt

SEQ ID NO: 934834 - DNA, 15 bp, Homo sapiens
gttggttagatagat

SEQ ID NO: 934835 - DNA, 15 bp, Homo sapiens
agttggttagataga

SEQ ID NO: 934836 - DNA, 15 bp, Homo sapiens
tagttggttagatag

SEQ ID NO: 934837 - DNA, 15 bp, Homo sapiens
ctagttggttagata

SEQ ID NO: 934838 - DNA, 15 bp, Homo sapiens
actagttggttagat

SEQ ID NO: 934839 - DNA, 15 bp, Homo sapiens
tactagttggttaga

SEQ ID NO: 934840 - DNA, 15 bp, Homo sapiens
atactagttggttag

SEQ ID NO: 934841 - DNA, 15 bp, Homo sapiens
tatactagttggtta

SEQ ID NO: 934842 - DNA, 15 bp, Homo sapiens
ttatactagttggtt

SEQ ID NO: 934843 - DNA, 15 bp, Homo sapiens
tttatactagttggt

SEQ ID NO: 934844 - DNA, 15 bp, Homo sapiens
gtttatactagttgg

SEQ ID NO: 934845 - DNA, 15 bp, Homo sapiens
agtttatactagttg

SEQ ID NO: 934846 - DNA, 15 bp, Homo sapiens
tagtttatactagtt

SEQ ID NO: 934847 - DNA, 15 bp, Homo sapiens
ctagtttatactagt

SEQ ID NO: 934848 - DNA, 15 bp, Homo sapiens
tctagtttatactag

SEQ ID NO: 934849 - DNA, 15 bp, Homo sapiens
atctagtttatacta

SEQ ID NO: 934850 - DNA, 15 bp, Homo sapiens
tatctagtttatact

SEQ ID NO: 934851 - DNA, 15 bp, Homo sapiens
ctatctagtttatac

SEQ ID NO: 934852 - DNA, 15 bp, Homo sapiens
actatctagtttata

SEQ ID NO: 934853 - DNA, 15 bp, Homo sapiens
tactatctagtttat

SEQ ID NO: 934854 - DNA, 15 bp, Homo sapiens
ttactatctagttta

SEQ ID NO: 934855 - DNA, 15 bp, Homo sapiens
cttactatctagttt

SEQ ID NO: 934856 - DNA, 15 bp, Homo sapiens
tcttactatctagtt

SEQ ID NO: 934857 - DNA, 15 bp, Homo sapiens
atcttactatctagt

SEQ ID NO: 934858 - DNA, 15 bp, Homo sapiens
aatcttactatctag

SEQ ID NO: 934859 - DNA, 15 bp, Homo sapiens
gaatcttactatcta

SEQ ID NO: 934860 - DNA, 15 bp, Homo sapiens
tgaatcttactatct

SEQ ID NO: 934861 - DNA, 15 bp, Homo sapiens
atgaatcttactatc

SEQ ID NO: 934862 - DNA, 15 bp, Homo sapiens
catgaatcttactat

SEQ ID NO: 934863 - DNA, 15 bp, Homo sapiens
tcatgaatcttacta

SEQ ID NO: 934864 - DNA, 15 bp, Homo sapiens
ttcatgaatcttact

SEQ ID NO: 934865 - DNA, 15 bp, Homo sapiens
cttcatgaatcttac

SEQ ID NO: 934866 - DNA, 15 bp, Homo sapiens
tcttcatgaatctta

SEQ ID NO: 934867 - DNA, 15 bp, Homo sapiens
atcttcatgaatctt

SEQ ID NO: 934868 - DNA, 15 bp, Homo sapiens
tatcttcatgaatct

SEQ ID NO: 934869 - DNA, 15 bp, Homo sapiens
gtatcttcatgaatc

SEQ ID NO: 934870 - DNA, 15 bp, Homo sapiens
tgtatcttcatgaat

SEQ ID NO: 934871 - DNA, 15 bp, Homo sapiens
gtgtatcttcatgaa

SEQ ID NO: 934872 - DNA, 15 bp, Homo sapiens
agtgtatcttcatga

SEQ ID NO: 934873 - DNA, 15 bp, Homo sapiens
aagtgtatcttcatg

SEQ ID NO: 934874 - DNA, 15 bp, Homo sapiens
aaagtgtatcttcat

SEQ ID NO: 934875 - DNA, 15 bp, Homo sapiens
aaaagtgtatcttca

SEQ ID NO: 934876 - DNA, 15 bp, Homo sapiens
aaaaagtgtatcttc

SEQ ID NO: 934877 - DNA, 15 bp, Homo sapiens
aaaaaagtgtatctt

SEQ ID NO: 934878 - DNA, 15 bp, Homo sapiens
taaaaaagtgtatct

SEQ ID NO: 934879 - DNA, 15 bp, Homo sapiens
ataaaaaagtgtatc

SEQ ID NO: 934880 - DNA, 15 bp, Homo sapiens
gataaaaaagtgtat

SEQ ID NO: 934881 - DNA, 15 bp, Homo sapiens
agataaaaaagtgta

SEQ ID NO: 934882 - DNA, 15 bp, Homo sapiens
cagataaaaaagtgt

SEQ ID NO: 934883 - DNA, 15 bp, Homo sapiens
tcagataaaaaagtg

SEQ ID NO: 934884 - DNA, 15 bp, Homo sapiens
atcagataaaaaagt

SEQ ID NO: 934885 - DNA, 15 bp, Homo sapiens
aatcagataaaaaag

SEQ ID NO: 934886 - DNA, 15 bp, Homo sapiens
aaatcagataaaaaa

SEQ ID NO: 934887 - DNA, 15 bp, Homo sapiens
aaaatcagataaaaa

SEQ ID NO: 934888 - DNA, 15 bp, Homo sapiens
taaaatcagataaaa

SEQ ID NO: 934889 - DNA, 15 bp, Homo sapiens
ataaaatcagataaa

SEQ ID NO: 934890 - DNA, 15 bp, Homo sapiens
aataaaatcagataa

SEQ ID NO: 934891 - DNA, 15 bp, Homo sapiens
gaataaaatcagata

SEQ ID NO: 934892 - DNA, 15 bp, Homo sapiens
tgaataaaatcagat

SEQ ID NO: 934893 - DNA, 15 bp, Homo sapiens
atgaataaaatcaga

SEQ ID NO: 934894 - DNA, 15 bp, Homo sapiens
aatgaataaaatcag

SEQ ID NO: 934895 - DNA, 15 bp, Homo sapiens
aaatgaataaaatca

SEQ ID NO: 934896 - DNA, 15 bp, Homo sapiens
caaatgaataaaatc

SEQ ID NO: 934897 - DNA, 15 bp, Homo sapiens
acaaatgaataaaat

SEQ ID NO: 934898 - DNA, 15 bp, Homo sapiens
aacaaatgaataaaa

SEQ ID NO: 934899 - DNA, 15 bp, Homo sapiens
gaacaaatgaataaa

SEQ ID NO: 934900 - DNA, 15 bp, Homo sapiens
agaacaaatgaataa

SEQ ID NO: 934901 - DNA, 15 bp, Homo sapiens
tagaacaaatgaata

SEQ ID NO: 934902 - DNA, 15 bp, Homo sapiens
atagaacaaatgaat

SEQ ID NO: 934903 - DNA, 15 bp, Homo sapiens
aatagaacaaatgaa

SEQ ID NO: 934904 - DNA, 15 bp, Homo sapiens
gaatagaacaaatga

SEQ ID NO: 934905 - DNA, 15 bp, Homo sapiens
ggaatagaacaaatg

SEQ ID NO: 934906 - DNA, 15 bp, Homo sapiens
aggaatagaacaaat

SEQ ID NO: 934907 - DNA, 15 bp, Homo sapiens
taggaatagaacaaa

SEQ ID NO: 934908 - DNA, 15 bp, Homo sapiens
ataggaatagaacaa

SEQ ID NO: 934909 - DNA, 15 bp, Homo sapiens
aataggaatagaaca

SEQ ID NO: 934910 - DNA, 15 bp, Homo sapiens
caataggaatagaac

SEQ ID NO: 934911 - DNA, 15 bp, Homo sapiens
gcaataggaatagaa

SEQ ID NO: 934912 - DNA, 15 bp, Homo sapiens
ggcaataggaataga

SEQ ID NO: 934913 - DNA, 15 bp, Homo sapiens
aggcaataggaatag

SEQ ID NO: 934914 - DNA, 15 bp, Homo sapiens
gaggcaataggaata

SEQ ID NO: 934915 - DNA, 15 bp, Homo sapiens
agaggcaataggaat

SEQ ID NO: 934916 - DNA, 15 bp, Homo sapiens
tagaggcaataggaa

SEQ ID NO: 934917 - DNA, 15 bp, Homo sapiens
ctagaggcaatagga

SEQ ID NO: 934918 - DNA, 15 bp, Homo sapiens
tctagaggcaatagg

SEQ ID NO: 934919 - DNA, 15 bp, Homo sapiens
ctctagaggcaatag

SEQ ID NO: 934920 - DNA, 15 bp, Homo sapiens
actctagaggcaata

SEQ ID NO: 934921 - DNA, 15 bp, Homo sapiens
tactctagaggcaat

SEQ ID NO: 934922 - DNA, 15 bp, Homo sapiens
ctactctagaggcaa

SEQ ID NO: 934923 - DNA, 15 bp, Homo sapiens
actactctagaggca

SEQ ID NO: 934924 - DNA, 15 bp, Homo sapiens
tactactctagaggc

SEQ ID NO: 934925 - DNA, 15 bp, Homo sapiens
gtactactctagagg

SEQ ID NO: 934926 - DNA, 15 bp, Homo sapiens
agtactactctagag

SEQ ID NO: 934927 - DNA, 15 bp, Homo sapiens
aagtactactctaga

SEQ ID NO: 934928 - DNA, 15 bp, Homo sapiens
caagtactactctag

SEQ ID NO: 934929 - DNA, 15 bp, Homo sapiens
ccaagtactactcta

SEQ ID NO: 934930 - DNA, 15 bp, Homo sapiens
gccaagtactactct

SEQ ID NO: 934931 - DNA, 15 bp, Homo sapiens
tgccaagtactactc

SEQ ID NO: 934932 - DNA, 15 bp, Homo sapiens
gtgccaagtactact

SEQ ID NO: 934933 - DNA, 15 bp, Homo sapiens
tgtgccaagtactac

SEQ ID NO: 934934 - DNA, 15 bp, Homo sapiens
atgtgccaagtacta

SEQ ID NO: 934935 - DNA, 15 bp, Homo sapiens
catgtgccaagtact

SEQ ID NO: 934936 - DNA, 15 bp, Homo sapiens
ccatgtgccaagtac

SEQ ID NO: 934937 - DNA, 15 bp, Homo sapiens
accatgtgccaagta

SEQ ID NO: 934938 - DNA, 15 bp, Homo sapiens
aaccatgtgccaagt

SEQ ID NO: 934939 - DNA, 15 bp, Homo sapiens
taaccatgtgccaag

SEQ ID NO: 934940 - DNA, 15 bp, Homo sapiens
ctaaccatgtgccaa

SEQ ID NO: 934941 - DNA, 15 bp, Homo sapiens
gctaaccatgtgcca

SEQ ID NO: 934942 - DNA, 15 bp, Homo sapiens
tgctaaccatgtgcc

SEQ ID NO: 934943 - DNA, 15 bp, Homo sapiens
gtgctaaccatgtgc

SEQ ID NO: 934944 - DNA, 15 bp, Homo sapiens
agtgctaaccatgtg

SEQ ID NO: 934945 - DNA, 15 bp, Homo sapiens
tagtgctaaccatgt

SEQ ID NO: 934946 - DNA, 15 bp, Homo sapiens
ttagtgctaaccatg

SEQ ID NO: 934947 - DNA, 15 bp, Homo sapiens
tttagtgctaaccat

SEQ ID NO: 934948 - DNA, 15 bp, Homo sapiens
atttagtgctaacca

SEQ ID NO: 934949 - DNA, 15 bp, Homo sapiens
tatttagtgctaacc

SEQ ID NO: 934950 - DNA, 15 bp, Homo sapiens
ttatttagtgctaac

SEQ ID NO: 934951 - DNA, 15 bp, Homo sapiens
cttatttagtgctaa

SEQ ID NO: 934952 - DNA, 15 bp, Homo sapiens
acttatttagtgcta

SEQ ID NO: 934953 - DNA, 15 bp, Homo sapiens
tacttatttagtgct

SEQ ID NO: 934954 - DNA, 15 bp, Homo sapiens
gtacttatttagtgc

SEQ ID NO: 934955 - DNA, 15 bp, Homo sapiens
ggtacttatttagtg

SEQ ID NO: 934956 - DNA, 15 bp, Homo sapiens
aggtacttatttagt

SEQ ID NO: 934957 - DNA, 15 bp, Homo sapiens
caggtacttatttag

SEQ ID NO: 934958 - DNA, 15 bp, Homo sapiens
acaggtacttattta

SEQ ID NO: 934959 - DNA, 15 bp, Homo sapiens
gacaggtacttattt

SEQ ID NO: 934960 - DNA, 15 bp, Homo sapiens
tgacaggtacttatt

SEQ ID NO: 934961 - DNA, 15 bp, Homo sapiens
ttgacaggtacttat

SEQ ID NO: 934962 - DNA, 15 bp, Homo sapiens
tttgacaggtactta

SEQ ID NO: 934963 - DNA, 15 bp, Homo sapiens
atttgacaggtactt

SEQ ID NO: 934964 - DNA, 15 bp, Homo sapiens
catttgacaggtact

SEQ ID NO: 934965 - DNA, 15 bp, Homo sapiens
tcatttgacaggtac

SEQ ID NO: 934966 - DNA, 15 bp, Homo sapiens
ctcatttgacaggta

SEQ ID NO: 934967 - DNA, 15 bp, Homo sapiens
actcatttgacaggt

SEQ ID NO: 934968 - DNA, 15 bp, Homo sapiens
cactcatttgacagg

SEQ ID NO: 934969 - DNA, 15 bp, Homo sapiens
tcactcatttgacag

SEQ ID NO: 934970 - DNA, 15 bp, Homo sapiens
ttcactcatttgaca

SEQ ID NO: 934971 - DNA, 15 bp, Homo sapiens
cttcactcatttgac

SEQ ID NO: 934972 - DNA, 15 bp, Homo sapiens
acttcactcatttga

SEQ ID NO: 934973 - DNA, 15 bp, Homo sapiens
tacttcactcatttg

SEQ ID NO: 934974 - DNA, 15 bp, Homo sapiens
ttacttcactcattt

SEQ ID NO: 934975 - DNA, 15 bp, Homo sapiens
attacttcactcatt

SEQ ID NO: 934976 - DNA, 15 bp, Homo sapiens
cattacttcactcat

SEQ ID NO: 934977 - DNA, 15 bp, Homo sapiens
acattacttcactca

SEQ ID NO: 934978 - DNA, 15 bp, Homo sapiens
cacattacttcactc

SEQ ID NO: 934979 - DNA, 15 bp, Homo sapiens
gcacattacttcact

SEQ ID NO: 934980 - DNA, 15 bp, Homo sapiens
tgcacattacttcac

SEQ ID NO: 934981 - DNA, 15 bp, Homo sapiens
atgcacattacttca

SEQ ID NO: 934982 - DNA, 15 bp, Homo sapiens
aatgcacattacttc

SEQ ID NO: 934983 - DNA, 15 bp, Homo sapiens
caatgcacattactt

SEQ ID NO: 934984 - DNA, 15 bp, Homo sapiens
tcaatgcacattact

SEQ ID NO: 934985 - DNA, 15 bp, Homo sapiens
ttcaatgcacattac

SEQ ID NO: 934986 - DNA, 15 bp, Homo sapiens
cttcaatgcacatta

SEQ ID NO: 934987 - DNA, 15 bp, Homo sapiens
tcttcaatgcacatt

SEQ ID NO: 934988 - DNA, 15 bp, Homo sapiens
gtcttcaatgcacat

SEQ ID NO: 934989 - DNA, 15 bp, Homo sapiens
agtcttcaatgcaca

SEQ ID NO: 934990 - DNA, 15 bp, Homo sapiens
aagtcttcaatgcac

SEQ ID NO: 934991 - DNA, 15 bp, Homo sapiens
caagtcttcaatgca

SEQ ID NO: 934992 - DNA, 15 bp, Homo sapiens
tcaagtcttcaatgc

SEQ ID NO: 934993 - DNA, 15 bp, Homo sapiens
ttcaagtcttcaatg

SEQ ID NO: 934994 - DNA, 15 bp, Homo sapiens
cttcaagtcttcaat

SEQ ID NO: 934995 - DNA, 15 bp, Homo sapiens
ccttcaagtcttcaa

SEQ ID NO: 934996 - DNA, 15 bp, Homo sapiens
cccttcaagtcttca

SEQ ID NO: 934997 - DNA, 15 bp, Homo sapiens
ccccttcaagtcttc

SEQ ID NO: 934998 - DNA, 15 bp, Homo sapiens
gccccttcaagtctt

SEQ ID NO: 934999 - DNA, 15 bp, Homo sapiens
agccccttcaagtct

SEQ ID NO: 935000 - DNA, 15 bp, Homo sapiens
gagccccttcaagtc

SEQ ID NO: 935001 - DNA, 15 bp, Homo sapiens
agagccccttcaagt

SEQ ID NO: 935002 - DNA, 15 bp, Homo sapiens
cagagccccttcaag

SEQ ID NO: 935003 - DNA, 15 bp, Homo sapiens
tcagagccccttcaa

SEQ ID NO: 935004 - DNA, 15 bp, Homo sapiens
atcagagccccttca

SEQ ID NO: 935005 - DNA, 15 bp, Homo sapiens
catcagagccccttc

SEQ ID NO: 935006 - DNA, 15 bp, Homo sapiens
gcatcagagcccctt

SEQ ID NO: 935007 - DNA, 15 bp, Homo sapiens
agcatcagagcccct

SEQ ID NO: 935008 - DNA, 15 bp, Homo sapiens
tagcatcagagcccc

SEQ ID NO: 935009 - DNA, 15 bp, Homo sapiens
ctagcatcagagccc

SEQ ID NO: 935010 - DNA, 15 bp, Homo sapiens
cctagcatcagagcc

SEQ ID NO: 935011 - DNA, 15 bp, Homo sapiens
tcctagcatcagagc

SEQ ID NO: 935012 - DNA, 15 bp, Homo sapiens
ttcctagcatcagag

SEQ ID NO: 935013 - DNA, 15 bp, Homo sapiens
tttcctagcatcaga

SEQ ID NO: 935014 - DNA, 15 bp, Homo sapiens
atttcctagcatcag

SEQ ID NO: 935015 - DNA, 15 bp, Homo sapiens
aatttcctagcatca

SEQ ID NO: 935016 - DNA, 15 bp, Homo sapiens
caatttcctagcatc

SEQ ID NO: 935017 - DNA, 15 bp, Homo sapiens
acaatttcctagcat

SEQ ID NO: 935018 - DNA, 15 bp, Homo sapiens
gacaatttcctagca

SEQ ID NO: 935019 - DNA, 15 bp, Homo sapiens
tgacaatttcctagc

SEQ ID NO: 935020 - DNA, 15 bp, Homo sapiens
atgacaatttcctag

SEQ ID NO: 935021 - DNA, 15 bp, Homo sapiens
catgacaatttccta

SEQ ID NO: 935022 - DNA, 15 bp, Homo sapiens
ccatgacaatttcct

SEQ ID NO: 935023 - DNA, 15 bp, Homo sapiens
cccatgacaatttcc

SEQ ID NO: 935024 - DNA, 15 bp, Homo sapiens
tcccatgacaatttc

SEQ ID NO: 935025 - DNA, 15 bp, Homo sapiens
atcccatgacaattt

SEQ ID NO: 935026 - DNA, 15 bp, Homo sapiens
tatcccatgacaatt

SEQ ID NO: 935027 - DNA, 15 bp, Homo sapiens
ttatcccatgacaat

SEQ ID NO: 935028 - DNA, 15 bp, Homo sapiens
attatcccatgacaa

SEQ ID NO: 935029 - DNA, 15 bp, Homo sapiens
tattatcccatgaca

SEQ ID NO: 935030 - DNA, 15 bp, Homo sapiens
ctattatcccatgac

SEQ ID NO: 935031 - DNA, 15 bp, Homo sapiens
tctattatcccatga

SEQ ID NO: 935032 - DNA, 15 bp, Homo sapiens
atctattatcccatg

SEQ ID NO: 935033 - DNA, 15 bp, Homo sapiens
catctattatcccat

SEQ ID NO: 935034 - DNA, 15 bp, Homo sapiens
tcatctattatccca

SEQ ID NO: 935035 - DNA, 15 bp, Homo sapiens
ctcatctattatccc

SEQ ID NO: 935036 - DNA, 15 bp, Homo sapiens
cctcatctattatcc

SEQ ID NO: 935037 - DNA, 15 bp, Homo sapiens
acctcatctattatc

SEQ ID NO: 935038 - DNA, 15 bp, Homo sapiens
aacctcatctattat

SEQ ID NO: 935039 - DNA, 15 bp, Homo sapiens
caacctcatctatta

SEQ ID NO: 935040 - DNA, 15 bp, Homo sapiens
ccaacctcatctatt

SEQ ID NO: 935041 - DNA, 15 bp, Homo sapiens
accaacctcatctat

SEQ ID NO: 935042 - DNA, 15 bp, Homo sapiens
gaccaacctcatcta

SEQ ID NO: 935043 - DNA, 15 bp, Homo sapiens
cgaccaacctcatct

SEQ ID NO: 935044 - DNA, 15 bp, Homo sapiens
acgaccaacctcatc

SEQ ID NO: 935045 - DNA, 15 bp, Homo sapiens
aacgaccaacctcat

SEQ ID NO: 935046 - DNA, 15 bp, Homo sapiens
aaacgaccaacctca

SEQ ID NO: 935047 - DNA, 15 bp, Homo sapiens
caaacgaccaacctc

SEQ ID NO: 935048 - DNA, 15 bp, Homo sapiens
acaaacgaccaacct

SEQ ID NO: 935049 - DNA, 15 bp, Homo sapiens
tacaaacgaccaacc

SEQ ID NO: 935050 - DNA, 15 bp, Homo sapiens
gtacaaacgaccaac

SEQ ID NO: 935051 - DNA, 15 bp, Homo sapiens
tgtacaaacgaccaa

SEQ ID NO: 935052 - DNA, 15 bp, Homo sapiens
ctgtacaaacgacca

SEQ ID NO: 935053 - DNA, 15 bp, Homo sapiens
tctgtacaaacgacc

SEQ ID NO: 935054 - DNA, 15 bp, Homo sapiens
ctctgtacaaacgac

SEQ ID NO: 935055 - DNA, 15 bp, Homo sapiens
cctctgtacaaacga

SEQ ID NO: 935056 - DNA, 15 bp, Homo sapiens
tcctctgtacaaacg

SEQ ID NO: 935057 - DNA, 15 bp, Homo sapiens
atcctctgtacaaac

SEQ ID NO: 935058 - DNA, 15 bp, Homo sapiens
aatcctctgtacaaa

SEQ ID NO: 935059 - DNA, 15 bp, Homo sapiens
gaatcctctgtacaa

SEQ ID NO: 935060 - DNA, 15 bp, Homo sapiens
agaatcctctgtaca

SEQ ID NO: 935061 - DNA, 15 bp, Homo sapiens
aagaatcctctgtac

SEQ ID NO: 935062 - DNA, 15 bp, Homo sapiens
caagaatcctctgta

SEQ ID NO: 935063 - DNA, 15 bp, Homo sapiens
acaagaatcctctgt

SEQ ID NO: 935064 - DNA, 15 bp, Homo sapiens
aacaagaatcctctg

SEQ ID NO: 935065 - DNA, 15 bp, Homo sapiens
taacaagaatcctct

SEQ ID NO: 935066 - DNA, 15 bp, Homo sapiens
ctaacaagaatcctc

SEQ ID NO: 935067 - DNA, 15 bp, Homo sapiens
tctaacaagaatcct

SEQ ID NO: 935068 - DNA, 15 bp, Homo sapiens
ttctaacaagaatcc

SEQ ID NO: 935069 - DNA, 15 bp, Homo sapiens
cttctaacaagaatc

SEQ ID NO: 935070 - DNA, 15 bp, Homo sapiens
gcttctaacaagaat

SEQ ID NO: 935071 - DNA, 15 bp, Homo sapiens
agcttctaacaagaa

SEQ ID NO: 935072 - DNA, 15 bp, Homo sapiens
aagcttctaacaaga

SEQ ID NO: 935073 - DNA, 15 bp, Homo sapiens
taagcttctaacaag

SEQ ID NO: 935074 - DNA, 15 bp, Homo sapiens
gtaagcttctaacaa

SEQ ID NO: 935075 - DNA, 15 bp, Homo sapiens
agtaagcttctaaca

SEQ ID NO: 935076 - DNA, 15 bp, Homo sapiens
gagtaagcttctaac

SEQ ID NO: 935077 - DNA, 15 bp, Homo sapiens
agagtaagcttctaa

SEQ ID NO: 935078 - DNA, 15 bp, Homo sapiens
tagagtaagcttcta

SEQ ID NO: 935079 - DNA, 15 bp, Homo sapiens
ctagagtaagcttct

SEQ ID NO: 935080 - DNA, 15 bp, Homo sapiens
actagagtaagcttc

SEQ ID NO: 935081 - DNA, 15 bp, Homo sapiens
gactagagtaagctt

SEQ ID NO: 935082 - DNA, 15 bp, Homo sapiens
tgactagagtaagct

SEQ ID NO: 935083 - DNA, 15 bp, Homo sapiens
atgactagagtaagc

SEQ ID NO: 935084 - DNA, 15 bp, Homo sapiens
catgactagagtaag

SEQ ID NO: 935085 - DNA, 15 bp, Homo sapiens
tcatgactagagtaa

SEQ ID NO: 935086 - DNA, 15 bp, Homo sapiens
atcatgactagagta

SEQ ID NO: 935087 - DNA, 15 bp, Homo sapiens
aatcatgactagagt

SEQ ID NO: 935088 - DNA, 15 bp, Homo sapiens
caatcatgactagag

SEQ ID NO: 935089 - DNA, 15 bp, Homo sapiens
acaatcatgactaga

SEQ ID NO: 935090 - DNA, 15 bp, Homo sapiens
tacaatcatgactag

SEQ ID NO: 935091 - DNA, 15 bp, Homo sapiens
atacaatcatgacta

SEQ ID NO: 935092 - DNA, 15 bp, Homo sapiens
aatacaatcatgact

SEQ ID NO: 935093 - DNA, 15 bp, Homo sapiens
taatacaatcatgac

SEQ ID NO: 935094 - DNA, 15 bp, Homo sapiens
ctaatacaatcatga

SEQ ID NO: 935095 - DNA, 15 bp, Homo sapiens
tctaatacaatcatg

SEQ ID NO: 935096 - DNA, 15 bp, Homo sapiens
ttctaatacaatcat

SEQ ID NO: 935097 - DNA, 15 bp, Homo sapiens
attctaatacaatca

SEQ ID NO: 935098 - DNA, 15 bp, Homo sapiens
gattctaatacaatc

SEQ ID NO: 935099 - DNA, 15 bp, Homo sapiens
agattctaatacaat

SEQ ID NO: 935100 - DNA, 15 bp, Homo sapiens
aagattctaatacaa

SEQ ID NO: 935101 - DNA, 15 bp, Homo sapiens
gaagattctaataca

SEQ ID NO: 935102 - DNA, 15 bp, Homo sapiens
tgaagattctaatac

SEQ ID NO: 935103 - DNA, 15 bp, Homo sapiens
atgaagattctaata

SEQ ID NO: 935104 - DNA, 15 bp, Homo sapiens
aatgaagattctaat

SEQ ID NO: 935105 - DNA, 15 bp, Homo sapiens
aaatgaagattctaa

SEQ ID NO: 935106 - DNA, 15 bp, Homo sapiens
taaatgaagattcta

SEQ ID NO: 935107 - DNA, 15 bp, Homo sapiens
ttaaatgaagattct

SEQ ID NO: 935108 - DNA, 15 bp, Homo sapiens
tttaaatgaagattc

SEQ ID NO: 935109 - DNA, 15 bp, Homo sapiens
ctttaaatgaagatt

SEQ ID NO: 935110 - DNA, 15 bp, Homo sapiens
cctttaaatgaagat

SEQ ID NO: 935111 - DNA, 15 bp, Homo sapiens
gcctttaaatgaaga

SEQ ID NO: 935112 - DNA, 15 bp, Homo sapiens
agcctttaaatgaag

SEQ ID NO: 935113 - DNA, 15 bp, Homo sapiens
gagcctttaaatgaa

SEQ ID NO: 935114 - DNA, 15 bp, Homo sapiens
ggagcctttaaatga

SEQ ID NO: 935115 - DNA, 15 bp, Homo sapiens
aggagcctttaaatg

SEQ ID NO: 935116 - DNA, 15 bp, Homo sapiens
caggagcctttaaat

SEQ ID NO: 935117 - DNA, 15 bp, Homo sapiens
tcaggagcctttaaa

SEQ ID NO: 935118 - DNA, 15 bp, Homo sapiens
ttcaggagcctttaa

SEQ ID NO: 935119 - DNA, 15 bp, Homo sapiens
cttcaggagccttta

SEQ ID NO: 935120 - DNA, 15 bp, Homo sapiens
ccttcaggagccttt

SEQ ID NO: 935121 - DNA, 15 bp, Homo sapiens
cccttcaggagcctt

SEQ ID NO: 935122 - DNA, 15 bp, Homo sapiens
acccttcaggagcct

SEQ ID NO: 935123 - DNA, 15 bp, Homo sapiens
cacccttcaggagcc

SEQ ID NO: 935124 - DNA, 15 bp, Homo sapiens
acacccttcaggagc

SEQ ID NO: 935125 - DNA, 15 bp, Homo sapiens
aacacccttcaggag

SEQ ID NO: 935126 - DNA, 15 bp, Homo sapiens
caacacccttcagga

SEQ ID NO: 935127 - DNA, 15 bp, Homo sapiens
ccaacacccttcagg

SEQ ID NO: 935128 - DNA, 15 bp, Homo sapiens
gccaacacccttcag

SEQ ID NO: 935129 - DNA, 15 bp, Homo sapiens
tgccaacacccttca

SEQ ID NO: 935130 - DNA, 15 bp, Homo sapiens
atgccaacacccttc

SEQ ID NO: 935131 - DNA, 15 bp, Homo sapiens
aatgccaacaccctt

SEQ ID NO: 935132 - DNA, 15 bp, Homo sapiens
taatgccaacaccct

SEQ ID NO: 935133 - DNA, 15 bp, Homo sapiens
ctaatgccaacaccc

SEQ ID NO: 935134 - DNA, 15 bp, Homo sapiens
actaatgccaacacc

SEQ ID NO: 935135 - DNA, 15 bp, Homo sapiens
gactaatgccaacac

SEQ ID NO: 935136 - DNA, 15 bp, Homo sapiens
tgactaatgccaaca

SEQ ID NO: 935137 - DNA, 15 bp, Homo sapiens
ctgactaatgccaac

SEQ ID NO: 935138 - DNA, 15 bp, Homo sapiens
tctgactaatgccaa

SEQ ID NO: 935139 - DNA, 15 bp, Homo sapiens
ttctgactaatgcca

SEQ ID NO: 935140 - DNA, 15 bp, Homo sapiens
gttctgactaatgcc

SEQ ID NO: 935141 - DNA, 15 bp, Homo sapiens
agttctgactaatgc

SEQ ID NO: 935142 - DNA, 15 bp, Homo sapiens
cagttctgactaatg

SEQ ID NO: 935143 - DNA, 15 bp, Homo sapiens
acagttctgactaat

SEQ ID NO: 935144 - DNA, 15 bp, Homo sapiens
gacagttctgactaa

SEQ ID NO: 935145 - DNA, 15 bp, Homo sapiens
agacagttctgacta

SEQ ID NO: 935146 - DNA, 15 bp, Homo sapiens
gagacagttctgact

SEQ ID NO: 935147 - DNA, 15 bp, Homo sapiens
ggagacagttctgac

SEQ ID NO: 935148 - DNA, 15 bp, Homo sapiens
gggagacagttctga

SEQ ID NO: 935149 - DNA, 15 bp, Homo sapiens
tgggagacagttctg

SEQ ID NO: 935150 - DNA, 15 bp, Homo sapiens
ctgggagacagttct

SEQ ID NO: 935151 - DNA, 15 bp, Homo sapiens
tctgggagacagttc

SEQ ID NO: 935152 - DNA, 15 bp, Homo sapiens
ttctgggagacagtt

SEQ ID NO: 935153 - DNA, 15 bp, Homo sapiens
attctgggagacagt

SEQ ID NO: 935154 - DNA, 15 bp, Homo sapiens
aattctgggagacag

SEQ ID NO: 935155 - DNA, 15 bp, Homo sapiens
aaattctgggagaca

SEQ ID NO: 935156 - DNA, 15 bp, Homo sapiens
aaaattctgggagac

SEQ ID NO: 935157 - DNA, 15 bp, Homo sapiens
taaaattctgggaga

SEQ ID NO: 935158 - DNA, 15 bp, Homo sapiens
ataaaattctgggag

SEQ ID NO: 935159 - DNA, 15 bp, Homo sapiens
aataaaattctggga

SEQ ID NO: 935160 - DNA, 15 bp, Homo sapiens
aaataaaattctggg

SEQ ID NO: 935161 - DNA, 15 bp, Homo sapiens
caaataaaattctgg

SEQ ID NO: 935162 - DNA, 15 bp, Homo sapiens
acaaataaaattctg

SEQ ID NO: 935163 - DNA, 15 bp, Homo sapiens
gacaaataaaattct

SEQ ID NO: 935164 - DNA, 15 bp, Homo sapiens
agacaaataaaattc

SEQ ID NO: 935165 - DNA, 15 bp, Homo sapiens
aagacaaataaaatt

SEQ ID NO: 935166 - DNA, 15 bp, Homo sapiens
caagacaaataaaat

SEQ ID NO: 935167 - DNA, 15 bp, Homo sapiens
acaagacaaataaaa

SEQ ID NO: 935168 - DNA, 15 bp, Homo sapiens
cacaagacaaataaa

SEQ ID NO: 935169 - DNA, 15 bp, Homo sapiens
tcacaagacaaataa

SEQ ID NO: 935170 - DNA, 15 bp, Homo sapiens
atcacaagacaaata

SEQ ID NO: 935171 - DNA, 15 bp, Homo sapiens
tatcacaagacaaat

SEQ ID NO: 935172 - DNA, 15 bp, Homo sapiens
ctatcacaagacaaa

SEQ ID NO: 935173 - DNA, 15 bp, Homo sapiens
tctatcacaagacaa

SEQ ID NO: 935174 - DNA, 15 bp, Homo sapiens
ttctatcacaagaca

SEQ ID NO: 935175 - DNA, 15 bp, Homo sapiens
attctatcacaagac

SEQ ID NO: 935176 - DNA, 15 bp, Homo sapiens
tattctatcacaaga

SEQ ID NO: 935177 - DNA, 15 bp, Homo sapiens
ttattctatcacaag

SEQ ID NO: 935178 - DNA, 15 bp, Homo sapiens
tttattctatcacaa

SEQ ID NO: 935179 - DNA, 15 bp, Homo sapiens
ctttattctatcaca

SEQ ID NO: 935180 - DNA, 15 bp, Homo sapiens
gctttattctatcac

SEQ ID NO: 935181 - DNA, 15 bp, Homo sapiens
tgctttattctatca

SEQ ID NO: 935182 - DNA, 15 bp, Homo sapiens
atgctttattctatc

SEQ ID NO: 935183 - DNA, 15 bp, Homo sapiens
tatgctttattctat

SEQ ID NO: 935184 - DNA, 15 bp, Homo sapiens
ctatgctttattcta

SEQ ID NO: 935185 - DNA, 15 bp, Homo sapiens
actatgctttattct

SEQ ID NO: 935186 - DNA, 15 bp, Homo sapiens
aactatgctttattc

SEQ ID NO: 935187 - DNA, 15 bp, Homo sapiens
taactatgctttatt

SEQ ID NO: 935188 - DNA, 15 bp, Homo sapiens
ctaactatgctttat

SEQ ID NO: 935189 - DNA, 15 bp, Homo sapiens
gctaactatgcttta

SEQ ID NO: 935190 - DNA, 15 bp, Homo sapiens
ggctaactatgcttt

SEQ ID NO: 935191 - DNA, 15 bp, Homo sapiens
aggctaactatgctt

SEQ ID NO: 935192 - DNA, 15 bp, Homo sapiens
taggctaactatgct

SEQ ID NO: 935193 - DNA, 15 bp, Homo sapiens
ttaggctaactatgc

SEQ ID NO: 935194 - DNA, 15 bp, Homo sapiens
tttaggctaactatg

SEQ ID NO: 935195 - DNA, 15 bp, Homo sapiens
ctttaggctaactat

SEQ ID NO: 935196 - DNA, 15 bp, Homo sapiens
tctttaggctaacta

SEQ ID NO: 935197 - DNA, 15 bp, Homo sapiens
ctctttaggctaact

SEQ ID NO: 935198 - DNA, 15 bp, Homo sapiens
gctctttaggctaac

SEQ ID NO: 935199 - DNA, 15 bp, Homo sapiens
tgctctttaggctaa

SEQ ID NO: 935200 - DNA, 15 bp, Homo sapiens
ctgctctttaggcta

SEQ ID NO: 935201 - DNA, 15 bp, Homo sapiens
actgctctttaggct

SEQ ID NO: 935202 - DNA, 15 bp, Homo sapiens
aactgctctttaggc

SEQ ID NO: 935203 - DNA, 15 bp, Homo sapiens
aaactgctctttagg

SEQ ID NO: 935204 - DNA, 15 bp, Homo sapiens
aaaactgctctttag

SEQ ID NO: 935205 - DNA, 15 bp, Homo sapiens
gaaaactgctcttta

SEQ ID NO: 935206 - DNA, 15 bp, Homo sapiens
ggaaaactgctcttt

SEQ ID NO: 935207 - DNA, 15 bp, Homo sapiens
aggaaaactgctctt

SEQ ID NO: 935208 - DNA, 15 bp, Homo sapiens
taggaaaactgctct

SEQ ID NO: 935209 - DNA, 15 bp, Homo sapiens
ttaggaaaactgctc

SEQ ID NO: 935210 - DNA, 15 bp, Homo sapiens
attaggaaaactgct

SEQ ID NO: 935211 - DNA, 15 bp, Homo sapiens
tattaggaaaactgc

SEQ ID NO: 935212 - DNA, 15 bp, Homo sapiens
ctattaggaaaactg

SEQ ID NO: 935213 - DNA, 15 bp, Homo sapiens
gctattaggaaaact

SEQ ID NO: 935214 - DNA, 15 bp, Homo sapiens
agctattaggaaaac

SEQ ID NO: 935215 - DNA, 15 bp, Homo sapiens
gagctattaggaaaa

SEQ ID NO: 935216 - DNA, 15 bp, Homo sapiens
cgagctattaggaaa

SEQ ID NO: 935217 - DNA, 15 bp, Homo sapiens
ccgagctattaggaa

SEQ ID NO: 935218 - DNA, 15 bp, Homo sapiens
gccgagctattagga

SEQ ID NO: 935219 - DNA, 15 bp, Homo sapiens
tgccgagctattagg

SEQ ID NO: 935220 - DNA, 15 bp, Homo sapiens
atgccgagctattag

SEQ ID NO: 935221 - DNA, 15 bp, Homo sapiens
catgccgagctatta

SEQ ID NO: 935222 - DNA, 15 bp, Homo sapiens
gcatgccgagctatt

SEQ ID NO: 935223 - DNA, 15 bp, Homo sapiens
ggcatgccgagctat

SEQ ID NO: 935224 - DNA, 15 bp, Homo sapiens
gggcatgccgagcta

SEQ ID NO: 935225 - DNA, 15 bp, Homo sapiens
tgggcatgccgagct

SEQ ID NO: 935226 - DNA, 15 bp, Homo sapiens
ttgggcatgccgagc

SEQ ID NO: 935227 - DNA, 15 bp, Homo sapiens
tttgggcatgccgag

SEQ ID NO: 935228 - DNA, 15 bp, Homo sapiens
ctttgggcatgccga

SEQ ID NO: 935229 - DNA, 15 bp, Homo sapiens
tctttgggcatgccg

SEQ ID NO: 935230 - DNA, 15 bp, Homo sapiens
atctttgggcatgcc

SEQ ID NO: 935231 - DNA, 15 bp, Homo sapiens
aatctttgggcatgc

SEQ ID NO: 935232 - DNA, 15 bp, Homo sapiens
gaatctttgggcatg

SEQ ID NO: 935233 - DNA, 15 bp, Homo sapiens
agaatctttgggcat

SEQ ID NO: 935234 - DNA, 15 bp, Homo sapiens
tagaatctttgggca

SEQ ID NO: 935235 - DNA, 15 bp, Homo sapiens
ctagaatctttgggc

SEQ ID NO: 935236 - DNA, 15 bp, Homo sapiens
cctagaatctttggg

SEQ ID NO: 935237 - DNA, 15 bp, Homo sapiens
tcctagaatctttgg

SEQ ID NO: 935238 - DNA, 15 bp, Homo sapiens
ctcctagaatctttg

SEQ ID NO: 935239 - DNA, 15 bp, Homo sapiens
actcctagaatcttt

SEQ ID NO: 935240 - DNA, 15 bp, Homo sapiens
aactcctagaatctt

SEQ ID NO: 935241 - DNA, 15 bp, Homo sapiens
taactcctagaatct

SEQ ID NO: 935242 - DNA, 15 bp, Homo sapiens
ataactcctagaatc

SEQ ID NO: 935243 - DNA, 15 bp, Homo sapiens
tataactcctagaat

SEQ ID NO: 935244 - DNA, 15 bp, Homo sapiens
gtataactcctagaa

SEQ ID NO: 935245 - DNA, 15 bp, Homo sapiens
tgtataactcctaga

SEQ ID NO: 935246 - DNA, 15 bp, Homo sapiens
ctgtataactcctag

SEQ ID NO: 935247 - DNA, 15 bp, Homo sapiens
cctgtataactccta

SEQ ID NO: 935248 - DNA, 15 bp, Homo sapiens
acctgtataactcct

SEQ ID NO: 935249 - DNA, 15 bp, Homo sapiens
aacctgtataactcc

SEQ ID NO: 935250 - DNA, 15 bp, Homo sapiens
caacctgtataactc

SEQ ID NO: 935251 - DNA, 15 bp, Homo sapiens
tcaacctgtataact

SEQ ID NO: 935252 - DNA, 15 bp, Homo sapiens
ttcaacctgtataac

SEQ ID NO: 935253 - DNA, 15 bp, Homo sapiens
gttcaacctgtataa

SEQ ID NO: 935254 - DNA, 15 bp, Homo sapiens
tgttcaacctgtata

SEQ ID NO: 935255 - DNA, 15 bp, Homo sapiens
atgttcaacctgtat

SEQ ID NO: 935256 - DNA, 15 bp, Homo sapiens
gatgttcaacctgta

SEQ ID NO: 935257 - DNA, 15 bp, Homo sapiens
agatgttcaacctgt

SEQ ID NO: 935258 - DNA, 15 bp, Homo sapiens
tagatgttcaacctg

SEQ ID NO: 935259 - DNA, 15 bp, Homo sapiens
ttagatgttcaacct

SEQ ID NO: 935260 - DNA, 15 bp, Homo sapiens
attagatgttcaacc

SEQ ID NO: 935261 - DNA, 15 bp, Homo sapiens
gattagatgttcaac

SEQ ID NO: 935262 - DNA, 15 bp, Homo sapiens
ggattagatgttcaa

SEQ ID NO: 935263 - DNA, 15 bp, Homo sapiens
tggattagatgttca

SEQ ID NO: 935264 - DNA, 15 bp, Homo sapiens
ttggattagatgttc

SEQ ID NO: 935265 - DNA, 15 bp, Homo sapiens
tttggattagatgtt

SEQ ID NO: 935266 - DNA, 15 bp, Homo sapiens
ttttggattagatgt

SEQ ID NO: 935267 - DNA, 15 bp, Homo sapiens
tttttggattagatg

SEQ ID NO: 935268 - DNA, 15 bp, Homo sapiens
atttttggattagat

SEQ ID NO: 935269 - DNA, 15 bp, Homo sapiens
gatttttggattaga

SEQ ID NO: 935270 - DNA, 15 bp, Homo sapiens
agatttttggattag

SEQ ID NO: 935271 - DNA, 15 bp, Homo sapiens
cagatttttggatta

SEQ ID NO: 935272 - DNA, 15 bp, Homo sapiens
tcagatttttggatt

SEQ ID NO: 935273 - DNA, 15 bp, Homo sapiens
ttcagatttttggat

SEQ ID NO: 935274 - DNA, 15 bp, Homo sapiens
tttcagatttttgga

SEQ ID NO: 935275 - DNA, 15 bp, Homo sapiens
atttcagatttttgg

SEQ ID NO: 935276 - DNA, 15 bp, Homo sapiens
catttcagatttttg

SEQ ID NO: 935277 - DNA, 15 bp, Homo sapiens
gcatttcagattttt

SEQ ID NO: 935278 - DNA, 15 bp, Homo sapiens
agcatttcagatttt

SEQ ID NO: 935279 - DNA, 15 bp, Homo sapiens
gagcatttcagattt

SEQ ID NO: 935280 - DNA, 15 bp, Homo sapiens
ggagcatttcagatt

SEQ ID NO: 935281 - DNA, 15 bp, Homo sapiens
tggagcatttcagat

SEQ ID NO: 935282 - DNA, 15 bp, Homo sapiens
ttggagcatttcaga

SEQ ID NO: 935283 - DNA, 15 bp, Homo sapiens
cttggagcatttcag

SEQ ID NO: 935284 - DNA, 15 bp, Homo sapiens
tcttggagcatttca

SEQ ID NO: 935285 - DNA, 15 bp, Homo sapiens
atcttggagcatttc

SEQ ID NO: 935286 - DNA, 15 bp, Homo sapiens
tatcttggagcattt

SEQ ID NO: 935287 - DNA, 15 bp, Homo sapiens
gtatcttggagcatt

SEQ ID NO: 935288 - DNA, 15 bp, Homo sapiens
tgtatcttggagcat

SEQ ID NO: 935289 - DNA, 15 bp, Homo sapiens
ttgtatcttggagca

SEQ ID NO: 935290 - DNA, 15 bp, Homo sapiens
tttgtatcttggagc

SEQ ID NO: 935291 - DNA, 15 bp, Homo sapiens
ttttgtatcttggag

SEQ ID NO: 935292 - DNA, 15 bp, Homo sapiens
attttgtatcttgga

SEQ ID NO: 935293 - DNA, 15 bp, Homo sapiens
aattttgtatcttgg

SEQ ID NO: 935294 - DNA, 15 bp, Homo sapiens
aaattttgtatcttg

SEQ ID NO: 935295 - DNA, 15 bp, Homo sapiens
aaaattttgtatctt

SEQ ID NO: 935296 - DNA, 15 bp, Homo sapiens
aaaaattttgtatct

SEQ ID NO: 935297 - DNA, 15 bp, Homo sapiens
aaaaaattttgtatc

SEQ ID NO: 935298 - DNA, 15 bp, Homo sapiens
caaaaaattttgtat

SEQ ID NO: 935299 - DNA, 15 bp, Homo sapiens
tcaaaaaattttgta

SEQ ID NO: 935300 - DNA, 15 bp, Homo sapiens
ctcaaaaaattttgt

SEQ ID NO: 935301 - DNA, 15 bp, Homo sapiens
gctcaaaaaattttg

SEQ ID NO: 935302 - DNA, 15 bp, Homo sapiens
tgctcaaaaaatttt

SEQ ID NO: 935303 - DNA, 15 bp, Homo sapiens
gtgctcaaaaaattt

SEQ ID NO: 935304 - DNA, 15 bp, Homo sapiens
ggtgctcaaaaaatt

SEQ ID NO: 935305 - DNA, 15 bp, Homo sapiens
tggtgctcaaaaaat

SEQ ID NO: 935306 - DNA, 15 bp, Homo sapiens
ttggtgctcaaaaaa

SEQ ID NO: 935307 - DNA, 15 bp, Homo sapiens
attggtgctcaaaaa

SEQ ID NO: 935308 - DNA, 15 bp, Homo sapiens
tattggtgctcaaaa

SEQ ID NO: 935309 - DNA, 15 bp, Homo sapiens
atattggtgctcaaa

SEQ ID NO: 935310 - DNA, 15 bp, Homo sapiens
catattggtgctcaa

SEQ ID NO: 935311 - DNA, 15 bp, Homo sapiens
tcatattggtgctca

SEQ ID NO: 935312 - DNA, 15 bp, Homo sapiens
atcatattggtgctc

SEQ ID NO: 935313 - DNA, 15 bp, Homo sapiens
catcatattggtgct

SEQ ID NO: 935314 - DNA, 15 bp, Homo sapiens
gcatcatattggtgc

SEQ ID NO: 935315 - DNA, 15 bp, Homo sapiens
ggcatcatattggtg

SEQ ID NO: 935316 - DNA, 15 bp, Homo sapiens
tggcatcatattggt

SEQ ID NO: 935317 - DNA, 15 bp, Homo sapiens
gtggcatcatattgg

SEQ ID NO: 935318 - DNA, 15 bp, Homo sapiens
tgtggcatcatattg

SEQ ID NO: 935319 - DNA, 15 bp, Homo sapiens
ttgtggcatcatatt

SEQ ID NO: 935320 - DNA, 15 bp, Homo sapiens
cttgtggcatcatat

SEQ ID NO: 935321 - DNA, 15 bp, Homo sapiens
acttgtggcatcata

SEQ ID NO: 935322 - DNA, 15 bp, Homo sapiens
cacttgtggcatcat

SEQ ID NO: 935323 - DNA, 15 bp, Homo sapiens
ccacttgtggcatca

SEQ ID NO: 935324 - DNA, 15 bp, Homo sapiens
tccacttgtggcatc

SEQ ID NO: 935325 - DNA, 15 bp, Homo sapiens
ttccacttgtggcat

SEQ ID NO: 935326 - DNA, 15 bp, Homo sapiens
tttccacttgtggca

SEQ ID NO: 935327 - DNA, 15 bp, Homo sapiens
ttttccacttgtggc

SEQ ID NO: 935328 - DNA, 15 bp, Homo sapiens
attttccacttgtgg

SEQ ID NO: 935329 - DNA, 15 bp, Homo sapiens
aattttccacttgtg

SEQ ID NO: 935330 - DNA, 15 bp, Homo sapiens
gaattttccacttgt

SEQ ID NO: 935331 - DNA, 15 bp, Homo sapiens
agaattttccacttg

SEQ ID NO: 935332 - DNA, 15 bp, Homo sapiens
cagaattttccactt

SEQ ID NO: 935333 - DNA, 15 bp, Homo sapiens
tcagaattttccact

SEQ ID NO: 935334 - DNA, 15 bp, Homo sapiens
atcagaattttccac

SEQ ID NO: 935335 - DNA, 15 bp, Homo sapiens
catcagaattttcca

SEQ ID NO: 935336 - DNA, 15 bp, Homo sapiens
acatcagaattttcc

SEQ ID NO: 935337 - DNA, 15 bp, Homo sapiens
cacatcagaattttc

SEQ ID NO: 935338 - DNA, 15 bp, Homo sapiens
tcacatcagaatttt

SEQ ID NO: 935339 - DNA, 15 bp, Homo sapiens
gtcacatcagaattt

SEQ ID NO: 935340 - DNA, 15 bp, Homo sapiens
ggtcacatcagaatt

SEQ ID NO: 935341 - DNA, 15 bp, Homo sapiens
aggtcacatcagaat

SEQ ID NO: 935342 - DNA, 15 bp, Homo sapiens
gaggtcacatcagaa

SEQ ID NO: 935343 - DNA, 15 bp, Homo sapiens
tgaggtcacatcaga

SEQ ID NO: 935344 - DNA, 15 bp, Homo sapiens
atgaggtcacatcag

SEQ ID NO: 935345 - DNA, 15 bp, Homo sapiens
tatgaggtcacatca

SEQ ID NO: 935346 - DNA, 15 bp, Homo sapiens
atatgaggtcacatc

SEQ ID NO: 935347 - DNA, 15 bp, Homo sapiens
catatgaggtcacat

SEQ ID NO: 935348 - DNA, 15 bp, Homo sapiens
tcatatgaggtcaca

SEQ ID NO: 935349 - DNA, 15 bp, Homo sapiens
atcatatgaggtcac

SEQ ID NO: 935350 - DNA, 15 bp, Homo sapiens
catcatatgaggtca

SEQ ID NO: 935351 - DNA, 15 bp, Homo sapiens
tcatcatatgaggtc

SEQ ID NO: 935352 - DNA, 15 bp, Homo sapiens
ctcatcatatgaggt

SEQ ID NO: 935353 - DNA, 15 bp, Homo sapiens
actcatcatatgagg

SEQ ID NO: 935354 - DNA, 15 bp, Homo sapiens
gactcatcatatgag

SEQ ID NO: 935355 - DNA, 15 bp, Homo sapiens
tgactcatcatatga

SEQ ID NO: 935356 - DNA, 15 bp, Homo sapiens
gtgactcatcatatg

SEQ ID NO: 935357 - DNA, 15 bp, Homo sapiens
tgtgactcatcatat

SEQ ID NO: 935358 - DNA, 15 bp, Homo sapiens
ctgtgactcatcata

SEQ ID NO: 935359 - DNA, 15 bp, Homo sapiens
actgtgactcatcat

SEQ ID NO: 935360 - DNA, 15 bp, Homo sapiens
gactgtgactcatca

SEQ ID NO: 935361 - DNA, 15 bp, Homo sapiens
tgactgtgactcatc

SEQ ID NO: 935362 - DNA, 15 bp, Homo sapiens
ttgactgtgactcat

SEQ ID NO: 935363 - DNA, 15 bp, Homo sapiens
tttgactgtgactca

SEQ ID NO: 935364 - DNA, 15 bp, Homo sapiens
ttttgactgtgactc

SEQ ID NO: 935365 - DNA, 15 bp, Homo sapiens
gttttgactgtgact

SEQ ID NO: 935366 - DNA, 15 bp, Homo sapiens
tgttttgactgtgac

SEQ ID NO: 935367 - DNA, 15 bp, Homo sapiens
gtgttttgactgtga

SEQ ID NO: 935368 - DNA, 15 bp, Homo sapiens
tgtgttttgactgtg

SEQ ID NO: 935369 - DNA, 15 bp, Homo sapiens
ctgtgttttgactgt

SEQ ID NO: 935370 - DNA, 15 bp, Homo sapiens
actgtgttttgactg

SEQ ID NO: 935371 - DNA, 15 bp, Homo sapiens
gactgtgttttgact

SEQ ID NO: 935372 - DNA, 15 bp, Homo sapiens
tgactgtgttttgac

SEQ ID NO: 935373 - DNA, 15 bp, Homo sapiens
ttgactgtgttttga

SEQ ID NO: 935374 - DNA, 15 bp, Homo sapiens
tttgactgtgttttg

SEQ ID NO: 935375 - DNA, 15 bp, Homo sapiens
ttttgactgtgtttt

SEQ ID NO: 935376 - DNA, 15 bp, Homo sapiens
gttttgactgtgttt

SEQ ID NO: 935377 - DNA, 15 bp, Homo sapiens
agttttgactgtgtt

SEQ ID NO: 935378 - DNA, 15 bp, Homo sapiens
aagttttgactgtgt

SEQ ID NO: 935379 - DNA, 15 bp, Homo sapiens
aaagttttgactgtg

SEQ ID NO: 935380 - DNA, 15 bp, Homo sapiens
caaagttttgactgt

SEQ ID NO: 935381 - DNA, 15 bp, Homo sapiens
acaaagttttgactg

SEQ ID NO: 935382 - DNA, 15 bp, Homo sapiens
aacaaagttttgact

SEQ ID NO: 935383 - DNA, 15 bp, Homo sapiens
aaacaaagttttgac

SEQ ID NO: 935384 - DNA, 15 bp, Homo sapiens
gaaacaaagttttga

SEQ ID NO: 935385 - DNA, 15 bp, Homo sapiens
tgaaacaaagttttg

SEQ ID NO: 935386 - DNA, 15 bp, Homo sapiens
atgaaacaaagtttt

SEQ ID NO: 935387 - DNA, 15 bp, Homo sapiens
catgaaacaaagttt

SEQ ID NO: 935388 - DNA, 15 bp, Homo sapiens
acatgaaacaaagtt

SEQ ID NO: 935389 - DNA, 15 bp, Homo sapiens
tacatgaaacaaagt

SEQ ID NO: 935390 - DNA, 15 bp, Homo sapiens
gtacatgaaacaaag

SEQ ID NO: 935391 - DNA, 15 bp, Homo sapiens
tgtacatgaaacaaa

SEQ ID NO: 935392 - DNA, 15 bp, Homo sapiens
ttgtacatgaaacaa

SEQ ID NO: 935393 - DNA, 15 bp, Homo sapiens
tttgtacatgaaaca

SEQ ID NO: 935394 - DNA, 15 bp, Homo sapiens
ttttgtacatgaaac

SEQ ID NO: 935395 - DNA, 15 bp, Homo sapiens
attttgtacatgaaa

SEQ ID NO: 935396 - DNA, 15 bp, Homo sapiens
aattttgtacatgaa

SEQ ID NO: 935397 - DNA, 15 bp, Homo sapiens
taattttgtacatga

SEQ ID NO: 935398 - DNA, 15 bp, Homo sapiens
ataattttgtacatg

SEQ ID NO: 935399 - DNA, 15 bp, Homo sapiens
aataattttgtacat

SEQ ID NO: 935400 - DNA, 15 bp, Homo sapiens
taataattttgtaca

SEQ ID NO: 935401 - DNA, 15 bp, Homo sapiens
ttaataattttgtac

SEQ ID NO: 935402 - DNA, 15 bp, Homo sapiens
tttaataattttgta

SEQ ID NO: 935403 - DNA, 15 bp, Homo sapiens
ttttaataattttgt

SEQ ID NO: 935404 - DNA, 15 bp, Homo sapiens
tttttaataattttg

SEQ ID NO: 935405 - DNA, 15 bp, Homo sapiens
ttttttaataatttt

SEQ ID NO: 935406 - DNA, 15 bp, Homo sapiens
attttttaataattt

SEQ ID NO: 935407 - DNA, 15 bp, Homo sapiens
tattttttaataatt

SEQ ID NO: 935408 - DNA, 15 bp, Homo sapiens
atattttttaataat

SEQ ID NO: 935409 - DNA, 15 bp, Homo sapiens
aatattttttaataa

SEQ ID NO: 935410 - DNA, 15 bp, Homo sapiens
caatattttttaata

SEQ ID NO: 935411 - DNA, 15 bp, Homo sapiens
acaatattttttaat

SEQ ID NO: 935412 - DNA, 15 bp, Homo sapiens
tacaatattttttaa

SEQ ID NO: 935413 - DNA, 15 bp, Homo sapiens
atacaatatttttta

SEQ ID NO: 935414 - DNA, 15 bp, Homo sapiens
tatacaatatttttt

SEQ ID NO: 935415 - DNA, 15 bp, Homo sapiens
ttatacaatattttt

SEQ ID NO: 935416 - DNA, 15 bp, Homo sapiens
attatacaatatttt

SEQ ID NO: 935417 - DNA, 15 bp, Homo sapiens
tattatacaatattt

SEQ ID NO: 935418 - DNA, 15 bp, Homo sapiens
gtattatacaatatt

SEQ ID NO: 935419 - DNA, 15 bp, Homo sapiens
agtattatacaatat

SEQ ID NO: 935420 - DNA, 15 bp, Homo sapiens
tagtattatacaata

SEQ ID NO: 935421 - DNA, 15 bp, Homo sapiens
gtagtattatacaat

SEQ ID NO: 935422 - DNA, 15 bp, Homo sapiens
ggtagtattatacaa

SEQ ID NO: 935423 - DNA, 15 bp, Homo sapiens
aggtagtattataca

SEQ ID NO: 935424 - DNA, 15 bp, Homo sapiens
gaggtagtattatac

SEQ ID NO: 935425 - DNA, 15 bp, Homo sapiens
ggaggtagtattata

SEQ ID NO: 935426 - DNA, 15 bp, Homo sapiens
tggaggtagtattat

SEQ ID NO: 935427 - DNA, 15 bp, Homo sapiens
ttggaggtagtatta

SEQ ID NO: 935428 - DNA, 15 bp, Homo sapiens
cttggaggtagtatt

SEQ ID NO: 935429 - DNA, 15 bp, Homo sapiens
gcttggaggtagtat

SEQ ID NO: 935430 - DNA, 15 bp, Homo sapiens
agcttggaggtagta

SEQ ID NO: 935431 - DNA, 15 bp, Homo sapiens
tagcttggaggtagt

SEQ ID NO: 935432 - DNA, 15 bp, Homo sapiens
atagcttggaggtag

SEQ ID NO: 935433 - DNA, 15 bp, Homo sapiens
catagcttggaggta

SEQ ID NO: 935434 - DNA, 15 bp, Homo sapiens
acatagcttggaggt

SEQ ID NO: 935435 - DNA, 15 bp, Homo sapiens
cacatagcttggagg

SEQ ID NO: 935436 - DNA, 15 bp, Homo sapiens
acacatagcttggag

SEQ ID NO: 935437 - DNA, 15 bp, Homo sapiens
tacacatagcttgga

SEQ ID NO: 935438 - DNA, 15 bp, Homo sapiens
ctacacatagcttgg

SEQ ID NO: 935439 - DNA, 15 bp, Homo sapiens
tctacacatagcttg

SEQ ID NO: 935440 - DNA, 15 bp, Homo sapiens
ttctacacatagctt

SEQ ID NO: 935441 - DNA, 15 bp, Homo sapiens
cttctacacatagct

SEQ ID NO: 935442 - DNA, 15 bp, Homo sapiens
ccttctacacatagc

SEQ ID NO: 935443 - DNA, 15 bp, Homo sapiens
accttctacacatag

SEQ ID NO: 935444 - DNA, 15 bp, Homo sapiens
caccttctacacata

SEQ ID NO: 935445 - DNA, 15 bp, Homo sapiens
acaccttctacacat

SEQ ID NO: 935446 - DNA, 15 bp, Homo sapiens
tacaccttctacaca

SEQ ID NO: 935447 - DNA, 15 bp, Homo sapiens
atacaccttctacac

SEQ ID NO: 935448 - DNA, 15 bp, Homo sapiens
catacaccttctaca

SEQ ID NO: 935449 - DNA, 15 bp, Homo sapiens
acatacaccttctac

SEQ ID NO: 935450 - DNA, 15 bp, Homo sapiens
cacatacaccttcta

SEQ ID NO: 935451 - DNA, 15 bp, Homo sapiens
tcacatacaccttct

SEQ ID NO: 935452 - DNA, 15 bp, Homo sapiens
ttcacatacaccttc

SEQ ID NO: 935453 - DNA, 15 bp, Homo sapiens
tttcacatacacctt

SEQ ID NO: 935454 - DNA, 15 bp, Homo sapiens
gtttcacatacacct

SEQ ID NO: 935455 - DNA, 15 bp, Homo sapiens
tgtttcacatacacc

SEQ ID NO: 935456 - DNA, 15 bp, Homo sapiens
atgtttcacatacac

SEQ ID NO: 935457 - DNA, 15 bp, Homo sapiens
tatgtttcacataca

SEQ ID NO: 935458 - DNA, 15 bp, Homo sapiens
ttatgtttcacatac

SEQ ID NO: 935459 - DNA, 15 bp, Homo sapiens
cttatgtttcacata

SEQ ID NO: 935460 - DNA, 15 bp, Homo sapiens
acttatgtttcacat

SEQ ID NO: 935461 - DNA, 15 bp, Homo sapiens
cacttatgtttcaca

SEQ ID NO: 935462 - DNA, 15 bp, Homo sapiens
tcacttatgtttcac

SEQ ID NO: 935463 - DNA, 15 bp, Homo sapiens
ttcacttatgtttca

SEQ ID NO: 935464 - DNA, 15 bp, Homo sapiens
attcacttatgtttc

SEQ ID NO: 935465 - DNA, 15 bp, Homo sapiens
aattcacttatgttt

SEQ ID NO: 935466 - DNA, 15 bp, Homo sapiens
aaattcacttatgtt

SEQ ID NO: 935467 - DNA, 15 bp, Homo sapiens
aaaattcacttatgt

SEQ ID NO: 935468 - DNA, 15 bp, Homo sapiens
caaaattcacttatg

SEQ ID NO: 935469 - DNA, 15 bp, Homo sapiens
acaaaattcacttat

SEQ ID NO: 935470 - DNA, 15 bp, Homo sapiens
cacaaaattcactta

SEQ ID NO: 935471 - DNA, 15 bp, Homo sapiens
acacaaaattcactt

SEQ ID NO: 935472 - DNA, 15 bp, Homo sapiens
aacacaaaattcact

SEQ ID NO: 935473 - DNA, 15 bp, Homo sapiens
aaacacaaaattcac

SEQ ID NO: 935474 - DNA, 15 bp, Homo sapiens
caaacacaaaattca

SEQ ID NO: 935475 - DNA, 15 bp, Homo sapiens
ccaaacacaaaattc

SEQ ID NO: 935476 - DNA, 15 bp, Homo sapiens
tccaaacacaaaatt

SEQ ID NO: 935477 - DNA, 15 bp, Homo sapiens
gtccaaacacaaaat

SEQ ID NO: 935478 - DNA, 15 bp, Homo sapiens
agtccaaacacaaaa

SEQ ID NO: 935479 - DNA, 15 bp, Homo sapiens
aagtccaaacacaaa

SEQ ID NO: 935480 - DNA, 15 bp, Homo sapiens
caagtccaaacacaa

SEQ ID NO: 935481 - DNA, 15 bp, Homo sapiens
ccaagtccaaacaca

SEQ ID NO: 935482 - DNA, 15 bp, Homo sapiens
cccaagtccaaacac

SEQ ID NO: 935483 - DNA, 15 bp, Homo sapiens
tcccaagtccaaaca

SEQ ID NO: 935484 - DNA, 15 bp, Homo sapiens
gtcccaagtccaaac

SEQ ID NO: 935485 - DNA, 15 bp, Homo sapiens
ggtcccaagtccaaa

SEQ ID NO: 935486 - DNA, 15 bp, Homo sapiens
gggtcccaagtccaa

SEQ ID NO: 935487 - DNA, 15 bp, Homo sapiens
tgggtcccaagtcca

SEQ ID NO: 935488 - DNA, 15 bp, Homo sapiens
atgggtcccaagtcc

SEQ ID NO: 935489 - DNA, 15 bp, Homo sapiens
gatgggtcccaagtc

SEQ ID NO: 935490 - DNA, 15 bp, Homo sapiens
ggatgggtcccaagt

SEQ ID NO: 935491 - DNA, 15 bp, Homo sapiens
gggatgggtcccaag

SEQ ID NO: 935492 - DNA, 15 bp, Homo sapiens
agggatgggtcccaa

SEQ ID NO: 935493 - DNA, 15 bp, Homo sapiens
tagggatgggtccca

SEQ ID NO: 935494 - DNA, 15 bp, Homo sapiens
ttagggatgggtccc

SEQ ID NO: 935495 - DNA, 15 bp, Homo sapiens
cttagggatgggtcc

SEQ ID NO: 935496 - DNA, 15 bp, Homo sapiens
tcttagggatgggtc

SEQ ID NO: 935497 - DNA, 15 bp, Homo sapiens
atcttagggatgggt

SEQ ID NO: 935498 - DNA, 15 bp, Homo sapiens
tatcttagggatggg

SEQ ID NO: 935499 - DNA, 15 bp, Homo sapiens
atatcttagggatgg

SEQ ID NO: 935500 - DNA, 15 bp, Homo sapiens
gatatcttagggatg

SEQ ID NO: 935501 - DNA, 15 bp, Homo sapiens
agatatcttagggat

SEQ ID NO: 935502 - DNA, 15 bp, Homo sapiens
gagatatcttaggga

SEQ ID NO: 935503 - DNA, 15 bp, Homo sapiens
tgagatatcttaggg

SEQ ID NO: 935504 - DNA, 15 bp, Homo sapiens
atgagatatcttagg

SEQ ID NO: 935505 - DNA, 15 bp, Homo sapiens
aatgagatatcttag

SEQ ID NO: 935506 - DNA, 15 bp, Homo sapiens
taatgagatatctta

SEQ ID NO: 935507 - DNA, 15 bp, Homo sapiens
ataatgagatatctt

SEQ ID NO: 935508 - DNA, 15 bp, Homo sapiens
cataatgagatatct

SEQ ID NO: 935509 - DNA, 15 bp, Homo sapiens
acataatgagatatc

SEQ ID NO: 935510 - DNA, 15 bp, Homo sapiens
tacataatgagatat

SEQ ID NO: 935511 - DNA, 15 bp, Homo sapiens
atacataatgagata

SEQ ID NO: 935512 - DNA, 15 bp, Homo sapiens
tatacataatgagat

SEQ ID NO: 935513 - DNA, 15 bp, Homo sapiens
atatacataatgaga

SEQ ID NO: 935514 - DNA, 15 bp, Homo sapiens
catatacataatgag

SEQ ID NO: 935515 - DNA, 15 bp, Homo sapiens
gcatatacataatga

SEQ ID NO: 935516 - DNA, 15 bp, Homo sapiens
tgcatatacataatg

SEQ ID NO: 935517 - DNA, 15 bp, Homo sapiens
ttgcatatacataat

SEQ ID NO: 935518 - DNA, 15 bp, Homo sapiens
tttgcatatacataa

SEQ ID NO: 935519 - DNA, 15 bp, Homo sapiens
atttgcatatacata

SEQ ID NO: 935520 - DNA, 15 bp, Homo sapiens
tatttgcatatacat

SEQ ID NO: 935521 - DNA, 15 bp, Homo sapiens
atatttgcatataca

SEQ ID NO: 935522 - DNA, 15 bp, Homo sapiens
aatatttgcatatac

SEQ ID NO: 935523 - DNA, 15 bp, Homo sapiens
gaatatttgcatata

SEQ ID NO: 935524 - DNA, 15 bp, Homo sapiens
ggaatatttgcatat

SEQ ID NO: 935525 - DNA, 15 bp, Homo sapiens
tggaatatttgcata

SEQ ID NO: 935526 - DNA, 15 bp, Homo sapiens
ttggaatatttgcat

SEQ ID NO: 935527 - DNA, 15 bp, Homo sapiens
tttggaatatttgca

SEQ ID NO: 935528 - DNA, 15 bp, Homo sapiens
ttttggaatatttgc

SEQ ID NO: 935529 - DNA, 15 bp, Homo sapiens
tttttggaatatttg

SEQ ID NO: 935530 - DNA, 15 bp, Homo sapiens
atttttggaatattt

SEQ ID NO: 935531 - DNA, 15 bp, Homo sapiens
tatttttggaatatt

SEQ ID NO: 935532 - DNA, 15 bp, Homo sapiens
atatttttggaatat

SEQ ID NO: 935533 - DNA, 15 bp, Homo sapiens
aatatttttggaata

SEQ ID NO: 935534 - DNA, 15 bp, Homo sapiens
aaatatttttggaat

SEQ ID NO: 935535 - DNA, 15 bp, Homo sapiens
aaaatatttttggaa

SEQ ID NO: 935536 - DNA, 15 bp, Homo sapiens
aaaaatatttttgga

SEQ ID NO: 935537 - DNA, 15 bp, Homo sapiens
aaaaaatatttttgg

SEQ ID NO: 935538 - DNA, 15 bp, Homo sapiens
taaaaaatatttttg

SEQ ID NO: 935539 - DNA, 15 bp, Homo sapiens
ttaaaaaatattttt

SEQ ID NO: 935540 - DNA, 15 bp, Homo sapiens
tttaaaaaatatttt

SEQ ID NO: 935541 - DNA, 15 bp, Homo sapiens
ttttaaaaaatattt

SEQ ID NO: 935542 - DNA, 15 bp, Homo sapiens
tttttaaaaaatatt

SEQ ID NO: 935543 - DNA, 15 bp, Homo sapiens
ttttttaaaaaatat

SEQ ID NO: 935544 - DNA, 15 bp, Homo sapiens
tttttttaaaaaata

SEQ ID NO: 935545 - DNA, 15 bp, Homo sapiens
atttttttaaaaaat

SEQ ID NO: 935546 - DNA, 15 bp, Homo sapiens
ggatttttttaaaaa

SEQ ID NO: 935547 - DNA, 15 bp, Homo sapiens
tggatttttttaaaa

SEQ ID NO: 935548 - DNA, 15 bp, Homo sapiens
ttggatttttttaaa

SEQ ID NO: 935549 - DNA, 15 bp, Homo sapiens
tttggatttttttaa

SEQ ID NO: 935550 - DNA, 15 bp, Homo sapiens
atttggattttttta

SEQ ID NO: 935551 - DNA, 15 bp, Homo sapiens
aatttggattttttt

SEQ ID NO: 935552 - DNA, 15 bp, Homo sapiens
gaatttggatttttt

SEQ ID NO: 935553 - DNA, 15 bp, Homo sapiens
agaatttggattttt

SEQ ID NO: 935554 - DNA, 15 bp, Homo sapiens
tagaatttggatttt

SEQ ID NO: 935555 - DNA, 15 bp, Homo sapiens
ttagaatttggattt

SEQ ID NO: 935556 - DNA, 15 bp, Homo sapiens
tttagaatttggatt

SEQ ID NO: 935557 - DNA, 15 bp, Homo sapiens
ttttagaatttggat

SEQ ID NO: 935558 - DNA, 15 bp, Homo sapiens
gttttagaatttgga

SEQ ID NO: 935559 - DNA, 15 bp, Homo sapiens
tgttttagaatttgg

SEQ ID NO: 935560 - DNA, 15 bp, Homo sapiens
gtgttttagaatttg

SEQ ID NO: 935561 - DNA, 15 bp, Homo sapiens
cgtgttttagaattt

SEQ ID NO: 935562 - DNA, 15 bp, Homo sapiens
ccgtgttttagaatt

SEQ ID NO: 935563 - DNA, 15 bp, Homo sapiens
gccgtgttttagaat

SEQ ID NO: 935564 - DNA, 15 bp, Homo sapiens
agccgtgttttagaa

SEQ ID NO: 935565 - DNA, 15 bp, Homo sapiens
cagccgtgttttaga

SEQ ID NO: 935566 - DNA, 15 bp, Homo sapiens
ccagccgtgttttag

SEQ ID NO: 935567 - DNA, 15 bp, Homo sapiens
accagccgtgtttta

SEQ ID NO: 935568 - DNA, 15 bp, Homo sapiens
aaccagccgtgtttt

SEQ ID NO: 935569 - DNA, 15 bp, Homo sapiens
gaaccagccgtgttt

SEQ ID NO: 935570 - DNA, 15 bp, Homo sapiens
ggaaccagccgtgtt

SEQ ID NO: 935571 - DNA, 15 bp, Homo sapiens
tggaaccagccgtgt

SEQ ID NO: 935572 - DNA, 15 bp, Homo sapiens
ttggaaccagccgtg

SEQ ID NO: 935573 - DNA, 15 bp, Homo sapiens
cttggaaccagccgt

SEQ ID NO: 935574 - DNA, 15 bp, Homo sapiens
gcttggaaccagccg

SEQ ID NO: 935575 - DNA, 15 bp, Homo sapiens
cgcttggaaccagcc

SEQ ID NO: 935576 - DNA, 15 bp, Homo sapiens
acgcttggaaccagc

SEQ ID NO: 935577 - DNA, 15 bp, Homo sapiens
aacgcttggaaccag

SEQ ID NO: 935578 - DNA, 15 bp, Homo sapiens
aaacgcttggaacca

SEQ ID NO: 935579 - DNA, 15 bp, Homo sapiens
gaaacgcttggaacc

SEQ ID NO: 935580 - DNA, 15 bp, Homo sapiens
cgaaacgcttggaac

SEQ ID NO: 935581 - DNA, 15 bp, Homo sapiens
acgaaacgcttggaa

SEQ ID NO: 935582 - DNA, 15 bp, Homo sapiens
tacgaaacgcttgga

SEQ ID NO: 935583 - DNA, 15 bp, Homo sapiens
ttacgaaacgcttgg

SEQ ID NO: 935584 - DNA, 15 bp, Homo sapiens
cttacgaaacgcttg

SEQ ID NO: 935585 - DNA, 15 bp, Homo sapiens
ccttacgaaacgctt

SEQ ID NO: 935586 - DNA, 15 bp, Homo sapiens
cccttacgaaacgct

SEQ ID NO: 935587 - DNA, 15 bp, Homo sapiens
tcccttacgaaacgc

SEQ ID NO: 935588 - DNA, 15 bp, Homo sapiens
atcccttacgaaacg

SEQ ID NO: 935589 - DNA, 15 bp, Homo sapiens
tatcccttacgaaac

SEQ ID NO: 935590 - DNA, 15 bp, Homo sapiens
gtatcccttacgaaa

SEQ ID NO: 935591 - DNA, 15 bp, Homo sapiens
agtatcccttacgaa

SEQ ID NO: 935592 - DNA, 15 bp, Homo sapiens
gagtatcccttacga

SEQ ID NO: 935593 - DNA, 15 bp, Homo sapiens
tgagtatcccttacg

SEQ ID NO: 935594 - DNA, 15 bp, Homo sapiens
ttgagtatcccttac

SEQ ID NO: 935595 - DNA, 15 bp, Homo sapiens
gttgagtatccctta

SEQ ID NO: 935596 - DNA, 15 bp, Homo sapiens
ggttgagtatccctt

SEQ ID NO: 935597 - DNA, 15 bp, Homo sapiens
aggttgagtatccct

SEQ ID NO: 935598 - DNA, 15 bp, Homo sapiens
caggttgagtatccc

SEQ ID NO: 935599 - DNA, 15 bp, Homo sapiens
acaggttgagtatcc

SEQ ID NO: 935600 - DNA, 15 bp, Homo sapiens
tacaggttgagtatc

SEQ ID NO: 935601 - DNA, 15 bp, Homo sapiens
atacaggttgagtat

SEQ ID NO: 935602 - DNA, 15 bp, Homo sapiens
tatacaggttgagta

SEQ ID NO: 935603 - DNA, 15 bp, Homo sapiens
ctatacaggttgagt

SEQ ID NO: 935604 - DNA, 15 bp, Homo sapiens
gctatacaggttgag

SEQ ID NO: 935605 - DNA, 15 bp, Homo sapiens
tgctatacaggttga

SEQ ID NO: 935606 - DNA, 15 bp, Homo sapiens
ttgctatacaggttg

SEQ ID NO: 935607 - DNA, 15 bp, Homo sapiens
tttgctatacaggtt

SEQ ID NO: 935608 - DNA, 15 bp, Homo sapiens
ttttgctatacaggt

SEQ ID NO: 935609 - DNA, 15 bp, Homo sapiens
attttgctatacagg

SEQ ID NO: 935610 - DNA, 15 bp, Homo sapiens
cattttgctatacag

SEQ ID NO: 935611 - DNA, 15 bp, Homo sapiens
tcattttgctataca

SEQ ID NO: 935612 - DNA, 15 bp, Homo sapiens
ttcattttgctatac

SEQ ID NO: 935613 - DNA, 15 bp, Homo sapiens
gttcattttgctata

SEQ ID NO: 935614 - DNA, 15 bp, Homo sapiens
tgttcattttgctat

SEQ ID NO: 935615 - DNA, 15 bp, Homo sapiens
atgttcattttgcta

SEQ ID NO: 935616 - DNA, 15 bp, Homo sapiens
tatgttcattttgct

SEQ ID NO: 935617 - DNA, 15 bp, Homo sapiens
atatgttcattttgc

SEQ ID NO: 935618 - DNA, 15 bp, Homo sapiens
aatatgttcattttg

SEQ ID NO: 935619 - DNA, 15 bp, Homo sapiens
aaatatgttcatttt

SEQ ID NO: 935620 - DNA, 15 bp, Homo sapiens
taaatatgttcattt

SEQ ID NO: 935621 - DNA, 15 bp, Homo sapiens
gtaaatatgttcatt

SEQ ID NO: 935622 - DNA, 15 bp, Homo sapiens
tgtaaatatgttcat

SEQ ID NO: 935623 - DNA, 15 bp, Homo sapiens
atgtaaatatgttca

SEQ ID NO: 935624 - DNA, 15 bp, Homo sapiens
tatgtaaatatgttc

SEQ ID NO: 935625 - DNA, 15 bp, Homo sapiens
atatgtaaatatgtt

SEQ ID NO: 935626 - DNA, 15 bp, Homo sapiens
aatatgtaaatatgt

SEQ ID NO: 935627 - DNA, 15 bp, Homo sapiens
gaatatgtaaatatg

SEQ ID NO: 935628 - DNA, 15 bp, Homo sapiens
agaatatgtaaatat

SEQ ID NO: 935629 - DNA, 15 bp, Homo sapiens
gagaatatgtaaata

SEQ ID NO: 935630 - DNA, 15 bp, Homo sapiens
agagaatatgtaaat

SEQ ID NO: 935631 - DNA, 15 bp, Homo sapiens
tagagaatatgtaaa

SEQ ID NO: 935632 - DNA, 15 bp, Homo sapiens
ctagagaatatgtaa

SEQ ID NO: 935633 - DNA, 15 bp, Homo sapiens
cctagagaatatgta

SEQ ID NO: 935634 - DNA, 15 bp, Homo sapiens
tcctagagaatatgt

SEQ ID NO: 935635 - DNA, 15 bp, Homo sapiens
ttcctagagaatatg

SEQ ID NO: 935636 - DNA, 15 bp, Homo sapiens
tttcctagagaatat

SEQ ID NO: 935637 - DNA, 15 bp, Homo sapiens
atttcctagagaata

SEQ ID NO: 935638 - DNA, 15 bp, Homo sapiens
tatttcctagagaat

SEQ ID NO: 935639 - DNA, 15 bp, Homo sapiens
atatttcctagagaa

SEQ ID NO: 935640 - DNA, 15 bp, Homo sapiens
aatatttcctagaga

SEQ ID NO: 935641 - DNA, 15 bp, Homo sapiens
taatatttcctagag

SEQ ID NO: 935642 - DNA, 15 bp, Homo sapiens
ctaatatttcctaga

SEQ ID NO: 935643 - DNA, 15 bp, Homo sapiens
actaatatttcctag

SEQ ID NO: 935644 - DNA, 15 bp, Homo sapiens
aactaatatttccta

SEQ ID NO: 935645 - DNA, 15 bp, Homo sapiens
aaactaatatttcct

SEQ ID NO: 935646 - DNA, 15 bp, Homo sapiens
taaactaatatttcc

SEQ ID NO: 935647 - DNA, 15 bp, Homo sapiens
gtaaactaatatttc

SEQ ID NO: 935648 - DNA, 15 bp, Homo sapiens
tgtaaactaatattt

SEQ ID NO: 935649 - DNA, 15 bp, Homo sapiens
ttgtaaactaatatt

SEQ ID NO: 935650 - DNA, 15 bp, Homo sapiens
attgtaaactaatat

SEQ ID NO: 935651 - DNA, 15 bp, Homo sapiens
aattgtaaactaata

SEQ ID NO: 935652 - DNA, 15 bp, Homo sapiens
aaattgtaaactaat

SEQ ID NO: 935653 - DNA, 15 bp, Homo sapiens
aaaattgtaaactaa

SEQ ID NO: 935654 - DNA, 15 bp, Homo sapiens
aaaaattgtaaacta

SEQ ID NO: 935655 - DNA, 15 bp, Homo sapiens
gaaaaattgtaaact

SEQ ID NO: 935656 - DNA, 15 bp, Homo sapiens
agaaaaattgtaaac

SEQ ID NO: 935657 - DNA, 15 bp, Homo sapiens
tagaaaaattgtaaa

SEQ ID NO: 935658 - DNA, 15 bp, Homo sapiens
ctagaaaaattgtaa

SEQ ID NO: 935659 - DNA, 15 bp, Homo sapiens
cctagaaaaattgta

SEQ ID NO: 935660 - DNA, 15 bp, Homo sapiens
gcctagaaaaattgt

SEQ ID NO: 935661 - DNA, 15 bp, Homo sapiens
tgcctagaaaaattg

SEQ ID NO: 935662 - DNA, 15 bp, Homo sapiens
ttgcctagaaaaatt

SEQ ID NO: 935663 - DNA, 15 bp, Homo sapiens
tttgcctagaaaaat

SEQ ID NO: 935664 - DNA, 15 bp, Homo sapiens
atttgcctagaaaaa

SEQ ID NO: 935665 - DNA, 15 bp, Homo sapiens
aatttgcctagaaaa

SEQ ID NO: 935666 - DNA, 15 bp, Homo sapiens
taatttgcctagaaa

SEQ ID NO: 935667 - DNA, 15 bp, Homo sapiens
ataatttgcctagaa

SEQ ID NO: 935668 - DNA, 15 bp, Homo sapiens
tataatttgcctaga

SEQ ID NO: 935669 - DNA, 15 bp, Homo sapiens
ttataatttgcctag

SEQ ID NO: 935670 - DNA, 15 bp, Homo sapiens
attataatttgccta

SEQ ID NO: 935671 - DNA, 15 bp, Homo sapiens
aattataatttgcct

SEQ ID NO: 935672 - DNA, 15 bp, Homo sapiens
caattataatttgcc

SEQ ID NO: 935673 - DNA, 15 bp, Homo sapiens
tcaattataatttgc

SEQ ID NO: 935674 - DNA, 15 bp, Homo sapiens
atcaattataatttg

SEQ ID NO: 935675 - DNA, 15 bp, Homo sapiens
tatcaattataattt

SEQ ID NO: 935676 - DNA, 15 bp, Homo sapiens
ttatcaattataatt

SEQ ID NO: 935677 - DNA, 15 bp, Homo sapiens
tttatcaattataat

SEQ ID NO: 935678 - DNA, 15 bp, Homo sapiens
atttatcaattataa

SEQ ID NO: 935679 - DNA, 15 bp, Homo sapiens
gatttatcaattata

SEQ ID NO: 935680 - DNA, 15 bp, Homo sapiens
tgatttatcaattat

SEQ ID NO: 935681 - DNA, 15 bp, Homo sapiens
atgatttatcaatta

SEQ ID NO: 935682 - DNA, 15 bp, Homo sapiens
tatgatttatcaatt

SEQ ID NO: 935683 - DNA, 15 bp, Homo sapiens
ttatgatttatcaat

SEQ ID NO: 935684 - DNA, 15 bp, Homo sapiens
tttatgatttatcaa

SEQ ID NO: 935685 - DNA, 15 bp, Homo sapiens
ctttatgatttatca

SEQ ID NO: 935686 - DNA, 15 bp, Homo sapiens
tctttatgatttatc

SEQ ID NO: 935687 - DNA, 15 bp, Homo sapiens
ttctttatgatttat

SEQ ID NO: 935688 - DNA, 15 bp, Homo sapiens
tttctttatgattta

SEQ ID NO: 935689 - DNA, 15 bp, Homo sapiens
ttttctttatgattt

SEQ ID NO: 935690 - DNA, 15 bp, Homo sapiens
attttctttatgatt

SEQ ID NO: 935691 - DNA, 15 bp, Homo sapiens
aattttctttatgat

SEQ ID NO: 935692 - DNA, 15 bp, Homo sapiens
aaattttctttatga

SEQ ID NO: 935693 - DNA, 15 bp, Homo sapiens
taaattttctttatg

SEQ ID NO: 935694 - DNA, 15 bp, Homo sapiens
ttaaattttctttat

SEQ ID NO: 935695 - DNA, 15 bp, Homo sapiens
tttaaattttcttta

SEQ ID NO: 935696 - DNA, 15 bp, Homo sapiens
ttttaaattttcttt

SEQ ID NO: 935697 - DNA, 15 bp, Homo sapiens
attttaaattttctt

SEQ ID NO: 935698 - DNA, 15 bp, Homo sapiens
tattttaaattttct

SEQ ID NO: 935699 - DNA, 15 bp, Homo sapiens
ttattttaaattttc

SEQ ID NO: 935700 - DNA, 15 bp, Homo sapiens
gttattttaaatttt

SEQ ID NO: 935701 - DNA, 15 bp, Homo sapiens
tgttattttaaattt

SEQ ID NO: 935702 - DNA, 15 bp, Homo sapiens
gtgttattttaaatt

SEQ ID NO: 935703 - DNA, 15 bp, Homo sapiens
agtgttattttaaat

SEQ ID NO: 935704 - DNA, 15 bp, Homo sapiens
cagtgttattttaaa

SEQ ID NO: 935705 - DNA, 15 bp, Homo sapiens
ccagtgttattttaa

SEQ ID NO: 935706 - DNA, 15 bp, Homo sapiens
accagtgttatttta

SEQ ID NO: 935707 - DNA, 15 bp, Homo sapiens
taccagtgttatttt

SEQ ID NO: 935708 - DNA, 15 bp, Homo sapiens
ttaccagtgttattt

SEQ ID NO: 935709 - DNA, 15 bp, Homo sapiens
attaccagtgttatt

SEQ ID NO: 935710 - DNA, 15 bp, Homo sapiens
aattaccagtgttat

SEQ ID NO: 935711 - DNA, 15 bp, Homo sapiens
aaattaccagtgtta

SEQ ID NO: 935712 - DNA, 15 bp, Homo sapiens
aaaattaccagtgtt

SEQ ID NO: 935713 - DNA, 15 bp, Homo sapiens
gaaaattaccagtgt

SEQ ID NO: 935714 - DNA, 15 bp, Homo sapiens
ggaaaattaccagtg

SEQ ID NO: 935715 - DNA, 15 bp, Homo sapiens
aggaaaattaccagt

SEQ ID NO: 935716 - DNA, 15 bp, Homo sapiens
taggaaaattaccag

SEQ ID NO: 935717 - DNA, 15 bp, Homo sapiens
gtaggaaaattacca

SEQ ID NO: 935718 - DNA, 15 bp, Homo sapiens
ggtaggaaaattacc

SEQ ID NO: 935719 - DNA, 15 bp, Homo sapiens
aggtaggaaaattac

SEQ ID NO: 935720 - DNA, 15 bp, Homo sapiens
gaggtaggaaaatta

SEQ ID NO: 935721 - DNA, 15 bp, Homo sapiens
ggaggtaggaaaatt

SEQ ID NO: 935722 - DNA, 15 bp, Homo sapiens
aggaggtaggaaaat

SEQ ID NO: 935723 - DNA, 15 bp, Homo sapiens
aaggaggtaggaaaa

SEQ ID NO: 935724 - DNA, 15 bp, Homo sapiens
gaaggaggtaggaaa

SEQ ID NO: 935725 - DNA, 15 bp, Homo sapiens
cgaaggaggtaggaa

SEQ ID NO: 935726 - DNA, 15 bp, Homo sapiens
acgaaggaggtagga

SEQ ID NO: 935727 - DNA, 15 bp, Homo sapiens
aacgaaggaggtagg

SEQ ID NO: 935728 - DNA, 15 bp, Homo sapiens
taacgaaggaggtag

SEQ ID NO: 935729 - DNA, 15 bp, Homo sapiens
ataacgaaggaggta

SEQ ID NO: 935730 - DNA, 15 bp, Homo sapiens
aataacgaaggaggt

SEQ ID NO: 935731 - DNA, 15 bp, Homo sapiens
caataacgaaggagg

SEQ ID NO: 935732 - DNA, 15 bp, Homo sapiens
acaataacgaaggag

SEQ ID NO: 935733 - DNA, 15 bp, Homo sapiens
aacaataacgaagga

SEQ ID NO: 935734 - DNA, 15 bp, Homo sapiens
taacaataacgaagg

SEQ ID NO: 935735 - DNA, 15 bp, Homo sapiens
gtaacaataacgaag

SEQ ID NO: 935736 - DNA, 15 bp, Homo sapiens
tgtaacaataacgaa

SEQ ID NO: 935737 - DNA, 15 bp, Homo sapiens
ctgtaacaataacga

SEQ ID NO: 935738 - DNA, 15 bp, Homo sapiens
tctgtaacaataacg

SEQ ID NO: 935739 - DNA, 15 bp, Homo sapiens
ttctgtaacaataac

SEQ ID NO: 935740 - DNA, 15 bp, Homo sapiens
attctgtaacaataa

SEQ ID NO: 935741 - DNA, 15 bp, Homo sapiens
cattctgtaacaata

SEQ ID NO: 935742 - DNA, 15 bp, Homo sapiens
gcattctgtaacaat

SEQ ID NO: 935743 - DNA, 15 bp, Homo sapiens
agcattctgtaacaa

SEQ ID NO: 935744 - DNA, 15 bp, Homo sapiens
tagcattctgtaaca

SEQ ID NO: 935745 - DNA, 15 bp, Homo sapiens
ttagcattctgtaac

SEQ ID NO: 935746 - DNA, 15 bp, Homo sapiens
tttagcattctgtaa

SEQ ID NO: 935747 - DNA, 15 bp, Homo sapiens
ctttagcattctgta

SEQ ID NO: 935748 - DNA, 15 bp, Homo sapiens
tctttagcattctgt

SEQ ID NO: 935749 - DNA, 15 bp, Homo sapiens
ttctttagcattctg

SEQ ID NO: 935750 - DNA, 15 bp, Homo sapiens
cttctttagcattct

SEQ ID NO: 935751 - DNA, 15 bp, Homo sapiens
tcttctttagcattc

SEQ ID NO: 935752 - DNA, 15 bp, Homo sapiens
ttcttctttagcatt

SEQ ID NO: 935753 - DNA, 15 bp, Homo sapiens
attcttctttagcat

SEQ ID NO: 935754 - DNA, 15 bp, Homo sapiens
aattcttctttagca

SEQ ID NO: 935755 - DNA, 15 bp, Homo sapiens
taattcttctttagc

SEQ ID NO: 935756 - DNA, 15 bp, Homo sapiens
ttaattcttctttag

SEQ ID NO: 935757 - DNA, 15 bp, Homo sapiens
attaattcttcttta

SEQ ID NO: 935758 - DNA, 15 bp, Homo sapiens
aattaattcttcttt

SEQ ID NO: 935759 - DNA, 15 bp, Homo sapiens
taattaattcttctt

SEQ ID NO: 935760 - DNA, 15 bp, Homo sapiens
ctaattaattcttct

SEQ ID NO: 935761 - DNA, 15 bp, Homo sapiens
cctaattaattcttc

SEQ ID NO: 935762 - DNA, 15 bp, Homo sapiens
acctaattaattctt

SEQ ID NO: 935763 - DNA, 15 bp, Homo sapiens
cacctaattaattct

SEQ ID NO: 935764 - DNA, 15 bp, Homo sapiens
ccacctaattaattc

SEQ ID NO: 935765 - DNA, 15 bp, Homo sapiens
cccacctaattaatt

SEQ ID NO: 935766 - DNA, 15 bp, Homo sapiens
tcccacctaattaat

SEQ ID NO: 935767 - DNA, 15 bp, Homo sapiens
ttcccacctaattaa

SEQ ID NO: 935768 - DNA, 15 bp, Homo sapiens
cttcccacctaatta

SEQ ID NO: 935769 - DNA, 15 bp, Homo sapiens
tcttcccacctaatt

SEQ ID NO: 935770 - DNA, 15 bp, Homo sapiens
ttcttcccacctaat

SEQ ID NO: 935771 - DNA, 15 bp, Homo sapiens
cttcttcccacctaa

SEQ ID NO: 935772 - DNA, 15 bp, Homo sapiens
ccttcttcccaccta

SEQ ID NO: 935773 - DNA, 15 bp, Homo sapiens
accttcttcccacct

SEQ ID NO: 935774 - DNA, 15 bp, Homo sapiens
taccttcttcccacc

SEQ ID NO: 935775 - DNA, 15 bp, Homo sapiens
ttaccttcttcccac

SEQ ID NO: 935776 - DNA, 15 bp, Homo sapiens
tttaccttcttccca

SEQ ID NO: 935777 - DNA, 15 bp, Homo sapiens
ttttaccttcttccc

SEQ ID NO: 935778 - DNA, 15 bp, Homo sapiens
tttttaccttcttcc

SEQ ID NO: 935779 - DNA, 15 bp, Homo sapiens
ctttttaccttcttc

SEQ ID NO: 935780 - DNA, 15 bp, Homo sapiens
actttttaccttctt

SEQ ID NO: 935781 - DNA, 15 bp, Homo sapiens
cactttttaccttct

SEQ ID NO: 935782 - DNA, 15 bp, Homo sapiens
ccactttttaccttc

SEQ ID NO: 935783 - DNA, 15 bp, Homo sapiens
gccactttttacctt

SEQ ID NO: 935784 - DNA, 15 bp, Homo sapiens
tgccactttttacct

SEQ ID NO: 935785 - DNA, 15 bp, Homo sapiens
ttgccactttttacc

SEQ ID NO: 935786 - DNA, 15 bp, Homo sapiens
cttgccactttttac

SEQ ID NO: 935787 - DNA, 15 bp, Homo sapiens
gcttgccacttttta

SEQ ID NO: 935788 - DNA, 15 bp, Homo sapiens
ggcttgccacttttt

SEQ ID NO: 935789 - DNA, 15 bp, Homo sapiens
tggcttgccactttt

SEQ ID NO: 935790 - DNA, 15 bp, Homo sapiens
ttggcttgccacttt

SEQ ID NO: 935791 - DNA, 15 bp, Homo sapiens
tttggcttgccactt

SEQ ID NO: 935792 - DNA, 15 bp, Homo sapiens
ttttggcttgccact

SEQ ID NO: 935793 - DNA, 15 bp, Homo sapiens
attttggcttgccac

SEQ ID NO: 935794 - DNA, 15 bp, Homo sapiens
tattttggcttgcca

SEQ ID NO: 935795 - DNA, 15 bp, Homo sapiens
ctattttggcttgcc

SEQ ID NO: 935796 - DNA, 15 bp, Homo sapiens
tctattttggcttgc

SEQ ID NO: 935797 - DNA, 15 bp, Homo sapiens
ttctattttggcttg

SEQ ID NO: 935798 - DNA, 15 bp, Homo sapiens
cttctattttggctt

SEQ ID NO: 935799 - DNA, 15 bp, Homo sapiens
ccttctattttggct

SEQ ID NO: 935800 - DNA, 15 bp, Homo sapiens
tccttctattttggc

SEQ ID NO: 935801 - DNA, 15 bp, Homo sapiens
ttccttctattttgg

SEQ ID NO: 935802 - DNA, 15 bp, Homo sapiens
attccttctattttg

SEQ ID NO: 935803 - DNA, 15 bp, Homo sapiens
aattccttctatttt

SEQ ID NO: 935804 - DNA, 15 bp, Homo sapiens
gaattccttctattt

SEQ ID NO: 935805 - DNA, 15 bp, Homo sapiens
cgaattccttctatt

SEQ ID NO: 935806 - DNA, 15 bp, Homo sapiens
tcgaattccttctat

SEQ ID NO: 935807 - DNA, 15 bp, Homo sapiens
ttcgaattccttcta

SEQ ID NO: 935808 - DNA, 15 bp, Homo sapiens
tttcgaattccttct

SEQ ID NO: 935809 - DNA, 15 bp, Homo sapiens
gtttcgaattccttc

SEQ ID NO: 935810 - DNA, 15 bp, Homo sapiens
tgtttcgaattcctt

SEQ ID NO: 935811 - DNA, 15 bp, Homo sapiens
ttgtttcgaattcct

SEQ ID NO: 935812 - DNA, 15 bp, Homo sapiens
cttgtttcgaattcc

SEQ ID NO: 935813 - DNA, 15 bp, Homo sapiens
acttgtttcgaattc

SEQ ID NO: 935814 - DNA, 15 bp, Homo sapiens
aacttgtttcgaatt

SEQ ID NO: 935815 - DNA, 15 bp, Homo sapiens
taacttgtttcgaat

SEQ ID NO: 935816 - DNA, 15 bp, Homo sapiens
ttaacttgtttcgaa

SEQ ID NO: 935817 - DNA, 15 bp, Homo sapiens
tttaacttgtttcga

SEQ ID NO: 935818 - DNA, 15 bp, Homo sapiens
ttttaacttgtttcg

SEQ ID NO: 935819 - DNA, 15 bp, Homo sapiens
cttttaacttgtttc

SEQ ID NO: 935820 - DNA, 15 bp, Homo sapiens
tcttttaacttgttt

SEQ ID NO: 935821 - DNA, 15 bp, Homo sapiens
ctcttttaacttgtt

SEQ ID NO: 935822 - DNA, 15 bp, Homo sapiens
tctcttttaacttgt

SEQ ID NO: 935823 - DNA, 15 bp, Homo sapiens
ttctcttttaacttg

SEQ ID NO: 935824 - DNA, 15 bp, Homo sapiens
tttctcttttaactt

SEQ ID NO: 935825 - DNA, 15 bp, Homo sapiens
ctttctcttttaact

SEQ ID NO: 935826 - DNA, 15 bp, Homo sapiens
tctttctcttttaac

SEQ ID NO: 935827 - DNA, 15 bp, Homo sapiens
ctctttctcttttaa

SEQ ID NO: 935828 - DNA, 15 bp, Homo sapiens
cctctttctctttta

SEQ ID NO: 935829 - DNA, 15 bp, Homo sapiens
ccctctttctctttt

SEQ ID NO: 935830 - DNA, 15 bp, Homo sapiens
cccctctttctcttt

SEQ ID NO: 935831 - DNA, 15 bp, Homo sapiens
ccccctctttctctt

SEQ ID NO: 935832 - DNA, 15 bp, Homo sapiens
tccccctctttctct

SEQ ID NO: 935833 - DNA, 15 bp, Homo sapiens
ttccccctctttctc

SEQ ID NO: 935834 - DNA, 15 bp, Homo sapiens
cttccccctctttct

SEQ ID NO: 935835 - DNA, 15 bp, Homo sapiens
acttccccctctttc

SEQ ID NO: 935836 - DNA, 15 bp, Homo sapiens
gacttccccctcttt

SEQ ID NO: 935837 - DNA, 15 bp, Homo sapiens
agacttccccctctt

SEQ ID NO: 935838 - DNA, 15 bp, Homo sapiens
aagacttccccctct

SEQ ID NO: 935839 - DNA, 15 bp, Homo sapiens
aaagacttccccctc

SEQ ID NO: 935840 - DNA, 15 bp, Homo sapiens
taaagacttccccct

SEQ ID NO: 935841 - DNA, 15 bp, Homo sapiens
gtaaagacttccccc

SEQ ID NO: 935842 - DNA, 15 bp, Homo sapiens
agtaaagacttcccc

SEQ ID NO: 935843 - DNA, 15 bp, Homo sapiens
aagtaaagacttccc

SEQ ID NO: 935844 - DNA, 15 bp, Homo sapiens
aaagtaaagacttcc

SEQ ID NO: 935845 - DNA, 15 bp, Homo sapiens
taaagtaaagacttc

SEQ ID NO: 935846 - DNA, 15 bp, Homo sapiens
ttaaagtaaagactt

SEQ ID NO: 935847 - DNA, 15 bp, Homo sapiens
gttaaagtaaagact

SEQ ID NO: 935848 - DNA, 15 bp, Homo sapiens
tgttaaagtaaagac

SEQ ID NO: 935849 - DNA, 15 bp, Homo sapiens
ttgttaaagtaaaga

SEQ ID NO: 935850 - DNA, 15 bp, Homo sapiens
tttgttaaagtaaag

SEQ ID NO: 935851 - DNA, 15 bp, Homo sapiens
ctttgttaaagtaaa

SEQ ID NO: 935852 - DNA, 15 bp, Homo sapiens
gctttgttaaagtaa

SEQ ID NO: 935853 - DNA, 15 bp, Homo sapiens
tgctttgttaaagta

SEQ ID NO: 935854 - DNA, 15 bp, Homo sapiens
ctgctttgttaaagt

SEQ ID NO: 935855 - DNA, 15 bp, Homo sapiens
actgctttgttaaag

SEQ ID NO: 935856 - DNA, 15 bp, Homo sapiens
aactgctttgttaaa

SEQ ID NO: 935857 - DNA, 15 bp, Homo sapiens
caactgctttgttaa

SEQ ID NO: 935858 - DNA, 15 bp, Homo sapiens
tcaactgctttgtta

SEQ ID NO: 935859 - DNA, 15 bp, Homo sapiens
ttcaactgctttgtt

SEQ ID NO: 935860 - DNA, 15 bp, Homo sapiens
attcaactgctttgt

SEQ ID NO: 935861 - DNA, 15 bp, Homo sapiens
tattcaactgctttg

SEQ ID NO: 935862 - DNA, 15 bp, Homo sapiens
gtattcaactgcttt

SEQ ID NO: 935863 - DNA, 15 bp, Homo sapiens
agtattcaactgctt

SEQ ID NO: 935864 - DNA, 15 bp, Homo sapiens
aagtattcaactgct

SEQ ID NO: 935865 - DNA, 15 bp, Homo sapiens
aaagtattcaactgc

SEQ ID NO: 935866 - DNA, 15 bp, Homo sapiens
caaagtattcaactg

SEQ ID NO: 935867 - DNA, 15 bp, Homo sapiens
tcaaagtattcaact

SEQ ID NO: 935868 - DNA, 15 bp, Homo sapiens
ttcaaagtattcaac

SEQ ID NO: 935869 - DNA, 15 bp, Homo sapiens
cttcaaagtattcaa

SEQ ID NO: 935870 - DNA, 15 bp, Homo sapiens
ccttcaaagtattca

SEQ ID NO: 935871 - DNA, 15 bp, Homo sapiens
tccttcaaagtattc

SEQ ID NO: 935872 - DNA, 15 bp, Homo sapiens
atccttcaaagtatt

SEQ ID NO: 935873 - DNA, 15 bp, Homo sapiens
gatccttcaaagtat

SEQ ID NO: 935874 - DNA, 15 bp, Homo sapiens
agatccttcaaagta

SEQ ID NO: 935875 - DNA, 15 bp, Homo sapiens
aagatccttcaaagt

SEQ ID NO: 935876 - DNA, 15 bp, Homo sapiens
aaagatccttcaaag

SEQ ID NO: 935877 - DNA, 15 bp, Homo sapiens
aaaagatccttcaaa

SEQ ID NO: 935878 - DNA, 15 bp, Homo sapiens
aaaaagatccttcaa

SEQ ID NO: 935879 - DNA, 15 bp, Homo sapiens
caaaaagatccttca

SEQ ID NO: 935880 - DNA, 15 bp, Homo sapiens
gcaaaaagatccttc

SEQ ID NO: 935881 - DNA, 15 bp, Homo sapiens
ggcaaaaagatcctt

SEQ ID NO: 935882 - DNA, 15 bp, Homo sapiens
tggcaaaaagatcct

SEQ ID NO: 935883 - DNA, 15 bp, Homo sapiens
ttggcaaaaagatcc

SEQ ID NO: 935884 - DNA, 15 bp, Homo sapiens
cttggcaaaaagatc

SEQ ID NO: 935885 - DNA, 15 bp, Homo sapiens
acttggcaaaaagat

SEQ ID NO: 935886 - DNA, 15 bp, Homo sapiens
cacttggcaaaaaga

SEQ ID NO: 935887 - DNA, 15 bp, Homo sapiens
tcacttggcaaaaag

SEQ ID NO: 935888 - DNA, 15 bp, Homo sapiens
ctcacttggcaaaaa

SEQ ID NO: 935889 - DNA, 15 bp, Homo sapiens
actcacttggcaaaa

SEQ ID NO: 935890 - DNA, 15 bp, Homo sapiens
aactcacttggcaaa

SEQ ID NO: 935891 - DNA, 15 bp, Homo sapiens
aaactcacttggcaa

SEQ ID NO: 935892 - DNA, 15 bp, Homo sapiens
taaactcacttggca

SEQ ID NO: 935893 - DNA, 15 bp, Homo sapiens
ttaaactcacttggc

SEQ ID NO: 935894 - DNA, 15 bp, Homo sapiens
tttaaactcacttgg

SEQ ID NO: 935895 - DNA, 15 bp, Homo sapiens
atttaaactcacttg

SEQ ID NO: 935896 - DNA, 15 bp, Homo sapiens
tatttaaactcactt

SEQ ID NO: 935897 - DNA, 15 bp, Homo sapiens
atatttaaactcact

SEQ ID NO: 935898 - DNA, 15 bp, Homo sapiens
gatatttaaactcac

SEQ ID NO: 935899 - DNA, 15 bp, Homo sapiens
tgatatttaaactca

SEQ ID NO: 935900 - DNA, 15 bp, Homo sapiens
atgatatttaaactc

SEQ ID NO: 935901 - DNA, 15 bp, Homo sapiens
aatgatatttaaact

SEQ ID NO: 935902 - DNA, 15 bp, Homo sapiens
taatgatatttaaac

SEQ ID NO: 935903 - DNA, 15 bp, Homo sapiens
ataatgatatttaaa

SEQ ID NO: 935904 - DNA, 15 bp, Homo sapiens
tataatgatatttaa

SEQ ID NO: 935905 - DNA, 15 bp, Homo sapiens
ttataatgatattta

SEQ ID NO: 935906 - DNA, 15 bp, Homo sapiens
tttataatgatattt

SEQ ID NO: 935907 - DNA, 15 bp, Homo sapiens
ttttataatgatatt

SEQ ID NO: 935908 - DNA, 15 bp, Homo sapiens
gttttataatgatat

SEQ ID NO: 935909 - DNA, 15 bp, Homo sapiens
agttttataatgata

SEQ ID NO: 935910 - DNA, 15 bp, Homo sapiens
tagttttataatgat

SEQ ID NO: 935911 - DNA, 15 bp, Homo sapiens
ttagttttataatga

SEQ ID NO: 935912 - DNA, 15 bp, Homo sapiens
attagttttataatg

SEQ ID NO: 935913 - DNA, 15 bp, Homo sapiens
aattagttttataat

SEQ ID NO: 935914 - DNA, 15 bp, Homo sapiens
taattagttttataa

SEQ ID NO: 935915 - DNA, 15 bp, Homo sapiens
ataattagttttata

SEQ ID NO: 935916 - DNA, 15 bp, Homo sapiens
cataattagttttat

SEQ ID NO: 935917 - DNA, 15 bp, Homo sapiens
acataattagtttta

SEQ ID NO: 935918 - DNA, 15 bp, Homo sapiens
cacataattagtttt

SEQ ID NO: 935919 - DNA, 15 bp, Homo sapiens
acacataattagttt

SEQ ID NO: 935920 - DNA, 15 bp, Homo sapiens
tacacataattagtt

SEQ ID NO: 935921 - DNA, 15 bp, Homo sapiens
ttacacataattagt

SEQ ID NO: 935922 - DNA, 15 bp, Homo sapiens
tttacacataattag

SEQ ID NO: 935923 - DNA, 15 bp, Homo sapiens
ttttacacataatta

SEQ ID NO: 935924 - DNA, 15 bp, Homo sapiens
attttacacataatt

SEQ ID NO: 935925 - DNA, 15 bp, Homo sapiens
gattttacacataat

SEQ ID NO: 935926 - DNA, 15 bp, Homo sapiens
ggattttacacataa

SEQ ID NO: 935927 - DNA, 15 bp, Homo sapiens
aggattttacacata

SEQ ID NO: 935928 - DNA, 15 bp, Homo sapiens
aaggattttacacat

SEQ ID NO: 935929 - DNA, 15 bp, Homo sapiens
aaaggattttacaca

SEQ ID NO: 935930 - DNA, 15 bp, Homo sapiens
taaaggattttacac

SEQ ID NO: 935931 - DNA, 15 bp, Homo sapiens
ctaaaggattttaca

SEQ ID NO: 935932 - DNA, 15 bp, Homo sapiens
actaaaggattttac

SEQ ID NO: 935933 - DNA, 15 bp, Homo sapiens
cactaaaggatttta

SEQ ID NO: 935934 - DNA, 15 bp, Homo sapiens
tcactaaaggatttt

SEQ ID NO: 935935 - DNA, 15 bp, Homo sapiens
gtcactaaaggattt

SEQ ID NO: 935936 - DNA, 15 bp, Homo sapiens
ggtcactaaaggatt

SEQ ID NO: 935937 - DNA, 15 bp, Homo sapiens
aggtcactaaaggat

SEQ ID NO: 935938 - DNA, 15 bp, Homo sapiens
caggtcactaaagga

SEQ ID NO: 935939 - DNA, 15 bp, Homo sapiens
ccaggtcactaaagg

SEQ ID NO: 935940 - DNA, 15 bp, Homo sapiens
tccaggtcactaaag

SEQ ID NO: 935941 - DNA, 15 bp, Homo sapiens
ttccaggtcactaaa

SEQ ID NO: 935942 - DNA, 15 bp, Homo sapiens
tttccaggtcactaa

SEQ ID NO: 935943 - DNA, 15 bp, Homo sapiens
atttccaggtcacta

SEQ ID NO: 935944 - DNA, 15 bp, Homo sapiens
aatttccaggtcact

SEQ ID NO: 935945 - DNA, 15 bp, Homo sapiens
taatttccaggtcac

SEQ ID NO: 935946 - DNA, 15 bp, Homo sapiens
ataatttccaggtca

SEQ ID NO: 935947 - DNA, 15 bp, Homo sapiens
tataatttccaggtc

SEQ ID NO: 935948 - DNA, 15 bp, Homo sapiens
atataatttccaggt

SEQ ID NO: 935949 - DNA, 15 bp, Homo sapiens
tatataatttccagg

SEQ ID NO: 935950 - DNA, 15 bp, Homo sapiens
ctatataatttccag

SEQ ID NO: 935951 - DNA, 15 bp, Homo sapiens
gctatataatttcca

SEQ ID NO: 935952 - DNA, 15 bp, Homo sapiens
agctatataatttcc

SEQ ID NO: 935953 - DNA, 15 bp, Homo sapiens
aagctatataatttc

SEQ ID NO: 935954 - DNA, 15 bp, Homo sapiens
aaagctatataattt

SEQ ID NO: 935955 - DNA, 15 bp, Homo sapiens
taaagctatataatt

SEQ ID NO: 935956 - DNA, 15 bp, Homo sapiens
ataaagctatataat

SEQ ID NO: 935957 - DNA, 15 bp, Homo sapiens
gataaagctatataa

SEQ ID NO: 935958 - DNA, 15 bp, Homo sapiens
tgataaagctatata

SEQ ID NO: 935959 - DNA, 15 bp, Homo sapiens
atgataaagctatat

SEQ ID NO: 935960 - DNA, 15 bp, Homo sapiens
tatgataaagctata

SEQ ID NO: 935961 - DNA, 15 bp, Homo sapiens
ctatgataaagctat

SEQ ID NO: 935962 - DNA, 15 bp, Homo sapiens
actatgataaagcta

SEQ ID NO: 935963 - DNA, 15 bp, Homo sapiens
aactatgataaagct

SEQ ID NO: 935964 - DNA, 15 bp, Homo sapiens
caactatgataaagc

SEQ ID NO: 935965 - DNA, 15 bp, Homo sapiens
tcaactatgataaag

SEQ ID NO: 935966 - DNA, 15 bp, Homo sapiens
atcaactatgataaa

SEQ ID NO: 935967 - DNA, 15 bp, Homo sapiens
tatcaactatgataa

SEQ ID NO: 935968 - DNA, 15 bp, Homo sapiens
ttatcaactatgata

SEQ ID NO: 935969 - DNA, 15 bp, Homo sapiens
attatcaactatgat

SEQ ID NO: 935970 - DNA, 15 bp, Homo sapiens
tattatcaactatga

SEQ ID NO: 935971 - DNA, 15 bp, Homo sapiens
atattatcaactatg

SEQ ID NO: 935972 - DNA, 15 bp, Homo sapiens
catattatcaactat

SEQ ID NO: 935973 - DNA, 15 bp, Homo sapiens
tcatattatcaacta

SEQ ID NO: 935974 - DNA, 15 bp, Homo sapiens
ctcatattatcaact

SEQ ID NO: 935975 - DNA, 15 bp, Homo sapiens
tctcatattatcaac

SEQ ID NO: 935976 - DNA, 15 bp, Homo sapiens
ttctcatattatcaa

SEQ ID NO: 935977 - DNA, 15 bp, Homo sapiens
tttctcatattatca

SEQ ID NO: 935978 - DNA, 15 bp, Homo sapiens
atttctcatattatc

SEQ ID NO: 935979 - DNA, 15 bp, Homo sapiens
catttctcatattat

SEQ ID NO: 935980 - DNA, 15 bp, Homo sapiens
ccatttctcatatta

SEQ ID NO: 935981 - DNA, 15 bp, Homo sapiens
accatttctcatatt

SEQ ID NO: 935982 - DNA, 15 bp, Homo sapiens
gaccatttctcatat

SEQ ID NO: 935983 - DNA, 15 bp, Homo sapiens
agaccatttctcata

SEQ ID NO: 935984 - DNA, 15 bp, Homo sapiens
tagaccatttctcat

SEQ ID NO: 935985 - DNA, 15 bp, Homo sapiens
ctagaccatttctca

SEQ ID NO: 935986 - DNA, 15 bp, Homo sapiens
actagaccatttctc

SEQ ID NO: 935987 - DNA, 15 bp, Homo sapiens
aactagaccatttct

SEQ ID NO: 935988 - DNA, 15 bp, Homo sapiens
aaactagaccatttc

SEQ ID NO: 935989 - DNA, 15 bp, Homo sapiens
taaactagaccattt

SEQ ID NO: 935990 - DNA, 15 bp, Homo sapiens
ttaaactagaccatt

SEQ ID NO: 935991 - DNA, 15 bp, Homo sapiens
tttaaactagaccat

SEQ ID NO: 935992 - DNA, 15 bp, Homo sapiens
atttaaactagacca

SEQ ID NO: 935993 - DNA, 15 bp, Homo sapiens
catttaaactagacc

SEQ ID NO: 935994 - DNA, 15 bp, Homo sapiens
tcatttaaactagac

SEQ ID NO: 935995 - DNA, 15 bp, Homo sapiens
atcatttaaactaga

SEQ ID NO: 935996 - DNA, 15 bp, Homo sapiens
gatcatttaaactag

SEQ ID NO: 935997 - DNA, 15 bp, Homo sapiens
tgatcatttaaacta

SEQ ID NO: 935998 - DNA, 15 bp, Homo sapiens
atgatcatttaaact

SEQ ID NO: 935999 - DNA, 15 bp, Homo sapiens
aatgatcatttaaac

SEQ ID NO: 936000 - DNA, 15 bp, Homo sapiens
aaatgatcatttaaa

SEQ ID NO: 936001 - DNA, 15 bp, Homo sapiens
taaatgatcatttaa

SEQ ID NO: 936002 - DNA, 15 bp, Homo sapiens
ataaatgatcattta

SEQ ID NO: 936003 - DNA, 15 bp, Homo sapiens
aataaatgatcattt

SEQ ID NO: 936004 - DNA, 15 bp, Homo sapiens
taataaatgatcatt

SEQ ID NO: 936005 - DNA, 15 bp, Homo sapiens
ataataaatgatcat

SEQ ID NO: 936006 - DNA, 15 bp, Homo sapiens
gataataaatgatca

SEQ ID NO: 936007 - DNA, 15 bp, Homo sapiens
agataataaatgatc

SEQ ID NO: 936008 - DNA, 15 bp, Homo sapiens
tagataataaatgat

SEQ ID NO: 936009 - DNA, 15 bp, Homo sapiens
atagataataaatga

SEQ ID NO: 936010 - DNA, 15 bp, Homo sapiens
catagataataaatg

SEQ ID NO: 936011 - DNA, 15 bp, Homo sapiens
tcatagataataaat

SEQ ID NO: 936012 - DNA, 15 bp, Homo sapiens
atcatagataataaa

SEQ ID NO: 936013 - DNA, 15 bp, Homo sapiens
aatcatagataataa

SEQ ID NO: 936014 - DNA, 15 bp, Homo sapiens
aaatcatagataata

SEQ ID NO: 936015 - DNA, 15 bp, Homo sapiens
taaatcatagataat

SEQ ID NO: 936016 - DNA, 15 bp, Homo sapiens
gtaaatcatagataa

SEQ ID NO: 936017 - DNA, 15 bp, Homo sapiens
agtaaatcatagata

SEQ ID NO: 936018 - DNA, 15 bp, Homo sapiens
aagtaaatcatagat

SEQ ID NO: 936019 - DNA, 15 bp, Homo sapiens
taagtaaatcataga

SEQ ID NO: 936020 - DNA, 15 bp, Homo sapiens
gtaagtaaatcatag

SEQ ID NO: 936021 - DNA, 15 bp, Homo sapiens
agtaagtaaatcata

SEQ ID NO: 936022 - DNA, 15 bp, Homo sapiens
aagtaagtaaatcat

SEQ ID NO: 936023 - DNA, 15 bp, Homo sapiens
aaagtaagtaaatca

SEQ ID NO: 936024 - DNA, 15 bp, Homo sapiens
aaaagtaagtaaatc

SEQ ID NO: 936025 - DNA, 15 bp, Homo sapiens
aaaaagtaagtaaat

SEQ ID NO: 936026 - DNA, 15 bp, Homo sapiens
taaaaagtaagtaaa

SEQ ID NO: 936027 - DNA, 15 bp, Homo sapiens
ataaaaagtaagtaa

SEQ ID NO: 936028 - DNA, 15 bp, Homo sapiens
aataaaaagtaagta

SEQ ID NO: 936029 - DNA, 15 bp, Homo sapiens
aaataaaaagtaagt

SEQ ID NO: 936030 - DNA, 15 bp, Homo sapiens
aaaataaaaagtaag

SEQ ID NO: 936031 - DNA, 15 bp, Homo sapiens
gaaaataaaaagtaa

SEQ ID NO: 936032 - DNA, 15 bp, Homo sapiens
agaaaataaaaagta

SEQ ID NO: 936033 - DNA, 15 bp, Homo sapiens
aagaaaataaaaagt

SEQ ID NO: 936034 - DNA, 15 bp, Homo sapiens
aaagaaaataaaaag

SEQ ID NO: 936035 - DNA, 15 bp, Homo sapiens
taaagaaaataaaaa

SEQ ID NO: 936036 - DNA, 15 bp, Homo sapiens
ttaaagaaaataaaa

SEQ ID NO: 936037 - DNA, 15 bp, Homo sapiens
tttaaagaaaataaa

SEQ ID NO: 936038 - DNA, 15 bp, Homo sapiens
ttttaaagaaaataa

SEQ ID NO: 936039 - DNA, 15 bp, Homo sapiens
attttaaagaaaata

SEQ ID NO: 936040 - DNA, 15 bp, Homo sapiens
gattttaaagaaaat

SEQ ID NO: 936041 - DNA, 15 bp, Homo sapiens
agattttaaagaaaa

SEQ ID NO: 936042 - DNA, 15 bp, Homo sapiens
cagattttaaagaaa

SEQ ID NO: 936043 - DNA, 15 bp, Homo sapiens
acagattttaaagaa

SEQ ID NO: 936044 - DNA, 15 bp, Homo sapiens
aacagattttaaaga

SEQ ID NO: 936045 - DNA, 15 bp, Homo sapiens
aaacagattttaaag

SEQ ID NO: 936046 - DNA, 15 bp, Homo sapiens
aaaacagattttaaa

SEQ ID NO: 936047 - DNA, 15 bp, Homo sapiens
taaaacagattttaa

SEQ ID NO: 936048 - DNA, 15 bp, Homo sapiens
ttaaaacagatttta

SEQ ID NO: 936049 - DNA, 15 bp, Homo sapiens
tttaaaacagatttt

SEQ ID NO: 936050 - DNA, 15 bp, Homo sapiens
atttaaaacagattt

SEQ ID NO: 936051 - DNA, 15 bp, Homo sapiens
tatttaaaacagatt

SEQ ID NO: 936052 - DNA, 15 bp, Homo sapiens
atatttaaaacagat

SEQ ID NO: 936053 - DNA, 15 bp, Homo sapiens
tatatttaaaacaga

SEQ ID NO: 936054 - DNA, 15 bp, Homo sapiens
atatatttaaaacag

SEQ ID NO: 936055 - DNA, 15 bp, Homo sapiens
aatatatttaaaaca

SEQ ID NO: 936056 - DNA, 15 bp, Homo sapiens
caatatatttaaaac

SEQ ID NO: 936057 - DNA, 15 bp, Homo sapiens
acaatatatttaaaa

SEQ ID NO: 936058 - DNA, 15 bp, Homo sapiens
tacaatatatttaaa

SEQ ID NO: 936059 - DNA, 15 bp, Homo sapiens
ttacaatatatttaa

SEQ ID NO: 936060 - DNA, 15 bp, Homo sapiens
gttacaatatattta

SEQ ID NO: 936061 - DNA, 15 bp, Homo sapiens
tgttacaatatattt

SEQ ID NO: 936062 - DNA, 15 bp, Homo sapiens
ttgttacaatatatt

SEQ ID NO: 936063 - DNA, 15 bp, Homo sapiens
attgttacaatatat

SEQ ID NO: 936064 - DNA, 15 bp, Homo sapiens
aattgttacaatata

SEQ ID NO: 936065 - DNA, 15 bp, Homo sapiens
taattgttacaatat

SEQ ID NO: 936066 - DNA, 15 bp, Homo sapiens
ataattgttacaata

SEQ ID NO: 936067 - DNA, 15 bp, Homo sapiens
tataattgttacaat

SEQ ID NO: 936068 - DNA, 15 bp, Homo sapiens
ctataattgttacaa

SEQ ID NO: 936069 - DNA, 15 bp, Homo sapiens
tctataattgttaca

SEQ ID NO: 936070 - DNA, 15 bp, Homo sapiens
atctataattgttac

SEQ ID NO: 936071 - DNA, 15 bp, Homo sapiens
catctataattgtta

SEQ ID NO: 936072 - DNA, 15 bp, Homo sapiens
ccatctataattgtt

SEQ ID NO: 936073 - DNA, 15 bp, Homo sapiens
tccatctataattgt

SEQ ID NO: 936074 - DNA, 15 bp, Homo sapiens
atccatctataattg

SEQ ID NO: 936075 - DNA, 15 bp, Homo sapiens
aatccatctataatt

SEQ ID NO: 936076 - DNA, 15 bp, Homo sapiens
aaatccatctataat

SEQ ID NO: 936077 - DNA, 15 bp, Homo sapiens
aaaatccatctataa

SEQ ID NO: 936078 - DNA, 15 bp, Homo sapiens
gaaaatccatctata

SEQ ID NO: 936079 - DNA, 15 bp, Homo sapiens
ggaaaatccatctat

SEQ ID NO: 936080 - DNA, 15 bp, Homo sapiens
aggaaaatccatcta

SEQ ID NO: 936081 - DNA, 15 bp, Homo sapiens
caggaaaatccatct

SEQ ID NO: 936082 - DNA, 15 bp, Homo sapiens
acaggaaaatccatc

SEQ ID NO: 936083 - DNA, 15 bp, Homo sapiens
cacaggaaaatccat

SEQ ID NO: 936084 - DNA, 15 bp, Homo sapiens
tcacaggaaaatcca

SEQ ID NO: 936085 - DNA, 15 bp, Homo sapiens
atcacaggaaaatcc

SEQ ID NO: 936086 - DNA, 15 bp, Homo sapiens
gatcacaggaaaatc

SEQ ID NO: 936087 - DNA, 15 bp, Homo sapiens
agatcacaggaaaat

SEQ ID NO: 936088 - DNA, 15 bp, Homo sapiens
gagatcacaggaaaa

SEQ ID NO: 936089 - DNA, 15 bp, Homo sapiens
cgagatcacaggaaa

SEQ ID NO: 936090 - DNA, 15 bp, Homo sapiens
acgagatcacaggaa

SEQ ID NO: 936091 - DNA, 15 bp, Homo sapiens
aacgagatcacagga

SEQ ID NO: 936092 - DNA, 15 bp, Homo sapiens
caacgagatcacagg

SEQ ID NO: 936093 - DNA, 15 bp, Homo sapiens
acaacgagatcacag

SEQ ID NO: 936094 - DNA, 15 bp, Homo sapiens
tacaacgagatcaca

SEQ ID NO: 936095 - DNA, 15 bp, Homo sapiens
ttacaacgagatcac

SEQ ID NO: 936096 - DNA, 15 bp, Homo sapiens
tttacaacgagatca

SEQ ID NO: 936097 - DNA, 15 bp, Homo sapiens
atttacaacgagatc

SEQ ID NO: 936098 - DNA, 15 bp, Homo sapiens
aatttacaacgagat

SEQ ID NO: 936099 - DNA, 15 bp, Homo sapiens
taatttacaacgaga

SEQ ID NO: 936100 - DNA, 15 bp, Homo sapiens
ctaatttacaacgag

SEQ ID NO: 936101 - DNA, 15 bp, Homo sapiens
gctaatttacaacga

SEQ ID NO: 936102 - DNA, 15 bp, Homo sapiens
agctaatttacaacg

SEQ ID NO: 936103 - DNA, 15 bp, Homo sapiens
aagctaatttacaac

SEQ ID NO: 936104 - DNA, 15 bp, Homo sapiens
taagctaatttacaa

SEQ ID NO: 936105 - DNA, 15 bp, Homo sapiens
ataagctaatttaca

SEQ ID NO: 936106 - DNA, 15 bp, Homo sapiens
cataagctaatttac

SEQ ID NO: 936107 - DNA, 15 bp, Homo sapiens
tcataagctaattta

SEQ ID NO: 936108 - DNA, 15 bp, Homo sapiens
gtcataagctaattt

SEQ ID NO: 936109 - DNA, 15 bp, Homo sapiens
tgtcataagctaatt

SEQ ID NO: 936110 - DNA, 15 bp, Homo sapiens
ttgtcataagctaat

SEQ ID NO: 936111 - DNA, 15 bp, Homo sapiens
tttgtcataagctaa

SEQ ID NO: 936112 - DNA, 15 bp, Homo sapiens
atttgtcataagcta

SEQ ID NO: 936113 - DNA, 15 bp, Homo sapiens
tatttgtcataagct

SEQ ID NO: 936114 - DNA, 15 bp, Homo sapiens
atatttgtcataagc

SEQ ID NO: 936115 - DNA, 15 bp, Homo sapiens
tatatttgtcataag

SEQ ID NO: 936116 - DNA, 15 bp, Homo sapiens
ctatatttgtcataa

SEQ ID NO: 936117 - DNA, 15 bp, Homo sapiens
cctatatttgtcata

SEQ ID NO: 936118 - DNA, 15 bp, Homo sapiens
ccctatatttgtcat

SEQ ID NO: 936119 - DNA, 15 bp, Homo sapiens
accctatatttgtca

SEQ ID NO: 936120 - DNA, 15 bp, Homo sapiens
caccctatatttgtc

SEQ ID NO: 936121 - DNA, 15 bp, Homo sapiens
acaccctatatttgt

SEQ ID NO: 936122 - DNA, 15 bp, Homo sapiens
aacaccctatatttg

SEQ ID NO: 936123 - DNA, 15 bp, Homo sapiens
taacaccctatattt

SEQ ID NO: 936124 - DNA, 15 bp, Homo sapiens
gtaacaccctatatt

SEQ ID NO: 936125 - DNA, 15 bp, Homo sapiens
tgtaacaccctatat

SEQ ID NO: 936126 - DNA, 15 bp, Homo sapiens
ttgtaacaccctata

SEQ ID NO: 936127 - DNA, 15 bp, Homo sapiens
attgtaacaccctat

SEQ ID NO: 936128 - DNA, 15 bp, Homo sapiens
aattgtaacacccta

SEQ ID NO: 936129 - DNA, 15 bp, Homo sapiens
taattgtaacaccct

SEQ ID NO: 936130 - DNA, 15 bp, Homo sapiens
ataattgtaacaccc

SEQ ID NO: 936131 - DNA, 15 bp, Homo sapiens
aataattgtaacacc

SEQ ID NO: 936132 - DNA, 15 bp, Homo sapiens
caataattgtaacac

SEQ ID NO: 936133 - DNA, 15 bp, Homo sapiens
acaataattgtaaca

SEQ ID NO: 936134 - DNA, 15 bp, Homo sapiens
tacaataattgtaac

SEQ ID NO: 936135 - DNA, 15 bp, Homo sapiens
ttacaataattgtaa

SEQ ID NO: 936136 - DNA, 15 bp, Homo sapiens
attacaataattgta

SEQ ID NO: 936137 - DNA, 15 bp, Homo sapiens
aattacaataattgt

SEQ ID NO: 936138 - DNA, 15 bp, Homo sapiens
aaattacaataattg

SEQ ID NO: 936139 - DNA, 15 bp, Homo sapiens
caaattacaataatt

SEQ ID NO: 936140 - DNA, 15 bp, Homo sapiens
ccaaattacaataat

SEQ ID NO: 936141 - DNA, 15 bp, Homo sapiens
accaaattacaataa

SEQ ID NO: 936142 - DNA, 15 bp, Homo sapiens
aaccaaattacaata

SEQ ID NO: 936143 - DNA, 15 bp, Homo sapiens
aaaccaaattacaat

SEQ ID NO: 936144 - DNA, 15 bp, Homo sapiens
caaaccaaattacaa

SEQ ID NO: 936145 - DNA, 15 bp, Homo sapiens
ccaaaccaaattaca

SEQ ID NO: 936146 - DNA, 15 bp, Homo sapiens
accaaaccaaattac

SEQ ID NO: 936147 - DNA, 15 bp, Homo sapiens
taccaaaccaaatta

SEQ ID NO: 936148 - DNA, 15 bp, Homo sapiens
ttaccaaaccaaatt

SEQ ID NO: 936149 - DNA, 15 bp, Homo sapiens
attaccaaaccaaat

SEQ ID NO: 936150 - DNA, 15 bp, Homo sapiens
cattaccaaaccaaa

SEQ ID NO: 936151 - DNA, 15 bp, Homo sapiens
tcattaccaaaccaa

SEQ ID NO: 936152 - DNA, 15 bp, Homo sapiens
ctcattaccaaacca

SEQ ID NO: 936153 - DNA, 15 bp, Homo sapiens
actcattaccaaacc

SEQ ID NO: 936154 - DNA, 15 bp, Homo sapiens
tactcattaccaaac

SEQ ID NO: 936155 - DNA, 15 bp, Homo sapiens
atactcattaccaaa

SEQ ID NO: 936156 - DNA, 15 bp, Homo sapiens
catactcattaccaa

SEQ ID NO: 936157 - DNA, 15 bp, Homo sapiens
gcatactcattacca

SEQ ID NO: 936158 - DNA, 15 bp, Homo sapiens
tgcatactcattacc

SEQ ID NO: 936159 - DNA, 15 bp, Homo sapiens
ttgcatactcattac

SEQ ID NO: 936160 - DNA, 15 bp, Homo sapiens
attgcatactcatta

SEQ ID NO: 936161 - DNA, 15 bp, Homo sapiens
aattgcatactcatt

SEQ ID NO: 936162 - DNA, 15 bp, Homo sapiens
caattgcatactcat

SEQ ID NO: 936163 - DNA, 15 bp, Homo sapiens
tcaattgcatactca

SEQ ID NO: 936164 - DNA, 15 bp, Homo sapiens
ttcaattgcatactc

SEQ ID NO: 936165 - DNA, 15 bp, Homo sapiens
tttcaattgcatact

SEQ ID NO: 936166 - DNA, 15 bp, Homo sapiens
ttttcaattgcatac

SEQ ID NO: 936167 - DNA, 15 bp, Homo sapiens
cttttcaattgcata

SEQ ID NO: 936168 - DNA, 15 bp, Homo sapiens
gcttttcaattgcat

SEQ ID NO: 936169 - DNA, 15 bp, Homo sapiens
ggcttttcaattgca

SEQ ID NO: 936170 - DNA, 15 bp, Homo sapiens
tggcttttcaattgc

SEQ ID NO: 936171 - DNA, 15 bp, Homo sapiens
ttggcttttcaattg

SEQ ID NO: 936172 - DNA, 15 bp, Homo sapiens
tttggcttttcaatt

SEQ ID NO: 936173 - DNA, 15 bp, Homo sapiens
gtttggcttttcaat

SEQ ID NO: 936174 - DNA, 15 bp, Homo sapiens
tgtttggcttttcaa

SEQ ID NO: 936175 - DNA, 15 bp, Homo sapiens
gtgtttggcttttca

SEQ ID NO: 936176 - DNA, 15 bp, Homo sapiens
agtgtttggcttttc

SEQ ID NO: 936177 - DNA, 15 bp, Homo sapiens
cagtgtttggctttt

SEQ ID NO: 936178 - DNA, 15 bp, Homo sapiens
tcagtgtttggcttt

SEQ ID NO: 936179 - DNA, 15 bp, Homo sapiens
ttcagtgtttggctt

SEQ ID NO: 936180 - DNA, 15 bp, Homo sapiens
attcagtgtttggct

SEQ ID NO: 936181 - DNA, 15 bp, Homo sapiens
cattcagtgtttggc

SEQ ID NO: 936182 - DNA, 15 bp, Homo sapiens
ccattcagtgtttgg

SEQ ID NO: 936183 - DNA, 15 bp, Homo sapiens
accattcagtgtttg

SEQ ID NO: 936184 - DNA, 15 bp, Homo sapiens
taccattcagtgttt

SEQ ID NO: 936185 - DNA, 15 bp, Homo sapiens
ataccattcagtgtt

SEQ ID NO: 936186 - DNA, 15 bp, Homo sapiens
tataccattcagtgt

SEQ ID NO: 936187 - DNA, 15 bp, Homo sapiens
atataccattcagtg

SEQ ID NO: 936188 - DNA, 15 bp, Homo sapiens
aatataccattcagt

SEQ ID NO: 936189 - DNA, 15 bp, Homo sapiens
aaatataccattcag

SEQ ID NO: 936190 - DNA, 15 bp, Homo sapiens
gaaatataccattca

SEQ ID NO: 936191 - DNA, 15 bp, Homo sapiens
tgaaatataccattc

SEQ ID NO: 936192 - DNA, 15 bp, Homo sapiens
atgaaatataccatt

SEQ ID NO: 936193 - DNA, 15 bp, Homo sapiens
catgaaatataccat

SEQ ID NO: 936194 - DNA, 15 bp, Homo sapiens
tcatgaaatatacca

SEQ ID NO: 936195 - DNA, 15 bp, Homo sapiens
atcatgaaatatacc

SEQ ID NO: 936196 - DNA, 15 bp, Homo sapiens
aatcatgaaatatac

SEQ ID NO: 936197 - DNA, 15 bp, Homo sapiens
gaatcatgaaatata

SEQ ID NO: 936198 - DNA, 15 bp, Homo sapiens
agaatcatgaaatat

SEQ ID NO: 936199 - DNA, 15 bp, Homo sapiens
tagaatcatgaaata

SEQ ID NO: 936200 - DNA, 15 bp, Homo sapiens
atagaatcatgaaat

SEQ ID NO: 936201 - DNA, 15 bp, Homo sapiens
tatagaatcatgaaa

SEQ ID NO: 936202 - DNA, 15 bp, Homo sapiens
atatagaatcatgaa

SEQ ID NO: 936203 - DNA, 15 bp, Homo sapiens
aatatagaatcatga

SEQ ID NO: 936204 - DNA, 15 bp, Homo sapiens
taatatagaatcatg

SEQ ID NO: 936205 - DNA, 15 bp, Homo sapiens
ttaatatagaatcat

SEQ ID NO: 936206 - DNA, 15 bp, Homo sapiens
tttaatatagaatca

SEQ ID NO: 936207 - DNA, 15 bp, Homo sapiens
atttaatatagaatc

SEQ ID NO: 936208 - DNA, 15 bp, Homo sapiens
aatttaatatagaat

SEQ ID NO: 936209 - DNA, 15 bp, Homo sapiens
gaatttaatatagaa

SEQ ID NO: 936210 - DNA, 15 bp, Homo sapiens
ggaatttaatataga

SEQ ID NO: 936211 - DNA, 15 bp, Homo sapiens
tggaatttaatatag

SEQ ID NO: 936212 - DNA, 15 bp, Homo sapiens
gtggaatttaatata

SEQ ID NO: 936213 - DNA, 15 bp, Homo sapiens
tgtggaatttaatat

SEQ ID NO: 936214 - DNA, 15 bp, Homo sapiens
ctgtggaatttaata

SEQ ID NO: 936215 - DNA, 15 bp, Homo sapiens
tctgtggaatttaat

SEQ ID NO: 936216 - DNA, 15 bp, Homo sapiens
ctctgtggaatttaa

SEQ ID NO: 936217 - DNA, 15 bp, Homo sapiens
gctctgtggaattta

SEQ ID NO: 936218 - DNA, 15 bp, Homo sapiens
ggctctgtggaattt

SEQ ID NO: 936219 - DNA, 15 bp, Homo sapiens
cggctctgtggaatt

SEQ ID NO: 936220 - DNA, 15 bp, Homo sapiens
tcggctctgtggaat

SEQ ID NO: 936221 - DNA, 15 bp, Homo sapiens
atcggctctgtggaa

SEQ ID NO: 936222 - DNA, 15 bp, Homo sapiens
tatcggctctgtgga

SEQ ID NO: 936223 - DNA, 15 bp, Homo sapiens
ttatcggctctgtgg

SEQ ID NO: 936224 - DNA, 15 bp, Homo sapiens
tttatcggctctgtg

SEQ ID NO: 936225 - DNA, 15 bp, Homo sapiens
ctttatcggctctgt

SEQ ID NO: 936226 - DNA, 15 bp, Homo sapiens
tctttatcggctctg

SEQ ID NO: 936227 - DNA, 15 bp, Homo sapiens
ctctttatcggctct

SEQ ID NO: 936228 - DNA, 15 bp, Homo sapiens
tctctttatcggctc

SEQ ID NO: 936229 - DNA, 15 bp, Homo sapiens
ttctctttatcggct

SEQ ID NO: 936230 - DNA, 15 bp, Homo sapiens
tttctctttatcggc

SEQ ID NO: 936231 - DNA, 15 bp, Homo sapiens
gtttctctttatcgg

SEQ ID NO: 936232 - DNA, 15 bp, Homo sapiens
agtttctctttatcg

SEQ ID NO: 936233 - DNA, 15 bp, Homo sapiens
aagtttctctttatc

SEQ ID NO: 936234 - DNA, 15 bp, Homo sapiens
taagtttctctttat

SEQ ID NO: 936235 - DNA, 15 bp, Homo sapiens
gtaagtttctcttta

SEQ ID NO: 936236 - DNA, 15 bp, Homo sapiens
agtaagtttctcttt

SEQ ID NO: 936237 - DNA, 15 bp, Homo sapiens
aagtaagtttctctt

SEQ ID NO: 936238 - DNA, 15 bp, Homo sapiens
aaagtaagtttctct

SEQ ID NO: 936239 - DNA, 15 bp, Homo sapiens
caaagtaagtttctc

SEQ ID NO: 936240 - DNA, 15 bp, Homo sapiens
gcaaagtaagtttct

SEQ ID NO: 936241 - DNA, 15 bp, Homo sapiens
tgcaaagtaagtttc

SEQ ID NO: 936242 - DNA, 15 bp, Homo sapiens
ctgcaaagtaagttt

SEQ ID NO: 936243 - DNA, 15 bp, Homo sapiens
tctgcaaagtaagtt

SEQ ID NO: 936244 - DNA, 15 bp, Homo sapiens
ctctgcaaagtaagt

SEQ ID NO: 936245 - DNA, 15 bp, Homo sapiens
cctctgcaaagtaag

SEQ ID NO: 936246 - DNA, 15 bp, Homo sapiens
tcctctgcaaagtaa

SEQ ID NO: 936247 - DNA, 15 bp, Homo sapiens
ttcctctgcaaagta

SEQ ID NO: 936248 - DNA, 15 bp, Homo sapiens
tttcctctgcaaagt

SEQ ID NO: 936249 - DNA, 15 bp, Homo sapiens
gtttcctctgcaaag

SEQ ID NO: 936250 - DNA, 15 bp, Homo sapiens
agtttcctctgcaaa

SEQ ID NO: 936251 - DNA, 15 bp, Homo sapiens
tagtttcctctgcaa

SEQ ID NO: 936252 - DNA, 15 bp, Homo sapiens
ttagtttcctctgca

SEQ ID NO: 936253 - DNA, 15 bp, Homo sapiens
tttagtttcctctgc

SEQ ID NO: 936254 - DNA, 15 bp, Homo sapiens
ttttagtttcctctg

SEQ ID NO: 936255 - DNA, 15 bp, Homo sapiens
tttttagtttcctct

SEQ ID NO: 936256 - DNA, 15 bp, Homo sapiens
gtttttagtttcctc

SEQ ID NO: 936257 - DNA, 15 bp, Homo sapiens
tgtttttagtttcct

SEQ ID NO: 936258 - DNA, 15 bp, Homo sapiens
ttgtttttagtttcc

SEQ ID NO: 936259 - DNA, 15 bp, Homo sapiens
gttgtttttagtttc

SEQ ID NO: 936260 - DNA, 15 bp, Homo sapiens
agttgtttttagttt

SEQ ID NO: 936261 - DNA, 15 bp, Homo sapiens
cagttgtttttagtt

SEQ ID NO: 936262 - DNA, 15 bp, Homo sapiens
ccagttgtttttagt

SEQ ID NO: 936263 - DNA, 15 bp, Homo sapiens
gccagttgtttttag

SEQ ID NO: 936264 - DNA, 15 bp, Homo sapiens
tgccagttgttttta

SEQ ID NO: 936265 - DNA, 15 bp, Homo sapiens
atgccagttgttttt

SEQ ID NO: 936266 - DNA, 15 bp, Homo sapiens
catgccagttgtttt

SEQ ID NO: 936267 - DNA, 15 bp, Homo sapiens
tcatgccagttgttt

SEQ ID NO: 936268 - DNA, 15 bp, Homo sapiens
gtcatgccagttgtt

SEQ ID NO: 936269 - DNA, 15 bp, Homo sapiens
agtcatgccagttgt

SEQ ID NO: 936270 - DNA, 15 bp, Homo sapiens
cagtcatgccagttg

SEQ ID NO: 936271 - DNA, 15 bp, Homo sapiens
acagtcatgccagtt

SEQ ID NO: 936272 - DNA, 15 bp, Homo sapiens
aacagtcatgccagt

SEQ ID NO: 936273 - DNA, 15 bp, Homo sapiens
caacagtcatgccag

SEQ ID NO: 936274 - DNA, 15 bp, Homo sapiens
tcaacagtcatgcca

SEQ ID NO: 936275 - DNA, 15 bp, Homo sapiens
atcaacagtcatgcc

SEQ ID NO: 936276 - DNA, 15 bp, Homo sapiens
gatcaacagtcatgc

SEQ ID NO: 936277 - DNA, 15 bp, Homo sapiens
tgatcaacagtcatg

SEQ ID NO: 936278 - DNA, 15 bp, Homo sapiens
ctgatcaacagtcat

SEQ ID NO: 936279 - DNA, 15 bp, Homo sapiens
cctgatcaacagtca

SEQ ID NO: 936280 - DNA, 15 bp, Homo sapiens
acctgatcaacagtc

SEQ ID NO: 936281 - DNA, 15 bp, Homo sapiens
aacctgatcaacagt

SEQ ID NO: 936282 - DNA, 15 bp, Homo sapiens
aaacctgatcaacag

SEQ ID NO: 936283 - DNA, 15 bp, Homo sapiens
aaaacctgatcaaca

SEQ ID NO: 936284 - DNA, 15 bp, Homo sapiens
caaaacctgatcaac

SEQ ID NO: 936285 - DNA, 15 bp, Homo sapiens
ccaaaacctgatcaa

SEQ ID NO: 936286 - DNA, 15 bp, Homo sapiens
cccaaaacctgatca

SEQ ID NO: 936287 - DNA, 15 bp, Homo sapiens
tcccaaaacctgatc

SEQ ID NO: 936288 - DNA, 15 bp, Homo sapiens
ttcccaaaacctgat

SEQ ID NO: 936289 - DNA, 15 bp, Homo sapiens
attcccaaaacctga

SEQ ID NO: 936290 - DNA, 15 bp, Homo sapiens
tattcccaaaacctg

SEQ ID NO: 936291 - DNA, 15 bp, Homo sapiens
gtattcccaaaacct

SEQ ID NO: 936292 - DNA, 15 bp, Homo sapiens
cgtattcccaaaacc

SEQ ID NO: 936293 - DNA, 15 bp, Homo sapiens
tcgtattcccaaaac

SEQ ID NO: 936294 - DNA, 15 bp, Homo sapiens
ctcgtattcccaaaa

SEQ ID NO: 936295 - DNA, 15 bp, Homo sapiens
gctcgtattcccaaa

SEQ ID NO: 936296 - DNA, 15 bp, Homo sapiens
agctcgtattcccaa

SEQ ID NO: 936297 - DNA, 15 bp, Homo sapiens
aagctcgtattccca

SEQ ID NO: 936298 - DNA, 15 bp, Homo sapiens
aaagctcgtattccc

SEQ ID NO: 936299 - DNA, 15 bp, Homo sapiens
caaagctcgtattcc

SEQ ID NO: 936300 - DNA, 15 bp, Homo sapiens
ccaaagctcgtattc

SEQ ID NO: 936301 - DNA, 15 bp, Homo sapiens
tccaaagctcgtatt

SEQ ID NO: 936302 - DNA, 15 bp, Homo sapiens
ctccaaagctcgtat

SEQ ID NO: 936303 - DNA, 15 bp, Homo sapiens
actccaaagctcgta

SEQ ID NO: 936304 - DNA, 15 bp, Homo sapiens
gactccaaagctcgt

SEQ ID NO: 936305 - DNA, 15 bp, Homo sapiens
tgactccaaagctcg

SEQ ID NO: 936306 - DNA, 15 bp, Homo sapiens
ctgactccaaagctc

SEQ ID NO: 936307 - DNA, 15 bp, Homo sapiens
tctgactccaaagct

SEQ ID NO: 936308 - DNA, 15 bp, Homo sapiens
ttctgactccaaagc

SEQ ID NO: 936309 - DNA, 15 bp, Homo sapiens
tttctgactccaaag

SEQ ID NO: 936310 - DNA, 15 bp, Homo sapiens
ttttctgactccaaa

SEQ ID NO: 936311 - DNA, 15 bp, Homo sapiens
tttttctgactccaa

SEQ ID NO: 936312 - DNA, 15 bp, Homo sapiens
ctttttctgactcca

SEQ ID NO: 936313 - DNA, 15 bp, Homo sapiens
tctttttctgactcc

SEQ ID NO: 936314 - DNA, 15 bp, Homo sapiens
ttctttttctgactc

SEQ ID NO: 936315 - DNA, 15 bp, Homo sapiens
attctttttctgact

SEQ ID NO: 936316 - DNA, 15 bp, Homo sapiens
aattctttttctgac

SEQ ID NO: 936317 - DNA, 15 bp, Homo sapiens
caattctttttctga

SEQ ID NO: 936318 - DNA, 15 bp, Homo sapiens
ccaattctttttctg

SEQ ID NO: 936319 - DNA, 15 bp, Homo sapiens
tccaattctttttct

SEQ ID NO: 936320 - DNA, 15 bp, Homo sapiens
ttccaattctttttc

SEQ ID NO: 936321 - DNA, 15 bp, Homo sapiens
cttccaattcttttt

SEQ ID NO: 936322 - DNA, 15 bp, Homo sapiens
tcttccaattctttt

SEQ ID NO: 936323 - DNA, 15 bp, Homo sapiens
ttcttccaattcttt

SEQ ID NO: 936324 - DNA, 15 bp, Homo sapiens
attcttccaattctt

SEQ ID NO: 936325 - DNA, 15 bp, Homo sapiens
aattcttccaattct

SEQ ID NO: 936326 - DNA, 15 bp, Homo sapiens
taattcttccaattc

SEQ ID NO: 936327 - DNA, 15 bp, Homo sapiens
ttaattcttccaatt

SEQ ID NO: 936328 - DNA, 15 bp, Homo sapiens
tttaattcttccaat

SEQ ID NO: 936329 - DNA, 15 bp, Homo sapiens
ttttaattcttccaa

SEQ ID NO: 936330 - DNA, 15 bp, Homo sapiens
tttttaattcttcca

SEQ ID NO: 936331 - DNA, 15 bp, Homo sapiens
ttttttaattcttcc

SEQ ID NO: 936332 - DNA, 15 bp, Homo sapiens
cttttttaattcttc

SEQ ID NO: 936333 - DNA, 15 bp, Homo sapiens
tcttttttaattctt

SEQ ID NO: 936334 - DNA, 15 bp, Homo sapiens
ctcttttttaattct

SEQ ID NO: 936335 - DNA, 15 bp, Homo sapiens
tctcttttttaattc

SEQ ID NO: 936336 - DNA, 15 bp, Homo sapiens
ttctcttttttaatt

SEQ ID NO: 936337 - DNA, 15 bp, Homo sapiens
tttctcttttttaat

SEQ ID NO: 936338 - DNA, 15 bp, Homo sapiens
atttctcttttttaa

SEQ ID NO: 936339 - DNA, 15 bp, Homo sapiens
gatttctctttttta

SEQ ID NO: 936340 - DNA, 15 bp, Homo sapiens
agatttctctttttt

SEQ ID NO: 936341 - DNA, 15 bp, Homo sapiens
aagatttctcttttt

SEQ ID NO: 936342 - DNA, 15 bp, Homo sapiens
caagatttctctttt

SEQ ID NO: 936343 - DNA, 15 bp, Homo sapiens
tcaagatttctcttt

SEQ ID NO: 936344 - DNA, 15 bp, Homo sapiens
gtcaagatttctctt

SEQ ID NO: 936345 - DNA, 15 bp, Homo sapiens
agtcaagatttctct

SEQ ID NO: 936346 - DNA, 15 bp, Homo sapiens
aagtcaagatttctc

SEQ ID NO: 936347 - DNA, 15 bp, Homo sapiens
taagtcaagatttct

SEQ ID NO: 936348 - DNA, 15 bp, Homo sapiens
ctaagtcaagatttc

SEQ ID NO: 936349 - DNA, 15 bp, Homo sapiens
tctaagtcaagattt

SEQ ID NO: 936350 - DNA, 15 bp, Homo sapiens
ttctaagtcaagatt

SEQ ID NO: 936351 - DNA, 15 bp, Homo sapiens
tttctaagtcaagat

SEQ ID NO: 936352 - DNA, 15 bp, Homo sapiens
ttttctaagtcaaga

SEQ ID NO: 936353 - DNA, 15 bp, Homo sapiens
attttctaagtcaag

SEQ ID NO: 936354 - DNA, 15 bp, Homo sapiens
cattttctaagtcaa

SEQ ID NO: 936355 - DNA, 15 bp, Homo sapiens
tcattttctaagtca

SEQ ID NO: 936356 - DNA, 15 bp, Homo sapiens
atcattttctaagtc

SEQ ID NO: 936357 - DNA, 15 bp, Homo sapiens
tatcattttctaagt

SEQ ID NO: 936358 - DNA, 15 bp, Homo sapiens
atatcattttctaag

SEQ ID NO: 936359 - DNA, 15 bp, Homo sapiens
tatatcattttctaa

SEQ ID NO: 936360 - DNA, 15 bp, Homo sapiens
atatatcattttcta

SEQ ID NO: 936361 - DNA, 15 bp, Homo sapiens
aatatatcattttct

SEQ ID NO: 936362 - DNA, 15 bp, Homo sapiens
caatatatcattttc

SEQ ID NO: 936363 - DNA, 15 bp, Homo sapiens
acaatatatcatttt

SEQ ID NO: 936364 - DNA, 15 bp, Homo sapiens
tacaatatatcattt

SEQ ID NO: 936365 - DNA, 15 bp, Homo sapiens
atacaatatatcatt

SEQ ID NO: 936366 - DNA, 15 bp, Homo sapiens
tatacaatatatcat

SEQ ID NO: 936367 - DNA, 15 bp, Homo sapiens
atatacaatatatca

SEQ ID NO: 936368 - DNA, 15 bp, Homo sapiens
catatacaatatatc

SEQ ID NO: 936369 - DNA, 15 bp, Homo sapiens
tcatatacaatatat

SEQ ID NO: 936370 - DNA, 15 bp, Homo sapiens
ctcatatacaatata

SEQ ID NO: 936371 - DNA, 15 bp, Homo sapiens
cctcatatacaatat

SEQ ID NO: 936372 - DNA, 15 bp, Homo sapiens
acctcatatacaata

SEQ ID NO: 936373 - DNA, 15 bp, Homo sapiens
tacctcatatacaat

SEQ ID NO: 936374 - DNA, 15 bp, Homo sapiens
ttacctcatatacaa

SEQ ID NO: 936375 - DNA, 15 bp, Homo sapiens
cttacctcatataca

SEQ ID NO: 936376 - DNA, 15 bp, Homo sapiens
gcttacctcatatac

SEQ ID NO: 936377 - DNA, 15 bp, Homo sapiens
agcttacctcatata

SEQ ID NO: 936378 - DNA, 15 bp, Homo sapiens
tagcttacctcatat

SEQ ID NO: 936379 - DNA, 15 bp, Homo sapiens
atagcttacctcata

SEQ ID NO: 936380 - DNA, 15 bp, Homo sapiens
aatagcttacctcat

SEQ ID NO: 936381 - DNA, 15 bp, Homo sapiens
taatagcttacctca

SEQ ID NO: 936382 - DNA, 15 bp, Homo sapiens
ataatagcttacctc

SEQ ID NO: 936383 - DNA, 15 bp, Homo sapiens
cataatagcttacct

SEQ ID NO: 936384 - DNA, 15 bp, Homo sapiens
acataatagcttacc

SEQ ID NO: 936385 - DNA, 15 bp, Homo sapiens
cacataatagcttac

SEQ ID NO: 936386 - DNA, 15 bp, Homo sapiens
ccacataatagctta

SEQ ID NO: 936387 - DNA, 15 bp, Homo sapiens
tccacataatagctt

SEQ ID NO: 936388 - DNA, 15 bp, Homo sapiens
ttccacataatagct

SEQ ID NO: 936389 - DNA, 15 bp, Homo sapiens
tttccacataatagc

SEQ ID NO: 936390 - DNA, 15 bp, Homo sapiens
atttccacataatag

SEQ ID NO: 936391 - DNA, 15 bp, Homo sapiens
catttccacataata

SEQ ID NO: 936392 - DNA, 15 bp, Homo sapiens
acatttccacataat

SEQ ID NO: 936393 - DNA, 15 bp, Homo sapiens
cacatttccacataa

SEQ ID NO: 936394 - DNA, 15 bp, Homo sapiens
gcacatttccacata

SEQ ID NO: 936395 - DNA, 15 bp, Homo sapiens
ggcacatttccacat

SEQ ID NO: 936396 - DNA, 15 bp, Homo sapiens
tggcacatttccaca

SEQ ID NO: 936397 - DNA, 15 bp, Homo sapiens
gtggcacatttccac

SEQ ID NO: 936398 - DNA, 15 bp, Homo sapiens
ggtggcacatttcca

SEQ ID NO: 936399 - DNA, 15 bp, Homo sapiens
gggtggcacatttcc

SEQ ID NO: 936400 - DNA, 15 bp, Homo sapiens
tgggtggcacatttc

SEQ ID NO: 936401 - DNA, 15 bp, Homo sapiens
atgggtggcacattt

SEQ ID NO: 936402 - DNA, 15 bp, Homo sapiens
aatgggtggcacatt

SEQ ID NO: 936403 - DNA, 15 bp, Homo sapiens
caatgggtggcacat

SEQ ID NO: 936404 - DNA, 15 bp, Homo sapiens
acaatgggtggcaca

SEQ ID NO: 936405 - DNA, 15 bp, Homo sapiens
tacaatgggtggcac

SEQ ID NO: 936406 - DNA, 15 bp, Homo sapiens
ttacaatgggtggca

SEQ ID NO: 936407 - DNA, 15 bp, Homo sapiens
attacaatgggtggc

SEQ ID NO: 936408 - DNA, 15 bp, Homo sapiens
cattacaatgggtgg

SEQ ID NO: 936409 - DNA, 15 bp, Homo sapiens
tcattacaatgggtg

SEQ ID NO: 936410 - DNA, 15 bp, Homo sapiens
ttcattacaatgggt

SEQ ID NO: 936411 - DNA, 15 bp, Homo sapiens
tttcattacaatggg

SEQ ID NO: 936412 - DNA, 15 bp, Homo sapiens
ttttcattacaatgg

SEQ ID NO: 936413 - DNA, 15 bp, Homo sapiens
tttttcattacaatg

SEQ ID NO: 936414 - DNA, 15 bp, Homo sapiens
gtttttcattacaat

SEQ ID NO: 936415 - DNA, 15 bp, Homo sapiens
agtttttcattacaa

SEQ ID NO: 936416 - DNA, 15 bp, Homo sapiens
cagtttttcattaca

SEQ ID NO: 936417 - DNA, 15 bp, Homo sapiens
ccagtttttcattac

SEQ ID NO: 936418 - DNA, 15 bp, Homo sapiens
accagtttttcatta

SEQ ID NO: 936419 - DNA, 15 bp, Homo sapiens
aaccagtttttcatt

SEQ ID NO: 936420 - DNA, 15 bp, Homo sapiens
caaccagtttttcat

SEQ ID NO: 936421 - DNA, 15 bp, Homo sapiens
tcaaccagtttttca

SEQ ID NO: 936422 - DNA, 15 bp, Homo sapiens
gtcaaccagtttttc

SEQ ID NO: 936423 - DNA, 15 bp, Homo sapiens
ggtcaaccagttttt

SEQ ID NO: 936424 - DNA, 15 bp, Homo sapiens
gggtcaaccagtttt

SEQ ID NO: 936425 - DNA, 15 bp, Homo sapiens
ggggtcaaccagttt

SEQ ID NO: 936426 - DNA, 15 bp, Homo sapiens
aggggtcaaccagtt

SEQ ID NO: 936427 - DNA, 15 bp, Homo sapiens
taggggtcaaccagt

SEQ ID NO: 936428 - DNA, 15 bp, Homo sapiens
ctaggggtcaaccag

SEQ ID NO: 936429 - DNA, 15 bp, Homo sapiens
tctaggggtcaacca

SEQ ID NO: 936430 - DNA, 15 bp, Homo sapiens
ttctaggggtcaacc

SEQ ID NO: 936431 - DNA, 15 bp, Homo sapiens
tttctaggggtcaac

SEQ ID NO: 936432 - DNA, 15 bp, Homo sapiens
atttctaggggtcaa

SEQ ID NO: 936433 - DNA, 15 bp, Homo sapiens
aatttctaggggtca

SEQ ID NO: 936434 - DNA, 15 bp, Homo sapiens
caatttctaggggtc

SEQ ID NO: 936435 - DNA, 15 bp, Homo sapiens
tcaatttctaggggt

SEQ ID NO: 936436 - DNA, 15 bp, Homo sapiens
ttcaatttctagggg

SEQ ID NO: 936437 - DNA, 15 bp, Homo sapiens
tttcaatttctaggg

SEQ ID NO: 936438 - DNA, 15 bp, Homo sapiens
atttcaatttctagg

SEQ ID NO: 936439 - DNA, 15 bp, Homo sapiens
tatttcaatttctag

SEQ ID NO: 936440 - DNA, 15 bp, Homo sapiens
ttatttcaatttcta

SEQ ID NO: 936441 - DNA, 15 bp, Homo sapiens
attatttcaatttct

SEQ ID NO: 936442 - DNA, 15 bp, Homo sapiens
tattatttcaatttc

SEQ ID NO: 936443 - DNA, 15 bp, Homo sapiens
ttattatttcaattt

SEQ ID NO: 936444 - DNA, 15 bp, Homo sapiens
tttattatttcaatt

SEQ ID NO: 936445 - DNA, 15 bp, Homo sapiens
atttattatttcaat

SEQ ID NO: 936446 - DNA, 15 bp, Homo sapiens
catttattatttcaa

SEQ ID NO: 936447 - DNA, 15 bp, Homo sapiens
acatttattatttca

SEQ ID NO: 936448 - DNA, 15 bp, Homo sapiens
cacatttattatttc

SEQ ID NO: 936449 - DNA, 15 bp, Homo sapiens
acacatttattattt

SEQ ID NO: 936450 - DNA, 15 bp, Homo sapiens
cacacatttattatt

SEQ ID NO: 936451 - DNA, 15 bp, Homo sapiens
acacacatttattat

SEQ ID NO: 936452 - DNA, 15 bp, Homo sapiens
aacacacatttatta

SEQ ID NO: 936453 - DNA, 15 bp, Homo sapiens
caacacacatttatt

SEQ ID NO: 936454 - DNA, 15 bp, Homo sapiens
acaacacacatttat

SEQ ID NO: 936455 - DNA, 15 bp, Homo sapiens
gacaacacacattta

SEQ ID NO: 936456 - DNA, 15 bp, Homo sapiens
agacaacacacattt

SEQ ID NO: 936457 - DNA, 15 bp, Homo sapiens
aagacaacacacatt

SEQ ID NO: 936458 - DNA, 15 bp, Homo sapiens
taagacaacacacat

SEQ ID NO: 936459 - DNA, 15 bp, Homo sapiens
ttaagacaacacaca

SEQ ID NO: 936460 - DNA, 15 bp, Homo sapiens
cttaagacaacacac

SEQ ID NO: 936461 - DNA, 15 bp, Homo sapiens
gcttaagacaacaca

SEQ ID NO: 936462 - DNA, 15 bp, Homo sapiens
agcttaagacaacac

SEQ ID NO: 936463 - DNA, 15 bp, Homo sapiens
aagcttaagacaaca

SEQ ID NO: 936464 - DNA, 15 bp, Homo sapiens
caagcttaagacaac

SEQ ID NO: 936465 - DNA, 15 bp, Homo sapiens
ccaagcttaagacaa

SEQ ID NO: 936466 - DNA, 15 bp, Homo sapiens
cccaagcttaagaca

SEQ ID NO: 936467 - DNA, 15 bp, Homo sapiens
acccaagcttaagac

SEQ ID NO: 936468 - DNA, 15 bp, Homo sapiens
aacccaagcttaaga

SEQ ID NO: 936469 - DNA, 15 bp, Homo sapiens
taacccaagcttaag

SEQ ID NO: 936470 - DNA, 15 bp, Homo sapiens
ataacccaagcttaa

SEQ ID NO: 936471 - DNA, 15 bp, Homo sapiens
cataacccaagctta

SEQ ID NO: 936472 - DNA, 15 bp, Homo sapiens
acataacccaagctt

SEQ ID NO: 936473 - DNA, 15 bp, Homo sapiens
aacataacccaagct

SEQ ID NO: 936474 - DNA, 15 bp, Homo sapiens
aaacataacccaagc

SEQ ID NO: 936475 - DNA, 15 bp, Homo sapiens
aaaacataacccaag

SEQ ID NO: 936476 - DNA, 15 bp, Homo sapiens
gaaaacataacccaa

SEQ ID NO: 936477 - DNA, 15 bp, Homo sapiens
agaaaacataaccca

SEQ ID NO: 936478 - DNA, 15 bp, Homo sapiens
aagaaaacataaccc

SEQ ID NO: 936479 - DNA, 15 bp, Homo sapiens
aaagaaaacataacc

SEQ ID NO: 936480 - DNA, 15 bp, Homo sapiens
aaaagaaaacataac

SEQ ID NO: 936481 - DNA, 15 bp, Homo sapiens
gaaaagaaaacataa

SEQ ID NO: 936482 - DNA, 15 bp, Homo sapiens
ggaaaagaaaacata

SEQ ID NO: 936483 - DNA, 15 bp, Homo sapiens
gggaaaagaaaacat

SEQ ID NO: 936484 - DNA, 15 bp, Homo sapiens
tgggaaaagaaaaca

SEQ ID NO: 936485 - DNA, 15 bp, Homo sapiens
atgggaaaagaaaac

SEQ ID NO: 936486 - DNA, 15 bp, Homo sapiens
catgggaaaagaaaa

SEQ ID NO: 936487 - DNA, 15 bp, Homo sapiens
acatgggaaaagaaa

SEQ ID NO: 936488 - DNA, 15 bp, Homo sapiens
cacatgggaaaagaa

SEQ ID NO: 936489 - DNA, 15 bp, Homo sapiens
tcacatgggaaaaga

SEQ ID NO: 936490 - DNA, 15 bp, Homo sapiens
ttcacatgggaaaag

SEQ ID NO: 936491 - DNA, 15 bp, Homo sapiens
attcacatgggaaaa

SEQ ID NO: 936492 - DNA, 15 bp, Homo sapiens
aattcacatgggaaa

SEQ ID NO: 936493 - DNA, 15 bp, Homo sapiens
caattcacatgggaa

SEQ ID NO: 936494 - DNA, 15 bp, Homo sapiens
tcaattcacatggga

SEQ ID NO: 936495 - DNA, 15 bp, Homo sapiens
ctcaattcacatggg

SEQ ID NO: 936496 - DNA, 15 bp, Homo sapiens
tctcaattcacatgg

SEQ ID NO: 936497 - DNA, 15 bp, Homo sapiens
atctcaattcacatg

SEQ ID NO: 936498 - DNA, 15 bp, Homo sapiens
tatctcaattcacat

SEQ ID NO: 936499 - DNA, 15 bp, Homo sapiens
atatctcaattcaca

SEQ ID NO: 936500 - DNA, 15 bp, Homo sapiens
aatatctcaattcac

SEQ ID NO: 936501 - DNA, 15 bp, Homo sapiens
gaatatctcaattca

SEQ ID NO: 936502 - DNA, 15 bp, Homo sapiens
ggaatatctcaattc

SEQ ID NO: 936503 - DNA, 15 bp, Homo sapiens
aggaatatctcaatt

SEQ ID NO: 936504 - DNA, 15 bp, Homo sapiens
caggaatatctcaat

SEQ ID NO: 936505 - DNA, 15 bp, Homo sapiens
ccaggaatatctcaa

SEQ ID NO: 936506 - DNA, 15 bp, Homo sapiens
accaggaatatctca

SEQ ID NO: 936507 - DNA, 15 bp, Homo sapiens
aaccaggaatatctc

SEQ ID NO: 936508 - DNA, 15 bp, Homo sapiens
gaaccaggaatatct

SEQ ID NO: 936509 - DNA, 15 bp, Homo sapiens
agaaccaggaatatc

SEQ ID NO: 936510 - DNA, 15 bp, Homo sapiens
aagaaccaggaatat

SEQ ID NO: 936511 - DNA, 15 bp, Homo sapiens
gaagaaccaggaata

SEQ ID NO: 936512 - DNA, 15 bp, Homo sapiens
tgaagaaccaggaat

SEQ ID NO: 936513 - DNA, 15 bp, Homo sapiens
atgaagaaccaggaa

SEQ ID NO: 936514 - DNA, 15 bp, Homo sapiens
tatgaagaaccagga

SEQ ID NO: 936515 - DNA, 15 bp, Homo sapiens
atatgaagaaccagg

SEQ ID NO: 936516 - DNA, 15 bp, Homo sapiens
catatgaagaaccag

SEQ ID NO: 936517 - DNA, 15 bp, Homo sapiens
gcatatgaagaacca

SEQ ID NO: 936518 - DNA, 15 bp, Homo sapiens
ggcatatgaagaacc

SEQ ID NO: 936519 - DNA, 15 bp, Homo sapiens
tggcatatgaagaac

SEQ ID NO: 936520 - DNA, 15 bp, Homo sapiens
gtggcatatgaagaa

SEQ ID NO: 936521 - DNA, 15 bp, Homo sapiens
tgtggcatatgaaga

SEQ ID NO: 936522 - DNA, 15 bp, Homo sapiens
atgtggcatatgaag

SEQ ID NO: 936523 - DNA, 15 bp, Homo sapiens
tatgtggcatatgaa

SEQ ID NO: 936524 - DNA, 15 bp, Homo sapiens
ttatgtggcatatga

SEQ ID NO: 936525 - DNA, 15 bp, Homo sapiens
attatgtggcatatg

SEQ ID NO: 936526 - DNA, 15 bp, Homo sapiens
aattatgtggcatat

SEQ ID NO: 936527 - DNA, 15 bp, Homo sapiens
aaattatgtggcata

SEQ ID NO: 936528 - DNA, 15 bp, Homo sapiens
aaaattatgtggcat

SEQ ID NO: 936529 - DNA, 15 bp, Homo sapiens
caaaattatgtggca

SEQ ID NO: 936530 - DNA, 15 bp, Homo sapiens
ccaaaattatgtggc

SEQ ID NO: 936531 - DNA, 15 bp, Homo sapiens
accaaaattatgtgg

SEQ ID NO: 936532 - DNA, 15 bp, Homo sapiens
caccaaaattatgtg

SEQ ID NO: 936533 - DNA, 15 bp, Homo sapiens
acaccaaaattatgt

SEQ ID NO: 936534 - DNA, 15 bp, Homo sapiens
tacaccaaaattatg

SEQ ID NO: 936535 - DNA, 15 bp, Homo sapiens
atacaccaaaattat

SEQ ID NO: 936536 - DNA, 15 bp, Homo sapiens
aatacaccaaaatta

SEQ ID NO: 936537 - DNA, 15 bp, Homo sapiens
aaatacaccaaaatt

SEQ ID NO: 936538 - DNA, 15 bp, Homo sapiens
aaaatacaccaaaat

SEQ ID NO: 936539 - DNA, 15 bp, Homo sapiens
aaaaatacaccaaaa

SEQ ID NO: 936540 - DNA, 15 bp, Homo sapiens
caaaaatacaccaaa

SEQ ID NO: 936541 - DNA, 15 bp, Homo sapiens
tcaaaaatacaccaa

SEQ ID NO: 936542 - DNA, 15 bp, Homo sapiens
atcaaaaatacacca

SEQ ID NO: 936543 - DNA, 15 bp, Homo sapiens
gatcaaaaatacacc

SEQ ID NO: 936544 - DNA, 15 bp, Homo sapiens
agatcaaaaatacac

SEQ ID NO: 936545 - DNA, 15 bp, Homo sapiens
aagatcaaaaataca

SEQ ID NO: 936546 - DNA, 15 bp, Homo sapiens
aaagatcaaaaatac

SEQ ID NO: 936547 - DNA, 15 bp, Homo sapiens
aaaagatcaaaaata

SEQ ID NO: 936548 - DNA, 15 bp, Homo sapiens
caaaagatcaaaaat

SEQ ID NO: 936549 - DNA, 15 bp, Homo sapiens
tcaaaagatcaaaaa

SEQ ID NO: 936550 - DNA, 15 bp, Homo sapiens
ttcaaaagatcaaaa

SEQ ID NO: 936551 - DNA, 15 bp, Homo sapiens
attcaaaagatcaaa

SEQ ID NO: 936552 - DNA, 15 bp, Homo sapiens
tattcaaaagatcaa

SEQ ID NO: 936553 - DNA, 15 bp, Homo sapiens
atattcaaaagatca

SEQ ID NO: 936554 - DNA, 15 bp, Homo sapiens
aatattcaaaagatc

SEQ ID NO: 936555 - DNA, 15 bp, Homo sapiens
taatattcaaaagat

SEQ ID NO: 936556 - DNA, 15 bp, Homo sapiens
ataatattcaaaaga

SEQ ID NO: 936557 - DNA, 15 bp, Homo sapiens
tataatattcaaaag

SEQ ID NO: 936558 - DNA, 15 bp, Homo sapiens
atataatattcaaaa

SEQ ID NO: 936559 - DNA, 15 bp, Homo sapiens
aatataatattcaaa

SEQ ID NO: 936560 - DNA, 15 bp, Homo sapiens
caatataatattcaa

SEQ ID NO: 936561 - DNA, 15 bp, Homo sapiens
acaatataatattca

SEQ ID NO: 936562 - DNA, 15 bp, Homo sapiens
cacaatataatattc

SEQ ID NO: 936563 - DNA, 15 bp, Homo sapiens
tcacaatataatatt

SEQ ID NO: 936564 - DNA, 15 bp, Homo sapiens
ctcacaatataatat

SEQ ID NO: 936565 - DNA, 15 bp, Homo sapiens
tctcacaatataata

SEQ ID NO: 936566 - DNA, 15 bp, Homo sapiens
gtctcacaatataat

SEQ ID NO: 936567 - DNA, 15 bp, Homo sapiens
agtctcacaatataa

SEQ ID NO: 936568 - DNA, 15 bp, Homo sapiens
gagtctcacaatata

SEQ ID NO: 936569 - DNA, 15 bp, Homo sapiens
agagtctcacaatat

SEQ ID NO: 936570 - DNA, 15 bp, Homo sapiens
cagagtctcacaata

SEQ ID NO: 936571 - DNA, 15 bp, Homo sapiens
ccagagtctcacaat

SEQ ID NO: 936572 - DNA, 15 bp, Homo sapiens
accagagtctcacaa

SEQ ID NO: 936573 - DNA, 15 bp, Homo sapiens
aaccagagtctcaca

SEQ ID NO: 936574 - DNA, 15 bp, Homo sapiens
gaaccagagtctcac

SEQ ID NO: 936575 - DNA, 15 bp, Homo sapiens
agaaccagagtctca

SEQ ID NO: 936576 - DNA, 15 bp, Homo sapiens
aagaaccagagtctc

SEQ ID NO: 936577 - DNA, 15 bp, Homo sapiens
caagaaccagagtct

SEQ ID NO: 936578 - DNA, 15 bp, Homo sapiens
acaagaaccagagtc

SEQ ID NO: 936579 - DNA, 15 bp, Homo sapiens
aacaagaaccagagt

SEQ ID NO: 936580 - DNA, 15 bp, Homo sapiens
aaacaagaaccagag

SEQ ID NO: 936581 - DNA, 15 bp, Homo sapiens
taaacaagaaccaga

SEQ ID NO: 936582 - DNA, 15 bp, Homo sapiens
ttaaacaagaaccag

SEQ ID NO: 936583 - DNA, 15 bp, Homo sapiens
tttaaacaagaacca

SEQ ID NO: 936584 - DNA, 15 bp, Homo sapiens
atttaaacaagaacc

SEQ ID NO: 936585 - DNA, 15 bp, Homo sapiens
aatttaaacaagaac

SEQ ID NO: 936586 - DNA, 15 bp, Homo sapiens
gaatttaaacaagaa

SEQ ID NO: 936587 - DNA, 15 bp, Homo sapiens
agaatttaaacaaga

SEQ ID NO: 936588 - DNA, 15 bp, Homo sapiens
tagaatttaaacaag

SEQ ID NO: 936589 - DNA, 15 bp, Homo sapiens
atagaatttaaacaa

SEQ ID NO: 936590 - DNA, 15 bp, Homo sapiens
catagaatttaaaca

SEQ ID NO: 936591 - DNA, 15 bp, Homo sapiens
ccatagaatttaaac

SEQ ID NO: 936592 - DNA, 15 bp, Homo sapiens
cccatagaatttaaa

SEQ ID NO: 936593 - DNA, 15 bp, Homo sapiens
tcccatagaatttaa

SEQ ID NO: 936594 - DNA, 15 bp, Homo sapiens
ttcccatagaattta

SEQ ID NO: 936595 - DNA, 15 bp, Homo sapiens
tttcccatagaattt

SEQ ID NO: 936596 - DNA, 15 bp, Homo sapiens
ttttcccatagaatt

SEQ ID NO: 936597 - DNA, 15 bp, Homo sapiens
attttcccatagaat

SEQ ID NO: 936598 - DNA, 15 bp, Homo sapiens
cattttcccatagaa

SEQ ID NO: 936599 - DNA, 15 bp, Homo sapiens
acattttcccataga

SEQ ID NO: 936600 - DNA, 15 bp, Homo sapiens
tacattttcccatag

SEQ ID NO: 936601 - DNA, 15 bp, Homo sapiens
ctacattttcccata

SEQ ID NO: 936602 - DNA, 15 bp, Homo sapiens
tctacattttcccat

SEQ ID NO: 936603 - DNA, 15 bp, Homo sapiens
atctacattttccca

SEQ ID NO: 936604 - DNA, 15 bp, Homo sapiens
tatctacattttccc

SEQ ID NO: 936605 - DNA, 15 bp, Homo sapiens
gtatctacattttcc

SEQ ID NO: 936606 - DNA, 15 bp, Homo sapiens
agtatctacattttc

SEQ ID NO: 936607 - DNA, 15 bp, Homo sapiens
aagtatctacatttt

SEQ ID NO: 936608 - DNA, 15 bp, Homo sapiens
aaagtatctacattt

SEQ ID NO: 936609 - DNA, 15 bp, Homo sapiens
aaaagtatctacatt

SEQ ID NO: 936610 - DNA, 15 bp, Homo sapiens
caaaagtatctacat

SEQ ID NO: 936611 - DNA, 15 bp, Homo sapiens
acaaaagtatctaca

SEQ ID NO: 936612 - DNA, 15 bp, Homo sapiens
aacaaaagtatctac

SEQ ID NO: 936613 - DNA, 15 bp, Homo sapiens
aaacaaaagtatcta

SEQ ID NO: 936614 - DNA, 15 bp, Homo sapiens
aaaacaaaagtatct

SEQ ID NO: 936615 - DNA, 15 bp, Homo sapiens
taaaacaaaagtatc

SEQ ID NO: 936616 - DNA, 15 bp, Homo sapiens
ctaaaacaaaagtat

SEQ ID NO: 936617 - DNA, 15 bp, Homo sapiens
gctaaaacaaaagta

SEQ ID NO: 936618 - DNA, 15 bp, Homo sapiens
tgctaaaacaaaagt

SEQ ID NO: 936619 - DNA, 15 bp, Homo sapiens
atgctaaaacaaaag

SEQ ID NO: 936620 - DNA, 15 bp, Homo sapiens
catgctaaaacaaaa

SEQ ID NO: 936621 - DNA, 15 bp, Homo sapiens
gcatgctaaaacaaa

SEQ ID NO: 936622 - DNA, 15 bp, Homo sapiens
tgcatgctaaaacaa

SEQ ID NO: 936623 - DNA, 15 bp, Homo sapiens
ttgcatgctaaaaca

SEQ ID NO: 936624 - DNA, 15 bp, Homo sapiens
attgcatgctaaaac

SEQ ID NO: 936625 - DNA, 15 bp, Homo sapiens
gattgcatgctaaaa

SEQ ID NO: 936626 - DNA, 15 bp, Homo sapiens
cgattgcatgctaaa

SEQ ID NO: 936627 - DNA, 15 bp, Homo sapiens
ccgattgcatgctaa

SEQ ID NO: 936628 - DNA, 15 bp, Homo sapiens
accgattgcatgcta

SEQ ID NO: 936629 - DNA, 15 bp, Homo sapiens
gaccgattgcatgct

SEQ ID NO: 936630 - DNA, 15 bp, Homo sapiens
agaccgattgcatgc

SEQ ID NO: 936631 - DNA, 15 bp, Homo sapiens
tagaccgattgcatg

SEQ ID NO: 936632 - DNA, 15 bp, Homo sapiens
ttagaccgattgcat

SEQ ID NO: 936633 - DNA, 15 bp, Homo sapiens
attagaccgattgca

SEQ ID NO: 936634 - DNA, 15 bp, Homo sapiens
aattagaccgattgc

SEQ ID NO: 936635 - DNA, 15 bp, Homo sapiens
taattagaccgattg

SEQ ID NO: 936636 - DNA, 15 bp, Homo sapiens
ctaattagaccgatt

SEQ ID NO: 936637 - DNA, 15 bp, Homo sapiens
cctaattagaccgat

SEQ ID NO: 936638 - DNA, 15 bp, Homo sapiens
acctaattagaccga

SEQ ID NO: 936639 - DNA, 15 bp, Homo sapiens
aacctaattagaccg

SEQ ID NO: 936640 - DNA, 15 bp, Homo sapiens
gaacctaattagacc

SEQ ID NO: 936641 - DNA, 15 bp, Homo sapiens
tgaacctaattagac

SEQ ID NO: 936642 - DNA, 15 bp, Homo sapiens
ctgaacctaattaga

SEQ ID NO: 936643 - DNA, 15 bp, Homo sapiens
cctgaacctaattag

SEQ ID NO: 936644 - DNA, 15 bp, Homo sapiens
gcctgaacctaatta

SEQ ID NO: 936645 - DNA, 15 bp, Homo sapiens
ggcctgaacctaatt

SEQ ID NO: 936646 - DNA, 15 bp, Homo sapiens
tggcctgaacctaat

SEQ ID NO: 936647 - DNA, 15 bp, Homo sapiens
gtggcctgaacctaa

SEQ ID NO: 936648 - DNA, 15 bp, Homo sapiens
tgtggcctgaaccta

SEQ ID NO: 936649 - DNA, 15 bp, Homo sapiens
ttgtggcctgaacct

SEQ ID NO: 936650 - DNA, 15 bp, Homo sapiens
cttgtggcctgaacc

SEQ ID NO: 936651 - DNA, 15 bp, Homo sapiens
acttgtggcctgaac

SEQ ID NO: 936652 - DNA, 15 bp, Homo sapiens
aacttgtggcctgaa

SEQ ID NO: 936653 - DNA, 15 bp, Homo sapiens
gaacttgtggcctga

SEQ ID NO: 936654 - DNA, 15 bp, Homo sapiens
ggaacttgtggcctg

SEQ ID NO: 936655 - DNA, 15 bp, Homo sapiens
tggaacttgtggcct

SEQ ID NO: 936656 - DNA, 15 bp, Homo sapiens
ttggaacttgtggcc

SEQ ID NO: 936657 - DNA, 15 bp, Homo sapiens
gttggaacttgtggc

SEQ ID NO: 936658 - DNA, 15 bp, Homo sapiens
ggttggaacttgtgg

SEQ ID NO: 936659 - DNA, 15 bp, Homo sapiens
aggttggaacttgtg

SEQ ID NO: 936660 - DNA, 15 bp, Homo sapiens
gaggttggaacttgt

SEQ ID NO: 936661 - DNA, 15 bp, Homo sapiens
tgaggttggaacttg

SEQ ID NO: 936662 - DNA, 15 bp, Homo sapiens
atgaggttggaactt

SEQ ID NO: 936663 - DNA, 15 bp, Homo sapiens
aatgaggttggaact

SEQ ID NO: 936664 - DNA, 15 bp, Homo sapiens
aaatgaggttggaac

SEQ ID NO: 936665 - DNA, 15 bp, Homo sapiens
gaaatgaggttggaa

SEQ ID NO: 936666 - DNA, 15 bp, Homo sapiens
agaaatgaggttgga

SEQ ID NO: 936667 - DNA, 15 bp, Homo sapiens
aagaaatgaggttgg

SEQ ID NO: 936668 - DNA, 15 bp, Homo sapiens
caagaaatgaggttg

SEQ ID NO: 936669 - DNA, 15 bp, Homo sapiens
ccaagaaatgaggtt

SEQ ID NO: 936670 - DNA, 15 bp, Homo sapiens
cccaagaaatgaggt

SEQ ID NO: 936671 - DNA, 15 bp, Homo sapiens
gcccaagaaatgagg

SEQ ID NO: 936672 - DNA, 15 bp, Homo sapiens
agcccaagaaatgag

SEQ ID NO: 936673 - DNA, 15 bp, Homo sapiens
cagcccaagaaatga

SEQ ID NO: 936674 - DNA, 15 bp, Homo sapiens
acagcccaagaaatg

SEQ ID NO: 936675 - DNA, 15 bp, Homo sapiens
cacagcccaagaaat

SEQ ID NO: 936676 - DNA, 15 bp, Homo sapiens
ccacagcccaagaaa

SEQ ID NO: 936677 - DNA, 15 bp, Homo sapiens
accacagcccaagaa

SEQ ID NO: 936678 - DNA, 15 bp, Homo sapiens
aaccacagcccaaga

SEQ ID NO: 936679 - DNA, 15 bp, Homo sapiens
gaaccacagcccaag

SEQ ID NO: 936680 - DNA, 15 bp, Homo sapiens
ggaaccacagcccaa

SEQ ID NO: 936681 - DNA, 15 bp, Homo sapiens
tggaaccacagccca

SEQ ID NO: 936682 - DNA, 15 bp, Homo sapiens
atggaaccacagccc

SEQ ID NO: 936683 - DNA, 15 bp, Homo sapiens
aatggaaccacagcc

SEQ ID NO: 936684 - DNA, 15 bp, Homo sapiens
aaatggaaccacagc

SEQ ID NO: 936685 - DNA, 15 bp, Homo sapiens
aaaatggaaccacag

SEQ ID NO: 936686 - DNA, 15 bp, Homo sapiens
aaaaatggaaccaca

SEQ ID NO: 936687 - DNA, 15 bp, Homo sapiens
gaaaaatggaaccac

SEQ ID NO: 936688 - DNA, 15 bp, Homo sapiens
tgaaaaatggaacca

SEQ ID NO: 936689 - DNA, 15 bp, Homo sapiens
ttgaaaaatggaacc

SEQ ID NO: 936690 - DNA, 15 bp, Homo sapiens
tttgaaaaatggaac

SEQ ID NO: 936691 - DNA, 15 bp, Homo sapiens
ctttgaaaaatggaa

SEQ ID NO: 936692 - DNA, 15 bp, Homo sapiens
gctttgaaaaatgga

SEQ ID NO: 936693 - DNA, 15 bp, Homo sapiens
ggctttgaaaaatgg

SEQ ID NO: 936694 - DNA, 15 bp, Homo sapiens
aggctttgaaaaatg

SEQ ID NO: 936695 - DNA, 15 bp, Homo sapiens
aaggctttgaaaaat

SEQ ID NO: 936696 - DNA, 15 bp, Homo sapiens
aaaggctttgaaaaa

SEQ ID NO: 936697 - DNA, 15 bp, Homo sapiens
aaaaggctttgaaaa

SEQ ID NO: 936698 - DNA, 15 bp, Homo sapiens
gaaaaggctttgaaa

SEQ ID NO: 936699 - DNA, 15 bp, Homo sapiens
tgaaaaggctttgaa

SEQ ID NO: 936700 - DNA, 15 bp, Homo sapiens
ttgaaaaggctttga

SEQ ID NO: 936701 - DNA, 15 bp, Homo sapiens
attgaaaaggctttg

SEQ ID NO: 936702 - DNA, 15 bp, Homo sapiens
tattgaaaaggcttt

SEQ ID NO: 936703 - DNA, 15 bp, Homo sapiens
gtattgaaaaggctt

SEQ ID NO: 936704 - DNA, 15 bp, Homo sapiens
agtattgaaaaggct

SEQ ID NO: 936705 - DNA, 15 bp, Homo sapiens
gagtattgaaaaggc

SEQ ID NO: 936706 - DNA, 15 bp, Homo sapiens
agagtattgaaaagg

SEQ ID NO: 936707 - DNA, 15 bp, Homo sapiens
aagagtattgaaaag

SEQ ID NO: 936708 - DNA, 15 bp, Homo sapiens
gaagagtattgaaaa

SEQ ID NO: 936709 - DNA, 15 bp, Homo sapiens
tgaagagtattgaaa

SEQ ID NO: 936710 - DNA, 15 bp, Homo sapiens
ctgaagagtattgaa

SEQ ID NO: 936711 - DNA, 15 bp, Homo sapiens
tctgaagagtattga

SEQ ID NO: 936712 - DNA, 15 bp, Homo sapiens
atctgaagagtattg

SEQ ID NO: 936713 - DNA, 15 bp, Homo sapiens
gatctgaagagtatt

SEQ ID NO: 936714 - DNA, 15 bp, Homo sapiens
agatctgaagagtat

SEQ ID NO: 936715 - DNA, 15 bp, Homo sapiens
cagatctgaagagta

SEQ ID NO: 936716 - DNA, 15 bp, Homo sapiens
acagatctgaagagt

SEQ ID NO: 936717 - DNA, 15 bp, Homo sapiens
gacagatctgaagag

SEQ ID NO: 936718 - DNA, 15 bp, Homo sapiens
ggacagatctgaaga

SEQ ID NO: 936719 - DNA, 15 bp, Homo sapiens
aggacagatctgaag

SEQ ID NO: 936720 - DNA, 15 bp, Homo sapiens
caggacagatctgaa

SEQ ID NO: 936721 - DNA, 15 bp, Homo sapiens
gcaggacagatctga

SEQ ID NO: 936722 - DNA, 15 bp, Homo sapiens
ggcaggacagatctg

SEQ ID NO: 936723 - DNA, 15 bp, Homo sapiens
aggcaggacagatct

SEQ ID NO: 936724 - DNA, 15 bp, Homo sapiens
caggcaggacagatc

SEQ ID NO: 936725 - DNA, 15 bp, Homo sapiens
acaggcaggacagat

SEQ ID NO: 936726 - DNA, 15 bp, Homo sapiens
cacaggcaggacaga

SEQ ID NO: 936727 - DNA, 15 bp, Homo sapiens
acacaggcaggacag

SEQ ID NO: 936728 - DNA, 15 bp, Homo sapiens
tacacaggcaggaca

SEQ ID NO: 936729 - DNA, 15 bp, Homo sapiens
gtacacaggcaggac

SEQ ID NO: 936730 - DNA, 15 bp, Homo sapiens
ggtacacaggcagga

SEQ ID NO: 936731 - DNA, 15 bp, Homo sapiens
aggtacacaggcagg

SEQ ID NO: 936732 - DNA, 15 bp, Homo sapiens
gaggtacacaggcag

SEQ ID NO: 936733 - DNA, 15 bp, Homo sapiens
tgaggtacacaggca

SEQ ID NO: 936734 - DNA, 15 bp, Homo sapiens
gtgaggtacacaggc

SEQ ID NO: 936735 - DNA, 15 bp, Homo sapiens
tgtgaggtacacagg

SEQ ID NO: 936736 - DNA, 15 bp, Homo sapiens
ttgtgaggtacacag

SEQ ID NO: 936737 - DNA, 15 bp, Homo sapiens
attgtgaggtacaca

SEQ ID NO: 936738 - DNA, 15 bp, Homo sapiens
tattgtgaggtacac

SEQ ID NO: 936739 - DNA, 15 bp, Homo sapiens
ctattgtgaggtaca

SEQ ID NO: 936740 - DNA, 15 bp, Homo sapiens
cctattgtgaggtac

SEQ ID NO: 936741 - DNA, 15 bp, Homo sapiens
acctattgtgaggta

SEQ ID NO: 936742 - DNA, 15 bp, Homo sapiens
cacctattgtgaggt

SEQ ID NO: 936743 - DNA, 15 bp, Homo sapiens
tcacctattgtgagg

SEQ ID NO: 936744 - DNA, 15 bp, Homo sapiens
atcacctattgtgag

SEQ ID NO: 936745 - DNA, 15 bp, Homo sapiens
gatcacctattgtga

SEQ ID NO: 936746 - DNA, 15 bp, Homo sapiens
agatcacctattgtg

SEQ ID NO: 936747 - DNA, 15 bp, Homo sapiens
cagatcacctattgt

SEQ ID NO: 936748 - DNA, 15 bp, Homo sapiens
ccagatcacctattg

SEQ ID NO: 936749 - DNA, 15 bp, Homo sapiens
accagatcacctatt

SEQ ID NO: 936750 - DNA, 15 bp, Homo sapiens
taccagatcacctat

SEQ ID NO: 936751 - DNA, 15 bp, Homo sapiens
ataccagatcaccta

SEQ ID NO: 936752 - DNA, 15 bp, Homo sapiens
cataccagatcacct

SEQ ID NO: 936753 - DNA, 15 bp, Homo sapiens
acataccagatcacc

SEQ ID NO: 936754 - DNA, 15 bp, Homo sapiens
cacataccagatcac

SEQ ID NO: 936755 - DNA, 15 bp, Homo sapiens
tcacataccagatca

SEQ ID NO: 936756 - DNA, 15 bp, Homo sapiens
ctcacataccagatc

SEQ ID NO: 936757 - DNA, 15 bp, Homo sapiens
gctcacataccagat

SEQ ID NO: 936758 - DNA, 15 bp, Homo sapiens
agctcacataccaga

SEQ ID NO: 936759 - DNA, 15 bp, Homo sapiens
tagctcacataccag

SEQ ID NO: 936760 - DNA, 15 bp, Homo sapiens
atagctcacatacca

SEQ ID NO: 936761 - DNA, 15 bp, Homo sapiens
catagctcacatacc

SEQ ID NO: 936762 - DNA, 15 bp, Homo sapiens
acatagctcacatac

SEQ ID NO: 936763 - DNA, 15 bp, Homo sapiens
tacatagctcacata

SEQ ID NO: 936764 - DNA, 15 bp, Homo sapiens
gtacatagctcacat

SEQ ID NO: 936765 - DNA, 15 bp, Homo sapiens
ggtacatagctcaca

SEQ ID NO: 936766 - DNA, 15 bp, Homo sapiens
tggtacatagctcac

SEQ ID NO: 936767 - DNA, 15 bp, Homo sapiens
atggtacatagctca

SEQ ID NO: 936768 - DNA, 15 bp, Homo sapiens
aatggtacatagctc

SEQ ID NO: 936769 - DNA, 15 bp, Homo sapiens
taatggtacatagct

SEQ ID NO: 936770 - DNA, 15 bp, Homo sapiens
ctaatggtacatagc

SEQ ID NO: 936771 - DNA, 15 bp, Homo sapiens
actaatggtacatag

SEQ ID NO: 936772 - DNA, 15 bp, Homo sapiens
aactaatggtacata

SEQ ID NO: 936773 - DNA, 15 bp, Homo sapiens
gaactaatggtacat

SEQ ID NO: 936774 - DNA, 15 bp, Homo sapiens
tgaactaatggtaca

SEQ ID NO: 936775 - DNA, 15 bp, Homo sapiens
ctgaactaatggtac

SEQ ID NO: 936776 - DNA, 15 bp, Homo sapiens
actgaactaatggta

SEQ ID NO: 936777 - DNA, 15 bp, Homo sapiens
aactgaactaatggt

SEQ ID NO: 936778 - DNA, 15 bp, Homo sapiens
gaactgaactaatgg

SEQ ID NO: 936779 - DNA, 15 bp, Homo sapiens
agaactgaactaatg

SEQ ID NO: 936780 - DNA, 15 bp, Homo sapiens
aagaactgaactaat

SEQ ID NO: 936781 - DNA, 15 bp, Homo sapiens
taagaactgaactaa

SEQ ID NO: 936782 - DNA, 15 bp, Homo sapiens
ctaagaactgaacta

SEQ ID NO: 936783 - DNA, 15 bp, Homo sapiens
tctaagaactgaact

SEQ ID NO: 936784 - DNA, 15 bp, Homo sapiens
ttctaagaactgaac

SEQ ID NO: 936785 - DNA, 15 bp, Homo sapiens
tttctaagaactgaa

SEQ ID NO: 936786 - DNA, 15 bp, Homo sapiens
gtttctaagaactga

SEQ ID NO: 936787 - DNA, 15 bp, Homo sapiens
agtttctaagaactg

SEQ ID NO: 936788 - DNA, 15 bp, Homo sapiens
aagtttctaagaact

SEQ ID NO: 936789 - DNA, 15 bp, Homo sapiens
aaagtttctaagaac

SEQ ID NO: 936790 - DNA, 15 bp, Homo sapiens
caaagtttctaagaa

SEQ ID NO: 936791 - DNA, 15 bp, Homo sapiens
ccaaagtttctaaga

SEQ ID NO: 936792 - DNA, 15 bp, Homo sapiens
accaaagtttctaag

SEQ ID NO: 936793 - DNA, 15 bp, Homo sapiens
taccaaagtttctaa

SEQ ID NO: 936794 - DNA, 15 bp, Homo sapiens
ataccaaagtttcta

SEQ ID NO: 936795 - DNA, 15 bp, Homo sapiens
aataccaaagtttct

SEQ ID NO: 936796 - DNA, 15 bp, Homo sapiens
gaataccaaagtttc

SEQ ID NO: 936797 - DNA, 15 bp, Homo sapiens
agaataccaaagttt

SEQ ID NO: 936798 - DNA, 15 bp, Homo sapiens
cagaataccaaagtt

SEQ ID NO: 936799 - DNA, 15 bp, Homo sapiens
tcagaataccaaagt

SEQ ID NO: 936800 - DNA, 15 bp, Homo sapiens
atcagaataccaaag

SEQ ID NO: 936801 - DNA, 15 bp, Homo sapiens
aatcagaataccaaa

SEQ ID NO: 936802 - DNA, 15 bp, Homo sapiens
taatcagaataccaa

SEQ ID NO: 936803 - DNA, 15 bp, Homo sapiens
ctaatcagaatacca

SEQ ID NO: 936804 - DNA, 15 bp, Homo sapiens
cctaatcagaatacc

SEQ ID NO: 936805 - DNA, 15 bp, Homo sapiens
tcctaatcagaatac

SEQ ID NO: 936806 - DNA, 15 bp, Homo sapiens
atcctaatcagaata

SEQ ID NO: 936807 - DNA, 15 bp, Homo sapiens
gatcctaatcagaat

SEQ ID NO: 936808 - DNA, 15 bp, Homo sapiens
cgatcctaatcagaa

SEQ ID NO: 936809 - DNA, 15 bp, Homo sapiens
tcgatcctaatcaga

SEQ ID NO: 936810 - DNA, 15 bp, Homo sapiens
atcgatcctaatcag

SEQ ID NO: 936811 - DNA, 15 bp, Homo sapiens
gatcgatcctaatca

SEQ ID NO: 936812 - DNA, 15 bp, Homo sapiens
ggatcgatcctaatc

SEQ ID NO: 936813 - DNA, 15 bp, Homo sapiens
tggatcgatcctaat

SEQ ID NO: 936814 - DNA, 15 bp, Homo sapiens
atggatcgatcctaa

SEQ ID NO: 936815 - DNA, 15 bp, Homo sapiens
tatggatcgatccta

SEQ ID NO: 936816 - DNA, 15 bp, Homo sapiens
gtatggatcgatcct

SEQ ID NO: 936817 - DNA, 15 bp, Homo sapiens
tgtatggatcgatcc

SEQ ID NO: 936818 - DNA, 15 bp, Homo sapiens
atgtatggatcgatc

SEQ ID NO: 936819 - DNA, 15 bp, Homo sapiens
aatgtatggatcgat

SEQ ID NO: 936820 - DNA, 15 bp, Homo sapiens
aaatgtatggatcga

SEQ ID NO: 936821 - DNA, 15 bp, Homo sapiens
caaatgtatggatcg

SEQ ID NO: 936822 - DNA, 15 bp, Homo sapiens
gcaaatgtatggatc

SEQ ID NO: 936823 - DNA, 15 bp, Homo sapiens
tgcaaatgtatggat

SEQ ID NO: 936824 - DNA, 15 bp, Homo sapiens
ctgcaaatgtatgga

SEQ ID NO: 936825 - DNA, 15 bp, Homo sapiens
gctgcaaatgtatgg

SEQ ID NO: 936826 - DNA, 15 bp, Homo sapiens
agctgcaaatgtatg

SEQ ID NO: 936827 - DNA, 15 bp, Homo sapiens
gagctgcaaatgtat

SEQ ID NO: 936828 - DNA, 15 bp, Homo sapiens
tgagctgcaaatgta

SEQ ID NO: 936829 - DNA, 15 bp, Homo sapiens
ttgagctgcaaatgt

SEQ ID NO: 936830 - DNA, 15 bp, Homo sapiens
cttgagctgcaaatg

SEQ ID NO: 936831 - DNA, 15 bp, Homo sapiens
tcttgagctgcaaat

SEQ ID NO: 936832 - DNA, 15 bp, Homo sapiens
ctcttgagctgcaaa

SEQ ID NO: 936833 - DNA, 15 bp, Homo sapiens
actcttgagctgcaa

SEQ ID NO: 936834 - DNA, 15 bp, Homo sapiens
cactcttgagctgca

SEQ ID NO: 936835 - DNA, 15 bp, Homo sapiens
tcactcttgagctgc

SEQ ID NO: 936836 - DNA, 15 bp, Homo sapiens
ctcactcttgagctg

SEQ ID NO: 936837 - DNA, 15 bp, Homo sapiens
gctcactcttgagct

SEQ ID NO: 936838 - DNA, 15 bp, Homo sapiens
ggctcactcttgagc

SEQ ID NO: 936839 - DNA, 15 bp, Homo sapiens
gggctcactcttgag

SEQ ID NO: 936840 - DNA, 15 bp, Homo sapiens
tgggctcactcttga

SEQ ID NO: 936841 - DNA, 15 bp, Homo sapiens
ctgggctcactcttg

SEQ ID NO: 936842 - DNA, 15 bp, Homo sapiens
tctgggctcactctt

SEQ ID NO: 936843 - DNA, 15 bp, Homo sapiens
ttctgggctcactct

SEQ ID NO: 936844 - DNA, 15 bp, Homo sapiens
cttctgggctcactc

SEQ ID NO: 936845 - DNA, 15 bp, Homo sapiens
acttctgggctcact

SEQ ID NO: 936846 - DNA, 15 bp, Homo sapiens
aacttctgggctcac

SEQ ID NO: 936847 - DNA, 15 bp, Homo sapiens
gaacttctgggctca

SEQ ID NO: 936848 - DNA, 15 bp, Homo sapiens
tgaacttctgggctc

SEQ ID NO: 936849 - DNA, 15 bp, Homo sapiens
atgaacttctgggct

SEQ ID NO: 936850 - DNA, 15 bp, Homo sapiens
tatgaacttctgggc

SEQ ID NO: 936851 - DNA, 15 bp, Homo sapiens
ttatgaacttctggg

SEQ ID NO: 936852 - DNA, 15 bp, Homo sapiens
tttatgaacttctgg

SEQ ID NO: 936853 - DNA, 15 bp, Homo sapiens
gtttatgaacttctg

SEQ ID NO: 936854 - DNA, 15 bp, Homo sapiens
tgtttatgaacttct

SEQ ID NO: 936855 - DNA, 15 bp, Homo sapiens
ttgtttatgaacttc

SEQ ID NO: 936856 - DNA, 15 bp, Homo sapiens
gttgtttatgaactt

SEQ ID NO: 936857 - DNA, 15 bp, Homo sapiens
agttgtttatgaact

SEQ ID NO: 936858 - DNA, 15 bp, Homo sapiens
aagttgtttatgaac

SEQ ID NO: 936859 - DNA, 15 bp, Homo sapiens
aaagttgtttatgaa

SEQ ID NO: 936860 - DNA, 15 bp, Homo sapiens
taaagttgtttatga

SEQ ID NO: 936861 - DNA, 15 bp, Homo sapiens
ataaagttgtttatg

SEQ ID NO: 936862 - DNA, 15 bp, Homo sapiens
tataaagttgtttat

SEQ ID NO: 936863 - DNA, 15 bp, Homo sapiens
ctataaagttgttta

SEQ ID NO: 936864 - DNA, 15 bp, Homo sapiens
cctataaagttgttt

SEQ ID NO: 936865 - DNA, 15 bp, Homo sapiens
ccctataaagttgtt

SEQ ID NO: 936866 - DNA, 15 bp, Homo sapiens
accctataaagttgt

SEQ ID NO: 936867 - DNA, 15 bp, Homo sapiens
gaccctataaagttg

SEQ ID NO: 936868 - DNA, 15 bp, Homo sapiens
ggaccctataaagtt

SEQ ID NO: 936869 - DNA, 15 bp, Homo sapiens
gggaccctataaagt

SEQ ID NO: 936870 - DNA, 15 bp, Homo sapiens
agggaccctataaag

SEQ ID NO: 936871 - DNA, 15 bp, Homo sapiens
aagggaccctataaa

SEQ ID NO: 936872 - DNA, 15 bp, Homo sapiens
aaagggaccctataa

SEQ ID NO: 936873 - DNA, 15 bp, Homo sapiens
gaaagggaccctata

SEQ ID NO: 936874 - DNA, 15 bp, Homo sapiens
agaaagggaccctat

SEQ ID NO: 936875 - DNA, 15 bp, Homo sapiens
aagaaagggacccta

SEQ ID NO: 936876 - DNA, 15 bp, Homo sapiens
caagaaagggaccct

SEQ ID NO: 936877 - DNA, 15 bp, Homo sapiens
tcaagaaagggaccc

SEQ ID NO: 936878 - DNA, 15 bp, Homo sapiens
ctcaagaaagggacc

SEQ ID NO: 936879 - DNA, 15 bp, Homo sapiens
gctcaagaaagggac

SEQ ID NO: 936880 - DNA, 15 bp, Homo sapiens
agctcaagaaaggga

SEQ ID NO: 936881 - DNA, 15 bp, Homo sapiens
gagctcaagaaaggg

SEQ ID NO: 936882 - DNA, 15 bp, Homo sapiens
ggagctcaagaaagg

SEQ ID NO: 936883 - DNA, 15 bp, Homo sapiens
aggagctcaagaaag

SEQ ID NO: 936884 - DNA, 15 bp, Homo sapiens
gaggagctcaagaaa

SEQ ID NO: 936885 - DNA, 15 bp, Homo sapiens
ggaggagctcaagaa

SEQ ID NO: 936886 - DNA, 15 bp, Homo sapiens
gggaggagctcaaga

SEQ ID NO: 936887 - DNA, 15 bp, Homo sapiens
agggaggagctcaag

SEQ ID NO: 936888 - DNA, 15 bp, Homo sapiens
gagggaggagctcaa

SEQ ID NO: 936889 - DNA, 15 bp, Homo sapiens
agagggaggagctca

SEQ ID NO: 936890 - DNA, 15 bp, Homo sapiens
aagagggaggagctc

SEQ ID NO: 936891 - DNA, 15 bp, Homo sapiens
aaagagggaggagct

SEQ ID NO: 936892 - DNA, 15 bp, Homo sapiens
caaagagggaggagc

SEQ ID NO: 936893 - DNA, 15 bp, Homo sapiens
gcaaagagggaggag

SEQ ID NO: 936894 - DNA, 15 bp, Homo sapiens
ggcaaagagggagga

SEQ ID NO: 936895 - DNA, 15 bp, Homo sapiens
tggcaaagagggagg

SEQ ID NO: 936896 - DNA, 15 bp, Homo sapiens
atggcaaagagggag

SEQ ID NO: 936897 - DNA, 15 bp, Homo sapiens
gatggcaaagaggga

SEQ ID NO: 936898 - DNA, 15 bp, Homo sapiens
agatggcaaagaggg

SEQ ID NO: 936899 - DNA, 15 bp, Homo sapiens
gagatggcaaagagg

SEQ ID NO: 936900 - DNA, 15 bp, Homo sapiens
agagatggcaaagag

SEQ ID NO: 936901 - DNA, 15 bp, Homo sapiens
gagagatggcaaaga

SEQ ID NO: 936902 - DNA, 15 bp, Homo sapiens
agagagatggcaaag

SEQ ID NO: 936903 - DNA, 15 bp, Homo sapiens
cagagagatggcaaa

SEQ ID NO: 936904 - DNA, 15 bp, Homo sapiens
tcagagagatggcaa

SEQ ID NO: 936905 - DNA, 15 bp, Homo sapiens
atcagagagatggca

SEQ ID NO: 936906 - DNA, 15 bp, Homo sapiens
tatcagagagatggc

SEQ ID NO: 936907 - DNA, 15 bp, Homo sapiens
gtatcagagagatgg

SEQ ID NO: 936908 - DNA, 15 bp, Homo sapiens
agtatcagagagatg

SEQ ID NO: 936909 - DNA, 15 bp, Homo sapiens
aagtatcagagagat

SEQ ID NO: 936910 - DNA, 15 bp, Homo sapiens
aaagtatcagagaga

SEQ ID NO: 936911 - DNA, 15 bp, Homo sapiens
caaagtatcagagag

SEQ ID NO: 936912 - DNA, 15 bp, Homo sapiens
acaaagtatcagaga

SEQ ID NO: 936913 - DNA, 15 bp, Homo sapiens
aacaaagtatcagag

SEQ ID NO: 936914 - DNA, 15 bp, Homo sapiens
aaacaaagtatcaga

SEQ ID NO: 936915 - DNA, 15 bp, Homo sapiens
gaaacaaagtatcag

SEQ ID NO: 936916 - DNA, 15 bp, Homo sapiens
ggaaacaaagtatca

SEQ ID NO: 936917 - DNA, 15 bp, Homo sapiens
gggaaacaaagtatc

SEQ ID NO: 936918 - DNA, 15 bp, Homo sapiens
agggaaacaaagtat

SEQ ID NO: 936919 - DNA, 15 bp, Homo sapiens
tagggaaacaaagta

SEQ ID NO: 936920 - DNA, 15 bp, Homo sapiens
ctagggaaacaaagt

SEQ ID NO: 936921 - DNA, 15 bp, Homo sapiens
cctagggaaacaaag

SEQ ID NO: 936922 - DNA, 15 bp, Homo sapiens
ccctagggaaacaaa

SEQ ID NO: 936923 - DNA, 15 bp, Homo sapiens
tccctagggaaacaa

SEQ ID NO: 936924 - DNA, 15 bp, Homo sapiens
atccctagggaaaca

SEQ ID NO: 936925 - DNA, 15 bp, Homo sapiens
aatccctagggaaac

SEQ ID NO: 936926 - DNA, 15 bp, Homo sapiens
aaatccctagggaaa

SEQ ID NO: 936927 - DNA, 15 bp, Homo sapiens
gaaatccctagggaa

SEQ ID NO: 936928 - DNA, 15 bp, Homo sapiens
ggaaatccctaggga

SEQ ID NO: 936929 - DNA, 15 bp, Homo sapiens
tggaaatccctaggg

SEQ ID NO: 936930 - DNA, 15 bp, Homo sapiens
atggaaatccctagg

SEQ ID NO: 936931 - DNA, 15 bp, Homo sapiens
aatggaaatccctag

SEQ ID NO: 936932 - DNA, 15 bp, Homo sapiens
aaatggaaatcccta

SEQ ID NO: 936933 - DNA, 15 bp, Homo sapiens
caaatggaaatccct

SEQ ID NO: 936934 - DNA, 15 bp, Homo sapiens
ccaaatggaaatccc

SEQ ID NO: 936935 - DNA, 15 bp, Homo sapiens
cccaaatggaaatcc

SEQ ID NO: 936936 - DNA, 15 bp, Homo sapiens
ccccaaatggaaatc

SEQ ID NO: 936937 - DNA, 15 bp, Homo sapiens
gccccaaatggaaat

SEQ ID NO: 936938 - DNA, 15 bp, Homo sapiens
agccccaaatggaaa

SEQ ID NO: 936939 - DNA, 15 bp, Homo sapiens
aagccccaaatggaa

SEQ ID NO: 936940 - DNA, 15 bp, Homo sapiens
aaagccccaaatgga

SEQ ID NO: 936941 - DNA, 15 bp, Homo sapiens
taaagccccaaatgg

SEQ ID NO: 936942 - DNA, 15 bp, Homo sapiens
ctaaagccccaaatg

SEQ ID NO: 936943 - DNA, 15 bp, Homo sapiens
actaaagccccaaat

SEQ ID NO: 936944 - DNA, 15 bp, Homo sapiens
aactaaagccccaaa

SEQ ID NO: 936945 - DNA, 15 bp, Homo sapiens
taactaaagccccaa

SEQ ID NO: 936946 - DNA, 15 bp, Homo sapiens
gtaactaaagcccca

SEQ ID NO: 936947 - DNA, 15 bp, Homo sapiens
ggtaactaaagcccc

SEQ ID NO: 936948 - DNA, 15 bp, Homo sapiens
gggtaactaaagccc

SEQ ID NO: 936949 - DNA, 15 bp, Homo sapiens
tgggtaactaaagcc

SEQ ID NO: 936950 - DNA, 15 bp, Homo sapiens
ctgggtaactaaagc

SEQ ID NO: 936951 - DNA, 15 bp, Homo sapiens
actgggtaactaaag

SEQ ID NO: 936952 - DNA, 15 bp, Homo sapiens
cactgggtaactaaa

SEQ ID NO: 936953 - DNA, 15 bp, Homo sapiens
tcactgggtaactaa

SEQ ID NO: 936954 - DNA, 15 bp, Homo sapiens
atcactgggtaacta

SEQ ID NO: 936955 - DNA, 15 bp, Homo sapiens
catcactgggtaact

SEQ ID NO: 936956 - DNA, 15 bp, Homo sapiens
gcatcactgggtaac

SEQ ID NO: 936957 - DNA, 15 bp, Homo sapiens
ggcatcactgggtaa

SEQ ID NO: 936958 - DNA, 15 bp, Homo sapiens
tggcatcactgggta

SEQ ID NO: 936959 - DNA, 15 bp, Homo sapiens
atggcatcactgggt

SEQ ID NO: 936960 - DNA, 15 bp, Homo sapiens
catggcatcactggg

SEQ ID NO: 936961 - DNA, 15 bp, Homo sapiens
acatggcatcactgg

SEQ ID NO: 936962 - DNA, 15 bp, Homo sapiens
tacatggcatcactg

SEQ ID NO: 936963 - DNA, 15 bp, Homo sapiens
gtacatggcatcact

SEQ ID NO: 936964 - DNA, 15 bp, Homo sapiens
agtacatggcatcac

SEQ ID NO: 936965 - DNA, 15 bp, Homo sapiens
aagtacatggcatca

SEQ ID NO: 936966 - DNA, 15 bp, Homo sapiens
gaagtacatggcatc

SEQ ID NO: 936967 - DNA, 15 bp, Homo sapiens
tgaagtacatggcat

SEQ ID NO: 936968 - DNA, 15 bp, Homo sapiens
ctgaagtacatggca

SEQ ID NO: 936969 - DNA, 15 bp, Homo sapiens
cctgaagtacatggc

SEQ ID NO: 936970 - DNA, 15 bp, Homo sapiens
tcctgaagtacatgg

SEQ ID NO: 936971 - DNA, 15 bp, Homo sapiens
ttcctgaagtacatg

SEQ ID NO: 936972 - DNA, 15 bp, Homo sapiens
attcctgaagtacat

SEQ ID NO: 936973 - DNA, 15 bp, Homo sapiens
aattcctgaagtaca

SEQ ID NO: 936974 - DNA, 15 bp, Homo sapiens
caattcctgaagtac

SEQ ID NO: 936975 - DNA, 15 bp, Homo sapiens
gcaattcctgaagta

SEQ ID NO: 936976 - DNA, 15 bp, Homo sapiens
tgcaattcctgaagt

SEQ ID NO: 936977 - DNA, 15 bp, Homo sapiens
gtgcaattcctgaag

SEQ ID NO: 936978 - DNA, 15 bp, Homo sapiens
tgtgcaattcctgaa

SEQ ID NO: 936979 - DNA, 15 bp, Homo sapiens
gtgtgcaattcctga

SEQ ID NO: 936980 - DNA, 15 bp, Homo sapiens
agtgtgcaattcctg

SEQ ID NO: 936981 - DNA, 15 bp, Homo sapiens
aagtgtgcaattcct

SEQ ID NO: 936982 - DNA, 15 bp, Homo sapiens
gaagtgtgcaattcc

SEQ ID NO: 936983 - DNA, 15 bp, Homo sapiens
agaagtgtgcaattc

SEQ ID NO: 936984 - DNA, 15 bp, Homo sapiens
cagaagtgtgcaatt

SEQ ID NO: 936985 - DNA, 15 bp, Homo sapiens
gcagaagtgtgcaat

SEQ ID NO: 936986 - DNA, 15 bp, Homo sapiens
tgcagaagtgtgcaa

SEQ ID NO: 936987 - DNA, 15 bp, Homo sapiens
ctgcagaagtgtgca

SEQ ID NO: 936988 - DNA, 15 bp, Homo sapiens
gctgcagaagtgtgc

SEQ ID NO: 936989 - DNA, 15 bp, Homo sapiens
ggctgcagaagtgtg

SEQ ID NO: 936990 - DNA, 15 bp, Homo sapiens
tggctgcagaagtgt

SEQ ID NO: 936991 - DNA, 15 bp, Homo sapiens
ttggctgcagaagtg

SEQ ID NO: 936992 - DNA, 15 bp, Homo sapiens
cttggctgcagaagt

SEQ ID NO: 936993 - DNA, 15 bp, Homo sapiens
gcttggctgcagaag

SEQ ID NO: 936994 - DNA, 15 bp, Homo sapiens
tgcttggctgcagaa

SEQ ID NO: 936995 - DNA, 15 bp, Homo sapiens
ttgcttggctgcaga

SEQ ID NO: 936996 - DNA, 15 bp, Homo sapiens
cttgcttggctgcag

SEQ ID NO: 936997 - DNA, 15 bp, Homo sapiens
gcttgcttggctgca

SEQ ID NO: 936998 - DNA, 15 bp, Homo sapiens
tgcttgcttggctgc

SEQ ID NO: 936999 - DNA, 15 bp, Homo sapiens
ttgcttgcttggctg

SEQ ID NO: 937000 - DNA, 15 bp, Homo sapiens
cttgcttgcttggct

SEQ ID NO: 937001 - DNA, 15 bp, Homo sapiens
tcttgcttgcttggc

SEQ ID NO: 937002 - DNA, 15 bp, Homo sapiens
ctcttgcttgcttgg

SEQ ID NO: 937003 - DNA, 15 bp, Homo sapiens
cctcttgcttgcttg

SEQ ID NO: 937004 - DNA, 15 bp, Homo sapiens
tcctcttgcttgctt

SEQ ID NO: 937005 - DNA, 15 bp, Homo sapiens
ctcctcttgcttgct

SEQ ID NO: 937006 - DNA, 15 bp, Homo sapiens
tctcctcttgcttgc

SEQ ID NO: 937007 - DNA, 15 bp, Homo sapiens
ctctcctcttgcttg

SEQ ID NO: 937008 - DNA, 15 bp, Homo sapiens
actctcctcttgctt

SEQ ID NO: 937009 - DNA, 15 bp, Homo sapiens
tactctcctcttgct

SEQ ID NO: 937010 - DNA, 15 bp, Homo sapiens
ctactctcctcttgc

SEQ ID NO: 937011 - DNA, 15 bp, Homo sapiens
tctactctcctcttg

SEQ ID NO: 937012 - DNA, 15 bp, Homo sapiens
ttctactctcctctt

SEQ ID NO: 937013 - DNA, 15 bp, Homo sapiens
tttctactctcctct

SEQ ID NO: 937014 - DNA, 15 bp, Homo sapiens
ctttctactctcctc

SEQ ID NO: 937015 - DNA, 15 bp, Homo sapiens
tctttctactctcct

SEQ ID NO: 937016 - DNA, 15 bp, Homo sapiens
ctctttctactctcc

SEQ ID NO: 937017 - DNA, 15 bp, Homo sapiens
cctctttctactctc

SEQ ID NO: 937018 - DNA, 15 bp, Homo sapiens
tcctctttctactct

SEQ ID NO: 937019 - DNA, 15 bp, Homo sapiens
ttcctctttctactc

SEQ ID NO: 937020 - DNA, 15 bp, Homo sapiens
cttcctctttctact

SEQ ID NO: 937021 - DNA, 15 bp, Homo sapiens
tcttcctctttctac

SEQ ID NO: 937022 - DNA, 15 bp, Homo sapiens
ttcttcctctttcta

SEQ ID NO: 937023 - DNA, 15 bp, Homo sapiens
tttcttcctctttct

SEQ ID NO: 937024 - DNA, 15 bp, Homo sapiens
ttttcttcctctttc

SEQ ID NO: 937025 - DNA, 15 bp, Homo sapiens
tttttcttcctcttt

SEQ ID NO: 937026 - DNA, 15 bp, Homo sapiens
ttttttcttcctctt

SEQ ID NO: 937027 - DNA, 15 bp, Homo sapiens
tttttttcttcctct

SEQ ID NO: 937028 - DNA, 15 bp, Homo sapiens
gtttttttcttcctc

SEQ ID NO: 937029 - DNA, 15 bp, Homo sapiens
cgtttttttcttcct

SEQ ID NO: 937030 - DNA, 15 bp, Homo sapiens
tcgtttttttcttcc

SEQ ID NO: 937031 - DNA, 15 bp, Homo sapiens
gtcgtttttttcttc

SEQ ID NO: 937032 - DNA, 15 bp, Homo sapiens
agtcgtttttttctt

SEQ ID NO: 937033 - DNA, 15 bp, Homo sapiens
aagtcgtttttttct

SEQ ID NO: 937034 - DNA, 15 bp, Homo sapiens
aaagtcgtttttttc

SEQ ID NO: 937035 - DNA, 15 bp, Homo sapiens
aaaagtcgttttttt

SEQ ID NO: 937036 - DNA, 15 bp, Homo sapiens
taaaagtcgtttttt

SEQ ID NO: 937037 - DNA, 15 bp, Homo sapiens
gtaaaagtcgttttt

SEQ ID NO: 937038 - DNA, 15 bp, Homo sapiens
ggtaaaagtcgtttt

SEQ ID NO: 937039 - DNA, 15 bp, Homo sapiens
aggtaaaagtcgttt

SEQ ID NO: 937040 - DNA, 15 bp, Homo sapiens
aaggtaaaagtcgtt

SEQ ID NO: 937041 - DNA, 15 bp, Homo sapiens
taaggtaaaagtcgt

SEQ ID NO: 937042 - DNA, 15 bp, Homo sapiens
gtaaggtaaaagtcg

SEQ ID NO: 937043 - DNA, 15 bp, Homo sapiens
ggtaaggtaaaagtc

SEQ ID NO: 937044 - DNA, 15 bp, Homo sapiens
gggtaaggtaaaagt

SEQ ID NO: 937045 - DNA, 15 bp, Homo sapiens
agggtaaggtaaaag

SEQ ID NO: 937046 - DNA, 15 bp, Homo sapiens
gagggtaaggtaaaa

SEQ ID NO: 937047 - DNA, 15 bp, Homo sapiens
agagggtaaggtaaa

SEQ ID NO: 937048 - DNA, 15 bp, Homo sapiens
aagagggtaaggtaa

SEQ ID NO: 937049 - DNA, 15 bp, Homo sapiens
taagagggtaaggta

SEQ ID NO: 937050 - DNA, 15 bp, Homo sapiens
ctaagagggtaaggt

SEQ ID NO: 937051 - DNA, 15 bp, Homo sapiens
actaagagggtaagg

SEQ ID NO: 937052 - DNA, 15 bp, Homo sapiens
tactaagagggtaag

SEQ ID NO: 937053 - DNA, 15 bp, Homo sapiens
atactaagagggtaa

SEQ ID NO: 937054 - DNA, 15 bp, Homo sapiens
gatactaagagggta

SEQ ID NO: 937055 - DNA, 15 bp, Homo sapiens
tgatactaagagggt

SEQ ID NO: 937056 - DNA, 15 bp, Homo sapiens
atgatactaagaggg

SEQ ID NO: 937057 - DNA, 15 bp, Homo sapiens
tatgatactaagagg

SEQ ID NO: 937058 - DNA, 15 bp, Homo sapiens
ctatgatactaagag

SEQ ID NO: 937059 - DNA, 15 bp, Homo sapiens
gctatgatactaaga

SEQ ID NO: 937060 - DNA, 15 bp, Homo sapiens
agctatgatactaag

SEQ ID NO: 937061 - DNA, 15 bp, Homo sapiens
gagctatgatactaa

SEQ ID NO: 937062 - DNA, 15 bp, Homo sapiens
agagctatgatacta

SEQ ID NO: 937063 - DNA, 15 bp, Homo sapiens
tagagctatgatact

SEQ ID NO: 937064 - DNA, 15 bp, Homo sapiens
gtagagctatgatac

SEQ ID NO: 937065 - DNA, 15 bp, Homo sapiens
ggtagagctatgata

SEQ ID NO: 937066 - DNA, 15 bp, Homo sapiens
tggtagagctatgat

SEQ ID NO: 937067 - DNA, 15 bp, Homo sapiens
ttggtagagctatga

SEQ ID NO: 937068 - DNA, 15 bp, Homo sapiens
attggtagagctatg

SEQ ID NO: 937069 - DNA, 15 bp, Homo sapiens
aattggtagagctat

SEQ ID NO: 937070 - DNA, 15 bp, Homo sapiens
caattggtagagcta

SEQ ID NO: 937071 - DNA, 15 bp, Homo sapiens
ccaattggtagagct

SEQ ID NO: 937072 - DNA, 15 bp, Homo sapiens
tccaattggtagagc

SEQ ID NO: 937073 - DNA, 15 bp, Homo sapiens
ctccaattggtagag

SEQ ID NO: 937074 - DNA, 15 bp, Homo sapiens
tctccaattggtaga

SEQ ID NO: 937075 - DNA, 15 bp, Homo sapiens
atctccaattggtag

SEQ ID NO: 937076 - DNA, 15 bp, Homo sapiens
aatctccaattggta

SEQ ID NO: 937077 - DNA, 15 bp, Homo sapiens
aaatctccaattggt

SEQ ID NO: 937078 - DNA, 15 bp, Homo sapiens
gaaatctccaattgg

SEQ ID NO: 937079 - DNA, 15 bp, Homo sapiens
ggaaatctccaattg

SEQ ID NO: 937080 - DNA, 15 bp, Homo sapiens
gggaaatctccaatt

SEQ ID NO: 937081 - DNA, 15 bp, Homo sapiens
agggaaatctccaat

SEQ ID NO: 937082 - DNA, 15 bp, Homo sapiens
gagggaaatctccaa

SEQ ID NO: 937083 - DNA, 15 bp, Homo sapiens
ggagggaaatctcca

SEQ ID NO: 937084 - DNA, 15 bp, Homo sapiens
gggagggaaatctcc

SEQ ID NO: 937085 - DNA, 15 bp, Homo sapiens
tgggagggaaatctc

SEQ ID NO: 937086 - DNA, 15 bp, Homo sapiens
ttgggagggaaatct

SEQ ID NO: 937087 - DNA, 15 bp, Homo sapiens
tttgggagggaaatc

SEQ ID NO: 937088 - DNA, 15 bp, Homo sapiens
ttttgggagggaaat

SEQ ID NO: 937089 - DNA, 15 bp, Homo sapiens
tttttgggagggaaa

SEQ ID NO: 937090 - DNA, 15 bp, Homo sapiens
ttttttgggagggaa

SEQ ID NO: 937091 - DNA, 15 bp, Homo sapiens
attttttgggaggga

SEQ ID NO: 937092 - DNA, 15 bp, Homo sapiens
tattttttgggaggg

SEQ ID NO: 937093 - DNA, 15 bp, Homo sapiens
atattttttgggagg

SEQ ID NO: 937094 - DNA, 15 bp, Homo sapiens
aatattttttgggag

SEQ ID NO: 937095 - DNA, 15 bp, Homo sapiens
taatattttttggga

SEQ ID NO: 937096 - DNA, 15 bp, Homo sapiens
ctaatattttttggg

SEQ ID NO: 937097 - DNA, 15 bp, Homo sapiens
gctaatattttttgg

SEQ ID NO: 937098 - DNA, 15 bp, Homo sapiens
agctaatattttttg

SEQ ID NO: 937099 - DNA, 15 bp, Homo sapiens
aagctaatatttttt

SEQ ID NO: 937100 - DNA, 15 bp, Homo sapiens
gaagctaatattttt

SEQ ID NO: 937101 - DNA, 15 bp, Homo sapiens
agaagctaatatttt

SEQ ID NO: 937102 - DNA, 15 bp, Homo sapiens
cagaagctaatattt

SEQ ID NO: 937103 - DNA, 15 bp, Homo sapiens
acagaagctaatatt

SEQ ID NO: 937104 - DNA, 15 bp, Homo sapiens
cacagaagctaatat

SEQ ID NO: 937105 - DNA, 15 bp, Homo sapiens
tcacagaagctaata

SEQ ID NO: 937106 - DNA, 15 bp, Homo sapiens
ctcacagaagctaat

SEQ ID NO: 937107 - DNA, 15 bp, Homo sapiens
actcacagaagctaa

SEQ ID NO: 937108 - DNA, 15 bp, Homo sapiens
aactcacagaagcta

SEQ ID NO: 937109 - DNA, 15 bp, Homo sapiens
gaactcacagaagct

SEQ ID NO: 937110 - DNA, 15 bp, Homo sapiens
ggaactcacagaagc

SEQ ID NO: 937111 - DNA, 15 bp, Homo sapiens
gggaactcacagaag

SEQ ID NO: 937112 - DNA, 15 bp, Homo sapiens
tgggaactcacagaa

SEQ ID NO: 937113 - DNA, 15 bp, Homo sapiens
atgggaactcacaga

SEQ ID NO: 937114 - DNA, 15 bp, Homo sapiens
aatgggaactcacag

SEQ ID NO: 937115 - DNA, 15 bp, Homo sapiens
caatgggaactcaca

SEQ ID NO: 937116 - DNA, 15 bp, Homo sapiens
gcaatgggaactcac

SEQ ID NO: 937117 - DNA, 15 bp, Homo sapiens
tgcaatgggaactca

SEQ ID NO: 937118 - DNA, 15 bp, Homo sapiens
ctgcaatgggaactc

SEQ ID NO: 937119 - DNA, 15 bp, Homo sapiens
gctgcaatgggaact

SEQ ID NO: 937120 - DNA, 15 bp, Homo sapiens
ggctgcaatgggaac

SEQ ID NO: 937121 - DNA, 15 bp, Homo sapiens
aggctgcaatgggaa

SEQ ID NO: 937122 - DNA, 15 bp, Homo sapiens
gaggctgcaatggga

SEQ ID NO: 937123 - DNA, 15 bp, Homo sapiens
agaggctgcaatggg

SEQ ID NO: 937124 - DNA, 15 bp, Homo sapiens
tagaggctgcaatgg

SEQ ID NO: 937125 - DNA, 15 bp, Homo sapiens
atagaggctgcaatg

SEQ ID NO: 937126 - DNA, 15 bp, Homo sapiens
aatagaggctgcaat

SEQ ID NO: 937127 - DNA, 15 bp, Homo sapiens
taatagaggctgcaa

SEQ ID NO: 937128 - DNA, 15 bp, Homo sapiens
gtaatagaggctgca

SEQ ID NO: 937129 - DNA, 15 bp, Homo sapiens
ggtaatagaggctgc

SEQ ID NO: 937130 - DNA, 15 bp, Homo sapiens
tggtaatagaggctg

SEQ ID NO: 937131 - DNA, 15 bp, Homo sapiens
gtggtaatagaggct

SEQ ID NO: 937132 - DNA, 15 bp, Homo sapiens
agtggtaatagaggc

SEQ ID NO: 937133 - DNA, 15 bp, Homo sapiens
cagtggtaatagagg

SEQ ID NO: 937134 - DNA, 15 bp, Homo sapiens
gcagtggtaatagag

SEQ ID NO: 937135 - DNA, 15 bp, Homo sapiens
agcagtggtaataga

SEQ ID NO: 937136 - DNA, 15 bp, Homo sapiens
tagcagtggtaatag

SEQ ID NO: 937137 - DNA, 15 bp, Homo sapiens
atagcagtggtaata

SEQ ID NO: 937138 - DNA, 15 bp, Homo sapiens
catagcagtggtaat

SEQ ID NO: 937139 - DNA, 15 bp, Homo sapiens
ccatagcagtggtaa

SEQ ID NO: 937140 - DNA, 15 bp, Homo sapiens
cccatagcagtggta

SEQ ID NO: 937141 - DNA, 15 bp, Homo sapiens
tcccatagcagtggt

SEQ ID NO: 937142 - DNA, 15 bp, Homo sapiens
atcccatagcagtgg

SEQ ID NO: 937143 - DNA, 15 bp, Homo sapiens
catcccatagcagtg

SEQ ID NO: 937144 - DNA, 15 bp, Homo sapiens
ccatcccatagcagt

SEQ ID NO: 937145 - DNA, 15 bp, Homo sapiens
gccatcccatagcag

SEQ ID NO: 937146 - DNA, 15 bp, Homo sapiens
agccatcccatagca

SEQ ID NO: 937147 - DNA, 15 bp, Homo sapiens
aagccatcccatagc

SEQ ID NO: 937148 - DNA, 15 bp, Homo sapiens
taagccatcccatag

SEQ ID NO: 937149 - DNA, 15 bp, Homo sapiens
ttaagccatcccata

SEQ ID NO: 937150 - DNA, 15 bp, Homo sapiens
cttaagccatcccat

SEQ ID NO: 937151 - DNA, 15 bp, Homo sapiens
ccttaagccatccca

SEQ ID NO: 937152 - DNA, 15 bp, Homo sapiens
cccttaagccatccc

SEQ ID NO: 937153 - DNA, 15 bp, Homo sapiens
acccttaagccatcc

SEQ ID NO: 937154 - DNA, 15 bp, Homo sapiens
aacccttaagccatc

SEQ ID NO: 937155 - DNA, 15 bp, Homo sapiens
caacccttaagccat

SEQ ID NO: 937156 - DNA, 15 bp, Homo sapiens
ccaacccttaagcca

SEQ ID NO: 937157 - DNA, 15 bp, Homo sapiens
cccaacccttaagcc

SEQ ID NO: 937158 - DNA, 15 bp, Homo sapiens
ccccaacccttaagc

SEQ ID NO: 937159 - DNA, 15 bp, Homo sapiens
gccccaacccttaag

SEQ ID NO: 937160 - DNA, 15 bp, Homo sapiens
tgccccaacccttaa

SEQ ID NO: 937161 - DNA, 15 bp, Homo sapiens
atgccccaaccctta

SEQ ID NO: 937162 - DNA, 15 bp, Homo sapiens
catgccccaaccctt

SEQ ID NO: 937163 - DNA, 15 bp, Homo sapiens
tcatgccccaaccct

SEQ ID NO: 937164 - DNA, 15 bp, Homo sapiens
ttcatgccccaaccc

SEQ ID NO: 937165 - DNA, 15 bp, Homo sapiens
tttcatgccccaacc

SEQ ID NO: 937166 - DNA, 15 bp, Homo sapiens
ctttcatgccccaac

SEQ ID NO: 937167 - DNA, 15 bp, Homo sapiens
tctttcatgccccaa

SEQ ID NO: 937168 - DNA, 15 bp, Homo sapiens
ttctttcatgcccca

SEQ ID NO: 937169 - DNA, 15 bp, Homo sapiens
gttctttcatgcccc

SEQ ID NO: 937170 - DNA, 15 bp, Homo sapiens
tgttctttcatgccc

SEQ ID NO: 937171 - DNA, 15 bp, Homo sapiens
ctgttctttcatgcc

SEQ ID NO: 937172 - DNA, 15 bp, Homo sapiens
tctgttctttcatgc

SEQ ID NO: 937173 - DNA, 15 bp, Homo sapiens
atctgttctttcatg

SEQ ID NO: 937174 - DNA, 15 bp, Homo sapiens
tatctgttctttcat

SEQ ID NO: 937175 - DNA, 15 bp, Homo sapiens
ctatctgttctttca

SEQ ID NO: 937176 - DNA, 15 bp, Homo sapiens
tctatctgttctttc

SEQ ID NO: 937177 - DNA, 15 bp, Homo sapiens
ttctatctgttcttt

SEQ ID NO: 937178 - DNA, 15 bp, Homo sapiens
cttctatctgttctt

SEQ ID NO: 937179 - DNA, 15 bp, Homo sapiens
tcttctatctgttct

SEQ ID NO: 937180 - DNA, 15 bp, Homo sapiens
ttcttctatctgttc

SEQ ID NO: 937181 - DNA, 15 bp, Homo sapiens
tttcttctatctgtt

SEQ ID NO: 937182 - DNA, 15 bp, Homo sapiens
ttttcttctatctgt

SEQ ID NO: 937183 - DNA, 15 bp, Homo sapiens
tttttcttctatctg

SEQ ID NO: 937184 - DNA, 15 bp, Homo sapiens
ttttttcttctatct

SEQ ID NO: 937185 - DNA, 15 bp, Homo sapiens
tttttttcttctatc

SEQ ID NO: 937186 - DNA, 15 bp, Homo sapiens
ttttttttcttctat

SEQ ID NO: 937187 - DNA, 15 bp, Homo sapiens
tttttttttcttcta

SEQ ID NO: 937188 - DNA, 15 bp, Homo sapiens
ctttttttttcttct

SEQ ID NO: 937189 - DNA, 15 bp, Homo sapiens
actttttttttcttc

SEQ ID NO: 937190 - DNA, 15 bp, Homo sapiens
cactttttttttctt

SEQ ID NO: 937191 - DNA, 15 bp, Homo sapiens
tcactttttttttct

SEQ ID NO: 937192 - DNA, 15 bp, Homo sapiens
ctcactttttttttc

SEQ ID NO: 937193 - DNA, 15 bp, Homo sapiens
cctcacttttttttt

SEQ ID NO: 937194 - DNA, 15 bp, Homo sapiens
acctcactttttttt

SEQ ID NO: 937195 - DNA, 15 bp, Homo sapiens
cacctcacttttttt

SEQ ID NO: 937196 - DNA, 15 bp, Homo sapiens
acacctcactttttt

SEQ ID NO: 937197 - DNA, 15 bp, Homo sapiens
aacacctcacttttt

SEQ ID NO: 937198 - DNA, 15 bp, Homo sapiens
aaacacctcactttt

SEQ ID NO: 937199 - DNA, 15 bp, Homo sapiens
aaaacacctcacttt

SEQ ID NO: 937200 - DNA, 15 bp, Homo sapiens
gaaaacacctcactt

SEQ ID NO: 937201 - DNA, 15 bp, Homo sapiens
tgaaaacacctcact

SEQ ID NO: 937202 - DNA, 15 bp, Homo sapiens
atgaaaacacctcac

SEQ ID NO: 937203 - DNA, 15 bp, Homo sapiens
tatgaaaacacctca

SEQ ID NO: 937204 - DNA, 15 bp, Homo sapiens
atatgaaaacacctc

SEQ ID NO: 937205 - DNA, 15 bp, Homo sapiens
aatatgaaaacacct

SEQ ID NO: 937206 - DNA, 15 bp, Homo sapiens
caatatgaaaacacc

SEQ ID NO: 937207 - DNA, 15 bp, Homo sapiens
acaatatgaaaacac

SEQ ID NO: 937208 - DNA, 15 bp, Homo sapiens
gacaatatgaaaaca

SEQ ID NO: 937209 - DNA, 15 bp, Homo sapiens
agacaatatgaaaac

SEQ ID NO: 937210 - DNA, 15 bp, Homo sapiens
gagacaatatgaaaa

SEQ ID NO: 937211 - DNA, 15 bp, Homo sapiens
agagacaatatgaaa

SEQ ID NO: 937212 - DNA, 15 bp, Homo sapiens
aagagacaatatgaa

SEQ ID NO: 937213 - DNA, 15 bp, Homo sapiens
caagagacaatatga

SEQ ID NO: 937214 - DNA, 15 bp, Homo sapiens
tcaagagacaatatg

SEQ ID NO: 937215 - DNA, 15 bp, Homo sapiens
ctcaagagacaatat

SEQ ID NO: 937216 - DNA, 15 bp, Homo sapiens
actcaagagacaata

SEQ ID NO: 937217 - DNA, 15 bp, Homo sapiens
cactcaagagacaat

SEQ ID NO: 937218 - DNA, 15 bp, Homo sapiens
acactcaagagacaa

SEQ ID NO: 937219 - DNA, 15 bp, Homo sapiens
aacactcaagagaca

SEQ ID NO: 937220 - DNA, 15 bp, Homo sapiens
taacactcaagagac

SEQ ID NO: 937221 - DNA, 15 bp, Homo sapiens
ttaacactcaagaga

SEQ ID NO: 937222 - DNA, 15 bp, Homo sapiens
tttaacactcaagag

SEQ ID NO: 937223 - DNA, 15 bp, Homo sapiens
ttttaacactcaaga

SEQ ID NO: 937224 - DNA, 15 bp, Homo sapiens
cttttaacactcaag

SEQ ID NO: 937225 - DNA, 15 bp, Homo sapiens
tcttttaacactcaa

SEQ ID NO: 937226 - DNA, 15 bp, Homo sapiens
atcttttaacactca

SEQ ID NO: 937227 - DNA, 15 bp, Homo sapiens
aatcttttaacactc

SEQ ID NO: 937228 - DNA, 15 bp, Homo sapiens
gaatcttttaacact

SEQ ID NO: 937229 - DNA, 15 bp, Homo sapiens
ggaatcttttaacac

SEQ ID NO: 937230 - DNA, 15 bp, Homo sapiens
gggaatcttttaaca

SEQ ID NO: 937231 - DNA, 15 bp, Homo sapiens
agggaatcttttaac

SEQ ID NO: 937232 - DNA, 15 bp, Homo sapiens
aagggaatcttttaa

SEQ ID NO: 937233 - DNA, 15 bp, Homo sapiens
aaagggaatctttta

SEQ ID NO: 937234 - DNA, 15 bp, Homo sapiens
gaaagggaatctttt

SEQ ID NO: 937235 - DNA, 15 bp, Homo sapiens
agaaagggaatcttt

SEQ ID NO: 937236 - DNA, 15 bp, Homo sapiens
gagaaagggaatctt

SEQ ID NO: 937237 - DNA, 15 bp, Homo sapiens
agagaaagggaatct

SEQ ID NO: 937238 - DNA, 15 bp, Homo sapiens
aagagaaagggaatc

SEQ ID NO: 937239 - DNA, 15 bp, Homo sapiens
aaagagaaagggaat

SEQ ID NO: 937240 - DNA, 15 bp, Homo sapiens
taaagagaaagggaa

SEQ ID NO: 937241 - DNA, 15 bp, Homo sapiens
gtaaagagaaaggga

SEQ ID NO: 937242 - DNA, 15 bp, Homo sapiens
agtaaagagaaaggg

SEQ ID NO: 937243 - DNA, 15 bp, Homo sapiens
gagtaaagagaaagg

SEQ ID NO: 937244 - DNA, 15 bp, Homo sapiens
cgagtaaagagaaag

SEQ ID NO: 937245 - DNA, 15 bp, Homo sapiens
tcgagtaaagagaaa

SEQ ID NO: 937246 - DNA, 15 bp, Homo sapiens
ctcgagtaaagagaa

SEQ ID NO: 937247 - DNA, 15 bp, Homo sapiens
gctcgagtaaagaga

SEQ ID NO: 937248 - DNA, 15 bp, Homo sapiens
agctcgagtaaagag

SEQ ID NO: 937249 - DNA, 15 bp, Homo sapiens
tagctcgagtaaaga

SEQ ID NO: 937250 - DNA, 15 bp, Homo sapiens
ctagctcgagtaaag

SEQ ID NO: 937251 - DNA, 15 bp, Homo sapiens
tctagctcgagtaaa

SEQ ID NO: 937252 - DNA, 15 bp, Homo sapiens
ttctagctcgagtaa

SEQ ID NO: 937253 - DNA, 15 bp, Homo sapiens
attctagctcgagta

SEQ ID NO: 937254 - DNA, 15 bp, Homo sapiens
aattctagctcgagt

SEQ ID NO: 937255 - DNA, 15 bp, Homo sapiens
taattctagctcgag

SEQ ID NO: 937256 - DNA, 15 bp, Homo sapiens
ctaattctagctcga

SEQ ID NO: 937257 - DNA, 15 bp, Homo sapiens
tctaattctagctcg

SEQ ID NO: 937258 - DNA, 15 bp, Homo sapiens
ttctaattctagctc

SEQ ID NO: 937259 - DNA, 15 bp, Homo sapiens
cttctaattctagct

SEQ ID NO: 937260 - DNA, 15 bp, Homo sapiens
ccttctaattctagc

SEQ ID NO: 937261 - DNA, 15 bp, Homo sapiens
accttctaattctag

SEQ ID NO: 937262 - DNA, 15 bp, Homo sapiens
aaccttctaattcta

SEQ ID NO: 937263 - DNA, 15 bp, Homo sapiens
aaaccttctaattct

SEQ ID NO: 937264 - DNA, 15 bp, Homo sapiens
taaaccttctaattc

SEQ ID NO: 937265 - DNA, 15 bp, Homo sapiens
gtaaaccttctaatt

SEQ ID NO: 937266 - DNA, 15 bp, Homo sapiens
ggtaaaccttctaat

SEQ ID NO: 937267 - DNA, 15 bp, Homo sapiens
aggtaaaccttctaa

SEQ ID NO: 937268 - DNA, 15 bp, Homo sapiens
caggtaaaccttcta

SEQ ID NO: 937269 - DNA, 15 bp, Homo sapiens
ccaggtaaaccttct

SEQ ID NO: 937270 - DNA, 15 bp, Homo sapiens
tccaggtaaaccttc

SEQ ID NO: 937271 - DNA, 15 bp, Homo sapiens
ctccaggtaaacctt

SEQ ID NO: 937272 - DNA, 15 bp, Homo sapiens
gctccaggtaaacct

SEQ ID NO: 937273 - DNA, 15 bp, Homo sapiens
agctccaggtaaacc

SEQ ID NO: 937274 - DNA, 15 bp, Homo sapiens
gagctccaggtaaac

SEQ ID NO: 937275 - DNA, 15 bp, Homo sapiens
agagctccaggtaaa

SEQ ID NO: 937276 - DNA, 15 bp, Homo sapiens
gagagctccaggtaa

SEQ ID NO: 937277 - DNA, 15 bp, Homo sapiens
agagagctccaggta

SEQ ID NO: 937278 - DNA, 15 bp, Homo sapiens
gagagagctccaggt

SEQ ID NO: 937279 - DNA, 15 bp, Homo sapiens
agagagagctccagg

SEQ ID NO: 937280 - DNA, 15 bp, Homo sapiens
cagagagagctccag

SEQ ID NO: 937281 - DNA, 15 bp, Homo sapiens
acagagagagctcca

SEQ ID NO: 937282 - DNA, 15 bp, Homo sapiens
gacagagagagctcc

SEQ ID NO: 937283 - DNA, 15 bp, Homo sapiens
tgacagagagagctc

SEQ ID NO: 937284 - DNA, 15 bp, Homo sapiens
ctgacagagagagct

SEQ ID NO: 937285 - DNA, 15 bp, Homo sapiens
actgacagagagagc

SEQ ID NO: 937286 - DNA, 15 bp, Homo sapiens
cactgacagagagag

SEQ ID NO: 937287 - DNA, 15 bp, Homo sapiens
gcactgacagagaga

SEQ ID NO: 937288 - DNA, 15 bp, Homo sapiens
tgcactgacagagag

SEQ ID NO: 937289 - DNA, 15 bp, Homo sapiens
ctgcactgacagaga

SEQ ID NO: 937290 - DNA, 15 bp, Homo sapiens
tctgcactgacagag

SEQ ID NO: 937291 - DNA, 15 bp, Homo sapiens
gtctgcactgacaga

SEQ ID NO: 937292 - DNA, 15 bp, Homo sapiens
tgtctgcactgacag

SEQ ID NO: 937293 - DNA, 15 bp, Homo sapiens
gtgtctgcactgaca

SEQ ID NO: 937294 - DNA, 15 bp, Homo sapiens
ggtgtctgcactgac

SEQ ID NO: 937295 - DNA, 15 bp, Homo sapiens
gggtgtctgcactga

SEQ ID NO: 937296 - DNA, 15 bp, Homo sapiens
tgggtgtctgcactg

SEQ ID NO: 937297 - DNA, 15 bp, Homo sapiens
atgggtgtctgcact

SEQ ID NO: 937298 - DNA, 15 bp, Homo sapiens
gatgggtgtctgcac

SEQ ID NO: 937299 - DNA, 15 bp, Homo sapiens
agatgggtgtctgca

SEQ ID NO: 937300 - DNA, 15 bp, Homo sapiens
aagatgggtgtctgc

SEQ ID NO: 937301 - DNA, 15 bp, Homo sapiens
gaagatgggtgtctg

SEQ ID NO: 937302 - DNA, 15 bp, Homo sapiens
tgaagatgggtgtct

SEQ ID NO: 937303 - DNA, 15 bp, Homo sapiens
ctgaagatgggtgtc

SEQ ID NO: 937304 - DNA, 15 bp, Homo sapiens
cctgaagatgggtgt

SEQ ID NO: 937305 - DNA, 15 bp, Homo sapiens
acctgaagatgggtg

SEQ ID NO: 937306 - DNA, 15 bp, Homo sapiens
aacctgaagatgggt

SEQ ID NO: 937307 - DNA, 15 bp, Homo sapiens
aaacctgaagatggg

SEQ ID NO: 937308 - DNA, 15 bp, Homo sapiens
gaaacctgaagatgg

SEQ ID NO: 937309 - DNA, 15 bp, Homo sapiens
tgaaacctgaagatg

SEQ ID NO: 937310 - DNA, 15 bp, Homo sapiens
ttgaaacctgaagat

SEQ ID NO: 937311 - DNA, 15 bp, Homo sapiens
tttgaaacctgaaga

SEQ ID NO: 937312 - DNA, 15 bp, Homo sapiens
atttgaaacctgaag

SEQ ID NO: 937313 - DNA, 15 bp, Homo sapiens
tatttgaaacctgaa

SEQ ID NO: 937314 - DNA, 15 bp, Homo sapiens
ttatttgaaacctga

SEQ ID NO: 937315 - DNA, 15 bp, Homo sapiens
attatttgaaacctg

SEQ ID NO: 937316 - DNA, 15 bp, Homo sapiens
cattatttgaaacct

SEQ ID NO: 937317 - DNA, 15 bp, Homo sapiens
acattatttgaaacc

SEQ ID NO: 937318 - DNA, 15 bp, Homo sapiens
aacattatttgaaac

SEQ ID NO: 937319 - DNA, 15 bp, Homo sapiens
caacattatttgaaa

SEQ ID NO: 937320 - DNA, 15 bp, Homo sapiens
acaacattatttgaa

SEQ ID NO: 937321 - DNA, 15 bp, Homo sapiens
gacaacattatttga

SEQ ID NO: 937322 - DNA, 15 bp, Homo sapiens
agacaacattatttg

SEQ ID NO: 937323 - DNA, 15 bp, Homo sapiens
aagacaacattattt

SEQ ID NO: 937324 - DNA, 15 bp, Homo sapiens
gaagacaacattatt

SEQ ID NO: 937325 - DNA, 15 bp, Homo sapiens
tgaagacaacattat

SEQ ID NO: 937326 - DNA, 15 bp, Homo sapiens
ctgaagacaacatta

SEQ ID NO: 937327 - DNA, 15 bp, Homo sapiens
cctgaagacaacatt

SEQ ID NO: 937328 - DNA, 15 bp, Homo sapiens
ccctgaagacaacat

SEQ ID NO: 937329 - DNA, 15 bp, Homo sapiens
gccctgaagacaaca

SEQ ID NO: 937330 - DNA, 15 bp, Homo sapiens
tgccctgaagacaac

SEQ ID NO: 937331 - DNA, 15 bp, Homo sapiens
ctgccctgaagacaa

SEQ ID NO: 937332 - DNA, 15 bp, Homo sapiens
cctgccctgaagaca

SEQ ID NO: 937333 - DNA, 15 bp, Homo sapiens
gcctgccctgaagac

SEQ ID NO: 937334 - DNA, 15 bp, Homo sapiens
tgcctgccctgaaga

SEQ ID NO: 937335 - DNA, 15 bp, Homo sapiens
ctgcctgccctgaag

SEQ ID NO: 937336 - DNA, 15 bp, Homo sapiens
actgcctgccctgaa

SEQ ID NO: 937337 - DNA, 15 bp, Homo sapiens
tactgcctgccctga

SEQ ID NO: 937338 - DNA, 15 bp, Homo sapiens
ttactgcctgccctg

SEQ ID NO: 937339 - DNA, 15 bp, Homo sapiens
gttactgcctgccct

SEQ ID NO: 937340 - DNA, 15 bp, Homo sapiens
tgttactgcctgccc

SEQ ID NO: 937341 - DNA, 15 bp, Homo sapiens
ctgttactgcctgcc

SEQ ID NO: 937342 - DNA, 15 bp, Homo sapiens
tctgttactgcctgc

SEQ ID NO: 937343 - DNA, 15 bp, Homo sapiens
ttctgttactgcctg

SEQ ID NO: 937344 - DNA, 15 bp, Homo sapiens
attctgttactgcct

SEQ ID NO: 937345 - DNA, 15 bp, Homo sapiens
tattctgttactgcc

SEQ ID NO: 937346 - DNA, 15 bp, Homo sapiens
ttattctgttactgc

SEQ ID NO: 937347 - DNA, 15 bp, Homo sapiens
tttattctgttactg

SEQ ID NO: 937348 - DNA, 15 bp, Homo sapiens
ttttattctgttact

SEQ ID NO: 937349 - DNA, 15 bp, Homo sapiens
cttttattctgttac

SEQ ID NO: 937350 - DNA, 15 bp, Homo sapiens
tcttttattctgtta

SEQ ID NO: 937351 - DNA, 15 bp, Homo sapiens
ttcttttattctgtt

SEQ ID NO: 937352 - DNA, 15 bp, Homo sapiens
tttcttttattctgt

SEQ ID NO: 937353 - DNA, 15 bp, Homo sapiens
ttttcttttattctg

SEQ ID NO: 937354 - DNA, 15 bp, Homo sapiens
cttttcttttattct

SEQ ID NO: 937355 - DNA, 15 bp, Homo sapiens
ccttttcttttattc

SEQ ID NO: 937356 - DNA, 15 bp, Homo sapiens
accttttcttttatt

SEQ ID NO: 937357 - DNA, 15 bp, Homo sapiens
taccttttcttttat

SEQ ID NO: 937358 - DNA, 15 bp, Homo sapiens
ttaccttttctttta

SEQ ID NO: 937359 - DNA, 15 bp, Homo sapiens
tttaccttttctttt

SEQ ID NO: 937360 - DNA, 15 bp, Homo sapiens
atttaccttttcttt

SEQ ID NO: 937361 - DNA, 15 bp, Homo sapiens
aatttaccttttctt

SEQ ID NO: 937362 - DNA, 15 bp, Homo sapiens
gaatttaccttttct

SEQ ID NO: 937363 - DNA, 15 bp, Homo sapiens
tgaatttaccttttc

SEQ ID NO: 937364 - DNA, 15 bp, Homo sapiens
atgaatttacctttt

SEQ ID NO: 937365 - DNA, 15 bp, Homo sapiens
gatgaatttaccttt

SEQ ID NO: 937366 - DNA, 15 bp, Homo sapiens
tgatgaatttacctt

SEQ ID NO: 937367 - DNA, 15 bp, Homo sapiens
gtgatgaatttacct

SEQ ID NO: 937368 - DNA, 15 bp, Homo sapiens
ggtgatgaatttacc

SEQ ID NO: 937369 - DNA, 15 bp, Homo sapiens
aggtgatgaatttac

SEQ ID NO: 937370 - DNA, 15 bp, Homo sapiens
caggtgatgaattta

SEQ ID NO: 937371 - DNA, 15 bp, Homo sapiens
acaggtgatgaattt

SEQ ID NO: 937372 - DNA, 15 bp, Homo sapiens
aacaggtgatgaatt

SEQ ID NO: 937373 - DNA, 15 bp, Homo sapiens
aaacaggtgatgaat

SEQ ID NO: 937374 - DNA, 15 bp, Homo sapiens
caaacaggtgatgaa

SEQ ID NO: 937375 - DNA, 15 bp, Homo sapiens
gcaaacaggtgatga

SEQ ID NO: 937376 - DNA, 15 bp, Homo sapiens
agcaaacaggtgatg

SEQ ID NO: 937377 - DNA, 15 bp, Homo sapiens
cagcaaacaggtgat

SEQ ID NO: 937378 - DNA, 15 bp, Homo sapiens
gcagcaaacaggtga

SEQ ID NO: 937379 - DNA, 15 bp, Homo sapiens
agcagcaaacaggtg

SEQ ID NO: 937380 - DNA, 15 bp, Homo sapiens
tagcagcaaacaggt

SEQ ID NO: 937381 - DNA, 15 bp, Homo sapiens
gtagcagcaaacagg

SEQ ID NO: 937382 - DNA, 15 bp, Homo sapiens
agtagcagcaaacag

SEQ ID NO: 937383 - DNA, 15 bp, Homo sapiens
aagtagcagcaaaca

SEQ ID NO: 937384 - DNA, 15 bp, Homo sapiens
aaagtagcagcaaac

SEQ ID NO: 937385 - DNA, 15 bp, Homo sapiens
taaagtagcagcaaa

SEQ ID NO: 937386 - DNA, 15 bp, Homo sapiens
ttaaagtagcagcaa

SEQ ID NO: 937387 - DNA, 15 bp, Homo sapiens
cttaaagtagcagca

SEQ ID NO: 937388 - DNA, 15 bp, Homo sapiens
acttaaagtagcagc

SEQ ID NO: 937389 - DNA, 15 bp, Homo sapiens
gacttaaagtagcag

SEQ ID NO: 937390 - DNA, 15 bp, Homo sapiens
ggacttaaagtagca

SEQ ID NO: 937391 - DNA, 15 bp, Homo sapiens
aggacttaaagtagc

SEQ ID NO: 937392 - DNA, 15 bp, Homo sapiens
caggacttaaagtag

SEQ ID NO: 937393 - DNA, 15 bp, Homo sapiens
ccaggacttaaagta

SEQ ID NO: 937394 - DNA, 15 bp, Homo sapiens
accaggacttaaagt

SEQ ID NO: 937395 - DNA, 15 bp, Homo sapiens
taccaggacttaaag

SEQ ID NO: 937396 - DNA, 15 bp, Homo sapiens
ataccaggacttaaa

SEQ ID NO: 937397 - DNA, 15 bp, Homo sapiens
aataccaggacttaa

SEQ ID NO: 937398 - DNA, 15 bp, Homo sapiens
gaataccaggactta

SEQ ID NO: 937399 - DNA, 15 bp, Homo sapiens
agaataccaggactt

SEQ ID NO: 937400 - DNA, 15 bp, Homo sapiens
tagaataccaggact

SEQ ID NO: 937401 - DNA, 15 bp, Homo sapiens
atagaataccaggac

SEQ ID NO: 937402 - DNA, 15 bp, Homo sapiens
aatagaataccagga

SEQ ID NO: 937403 - DNA, 15 bp, Homo sapiens
caatagaataccagg

SEQ ID NO: 937404 - DNA, 15 bp, Homo sapiens
acaatagaataccag

SEQ ID NO: 937405 - DNA, 15 bp, Homo sapiens
tacaatagaatacca

SEQ ID NO: 937406 - DNA, 15 bp, Homo sapiens
ttacaatagaatacc

SEQ ID NO: 937407 - DNA, 15 bp, Homo sapiens
attacaatagaatac

SEQ ID NO: 937408 - DNA, 15 bp, Homo sapiens
gattacaatagaata

SEQ ID NO: 937409 - DNA, 15 bp, Homo sapiens
agattacaatagaat

SEQ ID NO: 937410 - DNA, 15 bp, Homo sapiens
cagattacaatagaa

SEQ ID NO: 937411 - DNA, 15 bp, Homo sapiens
gcagattacaataga

SEQ ID NO: 937412 - DNA, 15 bp, Homo sapiens
ggcagattacaatag

SEQ ID NO: 937413 - DNA, 15 bp, Homo sapiens
aggcagattacaata

SEQ ID NO: 937414 - DNA, 15 bp, Homo sapiens
aaggcagattacaat

SEQ ID NO: 937415 - DNA, 15 bp, Homo sapiens
gaaggcagattacaa

SEQ ID NO: 937416 - DNA, 15 bp, Homo sapiens
agaaggcagattaca

SEQ ID NO: 937417 - DNA, 15 bp, Homo sapiens
tagaaggcagattac

SEQ ID NO: 937418 - DNA, 15 bp, Homo sapiens
gtagaaggcagatta

SEQ ID NO: 937419 - DNA, 15 bp, Homo sapiens
agtagaaggcagatt

SEQ ID NO: 937420 - DNA, 15 bp, Homo sapiens
gagtagaaggcagat

SEQ ID NO: 937421 - DNA, 15 bp, Homo sapiens
ggagtagaaggcaga

SEQ ID NO: 937422 - DNA, 15 bp, Homo sapiens
aggagtagaaggcag

SEQ ID NO: 937423 - DNA, 15 bp, Homo sapiens
aaggagtagaaggca

SEQ ID NO: 937424 - DNA, 15 bp, Homo sapiens
aaaggagtagaaggc

SEQ ID NO: 937425 - DNA, 15 bp, Homo sapiens
caaaggagtagaagg

SEQ ID NO: 937426 - DNA, 15 bp, Homo sapiens
gcaaaggagtagaag

SEQ ID NO: 937427 - DNA, 15 bp, Homo sapiens
tgcaaaggagtagaa

SEQ ID NO: 937428 - DNA, 15 bp, Homo sapiens
ttgcaaaggagtaga

SEQ ID NO: 937429 - DNA, 15 bp, Homo sapiens
tttgcaaaggagtag

SEQ ID NO: 937430 - DNA, 15 bp, Homo sapiens
ctttgcaaaggagta

SEQ ID NO: 937431 - DNA, 15 bp, Homo sapiens
actttgcaaaggagt

SEQ ID NO: 937432 - DNA, 15 bp, Homo sapiens
gactttgcaaaggag

SEQ ID NO: 937433 - DNA, 15 bp, Homo sapiens
ggactttgcaaagga

SEQ ID NO: 937434 - DNA, 15 bp, Homo sapiens
aggactttgcaaagg

SEQ ID NO: 937435 - DNA, 15 bp, Homo sapiens
gaggactttgcaaag

SEQ ID NO: 937436 - DNA, 15 bp, Homo sapiens
tgaggactttgcaaa

SEQ ID NO: 937437 - DNA, 15 bp, Homo sapiens
ttgaggactttgcaa

SEQ ID NO: 937438 - DNA, 15 bp, Homo sapiens
tttgaggactttgca

SEQ ID NO: 937439 - DNA, 15 bp, Homo sapiens
atttgaggactttgc

SEQ ID NO: 937440 - DNA, 15 bp, Homo sapiens
catttgaggactttg

SEQ ID NO: 937441 - DNA, 15 bp, Homo sapiens
ccatttgaggacttt

SEQ ID NO: 937442 - DNA, 15 bp, Homo sapiens
accatttgaggactt

SEQ ID NO: 937443 - DNA, 15 bp, Homo sapiens
aaccatttgaggact

SEQ ID NO: 937444 - DNA, 15 bp, Homo sapiens
caaccatttgaggac

SEQ ID NO: 937445 - DNA, 15 bp, Homo sapiens
gcaaccatttgagga

SEQ ID NO: 937446 - DNA, 15 bp, Homo sapiens
agcaaccatttgagg

SEQ ID NO: 937447 - DNA, 15 bp, Homo sapiens
gagcaaccatttgag

SEQ ID NO: 937448 - DNA, 15 bp, Homo sapiens
ggagcaaccatttga

SEQ ID NO: 937449 - DNA, 15 bp, Homo sapiens
tggagcaaccatttg

SEQ ID NO: 937450 - DNA, 15 bp, Homo sapiens
atggagcaaccattt

SEQ ID NO: 937451 - DNA, 15 bp, Homo sapiens
catggagcaaccatt

SEQ ID NO: 937452 - DNA, 15 bp, Homo sapiens
gcatggagcaaccat

SEQ ID NO: 937453 - DNA, 15 bp, Homo sapiens
tgcatggagcaacca

SEQ ID NO: 937454 - DNA, 15 bp, Homo sapiens
atgcatggagcaacc

SEQ ID NO: 937455 - DNA, 15 bp, Homo sapiens
aatgcatggagcaac

SEQ ID NO: 937456 - DNA, 15 bp, Homo sapiens
aaatgcatggagcaa

SEQ ID NO: 937457 - DNA, 15 bp, Homo sapiens
taaatgcatggagca

SEQ ID NO: 937458 - DNA, 15 bp, Homo sapiens
ctaaatgcatggagc

SEQ ID NO: 937459 - DNA, 15 bp, Homo sapiens
cctaaatgcatggag

SEQ ID NO: 937460 - DNA, 15 bp, Homo sapiens
tcctaaatgcatgga

SEQ ID NO: 937461 - DNA, 15 bp, Homo sapiens
ctcctaaatgcatgg

SEQ ID NO: 937462 - DNA, 15 bp, Homo sapiens
tctcctaaatgcatg

SEQ ID NO: 937463 - DNA, 15 bp, Homo sapiens
ctctcctaaatgcat

SEQ ID NO: 937464 - DNA, 15 bp, Homo sapiens
tctctcctaaatgca

SEQ ID NO: 937465 - DNA, 15 bp, Homo sapiens
ctctctcctaaatgc

SEQ ID NO: 937466 - DNA, 15 bp, Homo sapiens
tctctctcctaaatg

SEQ ID NO: 937467 - DNA, 15 bp, Homo sapiens
ttctctctcctaaat

SEQ ID NO: 937468 - DNA, 15 bp, Homo sapiens
cttctctctcctaaa

SEQ ID NO: 937469 - DNA, 15 bp, Homo sapiens
tcttctctctcctaa

SEQ ID NO: 937470 - DNA, 15 bp, Homo sapiens
atcttctctctccta

SEQ ID NO: 937471 - DNA, 15 bp, Homo sapiens
aatcttctctctcct

SEQ ID NO: 937472 - DNA, 15 bp, Homo sapiens
caatcttctctctcc

SEQ ID NO: 937473 - DNA, 15 bp, Homo sapiens
tcaatcttctctctc

SEQ ID NO: 937474 - DNA, 15 bp, Homo sapiens
ttcaatcttctctct

SEQ ID NO: 937475 - DNA, 15 bp, Homo sapiens
attcaatcttctctc

SEQ ID NO: 937476 - DNA, 15 bp, Homo sapiens
cattcaatcttctct

SEQ ID NO: 937477 - DNA, 15 bp, Homo sapiens
acattcaatcttctc

SEQ ID NO: 937478 - DNA, 15 bp, Homo sapiens
tacattcaatcttct

SEQ ID NO: 937479 - DNA, 15 bp, Homo sapiens
atacattcaatcttc

SEQ ID NO: 937480 - DNA, 15 bp, Homo sapiens
aatacattcaatctt

SEQ ID NO: 937481 - DNA, 15 bp, Homo sapiens
aaatacattcaatct

SEQ ID NO: 937482 - DNA, 15 bp, Homo sapiens
taaatacattcaatc

SEQ ID NO: 937483 - DNA, 15 bp, Homo sapiens
gtaaatacattcaat

SEQ ID NO: 937484 - DNA, 15 bp, Homo sapiens
agtaaatacattcaa

SEQ ID NO: 937485 - DNA, 15 bp, Homo sapiens
gagtaaatacattca

SEQ ID NO: 937486 - DNA, 15 bp, Homo sapiens
ggagtaaatacattc

SEQ ID NO: 937487 - DNA, 15 bp, Homo sapiens
tggagtaaatacatt

SEQ ID NO: 937488 - DNA, 15 bp, Homo sapiens
atggagtaaatacat

SEQ ID NO: 937489 - DNA, 15 bp, Homo sapiens
aatggagtaaataca

SEQ ID NO: 937490 - DNA, 15 bp, Homo sapiens
caatggagtaaatac

SEQ ID NO: 937491 - DNA, 15 bp, Homo sapiens
acaatggagtaaata

SEQ ID NO: 937492 - DNA, 15 bp, Homo sapiens
tacaatggagtaaat

SEQ ID NO: 937493 - DNA, 15 bp, Homo sapiens
gtacaatggagtaaa

SEQ ID NO: 937494 - DNA, 15 bp, Homo sapiens
ggtacaatggagtaa

SEQ ID NO: 937495 - DNA, 15 bp, Homo sapiens
aggtacaatggagta

SEQ ID NO: 937496 - DNA, 15 bp, Homo sapiens
caggtacaatggagt

SEQ ID NO: 937497 - DNA, 15 bp, Homo sapiens
ccaggtacaatggag

SEQ ID NO: 937498 - DNA, 15 bp, Homo sapiens
tccaggtacaatgga

SEQ ID NO: 937499 - DNA, 15 bp, Homo sapiens
ttccaggtacaatgg

SEQ ID NO: 937500 - DNA, 15 bp, Homo sapiens
gttccaggtacaatg

SEQ ID NO: 937501 - DNA, 15 bp, Homo sapiens
ggttccaggtacaat

SEQ ID NO: 937502 - DNA, 15 bp, Homo sapiens
tggttccaggtacaa

SEQ ID NO: 937503 - DNA, 15 bp, Homo sapiens
ctggttccaggtaca

SEQ ID NO: 937504 - DNA, 15 bp, Homo sapiens
tctggttccaggtac

SEQ ID NO: 937505 - DNA, 15 bp, Homo sapiens
atctggttccaggta

SEQ ID NO: 937506 - DNA, 15 bp, Homo sapiens
catctggttccaggt

SEQ ID NO: 937507 - DNA, 15 bp, Homo sapiens
gcatctggttccagg

SEQ ID NO: 937508 - DNA, 15 bp, Homo sapiens
ggcatctggttccag

SEQ ID NO: 937509 - DNA, 15 bp, Homo sapiens
gggcatctggttcca

SEQ ID NO: 937510 - DNA, 15 bp, Homo sapiens
agggcatctggttcc

SEQ ID NO: 937511 - DNA, 15 bp, Homo sapiens
aagggcatctggttc

SEQ ID NO: 937512 - DNA, 15 bp, Homo sapiens
caagggcatctggtt

SEQ ID NO: 937513 - DNA, 15 bp, Homo sapiens
gcaagggcatctggt

SEQ ID NO: 937514 - DNA, 15 bp, Homo sapiens
ggcaagggcatctgg

SEQ ID NO: 937515 - DNA, 15 bp, Homo sapiens
gggcaagggcatctg

SEQ ID NO: 937516 - DNA, 15 bp, Homo sapiens
agggcaagggcatct

SEQ ID NO: 937517 - DNA, 15 bp, Homo sapiens
cagggcaagggcatc

SEQ ID NO: 937518 - DNA, 15 bp, Homo sapiens
gcagggcaagggcat

SEQ ID NO: 937519 - DNA, 15 bp, Homo sapiens
tgcagggcaagggca

SEQ ID NO: 937520 - DNA, 15 bp, Homo sapiens
atgcagggcaagggc

SEQ ID NO: 937521 - DNA, 15 bp, Homo sapiens
gatgcagggcaaggg

SEQ ID NO: 937522 - DNA, 15 bp, Homo sapiens
tgatgcagggcaagg

SEQ ID NO: 937523 - DNA, 15 bp, Homo sapiens
gtgatgcagggcaag

SEQ ID NO: 937524 - DNA, 15 bp, Homo sapiens
ggtgatgcagggcaa

SEQ ID NO: 937525 - DNA, 15 bp, Homo sapiens
gggtgatgcagggca

SEQ ID NO: 937526 - DNA, 15 bp, Homo sapiens
ggggtgatgcagggc

SEQ ID NO: 937527 - DNA, 15 bp, Homo sapiens
tggggtgatgcaggg

SEQ ID NO: 937528 - DNA, 15 bp, Homo sapiens
atggggtgatgcagg

SEQ ID NO: 937529 - DNA, 15 bp, Homo sapiens
catggggtgatgcag

SEQ ID NO: 937530 - DNA, 15 bp, Homo sapiens
acatggggtgatgca

SEQ ID NO: 937531 - DNA, 15 bp, Homo sapiens
gacatggggtgatgc

SEQ ID NO: 937532 - DNA, 15 bp, Homo sapiens
tgacatggggtgatg

SEQ ID NO: 937533 - DNA, 15 bp, Homo sapiens
atgacatggggtgat

SEQ ID NO: 937534 - DNA, 15 bp, Homo sapiens
aatgacatggggtga

SEQ ID NO: 937535 - DNA, 15 bp, Homo sapiens
aaatgacatggggtg

SEQ ID NO: 937536 - DNA, 15 bp, Homo sapiens
gaaatgacatggggt

SEQ ID NO: 937537 - DNA, 15 bp, Homo sapiens
agaaatgacatgggg

SEQ ID NO: 937538 - DNA, 15 bp, Homo sapiens
aagaaatgacatggg

SEQ ID NO: 937539 - DNA, 15 bp, Homo sapiens
taagaaatgacatgg

SEQ ID NO: 937540 - DNA, 15 bp, Homo sapiens
ctaagaaatgacatg

SEQ ID NO: 937541 - DNA, 15 bp, Homo sapiens
gctaagaaatgacat

SEQ ID NO: 937542 - DNA, 15 bp, Homo sapiens
tgctaagaaatgaca

SEQ ID NO: 937543 - DNA, 15 bp, Homo sapiens
ctgctaagaaatgac

SEQ ID NO: 937544 - DNA, 15 bp, Homo sapiens
tctgctaagaaatga

SEQ ID NO: 937545 - DNA, 15 bp, Homo sapiens
ctctgctaagaaatg

SEQ ID NO: 937546 - DNA, 15 bp, Homo sapiens
gctctgctaagaaat

SEQ ID NO: 937547 - DNA, 15 bp, Homo sapiens
ggctctgctaagaaa

SEQ ID NO: 937548 - DNA, 15 bp, Homo sapiens
aggctctgctaagaa

SEQ ID NO: 937549 - DNA, 15 bp, Homo sapiens
aaggctctgctaaga

SEQ ID NO: 937550 - DNA, 15 bp, Homo sapiens
aaaggctctgctaag

SEQ ID NO: 937551 - DNA, 15 bp, Homo sapiens
caaaggctctgctaa

SEQ ID NO: 937552 - DNA, 15 bp, Homo sapiens
tcaaaggctctgcta

SEQ ID NO: 937553 - DNA, 15 bp, Homo sapiens
ctcaaaggctctgct

SEQ ID NO: 937554 - DNA, 15 bp, Homo sapiens
tctcaaaggctctgc

SEQ ID NO: 937555 - DNA, 15 bp, Homo sapiens
atctcaaaggctctg

SEQ ID NO: 937556 - DNA, 15 bp, Homo sapiens
aatctcaaaggctct

SEQ ID NO: 937557 - DNA, 15 bp, Homo sapiens
aaatctcaaaggctc

SEQ ID NO: 937558 - DNA, 15 bp, Homo sapiens
aaaatctcaaaggct

SEQ ID NO: 937559 - DNA, 15 bp, Homo sapiens
aaaaatctcaaaggc

SEQ ID NO: 937560 - DNA, 15 bp, Homo sapiens
caaaaatctcaaagg

SEQ ID NO: 937561 - DNA, 15 bp, Homo sapiens
acaaaaatctcaaag

SEQ ID NO: 937562 - DNA, 15 bp, Homo sapiens
cacaaaaatctcaaa

SEQ ID NO: 937563 - DNA, 15 bp, Homo sapiens
acacaaaaatctcaa

SEQ ID NO: 937564 - DNA, 15 bp, Homo sapiens
cacacaaaaatctca

SEQ ID NO: 937565 - DNA, 15 bp, Homo sapiens
acacacaaaaatctc

SEQ ID NO: 937566 - DNA, 15 bp, Homo sapiens
cacacacaaaaatct

SEQ ID NO: 937567 - DNA, 15 bp, Homo sapiens
acacacacaaaaatc

SEQ ID NO: 937568 - DNA, 15 bp, Homo sapiens
cacacacacaaaaat

SEQ ID NO: 937569 - DNA, 15 bp, Homo sapiens
acacacacacaaaaa

SEQ ID NO: 937570 - DNA, 15 bp, Homo sapiens
cacacacacacaaaa

SEQ ID NO: 937571 - DNA, 15 bp, Homo sapiens
gcacacacacacaaa

SEQ ID NO: 937572 - DNA, 15 bp, Homo sapiens
ttgtgcagaggaaat

SEQ ID NO: 937573 - DNA, 15 bp, Homo sapiens
attgtgcagaggaaa

SEQ ID NO: 937574 - DNA, 15 bp, Homo sapiens
gattgtgcagaggaa

SEQ ID NO: 937575 - DNA, 15 bp, Homo sapiens
tgattgtgcagagga

SEQ ID NO: 937576 - DNA, 15 bp, Homo sapiens
ctgattgtgcagagg

SEQ ID NO: 937577 - DNA, 15 bp, Homo sapiens
tctgattgtgcagag

SEQ ID NO: 937578 - DNA, 15 bp, Homo sapiens
ctctgattgtgcaga

SEQ ID NO: 937579 - DNA, 15 bp, Homo sapiens
cctctgattgtgcag

SEQ ID NO: 937580 - DNA, 15 bp, Homo sapiens
ccctctgattgtgca

SEQ ID NO: 937581 - DNA, 15 bp, Homo sapiens
tccctctgattgtgc

SEQ ID NO: 937582 - DNA, 15 bp, Homo sapiens
ttccctctgattgtg

SEQ ID NO: 937583 - DNA, 15 bp, Homo sapiens
tttccctctgattgt

SEQ ID NO: 937584 - DNA, 15 bp, Homo sapiens
ctttccctctgattg

SEQ ID NO: 937585 - DNA, 15 bp, Homo sapiens
tctttccctctgatt

SEQ ID NO: 937586 - DNA, 15 bp, Homo sapiens
atctttccctctgat

SEQ ID NO: 937587 - DNA, 15 bp, Homo sapiens
gatctttccctctga

SEQ ID NO: 937588 - DNA, 15 bp, Homo sapiens
agatctttccctctg

SEQ ID NO: 937589 - DNA, 15 bp, Homo sapiens
aagatctttccctct

SEQ ID NO: 937590 - DNA, 15 bp, Homo sapiens
aaagatctttccctc

SEQ ID NO: 937591 - DNA, 15 bp, Homo sapiens
gaaagatctttccct

SEQ ID NO: 937592 - DNA, 15 bp, Homo sapiens
ggaaagatctttccc

SEQ ID NO: 937593 - DNA, 15 bp, Homo sapiens
gggaaagatctttcc

SEQ ID NO: 937594 - DNA, 15 bp, Homo sapiens
tgggaaagatctttc

SEQ ID NO: 937595 - DNA, 15 bp, Homo sapiens
ttgggaaagatcttt

SEQ ID NO: 937596 - DNA, 15 bp, Homo sapiens
attgggaaagatctt

SEQ ID NO: 937597 - DNA, 15 bp, Homo sapiens
gattgggaaagatct

SEQ ID NO: 937598 - DNA, 15 bp, Homo sapiens
ggattgggaaagatc

SEQ ID NO: 937599 - DNA, 15 bp, Homo sapiens
aggattgggaaagat

SEQ ID NO: 937600 - DNA, 15 bp, Homo sapiens
gaggattgggaaaga

SEQ ID NO: 937601 - DNA, 15 bp, Homo sapiens
agaggattgggaaag

SEQ ID NO: 937602 - DNA, 15 bp, Homo sapiens
gagaggattgggaaa

SEQ ID NO: 937603 - DNA, 15 bp, Homo sapiens
agagaggattgggaa

SEQ ID NO: 937604 - DNA, 15 bp, Homo sapiens
gagagaggattggga

SEQ ID NO: 937605 - DNA, 15 bp, Homo sapiens
ggagagaggattggg

SEQ ID NO: 937606 - DNA, 15 bp, Homo sapiens
aggagagaggattgg

SEQ ID NO: 937607 - DNA, 15 bp, Homo sapiens
aaggagagaggattg

SEQ ID NO: 937608 - DNA, 15 bp, Homo sapiens
caaggagagaggatt

SEQ ID NO: 937609 - DNA, 15 bp, Homo sapiens
ccaaggagagaggat

SEQ ID NO: 937610 - DNA, 15 bp, Homo sapiens
gccaaggagagagga

SEQ ID NO: 937611 - DNA, 15 bp, Homo sapiens
agccaaggagagagg

SEQ ID NO: 937612 - DNA, 15 bp, Homo sapiens
aagccaaggagagag

SEQ ID NO: 937613 - DNA, 15 bp, Homo sapiens
taagccaaggagaga

SEQ ID NO: 937614 - DNA, 15 bp, Homo sapiens
ataagccaaggagag

SEQ ID NO: 937615 - DNA, 15 bp, Homo sapiens
tataagccaaggaga

SEQ ID NO: 937616 - DNA, 15 bp, Homo sapiens
ttataagccaaggag

SEQ ID NO: 937617 - DNA, 15 bp, Homo sapiens
tttataagccaagga

SEQ ID NO: 937618 - DNA, 15 bp, Homo sapiens
atttataagccaagg

SEQ ID NO: 937619 - DNA, 15 bp, Homo sapiens
catttataagccaag

SEQ ID NO: 937620 - DNA, 15 bp, Homo sapiens
acatttataagccaa

SEQ ID NO: 937621 - DNA, 15 bp, Homo sapiens
gacatttataagcca

SEQ ID NO: 937622 - DNA, 15 bp, Homo sapiens
ggacatttataagcc

SEQ ID NO: 937623 - DNA, 15 bp, Homo sapiens
tggacatttataagc

SEQ ID NO: 937624 - DNA, 15 bp, Homo sapiens
atggacatttataag

SEQ ID NO: 937625 - DNA, 15 bp, Homo sapiens
catggacatttataa

SEQ ID NO: 937626 - DNA, 15 bp, Homo sapiens
acatggacatttata

SEQ ID NO: 937627 - DNA, 15 bp, Homo sapiens
aacatggacatttat

SEQ ID NO: 937628 - DNA, 15 bp, Homo sapiens
aaacatggacattta

SEQ ID NO: 937629 - DNA, 15 bp, Homo sapiens
aaaacatggacattt

SEQ ID NO: 937630 - DNA, 15 bp, Homo sapiens
gaaaacatggacatt

SEQ ID NO: 937631 - DNA, 15 bp, Homo sapiens
ggaaaacatggacat

SEQ ID NO: 937632 - DNA, 15 bp, Homo sapiens
gggaaaacatggaca

SEQ ID NO: 937633 - DNA, 15 bp, Homo sapiens
agggaaaacatggac

SEQ ID NO: 937634 - DNA, 15 bp, Homo sapiens
cagggaaaacatgga

SEQ ID NO: 937635 - DNA, 15 bp, Homo sapiens
acagggaaaacatgg

SEQ ID NO: 937636 - DNA, 15 bp, Homo sapiens
aacagggaaaacatg

SEQ ID NO: 937637 - DNA, 15 bp, Homo sapiens
aaacagggaaaacat

SEQ ID NO: 937638 - DNA, 15 bp, Homo sapiens
gaaacagggaaaaca

SEQ ID NO: 937639 - DNA, 15 bp, Homo sapiens
agaaacagggaaaac

SEQ ID NO: 937640 - DNA, 15 bp, Homo sapiens
aagaaacagggaaaa

SEQ ID NO: 937641 - DNA, 15 bp, Homo sapiens
aaagaaacagggaaa

SEQ ID NO: 937642 - DNA, 15 bp, Homo sapiens
aaaagaaacagggaa

SEQ ID NO: 937643 - DNA, 15 bp, Homo sapiens
aaaaagaaacaggga

SEQ ID NO: 937644 - DNA, 15 bp, Homo sapiens
taaaaagaaacaggg

SEQ ID NO: 937645 - DNA, 15 bp, Homo sapiens
ataaaaagaaacagg

SEQ ID NO: 937646 - DNA, 15 bp, Homo sapiens
gataaaaagaaacag

SEQ ID NO: 937647 - DNA, 15 bp, Homo sapiens
tgataaaaagaaaca

SEQ ID NO: 937648 - DNA, 15 bp, Homo sapiens
atgataaaaagaaac

SEQ ID NO: 937649 - DNA, 15 bp, Homo sapiens
gatgataaaaagaaa

SEQ ID NO: 937650 - DNA, 15 bp, Homo sapiens
agatgataaaaagaa

SEQ ID NO: 937651 - DNA, 15 bp, Homo sapiens
aagatgataaaaaga

SEQ ID NO: 937652 - DNA, 15 bp, Homo sapiens
gaagatgataaaaag

SEQ ID NO: 937653 - DNA, 15 bp, Homo sapiens
ggaagatgataaaaa

SEQ ID NO: 937654 - DNA, 15 bp, Homo sapiens
aggaagatgataaaa

SEQ ID NO: 937655 - DNA, 15 bp, Homo sapiens
aaggaagatgataaa

SEQ ID NO: 937656 - DNA, 15 bp, Homo sapiens
gaaggaagatgataa

SEQ ID NO: 937657 - DNA, 15 bp, Homo sapiens
agaaggaagatgata

SEQ ID NO: 937658 - DNA, 15 bp, Homo sapiens
cagaaggaagatgat

SEQ ID NO: 937659 - DNA, 15 bp, Homo sapiens
acagaaggaagatga

SEQ ID NO: 937660 - DNA, 15 bp, Homo sapiens
tacagaaggaagatg

SEQ ID NO: 937661 - DNA, 15 bp, Homo sapiens
gtacagaaggaagat

SEQ ID NO: 937662 - DNA, 15 bp, Homo sapiens
tgtacagaaggaaga

SEQ ID NO: 937663 - DNA, 15 bp, Homo sapiens
atgtacagaaggaag

SEQ ID NO: 937664 - DNA, 15 bp, Homo sapiens
catgtacagaaggaa

SEQ ID NO: 937665 - DNA, 15 bp, Homo sapiens
acatgtacagaagga

SEQ ID NO: 937666 - DNA, 15 bp, Homo sapiens
gacatgtacagaagg

SEQ ID NO: 937667 - DNA, 15 bp, Homo sapiens
agacatgtacagaag

SEQ ID NO: 937668 - DNA, 15 bp, Homo sapiens
gagacatgtacagaa

SEQ ID NO: 937669 - DNA, 15 bp, Homo sapiens
agagacatgtacaga

SEQ ID NO: 937670 - DNA, 15 bp, Homo sapiens
cagagacatgtacag

SEQ ID NO: 937671 - DNA, 15 bp, Homo sapiens
acagagacatgtaca

SEQ ID NO: 937672 - DNA, 15 bp, Homo sapiens
cacagagacatgtac

SEQ ID NO: 937673 - DNA, 15 bp, Homo sapiens
acacagagacatgta

SEQ ID NO: 937674 - DNA, 15 bp, Homo sapiens
gacacagagacatgt

SEQ ID NO: 937675 - DNA, 15 bp, Homo sapiens
agacacagagacatg

SEQ ID NO: 937676 - DNA, 15 bp, Homo sapiens
tagacacagagacat

SEQ ID NO: 937677 - DNA, 15 bp, Homo sapiens
ttagacacagagaca

SEQ ID NO: 937678 - DNA, 15 bp, Homo sapiens
tttagacacagagac

SEQ ID NO: 937679 - DNA, 15 bp, Homo sapiens
atttagacacagaga

SEQ ID NO: 937680 - DNA, 15 bp, Homo sapiens
gatttagacacagag

SEQ ID NO: 937681 - DNA, 15 bp, Homo sapiens
ggatttagacacaga

SEQ ID NO: 937682 - DNA, 15 bp, Homo sapiens
gggatttagacacag

SEQ ID NO: 937683 - DNA, 15 bp, Homo sapiens
ggggatttagacaca

SEQ ID NO: 937684 - DNA, 15 bp, Homo sapiens
tggggatttagacac

SEQ ID NO: 937685 - DNA, 15 bp, Homo sapiens
ttggggatttagaca

SEQ ID NO: 937686 - DNA, 15 bp, Homo sapiens
tttggggatttagac

SEQ ID NO: 937687 - DNA, 15 bp, Homo sapiens
atttggggatttaga

SEQ ID NO: 937688 - DNA, 15 bp, Homo sapiens
aatttggggatttag

SEQ ID NO: 937689 - DNA, 15 bp, Homo sapiens
aaatttggggattta

SEQ ID NO: 937690 - DNA, 15 bp, Homo sapiens
aaaatttggggattt

SEQ ID NO: 937691 - DNA, 15 bp, Homo sapiens
gaaaatttggggatt

SEQ ID NO: 937692 - DNA, 15 bp, Homo sapiens
agaaaatttggggat

SEQ ID NO: 937693 - DNA, 15 bp, Homo sapiens
gagaaaatttgggga

SEQ ID NO: 937694 - DNA, 15 bp, Homo sapiens
agagaaaatttgggg

SEQ ID NO: 937695 - DNA, 15 bp, Homo sapiens
aagagaaaatttggg

SEQ ID NO: 937696 - DNA, 15 bp, Homo sapiens
aaagagaaaatttgg

SEQ ID NO: 937697 - DNA, 15 bp, Homo sapiens
aaaagagaaaatttg

SEQ ID NO: 937698 - DNA, 15 bp, Homo sapiens
gaaaagagaaaattt

SEQ ID NO: 937699 - DNA, 15 bp, Homo sapiens
tgaaaagagaaaatt

SEQ ID NO: 937700 - DNA, 15 bp, Homo sapiens
atgaaaagagaaaat

SEQ ID NO: 937701 - DNA, 15 bp, Homo sapiens
tatgaaaagagaaaa

SEQ ID NO: 937702 - DNA, 15 bp, Homo sapiens
ttatgaaaagagaaa

SEQ ID NO: 937703 - DNA, 15 bp, Homo sapiens
cttatgaaaagagaa

SEQ ID NO: 937704 - DNA, 15 bp, Homo sapiens
ccttatgaaaagaga

SEQ ID NO: 937705 - DNA, 15 bp, Homo sapiens
tccttatgaaaagag

SEQ ID NO: 937706 - DNA, 15 bp, Homo sapiens
atccttatgaaaaga

SEQ ID NO: 937707 - DNA, 15 bp, Homo sapiens
tatccttatgaaaag

SEQ ID NO: 937708 - DNA, 15 bp, Homo sapiens
gtatccttatgaaaa

SEQ ID NO: 937709 - DNA, 15 bp, Homo sapiens
ggtatccttatgaaa

SEQ ID NO: 937710 - DNA, 15 bp, Homo sapiens
tggtatccttatgaa

SEQ ID NO: 937711 - DNA, 15 bp, Homo sapiens
ctggtatccttatga

SEQ ID NO: 937712 - DNA, 15 bp, Homo sapiens
actggtatccttatg

SEQ ID NO: 937713 - DNA, 15 bp, Homo sapiens
gactggtatccttat

SEQ ID NO: 937714 - DNA, 15 bp, Homo sapiens
tgactggtatcctta

SEQ ID NO: 937715 - DNA, 15 bp, Homo sapiens
gtgactggtatcctt

SEQ ID NO: 937716 - DNA, 15 bp, Homo sapiens
tgtgactggtatcct

SEQ ID NO: 937717 - DNA, 15 bp, Homo sapiens
ctgtgactggtatcc

SEQ ID NO: 937718 - DNA, 15 bp, Homo sapiens
actgtgactggtatc

SEQ ID NO: 937719 - DNA, 15 bp, Homo sapiens
gactgtgactggtat

SEQ ID NO: 937720 - DNA, 15 bp, Homo sapiens
cgactgtgactggta

SEQ ID NO: 937721 - DNA, 15 bp, Homo sapiens
tcgactgtgactggt

SEQ ID NO: 937722 - DNA, 15 bp, Homo sapiens
ttcgactgtgactgg

SEQ ID NO: 937723 - DNA, 15 bp, Homo sapiens
attcgactgtgactg

SEQ ID NO: 937724 - DNA, 15 bp, Homo sapiens
tattcgactgtgact

SEQ ID NO: 937725 - DNA, 15 bp, Homo sapiens
ctattcgactgtgac

SEQ ID NO: 937726 - DNA, 15 bp, Homo sapiens
cctattcgactgtga

SEQ ID NO: 937727 - DNA, 15 bp, Homo sapiens
ccctattcgactgtg

SEQ ID NO: 937728 - DNA, 15 bp, Homo sapiens
accctattcgactgt

SEQ ID NO: 937729 - DNA, 15 bp, Homo sapiens
aaccctattcgactg

SEQ ID NO: 937730 - DNA, 15 bp, Homo sapiens
aaaccctattcgact

SEQ ID NO: 937731 - DNA, 15 bp, Homo sapiens
taaaccctattcgac

SEQ ID NO: 937732 - DNA, 15 bp, Homo sapiens
gtaaaccctattcga

SEQ ID NO: 937733 - DNA, 15 bp, Homo sapiens
ggtaaaccctattcg

SEQ ID NO: 937734 - DNA, 15 bp, Homo sapiens
gggtaaaccctattc

SEQ ID NO: 937735 - DNA, 15 bp, Homo sapiens
agggtaaaccctatt

SEQ ID NO: 937736 - DNA, 15 bp, Homo sapiens
cagggtaaaccctat

SEQ ID NO: 937737 - DNA, 15 bp, Homo sapiens
tcagggtaaacccta

SEQ ID NO: 937738 - DNA, 15 bp, Homo sapiens
ttcagggtaaaccct

SEQ ID NO: 937739 - DNA, 15 bp, Homo sapiens
tttcagggtaaaccc

SEQ ID NO: 937740 - DNA, 15 bp, Homo sapiens
atttcagggtaaacc

SEQ ID NO: 937741 - DNA, 15 bp, Homo sapiens
gatttcagggtaaac

SEQ ID NO: 937742 - DNA, 15 bp, Homo sapiens
agatttcagggtaaa

SEQ ID NO: 937743 - DNA, 15 bp, Homo sapiens
gagatttcagggtaa

SEQ ID NO: 937744 - DNA, 15 bp, Homo sapiens
tgagatttcagggta

SEQ ID NO: 937745 - DNA, 15 bp, Homo sapiens
atgagatttcagggt

SEQ ID NO: 937746 - DNA, 15 bp, Homo sapiens
aatgagatttcaggg

SEQ ID NO: 937747 - DNA, 15 bp, Homo sapiens
aaatgagatttcagg

SEQ ID NO: 937748 - DNA, 15 bp, Homo sapiens
aaaatgagatttcag

SEQ ID NO: 937749 - DNA, 15 bp, Homo sapiens
taaaatgagatttca

SEQ ID NO: 937750 - DNA, 15 bp, Homo sapiens
ttaaaatgagatttc

SEQ ID NO: 937751 - DNA, 15 bp, Homo sapiens
gttaaaatgagattt

SEQ ID NO: 937752 - DNA, 15 bp, Homo sapiens
agttaaaatgagatt

SEQ ID NO: 937753 - DNA, 15 bp, Homo sapiens
aagttaaaatgagat

SEQ ID NO: 937754 - DNA, 15 bp, Homo sapiens
caagttaaaatgaga

SEQ ID NO: 937755 - DNA, 15 bp, Homo sapiens
tcaagttaaaatgag

SEQ ID NO: 937756 - DNA, 15 bp, Homo sapiens
ttcaagttaaaatga

SEQ ID NO: 937757 - DNA, 15 bp, Homo sapiens
attcaagttaaaatg

SEQ ID NO: 937758 - DNA, 15 bp, Homo sapiens
tattcaagttaaaat

SEQ ID NO: 937759 - DNA, 15 bp, Homo sapiens
gtattcaagttaaaa

SEQ ID NO: 937760 - DNA, 15 bp, Homo sapiens
ggtattcaagttaaa

SEQ ID NO: 937761 - DNA, 15 bp, Homo sapiens
aggtattcaagttaa

SEQ ID NO: 937762 - DNA, 15 bp, Homo sapiens
gaggtattcaagtta

SEQ ID NO: 937763 - DNA, 15 bp, Homo sapiens
agaggtattcaagtt

SEQ ID NO: 937764 - DNA, 15 bp, Homo sapiens
cagaggtattcaagt

SEQ ID NO: 937765 - DNA, 15 bp, Homo sapiens
acagaggtattcaag

SEQ ID NO: 937766 - DNA, 15 bp, Homo sapiens
tacagaggtattcaa

SEQ ID NO: 937767 - DNA, 15 bp, Homo sapiens
ttacagaggtattca

SEQ ID NO: 937768 - DNA, 15 bp, Homo sapiens
tttacagaggtattc

SEQ ID NO: 937769 - DNA, 15 bp, Homo sapiens
ctttacagaggtatt

SEQ ID NO: 937770 - DNA, 15 bp, Homo sapiens
tctttacagaggtat

SEQ ID NO: 937771 - DNA, 15 bp, Homo sapiens
gtctttacagaggta

SEQ ID NO: 937772 - DNA, 15 bp, Homo sapiens
ggtctttacagaggt

SEQ ID NO: 937773 - DNA, 15 bp, Homo sapiens
gggtctttacagagg

SEQ ID NO: 937774 - DNA, 15 bp, Homo sapiens
tgggtctttacagag

SEQ ID NO: 937775 - DNA, 15 bp, Homo sapiens
ctgggtctttacaga

SEQ ID NO: 937776 - DNA, 15 bp, Homo sapiens
actgggtctttacag

SEQ ID NO: 937777 - DNA, 15 bp, Homo sapiens
gactgggtctttaca

SEQ ID NO: 937778 - DNA, 15 bp, Homo sapiens
agactgggtctttac

SEQ ID NO: 937779 - DNA, 15 bp, Homo sapiens
gagactgggtcttta

SEQ ID NO: 937780 - DNA, 15 bp, Homo sapiens
ggagactgggtcttt

SEQ ID NO: 937781 - DNA, 15 bp, Homo sapiens
tggagactgggtctt

SEQ ID NO: 937782 - DNA, 15 bp, Homo sapiens
ttggagactgggtct

SEQ ID NO: 937783 - DNA, 15 bp, Homo sapiens
tttggagactgggtc

SEQ ID NO: 937784 - DNA, 15 bp, Homo sapiens
atttggagactgggt

SEQ ID NO: 937785 - DNA, 15 bp, Homo sapiens
tatttggagactggg

SEQ ID NO: 937786 - DNA, 15 bp, Homo sapiens
ttatttggagactgg

SEQ ID NO: 937787 - DNA, 15 bp, Homo sapiens
tttatttggagactg

SEQ ID NO: 937788 - DNA, 15 bp, Homo sapiens
ctttatttggagact

SEQ ID NO: 937789 - DNA, 15 bp, Homo sapiens
actttatttggagac

SEQ ID NO: 937790 - DNA, 15 bp, Homo sapiens
gactttatttggaga

SEQ ID NO: 937791 - DNA, 15 bp, Homo sapiens
tgactttatttggag

SEQ ID NO: 937792 - DNA, 15 bp, Homo sapiens
gtgactttatttgga

SEQ ID NO: 937793 - DNA, 15 bp, Homo sapiens
tgtgactttatttgg

SEQ ID NO: 937794 - DNA, 15 bp, Homo sapiens
atgtgactttatttg

SEQ ID NO: 937795 - DNA, 15 bp, Homo sapiens
aatgtgactttattt

SEQ ID NO: 937796 - DNA, 15 bp, Homo sapiens
gaatgtgactttatt

SEQ ID NO: 937797 - DNA, 15 bp, Homo sapiens
agaatgtgactttat

SEQ ID NO: 937798 - DNA, 15 bp, Homo sapiens
cagaatgtgacttta

SEQ ID NO: 937799 - DNA, 15 bp, Homo sapiens
tcagaatgtgacttt

SEQ ID NO: 937800 - DNA, 15 bp, Homo sapiens
ctcagaatgtgactt

SEQ ID NO: 937801 - DNA, 15 bp, Homo sapiens
cctcagaatgtgact

SEQ ID NO: 937802 - DNA, 15 bp, Homo sapiens
acctcagaatgtgac

SEQ ID NO: 937803 - DNA, 15 bp, Homo sapiens
tacctcagaatgtga

SEQ ID NO: 937804 - DNA, 15 bp, Homo sapiens
gtacctcagaatgtg

SEQ ID NO: 937805 - DNA, 15 bp, Homo sapiens
agtacctcagaatgt

SEQ ID NO: 937806 - DNA, 15 bp, Homo sapiens
cagtacctcagaatg

SEQ ID NO: 937807 - DNA, 15 bp, Homo sapiens
ccagtacctcagaat

SEQ ID NO: 937808 - DNA, 15 bp, Homo sapiens
tccagtacctcagaa

SEQ ID NO: 937809 - DNA, 15 bp, Homo sapiens
ttccagtacctcaga

SEQ ID NO: 937810 - DNA, 15 bp, Homo sapiens
tttccagtacctcag

SEQ ID NO: 937811 - DNA, 15 bp, Homo sapiens
atttccagtacctca

SEQ ID NO: 937812 - DNA, 15 bp, Homo sapiens
aatttccagtacctc

SEQ ID NO: 937813 - DNA, 15 bp, Homo sapiens
taatttccagtacct

SEQ ID NO: 937814 - DNA, 15 bp, Homo sapiens
ataatttccagtacc

SEQ ID NO: 937815 - DNA, 15 bp, Homo sapiens
cataatttccagtac

SEQ ID NO: 937816 - DNA, 15 bp, Homo sapiens
tcataatttccagta

SEQ ID NO: 937817 - DNA, 15 bp, Homo sapiens
gtcataatttccagt

SEQ ID NO: 937818 - DNA, 15 bp, Homo sapiens
agtcataatttccag

SEQ ID NO: 937819 - DNA, 15 bp, Homo sapiens
aagtcataatttcca

SEQ ID NO: 937820 - DNA, 15 bp, Homo sapiens
aaagtcataatttcc

SEQ ID NO: 937821 - DNA, 15 bp, Homo sapiens
taaagtcataatttc

SEQ ID NO: 937822 - DNA, 15 bp, Homo sapiens
ttaaagtcataattt

SEQ ID NO: 937823 - DNA, 15 bp, Homo sapiens
attaaagtcataatt

SEQ ID NO: 937824 - DNA, 15 bp, Homo sapiens
tattaaagtcataat

SEQ ID NO: 937825 - DNA, 15 bp, Homo sapiens
atattaaagtcataa

SEQ ID NO: 937826 - DNA, 15 bp, Homo sapiens
tatattaaagtcata

SEQ ID NO: 937827 - DNA, 15 bp, Homo sapiens
atatattaaagtcat

SEQ ID NO: 937828 - DNA, 15 bp, Homo sapiens
tatatattaaagtca

SEQ ID NO: 937829 - DNA, 15 bp, Homo sapiens
ttatatattaaagtc

SEQ ID NO: 937830 - DNA, 15 bp, Homo sapiens
tttatatattaaagt

SEQ ID NO: 937831 - DNA, 15 bp, Homo sapiens
atttatatattaaag

SEQ ID NO: 937832 - DNA, 15 bp, Homo sapiens
catttatatattaaa

SEQ ID NO: 937833 - DNA, 15 bp, Homo sapiens
acatttatatattaa

SEQ ID NO: 937834 - DNA, 15 bp, Homo sapiens
cacatttatatatta

SEQ ID NO: 937835 - DNA, 15 bp, Homo sapiens
ccacatttatatatt

SEQ ID NO: 937836 - DNA, 15 bp, Homo sapiens
tccacatttatatat

SEQ ID NO: 937837 - DNA, 15 bp, Homo sapiens
ctccacatttatata

SEQ ID NO: 937838 - DNA, 15 bp, Homo sapiens
cctccacatttatat

SEQ ID NO: 937839 - DNA, 15 bp, Homo sapiens
ccctccacatttata

SEQ ID NO: 937840 - DNA, 15 bp, Homo sapiens
accctccacatttat

SEQ ID NO: 937841 - DNA, 15 bp, Homo sapiens
taccctccacattta

SEQ ID NO: 937842 - DNA, 15 bp, Homo sapiens
ttaccctccacattt

SEQ ID NO: 937843 - DNA, 15 bp, Homo sapiens
cttaccctccacatt

SEQ ID NO: 937844 - DNA, 15 bp, Homo sapiens
ccttaccctccacat

SEQ ID NO: 937845 - DNA, 15 bp, Homo sapiens
cccttaccctccaca

SEQ ID NO: 937846 - DNA, 15 bp, Homo sapiens
ccccttaccctccac

SEQ ID NO: 937847 - DNA, 15 bp, Homo sapiens
tccccttaccctcca

SEQ ID NO: 937848 - DNA, 15 bp, Homo sapiens
ttccccttaccctcc

SEQ ID NO: 937849 - DNA, 15 bp, Homo sapiens
gttccccttaccctc

SEQ ID NO: 937850 - DNA, 15 bp, Homo sapiens
tgttccccttaccct

SEQ ID NO: 937851 - DNA, 15 bp, Homo sapiens
gtgttccccttaccc

SEQ ID NO: 937852 - DNA, 15 bp, Homo sapiens
tgtgttccccttacc

SEQ ID NO: 937853 - DNA, 15 bp, Homo sapiens
ctgtgttccccttac

SEQ ID NO: 937854 - DNA, 15 bp, Homo sapiens
actgtgttcccctta

SEQ ID NO: 937855 - DNA, 15 bp, Homo sapiens
aactgtgttcccctt

SEQ ID NO: 937856 - DNA, 15 bp, Homo sapiens
gaactgtgttcccct

SEQ ID NO: 937857 - DNA, 15 bp, Homo sapiens
tgaactgtgttcccc

SEQ ID NO: 937858 - DNA, 15 bp, Homo sapiens
ttgaactgtgttccc

SEQ ID NO: 937859 - DNA, 15 bp, Homo sapiens
gttgaactgtgttcc

SEQ ID NO: 937860 - DNA, 15 bp, Homo sapiens
ggttgaactgtgttc

SEQ ID NO: 937861 - DNA, 15 bp, Homo sapiens
gggttgaactgtgtt

SEQ ID NO: 937862 - DNA, 15 bp, Homo sapiens
tgggttgaactgtgt

SEQ ID NO: 937863 - DNA, 15 bp, Homo sapiens
atgggttgaactgtg

SEQ ID NO: 937864 - DNA, 15 bp, Homo sapiens
tatgggttgaactgt

SEQ ID NO: 937865 - DNA, 15 bp, Homo sapiens
ttatgggttgaactg

SEQ ID NO: 937866 - DNA, 15 bp, Homo sapiens
gttatgggttgaact

SEQ ID NO: 937867 - DNA, 15 bp, Homo sapiens
cgttatgggttgaac

SEQ ID NO: 937868 - DNA, 15 bp, Homo sapiens
ccgttatgggttgaa

SEQ ID NO: 937869 - DNA, 15 bp, Homo sapiens
accgttatgggttga

SEQ ID NO: 937870 - DNA, 15 bp, Homo sapiens
aaccgttatgggttg

SEQ ID NO: 937871 - DNA, 15 bp, Homo sapiens
taaccgttatgggtt

SEQ ID NO: 937872 - DNA, 15 bp, Homo sapiens
ctaaccgttatgggt

SEQ ID NO: 937873 - DNA, 15 bp, Homo sapiens
tctaaccgttatggg

SEQ ID NO: 937874 - DNA, 15 bp, Homo sapiens
atctaaccgttatgg

SEQ ID NO: 937875 - DNA, 15 bp, Homo sapiens
tatctaaccgttatg

SEQ ID NO: 937876 - DNA, 15 bp, Homo sapiens
ttatctaaccgttat

SEQ ID NO: 937877 - DNA, 15 bp, Homo sapiens
gttatctaaccgtta

SEQ ID NO: 937878 - DNA, 15 bp, Homo sapiens
tgttatctaaccgtt

SEQ ID NO: 937879 - DNA, 15 bp, Homo sapiens
ttgttatctaaccgt

SEQ ID NO: 937880 - DNA, 15 bp, Homo sapiens
attgttatctaaccg

SEQ ID NO: 937881 - DNA, 15 bp, Homo sapiens
gattgttatctaacc

SEQ ID NO: 937882 - DNA, 15 bp, Homo sapiens
cgattgttatctaac

SEQ ID NO: 937883 - DNA, 15 bp, Homo sapiens
acgattgttatctaa

SEQ ID NO: 937884 - DNA, 15 bp, Homo sapiens
cacgattgttatcta

SEQ ID NO: 937885 - DNA, 15 bp, Homo sapiens
gcacgattgttatct

SEQ ID NO: 937886 - DNA, 15 bp, Homo sapiens
agcacgattgttatc

SEQ ID NO: 937887 - DNA, 15 bp, Homo sapiens
aagcacgattgttat

SEQ ID NO: 937888 - DNA, 15 bp, Homo sapiens
aaagcacgattgtta

SEQ ID NO: 937889 - DNA, 15 bp, Homo sapiens
taaagcacgattgtt

SEQ ID NO: 937890 - DNA, 15 bp, Homo sapiens
ataaagcacgattgt

SEQ ID NO: 937891 - DNA, 15 bp, Homo sapiens
aataaagcacgattg

SEQ ID NO: 937892 - DNA, 15 bp, Homo sapiens
aaataaagcacgatt

SEQ ID NO: 937893 - DNA, 15 bp, Homo sapiens
aaaataaagcacgat

SEQ ID NO: 937894 - DNA, 15 bp, Homo sapiens
caaaataaagcacga

SEQ ID NO: 937895 - DNA, 15 bp, Homo sapiens
ccaaaataaagcacg

SEQ ID NO: 937896 - DNA, 15 bp, Homo sapiens
tccaaaataaagcac

SEQ ID NO: 937897 - DNA, 15 bp, Homo sapiens
gtccaaaataaagca

SEQ ID NO: 937898 - DNA, 15 bp, Homo sapiens
agtccaaaataaagc

SEQ ID NO: 937899 - DNA, 15 bp, Homo sapiens
tagtccaaaataaag

SEQ ID NO: 937900 - DNA, 15 bp, Homo sapiens
ctagtccaaaataaa

SEQ ID NO: 937901 - DNA, 15 bp, Homo sapiens
actagtccaaaataa

SEQ ID NO: 937902 - DNA, 15 bp, Homo sapiens
tactagtccaaaata

SEQ ID NO: 937903 - DNA, 15 bp, Homo sapiens
ttactagtccaaaat

SEQ ID NO: 937904 - DNA, 15 bp, Homo sapiens
tttactagtccaaaa

SEQ ID NO: 937905 - DNA, 15 bp, Homo sapiens
ttttactagtccaaa

SEQ ID NO: 937906 - DNA, 15 bp, Homo sapiens
gttttactagtccaa

SEQ ID NO: 937907 - DNA, 15 bp, Homo sapiens
ggttttactagtcca

SEQ ID NO: 937908 - DNA, 15 bp, Homo sapiens
tggttttactagtcc

SEQ ID NO: 937909 - DNA, 15 bp, Homo sapiens
gtggttttactagtc

SEQ ID NO: 937910 - DNA, 15 bp, Homo sapiens
ggtggttttactagt

SEQ ID NO: 937911 - DNA, 15 bp, Homo sapiens
tggtggttttactag

SEQ ID NO: 937912 - DNA, 15 bp, Homo sapiens
atggtggttttacta

SEQ ID NO: 937913 - DNA, 15 bp, Homo sapiens
tatggtggttttact

SEQ ID NO: 937914 - DNA, 15 bp, Homo sapiens
ctatggtggttttac

SEQ ID NO: 937915 - DNA, 15 bp, Homo sapiens
tctatggtggtttta

SEQ ID NO: 937916 - DNA, 15 bp, Homo sapiens
atctatggtggtttt

SEQ ID NO: 937917 - DNA, 15 bp, Homo sapiens
gatctatggtggttt

SEQ ID NO: 937918 - DNA, 15 bp, Homo sapiens
tgatctatggtggtt

SEQ ID NO: 937919 - DNA, 15 bp, Homo sapiens
ctgatctatggtggt

SEQ ID NO: 937920 - DNA, 15 bp, Homo sapiens
actgatctatggtgg

SEQ ID NO: 937921 - DNA, 15 bp, Homo sapiens
aactgatctatggtg

SEQ ID NO: 937922 - DNA, 15 bp, Homo sapiens
aaactgatctatggt

SEQ ID NO: 937923 - DNA, 15 bp, Homo sapiens
taaactgatctatgg

SEQ ID NO: 937924 - DNA, 15 bp, Homo sapiens
ttaaactgatctatg

SEQ ID NO: 937925 - DNA, 15 bp, Homo sapiens
gttaaactgatctat

SEQ ID NO: 937926 - DNA, 15 bp, Homo sapiens
ggttaaactgatcta

SEQ ID NO: 937927 - DNA, 15 bp, Homo sapiens
tggttaaactgatct

SEQ ID NO: 937928 - DNA, 15 bp, Homo sapiens
atggttaaactgatc

SEQ ID NO: 937929 - DNA, 15 bp, Homo sapiens
aatggttaaactgat

SEQ ID NO: 937930 - DNA, 15 bp, Homo sapiens
taatggttaaactga

SEQ ID NO: 937931 - DNA, 15 bp, Homo sapiens
ataatggttaaactg

SEQ ID NO: 937932 - DNA, 15 bp, Homo sapiens
cataatggttaaact

SEQ ID NO: 937933 - DNA, 15 bp, Homo sapiens
tcataatggttaaac

SEQ ID NO: 937934 - DNA, 15 bp, Homo sapiens
ttcataatggttaaa

SEQ ID NO: 937935 - DNA, 15 bp, Homo sapiens
tttcataatggttaa

SEQ ID NO: 937936 - DNA, 15 bp, Homo sapiens
atttcataatggtta

SEQ ID NO: 937937 - DNA, 15 bp, Homo sapiens
aatttcataatggtt

SEQ ID NO: 937938 - DNA, 15 bp, Homo sapiens
taatttcataatggt

SEQ ID NO: 937939 - DNA, 15 bp, Homo sapiens
ataatttcataatgg

SEQ ID NO: 937940 - DNA, 15 bp, Homo sapiens
tataatttcataatg

SEQ ID NO: 937941 - DNA, 15 bp, Homo sapiens
gtataatttcataat

SEQ ID NO: 937942 - DNA, 15 bp, Homo sapiens
tgtataatttcataa

SEQ ID NO: 937943 - DNA, 15 bp, Homo sapiens
atgtataatttcata

SEQ ID NO: 937944 - DNA, 15 bp, Homo sapiens
catgtataatttcat

SEQ ID NO: 937945 - DNA, 15 bp, Homo sapiens
tcatgtataatttca

SEQ ID NO: 937946 - DNA, 15 bp, Homo sapiens
ttcatgtataatttc

SEQ ID NO: 937947 - DNA, 15 bp, Homo sapiens
cttcatgtataattt

SEQ ID NO: 937948 - DNA, 15 bp, Homo sapiens
ccttcatgtataatt

SEQ ID NO: 937949 - DNA, 15 bp, Homo sapiens
gccttcatgtataat

SEQ ID NO: 937950 - DNA, 15 bp, Homo sapiens
tgccttcatgtataa

SEQ ID NO: 937951 - DNA, 15 bp, Homo sapiens
atgccttcatgtata

SEQ ID NO: 937952 - DNA, 15 bp, Homo sapiens
aatgccttcatgtat

SEQ ID NO: 937953 - DNA, 15 bp, Homo sapiens
taatgccttcatgta

SEQ ID NO: 937954 - DNA, 15 bp, Homo sapiens
ataatgccttcatgt

SEQ ID NO: 937955 - DNA, 15 bp, Homo sapiens
tataatgccttcatg

SEQ ID NO: 937956 - DNA, 15 bp, Homo sapiens
atataatgccttcat

SEQ ID NO: 937957 - DNA, 15 bp, Homo sapiens
catataatgccttca

SEQ ID NO: 937958 - DNA, 15 bp, Homo sapiens
acatataatgccttc

SEQ ID NO: 937959 - DNA, 15 bp, Homo sapiens
tacatataatgcctt

SEQ ID NO: 937960 - DNA, 15 bp, Homo sapiens
atacatataatgcct

SEQ ID NO: 937961 - DNA, 15 bp, Homo sapiens
catacatataatgcc

SEQ ID NO: 937962 - DNA, 15 bp, Homo sapiens
ccatacatataatgc

SEQ ID NO: 937963 - DNA, 15 bp, Homo sapiens
tccatacatataatg

SEQ ID NO: 937964 - DNA, 15 bp, Homo sapiens
gtccatacatataat

SEQ ID NO: 937965 - DNA, 15 bp, Homo sapiens
tgtccatacatataa

SEQ ID NO: 937966 - DNA, 15 bp, Homo sapiens
atgtccatacatata

SEQ ID NO: 937967 - DNA, 15 bp, Homo sapiens
aatgtccatacatat

SEQ ID NO: 937968 - DNA, 15 bp, Homo sapiens
taatgtccatacata

SEQ ID NO: 937969 - DNA, 15 bp, Homo sapiens
ataatgtccatacat

SEQ ID NO: 937970 - DNA, 15 bp, Homo sapiens
aataatgtccataca

SEQ ID NO: 937971 - DNA, 15 bp, Homo sapiens
taataatgtccatac

SEQ ID NO: 937972 - DNA, 15 bp, Homo sapiens
ttaataatgtccata

SEQ ID NO: 937973 - DNA, 15 bp, Homo sapiens
cttaataatgtccat

SEQ ID NO: 937974 - DNA, 15 bp, Homo sapiens
acttaataatgtcca

SEQ ID NO: 937975 - DNA, 15 bp, Homo sapiens
gacttaataatgtcc

SEQ ID NO: 937976 - DNA, 15 bp, Homo sapiens
tgacttaataatgtc

SEQ ID NO: 937977 - DNA, 15 bp, Homo sapiens
atgacttaataatgt

SEQ ID NO: 937978 - DNA, 15 bp, Homo sapiens
tatgacttaataatg

SEQ ID NO: 937979 - DNA, 15 bp, Homo sapiens
gtatgacttaataat

SEQ ID NO: 937980 - DNA, 15 bp, Homo sapiens
agtatgacttaataa

SEQ ID NO: 937981 - DNA, 15 bp, Homo sapiens
aagtatgacttaata

SEQ ID NO: 937982 - DNA, 15 bp, Homo sapiens
caagtatgacttaat

SEQ ID NO: 937983 - DNA, 15 bp, Homo sapiens
gcaagtatgacttaa

SEQ ID NO: 937984 - DNA, 15 bp, Homo sapiens
agcaagtatgactta

SEQ ID NO: 937985 - DNA, 15 bp, Homo sapiens
aagcaagtatgactt

SEQ ID NO: 937986 - DNA, 15 bp, Homo sapiens
aaagcaagtatgact

SEQ ID NO: 937987 - DNA, 15 bp, Homo sapiens
caaagcaagtatgac

SEQ ID NO: 937988 - DNA, 15 bp, Homo sapiens
gcaaagcaagtatga

SEQ ID NO: 937989 - DNA, 15 bp, Homo sapiens
agcaaagcaagtatg

SEQ ID NO: 937990 - DNA, 15 bp, Homo sapiens
aagcaaagcaagtat

SEQ ID NO: 937991 - DNA, 15 bp, Homo sapiens
gaagcaaagcaagta

SEQ ID NO: 937992 - DNA, 15 bp, Homo sapiens
ggaagcaaagcaagt

SEQ ID NO: 937993 - DNA, 15 bp, Homo sapiens
tggaagcaaagcaag

SEQ ID NO: 937994 - DNA, 15 bp, Homo sapiens
atggaagcaaagcaa

SEQ ID NO: 937995 - DNA, 15 bp, Homo sapiens
aatggaagcaaagca

SEQ ID NO: 937996 - DNA, 15 bp, Homo sapiens
caatggaagcaaagc

SEQ ID NO: 937997 - DNA, 15 bp, Homo sapiens
acaatggaagcaaag

SEQ ID NO: 937998 - DNA, 15 bp, Homo sapiens
tacaatggaagcaaa

SEQ ID NO: 937999 - DNA, 15 bp, Homo sapiens
ttacaatggaagcaa

SEQ ID NO: 938000 - DNA, 15 bp, Homo sapiens
attacaatggaagca

SEQ ID NO: 938001 - DNA, 15 bp, Homo sapiens
aattacaatggaagc

SEQ ID NO: 938002 - DNA, 15 bp, Homo sapiens
taattacaatggaag

SEQ ID NO: 938003 - DNA, 15 bp, Homo sapiens
ttaattacaatggaa

SEQ ID NO: 938004 - DNA, 15 bp, Homo sapiens
tttaattacaatgga

SEQ ID NO: 938005 - DNA, 15 bp, Homo sapiens
ttttaattacaatgg

SEQ ID NO: 938006 - DNA, 15 bp, Homo sapiens
gttttaattacaatg

SEQ ID NO: 938007 - DNA, 15 bp, Homo sapiens
tgttttaattacaat

SEQ ID NO: 938008 - DNA, 15 bp, Homo sapiens
ttgttttaattacaa

SEQ ID NO: 938009 - DNA, 15 bp, Homo sapiens
tttgttttaattaca

SEQ ID NO: 938010 - DNA, 15 bp, Homo sapiens
gtttgttttaattac

SEQ ID NO: 938011 - DNA, 15 bp, Homo sapiens
ggtttgttttaatta

SEQ ID NO: 938012 - DNA, 15 bp, Homo sapiens
tggtttgttttaatt

SEQ ID NO: 938013 - DNA, 15 bp, Homo sapiens
atggtttgttttaat

SEQ ID NO: 938014 - DNA, 15 bp, Homo sapiens
tatggtttgttttaa

SEQ ID NO: 938015 - DNA, 15 bp, Homo sapiens
gtatggtttgtttta

SEQ ID NO: 938016 - DNA, 15 bp, Homo sapiens
agtatggtttgtttt

SEQ ID NO: 938017 - DNA, 15 bp, Homo sapiens
tagtatggtttgttt

SEQ ID NO: 938018 - DNA, 15 bp, Homo sapiens
gtagtatggtttgtt

SEQ ID NO: 938019 - DNA, 15 bp, Homo sapiens
ggtagtatggtttgt

SEQ ID NO: 938020 - DNA, 15 bp, Homo sapiens
aggtagtatggtttg

SEQ ID NO: 938021 - DNA, 15 bp, Homo sapiens
aaggtagtatggttt

SEQ ID NO: 938022 - DNA, 15 bp, Homo sapiens
aaaggtagtatggtt

SEQ ID NO: 938023 - DNA, 15 bp, Homo sapiens
caaaggtagtatggt

SEQ ID NO: 938024 - DNA, 15 bp, Homo sapiens
acaaaggtagtatgg

SEQ ID NO: 938025 - DNA, 15 bp, Homo sapiens
aacaaaggtagtatg

SEQ ID NO: 938026 - DNA, 15 bp, Homo sapiens
gaacaaaggtagtat

SEQ ID NO: 938027 - DNA, 15 bp, Homo sapiens
agaacaaaggtagta

SEQ ID NO: 938028 - DNA, 15 bp, Homo sapiens
cagaacaaaggtagt

SEQ ID NO: 938029 - DNA, 15 bp, Homo sapiens
gcagaacaaaggtag

SEQ ID NO: 938030 - DNA, 15 bp, Homo sapiens
tgcagaacaaaggta

SEQ ID NO: 938031 - DNA, 15 bp, Homo sapiens
ttgcagaacaaaggt

SEQ ID NO: 938032 - DNA, 15 bp, Homo sapiens
cttgcagaacaaagg

SEQ ID NO: 938033 - DNA, 15 bp, Homo sapiens
acttgcagaacaaag

SEQ ID NO: 938034 - DNA, 15 bp, Homo sapiens
aacttgcagaacaaa

SEQ ID NO: 938035 - DNA, 15 bp, Homo sapiens
aaacttgcagaacaa

SEQ ID NO: 938036 - DNA, 15 bp, Homo sapiens
aaaacttgcagaaca

SEQ ID NO: 938037 - DNA, 15 bp, Homo sapiens
caaaacttgcagaac

SEQ ID NO: 938038 - DNA, 15 bp, Homo sapiens
acaaaacttgcagaa

SEQ ID NO: 938039 - DNA, 15 bp, Homo sapiens
tacaaaacttgcaga

SEQ ID NO: 938040 - DNA, 15 bp, Homo sapiens
atacaaaacttgcag

SEQ ID NO: 938041 - DNA, 15 bp, Homo sapiens
aatacaaaacttgca

SEQ ID NO: 938042 - DNA, 15 bp, Homo sapiens
gaatacaaaacttgc

SEQ ID NO: 938043 - DNA, 15 bp, Homo sapiens
agaatacaaaacttg

SEQ ID NO: 938044 - DNA, 15 bp, Homo sapiens
tagaatacaaaactt

SEQ ID NO: 938045 - DNA, 15 bp, Homo sapiens
ttagaatacaaaact

SEQ ID NO: 938046 - DNA, 15 bp, Homo sapiens
gttagaatacaaaac

SEQ ID NO: 938047 - DNA, 15 bp, Homo sapiens
agttagaatacaaaa

SEQ ID NO: 938048 - DNA, 15 bp, Homo sapiens
aagttagaatacaaa

SEQ ID NO: 938049 - DNA, 15 bp, Homo sapiens
taagttagaatacaa

SEQ ID NO: 938050 - DNA, 15 bp, Homo sapiens
ataagttagaataca

SEQ ID NO: 938051 - DNA, 15 bp, Homo sapiens
aataagttagaatac

SEQ ID NO: 938052 - DNA, 15 bp, Homo sapiens
aaataagttagaata

SEQ ID NO: 938053 - DNA, 15 bp, Homo sapiens
taaataagttagaat

SEQ ID NO: 938054 - DNA, 15 bp, Homo sapiens
ataaataagttagaa

SEQ ID NO: 938055 - DNA, 15 bp, Homo sapiens
aataaataagttaga

SEQ ID NO: 938056 - DNA, 15 bp, Homo sapiens
aaataaataagttag

SEQ ID NO: 938057 - DNA, 15 bp, Homo sapiens
aaaataaataagtta

SEQ ID NO: 938058 - DNA, 15 bp, Homo sapiens
aaaaataaataagtt

SEQ ID NO: 938059 - DNA, 15 bp, Homo sapiens
caaaaataaataagt

SEQ ID NO: 938060 - DNA, 15 bp, Homo sapiens
ccaaaaataaataag

SEQ ID NO: 938061 - DNA, 15 bp, Homo sapiens
gccaaaaataaataa

SEQ ID NO: 938062 - DNA, 15 bp, Homo sapiens
agccaaaaataaata

SEQ ID NO: 938063 - DNA, 15 bp, Homo sapiens
aagccaaaaataaat

SEQ ID NO: 938064 - DNA, 15 bp, Homo sapiens
aaagccaaaaataaa

SEQ ID NO: 938065 - DNA, 15 bp, Homo sapiens
gaaagccaaaaataa

SEQ ID NO: 938066 - DNA, 15 bp, Homo sapiens
tgaaagccaaaaata

SEQ ID NO: 938067 - DNA, 15 bp, Homo sapiens
gtgaaagccaaaaat

SEQ ID NO: 938068 - DNA, 15 bp, Homo sapiens
ggtgaaagccaaaaa

SEQ ID NO: 938069 - DNA, 15 bp, Homo sapiens
tggtgaaagccaaaa

SEQ ID NO: 938070 - DNA, 15 bp, Homo sapiens
ctggtgaaagccaaa

SEQ ID NO: 938071 - DNA, 15 bp, Homo sapiens
tctggtgaaagccaa

SEQ ID NO: 938072 - DNA, 15 bp, Homo sapiens
ttctggtgaaagcca

SEQ ID NO: 938073 - DNA, 15 bp, Homo sapiens
gttctggtgaaagcc

SEQ ID NO: 938074 - DNA, 15 bp, Homo sapiens
tgttctggtgaaagc

SEQ ID NO: 938075 - DNA, 15 bp, Homo sapiens
gtgttctggtgaaag

SEQ ID NO: 938076 - DNA, 15 bp, Homo sapiens
agtgttctggtgaaa

SEQ ID NO: 938077 - DNA, 15 bp, Homo sapiens
gagtgttctggtgaa

SEQ ID NO: 938078 - DNA, 15 bp, Homo sapiens
ggagtgttctggtga

SEQ ID NO: 938079 - DNA, 15 bp, Homo sapiens
cggagtgttctggtg

SEQ ID NO: 938080 - DNA, 15 bp, Homo sapiens
tcggagtgttctggt

SEQ ID NO: 938081 - DNA, 15 bp, Homo sapiens
atcggagtgttctgg

SEQ ID NO: 938082 - DNA, 15 bp, Homo sapiens
aatcggagtgttctg

SEQ ID NO: 938083 - DNA, 15 bp, Homo sapiens
aaatcggagtgttct

SEQ ID NO: 938084 - DNA, 15 bp, Homo sapiens
aaaatcggagtgttc

SEQ ID NO: 938085 - DNA, 15 bp, Homo sapiens
gaaaatcggagtgtt

SEQ ID NO: 938086 - DNA, 15 bp, Homo sapiens
agaaaatcggagtgt

SEQ ID NO: 938087 - DNA, 15 bp, Homo sapiens
gagaaaatcggagtg

SEQ ID NO: 938088 - DNA, 15 bp, Homo sapiens
tgagaaaatcggagt

SEQ ID NO: 938089 - DNA, 15 bp, Homo sapiens
atgagaaaatcggag

SEQ ID NO: 938090 - DNA, 15 bp, Homo sapiens
tatgagaaaatcgga

SEQ ID NO: 938091 - DNA, 15 bp, Homo sapiens
atatgagaaaatcgg

SEQ ID NO: 938092 - DNA, 15 bp, Homo sapiens
aatatgagaaaatcg

SEQ ID NO: 938093 - DNA, 15 bp, Homo sapiens
gaatatgagaaaatc

SEQ ID NO: 938094 - DNA, 15 bp, Homo sapiens
ggaatatgagaaaat

SEQ ID NO: 938095 - DNA, 15 bp, Homo sapiens
aggaatatgagaaaa

SEQ ID NO: 938096 - DNA, 15 bp, Homo sapiens
aaggaatatgagaaa

SEQ ID NO: 938097 - DNA, 15 bp, Homo sapiens
aaaggaatatgagaa

SEQ ID NO: 938098 - DNA, 15 bp, Homo sapiens
caaaggaatatgaga

SEQ ID NO: 938099 - DNA, 15 bp, Homo sapiens
tcaaaggaatatgag

SEQ ID NO: 938100 - DNA, 15 bp, Homo sapiens
ctcaaaggaatatga

SEQ ID NO: 938101 - DNA, 15 bp, Homo sapiens
cctcaaaggaatatg

SEQ ID NO: 938102 - DNA, 15 bp, Homo sapiens
tcctcaaaggaatat

SEQ ID NO: 938103 - DNA, 15 bp, Homo sapiens
ttcctcaaaggaata

SEQ ID NO: 938104 - DNA, 15 bp, Homo sapiens
tttcctcaaaggaat

SEQ ID NO: 938105 - DNA, 15 bp, Homo sapiens
ttttcctcaaaggaa

SEQ ID NO: 938106 - DNA, 15 bp, Homo sapiens
tttttcctcaaagga

SEQ ID NO: 938107 - DNA, 15 bp, Homo sapiens
ttttttcctcaaagg

SEQ ID NO: 938108 - DNA, 15 bp, Homo sapiens
tttttttcctcaaag

SEQ ID NO: 938109 - DNA, 15 bp, Homo sapiens
ctttttttcctcaaa

SEQ ID NO: 938110 - DNA, 15 bp, Homo sapiens
actttttttcctcaa

SEQ ID NO: 938111 - DNA, 15 bp, Homo sapiens
aactttttttcctca

SEQ ID NO: 938112 - DNA, 15 bp, Homo sapiens
taactttttttcctc

SEQ ID NO: 938113 - DNA, 15 bp, Homo sapiens
gtaactttttttcct

SEQ ID NO: 938114 - DNA, 15 bp, Homo sapiens
ggtaactttttttcc

SEQ ID NO: 938115 - DNA, 15 bp, Homo sapiens
aggtaactttttttc

SEQ ID NO: 938116 - DNA, 15 bp, Homo sapiens
aaggtaacttttttt

SEQ ID NO: 938117 - DNA, 15 bp, Homo sapiens
aaaggtaactttttt

SEQ ID NO: 938118 - DNA, 15 bp, Homo sapiens
aaaaggtaacttttt

SEQ ID NO: 938119 - DNA, 15 bp, Homo sapiens
caaaaggtaactttt

SEQ ID NO: 938120 - DNA, 15 bp, Homo sapiens
tcaaaaggtaacttt

SEQ ID NO: 938121 - DNA, 15 bp, Homo sapiens
gtcaaaaggtaactt

SEQ ID NO: 938122 - DNA, 15 bp, Homo sapiens
tgtcaaaaggtaact

SEQ ID NO: 938123 - DNA, 15 bp, Homo sapiens
ctgtcaaaaggtaac

SEQ ID NO: 938124 - DNA, 15 bp, Homo sapiens
actgtcaaaaggtaa

SEQ ID NO: 938125 - DNA, 15 bp, Homo sapiens
tactgtcaaaaggta

SEQ ID NO: 938126 - DNA, 15 bp, Homo sapiens
atactgtcaaaaggt

SEQ ID NO: 938127 - DNA, 15 bp, Homo sapiens
aatactgtcaaaagg

SEQ ID NO: 938128 - DNA, 15 bp, Homo sapiens
aaatactgtcaaaag

SEQ ID NO: 938129 - DNA, 15 bp, Homo sapiens
aaaatactgtcaaaa

SEQ ID NO: 938130 - DNA, 15 bp, Homo sapiens
gaaaatactgtcaaa

SEQ ID NO: 938131 - DNA, 15 bp, Homo sapiens
agaaaatactgtcaa

SEQ ID NO: 938132 - DNA, 15 bp, Homo sapiens
aagaaaatactgtca

SEQ ID NO: 938133 - DNA, 15 bp, Homo sapiens
taagaaaatactgtc

SEQ ID NO: 938134 - DNA, 15 bp, Homo sapiens
ataagaaaatactgt

SEQ ID NO: 938135 - DNA, 15 bp, Homo sapiens
gataagaaaatactg

SEQ ID NO: 938136 - DNA, 15 bp, Homo sapiens
ggataagaaaatact

SEQ ID NO: 938137 - DNA, 15 bp, Homo sapiens
tggataagaaaatac

SEQ ID NO: 938138 - DNA, 15 bp, Homo sapiens
ctggataagaaaata

SEQ ID NO: 938139 - DNA, 15 bp, Homo sapiens
actggataagaaaat

SEQ ID NO: 938140 - DNA, 15 bp, Homo sapiens
tactggataagaaaa

SEQ ID NO: 938141 - DNA, 15 bp, Homo sapiens
atactggataagaaa

SEQ ID NO: 938142 - DNA, 15 bp, Homo sapiens
catactggataagaa

SEQ ID NO: 938143 - DNA, 15 bp, Homo sapiens
acatactggataaga

SEQ ID NO: 938144 - DNA, 15 bp, Homo sapiens
gacatactggataag

SEQ ID NO: 938145 - DNA, 15 bp, Homo sapiens
agacatactggataa

SEQ ID NO: 938146 - DNA, 15 bp, Homo sapiens
aagacatactggata

SEQ ID NO: 938147 - DNA, 15 bp, Homo sapiens
aaagacatactggat

SEQ ID NO: 938148 - DNA, 15 bp, Homo sapiens
aaaagacatactgga

SEQ ID NO: 938149 - DNA, 15 bp, Homo sapiens
taaaagacatactgg

SEQ ID NO: 938150 - DNA, 15 bp, Homo sapiens
ataaaagacatactg

SEQ ID NO: 938151 - DNA, 15 bp, Homo sapiens
cataaaagacatact

SEQ ID NO: 938152 - DNA, 15 bp, Homo sapiens
ccataaaagacatac

SEQ ID NO: 938153 - DNA, 15 bp, Homo sapiens
gccataaaagacata

SEQ ID NO: 938154 - DNA, 15 bp, Homo sapiens
agccataaaagacat

SEQ ID NO: 938155 - DNA, 15 bp, Homo sapiens
aagccataaaagaca

SEQ ID NO: 938156 - DNA, 15 bp, Homo sapiens
aaagccataaaagac

SEQ ID NO: 938157 - DNA, 15 bp, Homo sapiens
aaaagccataaaaga

SEQ ID NO: 938158 - DNA, 15 bp, Homo sapiens
taaaagccataaaag

SEQ ID NO: 938159 - DNA, 15 bp, Homo sapiens
ataaaagccataaaa

SEQ ID NO: 938160 - DNA, 15 bp, Homo sapiens
aataaaagccataaa

SEQ ID NO: 938161 - DNA, 15 bp, Homo sapiens
aaataaaagccataa

SEQ ID NO: 938162 - DNA, 15 bp, Homo sapiens
taaataaaagccata

SEQ ID NO: 938163 - DNA, 15 bp, Homo sapiens
ataaataaaagccat

SEQ ID NO: 938164 - DNA, 15 bp, Homo sapiens
aataaataaaagcca

SEQ ID NO: 938165 - DNA, 15 bp, Homo sapiens
taataaataaaagcc

SEQ ID NO: 938166 - DNA, 15 bp, Homo sapiens
ttaataaataaaagc

SEQ ID NO: 938167 - DNA, 15 bp, Homo sapiens
tttaataaataaaag

SEQ ID NO: 938168 - DNA, 15 bp, Homo sapiens
gtttaataaataaaa

SEQ ID NO: 938169 - DNA, 15 bp, Homo sapiens
agtttaataaataaa

SEQ ID NO: 938170 - DNA, 15 bp, Homo sapiens
aagtttaataaataa

SEQ ID NO: 938171 - DNA, 15 bp, Homo sapiens
aaagtttaataaata

SEQ ID NO: 938172 - DNA, 15 bp, Homo sapiens
taaagtttaataaat

SEQ ID NO: 938173 - DNA, 15 bp, Homo sapiens
ttaaagtttaataaa

SEQ ID NO: 938174 - DNA, 15 bp, Homo sapiens
tttaaagtttaataa

SEQ ID NO: 938175 - DNA, 15 bp, Homo sapiens
ttttaaagtttaata

SEQ ID NO: 938176 - DNA, 15 bp, Homo sapiens
tttttaaagtttaat

SEQ ID NO: 938177 - DNA, 15 bp, Homo sapiens
atttttaaagtttaa

SEQ ID NO: 938178 - DNA, 15 bp, Homo sapiens
tatttttaaagttta

SEQ ID NO: 938179 - DNA, 15 bp, Homo sapiens
atatttttaaagttt

SEQ ID NO: 938180 - DNA, 15 bp, Homo sapiens
aatatttttaaagtt

SEQ ID NO: 938181 - DNA, 15 bp, Homo sapiens
gaatatttttaaagt

SEQ ID NO: 938182 - DNA, 15 bp, Homo sapiens
ggaatatttttaaag

SEQ ID NO: 938183 - DNA, 15 bp, Homo sapiens
aggaatatttttaaa

SEQ ID NO: 938184 - DNA, 15 bp, Homo sapiens
taggaatatttttaa

SEQ ID NO: 938185 - DNA, 15 bp, Homo sapiens
ttaggaatattttta

SEQ ID NO: 938186 - DNA, 15 bp, Homo sapiens
attaggaatattttt

SEQ ID NO: 938187 - DNA, 15 bp, Homo sapiens
aattaggaatatttt

SEQ ID NO: 938188 - DNA, 15 bp, Homo sapiens
aaattaggaatattt

SEQ ID NO: 938189 - DNA, 15 bp, Homo sapiens
gaaattaggaatatt

SEQ ID NO: 938190 - DNA, 15 bp, Homo sapiens
tgaaattaggaatat

SEQ ID NO: 938191 - DNA, 15 bp, Homo sapiens
atgaaattaggaata

SEQ ID NO: 938192 - DNA, 15 bp, Homo sapiens
aatgaaattaggaat

SEQ ID NO: 938193 - DNA, 15 bp, Homo sapiens
aaatgaaattaggaa

SEQ ID NO: 938194 - DNA, 15 bp, Homo sapiens
gaaatgaaattagga

SEQ ID NO: 938195 - DNA, 15 bp, Homo sapiens
ggaaatgaaattagg

SEQ ID NO: 938196 - DNA, 15 bp, Homo sapiens
gggaaatgaaattag

SEQ ID NO: 938197 - DNA, 15 bp, Homo sapiens
agggaaatgaaatta

SEQ ID NO: 938198 - DNA, 15 bp, Homo sapiens
cagggaaatgaaatt

SEQ ID NO: 938199 - DNA, 15 bp, Homo sapiens
tcagggaaatgaaat

SEQ ID NO: 938200 - DNA, 15 bp, Homo sapiens
ttcagggaaatgaaa

SEQ ID NO: 938201 - DNA, 15 bp, Homo sapiens
cttcagggaaatgaa

SEQ ID NO: 938202 - DNA, 15 bp, Homo sapiens
tcttcagggaaatga

SEQ ID NO: 938203 - DNA, 15 bp, Homo sapiens
atcttcagggaaatg

SEQ ID NO: 938204 - DNA, 15 bp, Homo sapiens
aatcttcagggaaat

SEQ ID NO: 938205 - DNA, 15 bp, Homo sapiens
aaatcttcagggaaa

SEQ ID NO: 938206 - DNA, 15 bp, Homo sapiens
gaaatcttcagggaa

SEQ ID NO: 938207 - DNA, 15 bp, Homo sapiens
tgaaatcttcaggga

SEQ ID NO: 938208 - DNA, 15 bp, Homo sapiens
ctgaaatcttcaggg

SEQ ID NO: 938209 - DNA, 15 bp, Homo sapiens
cctgaaatcttcagg

SEQ ID NO: 938210 - DNA, 15 bp, Homo sapiens
tcctgaaatcttcag

SEQ ID NO: 938211 - DNA, 15 bp, Homo sapiens
ttcctgaaatcttca

SEQ ID NO: 938212 - DNA, 15 bp, Homo sapiens
attcctgaaatcttc

SEQ ID NO: 938213 - DNA, 15 bp, Homo sapiens
tattcctgaaatctt

SEQ ID NO: 938214 - DNA, 15 bp, Homo sapiens
ctattcctgaaatct

SEQ ID NO: 938215 - DNA, 15 bp, Homo sapiens
tctattcctgaaatc

SEQ ID NO: 938216 - DNA, 15 bp, Homo sapiens
ctctattcctgaaat

SEQ ID NO: 938217 - DNA, 15 bp, Homo sapiens
actctattcctgaaa

SEQ ID NO: 938218 - DNA, 15 bp, Homo sapiens
gactctattcctgaa

SEQ ID NO: 938219 - DNA, 15 bp, Homo sapiens
tgactctattcctga

SEQ ID NO: 938220 - DNA, 15 bp, Homo sapiens
ctgactctattcctg

SEQ ID NO: 938221 - DNA, 15 bp, Homo sapiens
tctgactctattcct

SEQ ID NO: 938222 - DNA, 15 bp, Homo sapiens
atctgactctattcc

SEQ ID NO: 938223 - DNA, 15 bp, Homo sapiens
catctgactctattc

SEQ ID NO: 938224 - DNA, 15 bp, Homo sapiens
tcatctgactctatt

SEQ ID NO: 938225 - DNA, 15 bp, Homo sapiens
atcatctgactctat

SEQ ID NO: 938226 - DNA, 15 bp, Homo sapiens
gatcatctgactcta

SEQ ID NO: 938227 - DNA, 15 bp, Homo sapiens
tgatcatctgactct

SEQ ID NO: 938228 - DNA, 15 bp, Homo sapiens
atgatcatctgactc

SEQ ID NO: 938229 - DNA, 15 bp, Homo sapiens
aatgatcatctgact

SEQ ID NO: 938230 - DNA, 15 bp, Homo sapiens
caatgatcatctgac

SEQ ID NO: 938231 - DNA, 15 bp, Homo sapiens
acaatgatcatctga

SEQ ID NO: 938232 - DNA, 15 bp, Homo sapiens
gacaatgatcatctg

SEQ ID NO: 938233 - DNA, 15 bp, Homo sapiens
tgacaatgatcatct

SEQ ID NO: 938234 - DNA, 15 bp, Homo sapiens
ctgacaatgatcatc

SEQ ID NO: 938235 - DNA, 15 bp, Homo sapiens
tctgacaatgatcat

SEQ ID NO: 938236 - DNA, 15 bp, Homo sapiens
ctctgacaatgatca

SEQ ID NO: 938237 - DNA, 15 bp, Homo sapiens
tctctgacaatgatc

SEQ ID NO: 938238 - DNA, 15 bp, Homo sapiens
ctctctgacaatgat

SEQ ID NO: 938239 - DNA, 15 bp, Homo sapiens
tctctctgacaatga

SEQ ID NO: 938240 - DNA, 15 bp, Homo sapiens
ttctctctgacaatg

SEQ ID NO: 938241 - DNA, 15 bp, Homo sapiens
gttctctctgacaat

SEQ ID NO: 938242 - DNA, 15 bp, Homo sapiens
tgttctctctgacaa

SEQ ID NO: 938243 - DNA, 15 bp, Homo sapiens
ctgttctctctgaca

SEQ ID NO: 938244 - DNA, 15 bp, Homo sapiens
cctgttctctctgac

SEQ ID NO: 938245 - DNA, 15 bp, Homo sapiens
tcctgttctctctga

SEQ ID NO: 938246 - DNA, 15 bp, Homo sapiens
ctcctgttctctctg

SEQ ID NO: 938247 - DNA, 15 bp, Homo sapiens
gctcctgttctctct

SEQ ID NO: 938248 - DNA, 15 bp, Homo sapiens
agctcctgttctctc

SEQ ID NO: 938249 - DNA, 15 bp, Homo sapiens
aagctcctgttctct

SEQ ID NO: 938250 - DNA, 15 bp, Homo sapiens
gaagctcctgttctc

SEQ ID NO: 938251 - DNA, 15 bp, Homo sapiens
tgaagctcctgttct

SEQ ID NO: 938252 - DNA, 15 bp, Homo sapiens
ctgaagctcctgttc

SEQ ID NO: 938253 - DNA, 15 bp, Homo sapiens
tctgaagctcctgtt

SEQ ID NO: 938254 - DNA, 15 bp, Homo sapiens
ttctgaagctcctgt

SEQ ID NO: 938255 - DNA, 15 bp, Homo sapiens
cttctgaagctcctg

SEQ ID NO: 938256 - DNA, 15 bp, Homo sapiens
ccttctgaagctcct

SEQ ID NO: 938257 - DNA, 15 bp, Homo sapiens
tccttctgaagctcc

SEQ ID NO: 938258 - DNA, 15 bp, Homo sapiens
ttccttctgaagctc

SEQ ID NO: 938259 - DNA, 15 bp, Homo sapiens
tttccttctgaagct

SEQ ID NO: 938260 - DNA, 15 bp, Homo sapiens
ttttccttctgaagc

SEQ ID NO: 938261 - DNA, 15 bp, Homo sapiens
gttttccttctgaag

SEQ ID NO: 938262 - DNA, 15 bp, Homo sapiens
agttttccttctgaa

SEQ ID NO: 938263 - DNA, 15 bp, Homo sapiens
aagttttccttctga

SEQ ID NO: 938264 - DNA, 15 bp, Homo sapiens
caagttttccttctg

SEQ ID NO: 938265 - DNA, 15 bp, Homo sapiens
tcaagttttccttct

SEQ ID NO: 938266 - DNA, 15 bp, Homo sapiens
ttcaagttttccttc

SEQ ID NO: 938267 - DNA, 15 bp, Homo sapiens
cttcaagttttcctt

SEQ ID NO: 938268 - DNA, 15 bp, Homo sapiens
acttcaagttttcct

SEQ ID NO: 938269 - DNA, 15 bp, Homo sapiens
aacttcaagttttcc

SEQ ID NO: 938270 - DNA, 15 bp, Homo sapiens
caacttcaagttttc

SEQ ID NO: 938271 - DNA, 15 bp, Homo sapiens
acaacttcaagtttt

SEQ ID NO: 938272 - DNA, 15 bp, Homo sapiens
gacaacttcaagttt

SEQ ID NO: 938273 - DNA, 15 bp, Homo sapiens
tgacaacttcaagtt

SEQ ID NO: 938274 - DNA, 15 bp, Homo sapiens
atgacaacttcaagt

SEQ ID NO: 938275 - DNA, 15 bp, Homo sapiens
gatgacaacttcaag

SEQ ID NO: 938276 - DNA, 15 bp, Homo sapiens
agatgacaacttcaa

SEQ ID NO: 938277 - DNA, 15 bp, Homo sapiens
cagatgacaacttca

SEQ ID NO: 938278 - DNA, 15 bp, Homo sapiens
tcagatgacaacttc

SEQ ID NO: 938279 - DNA, 15 bp, Homo sapiens
ttcagatgacaactt

SEQ ID NO: 938280 - DNA, 15 bp, Homo sapiens
tttcagatgacaact

SEQ ID NO: 938281 - DNA, 15 bp, Homo sapiens
ttttcagatgacaac

SEQ ID NO: 938282 - DNA, 15 bp, Homo sapiens
attttcagatgacaa

SEQ ID NO: 938283 - DNA, 15 bp, Homo sapiens
tattttcagatgaca

SEQ ID NO: 938284 - DNA, 15 bp, Homo sapiens
atattttcagatgac

SEQ ID NO: 938285 - DNA, 15 bp, Homo sapiens
aatattttcagatga

SEQ ID NO: 938286 - DNA, 15 bp, Homo sapiens
caatattttcagatg

SEQ ID NO: 938287 - DNA, 15 bp, Homo sapiens
tcaatattttcagat

SEQ ID NO: 938288 - DNA, 15 bp, Homo sapiens
ttcaatattttcaga

SEQ ID NO: 938289 - DNA, 15 bp, Homo sapiens
gttcaatattttcag

SEQ ID NO: 938290 - DNA, 15 bp, Homo sapiens
agttcaatattttca

SEQ ID NO: 938291 - DNA, 15 bp, Homo sapiens
cagttcaatattttc

SEQ ID NO: 938292 - DNA, 15 bp, Homo sapiens
tcagttcaatatttt

SEQ ID NO: 938293 - DNA, 15 bp, Homo sapiens
ttcagttcaatattt

SEQ ID NO: 938294 - DNA, 15 bp, Homo sapiens
tttcagttcaatatt

SEQ ID NO: 938295 - DNA, 15 bp, Homo sapiens
atttcagttcaatat

SEQ ID NO: 938296 - DNA, 15 bp, Homo sapiens
aatttcagttcaata

SEQ ID NO: 938297 - DNA, 15 bp, Homo sapiens
aaatttcagttcaat

SEQ ID NO: 938298 - DNA, 15 bp, Homo sapiens
gaaatttcagttcaa

SEQ ID NO: 938299 - DNA, 15 bp, Homo sapiens
tgaaatttcagttca

SEQ ID NO: 938300 - DNA, 15 bp, Homo sapiens
ctgaaatttcagttc

SEQ ID NO: 938301 - DNA, 15 bp, Homo sapiens
gctgaaatttcagtt

SEQ ID NO: 938302 - DNA, 15 bp, Homo sapiens
agctgaaatttcagt

SEQ ID NO: 938303 - DNA, 15 bp, Homo sapiens
aagctgaaatttcag

SEQ ID NO: 938304 - DNA, 15 bp, Homo sapiens
caagctgaaatttca

SEQ ID NO: 938305 - DNA, 15 bp, Homo sapiens
tcaagctgaaatttc

SEQ ID NO: 938306 - DNA, 15 bp, Homo sapiens
ttcaagctgaaattt

SEQ ID NO: 938307 - DNA, 15 bp, Homo sapiens
gttcaagctgaaatt

SEQ ID NO: 938308 - DNA, 15 bp, Homo sapiens
tgttcaagctgaaat

SEQ ID NO: 938309 - DNA, 15 bp, Homo sapiens
ttgttcaagctgaaa

SEQ ID NO: 938310 - DNA, 15 bp, Homo sapiens
cttgttcaagctgaa

SEQ ID NO: 938311 - DNA, 15 bp, Homo sapiens
gcttgttcaagctga

SEQ ID NO: 938312 - DNA, 15 bp, Homo sapiens
tgcttgttcaagctg

SEQ ID NO: 938313 - DNA, 15 bp, Homo sapiens
ttgcttgttcaagct

SEQ ID NO: 938314 - DNA, 15 bp, Homo sapiens
tttgcttgttcaagc

SEQ ID NO: 938315 - DNA, 15 bp, Homo sapiens
atttgcttgttcaag

SEQ ID NO: 938316 - DNA, 15 bp, Homo sapiens
tatttgcttgttcaa

SEQ ID NO: 938317 - DNA, 15 bp, Homo sapiens
ttatttgcttgttca

SEQ ID NO: 938318 - DNA, 15 bp, Homo sapiens
tttatttgcttgttc

SEQ ID NO: 938319 - DNA, 15 bp, Homo sapiens
ctttatttgcttgtt

SEQ ID NO: 938320 - DNA, 15 bp, Homo sapiens
tctttatttgcttgt

SEQ ID NO: 938321 - DNA, 15 bp, Homo sapiens
atctttatttgcttg

SEQ ID NO: 938322 - DNA, 15 bp, Homo sapiens
aatctttatttgctt

SEQ ID NO: 938323 - DNA, 15 bp, Homo sapiens
aaatctttatttgct

SEQ ID NO: 938324 - DNA, 15 bp, Homo sapiens
caaatctttatttgc

SEQ ID NO: 938325 - DNA, 15 bp, Homo sapiens
gcaaatctttatttg

SEQ ID NO: 938326 - DNA, 15 bp, Homo sapiens
ggcaaatctttattt

SEQ ID NO: 938327 - DNA, 15 bp, Homo sapiens
tggcaaatctttatt

SEQ ID NO: 938328 - DNA, 15 bp, Homo sapiens
ttggcaaatctttat

SEQ ID NO: 938329 - DNA, 15 bp, Homo sapiens
cttggcaaatcttta

SEQ ID NO: 938330 - DNA, 15 bp, Homo sapiens
tcttggcaaatcttt

SEQ ID NO: 938331 - DNA, 15 bp, Homo sapiens
atcttggcaaatctt

SEQ ID NO: 938332 - DNA, 15 bp, Homo sapiens
aatcttggcaaatct

SEQ ID NO: 938333 - DNA, 15 bp, Homo sapiens
taatcttggcaaatc

SEQ ID NO: 938334 - DNA, 15 bp, Homo sapiens
ttaatcttggcaaat

SEQ ID NO: 938335 - DNA, 15 bp, Homo sapiens
tttaatcttggcaaa

SEQ ID NO: 938336 - DNA, 15 bp, Homo sapiens
ctttaatcttggcaa

SEQ ID NO: 938337 - DNA, 15 bp, Homo sapiens
cctttaatcttggca

SEQ ID NO: 938338 - DNA, 15 bp, Homo sapiens
acctttaatcttggc

SEQ ID NO: 938339 - DNA, 15 bp, Homo sapiens
cacctttaatcttgg

SEQ ID NO: 938340 - DNA, 15 bp, Homo sapiens
tcacctttaatcttg

SEQ ID NO: 938341 - DNA, 15 bp, Homo sapiens
ttcacctttaatctt

SEQ ID NO: 938342 - DNA, 15 bp, Homo sapiens
attcacctttaatct

SEQ ID NO: 938343 - DNA, 15 bp, Homo sapiens
aattcacctttaatc

SEQ ID NO: 938344 - DNA, 15 bp, Homo sapiens
aaattcacctttaat

SEQ ID NO: 938345 - DNA, 15 bp, Homo sapiens
taaattcacctttaa

SEQ ID NO: 938346 - DNA, 15 bp, Homo sapiens
ttaaattcaccttta

SEQ ID NO: 938347 - DNA, 15 bp, Homo sapiens
attaaattcaccttt

SEQ ID NO: 938348 - DNA, 15 bp, Homo sapiens
cattaaattcacctt

SEQ ID NO: 938349 - DNA, 15 bp, Homo sapiens
acattaaattcacct

SEQ ID NO: 938350 - DNA, 15 bp, Homo sapiens
aacattaaattcacc

SEQ ID NO: 938351 - DNA, 15 bp, Homo sapiens
aaacattaaattcac

SEQ ID NO: 938352 - DNA, 15 bp, Homo sapiens
aaaacattaaattca

SEQ ID NO: 938353 - DNA, 15 bp, Homo sapiens
aaaaacattaaattc

SEQ ID NO: 938354 - DNA, 15 bp, Homo sapiens
aaaaaacattaaatt

SEQ ID NO: 938355 - DNA, 15 bp, Homo sapiens
taaaaaacattaaat

SEQ ID NO: 938356 - DNA, 15 bp, Homo sapiens
ataaaaaacattaaa

SEQ ID NO: 938357 - DNA, 15 bp, Homo sapiens
aataaaaaacattaa

SEQ ID NO: 938358 - DNA, 15 bp, Homo sapiens
taataaaaaacatta

SEQ ID NO: 938359 - DNA, 15 bp, Homo sapiens
ctaataaaaaacatt

SEQ ID NO: 938360 - DNA, 15 bp, Homo sapiens
cctaataaaaaacat

SEQ ID NO: 938361 - DNA, 15 bp, Homo sapiens
tcctaataaaaaaca

SEQ ID NO: 938362 - DNA, 15 bp, Homo sapiens
ttcctaataaaaaac

SEQ ID NO: 938363 - DNA, 15 bp, Homo sapiens
tttcctaataaaaaa

SEQ ID NO: 938364 - DNA, 15 bp, Homo sapiens
atttcctaataaaaa

SEQ ID NO: 938365 - DNA, 15 bp, Homo sapiens
gatttcctaataaaa

SEQ ID NO: 938366 - DNA, 15 bp, Homo sapiens
agatttcctaataaa

SEQ ID NO: 938367 - DNA, 15 bp, Homo sapiens
tagatttcctaataa

SEQ ID NO: 938368 - DNA, 15 bp, Homo sapiens
ttagatttcctaata

SEQ ID NO: 938369 - DNA, 15 bp, Homo sapiens
attagatttcctaat

SEQ ID NO: 938370 - DNA, 15 bp, Homo sapiens
cattagatttcctaa

SEQ ID NO: 938371 - DNA, 15 bp, Homo sapiens
gcattagatttccta

SEQ ID NO: 938372 - DNA, 15 bp, Homo sapiens
ggcattagatttcct

SEQ ID NO: 938373 - DNA, 15 bp, Homo sapiens
aggcattagatttcc

SEQ ID NO: 938374 - DNA, 15 bp, Homo sapiens
taggcattagatttc

SEQ ID NO: 938375 - DNA, 15 bp, Homo sapiens
ttaggcattagattt

SEQ ID NO: 938376 - DNA, 15 bp, Homo sapiens
tttaggcattagatt

SEQ ID NO: 938377 - DNA, 15 bp, Homo sapiens
ttttaggcattagat

SEQ ID NO: 938378 - DNA, 15 bp, Homo sapiens
gttttaggcattaga

SEQ ID NO: 938379 - DNA, 15 bp, Homo sapiens
agttttaggcattag

SEQ ID NO: 938380 - DNA, 15 bp, Homo sapiens
gagttttaggcatta

SEQ ID NO: 938381 - DNA, 15 bp, Homo sapiens
ggagttttaggcatt

SEQ ID NO: 938382 - DNA, 15 bp, Homo sapiens
aggagttttaggcat

SEQ ID NO: 938383 - DNA, 15 bp, Homo sapiens
aaggagttttaggca

SEQ ID NO: 938384 - DNA, 15 bp, Homo sapiens
gaaggagttttaggc

SEQ ID NO: 938385 - DNA, 15 bp, Homo sapiens
ggaaggagttttagg

SEQ ID NO: 938386 - DNA, 15 bp, Homo sapiens
aggaaggagttttag

SEQ ID NO: 938387 - DNA, 15 bp, Homo sapiens
aaggaaggagtttta

SEQ ID NO: 938388 - DNA, 15 bp, Homo sapiens
taaggaaggagtttt

SEQ ID NO: 938389 - DNA, 15 bp, Homo sapiens
ctaaggaaggagttt

SEQ ID NO: 938390 - DNA, 15 bp, Homo sapiens
actaaggaaggagtt

SEQ ID NO: 938391 - DNA, 15 bp, Homo sapiens
aactaaggaaggagt

SEQ ID NO: 938392 - DNA, 15 bp, Homo sapiens
caactaaggaaggag

SEQ ID NO: 938393 - DNA, 15 bp, Homo sapiens
acaactaaggaagga

SEQ ID NO: 938394 - DNA, 15 bp, Homo sapiens
aacaactaaggaagg

SEQ ID NO: 938395 - DNA, 15 bp, Homo sapiens
taacaactaaggaag

SEQ ID NO: 938396 - DNA, 15 bp, Homo sapiens
ataacaactaaggaa

SEQ ID NO: 938397 - DNA, 15 bp, Homo sapiens
cataacaactaagga

SEQ ID NO: 938398 - DNA, 15 bp, Homo sapiens
acataacaactaagg

SEQ ID NO: 938399 - DNA, 15 bp, Homo sapiens
aacataacaactaag

SEQ ID NO: 938400 - DNA, 15 bp, Homo sapiens
aaacataacaactaa

SEQ ID NO: 938401 - DNA, 15 bp, Homo sapiens
taaacataacaacta

SEQ ID NO: 938402 - DNA, 15 bp, Homo sapiens
gtaaacataacaact

SEQ ID NO: 938403 - DNA, 15 bp, Homo sapiens
agtaaacataacaac

SEQ ID NO: 938404 - DNA, 15 bp, Homo sapiens
aagtaaacataacaa

SEQ ID NO: 938405 - DNA, 15 bp, Homo sapiens
aaagtaaacataaca

SEQ ID NO: 938406 - DNA, 15 bp, Homo sapiens
aaaagtaaacataac

SEQ ID NO: 938407 - DNA, 15 bp, Homo sapiens
taaaagtaaacataa

SEQ ID NO: 938408 - DNA, 15 bp, Homo sapiens
ataaaagtaaacata

SEQ ID NO: 938409 - DNA, 15 bp, Homo sapiens
aataaaagtaaacat

SEQ ID NO: 938410 - DNA, 15 bp, Homo sapiens
taataaaagtaaaca

SEQ ID NO: 938411 - DNA, 15 bp, Homo sapiens
ctaataaaagtaaac

SEQ ID NO: 938412 - DNA, 15 bp, Homo sapiens
gctaataaaagtaaa

SEQ ID NO: 938413 - DNA, 15 bp, Homo sapiens
agctaataaaagtaa

SEQ ID NO: 938414 - DNA, 15 bp, Homo sapiens
aagctaataaaagta

SEQ ID NO: 938415 - DNA, 15 bp, Homo sapiens
taagctaataaaagt

SEQ ID NO: 938416 - DNA, 15 bp, Homo sapiens
ataagctaataaaag

SEQ ID NO: 938417 - DNA, 15 bp, Homo sapiens
aataagctaataaaa

SEQ ID NO: 938418 - DNA, 15 bp, Homo sapiens
taataagctaataaa

SEQ ID NO: 938419 - DNA, 15 bp, Homo sapiens
ttaataagctaataa

SEQ ID NO: 938420 - DNA, 15 bp, Homo sapiens
cttaataagctaata

SEQ ID NO: 938421 - DNA, 15 bp, Homo sapiens
tcttaataagctaat

SEQ ID NO: 938422 - DNA, 15 bp, Homo sapiens
ttcttaataagctaa

SEQ ID NO: 938423 - DNA, 15 bp, Homo sapiens
cttcttaataagcta

SEQ ID NO: 938424 - DNA, 15 bp, Homo sapiens
acttcttaataagct

SEQ ID NO: 938425 - DNA, 15 bp, Homo sapiens
gacttcttaataagc

SEQ ID NO: 938426 - DNA, 15 bp, Homo sapiens
tgacttcttaataag

SEQ ID NO: 938427 - DNA, 15 bp, Homo sapiens
ttgacttcttaataa

SEQ ID NO: 938428 - DNA, 15 bp, Homo sapiens
tttgacttcttaata

SEQ ID NO: 938429 - DNA, 15 bp, Homo sapiens
ttttgacttcttaat

SEQ ID NO: 938430 - DNA, 15 bp, Homo sapiens
tttttgacttcttaa

SEQ ID NO: 938431 - DNA, 15 bp, Homo sapiens
atttttgacttctta

SEQ ID NO: 938432 - DNA, 15 bp, Homo sapiens
catttttgacttctt

SEQ ID NO: 938433 - DNA, 15 bp, Homo sapiens
gcatttttgacttct

SEQ ID NO: 938434 - DNA, 15 bp, Homo sapiens
tgcatttttgacttc

SEQ ID NO: 938435 - DNA, 15 bp, Homo sapiens
atgcatttttgactt

SEQ ID NO: 938436 - DNA, 15 bp, Homo sapiens
tatgcatttttgact

SEQ ID NO: 938437 - DNA, 15 bp, Homo sapiens
atatgcatttttgac

SEQ ID NO: 938438 - DNA, 15 bp, Homo sapiens
aatatgcatttttga

SEQ ID NO: 938439 - DNA, 15 bp, Homo sapiens
gaatatgcatttttg

SEQ ID NO: 938440 - DNA, 15 bp, Homo sapiens
ggaatatgcattttt

SEQ ID NO: 938441 - DNA, 15 bp, Homo sapiens
aggaatatgcatttt

SEQ ID NO: 938442 - DNA, 15 bp, Homo sapiens
taggaatatgcattt

SEQ ID NO: 938443 - DNA, 15 bp, Homo sapiens
ttaggaatatgcatt

SEQ ID NO: 938444 - DNA, 15 bp, Homo sapiens
attaggaatatgcat

SEQ ID NO: 938445 - DNA, 15 bp, Homo sapiens
tattaggaatatgca

SEQ ID NO: 938446 - DNA, 15 bp, Homo sapiens
atattaggaatatgc

SEQ ID NO: 938447 - DNA, 15 bp, Homo sapiens
tatattaggaatatg

SEQ ID NO: 938448 - DNA, 15 bp, Homo sapiens
atatattaggaatat

SEQ ID NO: 938449 - DNA, 15 bp, Homo sapiens
gatatattaggaata

SEQ ID NO: 938450 - DNA, 15 bp, Homo sapiens
tgatatattaggaat

SEQ ID NO: 938451 - DNA, 15 bp, Homo sapiens
atgatatattaggaa

SEQ ID NO: 938452 - DNA, 15 bp, Homo sapiens
catgatatattagga

SEQ ID NO: 938453 - DNA, 15 bp, Homo sapiens
ccatgatatattagg

SEQ ID NO: 938454 - DNA, 15 bp, Homo sapiens
accatgatatattag

SEQ ID NO: 938455 - DNA, 15 bp, Homo sapiens
caccatgatatatta

SEQ ID NO: 938456 - DNA, 15 bp, Homo sapiens
tcaccatgatatatt

SEQ ID NO: 938457 - DNA, 15 bp, Homo sapiens
atcaccatgatatat

SEQ ID NO: 938458 - DNA, 15 bp, Homo sapiens
catcaccatgatata

SEQ ID NO: 938459 - DNA, 15 bp, Homo sapiens
ccatcaccatgatat

SEQ ID NO: 938460 - DNA, 15 bp, Homo sapiens
accatcaccatgata

SEQ ID NO: 938461 - DNA, 15 bp, Homo sapiens
taccatcaccatgat

SEQ ID NO: 938462 - DNA, 15 bp, Homo sapiens
ataccatcaccatga

SEQ ID NO: 938463 - DNA, 15 bp, Homo sapiens
tataccatcaccatg

SEQ ID NO: 938464 - DNA, 15 bp, Homo sapiens
gtataccatcaccat

SEQ ID NO: 938465 - DNA, 15 bp, Homo sapiens
agtataccatcacca

SEQ ID NO: 938466 - DNA, 15 bp, Homo sapiens
aagtataccatcacc

SEQ ID NO: 938467 - DNA, 15 bp, Homo sapiens
aaagtataccatcac

SEQ ID NO: 938468 - DNA, 15 bp, Homo sapiens
taaagtataccatca

SEQ ID NO: 938469 - DNA, 15 bp, Homo sapiens
ataaagtataccatc

SEQ ID NO: 938470 - DNA, 15 bp, Homo sapiens
tataaagtataccat

SEQ ID NO: 938471 - DNA, 15 bp, Homo sapiens
gtataaagtatacca

SEQ ID NO: 938472 - DNA, 15 bp, Homo sapiens
tgtataaagtatacc

SEQ ID NO: 938473 - DNA, 15 bp, Homo sapiens
atgtataaagtatac

SEQ ID NO: 938474 - DNA, 15 bp, Homo sapiens
aatgtataaagtata

SEQ ID NO: 938475 - DNA, 15 bp, Homo sapiens
aaatgtataaagtat

SEQ ID NO: 938476 - DNA, 15 bp, Homo sapiens
caaatgtataaagta

SEQ ID NO: 938477 - DNA, 15 bp, Homo sapiens
gcaaatgtataaagt

SEQ ID NO: 938478 - DNA, 15 bp, Homo sapiens
agcaaatgtataaag

SEQ ID NO: 938479 - DNA, 15 bp, Homo sapiens
gagcaaatgtataaa

SEQ ID NO: 938480 - DNA, 15 bp, Homo sapiens
agagcaaatgtataa

SEQ ID NO: 938481 - DNA, 15 bp, Homo sapiens
aagagcaaatgtata

SEQ ID NO: 938482 - DNA, 15 bp, Homo sapiens
aaagagcaaatgtat

SEQ ID NO: 938483 - DNA, 15 bp, Homo sapiens
taaagagcaaatgta

SEQ ID NO: 938484 - DNA, 15 bp, Homo sapiens
ctaaagagcaaatgt

SEQ ID NO: 938485 - DNA, 15 bp, Homo sapiens
gctaaagagcaaatg

SEQ ID NO: 938486 - DNA, 15 bp, Homo sapiens
tgctaaagagcaaat

SEQ ID NO: 938487 - DNA, 15 bp, Homo sapiens
atgctaaagagcaaa

SEQ ID NO: 938488 - DNA, 15 bp, Homo sapiens
aatgctaaagagcaa

SEQ ID NO: 938489 - DNA, 15 bp, Homo sapiens
aaatgctaaagagca

SEQ ID NO: 938490 - DNA, 15 bp, Homo sapiens
taaatgctaaagagc

SEQ ID NO: 938491 - DNA, 15 bp, Homo sapiens
ataaatgctaaagag

SEQ ID NO: 938492 - DNA, 15 bp, Homo sapiens
aataaatgctaaaga

SEQ ID NO: 938493 - DNA, 15 bp, Homo sapiens
aaataaatgctaaag

SEQ ID NO: 938494 - DNA, 15 bp, Homo sapiens
caaataaatgctaaa

SEQ ID NO: 938495 - DNA, 15 bp, Homo sapiens
acaaataaatgctaa

SEQ ID NO: 938496 - DNA, 15 bp, Homo sapiens
aacaaataaatgcta

SEQ ID NO: 938497 - DNA, 15 bp, Homo sapiens
caacaaataaatgct

SEQ ID NO: 938498 - DNA, 15 bp, Homo sapiens
tcaacaaataaatgc

SEQ ID NO: 938499 - DNA, 15 bp, Homo sapiens
ttcaacaaataaatg

SEQ ID NO: 938500 - DNA, 15 bp, Homo sapiens
cttcaacaaataaat

SEQ ID NO: 938501 - DNA, 15 bp, Homo sapiens
ccttcaacaaataaa

SEQ ID NO: 938502 - DNA, 15 bp, Homo sapiens
gccttcaacaaataa

SEQ ID NO: 938503 - DNA, 15 bp, Homo sapiens
ggccttcaacaaata

SEQ ID NO: 938504 - DNA, 15 bp, Homo sapiens
aggccttcaacaaat

SEQ ID NO: 938505 - DNA, 15 bp, Homo sapiens
taggccttcaacaaa

SEQ ID NO: 938506 - DNA, 15 bp, Homo sapiens
gtaggccttcaacaa

SEQ ID NO: 938507 - DNA, 15 bp, Homo sapiens
agtaggccttcaaca

SEQ ID NO: 938508 - DNA, 15 bp, Homo sapiens
aagtaggccttcaac

SEQ ID NO: 938509 - DNA, 15 bp, Homo sapiens
aaagtaggccttcaa

SEQ ID NO: 938510 - DNA, 15 bp, Homo sapiens
taaagtaggccttca

SEQ ID NO: 938511 - DNA, 15 bp, Homo sapiens
ataaagtaggccttc

SEQ ID NO: 938512 - DNA, 15 bp, Homo sapiens
tataaagtaggcctt

SEQ ID NO: 938513 - DNA, 15 bp, Homo sapiens
atataaagtaggcct

SEQ ID NO: 938514 - DNA, 15 bp, Homo sapiens
aatataaagtaggcc

SEQ ID NO: 938515 - DNA, 15 bp, Homo sapiens
taatataaagtaggc

SEQ ID NO: 938516 - DNA, 15 bp, Homo sapiens
ttaatataaagtagg

SEQ ID NO: 938517 - DNA, 15 bp, Homo sapiens
tttaatataaagtag

SEQ ID NO: 938518 - DNA, 15 bp, Homo sapiens
gtttaatataaagta

SEQ ID NO: 938519 - DNA, 15 bp, Homo sapiens
tgtttaatataaagt

SEQ ID NO: 938520 - DNA, 15 bp, Homo sapiens
gtgtttaatataaag

SEQ ID NO: 938521 - DNA, 15 bp, Homo sapiens
agtgtttaatataaa

SEQ ID NO: 938522 - DNA, 15 bp, Homo sapiens
gagtgtttaatataa

SEQ ID NO: 938523 - DNA, 15 bp, Homo sapiens
ggagtgtttaatata

SEQ ID NO: 938524 - DNA, 15 bp, Homo sapiens
aggagtgtttaatat

SEQ ID NO: 938525 - DNA, 15 bp, Homo sapiens
gaggagtgtttaata

SEQ ID NO: 938526 - DNA, 15 bp, Homo sapiens
ggaggagtgtttaat

SEQ ID NO: 938527 - DNA, 15 bp, Homo sapiens
tggaggagtgtttaa

SEQ ID NO: 938528 - DNA, 15 bp, Homo sapiens
ctggaggagtgttta

SEQ ID NO: 938529 - DNA, 15 bp, Homo sapiens
tctggaggagtgttt

SEQ ID NO: 938530 - DNA, 15 bp, Homo sapiens
atctggaggagtgtt

SEQ ID NO: 938531 - DNA, 15 bp, Homo sapiens
catctggaggagtgt

SEQ ID NO: 938532 - DNA, 15 bp, Homo sapiens
gcatctggaggagtg

SEQ ID NO: 938533 - DNA, 15 bp, Homo sapiens
agcatctggaggagt

SEQ ID NO: 938534 - DNA, 15 bp, Homo sapiens
cagcatctggaggag

SEQ ID NO: 938535 - DNA, 15 bp, Homo sapiens
ccagcatctggagga

SEQ ID NO: 938536 - DNA, 15 bp, Homo sapiens
cccagcatctggagg

SEQ ID NO: 938537 - DNA, 15 bp, Homo sapiens
tcccagcatctggag

SEQ ID NO: 938538 - DNA, 15 bp, Homo sapiens
ttcccagcatctgga

SEQ ID NO: 938539 - DNA, 15 bp, Homo sapiens
tttcccagcatctgg

SEQ ID NO: 938540 - DNA, 15 bp, Homo sapiens
gtttcccagcatctg

SEQ ID NO: 938541 - DNA, 15 bp, Homo sapiens
tgtttcccagcatct

SEQ ID NO: 938542 - DNA, 15 bp, Homo sapiens
ctgtttcccagcatc

SEQ ID NO: 938543 - DNA, 15 bp, Homo sapiens
gctgtttcccagcat

SEQ ID NO: 938544 - DNA, 15 bp, Homo sapiens
tgctgtttcccagca

SEQ ID NO: 938545 - DNA, 15 bp, Homo sapiens
ctgctgtttcccagc

SEQ ID NO: 938546 - DNA, 15 bp, Homo sapiens
actgctgtttcccag

SEQ ID NO: 938547 - DNA, 15 bp, Homo sapiens
gactgctgtttccca

SEQ ID NO: 938548 - DNA, 15 bp, Homo sapiens
tgactgctgtttccc

SEQ ID NO: 938549 - DNA, 15 bp, Homo sapiens
ttgactgctgtttcc

SEQ ID NO: 938550 - DNA, 15 bp, Homo sapiens
tttgactgctgtttc

SEQ ID NO: 938551 - DNA, 15 bp, Homo sapiens
ttttgactgctgttt

SEQ ID NO: 938552 - DNA, 15 bp, Homo sapiens
tttttgactgctgtt

SEQ ID NO: 938553 - DNA, 15 bp, Homo sapiens
ttttttgactgctgt

SEQ ID NO: 938554 - DNA, 15 bp, Homo sapiens
attttttgactgctg

SEQ ID NO: 938555 - DNA, 15 bp, Homo sapiens
aattttttgactgct

SEQ ID NO: 938556 - DNA, 15 bp, Homo sapiens
gaattttttgactgc

SEQ ID NO: 938557 - DNA, 15 bp, Homo sapiens
ggaattttttgactg

SEQ ID NO: 938558 - DNA, 15 bp, Homo sapiens
aggaattttttgact

SEQ ID NO: 938559 - DNA, 15 bp, Homo sapiens
aaggaattttttgac

SEQ ID NO: 938560 - DNA, 15 bp, Homo sapiens
taaggaattttttga

SEQ ID NO: 938561 - DNA, 15 bp, Homo sapiens
ataaggaattttttg

SEQ ID NO: 938562 - DNA, 15 bp, Homo sapiens
tataaggaatttttt

SEQ ID NO: 938563 - DNA, 15 bp, Homo sapiens
gtataaggaattttt

SEQ ID NO: 938564 - DNA, 15 bp, Homo sapiens
agtataaggaatttt

SEQ ID NO: 938565 - DNA, 15 bp, Homo sapiens
gagtataaggaattt

SEQ ID NO: 938566 - DNA, 15 bp, Homo sapiens
tgagtataaggaatt

SEQ ID NO: 938567 - DNA, 15 bp, Homo sapiens
atgagtataaggaat

SEQ ID NO: 938568 - DNA, 15 bp, Homo sapiens
tatgagtataaggaa

SEQ ID NO: 938569 - DNA, 15 bp, Homo sapiens
ctatgagtataagga

SEQ ID NO: 938570 - DNA, 15 bp, Homo sapiens
cctatgagtataagg

SEQ ID NO: 938571 - DNA, 15 bp, Homo sapiens
tcctatgagtataag

SEQ ID NO: 938572 - DNA, 15 bp, Homo sapiens
gtcctatgagtataa

SEQ ID NO: 938573 - DNA, 15 bp, Homo sapiens
agtcctatgagtata

SEQ ID NO: 938574 - DNA, 15 bp, Homo sapiens
aagtcctatgagtat

SEQ ID NO: 938575 - DNA, 15 bp, Homo sapiens
taagtcctatgagta

SEQ ID NO: 938576 - DNA, 15 bp, Homo sapiens
gtaagtcctatgagt

SEQ ID NO: 938577 - DNA, 15 bp, Homo sapiens
cgtaagtcctatgag

SEQ ID NO: 938578 - DNA, 15 bp, Homo sapiens
acgtaagtcctatga

SEQ ID NO: 938579 - DNA, 15 bp, Homo sapiens
aacgtaagtcctatg

SEQ ID NO: 938580 - DNA, 15 bp, Homo sapiens
gaacgtaagtcctat

SEQ ID NO: 938581 - DNA, 15 bp, Homo sapiens
agaacgtaagtccta

SEQ ID NO: 938582 - DNA, 15 bp, Homo sapiens
tagaacgtaagtcct

SEQ ID NO: 938583 - DNA, 15 bp, Homo sapiens
ctagaacgtaagtcc

SEQ ID NO: 938584 - DNA, 15 bp, Homo sapiens
actagaacgtaagtc

SEQ ID NO: 938585 - DNA, 15 bp, Homo sapiens
cactagaacgtaagt

SEQ ID NO: 938586 - DNA, 15 bp, Homo sapiens
ccactagaacgtaag

SEQ ID NO: 938587 - DNA, 15 bp, Homo sapiens
tccactagaacgtaa

SEQ ID NO: 938588 - DNA, 15 bp, Homo sapiens
ctccactagaacgta

SEQ ID NO: 938589 - DNA, 15 bp, Homo sapiens
tctccactagaacgt

SEQ ID NO: 938590 - DNA, 15 bp, Homo sapiens
ttctccactagaacg

SEQ ID NO: 938591 - DNA, 15 bp, Homo sapiens
cttctccactagaac

SEQ ID NO: 938592 - DNA, 15 bp, Homo sapiens
tcttctccactagaa

SEQ ID NO: 938593 - DNA, 15 bp, Homo sapiens
gtcttctccactaga

SEQ ID NO: 938594 - DNA, 15 bp, Homo sapiens
agtcttctccactag

SEQ ID NO: 938595 - DNA, 15 bp, Homo sapiens
cagtcttctccacta

SEQ ID NO: 938596 - DNA, 15 bp, Homo sapiens
tcagtcttctccact

SEQ ID NO: 938597 - DNA, 15 bp, Homo sapiens
gtcagtcttctccac

SEQ ID NO: 938598 - DNA, 15 bp, Homo sapiens
tgtcagtcttctcca

SEQ ID NO: 938599 - DNA, 15 bp, Homo sapiens
ttgtcagtcttctcc

SEQ ID NO: 938600 - DNA, 15 bp, Homo sapiens
attgtcagtcttctc

SEQ ID NO: 938601 - DNA, 15 bp, Homo sapiens
tattgtcagtcttct

SEQ ID NO: 938602 - DNA, 15 bp, Homo sapiens
ttattgtcagtcttc

SEQ ID NO: 938603 - DNA, 15 bp, Homo sapiens
tttattgtcagtctt

SEQ ID NO: 938604 - DNA, 15 bp, Homo sapiens
gtttattgtcagtct

SEQ ID NO: 938605 - DNA, 15 bp, Homo sapiens
tgtttattgtcagtc

SEQ ID NO: 938606 - DNA, 15 bp, Homo sapiens
ttgtttattgtcagt

SEQ ID NO: 938607 - DNA, 15 bp, Homo sapiens
cttgtttattgtcag

SEQ ID NO: 938608 - DNA, 15 bp, Homo sapiens
acttgtttattgtca

SEQ ID NO: 938609 - DNA, 15 bp, Homo sapiens
gacttgtttattgtc

SEQ ID NO: 938610 - DNA, 15 bp, Homo sapiens
tgacttgtttattgt

SEQ ID NO: 938611 - DNA, 15 bp, Homo sapiens
gtgacttgtttattg

SEQ ID NO: 938612 - DNA, 15 bp, Homo sapiens
agtgacttgtttatt

SEQ ID NO: 938613 - DNA, 15 bp, Homo sapiens
tagtgacttgtttat

SEQ ID NO: 938614 - DNA, 15 bp, Homo sapiens
ttagtgacttgttta

SEQ ID NO: 938615 - DNA, 15 bp, Homo sapiens
tttagtgacttgttt

SEQ ID NO: 938616 - DNA, 15 bp, Homo sapiens
atttagtgacttgtt

SEQ ID NO: 938617 - DNA, 15 bp, Homo sapiens
tatttagtgacttgt

SEQ ID NO: 938618 - DNA, 15 bp, Homo sapiens
ctatttagtgacttg

SEQ ID NO: 938619 - DNA, 15 bp, Homo sapiens
actatttagtgactt

SEQ ID NO: 938620 - DNA, 15 bp, Homo sapiens
tactatttagtgact

SEQ ID NO: 938621 - DNA, 15 bp, Homo sapiens
atactatttagtgac

SEQ ID NO: 938622 - DNA, 15 bp, Homo sapiens
catactatttagtga

SEQ ID NO: 938623 - DNA, 15 bp, Homo sapiens
acatactatttagtg

SEQ ID NO: 938624 - DNA, 15 bp, Homo sapiens
gacatactatttagt

SEQ ID NO: 938625 - DNA, 15 bp, Homo sapiens
tgacatactatttag

SEQ ID NO: 938626 - DNA, 15 bp, Homo sapiens
atgacatactattta

SEQ ID NO: 938627 - DNA, 15 bp, Homo sapiens
gatgacatactattt

SEQ ID NO: 938628 - DNA, 15 bp, Homo sapiens
agatgacatactatt

SEQ ID NO: 938629 - DNA, 15 bp, Homo sapiens
cagatgacatactat

SEQ ID NO: 938630 - DNA, 15 bp, Homo sapiens
tcagatgacatacta

SEQ ID NO: 938631 - DNA, 15 bp, Homo sapiens
atcagatgacatact

SEQ ID NO: 938632 - DNA, 15 bp, Homo sapiens
catcagatgacatac

SEQ ID NO: 938633 - DNA, 15 bp, Homo sapiens
acatcagatgacata

SEQ ID NO: 938634 - DNA, 15 bp, Homo sapiens
aacatcagatgacat

SEQ ID NO: 938635 - DNA, 15 bp, Homo sapiens
taacatcagatgaca

SEQ ID NO: 938636 - DNA, 15 bp, Homo sapiens
ctaacatcagatgac

SEQ ID NO: 938637 - DNA, 15 bp, Homo sapiens
actaacatcagatga

SEQ ID NO: 938638 - DNA, 15 bp, Homo sapiens
cactaacatcagatg

SEQ ID NO: 938639 - DNA, 15 bp, Homo sapiens
gcactaacatcagat

SEQ ID NO: 938640 - DNA, 15 bp, Homo sapiens
agcactaacatcaga

SEQ ID NO: 938641 - DNA, 15 bp, Homo sapiens
tagcactaacatcag

SEQ ID NO: 938642 - DNA, 15 bp, Homo sapiens
ttagcactaacatca

SEQ ID NO: 938643 - DNA, 15 bp, Homo sapiens
cttagcactaacatc

SEQ ID NO: 938644 - DNA, 15 bp, Homo sapiens
ccttagcactaacat

SEQ ID NO: 938645 - DNA, 15 bp, Homo sapiens
tccttagcactaaca

SEQ ID NO: 938646 - DNA, 15 bp, Homo sapiens
ctccttagcactaac

SEQ ID NO: 938647 - DNA, 15 bp, Homo sapiens
tctccttagcactaa

SEQ ID NO: 938648 - DNA, 15 bp, Homo sapiens
ctctccttagcacta

SEQ ID NO: 938649 - DNA, 15 bp, Homo sapiens
tctctccttagcact

SEQ ID NO: 938650 - DNA, 15 bp, Homo sapiens
ttctctccttagcac

SEQ ID NO: 938651 - DNA, 15 bp, Homo sapiens
tttctctccttagca

SEQ ID NO: 938652 - DNA, 15 bp, Homo sapiens
atttctctccttagc

SEQ ID NO: 938653 - DNA, 15 bp, Homo sapiens
tatttctctccttag

SEQ ID NO: 938654 - DNA, 15 bp, Homo sapiens
ttatttctctcctta

SEQ ID NO: 938655 - DNA, 15 bp, Homo sapiens
tttatttctctcctt

SEQ ID NO: 938656 - DNA, 15 bp, Homo sapiens
ctttatttctctcct

SEQ ID NO: 938657 - DNA, 15 bp, Homo sapiens
gctttatttctctcc

SEQ ID NO: 938658 - DNA, 15 bp, Homo sapiens
tgctttatttctctc

SEQ ID NO: 938659 - DNA, 15 bp, Homo sapiens
atgctttatttctct

SEQ ID NO: 938660 - DNA, 15 bp, Homo sapiens
catgctttatttctc

SEQ ID NO: 938661 - DNA, 15 bp, Homo sapiens
tcatgctttatttct

SEQ ID NO: 938662 - DNA, 15 bp, Homo sapiens
atcatgctttatttc

SEQ ID NO: 938663 - DNA, 15 bp, Homo sapiens
aatcatgctttattt

SEQ ID NO: 938664 - DNA, 15 bp, Homo sapiens
caatcatgctttatt

SEQ ID NO: 938665 - DNA, 15 bp, Homo sapiens
ccaatcatgctttat

SEQ ID NO: 938666 - DNA, 15 bp, Homo sapiens
accaatcatgcttta

SEQ ID NO: 938667 - DNA, 15 bp, Homo sapiens
caccaatcatgcttt

SEQ ID NO: 938668 - DNA, 15 bp, Homo sapiens
acaccaatcatgctt

SEQ ID NO: 938669 - DNA, 15 bp, Homo sapiens
tacaccaatcatgct

SEQ ID NO: 938670 - DNA, 15 bp, Homo sapiens
ttacaccaatcatgc

SEQ ID NO: 938671 - DNA, 15 bp, Homo sapiens
tttacaccaatcatg

SEQ ID NO: 938672 - DNA, 15 bp, Homo sapiens
ctttacaccaatcat

SEQ ID NO: 938673 - DNA, 15 bp, Homo sapiens
tctttacaccaatca

SEQ ID NO: 938674 - DNA, 15 bp, Homo sapiens
ctctttacaccaatc

SEQ ID NO: 938675 - DNA, 15 bp, Homo sapiens
actctttacaccaat

SEQ ID NO: 938676 - DNA, 15 bp, Homo sapiens
tactctttacaccaa

SEQ ID NO: 938677 - DNA, 15 bp, Homo sapiens
atactctttacacca

SEQ ID NO: 938678 - DNA, 15 bp, Homo sapiens
catactctttacacc

SEQ ID NO: 938679 - DNA, 15 bp, Homo sapiens
ccatactctttacac

SEQ ID NO: 938680 - DNA, 15 bp, Homo sapiens
cccatactctttaca

SEQ ID NO: 938681 - DNA, 15 bp, Homo sapiens
ccccatactctttac

SEQ ID NO: 938682 - DNA, 15 bp, Homo sapiens
tccccatactcttta

SEQ ID NO: 938683 - DNA, 15 bp, Homo sapiens
ctccccatactcttt

SEQ ID NO: 938684 - DNA, 15 bp, Homo sapiens
tctccccatactctt

SEQ ID NO: 938685 - DNA, 15 bp, Homo sapiens
ctctccccatactct

SEQ ID NO: 938686 - DNA, 15 bp, Homo sapiens
tctctccccatactc

SEQ ID NO: 938687 - DNA, 15 bp, Homo sapiens
ctctctccccatact

SEQ ID NO: 938688 - DNA, 15 bp, Homo sapiens
tctctctccccatac

SEQ ID NO: 938689 - DNA, 15 bp, Homo sapiens
ttctctctccccata

SEQ ID NO: 938690 - DNA, 15 bp, Homo sapiens
cttctctctccccat

SEQ ID NO: 938691 - DNA, 15 bp, Homo sapiens
ccttctctctcccca

SEQ ID NO: 938692 - DNA, 15 bp, Homo sapiens
cccttctctctcccc

SEQ ID NO: 938693 - DNA, 15 bp, Homo sapiens
ccccttctctctccc

SEQ ID NO: 938694 - DNA, 15 bp, Homo sapiens
accccttctctctcc

SEQ ID NO: 938695 - DNA, 15 bp, Homo sapiens
caccccttctctctc

SEQ ID NO: 938696 - DNA, 15 bp, Homo sapiens
acaccccttctctct

SEQ ID NO: 938697 - DNA, 15 bp, Homo sapiens
tacaccccttctctc

SEQ ID NO: 938698 - DNA, 15 bp, Homo sapiens
ttacaccccttctct

SEQ ID NO: 938699 - DNA, 15 bp, Homo sapiens
gttacaccccttctc

SEQ ID NO: 938700 - DNA, 15 bp, Homo sapiens
agttacaccccttct

SEQ ID NO: 938701 - DNA, 15 bp, Homo sapiens
cagttacaccccttc

SEQ ID NO: 938702 - DNA, 15 bp, Homo sapiens
tcagttacacccctt

SEQ ID NO: 938703 - DNA, 15 bp, Homo sapiens
ttcagttacacccct

SEQ ID NO: 938704 - DNA, 15 bp, Homo sapiens
tttcagttacacccc

SEQ ID NO: 938705 - DNA, 15 bp, Homo sapiens
ttttcagttacaccc

SEQ ID NO: 938706 - DNA, 15 bp, Homo sapiens
attttcagttacacc

SEQ ID NO: 938707 - DNA, 15 bp, Homo sapiens
tattttcagttacac

SEQ ID NO: 938708 - DNA, 15 bp, Homo sapiens
ctattttcagttaca

SEQ ID NO: 938709 - DNA, 15 bp, Homo sapiens
tctattttcagttac

SEQ ID NO: 938710 - DNA, 15 bp, Homo sapiens
ctctattttcagtta

SEQ ID NO: 938711 - DNA, 15 bp, Homo sapiens
actctattttcagtt

SEQ ID NO: 938712 - DNA, 15 bp, Homo sapiens
tactctattttcagt

SEQ ID NO: 938713 - DNA, 15 bp, Homo sapiens
ctactctattttcag

SEQ ID NO: 938714 - DNA, 15 bp, Homo sapiens
actactctattttca

SEQ ID NO: 938715 - DNA, 15 bp, Homo sapiens
tactactctattttc

SEQ ID NO: 938716 - DNA, 15 bp, Homo sapiens
ttactactctatttt

SEQ ID NO: 938717 - DNA, 15 bp, Homo sapiens
cttactactctattt

SEQ ID NO: 938718 - DNA, 15 bp, Homo sapiens
ccttactactctatt

SEQ ID NO: 938719 - DNA, 15 bp, Homo sapiens
cccttactactctat

SEQ ID NO: 938720 - DNA, 15 bp, Homo sapiens
tcccttactactcta

SEQ ID NO: 938721 - DNA, 15 bp, Homo sapiens
ctcccttactactct

SEQ ID NO: 938722 - DNA, 15 bp, Homo sapiens
cctcccttactactc

SEQ ID NO: 938723 - DNA, 15 bp, Homo sapiens
acctcccttactact

SEQ ID NO: 938724 - DNA, 15 bp, Homo sapiens
gacctcccttactac

SEQ ID NO: 938725 - DNA, 15 bp, Homo sapiens
agacctcccttacta

SEQ ID NO: 938726 - DNA, 15 bp, Homo sapiens
aagacctcccttact

SEQ ID NO: 938727 - DNA, 15 bp, Homo sapiens
gaagacctcccttac

SEQ ID NO: 938728 - DNA, 15 bp, Homo sapiens
ggaagacctccctta

SEQ ID NO: 938729 - DNA, 15 bp, Homo sapiens
aggaagacctccctt

SEQ ID NO: 938730 - DNA, 15 bp, Homo sapiens
aaggaagacctccct

SEQ ID NO: 938731 - DNA, 15 bp, Homo sapiens
taaggaagacctccc

SEQ ID NO: 938732 - DNA, 15 bp, Homo sapiens
ttaaggaagacctcc

SEQ ID NO: 938733 - DNA, 15 bp, Homo sapiens
attaaggaagacctc

SEQ ID NO: 938734 - DNA, 15 bp, Homo sapiens
tattaaggaagacct

SEQ ID NO: 938735 - DNA, 15 bp, Homo sapiens
ttattaaggaagacc

SEQ ID NO: 938736 - DNA, 15 bp, Homo sapiens
cttattaaggaagac

SEQ ID NO: 938737 - DNA, 15 bp, Homo sapiens
tcttattaaggaaga

SEQ ID NO: 938738 - DNA, 15 bp, Homo sapiens
atcttattaaggaag

SEQ ID NO: 938739 - DNA, 15 bp, Homo sapiens
catcttattaaggaa

SEQ ID NO: 938740 - DNA, 15 bp, Homo sapiens
tcatcttattaagga

SEQ ID NO: 938741 - DNA, 15 bp, Homo sapiens
atcatcttattaagg

SEQ ID NO: 938742 - DNA, 15 bp, Homo sapiens
tatcatcttattaag

SEQ ID NO: 938743 - DNA, 15 bp, Homo sapiens
atatcatcttattaa

SEQ ID NO: 938744 - DNA, 15 bp, Homo sapiens
tatatcatcttatta

SEQ ID NO: 938745 - DNA, 15 bp, Homo sapiens
atatatcatcttatt

SEQ ID NO: 938746 - DNA, 15 bp, Homo sapiens
catatatcatcttat

SEQ ID NO: 938747 - DNA, 15 bp, Homo sapiens
tcatatatcatctta

SEQ ID NO: 938748 - DNA, 15 bp, Homo sapiens
ttcatatatcatctt

SEQ ID NO: 938749 - DNA, 15 bp, Homo sapiens
gttcatatatcatct

SEQ ID NO: 938750 - DNA, 15 bp, Homo sapiens
tgttcatatatcatc

SEQ ID NO: 938751 - DNA, 15 bp, Homo sapiens
ctgttcatatatcat

SEQ ID NO: 938752 - DNA, 15 bp, Homo sapiens
tctgttcatatatca

SEQ ID NO: 938753 - DNA, 15 bp, Homo sapiens
ctctgttcatatatc

SEQ ID NO: 938754 - DNA, 15 bp, Homo sapiens
tctctgttcatatat

SEQ ID NO: 938755 - DNA, 15 bp, Homo sapiens
ctctctgttcatata

SEQ ID NO: 938756 - DNA, 15 bp, Homo sapiens
gctctctgttcatat

SEQ ID NO: 938757 - DNA, 15 bp, Homo sapiens
agctctctgttcata

SEQ ID NO: 938758 - DNA, 15 bp, Homo sapiens
tagctctctgttcat

SEQ ID NO: 938759 - DNA, 15 bp, Homo sapiens
ttagctctctgttca

SEQ ID NO: 938760 - DNA, 15 bp, Homo sapiens
cttagctctctgttc

SEQ ID NO: 938761 - DNA, 15 bp, Homo sapiens
ccttagctctctgtt

SEQ ID NO: 938762 - DNA, 15 bp, Homo sapiens
tccttagctctctgt

SEQ ID NO: 938763 - DNA, 15 bp, Homo sapiens
ctccttagctctctg

SEQ ID NO: 938764 - DNA, 15 bp, Homo sapiens
cctccttagctctct

SEQ ID NO: 938765 - DNA, 15 bp, Homo sapiens
ccctccttagctctc

SEQ ID NO: 938766 - DNA, 15 bp, Homo sapiens
cccctccttagctct

SEQ ID NO: 938767 - DNA, 15 bp, Homo sapiens
acccctccttagctc

SEQ ID NO: 938768 - DNA, 15 bp, Homo sapiens
tacccctccttagct

SEQ ID NO: 938769 - DNA, 15 bp, Homo sapiens
ttacccctccttagc

SEQ ID NO: 938770 - DNA, 15 bp, Homo sapiens
tttacccctccttag

SEQ ID NO: 938771 - DNA, 15 bp, Homo sapiens
ctttacccctcctta

SEQ ID NO: 938772 - DNA, 15 bp, Homo sapiens
cctttacccctcctt

SEQ ID NO: 938773 - DNA, 15 bp, Homo sapiens
tcctttacccctcct

SEQ ID NO: 938774 - DNA, 15 bp, Homo sapiens
ttcctttacccctcc

SEQ ID NO: 938775 - DNA, 15 bp, Homo sapiens
cttcctttacccctc

SEQ ID NO: 938776 - DNA, 15 bp, Homo sapiens
acttcctttacccct

SEQ ID NO: 938777 - DNA, 15 bp, Homo sapiens
cacttcctttacccc

SEQ ID NO: 938778 - DNA, 15 bp, Homo sapiens
tcacttcctttaccc

SEQ ID NO: 938779 - DNA, 15 bp, Homo sapiens
ctcacttcctttacc

SEQ ID NO: 938780 - DNA, 15 bp, Homo sapiens
actcacttcctttac

SEQ ID NO: 938781 - DNA, 15 bp, Homo sapiens
gactcacttccttta

SEQ ID NO: 938782 - DNA, 15 bp, Homo sapiens
tgactcacttccttt

SEQ ID NO: 938783 - DNA, 15 bp, Homo sapiens
atgactcacttcctt

SEQ ID NO: 938784 - DNA, 15 bp, Homo sapiens
tatgactcacttcct

SEQ ID NO: 938785 - DNA, 15 bp, Homo sapiens
gtatgactcacttcc

SEQ ID NO: 938786 - DNA, 15 bp, Homo sapiens
tgtatgactcacttc

SEQ ID NO: 938787 - DNA, 15 bp, Homo sapiens
ctgtatgactcactt

SEQ ID NO: 938788 - DNA, 15 bp, Homo sapiens
tctgtatgactcact

SEQ ID NO: 938789 - DNA, 15 bp, Homo sapiens
atctgtatgactcac

SEQ ID NO: 938790 - DNA, 15 bp, Homo sapiens
tatctgtatgactca

SEQ ID NO: 938791 - DNA, 15 bp, Homo sapiens
gtatctgtatgactc

SEQ ID NO: 938792 - DNA, 15 bp, Homo sapiens
agtatctgtatgact

SEQ ID NO: 938793 - DNA, 15 bp, Homo sapiens
tagtatctgtatgac

SEQ ID NO: 938794 - DNA, 15 bp, Homo sapiens
ctagtatctgtatga

SEQ ID NO: 938795 - DNA, 15 bp, Homo sapiens
tctagtatctgtatg

SEQ ID NO: 938796 - DNA, 15 bp, Homo sapiens
ttctagtatctgtat

SEQ ID NO: 938797 - DNA, 15 bp, Homo sapiens
tttctagtatctgta

SEQ ID NO: 938798 - DNA, 15 bp, Homo sapiens
ttttctagtatctgt

SEQ ID NO: 938799 - DNA, 15 bp, Homo sapiens
tttttctagtatctg

SEQ ID NO: 938800 - DNA, 15 bp, Homo sapiens
atttttctagtatct

SEQ ID NO: 938801 - DNA, 15 bp, Homo sapiens
tatttttctagtatc

SEQ ID NO: 938802 - DNA, 15 bp, Homo sapiens
ttatttttctagtat

SEQ ID NO: 938803 - DNA, 15 bp, Homo sapiens
attatttttctagta

SEQ ID NO: 938804 - DNA, 15 bp, Homo sapiens
aattatttttctagt

SEQ ID NO: 938805 - DNA, 15 bp, Homo sapiens
taattatttttctag

SEQ ID NO: 938806 - DNA, 15 bp, Homo sapiens
gtaattatttttcta

SEQ ID NO: 938807 - DNA, 15 bp, Homo sapiens
tgtaattatttttct

SEQ ID NO: 938808 - DNA, 15 bp, Homo sapiens
ctgtaattatttttc

SEQ ID NO: 938809 - DNA, 15 bp, Homo sapiens
tctgtaattattttt

SEQ ID NO: 938810 - DNA, 15 bp, Homo sapiens
gtctgtaattatttt

SEQ ID NO: 938811 - DNA, 15 bp, Homo sapiens
tgtctgtaattattt

SEQ ID NO: 938812 - DNA, 15 bp, Homo sapiens
ttgtctgtaattatt

SEQ ID NO: 938813 - DNA, 15 bp, Homo sapiens
gttgtctgtaattat

SEQ ID NO: 938814 - DNA, 15 bp, Homo sapiens
tgttgtctgtaatta

SEQ ID NO: 938815 - DNA, 15 bp, Homo sapiens
ctgttgtctgtaatt

SEQ ID NO: 938816 - DNA, 15 bp, Homo sapiens
tctgttgtctgtaat

SEQ ID NO: 938817 - DNA, 15 bp, Homo sapiens
ttctgttgtctgtaa

SEQ ID NO: 938818 - DNA, 15 bp, Homo sapiens
tttctgttgtctgta

SEQ ID NO: 938819 - DNA, 15 bp, Homo sapiens
atttctgttgtctgt

SEQ ID NO: 938820 - DNA, 15 bp, Homo sapiens
tatttctgttgtctg

SEQ ID NO: 938821 - DNA, 15 bp, Homo sapiens
ctatttctgttgtct

SEQ ID NO: 938822 - DNA, 15 bp, Homo sapiens
gctatttctgttgtc

SEQ ID NO: 938823 - DNA, 15 bp, Homo sapiens
tgctatttctgttgt

SEQ ID NO: 938824 - DNA, 15 bp, Homo sapiens
ttgctatttctgttg

SEQ ID NO: 938825 - DNA, 15 bp, Homo sapiens
cttgctatttctgtt

SEQ ID NO: 938826 - DNA, 15 bp, Homo sapiens
acttgctatttctgt

SEQ ID NO: 938827 - DNA, 15 bp, Homo sapiens
aacttgctatttctg

SEQ ID NO: 938828 - DNA, 15 bp, Homo sapiens
gaacttgctatttct

SEQ ID NO: 938829 - DNA, 15 bp, Homo sapiens
tgaacttgctatttc

SEQ ID NO: 938830 - DNA, 15 bp, Homo sapiens
ctgaacttgctattt

SEQ ID NO: 938831 - DNA, 15 bp, Homo sapiens
tctgaacttgctatt

SEQ ID NO: 938832 - DNA, 15 bp, Homo sapiens
atctgaacttgctat

SEQ ID NO: 938833 - DNA, 15 bp, Homo sapiens
catctgaacttgcta

SEQ ID NO: 938834 - DNA, 15 bp, Homo sapiens
acatctgaacttgct

SEQ ID NO: 938835 - DNA, 15 bp, Homo sapiens
gacatctgaacttgc

SEQ ID NO: 938836 - DNA, 15 bp, Homo sapiens
ggacatctgaacttg

SEQ ID NO: 938837 - DNA, 15 bp, Homo sapiens
aggacatctgaactt

SEQ ID NO: 938838 - DNA, 15 bp, Homo sapiens
taggacatctgaact

SEQ ID NO: 938839 - DNA, 15 bp, Homo sapiens
ttaggacatctgaac

SEQ ID NO: 938840 - DNA, 15 bp, Homo sapiens
cttaggacatctgaa

SEQ ID NO: 938841 - DNA, 15 bp, Homo sapiens
ccttaggacatctga

SEQ ID NO: 938842 - DNA, 15 bp, Homo sapiens
accttaggacatctg

SEQ ID NO: 938843 - DNA, 15 bp, Homo sapiens
caccttaggacatct

SEQ ID NO: 938844 - DNA, 15 bp, Homo sapiens
ccaccttaggacatc

SEQ ID NO: 938845 - DNA, 15 bp, Homo sapiens
cccaccttaggacat

SEQ ID NO: 938846 - DNA, 15 bp, Homo sapiens
tcccaccttaggaca

SEQ ID NO: 938847 - DNA, 15 bp, Homo sapiens
ctcccaccttaggac

SEQ ID NO: 938848 - DNA, 15 bp, Homo sapiens
cctcccaccttagga

SEQ ID NO: 938849 - DNA, 15 bp, Homo sapiens
tcctcccaccttagg

SEQ ID NO: 938850 - DNA, 15 bp, Homo sapiens
atcctcccaccttag

SEQ ID NO: 938851 - DNA, 15 bp, Homo sapiens
catcctcccacctta

SEQ ID NO: 938852 - DNA, 15 bp, Homo sapiens
gcatcctcccacctt

SEQ ID NO: 938853 - DNA, 15 bp, Homo sapiens
cgcatcctcccacct

SEQ ID NO: 938854 - DNA, 15 bp, Homo sapiens
acgcatcctcccacc

SEQ ID NO: 938855 - DNA, 15 bp, Homo sapiens
cacgcatcctcccac

SEQ ID NO: 938856 - DNA, 15 bp, Homo sapiens
ccacgcatcctccca

SEQ ID NO: 938857 - DNA, 15 bp, Homo sapiens
accacgcatcctccc

SEQ ID NO: 938858 - DNA, 15 bp, Homo sapiens
taccacgcatcctcc

SEQ ID NO: 938859 - DNA, 15 bp, Homo sapiens
ataccacgcatcctc

SEQ ID NO: 938860 - DNA, 15 bp, Homo sapiens
tataccacgcatcct

SEQ ID NO: 938861 - DNA, 15 bp, Homo sapiens
atataccacgcatcc

SEQ ID NO: 938862 - DNA, 15 bp, Homo sapiens
aatataccacgcatc

SEQ ID NO: 938863 - DNA, 15 bp, Homo sapiens
aaatataccacgcat

SEQ ID NO: 938864 - DNA, 15 bp, Homo sapiens
gaaatataccacgca

SEQ ID NO: 938865 - DNA, 15 bp, Homo sapiens
tgaaatataccacgc

SEQ ID NO: 938866 - DNA, 15 bp, Homo sapiens
atgaaatataccacg

SEQ ID NO: 938867 - DNA, 15 bp, Homo sapiens
aatgaaatataccac

SEQ ID NO: 938868 - DNA, 15 bp, Homo sapiens
taatgaaatatacca

SEQ ID NO: 938869 - DNA, 15 bp, Homo sapiens
ttaatgaaatatacc

SEQ ID NO: 938870 - DNA, 15 bp, Homo sapiens
tttaatgaaatatac

SEQ ID NO: 938871 - DNA, 15 bp, Homo sapiens
ttttaatgaaatata

SEQ ID NO: 938872 - DNA, 15 bp, Homo sapiens
tttttaatgaaatat

SEQ ID NO: 938873 - DNA, 15 bp, Homo sapiens
atttttaatgaaata

SEQ ID NO: 938874 - DNA, 15 bp, Homo sapiens
aatttttaatgaaat

SEQ ID NO: 938875 - DNA, 15 bp, Homo sapiens
taatttttaatgaaa

SEQ ID NO: 938876 - DNA, 15 bp, Homo sapiens
ataatttttaatgaa

SEQ ID NO: 938877 - DNA, 15 bp, Homo sapiens
gataatttttaatga

SEQ ID NO: 938878 - DNA, 15 bp, Homo sapiens
tgataatttttaatg

SEQ ID NO: 938879 - DNA, 15 bp, Homo sapiens
gtgataatttttaat

SEQ ID NO: 938880 - DNA, 15 bp, Homo sapiens
tgtgataatttttaa

SEQ ID NO: 938881 - DNA, 15 bp, Homo sapiens
gtgtgataattttta

SEQ ID NO: 938882 - DNA, 15 bp, Homo sapiens
agtgtgataattttt

SEQ ID NO: 938883 - DNA, 15 bp, Homo sapiens
cagtgtgataatttt

SEQ ID NO: 938884 - DNA, 15 bp, Homo sapiens
acagtgtgataattt

SEQ ID NO: 938885 - DNA, 15 bp, Homo sapiens
tacagtgtgataatt

SEQ ID NO: 938886 - DNA, 15 bp, Homo sapiens
ttacagtgtgataat

SEQ ID NO: 938887 - DNA, 15 bp, Homo sapiens
tttacagtgtgataa

SEQ ID NO: 938888 - DNA, 15 bp, Homo sapiens
ttttacagtgtgata

SEQ ID NO: 938889 - DNA, 15 bp, Homo sapiens
attttacagtgtgat

SEQ ID NO: 938890 - DNA, 15 bp, Homo sapiens
tattttacagtgtga

SEQ ID NO: 938891 - DNA, 15 bp, Homo sapiens
atattttacagtgtg

SEQ ID NO: 938892 - DNA, 15 bp, Homo sapiens
tatattttacagtgt

SEQ ID NO: 938893 - DNA, 15 bp, Homo sapiens
ttatattttacagtg

SEQ ID NO: 938894 - DNA, 15 bp, Homo sapiens
cttatattttacagt

SEQ ID NO: 938895 - DNA, 15 bp, Homo sapiens
tcttatattttacag

SEQ ID NO: 938896 - DNA, 15 bp, Homo sapiens
ttcttatattttaca

SEQ ID NO: 938897 - DNA, 15 bp, Homo sapiens
attcttatattttac

SEQ ID NO: 938898 - DNA, 15 bp, Homo sapiens
tattcttatatttta

SEQ ID NO: 938899 - DNA, 15 bp, Homo sapiens
ttattcttatatttt

SEQ ID NO: 938900 - DNA, 15 bp, Homo sapiens
attattcttatattt

SEQ ID NO: 938901 - DNA, 15 bp, Homo sapiens
aattattcttatatt

SEQ ID NO: 938902 - DNA, 15 bp, Homo sapiens
aaattattcttatat

SEQ ID NO: 938903 - DNA, 15 bp, Homo sapiens
caaattattcttata

SEQ ID NO: 938904 - DNA, 15 bp, Homo sapiens
acaaattattcttat

SEQ ID NO: 938905 - DNA, 15 bp, Homo sapiens
aacaaattattctta

SEQ ID NO: 938906 - DNA, 15 bp, Homo sapiens
aaacaaattattctt

SEQ ID NO: 938907 - DNA, 15 bp, Homo sapiens
gaaacaaattattct

SEQ ID NO: 938908 - DNA, 15 bp, Homo sapiens
agaaacaaattattc

SEQ ID NO: 938909 - DNA, 15 bp, Homo sapiens
aagaaacaaattatt

SEQ ID NO: 938910 - DNA, 15 bp, Homo sapiens
aaagaaacaaattat

SEQ ID NO: 938911 - DNA, 15 bp, Homo sapiens
aaaagaaacaaatta

SEQ ID NO: 938912 - DNA, 15 bp, Homo sapiens
taaaagaaacaaatt

SEQ ID NO: 938913 - DNA, 15 bp, Homo sapiens
ctaaaagaaacaaat

SEQ ID NO: 938914 - DNA, 15 bp, Homo sapiens
tctaaaagaaacaaa

SEQ ID NO: 938915 - DNA, 15 bp, Homo sapiens
ttctaaaagaaacaa

SEQ ID NO: 938916 - DNA, 15 bp, Homo sapiens
tttctaaaagaaaca

SEQ ID NO: 938917 - DNA, 15 bp, Homo sapiens
atttctaaaagaaac

SEQ ID NO: 938918 - DNA, 15 bp, Homo sapiens
aatttctaaaagaaa

SEQ ID NO: 938919 - DNA, 15 bp, Homo sapiens
aaatttctaaaagaa

SEQ ID NO: 938920 - DNA, 15 bp, Homo sapiens
aaaatttctaaaaga

SEQ ID NO: 938921 - DNA, 15 bp, Homo sapiens
taaaatttctaaaag

SEQ ID NO: 938922 - DNA, 15 bp, Homo sapiens
gtaaaatttctaaaa

SEQ ID NO: 938923 - DNA, 15 bp, Homo sapiens
agtaaaatttctaaa

SEQ ID NO: 938924 - DNA, 15 bp, Homo sapiens
aagtaaaatttctaa

SEQ ID NO: 938925 - DNA, 15 bp, Homo sapiens
aaagtaaaatttcta

SEQ ID NO: 938926 - DNA, 15 bp, Homo sapiens
taaagtaaaatttct

SEQ ID NO: 938927 - DNA, 15 bp, Homo sapiens
ataaagtaaaatttc

SEQ ID NO: 938928 - DNA, 15 bp, Homo sapiens
aataaagtaaaattt

SEQ ID NO: 938929 - DNA, 15 bp, Homo sapiens
gaataaagtaaaatt

SEQ ID NO: 938930 - DNA, 15 bp, Homo sapiens
agaataaagtaaaat

SEQ ID NO: 938931 - DNA, 15 bp, Homo sapiens
cagaataaagtaaaa

SEQ ID NO: 938932 - DNA, 15 bp, Homo sapiens
tcagaataaagtaaa

SEQ ID NO: 938933 - DNA, 15 bp, Homo sapiens
atcagaataaagtaa

SEQ ID NO: 938934 - DNA, 15 bp, Homo sapiens
tatcagaataaagta

SEQ ID NO: 938935 - DNA, 15 bp, Homo sapiens
atatcagaataaagt

SEQ ID NO: 938936 - DNA, 15 bp, Homo sapiens
aatatcagaataaag

SEQ ID NO: 938937 - DNA, 15 bp, Homo sapiens
taatatcagaataaa

SEQ ID NO: 938938 - DNA, 15 bp, Homo sapiens
ttaatatcagaataa

SEQ ID NO: 938939 - DNA, 15 bp, Homo sapiens
attaatatcagaata

SEQ ID NO: 938940 - DNA, 15 bp, Homo sapiens
tattaatatcagaat

SEQ ID NO: 938941 - DNA, 15 bp, Homo sapiens
ttattaatatcagaa

SEQ ID NO: 938942 - DNA, 15 bp, Homo sapiens
attattaatatcaga

SEQ ID NO: 938943 - DNA, 15 bp, Homo sapiens
cattattaatatcag

SEQ ID NO: 938944 - DNA, 15 bp, Homo sapiens
tcattattaatatca

SEQ ID NO: 938945 - DNA, 15 bp, Homo sapiens
atcattattaatatc

SEQ ID NO: 938946 - DNA, 15 bp, Homo sapiens
aatcattattaatat

SEQ ID NO: 938947 - DNA, 15 bp, Homo sapiens
aaatcattattaata

SEQ ID NO: 938948 - DNA, 15 bp, Homo sapiens
aaaatcattattaat

SEQ ID NO: 938949 - DNA, 15 bp, Homo sapiens
aaaaatcattattaa

SEQ ID NO: 938950 - DNA, 15 bp, Homo sapiens
aaaaaatcattatta

SEQ ID NO: 938951 - DNA, 15 bp, Homo sapiens
taaaaaatcattatt

SEQ ID NO: 938952 - DNA, 15 bp, Homo sapiens
ttaaaaaatcattat

SEQ ID NO: 938953 - DNA, 15 bp, Homo sapiens
attaaaaaatcatta

SEQ ID NO: 938954 - DNA, 15 bp, Homo sapiens
gattaaaaaatcatt

SEQ ID NO: 938955 - DNA, 15 bp, Homo sapiens
agattaaaaaatcat

SEQ ID NO: 938956 - DNA, 15 bp, Homo sapiens
aagattaaaaaatca

SEQ ID NO: 938957 - DNA, 15 bp, Homo sapiens
aaagattaaaaaatc

SEQ ID NO: 938958 - DNA, 15 bp, Homo sapiens
caaagattaaaaaat

SEQ ID NO: 938959 - DNA, 15 bp, Homo sapiens
ccaaagattaaaaaa

SEQ ID NO: 938960 - DNA, 15 bp, Homo sapiens
accaaagattaaaaa

SEQ ID NO: 938961 - DNA, 15 bp, Homo sapiens
aaccaaagattaaaa

SEQ ID NO: 938962 - DNA, 15 bp, Homo sapiens
aaaccaaagattaaa

SEQ ID NO: 938963 - DNA, 15 bp, Homo sapiens
aaaaccaaagattaa

SEQ ID NO: 938964 - DNA, 15 bp, Homo sapiens
gaaaaccaaagatta

SEQ ID NO: 938965 - DNA, 15 bp, Homo sapiens
ggaaaaccaaagatt

SEQ ID NO: 938966 - DNA, 15 bp, Homo sapiens
tggaaaaccaaagat

SEQ ID NO: 938967 - DNA, 15 bp, Homo sapiens
ttggaaaaccaaaga

SEQ ID NO: 938968 - DNA, 15 bp, Homo sapiens
cttggaaaaccaaag

SEQ ID NO: 938969 - DNA, 15 bp, Homo sapiens
acttggaaaaccaaa

SEQ ID NO: 938970 - DNA, 15 bp, Homo sapiens
gacttggaaaaccaa

SEQ ID NO: 938971 - DNA, 15 bp, Homo sapiens
agacttggaaaacca

SEQ ID NO: 938972 - DNA, 15 bp, Homo sapiens
aagacttggaaaacc

SEQ ID NO: 938973 - DNA, 15 bp, Homo sapiens
taagacttggaaaac

SEQ ID NO: 938974 - DNA, 15 bp, Homo sapiens
gtaagacttggaaaa

SEQ ID NO: 938975 - DNA, 15 bp, Homo sapiens
ggtaagacttggaaa

SEQ ID NO: 938976 - DNA, 15 bp, Homo sapiens
gggtaagacttggaa

SEQ ID NO: 938977 - DNA, 15 bp, Homo sapiens
agggtaagacttgga

SEQ ID NO: 938978 - DNA, 15 bp, Homo sapiens
tagggtaagacttgg

SEQ ID NO: 938979 - DNA, 15 bp, Homo sapiens
atagggtaagacttg

SEQ ID NO: 938980 - DNA, 15 bp, Homo sapiens
aatagggtaagactt

SEQ ID NO: 938981 - DNA, 15 bp, Homo sapiens
aaatagggtaagact

SEQ ID NO: 938982 - DNA, 15 bp, Homo sapiens
taaatagggtaagac

SEQ ID NO: 938983 - DNA, 15 bp, Homo sapiens
ataaatagggtaaga

SEQ ID NO: 938984 - DNA, 15 bp, Homo sapiens
cataaatagggtaag

SEQ ID NO: 938985 - DNA, 15 bp, Homo sapiens
ccataaatagggtaa

SEQ ID NO: 938986 - DNA, 15 bp, Homo sapiens
cccataaatagggta

SEQ ID NO: 938987 - DNA, 15 bp, Homo sapiens
tcccataaatagggt

SEQ ID NO: 938988 - DNA, 15 bp, Homo sapiens
ttcccataaataggg

SEQ ID NO: 938989 - DNA, 15 bp, Homo sapiens
attcccataaatagg

SEQ ID NO: 938990 - DNA, 15 bp, Homo sapiens
gattcccataaatag

SEQ ID NO: 938991 - DNA, 15 bp, Homo sapiens
agattcccataaata

SEQ ID NO: 938992 - DNA, 15 bp, Homo sapiens
aagattcccataaat

SEQ ID NO: 938993 - DNA, 15 bp, Homo sapiens
aaagattcccataaa

SEQ ID NO: 938994 - DNA, 15 bp, Homo sapiens
aaaagattcccataa

SEQ ID NO: 938995 - DNA, 15 bp, Homo sapiens
aaaaagattcccata

SEQ ID NO: 938996 - DNA, 15 bp, Homo sapiens
aaaaaagattcccat

SEQ ID NO: 938997 - DNA, 15 bp, Homo sapiens
aaaaaaagattccca

SEQ ID NO: 938998 - DNA, 15 bp, Homo sapiens
aaaaaaaagattccc

SEQ ID NO: 938999 - DNA, 15 bp, Homo sapiens
gaaaaaaaagattcc

SEQ ID NO: 939000 - DNA, 15 bp, Homo sapiens
agaaaaaaaagattc

SEQ ID NO: 939001 - DNA, 15 bp, Homo sapiens
aagaaaaaaaagatt

SEQ ID NO: 939002 - DNA, 15 bp, Homo sapiens
aaagaaaaaaaagat

SEQ ID NO: 939003 - DNA, 15 bp, Homo sapiens
aaaagaaaaaaaaga

SEQ ID NO: 939004 - DNA, 15 bp, Homo sapiens
caaaagaaaaaaaag

SEQ ID NO: 939005 - DNA, 15 bp, Homo sapiens
ccaaaagaaaaaaaa

SEQ ID NO: 939006 - DNA, 15 bp, Homo sapiens
gccaaaagaaaaaaa

SEQ ID NO: 939007 - DNA, 15 bp, Homo sapiens
agccaaaagaaaaaa

SEQ ID NO: 939008 - DNA, 15 bp, Homo sapiens
tagccaaaagaaaaa

SEQ ID NO: 939009 - DNA, 15 bp, Homo sapiens
ctagccaaaagaaaa

SEQ ID NO: 939010 - DNA, 15 bp, Homo sapiens
gctagccaaaagaaa

SEQ ID NO: 939011 - DNA, 15 bp, Homo sapiens
agctagccaaaagaa

SEQ ID NO: 939012 - DNA, 15 bp, Homo sapiens
tagctagccaaaaga

SEQ ID NO: 939013 - DNA, 15 bp, Homo sapiens
ttagctagccaaaag

SEQ ID NO: 939014 - DNA, 15 bp, Homo sapiens
attagctagccaaaa

SEQ ID NO: 939015 - DNA, 15 bp, Homo sapiens
aattagctagccaaa

SEQ ID NO: 939016 - DNA, 15 bp, Homo sapiens
caattagctagccaa

SEQ ID NO: 939017 - DNA, 15 bp, Homo sapiens
gcaattagctagcca

SEQ ID NO: 939018 - DNA, 15 bp, Homo sapiens
agcaattagctagcc

SEQ ID NO: 939019 - DNA, 15 bp, Homo sapiens
aagcaattagctagc

SEQ ID NO: 939020 - DNA, 15 bp, Homo sapiens
gaagcaattagctag

SEQ ID NO: 939021 - DNA, 15 bp, Homo sapiens
tgaagcaattagcta

SEQ ID NO: 939022 - DNA, 15 bp, Homo sapiens
ctgaagcaattagct

SEQ ID NO: 939023 - DNA, 15 bp, Homo sapiens
actgaagcaattagc

SEQ ID NO: 939024 - DNA, 15 bp, Homo sapiens
aactgaagcaattag

SEQ ID NO: 939025 - DNA, 15 bp, Homo sapiens
aaactgaagcaatta

SEQ ID NO: 939026 - DNA, 15 bp, Homo sapiens
aaaactgaagcaatt

SEQ ID NO: 939027 - DNA, 15 bp, Homo sapiens
caaaactgaagcaat

SEQ ID NO: 939028 - DNA, 15 bp, Homo sapiens
acaaaactgaagcaa

SEQ ID NO: 939029 - DNA, 15 bp, Homo sapiens
aacaaaactgaagca

SEQ ID NO: 939030 - DNA, 15 bp, Homo sapiens
aaacaaaactgaagc

SEQ ID NO: 939031 - DNA, 15 bp, Homo sapiens
aaaacaaaactgaag

SEQ ID NO: 939032 - DNA, 15 bp, Homo sapiens
gaaaacaaaactgaa

SEQ ID NO: 939033 - DNA, 15 bp, Homo sapiens
agaaaacaaaactga

SEQ ID NO: 939034 - DNA, 15 bp, Homo sapiens
tagaaaacaaaactg

SEQ ID NO: 939035 - DNA, 15 bp, Homo sapiens
ttagaaaacaaaact

SEQ ID NO: 939036 - DNA, 15 bp, Homo sapiens
attagaaaacaaaac

SEQ ID NO: 939037 - DNA, 15 bp, Homo sapiens
gattagaaaacaaaa

SEQ ID NO: 939038 - DNA, 15 bp, Homo sapiens
agattagaaaacaaa

SEQ ID NO: 939039 - DNA, 15 bp, Homo sapiens
tagattagaaaacaa

SEQ ID NO: 939040 - DNA, 15 bp, Homo sapiens
ctagattagaaaaca

SEQ ID NO: 939041 - DNA, 15 bp, Homo sapiens
tctagattagaaaac

SEQ ID NO: 939042 - DNA, 15 bp, Homo sapiens
ttctagattagaaaa

SEQ ID NO: 939043 - DNA, 15 bp, Homo sapiens
attctagattagaaa

SEQ ID NO: 939044 - DNA, 15 bp, Homo sapiens
cattctagattagaa

SEQ ID NO: 939045 - DNA, 15 bp, Homo sapiens
acattctagattaga

SEQ ID NO: 939046 - DNA, 15 bp, Homo sapiens
aacattctagattag

SEQ ID NO: 939047 - DNA, 15 bp, Homo sapiens
taacattctagatta

SEQ ID NO: 939048 - DNA, 15 bp, Homo sapiens
ctaacattctagatt

SEQ ID NO: 939049 - DNA, 15 bp, Homo sapiens
gctaacattctagat

SEQ ID NO: 939050 - DNA, 15 bp, Homo sapiens
tgctaacattctaga

SEQ ID NO: 939051 - DNA, 15 bp, Homo sapiens
ttgctaacattctag

SEQ ID NO: 939052 - DNA, 15 bp, Homo sapiens
attgctaacattcta

SEQ ID NO: 939053 - DNA, 15 bp, Homo sapiens
gattgctaacattct

SEQ ID NO: 939054 - DNA, 15 bp, Homo sapiens
agattgctaacattc

SEQ ID NO: 939055 - DNA, 15 bp, Homo sapiens
cagattgctaacatt

SEQ ID NO: 939056 - DNA, 15 bp, Homo sapiens
acagattgctaacat

SEQ ID NO: 939057 - DNA, 15 bp, Homo sapiens
aacagattgctaaca

SEQ ID NO: 939058 - DNA, 15 bp, Homo sapiens
taacagattgctaac

SEQ ID NO: 939059 - DNA, 15 bp, Homo sapiens
ttaacagattgctaa

SEQ ID NO: 939060 - DNA, 15 bp, Homo sapiens
attaacagattgcta

SEQ ID NO: 939061 - DNA, 15 bp, Homo sapiens
aattaacagattgct

SEQ ID NO: 939062 - DNA, 15 bp, Homo sapiens
gaattaacagattgc

SEQ ID NO: 939063 - DNA, 15 bp, Homo sapiens
ggaattaacagattg

SEQ ID NO: 939064 - DNA, 15 bp, Homo sapiens
tggaattaacagatt

SEQ ID NO: 939065 - DNA, 15 bp, Homo sapiens
gtggaattaacagat

SEQ ID NO: 939066 - DNA, 15 bp, Homo sapiens
agtggaattaacaga

SEQ ID NO: 939067 - DNA, 15 bp, Homo sapiens
cagtggaattaacag

SEQ ID NO: 939068 - DNA, 15 bp, Homo sapiens
ccagtggaattaaca

SEQ ID NO: 939069 - DNA, 15 bp, Homo sapiens
accagtggaattaac

SEQ ID NO: 939070 - DNA, 15 bp, Homo sapiens
taccagtggaattaa

SEQ ID NO: 939071 - DNA, 15 bp, Homo sapiens
ttaccagtggaatta

SEQ ID NO: 939072 - DNA, 15 bp, Homo sapiens
attaccagtggaatt

SEQ ID NO: 939073 - DNA, 15 bp, Homo sapiens
cattaccagtggaat

SEQ ID NO: 939074 - DNA, 15 bp, Homo sapiens
tcattaccagtggaa

SEQ ID NO: 939075 - DNA, 15 bp, Homo sapiens
atcattaccagtgga

SEQ ID NO: 939076 - DNA, 15 bp, Homo sapiens
tatcattaccagtgg

SEQ ID NO: 939077 - DNA, 15 bp, Homo sapiens
atatcattaccagtg

SEQ ID NO: 939078 - DNA, 15 bp, Homo sapiens
tatatcattaccagt

SEQ ID NO: 939079 - DNA, 15 bp, Homo sapiens
ctatatcattaccag

SEQ ID NO: 939080 - DNA, 15 bp, Homo sapiens
actatatcattacca

SEQ ID NO: 939081 - DNA, 15 bp, Homo sapiens
aactatatcattacc

SEQ ID NO: 939082 - DNA, 15 bp, Homo sapiens
taactatatcattac

SEQ ID NO: 939083 - DNA, 15 bp, Homo sapiens
ttaactatatcatta

SEQ ID NO: 939084 - DNA, 15 bp, Homo sapiens
cttaactatatcatt

SEQ ID NO: 939085 - DNA, 15 bp, Homo sapiens
gcttaactatatcat

SEQ ID NO: 939086 - DNA, 15 bp, Homo sapiens
agcttaactatatca

SEQ ID NO: 939087 - DNA, 15 bp, Homo sapiens
tagcttaactatatc

SEQ ID NO: 939088 - DNA, 15 bp, Homo sapiens
atagcttaactatat

SEQ ID NO: 939089 - DNA, 15 bp, Homo sapiens
catagcttaactata

SEQ ID NO: 939090 - DNA, 15 bp, Homo sapiens
acatagcttaactat

SEQ ID NO: 939091 - DNA, 15 bp, Homo sapiens
gacatagcttaacta

SEQ ID NO: 939092 - DNA, 15 bp, Homo sapiens
agacatagcttaact

SEQ ID NO: 939093 - DNA, 15 bp, Homo sapiens
aagacatagcttaac

SEQ ID NO: 939094 - DNA, 15 bp, Homo sapiens
caagacatagcttaa

SEQ ID NO: 939095 - DNA, 15 bp, Homo sapiens
gcaagacatagctta

SEQ ID NO: 939096 - DNA, 15 bp, Homo sapiens
agcaagacatagctt

SEQ ID NO: 939097 - DNA, 15 bp, Homo sapiens
aagcaagacatagct

SEQ ID NO: 939098 - DNA, 15 bp, Homo sapiens
gaagcaagacatagc

SEQ ID NO: 939099 - DNA, 15 bp, Homo sapiens
agaagcaagacatag

SEQ ID NO: 939100 - DNA, 15 bp, Homo sapiens
gagaagcaagacata

SEQ ID NO: 939101 - DNA, 15 bp, Homo sapiens
tgagaagcaagacat

SEQ ID NO: 939102 - DNA, 15 bp, Homo sapiens
gtgagaagcaagaca

SEQ ID NO: 939103 - DNA, 15 bp, Homo sapiens
tgtgagaagcaagac

SEQ ID NO: 939104 - DNA, 15 bp, Homo sapiens
gtgtgagaagcaaga

SEQ ID NO: 939105 - DNA, 15 bp, Homo sapiens
agtgtgagaagcaag

SEQ ID NO: 939106 - DNA, 15 bp, Homo sapiens
aagtgtgagaagcaa

SEQ ID NO: 939107 - DNA, 15 bp, Homo sapiens
aaagtgtgagaagca

SEQ ID NO: 939108 - DNA, 15 bp, Homo sapiens
taaagtgtgagaagc

SEQ ID NO: 939109 - DNA, 15 bp, Homo sapiens
ataaagtgtgagaag

SEQ ID NO: 939110 - DNA, 15 bp, Homo sapiens
aataaagtgtgagaa

SEQ ID NO: 939111 - DNA, 15 bp, Homo sapiens
aaataaagtgtgaga

SEQ ID NO: 939112 - DNA, 15 bp, Homo sapiens
taaataaagtgtgag

SEQ ID NO: 939113 - DNA, 15 bp, Homo sapiens
ataaataaagtgtga

SEQ ID NO: 939114 - DNA, 15 bp, Homo sapiens
aataaataaagtgtg

SEQ ID NO: 939115 - DNA, 15 bp, Homo sapiens
aaataaataaagtgt

SEQ ID NO: 939116 - DNA, 15 bp, Homo sapiens
taaataaataaagtg

SEQ ID NO: 939117 - DNA, 15 bp, Homo sapiens
ataaataaataaagt

SEQ ID NO: 939118 - DNA, 15 bp, Homo sapiens
aataaataaataaag

SEQ ID NO: 939119 - DNA, 15 bp, Homo sapiens
aaataaataaataaa

SEQ ID NO: 939120 - DNA, 15 bp, Homo sapiens
gagtaaataaataaa

SEQ ID NO: 939121 - DNA, 15 bp, Homo sapiens
tgagtaaataaataa

SEQ ID NO: 939122 - DNA, 15 bp, Homo sapiens
ctgagtaaataaata

SEQ ID NO: 939123 - DNA, 15 bp, Homo sapiens
cctgagtaaataaat

SEQ ID NO: 939124 - DNA, 15 bp, Homo sapiens
ccctgagtaaataaa

SEQ ID NO: 939125 - DNA, 15 bp, Homo sapiens
gccctgagtaaataa

SEQ ID NO: 939126 - DNA, 15 bp, Homo sapiens
tgccctgagtaaata

SEQ ID NO: 939127 - DNA, 15 bp, Homo sapiens
gtgccctgagtaaat

SEQ ID NO: 939128 - DNA, 15 bp, Homo sapiens
agtgccctgagtaaa

SEQ ID NO: 939129 - DNA, 15 bp, Homo sapiens
tagtgccctgagtaa

SEQ ID NO: 939130 - DNA, 15 bp, Homo sapiens
ttagtgccctgagta

SEQ ID NO: 939131 - DNA, 15 bp, Homo sapiens
attagtgccctgagt

SEQ ID NO: 939132 - DNA, 15 bp, Homo sapiens
gattagtgccctgag

SEQ ID NO: 939133 - DNA, 15 bp, Homo sapiens
agattagtgccctga

SEQ ID NO: 939134 - DNA, 15 bp, Homo sapiens
cagattagtgccctg

SEQ ID NO: 939135 - DNA, 15 bp, Homo sapiens
gcagattagtgccct

SEQ ID NO: 939136 - DNA, 15 bp, Homo sapiens
ggcagattagtgccc

SEQ ID NO: 939137 - DNA, 15 bp, Homo sapiens
tggcagattagtgcc

SEQ ID NO: 939138 - DNA, 15 bp, Homo sapiens
atggcagattagtgc

SEQ ID NO: 939139 - DNA, 15 bp, Homo sapiens
aatggcagattagtg

SEQ ID NO: 939140 - DNA, 15 bp, Homo sapiens
aaatggcagattagt

SEQ ID NO: 939141 - DNA, 15 bp, Homo sapiens
aaaatggcagattag

SEQ ID NO: 939142 - DNA, 15 bp, Homo sapiens
aaaaatggcagatta

SEQ ID NO: 939143 - DNA, 15 bp, Homo sapiens
aaaaaatggcagatt

SEQ ID NO: 939144 - DNA, 15 bp, Homo sapiens
gaaaaaatggcagat

SEQ ID NO: 939145 - DNA, 15 bp, Homo sapiens
cgaaaaaatggcaga

SEQ ID NO: 939146 - DNA, 15 bp, Homo sapiens
gcgaaaaaatggcag

SEQ ID NO: 939147 - DNA, 15 bp, Homo sapiens
tgcgaaaaaatggca

SEQ ID NO: 939148 - DNA, 15 bp, Homo sapiens
gtgcgaaaaaatggc

SEQ ID NO: 939149 - DNA, 15 bp, Homo sapiens
agtgcgaaaaaatgg

SEQ ID NO: 939150 - DNA, 15 bp, Homo sapiens
aagtgcgaaaaaatg

SEQ ID NO: 939151 - DNA, 15 bp, Homo sapiens
aaagtgcgaaaaaat

SEQ ID NO: 939152 - DNA, 15 bp, Homo sapiens
aaaagtgcgaaaaaa

SEQ ID NO: 939153 - DNA, 15 bp, Homo sapiens
aaaaagtgcgaaaaa

SEQ ID NO: 939154 - DNA, 15 bp, Homo sapiens
aaaaaagtgcgaaaa

SEQ ID NO: 939155 - DNA, 15 bp, Homo sapiens
aaaaaaagtgcgaaa

SEQ ID NO: 939156 - DNA, 15 bp, Homo sapiens
gaaaaaaagtgcgaa

SEQ ID NO: 939157 - DNA, 15 bp, Homo sapiens
ggaaaaaaagtgcga

SEQ ID NO: 939158 - DNA, 15 bp, Homo sapiens
aggaaaaaaagtgcg

SEQ ID NO: 939159 - DNA, 15 bp, Homo sapiens
aaggaaaaaaagtgc

SEQ ID NO: 939160 - DNA, 15 bp, Homo sapiens
aaaggaaaaaaagtg

SEQ ID NO: 939161 - DNA, 15 bp, Homo sapiens
aaaaggaaaaaaagt

SEQ ID NO: 939162 - DNA, 15 bp, Homo sapiens
aaaaaggaaaaaaag

SEQ ID NO: 939163 - DNA, 15 bp, Homo sapiens
aaaaaaggaaaaaaa

SEQ ID NO: 939164 - DNA, 15 bp, Homo sapiens
aaaaaaaggaaaaaa

SEQ ID NO: 939165 - DNA, 15 bp, Homo sapiens
aaaaaaaaggaaaaa

SEQ ID NO: 939166 - DNA, 15 bp, Homo sapiens
aaaaaaaaaggaaaa

SEQ ID NO: 939167 - DNA, 15 bp, Homo sapiens
aaaaaaaaaaggaaa

SEQ ID NO: 939168 - DNA, 15 bp, Homo sapiens
aaaaaaaaaaaggaa

SEQ ID NO: 939169 - DNA, 15 bp, Homo sapiens
aaaaaaaaaaaagga

SEQ ID NO: 939170 - DNA, 15 bp, Homo sapiens
aaaaaaaaaaaaagg

SEQ ID NO: 939171 - DNA, 15 bp, Homo sapiens
ccaaaaaaaaaaaaa

SEQ ID NO: 939172 - DNA, 15 bp, Homo sapiens
accaaaaaaaaaaaa

SEQ ID NO: 939173 - DNA, 15 bp, Homo sapiens
taccaaaaaaaaaaa

SEQ ID NO: 939174 - DNA, 15 bp, Homo sapiens
gtaccaaaaaaaaaa

SEQ ID NO: 939175 - DNA, 15 bp, Homo sapiens
agtaccaaaaaaaaa

SEQ ID NO: 939176 - DNA, 15 bp, Homo sapiens
cagtaccaaaaaaaa

SEQ ID NO: 939177 - DNA, 15 bp, Homo sapiens
gcagtaccaaaaaaa

SEQ ID NO: 939178 - DNA, 15 bp, Homo sapiens
agcagtaccaaaaaa

SEQ ID NO: 939179 - DNA, 15 bp, Homo sapiens
aagcagtaccaaaaa

SEQ ID NO: 939180 - DNA, 15 bp, Homo sapiens
gaagcagtaccaaaa

SEQ ID NO: 939181 - DNA, 15 bp, Homo sapiens
agaagcagtaccaaa

SEQ ID NO: 939182 - DNA, 15 bp, Homo sapiens
aagaagcagtaccaa

SEQ ID NO: 939183 - DNA, 15 bp, Homo sapiens
taagaagcagtacca

SEQ ID NO: 939184 - DNA, 15 bp, Homo sapiens
ataagaagcagtacc

SEQ ID NO: 939185 - DNA, 15 bp, Homo sapiens
aataagaagcagtac

SEQ ID NO: 939186 - DNA, 15 bp, Homo sapiens
gaataagaagcagta

SEQ ID NO: 939187 - DNA, 15 bp, Homo sapiens
agaataagaagcagt

SEQ ID NO: 939188 - DNA, 15 bp, Homo sapiens
cagaataagaagcag

SEQ ID NO: 939189 - DNA, 15 bp, Homo sapiens
ccagaataagaagca

SEQ ID NO: 939190 - DNA, 15 bp, Homo sapiens
accagaataagaagc

SEQ ID NO: 939191 - DNA, 15 bp, Homo sapiens
aaccagaataagaag

SEQ ID NO: 939192 - DNA, 15 bp, Homo sapiens
aaaccagaataagaa

SEQ ID NO: 939193 - DNA, 15 bp, Homo sapiens
aaaaccagaataaga

SEQ ID NO: 939194 - DNA, 15 bp, Homo sapiens
aaaaaccagaataag

SEQ ID NO: 939195 - DNA, 15 bp, Homo sapiens
taaaaaccagaataa

SEQ ID NO: 939196 - DNA, 15 bp, Homo sapiens
gtaaaaaccagaata

SEQ ID NO: 939197 - DNA, 15 bp, Homo sapiens
tgtaaaaaccagaat

SEQ ID NO: 939198 - DNA, 15 bp, Homo sapiens
atgtaaaaaccagaa

SEQ ID NO: 939199 - DNA, 15 bp, Homo sapiens
aatgtaaaaaccaga

SEQ ID NO: 939200 - DNA, 15 bp, Homo sapiens
caatgtaaaaaccag

SEQ ID NO: 939201 - DNA, 15 bp, Homo sapiens
tcaatgtaaaaacca

SEQ ID NO: 939202 - DNA, 15 bp, Homo sapiens
atcaatgtaaaaacc

SEQ ID NO: 939203 - DNA, 15 bp, Homo sapiens
tatcaatgtaaaaac

SEQ ID NO: 939204 - DNA, 15 bp, Homo sapiens
ctatcaatgtaaaaa

SEQ ID NO: 939205 - DNA, 15 bp, Homo sapiens
tctatcaatgtaaaa

SEQ ID NO: 939206 - DNA, 15 bp, Homo sapiens
ttctatcaatgtaaa

SEQ ID NO: 939207 - DNA, 15 bp, Homo sapiens
gttctatcaatgtaa

SEQ ID NO: 939208 - DNA, 15 bp, Homo sapiens
ggttctatcaatgta

SEQ ID NO: 939209 - DNA, 15 bp, Homo sapiens
tggttctatcaatgt

SEQ ID NO: 939210 - DNA, 15 bp, Homo sapiens
ttggttctatcaatg

SEQ ID NO: 939211 - DNA, 15 bp, Homo sapiens
attggttctatcaat

SEQ ID NO: 939212 - DNA, 15 bp, Homo sapiens
cattggttctatcaa

SEQ ID NO: 939213 - DNA, 15 bp, Homo sapiens
acattggttctatca

SEQ ID NO: 939214 - DNA, 15 bp, Homo sapiens
aacattggttctatc

SEQ ID NO: 939215 - DNA, 15 bp, Homo sapiens
taacattggttctat

SEQ ID NO: 939216 - DNA, 15 bp, Homo sapiens
ctaacattggttcta

SEQ ID NO: 939217 - DNA, 15 bp, Homo sapiens
tctaacattggttct

SEQ ID NO: 939218 - DNA, 15 bp, Homo sapiens
gtctaacattggttc

SEQ ID NO: 939219 - DNA, 15 bp, Homo sapiens
cgtctaacattggtt

SEQ ID NO: 939220 - DNA, 15 bp, Homo sapiens
acgtctaacattggt

SEQ ID NO: 939221 - DNA, 15 bp, Homo sapiens
aacgtctaacattgg

SEQ ID NO: 939222 - DNA, 15 bp, Homo sapiens
gaacgtctaacattg

SEQ ID NO: 939223 - DNA, 15 bp, Homo sapiens
tgaacgtctaacatt

SEQ ID NO: 939224 - DNA, 15 bp, Homo sapiens
atgaacgtctaacat

SEQ ID NO: 939225 - DNA, 15 bp, Homo sapiens
aatgaacgtctaaca

SEQ ID NO: 939226 - DNA, 15 bp, Homo sapiens
aaatgaacgtctaac

SEQ ID NO: 939227 - DNA, 15 bp, Homo sapiens
caaatgaacgtctaa

SEQ ID NO: 939228 - DNA, 15 bp, Homo sapiens
gcaaatgaacgtcta

SEQ ID NO: 939229 - DNA, 15 bp, Homo sapiens
ggcaaatgaacgtct

SEQ ID NO: 939230 - DNA, 15 bp, Homo sapiens
aggcaaatgaacgtc

SEQ ID NO: 939231 - DNA, 15 bp, Homo sapiens
aaggcaaatgaacgt

SEQ ID NO: 939232 - DNA, 15 bp, Homo sapiens
aaaggcaaatgaacg

SEQ ID NO: 939233 - DNA, 15 bp, Homo sapiens
aaaaggcaaatgaac

SEQ ID NO: 939234 - DNA, 15 bp, Homo sapiens
caaaaggcaaatgaa

SEQ ID NO: 939235 - DNA, 15 bp, Homo sapiens
gcaaaaggcaaatga

SEQ ID NO: 939236 - DNA, 15 bp, Homo sapiens
agcaaaaggcaaatg

SEQ ID NO: 939237 - DNA, 15 bp, Homo sapiens
cagcaaaaggcaaat

SEQ ID NO: 939238 - DNA, 15 bp, Homo sapiens
acagcaaaaggcaaa

SEQ ID NO: 939239 - DNA, 15 bp, Homo sapiens
cacagcaaaaggcaa

SEQ ID NO: 939240 - DNA, 15 bp, Homo sapiens
acacagcaaaaggca

SEQ ID NO: 939241 - DNA, 15 bp, Homo sapiens
tacacagcaaaaggc

SEQ ID NO: 939242 - DNA, 15 bp, Homo sapiens
atacacagcaaaagg

SEQ ID NO: 939243 - DNA, 15 bp, Homo sapiens
tatacacagcaaaag

SEQ ID NO: 939244 - DNA, 15 bp, Homo sapiens
atatacacagcaaaa

SEQ ID NO: 939245 - DNA, 15 bp, Homo sapiens
aatatacacagcaaa

SEQ ID NO: 939246 - DNA, 15 bp, Homo sapiens
aaatatacacagcaa

SEQ ID NO: 939247 - DNA, 15 bp, Homo sapiens
caaatatacacagca

SEQ ID NO: 939248 - DNA, 15 bp, Homo sapiens
ccaaatatacacagc

SEQ ID NO: 939249 - DNA, 15 bp, Homo sapiens
cccaaatatacacag

SEQ ID NO: 939250 - DNA, 15 bp, Homo sapiens
acccaaatatacaca

SEQ ID NO: 939251 - DNA, 15 bp, Homo sapiens
tacccaaatatacac

SEQ ID NO: 939252 - DNA, 15 bp, Homo sapiens
ttacccaaatataca

SEQ ID NO: 939253 - DNA, 15 bp, Homo sapiens
cttacccaaatatac

SEQ ID NO: 939254 - DNA, 15 bp, Homo sapiens
ccttacccaaatata

SEQ ID NO: 939255 - DNA, 15 bp, Homo sapiens
tccttacccaaatat

SEQ ID NO: 939256 - DNA, 15 bp, Homo sapiens
atccttacccaaata

SEQ ID NO: 939257 - DNA, 15 bp, Homo sapiens
gatccttacccaaat

SEQ ID NO: 939258 - DNA, 15 bp, Homo sapiens
agatccttacccaaa

SEQ ID NO: 939259 - DNA, 15 bp, Homo sapiens
tagatccttacccaa

SEQ ID NO: 939260 - DNA, 15 bp, Homo sapiens
atagatccttaccca

SEQ ID NO: 939261 - DNA, 15 bp, Homo sapiens
tatagatccttaccc

SEQ ID NO: 939262 - DNA, 15 bp, Homo sapiens
atatagatccttacc

SEQ ID NO: 939263 - DNA, 15 bp, Homo sapiens
catatagatccttac

SEQ ID NO: 939264 - DNA, 15 bp, Homo sapiens
acatatagatcctta

SEQ ID NO: 939265 - DNA, 15 bp, Homo sapiens
cacatatagatcctt

SEQ ID NO: 939266 - DNA, 15 bp, Homo sapiens
gcacatatagatcct

SEQ ID NO: 939267 - DNA, 15 bp, Homo sapiens
tgcacatatagatcc

SEQ ID NO: 939268 - DNA, 15 bp, Homo sapiens
ttgcacatatagatc

SEQ ID NO: 939269 - DNA, 15 bp, Homo sapiens
attgcacatatagat

SEQ ID NO: 939270 - DNA, 15 bp, Homo sapiens
tattgcacatataga

SEQ ID NO: 939271 - DNA, 15 bp, Homo sapiens
atattgcacatatag

SEQ ID NO: 939272 - DNA, 15 bp, Homo sapiens
tatattgcacatata

SEQ ID NO: 939273 - DNA, 15 bp, Homo sapiens
atatattgcacatat

SEQ ID NO: 939274 - DNA, 15 bp, Homo sapiens
catatattgcacata

SEQ ID NO: 939275 - DNA, 15 bp, Homo sapiens
ccatatattgcacat

SEQ ID NO: 939276 - DNA, 15 bp, Homo sapiens
cccatatattgcaca

SEQ ID NO: 939277 - DNA, 15 bp, Homo sapiens
tcccatatattgcac

SEQ ID NO: 939278 - DNA, 15 bp, Homo sapiens
gtcccatatattgca

SEQ ID NO: 939279 - DNA, 15 bp, Homo sapiens
tgtcccatatattgc

SEQ ID NO: 939280 - DNA, 15 bp, Homo sapiens
ctgtcccatatattg

SEQ ID NO: 939281 - DNA, 15 bp, Homo sapiens
actgtcccatatatt

SEQ ID NO: 939282 - DNA, 15 bp, Homo sapiens
aactgtcccatatat

SEQ ID NO: 939283 - DNA, 15 bp, Homo sapiens
taactgtcccatata

SEQ ID NO: 939284 - DNA, 15 bp, Homo sapiens
ttaactgtcccatat

SEQ ID NO: 939285 - DNA, 15 bp, Homo sapiens
tttaactgtcccata

SEQ ID NO: 939286 - DNA, 15 bp, Homo sapiens
ttttaactgtcccat

SEQ ID NO: 939287 - DNA, 15 bp, Homo sapiens
attttaactgtccca

SEQ ID NO: 939288 - DNA, 15 bp, Homo sapiens
gattttaactgtccc

SEQ ID NO: 939289 - DNA, 15 bp, Homo sapiens
tgattttaactgtcc

SEQ ID NO: 939290 - DNA, 15 bp, Homo sapiens
ctgattttaactgtc

SEQ ID NO: 939291 - DNA, 15 bp, Homo sapiens
tctgattttaactgt

SEQ ID NO: 939292 - DNA, 15 bp, Homo sapiens
ttctgattttaactg

SEQ ID NO: 939293 - DNA, 15 bp, Homo sapiens
attctgattttaact

SEQ ID NO: 939294 - DNA, 15 bp, Homo sapiens
aattctgattttaac

SEQ ID NO: 939295 - DNA, 15 bp, Homo sapiens
gaattctgattttaa

SEQ ID NO: 939296 - DNA, 15 bp, Homo sapiens
agaattctgatttta

SEQ ID NO: 939297 - DNA, 15 bp, Homo sapiens
tagaattctgatttt

SEQ ID NO: 939298 - DNA, 15 bp, Homo sapiens
ttagaattctgattt

SEQ ID NO: 939299 - DNA, 15 bp, Homo sapiens
tttagaattctgatt

SEQ ID NO: 939300 - DNA, 15 bp, Homo sapiens
atttagaattctgat

SEQ ID NO: 939301 - DNA, 15 bp, Homo sapiens
aatttagaattctga

SEQ ID NO: 939302 - DNA, 15 bp, Homo sapiens
aaatttagaattctg

SEQ ID NO: 939303 - DNA, 15 bp, Homo sapiens
caaatttagaattct

SEQ ID NO: 939304 - DNA, 15 bp, Homo sapiens
acaaatttagaattc

SEQ ID NO: 939305 - DNA, 15 bp, Homo sapiens
tacaaatttagaatt

SEQ ID NO: 939306 - DNA, 15 bp, Homo sapiens
atacaaatttagaat

SEQ ID NO: 939307 - DNA, 15 bp, Homo sapiens
aatacaaatttagaa

SEQ ID NO: 939308 - DNA, 15 bp, Homo sapiens
taatacaaatttaga

SEQ ID NO: 939309 - DNA, 15 bp, Homo sapiens
ataatacaaatttag

SEQ ID NO: 939310 - DNA, 15 bp, Homo sapiens
aataatacaaattta

SEQ ID NO: 939311 - DNA, 15 bp, Homo sapiens
caataatacaaattt

SEQ ID NO: 939312 - DNA, 15 bp, Homo sapiens
gcaataatacaaatt

SEQ ID NO: 939313 - DNA, 15 bp, Homo sapiens
tgcaataatacaaat

SEQ ID NO: 939314 - DNA, 15 bp, Homo sapiens
atgcaataatacaaa

SEQ ID NO: 939315 - DNA, 15 bp, Homo sapiens
gatgcaataatacaa

SEQ ID NO: 939316 - DNA, 15 bp, Homo sapiens
tgatgcaataataca

SEQ ID NO: 939317 - DNA, 15 bp, Homo sapiens
ctgatgcaataatac

SEQ ID NO: 939318 - DNA, 15 bp, Homo sapiens
cctgatgcaataata

SEQ ID NO: 939319 - DNA, 15 bp, Homo sapiens
gcctgatgcaataat

SEQ ID NO: 939320 - DNA, 15 bp, Homo sapiens
tgcctgatgcaataa

SEQ ID NO: 939321 - DNA, 15 bp, Homo sapiens
ttgcctgatgcaata

SEQ ID NO: 939322 - DNA, 15 bp, Homo sapiens
attgcctgatgcaat

SEQ ID NO: 939323 - DNA, 15 bp, Homo sapiens
tattgcctgatgcaa

SEQ ID NO: 939324 - DNA, 15 bp, Homo sapiens
ttattgcctgatgca

SEQ ID NO: 939325 - DNA, 15 bp, Homo sapiens
attattgcctgatgc

SEQ ID NO: 939326 - DNA, 15 bp, Homo sapiens
cattattgcctgatg

SEQ ID NO: 939327 - DNA, 15 bp, Homo sapiens
acattattgcctgat

SEQ ID NO: 939328 - DNA, 15 bp, Homo sapiens
cacattattgcctga

SEQ ID NO: 939329 - DNA, 15 bp, Homo sapiens
ccacattattgcctg

SEQ ID NO: 939330 - DNA, 15 bp, Homo sapiens
cccacattattgcct

SEQ ID NO: 939331 - DNA, 15 bp, Homo sapiens
tcccacattattgcc

SEQ ID NO: 939332 - DNA, 15 bp, Homo sapiens
ttcccacattattgc

SEQ ID NO: 939333 - DNA, 15 bp, Homo sapiens
tttcccacattattg

SEQ ID NO: 939334 - DNA, 15 bp, Homo sapiens
atttcccacattatt

SEQ ID NO: 939335 - DNA, 15 bp, Homo sapiens
tatttcccacattat

SEQ ID NO: 939336 - DNA, 15 bp, Homo sapiens
gtatttcccacatta

SEQ ID NO: 939337 - DNA, 15 bp, Homo sapiens
ggtatttcccacatt

SEQ ID NO: 939338 - DNA, 15 bp, Homo sapiens
aggtatttcccacat

SEQ ID NO: 939339 - DNA, 15 bp, Homo sapiens
aaggtatttcccaca

SEQ ID NO: 939340 - DNA, 15 bp, Homo sapiens
caaggtatttcccac

SEQ ID NO: 939341 - DNA, 15 bp, Homo sapiens
tcaaggtatttccca

SEQ ID NO: 939342 - DNA, 15 bp, Homo sapiens
gtcaaggtatttccc

SEQ ID NO: 939343 - DNA, 15 bp, Homo sapiens
tgtcaaggtatttcc

SEQ ID NO: 939344 - DNA, 15 bp, Homo sapiens
atgtcaaggtatttc

SEQ ID NO: 939345 - DNA, 15 bp, Homo sapiens
aatgtcaaggtattt

SEQ ID NO: 939346 - DNA, 15 bp, Homo sapiens
aaatgtcaaggtatt

SEQ ID NO: 939347 - DNA, 15 bp, Homo sapiens
gaaatgtcaaggtat

SEQ ID NO: 939348 - DNA, 15 bp, Homo sapiens
tgaaatgtcaaggta

SEQ ID NO: 939349 - DNA, 15 bp, Homo sapiens
atgaaatgtcaaggt

SEQ ID NO: 939350 - DNA, 15 bp, Homo sapiens
tatgaaatgtcaagg

SEQ ID NO: 939351 - DNA, 15 bp, Homo sapiens
atatgaaatgtcaag

SEQ ID NO: 939352 - DNA, 15 bp, Homo sapiens
tatatgaaatgtcaa

SEQ ID NO: 939353 - DNA, 15 bp, Homo sapiens
gtatatgaaatgtca

SEQ ID NO: 939354 - DNA, 15 bp, Homo sapiens
tgtatatgaaatgtc

SEQ ID NO: 939355 - DNA, 15 bp, Homo sapiens
gtgtatatgaaatgt

SEQ ID NO: 939356 - DNA, 15 bp, Homo sapiens
tgtgtatatgaaatg

SEQ ID NO: 939357 - DNA, 15 bp, Homo sapiens
ttgtgtatatgaaat

SEQ ID NO: 939358 - DNA, 15 bp, Homo sapiens
attgtgtatatgaaa

SEQ ID NO: 939359 - DNA, 15 bp, Homo sapiens
tattgtgtatatgaa

SEQ ID NO: 939360 - DNA, 15 bp, Homo sapiens
atattgtgtatatga

SEQ ID NO: 939361 - DNA, 15 bp, Homo sapiens
aatattgtgtatatg

SEQ ID NO: 939362 - DNA, 15 bp, Homo sapiens
gaatattgtgtatat

SEQ ID NO: 939363 - DNA, 15 bp, Homo sapiens
agaatattgtgtata

SEQ ID NO: 939364 - DNA, 15 bp, Homo sapiens
aagaatattgtgtat

SEQ ID NO: 939365 - DNA, 15 bp, Homo sapiens
caagaatattgtgta

SEQ ID NO: 939366 - DNA, 15 bp, Homo sapiens
acaagaatattgtgt

SEQ ID NO: 939367 - DNA, 15 bp, Homo sapiens
tacaagaatattgtg

SEQ ID NO: 939368 - DNA, 15 bp, Homo sapiens
atacaagaatattgt

SEQ ID NO: 939369 - DNA, 15 bp, Homo sapiens
aatacaagaatattg

SEQ ID NO: 939370 - DNA, 15 bp, Homo sapiens
taatacaagaatatt

SEQ ID NO: 939371 - DNA, 15 bp, Homo sapiens
ttaatacaagaatat

SEQ ID NO: 939372 - DNA, 15 bp, Homo sapiens
attaatacaagaata

SEQ ID NO: 939373 - DNA, 15 bp, Homo sapiens
aattaatacaagaat

SEQ ID NO: 939374 - DNA, 15 bp, Homo sapiens
aaattaatacaagaa

SEQ ID NO: 939375 - DNA, 15 bp, Homo sapiens
taaattaatacaaga

SEQ ID NO: 939376 - DNA, 15 bp, Homo sapiens
ttaaattaatacaag

SEQ ID NO: 939377 - DNA, 15 bp, Homo sapiens
gttaaattaatacaa

SEQ ID NO: 939378 - DNA, 15 bp, Homo sapiens
cgttaaattaataca

SEQ ID NO: 939379 - DNA, 15 bp, Homo sapiens
acgttaaattaatac

SEQ ID NO: 939380 - DNA, 15 bp, Homo sapiens
gacgttaaattaata

SEQ ID NO: 939381 - DNA, 15 bp, Homo sapiens
agacgttaaattaat

SEQ ID NO: 939382 - DNA, 15 bp, Homo sapiens
aagacgttaaattaa

SEQ ID NO: 939383 - DNA, 15 bp, Homo sapiens
taagacgttaaatta

SEQ ID NO: 939384 - DNA, 15 bp, Homo sapiens
ctaagacgttaaatt

SEQ ID NO: 939385 - DNA, 15 bp, Homo sapiens
actaagacgttaaat

SEQ ID NO: 939386 - DNA, 15 bp, Homo sapiens
aactaagacgttaaa

SEQ ID NO: 939387 - DNA, 15 bp, Homo sapiens
gaactaagacgttaa

SEQ ID NO: 939388 - DNA, 15 bp, Homo sapiens
tgaactaagacgtta

SEQ ID NO: 939389 - DNA, 15 bp, Homo sapiens
ttgaactaagacgtt

SEQ ID NO: 939390 - DNA, 15 bp, Homo sapiens
tttgaactaagacgt

SEQ ID NO: 939391 - DNA, 15 bp, Homo sapiens
ttttgaactaagacg

SEQ ID NO: 939392 - DNA, 15 bp, Homo sapiens
attttgaactaagac

SEQ ID NO: 939393 - DNA, 15 bp, Homo sapiens
gattttgaactaaga

SEQ ID NO: 939394 - DNA, 15 bp, Homo sapiens
agattttgaactaag

SEQ ID NO: 939395 - DNA, 15 bp, Homo sapiens
aagattttgaactaa

SEQ ID NO: 939396 - DNA, 15 bp, Homo sapiens
gaagattttgaacta

SEQ ID NO: 939397 - DNA, 15 bp, Homo sapiens
ggaagattttgaact

SEQ ID NO: 939398 - DNA, 15 bp, Homo sapiens
aggaagattttgaac

SEQ ID NO: 939399 - DNA, 15 bp, Homo sapiens
aaggaagattttgaa

SEQ ID NO: 939400 - DNA, 15 bp, Homo sapiens
caaggaagattttga

SEQ ID NO: 939401 - DNA, 15 bp, Homo sapiens
acaaggaagattttg

SEQ ID NO: 939402 - DNA, 15 bp, Homo sapiens
aacaaggaagatttt

SEQ ID NO: 939403 - DNA, 15 bp, Homo sapiens
taacaaggaagattt

SEQ ID NO: 939404 - DNA, 15 bp, Homo sapiens
ttaacaaggaagatt

SEQ ID NO: 939405 - DNA, 15 bp, Homo sapiens
attaacaaggaagat

SEQ ID NO: 939406 - DNA, 15 bp, Homo sapiens
tattaacaaggaaga

SEQ ID NO: 939407 - DNA, 15 bp, Homo sapiens
atattaacaaggaag

SEQ ID NO: 939408 - DNA, 15 bp, Homo sapiens
tatattaacaaggaa

SEQ ID NO: 939409 - DNA, 15 bp, Homo sapiens
ctatattaacaagga

SEQ ID NO: 939410 - DNA, 15 bp, Homo sapiens
tctatattaacaagg

SEQ ID NO: 939411 - DNA, 15 bp, Homo sapiens
ctctatattaacaag

SEQ ID NO: 939412 - DNA, 15 bp, Homo sapiens
tctctatattaacaa

SEQ ID NO: 939413 - DNA, 15 bp, Homo sapiens
gtctctatattaaca

SEQ ID NO: 939414 - DNA, 15 bp, Homo sapiens
ggtctctatattaac

SEQ ID NO: 939415 - DNA, 15 bp, Homo sapiens
gggtctctatattaa

SEQ ID NO: 939416 - DNA, 15 bp, Homo sapiens
agggtctctatatta

SEQ ID NO: 939417 - DNA, 15 bp, Homo sapiens
tagggtctctatatt

SEQ ID NO: 939418 - DNA, 15 bp, Homo sapiens
atagggtctctatat

SEQ ID NO: 939419 - DNA, 15 bp, Homo sapiens
aatagggtctctata

SEQ ID NO: 939420 - DNA, 15 bp, Homo sapiens
taatagggtctctat

SEQ ID NO: 939421 - DNA, 15 bp, Homo sapiens
ataatagggtctcta

SEQ ID NO: 939422 - DNA, 15 bp, Homo sapiens
aataatagggtctct

SEQ ID NO: 939423 - DNA, 15 bp, Homo sapiens
aaataatagggtctc

SEQ ID NO: 939424 - DNA, 15 bp, Homo sapiens
caaataatagggtct

SEQ ID NO: 939425 - DNA, 15 bp, Homo sapiens
ccaaataatagggtc

SEQ ID NO: 939426 - DNA, 15 bp, Homo sapiens
accaaataatagggt

SEQ ID NO: 939427 - DNA, 15 bp, Homo sapiens
aaccaaataataggg

SEQ ID NO: 939428 - DNA, 15 bp, Homo sapiens
aaaccaaataatagg

SEQ ID NO: 939429 - DNA, 15 bp, Homo sapiens
caaaccaaataatag

SEQ ID NO: 939430 - DNA, 15 bp, Homo sapiens
ccaaaccaaataata

SEQ ID NO: 939431 - DNA, 15 bp, Homo sapiens
gccaaaccaaataat

SEQ ID NO: 939432 - DNA, 15 bp, Homo sapiens
tgccaaaccaaataa

SEQ ID NO: 939433 - DNA, 15 bp, Homo sapiens
ttgccaaaccaaata

SEQ ID NO: 939434 - DNA, 15 bp, Homo sapiens
attgccaaaccaaat

SEQ ID NO: 939435 - DNA, 15 bp, Homo sapiens
tattgccaaaccaaa

SEQ ID NO: 939436 - DNA, 15 bp, Homo sapiens
gtattgccaaaccaa

SEQ ID NO: 939437 - DNA, 15 bp, Homo sapiens
tgtattgccaaacca

SEQ ID NO: 939438 - DNA, 15 bp, Homo sapiens
ctgtattgccaaacc

SEQ ID NO: 939439 - DNA, 15 bp, Homo sapiens
actgtattgccaaac

SEQ ID NO: 939440 - DNA, 15 bp, Homo sapiens
aactgtattgccaaa

SEQ ID NO: 939441 - DNA, 15 bp, Homo sapiens
caactgtattgccaa

SEQ ID NO: 939442 - DNA, 15 bp, Homo sapiens
tcaactgtattgcca

SEQ ID NO: 939443 - DNA, 15 bp, Homo sapiens
ttcaactgtattgcc

SEQ ID NO: 939444 - DNA, 15 bp, Homo sapiens
cttcaactgtattgc

SEQ ID NO: 939445 - DNA, 15 bp, Homo sapiens
tcttcaactgtattg

SEQ ID NO: 939446 - DNA, 15 bp, Homo sapiens
ctcttcaactgtatt

SEQ ID NO: 939447 - DNA, 15 bp, Homo sapiens
tctcttcaactgtat

SEQ ID NO: 939448 - DNA, 15 bp, Homo sapiens
atctcttcaactgta

SEQ ID NO: 939449 - DNA, 15 bp, Homo sapiens
aatctcttcaactgt

SEQ ID NO: 939450 - DNA, 15 bp, Homo sapiens
caatctcttcaactg

SEQ ID NO: 939451 - DNA, 15 bp, Homo sapiens
tcaatctcttcaact

SEQ ID NO: 939452 - DNA, 15 bp, Homo sapiens
atcaatctcttcaac

SEQ ID NO: 939453 - DNA, 15 bp, Homo sapiens
catcaatctcttcaa

SEQ ID NO: 939454 - DNA, 15 bp, Homo sapiens
ccatcaatctcttca

SEQ ID NO: 939455 - DNA, 15 bp, Homo sapiens
accatcaatctcttc

SEQ ID NO: 939456 - DNA, 15 bp, Homo sapiens
aaccatcaatctctt

SEQ ID NO: 939457 - DNA, 15 bp, Homo sapiens
gaaccatcaatctct

SEQ ID NO: 939458 - DNA, 15 bp, Homo sapiens
agaaccatcaatctc

SEQ ID NO: 939459 - DNA, 15 bp, Homo sapiens
aagaaccatcaatct

SEQ ID NO: 939460 - DNA, 15 bp, Homo sapiens
taagaaccatcaatc

SEQ ID NO: 939461 - DNA, 15 bp, Homo sapiens
ataagaaccatcaat

SEQ ID NO: 939462 - DNA, 15 bp, Homo sapiens
cataagaaccatcaa

SEQ ID NO: 939463 - DNA, 15 bp, Homo sapiens
tcataagaaccatca

SEQ ID NO: 939464 - DNA, 15 bp, Homo sapiens
ttcataagaaccatc

SEQ ID NO: 939465 - DNA, 15 bp, Homo sapiens
attcataagaaccat

SEQ ID NO: 939466 - DNA, 15 bp, Homo sapiens
aattcataagaacca

SEQ ID NO: 939467 - DNA, 15 bp, Homo sapiens
caattcataagaacc

SEQ ID NO: 939468 - DNA, 15 bp, Homo sapiens
acaattcataagaac

SEQ ID NO: 939469 - DNA, 15 bp, Homo sapiens
aacaattcataagaa

SEQ ID NO: 939470 - DNA, 15 bp, Homo sapiens
aaacaattcataaga

SEQ ID NO: 939471 - DNA, 15 bp, Homo sapiens
caaacaattcataag

SEQ ID NO: 939472 - DNA, 15 bp, Homo sapiens
gcaaacaattcataa

SEQ ID NO: 939473 - DNA, 15 bp, Homo sapiens
ggcaaacaattcata

SEQ ID NO: 939474 - DNA, 15 bp, Homo sapiens
aggcaaacaattcat

SEQ ID NO: 939475 - DNA, 15 bp, Homo sapiens
aaggcaaacaattca

SEQ ID NO: 939476 - DNA, 15 bp, Homo sapiens
aaaggcaaacaattc

SEQ ID NO: 939477 - DNA, 15 bp, Homo sapiens
aaaaggcaaacaatt

SEQ ID NO: 939478 - DNA, 15 bp, Homo sapiens
gaaaaggcaaacaat

SEQ ID NO: 939479 - DNA, 15 bp, Homo sapiens
agaaaaggcaaacaa

SEQ ID NO: 939480 - DNA, 15 bp, Homo sapiens
aagaaaaggcaaaca

SEQ ID NO: 939481 - DNA, 15 bp, Homo sapiens
aaagaaaaggcaaac

SEQ ID NO: 939482 - DNA, 15 bp, Homo sapiens
aaaagaaaaggcaaa

SEQ ID NO: 939483 - DNA, 15 bp, Homo sapiens
gaaaagaaaaggcaa

SEQ ID NO: 939484 - DNA, 15 bp, Homo sapiens
tgaaaagaaaaggca

SEQ ID NO: 939485 - DNA, 15 bp, Homo sapiens
ttgaaaagaaaaggc

SEQ ID NO: 939486 - DNA, 15 bp, Homo sapiens
attgaaaagaaaagg

SEQ ID NO: 939487 - DNA, 15 bp, Homo sapiens
cattgaaaagaaaag

SEQ ID NO: 939488 - DNA, 15 bp, Homo sapiens
ccattgaaaagaaaa

SEQ ID NO: 939489 - DNA, 15 bp, Homo sapiens
gccattgaaaagaaa

SEQ ID NO: 939490 - DNA, 15 bp, Homo sapiens
agccattgaaaagaa

SEQ ID NO: 939491 - DNA, 15 bp, Homo sapiens
cagccattgaaaaga

SEQ ID NO: 939492 - DNA, 15 bp, Homo sapiens
acagccattgaaaag

SEQ ID NO: 939493 - DNA, 15 bp, Homo sapiens
tacagccattgaaaa

SEQ ID NO: 939494 - DNA, 15 bp, Homo sapiens
ctacagccattgaaa

SEQ ID NO: 939495 - DNA, 15 bp, Homo sapiens
gctacagccattgaa

SEQ ID NO: 939496 - DNA, 15 bp, Homo sapiens
agctacagccattga

SEQ ID NO: 939497 - DNA, 15 bp, Homo sapiens
tagctacagccattg

SEQ ID NO: 939498 - DNA, 15 bp, Homo sapiens
atagctacagccatt

SEQ ID NO: 939499 - DNA, 15 bp, Homo sapiens
catagctacagccat

SEQ ID NO: 939500 - DNA, 15 bp, Homo sapiens
acatagctacagcca

SEQ ID NO: 939501 - DNA, 15 bp, Homo sapiens
aacatagctacagcc

SEQ ID NO: 939502 - DNA, 15 bp, Homo sapiens
taacatagctacagc

SEQ ID NO: 939503 - DNA, 15 bp, Homo sapiens
ttaacatagctacag

SEQ ID NO: 939504 - DNA, 15 bp, Homo sapiens
tttaacatagctaca

SEQ ID NO: 939505 - DNA, 15 bp, Homo sapiens
atttaacatagctac

SEQ ID NO: 939506 - DNA, 15 bp, Homo sapiens
aatttaacatagcta

SEQ ID NO: 939507 - DNA, 15 bp, Homo sapiens
taatttaacatagct

SEQ ID NO: 939508 - DNA, 15 bp, Homo sapiens
ataatttaacatagc

SEQ ID NO: 939509 - DNA, 15 bp, Homo sapiens
aataatttaacatag

SEQ ID NO: 939510 - DNA, 15 bp, Homo sapiens
taataatttaacata

SEQ ID NO: 939511 - DNA, 15 bp, Homo sapiens
gtaataatttaacat

SEQ ID NO: 939512 - DNA, 15 bp, Homo sapiens
tgtaataatttaaca

SEQ ID NO: 939513 - DNA, 15 bp, Homo sapiens
atgtaataatttaac

SEQ ID NO: 939514 - DNA, 15 bp, Homo sapiens
catgtaataatttaa

SEQ ID NO: 939515 - DNA, 15 bp, Homo sapiens
acatgtaataattta

SEQ ID NO: 939516 - DNA, 15 bp, Homo sapiens
aacatgtaataattt

SEQ ID NO: 939517 - DNA, 15 bp, Homo sapiens
aaacatgtaataatt

SEQ ID NO: 939518 - DNA, 15 bp, Homo sapiens
caaacatgtaataat

SEQ ID NO: 939519 - DNA, 15 bp, Homo sapiens
gcaaacatgtaataa

SEQ ID NO: 939520 - DNA, 15 bp, Homo sapiens
agcaaacatgtaata

SEQ ID NO: 939521 - DNA, 15 bp, Homo sapiens
aagcaaacatgtaat

SEQ ID NO: 939522 - DNA, 15 bp, Homo sapiens
caagcaaacatgtaa

SEQ ID NO: 939523 - DNA, 15 bp, Homo sapiens
acaagcaaacatgta

SEQ ID NO: 939524 - DNA, 15 bp, Homo sapiens
aacaagcaaacatgt

SEQ ID NO: 939525 - DNA, 15 bp, Homo sapiens
taacaagcaaacatg

SEQ ID NO: 939526 - DNA, 15 bp, Homo sapiens
ataacaagcaaacat

SEQ ID NO: 939527 - DNA, 15 bp, Homo sapiens
gataacaagcaaaca

SEQ ID NO: 939528 - DNA, 15 bp, Homo sapiens
agataacaagcaaac

SEQ ID NO: 939529 - DNA, 15 bp, Homo sapiens
aagataacaagcaaa

SEQ ID NO: 939530 - DNA, 15 bp, Homo sapiens
aaagataacaagcaa

SEQ ID NO: 939531 - DNA, 15 bp, Homo sapiens
gaaagataacaagca

SEQ ID NO: 939532 - DNA, 15 bp, Homo sapiens
tgaaagataacaagc

SEQ ID NO: 939533 - DNA, 15 bp, Homo sapiens
ctgaaagataacaag

SEQ ID NO: 939534 - DNA, 15 bp, Homo sapiens
tctgaaagataacaa

SEQ ID NO: 939535 - DNA, 15 bp, Homo sapiens
ttctgaaagataaca

SEQ ID NO: 939536 - DNA, 15 bp, Homo sapiens
attctgaaagataac

SEQ ID NO: 939537 - DNA, 15 bp, Homo sapiens
gattctgaaagataa

SEQ ID NO: 939538 - DNA, 15 bp, Homo sapiens
tgattctgaaagata

SEQ ID NO: 939539 - DNA, 15 bp, Homo sapiens
ttgattctgaaagat

SEQ ID NO: 939540 - DNA, 15 bp, Homo sapiens
cttgattctgaaaga

SEQ ID NO: 939541 - DNA, 15 bp, Homo sapiens
acttgattctgaaag

SEQ ID NO: 939542 - DNA, 15 bp, Homo sapiens
gacttgattctgaaa

SEQ ID NO: 939543 - DNA, 15 bp, Homo sapiens
tgacttgattctgaa

SEQ ID NO: 939544 - DNA, 15 bp, Homo sapiens
ctgacttgattctga

SEQ ID NO: 939545 - DNA, 15 bp, Homo sapiens
tctgacttgattctg

SEQ ID NO: 939546 - DNA, 15 bp, Homo sapiens
ctctgacttgattct

SEQ ID NO: 939547 - DNA, 15 bp, Homo sapiens
tctctgacttgattc

SEQ ID NO: 939548 - DNA, 15 bp, Homo sapiens
atctctgacttgatt

SEQ ID NO: 939549 - DNA, 15 bp, Homo sapiens
aatctctgacttgat

SEQ ID NO: 939550 - DNA, 15 bp, Homo sapiens
tcaaatctctgactt

SEQ ID NO: 939551 - DNA, 15 bp, Homo sapiens
ttcaaatctctgact

SEQ ID NO: 939552 - DNA, 15 bp, Homo sapiens
cttcaaatctctgac

SEQ ID NO: 939553 - DNA, 15 bp, Homo sapiens
ccttcaaatctctga

SEQ ID NO: 939554 - DNA, 15 bp, Homo sapiens
tccttcaaatctctg

SEQ ID NO: 939555 - DNA, 15 bp, Homo sapiens
ttccttcaaatctct

SEQ ID NO: 939556 - DNA, 15 bp, Homo sapiens
tttccttcaaatctc

SEQ ID NO: 939557 - DNA, 15 bp, Homo sapiens
atttccttcaaatct

SEQ ID NO: 939558 - DNA, 15 bp, Homo sapiens
catttccttcaaatc

SEQ ID NO: 939559 - DNA, 15 bp, Homo sapiens
acatttccttcaaat

SEQ ID NO: 939560 - DNA, 15 bp, Homo sapiens
cacatttccttcaaa

SEQ ID NO: 939561 - DNA, 15 bp, Homo sapiens
acacatttccttcaa

SEQ ID NO: 939562 - DNA, 15 bp, Homo sapiens
cacacatttccttca

SEQ ID NO: 939563 - DNA, 15 bp, Homo sapiens
tcacacatttccttc

SEQ ID NO: 939564 - DNA, 15 bp, Homo sapiens
ttcacacatttcctt

SEQ ID NO: 939565 - DNA, 15 bp, Homo sapiens
attcacacatttcct

SEQ ID NO: 939566 - DNA, 15 bp, Homo sapiens
aattcacacatttcc

SEQ ID NO: 939567 - DNA, 15 bp, Homo sapiens
aaattcacacatttc

SEQ ID NO: 939568 - DNA, 15 bp, Homo sapiens
gaaattcacacattt

SEQ ID NO: 939569 - DNA, 15 bp, Homo sapiens
agaaattcacacatt

SEQ ID NO: 939570 - DNA, 15 bp, Homo sapiens
aagaaattcacacat

SEQ ID NO: 939571 - DNA, 15 bp, Homo sapiens
taagaaattcacaca

SEQ ID NO: 939572 - DNA, 15 bp, Homo sapiens
ttaagaaattcacac

SEQ ID NO: 939573 - DNA, 15 bp, Homo sapiens
cttaagaaattcaca

SEQ ID NO: 939574 - DNA, 15 bp, Homo sapiens
tcttaagaaattcac

SEQ ID NO: 939575 - DNA, 15 bp, Homo sapiens
ttcttaagaaattca

SEQ ID NO: 939576 - DNA, 15 bp, Homo sapiens
tttcttaagaaattc

SEQ ID NO: 939577 - DNA, 15 bp, Homo sapiens
ctttcttaagaaatt

SEQ ID NO: 939578 - DNA, 15 bp, Homo sapiens
tctttcttaagaaat

SEQ ID NO: 939579 - DNA, 15 bp, Homo sapiens
ttctttcttaagaaa

SEQ ID NO: 939580 - DNA, 15 bp, Homo sapiens
tttctttcttaagaa

SEQ ID NO: 939581 - DNA, 15 bp, Homo sapiens
ttttctttcttaaga

SEQ ID NO: 939582 - DNA, 15 bp, Homo sapiens
tttttctttcttaag

SEQ ID NO: 939583 - DNA, 15 bp, Homo sapiens
ctttttctttcttaa

SEQ ID NO: 939584 - DNA, 15 bp, Homo sapiens
gctttttctttctta

SEQ ID NO: 939585 - DNA, 15 bp, Homo sapiens
tgctttttctttctt

SEQ ID NO: 939586 - DNA, 15 bp, Homo sapiens
ctgctttttctttct

SEQ ID NO: 939587 - DNA, 15 bp, Homo sapiens
tctgctttttctttc

SEQ ID NO: 939588 - DNA, 15 bp, Homo sapiens
ttctgctttttcttt

SEQ ID NO: 939589 - DNA, 15 bp, Homo sapiens
cttctgctttttctt

SEQ ID NO: 939590 - DNA, 15 bp, Homo sapiens
acttctgctttttct

SEQ ID NO: 939591 - DNA, 15 bp, Homo sapiens
aacttctgctttttc

SEQ ID NO: 939592 - DNA, 15 bp, Homo sapiens
gaacttctgcttttt

SEQ ID NO: 939593 - DNA, 15 bp, Homo sapiens
tgaacttctgctttt

SEQ ID NO: 939594 - DNA, 15 bp, Homo sapiens
ctgaacttctgcttt

SEQ ID NO: 939595 - DNA, 15 bp, Homo sapiens
gctgaacttctgctt

SEQ ID NO: 939596 - DNA, 15 bp, Homo sapiens
cgctgaacttctgct

SEQ ID NO: 939597 - DNA, 15 bp, Homo sapiens
ccgctgaacttctgc

SEQ ID NO: 939598 - DNA, 15 bp, Homo sapiens
tccgctgaacttctg

SEQ ID NO: 939599 - DNA, 15 bp, Homo sapiens
ttccgctgaacttct

SEQ ID NO: 939600 - DNA, 15 bp, Homo sapiens
tttccgctgaacttc

SEQ ID NO: 939601 - DNA, 15 bp, Homo sapiens
gtttccgctgaactt

SEQ ID NO: 939602 - DNA, 15 bp, Homo sapiens
agtttccgctgaact

SEQ ID NO: 939603 - DNA, 15 bp, Homo sapiens
aagtttccgctgaac

SEQ ID NO: 939604 - DNA, 15 bp, Homo sapiens
caagtttccgctgaa

SEQ ID NO: 939605 - DNA, 15 bp, Homo sapiens
ccaagtttccgctga

SEQ ID NO: 939606 - DNA, 15 bp, Homo sapiens
gccaagtttccgctg

SEQ ID NO: 939607 - DNA, 15 bp, Homo sapiens
ggccaagtttccgct

SEQ ID NO: 939608 - DNA, 15 bp, Homo sapiens
tggccaagtttccgc

SEQ ID NO: 939609 - DNA, 15 bp, Homo sapiens
atggccaagtttccg

SEQ ID NO: 939610 - DNA, 15 bp, Homo sapiens
catggccaagtttcc

SEQ ID NO: 939611 - DNA, 15 bp, Homo sapiens
acatggccaagtttc

SEQ ID NO: 939612 - DNA, 15 bp, Homo sapiens
aacatggccaagttt

SEQ ID NO: 939613 - DNA, 15 bp, Homo sapiens
taacatggccaagtt

SEQ ID NO: 939614 - DNA, 15 bp, Homo sapiens
ctaacatggccaagt

SEQ ID NO: 939615 - DNA, 15 bp, Homo sapiens
tctaacatggccaag

SEQ ID NO: 939616 - DNA, 15 bp, Homo sapiens
ctctaacatggccaa

SEQ ID NO: 939617 - DNA, 15 bp, Homo sapiens
cctctaacatggcca

SEQ ID NO: 939618 - DNA, 15 bp, Homo sapiens
ccctctaacatggcc

SEQ ID NO: 939619 - DNA, 15 bp, Homo sapiens
cccctctaacatggc

SEQ ID NO: 939620 - DNA, 15 bp, Homo sapiens
acccctctaacatgg

SEQ ID NO: 939621 - DNA, 15 bp, Homo sapiens
tacccctctaacatg

SEQ ID NO: 939622 - DNA, 15 bp, Homo sapiens
atacccctctaacat

SEQ ID NO: 939623 - DNA, 15 bp, Homo sapiens
catacccctctaaca

SEQ ID NO: 939624 - DNA, 15 bp, Homo sapiens
acatacccctctaac

SEQ ID NO: 939625 - DNA, 15 bp, Homo sapiens
cacatacccctctaa

SEQ ID NO: 939626 - DNA, 15 bp, Homo sapiens
tcacatacccctcta

SEQ ID NO: 939627 - DNA, 15 bp, Homo sapiens
ctcacatacccctct

SEQ ID NO: 939628 - DNA, 15 bp, Homo sapiens
tctcacatacccctc

SEQ ID NO: 939629 - DNA, 15 bp, Homo sapiens
ttctcacatacccct

SEQ ID NO: 939630 - DNA, 15 bp, Homo sapiens
attctcacatacccc

SEQ ID NO: 939631 - DNA, 15 bp, Homo sapiens
aattctcacataccc

SEQ ID NO: 939632 - DNA, 15 bp, Homo sapiens
aaattctcacatacc

SEQ ID NO: 939633 - DNA, 15 bp, Homo sapiens
taaattctcacatac

SEQ ID NO: 939634 - DNA, 15 bp, Homo sapiens
gtaaattctcacata

SEQ ID NO: 939635 - DNA, 15 bp, Homo sapiens
ggtaaattctcacat

SEQ ID NO: 939636 - DNA, 15 bp, Homo sapiens
tggtaaattctcaca

SEQ ID NO: 939637 - DNA, 15 bp, Homo sapiens
atggtaaattctcac

SEQ ID NO: 939638 - DNA, 15 bp, Homo sapiens
tatggtaaattctca

SEQ ID NO: 939639 - DNA, 15 bp, Homo sapiens
gtatggtaaattctc

SEQ ID NO: 939640 - DNA, 15 bp, Homo sapiens
tgtatggtaaattct

SEQ ID NO: 939641 - DNA, 15 bp, Homo sapiens
atgtatggtaaattc

SEQ ID NO: 939642 - DNA, 15 bp, Homo sapiens
aatgtatggtaaatt

SEQ ID NO: 939643 - DNA, 15 bp, Homo sapiens
aaatgtatggtaaat

SEQ ID NO: 939644 - DNA, 15 bp, Homo sapiens
caaatgtatggtaaa

SEQ ID NO: 939645 - DNA, 15 bp, Homo sapiens
acaaatgtatggtaa

SEQ ID NO: 939646 - DNA, 15 bp, Homo sapiens
aacaaatgtatggta

SEQ ID NO: 939647 - DNA, 15 bp, Homo sapiens
aaacaaatgtatggt

SEQ ID NO: 939648 - DNA, 15 bp, Homo sapiens
aaaacaaatgtatgg

SEQ ID NO: 939649 - DNA, 15 bp, Homo sapiens
caaaacaaatgtatg

SEQ ID NO: 939650 - DNA, 15 bp, Homo sapiens
ccaaaacaaatgtat

SEQ ID NO: 939651 - DNA, 15 bp, Homo sapiens
accaaaacaaatgta

SEQ ID NO: 939652 - DNA, 15 bp, Homo sapiens
aaccaaaacaaatgt

SEQ ID NO: 939653 - DNA, 15 bp, Homo sapiens
aaaccaaaacaaatg

SEQ ID NO: 939654 - DNA, 15 bp, Homo sapiens
gaaaccaaaacaaat

SEQ ID NO: 939655 - DNA, 15 bp, Homo sapiens
tgaaaccaaaacaaa

SEQ ID NO: 939656 - DNA, 15 bp, Homo sapiens
ctgaaaccaaaacaa

SEQ ID NO: 939657 - DNA, 15 bp, Homo sapiens
gctgaaaccaaaaca

SEQ ID NO: 939658 - DNA, 15 bp, Homo sapiens
tgctgaaaccaaaac

SEQ ID NO: 939659 - DNA, 15 bp, Homo sapiens
ctgctgaaaccaaaa

SEQ ID NO: 939660 - DNA, 15 bp, Homo sapiens
actgctgaaaccaaa

SEQ ID NO: 939661 - DNA, 15 bp, Homo sapiens
cactgctgaaaccaa

SEQ ID NO: 939662 - DNA, 15 bp, Homo sapiens
tcactgctgaaacca

SEQ ID NO: 939663 - DNA, 15 bp, Homo sapiens
atcactgctgaaacc

SEQ ID NO: 939664 - DNA, 15 bp, Homo sapiens
tatcactgctgaaac

SEQ ID NO: 939665 - DNA, 15 bp, Homo sapiens
ttatcactgctgaaa

SEQ ID NO: 939666 - DNA, 15 bp, Homo sapiens
cttatcactgctgaa

SEQ ID NO: 939667 - DNA, 15 bp, Homo sapiens
gcttatcactgctga

SEQ ID NO: 939668 - DNA, 15 bp, Homo sapiens
ggcttatcactgctg

SEQ ID NO: 939669 - DNA, 15 bp, Homo sapiens
tggcttatcactgct

SEQ ID NO: 939670 - DNA, 15 bp, Homo sapiens
ctggcttatcactgc

SEQ ID NO: 939671 - DNA, 15 bp, Homo sapiens
tctggcttatcactg

SEQ ID NO: 939672 - DNA, 15 bp, Homo sapiens
ttctggcttatcact

SEQ ID NO: 939673 - DNA, 15 bp, Homo sapiens
tttctggcttatcac

SEQ ID NO: 939674 - DNA, 15 bp, Homo sapiens
atttctggcttatca

SEQ ID NO: 939675 - DNA, 15 bp, Homo sapiens
catttctggcttatc

SEQ ID NO: 939676 - DNA, 15 bp, Homo sapiens
tcatttctggcttat

SEQ ID NO: 939677 - DNA, 15 bp, Homo sapiens
ttcatttctggctta

SEQ ID NO: 939678 - DNA, 15 bp, Homo sapiens
tttcatttctggctt

SEQ ID NO: 939679 - DNA, 15 bp, Homo sapiens
ttttcatttctggct

SEQ ID NO: 939680 - DNA, 15 bp, Homo sapiens
cttttcatttctggc

SEQ ID NO: 939681 - DNA, 15 bp, Homo sapiens
acttttcatttctgg

SEQ ID NO: 939682 - DNA, 15 bp, Homo sapiens
aacttttcatttctg

SEQ ID NO: 939683 - DNA, 15 bp, Homo sapiens
aaacttttcatttct

SEQ ID NO: 939684 - DNA, 15 bp, Homo sapiens
taaacttttcatttc

SEQ ID NO: 939685 - DNA, 15 bp, Homo sapiens
ctaaacttttcattt

SEQ ID NO: 939686 - DNA, 15 bp, Homo sapiens
tctaaacttttcatt

SEQ ID NO: 939687 - DNA, 15 bp, Homo sapiens
atctaaacttttcat

SEQ ID NO: 939688 - DNA, 15 bp, Homo sapiens
tatctaaacttttca

SEQ ID NO: 939689 - DNA, 15 bp, Homo sapiens
atatctaaacttttc

SEQ ID NO: 939690 - DNA, 15 bp, Homo sapiens
catatctaaactttt

SEQ ID NO: 939691 - DNA, 15 bp, Homo sapiens
acatatctaaacttt

SEQ ID NO: 939692 - DNA, 15 bp, Homo sapiens
aacatatctaaactt

SEQ ID NO: 939693 - DNA, 15 bp, Homo sapiens
caacatatctaaact

SEQ ID NO: 939694 - DNA, 15 bp, Homo sapiens
acaacatatctaaac

SEQ ID NO: 939695 - DNA, 15 bp, Homo sapiens
tacaacatatctaaa

SEQ ID NO: 939696 - DNA, 15 bp, Homo sapiens
ttacaacatatctaa

SEQ ID NO: 939697 - DNA, 15 bp, Homo sapiens
tttacaacatatcta

SEQ ID NO: 939698 - DNA, 15 bp, Homo sapiens
ttttacaacatatct

SEQ ID NO: 939699 - DNA, 15 bp, Homo sapiens
cttttacaacatatc

SEQ ID NO: 939700 - DNA, 15 bp, Homo sapiens
acttttacaacatat

SEQ ID NO: 939701 - DNA, 15 bp, Homo sapiens
tacttttacaacata

SEQ ID NO: 939702 - DNA, 15 bp, Homo sapiens
gtacttttacaacat

SEQ ID NO: 939703 - DNA, 15 bp, Homo sapiens
agtacttttacaaca

SEQ ID NO: 939704 - DNA, 15 bp, Homo sapiens
cagtacttttacaac

SEQ ID NO: 939705 - DNA, 15 bp, Homo sapiens
tcagtacttttacaa

SEQ ID NO: 939706 - DNA, 15 bp, Homo sapiens
atcagtacttttaca

SEQ ID NO: 939707 - DNA, 15 bp, Homo sapiens
tatcagtacttttac

SEQ ID NO: 939708 - DNA, 15 bp, Homo sapiens
atatcagtactttta

SEQ ID NO: 939709 - DNA, 15 bp, Homo sapiens
catatcagtactttt

SEQ ID NO: 939710 - DNA, 15 bp, Homo sapiens
gcatatcagtacttt

SEQ ID NO: 939711 - DNA, 15 bp, Homo sapiens
ggcatatcagtactt

SEQ ID NO: 939712 - DNA, 15 bp, Homo sapiens
aggcatatcagtact

SEQ ID NO: 939713 - DNA, 15 bp, Homo sapiens
gaggcatatcagtac

SEQ ID NO: 939714 - DNA, 15 bp, Homo sapiens
agaggcatatcagta

SEQ ID NO: 939715 - DNA, 15 bp, Homo sapiens
tagaggcatatcagt

SEQ ID NO: 939716 - DNA, 15 bp, Homo sapiens
gtagaggcatatcag

SEQ ID NO: 939717 - DNA, 15 bp, Homo sapiens
tgtagaggcatatca

SEQ ID NO: 939718 - DNA, 15 bp, Homo sapiens
ttgtagaggcatatc

SEQ ID NO: 939719 - DNA, 15 bp, Homo sapiens
cttgtagaggcatat

SEQ ID NO: 939720 - DNA, 15 bp, Homo sapiens
acttgtagaggcata

SEQ ID NO: 939721 - DNA, 15 bp, Homo sapiens
cacttgtagaggcat

SEQ ID NO: 939722 - DNA, 15 bp, Homo sapiens
gcacttgtagaggca

SEQ ID NO: 939723 - DNA, 15 bp, Homo sapiens
ggcacttgtagaggc

SEQ ID NO: 939724 - DNA, 15 bp, Homo sapiens
gggcacttgtagagg

SEQ ID NO: 939725 - DNA, 15 bp, Homo sapiens
agggcacttgtagag

SEQ ID NO: 939726 - DNA, 15 bp, Homo sapiens
cagggcacttgtaga

SEQ ID NO: 939727 - DNA, 15 bp, Homo sapiens
acagggcacttgtag

SEQ ID NO: 939728 - DNA, 15 bp, Homo sapiens
tacagggcacttgta

SEQ ID NO: 939729 - DNA, 15 bp, Homo sapiens
ctacagggcacttgt

SEQ ID NO: 939730 - DNA, 15 bp, Homo sapiens
actacagggcacttg

SEQ ID NO: 939731 - DNA, 15 bp, Homo sapiens
aactacagggcactt

SEQ ID NO: 939732 - DNA, 15 bp, Homo sapiens
aaactacagggcact

SEQ ID NO: 939733 - DNA, 15 bp, Homo sapiens
gaaactacagggcac

SEQ ID NO: 939734 - DNA, 15 bp, Homo sapiens
tgaaactacagggca

SEQ ID NO: 939735 - DNA, 15 bp, Homo sapiens
ctgaaactacagggc

SEQ ID NO: 939736 - DNA, 15 bp, Homo sapiens
actgaaactacaggg

SEQ ID NO: 939737 - DNA, 15 bp, Homo sapiens
cactgaaactacagg

SEQ ID NO: 939738 - DNA, 15 bp, Homo sapiens
acactgaaactacag

SEQ ID NO: 939739 - DNA, 15 bp, Homo sapiens
aacactgaaactaca

SEQ ID NO: 939740 - DNA, 15 bp, Homo sapiens
aaacactgaaactac

SEQ ID NO: 939741 - DNA, 15 bp, Homo sapiens
taaacactgaaacta

SEQ ID NO: 939742 - DNA, 15 bp, Homo sapiens
ataaacactgaaact

SEQ ID NO: 939743 - DNA, 15 bp, Homo sapiens
aataaacactgaaac

SEQ ID NO: 939744 - DNA, 15 bp, Homo sapiens
gaataaacactgaaa

SEQ ID NO: 939745 - DNA, 15 bp, Homo sapiens
agaataaacactgaa

SEQ ID NO: 939746 - DNA, 15 bp, Homo sapiens
cagaataaacactga

SEQ ID NO: 939747 - DNA, 15 bp, Homo sapiens
gcagaataaacactg

SEQ ID NO: 939748 - DNA, 15 bp, Homo sapiens
tgcagaataaacact

SEQ ID NO: 939749 - DNA, 15 bp, Homo sapiens
atgcagaataaacac

SEQ ID NO: 939750 - DNA, 15 bp, Homo sapiens
gatgcagaataaaca

SEQ ID NO: 939751 - DNA, 15 bp, Homo sapiens
agatgcagaataaac

SEQ ID NO: 939752 - DNA, 15 bp, Homo sapiens
cagatgcagaataaa

SEQ ID NO: 939753 - DNA, 15 bp, Homo sapiens
acagatgcagaataa

SEQ ID NO: 939754 - DNA, 15 bp, Homo sapiens
tacagatgcagaata

SEQ ID NO: 939755 - DNA, 15 bp, Homo sapiens
ttacagatgcagaat

SEQ ID NO: 939756 - DNA, 15 bp, Homo sapiens
attacagatgcagaa

SEQ ID NO: 939757 - DNA, 15 bp, Homo sapiens
tattacagatgcaga

SEQ ID NO: 939758 - DNA, 15 bp, Homo sapiens
atattacagatgcag

SEQ ID NO: 939759 - DNA, 15 bp, Homo sapiens
tatattacagatgca

SEQ ID NO: 939760 - DNA, 15 bp, Homo sapiens
ttatattacagatgc

SEQ ID NO: 939761 - DNA, 15 bp, Homo sapiens
tttatattacagatg

SEQ ID NO: 939762 - DNA, 15 bp, Homo sapiens
ttttatattacagat

SEQ ID NO: 939763 - DNA, 15 bp, Homo sapiens
gttttatattacaga

SEQ ID NO: 939764 - DNA, 15 bp, Homo sapiens
tgttttatattacag

SEQ ID NO: 939765 - DNA, 15 bp, Homo sapiens
ctgttttatattaca

SEQ ID NO: 939766 - DNA, 15 bp, Homo sapiens
actgttttatattac

SEQ ID NO: 939767 - DNA, 15 bp, Homo sapiens
tactgttttatatta

SEQ ID NO: 939768 - DNA, 15 bp, Homo sapiens
ttactgttttatatt

SEQ ID NO: 939769 - DNA, 15 bp, Homo sapiens
cttactgttttatat

SEQ ID NO: 939770 - DNA, 15 bp, Homo sapiens
gcttactgttttata

SEQ ID NO: 939771 - DNA, 15 bp, Homo sapiens
tgcttactgttttat

SEQ ID NO: 939772 - DNA, 15 bp, Homo sapiens
atgcttactgtttta

SEQ ID NO: 939773 - DNA, 15 bp, Homo sapiens
aatgcttactgtttt

SEQ ID NO: 939774 - DNA, 15 bp, Homo sapiens
aaatgcttactgttt

SEQ ID NO: 939775 - DNA, 15 bp, Homo sapiens
gaaatgcttactgtt

SEQ ID NO: 939776 - DNA, 15 bp, Homo sapiens
agaaatgcttactgt

SEQ ID NO: 939777 - DNA, 15 bp, Homo sapiens
tagaaatgcttactg

SEQ ID NO: 939778 - DNA, 15 bp, Homo sapiens
atagaaatgcttact

SEQ ID NO: 939779 - DNA, 15 bp, Homo sapiens
catagaaatgcttac

SEQ ID NO: 939780 - DNA, 15 bp, Homo sapiens
acatagaaatgctta

SEQ ID NO: 939781 - DNA, 15 bp, Homo sapiens
cacatagaaatgctt

SEQ ID NO: 939782 - DNA, 15 bp, Homo sapiens
acacatagaaatgct

SEQ ID NO: 939783 - DNA, 15 bp, Homo sapiens
gacacatagaaatgc

SEQ ID NO: 939784 - DNA, 15 bp, Homo sapiens
agacacatagaaatg

SEQ ID NO: 939785 - DNA, 15 bp, Homo sapiens
gagacacatagaaat

SEQ ID NO: 939786 - DNA, 15 bp, Homo sapiens
tgagacacatagaaa

SEQ ID NO: 939787 - DNA, 15 bp, Homo sapiens
ttgagacacatagaa

SEQ ID NO: 939788 - DNA, 15 bp, Homo sapiens
tttgagacacataga

SEQ ID NO: 939789 - DNA, 15 bp, Homo sapiens
ctttgagacacatag

SEQ ID NO: 939790 - DNA, 15 bp, Homo sapiens
actttgagacacata

SEQ ID NO: 939791 - DNA, 15 bp, Homo sapiens
tactttgagacacat

SEQ ID NO: 939792 - DNA, 15 bp, Homo sapiens
atactttgagacaca

SEQ ID NO: 939793 - DNA, 15 bp, Homo sapiens
aatactttgagacac

SEQ ID NO: 939794 - DNA, 15 bp, Homo sapiens
aaatactttgagaca

SEQ ID NO: 939795 - DNA, 15 bp, Homo sapiens
aaaatactttgagac

SEQ ID NO: 939796 - DNA, 15 bp, Homo sapiens
taaaatactttgaga

SEQ ID NO: 939797 - DNA, 15 bp, Homo sapiens
ataaaatactttgag

SEQ ID NO: 939798 - DNA, 15 bp, Homo sapiens
gataaaatactttga

SEQ ID NO: 939799 - DNA, 15 bp, Homo sapiens
tgataaaatactttg

SEQ ID NO: 939800 - DNA, 15 bp, Homo sapiens
atgataaaatacttt

SEQ ID NO: 939801 - DNA, 15 bp, Homo sapiens
gatgataaaatactt

SEQ ID NO: 939802 - DNA, 15 bp, Homo sapiens
agatgataaaatact

SEQ ID NO: 939803 - DNA, 15 bp, Homo sapiens
cagatgataaaatac

SEQ ID NO: 939804 - DNA, 15 bp, Homo sapiens
acagatgataaaata

SEQ ID NO: 939805 - DNA, 15 bp, Homo sapiens
aacagatgataaaat

SEQ ID NO: 939806 - DNA, 15 bp, Homo sapiens
taacagatgataaaa

SEQ ID NO: 939807 - DNA, 15 bp, Homo sapiens
ataacagatgataaa

SEQ ID NO: 939808 - DNA, 15 bp, Homo sapiens
tataacagatgataa

SEQ ID NO: 939809 - DNA, 15 bp, Homo sapiens
gtataacagatgata

SEQ ID NO: 939810 - DNA, 15 bp, Homo sapiens
ggtataacagatgat

SEQ ID NO: 939811 - DNA, 15 bp, Homo sapiens
aggtataacagatga

SEQ ID NO: 939812 - DNA, 15 bp, Homo sapiens
aaggtataacagatg

SEQ ID NO: 939813 - DNA, 15 bp, Homo sapiens
taaggtataacagat

SEQ ID NO: 939814 - DNA, 15 bp, Homo sapiens
gtaaggtataacaga

SEQ ID NO: 939815 - DNA, 15 bp, Homo sapiens
tgtaaggtataacag

SEQ ID NO: 939816 - DNA, 15 bp, Homo sapiens
atgtaaggtataaca

SEQ ID NO: 939817 - DNA, 15 bp, Homo sapiens
tatgtaaggtataac

SEQ ID NO: 939818 - DNA, 15 bp, Homo sapiens
gtatgtaaggtataa

SEQ ID NO: 939819 - DNA, 15 bp, Homo sapiens
agtatgtaaggtata

SEQ ID NO: 939820 - DNA, 15 bp, Homo sapiens
aagtatgtaaggtat

SEQ ID NO: 939821 - DNA, 15 bp, Homo sapiens
aaagtatgtaaggta

SEQ ID NO: 939822 - DNA, 15 bp, Homo sapiens
gaaagtatgtaaggt

SEQ ID NO: 939823 - DNA, 15 bp, Homo sapiens
tgaaagtatgtaagg

SEQ ID NO: 939824 - DNA, 15 bp, Homo sapiens
atgaaagtatgtaag

SEQ ID NO: 939825 - DNA, 15 bp, Homo sapiens
gatgaaagtatgtaa

SEQ ID NO: 939826 - DNA, 15 bp, Homo sapiens
agatgaaagtatgta

SEQ ID NO: 939827 - DNA, 15 bp, Homo sapiens
gagatgaaagtatgt

SEQ ID NO: 939828 - DNA, 15 bp, Homo sapiens
agagatgaaagtatg

SEQ ID NO: 939829 - DNA, 15 bp, Homo sapiens
gagagatgaaagtat

SEQ ID NO: 939830 - DNA, 15 bp, Homo sapiens
agagagatgaaagta

SEQ ID NO: 939831 - DNA, 15 bp, Homo sapiens
aagagagatgaaagt

SEQ ID NO: 939832 - DNA, 15 bp, Homo sapiens
aaagagagatgaaag

SEQ ID NO: 939833 - DNA, 15 bp, Homo sapiens
aaaagagagatgaaa

SEQ ID NO: 939834 - DNA, 15 bp, Homo sapiens
aaaaagagagatgaa

SEQ ID NO: 939835 - DNA, 15 bp, Homo sapiens
taaaaagagagatga

SEQ ID NO: 939836 - DNA, 15 bp, Homo sapiens
ataaaaagagagatg

SEQ ID NO: 939837 - DNA, 15 bp, Homo sapiens
aataaaaagagagat

SEQ ID NO: 939838 - DNA, 15 bp, Homo sapiens
caataaaaagagaga

SEQ ID NO: 939839 - DNA, 15 bp, Homo sapiens
tcaataaaaagagag

SEQ ID NO: 939840 - DNA, 15 bp, Homo sapiens
ttcaataaaaagaga

SEQ ID NO: 939841 - DNA, 15 bp, Homo sapiens
attcaataaaaagag

SEQ ID NO: 939842 - DNA, 15 bp, Homo sapiens
tattcaataaaaaga

SEQ ID NO: 939843 - DNA, 15 bp, Homo sapiens
atattcaataaaaag

SEQ ID NO: 939844 - DNA, 15 bp, Homo sapiens
catattcaataaaaa

SEQ ID NO: 939845 - DNA, 15 bp, Homo sapiens
gcatattcaataaaa

SEQ ID NO: 939846 - DNA, 15 bp, Homo sapiens
ggcatattcaataaa

SEQ ID NO: 939847 - DNA, 15 bp, Homo sapiens
aggcatattcaataa

SEQ ID NO: 939848 - DNA, 15 bp, Homo sapiens
gaggcatattcaata

SEQ ID NO: 939849 - DNA, 15 bp, Homo sapiens
ggaggcatattcaat

SEQ ID NO: 939850 - DNA, 15 bp, Homo sapiens
tggaggcatattcaa

SEQ ID NO: 939851 - DNA, 15 bp, Homo sapiens
atggaggcatattca

SEQ ID NO: 939852 - DNA, 15 bp, Homo sapiens
tatggaggcatattc

SEQ ID NO: 939853 - DNA, 15 bp, Homo sapiens
gtatggaggcatatt

SEQ ID NO: 939854 - DNA, 15 bp, Homo sapiens
ggtatggaggcatat

SEQ ID NO: 939855 - DNA, 15 bp, Homo sapiens
aggtatggaggcata

SEQ ID NO: 939856 - DNA, 15 bp, Homo sapiens
aaggtatggaggcat

SEQ ID NO: 939857 - DNA, 15 bp, Homo sapiens
caaggtatggaggca

SEQ ID NO: 939858 - DNA, 15 bp, Homo sapiens
tcaaggtatggaggc

SEQ ID NO: 939859 - DNA, 15 bp, Homo sapiens
ttcaaggtatggagg

SEQ ID NO: 939860 - DNA, 15 bp, Homo sapiens
tttcaaggtatggag

SEQ ID NO: 939861 - DNA, 15 bp, Homo sapiens
ttttcaaggtatgga

SEQ ID NO: 939862 - DNA, 15 bp, Homo sapiens
gttttcaaggtatgg

SEQ ID NO: 939863 - DNA, 15 bp, Homo sapiens
tgttttcaaggtatg

SEQ ID NO: 939864 - DNA, 15 bp, Homo sapiens
atgttttcaaggtat

SEQ ID NO: 939865 - DNA, 15 bp, Homo sapiens
aatgttttcaaggta

SEQ ID NO: 939866 - DNA, 15 bp, Homo sapiens
aaatgttttcaaggt

SEQ ID NO: 939867 - DNA, 15 bp, Homo sapiens
taaatgttttcaagg

SEQ ID NO: 939868 - DNA, 15 bp, Homo sapiens
ttaaatgttttcaag

SEQ ID NO: 939869 - DNA, 15 bp, Homo sapiens
gttaaatgttttcaa

SEQ ID NO: 939870 - DNA, 15 bp, Homo sapiens
agttaaatgttttca

SEQ ID NO: 939871 - DNA, 15 bp, Homo sapiens
aagttaaatgttttc

SEQ ID NO: 939872 - DNA, 15 bp, Homo sapiens
gaagttaaatgtttt

SEQ ID NO: 939873 - DNA, 15 bp, Homo sapiens
ggaagttaaatgttt

SEQ ID NO: 939874 - DNA, 15 bp, Homo sapiens
tggaagttaaatgtt

SEQ ID NO: 939875 - DNA, 15 bp, Homo sapiens
ctggaagttaaatgt

SEQ ID NO: 939876 - DNA, 15 bp, Homo sapiens
cctggaagttaaatg

SEQ ID NO: 939877 - DNA, 15 bp, Homo sapiens
tcctggaagttaaat

SEQ ID NO: 939878 - DNA, 15 bp, Homo sapiens
ttcctggaagttaaa

SEQ ID NO: 939879 - DNA, 15 bp, Homo sapiens
attcctggaagttaa

SEQ ID NO: 939880 - DNA, 15 bp, Homo sapiens
gattcctggaagtta

SEQ ID NO: 939881 - DNA, 15 bp, Homo sapiens
ggattcctggaagtt

SEQ ID NO: 939882 - DNA, 15 bp, Homo sapiens
aggattcctggaagt

SEQ ID NO: 939883 - DNA, 15 bp, Homo sapiens
aaggattcctggaag

SEQ ID NO: 939884 - DNA, 15 bp, Homo sapiens
aaaggattcctggaa

SEQ ID NO: 939885 - DNA, 15 bp, Homo sapiens
aaaaggattcctgga

SEQ ID NO: 939886 - DNA, 15 bp, Homo sapiens
caaaaggattcctgg

SEQ ID NO: 939887 - DNA, 15 bp, Homo sapiens
acaaaaggattcctg

SEQ ID NO: 939888 - DNA, 15 bp, Homo sapiens
aacaaaaggattcct

SEQ ID NO: 939889 - DNA, 15 bp, Homo sapiens
aaacaaaaggattcc

SEQ ID NO: 939890 - DNA, 15 bp, Homo sapiens
taaacaaaaggattc

SEQ ID NO: 939891 - DNA, 15 bp, Homo sapiens
ataaacaaaaggatt

SEQ ID NO: 939892 - DNA, 15 bp, Homo sapiens
cataaacaaaaggat

SEQ ID NO: 939893 - DNA, 15 bp, Homo sapiens
ccataaacaaaagga

SEQ ID NO: 939894 - DNA, 15 bp, Homo sapiens
tccataaacaaaagg

SEQ ID NO: 939895 - DNA, 15 bp, Homo sapiens
ctccataaacaaaag

SEQ ID NO: 939896 - DNA, 15 bp, Homo sapiens
cctccataaacaaaa

SEQ ID NO: 939897 - DNA, 15 bp, Homo sapiens
acctccataaacaaa

SEQ ID NO: 939898 - DNA, 15 bp, Homo sapiens
tacctccataaacaa

SEQ ID NO: 939899 - DNA, 15 bp, Homo sapiens
ttacctccataaaca

SEQ ID NO: 939900 - DNA, 15 bp, Homo sapiens
gttacctccataaac

SEQ ID NO: 939901 - DNA, 15 bp, Homo sapiens
agttacctccataaa

SEQ ID NO: 939902 - DNA, 15 bp, Homo sapiens
cagttacctccataa

SEQ ID NO: 939903 - DNA, 15 bp, Homo sapiens
gcagttacctccata

SEQ ID NO: 939904 - DNA, 15 bp, Homo sapiens
agcagttacctccat

SEQ ID NO: 939905 - DNA, 15 bp, Homo sapiens
tagcagttacctcca

SEQ ID NO: 939906 - DNA, 15 bp, Homo sapiens
ttagcagttacctcc

SEQ ID NO: 939907 - DNA, 15 bp, Homo sapiens
gttagcagttacctc

SEQ ID NO: 939908 - DNA, 15 bp, Homo sapiens
agttagcagttacct

SEQ ID NO: 939909 - DNA, 15 bp, Homo sapiens
cagttagcagttacc

SEQ ID NO: 939910 - DNA, 15 bp, Homo sapiens
ccagttagcagttac

SEQ ID NO: 939911 - DNA, 15 bp, Homo sapiens
accagttagcagtta

SEQ ID NO: 939912 - DNA, 15 bp, Homo sapiens
gaccagttagcagtt

SEQ ID NO: 939913 - DNA, 15 bp, Homo sapiens
ggaccagttagcagt

SEQ ID NO: 939914 - DNA, 15 bp, Homo sapiens
aggaccagttagcag

SEQ ID NO: 939915 - DNA, 15 bp, Homo sapiens
aaggaccagttagca

SEQ ID NO: 939916 - DNA, 15 bp, Homo sapiens
caaggaccagttagc

SEQ ID NO: 939917 - DNA, 15 bp, Homo sapiens
ccaaggaccagttag

SEQ ID NO: 939918 - DNA, 15 bp, Homo sapiens
accaaggaccagtta

SEQ ID NO: 939919 - DNA, 15 bp, Homo sapiens
gaccaaggaccagtt

SEQ ID NO: 939920 - DNA, 15 bp, Homo sapiens
ggaccaaggaccagt

SEQ ID NO: 939921 - DNA, 15 bp, Homo sapiens
tggaccaaggaccag

SEQ ID NO: 939922 - DNA, 15 bp, Homo sapiens
ttggaccaaggacca

SEQ ID NO: 939923 - DNA, 15 bp, Homo sapiens
attggaccaaggacc

SEQ ID NO: 939924 - DNA, 15 bp, Homo sapiens
cattggaccaaggac

SEQ ID NO: 939925 - DNA, 15 bp, Homo sapiens
gcattggaccaagga

SEQ ID NO: 939926 - DNA, 15 bp, Homo sapiens
agcattggaccaagg

SEQ ID NO: 939927 - DNA, 15 bp, Homo sapiens
cagcattggaccaag

SEQ ID NO: 939928 - DNA, 15 bp, Homo sapiens
gcagcattggaccaa

SEQ ID NO: 939929 - DNA, 15 bp, Homo sapiens
ggcagcattggacca

SEQ ID NO: 939930 - DNA, 15 bp, Homo sapiens
tggcagcattggacc

SEQ ID NO: 939931 - DNA, 15 bp, Homo sapiens
atggcagcattggac

SEQ ID NO: 939932 - DNA, 15 bp, Homo sapiens
aatggcagcattgga

SEQ ID NO: 939933 - DNA, 15 bp, Homo sapiens
aaatggcagcattgg

SEQ ID NO: 939934 - DNA, 15 bp, Homo sapiens
aaaatggcagcattg

SEQ ID NO: 939935 - DNA, 15 bp, Homo sapiens
caaaatggcagcatt

SEQ ID NO: 939936 - DNA, 15 bp, Homo sapiens
acaaaatggcagcat

SEQ ID NO: 939937 - DNA, 15 bp, Homo sapiens
tacaaaatggcagca

SEQ ID NO: 939938 - DNA, 15 bp, Homo sapiens
ttacaaaatggcagc

SEQ ID NO: 939939 - DNA, 15 bp, Homo sapiens
gttacaaaatggcag

SEQ ID NO: 939940 - DNA, 15 bp, Homo sapiens
ggttacaaaatggca

SEQ ID NO: 939941 - DNA, 15 bp, Homo sapiens
tggttacaaaatggc

SEQ ID NO: 939942 - DNA, 15 bp, Homo sapiens
atggttacaaaatgg

SEQ ID NO: 939943 - DNA, 15 bp, Homo sapiens
aatggttacaaaatg

SEQ ID NO: 939944 - DNA, 15 bp, Homo sapiens
aaatggttacaaaat

SEQ ID NO: 939945 - DNA, 15 bp, Homo sapiens
caaatggttacaaaa

SEQ ID NO: 939946 - DNA, 15 bp, Homo sapiens
acaaatggttacaaa

SEQ ID NO: 939947 - DNA, 15 bp, Homo sapiens
aacaaatggttacaa

SEQ ID NO: 939948 - DNA, 15 bp, Homo sapiens
taacaaatggttaca

SEQ ID NO: 939949 - DNA, 15 bp, Homo sapiens
ataacaaatggttac

SEQ ID NO: 939950 - DNA, 15 bp, Homo sapiens
cataacaaatggtta

SEQ ID NO: 939951 - DNA, 15 bp, Homo sapiens
tcataacaaatggtt

SEQ ID NO: 939952 - DNA, 15 bp, Homo sapiens
atcataacaaatggt

SEQ ID NO: 939953 - DNA, 15 bp, Homo sapiens
tatcataacaaatgg

SEQ ID NO: 939954 - DNA, 15 bp, Homo sapiens
atatcataacaaatg

SEQ ID NO: 939955 - DNA, 15 bp, Homo sapiens
gatatcataacaaat

SEQ ID NO: 939956 - DNA, 15 bp, Homo sapiens
agatatcataacaaa

SEQ ID NO: 939957 - DNA, 15 bp, Homo sapiens
aagatatcataacaa

SEQ ID NO: 939958 - DNA, 15 bp, Homo sapiens
gaagatatcataaca

SEQ ID NO: 939959 - DNA, 15 bp, Homo sapiens
ggaagatatcataac

SEQ ID NO: 939960 - DNA, 15 bp, Homo sapiens
gggaagatatcataa

SEQ ID NO: 939961 - DNA, 15 bp, Homo sapiens
tgggaagatatcata

SEQ ID NO: 939962 - DNA, 15 bp, Homo sapiens
ctgggaagatatcat

SEQ ID NO: 939963 - DNA, 15 bp, Homo sapiens
gctgggaagatatca

SEQ ID NO: 939964 - DNA, 15 bp, Homo sapiens
agctgggaagatatc

SEQ ID NO: 939965 - DNA, 15 bp, Homo sapiens
aagctgggaagatat

SEQ ID NO: 939966 - DNA, 15 bp, Homo sapiens
caagctgggaagata

SEQ ID NO: 939967 - DNA, 15 bp, Homo sapiens
ccaagctgggaagat

SEQ ID NO: 939968 - DNA, 15 bp, Homo sapiens
accaagctgggaaga

SEQ ID NO: 939969 - DNA, 15 bp, Homo sapiens
taccaagctgggaag

SEQ ID NO: 939970 - DNA, 15 bp, Homo sapiens
ataccaagctgggaa

SEQ ID NO: 939971 - DNA, 15 bp, Homo sapiens
tataccaagctggga

SEQ ID NO: 939972 - DNA, 15 bp, Homo sapiens
ttataccaagctggg

SEQ ID NO: 939973 - DNA, 15 bp, Homo sapiens
attataccaagctgg

SEQ ID NO: 939974 - DNA, 15 bp, Homo sapiens
cattataccaagctg

SEQ ID NO: 939975 - DNA, 15 bp, Homo sapiens
acattataccaagct

SEQ ID NO: 939976 - DNA, 15 bp, Homo sapiens
aacattataccaagc

SEQ ID NO: 939977 - DNA, 15 bp, Homo sapiens
aaacattataccaag

SEQ ID NO: 939978 - DNA, 15 bp, Homo sapiens
aaaacattataccaa

SEQ ID NO: 939979 - DNA, 15 bp, Homo sapiens
taaaacattatacca

SEQ ID NO: 939980 - DNA, 15 bp, Homo sapiens
ataaaacattatacc

SEQ ID NO: 939981 - DNA, 15 bp, Homo sapiens
tataaaacattatac

SEQ ID NO: 939982 - DNA, 15 bp, Homo sapiens
ttataaaacattata

SEQ ID NO: 939983 - DNA, 15 bp, Homo sapiens
attataaaacattat

SEQ ID NO: 939984 - DNA, 15 bp, Homo sapiens
aattataaaacatta

SEQ ID NO: 939985 - DNA, 15 bp, Homo sapiens
taattataaaacatt

SEQ ID NO: 939986 - DNA, 15 bp, Homo sapiens
gtaattataaaacat

SEQ ID NO: 939987 - DNA, 15 bp, Homo sapiens
tgtaattataaaaca

SEQ ID NO: 939988 - DNA, 15 bp, Homo sapiens
atgtaattataaaac

SEQ ID NO: 939989 - DNA, 15 bp, Homo sapiens
aatgtaattataaaa

SEQ ID NO: 939990 - DNA, 15 bp, Homo sapiens
caatgtaattataaa

SEQ ID NO: 939991 - DNA, 15 bp, Homo sapiens
acaatgtaattataa

SEQ ID NO: 939992 - DNA, 15 bp, Homo sapiens
aacaatgtaattata

SEQ ID NO: 939993 - DNA, 15 bp, Homo sapiens
gaacaatgtaattat

SEQ ID NO: 939994 - DNA, 15 bp, Homo sapiens
ggaacaatgtaatta

SEQ ID NO: 939995 - DNA, 15 bp, Homo sapiens
aggaacaatgtaatt

SEQ ID NO: 939996 - DNA, 15 bp, Homo sapiens
gaggaacaatgtaat

SEQ ID NO: 939997 - DNA, 15 bp, Homo sapiens
ggaggaacaatgtaa

SEQ ID NO: 939998 - DNA, 15 bp, Homo sapiens
gggaggaacaatgta

SEQ ID NO: 939999 - DNA, 15 bp, Homo sapiens
ggggaggaacaatgt

SEQ ID NO: 940000 - DNA, 15 bp, Homo sapiens
gggggaggaacaatg

SEQ ID NO: 940001 - DNA, 15 bp, Homo sapiens
agggggaggaacaat

SEQ ID NO: 940002 - DNA, 15 bp, Homo sapiens
gagggggaggaacaa

SEQ ID NO: 940003 - DNA, 15 bp, Homo sapiens
agagggggaggaaca

SEQ ID NO: 940004 - DNA, 15 bp, Homo sapiens
aagagggggaggaac

SEQ ID NO: 940005 - DNA, 15 bp, Homo sapiens
aaagagggggaggaa

SEQ ID NO: 940006 - DNA, 15 bp, Homo sapiens
aaaagagggggagga

SEQ ID NO: 940007 - DNA, 15 bp, Homo sapiens
aaaaagagggggagg

SEQ ID NO: 940008 - DNA, 15 bp, Homo sapiens
aaaaaagagggggag

SEQ ID NO: 940009 - DNA, 15 bp, Homo sapiens
aaaaaaagaggggga

SEQ ID NO: 940010 - DNA, 15 bp, Homo sapiens
caaaaaaagaggggg

SEQ ID NO: 940011 - DNA, 15 bp, Homo sapiens
acaaaaaaagagggg

SEQ ID NO: 940012 - DNA, 15 bp, Homo sapiens
cacaaaaaaagaggg

SEQ ID NO: 940013 - DNA, 15 bp, Homo sapiens
acacaaaaaaagagg

SEQ ID NO: 940014 - DNA, 15 bp, Homo sapiens
aacacaaaaaaagag

SEQ ID NO: 940015 - DNA, 15 bp, Homo sapiens
gaacacaaaaaaaga

SEQ ID NO: 940016 - DNA, 15 bp, Homo sapiens
agaacacaaaaaaag

SEQ ID NO: 940017 - DNA, 15 bp, Homo sapiens
aagaacacaaaaaaa

SEQ ID NO: 940018 - DNA, 15 bp, Homo sapiens
caagaacacaaaaaa

SEQ ID NO: 940019 - DNA, 15 bp, Homo sapiens
acaagaacacaaaaa

SEQ ID NO: 940020 - DNA, 15 bp, Homo sapiens
tacaagaacacaaaa

SEQ ID NO: 940021 - DNA, 15 bp, Homo sapiens
ttacaagaacacaaa

SEQ ID NO: 940022 - DNA, 15 bp, Homo sapiens
attacaagaacacaa

SEQ ID NO: 940023 - DNA, 15 bp, Homo sapiens
aattacaagaacaca

SEQ ID NO: 940024 - DNA, 15 bp, Homo sapiens
aaattacaagaacac

SEQ ID NO: 940025 - DNA, 15 bp, Homo sapiens
aaaattacaagaaca

SEQ ID NO: 940026 - DNA, 15 bp, Homo sapiens
gaaaattacaagaac

SEQ ID NO: 940027 - DNA, 15 bp, Homo sapiens
agaaaattacaagaa

SEQ ID NO: 940028 - DNA, 15 bp, Homo sapiens
gagaaaattacaaga

SEQ ID NO: 940029 - DNA, 15 bp, Homo sapiens
ggagaaaattacaag

SEQ ID NO: 940030 - DNA, 15 bp, Homo sapiens
gggagaaaattacaa

SEQ ID NO: 940031 - DNA, 15 bp, Homo sapiens
agggagaaaattaca

SEQ ID NO: 940032 - DNA, 15 bp, Homo sapiens
tagggagaaaattac

SEQ ID NO: 940033 - DNA, 15 bp, Homo sapiens
atagggagaaaatta

SEQ ID NO: 940034 - DNA, 15 bp, Homo sapiens
catagggagaaaatt

SEQ ID NO: 940035 - DNA, 15 bp, Homo sapiens
acatagggagaaaat

SEQ ID NO: 940036 - DNA, 15 bp, Homo sapiens
aacatagggagaaaa

SEQ ID NO: 940037 - DNA, 15 bp, Homo sapiens
taacatagggagaaa

SEQ ID NO: 940038 - DNA, 15 bp, Homo sapiens
ataacatagggagaa

SEQ ID NO: 940039 - DNA, 15 bp, Homo sapiens
aataacatagggaga

SEQ ID NO: 940040 - DNA, 15 bp, Homo sapiens
aaataacatagggag

SEQ ID NO: 940041 - DNA, 15 bp, Homo sapiens
aaaataacataggga

SEQ ID NO: 940042 - DNA, 15 bp, Homo sapiens
caaaataacataggg

SEQ ID NO: 940043 - DNA, 15 bp, Homo sapiens
acaaaataacatagg

SEQ ID NO: 940044 - DNA, 15 bp, Homo sapiens
tacaaaataacatag

SEQ ID NO: 940045 - DNA, 15 bp, Homo sapiens
atacaaaataacata

SEQ ID NO: 940046 - DNA, 15 bp, Homo sapiens
aatacaaaataacat

SEQ ID NO: 940047 - DNA, 15 bp, Homo sapiens
gaatacaaaataaca

SEQ ID NO: 940048 - DNA, 15 bp, Homo sapiens
tgaatacaaaataac

SEQ ID NO: 940049 - DNA, 15 bp, Homo sapiens
atgaatacaaaataa

SEQ ID NO: 940050 - DNA, 15 bp, Homo sapiens
aatgaatacaaaata

SEQ ID NO: 940051 - DNA, 15 bp, Homo sapiens
aaatgaatacaaaat

SEQ ID NO: 940052 - DNA, 15 bp, Homo sapiens
aaaatgaatacaaaa

SEQ ID NO: 940053 - DNA, 15 bp, Homo sapiens
taaaatgaatacaaa

SEQ ID NO: 940054 - DNA, 15 bp, Homo sapiens
ataaaatgaatacaa

SEQ ID NO: 940055 - DNA, 15 bp, Homo sapiens
tataaaatgaataca

SEQ ID NO: 940056 - DNA, 15 bp, Homo sapiens
atataaaatgaatac

SEQ ID NO: 940057 - DNA, 15 bp, Homo sapiens
tatataaaatgaata

SEQ ID NO: 940058 - DNA, 15 bp, Homo sapiens
ttatataaaatgaat

SEQ ID NO: 940059 - DNA, 15 bp, Homo sapiens
attatataaaatgaa

SEQ ID NO: 940060 - DNA, 15 bp, Homo sapiens
cattatataaaatga

SEQ ID NO: 940061 - DNA, 15 bp, Homo sapiens
tcattatataaaatg

SEQ ID NO: 940062 - DNA, 15 bp, Homo sapiens
ttcattatataaaat

SEQ ID NO: 940063 - DNA, 15 bp, Homo sapiens
attcattatataaaa

SEQ ID NO: 940064 - DNA, 15 bp, Homo sapiens
tattcattatataaa

SEQ ID NO: 940065 - DNA, 15 bp, Homo sapiens
ttattcattatataa

SEQ ID NO: 940066 - DNA, 15 bp, Homo sapiens
tttattcattatata

SEQ ID NO: 940067 - DNA, 15 bp, Homo sapiens
atttattcattatat

SEQ ID NO: 940068 - DNA, 15 bp, Homo sapiens
catttattcattata

SEQ ID NO: 940069 - DNA, 15 bp, Homo sapiens
acatttattcattat

SEQ ID NO: 940070 - DNA, 15 bp, Homo sapiens
aacatttattcatta

SEQ ID NO: 940071 - DNA, 15 bp, Homo sapiens
caacatttattcatt

SEQ ID NO: 940072 - DNA, 15 bp, Homo sapiens
gcaacatttattcat

SEQ ID NO: 940073 - DNA, 15 bp, Homo sapiens
agcaacatttattca

SEQ ID NO: 940074 - DNA, 15 bp, Homo sapiens
aagcaacatttattc

SEQ ID NO: 940075 - DNA, 15 bp, Homo sapiens
taagcaacatttatt

SEQ ID NO: 940076 - DNA, 15 bp, Homo sapiens
ataagcaacatttat

SEQ ID NO: 940077 - DNA, 15 bp, Homo sapiens
cataagcaacattta

SEQ ID NO: 940078 - DNA, 15 bp, Homo sapiens
tcataagcaacattt

SEQ ID NO: 940079 - DNA, 15 bp, Homo sapiens
ctcataagcaacatt

SEQ ID NO: 940080 - DNA, 15 bp, Homo sapiens
cctcataagcaacat

SEQ ID NO: 940081 - DNA, 15 bp, Homo sapiens
acctcataagcaaca

SEQ ID NO: 940082 - DNA, 15 bp, Homo sapiens
gacctcataagcaac

SEQ ID NO: 940083 - DNA, 15 bp, Homo sapiens
tgacctcataagcaa

SEQ ID NO: 940084 - DNA, 15 bp, Homo sapiens
ttgacctcataagca

SEQ ID NO: 940085 - DNA, 15 bp, Homo sapiens
cttgacctcataagc

SEQ ID NO: 940086 - DNA, 15 bp, Homo sapiens
ccttgacctcataag

SEQ ID NO: 940087 - DNA, 15 bp, Homo sapiens
gccttgacctcataa

SEQ ID NO: 940088 - DNA, 15 bp, Homo sapiens
ggccttgacctcata

SEQ ID NO: 940089 - DNA, 15 bp, Homo sapiens
tggccttgacctcat

SEQ ID NO: 940090 - DNA, 15 bp, Homo sapiens
ttggccttgacctca

SEQ ID NO: 940091 - DNA, 15 bp, Homo sapiens
tttggccttgacctc

SEQ ID NO: 940092 - DNA, 15 bp, Homo sapiens
ctttggccttgacct

SEQ ID NO: 940093 - DNA, 15 bp, Homo sapiens
tctttggccttgacc

SEQ ID NO: 940094 - DNA, 15 bp, Homo sapiens
gtctttggccttgac

SEQ ID NO: 940095 - DNA, 15 bp, Homo sapiens
agtctttggccttga

SEQ ID NO: 940096 - DNA, 15 bp, Homo sapiens
aagtctttggccttg

SEQ ID NO: 940097 - DNA, 15 bp, Homo sapiens
taagtctttggcctt

SEQ ID NO: 940098 - DNA, 15 bp, Homo sapiens
ttaagtctttggcct

SEQ ID NO: 940099 - DNA, 15 bp, Homo sapiens
cttaagtctttggcc

SEQ ID NO: 940100 - DNA, 15 bp, Homo sapiens
gcttaagtctttggc

SEQ ID NO: 940101 - DNA, 15 bp, Homo sapiens
agcttaagtctttgg

SEQ ID NO: 940102 - DNA, 15 bp, Homo sapiens
gagcttaagtctttg

SEQ ID NO: 940103 - DNA, 15 bp, Homo sapiens
ggagcttaagtcttt

SEQ ID NO: 940104 - DNA, 15 bp, Homo sapiens
aggagcttaagtctt

SEQ ID NO: 940105 - DNA, 15 bp, Homo sapiens
caggagcttaagtct

SEQ ID NO: 940106 - DNA, 15 bp, Homo sapiens
acaggagcttaagtc

SEQ ID NO: 940107 - DNA, 15 bp, Homo sapiens
aacaggagcttaagt

SEQ ID NO: 940108 - DNA, 15 bp, Homo sapiens
caacaggagcttaag

SEQ ID NO: 940109 - DNA, 15 bp, Homo sapiens
tcaacaggagcttaa

SEQ ID NO: 940110 - DNA, 15 bp, Homo sapiens
atcaacaggagctta

SEQ ID NO: 940111 - DNA, 15 bp, Homo sapiens
aatcaacaggagctt

SEQ ID NO: 940112 - DNA, 15 bp, Homo sapiens
aaatcaacaggagct

SEQ ID NO: 940113 - DNA, 15 bp, Homo sapiens
gaaatcaacaggagc

SEQ ID NO: 940114 - DNA, 15 bp, Homo sapiens
tgaaatcaacaggag

SEQ ID NO: 940115 - DNA, 15 bp, Homo sapiens
atgaaatcaacagga

SEQ ID NO: 940116 - DNA, 15 bp, Homo sapiens
catgaaatcaacagg

SEQ ID NO: 940117 - DNA, 15 bp, Homo sapiens
acatgaaatcaacag

SEQ ID NO: 940118 - DNA, 15 bp, Homo sapiens
aacatgaaatcaaca

SEQ ID NO: 940119 - DNA, 15 bp, Homo sapiens
caacatgaaatcaac

SEQ ID NO: 940120 - DNA, 15 bp, Homo sapiens
gcaacatgaaatcaa

SEQ ID NO: 940121 - DNA, 15 bp, Homo sapiens
agcaacatgaaatca

SEQ ID NO: 940122 - DNA, 15 bp, Homo sapiens
cagcaacatgaaatc

SEQ ID NO: 940123 - DNA, 15 bp, Homo sapiens
tcagcaacatgaaat

SEQ ID NO: 940124 - DNA, 15 bp, Homo sapiens
ctcagcaacatgaaa

SEQ ID NO: 940125 - DNA, 15 bp, Homo sapiens
actcagcaacatgaa

SEQ ID NO: 940126 - DNA, 15 bp, Homo sapiens
cactcagcaacatga

SEQ ID NO: 940127 - DNA, 15 bp, Homo sapiens
acactcagcaacatg

SEQ ID NO: 940128 - DNA, 15 bp, Homo sapiens
gacactcagcaacat

SEQ ID NO: 940129 - DNA, 15 bp, Homo sapiens
tgacactcagcaaca

SEQ ID NO: 940130 - DNA, 15 bp, Homo sapiens
atgacactcagcaac

SEQ ID NO: 940131 - DNA, 15 bp, Homo sapiens
tatgacactcagcaa

SEQ ID NO: 940132 - DNA, 15 bp, Homo sapiens
ttatgacactcagca

SEQ ID NO: 940133 - DNA, 15 bp, Homo sapiens
tttatgacactcagc

SEQ ID NO: 940134 - DNA, 15 bp, Homo sapiens
atttatgacactcag

SEQ ID NO: 940135 - DNA, 15 bp, Homo sapiens
catttatgacactca

SEQ ID NO: 940136 - DNA, 15 bp, Homo sapiens
ccatttatgacactc

SEQ ID NO: 940137 - DNA, 15 bp, Homo sapiens
tccatttatgacact

SEQ ID NO: 940138 - DNA, 15 bp, Homo sapiens
ttccatttatgacac

SEQ ID NO: 940139 - DNA, 15 bp, Homo sapiens
cttccatttatgaca

SEQ ID NO: 940140 - DNA, 15 bp, Homo sapiens
gcttccatttatgac

SEQ ID NO: 940141 - DNA, 15 bp, Homo sapiens
tgcttccatttatga

SEQ ID NO: 940142 - DNA, 15 bp, Homo sapiens
ttgcttccatttatg

SEQ ID NO: 940143 - DNA, 15 bp, Homo sapiens
attgcttccatttat

SEQ ID NO: 940144 - DNA, 15 bp, Homo sapiens
gattgcttccattta

SEQ ID NO: 940145 - DNA, 15 bp, Homo sapiens
tgattgcttccattt

SEQ ID NO: 940146 - DNA, 15 bp, Homo sapiens
atgattgcttccatt

SEQ ID NO: 940147 - DNA, 15 bp, Homo sapiens
tatgattgcttccat

SEQ ID NO: 940148 - DNA, 15 bp, Homo sapiens
ttatgattgcttcca

SEQ ID NO: 940149 - DNA, 15 bp, Homo sapiens
attatgattgcttcc

SEQ ID NO: 940150 - DNA, 15 bp, Homo sapiens
cattatgattgcttc

SEQ ID NO: 940151 - DNA, 15 bp, Homo sapiens
gcattatgattgctt

SEQ ID NO: 940152 - DNA, 15 bp, Homo sapiens
tgcattatgattgct

SEQ ID NO: 940153 - DNA, 15 bp, Homo sapiens
ctgcattatgattgc

SEQ ID NO: 940154 - DNA, 15 bp, Homo sapiens
tctgcattatgattg

SEQ ID NO: 940155 - DNA, 15 bp, Homo sapiens
ctctgcattatgatt

SEQ ID NO: 940156 - DNA, 15 bp, Homo sapiens
actctgcattatgat

SEQ ID NO: 940157 - DNA, 15 bp, Homo sapiens
gactctgcattatga

SEQ ID NO: 940158 - DNA, 15 bp, Homo sapiens
tgactctgcattatg

SEQ ID NO: 940159 - DNA, 15 bp, Homo sapiens
atgactctgcattat

SEQ ID NO: 940160 - DNA, 15 bp, Homo sapiens
aatgactctgcatta

SEQ ID NO: 940161 - DNA, 15 bp, Homo sapiens
gaatgactctgcatt

SEQ ID NO: 940162 - DNA, 15 bp, Homo sapiens
agaatgactctgcat

SEQ ID NO: 940163 - DNA, 15 bp, Homo sapiens
cagaatgactctgca

SEQ ID NO: 940164 - DNA, 15 bp, Homo sapiens
ccagaatgactctgc

SEQ ID NO: 940165 - DNA, 15 bp, Homo sapiens
accagaatgactctg

SEQ ID NO: 940166 - DNA, 15 bp, Homo sapiens
taccagaatgactct

SEQ ID NO: 940167 - DNA, 15 bp, Homo sapiens
ctaccagaatgactc

SEQ ID NO: 940168 - DNA, 15 bp, Homo sapiens
actaccagaatgact

SEQ ID NO: 940169 - DNA, 15 bp, Homo sapiens
tactaccagaatgac

SEQ ID NO: 940170 - DNA, 15 bp, Homo sapiens
ttactaccagaatga

SEQ ID NO: 940171 - DNA, 15 bp, Homo sapiens
attactaccagaatg

SEQ ID NO: 940172 - DNA, 15 bp, Homo sapiens
tattactaccagaat

SEQ ID NO: 940173 - DNA, 15 bp, Homo sapiens
atattactaccagaa

SEQ ID NO: 940174 - DNA, 15 bp, Homo sapiens
aatattactaccaga

SEQ ID NO: 940175 - DNA, 15 bp, Homo sapiens
taatattactaccag

SEQ ID NO: 940176 - DNA, 15 bp, Homo sapiens
ttaatattactacca

SEQ ID NO: 940177 - DNA, 15 bp, Homo sapiens
tttaatattactacc

SEQ ID NO: 940178 - DNA, 15 bp, Homo sapiens
atttaatattactac

SEQ ID NO: 940179 - DNA, 15 bp, Homo sapiens
tatttaatattacta

SEQ ID NO: 940180 - DNA, 15 bp, Homo sapiens
atatttaatattact

SEQ ID NO: 940181 - DNA, 15 bp, Homo sapiens
tatatttaatattac

SEQ ID NO: 940182 - DNA, 15 bp, Homo sapiens
atatatttaatatta

SEQ ID NO: 940183 - DNA, 15 bp, Homo sapiens
catatatttaatatt

SEQ ID NO: 940184 - DNA, 15 bp, Homo sapiens
tcatatatttaatat

SEQ ID NO: 940185 - DNA, 15 bp, Homo sapiens
atcatatatttaata

SEQ ID NO: 940186 - DNA, 15 bp, Homo sapiens
catcatatatttaat

SEQ ID NO: 940187 - DNA, 15 bp, Homo sapiens
ccatcatatatttaa

SEQ ID NO: 940188 - DNA, 15 bp, Homo sapiens
tccatcatatattta

SEQ ID NO: 940189 - DNA, 15 bp, Homo sapiens
atccatcatatattt

SEQ ID NO: 940190 - DNA, 15 bp, Homo sapiens
aatccatcatatatt

SEQ ID NO: 940191 - DNA, 15 bp, Homo sapiens
gaatccatcatatat

SEQ ID NO: 940192 - DNA, 15 bp, Homo sapiens
tgaatccatcatata

SEQ ID NO: 940193 - DNA, 15 bp, Homo sapiens
ctgaatccatcatat

SEQ ID NO: 940194 - DNA, 15 bp, Homo sapiens
actgaatccatcata

SEQ ID NO: 940195 - DNA, 15 bp, Homo sapiens
cactgaatccatcat

SEQ ID NO: 940196 - DNA, 15 bp, Homo sapiens
tcactgaatccatca

SEQ ID NO: 940197 - DNA, 15 bp, Homo sapiens
ttcactgaatccatc

SEQ ID NO: 940198 - DNA, 15 bp, Homo sapiens
tttcactgaatccat

SEQ ID NO: 940199 - DNA, 15 bp, Homo sapiens
ttttcactgaatcca

SEQ ID NO: 940200 - DNA, 15 bp, Homo sapiens
attttcactgaatcc

SEQ ID NO: 940201 - DNA, 15 bp, Homo sapiens
tattttcactgaatc

SEQ ID NO: 940202 - DNA, 15 bp, Homo sapiens
atattttcactgaat

SEQ ID NO: 940203 - DNA, 15 bp, Homo sapiens
aatattttcactgaa

SEQ ID NO: 940204 - DNA, 15 bp, Homo sapiens
taatattttcactga

SEQ ID NO: 940205 - DNA, 15 bp, Homo sapiens
ataatattttcactg

SEQ ID NO: 940206 - DNA, 15 bp, Homo sapiens
cataatattttcact

SEQ ID NO: 940207 - DNA, 15 bp, Homo sapiens
acataatattttcac

SEQ ID NO: 940208 - DNA, 15 bp, Homo sapiens
cacataatattttca

SEQ ID NO: 940209 - DNA, 15 bp, Homo sapiens
acacataatattttc

SEQ ID NO: 940210 - DNA, 15 bp, Homo sapiens
aacacataatatttt

SEQ ID NO: 940211 - DNA, 15 bp, Homo sapiens
taacacataatattt

SEQ ID NO: 940212 - DNA, 15 bp, Homo sapiens
ataacacataatatt

SEQ ID NO: 940213 - DNA, 15 bp, Homo sapiens
aataacacataatat

SEQ ID NO: 940214 - DNA, 15 bp, Homo sapiens
taataacacataata

SEQ ID NO: 940215 - DNA, 15 bp, Homo sapiens
ctaataacacataat

SEQ ID NO: 940216 - DNA, 15 bp, Homo sapiens
tctaataacacataa

SEQ ID NO: 940217 - DNA, 15 bp, Homo sapiens
ttctaataacacata

SEQ ID NO: 940218 - DNA, 15 bp, Homo sapiens
tttctaataacacat

SEQ ID NO: 940219 - DNA, 15 bp, Homo sapiens
ttttctaataacaca

SEQ ID NO: 940220 - DNA, 15 bp, Homo sapiens
tttttctaataacac

SEQ ID NO: 940221 - DNA, 15 bp, Homo sapiens
atttttctaataaca

SEQ ID NO: 940222 - DNA, 15 bp, Homo sapiens
tatttttctaataac

SEQ ID NO: 940223 - DNA, 15 bp, Homo sapiens
atatttttctaataa

SEQ ID NO: 940224 - DNA, 15 bp, Homo sapiens
aatatttttctaata

SEQ ID NO: 940225 - DNA, 15 bp, Homo sapiens
gaatatttttctaat

SEQ ID NO: 940226 - DNA, 15 bp, Homo sapiens
tgaatatttttctaa

SEQ ID NO: 940227 - DNA, 15 bp, Homo sapiens
ctgaatatttttcta

SEQ ID NO: 940228 - DNA, 15 bp, Homo sapiens
tctgaatatttttct

SEQ ID NO: 940229 - DNA, 15 bp, Homo sapiens
ttctgaatatttttc

SEQ ID NO: 940230 - DNA, 15 bp, Homo sapiens
gttctgaatattttt

SEQ ID NO: 940231 - DNA, 15 bp, Homo sapiens
tgttctgaatatttt

SEQ ID NO: 940232 - DNA, 15 bp, Homo sapiens
ctgttctgaatattt

SEQ ID NO: 940233 - DNA, 15 bp, Homo sapiens
cctgttctgaatatt

SEQ ID NO: 940234 - DNA, 15 bp, Homo sapiens
gcctgttctgaatat

SEQ ID NO: 940235 - DNA, 15 bp, Homo sapiens
ggcctgttctgaata

SEQ ID NO: 940236 - DNA, 15 bp, Homo sapiens
cggcctgttctgaat

SEQ ID NO: 940237 - DNA, 15 bp, Homo sapiens
ccggcctgttctgaa

SEQ ID NO: 940238 - DNA, 15 bp, Homo sapiens
cccggcctgttctga

SEQ ID NO: 940239 - DNA, 15 bp, Homo sapiens
ccccggcctgttctg

SEQ ID NO: 940240 - DNA, 15 bp, Homo sapiens
cccccggcctgttct

SEQ ID NO: 940241 - DNA, 15 bp, Homo sapiens
gcccccggcctgttc

SEQ ID NO: 940242 - DNA, 15 bp, Homo sapiens
tgcccccggcctgtt

SEQ ID NO: 940243 - DNA, 15 bp, Homo sapiens
ctgcccccggcctgt

SEQ ID NO: 940244 - DNA, 15 bp, Homo sapiens
actgcccccggcctg

SEQ ID NO: 940245 - DNA, 15 bp, Homo sapiens
cactgcccccggcct

SEQ ID NO: 940246 - DNA, 15 bp, Homo sapiens
ccactgcccccggcc

SEQ ID NO: 940247 - DNA, 15 bp, Homo sapiens
gccactgcccccggc

SEQ ID NO: 940248 - DNA, 15 bp, Homo sapiens
agccactgcccccgg

SEQ ID NO: 940249 - DNA, 15 bp, Homo sapiens
gagccactgcccccg

SEQ ID NO: 940250 - DNA, 15 bp, Homo sapiens
tgagccactgccccc

SEQ ID NO: 940251 - DNA, 15 bp, Homo sapiens
gtgagccactgcccc

SEQ ID NO: 940252 - DNA, 15 bp, Homo sapiens
tgtgagccactgccc

SEQ ID NO: 940253 - DNA, 15 bp, Homo sapiens
gtgtgagccactgcc

SEQ ID NO: 940254 - DNA, 15 bp, Homo sapiens
ctcccaaattgctgg

SEQ ID NO: 940255 - DNA, 15 bp, Homo sapiens
cctcccaaattgctg

SEQ ID NO: 940256 - DNA, 15 bp, Homo sapiens
gcctcccaaattgct

SEQ ID NO: 940257 - DNA, 15 bp, Homo sapiens
ggcctcccaaattgc

SEQ ID NO: 940258 - DNA, 15 bp, Homo sapiens
cggcctcccaaattg

SEQ ID NO: 940259 - DNA, 15 bp, Homo sapiens
tcggcctcccaaatt

SEQ ID NO: 940260 - DNA, 15 bp, Homo sapiens
ctcggcctcccaaat

SEQ ID NO: 940261 - DNA, 15 bp, Homo sapiens
cgcctcggcctccca

SEQ ID NO: 940262 - DNA, 15 bp, Homo sapiens
ccgcctcggcctccc

SEQ ID NO: 940263 - DNA, 15 bp, Homo sapiens
cccgcctcggcctcc

SEQ ID NO: 940264 - DNA, 15 bp, Homo sapiens
gcccgcctcggcctc

SEQ ID NO: 940265 - DNA, 15 bp, Homo sapiens
tgcccgcctcggcct

SEQ ID NO: 940266 - DNA, 15 bp, Homo sapiens
ctgcccgcctcggcc

SEQ ID NO: 940267 - DNA, 15 bp, Homo sapiens
tctgcccgcctcggc

SEQ ID NO: 940268 - DNA, 15 bp, Homo sapiens
atctgcccgcctcgg

SEQ ID NO: 940269 - DNA, 15 bp, Homo sapiens
gatctgcccgcctcg

SEQ ID NO: 940270 - DNA, 15 bp, Homo sapiens
tgatctgcccgcctc

SEQ ID NO: 940271 - DNA, 15 bp, Homo sapiens
gtgatctgcccgcct

SEQ ID NO: 940272 - DNA, 15 bp, Homo sapiens
agtgatctgcccgcc

SEQ ID NO: 940273 - DNA, 15 bp, Homo sapiens
cagtgatctgcccgc

SEQ ID NO: 940274 - DNA, 15 bp, Homo sapiens
ccagtgatctgcccg

SEQ ID NO: 940275 - DNA, 15 bp, Homo sapiens
tccagtgatctgccc

SEQ ID NO: 940276 - DNA, 15 bp, Homo sapiens
ttccagtgatctgcc

SEQ ID NO: 940277 - DNA, 15 bp, Homo sapiens
cttccagtgatctgc

SEQ ID NO: 940278 - DNA, 15 bp, Homo sapiens
acttccagtgatctg

SEQ ID NO: 940279 - DNA, 15 bp, Homo sapiens
gacttccagtgatct

SEQ ID NO: 940280 - DNA, 15 bp, Homo sapiens
tgacttccagtgatc

SEQ ID NO: 940281 - DNA, 15 bp, Homo sapiens
ctgacttccagtgat

SEQ ID NO: 940282 - DNA, 15 bp, Homo sapiens
cctgacttccagtga

SEQ ID NO: 940283 - DNA, 15 bp, Homo sapiens
tcctgacttccagtg

SEQ ID NO: 940284 - DNA, 15 bp, Homo sapiens
ctcctgacttccagt

SEQ ID NO: 940285 - DNA, 15 bp, Homo sapiens
actcctgacttccag

SEQ ID NO: 940286 - DNA, 15 bp, Homo sapiens
aactcctgacttcca

SEQ ID NO: 940287 - DNA, 15 bp, Homo sapiens
gaactcctgacttcc

SEQ ID NO: 940288 - DNA, 15 bp, Homo sapiens
tgaactcctgacttc

SEQ ID NO: 940289 - DNA, 15 bp, Homo sapiens
ttgaactcctgactt

SEQ ID NO: 940290 - DNA, 15 bp, Homo sapiens
cttgaactcctgact

SEQ ID NO: 940291 - DNA, 15 bp, Homo sapiens
cggccaggctggtct

SEQ ID NO: 940292 - DNA, 15 bp, Homo sapiens
tcggccaggctggtc

SEQ ID NO: 940293 - DNA, 15 bp, Homo sapiens
gtcggccaggctggt

SEQ ID NO: 940294 - DNA, 15 bp, Homo sapiens
tgtcggccaggctgg

SEQ ID NO: 940295 - DNA, 15 bp, Homo sapiens
atgtcggccaggctg

SEQ ID NO: 940296 - DNA, 15 bp, Homo sapiens
catgtcggccaggct

SEQ ID NO: 940297 - DNA, 15 bp, Homo sapiens
ccatgtcggccaggc

SEQ ID NO: 940298 - DNA, 15 bp, Homo sapiens
accatgtcggccagg

SEQ ID NO: 940299 - DNA, 15 bp, Homo sapiens
caccatgtcggccag

SEQ ID NO: 940300 - DNA, 15 bp, Homo sapiens
tcaccatgtcggcca

SEQ ID NO: 940301 - DNA, 15 bp, Homo sapiens
ttcaccatgtcggcc

SEQ ID NO: 940302 - DNA, 15 bp, Homo sapiens
tttcaccatgtcggc

SEQ ID NO: 940303 - DNA, 15 bp, Homo sapiens
gtttcaccatgtcgg

SEQ ID NO: 940304 - DNA, 15 bp, Homo sapiens
ggtttcaccatgtcg

SEQ ID NO: 940305 - DNA, 15 bp, Homo sapiens
gggtttcaccatgtc

SEQ ID NO: 940306 - DNA, 15 bp, Homo sapiens
atatttttagtagag

SEQ ID NO: 940307 - DNA, 15 bp, Homo sapiens
catatttttagtaga

SEQ ID NO: 940308 - DNA, 15 bp, Homo sapiens
tcatatttttagtag

SEQ ID NO: 940309 - DNA, 15 bp, Homo sapiens
ttcatatttttagta

SEQ ID NO: 940310 - DNA, 15 bp, Homo sapiens
tttcatatttttagt

SEQ ID NO: 940311 - DNA, 15 bp, Homo sapiens
ttttcatatttttag

SEQ ID NO: 940312 - DNA, 15 bp, Homo sapiens
attttcatattttta

SEQ ID NO: 940313 - DNA, 15 bp, Homo sapiens
aattttcatattttt

SEQ ID NO: 940314 - DNA, 15 bp, Homo sapiens
taattttcatatttt

SEQ ID NO: 940315 - DNA, 15 bp, Homo sapiens
ctaattttcatattt

SEQ ID NO: 940316 - DNA, 15 bp, Homo sapiens
gctaattttcatatt

SEQ ID NO: 940317 - DNA, 15 bp, Homo sapiens
agctaattttcatat

SEQ ID NO: 940318 - DNA, 15 bp, Homo sapiens
cagctaattttcata

SEQ ID NO: 940319 - DNA, 15 bp, Homo sapiens
ccagctaattttcat

SEQ ID NO: 940320 - DNA, 15 bp, Homo sapiens
cccagctaattttca

SEQ ID NO: 940321 - DNA, 15 bp, Homo sapiens
gcccagctaattttc

SEQ ID NO: 940322 - DNA, 15 bp, Homo sapiens
tgcccagctaatttt

SEQ ID NO: 940323 - DNA, 15 bp, Homo sapiens
atgcccagctaattt

SEQ ID NO: 940324 - DNA, 15 bp, Homo sapiens
catgcccagctaatt

SEQ ID NO: 940325 - DNA, 15 bp, Homo sapiens
ccatgcccagctaat

SEQ ID NO: 940326 - DNA, 15 bp, Homo sapiens
accatgcccagctaa

SEQ ID NO: 940327 - DNA, 15 bp, Homo sapiens
caccatgcccagcta

SEQ ID NO: 940328 - DNA, 15 bp, Homo sapiens
ccaccatgcccagct

SEQ ID NO: 940329 - DNA, 15 bp, Homo sapiens
gccaccatgcccagc

SEQ ID NO: 940330 - DNA, 15 bp, Homo sapiens
agccaccatgcccag

SEQ ID NO: 940331 - DNA, 15 bp, Homo sapiens
gagccaccatgccca

SEQ ID NO: 940332 - DNA, 15 bp, Homo sapiens
tgagccaccatgccc

SEQ ID NO: 940333 - DNA, 15 bp, Homo sapiens
atgagccaccatgcc

SEQ ID NO: 940334 - DNA, 15 bp, Homo sapiens
catgagccaccatgc

SEQ ID NO: 940335 - DNA, 15 bp, Homo sapiens
gcatgagccaccatg

SEQ ID NO: 940336 - DNA, 15 bp, Homo sapiens
caggcatgagccacc

SEQ ID NO: 940337 - DNA, 15 bp, Homo sapiens
acaggcatgagccac

SEQ ID NO: 940338 - DNA, 15 bp, Homo sapiens
tacaggcatgagcca

SEQ ID NO: 940339 - DNA, 15 bp, Homo sapiens
ttacaggcatgagcc

SEQ ID NO: 940340 - DNA, 15 bp, Homo sapiens
attacaggcatgagc

SEQ ID NO: 940341 - DNA, 15 bp, Homo sapiens
gattacaggcatgag

SEQ ID NO: 940342 - DNA, 15 bp, Homo sapiens
ggattacaggcatga

SEQ ID NO: 940343 - DNA, 15 bp, Homo sapiens
aggattacaggcatg

SEQ ID NO: 940344 - DNA, 15 bp, Homo sapiens
taggattacaggcat

SEQ ID NO: 940345 - DNA, 15 bp, Homo sapiens
ctaggattacaggca

SEQ ID NO: 940346 - DNA, 15 bp, Homo sapiens
gctaggattacaggc

SEQ ID NO: 940347 - DNA, 15 bp, Homo sapiens
agctaggattacagg

SEQ ID NO: 940348 - DNA, 15 bp, Homo sapiens
tagctaggattacag

SEQ ID NO: 940349 - DNA, 15 bp, Homo sapiens
gtagctaggattaca

SEQ ID NO: 940350 - DNA, 15 bp, Homo sapiens
agtagctaggattac

SEQ ID NO: 940351 - DNA, 15 bp, Homo sapiens
gagtagctaggatta

SEQ ID NO: 940352 - DNA, 15 bp, Homo sapiens
tgagtagctaggatt

SEQ ID NO: 940353 - DNA, 15 bp, Homo sapiens
ctgagtagctaggat

SEQ ID NO: 940354 - DNA, 15 bp, Homo sapiens
cctgagtagctagga

SEQ ID NO: 940355 - DNA, 15 bp, Homo sapiens
tcctgagtagctagg

SEQ ID NO: 940356 - DNA, 15 bp, Homo sapiens
ctcctgagtagctag

SEQ ID NO: 940357 - DNA, 15 bp, Homo sapiens
cctcctgagtagcta

SEQ ID NO: 940358 - DNA, 15 bp, Homo sapiens
acctcctgagtagct

SEQ ID NO: 940359 - DNA, 15 bp, Homo sapiens
aacctcctgagtagc

SEQ ID NO: 940360 - DNA, 15 bp, Homo sapiens
caacctcctgagtag

SEQ ID NO: 940361 - DNA, 15 bp, Homo sapiens
tcaacctcctgagta

SEQ ID NO: 940362 - DNA, 15 bp, Homo sapiens
ctcaacctcctgagt

SEQ ID NO: 940363 - DNA, 15 bp, Homo sapiens
cctcaacctcctgag

SEQ ID NO: 940364 - DNA, 15 bp, Homo sapiens
gcctcaacctcctga

SEQ ID NO: 940365 - DNA, 15 bp, Homo sapiens
tgcctcaacctcctg

SEQ ID NO: 940366 - DNA, 15 bp, Homo sapiens
ctgcctcaacctcct

SEQ ID NO: 940367 - DNA, 15 bp, Homo sapiens
cctgcctcaacctcc

SEQ ID NO: 940368 - DNA, 15 bp, Homo sapiens
tcctgcctcaacctc

SEQ ID NO: 940369 - DNA, 15 bp, Homo sapiens
ctcctgcctcaacct

SEQ ID NO: 940370 - DNA, 15 bp, Homo sapiens
tctcctgcctcaacc

SEQ ID NO: 940371 - DNA, 15 bp, Homo sapiens
ttctcctgcctcaac

SEQ ID NO: 940372 - DNA, 15 bp, Homo sapiens
attctcctgcctcaa

SEQ ID NO: 940373 - DNA, 15 bp, Homo sapiens
caggttcaagcaatt

SEQ ID NO: 940374 - DNA, 15 bp, Homo sapiens
ccaggttcaagcaat

SEQ ID NO: 940375 - DNA, 15 bp, Homo sapiens
gccaggttcaagcaa

SEQ ID NO: 940376 - DNA, 15 bp, Homo sapiens
tgccaggttcaagca

SEQ ID NO: 940377 - DNA, 15 bp, Homo sapiens
ctgccaggttcaagc

SEQ ID NO: 940378 - DNA, 15 bp, Homo sapiens
cctgccaggttcaag

SEQ ID NO: 940379 - DNA, 15 bp, Homo sapiens
gcctgccaggttcaa

SEQ ID NO: 940380 - DNA, 15 bp, Homo sapiens
cgcctgccaggttca

SEQ ID NO: 940381 - DNA, 15 bp, Homo sapiens
ccgcctgccaggttc

SEQ ID NO: 940382 - DNA, 15 bp, Homo sapiens
tccgcctgccaggtt

SEQ ID NO: 940383 - DNA, 15 bp, Homo sapiens
ctccgcctgccaggt

SEQ ID NO: 940384 - DNA, 15 bp, Homo sapiens
cctccgcctgccagg

SEQ ID NO: 940385 - DNA, 15 bp, Homo sapiens
acctccgcctgccag

SEQ ID NO: 940386 - DNA, 15 bp, Homo sapiens
aacctccgcctgcca

SEQ ID NO: 940387 - DNA, 15 bp, Homo sapiens
taacctccgcctgcc

SEQ ID NO: 940388 - DNA, 15 bp, Homo sapiens
gtaacctccgcctgc

SEQ ID NO: 940389 - DNA, 15 bp, Homo sapiens
tgtaacctccgcctg

SEQ ID NO: 940390 - DNA, 15 bp, Homo sapiens
ctgtaacctccgcct

SEQ ID NO: 940391 - DNA, 15 bp, Homo sapiens
actgtaacctccgcc

SEQ ID NO: 940392 - DNA, 15 bp, Homo sapiens
cactgtaacctccgc

SEQ ID NO: 940393 - DNA, 15 bp, Homo sapiens
tcactgtaacctccg

SEQ ID NO: 940394 - DNA, 15 bp, Homo sapiens
ctcactgtaacctcc

SEQ ID NO: 940395 - DNA, 15 bp, Homo sapiens
gctcactgtaacctc

SEQ ID NO: 940396 - DNA, 15 bp, Homo sapiens
ggctcactgtaacct

SEQ ID NO: 940397 - DNA, 15 bp, Homo sapiens
tggctcactgtaacc

SEQ ID NO: 940398 - DNA, 15 bp, Homo sapiens
atggctcactgtaac

SEQ ID NO: 940399 - DNA, 15 bp, Homo sapiens
catggctcactgtaa

SEQ ID NO: 940400 - DNA, 15 bp, Homo sapiens
ccatggctcactgta

SEQ ID NO: 940401 - DNA, 15 bp, Homo sapiens
accatggctcactgt

SEQ ID NO: 940402 - DNA, 15 bp, Homo sapiens
gaccatggctcactg

SEQ ID NO: 940403 - DNA, 15 bp, Homo sapiens
tgaccatggctcact

SEQ ID NO: 940404 - DNA, 15 bp, Homo sapiens
gtgaccatggctcac

SEQ ID NO: 940405 - DNA, 15 bp, Homo sapiens
tgtgaccatggctca

SEQ ID NO: 940406 - DNA, 15 bp, Homo sapiens
gtgtgaccatggctc

SEQ ID NO: 940407 - DNA, 15 bp, Homo sapiens
tgtgtgaccatggct

SEQ ID NO: 940408 - DNA, 15 bp, Homo sapiens
ttgtgtgaccatggc

SEQ ID NO: 940409 - DNA, 15 bp, Homo sapiens
gttgtgtgaccatgg

SEQ ID NO: 940410 - DNA, 15 bp, Homo sapiens
agttgtgtgaccatg

SEQ ID NO: 940411 - DNA, 15 bp, Homo sapiens
cagttgtgtgaccat

SEQ ID NO: 940412 - DNA, 15 bp, Homo sapiens
acagttgtgtgacca

SEQ ID NO: 940413 - DNA, 15 bp, Homo sapiens
tacagttgtgtgacc

SEQ ID NO: 940414 - DNA, 15 bp, Homo sapiens
gtacagttgtgtgac

SEQ ID NO: 940415 - DNA, 15 bp, Homo sapiens
agtacagttgtgtga

SEQ ID NO: 940416 - DNA, 15 bp, Homo sapiens
gagtacagttgtgtg

SEQ ID NO: 940417 - DNA, 15 bp, Homo sapiens
ggagtacagttgtgt

SEQ ID NO: 940418 - DNA, 15 bp, Homo sapiens
tggagtacagttgtg

SEQ ID NO: 940419 - DNA, 15 bp, Homo sapiens
ctggagtacagttgt

SEQ ID NO: 940420 - DNA, 15 bp, Homo sapiens
gctggagtacagttg

SEQ ID NO: 940421 - DNA, 15 bp, Homo sapiens
ggctggagtacagtt

SEQ ID NO: 940422 - DNA, 15 bp, Homo sapiens
caggctggagtacag

SEQ ID NO: 940423 - DNA, 15 bp, Homo sapiens
ccaggctggagtaca

SEQ ID NO: 940424 - DNA, 15 bp, Homo sapiens
cccaggctggagtac

SEQ ID NO: 940425 - DNA, 15 bp, Homo sapiens
gcccaggctggagta

SEQ ID NO: 940426 - DNA, 15 bp, Homo sapiens
cgcccaggctggagt

SEQ ID NO: 940427 - DNA, 15 bp, Homo sapiens
tcgcccaggctggag

SEQ ID NO: 940428 - DNA, 15 bp, Homo sapiens
gtcgcccaggctgga

SEQ ID NO: 940429 - DNA, 15 bp, Homo sapiens
tgtcgcccaggctgg

SEQ ID NO: 940430 - DNA, 15 bp, Homo sapiens
ctgtcgcccaggctg

SEQ ID NO: 940431 - DNA, 15 bp, Homo sapiens
tctgtcgcccaggct

SEQ ID NO: 940432 - DNA, 15 bp, Homo sapiens
ctctgtcgcccaggc

SEQ ID NO: 940433 - DNA, 15 bp, Homo sapiens
gctctgtcgcccagg

SEQ ID NO: 940434 - DNA, 15 bp, Homo sapiens
cgctctgtcgcccag

SEQ ID NO: 940435 - DNA, 15 bp, Homo sapiens
tcgctctgtcgccca

SEQ ID NO: 940436 - DNA, 15 bp, Homo sapiens
ctcgctctgtcgccc

SEQ ID NO: 940437 - DNA, 15 bp, Homo sapiens
tctcgctctgtcgcc

SEQ ID NO: 940438 - DNA, 15 bp, Homo sapiens
gtctcgctctgtcgc

SEQ ID NO: 940439 - DNA, 15 bp, Homo sapiens
agtctcgctctgtcg

SEQ ID NO: 940440 - DNA, 15 bp, Homo sapiens
ggagtctcgctctgt

SEQ ID NO: 940441 - DNA, 15 bp, Homo sapiens
tggagtctcgctctg

SEQ ID NO: 940442 - DNA, 15 bp, Homo sapiens
atggagtctcgctct

SEQ ID NO: 940443 - DNA, 15 bp, Homo sapiens
gatggagtctcgctc

SEQ ID NO: 940444 - DNA, 15 bp, Homo sapiens
agatggagtctcgct

SEQ ID NO: 940445 - DNA, 15 bp, Homo sapiens
aagatggagtctcgc

SEQ ID NO: 940446 - DNA, 15 bp, Homo sapiens
aaagatggagtctcg

SEQ ID NO: 940447 - DNA, 15 bp, Homo sapiens
aaaagatggagtctc

SEQ ID NO: 940448 - DNA, 15 bp, Homo sapiens
taaaagatggagtct

SEQ ID NO: 940449 - DNA, 15 bp, Homo sapiens
ttaaaagatggagtc

SEQ ID NO: 940450 - DNA, 15 bp, Homo sapiens
tttaaaagatggagt

SEQ ID NO: 940451 - DNA, 15 bp, Homo sapiens
ttttaaaagatggag

SEQ ID NO: 940452 - DNA, 15 bp, Homo sapiens
gttttaaaagatgga

SEQ ID NO: 940453 - DNA, 15 bp, Homo sapiens
tgttttaaaagatgg

SEQ ID NO: 940454 - DNA, 15 bp, Homo sapiens
ttgttttaaaagatg

SEQ ID NO: 940455 - DNA, 15 bp, Homo sapiens
tttgttttaaaagat

SEQ ID NO: 940456 - DNA, 15 bp, Homo sapiens
ttttgttttaaaaga

SEQ ID NO: 940457 - DNA, 15 bp, Homo sapiens
tttttgttttaaaag

SEQ ID NO: 940458 - DNA, 15 bp, Homo sapiens
ttttttgttttaaaa

SEQ ID NO: 940459 - DNA, 15 bp, Homo sapiens
tttttttgttttaaa

SEQ ID NO: 940460 - DNA, 15 bp, Homo sapiens
ttttttttgttttaa

SEQ ID NO: 940461 - DNA, 15 bp, Homo sapiens
tttttttttgtttta

SEQ ID NO: 940462 - DNA, 15 bp, Homo sapiens
ttttttttttgtttt

SEQ ID NO: 940463 - DNA, 15 bp, Homo sapiens
tttttttttttgttt

SEQ ID NO: 940464 - DNA, 15 bp, Homo sapiens
ttttttttttttgtt

SEQ ID NO: 940465 - DNA, 15 bp, Homo sapiens
cttttttttttttgt

SEQ ID NO: 940466 - DNA, 15 bp, Homo sapiens
ccttttttttttttg

SEQ ID NO: 940467 - DNA, 15 bp, Homo sapiens
tcctttttttttttt

SEQ ID NO: 940468 - DNA, 15 bp, Homo sapiens
ttccttttttttttt

SEQ ID NO: 940469 - DNA, 15 bp, Homo sapiens
tttcctttttttttt

SEQ ID NO: 940470 - DNA, 15 bp, Homo sapiens
ttttccttttttttt

SEQ ID NO: 940471 - DNA, 15 bp, Homo sapiens
tttttcctttttttt

SEQ ID NO: 940472 - DNA, 15 bp, Homo sapiens
atttttccttttttt

SEQ ID NO: 940473 - DNA, 15 bp, Homo sapiens
tatttttcctttttt

SEQ ID NO: 940474 - DNA, 15 bp, Homo sapiens
atatttttccttttt

SEQ ID NO: 940475 - DNA, 15 bp, Homo sapiens
aatatttttcctttt

SEQ ID NO: 940476 - DNA, 15 bp, Homo sapiens
gaatatttttccttt

SEQ ID NO: 940477 - DNA, 15 bp, Homo sapiens
tgaatatttttcctt

SEQ ID NO: 940478 - DNA, 15 bp, Homo sapiens
ctgaatatttttcct

SEQ ID NO: 940479 - DNA, 15 bp, Homo sapiens
tctgaatatttttcc

SEQ ID NO: 940480 - DNA, 15 bp, Homo sapiens
actgttctgaatatt

SEQ ID NO: 940481 - DNA, 15 bp, Homo sapiens
tactgttctgaatat

SEQ ID NO: 940482 - DNA, 15 bp, Homo sapiens
atactgttctgaata

SEQ ID NO: 940483 - DNA, 15 bp, Homo sapiens
gatactgttctgaat

SEQ ID NO: 940484 - DNA, 15 bp, Homo sapiens
agatactgttctgaa

SEQ ID NO: 940485 - DNA, 15 bp, Homo sapiens
aagatactgttctga

SEQ ID NO: 940486 - DNA, 15 bp, Homo sapiens
caagatactgttctg

SEQ ID NO: 940487 - DNA, 15 bp, Homo sapiens
gcaagatactgttct

SEQ ID NO: 940488 - DNA, 15 bp, Homo sapiens
agcaagatactgttc

SEQ ID NO: 940489 - DNA, 15 bp, Homo sapiens
cagcaagatactgtt

SEQ ID NO: 940490 - DNA, 15 bp, Homo sapiens
ccagcaagatactgt

SEQ ID NO: 940491 - DNA, 15 bp, Homo sapiens
gccagcaagatactg

SEQ ID NO: 940492 - DNA, 15 bp, Homo sapiens
tgccagcaagatact

SEQ ID NO: 940493 - DNA, 15 bp, Homo sapiens
ctgccagcaagatac

SEQ ID NO: 940494 - DNA, 15 bp, Homo sapiens
gctgccagcaagata

SEQ ID NO: 940495 - DNA, 15 bp, Homo sapiens
tgctgccagcaagat

SEQ ID NO: 940496 - DNA, 15 bp, Homo sapiens
ttgctgccagcaaga

SEQ ID NO: 940497 - DNA, 15 bp, Homo sapiens
gttgctgccagcaag

SEQ ID NO: 940498 - DNA, 15 bp, Homo sapiens
tgttgctgccagcaa

SEQ ID NO: 940499 - DNA, 15 bp, Homo sapiens
atgttgctgccagca

SEQ ID NO: 940500 - DNA, 15 bp, Homo sapiens
aatgttgctgccagc

SEQ ID NO: 940501 - DNA, 15 bp, Homo sapiens
aaatgttgctgccag

SEQ ID NO: 940502 - DNA, 15 bp, Homo sapiens
caaatgttgctgcca

SEQ ID NO: 940503 - DNA, 15 bp, Homo sapiens
acaaatgttgctgcc

SEQ ID NO: 940504 - DNA, 15 bp, Homo sapiens
aacaaatgttgctgc

SEQ ID NO: 940505 - DNA, 15 bp, Homo sapiens
aaacaaatgttgctg

SEQ ID NO: 940506 - DNA, 15 bp, Homo sapiens
gaaacaaatgttgct

SEQ ID NO: 940507 - DNA, 15 bp, Homo sapiens
tgaaacaaatgttgc

SEQ ID NO: 940508 - DNA, 15 bp, Homo sapiens
atgaaacaaatgttg

SEQ ID NO: 940509 - DNA, 15 bp, Homo sapiens
gatgaaacaaatgtt

SEQ ID NO: 940510 - DNA, 15 bp, Homo sapiens
tgatgaaacaaatgt

SEQ ID NO: 940511 - DNA, 15 bp, Homo sapiens
ttgatgaaacaaatg

SEQ ID NO: 940512 - DNA, 15 bp, Homo sapiens
attgatgaaacaaat

SEQ ID NO: 940513 - DNA, 15 bp, Homo sapiens
cattgatgaaacaaa

SEQ ID NO: 940514 - DNA, 15 bp, Homo sapiens
tcattgatgaaacaa

SEQ ID NO: 940515 - DNA, 15 bp, Homo sapiens
ttcattgatgaaaca

SEQ ID NO: 940516 - DNA, 15 bp, Homo sapiens
tttcattgatgaaac

SEQ ID NO: 940517 - DNA, 15 bp, Homo sapiens
ttttcattgatgaaa

SEQ ID NO: 940518 - DNA, 15 bp, Homo sapiens
attttcattgatgaa

SEQ ID NO: 940519 - DNA, 15 bp, Homo sapiens
tattttcattgatga

SEQ ID NO: 940520 - DNA, 15 bp, Homo sapiens
atattttcattgatg

SEQ ID NO: 940521 - DNA, 15 bp, Homo sapiens
catattttcattgat

SEQ ID NO: 940522 - DNA, 15 bp, Homo sapiens
acatattttcattga

SEQ ID NO: 940523 - DNA, 15 bp, Homo sapiens
cacatattttcattg

SEQ ID NO: 940524 - DNA, 15 bp, Homo sapiens
acacatattttcatt

SEQ ID NO: 940525 - DNA, 15 bp, Homo sapiens
aacacatattttcat

SEQ ID NO: 940526 - DNA, 15 bp, Homo sapiens
taacacatattttca

SEQ ID NO: 940527 - DNA, 15 bp, Homo sapiens
ttaacacatattttc

SEQ ID NO: 940528 - DNA, 15 bp, Homo sapiens
attaacacatatttt

SEQ ID NO: 940529 - DNA, 15 bp, Homo sapiens
aattaacacatattt

SEQ ID NO: 940530 - DNA, 15 bp, Homo sapiens
aaattaacacatatt

SEQ ID NO: 940531 - DNA, 15 bp, Homo sapiens
caaattaacacatat

SEQ ID NO: 940532 - DNA, 15 bp, Homo sapiens
tcaaattaacacata

SEQ ID NO: 940533 - DNA, 15 bp, Homo sapiens
gtcaaattaacacat

SEQ ID NO: 940534 - DNA, 15 bp, Homo sapiens
ggtcaaattaacaca

SEQ ID NO: 940535 - DNA, 15 bp, Homo sapiens
aggtcaaattaacac

SEQ ID NO: 940536 - DNA, 15 bp, Homo sapiens
aaggtcaaattaaca

SEQ ID NO: 940537 - DNA, 15 bp, Homo sapiens
aaaggtcaaattaac

SEQ ID NO: 940538 - DNA, 15 bp, Homo sapiens
aaaaggtcaaattaa

SEQ ID NO: 940539 - DNA, 15 bp, Homo sapiens
gaaaaggtcaaatta

SEQ ID NO: 940540 - DNA, 15 bp, Homo sapiens
agaaaaggtcaaatt

SEQ ID NO: 940541 - DNA, 15 bp, Homo sapiens
tagaaaaggtcaaat

SEQ ID NO: 940542 - DNA, 15 bp, Homo sapiens
atagaaaaggtcaaa

SEQ ID NO: 940543 - DNA, 15 bp, Homo sapiens
gatagaaaaggtcaa

SEQ ID NO: 940544 - DNA, 15 bp, Homo sapiens
agatagaaaaggtca

SEQ ID NO: 940545 - DNA, 15 bp, Homo sapiens
tagatagaaaaggtc

SEQ ID NO: 940546 - DNA, 15 bp, Homo sapiens
ttagatagaaaaggt

SEQ ID NO: 940547 - DNA, 15 bp, Homo sapiens
cttagatagaaaagg

SEQ ID NO: 940548 - DNA, 15 bp, Homo sapiens
acttagatagaaaag

SEQ ID NO: 940549 - DNA, 15 bp, Homo sapiens
aacttagatagaaaa

SEQ ID NO: 940550 - DNA, 15 bp, Homo sapiens
taacttagatagaaa

SEQ ID NO: 940551 - DNA, 15 bp, Homo sapiens
ttaacttagatagaa

SEQ ID NO: 940552 - DNA, 15 bp, Homo sapiens
attaacttagataga

SEQ ID NO: 940553 - DNA, 15 bp, Homo sapiens
aattaacttagatag

SEQ ID NO: 940554 - DNA, 15 bp, Homo sapiens
taattaacttagata

SEQ ID NO: 940555 - DNA, 15 bp, Homo sapiens
ataattaacttagat

SEQ ID NO: 940556 - DNA, 15 bp, Homo sapiens
cataattaacttaga

SEQ ID NO: 940557 - DNA, 15 bp, Homo sapiens
tcataattaacttag

SEQ ID NO: 940558 - DNA, 15 bp, Homo sapiens
ttcataattaactta

SEQ ID NO: 940559 - DNA, 15 bp, Homo sapiens
tttcataattaactt

SEQ ID NO: 940560 - DNA, 15 bp, Homo sapiens
ctttcataattaact

SEQ ID NO: 940561 - DNA, 15 bp, Homo sapiens
actttcataattaac

SEQ ID NO: 940562 - DNA, 15 bp, Homo sapiens
cactttcataattaa

SEQ ID NO: 940563 - DNA, 15 bp, Homo sapiens
gcactttcataatta

SEQ ID NO: 940564 - DNA, 15 bp, Homo sapiens
tgcactttcataatt

SEQ ID NO: 940565 - DNA, 15 bp, Homo sapiens
atgcactttcataat

SEQ ID NO: 940566 - DNA, 15 bp, Homo sapiens
tatgcactttcataa

SEQ ID NO: 940567 - DNA, 15 bp, Homo sapiens
gtatgcactttcata

SEQ ID NO: 940568 - DNA, 15 bp, Homo sapiens
agtatgcactttcat

SEQ ID NO: 940569 - DNA, 15 bp, Homo sapiens
tagtatgcactttca

SEQ ID NO: 940570 - DNA, 15 bp, Homo sapiens
ttagtatgcactttc

SEQ ID NO: 940571 - DNA, 15 bp, Homo sapiens
tttagtatgcacttt

SEQ ID NO: 940572 - DNA, 15 bp, Homo sapiens
ttttagtatgcactt

SEQ ID NO: 940573 - DNA, 15 bp, Homo sapiens
attttagtatgcact

SEQ ID NO: 940574 - DNA, 15 bp, Homo sapiens
cattttagtatgcac

SEQ ID NO: 940575 - DNA, 15 bp, Homo sapiens
tcattttagtatgca

SEQ ID NO: 940576 - DNA, 15 bp, Homo sapiens
atcattttagtatgc

SEQ ID NO: 940577 - DNA, 15 bp, Homo sapiens
catcattttagtatg

SEQ ID NO: 940578 - DNA, 15 bp, Homo sapiens
acatcattttagtat

SEQ ID NO: 940579 - DNA, 15 bp, Homo sapiens
tacatcattttagta

SEQ ID NO: 940580 - DNA, 15 bp, Homo sapiens
ttacatcattttagt

SEQ ID NO: 940581 - DNA, 15 bp, Homo sapiens
tttacatcattttag

SEQ ID NO: 940582 - DNA, 15 bp, Homo sapiens
ttttacatcatttta

SEQ ID NO: 940583 - DNA, 15 bp, Homo sapiens
cttttacatcatttt

SEQ ID NO: 940584 - DNA, 15 bp, Homo sapiens
acttttacatcattt

SEQ ID NO: 940585 - DNA, 15 bp, Homo sapiens
aacttttacatcatt

SEQ ID NO: 940586 - DNA, 15 bp, Homo sapiens
aaacttttacatcat

SEQ ID NO: 940587 - DNA, 15 bp, Homo sapiens
taaacttttacatca

SEQ ID NO: 940588 - DNA, 15 bp, Homo sapiens
ataaacttttacatc

SEQ ID NO: 940589 - DNA, 15 bp, Homo sapiens
tataaacttttacat

SEQ ID NO: 940590 - DNA, 15 bp, Homo sapiens
atataaacttttaca

SEQ ID NO: 940591 - DNA, 15 bp, Homo sapiens
aatataaacttttac

SEQ ID NO: 940592 - DNA, 15 bp, Homo sapiens
aaatataaactttta

SEQ ID NO: 940593 - DNA, 15 bp, Homo sapiens
gaaatataaactttt

SEQ ID NO: 940594 - DNA, 15 bp, Homo sapiens
tgaaatataaacttt

SEQ ID NO: 940595 - DNA, 15 bp, Homo sapiens
ctgaaatataaactt

SEQ ID NO: 940596 - DNA, 15 bp, Homo sapiens
cctgaaatataaact

SEQ ID NO: 940597 - DNA, 15 bp, Homo sapiens
tcctgaaatataaac

SEQ ID NO: 940598 - DNA, 15 bp, Homo sapiens
atcctgaaatataaa

SEQ ID NO: 940599 - DNA, 15 bp, Homo sapiens
aatcctgaaatataa

SEQ ID NO: 940600 - DNA, 15 bp, Homo sapiens
taatcctgaaatata

SEQ ID NO: 940601 - DNA, 15 bp, Homo sapiens
ataatcctgaaatat

SEQ ID NO: 940602 - DNA, 15 bp, Homo sapiens
aataatcctgaaata

SEQ ID NO: 940603 - DNA, 15 bp, Homo sapiens
gaataatcctgaaat

SEQ ID NO: 940604 - DNA, 15 bp, Homo sapiens
agaataatcctgaaa

SEQ ID NO: 940605 - DNA, 15 bp, Homo sapiens
aagaataatcctgaa

SEQ ID NO: 940606 - DNA, 15 bp, Homo sapiens
taagaataatcctga

SEQ ID NO: 940607 - DNA, 15 bp, Homo sapiens
ataagaataatcctg

SEQ ID NO: 940608 - DNA, 15 bp, Homo sapiens
aataagaataatcct

SEQ ID NO: 940609 - DNA, 15 bp, Homo sapiens
gaataagaataatcc

SEQ ID NO: 940610 - DNA, 15 bp, Homo sapiens
tgaataagaataatc

SEQ ID NO: 940611 - DNA, 15 bp, Homo sapiens
atgaataagaataat

SEQ ID NO: 940612 - DNA, 15 bp, Homo sapiens
catgaataagaataa

SEQ ID NO: 940613 - DNA, 15 bp, Homo sapiens
ccatgaataagaata

SEQ ID NO: 940614 - DNA, 15 bp, Homo sapiens
tccatgaataagaat

SEQ ID NO: 940615 - DNA, 15 bp, Homo sapiens
atccatgaataagaa

SEQ ID NO: 940616 - DNA, 15 bp, Homo sapiens
catccatgaataaga

SEQ ID NO: 940617 - DNA, 15 bp, Homo sapiens
tcatccatgaataag

SEQ ID NO: 940618 - DNA, 15 bp, Homo sapiens
atcatccatgaataa

SEQ ID NO: 940619 - DNA, 15 bp, Homo sapiens
aatcatccatgaata

SEQ ID NO: 940620 - DNA, 15 bp, Homo sapiens
taatcatccatgaat

SEQ ID NO: 940621 - DNA, 15 bp, Homo sapiens
ttaatcatccatgaa

SEQ ID NO: 940622 - DNA, 15 bp, Homo sapiens
gttaatcatccatga

SEQ ID NO: 940623 - DNA, 15 bp, Homo sapiens
agttaatcatccatg

SEQ ID NO: 940624 - DNA, 15 bp, Homo sapiens
tagttaatcatccat

SEQ ID NO: 940625 - DNA, 15 bp, Homo sapiens
ttagttaatcatcca

SEQ ID NO: 940626 - DNA, 15 bp, Homo sapiens
tttagttaatcatcc

SEQ ID NO: 940627 - DNA, 15 bp, Homo sapiens
ttttagttaatcatc

SEQ ID NO: 940628 - DNA, 15 bp, Homo sapiens
attttagttaatcat

SEQ ID NO: 940629 - DNA, 15 bp, Homo sapiens
cattttagttaatca

SEQ ID NO: 940630 - DNA, 15 bp, Homo sapiens
gcattttagttaatc

SEQ ID NO: 940631 - DNA, 15 bp, Homo sapiens
tgcattttagttaat

SEQ ID NO: 940632 - DNA, 15 bp, Homo sapiens
ttgcattttagttaa

SEQ ID NO: 940633 - DNA, 15 bp, Homo sapiens
tttgcattttagtta

SEQ ID NO: 940634 - DNA, 15 bp, Homo sapiens
ttttgcattttagtt

SEQ ID NO: 940635 - DNA, 15 bp, Homo sapiens
tttttgcattttagt

SEQ ID NO: 940636 - DNA, 15 bp, Homo sapiens
ctttttgcattttag

SEQ ID NO: 940637 - DNA, 15 bp, Homo sapiens
tctttttgcatttta

SEQ ID NO: 940638 - DNA, 15 bp, Homo sapiens
ttctttttgcatttt

SEQ ID NO: 940639 - DNA, 15 bp, Homo sapiens
tttctttttgcattt

SEQ ID NO: 940640 - DNA, 15 bp, Homo sapiens
atttctttttgcatt

SEQ ID NO: 940641 - DNA, 15 bp, Homo sapiens
aatttctttttgcat

SEQ ID NO: 940642 - DNA, 15 bp, Homo sapiens
taatttctttttgca

SEQ ID NO: 940643 - DNA, 15 bp, Homo sapiens
ttaatttctttttgc

SEQ ID NO: 940644 - DNA, 15 bp, Homo sapiens
cttaatttctttttg

SEQ ID NO: 940645 - DNA, 15 bp, Homo sapiens
gcttaatttcttttt

SEQ ID NO: 940646 - DNA, 15 bp, Homo sapiens
tgcttaatttctttt

SEQ ID NO: 940647 - DNA, 15 bp, Homo sapiens
atgcttaatttcttt

SEQ ID NO: 940648 - DNA, 15 bp, Homo sapiens
tatgcttaatttctt

SEQ ID NO: 940649 - DNA, 15 bp, Homo sapiens
gtatgcttaatttct

SEQ ID NO: 940650 - DNA, 15 bp, Homo sapiens
agtatgcttaatttc

SEQ ID NO: 940651 - DNA, 15 bp, Homo sapiens
cagtatgcttaattt

SEQ ID NO: 940652 - DNA, 15 bp, Homo sapiens
acagtatgcttaatt

SEQ ID NO: 940653 - DNA, 15 bp, Homo sapiens
aacagtatgcttaat

SEQ ID NO: 940654 - DNA, 15 bp, Homo sapiens
aaacagtatgcttaa

SEQ ID NO: 940655 - DNA, 15 bp, Homo sapiens
caaacagtatgctta

SEQ ID NO: 940656 - DNA, 15 bp, Homo sapiens
ccaaacagtatgctt

SEQ ID NO: 940657 - DNA, 15 bp, Homo sapiens
gccaaacagtatgct

SEQ ID NO: 940658 - DNA, 15 bp, Homo sapiens
agccaaacagtatgc

SEQ ID NO: 940659 - DNA, 15 bp, Homo sapiens
tagccaaacagtatg

SEQ ID NO: 940660 - DNA, 15 bp, Homo sapiens
ttagccaaacagtat

SEQ ID NO: 940661 - DNA, 15 bp, Homo sapiens
tttagccaaacagta

SEQ ID NO: 940662 - DNA, 15 bp, Homo sapiens
gtttagccaaacagt

SEQ ID NO: 940663 - DNA, 15 bp, Homo sapiens
agtttagccaaacag

SEQ ID NO: 940664 - DNA, 15 bp, Homo sapiens
cagtttagccaaaca

SEQ ID NO: 940665 - DNA, 15 bp, Homo sapiens
acagtttagccaaac

SEQ ID NO: 940666 - DNA, 15 bp, Homo sapiens
aacagtttagccaaa

SEQ ID NO: 940667 - DNA, 15 bp, Homo sapiens
taacagtttagccaa

SEQ ID NO: 940668 - DNA, 15 bp, Homo sapiens
ttaacagtttagcca

SEQ ID NO: 940669 - DNA, 15 bp, Homo sapiens
tttaacagtttagcc

SEQ ID NO: 940670 - DNA, 15 bp, Homo sapiens
ttttaacagtttagc

SEQ ID NO: 940671 - DNA, 15 bp, Homo sapiens
tttttaacagtttag

SEQ ID NO: 940672 - DNA, 15 bp, Homo sapiens
atttttaacagttta

SEQ ID NO: 940673 - DNA, 15 bp, Homo sapiens
aatttttaacagttt

SEQ ID NO: 940674 - DNA, 15 bp, Homo sapiens
taatttttaacagtt

SEQ ID NO: 940675 - DNA, 15 bp, Homo sapiens
ataatttttaacagt

SEQ ID NO: 940676 - DNA, 15 bp, Homo sapiens
aataatttttaacag

SEQ ID NO: 940677 - DNA, 15 bp, Homo sapiens
aaataatttttaaca

SEQ ID NO: 940678 - DNA, 15 bp, Homo sapiens
aaaataatttttaac

SEQ ID NO: 940679 - DNA, 15 bp, Homo sapiens
aaaaataatttttaa

SEQ ID NO: 940680 - DNA, 15 bp, Homo sapiens
taaaaataattttta

SEQ ID NO: 940681 - DNA, 15 bp, Homo sapiens
ataaaaataattttt

SEQ ID NO: 940682 - DNA, 15 bp, Homo sapiens
aataaaaataatttt

SEQ ID NO: 940683 - DNA, 15 bp, Homo sapiens
aaataaaaataattt

SEQ ID NO: 940684 - DNA, 15 bp, Homo sapiens
aaaataaaaataatt

SEQ ID NO: 940685 - DNA, 15 bp, Homo sapiens
taaaataaaaataat

SEQ ID NO: 940686 - DNA, 15 bp, Homo sapiens
ttaaaataaaaataa

SEQ ID NO: 940687 - DNA, 15 bp, Homo sapiens
tttaaaataaaaata

SEQ ID NO: 940688 - DNA, 15 bp, Homo sapiens
atttaaaataaaaat

SEQ ID NO: 940689 - DNA, 15 bp, Homo sapiens
catttaaaataaaaa

SEQ ID NO: 940690 - DNA, 15 bp, Homo sapiens
tcatttaaaataaaa

SEQ ID NO: 940691 - DNA, 15 bp, Homo sapiens
atcatttaaaataaa

SEQ ID NO: 940692 - DNA, 15 bp, Homo sapiens
tatcatttaaaataa

SEQ ID NO: 940693 - DNA, 15 bp, Homo sapiens
ttatcatttaaaata

SEQ ID NO: 940694 - DNA, 15 bp, Homo sapiens
cttatcatttaaaat

SEQ ID NO: 940695 - DNA, 15 bp, Homo sapiens
gcttatcatttaaaa

SEQ ID NO: 940696 - DNA, 15 bp, Homo sapiens
tgcttatcatttaaa

SEQ ID NO: 940697 - DNA, 15 bp, Homo sapiens
ctgcttatcatttaa

SEQ ID NO: 940698 - DNA, 15 bp, Homo sapiens
actgcttatcattta

SEQ ID NO: 940699 - DNA, 15 bp, Homo sapiens
aactgcttatcattt

SEQ ID NO: 940700 - DNA, 15 bp, Homo sapiens
taactgcttatcatt

SEQ ID NO: 940701 - DNA, 15 bp, Homo sapiens
ttaactgcttatcat

SEQ ID NO: 940702 - DNA, 15 bp, Homo sapiens
tttaactgcttatca

SEQ ID NO: 940703 - DNA, 15 bp, Homo sapiens
gtttaactgcttatc

SEQ ID NO: 940704 - DNA, 15 bp, Homo sapiens
agtttaactgcttat

SEQ ID NO: 940705 - DNA, 15 bp, Homo sapiens
aagtttaactgctta

SEQ ID NO: 940706 - DNA, 15 bp, Homo sapiens
taagtttaactgctt

SEQ ID NO: 940707 - DNA, 15 bp, Homo sapiens
ataagtttaactgct

SEQ ID NO: 940708 - DNA, 15 bp, Homo sapiens
aataagtttaactgc

SEQ ID NO: 940709 - DNA, 15 bp, Homo sapiens
taataagtttaactg

SEQ ID NO: 940710 - DNA, 15 bp, Homo sapiens
ttaataagtttaact

SEQ ID NO: 940711 - DNA, 15 bp, Homo sapiens
cttaataagtttaac

SEQ ID NO: 940712 - DNA, 15 bp, Homo sapiens
acttaataagtttaa

SEQ ID NO: 940713 - DNA, 15 bp, Homo sapiens
cacttaataagttta

SEQ ID NO: 940714 - DNA, 15 bp, Homo sapiens
tcacttaataagttt

SEQ ID NO: 940715 - DNA, 15 bp, Homo sapiens
atcacttaataagtt

SEQ ID NO: 940716 - DNA, 15 bp, Homo sapiens
catcacttaataagt

SEQ ID NO: 940717 - DNA, 15 bp, Homo sapiens
tcatcacttaataag

SEQ ID NO: 940718 - DNA, 15 bp, Homo sapiens
gtcatcacttaataa

SEQ ID NO: 940719 - DNA, 15 bp, Homo sapiens
agtcatcacttaata

SEQ ID NO: 940720 - DNA, 15 bp, Homo sapiens
gagtcatcacttaat

SEQ ID NO: 940721 - DNA, 15 bp, Homo sapiens
tgagtcatcacttaa

SEQ ID NO: 940722 - DNA, 15 bp, Homo sapiens
atgagtcatcactta

SEQ ID NO: 940723 - DNA, 15 bp, Homo sapiens
gatgagtcatcactt

SEQ ID NO: 940724 - DNA, 15 bp, Homo sapiens
agatgagtcatcact

SEQ ID NO: 940725 - DNA, 15 bp, Homo sapiens
gagatgagtcatcac

SEQ ID NO: 940726 - DNA, 15 bp, Homo sapiens
agagatgagtcatca

SEQ ID NO: 940727 - DNA, 15 bp, Homo sapiens
cagagatgagtcatc

SEQ ID NO: 940728 - DNA, 15 bp, Homo sapiens
gcagagatgagtcat

SEQ ID NO: 940729 - DNA, 15 bp, Homo sapiens
agcagagatgagtca

SEQ ID NO: 940730 - DNA, 15 bp, Homo sapiens
cagcagagatgagtc

SEQ ID NO: 940731 - DNA, 15 bp, Homo sapiens
tcagcagagatgagt

SEQ ID NO: 940732 - DNA, 15 bp, Homo sapiens
atcagcagagatgag

SEQ ID NO: 940733 - DNA, 15 bp, Homo sapiens
tatcagcagagatga

SEQ ID NO: 940734 - DNA, 15 bp, Homo sapiens
atatcagcagagatg

SEQ ID NO: 940735 - DNA, 15 bp, Homo sapiens
tatatcagcagagat

SEQ ID NO: 940736 - DNA, 15 bp, Homo sapiens
atatatcagcagaga

SEQ ID NO: 940737 - DNA, 15 bp, Homo sapiens
aatatatcagcagag

SEQ ID NO: 940738 - DNA, 15 bp, Homo sapiens
aaatatatcagcaga

SEQ ID NO: 940739 - DNA, 15 bp, Homo sapiens
taaatatatcagcag

SEQ ID NO: 940740 - DNA, 15 bp, Homo sapiens
ataaatatatcagca

SEQ ID NO: 940741 - DNA, 15 bp, Homo sapiens
cataaatatatcagc

SEQ ID NO: 940742 - DNA, 15 bp, Homo sapiens
gcataaatatatcag

SEQ ID NO: 940743 - DNA, 15 bp, Homo sapiens
tgcataaatatatca

SEQ ID NO: 940744 - DNA, 15 bp, Homo sapiens
ttgcataaatatatc

SEQ ID NO: 940745 - DNA, 15 bp, Homo sapiens
cttgcataaatatat

SEQ ID NO: 940746 - DNA, 15 bp, Homo sapiens
ccttgcataaatata

SEQ ID NO: 940747 - DNA, 15 bp, Homo sapiens
accttgcataaatat

SEQ ID NO: 940748 - DNA, 15 bp, Homo sapiens
aaccttgcataaata

SEQ ID NO: 940749 - DNA, 15 bp, Homo sapiens
aaaccttgcataaat

SEQ ID NO: 940750 - DNA, 15 bp, Homo sapiens
aaaaccttgcataaa

SEQ ID NO: 940751 - DNA, 15 bp, Homo sapiens
aaaaaccttgcataa

SEQ ID NO: 940752 - DNA, 15 bp, Homo sapiens
aaaaaaccttgcata

SEQ ID NO: 940753 - DNA, 15 bp, Homo sapiens
taaaaaaccttgcat

SEQ ID NO: 940754 - DNA, 15 bp, Homo sapiens
ataaaaaaccttgca

SEQ ID NO: 940755 - DNA, 15 bp, Homo sapiens
aataaaaaaccttgc

SEQ ID NO: 940756 - DNA, 15 bp, Homo sapiens
aaataaaaaaccttg

SEQ ID NO: 940757 - DNA, 15 bp, Homo sapiens
gaaataaaaaacctt

SEQ ID NO: 940758 - DNA, 15 bp, Homo sapiens
tgaaataaaaaacct

SEQ ID NO: 940759 - DNA, 15 bp, Homo sapiens
ctgaaataaaaaacc

SEQ ID NO: 940760 - DNA, 15 bp, Homo sapiens
tctgaaataaaaaac

SEQ ID NO: 940761 - DNA, 15 bp, Homo sapiens
atctgaaataaaaaa

SEQ ID NO: 940762 - DNA, 15 bp, Homo sapiens
tatctgaaataaaaa

SEQ ID NO: 940763 - DNA, 15 bp, Homo sapiens
ttatctgaaataaaa

SEQ ID NO: 940764 - DNA, 15 bp, Homo sapiens
gttatctgaaataaa

SEQ ID NO: 940765 - DNA, 15 bp, Homo sapiens
agttatctgaaataa

SEQ ID NO: 940766 - DNA, 15 bp, Homo sapiens
gagttatctgaaata

SEQ ID NO: 940767 - DNA, 15 bp, Homo sapiens
agagttatctgaaat

SEQ ID NO: 940768 - DNA, 15 bp, Homo sapiens
aagagttatctgaaa

SEQ ID NO: 940769 - DNA, 15 bp, Homo sapiens
gaagagttatctgaa

SEQ ID NO: 940770 - DNA, 15 bp, Homo sapiens
agaagagttatctga

SEQ ID NO: 940771 - DNA, 15 bp, Homo sapiens
tagaagagttatctg

SEQ ID NO: 940772 - DNA, 15 bp, Homo sapiens
atagaagagttatct

SEQ ID NO: 940773 - DNA, 15 bp, Homo sapiens
aatagaagagttatc

SEQ ID NO: 940774 - DNA, 15 bp, Homo sapiens
aaatagaagagttat

SEQ ID NO: 940775 - DNA, 15 bp, Homo sapiens
taaatagaagagtta

SEQ ID NO: 940776 - DNA, 15 bp, Homo sapiens
ataaatagaagagtt

SEQ ID NO: 940777 - DNA, 15 bp, Homo sapiens
tataaatagaagagt

SEQ ID NO: 940778 - DNA, 15 bp, Homo sapiens
atataaatagaagag

SEQ ID NO: 940779 - DNA, 15 bp, Homo sapiens
aatataaatagaaga

SEQ ID NO: 940780 - DNA, 15 bp, Homo sapiens
taatataaatagaag

SEQ ID NO: 940781 - DNA, 15 bp, Homo sapiens
ttaatataaatagaa

SEQ ID NO: 940782 - DNA, 15 bp, Homo sapiens
tttaatataaataga

SEQ ID NO: 940783 - DNA, 15 bp, Homo sapiens
gtttaatataaatag

SEQ ID NO: 940784 - DNA, 15 bp, Homo sapiens
tgtttaatataaata

SEQ ID NO: 940785 - DNA, 15 bp, Homo sapiens
ctgtttaatataaat

SEQ ID NO: 940786 - DNA, 15 bp, Homo sapiens
tctgtttaatataaa

SEQ ID NO: 940787 - DNA, 15 bp, Homo sapiens
ttctgtttaatataa

SEQ ID NO: 940788 - DNA, 15 bp, Homo sapiens
tttctgtttaatata

SEQ ID NO: 940789 - DNA, 15 bp, Homo sapiens
gtttctgtttaatat

SEQ ID NO: 940790 - DNA, 15 bp, Homo sapiens
agtttctgtttaata

SEQ ID NO: 940791 - DNA, 15 bp, Homo sapiens
cagtttctgtttaat

SEQ ID NO: 940792 - DNA, 15 bp, Homo sapiens
acagtttctgtttaa

SEQ ID NO: 940793 - DNA, 15 bp, Homo sapiens
tacagtttctgttta

SEQ ID NO: 940794 - DNA, 15 bp, Homo sapiens
atacagtttctgttt

SEQ ID NO: 940795 - DNA, 15 bp, Homo sapiens
aatacagtttctgtt

SEQ ID NO: 940796 - DNA, 15 bp, Homo sapiens
aaatacagtttctgt

SEQ ID NO: 940797 - DNA, 15 bp, Homo sapiens
gaaatacagtttctg

SEQ ID NO: 940798 - DNA, 15 bp, Homo sapiens
agaaatacagtttct

SEQ ID NO: 940799 - DNA, 15 bp, Homo sapiens
tagaaatacagtttc

SEQ ID NO: 940800 - DNA, 15 bp, Homo sapiens
ttagaaatacagttt

SEQ ID NO: 940801 - DNA, 15 bp, Homo sapiens
cttagaaatacagtt

SEQ ID NO: 940802 - DNA, 15 bp, Homo sapiens
gcttagaaatacagt

SEQ ID NO: 940803 - DNA, 15 bp, Homo sapiens
tgcttagaaatacag

SEQ ID NO: 940804 - DNA, 15 bp, Homo sapiens
ttgcttagaaataca

SEQ ID NO: 940805 - DNA, 15 bp, Homo sapiens
attgcttagaaatac

SEQ ID NO: 940806 - DNA, 15 bp, Homo sapiens
tattgcttagaaata

SEQ ID NO: 940807 - DNA, 15 bp, Homo sapiens
ctattgcttagaaat

SEQ ID NO: 940808 - DNA, 15 bp, Homo sapiens
gctattgcttagaaa

SEQ ID NO: 940809 - DNA, 15 bp, Homo sapiens
tgctattgcttagaa

SEQ ID NO: 940810 - DNA, 15 bp, Homo sapiens
atgctattgcttaga

SEQ ID NO: 940811 - DNA, 15 bp, Homo sapiens
aatgctattgcttag

SEQ ID NO: 940812 - DNA, 15 bp, Homo sapiens
aaatgctattgctta

SEQ ID NO: 940813 - DNA, 15 bp, Homo sapiens
gaaatgctattgctt

SEQ ID NO: 940814 - DNA, 15 bp, Homo sapiens
agaaatgctattgct

SEQ ID NO: 940815 - DNA, 15 bp, Homo sapiens
aagaaatgctattgc

SEQ ID NO: 940816 - DNA, 15 bp, Homo sapiens
taagaaatgctattg

SEQ ID NO: 940817 - DNA, 15 bp, Homo sapiens
ctaagaaatgctatt

SEQ ID NO: 940818 - DNA, 15 bp, Homo sapiens
tctaagaaatgctat

SEQ ID NO: 940819 - DNA, 15 bp, Homo sapiens
ctctaagaaatgcta

SEQ ID NO: 940820 - DNA, 15 bp, Homo sapiens
tctctaagaaatgct

SEQ ID NO: 940821 - DNA, 15 bp, Homo sapiens
ttctctaagaaatgc

SEQ ID NO: 940822 - DNA, 15 bp, Homo sapiens
tttctctaagaaatg

SEQ ID NO: 940823 - DNA, 15 bp, Homo sapiens
ttttctctaagaaat

SEQ ID NO: 940824 - DNA, 15 bp, Homo sapiens
attttctctaagaaa

SEQ ID NO: 940825 - DNA, 15 bp, Homo sapiens
aattttctctaagaa

SEQ ID NO: 940826 - DNA, 15 bp, Homo sapiens
caattttctctaaga

SEQ ID NO: 940827 - DNA, 15 bp, Homo sapiens
gcaattttctctaag

SEQ ID NO: 940828 - DNA, 15 bp, Homo sapiens
ggcaattttctctaa

SEQ ID NO: 940829 - DNA, 15 bp, Homo sapiens
aggcaattttctcta

SEQ ID NO: 940830 - DNA, 15 bp, Homo sapiens
gaggcaattttctct

SEQ ID NO: 940831 - DNA, 15 bp, Homo sapiens
agaggcaattttctc

SEQ ID NO: 940832 - DNA, 15 bp, Homo sapiens
tagaggcaattttct

SEQ ID NO: 940833 - DNA, 15 bp, Homo sapiens
atagaggcaattttc

SEQ ID NO: 940834 - DNA, 15 bp, Homo sapiens
aatagaggcaatttt

SEQ ID NO: 940835 - DNA, 15 bp, Homo sapiens
taatagaggcaattt

SEQ ID NO: 940836 - DNA, 15 bp, Homo sapiens
ataatagaggcaatt

SEQ ID NO: 940837 - DNA, 15 bp, Homo sapiens
cataatagaggcaat

SEQ ID NO: 940838 - DNA, 15 bp, Homo sapiens
acataatagaggcaa

SEQ ID NO: 940839 - DNA, 15 bp, Homo sapiens
aacataatagaggca

SEQ ID NO: 940840 - DNA, 15 bp, Homo sapiens
caacataatagaggc

SEQ ID NO: 940841 - DNA, 15 bp, Homo sapiens
gcaacataatagagg

SEQ ID NO: 940842 - DNA, 15 bp, Homo sapiens
tgcaacataatagag

SEQ ID NO: 940843 - DNA, 15 bp, Homo sapiens
ttgcaacataataga

SEQ ID NO: 940844 - DNA, 15 bp, Homo sapiens
attgcaacataatag

SEQ ID NO: 940845 - DNA, 15 bp, Homo sapiens
aattgcaacataata

SEQ ID NO: 940846 - DNA, 15 bp, Homo sapiens
taattgcaacataat

SEQ ID NO: 940847 - DNA, 15 bp, Homo sapiens
ttaattgcaacataa

SEQ ID NO: 940848 - DNA, 15 bp, Homo sapiens
tttaattgcaacata

SEQ ID NO: 940849 - DNA, 15 bp, Homo sapiens
ttttaattgcaacat

SEQ ID NO: 940850 - DNA, 15 bp, Homo sapiens
attttaattgcaaca

SEQ ID NO: 940851 - DNA, 15 bp, Homo sapiens
aattttaattgcaac

SEQ ID NO: 940852 - DNA, 15 bp, Homo sapiens
aaattttaattgcaa

SEQ ID NO: 940853 - DNA, 15 bp, Homo sapiens
taaattttaattgca

SEQ ID NO: 940854 - DNA, 15 bp, Homo sapiens
ttaaattttaattgc

SEQ ID NO: 940855 - DNA, 15 bp, Homo sapiens
attaaattttaattg

SEQ ID NO: 940856 - DNA, 15 bp, Homo sapiens
aattaaattttaatt

SEQ ID NO: 940857 - DNA, 15 bp, Homo sapiens
taattaaattttaat

SEQ ID NO: 940858 - DNA, 15 bp, Homo sapiens
gtaattaaattttaa

SEQ ID NO: 940859 - DNA, 15 bp, Homo sapiens
agtaattaaatttta

SEQ ID NO: 940860 - DNA, 15 bp, Homo sapiens
gagtaattaaatttt

SEQ ID NO: 940861 - DNA, 15 bp, Homo sapiens
tgagtaattaaattt

SEQ ID NO: 940862 - DNA, 15 bp, Homo sapiens
atgagtaattaaatt

SEQ ID NO: 940863 - DNA, 15 bp, Homo sapiens
catgagtaattaaat

SEQ ID NO: 940864 - DNA, 15 bp, Homo sapiens
tcatgagtaattaaa

SEQ ID NO: 940865 - DNA, 15 bp, Homo sapiens
ctcatgagtaattaa

SEQ ID NO: 940866 - DNA, 15 bp, Homo sapiens
gctcatgagtaatta

SEQ ID NO: 940867 - DNA, 15 bp, Homo sapiens
agctcatgagtaatt

SEQ ID NO: 940868 - DNA, 15 bp, Homo sapiens
gagctcatgagtaat

SEQ ID NO: 940869 - DNA, 15 bp, Homo sapiens
agagctcatgagtaa

SEQ ID NO: 940870 - DNA, 15 bp, Homo sapiens
aagagctcatgagta

SEQ ID NO: 940871 - DNA, 15 bp, Homo sapiens
aaagagctcatgagt

SEQ ID NO: 940872 - DNA, 15 bp, Homo sapiens
taaagagctcatgag

SEQ ID NO: 940873 - DNA, 15 bp, Homo sapiens
ttaaagagctcatga

SEQ ID NO: 940874 - DNA, 15 bp, Homo sapiens
tttaaagagctcatg

SEQ ID NO: 940875 - DNA, 15 bp, Homo sapiens
ctttaaagagctcat

SEQ ID NO: 940876 - DNA, 15 bp, Homo sapiens
tctttaaagagctca

SEQ ID NO: 940877 - DNA, 15 bp, Homo sapiens
gtctttaaagagctc

SEQ ID NO: 940878 - DNA, 15 bp, Homo sapiens
tgtctttaaagagct

SEQ ID NO: 940879 - DNA, 15 bp, Homo sapiens
gtgtctttaaagagc

SEQ ID NO: 940880 - DNA, 15 bp, Homo sapiens
tgtgtctttaaagag

SEQ ID NO: 940881 - DNA, 15 bp, Homo sapiens
ttgtgtctttaaaga

SEQ ID NO: 940882 - DNA, 15 bp, Homo sapiens
attgtgtctttaaag

SEQ ID NO: 940883 - DNA, 15 bp, Homo sapiens
aattgtgtctttaaa

SEQ ID NO: 940884 - DNA, 15 bp, Homo sapiens
aaattgtgtctttaa

SEQ ID NO: 940885 - DNA, 15 bp, Homo sapiens
gaaattgtgtcttta

SEQ ID NO: 940886 - DNA, 15 bp, Homo sapiens
agaaattgtgtcttt

SEQ ID NO: 940887 - DNA, 15 bp, Homo sapiens
gagaaattgtgtctt

SEQ ID NO: 940888 - DNA, 15 bp, Homo sapiens
agagaaattgtgtct

SEQ ID NO: 940889 - DNA, 15 bp, Homo sapiens
aagagaaattgtgtc

SEQ ID NO: 940890 - DNA, 15 bp, Homo sapiens
caagagaaattgtgt

SEQ ID NO: 940891 - DNA, 15 bp, Homo sapiens
acaagagaaattgtg

SEQ ID NO: 940892 - DNA, 15 bp, Homo sapiens
cacaagagaaattgt

SEQ ID NO: 940893 - DNA, 15 bp, Homo sapiens
acacaagagaaattg

SEQ ID NO: 940894 - DNA, 15 bp, Homo sapiens
cacacaagagaaatt

SEQ ID NO: 940895 - DNA, 15 bp, Homo sapiens
ccacacaagagaaat

SEQ ID NO: 940896 - DNA, 15 bp, Homo sapiens
accacacaagagaaa

SEQ ID NO: 940897 - DNA, 15 bp, Homo sapiens
aaccacacaagagaa

SEQ ID NO: 940898 - DNA, 15 bp, Homo sapiens
aaaccacacaagaga

SEQ ID NO: 940899 - DNA, 15 bp, Homo sapiens
aaaaccacacaagag

SEQ ID NO: 940900 - DNA, 15 bp, Homo sapiens
taaaaccacacaaga

SEQ ID NO: 940901 - DNA, 15 bp, Homo sapiens
ataaaaccacacaag

SEQ ID NO: 940902 - DNA, 15 bp, Homo sapiens
aataaaaccacacaa

SEQ ID NO: 940903 - DNA, 15 bp, Homo sapiens
aaataaaaccacaca

SEQ ID NO: 940904 - DNA, 15 bp, Homo sapiens
gaaataaaaccacac

SEQ ID NO: 940905 - DNA, 15 bp, Homo sapiens
tgaaataaaaccaca

SEQ ID NO: 940906 - DNA, 15 bp, Homo sapiens
atgaaataaaaccac

SEQ ID NO: 940907 - DNA, 15 bp, Homo sapiens
tatgaaataaaacca

SEQ ID NO: 940908 - DNA, 15 bp, Homo sapiens
atatgaaataaaacc

SEQ ID NO: 940909 - DNA, 15 bp, Homo sapiens
tatatgaaataaaac

SEQ ID NO: 940910 - DNA, 15 bp, Homo sapiens
ttatatgaaataaaa

SEQ ID NO: 940911 - DNA, 15 bp, Homo sapiens
tttatatgaaataaa

SEQ ID NO: 940912 - DNA, 15 bp, Homo sapiens
ctttatatgaaataa

SEQ ID NO: 940913 - DNA, 15 bp, Homo sapiens
tctttatatgaaata

SEQ ID NO: 940914 - DNA, 15 bp, Homo sapiens
ttctttatatgaaat

SEQ ID NO: 940915 - DNA, 15 bp, Homo sapiens
tttctttatatgaaa

SEQ ID NO: 940916 - DNA, 15 bp, Homo sapiens
ttttctttatatgaa

SEQ ID NO: 940917 - DNA, 15 bp, Homo sapiens
tttttctttatatga

SEQ ID NO: 940918 - DNA, 15 bp, Homo sapiens
gtttttctttatatg

SEQ ID NO: 940919 - DNA, 15 bp, Homo sapiens
agtttttctttatat

SEQ ID NO: 940920 - DNA, 15 bp, Homo sapiens
gagtttttctttata

SEQ ID NO: 940921 - DNA, 15 bp, Homo sapiens
agagtttttctttat

SEQ ID NO: 940922 - DNA, 15 bp, Homo sapiens
cagagtttttcttta

SEQ ID NO: 940923 - DNA, 15 bp, Homo sapiens
tcagagtttttcttt

SEQ ID NO: 940924 - DNA, 15 bp, Homo sapiens
atcagagtttttctt

SEQ ID NO: 940925 - DNA, 15 bp, Homo sapiens
tatcagagtttttct

SEQ ID NO: 940926 - DNA, 15 bp, Homo sapiens
atatcagagtttttc

SEQ ID NO: 940927 - DNA, 15 bp, Homo sapiens
tatatcagagttttt

SEQ ID NO: 940928 - DNA, 15 bp, Homo sapiens
gtatatcagagtttt

SEQ ID NO: 940929 - DNA, 15 bp, Homo sapiens
agtatatcagagttt

SEQ ID NO: 940930 - DNA, 15 bp, Homo sapiens
cagtatatcagagtt

SEQ ID NO: 940931 - DNA, 15 bp, Homo sapiens
ccagtatatcagagt

SEQ ID NO: 940932 - DNA, 15 bp, Homo sapiens
tccagtatatcagag

SEQ ID NO: 940933 - DNA, 15 bp, Homo sapiens
ctccagtatatcaga

SEQ ID NO: 940934 - DNA, 15 bp, Homo sapiens
tctccagtatatcag

SEQ ID NO: 940935 - DNA, 15 bp, Homo sapiens
ctctccagtatatca

SEQ ID NO: 940936 - DNA, 15 bp, Homo sapiens
tctctccagtatatc

SEQ ID NO: 940937 - DNA, 15 bp, Homo sapiens
ttctctccagtatat

SEQ ID NO: 940938 - DNA, 15 bp, Homo sapiens
gttctctccagtata

SEQ ID NO: 940939 - DNA, 15 bp, Homo sapiens
tgttctctccagtat

SEQ ID NO: 940940 - DNA, 15 bp, Homo sapiens
atgttctctccagta

SEQ ID NO: 940941 - DNA, 15 bp, Homo sapiens
aatgttctctccagt

SEQ ID NO: 940942 - DNA, 15 bp, Homo sapiens
taatgttctctccag

SEQ ID NO: 940943 - DNA, 15 bp, Homo sapiens
ctaatgttctctcca

SEQ ID NO: 940944 - DNA, 15 bp, Homo sapiens
gctaatgttctctcc

SEQ ID NO: 940945 - DNA, 15 bp, Homo sapiens
agctaatgttctctc

SEQ ID NO: 940946 - DNA, 15 bp, Homo sapiens
tagctaatgttctct

SEQ ID NO: 940947 - DNA, 15 bp, Homo sapiens
ttagctaatgttctc

SEQ ID NO: 940948 - DNA, 15 bp, Homo sapiens
tttagctaatgttct

SEQ ID NO: 940949 - DNA, 15 bp, Homo sapiens
atttagctaatgttc

SEQ ID NO: 940950 - DNA, 15 bp, Homo sapiens
tatttagctaatgtt

SEQ ID NO: 940951 - DNA, 15 bp, Homo sapiens
ctatttagctaatgt

SEQ ID NO: 940952 - DNA, 15 bp, Homo sapiens
tctatttagctaatg

SEQ ID NO: 940953 - DNA, 15 bp, Homo sapiens
gtctatttagctaat

SEQ ID NO: 940954 - DNA, 15 bp, Homo sapiens
agtctatttagctaa

SEQ ID NO: 940955 - DNA, 15 bp, Homo sapiens
tagtctatttagcta

SEQ ID NO: 940956 - DNA, 15 bp, Homo sapiens
atagtctatttagct

SEQ ID NO: 940957 - DNA, 15 bp, Homo sapiens
aatagtctatttagc

SEQ ID NO: 940958 - DNA, 15 bp, Homo sapiens
aaatagtctatttag

SEQ ID NO: 940959 - DNA, 15 bp, Homo sapiens
taaatagtctattta

SEQ ID NO: 940960 - DNA, 15 bp, Homo sapiens
ctaaatagtctattt

SEQ ID NO: 940961 - DNA, 15 bp, Homo sapiens
tctaaatagtctatt

SEQ ID NO: 940962 - DNA, 15 bp, Homo sapiens
gtctaaatagtctat

SEQ ID NO: 940963 - DNA, 15 bp, Homo sapiens
agtctaaatagtcta

SEQ ID NO: 940964 - DNA, 15 bp, Homo sapiens
aagtctaaatagtct

SEQ ID NO: 940965 - DNA, 15 bp, Homo sapiens
taagtctaaatagtc

SEQ ID NO: 940966 - DNA, 15 bp, Homo sapiens
ttaagtctaaatagt

SEQ ID NO: 940967 - DNA, 15 bp, Homo sapiens
attaagtctaaatag

SEQ ID NO: 940968 - DNA, 15 bp, Homo sapiens
gattaagtctaaata

SEQ ID NO: 940969 - DNA, 15 bp, Homo sapiens
tgattaagtctaaat

SEQ ID NO: 940970 - DNA, 15 bp, Homo sapiens
atgattaagtctaaa

SEQ ID NO: 940971 - DNA, 15 bp, Homo sapiens
aatgattaagtctaa

SEQ ID NO: 940972 - DNA, 15 bp, Homo sapiens
aaatgattaagtcta

SEQ ID NO: 940973 - DNA, 15 bp, Homo sapiens
aaaatgattaagtct

SEQ ID NO: 940974 - DNA, 15 bp, Homo sapiens
caaaatgattaagtc

SEQ ID NO: 940975 - DNA, 15 bp, Homo sapiens
tcaaaatgattaagt

SEQ ID NO: 940976 - DNA, 15 bp, Homo sapiens
atcaaaatgattaag

SEQ ID NO: 940977 - DNA, 15 bp, Homo sapiens
gatcaaaatgattaa

SEQ ID NO: 940978 - DNA, 15 bp, Homo sapiens
tgatcaaaatgatta

SEQ ID NO: 940979 - DNA, 15 bp, Homo sapiens
ctgatcaaaatgatt

SEQ ID NO: 940980 - DNA, 15 bp, Homo sapiens
tctgatcaaaatgat

SEQ ID NO: 940981 - DNA, 15 bp, Homo sapiens
gtctgatcaaaatga

SEQ ID NO: 940982 - DNA, 15 bp, Homo sapiens
tgtctgatcaaaatg

SEQ ID NO: 940983 - DNA, 15 bp, Homo sapiens
atgtctgatcaaaat

SEQ ID NO: 940984 - DNA, 15 bp, Homo sapiens
gatgtctgatcaaaa

SEQ ID NO: 940985 - DNA, 15 bp, Homo sapiens
tgatgtctgatcaaa

SEQ ID NO: 940986 - DNA, 15 bp, Homo sapiens
ttgatgtctgatcaa

SEQ ID NO: 940987 - DNA, 15 bp, Homo sapiens
cttgatgtctgatca

SEQ ID NO: 940988 - DNA, 15 bp, Homo sapiens
ccttgatgtctgatc

SEQ ID NO: 940989 - DNA, 15 bp, Homo sapiens
gccttgatgtctgat

SEQ ID NO: 940990 - DNA, 15 bp, Homo sapiens
agccttgatgtctga

SEQ ID NO: 940991 - DNA, 15 bp, Homo sapiens
tagccttgatgtctg

SEQ ID NO: 940992 - DNA, 15 bp, Homo sapiens
ctagccttgatgtct

SEQ ID NO: 940993 - DNA, 15 bp, Homo sapiens
tctagccttgatgtc

SEQ ID NO: 940994 - DNA, 15 bp, Homo sapiens
gtctagccttgatgt

SEQ ID NO: 940995 - DNA, 15 bp, Homo sapiens
agtctagccttgatg

SEQ ID NO: 940996 - DNA, 15 bp, Homo sapiens
tagtctagccttgat

SEQ ID NO: 940997 - DNA, 15 bp, Homo sapiens
atagtctagccttga

SEQ ID NO: 940998 - DNA, 15 bp, Homo sapiens
aatagtctagccttg

SEQ ID NO: 940999 - DNA, 15 bp, Homo sapiens
aaatagtctagcctt

SEQ ID NO: 941000 - DNA, 15 bp, Homo sapiens
taaatagtctagcct

SEQ ID NO: 941001 - DNA, 15 bp, Homo sapiens
ttaaatagtctagcc

SEQ ID NO: 941002 - DNA, 15 bp, Homo sapiens
cttaaatagtctagc

SEQ ID NO: 941003 - DNA, 15 bp, Homo sapiens
gcttaaatagtctag

SEQ ID NO: 941004 - DNA, 15 bp, Homo sapiens
agcttaaatagtcta

SEQ ID NO: 941005 - DNA, 15 bp, Homo sapiens
cagcttaaatagtct

SEQ ID NO: 941006 - DNA, 15 bp, Homo sapiens
acagcttaaatagtc

SEQ ID NO: 941007 - DNA, 15 bp, Homo sapiens
aacagcttaaatagt

SEQ ID NO: 941008 - DNA, 15 bp, Homo sapiens
taacagcttaaatag

SEQ ID NO: 941009 - DNA, 15 bp, Homo sapiens
gtaacagcttaaata

SEQ ID NO: 941010 - DNA, 15 bp, Homo sapiens
agtaacagcttaaat

SEQ ID NO: 941011 - DNA, 15 bp, Homo sapiens
aagtaacagcttaaa

SEQ ID NO: 941012 - DNA, 15 bp, Homo sapiens
taagtaacagcttaa

SEQ ID NO: 941013 - DNA, 15 bp, Homo sapiens
ataagtaacagctta

SEQ ID NO: 941014 - DNA, 15 bp, Homo sapiens
aataagtaacagctt

SEQ ID NO: 941015 - DNA, 15 bp, Homo sapiens
taataagtaacagct

SEQ ID NO: 941016 - DNA, 15 bp, Homo sapiens
ctaataagtaacagc

SEQ ID NO: 941017 - DNA, 15 bp, Homo sapiens
gctaataagtaacag

SEQ ID NO: 941018 - DNA, 15 bp, Homo sapiens
agctaataagtaaca

SEQ ID NO: 941019 - DNA, 15 bp, Homo sapiens
cagctaataagtaac

SEQ ID NO: 941020 - DNA, 15 bp, Homo sapiens
gcagctaataagtaa

SEQ ID NO: 941021 - DNA, 15 bp, Homo sapiens
tgcagctaataagta

SEQ ID NO: 941022 - DNA, 15 bp, Homo sapiens
atgcagctaataagt

SEQ ID NO: 941023 - DNA, 15 bp, Homo sapiens
catgcagctaataag

SEQ ID NO: 941024 - DNA, 15 bp, Homo sapiens
tcatgcagctaataa

SEQ ID NO: 941025 - DNA, 15 bp, Homo sapiens
atcatgcagctaata

SEQ ID NO: 941026 - DNA, 15 bp, Homo sapiens
aatcatgcagctaat

SEQ ID NO: 941027 - DNA, 15 bp, Homo sapiens
aaatcatgcagctaa

SEQ ID NO: 941028 - DNA, 15 bp, Homo sapiens
aaaatcatgcagcta

SEQ ID NO: 941029 - DNA, 15 bp, Homo sapiens
taaaatcatgcagct

SEQ ID NO: 941030 - DNA, 15 bp, Homo sapiens
ctaaaatcatgcagc

SEQ ID NO: 941031 - DNA, 15 bp, Homo sapiens
cctaaaatcatgcag

SEQ ID NO: 941032 - DNA, 15 bp, Homo sapiens
tcctaaaatcatgca

SEQ ID NO: 941033 - DNA, 15 bp, Homo sapiens
ttcctaaaatcatgc

SEQ ID NO: 941034 - DNA, 15 bp, Homo sapiens
attcctaaaatcatg

SEQ ID NO: 941035 - DNA, 15 bp, Homo sapiens
cattcctaaaatcat

SEQ ID NO: 941036 - DNA, 15 bp, Homo sapiens
acattcctaaaatca

SEQ ID NO: 941037 - DNA, 15 bp, Homo sapiens
gacattcctaaaatc

SEQ ID NO: 941038 - DNA, 15 bp, Homo sapiens
tgacattcctaaaat

SEQ ID NO: 941039 - DNA, 15 bp, Homo sapiens
ttgacattcctaaaa

SEQ ID NO: 941040 - DNA, 15 bp, Homo sapiens
tttgacattcctaaa

SEQ ID NO: 941041 - DNA, 15 bp, Homo sapiens
atttgacattcctaa

SEQ ID NO: 941042 - DNA, 15 bp, Homo sapiens
aatttgacattccta

SEQ ID NO: 941043 - DNA, 15 bp, Homo sapiens
aaatttgacattcct

SEQ ID NO: 941044 - DNA, 15 bp, Homo sapiens
gaaatttgacattcc

SEQ ID NO: 941045 - DNA, 15 bp, Homo sapiens
ggaaatttgacattc

SEQ ID NO: 941046 - DNA, 15 bp, Homo sapiens
aggaaatttgacatt

SEQ ID NO: 941047 - DNA, 15 bp, Homo sapiens
taggaaatttgacat

SEQ ID NO: 941048 - DNA, 15 bp, Homo sapiens
ttaggaaatttgaca

SEQ ID NO: 941049 - DNA, 15 bp, Homo sapiens
cttaggaaatttgac

SEQ ID NO: 941050 - DNA, 15 bp, Homo sapiens
acttaggaaatttga

SEQ ID NO: 941051 - DNA, 15 bp, Homo sapiens
gacttaggaaatttg

SEQ ID NO: 941052 - DNA, 15 bp, Homo sapiens
agacttaggaaattt

SEQ ID NO: 941053 - DNA, 15 bp, Homo sapiens
aagacttaggaaatt

SEQ ID NO: 941054 - DNA, 15 bp, Homo sapiens
caagacttaggaaat

SEQ ID NO: 941055 - DNA, 15 bp, Homo sapiens
ccaagacttaggaaa

SEQ ID NO: 941056 - DNA, 15 bp, Homo sapiens
accaagacttaggaa

SEQ ID NO: 941057 - DNA, 15 bp, Homo sapiens
aaccaagacttagga

SEQ ID NO: 941058 - DNA, 15 bp, Homo sapiens
aaaccaagacttagg

SEQ ID NO: 941059 - DNA, 15 bp, Homo sapiens
aaaaccaagacttag

SEQ ID NO: 941060 - DNA, 15 bp, Homo sapiens
gaaaaccaagactta

SEQ ID NO: 941061 - DNA, 15 bp, Homo sapiens
agaaaaccaagactt

SEQ ID NO: 941062 - DNA, 15 bp, Homo sapiens
aagaaaaccaagact

SEQ ID NO: 941063 - DNA, 15 bp, Homo sapiens
caagaaaaccaagac

SEQ ID NO: 941064 - DNA, 15 bp, Homo sapiens
acaagaaaaccaaga

SEQ ID NO: 941065 - DNA, 15 bp, Homo sapiens
tacaagaaaaccaag

SEQ ID NO: 941066 - DNA, 15 bp, Homo sapiens
atacaagaaaaccaa

SEQ ID NO: 941067 - DNA, 15 bp, Homo sapiens
aatacaagaaaacca

SEQ ID NO: 941068 - DNA, 15 bp, Homo sapiens
aaatacaagaaaacc

SEQ ID NO: 941069 - DNA, 15 bp, Homo sapiens
taaatacaagaaaac

SEQ ID NO: 941070 - DNA, 15 bp, Homo sapiens
ttaaatacaagaaaa

SEQ ID NO: 941071 - DNA, 15 bp, Homo sapiens
tttaaatacaagaaa

SEQ ID NO: 941072 - DNA, 15 bp, Homo sapiens
ttttaaatacaagaa

SEQ ID NO: 941073 - DNA, 15 bp, Homo sapiens
attttaaatacaaga

SEQ ID NO: 941074 - DNA, 15 bp, Homo sapiens
cattttaaatacaag

SEQ ID NO: 941075 - DNA, 15 bp, Homo sapiens
ccattttaaatacaa

SEQ ID NO: 941076 - DNA, 15 bp, Homo sapiens
tccattttaaataca

SEQ ID NO: 941077 - DNA, 15 bp, Homo sapiens
ttccattttaaatac

SEQ ID NO: 941078 - DNA, 15 bp, Homo sapiens
tttccattttaaata

SEQ ID NO: 941079 - DNA, 15 bp, Homo sapiens
atttccattttaaat

SEQ ID NO: 941080 - DNA, 15 bp, Homo sapiens
aatttccattttaaa

SEQ ID NO: 941081 - DNA, 15 bp, Homo sapiens
taatttccattttaa

SEQ ID NO: 941082 - DNA, 15 bp, Homo sapiens
ataatttccatttta

SEQ ID NO: 941083 - DNA, 15 bp, Homo sapiens
tataatttccatttt

SEQ ID NO: 941084 - DNA, 15 bp, Homo sapiens
ttataatttccattt

SEQ ID NO: 941085 - DNA, 15 bp, Homo sapiens
attataatttccatt

SEQ ID NO: 941086 - DNA, 15 bp, Homo sapiens
aattataatttccat

SEQ ID NO: 941087 - DNA, 15 bp, Homo sapiens
gaattataatttcca

SEQ ID NO: 941088 - DNA, 15 bp, Homo sapiens
ggaattataatttcc

SEQ ID NO: 941089 - DNA, 15 bp, Homo sapiens
aggaattataatttc

SEQ ID NO: 941090 - DNA, 15 bp, Homo sapiens
taggaattataattt

SEQ ID NO: 941091 - DNA, 15 bp, Homo sapiens
ataggaattataatt

SEQ ID NO: 941092 - DNA, 15 bp, Homo sapiens
gataggaattataat

SEQ ID NO: 941093 - DNA, 15 bp, Homo sapiens
agataggaattataa

SEQ ID NO: 941094 - DNA, 15 bp, Homo sapiens
gagataggaattata

SEQ ID NO: 941095 - DNA, 15 bp, Homo sapiens
tgagataggaattat

SEQ ID NO: 941096 - DNA, 15 bp, Homo sapiens
atgagataggaatta

SEQ ID NO: 941097 - DNA, 15 bp, Homo sapiens
tatgagataggaatt

SEQ ID NO: 941098 - DNA, 15 bp, Homo sapiens
ctatgagataggaat

SEQ ID NO: 941099 - DNA, 15 bp, Homo sapiens
tctatgagataggaa

SEQ ID NO: 941100 - DNA, 15 bp, Homo sapiens
ttctatgagatagga

SEQ ID NO: 941101 - DNA, 15 bp, Homo sapiens
attctatgagatagg

SEQ ID NO: 941102 - DNA, 15 bp, Homo sapiens
aattctatgagatag

SEQ ID NO: 941103 - DNA, 15 bp, Homo sapiens
caattctatgagata

SEQ ID NO: 941104 - DNA, 15 bp, Homo sapiens
acaattctatgagat

SEQ ID NO: 941105 - DNA, 15 bp, Homo sapiens
aacaattctatgaga

SEQ ID NO: 941106 - DNA, 15 bp, Homo sapiens
aaacaattctatgag

SEQ ID NO: 941107 - DNA, 15 bp, Homo sapiens
aaaacaattctatga

SEQ ID NO: 941108 - DNA, 15 bp, Homo sapiens
taaaacaattctatg

SEQ ID NO: 941109 - DNA, 15 bp, Homo sapiens
ttaaaacaattctat

SEQ ID NO: 941110 - DNA, 15 bp, Homo sapiens
cttaaaacaattcta

SEQ ID NO: 941111 - DNA, 15 bp, Homo sapiens
ccttaaaacaattct

SEQ ID NO: 941112 - DNA, 15 bp, Homo sapiens
tccttaaaacaattc

SEQ ID NO: 941113 - DNA, 15 bp, Homo sapiens
atccttaaaacaatt

SEQ ID NO: 941114 - DNA, 15 bp, Homo sapiens
catccttaaaacaat

SEQ ID NO: 941115 - DNA, 15 bp, Homo sapiens
tcatccttaaaacaa

SEQ ID NO: 941116 - DNA, 15 bp, Homo sapiens
ttcatccttaaaaca

SEQ ID NO: 941117 - DNA, 15 bp, Homo sapiens
attcatccttaaaac

SEQ ID NO: 941118 - DNA, 15 bp, Homo sapiens
aattcatccttaaaa

SEQ ID NO: 941119 - DNA, 15 bp, Homo sapiens
caattcatccttaaa

SEQ ID NO: 941120 - DNA, 15 bp, Homo sapiens
tcaattcatccttaa

SEQ ID NO: 941121 - DNA, 15 bp, Homo sapiens
ttcaattcatcctta

SEQ ID NO: 941122 - DNA, 15 bp, Homo sapiens
attcaattcatcctt

SEQ ID NO: 941123 - DNA, 15 bp, Homo sapiens
aattcaattcatcct

SEQ ID NO: 941124 - DNA, 15 bp, Homo sapiens
taattcaattcatcc

SEQ ID NO: 941125 - DNA, 15 bp, Homo sapiens
ttaattcaattcatc

SEQ ID NO: 941126 - DNA, 15 bp, Homo sapiens
attaattcaattcat

SEQ ID NO: 941127 - DNA, 15 bp, Homo sapiens
tattaattcaattca

SEQ ID NO: 941128 - DNA, 15 bp, Homo sapiens
gtattaattcaattc

SEQ ID NO: 941129 - DNA, 15 bp, Homo sapiens
tgtattaattcaatt

SEQ ID NO: 941130 - DNA, 15 bp, Homo sapiens
ctgtattaattcaat

SEQ ID NO: 941131 - DNA, 15 bp, Homo sapiens
actgtattaattcaa

SEQ ID NO: 941132 - DNA, 15 bp, Homo sapiens
aactgtattaattca

SEQ ID NO: 941133 - DNA, 15 bp, Homo sapiens
aaactgtattaattc

SEQ ID NO: 941134 - DNA, 15 bp, Homo sapiens
aaaactgtattaatt

SEQ ID NO: 941135 - DNA, 15 bp, Homo sapiens
caaaactgtattaat

SEQ ID NO: 941136 - DNA, 15 bp, Homo sapiens
tcaaaactgtattaa

SEQ ID NO: 941137 - DNA, 15 bp, Homo sapiens
gtcaaaactgtatta

SEQ ID NO: 941138 - DNA, 15 bp, Homo sapiens
agtcaaaactgtatt

SEQ ID NO: 941139 - DNA, 15 bp, Homo sapiens
aagtcaaaactgtat

SEQ ID NO: 941140 - DNA, 15 bp, Homo sapiens
gaagtcaaaactgta

SEQ ID NO: 941141 - DNA, 15 bp, Homo sapiens
tgaagtcaaaactgt

SEQ ID NO: 941142 - DNA, 15 bp, Homo sapiens
ttgaagtcaaaactg

SEQ ID NO: 941143 - DNA, 15 bp, Homo sapiens
tttgaagtcaaaact

SEQ ID NO: 941144 - DNA, 15 bp, Homo sapiens
atttgaagtcaaaac

SEQ ID NO: 941145 - DNA, 15 bp, Homo sapiens
tatttgaagtcaaaa

SEQ ID NO: 941146 - DNA, 15 bp, Homo sapiens
atatttgaagtcaaa

SEQ ID NO: 941147 - DNA, 15 bp, Homo sapiens
aatatttgaagtcaa

SEQ ID NO: 941148 - DNA, 15 bp, Homo sapiens
taatatttgaagtca

SEQ ID NO: 941149 - DNA, 15 bp, Homo sapiens
ctaatatttgaagtc

SEQ ID NO: 941150 - DNA, 15 bp, Homo sapiens
cctaatatttgaagt

SEQ ID NO: 941151 - DNA, 15 bp, Homo sapiens
tcctaatatttgaag

SEQ ID NO: 941152 - DNA, 15 bp, Homo sapiens
ttcctaatatttgaa

SEQ ID NO: 941153 - DNA, 15 bp, Homo sapiens
attcctaatatttga

SEQ ID NO: 941154 - DNA, 15 bp, Homo sapiens
aattcctaatatttg

SEQ ID NO: 941155 - DNA, 15 bp, Homo sapiens
taattcctaatattt

SEQ ID NO: 941156 - DNA, 15 bp, Homo sapiens
ataattcctaatatt

SEQ ID NO: 941157 - DNA, 15 bp, Homo sapiens
aataattcctaatat

SEQ ID NO: 941158 - DNA, 15 bp, Homo sapiens
caataattcctaata

SEQ ID NO: 941159 - DNA, 15 bp, Homo sapiens
tcaataattcctaat

SEQ ID NO: 941160 - DNA, 15 bp, Homo sapiens
ctcaataattcctaa

SEQ ID NO: 941161 - DNA, 15 bp, Homo sapiens
actcaataattccta

SEQ ID NO: 941162 - DNA, 15 bp, Homo sapiens
tactcaataattcct

SEQ ID NO: 941163 - DNA, 15 bp, Homo sapiens
atactcaataattcc

SEQ ID NO: 941164 - DNA, 15 bp, Homo sapiens
tatactcaataattc

SEQ ID NO: 941165 - DNA, 15 bp, Homo sapiens
ttatactcaataatt

SEQ ID NO: 941166 - DNA, 15 bp, Homo sapiens
attatactcaataat

SEQ ID NO: 941167 - DNA, 15 bp, Homo sapiens
tattatactcaataa

SEQ ID NO: 941168 - DNA, 15 bp, Homo sapiens
ttattatactcaata

SEQ ID NO: 941169 - DNA, 15 bp, Homo sapiens
cttattatactcaat

SEQ ID NO: 941170 - DNA, 15 bp, Homo sapiens
gcttattatactcaa

SEQ ID NO: 941171 - DNA, 15 bp, Homo sapiens
ggcttattatactca

SEQ ID NO: 941172 - DNA, 15 bp, Homo sapiens
aggcttattatactc

SEQ ID NO: 941173 - DNA, 15 bp, Homo sapiens
caggcttattatact

SEQ ID NO: 941174 - DNA, 15 bp, Homo sapiens
acaggcttattatac

SEQ ID NO: 941175 - DNA, 15 bp, Homo sapiens
aacaggcttattata

SEQ ID NO: 941176 - DNA, 15 bp, Homo sapiens
caacaggcttattat

SEQ ID NO: 941177 - DNA, 15 bp, Homo sapiens
acaacaggcttatta

SEQ ID NO: 941178 - DNA, 15 bp, Homo sapiens
tacaacaggcttatt

SEQ ID NO: 941179 - DNA, 15 bp, Homo sapiens
atacaacaggcttat

SEQ ID NO: 941180 - DNA, 15 bp, Homo sapiens
aatacaacaggctta

SEQ ID NO: 941181 - DNA, 15 bp, Homo sapiens
caatacaacaggctt

SEQ ID NO: 941182 - DNA, 15 bp, Homo sapiens
acaatacaacaggct

SEQ ID NO: 941183 - DNA, 15 bp, Homo sapiens
aacaatacaacaggc

SEQ ID NO: 941184 - DNA, 15 bp, Homo sapiens
caacaatacaacagg

SEQ ID NO: 941185 - DNA, 15 bp, Homo sapiens
ccaacaatacaacag

SEQ ID NO: 941186 - DNA, 15 bp, Homo sapiens
accaacaatacaaca

SEQ ID NO: 941187 - DNA, 15 bp, Homo sapiens
taccaacaatacaac

SEQ ID NO: 941188 - DNA, 15 bp, Homo sapiens
gtaccaacaatacaa

SEQ ID NO: 941189 - DNA, 15 bp, Homo sapiens
agtaccaacaataca

SEQ ID NO: 941190 - DNA, 15 bp, Homo sapiens
aagtaccaacaatac

SEQ ID NO: 941191 - DNA, 15 bp, Homo sapiens
gaagtaccaacaata

SEQ ID NO: 941192 - DNA, 15 bp, Homo sapiens
cgaagtaccaacaat

SEQ ID NO: 941193 - DNA, 15 bp, Homo sapiens
acgaagtaccaacaa

SEQ ID NO: 941194 - DNA, 15 bp, Homo sapiens
tacgaagtaccaaca

SEQ ID NO: 941195 - DNA, 15 bp, Homo sapiens
atacgaagtaccaac

SEQ ID NO: 941196 - DNA, 15 bp, Homo sapiens
aatacgaagtaccaa

SEQ ID NO: 941197 - DNA, 15 bp, Homo sapiens
taatacgaagtacca

SEQ ID NO: 941198 - DNA, 15 bp, Homo sapiens
ataatacgaagtacc

SEQ ID NO: 941199 - DNA, 15 bp, Homo sapiens
tataatacgaagtac

SEQ ID NO: 941200 - DNA, 15 bp, Homo sapiens
gtataatacgaagta

SEQ ID NO: 941201 - DNA, 15 bp, Homo sapiens
agtataatacgaagt

SEQ ID NO: 941202 - DNA, 15 bp, Homo sapiens
aagtataatacgaag

SEQ ID NO: 941203 - DNA, 15 bp, Homo sapiens
taagtataatacgaa

SEQ ID NO: 941204 - DNA, 15 bp, Homo sapiens
gtaagtataatacga

SEQ ID NO: 941205 - DNA, 15 bp, Homo sapiens
agtaagtataatacg

SEQ ID NO: 941206 - DNA, 15 bp, Homo sapiens
tagtaagtataatac

SEQ ID NO: 941207 - DNA, 15 bp, Homo sapiens
ttagtaagtataata

SEQ ID NO: 941208 - DNA, 15 bp, Homo sapiens
tttagtaagtataat

SEQ ID NO: 941209 - DNA, 15 bp, Homo sapiens
ttttagtaagtataa

SEQ ID NO: 941210 - DNA, 15 bp, Homo sapiens
attttagtaagtata

SEQ ID NO: 941211 - DNA, 15 bp, Homo sapiens
tattttagtaagtat

SEQ ID NO: 941212 - DNA, 15 bp, Homo sapiens
atattttagtaagta

SEQ ID NO: 941213 - DNA, 15 bp, Homo sapiens
aatattttagtaagt

SEQ ID NO: 941214 - DNA, 15 bp, Homo sapiens
aaatattttagtaag

SEQ ID NO: 941215 - DNA, 15 bp, Homo sapiens
caaatattttagtaa

SEQ ID NO: 941216 - DNA, 15 bp, Homo sapiens
tcaaatattttagta

SEQ ID NO: 941217 - DNA, 15 bp, Homo sapiens
atcaaatattttagt

SEQ ID NO: 941218 - DNA, 15 bp, Homo sapiens
aatcaaatattttag

SEQ ID NO: 941219 - DNA, 15 bp, Homo sapiens
taatcaaatatttta

SEQ ID NO: 941220 - DNA, 15 bp, Homo sapiens
ttaatcaaatatttt

SEQ ID NO: 941221 - DNA, 15 bp, Homo sapiens
tttaatcaaatattt

SEQ ID NO: 941222 - DNA, 15 bp, Homo sapiens
ctttaatcaaatatt

SEQ ID NO: 941223 - DNA, 15 bp, Homo sapiens
tctttaatcaaatat

SEQ ID NO: 941224 - DNA, 15 bp, Homo sapiens
atctttaatcaaata

SEQ ID NO: 941225 - DNA, 15 bp, Homo sapiens
aatctttaatcaaat

SEQ ID NO: 941226 - DNA, 15 bp, Homo sapiens
aaatctttaatcaaa

SEQ ID NO: 941227 - DNA, 15 bp, Homo sapiens
taaatctttaatcaa

SEQ ID NO: 941228 - DNA, 15 bp, Homo sapiens
ttaaatctttaatca

SEQ ID NO: 941229 - DNA, 15 bp, Homo sapiens
gttaaatctttaatc

SEQ ID NO: 941230 - DNA, 15 bp, Homo sapiens
tgttaaatctttaat

SEQ ID NO: 941231 - DNA, 15 bp, Homo sapiens
atgttaaatctttaa

SEQ ID NO: 941232 - DNA, 15 bp, Homo sapiens
tatgttaaatcttta

SEQ ID NO: 941233 - DNA, 15 bp, Homo sapiens
atatgttaaatcttt

SEQ ID NO: 941234 - DNA, 15 bp, Homo sapiens
aatatgttaaatctt

SEQ ID NO: 941235 - DNA, 15 bp, Homo sapiens
gaatatgttaaatct

SEQ ID NO: 941236 - DNA, 15 bp, Homo sapiens
agaatatgttaaatc

SEQ ID NO: 941237 - DNA, 15 bp, Homo sapiens
aagaatatgttaaat

SEQ ID NO: 941238 - DNA, 15 bp, Homo sapiens
aaagaatatgttaaa

SEQ ID NO: 941239 - DNA, 15 bp, Homo sapiens
gaaagaatatgttaa

SEQ ID NO: 941240 - DNA, 15 bp, Homo sapiens
cgaaagaatatgtta

SEQ ID NO: 941241 - DNA, 15 bp, Homo sapiens
acgaaagaatatgtt

SEQ ID NO: 941242 - DNA, 15 bp, Homo sapiens
tacgaaagaatatgt

SEQ ID NO: 941243 - DNA, 15 bp, Homo sapiens
ctacgaaagaatatg

SEQ ID NO: 941244 - DNA, 15 bp, Homo sapiens
actacgaaagaatat

SEQ ID NO: 941245 - DNA, 15 bp, Homo sapiens
gactacgaaagaata

SEQ ID NO: 941246 - DNA, 15 bp, Homo sapiens
agactacgaaagaat

SEQ ID NO: 941247 - DNA, 15 bp, Homo sapiens
cagactacgaaagaa

SEQ ID NO: 941248 - DNA, 15 bp, Homo sapiens
ccagactacgaaaga

SEQ ID NO: 941249 - DNA, 15 bp, Homo sapiens
accagactacgaaag

SEQ ID NO: 941250 - DNA, 15 bp, Homo sapiens
taccagactacgaaa

SEQ ID NO: 941251 - DNA, 15 bp, Homo sapiens
ctaccagactacgaa

SEQ ID NO: 941252 - DNA, 15 bp, Homo sapiens
tctaccagactacga

SEQ ID NO: 941253 - DNA, 15 bp, Homo sapiens
ttctaccagactacg

SEQ ID NO: 941254 - DNA, 15 bp, Homo sapiens
cttctaccagactac

SEQ ID NO: 941255 - DNA, 15 bp, Homo sapiens
acttctaccagacta

SEQ ID NO: 941256 - DNA, 15 bp, Homo sapiens
cacttctaccagact

SEQ ID NO: 941257 - DNA, 15 bp, Homo sapiens
ccacttctaccagac

SEQ ID NO: 941258 - DNA, 15 bp, Homo sapiens
tccacttctaccaga

SEQ ID NO: 941259 - DNA, 15 bp, Homo sapiens
ttccacttctaccag

SEQ ID NO: 941260 - DNA, 15 bp, Homo sapiens
tttccacttctacca

SEQ ID NO: 941261 - DNA, 15 bp, Homo sapiens
ctttccacttctacc

SEQ ID NO: 941262 - DNA, 15 bp, Homo sapiens
tctttccacttctac

SEQ ID NO: 941263 - DNA, 15 bp, Homo sapiens
gtctttccacttcta

SEQ ID NO: 941264 - DNA, 15 bp, Homo sapiens
tgtctttccacttct

SEQ ID NO: 941265 - DNA, 15 bp, Homo sapiens
ttgtctttccacttc

SEQ ID NO: 941266 - DNA, 15 bp, Homo sapiens
attgtctttccactt

SEQ ID NO: 941267 - DNA, 15 bp, Homo sapiens
gattgtctttccact

SEQ ID NO: 941268 - DNA, 15 bp, Homo sapiens
ggattgtctttccac

SEQ ID NO: 941269 - DNA, 15 bp, Homo sapiens
gggattgtctttcca

SEQ ID NO: 941270 - DNA, 15 bp, Homo sapiens
tgggattgtctttcc

SEQ ID NO: 941271 - DNA, 15 bp, Homo sapiens
ctgggattgtctttc

SEQ ID NO: 941272 - DNA, 15 bp, Homo sapiens
tctgggattgtcttt

SEQ ID NO: 941273 - DNA, 15 bp, Homo sapiens
ttctgggattgtctt

SEQ ID NO: 941274 - DNA, 15 bp, Homo sapiens
gttctgggattgtct

SEQ ID NO: 941275 - DNA, 15 bp, Homo sapiens
agttctgggattgtc

SEQ ID NO: 941276 - DNA, 15 bp, Homo sapiens
cagttctgggattgt

SEQ ID NO: 941277 - DNA, 15 bp, Homo sapiens
ccagttctgggattg

SEQ ID NO: 941278 - DNA, 15 bp, Homo sapiens
tccagttctgggatt

SEQ ID NO: 941279 - DNA, 15 bp, Homo sapiens
ttccagttctgggat

SEQ ID NO: 941280 - DNA, 15 bp, Homo sapiens
tttccagttctggga

SEQ ID NO: 941281 - DNA, 15 bp, Homo sapiens
ttttccagttctggg

SEQ ID NO: 941282 - DNA, 15 bp, Homo sapiens
tttttccagttctgg

SEQ ID NO: 941283 - DNA, 15 bp, Homo sapiens
ttttttccagttctg

SEQ ID NO: 941284 - DNA, 15 bp, Homo sapiens
gttttttccagttct

SEQ ID NO: 941285 - DNA, 15 bp, Homo sapiens
ggttttttccagttc

SEQ ID NO: 941286 - DNA, 15 bp, Homo sapiens
tggttttttccagtt

SEQ ID NO: 941287 - DNA, 15 bp, Homo sapiens
atggttttttccagt

SEQ ID NO: 941288 - DNA, 15 bp, Homo sapiens
aatggttttttccag

SEQ ID NO: 941289 - DNA, 15 bp, Homo sapiens
caatggttttttcca

SEQ ID NO: 941290 - DNA, 15 bp, Homo sapiens
ccaatggttttttcc

SEQ ID NO: 941291 - DNA, 15 bp, Homo sapiens
accaatggttttttc

SEQ ID NO: 941292 - DNA, 15 bp, Homo sapiens
aaccaatggtttttt

SEQ ID NO: 941293 - DNA, 15 bp, Homo sapiens
aaaccaatggttttt

SEQ ID NO: 941294 - DNA, 15 bp, Homo sapiens
taaaccaatggtttt

SEQ ID NO: 941295 - DNA, 15 bp, Homo sapiens
ttaaaccaatggttt

SEQ ID NO: 941296 - DNA, 15 bp, Homo sapiens
attaaaccaatggtt

SEQ ID NO: 941297 - DNA, 15 bp, Homo sapiens
cattaaaccaatggt

SEQ ID NO: 941298 - DNA, 15 bp, Homo sapiens
tcattaaaccaatgg

SEQ ID NO: 941299 - DNA, 15 bp, Homo sapiens
ttcattaaaccaatg

SEQ ID NO: 941300 - DNA, 15 bp, Homo sapiens
tttcattaaaccaat

SEQ ID NO: 941301 - DNA, 15 bp, Homo sapiens
ttttcattaaaccaa

SEQ ID NO: 941302 - DNA, 15 bp, Homo sapiens
tttttcattaaacca

SEQ ID NO: 941303 - DNA, 15 bp, Homo sapiens
ttttttcattaaacc

SEQ ID NO: 941304 - DNA, 15 bp, Homo sapiens
cttttttcattaaac

SEQ ID NO: 941305 - DNA, 15 bp, Homo sapiens
acttttttcattaaa

SEQ ID NO: 941306 - DNA, 15 bp, Homo sapiens
tacttttttcattaa

SEQ ID NO: 941307 - DNA, 15 bp, Homo sapiens
ctacttttttcatta

SEQ ID NO: 941308 - DNA, 15 bp, Homo sapiens
actacttttttcatt

SEQ ID NO: 941309 - DNA, 15 bp, Homo sapiens
aactacttttttcat

SEQ ID NO: 941310 - DNA, 15 bp, Homo sapiens
caactacttttttca

SEQ ID NO: 941311 - DNA, 15 bp, Homo sapiens
tcaactacttttttc

SEQ ID NO: 941312 - DNA, 15 bp, Homo sapiens
ttcaactactttttt

SEQ ID NO: 941313 - DNA, 15 bp, Homo sapiens
tttcaactacttttt

SEQ ID NO: 941314 - DNA, 15 bp, Homo sapiens
ttttcaactactttt

SEQ ID NO: 941315 - DNA, 15 bp, Homo sapiens
tttttcaactacttt

SEQ ID NO: 941316 - DNA, 15 bp, Homo sapiens
ctttttcaactactt

SEQ ID NO: 941317 - DNA, 15 bp, Homo sapiens
actttttcaactact

SEQ ID NO: 941318 - DNA, 15 bp, Homo sapiens
gactttttcaactac

SEQ ID NO: 941319 - DNA, 15 bp, Homo sapiens
ggactttttcaacta

SEQ ID NO: 941320 - DNA, 15 bp, Homo sapiens
tggactttttcaact

SEQ ID NO: 941321 - DNA, 15 bp, Homo sapiens
ctggactttttcaac

SEQ ID NO: 941322 - DNA, 15 bp, Homo sapiens
tctggactttttcaa

SEQ ID NO: 941323 - DNA, 15 bp, Homo sapiens
ctctggactttttca

SEQ ID NO: 941324 - DNA, 15 bp, Homo sapiens
tctctggactttttc

SEQ ID NO: 941325 - DNA, 15 bp, Homo sapiens
ctctctggacttttt

SEQ ID NO: 941326 - DNA, 15 bp, Homo sapiens
tctctctggactttt

SEQ ID NO: 941327 - DNA, 15 bp, Homo sapiens
ttctctctggacttt

SEQ ID NO: 941328 - DNA, 15 bp, Homo sapiens
tttctctctggactt

SEQ ID NO: 941329 - DNA, 15 bp, Homo sapiens
ttttctctctggact

SEQ ID NO: 941330 - DNA, 15 bp, Homo sapiens
attttctctctggac

SEQ ID NO: 941331 - DNA, 15 bp, Homo sapiens
cattttctctctgga

SEQ ID NO: 941332 - DNA, 15 bp, Homo sapiens
tcattttctctctgg

SEQ ID NO: 941333 - DNA, 15 bp, Homo sapiens
ttcattttctctctg

SEQ ID NO: 941334 - DNA, 15 bp, Homo sapiens
gttcattttctctct

SEQ ID NO: 941335 - DNA, 15 bp, Homo sapiens
tgttcattttctctc

SEQ ID NO: 941336 - DNA, 15 bp, Homo sapiens
ctgttcattttctct

SEQ ID NO: 941337 - DNA, 15 bp, Homo sapiens
actgttcattttctc

SEQ ID NO: 941338 - DNA, 15 bp, Homo sapiens
aactgttcattttct

SEQ ID NO: 941339 - DNA, 15 bp, Homo sapiens
caactgttcattttc

SEQ ID NO: 941340 - DNA, 15 bp, Homo sapiens
tcaactgttcatttt

SEQ ID NO: 941341 - DNA, 15 bp, Homo sapiens
ttcaactgttcattt

SEQ ID NO: 941342 - DNA, 15 bp, Homo sapiens
tttcaactgttcatt

SEQ ID NO: 941343 - DNA, 15 bp, Homo sapiens
ttttcaactgttcat

SEQ ID NO: 941344 - DNA, 15 bp, Homo sapiens
tttttcaactgttca

SEQ ID NO: 941345 - DNA, 15 bp, Homo sapiens
ttttttcaactgttc

SEQ ID NO: 941346 - DNA, 15 bp, Homo sapiens
cttttttcaactgtt

SEQ ID NO: 941347 - DNA, 15 bp, Homo sapiens
gcttttttcaactgt

SEQ ID NO: 941348 - DNA, 15 bp, Homo sapiens
tgcttttttcaactg

SEQ ID NO: 941349 - DNA, 15 bp, Homo sapiens
atgcttttttcaact

SEQ ID NO: 941350 - DNA, 15 bp, Homo sapiens
gatgcttttttcaac

SEQ ID NO: 941351 - DNA, 15 bp, Homo sapiens
tgatgcttttttcaa

SEQ ID NO: 941352 - DNA, 15 bp, Homo sapiens
ctgatgcttttttca

SEQ ID NO: 941353 - DNA, 15 bp, Homo sapiens
cctgatgcttttttc

SEQ ID NO: 941354 - DNA, 15 bp, Homo sapiens
tcctgatgctttttt

SEQ ID NO: 941355 - DNA, 15 bp, Homo sapiens
ttcctgatgcttttt

SEQ ID NO: 941356 - DNA, 15 bp, Homo sapiens
attcctgatgctttt

SEQ ID NO: 941357 - DNA, 15 bp, Homo sapiens
tattcctgatgcttt

SEQ ID NO: 941358 - DNA, 15 bp, Homo sapiens
atattcctgatgctt

SEQ ID NO: 941359 - DNA, 15 bp, Homo sapiens
aatattcctgatgct

SEQ ID NO: 941360 - DNA, 15 bp, Homo sapiens
caatattcctgatgc

SEQ ID NO: 941361 - DNA, 15 bp, Homo sapiens
tcaatattcctgatg

SEQ ID NO: 941362 - DNA, 15 bp, Homo sapiens
gtcaatattcctgat

SEQ ID NO: 941363 - DNA, 15 bp, Homo sapiens
agtcaatattcctga

SEQ ID NO: 941364 - DNA, 15 bp, Homo sapiens
tagtcaatattcctg

SEQ ID NO: 941365 - DNA, 15 bp, Homo sapiens
ctagtcaatattcct

SEQ ID NO: 941366 - DNA, 15 bp, Homo sapiens
actagtcaatattcc

SEQ ID NO: 941367 - DNA, 15 bp, Homo sapiens
cactagtcaatattc

SEQ ID NO: 941368 - DNA, 15 bp, Homo sapiens
tcactagtcaatatt

SEQ ID NO: 941369 - DNA, 15 bp, Homo sapiens
ttcactagtcaatat

SEQ ID NO: 941370 - DNA, 15 bp, Homo sapiens
tttcactagtcaata

SEQ ID NO: 941371 - DNA, 15 bp, Homo sapiens
ttttcactagtcaat

SEQ ID NO: 941372 - DNA, 15 bp, Homo sapiens
tttttcactagtcaa

SEQ ID NO: 941373 - DNA, 15 bp, Homo sapiens
ttttttcactagtca

SEQ ID NO: 941374 - DNA, 15 bp, Homo sapiens
attttttcactagtc

SEQ ID NO: 941375 - DNA, 15 bp, Homo sapiens
cattttttcactagt

SEQ ID NO: 941376 - DNA, 15 bp, Homo sapiens
ccattttttcactag

SEQ ID NO: 941377 - DNA, 15 bp, Homo sapiens
gccattttttcacta

SEQ ID NO: 941378 - DNA, 15 bp, Homo sapiens
agccattttttcact

SEQ ID NO: 941379 - DNA, 15 bp, Homo sapiens
tagccattttttcac

SEQ ID NO: 941380 - DNA, 15 bp, Homo sapiens
ttagccattttttca

SEQ ID NO: 941381 - DNA, 15 bp, Homo sapiens
attagccattttttc

SEQ ID NO: 941382 - DNA, 15 bp, Homo sapiens
tattagccatttttt

SEQ ID NO: 941383 - DNA, 15 bp, Homo sapiens
atattagccattttt

SEQ ID NO: 941384 - DNA, 15 bp, Homo sapiens
aatattagccatttt

SEQ ID NO: 941385 - DNA, 15 bp, Homo sapiens
caatattagccattt

SEQ ID NO: 941386 - DNA, 15 bp, Homo sapiens
tcaatattagccatt

SEQ ID NO: 941387 - DNA, 15 bp, Homo sapiens
ctcaatattagccat

SEQ ID NO: 941388 - DNA, 15 bp, Homo sapiens
gctcaatattagcca

SEQ ID NO: 941389 - DNA, 15 bp, Homo sapiens
tgctcaatattagcc

SEQ ID NO: 941390 - DNA, 15 bp, Homo sapiens
ctgctcaatattagc

SEQ ID NO: 941391 - DNA, 15 bp, Homo sapiens
cctgctcaatattag

SEQ ID NO: 941392 - DNA, 15 bp, Homo sapiens
tcctgctcaatatta

SEQ ID NO: 941393 - DNA, 15 bp, Homo sapiens
ttcctgctcaatatt

SEQ ID NO: 941394 - DNA, 15 bp, Homo sapiens
tttcctgctcaatat

SEQ ID NO: 941395 - DNA, 15 bp, Homo sapiens
ttttcctgctcaata

SEQ ID NO: 941396 - DNA, 15 bp, Homo sapiens
attttcctgctcaat

SEQ ID NO: 941397 - DNA, 15 bp, Homo sapiens
cattttcctgctcaa

SEQ ID NO: 941398 - DNA, 15 bp, Homo sapiens
tcattttcctgctca

SEQ ID NO: 941399 - DNA, 15 bp, Homo sapiens
ttcattttcctgctc

SEQ ID NO: 941400 - DNA, 15 bp, Homo sapiens
tttcattttcctgct

SEQ ID NO: 941401 - DNA, 15 bp, Homo sapiens
ttttcattttcctgc

SEQ ID NO: 941402 - DNA, 15 bp, Homo sapiens
tttttcattttcctg

SEQ ID NO: 941403 - DNA, 15 bp, Homo sapiens
atttttcattttcct

SEQ ID NO: 941404 - DNA, 15 bp, Homo sapiens
aatttttcattttcc

SEQ ID NO: 941405 - DNA, 15 bp, Homo sapiens
caatttttcattttc

SEQ ID NO: 941406 - DNA, 15 bp, Homo sapiens
tcaatttttcatttt

SEQ ID NO: 941407 - DNA, 15 bp, Homo sapiens
ttcaatttttcattt

SEQ ID NO: 941408 - DNA, 15 bp, Homo sapiens
cttcaatttttcatt

SEQ ID NO: 941409 - DNA, 15 bp, Homo sapiens
ccttcaatttttcat

SEQ ID NO: 941410 - DNA, 15 bp, Homo sapiens
accttcaatttttca

SEQ ID NO: 941411 - DNA, 15 bp, Homo sapiens
taccttcaatttttc

SEQ ID NO: 941412 - DNA, 15 bp, Homo sapiens
ttaccttcaattttt

SEQ ID NO: 941413 - DNA, 15 bp, Homo sapiens
attaccttcaatttt

SEQ ID NO: 941414 - DNA, 15 bp, Homo sapiens
aattaccttcaattt

SEQ ID NO: 941415 - DNA, 15 bp, Homo sapiens
aaattaccttcaatt

SEQ ID NO: 941416 - DNA, 15 bp, Homo sapiens
aaaattaccttcaat

SEQ ID NO: 941417 - DNA, 15 bp, Homo sapiens
aaaaattaccttcaa

SEQ ID NO: 941418 - DNA, 15 bp, Homo sapiens
aaaaaattaccttca

SEQ ID NO: 941419 - DNA, 15 bp, Homo sapiens
aaaaaaattaccttc

SEQ ID NO: 941420 - DNA, 15 bp, Homo sapiens
aaaaaaaattacctt

SEQ ID NO: 941421 - DNA, 15 bp, Homo sapiens
taaaaaaaattacct

SEQ ID NO: 941422 - DNA, 15 bp, Homo sapiens
ttaaaaaaaattacc

SEQ ID NO: 941423 - DNA, 15 bp, Homo sapiens
attaaaaaaaattac

SEQ ID NO: 941424 - DNA, 15 bp, Homo sapiens
cattaaaaaaaatta

SEQ ID NO: 941425 - DNA, 15 bp, Homo sapiens
acattaaaaaaaatt

SEQ ID NO: 941426 - DNA, 15 bp, Homo sapiens
cacattaaaaaaaat

SEQ ID NO: 941427 - DNA, 15 bp, Homo sapiens
tcacattaaaaaaaa

SEQ ID NO: 941428 - DNA, 15 bp, Homo sapiens
atcacattaaaaaaa

SEQ ID NO: 941429 - DNA, 15 bp, Homo sapiens
gatcacattaaaaaa

SEQ ID NO: 941430 - DNA, 15 bp, Homo sapiens
tgatcacattaaaaa

SEQ ID NO: 941431 - DNA, 15 bp, Homo sapiens
atgatcacattaaaa

SEQ ID NO: 941432 - DNA, 15 bp, Homo sapiens
aatgatcacattaaa

SEQ ID NO: 941433 - DNA, 15 bp, Homo sapiens
aaatgatcacattaa

SEQ ID NO: 941434 - DNA, 15 bp, Homo sapiens
aaaatgatcacatta

SEQ ID NO: 941435 - DNA, 15 bp, Homo sapiens
aaaaatgatcacatt

SEQ ID NO: 941436 - DNA, 15 bp, Homo sapiens
taaaaatgatcacat

SEQ ID NO: 941437 - DNA, 15 bp, Homo sapiens
ctaaaaatgatcaca

SEQ ID NO: 941438 - DNA, 15 bp, Homo sapiens
cctaaaaatgatcac

SEQ ID NO: 941439 - DNA, 15 bp, Homo sapiens
ccctaaaaatgatca

SEQ ID NO: 941440 - DNA, 15 bp, Homo sapiens
cccctaaaaatgatc

SEQ ID NO: 941441 - DNA, 15 bp, Homo sapiens
tcccctaaaaatgat

SEQ ID NO: 941442 - DNA, 15 bp, Homo sapiens
ttcccctaaaaatga

SEQ ID NO: 941443 - DNA, 15 bp, Homo sapiens
attcccctaaaaatg

SEQ ID NO: 941444 - DNA, 15 bp, Homo sapiens
tattcccctaaaaat

SEQ ID NO: 941445 - DNA, 15 bp, Homo sapiens
atattcccctaaaaa

SEQ ID NO: 941446 - DNA, 15 bp, Homo sapiens
aatattcccctaaaa

SEQ ID NO: 941447 - DNA, 15 bp, Homo sapiens
aaatattcccctaaa

SEQ ID NO: 941448 - DNA, 15 bp, Homo sapiens
aaaatattcccctaa

SEQ ID NO: 941449 - DNA, 15 bp, Homo sapiens
taaaatattccccta

SEQ ID NO: 941450 - DNA, 15 bp, Homo sapiens
gtaaaatattcccct

SEQ ID NO: 941451 - DNA, 15 bp, Homo sapiens
cgtaaaatattcccc

SEQ ID NO: 941452 - DNA, 15 bp, Homo sapiens
acgtaaaatattccc

SEQ ID NO: 941453 - DNA, 15 bp, Homo sapiens
aacgtaaaatattcc

SEQ ID NO: 941454 - DNA, 15 bp, Homo sapiens
aaacgtaaaatattc

SEQ ID NO: 941455 - DNA, 15 bp, Homo sapiens
aaaacgtaaaatatt

SEQ ID NO: 941456 - DNA, 15 bp, Homo sapiens
caaaacgtaaaatat

SEQ ID NO: 941457 - DNA, 15 bp, Homo sapiens
acaaaacgtaaaata

SEQ ID NO: 941458 - DNA, 15 bp, Homo sapiens
aacaaaacgtaaaat

SEQ ID NO: 941459 - DNA, 15 bp, Homo sapiens
taacaaaacgtaaaa

SEQ ID NO: 941460 - DNA, 15 bp, Homo sapiens
gtaacaaaacgtaaa

SEQ ID NO: 941461 - DNA, 15 bp, Homo sapiens
agtaacaaaacgtaa

SEQ ID NO: 941462 - DNA, 15 bp, Homo sapiens
tagtaacaaaacgta

SEQ ID NO: 941463 - DNA, 15 bp, Homo sapiens
atagtaacaaaacgt

SEQ ID NO: 941464 - DNA, 15 bp, Homo sapiens
aatagtaacaaaacg

SEQ ID NO: 941465 - DNA, 15 bp, Homo sapiens
aaatagtaacaaaac

SEQ ID NO: 941466 - DNA, 15 bp, Homo sapiens
taaatagtaacaaaa

SEQ ID NO: 941467 - DNA, 15 bp, Homo sapiens
ctaaatagtaacaaa

SEQ ID NO: 941468 - DNA, 15 bp, Homo sapiens
cctaaatagtaacaa

SEQ ID NO: 941469 - DNA, 15 bp, Homo sapiens
tcctaaatagtaaca

SEQ ID NO: 941470 - DNA, 15 bp, Homo sapiens
ttcctaaatagtaac

SEQ ID NO: 941471 - DNA, 15 bp, Homo sapiens
tttcctaaatagtaa

SEQ ID NO: 941472 - DNA, 15 bp, Homo sapiens
ttttcctaaatagta

SEQ ID NO: 941473 - DNA, 15 bp, Homo sapiens
attttcctaaatagt

SEQ ID NO: 941474 - DNA, 15 bp, Homo sapiens
aattttcctaaatag

SEQ ID NO: 941475 - DNA, 15 bp, Homo sapiens
aaattttcctaaata

SEQ ID NO: 941476 - DNA, 15 bp, Homo sapiens
gaaattttcctaaat

SEQ ID NO: 941477 - DNA, 15 bp, Homo sapiens
tgaaattttcctaaa

SEQ ID NO: 941478 - DNA, 15 bp, Homo sapiens
ttgaaattttcctaa

SEQ ID NO: 941479 - DNA, 15 bp, Homo sapiens
tttgaaattttccta

SEQ ID NO: 941480 - DNA, 15 bp, Homo sapiens
atttgaaattttcct

SEQ ID NO: 941481 - DNA, 15 bp, Homo sapiens
tatttgaaattttcc

SEQ ID NO: 941482 - DNA, 15 bp, Homo sapiens
atatttgaaattttc

SEQ ID NO: 941483 - DNA, 15 bp, Homo sapiens
agcatatttgaaatt

SEQ ID NO: 941484 - DNA, 15 bp, Homo sapiens
gagcatatttgaaat

SEQ ID NO: 941485 - DNA, 15 bp, Homo sapiens
tgagcatatttgaaa

SEQ ID NO: 941486 - DNA, 15 bp, Homo sapiens
atgagcatatttgaa

SEQ ID NO: 941487 - DNA, 15 bp, Homo sapiens
aatgagcatatttga

SEQ ID NO: 941488 - DNA, 15 bp, Homo sapiens
taatgagcatatttg

SEQ ID NO: 941489 - DNA, 15 bp, Homo sapiens
gtaatgagcatattt

SEQ ID NO: 941490 - DNA, 15 bp, Homo sapiens
agtaatgagcatatt

SEQ ID NO: 941491 - DNA, 15 bp, Homo sapiens
tagtaatgagcatat

SEQ ID NO: 941492 - DNA, 15 bp, Homo sapiens
atagtaatgagcata

SEQ ID NO: 941493 - DNA, 15 bp, Homo sapiens
tatagtaatgagcat

SEQ ID NO: 941494 - DNA, 15 bp, Homo sapiens
atatagtaatgagca

SEQ ID NO: 941495 - DNA, 15 bp, Homo sapiens
tatatagtaatgagc

SEQ ID NO: 941496 - DNA, 15 bp, Homo sapiens
ttatatagtaatgag

SEQ ID NO: 941497 - DNA, 15 bp, Homo sapiens
tttatatagtaatga

SEQ ID NO: 941498 - DNA, 15 bp, Homo sapiens
ttttatatagtaatg

SEQ ID NO: 941499 - DNA, 15 bp, Homo sapiens
attttatatagtaat

SEQ ID NO: 941500 - DNA, 15 bp, Homo sapiens
cattttatatagtaa

SEQ ID NO: 941501 - DNA, 15 bp, Homo sapiens
ccattttatatagta

SEQ ID NO: 941502 - DNA, 15 bp, Homo sapiens
gccattttatatagt

SEQ ID NO: 941503 - DNA, 15 bp, Homo sapiens
agccattttatatag

SEQ ID NO: 941504 - DNA, 15 bp, Homo sapiens
aagccattttatata

SEQ ID NO: 941505 - DNA, 15 bp, Homo sapiens
aaagccattttatat

SEQ ID NO: 941506 - DNA, 15 bp, Homo sapiens
taaagccattttata

SEQ ID NO: 941507 - DNA, 15 bp, Homo sapiens
ttaaagccattttat

SEQ ID NO: 941508 - DNA, 15 bp, Homo sapiens
attaaagccatttta

SEQ ID NO: 941509 - DNA, 15 bp, Homo sapiens
cattaaagccatttt

SEQ ID NO: 941510 - DNA, 15 bp, Homo sapiens
tcattaaagccattt

SEQ ID NO: 941511 - DNA, 15 bp, Homo sapiens
ttcattaaagccatt

SEQ ID NO: 941512 - DNA, 15 bp, Homo sapiens
attcattaaagccat

SEQ ID NO: 941513 - DNA, 15 bp, Homo sapiens
tattcattaaagcca

SEQ ID NO: 941514 - DNA, 15 bp, Homo sapiens
gtattcattaaagcc

SEQ ID NO: 941515 - DNA, 15 bp, Homo sapiens
tgtattcattaaagc

SEQ ID NO: 941516 - DNA, 15 bp, Homo sapiens
ttgtattcattaaag

SEQ ID NO: 941517 - DNA, 15 bp, Homo sapiens
attgtattcattaaa

SEQ ID NO: 941518 - DNA, 15 bp, Homo sapiens
tattgtattcattaa

SEQ ID NO: 941519 - DNA, 15 bp, Homo sapiens
gtattgtattcatta

SEQ ID NO: 941520 - DNA, 15 bp, Homo sapiens
tgtattgtattcatt

SEQ ID NO: 941521 - DNA, 15 bp, Homo sapiens
atgtattgtattcat

SEQ ID NO: 941522 - DNA, 15 bp, Homo sapiens
tatgtattgtattca

SEQ ID NO: 941523 - DNA, 15 bp, Homo sapiens
atatgtattgtattc

SEQ ID NO: 941524 - DNA, 15 bp, Homo sapiens
aatatgtattgtatt

SEQ ID NO: 941525 - DNA, 15 bp, Homo sapiens
aaatatgtattgtat

SEQ ID NO: 941526 - DNA, 15 bp, Homo sapiens
aaaatatgtattgta

SEQ ID NO: 941527 - DNA, 15 bp, Homo sapiens
taaaatatgtattgt

SEQ ID NO: 941528 - DNA, 15 bp, Homo sapiens
ataaaatatgtattg

SEQ ID NO: 941529 - DNA, 15 bp, Homo sapiens
tataaaatatgtatt

SEQ ID NO: 941530 - DNA, 15 bp, Homo sapiens
ttataaaatatgtat

SEQ ID NO: 941531 - DNA, 15 bp, Homo sapiens
tttataaaatatgta

SEQ ID NO: 941532 - DNA, 15 bp, Homo sapiens
atttataaaatatgt

SEQ ID NO: 941533 - DNA, 15 bp, Homo sapiens
tatttataaaatatg

SEQ ID NO: 941534 - DNA, 15 bp, Homo sapiens
atatttataaaatat

SEQ ID NO: 941535 - DNA, 15 bp, Homo sapiens
tatatttataaaata

SEQ ID NO: 941536 - DNA, 15 bp, Homo sapiens
ctatatttataaaat

SEQ ID NO: 941537 - DNA, 15 bp, Homo sapiens
tctatatttataaaa

SEQ ID NO: 941538 - DNA, 15 bp, Homo sapiens
ttctatatttataaa

SEQ ID NO: 941539 - DNA, 15 bp, Homo sapiens
tttctatatttataa

SEQ ID NO: 941540 - DNA, 15 bp, Homo sapiens
ttttctatatttata

SEQ ID NO: 941541 - DNA, 15 bp, Homo sapiens
tttttctatatttat

SEQ ID NO: 941542 - DNA, 15 bp, Homo sapiens
ttttttctatattta

SEQ ID NO: 941543 - DNA, 15 bp, Homo sapiens
tttttttctatattt

SEQ ID NO: 941544 - DNA, 15 bp, Homo sapiens
gtttttttctatatt

SEQ ID NO: 941545 - DNA, 15 bp, Homo sapiens
agtttttttctatat

SEQ ID NO: 941546 - DNA, 15 bp, Homo sapiens
aagtttttttctata

SEQ ID NO: 941547 - DNA, 15 bp, Homo sapiens
taagtttttttctat

SEQ ID NO: 941548 - DNA, 15 bp, Homo sapiens
ataagtttttttcta

SEQ ID NO: 941549 - DNA, 15 bp, Homo sapiens
cataagtttttttct

SEQ ID NO: 941550 - DNA, 15 bp, Homo sapiens
tcataagtttttttc

SEQ ID NO: 941551 - DNA, 15 bp, Homo sapiens
cttagacttggttga

SEQ ID NO: 941552 - DNA, 15 bp, Homo sapiens
ccttagacttggttg

SEQ ID NO: 941553 - DNA, 15 bp, Homo sapiens
tccttagacttggtt

SEQ ID NO: 941554 - DNA, 15 bp, Homo sapiens
ctccttagacttggt

SEQ ID NO: 941555 - DNA, 15 bp, Homo sapiens
tctccttagacttgg

SEQ ID NO: 941556 - DNA, 15 bp, Homo sapiens
ttctccttagacttg

SEQ ID NO: 941557 - DNA, 15 bp, Homo sapiens
tttctccttagactt

SEQ ID NO: 941558 - DNA, 15 bp, Homo sapiens
ctttctccttagact

SEQ ID NO: 941559 - DNA, 15 bp, Homo sapiens
tctttctccttagac

SEQ ID NO: 941560 - DNA, 15 bp, Homo sapiens
atctttctccttaga

SEQ ID NO: 941561 - DNA, 15 bp, Homo sapiens
aatctttctccttag

SEQ ID NO: 941562 - DNA, 15 bp, Homo sapiens
taatctttctcctta

SEQ ID NO: 941563 - DNA, 15 bp, Homo sapiens
ttaatctttctcctt

SEQ ID NO: 941564 - DNA, 15 bp, Homo sapiens
cttaatctttctcct

SEQ ID NO: 941565 - DNA, 15 bp, Homo sapiens
gcttaatctttctcc

SEQ ID NO: 941566 - DNA, 15 bp, Homo sapiens
tgcttaatctttctc

SEQ ID NO: 941567 - DNA, 15 bp, Homo sapiens
ctgcttaatctttct

SEQ ID NO: 941568 - DNA, 15 bp, Homo sapiens
cctgcttaatctttc

SEQ ID NO: 941569 - DNA, 15 bp, Homo sapiens
gcctgcttaatcttt

SEQ ID NO: 941570 - DNA, 15 bp, Homo sapiens
tgcctgcttaatctt

SEQ ID NO: 941571 - DNA, 15 bp, Homo sapiens
atgcctgcttaatct

SEQ ID NO: 941572 - DNA, 15 bp, Homo sapiens
tatgcctgcttaatc

SEQ ID NO: 941573 - DNA, 15 bp, Homo sapiens
atatgcctgcttaat

SEQ ID NO: 941574 - DNA, 15 bp, Homo sapiens
aatatgcctgcttaa

SEQ ID NO: 941575 - DNA, 15 bp, Homo sapiens
taatatgcctgctta

SEQ ID NO: 941576 - DNA, 15 bp, Homo sapiens
ttaatatgcctgctt

SEQ ID NO: 941577 - DNA, 15 bp, Homo sapiens
tttaatatgcctgct

SEQ ID NO: 941578 - DNA, 15 bp, Homo sapiens
ctttaatatgcctgc

SEQ ID NO: 941579 - DNA, 15 bp, Homo sapiens
cctttaatatgcctg

SEQ ID NO: 941580 - DNA, 15 bp, Homo sapiens
tcctttaatatgcct

SEQ ID NO: 941581 - DNA, 15 bp, Homo sapiens
gtcctttaatatgcc

SEQ ID NO: 941582 - DNA, 15 bp, Homo sapiens
tgtcctttaatatgc

SEQ ID NO: 941583 - DNA, 15 bp, Homo sapiens
ctgtcctttaatatg

SEQ ID NO: 941584 - DNA, 15 bp, Homo sapiens
gctgtcctttaatat

SEQ ID NO: 941585 - DNA, 15 bp, Homo sapiens
ggctgtcctttaata

SEQ ID NO: 941586 - DNA, 15 bp, Homo sapiens
gggctgtcctttaat

SEQ ID NO: 941587 - DNA, 15 bp, Homo sapiens
tgggctgtcctttaa

SEQ ID NO: 941588 - DNA, 15 bp, Homo sapiens
ctgggctgtccttta

SEQ ID NO: 941589 - DNA, 15 bp, Homo sapiens
tctgggctgtccttt

SEQ ID NO: 941590 - DNA, 15 bp, Homo sapiens
atctgggctgtcctt

SEQ ID NO: 941591 - DNA, 15 bp, Homo sapiens
catctgggctgtcct

SEQ ID NO: 941592 - DNA, 15 bp, Homo sapiens
ccatctgggctgtcc

SEQ ID NO: 941593 - DNA, 15 bp, Homo sapiens
tccatctgggctgtc

SEQ ID NO: 941594 - DNA, 15 bp, Homo sapiens
gtccatctgggctgt

SEQ ID NO: 941595 - DNA, 15 bp, Homo sapiens
tgtccatctgggctg

SEQ ID NO: 941596 - DNA, 15 bp, Homo sapiens
atgtccatctgggct

SEQ ID NO: 941597 - DNA, 15 bp, Homo sapiens
catgtccatctgggc

SEQ ID NO: 941598 - DNA, 15 bp, Homo sapiens
tcatgtccatctggg

SEQ ID NO: 941599 - DNA, 15 bp, Homo sapiens
ttcatgtccatctgg

SEQ ID NO: 941600 - DNA, 15 bp, Homo sapiens
cttcatgtccatctg

SEQ ID NO: 941601 - DNA, 15 bp, Homo sapiens
acttcatgtccatct

SEQ ID NO: 941602 - DNA, 15 bp, Homo sapiens
gacttcatgtccatc

SEQ ID NO: 941603 - DNA, 15 bp, Homo sapiens
ggacttcatgtccat

SEQ ID NO: 941604 - DNA, 15 bp, Homo sapiens
aggacttcatgtcca

SEQ ID NO: 941605 - DNA, 15 bp, Homo sapiens
caggacttcatgtcc

SEQ ID NO: 941606 - DNA, 15 bp, Homo sapiens
ccaggacttcatgtc

SEQ ID NO: 941607 - DNA, 15 bp, Homo sapiens
tccaggacttcatgt

SEQ ID NO: 941608 - DNA, 15 bp, Homo sapiens
ctccaggacttcatg

SEQ ID NO: 941609 - DNA, 15 bp, Homo sapiens
cctccaggacttcat

SEQ ID NO: 941610 - DNA, 15 bp, Homo sapiens
tcctccaggacttca

SEQ ID NO: 941611 - DNA, 15 bp, Homo sapiens
ctcctccaggacttc

SEQ ID NO: 941612 - DNA, 15 bp, Homo sapiens
cctcctccaggactt

SEQ ID NO: 941613 - DNA, 15 bp, Homo sapiens
gcctcctccaggact

SEQ ID NO: 941614 - DNA, 15 bp, Homo sapiens
ggcctcctccaggac

SEQ ID NO: 941615 - DNA, 15 bp, Homo sapiens
aggcctcctccagga

SEQ ID NO: 941616 - DNA, 15 bp, Homo sapiens
aaggcctcctccagg

SEQ ID NO: 941617 - DNA, 15 bp, Homo sapiens
caaggcctcctccag

SEQ ID NO: 941618 - DNA, 15 bp, Homo sapiens
ccaaggcctcctcca

SEQ ID NO: 941619 - DNA, 15 bp, Homo sapiens
accaaggcctcctcc

SEQ ID NO: 941620 - DNA, 15 bp, Homo sapiens
aaccaaggcctcctc

SEQ ID NO: 941621 - DNA, 15 bp, Homo sapiens
gaaccaaggcctcct

SEQ ID NO: 941622 - DNA, 15 bp, Homo sapiens
ggaaccaaggcctcc

SEQ ID NO: 941623 - DNA, 15 bp, Homo sapiens
aggaaccaaggcctc

SEQ ID NO: 941624 - DNA, 15 bp, Homo sapiens
caggaaccaaggcct

SEQ ID NO: 941625 - DNA, 15 bp, Homo sapiens
acaggaaccaaggcc

SEQ ID NO: 941626 - DNA, 15 bp, Homo sapiens
gacaggaaccaaggc

SEQ ID NO: 941627 - DNA, 15 bp, Homo sapiens
ggacaggaaccaagg

SEQ ID NO: 941628 - DNA, 15 bp, Homo sapiens
aggacaggaaccaag

SEQ ID NO: 941629 - DNA, 15 bp, Homo sapiens
taggacaggaaccaa

SEQ ID NO: 941630 - DNA, 15 bp, Homo sapiens
ttaggacaggaacca

SEQ ID NO: 941631 - DNA, 15 bp, Homo sapiens
attaggacaggaacc

SEQ ID NO: 941632 - DNA, 15 bp, Homo sapiens
tattaggacaggaac

SEQ ID NO: 941633 - DNA, 15 bp, Homo sapiens
gtattaggacaggaa

SEQ ID NO: 941634 - DNA, 15 bp, Homo sapiens
agtattaggacagga

SEQ ID NO: 941635 - DNA, 15 bp, Homo sapiens
tagtattaggacagg

SEQ ID NO: 941636 - DNA, 15 bp, Homo sapiens
ttagtattaggacag

SEQ ID NO: 941637 - DNA, 15 bp, Homo sapiens
tttagtattaggaca

SEQ ID NO: 941638 - DNA, 15 bp, Homo sapiens
gtttagtattaggac

SEQ ID NO: 941639 - DNA, 15 bp, Homo sapiens
ggtttagtattagga

SEQ ID NO: 941640 - DNA, 15 bp, Homo sapiens
aggtttagtattagg

SEQ ID NO: 941641 - DNA, 15 bp, Homo sapiens
taggtttagtattag

SEQ ID NO: 941642 - DNA, 15 bp, Homo sapiens
ctaggtttagtatta

SEQ ID NO: 941643 - DNA, 15 bp, Homo sapiens
tctaggtttagtatt

SEQ ID NO: 941644 - DNA, 15 bp, Homo sapiens
ctctaggtttagtat

SEQ ID NO: 941645 - DNA, 15 bp, Homo sapiens
actctaggtttagta

SEQ ID NO: 941646 - DNA, 15 bp, Homo sapiens
tactctaggtttagt

SEQ ID NO: 941647 - DNA, 15 bp, Homo sapiens
gtactctaggtttag

SEQ ID NO: 941648 - DNA, 15 bp, Homo sapiens
ggtactctaggttta

SEQ ID NO: 941649 - DNA, 15 bp, Homo sapiens
gggtactctaggttt

SEQ ID NO: 941650 - DNA, 15 bp, Homo sapiens
tgggtactctaggtt

SEQ ID NO: 941651 - DNA, 15 bp, Homo sapiens
ctgggtactctaggt

SEQ ID NO: 941652 - DNA, 15 bp, Homo sapiens
tctgggtactctagg

SEQ ID NO: 941653 - DNA, 15 bp, Homo sapiens
ttctgggtactctag

SEQ ID NO: 941654 - DNA, 15 bp, Homo sapiens
attctgggtactcta

SEQ ID NO: 941655 - DNA, 15 bp, Homo sapiens
gattctgggtactct

SEQ ID NO: 941656 - DNA, 15 bp, Homo sapiens
ggattctgggtactc

SEQ ID NO: 941657 - DNA, 15 bp, Homo sapiens
tggattctgggtact

SEQ ID NO: 941658 - DNA, 15 bp, Homo sapiens
gtggattctgggtac

SEQ ID NO: 941659 - DNA, 15 bp, Homo sapiens
tgtggattctgggta

SEQ ID NO: 941660 - DNA, 15 bp, Homo sapiens
gtgtggattctgggt

SEQ ID NO: 941661 - DNA, 15 bp, Homo sapiens
agtgtggattctggg

SEQ ID NO: 941662 - DNA, 15 bp, Homo sapiens
aagtgtggattctgg

SEQ ID NO: 941663 - DNA, 15 bp, Homo sapiens
gaagtgtggattctg

SEQ ID NO: 941664 - DNA, 15 bp, Homo sapiens
agaagtgtggattct

SEQ ID NO: 941665 - DNA, 15 bp, Homo sapiens
gagaagtgtggattc

SEQ ID NO: 941666 - DNA, 15 bp, Homo sapiens
ggagaagtgtggatt

SEQ ID NO: 941667 - DNA, 15 bp, Homo sapiens
tggagaagtgtggat

SEQ ID NO: 941668 - DNA, 15 bp, Homo sapiens
gtggagaagtgtgga

SEQ ID NO: 941669 - DNA, 15 bp, Homo sapiens
agtggagaagtgtgg

SEQ ID NO: 941670 - DNA, 15 bp, Homo sapiens
gagtggagaagtgtg

SEQ ID NO: 941671 - DNA, 15 bp, Homo sapiens
agagtggagaagtgt

SEQ ID NO: 941672 - DNA, 15 bp, Homo sapiens
tagagtggagaagtg

SEQ ID NO: 941673 - DNA, 15 bp, Homo sapiens
ctagagtggagaagt

SEQ ID NO: 941674 - DNA, 15 bp, Homo sapiens
gctagagtggagaag

SEQ ID NO: 941675 - DNA, 15 bp, Homo sapiens
agctagagtggagaa

SEQ ID NO: 941676 - DNA, 15 bp, Homo sapiens
gagctagagtggaga

SEQ ID NO: 941677 - DNA, 15 bp, Homo sapiens
agagctagagtggag

SEQ ID NO: 941678 - DNA, 15 bp, Homo sapiens
gagagctagagtgga

SEQ ID NO: 941679 - DNA, 15 bp, Homo sapiens
tgagagctagagtgg

SEQ ID NO: 941680 - DNA, 15 bp, Homo sapiens
gtgagagctagagtg

SEQ ID NO: 941681 - DNA, 15 bp, Homo sapiens
agtgagagctagagt

SEQ ID NO: 941682 - DNA, 15 bp, Homo sapiens
aagtgagagctagag

SEQ ID NO: 941683 - DNA, 15 bp, Homo sapiens
aaagtgagagctaga

SEQ ID NO: 941684 - DNA, 15 bp, Homo sapiens
aaaagtgagagctag

SEQ ID NO: 941685 - DNA, 15 bp, Homo sapiens
gaaaagtgagagcta

SEQ ID NO: 941686 - DNA, 15 bp, Homo sapiens
ggaaaagtgagagct

SEQ ID NO: 941687 - DNA, 15 bp, Homo sapiens
gggaaaagtgagagc

SEQ ID NO: 941688 - DNA, 15 bp, Homo sapiens
tgggaaaagtgagag

SEQ ID NO: 941689 - DNA, 15 bp, Homo sapiens
atgggaaaagtgaga

SEQ ID NO: 941690 - DNA, 15 bp, Homo sapiens
gatgggaaaagtgag

SEQ ID NO: 941691 - DNA, 15 bp, Homo sapiens
agatgggaaaagtga

SEQ ID NO: 941692 - DNA, 15 bp, Homo sapiens
tagatgggaaaagtg

SEQ ID NO: 941693 - DNA, 15 bp, Homo sapiens
gtagatgggaaaagt

SEQ ID NO: 941694 - DNA, 15 bp, Homo sapiens
tgtagatgggaaaag

SEQ ID NO: 941695 - DNA, 15 bp, Homo sapiens
gtgtagatgggaaaa

SEQ ID NO: 941696 - DNA, 15 bp, Homo sapiens
tgtgtagatgggaaa

SEQ ID NO: 941697 - DNA, 15 bp, Homo sapiens
gtgtgtagatgggaa

SEQ ID NO: 941698 - DNA, 15 bp, Homo sapiens
agtgtgtagatggga

SEQ ID NO: 941699 - DNA, 15 bp, Homo sapiens
cagtgtgtagatggg

SEQ ID NO: 941700 - DNA, 15 bp, Homo sapiens
ccagtgtgtagatgg

SEQ ID NO: 941701 - DNA, 15 bp, Homo sapiens
cccagtgtgtagatg

SEQ ID NO: 941702 - DNA, 15 bp, Homo sapiens
tcccagtgtgtagat

SEQ ID NO: 941703 - DNA, 15 bp, Homo sapiens
ttcccagtgtgtaga

SEQ ID NO: 941704 - DNA, 15 bp, Homo sapiens
tttcccagtgtgtag

SEQ ID NO: 941705 - DNA, 15 bp, Homo sapiens
ttttcccagtgtgta

SEQ ID NO: 941706 - DNA, 15 bp, Homo sapiens
tttttcccagtgtgt

SEQ ID NO: 941707 - DNA, 15 bp, Homo sapiens
atttttcccagtgtg

SEQ ID NO: 941708 - DNA, 15 bp, Homo sapiens
aatttttcccagtgt

SEQ ID NO: 941709 - DNA, 15 bp, Homo sapiens
taatttttcccagtg

SEQ ID NO: 941710 - DNA, 15 bp, Homo sapiens
ataatttttcccagt

SEQ ID NO: 941711 - DNA, 15 bp, Homo sapiens
aataatttttcccag

SEQ ID NO: 941712 - DNA, 15 bp, Homo sapiens
gaataatttttccca

SEQ ID NO: 941713 - DNA, 15 bp, Homo sapiens
agaataatttttccc

SEQ ID NO: 941714 - DNA, 15 bp, Homo sapiens
cagaataatttttcc

SEQ ID NO: 941715 - DNA, 15 bp, Homo sapiens
acagaataatttttc

SEQ ID NO: 941716 - DNA, 15 bp, Homo sapiens
gacagaataattttt

SEQ ID NO: 941717 - DNA, 15 bp, Homo sapiens
tgacagaataatttt

SEQ ID NO: 941718 - DNA, 15 bp, Homo sapiens
ctgacagaataattt

SEQ ID NO: 941719 - DNA, 15 bp, Homo sapiens
tctgacagaataatt

SEQ ID NO: 941720 - DNA, 15 bp, Homo sapiens
ttctgacagaataat

SEQ ID NO: 941721 - DNA, 15 bp, Homo sapiens
tttctgacagaataa

SEQ ID NO: 941722 - DNA, 15 bp, Homo sapiens
ctttctgacagaata

SEQ ID NO: 941723 - DNA, 15 bp, Homo sapiens
gctttctgacagaat

SEQ ID NO: 941724 - DNA, 15 bp, Homo sapiens
ggctttctgacagaa

SEQ ID NO: 941725 - DNA, 15 bp, Homo sapiens
tggctttctgacaga

SEQ ID NO: 941726 - DNA, 15 bp, Homo sapiens
ctggctttctgacag

SEQ ID NO: 941727 - DNA, 15 bp, Homo sapiens
actggctttctgaca

SEQ ID NO: 941728 - DNA, 15 bp, Homo sapiens
cactggctttctgac

SEQ ID NO: 941729 - DNA, 15 bp, Homo sapiens
acactggctttctga

SEQ ID NO: 941730 - DNA, 15 bp, Homo sapiens
gacactggctttctg

SEQ ID NO: 941731 - DNA, 15 bp, Homo sapiens
tgacactggctttct

SEQ ID NO: 941732 - DNA, 15 bp, Homo sapiens
ttgacactggctttc

SEQ ID NO: 941733 - DNA, 15 bp, Homo sapiens
cttgacactggcttt

SEQ ID NO: 941734 - DNA, 15 bp, Homo sapiens
ccttgacactggctt

SEQ ID NO: 941735 - DNA, 15 bp, Homo sapiens
accttgacactggct

SEQ ID NO: 941736 - DNA, 15 bp, Homo sapiens
caccttgacactggc

SEQ ID NO: 941737 - DNA, 15 bp, Homo sapiens
tcaccttgacactgg

SEQ ID NO: 941738 - DNA, 15 bp, Homo sapiens
ctcaccttgacactg

SEQ ID NO: 941739 - DNA, 15 bp, Homo sapiens
tctcaccttgacact

SEQ ID NO: 941740 - DNA, 15 bp, Homo sapiens
ttctcaccttgacac

SEQ ID NO: 941741 - DNA, 15 bp, Homo sapiens
gttctcaccttgaca

SEQ ID NO: 941742 - DNA, 15 bp, Homo sapiens
tgttctcaccttgac

SEQ ID NO: 941743 - DNA, 15 bp, Homo sapiens
ttgttctcaccttga

SEQ ID NO: 941744 - DNA, 15 bp, Homo sapiens
tttgttctcaccttg

SEQ ID NO: 941745 - DNA, 15 bp, Homo sapiens
atttgttctcacctt

SEQ ID NO: 941746 - DNA, 15 bp, Homo sapiens
tatttgttctcacct

SEQ ID NO: 941747 - DNA, 15 bp, Homo sapiens
ttatttgttctcacc

SEQ ID NO: 941748 - DNA, 15 bp, Homo sapiens
gttatttgttctcac

SEQ ID NO: 941749 - DNA, 15 bp, Homo sapiens
tgttatttgttctca

SEQ ID NO: 941750 - DNA, 15 bp, Homo sapiens
ttgttatttgttctc

SEQ ID NO: 941751 - DNA, 15 bp, Homo sapiens
tttgttatttgttct

SEQ ID NO: 941752 - DNA, 15 bp, Homo sapiens
atttgttatttgttc

SEQ ID NO: 941753 - DNA, 15 bp, Homo sapiens
catttgttatttgtt

SEQ ID NO: 941754 - DNA, 15 bp, Homo sapiens
acatttgttatttgt

SEQ ID NO: 941755 - DNA, 15 bp, Homo sapiens
cacatttgttatttg

SEQ ID NO: 941756 - DNA, 15 bp, Homo sapiens
tcacatttgttattt

SEQ ID NO: 941757 - DNA, 15 bp, Homo sapiens
atcacatttgttatt

SEQ ID NO: 941758 - DNA, 15 bp, Homo sapiens
catcacatttgttat

SEQ ID NO: 941759 - DNA, 15 bp, Homo sapiens
tcatcacatttgtta

SEQ ID NO: 941760 - DNA, 15 bp, Homo sapiens
atcatcacatttgtt

SEQ ID NO: 941761 - DNA, 15 bp, Homo sapiens
tatcatcacatttgt

SEQ ID NO: 941762 - DNA, 15 bp, Homo sapiens
atatcatcacatttg

SEQ ID NO: 941763 - DNA, 15 bp, Homo sapiens
catatcatcacattt

SEQ ID NO: 941764 - DNA, 15 bp, Homo sapiens
ccatatcatcacatt

SEQ ID NO: 941765 - DNA, 15 bp, Homo sapiens
tccatatcatcacat

SEQ ID NO: 941766 - DNA, 15 bp, Homo sapiens
ctccatatcatcaca

SEQ ID NO: 941767 - DNA, 15 bp, Homo sapiens
actccatatcatcac

SEQ ID NO: 941768 - DNA, 15 bp, Homo sapiens
cactccatatcatca

SEQ ID NO: 941769 - DNA, 15 bp, Homo sapiens
ccactccatatcatc

SEQ ID NO: 941770 - DNA, 15 bp, Homo sapiens
cccactccatatcat

SEQ ID NO: 941771 - DNA, 15 bp, Homo sapiens
tcccactccatatca

SEQ ID NO: 941772 - DNA, 15 bp, Homo sapiens
ctcccactccatatc

SEQ ID NO: 941773 - DNA, 15 bp, Homo sapiens
tctcccactccatat

SEQ ID NO: 941774 - DNA, 15 bp, Homo sapiens
ttctcccactccata

SEQ ID NO: 941775 - DNA, 15 bp, Homo sapiens
cttctcccactccat

SEQ ID NO: 941776 - DNA, 15 bp, Homo sapiens
ccttctcccactcca

SEQ ID NO: 941777 - DNA, 15 bp, Homo sapiens
cccttctcccactcc

SEQ ID NO: 941778 - DNA, 15 bp, Homo sapiens
ccccttctcccactc

SEQ ID NO: 941779 - DNA, 15 bp, Homo sapiens
accccttctcccact

SEQ ID NO: 941780 - DNA, 15 bp, Homo sapiens
gaccccttctcccac

SEQ ID NO: 941781 - DNA, 15 bp, Homo sapiens
agaccccttctccca

SEQ ID NO: 941782 - DNA, 15 bp, Homo sapiens
gagaccccttctccc

SEQ ID NO: 941783 - DNA, 15 bp, Homo sapiens
agagaccccttctcc

SEQ ID NO: 941784 - DNA, 15 bp, Homo sapiens
aagagaccccttctc

SEQ ID NO: 941785 - DNA, 15 bp, Homo sapiens
gaagagaccccttct

SEQ ID NO: 941786 - DNA, 15 bp, Homo sapiens
agaagagaccccttc

SEQ ID NO: 941787 - DNA, 15 bp, Homo sapiens
tagaagagacccctt

SEQ ID NO: 941788 - DNA, 15 bp, Homo sapiens
gtagaagagacccct

SEQ ID NO: 941789 - DNA, 15 bp, Homo sapiens
agtagaagagacccc

SEQ ID NO: 941790 - DNA, 15 bp, Homo sapiens
cagtagaagagaccc

SEQ ID NO: 941791 - DNA, 15 bp, Homo sapiens
acagtagaagagacc

SEQ ID NO: 941792 - DNA, 15 bp, Homo sapiens
gacagtagaagagac

SEQ ID NO: 941793 - DNA, 15 bp, Homo sapiens
agacagtagaagaga

SEQ ID NO: 941794 - DNA, 15 bp, Homo sapiens
aagacagtagaagag

SEQ ID NO: 941795 - DNA, 15 bp, Homo sapiens
taagacagtagaaga

SEQ ID NO: 941796 - DNA, 15 bp, Homo sapiens
ataagacagtagaag

SEQ ID NO: 941797 - DNA, 15 bp, Homo sapiens
aataagacagtagaa

SEQ ID NO: 941798 - DNA, 15 bp, Homo sapiens
caataagacagtaga

SEQ ID NO: 941799 - DNA, 15 bp, Homo sapiens
ccaataagacagtag

SEQ ID NO: 941800 - DNA, 15 bp, Homo sapiens
tccaataagacagta

SEQ ID NO: 941801 - DNA, 15 bp, Homo sapiens
gtccaataagacagt

SEQ ID NO: 941802 - DNA, 15 bp, Homo sapiens
ggtccaataagacag

SEQ ID NO: 941803 - DNA, 15 bp, Homo sapiens
gggtccaataagaca

SEQ ID NO: 941804 - DNA, 15 bp, Homo sapiens
agggtccaataagac

SEQ ID NO: 941805 - DNA, 15 bp, Homo sapiens
tagggtccaataaga

SEQ ID NO: 941806 - DNA, 15 bp, Homo sapiens
ctagggtccaataag

SEQ ID NO: 941807 - DNA, 15 bp, Homo sapiens
gctagggtccaataa

SEQ ID NO: 941808 - DNA, 15 bp, Homo sapiens
tgctagggtccaata

SEQ ID NO: 941809 - DNA, 15 bp, Homo sapiens
ctgctagggtccaat

SEQ ID NO: 941810 - DNA, 15 bp, Homo sapiens
actgctagggtccaa

SEQ ID NO: 941811 - DNA, 15 bp, Homo sapiens
cactgctagggtcca

SEQ ID NO: 941812 - DNA, 15 bp, Homo sapiens
ccactgctagggtcc

SEQ ID NO: 941813 - DNA, 15 bp, Homo sapiens
gccactgctagggtc

SEQ ID NO: 941814 - DNA, 15 bp, Homo sapiens
agccactgctagggt

SEQ ID NO: 941815 - DNA, 15 bp, Homo sapiens
gagccactgctaggg

SEQ ID NO: 941816 - DNA, 15 bp, Homo sapiens
agagccactgctagg

SEQ ID NO: 941817 - DNA, 15 bp, Homo sapiens
cagagccactgctag

SEQ ID NO: 941818 - DNA, 15 bp, Homo sapiens
tcagagccactgcta

SEQ ID NO: 941819 - DNA, 15 bp, Homo sapiens
ctcagagccactgct

SEQ ID NO: 941820 - DNA, 15 bp, Homo sapiens
gctcagagccactgc

SEQ ID NO: 941821 - DNA, 15 bp, Homo sapiens
ggctcagagccactg

SEQ ID NO: 941822 - DNA, 15 bp, Homo sapiens
tggctcagagccact

SEQ ID NO: 941823 - DNA, 15 bp, Homo sapiens
ctggctcagagccac

SEQ ID NO: 941824 - DNA, 15 bp, Homo sapiens
gctggctcagagcca

SEQ ID NO: 941825 - DNA, 15 bp, Homo sapiens
tgctggctcagagcc

SEQ ID NO: 941826 - DNA, 15 bp, Homo sapiens
ctgctggctcagagc

SEQ ID NO: 941827 - DNA, 15 bp, Homo sapiens
actgctggctcagag

SEQ ID NO: 941828 - DNA, 15 bp, Homo sapiens
gactgctggctcaga

SEQ ID NO: 941829 - DNA, 15 bp, Homo sapiens
ggactgctggctcag

SEQ ID NO: 941830 - DNA, 15 bp, Homo sapiens
aggactgctggctca

SEQ ID NO: 941831 - DNA, 15 bp, Homo sapiens
caggactgctggctc

SEQ ID NO: 941832 - DNA, 15 bp, Homo sapiens
acaggactgctggct

SEQ ID NO: 941833 - DNA, 15 bp, Homo sapiens
gacaggactgctggc

SEQ ID NO: 941834 - DNA, 15 bp, Homo sapiens
tgacaggactgctgg

SEQ ID NO: 941835 - DNA, 15 bp, Homo sapiens
ctgacaggactgctg

SEQ ID NO: 941836 - DNA, 15 bp, Homo sapiens
actgacaggactgct

SEQ ID NO: 941837 - DNA, 15 bp, Homo sapiens
aactgacaggactgc

SEQ ID NO: 941838 - DNA, 15 bp, Homo sapiens
caactgacaggactg

SEQ ID NO: 941839 - DNA, 15 bp, Homo sapiens
tcaactgacaggact

SEQ ID NO: 941840 - DNA, 15 bp, Homo sapiens
atcaactgacaggac

SEQ ID NO: 941841 - DNA, 15 bp, Homo sapiens
aatcaactgacagga

SEQ ID NO: 941842 - DNA, 15 bp, Homo sapiens
aaatcaactgacagg

SEQ ID NO: 941843 - DNA, 15 bp, Homo sapiens
gaaatcaactgacag

SEQ ID NO: 941844 - DNA, 15 bp, Homo sapiens
agaaatcaactgaca

SEQ ID NO: 941845 - DNA, 15 bp, Homo sapiens
aagaaatcaactgac

SEQ ID NO: 941846 - DNA, 15 bp, Homo sapiens
caagaaatcaactga

SEQ ID NO: 941847 - DNA, 15 bp, Homo sapiens
ccaagaaatcaactg

SEQ ID NO: 941848 - DNA, 15 bp, Homo sapiens
accaagaaatcaact

SEQ ID NO: 941849 - DNA, 15 bp, Homo sapiens
gaccaagaaatcaac

SEQ ID NO: 941850 - DNA, 15 bp, Homo sapiens
cgaccaagaaatcaa

SEQ ID NO: 941851 - DNA, 15 bp, Homo sapiens
acgaccaagaaatca

SEQ ID NO: 941852 - DNA, 15 bp, Homo sapiens
aacgaccaagaaatc

SEQ ID NO: 941853 - DNA, 15 bp, Homo sapiens
gaacgaccaagaaat

SEQ ID NO: 941854 - DNA, 15 bp, Homo sapiens
ggaacgaccaagaaa

SEQ ID NO: 941855 - DNA, 15 bp, Homo sapiens
aggaacgaccaagaa

SEQ ID NO: 941856 - DNA, 15 bp, Homo sapiens
aaggaacgaccaaga

SEQ ID NO: 941857 - DNA, 15 bp, Homo sapiens
aaaggaacgaccaag

SEQ ID NO: 941858 - DNA, 15 bp, Homo sapiens
caaaggaacgaccaa

SEQ ID NO: 941859 - DNA, 15 bp, Homo sapiens
acaaaggaacgacca

SEQ ID NO: 941860 - DNA, 15 bp, Homo sapiens
aacaaaggaacgacc

SEQ ID NO: 941861 - DNA, 15 bp, Homo sapiens
aaacaaaggaacgac

SEQ ID NO: 941862 - DNA, 15 bp, Homo sapiens
aaaacaaaggaacga

SEQ ID NO: 941863 - DNA, 15 bp, Homo sapiens
gaaaacaaaggaacg

SEQ ID NO: 941864 - DNA, 15 bp, Homo sapiens
agaaaacaaaggaac

SEQ ID NO: 941865 - DNA, 15 bp, Homo sapiens
aagaaaacaaaggaa

SEQ ID NO: 941866 - DNA, 15 bp, Homo sapiens
gaagaaaacaaagga

SEQ ID NO: 941867 - DNA, 15 bp, Homo sapiens
agaagaaaacaaagg

SEQ ID NO: 941868 - DNA, 15 bp, Homo sapiens
tagaagaaaacaaag

SEQ ID NO: 941869 - DNA, 15 bp, Homo sapiens
atagaagaaaacaaa

SEQ ID NO: 941870 - DNA, 15 bp, Homo sapiens
tatagaagaaaacaa

SEQ ID NO: 941871 - DNA, 15 bp, Homo sapiens
ttatagaagaaaaca

SEQ ID NO: 941872 - DNA, 15 bp, Homo sapiens
attatagaagaaaac

SEQ ID NO: 941873 - DNA, 15 bp, Homo sapiens
gattatagaagaaaa

SEQ ID NO: 941874 - DNA, 15 bp, Homo sapiens
tgattatagaagaaa

SEQ ID NO: 941875 - DNA, 15 bp, Homo sapiens
gtgattatagaagaa

SEQ ID NO: 941876 - DNA, 15 bp, Homo sapiens
tgtgattatagaaga

SEQ ID NO: 941877 - DNA, 15 bp, Homo sapiens
atgtgattatagaag

SEQ ID NO: 941878 - DNA, 15 bp, Homo sapiens
catgtgattatagaa

SEQ ID NO: 941879 - DNA, 15 bp, Homo sapiens
acatgtgattataga

SEQ ID NO: 941880 - DNA, 15 bp, Homo sapiens
cacatgtgattatag

SEQ ID NO: 941881 - DNA, 15 bp, Homo sapiens
ccacatgtgattata

SEQ ID NO: 941882 - DNA, 15 bp, Homo sapiens
tccacatgtgattat

SEQ ID NO: 941883 - DNA, 15 bp, Homo sapiens
gtccacatgtgatta

SEQ ID NO: 941884 - DNA, 15 bp, Homo sapiens
agtccacatgtgatt

SEQ ID NO: 941885 - DNA, 15 bp, Homo sapiens
gagtccacatgtgat

SEQ ID NO: 941886 - DNA, 15 bp, Homo sapiens
tgagtccacatgtga

SEQ ID NO: 941887 - DNA, 15 bp, Homo sapiens
ctgagtccacatgtg

SEQ ID NO: 941888 - DNA, 15 bp, Homo sapiens
tctgagtccacatgt

SEQ ID NO: 941889 - DNA, 15 bp, Homo sapiens
ttctgagtccacatg

SEQ ID NO: 941890 - DNA, 15 bp, Homo sapiens
attctgagtccacat

SEQ ID NO: 941891 - DNA, 15 bp, Homo sapiens
cattctgagtccaca

SEQ ID NO: 941892 - DNA, 15 bp, Homo sapiens
tcattctgagtccac

SEQ ID NO: 941893 - DNA, 15 bp, Homo sapiens
ttcattctgagtcca

SEQ ID NO: 941894 - DNA, 15 bp, Homo sapiens
attcattctgagtcc

SEQ ID NO: 941895 - DNA, 15 bp, Homo sapiens
aattcattctgagtc

SEQ ID NO: 941896 - DNA, 15 bp, Homo sapiens
aaattcattctgagt

SEQ ID NO: 941897 - DNA, 15 bp, Homo sapiens
aaaattcattctgag

SEQ ID NO: 941898 - DNA, 15 bp, Homo sapiens
caaaattcattctga

SEQ ID NO: 941899 - DNA, 15 bp, Homo sapiens
tcaaaattcattctg

SEQ ID NO: 941900 - DNA, 15 bp, Homo sapiens
ctcaaaattcattct

SEQ ID NO: 941901 - DNA, 15 bp, Homo sapiens
actcaaaattcattc

SEQ ID NO: 941902 - DNA, 15 bp, Homo sapiens
aactcaaaattcatt

SEQ ID NO: 941903 - DNA, 15 bp, Homo sapiens
taactcaaaattcat

SEQ ID NO: 941904 - DNA, 15 bp, Homo sapiens
gtaactcaaaattca

SEQ ID NO: 941905 - DNA, 15 bp, Homo sapiens
agtaactcaaaattc

SEQ ID NO: 941906 - DNA, 15 bp, Homo sapiens
gagtaactcaaaatt

SEQ ID NO: 941907 - DNA, 15 bp, Homo sapiens
agagtaactcaaaat

SEQ ID NO: 941908 - DNA, 15 bp, Homo sapiens
cagagtaactcaaaa

SEQ ID NO: 941909 - DNA, 15 bp, Homo sapiens
tcagagtaactcaaa

SEQ ID NO: 941910 - DNA, 15 bp, Homo sapiens
ttcagagtaactcaa

SEQ ID NO: 941911 - DNA, 15 bp, Homo sapiens
tttcagagtaactca

SEQ ID NO: 941912 - DNA, 15 bp, Homo sapiens
atttcagagtaactc

SEQ ID NO: 941913 - DNA, 15 bp, Homo sapiens
gatttcagagtaact

SEQ ID NO: 941914 - DNA, 15 bp, Homo sapiens
agatttcagagtaac

SEQ ID NO: 941915 - DNA, 15 bp, Homo sapiens
tagatttcagagtaa

SEQ ID NO: 941916 - DNA, 15 bp, Homo sapiens
atagatttcagagta

SEQ ID NO: 941917 - DNA, 15 bp, Homo sapiens
aatagatttcagagt

SEQ ID NO: 941918 - DNA, 15 bp, Homo sapiens
aaatagatttcagag

SEQ ID NO: 941919 - DNA, 15 bp, Homo sapiens
taaatagatttcaga

SEQ ID NO: 941920 - DNA, 15 bp, Homo sapiens
ataaatagatttcag

SEQ ID NO: 941921 - DNA, 15 bp, Homo sapiens
aataaatagatttca

SEQ ID NO: 941922 - DNA, 15 bp, Homo sapiens
gaataaatagatttc

SEQ ID NO: 941923 - DNA, 15 bp, Homo sapiens
tgaataaatagattt

SEQ ID NO: 941924 - DNA, 15 bp, Homo sapiens
ttgaataaatagatt

SEQ ID NO: 941925 - DNA, 15 bp, Homo sapiens
gttgaataaatagat

SEQ ID NO: 941926 - DNA, 15 bp, Homo sapiens
tgttgaataaataga

SEQ ID NO: 941927 - DNA, 15 bp, Homo sapiens
ctgttgaataaatag

SEQ ID NO: 941928 - DNA, 15 bp, Homo sapiens
tctgttgaataaata

SEQ ID NO: 941929 - DNA, 15 bp, Homo sapiens
atctgttgaataaat

SEQ ID NO: 941930 - DNA, 15 bp, Homo sapiens
tatctgttgaataaa

SEQ ID NO: 941931 - DNA, 15 bp, Homo sapiens
atatctgttgaataa

SEQ ID NO: 941932 - DNA, 15 bp, Homo sapiens
aatatctgttgaata

SEQ ID NO: 941933 - DNA, 15 bp, Homo sapiens
aaatatctgttgaat

SEQ ID NO: 941934 - DNA, 15 bp, Homo sapiens
taaatatctgttgaa

SEQ ID NO: 941935 - DNA, 15 bp, Homo sapiens
gtaaatatctgttga

SEQ ID NO: 941936 - DNA, 15 bp, Homo sapiens
agtaaatatctgttg

SEQ ID NO: 941937 - DNA, 15 bp, Homo sapiens
aagtaaatatctgtt

SEQ ID NO: 941938 - DNA, 15 bp, Homo sapiens
taagtaaatatctgt

SEQ ID NO: 941939 - DNA, 15 bp, Homo sapiens
ctaagtaaatatctg

SEQ ID NO: 941940 - DNA, 15 bp, Homo sapiens
actaagtaaatatct

SEQ ID NO: 941941 - DNA, 15 bp, Homo sapiens
tactaagtaaatatc

SEQ ID NO: 941942 - DNA, 15 bp, Homo sapiens
gtactaagtaaatat

SEQ ID NO: 941943 - DNA, 15 bp, Homo sapiens
ggtactaagtaaata

SEQ ID NO: 941944 - DNA, 15 bp, Homo sapiens
aggtactaagtaaat

SEQ ID NO: 941945 - DNA, 15 bp, Homo sapiens
gaggtactaagtaaa

SEQ ID NO: 941946 - DNA, 15 bp, Homo sapiens
ggaggtactaagtaa

SEQ ID NO: 941947 - DNA, 15 bp, Homo sapiens
aggaggtactaagta

SEQ ID NO: 941948 - DNA, 15 bp, Homo sapiens
taggaggtactaagt

SEQ ID NO: 941949 - DNA, 15 bp, Homo sapiens
ataggaggtactaag

SEQ ID NO: 941950 - DNA, 15 bp, Homo sapiens
aataggaggtactaa

SEQ ID NO: 941951 - DNA, 15 bp, Homo sapiens
caataggaggtacta

SEQ ID NO: 941952 - DNA, 15 bp, Homo sapiens
gcaataggaggtact

SEQ ID NO: 941953 - DNA, 15 bp, Homo sapiens
ggcaataggaggtac

SEQ ID NO: 941954 - DNA, 15 bp, Homo sapiens
tggcaataggaggta

SEQ ID NO: 941955 - DNA, 15 bp, Homo sapiens
ctggcaataggaggt

SEQ ID NO: 941956 - DNA, 15 bp, Homo sapiens
tctggcaataggagg

SEQ ID NO: 941957 - DNA, 15 bp, Homo sapiens
gtctggcaataggag

SEQ ID NO: 941958 - DNA, 15 bp, Homo sapiens
agtctggcaatagga

SEQ ID NO: 941959 - DNA, 15 bp, Homo sapiens
gagtctggcaatagg

SEQ ID NO: 941960 - DNA, 15 bp, Homo sapiens
agagtctggcaatag

SEQ ID NO: 941961 - DNA, 15 bp, Homo sapiens
cagagtctggcaata

SEQ ID NO: 941962 - DNA, 15 bp, Homo sapiens
gcagagtctggcaat

SEQ ID NO: 941963 - DNA, 15 bp, Homo sapiens
agcagagtctggcaa

SEQ ID NO: 941964 - DNA, 15 bp, Homo sapiens
aagcagagtctggca

SEQ ID NO: 941965 - DNA, 15 bp, Homo sapiens
aaagcagagtctggc

SEQ ID NO: 941966 - DNA, 15 bp, Homo sapiens
taaagcagagtctgg

SEQ ID NO: 941967 - DNA, 15 bp, Homo sapiens
ataaagcagagtctg

SEQ ID NO: 941968 - DNA, 15 bp, Homo sapiens
cataaagcagagtct

SEQ ID NO: 941969 - DNA, 15 bp, Homo sapiens
acataaagcagagtc

SEQ ID NO: 941970 - DNA, 15 bp, Homo sapiens
aacataaagcagagt

SEQ ID NO: 941971 - DNA, 15 bp, Homo sapiens
caacataaagcagag

SEQ ID NO: 941972 - DNA, 15 bp, Homo sapiens
ccaacataaagcaga

SEQ ID NO: 941973 - DNA, 15 bp, Homo sapiens
tccaacataaagcag

SEQ ID NO: 941974 - DNA, 15 bp, Homo sapiens
atccaacataaagca

SEQ ID NO: 941975 - DNA, 15 bp, Homo sapiens
tatccaacataaagc

SEQ ID NO: 941976 - DNA, 15 bp, Homo sapiens
atatccaacataaag

SEQ ID NO: 941977 - DNA, 15 bp, Homo sapiens
aatatccaacataaa

SEQ ID NO: 941978 - DNA, 15 bp, Homo sapiens
taatatccaacataa

SEQ ID NO: 941979 - DNA, 15 bp, Homo sapiens
ataatatccaacata

SEQ ID NO: 941980 - DNA, 15 bp, Homo sapiens
aataatatccaacat

SEQ ID NO: 941981 - DNA, 15 bp, Homo sapiens
aaataatatccaaca

SEQ ID NO: 941982 - DNA, 15 bp, Homo sapiens
aaaataatatccaac

SEQ ID NO: 941983 - DNA, 15 bp, Homo sapiens
aaaaataatatccaa

SEQ ID NO: 941984 - DNA, 15 bp, Homo sapiens
aaaaaataatatcca

SEQ ID NO: 941985 - DNA, 15 bp, Homo sapiens
taaaaaataatatcc

SEQ ID NO: 941986 - DNA, 15 bp, Homo sapiens
ttaaaaaataatatc

SEQ ID NO: 941987 - DNA, 15 bp, Homo sapiens
tttaaaaaataatat

SEQ ID NO: 941988 - DNA, 15 bp, Homo sapiens
ttttaaaaaataata

SEQ ID NO: 941989 - DNA, 15 bp, Homo sapiens
cttttaaaaaataat

SEQ ID NO: 941990 - DNA, 15 bp, Homo sapiens
gcttttaaaaaataa

SEQ ID NO: 941991 - DNA, 15 bp, Homo sapiens
ggcttttaaaaaata

SEQ ID NO: 941992 - DNA, 15 bp, Homo sapiens
gggcttttaaaaaat

SEQ ID NO: 941993 - DNA, 15 bp, Homo sapiens
tgggcttttaaaaaa

SEQ ID NO: 941994 - DNA, 15 bp, Homo sapiens
gtgggcttttaaaaa

SEQ ID NO: 941995 - DNA, 15 bp, Homo sapiens
ggtgggcttttaaaa

SEQ ID NO: 941996 - DNA, 15 bp, Homo sapiens
aggtgggcttttaaa

SEQ ID NO: 941997 - DNA, 15 bp, Homo sapiens
aaggtgggcttttaa

SEQ ID NO: 941998 - DNA, 15 bp, Homo sapiens
caaggtgggctttta

SEQ ID NO: 941999 - DNA, 15 bp, Homo sapiens
gcaaggtgggctttt

SEQ ID NO: 942000 - DNA, 15 bp, Homo sapiens
ggcaaggtgggcttt

SEQ ID NO: 942001 - DNA, 15 bp, Homo sapiens
aggcaaggtgggctt

SEQ ID NO: 942002 - DNA, 15 bp, Homo sapiens
taggcaaggtgggct

SEQ ID NO: 942003 - DNA, 15 bp, Homo sapiens
ctaggcaaggtgggc

SEQ ID NO: 942004 - DNA, 15 bp, Homo sapiens
tctaggcaaggtggg

SEQ ID NO: 942005 - DNA, 15 bp, Homo sapiens
atctaggcaaggtgg

SEQ ID NO: 942006 - DNA, 15 bp, Homo sapiens
aatctaggcaaggtg

SEQ ID NO: 942007 - DNA, 15 bp, Homo sapiens
aaatctaggcaaggt

SEQ ID NO: 942008 - DNA, 15 bp, Homo sapiens
gaaatctaggcaagg

SEQ ID NO: 942009 - DNA, 15 bp, Homo sapiens
ggaaatctaggcaag

SEQ ID NO: 942010 - DNA, 15 bp, Homo sapiens
aggaaatctaggcaa

SEQ ID NO: 942011 - DNA, 15 bp, Homo sapiens
gaggaaatctaggca

SEQ ID NO: 942012 - DNA, 15 bp, Homo sapiens
tgaggaaatctaggc

SEQ ID NO: 942013 - DNA, 15 bp, Homo sapiens
ttgaggaaatctagg

SEQ ID NO: 942014 - DNA, 15 bp, Homo sapiens
tttgaggaaatctag

SEQ ID NO: 942015 - DNA, 15 bp, Homo sapiens
ctttgaggaaatcta

SEQ ID NO: 942016 - DNA, 15 bp, Homo sapiens
cctttgaggaaatct

SEQ ID NO: 942017 - DNA, 15 bp, Homo sapiens
tcctttgaggaaatc

SEQ ID NO: 942018 - DNA, 15 bp, Homo sapiens
gtcctttgaggaaat

SEQ ID NO: 942019 - DNA, 15 bp, Homo sapiens
ggtcctttgaggaaa

SEQ ID NO: 942020 - DNA, 15 bp, Homo sapiens
tggtcctttgaggaa

SEQ ID NO: 942021 - DNA, 15 bp, Homo sapiens
ctggtcctttgagga

SEQ ID NO: 942022 - DNA, 15 bp, Homo sapiens
cctggtcctttgagg

SEQ ID NO: 942023 - DNA, 15 bp, Homo sapiens
acctggtcctttgag

SEQ ID NO: 942024 - DNA, 15 bp, Homo sapiens
cacctggtcctttga

SEQ ID NO: 942025 - DNA, 15 bp, Homo sapiens
ccacctggtcctttg

SEQ ID NO: 942026 - DNA, 15 bp, Homo sapiens
gccacctggtccttt

SEQ ID NO: 942027 - DNA, 15 bp, Homo sapiens
agccacctggtcctt

SEQ ID NO: 942028 - DNA, 15 bp, Homo sapiens
aagccacctggtcct

SEQ ID NO: 942029 - DNA, 15 bp, Homo sapiens
gaagccacctggtcc

SEQ ID NO: 942030 - DNA, 15 bp, Homo sapiens
ggaagccacctggtc

SEQ ID NO: 942031 - DNA, 15 bp, Homo sapiens
gggaagccacctggt

SEQ ID NO: 942032 - DNA, 15 bp, Homo sapiens
agggaagccacctgg

SEQ ID NO: 942033 - DNA, 15 bp, Homo sapiens
cagggaagccacctg

SEQ ID NO: 942034 - DNA, 15 bp, Homo sapiens
ccagggaagccacct

SEQ ID NO: 942035 - DNA, 15 bp, Homo sapiens
accagggaagccacc

SEQ ID NO: 942036 - DNA, 15 bp, Homo sapiens
aaccagggaagccac

SEQ ID NO: 942037 - DNA, 15 bp, Homo sapiens
aaaccagggaagcca

SEQ ID NO: 942038 - DNA, 15 bp, Homo sapiens
aaaaccagggaagcc

SEQ ID NO: 942039 - DNA, 15 bp, Homo sapiens
caaaaccagggaagc

SEQ ID NO: 942040 - DNA, 15 bp, Homo sapiens
tcaaaaccagggaag

SEQ ID NO: 942041 - DNA, 15 bp, Homo sapiens
ttcaaaaccagggaa

SEQ ID NO: 942042 - DNA, 15 bp, Homo sapiens
tttcaaaaccaggga

SEQ ID NO: 942043 - DNA, 15 bp, Homo sapiens
ctttcaaaaccaggg

SEQ ID NO: 942044 - DNA, 15 bp, Homo sapiens
tctttcaaaaccagg

SEQ ID NO: 942045 - DNA, 15 bp, Homo sapiens
gtctttcaaaaccag

SEQ ID NO: 942046 - DNA, 15 bp, Homo sapiens
ggtctttcaaaacca

SEQ ID NO: 942047 - DNA, 15 bp, Homo sapiens
gggtctttcaaaacc

SEQ ID NO: 942048 - DNA, 15 bp, Homo sapiens
agggtctttcaaaac

SEQ ID NO: 942049 - DNA, 15 bp, Homo sapiens
tagggtctttcaaaa

SEQ ID NO: 942050 - DNA, 15 bp, Homo sapiens
ttagggtctttcaaa

SEQ ID NO: 942051 - DNA, 15 bp, Homo sapiens
attagggtctttcaa

SEQ ID NO: 942052 - DNA, 15 bp, Homo sapiens
aattagggtctttca

SEQ ID NO: 942053 - DNA, 15 bp, Homo sapiens
gaattagggtctttc

SEQ ID NO: 942054 - DNA, 15 bp, Homo sapiens
agaattagggtcttt

SEQ ID NO: 942055 - DNA, 15 bp, Homo sapiens
aagaattagggtctt

SEQ ID NO: 942056 - DNA, 15 bp, Homo sapiens
taagaattagggtct

SEQ ID NO: 942057 - DNA, 15 bp, Homo sapiens
gtaagaattagggtc

SEQ ID NO: 942058 - DNA, 15 bp, Homo sapiens
agtaagaattagggt

SEQ ID NO: 942059 - DNA, 15 bp, Homo sapiens
tagtaagaattaggg

SEQ ID NO: 942060 - DNA, 15 bp, Homo sapiens
atagtaagaattagg

SEQ ID NO: 942061 - DNA, 15 bp, Homo sapiens
catagtaagaattag

SEQ ID NO: 942062 - DNA, 15 bp, Homo sapiens
tcatagtaagaatta

SEQ ID NO: 942063 - DNA, 15 bp, Homo sapiens
atcatagtaagaatt

SEQ ID NO: 942064 - DNA, 15 bp, Homo sapiens
gatcatagtaagaat

SEQ ID NO: 942065 - DNA, 15 bp, Homo sapiens
agatcatagtaagaa

SEQ ID NO: 942066 - DNA, 15 bp, Homo sapiens
aagatcatagtaaga

SEQ ID NO: 942067 - DNA, 15 bp, Homo sapiens
taagatcatagtaag

SEQ ID NO: 942068 - DNA, 15 bp, Homo sapiens
ttaagatcatagtaa

SEQ ID NO: 942069 - DNA, 15 bp, Homo sapiens
cttaagatcatagta

SEQ ID NO: 942070 - DNA, 15 bp, Homo sapiens
acttaagatcatagt

SEQ ID NO: 942071 - DNA, 15 bp, Homo sapiens
tacttaagatcatag

SEQ ID NO: 942072 - DNA, 15 bp, Homo sapiens
ttacttaagatcata

SEQ ID NO: 942073 - DNA, 15 bp, Homo sapiens
tttacttaagatcat

SEQ ID NO: 942074 - DNA, 15 bp, Homo sapiens
atttacttaagatca

SEQ ID NO: 942075 - DNA, 15 bp, Homo sapiens
aatttacttaagatc

SEQ ID NO: 942076 - DNA, 15 bp, Homo sapiens
taatttacttaagat

SEQ ID NO: 942077 - DNA, 15 bp, Homo sapiens
ataatttacttaaga

SEQ ID NO: 942078 - DNA, 15 bp, Homo sapiens
tataatttacttaag

SEQ ID NO: 942079 - DNA, 15 bp, Homo sapiens
atataatttacttaa

SEQ ID NO: 942080 - DNA, 15 bp, Homo sapiens
gatataatttactta

SEQ ID NO: 942081 - DNA, 15 bp, Homo sapiens
ggatataatttactt

SEQ ID NO: 942082 - DNA, 15 bp, Homo sapiens
aggatataatttact

SEQ ID NO: 942083 - DNA, 15 bp, Homo sapiens
aaggatataatttac

SEQ ID NO: 942084 - DNA, 15 bp, Homo sapiens
aaaggatataattta

SEQ ID NO: 942085 - DNA, 15 bp, Homo sapiens
gaaaggatataattt

SEQ ID NO: 942086 - DNA, 15 bp, Homo sapiens
agaaaggatataatt

SEQ ID NO: 942087 - DNA, 15 bp, Homo sapiens
cagaaaggatataat

SEQ ID NO: 942088 - DNA, 15 bp, Homo sapiens
acagaaaggatataa

SEQ ID NO: 942089 - DNA, 15 bp, Homo sapiens
cacagaaaggatata

SEQ ID NO: 942090 - DNA, 15 bp, Homo sapiens
ccacagaaaggatat

SEQ ID NO: 942091 - DNA, 15 bp, Homo sapiens
cccacagaaaggata

SEQ ID NO: 942092 - DNA, 15 bp, Homo sapiens
gcccacagaaaggat

SEQ ID NO: 942093 - DNA, 15 bp, Homo sapiens
agcccacagaaagga

SEQ ID NO: 942094 - DNA, 15 bp, Homo sapiens
gagcccacagaaagg

SEQ ID NO: 942095 - DNA, 15 bp, Homo sapiens
tgagcccacagaaag

SEQ ID NO: 942096 - DNA, 15 bp, Homo sapiens
ttgagcccacagaaa

SEQ ID NO: 942097 - DNA, 15 bp, Homo sapiens
cttgagcccacagaa

SEQ ID NO: 942098 - DNA, 15 bp, Homo sapiens
acttgagcccacaga

SEQ ID NO: 942099 - DNA, 15 bp, Homo sapiens
aacttgagcccacag

SEQ ID NO: 942100 - DNA, 15 bp, Homo sapiens
gaacttgagcccaca

SEQ ID NO: 942101 - DNA, 15 bp, Homo sapiens
agaacttgagcccac

SEQ ID NO: 942102 - DNA, 15 bp, Homo sapiens
aagaacttgagccca

SEQ ID NO: 942103 - DNA, 15 bp, Homo sapiens
aaagaacttgagccc

SEQ ID NO: 942104 - DNA, 15 bp, Homo sapiens
gaaagaacttgagcc

SEQ ID NO: 942105 - DNA, 15 bp, Homo sapiens
agaaagaacttgagc

SEQ ID NO: 942106 - DNA, 15 bp, Homo sapiens
tagaaagaacttgag

SEQ ID NO: 942107 - DNA, 15 bp, Homo sapiens
ttagaaagaacttga

SEQ ID NO: 942108 - DNA, 15 bp, Homo sapiens
cttagaaagaacttg

SEQ ID NO: 942109 - DNA, 15 bp, Homo sapiens
tcttagaaagaactt

SEQ ID NO: 942110 - DNA, 15 bp, Homo sapiens
ctcttagaaagaact

SEQ ID NO: 942111 - DNA, 15 bp, Homo sapiens
cctcttagaaagaac

SEQ ID NO: 942112 - DNA, 15 bp, Homo sapiens
ccctcttagaaagaa

SEQ ID NO: 942113 - DNA, 15 bp, Homo sapiens
gccctcttagaaaga

SEQ ID NO: 942114 - DNA, 15 bp, Homo sapiens
agccctcttagaaag

SEQ ID NO: 942115 - DNA, 15 bp, Homo sapiens
gagccctcttagaaa

SEQ ID NO: 942116 - DNA, 15 bp, Homo sapiens
agagccctcttagaa

SEQ ID NO: 942117 - DNA, 15 bp, Homo sapiens
aagagccctcttaga

SEQ ID NO: 942118 - DNA, 15 bp, Homo sapiens
aaagagccctcttag

SEQ ID NO: 942119 - DNA, 15 bp, Homo sapiens
caaagagccctctta

SEQ ID NO: 942120 - DNA, 15 bp, Homo sapiens
ccaaagagccctctt

SEQ ID NO: 942121 - DNA, 15 bp, Homo sapiens
cccaaagagccctct

SEQ ID NO: 942122 - DNA, 15 bp, Homo sapiens
ccccaaagagccctc

SEQ ID NO: 942123 - DNA, 15 bp, Homo sapiens
gccccaaagagccct

SEQ ID NO: 942124 - DNA, 15 bp, Homo sapiens
agccccaaagagccc

SEQ ID NO: 942125 - DNA, 15 bp, Homo sapiens
tagccccaaagagcc

SEQ ID NO: 942126 - DNA, 15 bp, Homo sapiens
gtagccccaaagagc

SEQ ID NO: 942127 - DNA, 15 bp, Homo sapiens
tgtagccccaaagag

SEQ ID NO: 942128 - DNA, 15 bp, Homo sapiens
ttgtagccccaaaga

SEQ ID NO: 942129 - DNA, 15 bp, Homo sapiens
tttgtagccccaaag

SEQ ID NO: 942130 - DNA, 15 bp, Homo sapiens
ttttgtagccccaaa

SEQ ID NO: 942131 - DNA, 15 bp, Homo sapiens
cttttgtagccccaa

SEQ ID NO: 942132 - DNA, 15 bp, Homo sapiens
tcttttgtagcccca

SEQ ID NO: 942133 - DNA, 15 bp, Homo sapiens
ttcttttgtagcccc

SEQ ID NO: 942134 - DNA, 15 bp, Homo sapiens
tttcttttgtagccc

SEQ ID NO: 942135 - DNA, 15 bp, Homo sapiens
atttcttttgtagcc

SEQ ID NO: 942136 - DNA, 15 bp, Homo sapiens
aatttcttttgtagc

SEQ ID NO: 942137 - DNA, 15 bp, Homo sapiens
caatttcttttgtag

SEQ ID NO: 942138 - DNA, 15 bp, Homo sapiens
acaatttcttttgta

SEQ ID NO: 942139 - DNA, 15 bp, Homo sapiens
aacaatttcttttgt

SEQ ID NO: 942140 - DNA, 15 bp, Homo sapiens
taacaatttcttttg

SEQ ID NO: 942141 - DNA, 15 bp, Homo sapiens
ctaacaatttctttt

SEQ ID NO: 942142 - DNA, 15 bp, Homo sapiens
actaacaatttcttt

SEQ ID NO: 942143 - DNA, 15 bp, Homo sapiens
cactaacaatttctt

SEQ ID NO: 942144 - DNA, 15 bp, Homo sapiens
gcactaacaatttct

SEQ ID NO: 942145 - DNA, 15 bp, Homo sapiens
tgcactaacaatttc

SEQ ID NO: 942146 - DNA, 15 bp, Homo sapiens
ttgcactaacaattt

SEQ ID NO: 942147 - DNA, 15 bp, Homo sapiens
tttgcactaacaatt

SEQ ID NO: 942148 - DNA, 15 bp, Homo sapiens
ttttgcactaacaat

SEQ ID NO: 942149 - DNA, 15 bp, Homo sapiens
tttttgcactaacaa

SEQ ID NO: 942150 - DNA, 15 bp, Homo sapiens
ctttttgcactaaca

SEQ ID NO: 942151 - DNA, 15 bp, Homo sapiens
tctttttgcactaac

SEQ ID NO: 942152 - DNA, 15 bp, Homo sapiens
ctctttttgcactaa

SEQ ID NO: 942153 - DNA, 15 bp, Homo sapiens
actctttttgcacta

SEQ ID NO: 942154 - DNA, 15 bp, Homo sapiens
aactctttttgcact

SEQ ID NO: 942155 - DNA, 15 bp, Homo sapiens
aaactctttttgcac

SEQ ID NO: 942156 - DNA, 15 bp, Homo sapiens
taaactctttttgca

SEQ ID NO: 942157 - DNA, 15 bp, Homo sapiens
ataaactctttttgc

SEQ ID NO: 942158 - DNA, 15 bp, Homo sapiens
tataaactctttttg

SEQ ID NO: 942159 - DNA, 15 bp, Homo sapiens
ttataaactcttttt

SEQ ID NO: 942160 - DNA, 15 bp, Homo sapiens
cttataaactctttt

SEQ ID NO: 942161 - DNA, 15 bp, Homo sapiens
ccttataaactcttt

SEQ ID NO: 942162 - DNA, 15 bp, Homo sapiens
accttataaactctt

SEQ ID NO: 942163 - DNA, 15 bp, Homo sapiens
aaccttataaactct

SEQ ID NO: 942164 - DNA, 15 bp, Homo sapiens
aaaccttataaactc

SEQ ID NO: 942165 - DNA, 15 bp, Homo sapiens
taaaccttataaact

SEQ ID NO: 942166 - DNA, 15 bp, Homo sapiens
ataaaccttataaac

SEQ ID NO: 942167 - DNA, 15 bp, Homo sapiens
tataaaccttataaa

SEQ ID NO: 942168 - DNA, 15 bp, Homo sapiens
ttataaaccttataa

SEQ ID NO: 942169 - DNA, 15 bp, Homo sapiens
tttataaaccttata

SEQ ID NO: 942170 - DNA, 15 bp, Homo sapiens
atttataaaccttat

SEQ ID NO: 942171 - DNA, 15 bp, Homo sapiens
catttataaacctta

SEQ ID NO: 942172 - DNA, 15 bp, Homo sapiens
ccatttataaacctt

SEQ ID NO: 942173 - DNA, 15 bp, Homo sapiens
accatttataaacct

SEQ ID NO: 942174 - DNA, 15 bp, Homo sapiens
aaccatttataaacc

SEQ ID NO: 942175 - DNA, 15 bp, Homo sapiens
taaccatttataaac

SEQ ID NO: 942176 - DNA, 15 bp, Homo sapiens
ctaaccatttataaa

SEQ ID NO: 942177 - DNA, 15 bp, Homo sapiens
actaaccatttataa

SEQ ID NO: 942178 - DNA, 15 bp, Homo sapiens
tactaaccatttata

SEQ ID NO: 942179 - DNA, 15 bp, Homo sapiens
ctactaaccatttat

SEQ ID NO: 942180 - DNA, 15 bp, Homo sapiens
tctactaaccattta

SEQ ID NO: 942181 - DNA, 15 bp, Homo sapiens
ctctactaaccattt

SEQ ID NO: 942182 - DNA, 15 bp, Homo sapiens
cctctactaaccatt

SEQ ID NO: 942183 - DNA, 15 bp, Homo sapiens
acctctactaaccat

SEQ ID NO: 942184 - DNA, 15 bp, Homo sapiens
cacctctactaacca

SEQ ID NO: 942185 - DNA, 15 bp, Homo sapiens
tcacctctactaacc

SEQ ID NO: 942186 - DNA, 15 bp, Homo sapiens
atcacctctactaac

SEQ ID NO: 942187 - DNA, 15 bp, Homo sapiens
catcacctctactaa

SEQ ID NO: 942188 - DNA, 15 bp, Homo sapiens
tcatcacctctacta

SEQ ID NO: 942189 - DNA, 15 bp, Homo sapiens
atcatcacctctact

SEQ ID NO: 942190 - DNA, 15 bp, Homo sapiens
catcatcacctctac

SEQ ID NO: 942191 - DNA, 15 bp, Homo sapiens
tcatcatcacctcta

SEQ ID NO: 942192 - DNA, 15 bp, Homo sapiens
atcatcatcacctct

SEQ ID NO: 942193 - DNA, 15 bp, Homo sapiens
tatcatcatcacctc

SEQ ID NO: 942194 - DNA, 15 bp, Homo sapiens
atatcatcatcacct

SEQ ID NO: 942195 - DNA, 15 bp, Homo sapiens
aatatcatcatcacc

SEQ ID NO: 942196 - DNA, 15 bp, Homo sapiens
aaatatcatcatcac

SEQ ID NO: 942197 - DNA, 15 bp, Homo sapiens
taaatatcatcatca

SEQ ID NO: 942198 - DNA, 15 bp, Homo sapiens
ttaaatatcatcatc

SEQ ID NO: 942199 - DNA, 15 bp, Homo sapiens
gttaaatatcatcat

SEQ ID NO: 942200 - DNA, 15 bp, Homo sapiens
ggttaaatatcatca

SEQ ID NO: 942201 - DNA, 15 bp, Homo sapiens
tggttaaatatcatc

SEQ ID NO: 942202 - DNA, 15 bp, Homo sapiens
atggttaaatatcat

SEQ ID NO: 942203 - DNA, 15 bp, Homo sapiens
tatggttaaatatca

SEQ ID NO: 942204 - DNA, 15 bp, Homo sapiens
ttatggttaaatatc

SEQ ID NO: 942205 - DNA, 15 bp, Homo sapiens
attatggttaaatat

SEQ ID NO: 942206 - DNA, 15 bp, Homo sapiens
aattatggttaaata

SEQ ID NO: 942207 - DNA, 15 bp, Homo sapiens
caattatggttaaat

SEQ ID NO: 942208 - DNA, 15 bp, Homo sapiens
tcaattatggttaaa

SEQ ID NO: 942209 - DNA, 15 bp, Homo sapiens
ttcaattatggttaa

SEQ ID NO: 942210 - DNA, 15 bp, Homo sapiens
cttcaattatggtta

SEQ ID NO: 942211 - DNA, 15 bp, Homo sapiens
tcttcaattatggtt

SEQ ID NO: 942212 - DNA, 15 bp, Homo sapiens
atcttcaattatggt

SEQ ID NO: 942213 - DNA, 15 bp, Homo sapiens
catcttcaattatgg

SEQ ID NO: 942214 - DNA, 15 bp, Homo sapiens
tcatcttcaattatg

SEQ ID NO: 942215 - DNA, 15 bp, Homo sapiens
gtcatcttcaattat

SEQ ID NO: 942216 - DNA, 15 bp, Homo sapiens
agtcatcttcaatta

SEQ ID NO: 942217 - DNA, 15 bp, Homo sapiens
aagtcatcttcaatt

SEQ ID NO: 942218 - DNA, 15 bp, Homo sapiens
aaagtcatcttcaat

SEQ ID NO: 942219 - DNA, 15 bp, Homo sapiens
caaagtcatcttcaa

SEQ ID NO: 942220 - DNA, 15 bp, Homo sapiens
gcaaagtcatcttca

SEQ ID NO: 942221 - DNA, 15 bp, Homo sapiens
tgcaaagtcatcttc

SEQ ID NO: 942222 - DNA, 15 bp, Homo sapiens
atgcaaagtcatctt

SEQ ID NO: 942223 - DNA, 15 bp, Homo sapiens
aatgcaaagtcatct

SEQ ID NO: 942224 - DNA, 15 bp, Homo sapiens
aaatgcaaagtcatc

SEQ ID NO: 942225 - DNA, 15 bp, Homo sapiens
aaaatgcaaagtcat

SEQ ID NO: 942226 - DNA, 15 bp, Homo sapiens
taaaatgcaaagtca

SEQ ID NO: 942227 - DNA, 15 bp, Homo sapiens
ctaaaatgcaaagtc

SEQ ID NO: 942228 - DNA, 15 bp, Homo sapiens
tctaaaatgcaaagt

SEQ ID NO: 942229 - DNA, 15 bp, Homo sapiens
atctaaaatgcaaag

SEQ ID NO: 942230 - DNA, 15 bp, Homo sapiens
gatctaaaatgcaaa

SEQ ID NO: 942231 - DNA, 15 bp, Homo sapiens
tgatctaaaatgcaa

SEQ ID NO: 942232 - DNA, 15 bp, Homo sapiens
atgatctaaaatgca

SEQ ID NO: 942233 - DNA, 15 bp, Homo sapiens
tatgatctaaaatgc

SEQ ID NO: 942234 - DNA, 15 bp, Homo sapiens
atatgatctaaaatg

SEQ ID NO: 942235 - DNA, 15 bp, Homo sapiens
tatatgatctaaaat

SEQ ID NO: 942236 - DNA, 15 bp, Homo sapiens
gtatatgatctaaaa

SEQ ID NO: 942237 - DNA, 15 bp, Homo sapiens
cgtatatgatctaaa

SEQ ID NO: 942238 - DNA, 15 bp, Homo sapiens
acgtatatgatctaa

SEQ ID NO: 942239 - DNA, 15 bp, Homo sapiens
cacgtatatgatcta

SEQ ID NO: 942240 - DNA, 15 bp, Homo sapiens
acacgtatatgatct

SEQ ID NO: 942241 - DNA, 15 bp, Homo sapiens
aacacgtatatgatc

SEQ ID NO: 942242 - DNA, 15 bp, Homo sapiens
aaacacgtatatgat

SEQ ID NO: 942243 - DNA, 15 bp, Homo sapiens
aaaacacgtatatga

SEQ ID NO: 942244 - DNA, 15 bp, Homo sapiens
aaaaacacgtatatg

SEQ ID NO: 942245 - DNA, 15 bp, Homo sapiens
gaaaaacacgtatat

SEQ ID NO: 942246 - DNA, 15 bp, Homo sapiens
cgaaaaacacgtata

SEQ ID NO: 942247 - DNA, 15 bp, Homo sapiens
acgaaaaacacgtat

SEQ ID NO: 942248 - DNA, 15 bp, Homo sapiens
gacgaaaaacacgta

SEQ ID NO: 942249 - DNA, 15 bp, Homo sapiens
agacgaaaaacacgt

SEQ ID NO: 942250 - DNA, 15 bp, Homo sapiens
cagacgaaaaacacg

SEQ ID NO: 942251 - DNA, 15 bp, Homo sapiens
tcagacgaaaaacac

SEQ ID NO: 942252 - DNA, 15 bp, Homo sapiens
ctcagacgaaaaaca

SEQ ID NO: 942253 - DNA, 15 bp, Homo sapiens
tctcagacgaaaaac

SEQ ID NO: 942254 - DNA, 15 bp, Homo sapiens
ttctcagacgaaaaa

SEQ ID NO: 942255 - DNA, 15 bp, Homo sapiens
gttctcagacgaaaa

SEQ ID NO: 942256 - DNA, 15 bp, Homo sapiens
cgttctcagacgaaa

SEQ ID NO: 942257 - DNA, 15 bp, Homo sapiens
tcgttctcagacgaa

SEQ ID NO: 942258 - DNA, 15 bp, Homo sapiens
atcgttctcagacga

SEQ ID NO: 942259 - DNA, 15 bp, Homo sapiens
tatcgttctcagacg

SEQ ID NO: 942260 - DNA, 15 bp, Homo sapiens
gtatcgttctcagac

SEQ ID NO: 942261 - DNA, 15 bp, Homo sapiens
tgtatcgttctcaga

SEQ ID NO: 942262 - DNA, 15 bp, Homo sapiens
ctgtatcgttctcag

SEQ ID NO: 942263 - DNA, 15 bp, Homo sapiens
cctgtatcgttctca

SEQ ID NO: 942264 - DNA, 15 bp, Homo sapiens
acctgtatcgttctc

SEQ ID NO: 942265 - DNA, 15 bp, Homo sapiens
gacctgtatcgttct

SEQ ID NO: 942266 - DNA, 15 bp, Homo sapiens
tgacctgtatcgttc

SEQ ID NO: 942267 - DNA, 15 bp, Homo sapiens
gtgacctgtatcgtt

SEQ ID NO: 942268 - DNA, 15 bp, Homo sapiens
agtgacctgtatcgt

SEQ ID NO: 942269 - DNA, 15 bp, Homo sapiens
cagtgacctgtatcg

SEQ ID NO: 942270 - DNA, 15 bp, Homo sapiens
tcagtgacctgtatc

SEQ ID NO: 942271 - DNA, 15 bp, Homo sapiens
ctcagtgacctgtat

SEQ ID NO: 942272 - DNA, 15 bp, Homo sapiens
gctcagtgacctgta

SEQ ID NO: 942273 - DNA, 15 bp, Homo sapiens
tgctcagtgacctgt

SEQ ID NO: 942274 - DNA, 15 bp, Homo sapiens
atgctcagtgacctg

SEQ ID NO: 942275 - DNA, 15 bp, Homo sapiens
tatgctcagtgacct

SEQ ID NO: 942276 - DNA, 15 bp, Homo sapiens
gtatgctcagtgacc

SEQ ID NO: 942277 - DNA, 15 bp, Homo sapiens
ggtatgctcagtgac

SEQ ID NO: 942278 - DNA, 15 bp, Homo sapiens
tggtatgctcagtga

SEQ ID NO: 942279 - DNA, 15 bp, Homo sapiens
atggtatgctcagtg

SEQ ID NO: 942280 - DNA, 15 bp, Homo sapiens
tatggtatgctcagt

SEQ ID NO: 942281 - DNA, 15 bp, Homo sapiens
ttatggtatgctcag

SEQ ID NO: 942282 - DNA, 15 bp, Homo sapiens
cttatggtatgctca

SEQ ID NO: 942283 - DNA, 15 bp, Homo sapiens
gcttatggtatgctc

SEQ ID NO: 942284 - DNA, 15 bp, Homo sapiens
ggcttatggtatgct

SEQ ID NO: 942285 - DNA, 15 bp, Homo sapiens
aggcttatggtatgc

SEQ ID NO: 942286 - DNA, 15 bp, Homo sapiens
aaggcttatggtatg

SEQ ID NO: 942287 - DNA, 15 bp, Homo sapiens
gaaggcttatggtat

SEQ ID NO: 942288 - DNA, 15 bp, Homo sapiens
tgaaggcttatggta

SEQ ID NO: 942289 - DNA, 15 bp, Homo sapiens
ctgaaggcttatggt

SEQ ID NO: 942290 - DNA, 15 bp, Homo sapiens
actgaaggcttatgg

SEQ ID NO: 942291 - DNA, 15 bp, Homo sapiens
tactgaaggcttatg

SEQ ID NO: 942292 - DNA, 15 bp, Homo sapiens
ttactgaaggcttat

SEQ ID NO: 942293 - DNA, 15 bp, Homo sapiens
tttactgaaggctta

SEQ ID NO: 942294 - DNA, 15 bp, Homo sapiens
atttactgaaggctt

SEQ ID NO: 942295 - DNA, 15 bp, Homo sapiens
gatttactgaaggct

SEQ ID NO: 942296 - DNA, 15 bp, Homo sapiens
tgatttactgaaggc

SEQ ID NO: 942297 - DNA, 15 bp, Homo sapiens
atgatttactgaagg

SEQ ID NO: 942298 - DNA, 15 bp, Homo sapiens
aatgatttactgaag

SEQ ID NO: 942299 - DNA, 15 bp, Homo sapiens
aaatgatttactgaa

SEQ ID NO: 942300 - DNA, 15 bp, Homo sapiens
caaatgatttactga

SEQ ID NO: 942301 - DNA, 15 bp, Homo sapiens
gcaaatgatttactg

SEQ ID NO: 942302 - DNA, 15 bp, Homo sapiens
tgcaaatgatttact

SEQ ID NO: 942303 - DNA, 15 bp, Homo sapiens
ctgcaaatgatttac

SEQ ID NO: 942304 - DNA, 15 bp, Homo sapiens
tctgcaaatgattta

SEQ ID NO: 942305 - DNA, 15 bp, Homo sapiens
ttctgcaaatgattt

SEQ ID NO: 942306 - DNA, 15 bp, Homo sapiens
cttctgcaaatgatt

SEQ ID NO: 942307 - DNA, 15 bp, Homo sapiens
tcttctgcaaatgat

SEQ ID NO: 942308 - DNA, 15 bp, Homo sapiens
gtcttctgcaaatga

SEQ ID NO: 942309 - DNA, 15 bp, Homo sapiens
tgtcttctgcaaatg

SEQ ID NO: 942310 - DNA, 15 bp, Homo sapiens
atgtcttctgcaaat

SEQ ID NO: 942311 - DNA, 15 bp, Homo sapiens
aatgtcttctgcaaa

SEQ ID NO: 942312 - DNA, 15 bp, Homo sapiens
caatgtcttctgcaa

SEQ ID NO: 942313 - DNA, 15 bp, Homo sapiens
gcaatgtcttctgca

SEQ ID NO: 942314 - DNA, 15 bp, Homo sapiens
tgcaatgtcttctgc

SEQ ID NO: 942315 - DNA, 15 bp, Homo sapiens
ctgcaatgtcttctg

SEQ ID NO: 942316 - DNA, 15 bp, Homo sapiens
tctgcaatgtcttct

SEQ ID NO: 942317 - DNA, 15 bp, Homo sapiens
ttctgcaatgtcttc

SEQ ID NO: 942318 - DNA, 15 bp, Homo sapiens
cttctgcaatgtctt

SEQ ID NO: 942319 - DNA, 15 bp, Homo sapiens
tcttctgcaatgtct

SEQ ID NO: 942320 - DNA, 15 bp, Homo sapiens
gtcttctgcaatgtc

SEQ ID NO: 942321 - DNA, 15 bp, Homo sapiens
tgtcttctgcaatgt

SEQ ID NO: 942322 - DNA, 15 bp, Homo sapiens
atgtcttctgcaatg

SEQ ID NO: 942323 - DNA, 15 bp, Homo sapiens
tatgtcttctgcaat

SEQ ID NO: 942324 - DNA, 15 bp, Homo sapiens
ttatgtcttctgcaa

SEQ ID NO: 942325 - DNA, 15 bp, Homo sapiens
cttatgtcttctgca

SEQ ID NO: 942326 - DNA, 15 bp, Homo sapiens
acttatgtcttctgc

SEQ ID NO: 942327 - DNA, 15 bp, Homo sapiens
gacttatgtcttctg

SEQ ID NO: 942328 - DNA, 15 bp, Homo sapiens
agacttatgtcttct

SEQ ID NO: 942329 - DNA, 15 bp, Homo sapiens
tagacttatgtcttc

SEQ ID NO: 942330 - DNA, 15 bp, Homo sapiens
ttagacttatgtctt

SEQ ID NO: 942331 - DNA, 15 bp, Homo sapiens
cttagacttatgtct

SEQ ID NO: 942332 - DNA, 15 bp, Homo sapiens
acttagacttatgtc

SEQ ID NO: 942333 - DNA, 15 bp, Homo sapiens
tacttagacttatgt

SEQ ID NO: 942334 - DNA, 15 bp, Homo sapiens
ctacttagacttatg

SEQ ID NO: 942335 - DNA, 15 bp, Homo sapiens
tctacttagacttat

SEQ ID NO: 942336 - DNA, 15 bp, Homo sapiens
ttctacttagactta

SEQ ID NO: 942337 - DNA, 15 bp, Homo sapiens
tttctacttagactt

SEQ ID NO: 942338 - DNA, 15 bp, Homo sapiens
atttctacttagact

SEQ ID NO: 942339 - DNA, 15 bp, Homo sapiens
gatttctacttagac

SEQ ID NO: 942340 - DNA, 15 bp, Homo sapiens
agatttctacttaga

SEQ ID NO: 942341 - DNA, 15 bp, Homo sapiens
gagatttctacttag

SEQ ID NO: 942342 - DNA, 15 bp, Homo sapiens
agagatttctactta

SEQ ID NO: 942343 - DNA, 15 bp, Homo sapiens
aagagatttctactt

SEQ ID NO: 942344 - DNA, 15 bp, Homo sapiens
caagagatttctact

SEQ ID NO: 942345 - DNA, 15 bp, Homo sapiens
tcaagagatttctac

SEQ ID NO: 942346 - DNA, 15 bp, Homo sapiens
gtcaagagatttcta

SEQ ID NO: 942347 - DNA, 15 bp, Homo sapiens
tgtcaagagatttct

SEQ ID NO: 942348 - DNA, 15 bp, Homo sapiens
ctgtcaagagatttc

SEQ ID NO: 942349 - DNA, 15 bp, Homo sapiens
tctgtcaagagattt

SEQ ID NO: 942350 - DNA, 15 bp, Homo sapiens
ctctgtcaagagatt

SEQ ID NO: 942351 - DNA, 15 bp, Homo sapiens
tctctgtcaagagat

SEQ ID NO: 942352 - DNA, 15 bp, Homo sapiens
ctctctgtcaagaga

SEQ ID NO: 942353 - DNA, 15 bp, Homo sapiens
tctctctgtcaagag

SEQ ID NO: 942354 - DNA, 15 bp, Homo sapiens
ttctctctgtcaaga

SEQ ID NO: 942355 - DNA, 15 bp, Homo sapiens
cttctctctgtcaag

SEQ ID NO: 942356 - DNA, 15 bp, Homo sapiens
ccttctctctgtcaa

SEQ ID NO: 942357 - DNA, 15 bp, Homo sapiens
gccttctctctgtca

SEQ ID NO: 942358 - DNA, 15 bp, Homo sapiens
agccttctctctgtc

SEQ ID NO: 942359 - DNA, 15 bp, Homo sapiens
gagccttctctctgt

SEQ ID NO: 942360 - DNA, 15 bp, Homo sapiens
cgagccttctctctg

SEQ ID NO: 942361 - DNA, 15 bp, Homo sapiens
acgagccttctctct

SEQ ID NO: 942362 - DNA, 15 bp, Homo sapiens
aacgagccttctctc

SEQ ID NO: 942363 - DNA, 15 bp, Homo sapiens
aaacgagccttctct

SEQ ID NO: 942364 - DNA, 15 bp, Homo sapiens
aaaacgagccttctc

SEQ ID NO: 942365 - DNA, 15 bp, Homo sapiens
caaaacgagccttct

SEQ ID NO: 942366 - DNA, 15 bp, Homo sapiens
tcaaaacgagccttc

SEQ ID NO: 942367 - DNA, 15 bp, Homo sapiens
atcaaaacgagcctt

SEQ ID NO: 942368 - DNA, 15 bp, Homo sapiens
gatcaaaacgagcct

SEQ ID NO: 942369 - DNA, 15 bp, Homo sapiens
ggatcaaaacgagcc

SEQ ID NO: 942370 - DNA, 15 bp, Homo sapiens
aggatcaaaacgagc

SEQ ID NO: 942371 - DNA, 15 bp, Homo sapiens
aaggatcaaaacgag

SEQ ID NO: 942372 - DNA, 15 bp, Homo sapiens
caaggatcaaaacga

SEQ ID NO: 942373 - DNA, 15 bp, Homo sapiens
tcaaggatcaaaacg

SEQ ID NO: 942374 - DNA, 15 bp, Homo sapiens
gtcaaggatcaaaac

SEQ ID NO: 942375 - DNA, 15 bp, Homo sapiens
ggtcaaggatcaaaa

SEQ ID NO: 942376 - DNA, 15 bp, Homo sapiens
aggtcaaggatcaaa

SEQ ID NO: 942377 - DNA, 15 bp, Homo sapiens
gaggtcaaggatcaa

SEQ ID NO: 942378 - DNA, 15 bp, Homo sapiens
tgaggtcaaggatca

SEQ ID NO: 942379 - DNA, 15 bp, Homo sapiens
ttgaggtcaaggatc

SEQ ID NO: 942380 - DNA, 15 bp, Homo sapiens
tttgaggtcaaggat

SEQ ID NO: 942381 - DNA, 15 bp, Homo sapiens
atttgaggtcaagga

SEQ ID NO: 942382 - DNA, 15 bp, Homo sapiens
aatttgaggtcaagg

SEQ ID NO: 942383 - DNA, 15 bp, Homo sapiens
aaatttgaggtcaag

SEQ ID NO: 942384 - DNA, 15 bp, Homo sapiens
taaatttgaggtcaa

SEQ ID NO: 942385 - DNA, 15 bp, Homo sapiens
ctaaatttgaggtca

SEQ ID NO: 942386 - DNA, 15 bp, Homo sapiens
cctaaatttgaggtc

SEQ ID NO: 942387 - DNA, 15 bp, Homo sapiens
acctaaatttgaggt

SEQ ID NO: 942388 - DNA, 15 bp, Homo sapiens
aacctaaatttgagg

SEQ ID NO: 942389 - DNA, 15 bp, Homo sapiens
gaacctaaatttgag

SEQ ID NO: 942390 - DNA, 15 bp, Homo sapiens
ggaacctaaatttga

SEQ ID NO: 942391 - DNA, 15 bp, Homo sapiens
gggaacctaaatttg

SEQ ID NO: 942392 - DNA, 15 bp, Homo sapiens
agggaacctaaattt

SEQ ID NO: 942393 - DNA, 15 bp, Homo sapiens
tagggaacctaaatt

SEQ ID NO: 942394 - DNA, 15 bp, Homo sapiens
ttagggaacctaaat

SEQ ID NO: 942395 - DNA, 15 bp, Homo sapiens
tttagggaacctaaa

SEQ ID NO: 942396 - DNA, 15 bp, Homo sapiens
atttagggaacctaa

SEQ ID NO: 942397 - DNA, 15 bp, Homo sapiens
gatttagggaaccta

SEQ ID NO: 942398 - DNA, 15 bp, Homo sapiens
ggatttagggaacct

SEQ ID NO: 942399 - DNA, 15 bp, Homo sapiens
tggatttagggaacc

SEQ ID NO: 942400 - DNA, 15 bp, Homo sapiens
atggatttagggaac

SEQ ID NO: 942401 - DNA, 15 bp, Homo sapiens
aatggatttagggaa

SEQ ID NO: 942402 - DNA, 15 bp, Homo sapiens
taatggatttaggga

SEQ ID NO: 942403 - DNA, 15 bp, Homo sapiens
ttaatggatttaggg

SEQ ID NO: 942404 - DNA, 15 bp, Homo sapiens
tttaatggatttagg

SEQ ID NO: 942405 - DNA, 15 bp, Homo sapiens
ttttaatggatttag

SEQ ID NO: 942406 - DNA, 15 bp, Homo sapiens
tttttaatggattta

SEQ ID NO: 942407 - DNA, 15 bp, Homo sapiens
ttttttaatggattt

SEQ ID NO: 942408 - DNA, 15 bp, Homo sapiens
cttttttaatggatt

SEQ ID NO: 942409 - DNA, 15 bp, Homo sapiens
tcttttttaatggat

SEQ ID NO: 942410 - DNA, 15 bp, Homo sapiens
ctcttttttaatgga

SEQ ID NO: 942411 - DNA, 15 bp, Homo sapiens
tctcttttttaatgg

SEQ ID NO: 942412 - DNA, 15 bp, Homo sapiens
ttctcttttttaatg

SEQ ID NO: 942413 - DNA, 15 bp, Homo sapiens
ctttctcttttttaa

SEQ ID NO: 942414 - DNA, 15 bp, Homo sapiens
tctttctctttttta

SEQ ID NO: 942415 - DNA, 15 bp, Homo sapiens
ttctttctctttttt

SEQ ID NO: 942416 - DNA, 15 bp, Homo sapiens
tttctttctcttttt

SEQ ID NO: 942417 - DNA, 15 bp, Homo sapiens
ttttctttctctttt

SEQ ID NO: 942418 - DNA, 15 bp, Homo sapiens
tttttctttctcttt

SEQ ID NO: 942419 - DNA, 15 bp, Homo sapiens
ctttttctttctctt

SEQ ID NO: 942420 - DNA, 15 bp, Homo sapiens
tctttttctttctct

SEQ ID NO: 942421 - DNA, 15 bp, Homo sapiens
ttctttttctttctc

SEQ ID NO: 942422 - DNA, 15 bp, Homo sapiens
tttctttttctttct

SEQ ID NO: 942423 - DNA, 15 bp, Homo sapiens
ttttctttttctttc

SEQ ID NO: 942424 - DNA, 15 bp, Homo sapiens
tttttctttttcttt

SEQ ID NO: 942425 - DNA, 15 bp, Homo sapiens
ttttttctttttctt

SEQ ID NO: 942426 - DNA, 15 bp, Homo sapiens
tttttttctttttct

SEQ ID NO: 942427 - DNA, 15 bp, Homo sapiens
ctttttttctttttc

SEQ ID NO: 942428 - DNA, 15 bp, Homo sapiens
actttttttcttttt

SEQ ID NO: 942429 - DNA, 15 bp, Homo sapiens
aactttttttctttt

SEQ ID NO: 942430 - DNA, 15 bp, Homo sapiens
gtaactttttttctt

SEQ ID NO: 942431 - DNA, 15 bp, Homo sapiens
agtaactttttttct

SEQ ID NO: 942432 - DNA, 15 bp, Homo sapiens
tagtaactttttttc

SEQ ID NO: 942433 - DNA, 15 bp, Homo sapiens
ttagtaacttttttt

SEQ ID NO: 942434 - DNA, 15 bp, Homo sapiens
tttagtaactttttt

SEQ ID NO: 942435 - DNA, 15 bp, Homo sapiens
ctttagtaacttttt

SEQ ID NO: 942436 - DNA, 15 bp, Homo sapiens
actttagtaactttt

SEQ ID NO: 942437 - DNA, 15 bp, Homo sapiens
aactttagtaacttt

SEQ ID NO: 942438 - DNA, 15 bp, Homo sapiens
aaactttagtaactt

SEQ ID NO: 942439 - DNA, 15 bp, Homo sapiens
taaactttagtaact

SEQ ID NO: 942440 - DNA, 15 bp, Homo sapiens
ttaaactttagtaac

SEQ ID NO: 942441 - DNA, 15 bp, Homo sapiens
tttaaactttagtaa

SEQ ID NO: 942442 - DNA, 15 bp, Homo sapiens
atttaaactttagta

SEQ ID NO: 942443 - DNA, 15 bp, Homo sapiens
gatttaaactttagt

SEQ ID NO: 942444 - DNA, 15 bp, Homo sapiens
agatttaaactttag

SEQ ID NO: 942445 - DNA, 15 bp, Homo sapiens
cagatttaaacttta

SEQ ID NO: 942446 - DNA, 15 bp, Homo sapiens
ccagatttaaacttt

SEQ ID NO: 942447 - DNA, 15 bp, Homo sapiens
cccagatttaaactt

SEQ ID NO: 942448 - DNA, 15 bp, Homo sapiens
tcccagatttaaact

SEQ ID NO: 942449 - DNA, 15 bp, Homo sapiens
ctcccagatttaaac

SEQ ID NO: 942450 - DNA, 15 bp, Homo sapiens
cctcccagatttaaa

SEQ ID NO: 942451 - DNA, 15 bp, Homo sapiens
tcctcccagatttaa

SEQ ID NO: 942452 - DNA, 15 bp, Homo sapiens
atcctcccagattta

SEQ ID NO: 942453 - DNA, 15 bp, Homo sapiens
aatcctcccagattt

SEQ ID NO: 942454 - DNA, 15 bp, Homo sapiens
taatcctcccagatt

SEQ ID NO: 942455 - DNA, 15 bp, Homo sapiens
ataatcctcccagat

SEQ ID NO: 942456 - DNA, 15 bp, Homo sapiens
tataatcctcccaga

SEQ ID NO: 942457 - DNA, 15 bp, Homo sapiens
atataatcctcccag

SEQ ID NO: 942458 - DNA, 15 bp, Homo sapiens
tatataatcctccca

SEQ ID NO: 942459 - DNA, 15 bp, Homo sapiens
gtatataatcctccc

SEQ ID NO: 942460 - DNA, 15 bp, Homo sapiens
ggtatataatcctcc

SEQ ID NO: 942461 - DNA, 15 bp, Homo sapiens
gggtatataatcctc

SEQ ID NO: 942462 - DNA, 15 bp, Homo sapiens
agggtatataatcct

SEQ ID NO: 942463 - DNA, 15 bp, Homo sapiens
aagggtatataatcc

SEQ ID NO: 942464 - DNA, 15 bp, Homo sapiens
gaagggtatataatc

SEQ ID NO: 942465 - DNA, 15 bp, Homo sapiens
agaagggtatataat

SEQ ID NO: 942466 - DNA, 15 bp, Homo sapiens
gagaagggtatataa

SEQ ID NO: 942467 - DNA, 15 bp, Homo sapiens
tgagaagggtatata

SEQ ID NO: 942468 - DNA, 15 bp, Homo sapiens
ttgagaagggtatat

SEQ ID NO: 942469 - DNA, 15 bp, Homo sapiens
attgagaagggtata

SEQ ID NO: 942470 - DNA, 15 bp, Homo sapiens
tattgagaagggtat

SEQ ID NO: 942471 - DNA, 15 bp, Homo sapiens
ttattgagaagggta

SEQ ID NO: 942472 - DNA, 15 bp, Homo sapiens
tttattgagaagggt

SEQ ID NO: 942473 - DNA, 15 bp, Homo sapiens
ctttattgagaaggg

SEQ ID NO: 942474 - DNA, 15 bp, Homo sapiens
gctttattgagaagg

SEQ ID NO: 942475 - DNA, 15 bp, Homo sapiens
tgctttattgagaag

SEQ ID NO: 942476 - DNA, 15 bp, Homo sapiens
ctgctttattgagaa

SEQ ID NO: 942477 - DNA, 15 bp, Homo sapiens
actgctttattgaga

SEQ ID NO: 942478 - DNA, 15 bp, Homo sapiens
aactgctttattgag

SEQ ID NO: 942479 - DNA, 15 bp, Homo sapiens
aaactgctttattga

SEQ ID NO: 942480 - DNA, 15 bp, Homo sapiens
taaactgctttattg

SEQ ID NO: 942481 - DNA, 15 bp, Homo sapiens
ctaaactgctttatt

SEQ ID NO: 942482 - DNA, 15 bp, Homo sapiens
tctaaactgctttat

SEQ ID NO: 942483 - DNA, 15 bp, Homo sapiens
ctctaaactgcttta

SEQ ID NO: 942484 - DNA, 15 bp, Homo sapiens
tctctaaactgcttt

SEQ ID NO: 942485 - DNA, 15 bp, Homo sapiens
ctctctaaactgctt

SEQ ID NO: 942486 - DNA, 15 bp, Homo sapiens
tctctctaaactgct

SEQ ID NO: 942487 - DNA, 15 bp, Homo sapiens
atctctctaaactgc

SEQ ID NO: 942488 - DNA, 15 bp, Homo sapiens
gatctctctaaactg

SEQ ID NO: 942489 - DNA, 15 bp, Homo sapiens
agatctctctaaact

SEQ ID NO: 942490 - DNA, 15 bp, Homo sapiens
gagatctctctaaac

SEQ ID NO: 942491 - DNA, 15 bp, Homo sapiens
agagatctctctaaa

SEQ ID NO: 942492 - DNA, 15 bp, Homo sapiens
aagagatctctctaa

SEQ ID NO: 942493 - DNA, 15 bp, Homo sapiens
aaagagatctctcta

SEQ ID NO: 942494 - DNA, 15 bp, Homo sapiens
aaaagagatctctct

SEQ ID NO: 942495 - DNA, 15 bp, Homo sapiens
caaaagagatctctc

SEQ ID NO: 942496 - DNA, 15 bp, Homo sapiens
ccaaaagagatctct

SEQ ID NO: 942497 - DNA, 15 bp, Homo sapiens
cccaaaagagatctc

SEQ ID NO: 942498 - DNA, 15 bp, Homo sapiens
tcccaaaagagatct

SEQ ID NO: 942499 - DNA, 15 bp, Homo sapiens
gtcccaaaagagatc

SEQ ID NO: 942500 - DNA, 15 bp, Homo sapiens
ggtcccaaaagagat

SEQ ID NO: 942501 - DNA, 15 bp, Homo sapiens
gggtcccaaaagaga

SEQ ID NO: 942502 - DNA, 15 bp, Homo sapiens
tgggtcccaaaagag

SEQ ID NO: 942503 - DNA, 15 bp, Homo sapiens
atgggtcccaaaaga

SEQ ID NO: 942504 - DNA, 15 bp, Homo sapiens
catgggtcccaaaag

SEQ ID NO: 942505 - DNA, 15 bp, Homo sapiens
tcatgggtcccaaaa

SEQ ID NO: 942506 - DNA, 15 bp, Homo sapiens
gtcatgggtcccaaa

SEQ ID NO: 942507 - DNA, 15 bp, Homo sapiens
tgtcatgggtcccaa

SEQ ID NO: 942508 - DNA, 15 bp, Homo sapiens
gtgtcatgggtccca

SEQ ID NO: 942509 - DNA, 15 bp, Homo sapiens
tgtgtcatgggtccc

SEQ ID NO: 942510 - DNA, 15 bp, Homo sapiens
ctgtgtcatgggtcc

SEQ ID NO: 942511 - DNA, 15 bp, Homo sapiens
cctgtgtcatgggtc

SEQ ID NO: 942512 - DNA, 15 bp, Homo sapiens
acctgtgtcatgggt

SEQ ID NO: 942513 - DNA, 15 bp, Homo sapiens
gacctgtgtcatggg

SEQ ID NO: 942514 - DNA, 15 bp, Homo sapiens
agacctgtgtcatgg

SEQ ID NO: 942515 - DNA, 15 bp, Homo sapiens
aagacctgtgtcatg

SEQ ID NO: 942516 - DNA, 15 bp, Homo sapiens
caagacctgtgtcat

SEQ ID NO: 942517 - DNA, 15 bp, Homo sapiens
gcaagacctgtgtca

SEQ ID NO: 942518 - DNA, 15 bp, Homo sapiens
agcaagacctgtgtc

SEQ ID NO: 942519 - DNA, 15 bp, Homo sapiens
gagcaagacctgtgt

SEQ ID NO: 942520 - DNA, 15 bp, Homo sapiens
tgagcaagacctgtg

SEQ ID NO: 942521 - DNA, 15 bp, Homo sapiens
atgagcaagacctgt

SEQ ID NO: 942522 - DNA, 15 bp, Homo sapiens
catgagcaagacctg

SEQ ID NO: 942523 - DNA, 15 bp, Homo sapiens
gcatgagcaagacct

SEQ ID NO: 942524 - DNA, 15 bp, Homo sapiens
agcatgagcaagacc

SEQ ID NO: 942525 - DNA, 15 bp, Homo sapiens
cagcatgagcaagac

SEQ ID NO: 942526 - DNA, 15 bp, Homo sapiens
tcagcatgagcaaga

SEQ ID NO: 942527 - DNA, 15 bp, Homo sapiens
gtcagcatgagcaag

SEQ ID NO: 942528 - DNA, 15 bp, Homo sapiens
tgtcagcatgagcaa

SEQ ID NO: 942529 - DNA, 15 bp, Homo sapiens
atgtcagcatgagca

SEQ ID NO: 942530 - DNA, 15 bp, Homo sapiens
gatgtcagcatgagc

SEQ ID NO: 942531 - DNA, 15 bp, Homo sapiens
agatgtcagcatgag

SEQ ID NO: 942532 - DNA, 15 bp, Homo sapiens
aagatgtcagcatga

SEQ ID NO: 942533 - DNA, 15 bp, Homo sapiens
aaagatgtcagcatg

SEQ ID NO: 942534 - DNA, 15 bp, Homo sapiens
taaagatgtcagcat

SEQ ID NO: 942535 - DNA, 15 bp, Homo sapiens
ataaagatgtcagca

SEQ ID NO: 942536 - DNA, 15 bp, Homo sapiens
tataaagatgtcagc

SEQ ID NO: 942537 - DNA, 15 bp, Homo sapiens
ctataaagatgtcag

SEQ ID NO: 942538 - DNA, 15 bp, Homo sapiens
actataaagatgtca

SEQ ID NO: 942539 - DNA, 15 bp, Homo sapiens
aactataaagatgtc

SEQ ID NO: 942540 - DNA, 15 bp, Homo sapiens
caactataaagatgt

SEQ ID NO: 942541 - DNA, 15 bp, Homo sapiens
gcaactataaagatg

SEQ ID NO: 942542 - DNA, 15 bp, Homo sapiens
agcaactataaagat

SEQ ID NO: 942543 - DNA, 15 bp, Homo sapiens
aagcaactataaaga

SEQ ID NO: 942544 - DNA, 15 bp, Homo sapiens
aaagcaactataaag

SEQ ID NO: 942545 - DNA, 15 bp, Homo sapiens
taaagcaactataaa

SEQ ID NO: 942546 - DNA, 15 bp, Homo sapiens
ataaagcaactataa

SEQ ID NO: 942547 - DNA, 15 bp, Homo sapiens
aataaagcaactata

SEQ ID NO: 942548 - DNA, 15 bp, Homo sapiens
taataaagcaactat

SEQ ID NO: 942549 - DNA, 15 bp, Homo sapiens
ataataaagcaacta

SEQ ID NO: 942550 - DNA, 15 bp, Homo sapiens
aataataaagcaact

SEQ ID NO: 942551 - DNA, 15 bp, Homo sapiens
aaataataaagcaac

SEQ ID NO: 942552 - DNA, 15 bp, Homo sapiens
taaataataaagcaa

SEQ ID NO: 942553 - DNA, 15 bp, Homo sapiens
ataaataataaagca

SEQ ID NO: 942554 - DNA, 15 bp, Homo sapiens
aataaataataaagc

SEQ ID NO: 942555 - DNA, 15 bp, Homo sapiens
gaataaataataaag

SEQ ID NO: 942556 - DNA, 15 bp, Homo sapiens
tgaataaataataaa

SEQ ID NO: 942557 - DNA, 15 bp, Homo sapiens
ttgaataaataataa

SEQ ID NO: 942558 - DNA, 15 bp, Homo sapiens
gttgaataaataata

SEQ ID NO: 942559 - DNA, 15 bp, Homo sapiens
tgttgaataaataat

SEQ ID NO: 942560 - DNA, 15 bp, Homo sapiens
ttgttgaataaataa

SEQ ID NO: 942561 - DNA, 15 bp, Homo sapiens
tttgttgaataaata

SEQ ID NO: 942562 - DNA, 15 bp, Homo sapiens
gtttgttgaataaat

SEQ ID NO: 942563 - DNA, 15 bp, Homo sapiens
agtttgttgaataaa

SEQ ID NO: 942564 - DNA, 15 bp, Homo sapiens
aagtttgttgaataa

SEQ ID NO: 942565 - DNA, 15 bp, Homo sapiens
taagtttgttgaata

SEQ ID NO: 942566 - DNA, 15 bp, Homo sapiens
ctaagtttgttgaat

SEQ ID NO: 942567 - DNA, 15 bp, Homo sapiens
actaagtttgttgaa

SEQ ID NO: 942568 - DNA, 15 bp, Homo sapiens
tactaagtttgttga

SEQ ID NO: 942569 - DNA, 15 bp, Homo sapiens
ttactaagtttgttg

SEQ ID NO: 942570 - DNA, 15 bp, Homo sapiens
gttactaagtttgtt

SEQ ID NO: 942571 - DNA, 15 bp, Homo sapiens
tgttactaagtttgt

SEQ ID NO: 942572 - DNA, 15 bp, Homo sapiens
gtgttactaagtttg

SEQ ID NO: 942573 - DNA, 15 bp, Homo sapiens
cgtgttactaagttt

SEQ ID NO: 942574 - DNA, 15 bp, Homo sapiens
acgtgttactaagtt

SEQ ID NO: 942575 - DNA, 15 bp, Homo sapiens
tacgtgttactaagt

SEQ ID NO: 942576 - DNA, 15 bp, Homo sapiens
atacgtgttactaag

SEQ ID NO: 942577 - DNA, 15 bp, Homo sapiens
aatacgtgttactaa

SEQ ID NO: 942578 - DNA, 15 bp, Homo sapiens
gaatacgtgttacta

SEQ ID NO: 942579 - DNA, 15 bp, Homo sapiens
agaatacgtgttact

SEQ ID NO: 942580 - DNA, 15 bp, Homo sapiens
tagaatacgtgttac

SEQ ID NO: 942581 - DNA, 15 bp, Homo sapiens
atagaatacgtgtta

SEQ ID NO: 942582 - DNA, 15 bp, Homo sapiens
catagaatacgtgtt

SEQ ID NO: 942583 - DNA, 15 bp, Homo sapiens
acatagaatacgtgt

SEQ ID NO: 942584 - DNA, 15 bp, Homo sapiens
gacatagaatacgtg

SEQ ID NO: 942585 - DNA, 15 bp, Homo sapiens
tgacatagaatacgt

SEQ ID NO: 942586 - DNA, 15 bp, Homo sapiens
ctgacatagaatacg

SEQ ID NO: 942587 - DNA, 15 bp, Homo sapiens
cctgacatagaatac

SEQ ID NO: 942588 - DNA, 15 bp, Homo sapiens
gcctgacatagaata

SEQ ID NO: 942589 - DNA, 15 bp, Homo sapiens
ggcctgacatagaat

SEQ ID NO: 942590 - DNA, 15 bp, Homo sapiens
aggcctgacatagaa

SEQ ID NO: 942591 - DNA, 15 bp, Homo sapiens
aaggcctgacataga

SEQ ID NO: 942592 - DNA, 15 bp, Homo sapiens
aaaggcctgacatag

SEQ ID NO: 942593 - DNA, 15 bp, Homo sapiens
aaaaggcctgacata

SEQ ID NO: 942594 - DNA, 15 bp, Homo sapiens
gaaaaggcctgacat

SEQ ID NO: 942595 - DNA, 15 bp, Homo sapiens
ggaaaaggcctgaca

SEQ ID NO: 942596 - DNA, 15 bp, Homo sapiens
aggaaaaggcctgac

SEQ ID NO: 942597 - DNA, 15 bp, Homo sapiens
caggaaaaggcctga

SEQ ID NO: 942598 - DNA, 15 bp, Homo sapiens
tcaggaaaaggcctg

SEQ ID NO: 942599 - DNA, 15 bp, Homo sapiens
gtcaggaaaaggcct

SEQ ID NO: 942600 - DNA, 15 bp, Homo sapiens
agtcaggaaaaggcc

SEQ ID NO: 942601 - DNA, 15 bp, Homo sapiens
tagtcaggaaaaggc

SEQ ID NO: 942602 - DNA, 15 bp, Homo sapiens
gtagtcaggaaaagg

SEQ ID NO: 942603 - DNA, 15 bp, Homo sapiens
agtagtcaggaaaag

SEQ ID NO: 942604 - DNA, 15 bp, Homo sapiens
cagtagtcaggaaaa

SEQ ID NO: 942605 - DNA, 15 bp, Homo sapiens
ccagtagtcaggaaa

SEQ ID NO: 942606 - DNA, 15 bp, Homo sapiens
cccagtagtcaggaa

SEQ ID NO: 942607 - DNA, 15 bp, Homo sapiens
tcccagtagtcagga

SEQ ID NO: 942608 - DNA, 15 bp, Homo sapiens
gtcccagtagtcagg

SEQ ID NO: 942609 - DNA, 15 bp, Homo sapiens
tgtcccagtagtcag

SEQ ID NO: 942610 - DNA, 15 bp, Homo sapiens
ttgtcccagtagtca

SEQ ID NO: 942611 - DNA, 15 bp, Homo sapiens
tttgtcccagtagtc

SEQ ID NO: 942612 - DNA, 15 bp, Homo sapiens
gtttgtcccagtagt

SEQ ID NO: 942613 - DNA, 15 bp, Homo sapiens
ggtttgtcccagtag

SEQ ID NO: 942614 - DNA, 15 bp, Homo sapiens
tggtttgtcccagta

SEQ ID NO: 942615 - DNA, 15 bp, Homo sapiens
ctggtttgtcccagt

SEQ ID NO: 942616 - DNA, 15 bp, Homo sapiens
cctggtttgtcccag

SEQ ID NO: 942617 - DNA, 15 bp, Homo sapiens
ccctggtttgtccca

SEQ ID NO: 942618 - DNA, 15 bp, Homo sapiens
accctggtttgtccc

SEQ ID NO: 942619 - DNA, 15 bp, Homo sapiens
caccctggtttgtcc

SEQ ID NO: 942620 - DNA, 15 bp, Homo sapiens
tcaccctggtttgtc

SEQ ID NO: 942621 - DNA, 15 bp, Homo sapiens
atcaccctggtttgt

SEQ ID NO: 942622 - DNA, 15 bp, Homo sapiens
catcaccctggtttg

SEQ ID NO: 942623 - DNA, 15 bp, Homo sapiens
acatcaccctggttt

SEQ ID NO: 942624 - DNA, 15 bp, Homo sapiens
cacatcaccctggtt

SEQ ID NO: 942625 - DNA, 15 bp, Homo sapiens
ccacatcaccctggt

SEQ ID NO: 942626 - DNA, 15 bp, Homo sapiens
cccacatcaccctgg

SEQ ID NO: 942627 - DNA, 15 bp, Homo sapiens
ccccacatcaccctg

SEQ ID NO: 942628 - DNA, 15 bp, Homo sapiens
cccccacatcaccct

SEQ ID NO: 942629 - DNA, 15 bp, Homo sapiens
gcccccacatcaccc

SEQ ID NO: 942630 - DNA, 15 bp, Homo sapiens
agcccccacatcacc

SEQ ID NO: 942631 - DNA, 15 bp, Homo sapiens
cagcccccacatcac

SEQ ID NO: 942632 - DNA, 15 bp, Homo sapiens
acagcccccacatca

SEQ ID NO: 942633 - DNA, 15 bp, Homo sapiens
aacagcccccacatc

SEQ ID NO: 942634 - DNA, 15 bp, Homo sapiens
aaacagcccccacat

SEQ ID NO: 942635 - DNA, 15 bp, Homo sapiens
aaaacagcccccaca

SEQ ID NO: 942636 - DNA, 15 bp, Homo sapiens
taaaacagcccccac

SEQ ID NO: 942637 - DNA, 15 bp, Homo sapiens
ctaaaacagccccca

SEQ ID NO: 942638 - DNA, 15 bp, Homo sapiens
tctaaaacagccccc

SEQ ID NO: 942639 - DNA, 15 bp, Homo sapiens
atctaaaacagcccc

SEQ ID NO: 942640 - DNA, 15 bp, Homo sapiens
tatctaaaacagccc

SEQ ID NO: 942641 - DNA, 15 bp, Homo sapiens
ctatctaaaacagcc

SEQ ID NO: 942642 - DNA, 15 bp, Homo sapiens
cctatctaaaacagc

SEQ ID NO: 942643 - DNA, 15 bp, Homo sapiens
ccctatctaaaacag

SEQ ID NO: 942644 - DNA, 15 bp, Homo sapiens
accctatctaaaaca

SEQ ID NO: 942645 - DNA, 15 bp, Homo sapiens
caccctatctaaaac

SEQ ID NO: 942646 - DNA, 15 bp, Homo sapiens
tcaccctatctaaaa

SEQ ID NO: 942647 - DNA, 15 bp, Homo sapiens
atcaccctatctaaa

SEQ ID NO: 942648 - DNA, 15 bp, Homo sapiens
gatcaccctatctaa

SEQ ID NO: 942649 - DNA, 15 bp, Homo sapiens
tgatcaccctatcta

SEQ ID NO: 942650 - DNA, 15 bp, Homo sapiens
ctgatcaccctatct

SEQ ID NO: 942651 - DNA, 15 bp, Homo sapiens
tctgatcaccctatc

SEQ ID NO: 942652 - DNA, 15 bp, Homo sapiens
ctctgatcaccctat

SEQ ID NO: 942653 - DNA, 15 bp, Homo sapiens
cctctgatcacccta

SEQ ID NO: 942654 - DNA, 15 bp, Homo sapiens
tcctctgatcaccct

SEQ ID NO: 942655 - DNA, 15 bp, Homo sapiens
ctcctctgatcaccc

SEQ ID NO: 942656 - DNA, 15 bp, Homo sapiens
cctcctctgatcacc

SEQ ID NO: 942657 - DNA, 15 bp, Homo sapiens
gcctcctctgatcac

SEQ ID NO: 942658 - DNA, 15 bp, Homo sapiens
ggcctcctctgatca

SEQ ID NO: 942659 - DNA, 15 bp, Homo sapiens
aggcctcctctgatc

SEQ ID NO: 942660 - DNA, 15 bp, Homo sapiens
gaggcctcctctgat

SEQ ID NO: 942661 - DNA, 15 bp, Homo sapiens
agaggcctcctctga

SEQ ID NO: 942662 - DNA, 15 bp, Homo sapiens
gagaggcctcctctg

SEQ ID NO: 942663 - DNA, 15 bp, Homo sapiens
agagaggcctcctct

SEQ ID NO: 942664 - DNA, 15 bp, Homo sapiens
cagagaggcctcctc

SEQ ID NO: 942665 - DNA, 15 bp, Homo sapiens
acagagaggcctcct

SEQ ID NO: 942666 - DNA, 15 bp, Homo sapiens
aacagagaggcctcc

SEQ ID NO: 942667 - DNA, 15 bp, Homo sapiens
aaacagagaggcctc

SEQ ID NO: 942668 - DNA, 15 bp, Homo sapiens
caaacagagaggcct

SEQ ID NO: 942669 - DNA, 15 bp, Homo sapiens
ccaaacagagaggcc

SEQ ID NO: 942670 - DNA, 15 bp, Homo sapiens
cccaaacagagaggc

SEQ ID NO: 942671 - DNA, 15 bp, Homo sapiens
acccaaacagagagg

SEQ ID NO: 942672 - DNA, 15 bp, Homo sapiens
cacccaaacagagag

SEQ ID NO: 942673 - DNA, 15 bp, Homo sapiens
ccacccaaacagaga

SEQ ID NO: 942674 - DNA, 15 bp, Homo sapiens
gccacccaaacagag

SEQ ID NO: 942675 - DNA, 15 bp, Homo sapiens
agccacccaaacaga

SEQ ID NO: 942676 - DNA, 15 bp, Homo sapiens
aagccacccaaacag

SEQ ID NO: 942677 - DNA, 15 bp, Homo sapiens
aaagccacccaaaca

SEQ ID NO: 942678 - DNA, 15 bp, Homo sapiens
aaaagccacccaaac

SEQ ID NO: 942679 - DNA, 15 bp, Homo sapiens
caaaagccacccaaa

SEQ ID NO: 942680 - DNA, 15 bp, Homo sapiens
tcaaaagccacccaa

SEQ ID NO: 942681 - DNA, 15 bp, Homo sapiens
ttcaaaagccaccca

SEQ ID NO: 942682 - DNA, 15 bp, Homo sapiens
attcaaaagccaccc

SEQ ID NO: 942683 - DNA, 15 bp, Homo sapiens
tattcaaaagccacc

SEQ ID NO: 942684 - DNA, 15 bp, Homo sapiens
ctattcaaaagccac

SEQ ID NO: 942685 - DNA, 15 bp, Homo sapiens
tctattcaaaagcca

SEQ ID NO: 942686 - DNA, 15 bp, Homo sapiens
ttctattcaaaagcc

SEQ ID NO: 942687 - DNA, 15 bp, Homo sapiens
tttctattcaaaagc

SEQ ID NO: 942688 - DNA, 15 bp, Homo sapiens
ttttctattcaaaag

SEQ ID NO: 942689 - DNA, 15 bp, Homo sapiens
attttctattcaaaa

SEQ ID NO: 942690 - DNA, 15 bp, Homo sapiens
aattttctattcaaa

SEQ ID NO: 942691 - DNA, 15 bp, Homo sapiens
taattttctattcaa

SEQ ID NO: 942692 - DNA, 15 bp, Homo sapiens
ctaattttctattca

SEQ ID NO: 942693 - DNA, 15 bp, Homo sapiens
tctaattttctattc

SEQ ID NO: 942694 - DNA, 15 bp, Homo sapiens
atctaattttctatt

SEQ ID NO: 942695 - DNA, 15 bp, Homo sapiens
catctaattttctat

SEQ ID NO: 942696 - DNA, 15 bp, Homo sapiens
tcatctaattttcta

SEQ ID NO: 942697 - DNA, 15 bp, Homo sapiens
ttcatctaattttct

SEQ ID NO: 942698 - DNA, 15 bp, Homo sapiens
cttcatctaattttc

SEQ ID NO: 942699 - DNA, 15 bp, Homo sapiens
acttcatctaatttt

SEQ ID NO: 942700 - DNA, 15 bp, Homo sapiens
cacttcatctaattt

SEQ ID NO: 942701 - DNA, 15 bp, Homo sapiens
tcacttcatctaatt

SEQ ID NO: 942702 - DNA, 15 bp, Homo sapiens
ttcacttcatctaat

SEQ ID NO: 942703 - DNA, 15 bp, Homo sapiens
cttcacttcatctaa

SEQ ID NO: 942704 - DNA, 15 bp, Homo sapiens
ccttcacttcatcta

SEQ ID NO: 942705 - DNA, 15 bp, Homo sapiens
tccttcacttcatct

SEQ ID NO: 942706 - DNA, 15 bp, Homo sapiens
ctccttcacttcatc

SEQ ID NO: 942707 - DNA, 15 bp, Homo sapiens
actccttcacttcat

SEQ ID NO: 942708 - DNA, 15 bp, Homo sapiens
tactccttcacttca

SEQ ID NO: 942709 - DNA, 15 bp, Homo sapiens
ttactccttcacttc

SEQ ID NO: 942710 - DNA, 15 bp, Homo sapiens
cttactccttcactt

SEQ ID NO: 942711 - DNA, 15 bp, Homo sapiens
gcttactccttcact

SEQ ID NO: 942712 - DNA, 15 bp, Homo sapiens
agcttactccttcac

SEQ ID NO: 942713 - DNA, 15 bp, Homo sapiens
aagcttactccttca

SEQ ID NO: 942714 - DNA, 15 bp, Homo sapiens
gaagcttactccttc

SEQ ID NO: 942715 - DNA, 15 bp, Homo sapiens
agaagcttactcctt

SEQ ID NO: 942716 - DNA, 15 bp, Homo sapiens
cagaagcttactcct

SEQ ID NO: 942717 - DNA, 15 bp, Homo sapiens
tcagaagcttactcc

SEQ ID NO: 942718 - DNA, 15 bp, Homo sapiens
atcagaagcttactc

SEQ ID NO: 942719 - DNA, 15 bp, Homo sapiens
tatcagaagcttact

SEQ ID NO: 942720 - DNA, 15 bp, Homo sapiens
atatcagaagcttac

SEQ ID NO: 942721 - DNA, 15 bp, Homo sapiens
aatatcagaagctta

SEQ ID NO: 942722 - DNA, 15 bp, Homo sapiens
aaatatcagaagctt

SEQ ID NO: 942723 - DNA, 15 bp, Homo sapiens
gaaatatcagaagct

SEQ ID NO: 942724 - DNA, 15 bp, Homo sapiens
tgaaatatcagaagc

SEQ ID NO: 942725 - DNA, 15 bp, Homo sapiens
gtgaaatatcagaag

SEQ ID NO: 942726 - DNA, 15 bp, Homo sapiens
agtgaaatatcagaa

SEQ ID NO: 942727 - DNA, 15 bp, Homo sapiens
cagtgaaatatcaga

SEQ ID NO: 942728 - DNA, 15 bp, Homo sapiens
acagtgaaatatcag

SEQ ID NO: 942729 - DNA, 15 bp, Homo sapiens
aacagtgaaatatca

SEQ ID NO: 942730 - DNA, 15 bp, Homo sapiens
aaacagtgaaatatc

SEQ ID NO: 942731 - DNA, 15 bp, Homo sapiens
taaacagtgaaatat

SEQ ID NO: 942732 - DNA, 15 bp, Homo sapiens
gtaaacagtgaaata

SEQ ID NO: 942733 - DNA, 15 bp, Homo sapiens
agtaaacagtgaaat

SEQ ID NO: 942734 - DNA, 15 bp, Homo sapiens
aagtaaacagtgaaa

SEQ ID NO: 942735 - DNA, 15 bp, Homo sapiens
caagtaaacagtgaa

SEQ ID NO: 942736 - DNA, 15 bp, Homo sapiens
acaagtaaacagtga

SEQ ID NO: 942737 - DNA, 15 bp, Homo sapiens
cacaagtaaacagtg

SEQ ID NO: 942738 - DNA, 15 bp, Homo sapiens
ccacaagtaaacagt

SEQ ID NO: 942739 - DNA, 15 bp, Homo sapiens
accacaagtaaacag

SEQ ID NO: 942740 - DNA, 15 bp, Homo sapiens
taccacaagtaaaca

SEQ ID NO: 942741 - DNA, 15 bp, Homo sapiens
ctaccacaagtaaac

SEQ ID NO: 942742 - DNA, 15 bp, Homo sapiens
tctaccacaagtaaa

SEQ ID NO: 942743 - DNA, 15 bp, Homo sapiens
atctaccacaagtaa

SEQ ID NO: 942744 - DNA, 15 bp, Homo sapiens
gatctaccacaagta

SEQ ID NO: 942745 - DNA, 15 bp, Homo sapiens
agatctaccacaagt

SEQ ID NO: 942746 - DNA, 15 bp, Homo sapiens
cagatctaccacaag

SEQ ID NO: 942747 - DNA, 15 bp, Homo sapiens
acagatctaccacaa

SEQ ID NO: 942748 - DNA, 15 bp, Homo sapiens
cacagatctaccaca

SEQ ID NO: 942749 - DNA, 15 bp, Homo sapiens
tcacagatctaccac

SEQ ID NO: 942750 - DNA, 15 bp, Homo sapiens
atcacagatctacca

SEQ ID NO: 942751 - DNA, 15 bp, Homo sapiens
tatcacagatctacc

SEQ ID NO: 942752 - DNA, 15 bp, Homo sapiens
ttatcacagatctac

SEQ ID NO: 942753 - DNA, 15 bp, Homo sapiens
attatcacagatcta

SEQ ID NO: 942754 - DNA, 15 bp, Homo sapiens
gattatcacagatct

SEQ ID NO: 942755 - DNA, 15 bp, Homo sapiens
agattatcacagatc

SEQ ID NO: 942756 - DNA, 15 bp, Homo sapiens
gagattatcacagat

SEQ ID NO: 942757 - DNA, 15 bp, Homo sapiens
agagattatcacaga

SEQ ID NO: 942758 - DNA, 15 bp, Homo sapiens
cagagattatcacag

SEQ ID NO: 942759 - DNA, 15 bp, Homo sapiens
acagagattatcaca

SEQ ID NO: 942760 - DNA, 15 bp, Homo sapiens
gacagagattatcac

SEQ ID NO: 942761 - DNA, 15 bp, Homo sapiens
tgacagagattatca

SEQ ID NO: 942762 - DNA, 15 bp, Homo sapiens
ctgacagagattatc

SEQ ID NO: 942763 - DNA, 15 bp, Homo sapiens
cctgacagagattat

SEQ ID NO: 942764 - DNA, 15 bp, Homo sapiens
acctgacagagatta

SEQ ID NO: 942765 - DNA, 15 bp, Homo sapiens
aacctgacagagatt

SEQ ID NO: 942766 - DNA, 15 bp, Homo sapiens
taacctgacagagat

SEQ ID NO: 942767 - DNA, 15 bp, Homo sapiens
ttaacctgacagaga

SEQ ID NO: 942768 - DNA, 15 bp, Homo sapiens
tttaacctgacagag

SEQ ID NO: 942769 - DNA, 15 bp, Homo sapiens
ttttaacctgacaga

SEQ ID NO: 942770 - DNA, 15 bp, Homo sapiens
tttttaacctgacag

SEQ ID NO: 942771 - DNA, 15 bp, Homo sapiens
gtttttaacctgaca

SEQ ID NO: 942772 - DNA, 15 bp, Homo sapiens
tgtttttaacctgac

SEQ ID NO: 942773 - DNA, 15 bp, Homo sapiens
atgtttttaacctga

SEQ ID NO: 942774 - DNA, 15 bp, Homo sapiens
aatgtttttaacctg

SEQ ID NO: 942775 - DNA, 15 bp, Homo sapiens
gaatgtttttaacct

SEQ ID NO: 942776 - DNA, 15 bp, Homo sapiens
ggaatgtttttaacc

SEQ ID NO: 942777 - DNA, 15 bp, Homo sapiens
gggaatgtttttaac

SEQ ID NO: 942778 - DNA, 15 bp, Homo sapiens
agggaatgtttttaa

SEQ ID NO: 942779 - DNA, 15 bp, Homo sapiens
aagggaatgttttta

SEQ ID NO: 942780 - DNA, 15 bp, Homo sapiens
gaagggaatgttttt

SEQ ID NO: 942781 - DNA, 15 bp, Homo sapiens
agaagggaatgtttt

SEQ ID NO: 942782 - DNA, 15 bp, Homo sapiens
tagaagggaatgttt

SEQ ID NO: 942783 - DNA, 15 bp, Homo sapiens
ttagaagggaatgtt

SEQ ID NO: 942784 - DNA, 15 bp, Homo sapiens
attagaagggaatgt

SEQ ID NO: 942785 - DNA, 15 bp, Homo sapiens
gattagaagggaatg

SEQ ID NO: 942786 - DNA, 15 bp, Homo sapiens
agattagaagggaat

SEQ ID NO: 942787 - DNA, 15 bp, Homo sapiens
tagattagaagggaa

SEQ ID NO: 942788 - DNA, 15 bp, Homo sapiens
ttagattagaaggga

SEQ ID NO: 942789 - DNA, 15 bp, Homo sapiens
cttagattagaaggg

SEQ ID NO: 942790 - DNA, 15 bp, Homo sapiens
acttagattagaagg

SEQ ID NO: 942791 - DNA, 15 bp, Homo sapiens
aacttagattagaag

SEQ ID NO: 942792 - DNA, 15 bp, Homo sapiens
aaacttagattagaa

SEQ ID NO: 942793 - DNA, 15 bp, Homo sapiens
gaaacttagattaga

SEQ ID NO: 942794 - DNA, 15 bp, Homo sapiens
agaaacttagattag

SEQ ID NO: 942795 - DNA, 15 bp, Homo sapiens
tagaaacttagatta

SEQ ID NO: 942796 - DNA, 15 bp, Homo sapiens
ttagaaacttagatt

SEQ ID NO: 942797 - DNA, 15 bp, Homo sapiens
cttagaaacttagat

SEQ ID NO: 942798 - DNA, 15 bp, Homo sapiens
tcttagaaacttaga

SEQ ID NO: 942799 - DNA, 15 bp, Homo sapiens
atcttagaaacttag

SEQ ID NO: 942800 - DNA, 15 bp, Homo sapiens
gatcttagaaactta

SEQ ID NO: 942801 - DNA, 15 bp, Homo sapiens
agatcttagaaactt

SEQ ID NO: 942802 - DNA, 15 bp, Homo sapiens
tagatcttagaaact

SEQ ID NO: 942803 - DNA, 15 bp, Homo sapiens
atagatcttagaaac

SEQ ID NO: 942804 - DNA, 15 bp, Homo sapiens
gatagatcttagaaa

SEQ ID NO: 942805 - DNA, 15 bp, Homo sapiens
tgatagatcttagaa

SEQ ID NO: 942806 - DNA, 15 bp, Homo sapiens
ttgatagatcttaga

SEQ ID NO: 942807 - DNA, 15 bp, Homo sapiens
tttgatagatcttag

SEQ ID NO: 942808 - DNA, 15 bp, Homo sapiens
ttttgatagatctta

SEQ ID NO: 942809 - DNA, 15 bp, Homo sapiens
cttttgatagatctt

SEQ ID NO: 942810 - DNA, 15 bp, Homo sapiens
gcttttgatagatct

SEQ ID NO: 942811 - DNA, 15 bp, Homo sapiens
agcttttgatagatc

SEQ ID NO: 942812 - DNA, 15 bp, Homo sapiens
cagcttttgatagat

SEQ ID NO: 942813 - DNA, 15 bp, Homo sapiens
acagcttttgataga

SEQ ID NO: 942814 - DNA, 15 bp, Homo sapiens
aacagcttttgatag

SEQ ID NO: 942815 - DNA, 15 bp, Homo sapiens
aaacagcttttgata

SEQ ID NO: 942816 - DNA, 15 bp, Homo sapiens
caaacagcttttgat

SEQ ID NO: 942817 - DNA, 15 bp, Homo sapiens
tcaaacagcttttga

SEQ ID NO: 942818 - DNA, 15 bp, Homo sapiens
ttcaaacagcttttg

SEQ ID NO: 942819 - DNA, 15 bp, Homo sapiens
attcaaacagctttt

SEQ ID NO: 942820 - DNA, 15 bp, Homo sapiens
tattcaaacagcttt

SEQ ID NO: 942821 - DNA, 15 bp, Homo sapiens
atattcaaacagctt

SEQ ID NO: 942822 - DNA, 15 bp, Homo sapiens
tatattcaaacagct

SEQ ID NO: 942823 - DNA, 15 bp, Homo sapiens
atatattcaaacagc

SEQ ID NO: 942824 - DNA, 15 bp, Homo sapiens
aatatattcaaacag

SEQ ID NO: 942825 - DNA, 15 bp, Homo sapiens
aaatatattcaaaca

SEQ ID NO: 942826 - DNA, 15 bp, Homo sapiens
taaatatattcaaac

SEQ ID NO: 942827 - DNA, 15 bp, Homo sapiens
ctaaatatattcaaa

SEQ ID NO: 942828 - DNA, 15 bp, Homo sapiens
tctaaatatattcaa

SEQ ID NO: 942829 - DNA, 15 bp, Homo sapiens
gtctaaatatattca

SEQ ID NO: 942830 - DNA, 15 bp, Homo sapiens
tgtctaaatatattc

SEQ ID NO: 942831 - DNA, 15 bp, Homo sapiens
ttgtctaaatatatt

SEQ ID NO: 942832 - DNA, 15 bp, Homo sapiens
attgtctaaatatat

SEQ ID NO: 942833 - DNA, 15 bp, Homo sapiens
gattgtctaaatata

SEQ ID NO: 942834 - DNA, 15 bp, Homo sapiens
tgattgtctaaatat

SEQ ID NO: 942835 - DNA, 15 bp, Homo sapiens
atgattgtctaaata

SEQ ID NO: 942836 - DNA, 15 bp, Homo sapiens
tatgattgtctaaat

SEQ ID NO: 942837 - DNA, 15 bp, Homo sapiens
ttatgattgtctaaa

SEQ ID NO: 942838 - DNA, 15 bp, Homo sapiens
attatgattgtctaa

SEQ ID NO: 942839 - DNA, 15 bp, Homo sapiens
aattatgattgtcta

SEQ ID NO: 942840 - DNA, 15 bp, Homo sapiens
aaattatgattgtct

SEQ ID NO: 942841 - DNA, 15 bp, Homo sapiens
aaaattatgattgtc

SEQ ID NO: 942842 - DNA, 15 bp, Homo sapiens
gaaaattatgattgt

SEQ ID NO: 942843 - DNA, 15 bp, Homo sapiens
ggaaaattatgattg

SEQ ID NO: 942844 - DNA, 15 bp, Homo sapiens
aggaaaattatgatt

SEQ ID NO: 942845 - DNA, 15 bp, Homo sapiens
aaggaaaattatgat

SEQ ID NO: 942846 - DNA, 15 bp, Homo sapiens
aaaggaaaattatga

SEQ ID NO: 942847 - DNA, 15 bp, Homo sapiens
gaaaggaaaattatg

SEQ ID NO: 942848 - DNA, 15 bp, Homo sapiens
agaaaggaaaattat

SEQ ID NO: 942849 - DNA, 15 bp, Homo sapiens
aagaaaggaaaatta

SEQ ID NO: 942850 - DNA, 15 bp, Homo sapiens
caagaaaggaaaatt

SEQ ID NO: 942851 - DNA, 15 bp, Homo sapiens
acaagaaaggaaaat

SEQ ID NO: 942852 - DNA, 15 bp, Homo sapiens
tacaagaaaggaaaa

SEQ ID NO: 942853 - DNA, 15 bp, Homo sapiens
atacaagaaaggaaa

SEQ ID NO: 942854 - DNA, 15 bp, Homo sapiens
aatacaagaaaggaa

SEQ ID NO: 942855 - DNA, 15 bp, Homo sapiens
taatacaagaaagga

SEQ ID NO: 942856 - DNA, 15 bp, Homo sapiens
ataatacaagaaagg

SEQ ID NO: 942857 - DNA, 15 bp, Homo sapiens
gataatacaagaaag

SEQ ID NO: 942858 - DNA, 15 bp, Homo sapiens
ggataatacaagaaa

SEQ ID NO: 942859 - DNA, 15 bp, Homo sapiens
aggataatacaagaa

SEQ ID NO: 942860 - DNA, 15 bp, Homo sapiens
taggataatacaaga

SEQ ID NO: 942861 - DNA, 15 bp, Homo sapiens
ctaggataatacaag

SEQ ID NO: 942862 - DNA, 15 bp, Homo sapiens
gctaggataatacaa

SEQ ID NO: 942863 - DNA, 15 bp, Homo sapiens
tgctaggataataca

SEQ ID NO: 942864 - DNA, 15 bp, Homo sapiens
ctgctaggataatac

SEQ ID NO: 942865 - DNA, 15 bp, Homo sapiens
tctgctaggataata

SEQ ID NO: 942866 - DNA, 15 bp, Homo sapiens
atctgctaggataat

SEQ ID NO: 942867 - DNA, 15 bp, Homo sapiens
aatctgctaggataa

SEQ ID NO: 942868 - DNA, 15 bp, Homo sapiens
aaatctgctaggata

SEQ ID NO: 942869 - DNA, 15 bp, Homo sapiens
aaaatctgctaggat

SEQ ID NO: 942870 - DNA, 15 bp, Homo sapiens
caaaatctgctagga

SEQ ID NO: 942871 - DNA, 15 bp, Homo sapiens
acaaaatctgctagg

SEQ ID NO: 942872 - DNA, 15 bp, Homo sapiens
aacaaaatctgctag

SEQ ID NO: 942873 - DNA, 15 bp, Homo sapiens
caacaaaatctgcta

SEQ ID NO: 942874 - DNA, 15 bp, Homo sapiens
gcaacaaaatctgct

SEQ ID NO: 942875 - DNA, 15 bp, Homo sapiens
ggcaacaaaatctgc

SEQ ID NO: 942876 - DNA, 15 bp, Homo sapiens
tggcaacaaaatctg

SEQ ID NO: 942877 - DNA, 15 bp, Homo sapiens
ttggcaacaaaatct

SEQ ID NO: 942878 - DNA, 15 bp, Homo sapiens
tttggcaacaaaatc

SEQ ID NO: 942879 - DNA, 15 bp, Homo sapiens
ctttggcaacaaaat

SEQ ID NO: 942880 - DNA, 15 bp, Homo sapiens
gctttggcaacaaaa

SEQ ID NO: 942881 - DNA, 15 bp, Homo sapiens
agctttggcaacaaa

SEQ ID NO: 942882 - DNA, 15 bp, Homo sapiens
tagctttggcaacaa

SEQ ID NO: 942883 - DNA, 15 bp, Homo sapiens
atagctttggcaaca

SEQ ID NO: 942884 - DNA, 15 bp, Homo sapiens
tatagctttggcaac

SEQ ID NO: 942885 - DNA, 15 bp, Homo sapiens
gtatagctttggcaa

SEQ ID NO: 942886 - DNA, 15 bp, Homo sapiens
agtatagctttggca

SEQ ID NO: 942887 - DNA, 15 bp, Homo sapiens
cagtatagctttggc

SEQ ID NO: 942888 - DNA, 15 bp, Homo sapiens
ccagtatagctttgg

SEQ ID NO: 942889 - DNA, 15 bp, Homo sapiens
gccagtatagctttg

SEQ ID NO: 942890 - DNA, 15 bp, Homo sapiens
ggccagtatagcttt

SEQ ID NO: 942891 - DNA, 15 bp, Homo sapiens
tggccagtatagctt

SEQ ID NO: 942892 - DNA, 15 bp, Homo sapiens
atggccagtatagct

SEQ ID NO: 942893 - DNA, 15 bp, Homo sapiens
aatggccagtatagc

SEQ ID NO: 942894 - DNA, 15 bp, Homo sapiens
aaatggccagtatag

SEQ ID NO: 942895 - DNA, 15 bp, Homo sapiens
aaaatggccagtata

SEQ ID NO: 942896 - DNA, 15 bp, Homo sapiens
taaaatggccagtat

SEQ ID NO: 942897 - DNA, 15 bp, Homo sapiens
ttaaaatggccagta

SEQ ID NO: 942898 - DNA, 15 bp, Homo sapiens
gttaaaatggccagt

SEQ ID NO: 942899 - DNA, 15 bp, Homo sapiens
agttaaaatggccag

SEQ ID NO: 942900 - DNA, 15 bp, Homo sapiens
aagttaaaatggcca

SEQ ID NO: 942901 - DNA, 15 bp, Homo sapiens
taagttaaaatggcc

SEQ ID NO: 942902 - DNA, 15 bp, Homo sapiens
ctaagttaaaatggc

SEQ ID NO: 942903 - DNA, 15 bp, Homo sapiens
tctaagttaaaatgg

SEQ ID NO: 942904 - DNA, 15 bp, Homo sapiens
ttctaagttaaaatg

SEQ ID NO: 942905 - DNA, 15 bp, Homo sapiens
attctaagttaaaat

SEQ ID NO: 942906 - DNA, 15 bp, Homo sapiens
cattctaagttaaaa

SEQ ID NO: 942907 - DNA, 15 bp, Homo sapiens
gcattctaagttaaa

SEQ ID NO: 942908 - DNA, 15 bp, Homo sapiens
tgcattctaagttaa

SEQ ID NO: 942909 - DNA, 15 bp, Homo sapiens
ctgcattctaagtta

SEQ ID NO: 942910 - DNA, 15 bp, Homo sapiens
actgcattctaagtt

SEQ ID NO: 942911 - DNA, 15 bp, Homo sapiens
gactgcattctaagt

SEQ ID NO: 942912 - DNA, 15 bp, Homo sapiens
agactgcattctaag

SEQ ID NO: 942913 - DNA, 15 bp, Homo sapiens
aagactgcattctaa

SEQ ID NO: 942914 - DNA, 15 bp, Homo sapiens
aaagactgcattcta

SEQ ID NO: 942915 - DNA, 15 bp, Homo sapiens
gaaagactgcattct

SEQ ID NO: 942916 - DNA, 15 bp, Homo sapiens
agaaagactgcattc

SEQ ID NO: 942917 - DNA, 15 bp, Homo sapiens
tagaaagactgcatt

SEQ ID NO: 942918 - DNA, 15 bp, Homo sapiens
atagaaagactgcat

SEQ ID NO: 942919 - DNA, 15 bp, Homo sapiens
aatagaaagactgca

SEQ ID NO: 942920 - DNA, 15 bp, Homo sapiens
gaatagaaagactgc

SEQ ID NO: 942921 - DNA, 15 bp, Homo sapiens
tgaatagaaagactg

SEQ ID NO: 942922 - DNA, 15 bp, Homo sapiens
atgaatagaaagact

SEQ ID NO: 942923 - DNA, 15 bp, Homo sapiens
aatgaatagaaagac

SEQ ID NO: 942924 - DNA, 15 bp, Homo sapiens
aaatgaatagaaaga

SEQ ID NO: 942925 - DNA, 15 bp, Homo sapiens
gaaatgaatagaaag

SEQ ID NO: 942926 - DNA, 15 bp, Homo sapiens
agaaatgaatagaaa

SEQ ID NO: 942927 - DNA, 15 bp, Homo sapiens
gagaaatgaatagaa

SEQ ID NO: 942928 - DNA, 15 bp, Homo sapiens
agagaaatgaataga

SEQ ID NO: 942929 - DNA, 15 bp, Homo sapiens
cagagaaatgaatag

SEQ ID NO: 942930 - DNA, 15 bp, Homo sapiens
ccagagaaatgaata

SEQ ID NO: 942931 - DNA, 15 bp, Homo sapiens
tccagagaaatgaat

SEQ ID NO: 942932 - DNA, 15 bp, Homo sapiens
ttccagagaaatgaa

SEQ ID NO: 942933 - DNA, 15 bp, Homo sapiens
tttccagagaaatga

SEQ ID NO: 942934 - DNA, 15 bp, Homo sapiens
ttttccagagaaatg

SEQ ID NO: 942935 - DNA, 15 bp, Homo sapiens
cttttccagagaaat

SEQ ID NO: 942936 - DNA, 15 bp, Homo sapiens
acttttccagagaaa

SEQ ID NO: 942937 - DNA, 15 bp, Homo sapiens
aacttttccagagaa

SEQ ID NO: 942938 - DNA, 15 bp, Homo sapiens
aaacttttccagaga

SEQ ID NO: 942939 - DNA, 15 bp, Homo sapiens
caaacttttccagag

SEQ ID NO: 942940 - DNA, 15 bp, Homo sapiens
ccaaacttttccaga

SEQ ID NO: 942941 - DNA, 15 bp, Homo sapiens
tccaaacttttccag

SEQ ID NO: 942942 - DNA, 15 bp, Homo sapiens
atccaaacttttcca

SEQ ID NO: 942943 - DNA, 15 bp, Homo sapiens
tatccaaacttttcc

SEQ ID NO: 942944 - DNA, 15 bp, Homo sapiens
atatccaaacttttc

SEQ ID NO: 942945 - DNA, 15 bp, Homo sapiens
aatatccaaactttt

SEQ ID NO: 942946 - DNA, 15 bp, Homo sapiens
caatatccaaacttt

SEQ ID NO: 942947 - DNA, 15 bp, Homo sapiens
acaatatccaaactt

SEQ ID NO: 942948 - DNA, 15 bp, Homo sapiens
tacaatatccaaact

SEQ ID NO: 942949 - DNA, 15 bp, Homo sapiens
ttacaatatccaaac

SEQ ID NO: 942950 - DNA, 15 bp, Homo sapiens
cttacaatatccaaa

SEQ ID NO: 942951 - DNA, 15 bp, Homo sapiens
gcttacaatatccaa

SEQ ID NO: 942952 - DNA, 15 bp, Homo sapiens
tgcttacaatatcca

SEQ ID NO: 942953 - DNA, 15 bp, Homo sapiens
atgcttacaatatcc

SEQ ID NO: 942954 - DNA, 15 bp, Homo sapiens
aatgcttacaatatc

SEQ ID NO: 942955 - DNA, 15 bp, Homo sapiens
taatgcttacaatat

SEQ ID NO: 942956 - DNA, 15 bp, Homo sapiens
ataatgcttacaata

SEQ ID NO: 942957 - DNA, 15 bp, Homo sapiens
aataatgcttacaat

SEQ ID NO: 942958 - DNA, 15 bp, Homo sapiens
aaataatgcttacaa

SEQ ID NO: 942959 - DNA, 15 bp, Homo sapiens
aaaataatgcttaca

SEQ ID NO: 942960 - DNA, 15 bp, Homo sapiens
aaaaataatgcttac

SEQ ID NO: 942961 - DNA, 15 bp, Homo sapiens
gaaaaataatgctta

SEQ ID NO: 942962 - DNA, 15 bp, Homo sapiens
agaaaaataatgctt

SEQ ID NO: 942963 - DNA, 15 bp, Homo sapiens
aagaaaaataatgct

SEQ ID NO: 942964 - DNA, 15 bp, Homo sapiens
aaagaaaaataatgc

SEQ ID NO: 942965 - DNA, 15 bp, Homo sapiens
taaagaaaaataatg

SEQ ID NO: 942966 - DNA, 15 bp, Homo sapiens
ctaaagaaaaataat

SEQ ID NO: 942967 - DNA, 15 bp, Homo sapiens
cctaaagaaaaataa

SEQ ID NO: 942968 - DNA, 15 bp, Homo sapiens
acctaaagaaaaata

SEQ ID NO: 942969 - DNA, 15 bp, Homo sapiens
tacctaaagaaaaat

SEQ ID NO: 942970 - DNA, 15 bp, Homo sapiens
atacctaaagaaaaa

SEQ ID NO: 942971 - DNA, 15 bp, Homo sapiens
catacctaaagaaaa

SEQ ID NO: 942972 - DNA, 15 bp, Homo sapiens
tcatacctaaagaaa

SEQ ID NO: 942973 - DNA, 15 bp, Homo sapiens
atcatacctaaagaa

SEQ ID NO: 942974 - DNA, 15 bp, Homo sapiens
catcatacctaaaga

SEQ ID NO: 942975 - DNA, 15 bp, Homo sapiens
tcatcatacctaaag

SEQ ID NO: 942976 - DNA, 15 bp, Homo sapiens
ttcatcatacctaaa

SEQ ID NO: 942977 - DNA, 15 bp, Homo sapiens
gttcatcatacctaa

SEQ ID NO: 942978 - DNA, 15 bp, Homo sapiens
ggttcatcataccta

SEQ ID NO: 942979 - DNA, 15 bp, Homo sapiens
aggttcatcatacct

SEQ ID NO: 942980 - DNA, 15 bp, Homo sapiens
caggttcatcatacc

SEQ ID NO: 942981 - DNA, 15 bp, Homo sapiens
gcaggttcatcatac

SEQ ID NO: 942982 - DNA, 15 bp, Homo sapiens
tgcaggttcatcata

SEQ ID NO: 942983 - DNA, 15 bp, Homo sapiens
ctgcaggttcatcat

SEQ ID NO: 942984 - DNA, 15 bp, Homo sapiens
tctgcaggttcatca

SEQ ID NO: 942985 - DNA, 15 bp, Homo sapiens
ttctgcaggttcatc

SEQ ID NO: 942986 - DNA, 15 bp, Homo sapiens
gttctgcaggttcat

SEQ ID NO: 942987 - DNA, 15 bp, Homo sapiens
agttctgcaggttca

SEQ ID NO: 942988 - DNA, 15 bp, Homo sapiens
cagttctgcaggttc

SEQ ID NO: 942989 - DNA, 15 bp, Homo sapiens
acagttctgcaggtt

SEQ ID NO: 942990 - DNA, 15 bp, Homo sapiens
aacagttctgcaggt

SEQ ID NO: 942991 - DNA, 15 bp, Homo sapiens
aaacagttctgcagg

SEQ ID NO: 942992 - DNA, 15 bp, Homo sapiens
caaacagttctgcag

SEQ ID NO: 942993 - DNA, 15 bp, Homo sapiens
ccaaacagttctgca

SEQ ID NO: 942994 - DNA, 15 bp, Homo sapiens
accaaacagttctgc

SEQ ID NO: 942995 - DNA, 15 bp, Homo sapiens
aaccaaacagttctg

SEQ ID NO: 942996 - DNA, 15 bp, Homo sapiens
gaaccaaacagttct

SEQ ID NO: 942997 - DNA, 15 bp, Homo sapiens
tgaaccaaacagttc

SEQ ID NO: 942998 - DNA, 15 bp, Homo sapiens
ttgaaccaaacagtt

SEQ ID NO: 942999 - DNA, 15 bp, Homo sapiens
attgaaccaaacagt

SEQ ID NO: 943000 - DNA, 15 bp, Homo sapiens
aattgaaccaaacag

SEQ ID NO: 943001 - DNA, 15 bp, Homo sapiens
taattgaaccaaaca

SEQ ID NO: 943002 - DNA, 15 bp, Homo sapiens
ataattgaaccaaac

SEQ ID NO: 943003 - DNA, 15 bp, Homo sapiens
cataattgaaccaaa

SEQ ID NO: 943004 - DNA, 15 bp, Homo sapiens
tcataattgaaccaa

SEQ ID NO: 943005 - DNA, 15 bp, Homo sapiens
ttcataattgaacca

SEQ ID NO: 943006 - DNA, 15 bp, Homo sapiens
attcataattgaacc

SEQ ID NO: 943007 - DNA, 15 bp, Homo sapiens
aattcataattgaac

SEQ ID NO: 943008 - DNA, 15 bp, Homo sapiens
aaattcataattgaa

SEQ ID NO: 943009 - DNA, 15 bp, Homo sapiens
aaaattcataattga

SEQ ID NO: 943010 - DNA, 15 bp, Homo sapiens
aaaaattcataattg

SEQ ID NO: 943011 - DNA, 15 bp, Homo sapiens
aaaaaattcataatt

SEQ ID NO: 943012 - DNA, 15 bp, Homo sapiens
aaaaaaattcataat

SEQ ID NO: 943013 - DNA, 15 bp, Homo sapiens
aaaaaaaattcataa

SEQ ID NO: 943014 - DNA, 15 bp, Homo sapiens
aaaaaaaaattcata

SEQ ID NO: 943015 - DNA, 15 bp, Homo sapiens
aaaaaaaaaattcat

SEQ ID NO: 943016 - DNA, 15 bp, Homo sapiens
gaaaaaaaaaattca

SEQ ID NO: 943017 - DNA, 15 bp, Homo sapiens
agaaaaaaaaaattc

SEQ ID NO: 943018 - DNA, 15 bp, Homo sapiens
cagaaaaaaaaaatt

SEQ ID NO: 943019 - DNA, 15 bp, Homo sapiens
ccagaaaaaaaaaat

SEQ ID NO: 943020 - DNA, 15 bp, Homo sapiens
tccagaaaaaaaaaa

SEQ ID NO: 943021 - DNA, 15 bp, Homo sapiens
ctccagaaaaaaaaa

SEQ ID NO: 943022 - DNA, 15 bp, Homo sapiens
actccagaaaaaaaa

SEQ ID NO: 943023 - DNA, 15 bp, Homo sapiens
gactccagaaaaaaa

SEQ ID NO: 943024 - DNA, 15 bp, Homo sapiens
agactccagaaaaaa

SEQ ID NO: 943025 - DNA, 15 bp, Homo sapiens
cagactccagaaaaa

SEQ ID NO: 943026 - DNA, 15 bp, Homo sapiens
acagactccagaaaa

SEQ ID NO: 943027 - DNA, 15 bp, Homo sapiens
tacagactccagaaa

SEQ ID NO: 943028 - DNA, 15 bp, Homo sapiens
atacagactccagaa

SEQ ID NO: 943029 - DNA, 15 bp, Homo sapiens
aatacagactccaga

SEQ ID NO: 943030 - DNA, 15 bp, Homo sapiens
aaatacagactccag

SEQ ID NO: 943031 - DNA, 15 bp, Homo sapiens
aaaatacagactcca

SEQ ID NO: 943032 - DNA, 15 bp, Homo sapiens
aaaaatacagactcc

SEQ ID NO: 943033 - DNA, 15 bp, Homo sapiens
aaaaaatacagactc

SEQ ID NO: 943034 - DNA, 15 bp, Homo sapiens
aaaaaaatacagact

SEQ ID NO: 943035 - DNA, 15 bp, Homo sapiens
caaaaaaatacagac

SEQ ID NO: 943036 - DNA, 15 bp, Homo sapiens
tcaaaaaaatacaga

SEQ ID NO: 943037 - DNA, 15 bp, Homo sapiens
ttcaaaaaaatacag

SEQ ID NO: 943038 - DNA, 15 bp, Homo sapiens
gttcaaaaaaataca

SEQ ID NO: 943039 - DNA, 15 bp, Homo sapiens
agttcaaaaaaatac

SEQ ID NO: 943040 - DNA, 15 bp, Homo sapiens
tagttcaaaaaaata

SEQ ID NO: 943041 - DNA, 15 bp, Homo sapiens
atagttcaaaaaaat

SEQ ID NO: 943042 - DNA, 15 bp, Homo sapiens
aatagttcaaaaaaa

SEQ ID NO: 943043 - DNA, 15 bp, Homo sapiens
taatagttcaaaaaa

SEQ ID NO: 943044 - DNA, 15 bp, Homo sapiens
ttaatagttcaaaaa

SEQ ID NO: 943045 - DNA, 15 bp, Homo sapiens
attaatagttcaaaa

SEQ ID NO: 943046 - DNA, 15 bp, Homo sapiens
gattaatagttcaaa

SEQ ID NO: 943047 - DNA, 15 bp, Homo sapiens
tgattaatagttcaa

SEQ ID NO: 943048 - DNA, 15 bp, Homo sapiens
atgattaatagttca

SEQ ID NO: 943049 - DNA, 15 bp, Homo sapiens
aatgattaatagttc

SEQ ID NO: 943050 - DNA, 15 bp, Homo sapiens
aaatgattaatagtt

SEQ ID NO: 943051 - DNA, 15 bp, Homo sapiens
gaaatgattaatagt

SEQ ID NO: 943052 - DNA, 15 bp, Homo sapiens
agaaatgattaatag

SEQ ID NO: 943053 - DNA, 15 bp, Homo sapiens
aagaaatgattaata

SEQ ID NO: 943054 - DNA, 15 bp, Homo sapiens
aaagaaatgattaat

SEQ ID NO: 943055 - DNA, 15 bp, Homo sapiens
taaagaaatgattaa

SEQ ID NO: 943056 - DNA, 15 bp, Homo sapiens
ttaaagaaatgatta

SEQ ID NO: 943057 - DNA, 15 bp, Homo sapiens
attaaagaaatgatt

SEQ ID NO: 943058 - DNA, 15 bp, Homo sapiens
cattaaagaaatgat

SEQ ID NO: 943059 - DNA, 15 bp, Homo sapiens
tcattaaagaaatga

SEQ ID NO: 943060 - DNA, 15 bp, Homo sapiens
atcattaaagaaatg

SEQ ID NO: 943061 - DNA, 15 bp, Homo sapiens
aatcattaaagaaat

SEQ ID NO: 943062 - DNA, 15 bp, Homo sapiens
taatcattaaagaaa

SEQ ID NO: 943063 - DNA, 15 bp, Homo sapiens
ataatcattaaagaa

SEQ ID NO: 943064 - DNA, 15 bp, Homo sapiens
tataatcattaaaga

SEQ ID NO: 943065 - DNA, 15 bp, Homo sapiens
ttataatcattaaag

SEQ ID NO: 943066 - DNA, 15 bp, Homo sapiens
tttataatcattaaa

SEQ ID NO: 943067 - DNA, 15 bp, Homo sapiens
atttataatcattaa

SEQ ID NO: 943068 - DNA, 15 bp, Homo sapiens
gatttataatcatta

SEQ ID NO: 943069 - DNA, 15 bp, Homo sapiens
agatttataatcatt

SEQ ID NO: 943070 - DNA, 15 bp, Homo sapiens
tagatttataatcat

SEQ ID NO: 943071 - DNA, 15 bp, Homo sapiens
atagatttataatca

SEQ ID NO: 943072 - DNA, 15 bp, Homo sapiens
aatagatttataatc

SEQ ID NO: 943073 - DNA, 15 bp, Homo sapiens
gaatagatttataat

SEQ ID NO: 943074 - DNA, 15 bp, Homo sapiens
tgaatagatttataa

SEQ ID NO: 943075 - DNA, 15 bp, Homo sapiens
ctgaatagatttata

SEQ ID NO: 943076 - DNA, 15 bp, Homo sapiens
tctgaatagatttat

SEQ ID NO: 943077 - DNA, 15 bp, Homo sapiens
atctgaatagattta

SEQ ID NO: 943078 - DNA, 15 bp, Homo sapiens
aatctgaatagattt

SEQ ID NO: 943079 - DNA, 15 bp, Homo sapiens
aaatctgaatagatt

SEQ ID NO: 943080 - DNA, 15 bp, Homo sapiens
aaaatctgaatagat

SEQ ID NO: 943081 - DNA, 15 bp, Homo sapiens
aaaaatctgaataga

SEQ ID NO: 943082 - DNA, 15 bp, Homo sapiens
taaaaatctgaatag

SEQ ID NO: 943083 - DNA, 15 bp, Homo sapiens
gtaaaaatctgaata

SEQ ID NO: 943084 - DNA, 15 bp, Homo sapiens
tgtaaaaatctgaat

SEQ ID NO: 943085 - DNA, 15 bp, Homo sapiens
ttgtaaaaatctgaa

SEQ ID NO: 943086 - DNA, 15 bp, Homo sapiens
cttgtaaaaatctga

SEQ ID NO: 943087 - DNA, 15 bp, Homo sapiens
gcttgtaaaaatctg

SEQ ID NO: 943088 - DNA, 15 bp, Homo sapiens
agcttgtaaaaatct

SEQ ID NO: 943089 - DNA, 15 bp, Homo sapiens
aagcttgtaaaaatc

SEQ ID NO: 943090 - DNA, 15 bp, Homo sapiens
aaagcttgtaaaaat

SEQ ID NO: 943091 - DNA, 15 bp, Homo sapiens
taaagcttgtaaaaa

SEQ ID NO: 943092 - DNA, 15 bp, Homo sapiens
ataaagcttgtaaaa

SEQ ID NO: 943093 - DNA, 15 bp, Homo sapiens
gataaagcttgtaaa

SEQ ID NO: 943094 - DNA, 15 bp, Homo sapiens
ggataaagcttgtaa

SEQ ID NO: 943095 - DNA, 15 bp, Homo sapiens
gggataaagcttgta

SEQ ID NO: 943096 - DNA, 15 bp, Homo sapiens
agggataaagcttgt

SEQ ID NO: 943097 - DNA, 15 bp, Homo sapiens
gagggataaagcttg

SEQ ID NO: 943098 - DNA, 15 bp, Homo sapiens
agagggataaagctt

SEQ ID NO: 943099 - DNA, 15 bp, Homo sapiens
gagagggataaagct

SEQ ID NO: 943100 - DNA, 15 bp, Homo sapiens
ggagagggataaagc

SEQ ID NO: 943101 - DNA, 15 bp, Homo sapiens
gggagagggataaag

SEQ ID NO: 943102 - DNA, 15 bp, Homo sapiens
tgggagagggataaa

SEQ ID NO: 943103 - DNA, 15 bp, Homo sapiens
atgggagagggataa

SEQ ID NO: 943104 - DNA, 15 bp, Homo sapiens
gatgggagagggata

SEQ ID NO: 943105 - DNA, 15 bp, Homo sapiens
tgatgggagagggat

SEQ ID NO: 943106 - DNA, 15 bp, Homo sapiens
atgatgggagaggga

SEQ ID NO: 943107 - DNA, 15 bp, Homo sapiens
tatgatgggagaggg

SEQ ID NO: 943108 - DNA, 15 bp, Homo sapiens
gtatgatgggagagg

SEQ ID NO: 943109 - DNA, 15 bp, Homo sapiens
tgtatgatgggagag

SEQ ID NO: 943110 - DNA, 15 bp, Homo sapiens
gtgtatgatgggaga

SEQ ID NO: 943111 - DNA, 15 bp, Homo sapiens
agtgtatgatgggag

SEQ ID NO: 943112 - DNA, 15 bp, Homo sapiens
tagtgtatgatggga

SEQ ID NO: 943113 - DNA, 15 bp, Homo sapiens
atagtgtatgatggg

SEQ ID NO: 943114 - DNA, 15 bp, Homo sapiens
aatagtgtatgatgg

SEQ ID NO: 943115 - DNA, 15 bp, Homo sapiens
aaatagtgtatgatg

SEQ ID NO: 943116 - DNA, 15 bp, Homo sapiens
aaaatagtgtatgat

SEQ ID NO: 943117 - DNA, 15 bp, Homo sapiens
aaaaatagtgtatga

SEQ ID NO: 943118 - DNA, 15 bp, Homo sapiens
gaaaaatagtgtatg

SEQ ID NO: 943119 - DNA, 15 bp, Homo sapiens
agaaaaatagtgtat

SEQ ID NO: 943120 - DNA, 15 bp, Homo sapiens
aagaaaaatagtgta

SEQ ID NO: 943121 - DNA, 15 bp, Homo sapiens
taagaaaaatagtgt

SEQ ID NO: 943122 - DNA, 15 bp, Homo sapiens
gtaagaaaaatagtg

SEQ ID NO: 943123 - DNA, 15 bp, Homo sapiens
ggtaagaaaaatagt

SEQ ID NO: 943124 - DNA, 15 bp, Homo sapiens
gggtaagaaaaatag

SEQ ID NO: 943125 - DNA, 15 bp, Homo sapiens
tgggtaagaaaaata

SEQ ID NO: 943126 - DNA, 15 bp, Homo sapiens
atgggtaagaaaaat

SEQ ID NO: 943127 - DNA, 15 bp, Homo sapiens
catgggtaagaaaaa

SEQ ID NO: 943128 - DNA, 15 bp, Homo sapiens
gcatgggtaagaaaa

SEQ ID NO: 943129 - DNA, 15 bp, Homo sapiens
agcatgggtaagaaa

SEQ ID NO: 943130 - DNA, 15 bp, Homo sapiens
aagcatgggtaagaa

SEQ ID NO: 943131 - DNA, 15 bp, Homo sapiens
aaagcatgggtaaga

SEQ ID NO: 943132 - DNA, 15 bp, Homo sapiens
aaaagcatgggtaag

SEQ ID NO: 943133 - DNA, 15 bp, Homo sapiens
caaaagcatgggtaa

SEQ ID NO: 943134 - DNA, 15 bp, Homo sapiens
gcaaaagcatgggta

SEQ ID NO: 943135 - DNA, 15 bp, Homo sapiens
tgcaaaagcatgggt

SEQ ID NO: 943136 - DNA, 15 bp, Homo sapiens
gtgcaaaagcatggg

SEQ ID NO: 943137 - DNA, 15 bp, Homo sapiens
tgtgcaaaagcatgg

SEQ ID NO: 943138 - DNA, 15 bp, Homo sapiens
ttgtgcaaaagcatg

SEQ ID NO: 943139 - DNA, 15 bp, Homo sapiens
attgtgcaaaagcat

SEQ ID NO: 943140 - DNA, 15 bp, Homo sapiens
aattgtgcaaaagca

SEQ ID NO: 943141 - DNA, 15 bp, Homo sapiens
aaattgtgcaaaagc

SEQ ID NO: 943142 - DNA, 15 bp, Homo sapiens
aaaattgtgcaaaag

SEQ ID NO: 943143 - DNA, 15 bp, Homo sapiens
aaaaattgtgcaaaa

SEQ ID NO: 943144 - DNA, 15 bp, Homo sapiens
aaaaaattgtgcaaa

SEQ ID NO: 943145 - DNA, 15 bp, Homo sapiens
gaaaaaattgtgcaa

SEQ ID NO: 943146 - DNA, 15 bp, Homo sapiens
ggaaaaaattgtgca

SEQ ID NO: 943147 - DNA, 15 bp, Homo sapiens
aggaaaaaattgtgc

SEQ ID NO: 943148 - DNA, 15 bp, Homo sapiens
gaggaaaaaattgtg

SEQ ID NO: 943149 - DNA, 15 bp, Homo sapiens
agaggaaaaaattgt

SEQ ID NO: 943150 - DNA, 15 bp, Homo sapiens
gagaggaaaaaattg

SEQ ID NO: 943151 - DNA, 15 bp, Homo sapiens
ggagaggaaaaaatt

SEQ ID NO: 943152 - DNA, 15 bp, Homo sapiens
gggagaggaaaaaat

SEQ ID NO: 943153 - DNA, 15 bp, Homo sapiens
agggagaggaaaaaa

SEQ ID NO: 943154 - DNA, 15 bp, Homo sapiens
aagggagaggaaaaa

SEQ ID NO: 943155 - DNA, 15 bp, Homo sapiens
taagggagaggaaaa

SEQ ID NO: 943156 - DNA, 15 bp, Homo sapiens
ctaagggagaggaaa

SEQ ID NO: 943157 - DNA, 15 bp, Homo sapiens
actaagggagaggaa

SEQ ID NO: 943158 - DNA, 15 bp, Homo sapiens
cactaagggagagga

SEQ ID NO: 943159 - DNA, 15 bp, Homo sapiens
acactaagggagagg

SEQ ID NO: 943160 - DNA, 15 bp, Homo sapiens
aacactaagggagag

SEQ ID NO: 943161 - DNA, 15 bp, Homo sapiens
aaacactaagggaga

SEQ ID NO: 943162 - DNA, 15 bp, Homo sapiens
aaaacactaagggag

SEQ ID NO: 943163 - DNA, 15 bp, Homo sapiens
gaaaacactaaggga

SEQ ID NO: 943164 - DNA, 15 bp, Homo sapiens
ggaaaacactaaggg

SEQ ID NO: 943165 - DNA, 15 bp, Homo sapiens
aggaaaacactaagg

SEQ ID NO: 943166 - DNA, 15 bp, Homo sapiens
taggaaaacactaag

SEQ ID NO: 943167 - DNA, 15 bp, Homo sapiens
gtaggaaaacactaa

SEQ ID NO: 943168 - DNA, 15 bp, Homo sapiens
ggtaggaaaacacta

SEQ ID NO: 943169 - DNA, 15 bp, Homo sapiens
aggtaggaaaacact

SEQ ID NO: 943170 - DNA, 15 bp, Homo sapiens
taggtaggaaaacac

SEQ ID NO: 943171 - DNA, 15 bp, Homo sapiens
ctaggtaggaaaaca

SEQ ID NO: 943172 - DNA, 15 bp, Homo sapiens
tctaggtaggaaaac

SEQ ID NO: 943173 - DNA, 15 bp, Homo sapiens
atctaggtaggaaaa

SEQ ID NO: 943174 - DNA, 15 bp, Homo sapiens
tatctaggtaggaaa

SEQ ID NO: 943175 - DNA, 15 bp, Homo sapiens
gtatctaggtaggaa

SEQ ID NO: 943176 - DNA, 15 bp, Homo sapiens
ggtatctaggtagga

SEQ ID NO: 943177 - DNA, 15 bp, Homo sapiens
aggtatctaggtagg

SEQ ID NO: 943178 - DNA, 15 bp, Homo sapiens
gaggtatctaggtag

SEQ ID NO: 943179 - DNA, 15 bp, Homo sapiens
ggaggtatctaggta

SEQ ID NO: 943180 - DNA, 15 bp, Homo sapiens
aggaggtatctaggt

SEQ ID NO: 943181 - DNA, 15 bp, Homo sapiens
taggaggtatctagg

SEQ ID NO: 943182 - DNA, 15 bp, Homo sapiens
ataggaggtatctag

SEQ ID NO: 943183 - DNA, 15 bp, Homo sapiens
cataggaggtatcta

SEQ ID NO: 943184 - DNA, 15 bp, Homo sapiens
acataggaggtatct

SEQ ID NO: 943185 - DNA, 15 bp, Homo sapiens
cacataggaggtatc

SEQ ID NO: 943186 - DNA, 15 bp, Homo sapiens
acacataggaggtat

SEQ ID NO: 943187 - DNA, 15 bp, Homo sapiens
cacacataggaggta

SEQ ID NO: 943188 - DNA, 15 bp, Homo sapiens
acacacataggaggt

SEQ ID NO: 943189 - DNA, 15 bp, Homo sapiens
gacacacataggagg

SEQ ID NO: 943190 - DNA, 15 bp, Homo sapiens
agacacacataggag

SEQ ID NO: 943191 - DNA, 15 bp, Homo sapiens
cagacacacatagga

SEQ ID NO: 943192 - DNA, 15 bp, Homo sapiens
acagacacacatagg

SEQ ID NO: 943193 - DNA, 15 bp, Homo sapiens
cacagacacacatag

SEQ ID NO: 943194 - DNA, 15 bp, Homo sapiens
acacagacacacata

SEQ ID NO: 943195 - DNA, 15 bp, Homo sapiens
tacacagacacacat

SEQ ID NO: 943196 - DNA, 15 bp, Homo sapiens
atacacagacacaca

SEQ ID NO: 943197 - DNA, 15 bp, Homo sapiens
catacacagacacac

SEQ ID NO: 943198 - DNA, 15 bp, Homo sapiens
acatacacagacaca

SEQ ID NO: 943199 - DNA, 15 bp, Homo sapiens
cacatacacagacac

SEQ ID NO: 943200 - DNA, 15 bp, Homo sapiens
tcacatacacagaca

SEQ ID NO: 943201 - DNA, 15 bp, Homo sapiens
ctcacatacacagac

SEQ ID NO: 943202 - DNA, 15 bp, Homo sapiens
tctcacatacacaga

SEQ ID NO: 943203 - DNA, 15 bp, Homo sapiens
ttctcacatacacag

SEQ ID NO: 943204 - DNA, 15 bp, Homo sapiens
tttctcacatacaca

SEQ ID NO: 943205 - DNA, 15 bp, Homo sapiens
ttttctcacatacac

SEQ ID NO: 943206 - DNA, 15 bp, Homo sapiens
cttttctcacataca

SEQ ID NO: 943207 - DNA, 15 bp, Homo sapiens
gcttttctcacatac

SEQ ID NO: 943208 - DNA, 15 bp, Homo sapiens
agcttttctcacata

SEQ ID NO: 943209 - DNA, 15 bp, Homo sapiens
aagcttttctcacat

SEQ ID NO: 943210 - DNA, 15 bp, Homo sapiens
aaagcttttctcaca

SEQ ID NO: 943211 - DNA, 15 bp, Homo sapiens
aaaagcttttctcac

SEQ ID NO: 943212 - DNA, 15 bp, Homo sapiens
aaaaagcttttctca

SEQ ID NO: 943213 - DNA, 15 bp, Homo sapiens
taaaaagcttttctc

SEQ ID NO: 943214 - DNA, 15 bp, Homo sapiens
ataaaaagcttttct

SEQ ID NO: 943215 - DNA, 15 bp, Homo sapiens
aataaaaagcttttc

SEQ ID NO: 943216 - DNA, 15 bp, Homo sapiens
aaataaaaagctttt

SEQ ID NO: 943217 - DNA, 15 bp, Homo sapiens
caaataaaaagcttt

SEQ ID NO: 943218 - DNA, 15 bp, Homo sapiens
gcaaataaaaagctt

SEQ ID NO: 943219 - DNA, 15 bp, Homo sapiens
ggcaaataaaaagct

SEQ ID NO: 943220 - DNA, 15 bp, Homo sapiens
tggcaaataaaaagc

SEQ ID NO: 943221 - DNA, 15 bp, Homo sapiens
atggcaaataaaaag

SEQ ID NO: 943222 - DNA, 15 bp, Homo sapiens
gatggcaaataaaaa

SEQ ID NO: 943223 - DNA, 15 bp, Homo sapiens
agatggcaaataaaa

SEQ ID NO: 943224 - DNA, 15 bp, Homo sapiens
aagatggcaaataaa

SEQ ID NO: 943225 - DNA, 15 bp, Homo sapiens
aaagatggcaaataa

SEQ ID NO: 943226 - DNA, 15 bp, Homo sapiens
taaagatggcaaata

SEQ ID NO: 943227 - DNA, 15 bp, Homo sapiens
ataaagatggcaaat

SEQ ID NO: 943228 - DNA, 15 bp, Homo sapiens
tataaagatggcaaa

SEQ ID NO: 943229 - DNA, 15 bp, Homo sapiens
atataaagatggcaa

SEQ ID NO: 943230 - DNA, 15 bp, Homo sapiens
aatataaagatggca

SEQ ID NO: 943231 - DNA, 15 bp, Homo sapiens
aaatataaagatggc

SEQ ID NO: 943232 - DNA, 15 bp, Homo sapiens
gaaatataaagatgg

SEQ ID NO: 943233 - DNA, 15 bp, Homo sapiens
agaaatataaagatg

SEQ ID NO: 943234 - DNA, 15 bp, Homo sapiens
tagaaatataaagat

SEQ ID NO: 943235 - DNA, 15 bp, Homo sapiens
ttagaaatataaaga

SEQ ID NO: 943236 - DNA, 15 bp, Homo sapiens
cttagaaatataaag

SEQ ID NO: 943237 - DNA, 15 bp, Homo sapiens
tcttagaaatataaa

SEQ ID NO: 943238 - DNA, 15 bp, Homo sapiens
ttcttagaaatataa

SEQ ID NO: 943239 - DNA, 15 bp, Homo sapiens
attcttagaaatata

SEQ ID NO: 943240 - DNA, 15 bp, Homo sapiens
tattcttagaaatat

SEQ ID NO: 943241 - DNA, 15 bp, Homo sapiens
atattcttagaaata

SEQ ID NO: 943242 - DNA, 15 bp, Homo sapiens
gatattcttagaaat

SEQ ID NO: 943243 - DNA, 15 bp, Homo sapiens
agatattcttagaaa

SEQ ID NO: 943244 - DNA, 15 bp, Homo sapiens
tagatattcttagaa

SEQ ID NO: 943245 - DNA, 15 bp, Homo sapiens
ctagatattcttaga

SEQ ID NO: 943246 - DNA, 15 bp, Homo sapiens
actagatattcttag

SEQ ID NO: 943247 - DNA, 15 bp, Homo sapiens
tactagatattctta

SEQ ID NO: 943248 - DNA, 15 bp, Homo sapiens
ttactagatattctt

SEQ ID NO: 943249 - DNA, 15 bp, Homo sapiens
attactagatattct

SEQ ID NO: 943250 - DNA, 15 bp, Homo sapiens
tattactagatattc

SEQ ID NO: 943251 - DNA, 15 bp, Homo sapiens
gtattactagatatt

SEQ ID NO: 943252 - DNA, 15 bp, Homo sapiens
tgtattactagatat

SEQ ID NO: 943253 - DNA, 15 bp, Homo sapiens
ctgtattactagata

SEQ ID NO: 943254 - DNA, 15 bp, Homo sapiens
tctgtattactagat

SEQ ID NO: 943255 - DNA, 15 bp, Homo sapiens
ttctgtattactaga

SEQ ID NO: 943256 - DNA, 15 bp, Homo sapiens
attctgtattactag

SEQ ID NO: 943257 - DNA, 15 bp, Homo sapiens
aattctgtattacta

SEQ ID NO: 943258 - DNA, 15 bp, Homo sapiens
aaattctgtattact

SEQ ID NO: 943259 - DNA, 15 bp, Homo sapiens
aaaattctgtattac

SEQ ID NO: 943260 - DNA, 15 bp, Homo sapiens
taaaattctgtatta

SEQ ID NO: 943261 - DNA, 15 bp, Homo sapiens
ataaaattctgtatt

SEQ ID NO: 943262 - DNA, 15 bp, Homo sapiens
tataaaattctgtat

SEQ ID NO: 943263 - DNA, 15 bp, Homo sapiens
atataaaattctgta

SEQ ID NO: 943264 - DNA, 15 bp, Homo sapiens
aatataaaattctgt

SEQ ID NO: 943265 - DNA, 15 bp, Homo sapiens
gaatataaaattctg

SEQ ID NO: 943266 - DNA, 15 bp, Homo sapiens
agaatataaaattct

SEQ ID NO: 943267 - DNA, 15 bp, Homo sapiens
cagaatataaaattc

SEQ ID NO: 943268 - DNA, 15 bp, Homo sapiens
tcagaatataaaatt

SEQ ID NO: 943269 - DNA, 15 bp, Homo sapiens
ttcagaatataaaat

SEQ ID NO: 943270 - DNA, 15 bp, Homo sapiens
cttcagaatataaaa

SEQ ID NO: 943271 - DNA, 15 bp, Homo sapiens
tcttcagaatataaa

SEQ ID NO: 943272 - DNA, 15 bp, Homo sapiens
ttcttcagaatataa

SEQ ID NO: 943273 - DNA, 15 bp, Homo sapiens
attcttcagaatata

SEQ ID NO: 943274 - DNA, 15 bp, Homo sapiens
aattcttcagaatat

SEQ ID NO: 943275 - DNA, 15 bp, Homo sapiens
aaattcttcagaata

SEQ ID NO: 943276 - DNA, 15 bp, Homo sapiens
aaaattcttcagaat

SEQ ID NO: 943277 - DNA, 15 bp, Homo sapiens
taaaattcttcagaa

SEQ ID NO: 943278 - DNA, 15 bp, Homo sapiens
gtaaaattcttcaga

SEQ ID NO: 943279 - DNA, 15 bp, Homo sapiens
agtaaaattcttcag

SEQ ID NO: 943280 - DNA, 15 bp, Homo sapiens
aagtaaaattcttca

SEQ ID NO: 943281 - DNA, 15 bp, Homo sapiens
aaagtaaaattcttc

SEQ ID NO: 943282 - DNA, 15 bp, Homo sapiens
caaagtaaaattctt

SEQ ID NO: 943283 - DNA, 15 bp, Homo sapiens
gcaaagtaaaattct

SEQ ID NO: 943284 - DNA, 15 bp, Homo sapiens
tgcaaagtaaaattc

SEQ ID NO: 943285 - DNA, 15 bp, Homo sapiens
atgcaaagtaaaatt

SEQ ID NO: 943286 - DNA, 15 bp, Homo sapiens
aatgcaaagtaaaat

SEQ ID NO: 943287 - DNA, 15 bp, Homo sapiens
aaatgcaaagtaaaa

SEQ ID NO: 943288 - DNA, 15 bp, Homo sapiens
aaaatgcaaagtaaa

SEQ ID NO: 943289 - DNA, 15 bp, Homo sapiens
gaaaatgcaaagtaa

SEQ ID NO: 943290 - DNA, 15 bp, Homo sapiens
agaaaatgcaaagta

SEQ ID NO: 943291 - DNA, 15 bp, Homo sapiens
aagaaaatgcaaagt

SEQ ID NO: 943292 - DNA, 15 bp, Homo sapiens
taagaaaatgcaaag

SEQ ID NO: 943293 - DNA, 15 bp, Homo sapiens
ataagaaaatgcaaa

SEQ ID NO: 943294 - DNA, 15 bp, Homo sapiens
aataagaaaatgcaa

SEQ ID NO: 943295 - DNA, 15 bp, Homo sapiens
aaataagaaaatgca

SEQ ID NO: 943296 - DNA, 15 bp, Homo sapiens
aaaataagaaaatgc

SEQ ID NO: 943297 - DNA, 15 bp, Homo sapiens
caaaataagaaaatg

SEQ ID NO: 943298 - DNA, 15 bp, Homo sapiens
acaaaataagaaaat

SEQ ID NO: 943299 - DNA, 15 bp, Homo sapiens
cacaaaataagaaaa

SEQ ID NO: 943300 - DNA, 15 bp, Homo sapiens
tcacaaaataagaaa

SEQ ID NO: 943301 - DNA, 15 bp, Homo sapiens
atcacaaaataagaa

SEQ ID NO: 943302 - DNA, 15 bp, Homo sapiens
aatcacaaaataaga

SEQ ID NO: 943303 - DNA, 15 bp, Homo sapiens
caatcacaaaataag

SEQ ID NO: 943304 - DNA, 15 bp, Homo sapiens
tcaatcacaaaataa

SEQ ID NO: 943305 - DNA, 15 bp, Homo sapiens
ttcaatcacaaaata

SEQ ID NO: 943306 - DNA, 15 bp, Homo sapiens
tttcaatcacaaaat

SEQ ID NO: 943307 - DNA, 15 bp, Homo sapiens
ttttcaatcacaaaa

SEQ ID NO: 943308 - DNA, 15 bp, Homo sapiens
tttttcaatcacaaa

SEQ ID NO: 943309 - DNA, 15 bp, Homo sapiens
ttttttcaatcacaa

SEQ ID NO: 943310 - DNA, 15 bp, Homo sapiens
cttttttcaatcaca

SEQ ID NO: 943311 - DNA, 15 bp, Homo sapiens
ccttttttcaatcac

SEQ ID NO: 943312 - DNA, 15 bp, Homo sapiens
accttttttcaatca

SEQ ID NO: 943313 - DNA, 15 bp, Homo sapiens
taccttttttcaatc

SEQ ID NO: 943314 - DNA, 15 bp, Homo sapiens
ataccttttttcaat

SEQ ID NO: 943315 - DNA, 15 bp, Homo sapiens
aataccttttttcaa

SEQ ID NO: 943316 - DNA, 15 bp, Homo sapiens
taataccttttttca

SEQ ID NO: 943317 - DNA, 15 bp, Homo sapiens
ttaataccttttttc

SEQ ID NO: 943318 - DNA, 15 bp, Homo sapiens
attaatacctttttt

SEQ ID NO: 943319 - DNA, 15 bp, Homo sapiens
aattaataccttttt

SEQ ID NO: 943320 - DNA, 15 bp, Homo sapiens
aaattaatacctttt

SEQ ID NO: 943321 - DNA, 15 bp, Homo sapiens
aaaattaataccttt

SEQ ID NO: 943322 - DNA, 15 bp, Homo sapiens
taaaattaatacctt

SEQ ID NO: 943323 - DNA, 15 bp, Homo sapiens
ttaaaattaatacct

SEQ ID NO: 943324 - DNA, 15 bp, Homo sapiens
tttaaaattaatacc

SEQ ID NO: 943325 - DNA, 15 bp, Homo sapiens
ttttaaaattaatac

SEQ ID NO: 943326 - DNA, 15 bp, Homo sapiens
attttaaaattaata

SEQ ID NO: 943327 - DNA, 15 bp, Homo sapiens
cattttaaaattaat

SEQ ID NO: 943328 - DNA, 15 bp, Homo sapiens
ccattttaaaattaa

SEQ ID NO: 943329 - DNA, 15 bp, Homo sapiens
accattttaaaatta

SEQ ID NO: 943330 - DNA, 15 bp, Homo sapiens
gaccattttaaaatt

SEQ ID NO: 943331 - DNA, 15 bp, Homo sapiens
tgaccattttaaaat

SEQ ID NO: 943332 - DNA, 15 bp, Homo sapiens
ttgaccattttaaaa

SEQ ID NO: 943333 - DNA, 15 bp, Homo sapiens
tttgaccattttaaa

SEQ ID NO: 943334 - DNA, 15 bp, Homo sapiens
atttgaccattttaa

SEQ ID NO: 943335 - DNA, 15 bp, Homo sapiens
gatttgaccatttta

SEQ ID NO: 943336 - DNA, 15 bp, Homo sapiens
tgatttgaccatttt

SEQ ID NO: 943337 - DNA, 15 bp, Homo sapiens
ctgatttgaccattt

SEQ ID NO: 943338 - DNA, 15 bp, Homo sapiens
cctgatttgaccatt

SEQ ID NO: 943339 - DNA, 15 bp, Homo sapiens
gcctgatttgaccat

SEQ ID NO: 943340 - DNA, 15 bp, Homo sapiens
agcctgatttgacca

SEQ ID NO: 943341 - DNA, 15 bp, Homo sapiens
gagcctgatttgacc

SEQ ID NO: 943342 - DNA, 15 bp, Homo sapiens
ggagcctgatttgac

SEQ ID NO: 943343 - DNA, 15 bp, Homo sapiens
tggagcctgatttga

SEQ ID NO: 943344 - DNA, 15 bp, Homo sapiens
atggagcctgatttg

SEQ ID NO: 943345 - DNA, 15 bp, Homo sapiens
gatggagcctgattt

SEQ ID NO: 943346 - DNA, 15 bp, Homo sapiens
ggatggagcctgatt

SEQ ID NO: 943347 - DNA, 15 bp, Homo sapiens
aggatggagcctgat

SEQ ID NO: 943348 - DNA, 15 bp, Homo sapiens
aaggatggagcctga

SEQ ID NO: 943349 - DNA, 15 bp, Homo sapiens
caaggatggagcctg

SEQ ID NO: 943350 - DNA, 15 bp, Homo sapiens
ccaaggatggagcct

SEQ ID NO: 943351 - DNA, 15 bp, Homo sapiens
tccaaggatggagcc

SEQ ID NO: 943352 - DNA, 15 bp, Homo sapiens
ttccaaggatggagc

SEQ ID NO: 943353 - DNA, 15 bp, Homo sapiens
tttccaaggatggag

SEQ ID NO: 943354 - DNA, 15 bp, Homo sapiens
ttttccaaggatgga

SEQ ID NO: 943355 - DNA, 15 bp, Homo sapiens
attttccaaggatgg

SEQ ID NO: 943356 - DNA, 15 bp, Homo sapiens
tattttccaaggatg

SEQ ID NO: 943357 - DNA, 15 bp, Homo sapiens
gtattttccaaggat

SEQ ID NO: 943358 - DNA, 15 bp, Homo sapiens
ggtattttccaagga

SEQ ID NO: 943359 - DNA, 15 bp, Homo sapiens
gggtattttccaagg

SEQ ID NO: 943360 - DNA, 15 bp, Homo sapiens
tgggtattttccaag

SEQ ID NO: 943361 - DNA, 15 bp, Homo sapiens
ttgggtattttccaa

SEQ ID NO: 943362 - DNA, 15 bp, Homo sapiens
tttgggtattttcca

SEQ ID NO: 943363 - DNA, 15 bp, Homo sapiens
atttgggtattttcc

SEQ ID NO: 943364 - DNA, 15 bp, Homo sapiens
gatttgggtattttc

SEQ ID NO: 943365 - DNA, 15 bp, Homo sapiens
ggatttgggtatttt

SEQ ID NO: 943366 - DNA, 15 bp, Homo sapiens
aggatttgggtattt

SEQ ID NO: 943367 - DNA, 15 bp, Homo sapiens
aaggatttgggtatt

SEQ ID NO: 943368 - DNA, 15 bp, Homo sapiens
aaaggatttgggtat

SEQ ID NO: 943369 - DNA, 15 bp, Homo sapiens
taaaggatttgggta

SEQ ID NO: 943370 - DNA, 15 bp, Homo sapiens
ataaaggatttgggt

SEQ ID NO: 943371 - DNA, 15 bp, Homo sapiens
aataaaggatttggg

SEQ ID NO: 943372 - DNA, 15 bp, Homo sapiens
aaataaaggatttgg

SEQ ID NO: 943373 - DNA, 15 bp, Homo sapiens
aaaataaaggatttg

SEQ ID NO: 943374 - DNA, 15 bp, Homo sapiens
caaaataaaggattt

SEQ ID NO: 943375 - DNA, 15 bp, Homo sapiens
tcaaaataaaggatt

SEQ ID NO: 943376 - DNA, 15 bp, Homo sapiens
atcaaaataaaggat

SEQ ID NO: 943377 - DNA, 15 bp, Homo sapiens
aatcaaaataaagga

SEQ ID NO: 943378 - DNA, 15 bp, Homo sapiens
caatcaaaataaagg

SEQ ID NO: 943379 - DNA, 15 bp, Homo sapiens
ccaatcaaaataaag

SEQ ID NO: 943380 - DNA, 15 bp, Homo sapiens
cccaatcaaaataaa

SEQ ID NO: 943381 - DNA, 15 bp, Homo sapiens
gcccaatcaaaataa

SEQ ID NO: 943382 - DNA, 15 bp, Homo sapiens
ggcccaatcaaaata

SEQ ID NO: 943383 - DNA, 15 bp, Homo sapiens
tggcccaatcaaaat

SEQ ID NO: 943384 - DNA, 15 bp, Homo sapiens
atggcccaatcaaaa

SEQ ID NO: 943385 - DNA, 15 bp, Homo sapiens
gatggcccaatcaaa

SEQ ID NO: 943386 - DNA, 15 bp, Homo sapiens
agatggcccaatcaa

SEQ ID NO: 943387 - DNA, 15 bp, Homo sapiens
cagatggcccaatca

SEQ ID NO: 943388 - DNA, 15 bp, Homo sapiens
acagatggcccaatc

SEQ ID NO: 943389 - DNA, 15 bp, Homo sapiens
aacagatggcccaat

SEQ ID NO: 943390 - DNA, 15 bp, Homo sapiens
taacagatggcccaa

SEQ ID NO: 943391 - DNA, 15 bp, Homo sapiens
ttaacagatggccca

SEQ ID NO: 943392 - DNA, 15 bp, Homo sapiens
attaacagatggccc

SEQ ID NO: 943393 - DNA, 15 bp, Homo sapiens
aattaacagatggcc

SEQ ID NO: 943394 - DNA, 15 bp, Homo sapiens
taattaacagatggc

SEQ ID NO: 943395 - DNA, 15 bp, Homo sapiens
ctaattaacagatgg

SEQ ID NO: 943396 - DNA, 15 bp, Homo sapiens
cctaattaacagatg

SEQ ID NO: 943397 - DNA, 15 bp, Homo sapiens
ccctaattaacagat

SEQ ID NO: 943398 - DNA, 15 bp, Homo sapiens
tccctaattaacaga

SEQ ID NO: 943399 - DNA, 15 bp, Homo sapiens
atccctaattaacag

SEQ ID NO: 943400 - DNA, 15 bp, Homo sapiens
tatccctaattaaca

SEQ ID NO: 943401 - DNA, 15 bp, Homo sapiens
gtatccctaattaac

SEQ ID NO: 943402 - DNA, 15 bp, Homo sapiens
ggtatccctaattaa

SEQ ID NO: 943403 - DNA, 15 bp, Homo sapiens
aggtatccctaatta

SEQ ID NO: 943404 - DNA, 15 bp, Homo sapiens
aaggtatccctaatt

SEQ ID NO: 943405 - DNA, 15 bp, Homo sapiens
taaggtatccctaat

SEQ ID NO: 943406 - DNA, 15 bp, Homo sapiens
ataaggtatccctaa

SEQ ID NO: 943407 - DNA, 15 bp, Homo sapiens
gataaggtatcccta

SEQ ID NO: 943408 - DNA, 15 bp, Homo sapiens
agataaggtatccct

SEQ ID NO: 943409 - DNA, 15 bp, Homo sapiens
gagataaggtatccc

SEQ ID NO: 943410 - DNA, 15 bp, Homo sapiens
agagataaggtatcc

SEQ ID NO: 943411 - DNA, 15 bp, Homo sapiens
aagagataaggtatc

SEQ ID NO: 943412 - DNA, 15 bp, Homo sapiens
caagagataaggtat

SEQ ID NO: 943413 - DNA, 15 bp, Homo sapiens
gcaagagataaggta

SEQ ID NO: 943414 - DNA, 15 bp, Homo sapiens
ggcaagagataaggt

SEQ ID NO: 943415 - DNA, 15 bp, Homo sapiens
tggcaagagataagg

SEQ ID NO: 943416 - DNA, 15 bp, Homo sapiens
gtggcaagagataag

SEQ ID NO: 943417 - DNA, 15 bp, Homo sapiens
ggtggcaagagataa

SEQ ID NO: 943418 - DNA, 15 bp, Homo sapiens
tggtggcaagagata

SEQ ID NO: 943419 - DNA, 15 bp, Homo sapiens
gtggtggcaagagat

SEQ ID NO: 943420 - DNA, 15 bp, Homo sapiens
agtggtggcaagaga

SEQ ID NO: 943421 - DNA, 15 bp, Homo sapiens
aagtggtggcaagag

SEQ ID NO: 943422 - DNA, 15 bp, Homo sapiens
aaagtggtggcaaga

SEQ ID NO: 943423 - DNA, 15 bp, Homo sapiens
aaaagtggtggcaag

SEQ ID NO: 943424 - DNA, 15 bp, Homo sapiens
aaaaagtggtggcaa

SEQ ID NO: 943425 - DNA, 15 bp, Homo sapiens
taaaaagtggtggca

SEQ ID NO: 943426 - DNA, 15 bp, Homo sapiens
ttaaaaagtggtggc

SEQ ID NO: 943427 - DNA, 15 bp, Homo sapiens
attaaaaagtggtgg

SEQ ID NO: 943428 - DNA, 15 bp, Homo sapiens
cattaaaaagtggtg

SEQ ID NO: 943429 - DNA, 15 bp, Homo sapiens
gcattaaaaagtggt

SEQ ID NO: 943430 - DNA, 15 bp, Homo sapiens
agcattaaaaagtgg

SEQ ID NO: 943431 - DNA, 15 bp, Homo sapiens
tagcattaaaaagtg

SEQ ID NO: 943432 - DNA, 15 bp, Homo sapiens
ttagcattaaaaagt

SEQ ID NO: 943433 - DNA, 15 bp, Homo sapiens
tttagcattaaaaag

SEQ ID NO: 943434 - DNA, 15 bp, Homo sapiens
atttagcattaaaaa

SEQ ID NO: 943435 - DNA, 15 bp, Homo sapiens
tatttagcattaaaa

SEQ ID NO: 943436 - DNA, 15 bp, Homo sapiens
ttatttagcattaaa

SEQ ID NO: 943437 - DNA, 15 bp, Homo sapiens
tttatttagcattaa

SEQ ID NO: 943438 - DNA, 15 bp, Homo sapiens
atttatttagcatta

SEQ ID NO: 943439 - DNA, 15 bp, Homo sapiens
tatttatttagcatt

SEQ ID NO: 943440 - DNA, 15 bp, Homo sapiens
atatttatttagcat

SEQ ID NO: 943441 - DNA, 15 bp, Homo sapiens
catatttatttagca

SEQ ID NO: 943442 - DNA, 15 bp, Homo sapiens
acatatttatttagc

SEQ ID NO: 943443 - DNA, 15 bp, Homo sapiens
tacatatttatttag

SEQ ID NO: 943444 - DNA, 15 bp, Homo sapiens
ctacatatttattta

SEQ ID NO: 943445 - DNA, 15 bp, Homo sapiens
gctacatatttattt

SEQ ID NO: 943446 - DNA, 15 bp, Homo sapiens
agctacatatttatt

SEQ ID NO: 943447 - DNA, 15 bp, Homo sapiens
tagctacatatttat

SEQ ID NO: 943448 - DNA, 15 bp, Homo sapiens
ttagctacatattta

SEQ ID NO: 943449 - DNA, 15 bp, Homo sapiens
tttagctacatattt

SEQ ID NO: 943450 - DNA, 15 bp, Homo sapiens
ttttagctacatatt

SEQ ID NO: 943451 - DNA, 15 bp, Homo sapiens
gttttagctacatat

SEQ ID NO: 943452 - DNA, 15 bp, Homo sapiens
agttttagctacata

SEQ ID NO: 943453 - DNA, 15 bp, Homo sapiens
aagttttagctacat

SEQ ID NO: 943454 - DNA, 15 bp, Homo sapiens
aaagttttagctaca

SEQ ID NO: 943455 - DNA, 15 bp, Homo sapiens
caaagttttagctac

SEQ ID NO: 943456 - DNA, 15 bp, Homo sapiens
tcaaagttttagcta

SEQ ID NO: 943457 - DNA, 15 bp, Homo sapiens
gtcaaagttttagct

SEQ ID NO: 943458 - DNA, 15 bp, Homo sapiens
agtcaaagttttagc

SEQ ID NO: 943459 - DNA, 15 bp, Homo sapiens
tagtcaaagttttag

SEQ ID NO: 943460 - DNA, 15 bp, Homo sapiens
ctagtcaaagtttta

SEQ ID NO: 943461 - DNA, 15 bp, Homo sapiens
tctagtcaaagtttt

SEQ ID NO: 943462 - DNA, 15 bp, Homo sapiens
ttctagtcaaagttt

SEQ ID NO: 943463 - DNA, 15 bp, Homo sapiens
cttctagtcaaagtt

SEQ ID NO: 943464 - DNA, 15 bp, Homo sapiens
tcttctagtcaaagt

SEQ ID NO: 943465 - DNA, 15 bp, Homo sapiens
ttcttctagtcaaag

SEQ ID NO: 943466 - DNA, 15 bp, Homo sapiens
tttcttctagtcaaa

SEQ ID NO: 943467 - DNA, 15 bp, Homo sapiens
gtttcttctagtcaa

SEQ ID NO: 943468 - DNA, 15 bp, Homo sapiens
tgtttcttctagtca

SEQ ID NO: 943469 - DNA, 15 bp, Homo sapiens
ctgtttcttctagtc

SEQ ID NO: 943470 - DNA, 15 bp, Homo sapiens
actgtttcttctagt

SEQ ID NO: 943471 - DNA, 15 bp, Homo sapiens
tactgtttcttctag

SEQ ID NO: 943472 - DNA, 15 bp, Homo sapiens
ttactgtttcttcta

SEQ ID NO: 943473 - DNA, 15 bp, Homo sapiens
tttactgtttcttct

SEQ ID NO: 943474 - DNA, 15 bp, Homo sapiens
ttttactgtttcttc

SEQ ID NO: 943475 - DNA, 15 bp, Homo sapiens
attttactgtttctt

SEQ ID NO: 943476 - DNA, 15 bp, Homo sapiens
tattttactgtttct

SEQ ID NO: 943477 - DNA, 15 bp, Homo sapiens
ttattttactgtttc

SEQ ID NO: 943478 - DNA, 15 bp, Homo sapiens
cttattttactgttt

SEQ ID NO: 943479 - DNA, 15 bp, Homo sapiens
tcttattttactgtt

SEQ ID NO: 943480 - DNA, 15 bp, Homo sapiens
atcttattttactgt

SEQ ID NO: 943481 - DNA, 15 bp, Homo sapiens
tatcttattttactg

SEQ ID NO: 943482 - DNA, 15 bp, Homo sapiens
atatcttattttact

SEQ ID NO: 943483 - DNA, 15 bp, Homo sapiens
aatatcttattttac

SEQ ID NO: 943484 - DNA, 15 bp, Homo sapiens
gaatatcttatttta

SEQ ID NO: 943485 - DNA, 15 bp, Homo sapiens
agaatatcttatttt

SEQ ID NO: 943486 - DNA, 15 bp, Homo sapiens
aagaatatcttattt

SEQ ID NO: 943487 - DNA, 15 bp, Homo sapiens
caagaatatcttatt

SEQ ID NO: 943488 - DNA, 15 bp, Homo sapiens
gcaagaatatcttat

SEQ ID NO: 943489 - DNA, 15 bp, Homo sapiens
agcaagaatatctta

SEQ ID NO: 943490 - DNA, 15 bp, Homo sapiens
aagcaagaatatctt

SEQ ID NO: 943491 - DNA, 15 bp, Homo sapiens
taagcaagaatatct

SEQ ID NO: 943492 - DNA, 15 bp, Homo sapiens
ataagcaagaatatc

SEQ ID NO: 943493 - DNA, 15 bp, Homo sapiens
aataagcaagaatat

SEQ ID NO: 943494 - DNA, 15 bp, Homo sapiens
aaataagcaagaata

SEQ ID NO: 943495 - DNA, 15 bp, Homo sapiens
aaaataagcaagaat

SEQ ID NO: 943496 - DNA, 15 bp, Homo sapiens
aaaaataagcaagaa

SEQ ID NO: 943497 - DNA, 15 bp, Homo sapiens
taaaaataagcaaga

SEQ ID NO: 943498 - DNA, 15 bp, Homo sapiens
ctaaaaataagcaag

SEQ ID NO: 943499 - DNA, 15 bp, Homo sapiens
actaaaaataagcaa

SEQ ID NO: 943500 - DNA, 15 bp, Homo sapiens
tactaaaaataagca

SEQ ID NO: 943501 - DNA, 15 bp, Homo sapiens
gtactaaaaataagc

SEQ ID NO: 943502 - DNA, 15 bp, Homo sapiens
tgtactaaaaataag

SEQ ID NO: 943503 - DNA, 15 bp, Homo sapiens
ctgtactaaaaataa

SEQ ID NO: 943504 - DNA, 15 bp, Homo sapiens
actgtactaaaaata

SEQ ID NO: 943505 - DNA, 15 bp, Homo sapiens
aactgtactaaaaat

SEQ ID NO: 943506 - DNA, 15 bp, Homo sapiens
taactgtactaaaaa

SEQ ID NO: 943507 - DNA, 15 bp, Homo sapiens
ataactgtactaaaa

SEQ ID NO: 943508 - DNA, 15 bp, Homo sapiens
aataactgtactaaa

SEQ ID NO: 943509 - DNA, 15 bp, Homo sapiens
aaataactgtactaa

SEQ ID NO: 943510 - DNA, 15 bp, Homo sapiens
caaataactgtacta

SEQ ID NO: 943511 - DNA, 15 bp, Homo sapiens
tcaaataactgtact

SEQ ID NO: 943512 - DNA, 15 bp, Homo sapiens
ttcaaataactgtac

SEQ ID NO: 943513 - DNA, 15 bp, Homo sapiens
gttcaaataactgta

SEQ ID NO: 943514 - DNA, 15 bp, Homo sapiens
agttcaaataactgt

SEQ ID NO: 943515 - DNA, 15 bp, Homo sapiens
cagttcaaataactg

SEQ ID NO: 943516 - DNA, 15 bp, Homo sapiens
tcagttcaaataact

SEQ ID NO: 943517 - DNA, 15 bp, Homo sapiens
gtcagttcaaataac

SEQ ID NO: 943518 - DNA, 15 bp, Homo sapiens
agtcagttcaaataa

SEQ ID NO: 943519 - DNA, 15 bp, Homo sapiens
aagtcagttcaaata

SEQ ID NO: 943520 - DNA, 15 bp, Homo sapiens
aaagtcagttcaaat

SEQ ID NO: 943521 - DNA, 15 bp, Homo sapiens
aaaagtcagttcaaa

SEQ ID NO: 943522 - DNA, 15 bp, Homo sapiens
taaaagtcagttcaa

SEQ ID NO: 943523 - DNA, 15 bp, Homo sapiens
ttaaaagtcagttca

SEQ ID NO: 943524 - DNA, 15 bp, Homo sapiens
tttaaaagtcagttc

SEQ ID NO: 943525 - DNA, 15 bp, Homo sapiens
atttaaaagtcagtt

SEQ ID NO: 943526 - DNA, 15 bp, Homo sapiens
gatttaaaagtcagt

SEQ ID NO: 943527 - DNA, 15 bp, Homo sapiens
tgatttaaaagtcag

SEQ ID NO: 943528 - DNA, 15 bp, Homo sapiens
ctgatttaaaagtca

SEQ ID NO: 943529 - DNA, 15 bp, Homo sapiens
actgatttaaaagtc

SEQ ID NO: 943530 - DNA, 15 bp, Homo sapiens
cactgatttaaaagt

SEQ ID NO: 943531 - DNA, 15 bp, Homo sapiens
tcactgatttaaaag

SEQ ID NO: 943532 - DNA, 15 bp, Homo sapiens
gtcactgatttaaaa

SEQ ID NO: 943533 - DNA, 15 bp, Homo sapiens
tgtcactgatttaaa

SEQ ID NO: 943534 - DNA, 15 bp, Homo sapiens
atgtcactgatttaa

SEQ ID NO: 943535 - DNA, 15 bp, Homo sapiens
tatgtcactgattta

SEQ ID NO: 943536 - DNA, 15 bp, Homo sapiens
ttatgtcactgattt

SEQ ID NO: 943537 - DNA, 15 bp, Homo sapiens
tttatgtcactgatt

SEQ ID NO: 943538 - DNA, 15 bp, Homo sapiens
atttatgtcactgat

SEQ ID NO: 943539 - DNA, 15 bp, Homo sapiens
aatttatgtcactga

SEQ ID NO: 943540 - DNA, 15 bp, Homo sapiens
taatttatgtcactg

SEQ ID NO: 943541 - DNA, 15 bp, Homo sapiens
ataatttatgtcact

SEQ ID NO: 943542 - DNA, 15 bp, Homo sapiens
aataatttatgtcac

SEQ ID NO: 943543 - DNA, 15 bp, Homo sapiens
aaataatttatgtca

SEQ ID NO: 943544 - DNA, 15 bp, Homo sapiens
caaataatttatgtc

SEQ ID NO: 943545 - DNA, 15 bp, Homo sapiens
gcaaataatttatgt

SEQ ID NO: 943546 - DNA, 15 bp, Homo sapiens
ggcaaataatttatg

SEQ ID NO: 943547 - DNA, 15 bp, Homo sapiens
tggcaaataatttat

SEQ ID NO: 943548 - DNA, 15 bp, Homo sapiens
atggcaaataattta

SEQ ID NO: 943549 - DNA, 15 bp, Homo sapiens
catggcaaataattt

SEQ ID NO: 943550 - DNA, 15 bp, Homo sapiens
acatggcaaataatt

SEQ ID NO: 943551 - DNA, 15 bp, Homo sapiens
gacatggcaaataat

SEQ ID NO: 943552 - DNA, 15 bp, Homo sapiens
agacatggcaaataa

SEQ ID NO: 943553 - DNA, 15 bp, Homo sapiens
tagacatggcaaata

SEQ ID NO: 943554 - DNA, 15 bp, Homo sapiens
atagacatggcaaat

SEQ ID NO: 943555 - DNA, 15 bp, Homo sapiens
tatagacatggcaaa

SEQ ID NO: 943556 - DNA, 15 bp, Homo sapiens
gtatagacatggcaa

SEQ ID NO: 943557 - DNA, 15 bp, Homo sapiens
agtatagacatggca

SEQ ID NO: 943558 - DNA, 15 bp, Homo sapiens
aagtatagacatggc

SEQ ID NO: 943559 - DNA, 15 bp, Homo sapiens
aaagtatagacatgg

SEQ ID NO: 943560 - DNA, 15 bp, Homo sapiens
aaaagtatagacatg

SEQ ID NO: 943561 - DNA, 15 bp, Homo sapiens
aaaaagtatagacat

SEQ ID NO: 943562 - DNA, 15 bp, Homo sapiens
aaaaaagtatagaca

SEQ ID NO: 943563 - DNA, 15 bp, Homo sapiens
aaaaaaagtatagac

SEQ ID NO: 943564 - DNA, 15 bp, Homo sapiens
gaaaaaaagtataga

SEQ ID NO: 943565 - DNA, 15 bp, Homo sapiens
ggaaaaaaagtatag

SEQ ID NO: 943566 - DNA, 15 bp, Homo sapiens
aggaaaaaaagtata

SEQ ID NO: 943567 - DNA, 15 bp, Homo sapiens
aaggaaaaaaagtat

SEQ ID NO: 943568 - DNA, 15 bp, Homo sapiens
taaggaaaaaaagta

SEQ ID NO: 943569 - DNA, 15 bp, Homo sapiens
ataaggaaaaaaagt

SEQ ID NO: 943570 - DNA, 15 bp, Homo sapiens
tataaggaaaaaaag

SEQ ID NO: 943571 - DNA, 15 bp, Homo sapiens
gtataaggaaaaaaa

SEQ ID NO: 943572 - DNA, 15 bp, Homo sapiens
agtataaggaaaaaa

SEQ ID NO: 943573 - DNA, 15 bp, Homo sapiens
aagtataaggaaaaa

SEQ ID NO: 943574 - DNA, 15 bp, Homo sapiens
aaagtataaggaaaa

SEQ ID NO: 943575 - DNA, 15 bp, Homo sapiens
aaaagtataaggaaa

SEQ ID NO: 943576 - DNA, 15 bp, Homo sapiens
taaaagtataaggaa

SEQ ID NO: 943577 - DNA, 15 bp, Homo sapiens
ctaaaagtataagga

SEQ ID NO: 943578 - DNA, 15 bp, Homo sapiens
tctaaaagtataagg

SEQ ID NO: 943579 - DNA, 15 bp, Homo sapiens
ttctaaaagtataag

SEQ ID NO: 943580 - DNA, 15 bp, Homo sapiens
attctaaaagtataa

SEQ ID NO: 943581 - DNA, 15 bp, Homo sapiens
cattctaaaagtata

SEQ ID NO: 943582 - DNA, 15 bp, Homo sapiens
acattctaaaagtat

SEQ ID NO: 943583 - DNA, 15 bp, Homo sapiens
tacattctaaaagta

SEQ ID NO: 943584 - DNA, 15 bp, Homo sapiens
atacattctaaaagt

SEQ ID NO: 943585 - DNA, 15 bp, Homo sapiens
catacattctaaaag

SEQ ID NO: 943586 - DNA, 15 bp, Homo sapiens
tcatacattctaaaa

SEQ ID NO: 943587 - DNA, 15 bp, Homo sapiens
ttcatacattctaaa

SEQ ID NO: 943588 - DNA, 15 bp, Homo sapiens
tttcatacattctaa

SEQ ID NO: 943589 - DNA, 15 bp, Homo sapiens
gtttcatacattcta

SEQ ID NO: 943590 - DNA, 15 bp, Homo sapiens
ggtttcatacattct

SEQ ID NO: 943591 - DNA, 15 bp, Homo sapiens
tggtttcatacattc

SEQ ID NO: 943592 - DNA, 15 bp, Homo sapiens
ttggtttcatacatt

SEQ ID NO: 943593 - DNA, 15 bp, Homo sapiens
cttggtttcatacat

SEQ ID NO: 943594 - DNA, 15 bp, Homo sapiens
acttggtttcataca

SEQ ID NO: 943595 - DNA, 15 bp, Homo sapiens
aacttggtttcatac

SEQ ID NO: 943596 - DNA, 15 bp, Homo sapiens
taacttggtttcata

SEQ ID NO: 943597 - DNA, 15 bp, Homo sapiens
ttaacttggtttcat

SEQ ID NO: 943598 - DNA, 15 bp, Homo sapiens
tttaacttggtttca

SEQ ID NO: 943599 - DNA, 15 bp, Homo sapiens
ttttaacttggtttc

SEQ ID NO: 943600 - DNA, 15 bp, Homo sapiens
cttttaacttggttt

SEQ ID NO: 943601 - DNA, 15 bp, Homo sapiens
tcttttaacttggtt

SEQ ID NO: 943602 - DNA, 15 bp, Homo sapiens
ttcttttaacttggt

SEQ ID NO: 943603 - DNA, 15 bp, Homo sapiens
attcttttaacttgg

SEQ ID NO: 943604 - DNA, 15 bp, Homo sapiens
aattcttttaacttg

SEQ ID NO: 943605 - DNA, 15 bp, Homo sapiens
caattcttttaactt

SEQ ID NO: 943606 - DNA, 15 bp, Homo sapiens
ccaattcttttaact

SEQ ID NO: 943607 - DNA, 15 bp, Homo sapiens
tccaattcttttaac

SEQ ID NO: 943608 - DNA, 15 bp, Homo sapiens
ttccaattcttttaa

SEQ ID NO: 943609 - DNA, 15 bp, Homo sapiens
tttccaattctttta

SEQ ID NO: 943610 - DNA, 15 bp, Homo sapiens
gtttccaattctttt

SEQ ID NO: 943611 - DNA, 15 bp, Homo sapiens
agtttccaattcttt

SEQ ID NO: 943612 - DNA, 15 bp, Homo sapiens
cagtttccaattctt

SEQ ID NO: 943613 - DNA, 15 bp, Homo sapiens
tcagtttccaattct

SEQ ID NO: 943614 - DNA, 15 bp, Homo sapiens
atcagtttccaattc

SEQ ID NO: 943615 - DNA, 15 bp, Homo sapiens
tatcagtttccaatt

SEQ ID NO: 943616 - DNA, 15 bp, Homo sapiens
atatcagtttccaat

SEQ ID NO: 943617 - DNA, 15 bp, Homo sapiens
aatatcagtttccaa

SEQ ID NO: 943618 - DNA, 15 bp, Homo sapiens
caatatcagtttcca

SEQ ID NO: 943619 - DNA, 15 bp, Homo sapiens
gcaatatcagtttcc

SEQ ID NO: 943620 - DNA, 15 bp, Homo sapiens
ggcaatatcagtttc

SEQ ID NO: 943621 - DNA, 15 bp, Homo sapiens
tggcaatatcagttt

SEQ ID NO: 943622 - DNA, 15 bp, Homo sapiens
ttggcaatatcagtt

SEQ ID NO: 943623 - DNA, 15 bp, Homo sapiens
tttggcaatatcagt

SEQ ID NO: 943624 - DNA, 15 bp, Homo sapiens
ttttggcaatatcag

SEQ ID NO: 943625 - DNA, 15 bp, Homo sapiens
tttttggcaatatca

SEQ ID NO: 943626 - DNA, 15 bp, Homo sapiens
ttttttggcaatatc

SEQ ID NO: 943627 - DNA, 15 bp, Homo sapiens
tttttttggcaatat

SEQ ID NO: 943628 - DNA, 15 bp, Homo sapiens
ttttttttggcaata

SEQ ID NO: 943629 - DNA, 15 bp, Homo sapiens
attttttttggcaat

SEQ ID NO: 943630 - DNA, 15 bp, Homo sapiens
gattttttttggcaa

SEQ ID NO: 943631 - DNA, 15 bp, Homo sapiens
tgattttttttggca

SEQ ID NO: 943632 - DNA, 15 bp, Homo sapiens
ttgattttttttggc

SEQ ID NO: 943633 - DNA, 15 bp, Homo sapiens
tttgattttttttgg

SEQ ID NO: 943634 - DNA, 15 bp, Homo sapiens
ctttgattttttttg

SEQ ID NO: 943635 - DNA, 15 bp, Homo sapiens
gctttgatttttttt

SEQ ID NO: 943636 - DNA, 15 bp, Homo sapiens
tgctttgattttttt

SEQ ID NO: 943637 - DNA, 15 bp, Homo sapiens
atgctttgatttttt

SEQ ID NO: 943638 - DNA, 15 bp, Homo sapiens
aatgctttgattttt

SEQ ID NO: 943639 - DNA, 15 bp, Homo sapiens
taatgctttgatttt

SEQ ID NO: 943640 - DNA, 15 bp, Homo sapiens
gtaatgctttgattt

SEQ ID NO: 943641 - DNA, 15 bp, Homo sapiens
agtaatgctttgatt

SEQ ID NO: 943642 - DNA, 15 bp, Homo sapiens
cagtaatgctttgat

SEQ ID NO: 943643 - DNA, 15 bp, Homo sapiens
tcagtaatgctttga

SEQ ID NO: 943644 - DNA, 15 bp, Homo sapiens
gtcagtaatgctttg

SEQ ID NO: 943645 - DNA, 15 bp, Homo sapiens
ggtcagtaatgcttt

SEQ ID NO: 943646 - DNA, 15 bp, Homo sapiens
aggtcagtaatgctt

SEQ ID NO: 943647 - DNA, 15 bp, Homo sapiens
aaggtcagtaatgct

SEQ ID NO: 943648 - DNA, 15 bp, Homo sapiens
taaggtcagtaatgc

SEQ ID NO: 943649 - DNA, 15 bp, Homo sapiens
ttaaggtcagtaatg

SEQ ID NO: 943650 - DNA, 15 bp, Homo sapiens
tttaaggtcagtaat

SEQ ID NO: 943651 - DNA, 15 bp, Homo sapiens
gtttaaggtcagtaa

SEQ ID NO: 943652 - DNA, 15 bp, Homo sapiens
tgtttaaggtcagta

SEQ ID NO: 943653 - DNA, 15 bp, Homo sapiens
ctgtttaaggtcagt

SEQ ID NO: 943654 - DNA, 15 bp, Homo sapiens
gctgtttaaggtcag

SEQ ID NO: 943655 - DNA, 15 bp, Homo sapiens
agctgtttaaggtca

SEQ ID NO: 943656 - DNA, 15 bp, Homo sapiens
aagctgtttaaggtc

SEQ ID NO: 943657 - DNA, 15 bp, Homo sapiens
caagctgtttaaggt

SEQ ID NO: 943658 - DNA, 15 bp, Homo sapiens
acaagctgtttaagg

SEQ ID NO: 943659 - DNA, 15 bp, Homo sapiens
tacaagctgtttaag

SEQ ID NO: 943660 - DNA, 15 bp, Homo sapiens
ttacaagctgtttaa

SEQ ID NO: 943661 - DNA, 15 bp, Homo sapiens
tttacaagctgttta

SEQ ID NO: 943662 - DNA, 15 bp, Homo sapiens
ttttacaagctgttt

SEQ ID NO: 943663 - DNA, 15 bp, Homo sapiens
cttttacaagctgtt

SEQ ID NO: 943664 - DNA, 15 bp, Homo sapiens
tcttttacaagctgt

SEQ ID NO: 943665 - DNA, 15 bp, Homo sapiens
ttcttttacaagctg

SEQ ID NO: 943666 - DNA, 15 bp, Homo sapiens
cttcttttacaagct

SEQ ID NO: 943667 - DNA, 15 bp, Homo sapiens
gcttcttttacaagc

SEQ ID NO: 943668 - DNA, 15 bp, Homo sapiens
tgcttcttttacaag

SEQ ID NO: 943669 - DNA, 15 bp, Homo sapiens
ttgcttcttttacaa

SEQ ID NO: 943670 - DNA, 15 bp, Homo sapiens
gttgcttcttttaca

SEQ ID NO: 943671 - DNA, 15 bp, Homo sapiens
tgttgcttcttttac

SEQ ID NO: 943672 - DNA, 15 bp, Homo sapiens
ctgttgcttctttta

SEQ ID NO: 943673 - DNA, 15 bp, Homo sapiens
tctgttgcttctttt

SEQ ID NO: 943674 - DNA, 15 bp, Homo sapiens
ctctgttgcttcttt

SEQ ID NO: 943675 - DNA, 15 bp, Homo sapiens
tctctgttgcttctt

SEQ ID NO: 943676 - DNA, 15 bp, Homo sapiens
ctctctgttgcttct

SEQ ID NO: 943677 - DNA, 15 bp, Homo sapiens
tctctctgttgcttc

SEQ ID NO: 943678 - DNA, 15 bp, Homo sapiens
ctctctctgttgctt

SEQ ID NO: 943679 - DNA, 15 bp, Homo sapiens
tctctctctgttgct

SEQ ID NO: 943680 - DNA, 15 bp, Homo sapiens
ttctctctctgttgc

SEQ ID NO: 943681 - DNA, 15 bp, Homo sapiens
gttctctctctgttg

SEQ ID NO: 943682 - DNA, 15 bp, Homo sapiens
tgttctctctctgtt

SEQ ID NO: 943683 - DNA, 15 bp, Homo sapiens
ttgttctctctctgt

SEQ ID NO: 943684 - DNA, 15 bp, Homo sapiens
tttgttctctctctg

SEQ ID NO: 943685 - DNA, 15 bp, Homo sapiens
ttttgttctctctct

SEQ ID NO: 943686 - DNA, 15 bp, Homo sapiens
tttttgttctctctc

SEQ ID NO: 943687 - DNA, 15 bp, Homo sapiens
ctttttgttctctct

SEQ ID NO: 943688 - DNA, 15 bp, Homo sapiens
actttttgttctctc

SEQ ID NO: 943689 - DNA, 15 bp, Homo sapiens
aactttttgttctct

SEQ ID NO: 943690 - DNA, 15 bp, Homo sapiens
taactttttgttctc

SEQ ID NO: 943691 - DNA, 15 bp, Homo sapiens
ttaactttttgttct

SEQ ID NO: 943692 - DNA, 15 bp, Homo sapiens
gttaactttttgttc

SEQ ID NO: 943693 - DNA, 15 bp, Homo sapiens
tgttaactttttgtt

SEQ ID NO: 943694 - DNA, 15 bp, Homo sapiens
ttgttaactttttgt

SEQ ID NO: 943695 - DNA, 15 bp, Homo sapiens
tttgttaactttttg

SEQ ID NO: 943696 - DNA, 15 bp, Homo sapiens
atttgttaacttttt

SEQ ID NO: 943697 - DNA, 15 bp, Homo sapiens
tatttgttaactttt

SEQ ID NO: 943698 - DNA, 15 bp, Homo sapiens
gtatttgttaacttt

SEQ ID NO: 943699 - DNA, 15 bp, Homo sapiens
tgtatttgttaactt

SEQ ID NO: 943700 - DNA, 15 bp, Homo sapiens
ttgtatttgttaact

SEQ ID NO: 943701 - DNA, 15 bp, Homo sapiens
attgtatttgttaac

SEQ ID NO: 943702 - DNA, 15 bp, Homo sapiens
cattgtatttgttaa

SEQ ID NO: 943703 - DNA, 15 bp, Homo sapiens
tcattgtatttgtta

SEQ ID NO: 943704 - DNA, 15 bp, Homo sapiens
ttcattgtatttgtt

SEQ ID NO: 943705 - DNA, 15 bp, Homo sapiens
cttcattgtatttgt

SEQ ID NO: 943706 - DNA, 15 bp, Homo sapiens
tcttcattgtatttg

SEQ ID NO: 943707 - DNA, 15 bp, Homo sapiens
gtcttcattgtattt

SEQ ID NO: 943708 - DNA, 15 bp, Homo sapiens
ggtcttcattgtatt

SEQ ID NO: 943709 - DNA, 15 bp, Homo sapiens
aggtcttcattgtat

SEQ ID NO: 943710 - DNA, 15 bp, Homo sapiens
aaggtcttcattgta

SEQ ID NO: 943711 - DNA, 15 bp, Homo sapiens
caaggtcttcattgt

SEQ ID NO: 943712 - DNA, 15 bp, Homo sapiens
tcaaggtcttcattg

SEQ ID NO: 943713 - DNA, 15 bp, Homo sapiens
ttcaaggtcttcatt

SEQ ID NO: 943714 - DNA, 15 bp, Homo sapiens
gttcaaggtcttcat

SEQ ID NO: 943715 - DNA, 15 bp, Homo sapiens
tgttcaaggtcttca

SEQ ID NO: 943716 - DNA, 15 bp, Homo sapiens
ttgttcaaggtcttc

SEQ ID NO: 943717 - DNA, 15 bp, Homo sapiens
gttgttcaaggtctt

SEQ ID NO: 943718 - DNA, 15 bp, Homo sapiens
tgttgttcaaggtct

SEQ ID NO: 943719 - DNA, 15 bp, Homo sapiens
ctgttgttcaaggtc

SEQ ID NO: 943720 - DNA, 15 bp, Homo sapiens
cctgttgttcaaggt

SEQ ID NO: 943721 - DNA, 15 bp, Homo sapiens
acctgttgttcaagg

SEQ ID NO: 943722 - DNA, 15 bp, Homo sapiens
tacctgttgttcaag

SEQ ID NO: 943723 - DNA, 15 bp, Homo sapiens
ttacctgttgttcaa

SEQ ID NO: 943724 - DNA, 15 bp, Homo sapiens
cttacctgttgttca

SEQ ID NO: 943725 - DNA, 15 bp, Homo sapiens
acttacctgttgttc

SEQ ID NO: 943726 - DNA, 15 bp, Homo sapiens
tacttacctgttgtt

SEQ ID NO: 943727 - DNA, 15 bp, Homo sapiens
ttacttacctgttgt

SEQ ID NO: 943728 - DNA, 15 bp, Homo sapiens
gttacttacctgttg

SEQ ID NO: 943729 - DNA, 15 bp, Homo sapiens
cgttacttacctgtt

SEQ ID NO: 943730 - DNA, 15 bp, Homo sapiens
acgttacttacctgt

SEQ ID NO: 943731 - DNA, 15 bp, Homo sapiens
tacgttacttacctg

SEQ ID NO: 943732 - DNA, 15 bp, Homo sapiens
ttacgttacttacct

SEQ ID NO: 943733 - DNA, 15 bp, Homo sapiens
attacgttacttacc

SEQ ID NO: 943734 - DNA, 15 bp, Homo sapiens
aattacgttacttac

SEQ ID NO: 943735 - DNA, 15 bp, Homo sapiens
aaattacgttactta

SEQ ID NO: 943736 - DNA, 15 bp, Homo sapiens
aaaattacgttactt

SEQ ID NO: 943737 - DNA, 15 bp, Homo sapiens
aaaaattacgttact

SEQ ID NO: 943738 - DNA, 15 bp, Homo sapiens
gaaaaattacgttac

SEQ ID NO: 943739 - DNA, 15 bp, Homo sapiens
agaaaaattacgtta

SEQ ID NO: 943740 - DNA, 15 bp, Homo sapiens
aagaaaaattacgtt

SEQ ID NO: 943741 - DNA, 15 bp, Homo sapiens
aaagaaaaattacgt

SEQ ID NO: 943742 - DNA, 15 bp, Homo sapiens
taaagaaaaattacg

SEQ ID NO: 943743 - DNA, 15 bp, Homo sapiens
gtaaagaaaaattac

SEQ ID NO: 943744 - DNA, 15 bp, Homo sapiens
tgtaaagaaaaatta

SEQ ID NO: 943745 - DNA, 15 bp, Homo sapiens
atgtaaagaaaaatt

SEQ ID NO: 943746 - DNA, 15 bp, Homo sapiens
catgtaaagaaaaat

SEQ ID NO: 943747 - DNA, 15 bp, Homo sapiens
tcatgtaaagaaaaa

SEQ ID NO: 943748 - DNA, 15 bp, Homo sapiens
atcatgtaaagaaaa

SEQ ID NO: 943749 - DNA, 15 bp, Homo sapiens
tatcatgtaaagaaa

SEQ ID NO: 943750 - DNA, 15 bp, Homo sapiens
ttatcatgtaaagaa

SEQ ID NO: 943751 - DNA, 15 bp, Homo sapiens
tttatcatgtaaaga

SEQ ID NO: 943752 - DNA, 15 bp, Homo sapiens
ttttatcatgtaaag

SEQ ID NO: 943753 - DNA, 15 bp, Homo sapiens
attttatcatgtaaa

SEQ ID NO: 943754 - DNA, 15 bp, Homo sapiens
tattttatcatgtaa

SEQ ID NO: 943755 - DNA, 15 bp, Homo sapiens
ttattttatcatgta

SEQ ID NO: 943756 - DNA, 15 bp, Homo sapiens
attattttatcatgt

SEQ ID NO: 943757 - DNA, 15 bp, Homo sapiens
cattattttatcatg

SEQ ID NO: 943758 - DNA, 15 bp, Homo sapiens
gcattattttatcat

SEQ ID NO: 943759 - DNA, 15 bp, Homo sapiens
tgcattattttatca

SEQ ID NO: 943760 - DNA, 15 bp, Homo sapiens
atgcattattttatc

SEQ ID NO: 943761 - DNA, 15 bp, Homo sapiens
tatgcattattttat

SEQ ID NO: 943762 - DNA, 15 bp, Homo sapiens
ttatgcattatttta

SEQ ID NO: 943763 - DNA, 15 bp, Homo sapiens
attatgcattatttt

SEQ ID NO: 943764 - DNA, 15 bp, Homo sapiens
tattatgcattattt

SEQ ID NO: 943765 - DNA, 15 bp, Homo sapiens
atattatgcattatt

SEQ ID NO: 943766 - DNA, 15 bp, Homo sapiens
gatattatgcattat

SEQ ID NO: 943767 - DNA, 15 bp, Homo sapiens
cgatattatgcatta

SEQ ID NO: 943768 - DNA, 15 bp, Homo sapiens
gcgatattatgcatt

SEQ ID NO: 943769 - DNA, 15 bp, Homo sapiens
tgcgatattatgcat

SEQ ID NO: 943770 - DNA, 15 bp, Homo sapiens
ttgcgatattatgca

SEQ ID NO: 943771 - DNA, 15 bp, Homo sapiens
cttgcgatattatgc

SEQ ID NO: 943772 - DNA, 15 bp, Homo sapiens
tcttgcgatattatg

SEQ ID NO: 943773 - DNA, 15 bp, Homo sapiens
atcttgcgatattat

SEQ ID NO: 943774 - DNA, 15 bp, Homo sapiens
catcttgcgatatta

SEQ ID NO: 943775 - DNA, 15 bp, Homo sapiens
acatcttgcgatatt

SEQ ID NO: 943776 - DNA, 15 bp, Homo sapiens
aacatcttgcgatat

SEQ ID NO: 943777 - DNA, 15 bp, Homo sapiens
gaacatcttgcgata

SEQ ID NO: 943778 - DNA, 15 bp, Homo sapiens
ggaacatcttgcgat

SEQ ID NO: 943779 - DNA, 15 bp, Homo sapiens
aggaacatcttgcga

SEQ ID NO: 943780 - DNA, 15 bp, Homo sapiens
aaggaacatcttgcg

SEQ ID NO: 943781 - DNA, 15 bp, Homo sapiens
caaggaacatcttgc

SEQ ID NO: 943782 - DNA, 15 bp, Homo sapiens
gcaaggaacatcttg

SEQ ID NO: 943783 - DNA, 15 bp, Homo sapiens
tgcaaggaacatctt

SEQ ID NO: 943784 - DNA, 15 bp, Homo sapiens
atgcaaggaacatct

SEQ ID NO: 943785 - DNA, 15 bp, Homo sapiens
aatgcaaggaacatc

SEQ ID NO: 943786 - DNA, 15 bp, Homo sapiens
caatgcaaggaacat

SEQ ID NO: 943787 - DNA, 15 bp, Homo sapiens
acaatgcaaggaaca

SEQ ID NO: 943788 - DNA, 15 bp, Homo sapiens
gacaatgcaaggaac

SEQ ID NO: 943789 - DNA, 15 bp, Homo sapiens
agacaatgcaaggaa

SEQ ID NO: 943790 - DNA, 15 bp, Homo sapiens
aagacaatgcaagga

SEQ ID NO: 943791 - DNA, 15 bp, Homo sapiens
taagacaatgcaagg

SEQ ID NO: 943792 - DNA, 15 bp, Homo sapiens
ataagacaatgcaag

SEQ ID NO: 943793 - DNA, 15 bp, Homo sapiens
tataagacaatgcaa

SEQ ID NO: 943794 - DNA, 15 bp, Homo sapiens
atataagacaatgca

SEQ ID NO: 943795 - DNA, 15 bp, Homo sapiens
tatataagacaatgc

SEQ ID NO: 943796 - DNA, 15 bp, Homo sapiens
ctatataagacaatg

SEQ ID NO: 943797 - DNA, 15 bp, Homo sapiens
tctatataagacaat

SEQ ID NO: 943798 - DNA, 15 bp, Homo sapiens
atctatataagacaa

SEQ ID NO: 943799 - DNA, 15 bp, Homo sapiens
tatctatataagaca

SEQ ID NO: 943800 - DNA, 15 bp, Homo sapiens
ttatctatataagac

SEQ ID NO: 943801 - DNA, 15 bp, Homo sapiens
tttatctatataaga

SEQ ID NO: 943802 - DNA, 15 bp, Homo sapiens
ttttatctatataag

SEQ ID NO: 943803 - DNA, 15 bp, Homo sapiens
tttttatctatataa

SEQ ID NO: 943804 - DNA, 15 bp, Homo sapiens
atttttatctatata

SEQ ID NO: 943805 - DNA, 15 bp, Homo sapiens
catttttatctatat

SEQ ID NO: 943806 - DNA, 15 bp, Homo sapiens
ccatttttatctata

SEQ ID NO: 943807 - DNA, 15 bp, Homo sapiens
tccatttttatctat

SEQ ID NO: 943808 - DNA, 15 bp, Homo sapiens
gtccatttttatcta

SEQ ID NO: 943809 - DNA, 15 bp, Homo sapiens
agtccatttttatct

SEQ ID NO: 943810 - DNA, 15 bp, Homo sapiens
gagtccatttttatc

SEQ ID NO: 943811 - DNA, 15 bp, Homo sapiens
agagtccatttttat

SEQ ID NO: 943812 - DNA, 15 bp, Homo sapiens
tagagtccattttta

SEQ ID NO: 943813 - DNA, 15 bp, Homo sapiens
atagagtccattttt

SEQ ID NO: 943814 - DNA, 15 bp, Homo sapiens
aatagagtccatttt

SEQ ID NO: 943815 - DNA, 15 bp, Homo sapiens
taatagagtccattt

SEQ ID NO: 943816 - DNA, 15 bp, Homo sapiens
ttaatagagtccatt

SEQ ID NO: 943817 - DNA, 15 bp, Homo sapiens
cttaatagagtccat

SEQ ID NO: 943818 - DNA, 15 bp, Homo sapiens
tcttaatagagtcca

SEQ ID NO: 943819 - DNA, 15 bp, Homo sapiens
ttcttaatagagtcc

SEQ ID NO: 943820 - DNA, 15 bp, Homo sapiens
cttcttaatagagtc

SEQ ID NO: 943821 - DNA, 15 bp, Homo sapiens
tcttcttaatagagt

SEQ ID NO: 943822 - DNA, 15 bp, Homo sapiens
gtcttcttaatagag

SEQ ID NO: 943823 - DNA, 15 bp, Homo sapiens
ggtcttcttaataga

SEQ ID NO: 943824 - DNA, 15 bp, Homo sapiens
gggtcttcttaatag

SEQ ID NO: 943825 - DNA, 15 bp, Homo sapiens
tgggtcttcttaata

SEQ ID NO: 943826 - DNA, 15 bp, Homo sapiens
atgggtcttcttaat

SEQ ID NO: 943827 - DNA, 15 bp, Homo sapiens
gatgggtcttcttaa

SEQ ID NO: 943828 - DNA, 15 bp, Homo sapiens
agatgggtcttctta

SEQ ID NO: 943829 - DNA, 15 bp, Homo sapiens
tagatgggtcttctt

SEQ ID NO: 943830 - DNA, 15 bp, Homo sapiens
ttagatgggtcttct

SEQ ID NO: 943831 - DNA, 15 bp, Homo sapiens
gttagatgggtcttc

SEQ ID NO: 943832 - DNA, 15 bp, Homo sapiens
agttagatgggtctt

SEQ ID NO: 943833 - DNA, 15 bp, Homo sapiens
cagttagatgggtct

SEQ ID NO: 943834 - DNA, 15 bp, Homo sapiens
tcagttagatgggtc

SEQ ID NO: 943835 - DNA, 15 bp, Homo sapiens
ttcagttagatgggt

SEQ ID NO: 943836 - DNA, 15 bp, Homo sapiens
cttcagttagatggg

SEQ ID NO: 943837 - DNA, 15 bp, Homo sapiens
ccttcagttagatgg

SEQ ID NO: 943838 - DNA, 15 bp, Homo sapiens
cccttcagttagatg

SEQ ID NO: 943839 - DNA, 15 bp, Homo sapiens
gcccttcagttagat

SEQ ID NO: 943840 - DNA, 15 bp, Homo sapiens
tgcccttcagttaga

SEQ ID NO: 943841 - DNA, 15 bp, Homo sapiens
gtgcccttcagttag

SEQ ID NO: 943842 - DNA, 15 bp, Homo sapiens
ggtgcccttcagtta

SEQ ID NO: 943843 - DNA, 15 bp, Homo sapiens
gggtgcccttcagtt

SEQ ID NO: 943844 - DNA, 15 bp, Homo sapiens
ggggtgcccttcagt

SEQ ID NO: 943845 - DNA, 15 bp, Homo sapiens
tggggtgcccttcag

SEQ ID NO: 943846 - DNA, 15 bp, Homo sapiens
atggggtgcccttca

SEQ ID NO: 943847 - DNA, 15 bp, Homo sapiens
aatggggtgcccttc

SEQ ID NO: 943848 - DNA, 15 bp, Homo sapiens
gaatggggtgccctt

SEQ ID NO: 943849 - DNA, 15 bp, Homo sapiens
tgaatggggtgccct

SEQ ID NO: 943850 - DNA, 15 bp, Homo sapiens
gtgaatggggtgccc

SEQ ID NO: 943851 - DNA, 15 bp, Homo sapiens
ggtgaatggggtgcc

SEQ ID NO: 943852 - DNA, 15 bp, Homo sapiens
gggtgaatggggtgc

SEQ ID NO: 943853 - DNA, 15 bp, Homo sapiens
tgggtgaatggggtg

SEQ ID NO: 943854 - DNA, 15 bp, Homo sapiens
atgggtgaatggggt

SEQ ID NO: 943855 - DNA, 15 bp, Homo sapiens
aatgggtgaatgggg

SEQ ID NO: 943856 - DNA, 15 bp, Homo sapiens
aaatgggtgaatggg

SEQ ID NO: 943857 - DNA, 15 bp, Homo sapiens
caaatgggtgaatgg

SEQ ID NO: 943858 - DNA, 15 bp, Homo sapiens
gcaaatgggtgaatg

SEQ ID NO: 943859 - DNA, 15 bp, Homo sapiens
agcaaatgggtgaat

SEQ ID NO: 943860 - DNA, 15 bp, Homo sapiens
aagcaaatgggtgaa

SEQ ID NO: 943861 - DNA, 15 bp, Homo sapiens
taagcaaatgggtga

SEQ ID NO: 943862 - DNA, 15 bp, Homo sapiens
ttaagcaaatgggtg

SEQ ID NO: 943863 - DNA, 15 bp, Homo sapiens
cttaagcaaatgggt

SEQ ID NO: 943864 - DNA, 15 bp, Homo sapiens
gcttaagcaaatggg

SEQ ID NO: 943865 - DNA, 15 bp, Homo sapiens
ggcttaagcaaatgg

SEQ ID NO: 943866 - DNA, 15 bp, Homo sapiens
tggcttaagcaaatg

SEQ ID NO: 943867 - DNA, 15 bp, Homo sapiens
ctggcttaagcaaat

SEQ ID NO: 943868 - DNA, 15 bp, Homo sapiens
tctggcttaagcaaa

SEQ ID NO: 943869 - DNA, 15 bp, Homo sapiens
ttctggcttaagcaa

SEQ ID NO: 943870 - DNA, 15 bp, Homo sapiens
tttctggcttaagca

SEQ ID NO: 943871 - DNA, 15 bp, Homo sapiens
gtttctggcttaagc

SEQ ID NO: 943872 - DNA, 15 bp, Homo sapiens
agtttctggcttaag

SEQ ID NO: 943873 - DNA, 15 bp, Homo sapiens
aagtttctggcttaa

SEQ ID NO: 943874 - DNA, 15 bp, Homo sapiens
aaagtttctggctta

SEQ ID NO: 943875 - DNA, 15 bp, Homo sapiens
caaagtttctggctt

SEQ ID NO: 943876 - DNA, 15 bp, Homo sapiens
ccaaagtttctggct

SEQ ID NO: 943877 - DNA, 15 bp, Homo sapiens
tccaaagtttctggc

SEQ ID NO: 943878 - DNA, 15 bp, Homo sapiens
atccaaagtttctgg

SEQ ID NO: 943879 - DNA, 15 bp, Homo sapiens
gatccaaagtttctg

SEQ ID NO: 943880 - DNA, 15 bp, Homo sapiens
tgatccaaagtttct

SEQ ID NO: 943881 - DNA, 15 bp, Homo sapiens
atgatccaaagtttc

SEQ ID NO: 943882 - DNA, 15 bp, Homo sapiens
gatgatccaaagttt

SEQ ID NO: 943883 - DNA, 15 bp, Homo sapiens
tgatgatccaaagtt

SEQ ID NO: 943884 - DNA, 15 bp, Homo sapiens
ttgatgatccaaagt

SEQ ID NO: 943885 - DNA, 15 bp, Homo sapiens
gttgatgatccaaag

SEQ ID NO: 943886 - DNA, 15 bp, Homo sapiens
cgttgatgatccaaa

SEQ ID NO: 943887 - DNA, 15 bp, Homo sapiens
tcgttgatgatccaa

SEQ ID NO: 943888 - DNA, 15 bp, Homo sapiens
gtcgttgatgatcca

SEQ ID NO: 943889 - DNA, 15 bp, Homo sapiens
agtcgttgatgatcc

SEQ ID NO: 943890 - DNA, 15 bp, Homo sapiens
aagtcgttgatgatc

SEQ ID NO: 943891 - DNA, 15 bp, Homo sapiens
gaagtcgttgatgat

SEQ ID NO: 943892 - DNA, 15 bp, Homo sapiens
tgaagtcgttgatga

SEQ ID NO: 943893 - DNA, 15 bp, Homo sapiens
atgaagtcgttgatg

SEQ ID NO: 943894 - DNA, 15 bp, Homo sapiens
aatgaagtcgttgat

SEQ ID NO: 943895 - DNA, 15 bp, Homo sapiens
gaatgaagtcgttga

SEQ ID NO: 943896 - DNA, 15 bp, Homo sapiens
agaatgaagtcgttg

SEQ ID NO: 943897 - DNA, 15 bp, Homo sapiens
aagaatgaagtcgtt

SEQ ID NO: 943898 - DNA, 15 bp, Homo sapiens
aaagaatgaagtcgt

SEQ ID NO: 943899 - DNA, 15 bp, Homo sapiens
aaaagaatgaagtcg

SEQ ID NO: 943900 - DNA, 15 bp, Homo sapiens
gaaaagaatgaagtc

SEQ ID NO: 943901 - DNA, 15 bp, Homo sapiens
tgaaaagaatgaagt

SEQ ID NO: 943902 - DNA, 15 bp, Homo sapiens
atgaaaagaatgaag

SEQ ID NO: 943903 - DNA, 15 bp, Homo sapiens
aatgaaaagaatgaa

SEQ ID NO: 943904 - DNA, 15 bp, Homo sapiens
gaatgaaaagaatga

SEQ ID NO: 943905 - DNA, 15 bp, Homo sapiens
agaatgaaaagaatg

SEQ ID NO: 943906 - DNA, 15 bp, Homo sapiens
gagaatgaaaagaat

SEQ ID NO: 943907 - DNA, 15 bp, Homo sapiens
ggagaatgaaaagaa

SEQ ID NO: 943908 - DNA, 15 bp, Homo sapiens
tggagaatgaaaaga

SEQ ID NO: 943909 - DNA, 15 bp, Homo sapiens
gtggagaatgaaaag

SEQ ID NO: 943910 - DNA, 15 bp, Homo sapiens
tgtggagaatgaaaa

SEQ ID NO: 943911 - DNA, 15 bp, Homo sapiens
atgtggagaatgaaa

SEQ ID NO: 943912 - DNA, 15 bp, Homo sapiens
aatgtggagaatgaa

SEQ ID NO: 943913 - DNA, 15 bp, Homo sapiens
aaatgtggagaatga

SEQ ID NO: 943914 - DNA, 15 bp, Homo sapiens
aaaatgtggagaatg

SEQ ID NO: 943915 - DNA, 15 bp, Homo sapiens
gaaaatgtggagaat

SEQ ID NO: 943916 - DNA, 15 bp, Homo sapiens
agaaaatgtggagaa

SEQ ID NO: 943917 - DNA, 15 bp, Homo sapiens
tagaaaatgtggaga

SEQ ID NO: 943918 - DNA, 15 bp, Homo sapiens
atagaaaatgtggag

SEQ ID NO: 943919 - DNA, 15 bp, Homo sapiens
gatagaaaatgtgga

SEQ ID NO: 943920 - DNA, 15 bp, Homo sapiens
tgatagaaaatgtgg

SEQ ID NO: 943921 - DNA, 15 bp, Homo sapiens
atgatagaaaatgtg

SEQ ID NO: 943922 - DNA, 15 bp, Homo sapiens
aatgatagaaaatgt

SEQ ID NO: 943923 - DNA, 15 bp, Homo sapiens
taatgatagaaaatg

SEQ ID NO: 943924 - DNA, 15 bp, Homo sapiens
ttaatgatagaaaat

SEQ ID NO: 943925 - DNA, 15 bp, Homo sapiens
tttaatgatagaaaa

SEQ ID NO: 943926 - DNA, 15 bp, Homo sapiens
atttaatgatagaaa

SEQ ID NO: 943927 - DNA, 15 bp, Homo sapiens
gatttaatgatagaa

SEQ ID NO: 943928 - DNA, 15 bp, Homo sapiens
tgatttaatgataga

SEQ ID NO: 943929 - DNA, 15 bp, Homo sapiens
atgatttaatgatag

SEQ ID NO: 943930 - DNA, 15 bp, Homo sapiens
catgatttaatgata

SEQ ID NO: 943931 - DNA, 15 bp, Homo sapiens
acatgatttaatgat

SEQ ID NO: 943932 - DNA, 15 bp, Homo sapiens
gacatgatttaatga

SEQ ID NO: 943933 - DNA, 15 bp, Homo sapiens
tgacatgatttaatg

SEQ ID NO: 943934 - DNA, 15 bp, Homo sapiens
ctgacatgatttaat

SEQ ID NO: 943935 - DNA, 15 bp, Homo sapiens
gctgacatgatttaa

SEQ ID NO: 943936 - DNA, 15 bp, Homo sapiens
agctgacatgattta

SEQ ID NO: 943937 - DNA, 15 bp, Homo sapiens
gagctgacatgattt

SEQ ID NO: 943938 - DNA, 15 bp, Homo sapiens
agagctgacatgatt

SEQ ID NO: 943939 - DNA, 15 bp, Homo sapiens
tagagctgacatgat

SEQ ID NO: 943940 - DNA, 15 bp, Homo sapiens
atagagctgacatga

SEQ ID NO: 943941 - DNA, 15 bp, Homo sapiens
aatagagctgacatg

SEQ ID NO: 943942 - DNA, 15 bp, Homo sapiens
aaatagagctgacat

SEQ ID NO: 943943 - DNA, 15 bp, Homo sapiens
aaaatagagctgaca

SEQ ID NO: 943944 - DNA, 15 bp, Homo sapiens
gaaaatagagctgac

SEQ ID NO: 943945 - DNA, 15 bp, Homo sapiens
tgaaaatagagctga

SEQ ID NO: 943946 - DNA, 15 bp, Homo sapiens
ttgaaaatagagctg

SEQ ID NO: 943947 - DNA, 15 bp, Homo sapiens
tttgaaaatagagct

SEQ ID NO: 943948 - DNA, 15 bp, Homo sapiens
gtttgaaaatagagc

SEQ ID NO: 943949 - DNA, 15 bp, Homo sapiens
agtttgaaaatagag

SEQ ID NO: 943950 - DNA, 15 bp, Homo sapiens
tagtttgaaaataga

SEQ ID NO: 943951 - DNA, 15 bp, Homo sapiens
atagtttgaaaatag

SEQ ID NO: 943952 - DNA, 15 bp, Homo sapiens
tatagtttgaaaata

SEQ ID NO: 943953 - DNA, 15 bp, Homo sapiens
atatagtttgaaaat

SEQ ID NO: 943954 - DNA, 15 bp, Homo sapiens
gatatagtttgaaaa

SEQ ID NO: 943955 - DNA, 15 bp, Homo sapiens
ggatatagtttgaaa

SEQ ID NO: 943956 - DNA, 15 bp, Homo sapiens
aggatatagtttgaa

SEQ ID NO: 943957 - DNA, 15 bp, Homo sapiens
taggatatagtttga

SEQ ID NO: 943958 - DNA, 15 bp, Homo sapiens
ttaggatatagtttg

SEQ ID NO: 943959 - DNA, 15 bp, Homo sapiens
tttaggatatagttt

SEQ ID NO: 943960 - DNA, 15 bp, Homo sapiens
atttaggatatagtt

SEQ ID NO: 943961 - DNA, 15 bp, Homo sapiens
tatttaggatatagt

SEQ ID NO: 943962 - DNA, 15 bp, Homo sapiens
atatttaggatatag

SEQ ID NO: 943963 - DNA, 15 bp, Homo sapiens
catatttaggatata

SEQ ID NO: 943964 - DNA, 15 bp, Homo sapiens
tcatatttaggatat

SEQ ID NO: 943965 - DNA, 15 bp, Homo sapiens
gtcatatttaggata

SEQ ID NO: 943966 - DNA, 15 bp, Homo sapiens
ggtcatatttaggat

SEQ ID NO: 943967 - DNA, 15 bp, Homo sapiens
tggtcatatttagga

SEQ ID NO: 943968 - DNA, 15 bp, Homo sapiens
gtggtcatatttagg

SEQ ID NO: 943969 - DNA, 15 bp, Homo sapiens
agtggtcatatttag

SEQ ID NO: 943970 - DNA, 15 bp, Homo sapiens
aagtggtcatattta

SEQ ID NO: 943971 - DNA, 15 bp, Homo sapiens
gaagtggtcatattt

SEQ ID NO: 943972 - DNA, 15 bp, Homo sapiens
agaagtggtcatatt

SEQ ID NO: 943973 - DNA, 15 bp, Homo sapiens
aagaagtggtcatat

SEQ ID NO: 943974 - DNA, 15 bp, Homo sapiens
caagaagtggtcata

SEQ ID NO: 943975 - DNA, 15 bp, Homo sapiens
ccaagaagtggtcat

SEQ ID NO: 943976 - DNA, 15 bp, Homo sapiens
accaagaagtggtca

SEQ ID NO: 943977 - DNA, 15 bp, Homo sapiens
taccaagaagtggtc

SEQ ID NO: 943978 - DNA, 15 bp, Homo sapiens
ataccaagaagtggt

SEQ ID NO: 943979 - DNA, 15 bp, Homo sapiens
gataccaagaagtgg

SEQ ID NO: 943980 - DNA, 15 bp, Homo sapiens
agataccaagaagtg

SEQ ID NO: 943981 - DNA, 15 bp, Homo sapiens
aagataccaagaagt

SEQ ID NO: 943982 - DNA, 15 bp, Homo sapiens
caagataccaagaag

SEQ ID NO: 943983 - DNA, 15 bp, Homo sapiens
tcaagataccaagaa

SEQ ID NO: 943984 - DNA, 15 bp, Homo sapiens
ctcaagataccaaga

SEQ ID NO: 943985 - DNA, 15 bp, Homo sapiens
tctcaagataccaag

SEQ ID NO: 943986 - DNA, 15 bp, Homo sapiens
gtctcaagataccaa

SEQ ID NO: 943987 - DNA, 15 bp, Homo sapiens
tgtctcaagatacca

SEQ ID NO: 943988 - DNA, 15 bp, Homo sapiens
atgtctcaagatacc

SEQ ID NO: 943989 - DNA, 15 bp, Homo sapiens
gatgtctcaagatac

SEQ ID NO: 943990 - DNA, 15 bp, Homo sapiens
tgatgtctcaagata

SEQ ID NO: 943991 - DNA, 15 bp, Homo sapiens
gtgatgtctcaagat

SEQ ID NO: 943992 - DNA, 15 bp, Homo sapiens
agtgatgtctcaaga

SEQ ID NO: 943993 - DNA, 15 bp, Homo sapiens
tagtgatgtctcaag

SEQ ID NO: 943994 - DNA, 15 bp, Homo sapiens
gtagtgatgtctcaa

SEQ ID NO: 943995 - DNA, 15 bp, Homo sapiens
ggtagtgatgtctca

SEQ ID NO: 943996 - DNA, 15 bp, Homo sapiens
tggtagtgatgtctc

SEQ ID NO: 943997 - DNA, 15 bp, Homo sapiens
ctggtagtgatgtct

SEQ ID NO: 943998 - DNA, 15 bp, Homo sapiens
actggtagtgatgtc

SEQ ID NO: 943999 - DNA, 15 bp, Homo sapiens
gactggtagtgatgt

SEQ ID NO: 944000 - DNA, 15 bp, Homo sapiens
agactggtagtgatg

SEQ ID NO: 944001 - DNA, 15 bp, Homo sapiens
aagactggtagtgat

SEQ ID NO: 944002 - DNA, 15 bp, Homo sapiens
caagactggtagtga

SEQ ID NO: 944003 - DNA, 15 bp, Homo sapiens
acaagactggtagtg

SEQ ID NO: 944004 - DNA, 15 bp, Homo sapiens
gacaagactggtagt

SEQ ID NO: 944005 - DNA, 15 bp, Homo sapiens
ggacaagactggtag

SEQ ID NO: 944006 - DNA, 15 bp, Homo sapiens
tggacaagactggta

SEQ ID NO: 944007 - DNA, 15 bp, Homo sapiens
ttggacaagactggt

SEQ ID NO: 944008 - DNA, 15 bp, Homo sapiens
cttggacaagactgg

SEQ ID NO: 944009 - DNA, 15 bp, Homo sapiens
gcttggacaagactg

SEQ ID NO: 944010 - DNA, 15 bp, Homo sapiens
agcttggacaagact

SEQ ID NO: 944011 - DNA, 15 bp, Homo sapiens
tagcttggacaagac

SEQ ID NO: 944012 - DNA, 15 bp, Homo sapiens
atagcttggacaaga

SEQ ID NO: 944013 - DNA, 15 bp, Homo sapiens
aatagcttggacaag

SEQ ID NO: 944014 - DNA, 15 bp, Homo sapiens
caatagcttggacaa

SEQ ID NO: 944015 - DNA, 15 bp, Homo sapiens
acaatagcttggaca

SEQ ID NO: 944016 - DNA, 15 bp, Homo sapiens
aacaatagcttggac

SEQ ID NO: 944017 - DNA, 15 bp, Homo sapiens
aaacaatagcttgga

SEQ ID NO: 944018 - DNA, 15 bp, Homo sapiens
aaaacaatagcttgg

SEQ ID NO: 944019 - DNA, 15 bp, Homo sapiens
taaaacaatagcttg

SEQ ID NO: 944020 - DNA, 15 bp, Homo sapiens
ataaaacaatagctt

SEQ ID NO: 944021 - DNA, 15 bp, Homo sapiens
tataaaacaatagct

SEQ ID NO: 944022 - DNA, 15 bp, Homo sapiens
gtataaaacaatagc

SEQ ID NO: 944023 - DNA, 15 bp, Homo sapiens
ggtataaaacaatag

SEQ ID NO: 944024 - DNA, 15 bp, Homo sapiens
aggtataaaacaata

SEQ ID NO: 944025 - DNA, 15 bp, Homo sapiens
caggtataaaacaat

SEQ ID NO: 944026 - DNA, 15 bp, Homo sapiens
tcaggtataaaacaa

SEQ ID NO: 944027 - DNA, 15 bp, Homo sapiens
ttcaggtataaaaca

SEQ ID NO: 944028 - DNA, 15 bp, Homo sapiens
attcaggtataaaac

SEQ ID NO: 944029 - DNA, 15 bp, Homo sapiens
tattcaggtataaaa

SEQ ID NO: 944030 - DNA, 15 bp, Homo sapiens
ttattcaggtataaa

SEQ ID NO: 944031 - DNA, 15 bp, Homo sapiens
gttattcaggtataa

SEQ ID NO: 944032 - DNA, 15 bp, Homo sapiens
agttattcaggtata

SEQ ID NO: 944033 - DNA, 15 bp, Homo sapiens
cagttattcaggtat

SEQ ID NO: 944034 - DNA, 15 bp, Homo sapiens
gcagttattcaggta

SEQ ID NO: 944035 - DNA, 15 bp, Homo sapiens
tgcagttattcaggt

SEQ ID NO: 944036 - DNA, 15 bp, Homo sapiens
ttgcagttattcagg

SEQ ID NO: 944037 - DNA, 15 bp, Homo sapiens
attgcagttattcag

SEQ ID NO: 944038 - DNA, 15 bp, Homo sapiens
tattgcagttattca

SEQ ID NO: 944039 - DNA, 15 bp, Homo sapiens
ttattgcagttattc

SEQ ID NO: 944040 - DNA, 15 bp, Homo sapiens
attattgcagttatt

SEQ ID NO: 944041 - DNA, 15 bp, Homo sapiens
aattattgcagttat

SEQ ID NO: 944042 - DNA, 15 bp, Homo sapiens
aaattattgcagtta

SEQ ID NO: 944043 - DNA, 15 bp, Homo sapiens
gaaattattgcagtt

SEQ ID NO: 944044 - DNA, 15 bp, Homo sapiens
ggaaattattgcagt

SEQ ID NO: 944045 - DNA, 15 bp, Homo sapiens
tggaaattattgcag

SEQ ID NO: 944046 - DNA, 15 bp, Homo sapiens
ttggaaattattgca

SEQ ID NO: 944047 - DNA, 15 bp, Homo sapiens
cttggaaattattgc

SEQ ID NO: 944048 - DNA, 15 bp, Homo sapiens
gcttggaaattattg

SEQ ID NO: 944049 - DNA, 15 bp, Homo sapiens
agcttggaaattatt

SEQ ID NO: 944050 - DNA, 15 bp, Homo sapiens
cagcttggaaattat

SEQ ID NO: 944051 - DNA, 15 bp, Homo sapiens
ccagcttggaaatta

SEQ ID NO: 944052 - DNA, 15 bp, Homo sapiens
accagcttggaaatt

SEQ ID NO: 944053 - DNA, 15 bp, Homo sapiens
taccagcttggaaat

SEQ ID NO: 944054 - DNA, 15 bp, Homo sapiens
ataccagcttggaaa

SEQ ID NO: 944055 - DNA, 15 bp, Homo sapiens
gataccagcttggaa

SEQ ID NO: 944056 - DNA, 15 bp, Homo sapiens
agataccagcttgga

SEQ ID NO: 944057 - DNA, 15 bp, Homo sapiens
gagataccagcttgg

SEQ ID NO: 944058 - DNA, 15 bp, Homo sapiens
tgagataccagcttg

SEQ ID NO: 944059 - DNA, 15 bp, Homo sapiens
ctgagataccagctt

SEQ ID NO: 944060 - DNA, 15 bp, Homo sapiens
gctgagataccagct

SEQ ID NO: 944061 - DNA, 15 bp, Homo sapiens
agctgagataccagc

SEQ ID NO: 944062 - DNA, 15 bp, Homo sapiens
aagctgagataccag

SEQ ID NO: 944063 - DNA, 15 bp, Homo sapiens
gaagctgagatacca

SEQ ID NO: 944064 - DNA, 15 bp, Homo sapiens
ggaagctgagatacc

SEQ ID NO: 944065 - DNA, 15 bp, Homo sapiens
tggaagctgagatac

SEQ ID NO: 944066 - DNA, 15 bp, Homo sapiens
gtggaagctgagata

SEQ ID NO: 944067 - DNA, 15 bp, Homo sapiens
agtggaagctgagat

SEQ ID NO: 944068 - DNA, 15 bp, Homo sapiens
gagtggaagctgaga

SEQ ID NO: 944069 - DNA, 15 bp, Homo sapiens
agagtggaagctgag

SEQ ID NO: 944070 - DNA, 15 bp, Homo sapiens
aagagtggaagctga

SEQ ID NO: 944071 - DNA, 15 bp, Homo sapiens
caagagtggaagctg

SEQ ID NO: 944072 - DNA, 15 bp, Homo sapiens
ccaagagtggaagct

SEQ ID NO: 944073 - DNA, 15 bp, Homo sapiens
tccaagagtggaagc

SEQ ID NO: 944074 - DNA, 15 bp, Homo sapiens
atccaagagtggaag

SEQ ID NO: 944075 - DNA, 15 bp, Homo sapiens
aatccaagagtggaa

SEQ ID NO: 944076 - DNA, 15 bp, Homo sapiens
taatccaagagtgga

SEQ ID NO: 944077 - DNA, 15 bp, Homo sapiens
ataatccaagagtgg

SEQ ID NO: 944078 - DNA, 15 bp, Homo sapiens
aataatccaagagtg

SEQ ID NO: 944079 - DNA, 15 bp, Homo sapiens
aaataatccaagagt

SEQ ID NO: 944080 - DNA, 15 bp, Homo sapiens
gaaataatccaagag

SEQ ID NO: 944081 - DNA, 15 bp, Homo sapiens
tgaaataatccaaga

SEQ ID NO: 944082 - DNA, 15 bp, Homo sapiens
gtgaaataatccaag

SEQ ID NO: 944083 - DNA, 15 bp, Homo sapiens
ggtgaaataatccaa

SEQ ID NO: 944084 - DNA, 15 bp, Homo sapiens
gggtgaaataatcca

SEQ ID NO: 944085 - DNA, 15 bp, Homo sapiens
agggtgaaataatcc

SEQ ID NO: 944086 - DNA, 15 bp, Homo sapiens
tagggtgaaataatc

SEQ ID NO: 944087 - DNA, 15 bp, Homo sapiens
atagggtgaaataat

SEQ ID NO: 944088 - DNA, 15 bp, Homo sapiens
aatagggtgaaataa

SEQ ID NO: 944089 - DNA, 15 bp, Homo sapiens
aaatagggtgaaata

SEQ ID NO: 944090 - DNA, 15 bp, Homo sapiens
gaaatagggtgaaat

SEQ ID NO: 944091 - DNA, 15 bp, Homo sapiens
agaaatagggtgaaa

SEQ ID NO: 944092 - DNA, 15 bp, Homo sapiens
tagaaatagggtgaa

SEQ ID NO: 944093 - DNA, 15 bp, Homo sapiens
atagaaatagggtga

SEQ ID NO: 944094 - DNA, 15 bp, Homo sapiens
aatagaaatagggtg

SEQ ID NO: 944095 - DNA, 15 bp, Homo sapiens
aaatagaaatagggt

SEQ ID NO: 944096 - DNA, 15 bp, Homo sapiens
gaaatagaaataggg

SEQ ID NO: 944097 - DNA, 15 bp, Homo sapiens
agaaatagaaatagg

SEQ ID NO: 944098 - DNA, 15 bp, Homo sapiens
cagaaatagaaatag

SEQ ID NO: 944099 - DNA, 15 bp, Homo sapiens
ccagaaatagaaata

SEQ ID NO: 944100 - DNA, 15 bp, Homo sapiens
cccagaaatagaaat

SEQ ID NO: 944101 - DNA, 15 bp, Homo sapiens
gcccagaaatagaaa

SEQ ID NO: 944102 - DNA, 15 bp, Homo sapiens
agcccagaaatagaa

SEQ ID NO: 944103 - DNA, 15 bp, Homo sapiens
cagcccagaaataga

SEQ ID NO: 944104 - DNA, 15 bp, Homo sapiens
acagcccagaaatag

SEQ ID NO: 944105 - DNA, 15 bp, Homo sapiens
gacagcccagaaata

SEQ ID NO: 944106 - DNA, 15 bp, Homo sapiens
agacagcccagaaat

SEQ ID NO: 944107 - DNA, 15 bp, Homo sapiens
gagacagcccagaaa

SEQ ID NO: 944108 - DNA, 15 bp, Homo sapiens
ggagacagcccagaa

SEQ ID NO: 944109 - DNA, 15 bp, Homo sapiens
tggagacagcccaga

SEQ ID NO: 944110 - DNA, 15 bp, Homo sapiens
gtggagacagcccag

SEQ ID NO: 944111 - DNA, 15 bp, Homo sapiens
tgtggagacagccca

SEQ ID NO: 944112 - DNA, 15 bp, Homo sapiens
gtgtggagacagccc

SEQ ID NO: 944113 - DNA, 15 bp, Homo sapiens
tgtgtggagacagcc

SEQ ID NO: 944114 - DNA, 15 bp, Homo sapiens
ctgtgtggagacagc

SEQ ID NO: 944115 - DNA, 15 bp, Homo sapiens
actgtgtggagacag

SEQ ID NO: 944116 - DNA, 15 bp, Homo sapiens
aactgtgtggagaca

SEQ ID NO: 944117 - DNA, 15 bp, Homo sapiens
caactgtgtggagac

SEQ ID NO: 944118 - DNA, 15 bp, Homo sapiens
gcaactgtgtggaga

SEQ ID NO: 944119 - DNA, 15 bp, Homo sapiens
ggcaactgtgtggag

SEQ ID NO: 944120 - DNA, 15 bp, Homo sapiens
tggcaactgtgtgga

SEQ ID NO: 944121 - DNA, 15 bp, Homo sapiens
ctggcaactgtgtgg

SEQ ID NO: 944122 - DNA, 15 bp, Homo sapiens
cctggcaactgtgtg

SEQ ID NO: 944123 - DNA, 15 bp, Homo sapiens
acctggcaactgtgt

SEQ ID NO: 944124 - DNA, 15 bp, Homo sapiens
tacctggcaactgtg

SEQ ID NO: 944125 - DNA, 15 bp, Homo sapiens
ttacctggcaactgt

SEQ ID NO: 944126 - DNA, 15 bp, Homo sapiens
gttacctggcaactg

SEQ ID NO: 944127 - DNA, 15 bp, Homo sapiens
ggttacctggcaact

SEQ ID NO: 944128 - DNA, 15 bp, Homo sapiens
gggttacctggcaac

SEQ ID NO: 944129 - DNA, 15 bp, Homo sapiens
agggttacctggcaa

SEQ ID NO: 944130 - DNA, 15 bp, Homo sapiens
aagggttacctggca

SEQ ID NO: 944131 - DNA, 15 bp, Homo sapiens
aaagggttacctggc

SEQ ID NO: 944132 - DNA, 15 bp, Homo sapiens
aaaagggttacctgg

SEQ ID NO: 944133 - DNA, 15 bp, Homo sapiens
taaaagggttacctg

SEQ ID NO: 944134 - DNA, 15 bp, Homo sapiens
ttaaaagggttacct

SEQ ID NO: 944135 - DNA, 15 bp, Homo sapiens
tttaaaagggttacc

SEQ ID NO: 944136 - DNA, 15 bp, Homo sapiens
ttttaaaagggttac

SEQ ID NO: 944137 - DNA, 15 bp, Homo sapiens
gttttaaaagggtta

SEQ ID NO: 944138 - DNA, 15 bp, Homo sapiens
tgttttaaaagggtt

SEQ ID NO: 944139 - DNA, 15 bp, Homo sapiens
atgttttaaaagggt

SEQ ID NO: 944140 - DNA, 15 bp, Homo sapiens
tatgttttaaaaggg

SEQ ID NO: 944141 - DNA, 15 bp, Homo sapiens
ttatgttttaaaagg

SEQ ID NO: 944142 - DNA, 15 bp, Homo sapiens
tttatgttttaaaag

SEQ ID NO: 944143 - DNA, 15 bp, Homo sapiens
ctttatgttttaaaa

SEQ ID NO: 944144 - DNA, 15 bp, Homo sapiens
gctttatgttttaaa

SEQ ID NO: 944145 - DNA, 15 bp, Homo sapiens
tgctttatgttttaa

SEQ ID NO: 944146 - DNA, 15 bp, Homo sapiens
gtgctttatgtttta

SEQ ID NO: 944147 - DNA, 15 bp, Homo sapiens
tgtgctttatgtttt

SEQ ID NO: 944148 - DNA, 15 bp, Homo sapiens
atgtgctttatgttt

SEQ ID NO: 944149 - DNA, 15 bp, Homo sapiens
gatgtgctttatgtt

SEQ ID NO: 944150 - DNA, 15 bp, Homo sapiens
tgatgtgctttatgt

SEQ ID NO: 944151 - DNA, 15 bp, Homo sapiens
gtgatgtgctttatg

SEQ ID NO: 944152 - DNA, 15 bp, Homo sapiens
tgtgatgtgctttat

SEQ ID NO: 944153 - DNA, 15 bp, Homo sapiens
ttgtgatgtgcttta

SEQ ID NO: 944154 - DNA, 15 bp, Homo sapiens
tttgtgatgtgcttt

SEQ ID NO: 944155 - DNA, 15 bp, Homo sapiens
ctttgtgatgtgctt

SEQ ID NO: 944156 - DNA, 15 bp, Homo sapiens
gctttgtgatgtgct

SEQ ID NO: 944157 - DNA, 15 bp, Homo sapiens
tgctttgtgatgtgc

SEQ ID NO: 944158 - DNA, 15 bp, Homo sapiens
gtgctttgtgatgtg

SEQ ID NO: 944159 - DNA, 15 bp, Homo sapiens
tgtgctttgtgatgt

SEQ ID NO: 944160 - DNA, 15 bp, Homo sapiens
ttgtgctttgtgatg

SEQ ID NO: 944161 - DNA, 15 bp, Homo sapiens
tttgtgctttgtgat

SEQ ID NO: 944162 - DNA, 15 bp, Homo sapiens
ctttgtgctttgtga

SEQ ID NO: 944163 - DNA, 15 bp, Homo sapiens
actttgtgctttgtg

SEQ ID NO: 944164 - DNA, 15 bp, Homo sapiens
gactttgtgctttgt

SEQ ID NO: 944165 - DNA, 15 bp, Homo sapiens
ggactttgtgctttg

SEQ ID NO: 944166 - DNA, 15 bp, Homo sapiens
aggactttgtgcttt

SEQ ID NO: 944167 - DNA, 15 bp, Homo sapiens
taggactttgtgctt

SEQ ID NO: 944168 - DNA, 15 bp, Homo sapiens
ataggactttgtgct

SEQ ID NO: 944169 - DNA, 15 bp, Homo sapiens
gataggactttgtgc

SEQ ID NO: 944170 - DNA, 15 bp, Homo sapiens
ggataggactttgtg

SEQ ID NO: 944171 - DNA, 15 bp, Homo sapiens
aggataggactttgt

SEQ ID NO: 944172 - DNA, 15 bp, Homo sapiens
gaggataggactttg

SEQ ID NO: 944173 - DNA, 15 bp, Homo sapiens
tgaggataggacttt

SEQ ID NO: 944174 - DNA, 15 bp, Homo sapiens
ctgaggataggactt

SEQ ID NO: 944175 - DNA, 15 bp, Homo sapiens
tctgaggataggact

SEQ ID NO: 944176 - DNA, 15 bp, Homo sapiens
ttctgaggataggac

SEQ ID NO: 944177 - DNA, 15 bp, Homo sapiens
attctgaggatagga

SEQ ID NO: 944178 - DNA, 15 bp, Homo sapiens
gattctgaggatagg

SEQ ID NO: 944179 - DNA, 15 bp, Homo sapiens
agattctgaggatag

SEQ ID NO: 944180 - DNA, 15 bp, Homo sapiens
aagattctgaggata

SEQ ID NO: 944181 - DNA, 15 bp, Homo sapiens
gaagattctgaggat

SEQ ID NO: 944182 - DNA, 15 bp, Homo sapiens
ggaagattctgagga

SEQ ID NO: 944183 - DNA, 15 bp, Homo sapiens
tggaagattctgagg

SEQ ID NO: 944184 - DNA, 15 bp, Homo sapiens
ctggaagattctgag

SEQ ID NO: 944185 - DNA, 15 bp, Homo sapiens
actggaagattctga

SEQ ID NO: 944186 - DNA, 15 bp, Homo sapiens
cactggaagattctg

SEQ ID NO: 944187 - DNA, 15 bp, Homo sapiens
ccactggaagattct

SEQ ID NO: 944188 - DNA, 15 bp, Homo sapiens
accactggaagattc

SEQ ID NO: 944189 - DNA, 15 bp, Homo sapiens
aaccactggaagatt

SEQ ID NO: 944190 - DNA, 15 bp, Homo sapiens
gaaccactggaagat

SEQ ID NO: 944191 - DNA, 15 bp, Homo sapiens
agaaccactggaaga

SEQ ID NO: 944192 - DNA, 15 bp, Homo sapiens
gagaaccactggaag

SEQ ID NO: 944193 - DNA, 15 bp, Homo sapiens
ggagaaccactggaa

SEQ ID NO: 944194 - DNA, 15 bp, Homo sapiens
tggagaaccactgga

SEQ ID NO: 944195 - DNA, 15 bp, Homo sapiens
atggagaaccactgg

SEQ ID NO: 944196 - DNA, 15 bp, Homo sapiens
gatggagaaccactg

SEQ ID NO: 944197 - DNA, 15 bp, Homo sapiens
tgatggagaaccact

SEQ ID NO: 944198 - DNA, 15 bp, Homo sapiens
gtgatggagaaccac

SEQ ID NO: 944199 - DNA, 15 bp, Homo sapiens
ggtgatggagaacca

SEQ ID NO: 944200 - DNA, 15 bp, Homo sapiens
gggtgatggagaacc

SEQ ID NO: 944201 - DNA, 15 bp, Homo sapiens
agggtgatggagaac

SEQ ID NO: 944202 - DNA, 15 bp, Homo sapiens
tagggtgatggagaa

SEQ ID NO: 944203 - DNA, 15 bp, Homo sapiens
ttagggtgatggaga

SEQ ID NO: 944204 - DNA, 15 bp, Homo sapiens
tttagggtgatggag

SEQ ID NO: 944205 - DNA, 15 bp, Homo sapiens
ttttagggtgatgga

SEQ ID NO: 944206 - DNA, 15 bp, Homo sapiens
attttagggtgatgg

SEQ ID NO: 944207 - DNA, 15 bp, Homo sapiens
tattttagggtgatg

SEQ ID NO: 944208 - DNA, 15 bp, Homo sapiens
ttattttagggtgat

SEQ ID NO: 944209 - DNA, 15 bp, Homo sapiens
tttattttagggtga

SEQ ID NO: 944210 - DNA, 15 bp, Homo sapiens
ttttattttagggtg

SEQ ID NO: 944211 - DNA, 15 bp, Homo sapiens
gttttattttagggt

SEQ ID NO: 944212 - DNA, 15 bp, Homo sapiens
agttttattttaggg

SEQ ID NO: 944213 - DNA, 15 bp, Homo sapiens
aagttttattttagg

SEQ ID NO: 944214 - DNA, 15 bp, Homo sapiens
taagttttattttag

SEQ ID NO: 944215 - DNA, 15 bp, Homo sapiens
ttaagttttatttta

SEQ ID NO: 944216 - DNA, 15 bp, Homo sapiens
tttaagttttatttt

SEQ ID NO: 944217 - DNA, 15 bp, Homo sapiens
ttttaagttttattt

SEQ ID NO: 944218 - DNA, 15 bp, Homo sapiens
cttttaagttttatt

SEQ ID NO: 944219 - DNA, 15 bp, Homo sapiens
acttttaagttttat

SEQ ID NO: 944220 - DNA, 15 bp, Homo sapiens
aacttttaagtttta

SEQ ID NO: 944221 - DNA, 15 bp, Homo sapiens
gaacttttaagtttt

SEQ ID NO: 944222 - DNA, 15 bp, Homo sapiens
agaacttttaagttt

SEQ ID NO: 944223 - DNA, 15 bp, Homo sapiens
aagaacttttaagtt

SEQ ID NO: 944224 - DNA, 15 bp, Homo sapiens
aaagaacttttaagt

SEQ ID NO: 944225 - DNA, 15 bp, Homo sapiens
aaaagaacttttaag

SEQ ID NO: 944226 - DNA, 15 bp, Homo sapiens
gaaaagaacttttaa

SEQ ID NO: 944227 - DNA, 15 bp, Homo sapiens
tgaaaagaactttta

SEQ ID NO: 944228 - DNA, 15 bp, Homo sapiens
atgaaaagaactttt

SEQ ID NO: 944229 - DNA, 15 bp, Homo sapiens
tatgaaaagaacttt

SEQ ID NO: 944230 - DNA, 15 bp, Homo sapiens
atatgaaaagaactt

SEQ ID NO: 944231 - DNA, 15 bp, Homo sapiens
gatatgaaaagaact

SEQ ID NO: 944232 - DNA, 15 bp, Homo sapiens
ggatatgaaaagaac

SEQ ID NO: 944233 - DNA, 15 bp, Homo sapiens
gggatatgaaaagaa

SEQ ID NO: 944234 - DNA, 15 bp, Homo sapiens
tgggatatgaaaaga

SEQ ID NO: 944235 - DNA, 15 bp, Homo sapiens
ttgggatatgaaaag

SEQ ID NO: 944236 - DNA, 15 bp, Homo sapiens
tttgggatatgaaaa

SEQ ID NO: 944237 - DNA, 15 bp, Homo sapiens
ttttgggatatgaaa

SEQ ID NO: 944238 - DNA, 15 bp, Homo sapiens
gttttgggatatgaa

SEQ ID NO: 944239 - DNA, 15 bp, Homo sapiens
tgttttgggatatga

SEQ ID NO: 944240 - DNA, 15 bp, Homo sapiens
ttgttttgggatatg

SEQ ID NO: 944241 - DNA, 15 bp, Homo sapiens
gttgttttgggatat

SEQ ID NO: 944242 - DNA, 15 bp, Homo sapiens
tgttgttttgggata

SEQ ID NO: 944243 - DNA, 15 bp, Homo sapiens
atgttgttttgggat

SEQ ID NO: 944244 - DNA, 15 bp, Homo sapiens
tatgttgttttggga

SEQ ID NO: 944245 - DNA, 15 bp, Homo sapiens
atatgttgttttggg

SEQ ID NO: 944246 - DNA, 15 bp, Homo sapiens
catatgttgttttgg

SEQ ID NO: 944247 - DNA, 15 bp, Homo sapiens
tcatatgttgttttg

SEQ ID NO: 944248 - DNA, 15 bp, Homo sapiens
ctcatatgttgtttt

SEQ ID NO: 944249 - DNA, 15 bp, Homo sapiens
cctcatatgttgttt

SEQ ID NO: 944250 - DNA, 15 bp, Homo sapiens
acctcatatgttgtt

SEQ ID NO: 944251 - DNA, 15 bp, Homo sapiens
gacctcatatgttgt

SEQ ID NO: 944252 - DNA, 15 bp, Homo sapiens
agacctcatatgttg

SEQ ID NO: 944253 - DNA, 15 bp, Homo sapiens
cagacctcatatgtt

SEQ ID NO: 944254 - DNA, 15 bp, Homo sapiens
ccagacctcatatgt

SEQ ID NO: 944255 - DNA, 15 bp, Homo sapiens
gccagacctcatatg

SEQ ID NO: 944256 - DNA, 15 bp, Homo sapiens
tgccagacctcatat

SEQ ID NO: 944257 - DNA, 15 bp, Homo sapiens
gtgccagacctcata

SEQ ID NO: 944258 - DNA, 15 bp, Homo sapiens
ggtgccagacctcat

SEQ ID NO: 944259 - DNA, 15 bp, Homo sapiens
gggtgccagacctca

SEQ ID NO: 944260 - DNA, 15 bp, Homo sapiens
tgggtgccagacctc

SEQ ID NO: 944261 - DNA, 15 bp, Homo sapiens
ctgggtgccagacct

SEQ ID NO: 944262 - DNA, 15 bp, Homo sapiens
actgggtgccagacc

SEQ ID NO: 944263 - DNA, 15 bp, Homo sapiens
aactgggtgccagac

SEQ ID NO: 944264 - DNA, 15 bp, Homo sapiens
aaactgggtgccaga

SEQ ID NO: 944265 - DNA, 15 bp, Homo sapiens
aaaactgggtgccag

SEQ ID NO: 944266 - DNA, 15 bp, Homo sapiens
gaaaactgggtgcca

SEQ ID NO: 944267 - DNA, 15 bp, Homo sapiens
agaaaactgggtgcc

SEQ ID NO: 944268 - DNA, 15 bp, Homo sapiens
aagaaaactgggtgc

SEQ ID NO: 944269 - DNA, 15 bp, Homo sapiens
gaagaaaactgggtg

SEQ ID NO: 944270 - DNA, 15 bp, Homo sapiens
ggaagaaaactgggt

SEQ ID NO: 944271 - DNA, 15 bp, Homo sapiens
gggaagaaaactggg

SEQ ID NO: 944272 - DNA, 15 bp, Homo sapiens
tgggaagaaaactgg

SEQ ID NO: 944273 - DNA, 15 bp, Homo sapiens
ttgggaagaaaactg

SEQ ID NO: 944274 - DNA, 15 bp, Homo sapiens
attgggaagaaaact

SEQ ID NO: 944275 - DNA, 15 bp, Homo sapiens
gattgggaagaaaac

SEQ ID NO: 944276 - DNA, 15 bp, Homo sapiens
agattgggaagaaaa

SEQ ID NO: 944277 - DNA, 15 bp, Homo sapiens
gagattgggaagaaa

SEQ ID NO: 944278 - DNA, 15 bp, Homo sapiens
tgagattgggaagaa

SEQ ID NO: 944279 - DNA, 15 bp, Homo sapiens
atgagattgggaaga

SEQ ID NO: 944280 - DNA, 15 bp, Homo sapiens
gatgagattgggaag

SEQ ID NO: 944281 - DNA, 15 bp, Homo sapiens
agatgagattgggaa

SEQ ID NO: 944282 - DNA, 15 bp, Homo sapiens
aagatgagattggga

SEQ ID NO: 944283 - DNA, 15 bp, Homo sapiens
gaagatgagattggg

SEQ ID NO: 944284 - DNA, 15 bp, Homo sapiens
agaagatgagattgg

SEQ ID NO: 944285 - DNA, 15 bp, Homo sapiens
tagaagatgagattg

SEQ ID NO: 944286 - DNA, 15 bp, Homo sapiens
gtagaagatgagatt

SEQ ID NO: 944287 - DNA, 15 bp, Homo sapiens
agtagaagatgagat

SEQ ID NO: 944288 - DNA, 15 bp, Homo sapiens
tagtagaagatgaga

SEQ ID NO: 944289 - DNA, 15 bp, Homo sapiens
gtagtagaagatgag

SEQ ID NO: 944290 - DNA, 15 bp, Homo sapiens
agtagtagaagatga

SEQ ID NO: 944291 - DNA, 15 bp, Homo sapiens
aagtagtagaagatg

SEQ ID NO: 944292 - DNA, 15 bp, Homo sapiens
aaagtagtagaagat

SEQ ID NO: 944293 - DNA, 15 bp, Homo sapiens
aaaagtagtagaaga

SEQ ID NO: 944294 - DNA, 15 bp, Homo sapiens
gaaaagtagtagaag

SEQ ID NO: 944295 - DNA, 15 bp, Homo sapiens
ggaaaagtagtagaa

SEQ ID NO: 944296 - DNA, 15 bp, Homo sapiens
gggaaaagtagtaga

SEQ ID NO: 944297 - DNA, 15 bp, Homo sapiens
agggaaaagtagtag

SEQ ID NO: 944298 - DNA, 15 bp, Homo sapiens
aagggaaaagtagta

SEQ ID NO: 944299 - DNA, 15 bp, Homo sapiens
gaagggaaaagtagt

SEQ ID NO: 944300 - DNA, 15 bp, Homo sapiens
tgaagggaaaagtag

SEQ ID NO: 944301 - DNA, 15 bp, Homo sapiens
atgaagggaaaagta

SEQ ID NO: 944302 - DNA, 15 bp, Homo sapiens
aatgaagggaaaagt

SEQ ID NO: 944303 - DNA, 15 bp, Homo sapiens
aaatgaagggaaaag

SEQ ID NO: 944304 - DNA, 15 bp, Homo sapiens
gaaatgaagggaaaa

SEQ ID NO: 944305 - DNA, 15 bp, Homo sapiens
tgaaatgaagggaaa

SEQ ID NO: 944306 - DNA, 15 bp, Homo sapiens
atgaaatgaagggaa

SEQ ID NO: 944307 - DNA, 15 bp, Homo sapiens
aatgaaatgaaggga

SEQ ID NO: 944308 - DNA, 15 bp, Homo sapiens
gaatgaaatgaaggg

SEQ ID NO: 944309 - DNA, 15 bp, Homo sapiens
tgaatgaaatgaagg

SEQ ID NO: 944310 - DNA, 15 bp, Homo sapiens
gtgaatgaaatgaag

SEQ ID NO: 944311 - DNA, 15 bp, Homo sapiens
tgtgaatgaaatgaa

SEQ ID NO: 944312 - DNA, 15 bp, Homo sapiens
ttgtgaatgaaatga

SEQ ID NO: 944313 - DNA, 15 bp, Homo sapiens
attgtgaatgaaatg

SEQ ID NO: 944314 - DNA, 15 bp, Homo sapiens
cattgtgaatgaaat

SEQ ID NO: 944315 - DNA, 15 bp, Homo sapiens
acattgtgaatgaaa

SEQ ID NO: 944316 - DNA, 15 bp, Homo sapiens
aacattgtgaatgaa

SEQ ID NO: 944317 - DNA, 15 bp, Homo sapiens
aaacattgtgaatga

SEQ ID NO: 944318 - DNA, 15 bp, Homo sapiens
aaaacattgtgaatg

SEQ ID NO: 944319 - DNA, 15 bp, Homo sapiens
taaaacattgtgaat

SEQ ID NO: 944320 - DNA, 15 bp, Homo sapiens
ttaaaacattgtgaa

SEQ ID NO: 944321 - DNA, 15 bp, Homo sapiens
gttaaaacattgtga

SEQ ID NO: 944322 - DNA, 15 bp, Homo sapiens
ggttaaaacattgtg

SEQ ID NO: 944323 - DNA, 15 bp, Homo sapiens
tggttaaaacattgt

SEQ ID NO: 944324 - DNA, 15 bp, Homo sapiens
gtggttaaaacattg

SEQ ID NO: 944325 - DNA, 15 bp, Homo sapiens
tgtggttaaaacatt

SEQ ID NO: 944326 - DNA, 15 bp, Homo sapiens
ctgtggttaaaacat

SEQ ID NO: 944327 - DNA, 15 bp, Homo sapiens
actgtggttaaaaca

SEQ ID NO: 944328 - DNA, 15 bp, Homo sapiens
tactgtggttaaaac

SEQ ID NO: 944329 - DNA, 15 bp, Homo sapiens
ttactgtggttaaaa

SEQ ID NO: 944330 - DNA, 15 bp, Homo sapiens
gttactgtggttaaa

SEQ ID NO: 944331 - DNA, 15 bp, Homo sapiens
ggttactgtggttaa

SEQ ID NO: 944332 - DNA, 15 bp, Homo sapiens
aggttactgtggtta

SEQ ID NO: 944333 - DNA, 15 bp, Homo sapiens
aaggttactgtggtt

SEQ ID NO: 944334 - DNA, 15 bp, Homo sapiens
gaaggttactgtggt

SEQ ID NO: 944335 - DNA, 15 bp, Homo sapiens
agaaggttactgtgg

SEQ ID NO: 944336 - DNA, 15 bp, Homo sapiens
aagaaggttactgtg

SEQ ID NO: 944337 - DNA, 15 bp, Homo sapiens
aaagaaggttactgt

SEQ ID NO: 944338 - DNA, 15 bp, Homo sapiens
gaaagaaggttactg

SEQ ID NO: 944339 - DNA, 15 bp, Homo sapiens
tgaaagaaggttact

SEQ ID NO: 944340 - DNA, 15 bp, Homo sapiens
ctgaaagaaggttac

SEQ ID NO: 944341 - DNA, 15 bp, Homo sapiens
actgaaagaaggtta

SEQ ID NO: 944342 - DNA, 15 bp, Homo sapiens
tactgaaagaaggtt

SEQ ID NO: 944343 - DNA, 15 bp, Homo sapiens
gtactgaaagaaggt

SEQ ID NO: 944344 - DNA, 15 bp, Homo sapiens
agtactgaaagaagg

SEQ ID NO: 944345 - DNA, 15 bp, Homo sapiens
aagtactgaaagaag

SEQ ID NO: 944346 - DNA, 15 bp, Homo sapiens
aaagtactgaaagaa

SEQ ID NO: 944347 - DNA, 15 bp, Homo sapiens
taaagtactgaaaga

SEQ ID NO: 944348 - DNA, 15 bp, Homo sapiens
ttaaagtactgaaag

SEQ ID NO: 944349 - DNA, 15 bp, Homo sapiens
tttaaagtactgaaa

SEQ ID NO: 944350 - DNA, 15 bp, Homo sapiens
gtttaaagtactgaa

SEQ ID NO: 944351 - DNA, 15 bp, Homo sapiens
tgtttaaagtactga

SEQ ID NO: 944352 - DNA, 15 bp, Homo sapiens
ttgtttaaagtactg

SEQ ID NO: 944353 - DNA, 15 bp, Homo sapiens
attgtttaaagtact

SEQ ID NO: 944354 - DNA, 15 bp, Homo sapiens
gattgtttaaagtac

SEQ ID NO: 944355 - DNA, 15 bp, Homo sapiens
ggattgtttaaagta

SEQ ID NO: 944356 - DNA, 15 bp, Homo sapiens
tggattgtttaaagt

SEQ ID NO: 944357 - DNA, 15 bp, Homo sapiens
ttggattgtttaaag

SEQ ID NO: 944358 - DNA, 15 bp, Homo sapiens
tttggattgtttaaa

SEQ ID NO: 944359 - DNA, 15 bp, Homo sapiens
gtttggattgtttaa

SEQ ID NO: 944360 - DNA, 15 bp, Homo sapiens
agtttggattgttta

SEQ ID NO: 944361 - DNA, 15 bp, Homo sapiens
gagtttggattgttt

SEQ ID NO: 944362 - DNA, 15 bp, Homo sapiens
cgagtttggattgtt

SEQ ID NO: 944363 - DNA, 15 bp, Homo sapiens
acgagtttggattgt

SEQ ID NO: 944364 - DNA, 15 bp, Homo sapiens
aacgagtttggattg

SEQ ID NO: 944365 - DNA, 15 bp, Homo sapiens
aaacgagtttggatt

SEQ ID NO: 944366 - DNA, 15 bp, Homo sapiens
taaacgagtttggat

SEQ ID NO: 944367 - DNA, 15 bp, Homo sapiens
ttaaacgagtttgga

SEQ ID NO: 944368 - DNA, 15 bp, Homo sapiens
cttaaacgagtttgg

SEQ ID NO: 944369 - DNA, 15 bp, Homo sapiens
gcttaaacgagtttg

SEQ ID NO: 944370 - DNA, 15 bp, Homo sapiens
cgcttaaacgagttt

SEQ ID NO: 944371 - DNA, 15 bp, Homo sapiens
acgcttaaacgagtt

SEQ ID NO: 944372 - DNA, 15 bp, Homo sapiens
gacgcttaaacgagt

SEQ ID NO: 944373 - DNA, 15 bp, Homo sapiens
tgacgcttaaacgag

SEQ ID NO: 944374 - DNA, 15 bp, Homo sapiens
ttgacgcttaaacga

SEQ ID NO: 944375 - DNA, 15 bp, Homo sapiens
cttgacgcttaaacg

SEQ ID NO: 944376 - DNA, 15 bp, Homo sapiens
acttgacgcttaaac

SEQ ID NO: 944377 - DNA, 15 bp, Homo sapiens
gacttgacgcttaaa

SEQ ID NO: 944378 - DNA, 15 bp, Homo sapiens
ggacttgacgcttaa

SEQ ID NO: 944379 - DNA, 15 bp, Homo sapiens
aggacttgacgctta

SEQ ID NO: 944380 - DNA, 15 bp, Homo sapiens
aaggacttgacgctt

SEQ ID NO: 944381 - DNA, 15 bp, Homo sapiens
taaggacttgacgct

SEQ ID NO: 944382 - DNA, 15 bp, Homo sapiens
ataaggacttgacgc

SEQ ID NO: 944383 - DNA, 15 bp, Homo sapiens
tataaggacttgacg

SEQ ID NO: 944384 - DNA, 15 bp, Homo sapiens
gtataaggacttgac

SEQ ID NO: 944385 - DNA, 15 bp, Homo sapiens
agtataaggacttga

SEQ ID NO: 944386 - DNA, 15 bp, Homo sapiens
aagtataaggacttg

SEQ ID NO: 944387 - DNA, 15 bp, Homo sapiens
caagtataaggactt

SEQ ID NO: 944388 - DNA, 15 bp, Homo sapiens
acaagtataaggact

SEQ ID NO: 944389 - DNA, 15 bp, Homo sapiens
aacaagtataaggac

SEQ ID NO: 944390 - DNA, 15 bp, Homo sapiens
aaacaagtataagga

SEQ ID NO: 944391 - DNA, 15 bp, Homo sapiens
gaaacaagtataagg

SEQ ID NO: 944392 - DNA, 15 bp, Homo sapiens
ggaaacaagtataag

SEQ ID NO: 944393 - DNA, 15 bp, Homo sapiens
aggaaacaagtataa

SEQ ID NO: 944394 - DNA, 15 bp, Homo sapiens
aaggaaacaagtata

SEQ ID NO: 944395 - DNA, 15 bp, Homo sapiens
aaaggaaacaagtat

SEQ ID NO: 944396 - DNA, 15 bp, Homo sapiens
caaaggaaacaagta

SEQ ID NO: 944397 - DNA, 15 bp, Homo sapiens
acaaaggaaacaagt

SEQ ID NO: 944398 - DNA, 15 bp, Homo sapiens
aacaaaggaaacaag

SEQ ID NO: 944399 - DNA, 15 bp, Homo sapiens
aaacaaaggaaacaa

SEQ ID NO: 944400 - DNA, 15 bp, Homo sapiens
taaacaaaggaaaca

SEQ ID NO: 944401 - DNA, 15 bp, Homo sapiens
ctaaacaaaggaaac

SEQ ID NO: 944402 - DNA, 15 bp, Homo sapiens
tctaaacaaaggaaa

SEQ ID NO: 944403 - DNA, 15 bp, Homo sapiens
ttctaaacaaaggaa

SEQ ID NO: 944404 - DNA, 15 bp, Homo sapiens
attctaaacaaagga

SEQ ID NO: 944405 - DNA, 15 bp, Homo sapiens
tattctaaacaaagg

SEQ ID NO: 944406 - DNA, 15 bp, Homo sapiens
gtattctaaacaaag

SEQ ID NO: 944407 - DNA, 15 bp, Homo sapiens
agtattctaaacaaa

SEQ ID NO: 944408 - DNA, 15 bp, Homo sapiens
cagtattctaaacaa

SEQ ID NO: 944409 - DNA, 15 bp, Homo sapiens
acagtattctaaaca

SEQ ID NO: 944410 - DNA, 15 bp, Homo sapiens
aacagtattctaaac

SEQ ID NO: 944411 - DNA, 15 bp, Homo sapiens
gaacagtattctaaa

SEQ ID NO: 944412 - DNA, 15 bp, Homo sapiens
tgaacagtattctaa

SEQ ID NO: 944413 - DNA, 15 bp, Homo sapiens
gtgaacagtattcta

SEQ ID NO: 944414 - DNA, 15 bp, Homo sapiens
ggtgaacagtattct

SEQ ID NO: 944415 - DNA, 15 bp, Homo sapiens
gggtgaacagtattc

SEQ ID NO: 944416 - DNA, 15 bp, Homo sapiens
tgggtgaacagtatt

SEQ ID NO: 944417 - DNA, 15 bp, Homo sapiens
ttgggtgaacagtat

SEQ ID NO: 944418 - DNA, 15 bp, Homo sapiens
tttgggtgaacagta

SEQ ID NO: 944419 - DNA, 15 bp, Homo sapiens
atttgggtgaacagt

SEQ ID NO: 944420 - DNA, 15 bp, Homo sapiens
tatttgggtgaacag

SEQ ID NO: 944421 - DNA, 15 bp, Homo sapiens
atatttgggtgaaca

SEQ ID NO: 944422 - DNA, 15 bp, Homo sapiens
aatatttgggtgaac

SEQ ID NO: 944423 - DNA, 15 bp, Homo sapiens
gaatatttgggtgaa

SEQ ID NO: 944424 - DNA, 15 bp, Homo sapiens
agaatatttgggtga

SEQ ID NO: 944425 - DNA, 15 bp, Homo sapiens
gagaatatttgggtg

SEQ ID NO: 944426 - DNA, 15 bp, Homo sapiens
tgagaatatttgggt

SEQ ID NO: 944427 - DNA, 15 bp, Homo sapiens
atgagaatatttggg

SEQ ID NO: 944428 - DNA, 15 bp, Homo sapiens
tatgagaatatttgg

SEQ ID NO: 944429 - DNA, 15 bp, Homo sapiens
ctatgagaatatttg

SEQ ID NO: 944430 - DNA, 15 bp, Homo sapiens
gctatgagaatattt

SEQ ID NO: 944431 - DNA, 15 bp, Homo sapiens
agctatgagaatatt

SEQ ID NO: 944432 - DNA, 15 bp, Homo sapiens
aagctatgagaatat

SEQ ID NO: 944433 - DNA, 15 bp, Homo sapiens
caagctatgagaata

SEQ ID NO: 944434 - DNA, 15 bp, Homo sapiens
gcaagctatgagaat

SEQ ID NO: 944435 - DNA, 15 bp, Homo sapiens
agcaagctatgagaa

SEQ ID NO: 944436 - DNA, 15 bp, Homo sapiens
gagcaagctatgaga

SEQ ID NO: 944437 - DNA, 15 bp, Homo sapiens
ggagcaagctatgag

SEQ ID NO: 944438 - DNA, 15 bp, Homo sapiens
gggagcaagctatga

SEQ ID NO: 944439 - DNA, 15 bp, Homo sapiens
tgggagcaagctatg

SEQ ID NO: 944440 - DNA, 15 bp, Homo sapiens
ctgggagcaagctat

SEQ ID NO: 944441 - DNA, 15 bp, Homo sapiens
tctgggagcaagcta

SEQ ID NO: 944442 - DNA, 15 bp, Homo sapiens
gtctgggagcaagct

SEQ ID NO: 944443 - DNA, 15 bp, Homo sapiens
agtctgggagcaagc

SEQ ID NO: 944444 - DNA, 15 bp, Homo sapiens
aagtctgggagcaag

SEQ ID NO: 944445 - DNA, 15 bp, Homo sapiens
gaagtctgggagcaa

SEQ ID NO: 944446 - DNA, 15 bp, Homo sapiens
tgaagtctgggagca

SEQ ID NO: 944447 - DNA, 15 bp, Homo sapiens
atgaagtctgggagc

SEQ ID NO: 944448 - DNA, 15 bp, Homo sapiens
catgaagtctgggag

SEQ ID NO: 944449 - DNA, 15 bp, Homo sapiens
acatgaagtctggga

SEQ ID NO: 944450 - DNA, 15 bp, Homo sapiens
gacatgaagtctggg

SEQ ID NO: 944451 - DNA, 15 bp, Homo sapiens
agacatgaagtctgg

SEQ ID NO: 944452 - DNA, 15 bp, Homo sapiens
gagacatgaagtctg

SEQ ID NO: 944453 - DNA, 15 bp, Homo sapiens
agagacatgaagtct

SEQ ID NO: 944454 - DNA, 15 bp, Homo sapiens
cagagacatgaagtc

SEQ ID NO: 944455 - DNA, 15 bp, Homo sapiens
gcagagacatgaagt

SEQ ID NO: 944456 - DNA, 15 bp, Homo sapiens
agcagagacatgaag

SEQ ID NO: 944457 - DNA, 15 bp, Homo sapiens
cagcagagacatgaa

SEQ ID NO: 944458 - DNA, 15 bp, Homo sapiens
tcagcagagacatga

SEQ ID NO: 944459 - DNA, 15 bp, Homo sapiens
ttcagcagagacatg

SEQ ID NO: 944460 - DNA, 15 bp, Homo sapiens
tttcagcagagacat

SEQ ID NO: 944461 - DNA, 15 bp, Homo sapiens
atttcagcagagaca

SEQ ID NO: 944462 - DNA, 15 bp, Homo sapiens
tatttcagcagagac

SEQ ID NO: 944463 - DNA, 15 bp, Homo sapiens
ctatttcagcagaga

SEQ ID NO: 944464 - DNA, 15 bp, Homo sapiens
tctatttcagcagag

SEQ ID NO: 944465 - DNA, 15 bp, Homo sapiens
ctctatttcagcaga

SEQ ID NO: 944466 - DNA, 15 bp, Homo sapiens
cctctatttcagcag

SEQ ID NO: 944467 - DNA, 15 bp, Homo sapiens
gcctctatttcagca

SEQ ID NO: 944468 - DNA, 15 bp, Homo sapiens
agcctctatttcagc

SEQ ID NO: 944469 - DNA, 15 bp, Homo sapiens
gagcctctatttcag

SEQ ID NO: 944470 - DNA, 15 bp, Homo sapiens
ggagcctctatttca

SEQ ID NO: 944471 - DNA, 15 bp, Homo sapiens
aggagcctctatttc

SEQ ID NO: 944472 - DNA, 15 bp, Homo sapiens
aaggagcctctattt

SEQ ID NO: 944473 - DNA, 15 bp, Homo sapiens
taaggagcctctatt

SEQ ID NO: 944474 - DNA, 15 bp, Homo sapiens
ctaaggagcctctat

SEQ ID NO: 944475 - DNA, 15 bp, Homo sapiens
tctaaggagcctcta

SEQ ID NO: 944476 - DNA, 15 bp, Homo sapiens
ctctaaggagcctct

SEQ ID NO: 944477 - DNA, 15 bp, Homo sapiens
tctctaaggagcctc

SEQ ID NO: 944478 - DNA, 15 bp, Homo sapiens
ctctctaaggagcct

SEQ ID NO: 944479 - DNA, 15 bp, Homo sapiens
tctctctaaggagcc

SEQ ID NO: 944480 - DNA, 15 bp, Homo sapiens
gtctctctaaggagc

SEQ ID NO: 944481 - DNA, 15 bp, Homo sapiens
ggtctctctaaggag

SEQ ID NO: 944482 - DNA, 15 bp, Homo sapiens
aggtctctctaagga

SEQ ID NO: 944483 - DNA, 15 bp, Homo sapiens
aaggtctctctaagg

SEQ ID NO: 944484 - DNA, 15 bp, Homo sapiens
gaaggtctctctaag

SEQ ID NO: 944485 - DNA, 15 bp, Homo sapiens
ggaaggtctctctaa

SEQ ID NO: 944486 - DNA, 15 bp, Homo sapiens
gggaaggtctctcta

SEQ ID NO: 944487 - DNA, 15 bp, Homo sapiens
agggaaggtctctct

SEQ ID NO: 944488 - DNA, 15 bp, Homo sapiens
tagggaaggtctctc

SEQ ID NO: 944489 - DNA, 15 bp, Homo sapiens
ttagggaaggtctct

SEQ ID NO: 944490 - DNA, 15 bp, Homo sapiens
gttagggaaggtctc

SEQ ID NO: 944491 - DNA, 15 bp, Homo sapiens
ggttagggaaggtct

SEQ ID NO: 944492 - DNA, 15 bp, Homo sapiens
gggttagggaaggtc

SEQ ID NO: 944493 - DNA, 15 bp, Homo sapiens
agggttagggaaggt

SEQ ID NO: 944494 - DNA, 15 bp, Homo sapiens
tagggttagggaagg

SEQ ID NO: 944495 - DNA, 15 bp, Homo sapiens
ttagggttagggaag

SEQ ID NO: 944496 - DNA, 15 bp, Homo sapiens
gttagggttagggaa

SEQ ID NO: 944497 - DNA, 15 bp, Homo sapiens
ggttagggttaggga

SEQ ID NO: 944498 - DNA, 15 bp, Homo sapiens
gggttagggttaggg

SEQ ID NO: 944499 - DNA, 15 bp, Homo sapiens
agggttagggttagg

SEQ ID NO: 944500 - DNA, 15 bp, Homo sapiens
tagggttagggttag

SEQ ID NO: 944501 - DNA, 15 bp, Homo sapiens
ttagggttagggtta

SEQ ID NO: 944502 - DNA, 15 bp, Homo sapiens
gttagggttagggtt

SEQ ID NO: 944503 - DNA, 15 bp, Homo sapiens
ggttagggttagggt

SEQ ID NO: 944504 - DNA, 15 bp, Homo sapiens
atagggttagggtta

SEQ ID NO: 944505 - DNA, 15 bp, Homo sapiens
tatagggttagggtt

SEQ ID NO: 944506 - DNA, 15 bp, Homo sapiens
gtatagggttagggt

SEQ ID NO: 944507 - DNA, 15 bp, Homo sapiens
agtatagggttaggg

SEQ ID NO: 944508 - DNA, 15 bp, Homo sapiens
tagtatagggttagg

SEQ ID NO: 944509 - DNA, 15 bp, Homo sapiens
gtagtatagggttag

SEQ ID NO: 944510 - DNA, 15 bp, Homo sapiens
agtagtatagggtta

SEQ ID NO: 944511 - DNA, 15 bp, Homo sapiens
aagtagtatagggtt

SEQ ID NO: 944512 - DNA, 15 bp, Homo sapiens
caagtagtatagggt

SEQ ID NO: 944513 - DNA, 15 bp, Homo sapiens
gcaagtagtataggg

SEQ ID NO: 944514 - DNA, 15 bp, Homo sapiens
ggcaagtagtatagg

SEQ ID NO: 944515 - DNA, 15 bp, Homo sapiens
tggcaagtagtatag

SEQ ID NO: 944516 - DNA, 15 bp, Homo sapiens
atggcaagtagtata

SEQ ID NO: 944517 - DNA, 15 bp, Homo sapiens
gatggcaagtagtat

SEQ ID NO: 944518 - DNA, 15 bp, Homo sapiens
tgatggcaagtagta

SEQ ID NO: 944519 - DNA, 15 bp, Homo sapiens
gtgatggcaagtagt

SEQ ID NO: 944520 - DNA, 15 bp, Homo sapiens
agtgatggcaagtag

SEQ ID NO: 944521 - DNA, 15 bp, Homo sapiens
gagtgatggcaagta

SEQ ID NO: 944522 - DNA, 15 bp, Homo sapiens
agagtgatggcaagt

SEQ ID NO: 944523 - DNA, 15 bp, Homo sapiens
aagagtgatggcaag

SEQ ID NO: 944524 - DNA, 15 bp, Homo sapiens
aaagagtgatggcaa

SEQ ID NO: 944525 - DNA, 15 bp, Homo sapiens
taaagagtgatggca

SEQ ID NO: 944526 - DNA, 15 bp, Homo sapiens
ataaagagtgatggc

SEQ ID NO: 944527 - DNA, 15 bp, Homo sapiens
gataaagagtgatgg

SEQ ID NO: 944528 - DNA, 15 bp, Homo sapiens
ggataaagagtgatg

SEQ ID NO: 944529 - DNA, 15 bp, Homo sapiens
aggataaagagtgat

SEQ ID NO: 944530 - DNA, 15 bp, Homo sapiens
gaggataaagagtga

SEQ ID NO: 944531 - DNA, 15 bp, Homo sapiens
agaggataaagagtg

SEQ ID NO: 944532 - DNA, 15 bp, Homo sapiens
aagaggataaagagt

SEQ ID NO: 944533 - DNA, 15 bp, Homo sapiens
taagaggataaagag

SEQ ID NO: 944534 - DNA, 15 bp, Homo sapiens
gtaagaggataaaga

SEQ ID NO: 944535 - DNA, 15 bp, Homo sapiens
ggtaagaggataaag

SEQ ID NO: 944536 - DNA, 15 bp, Homo sapiens
gggtaagaggataaa

SEQ ID NO: 944537 - DNA, 15 bp, Homo sapiens
agggtaagaggataa

SEQ ID NO: 944538 - DNA, 15 bp, Homo sapiens
cagggtaagaggata

SEQ ID NO: 944539 - DNA, 15 bp, Homo sapiens
ccagggtaagaggat

SEQ ID NO: 944540 - DNA, 15 bp, Homo sapiens
tccagggtaagagga

SEQ ID NO: 944541 - DNA, 15 bp, Homo sapiens
atccagggtaagagg

SEQ ID NO: 944542 - DNA, 15 bp, Homo sapiens
aatccagggtaagag

SEQ ID NO: 944543 - DNA, 15 bp, Homo sapiens
taatccagggtaaga

SEQ ID NO: 944544 - DNA, 15 bp, Homo sapiens
ataatccagggtaag

SEQ ID NO: 944545 - DNA, 15 bp, Homo sapiens
aataatccagggtaa

SEQ ID NO: 944546 - DNA, 15 bp, Homo sapiens
aaataatccagggta

SEQ ID NO: 944547 - DNA, 15 bp, Homo sapiens
aaaataatccagggt

SEQ ID NO: 944548 - DNA, 15 bp, Homo sapiens
aaaaataatccaggg

SEQ ID NO: 944549 - DNA, 15 bp, Homo sapiens
aaaaaataatccagg

SEQ ID NO: 944550 - DNA, 15 bp, Homo sapiens
gaaaaaataatccag

SEQ ID NO: 944551 - DNA, 15 bp, Homo sapiens
agaaaaaataatcca

SEQ ID NO: 944552 - DNA, 15 bp, Homo sapiens
aagaaaaaataatcc

SEQ ID NO: 944553 - DNA, 15 bp, Homo sapiens
caagaaaaaataatc

SEQ ID NO: 944554 - DNA, 15 bp, Homo sapiens
tcaagaaaaaataat

SEQ ID NO: 944555 - DNA, 15 bp, Homo sapiens
atcaagaaaaaataa

SEQ ID NO: 944556 - DNA, 15 bp, Homo sapiens
tatcaagaaaaaata

SEQ ID NO: 944557 - DNA, 15 bp, Homo sapiens
ctatcaagaaaaaat

SEQ ID NO: 944558 - DNA, 15 bp, Homo sapiens
gctatcaagaaaaaa

SEQ ID NO: 944559 - DNA, 15 bp, Homo sapiens
agctatcaagaaaaa

SEQ ID NO: 944560 - DNA, 15 bp, Homo sapiens
gagctatcaagaaaa

SEQ ID NO: 944561 - DNA, 15 bp, Homo sapiens
agagctatcaagaaa

SEQ ID NO: 944562 - DNA, 15 bp, Homo sapiens
aagagctatcaagaa

SEQ ID NO: 944563 - DNA, 15 bp, Homo sapiens
gaagagctatcaaga

SEQ ID NO: 944564 - DNA, 15 bp, Homo sapiens
ggaagagctatcaag

SEQ ID NO: 944565 - DNA, 15 bp, Homo sapiens
aggaagagctatcaa

SEQ ID NO: 944566 - DNA, 15 bp, Homo sapiens
taggaagagctatca

SEQ ID NO: 944567 - DNA, 15 bp, Homo sapiens
gtaggaagagctatc

SEQ ID NO: 944568 - DNA, 15 bp, Homo sapiens
ggtaggaagagctat

SEQ ID NO: 944569 - DNA, 15 bp, Homo sapiens
tggtaggaagagcta

SEQ ID NO: 944570 - DNA, 15 bp, Homo sapiens
atggtaggaagagct

SEQ ID NO: 944571 - DNA, 15 bp, Homo sapiens
gatggtaggaagagc

SEQ ID NO: 944572 - DNA, 15 bp, Homo sapiens
agatggtaggaagag

SEQ ID NO: 944573 - DNA, 15 bp, Homo sapiens
cagatggtaggaaga

SEQ ID NO: 944574 - DNA, 15 bp, Homo sapiens
ccagatggtaggaag

SEQ ID NO: 944575 - DNA, 15 bp, Homo sapiens
gccagatggtaggaa

SEQ ID NO: 944576 - DNA, 15 bp, Homo sapiens
tgccagatggtagga

SEQ ID NO: 944577 - DNA, 15 bp, Homo sapiens
gtgccagatggtagg

SEQ ID NO: 944578 - DNA, 15 bp, Homo sapiens
agtgccagatggtag

SEQ ID NO: 944579 - DNA, 15 bp, Homo sapiens
tagtgccagatggta

SEQ ID NO: 944580 - DNA, 15 bp, Homo sapiens
atagtgccagatggt

SEQ ID NO: 944581 - DNA, 15 bp, Homo sapiens
tatagtgccagatgg

SEQ ID NO: 944582 - DNA, 15 bp, Homo sapiens
atatagtgccagatg

SEQ ID NO: 944583 - DNA, 15 bp, Homo sapiens
aatatagtgccagat

SEQ ID NO: 944584 - DNA, 15 bp, Homo sapiens
taatatagtgccaga

SEQ ID NO: 944585 - DNA, 15 bp, Homo sapiens
gtaatatagtgccag

SEQ ID NO: 944586 - DNA, 15 bp, Homo sapiens
tgtaatatagtgcca

SEQ ID NO: 944587 - DNA, 15 bp, Homo sapiens
atgtaatatagtgcc

SEQ ID NO: 944588 - DNA, 15 bp, Homo sapiens
gatgtaatatagtgc

SEQ ID NO: 944589 - DNA, 15 bp, Homo sapiens
tgatgtaatatagtg

SEQ ID NO: 944590 - DNA, 15 bp, Homo sapiens
atgatgtaatatagt

SEQ ID NO: 944591 - DNA, 15 bp, Homo sapiens
tatgatgtaatatag

SEQ ID NO: 944592 - DNA, 15 bp, Homo sapiens
atatgatgtaatata

SEQ ID NO: 944593 - DNA, 15 bp, Homo sapiens
gatatgatgtaatat

SEQ ID NO: 944594 - DNA, 15 bp, Homo sapiens
tgatatgatgtaata

SEQ ID NO: 944595 - DNA, 15 bp, Homo sapiens
atgatatgatgtaat

SEQ ID NO: 944596 - DNA, 15 bp, Homo sapiens
tatgatatgatgtaa

SEQ ID NO: 944597 - DNA, 15 bp, Homo sapiens
atatgatatgatgta

SEQ ID NO: 944598 - DNA, 15 bp, Homo sapiens
aatatgatatgatgt

SEQ ID NO: 944599 - DNA, 15 bp, Homo sapiens
taatatgatatgatg

SEQ ID NO: 944600 - DNA, 15 bp, Homo sapiens
ttaatatgatatgat

SEQ ID NO: 944601 - DNA, 15 bp, Homo sapiens
tttaatatgatatga

SEQ ID NO: 944602 - DNA, 15 bp, Homo sapiens
gtttaatatgatatg

SEQ ID NO: 944603 - DNA, 15 bp, Homo sapiens
tgtttaatatgatat

SEQ ID NO: 944604 - DNA, 15 bp, Homo sapiens
gtgtttaatatgata

SEQ ID NO: 944605 - DNA, 15 bp, Homo sapiens
tgtgtttaatatgat

SEQ ID NO: 944606 - DNA, 15 bp, Homo sapiens
gtgtgtttaatatga

SEQ ID NO: 944607 - DNA, 15 bp, Homo sapiens
tgtgtgtttaatatg

SEQ ID NO: 944608 - DNA, 15 bp, Homo sapiens
atgtgtgtttaatat

SEQ ID NO: 944609 - DNA, 15 bp, Homo sapiens
aatgtgtgtttaata

SEQ ID NO: 944610 - DNA, 15 bp, Homo sapiens
gaatgtgtgtttaat

SEQ ID NO: 944611 - DNA, 15 bp, Homo sapiens
agaatgtgtgtttaa

SEQ ID NO: 944612 - DNA, 15 bp, Homo sapiens
aagaatgtgtgttta

SEQ ID NO: 944613 - DNA, 15 bp, Homo sapiens
aaagaatgtgtgttt

SEQ ID NO: 944614 - DNA, 15 bp, Homo sapiens
caaagaatgtgtgtt

SEQ ID NO: 944615 - DNA, 15 bp, Homo sapiens
acaaagaatgtgtgt

SEQ ID NO: 944616 - DNA, 15 bp, Homo sapiens
cacaaagaatgtgtg

SEQ ID NO: 944617 - DNA, 15 bp, Homo sapiens
gcacaaagaatgtgt

SEQ ID NO: 944618 - DNA, 15 bp, Homo sapiens
agcacaaagaatgtg

SEQ ID NO: 944619 - DNA, 15 bp, Homo sapiens
aagcacaaagaatgt

SEQ ID NO: 944620 - DNA, 15 bp, Homo sapiens
gaagcacaaagaatg

SEQ ID NO: 944621 - DNA, 15 bp, Homo sapiens
ggaagcacaaagaat

SEQ ID NO: 944622 - DNA, 15 bp, Homo sapiens
gggaagcacaaagaa

SEQ ID NO: 944623 - DNA, 15 bp, Homo sapiens
ggggaagcacaaaga

SEQ ID NO: 944624 - DNA, 15 bp, Homo sapiens
tggggaagcacaaag

SEQ ID NO: 944625 - DNA, 15 bp, Homo sapiens
gtggggaagcacaaa

SEQ ID NO: 944626 - DNA, 15 bp, Homo sapiens
agtggggaagcacaa

SEQ ID NO: 944627 - DNA, 15 bp, Homo sapiens
tagtggggaagcaca

SEQ ID NO: 944628 - DNA, 15 bp, Homo sapiens
ttagtggggaagcac

SEQ ID NO: 944629 - DNA, 15 bp, Homo sapiens
tttagtggggaagca

SEQ ID NO: 944630 - DNA, 15 bp, Homo sapiens
gtttagtggggaagc

SEQ ID NO: 944631 - DNA, 15 bp, Homo sapiens
tgtttagtggggaag

SEQ ID NO: 944632 - DNA, 15 bp, Homo sapiens
ttgtttagtggggaa

SEQ ID NO: 944633 - DNA, 15 bp, Homo sapiens
cttgtttagtgggga

SEQ ID NO: 944634 - DNA, 15 bp, Homo sapiens
ccttgtttagtgggg

SEQ ID NO: 944635 - DNA, 15 bp, Homo sapiens
tccttgtttagtggg

SEQ ID NO: 944636 - DNA, 15 bp, Homo sapiens
gtccttgtttagtgg

SEQ ID NO: 944637 - DNA, 15 bp, Homo sapiens
ggtccttgtttagtg

SEQ ID NO: 944638 - DNA, 15 bp, Homo sapiens
tggtccttgtttagt

SEQ ID NO: 944639 - DNA, 15 bp, Homo sapiens
atggtccttgtttag

SEQ ID NO: 944640 - DNA, 15 bp, Homo sapiens
catggtccttgttta

SEQ ID NO: 944641 - DNA, 15 bp, Homo sapiens
gcatggtccttgttt

SEQ ID NO: 944642 - DNA, 15 bp, Homo sapiens
tgcatggtccttgtt

SEQ ID NO: 944643 - DNA, 15 bp, Homo sapiens
ttgcatggtccttgt

SEQ ID NO: 944644 - DNA, 15 bp, Homo sapiens
cttgcatggtccttg

SEQ ID NO: 944645 - DNA, 15 bp, Homo sapiens
tcttgcatggtcctt

SEQ ID NO: 944646 - DNA, 15 bp, Homo sapiens
atcttgcatggtcct

SEQ ID NO: 944647 - DNA, 15 bp, Homo sapiens
catcttgcatggtcc

SEQ ID NO: 944648 - DNA, 15 bp, Homo sapiens
ccatcttgcatggtc

SEQ ID NO: 944649 - DNA, 15 bp, Homo sapiens
tccatcttgcatggt

SEQ ID NO: 944650 - DNA, 15 bp, Homo sapiens
ttccatcttgcatgg

SEQ ID NO: 944651 - DNA, 15 bp, Homo sapiens
gttccatcttgcatg

SEQ ID NO: 944652 - DNA, 15 bp, Homo sapiens
tgttccatcttgcat

SEQ ID NO: 944653 - DNA, 15 bp, Homo sapiens
atgttccatcttgca

SEQ ID NO: 944654 - DNA, 15 bp, Homo sapiens
aatgttccatcttgc

SEQ ID NO: 944655 - DNA, 15 bp, Homo sapiens
caatgttccatcttg

SEQ ID NO: 944656 - DNA, 15 bp, Homo sapiens
gcaatgttccatctt

SEQ ID NO: 944657 - DNA, 15 bp, Homo sapiens
ggcaatgttccatct

SEQ ID NO: 944658 - DNA, 15 bp, Homo sapiens
tggcaatgttccatc

SEQ ID NO: 944659 - DNA, 15 bp, Homo sapiens
atggcaatgttccat

SEQ ID NO: 944660 - DNA, 15 bp, Homo sapiens
aatggcaatgttcca

SEQ ID NO: 944661 - DNA, 15 bp, Homo sapiens
aaatggcaatgttcc

SEQ ID NO: 944662 - DNA, 15 bp, Homo sapiens
aaaatggcaatgttc

SEQ ID NO: 944663 - DNA, 15 bp, Homo sapiens
caaaatggcaatgtt

SEQ ID NO: 944664 - DNA, 15 bp, Homo sapiens
acaaaatggcaatgt

SEQ ID NO: 944665 - DNA, 15 bp, Homo sapiens
aacaaaatggcaatg

SEQ ID NO: 944666 - DNA, 15 bp, Homo sapiens
gaacaaaatggcaat

SEQ ID NO: 944667 - DNA, 15 bp, Homo sapiens
tgaacaaaatggcaa

SEQ ID NO: 944668 - DNA, 15 bp, Homo sapiens
gtgaacaaaatggca

SEQ ID NO: 944669 - DNA, 15 bp, Homo sapiens
agtgaacaaaatggc

SEQ ID NO: 944670 - DNA, 15 bp, Homo sapiens
cagtgaacaaaatgg

SEQ ID NO: 944671 - DNA, 15 bp, Homo sapiens
gcagtgaacaaaatg

SEQ ID NO: 944672 - DNA, 15 bp, Homo sapiens
agcagtgaacaaaat

SEQ ID NO: 944673 - DNA, 15 bp, Homo sapiens
cagcagtgaacaaaa

SEQ ID NO: 944674 - DNA, 15 bp, Homo sapiens
acagcagtgaacaaa

SEQ ID NO: 944675 - DNA, 15 bp, Homo sapiens
aacagcagtgaacaa

SEQ ID NO: 944676 - DNA, 15 bp, Homo sapiens
taacagcagtgaaca

SEQ ID NO: 944677 - DNA, 15 bp, Homo sapiens
ctaacagcagtgaac

SEQ ID NO: 944678 - DNA, 15 bp, Homo sapiens
gctaacagcagtgaa

SEQ ID NO: 944679 - DNA, 15 bp, Homo sapiens
ggctaacagcagtga

SEQ ID NO: 944680 - DNA, 15 bp, Homo sapiens
aggctaacagcagtg

SEQ ID NO: 944681 - DNA, 15 bp, Homo sapiens
gaggctaacagcagt

SEQ ID NO: 944682 - DNA, 15 bp, Homo sapiens
agaggctaacagcag

SEQ ID NO: 944683 - DNA, 15 bp, Homo sapiens
cagaggctaacagca

SEQ ID NO: 944684 - DNA, 15 bp, Homo sapiens
acagaggctaacagc

SEQ ID NO: 944685 - DNA, 15 bp, Homo sapiens
cacagaggctaacag

SEQ ID NO: 944686 - DNA, 15 bp, Homo sapiens
gcacagaggctaaca

SEQ ID NO: 944687 - DNA, 15 bp, Homo sapiens
ggcacagaggctaac

SEQ ID NO: 944688 - DNA, 15 bp, Homo sapiens
aggcacagaggctaa

SEQ ID NO: 944689 - DNA, 15 bp, Homo sapiens
taggcacagaggcta

SEQ ID NO: 944690 - DNA, 15 bp, Homo sapiens
ctaggcacagaggct

SEQ ID NO: 944691 - DNA, 15 bp, Homo sapiens
cctaggcacagaggc

SEQ ID NO: 944692 - DNA, 15 bp, Homo sapiens
tcctaggcacagagg

SEQ ID NO: 944693 - DNA, 15 bp, Homo sapiens
gtcctaggcacagag

SEQ ID NO: 944694 - DNA, 15 bp, Homo sapiens
tgtcctaggcacaga

SEQ ID NO: 944695 - DNA, 15 bp, Homo sapiens
ttgtcctaggcacag

SEQ ID NO: 944696 - DNA, 15 bp, Homo sapiens
attgtcctaggcaca

SEQ ID NO: 944697 - DNA, 15 bp, Homo sapiens
cattgtcctaggcac

SEQ ID NO: 944698 - DNA, 15 bp, Homo sapiens
gcattgtcctaggca

SEQ ID NO: 944699 - DNA, 15 bp, Homo sapiens
ggcattgtcctaggc

SEQ ID NO: 944700 - DNA, 15 bp, Homo sapiens
tggcattgtcctagg

SEQ ID NO: 944701 - DNA, 15 bp, Homo sapiens
ctggcattgtcctag

SEQ ID NO: 944702 - DNA, 15 bp, Homo sapiens
actggcattgtccta

SEQ ID NO: 944703 - DNA, 15 bp, Homo sapiens
aactggcattgtcct

SEQ ID NO: 944704 - DNA, 15 bp, Homo sapiens
taactggcattgtcc

SEQ ID NO: 944705 - DNA, 15 bp, Homo sapiens
ataactggcattgtc

SEQ ID NO: 944706 - DNA, 15 bp, Homo sapiens
cataactggcattgt

SEQ ID NO: 944707 - DNA, 15 bp, Homo sapiens
gcataactggcattg

SEQ ID NO: 944708 - DNA, 15 bp, Homo sapiens
tgcataactggcatt

SEQ ID NO: 944709 - DNA, 15 bp, Homo sapiens
ctgcataactggcat

SEQ ID NO: 944710 - DNA, 15 bp, Homo sapiens
actgcataactggca

SEQ ID NO: 944711 - DNA, 15 bp, Homo sapiens
tactgcataactggc

SEQ ID NO: 944712 - DNA, 15 bp, Homo sapiens
ctactgcataactgg

SEQ ID NO: 944713 - DNA, 15 bp, Homo sapiens
actactgcataactg

SEQ ID NO: 944714 - DNA, 15 bp, Homo sapiens
aactactgcataact

SEQ ID NO: 944715 - DNA, 15 bp, Homo sapiens
taactactgcataac

SEQ ID NO: 944716 - DNA, 15 bp, Homo sapiens
gtaactactgcataa

SEQ ID NO: 944717 - DNA, 15 bp, Homo sapiens
agtaactactgcata

SEQ ID NO: 944718 - DNA, 15 bp, Homo sapiens
gagtaactactgcat

SEQ ID NO: 944719 - DNA, 15 bp, Homo sapiens
tgagtaactactgca

SEQ ID NO: 944720 - DNA, 15 bp, Homo sapiens
ttgagtaactactgc

SEQ ID NO: 944721 - DNA, 15 bp, Homo sapiens
attgagtaactactg

SEQ ID NO: 944722 - DNA, 15 bp, Homo sapiens
tattgagtaactact

SEQ ID NO: 944723 - DNA, 15 bp, Homo sapiens
gtattgagtaactac

SEQ ID NO: 944724 - DNA, 15 bp, Homo sapiens
agtattgagtaacta

SEQ ID NO: 944725 - DNA, 15 bp, Homo sapiens
aagtattgagtaact

SEQ ID NO: 944726 - DNA, 15 bp, Homo sapiens
caagtattgagtaac

SEQ ID NO: 944727 - DNA, 15 bp, Homo sapiens
acaagtattgagtaa

SEQ ID NO: 944728 - DNA, 15 bp, Homo sapiens
aacaagtattgagta

SEQ ID NO: 944729 - DNA, 15 bp, Homo sapiens
caacaagtattgagt

SEQ ID NO: 944730 - DNA, 15 bp, Homo sapiens
tcaacaagtattgag

SEQ ID NO: 944731 - DNA, 15 bp, Homo sapiens
ttcaacaagtattga

SEQ ID NO: 944732 - DNA, 15 bp, Homo sapiens
attcaacaagtattg

SEQ ID NO: 944733 - DNA, 15 bp, Homo sapiens
cattcaacaagtatt

SEQ ID NO: 944734 - DNA, 15 bp, Homo sapiens
tcattcaacaagtat

SEQ ID NO: 944735 - DNA, 15 bp, Homo sapiens
ttcattcaacaagta

SEQ ID NO: 944736 - DNA, 15 bp, Homo sapiens
attcattcaacaagt

SEQ ID NO: 944737 - DNA, 15 bp, Homo sapiens
cattcattcaacaag

SEQ ID NO: 944738 - DNA, 15 bp, Homo sapiens
ccattcattcaacaa

SEQ ID NO: 944739 - DNA, 15 bp, Homo sapiens
accattcattcaaca

SEQ ID NO: 944740 - DNA, 15 bp, Homo sapiens
caccattcattcaac

SEQ ID NO: 944741 - DNA, 15 bp, Homo sapiens
tcaccattcattcaa

SEQ ID NO: 944742 - DNA, 15 bp, Homo sapiens
ttcaccattcattca

SEQ ID NO: 944743 - DNA, 15 bp, Homo sapiens
attcaccattcattc

SEQ ID NO: 944744 - DNA, 15 bp, Homo sapiens
tattcaccattcatt

SEQ ID NO: 944745 - DNA, 15 bp, Homo sapiens
ctattcaccattcat

SEQ ID NO: 944746 - DNA, 15 bp, Homo sapiens
tctattcaccattca

SEQ ID NO: 944747 - DNA, 15 bp, Homo sapiens
ttctattcaccattc

SEQ ID NO: 944748 - DNA, 15 bp, Homo sapiens
gttctattcaccatt

SEQ ID NO: 944749 - DNA, 15 bp, Homo sapiens
tgttctattcaccat

SEQ ID NO: 944750 - DNA, 15 bp, Homo sapiens
atgttctattcacca

SEQ ID NO: 944751 - DNA, 15 bp, Homo sapiens
tatgttctattcacc

SEQ ID NO: 944752 - DNA, 15 bp, Homo sapiens
ctatgttctattcac

SEQ ID NO: 944753 - DNA, 15 bp, Homo sapiens
tctatgttctattca

SEQ ID NO: 944754 - DNA, 15 bp, Homo sapiens
ttctatgttctattc

SEQ ID NO: 944755 - DNA, 15 bp, Homo sapiens
tttctatgttctatt

SEQ ID NO: 944756 - DNA, 15 bp, Homo sapiens
atttctatgttctat

SEQ ID NO: 944757 - DNA, 15 bp, Homo sapiens
aatttctatgttcta

SEQ ID NO: 944758 - DNA, 15 bp, Homo sapiens
aaatttctatgttct

SEQ ID NO: 944759 - DNA, 15 bp, Homo sapiens
caaatttctatgttc

SEQ ID NO: 944760 - DNA, 15 bp, Homo sapiens
gcaaatttctatgtt

SEQ ID NO: 944761 - DNA, 15 bp, Homo sapiens
ggcaaatttctatgt

SEQ ID NO: 944762 - DNA, 15 bp, Homo sapiens
aggcaaatttctatg

SEQ ID NO: 944763 - DNA, 15 bp, Homo sapiens
taggcaaatttctat

SEQ ID NO: 944764 - DNA, 15 bp, Homo sapiens
ataggcaaatttcta

SEQ ID NO: 944765 - DNA, 15 bp, Homo sapiens
cataggcaaatttct

SEQ ID NO: 944766 - DNA, 15 bp, Homo sapiens
gcataggcaaatttc

SEQ ID NO: 944767 - DNA, 15 bp, Homo sapiens
cgcataggcaaattt

SEQ ID NO: 944768 - DNA, 15 bp, Homo sapiens
acgcataggcaaatt

SEQ ID NO: 944769 - DNA, 15 bp, Homo sapiens
cacgcataggcaaat

SEQ ID NO: 944770 - DNA, 15 bp, Homo sapiens
gcacgcataggcaaa

SEQ ID NO: 944771 - DNA, 15 bp, Homo sapiens
agcacgcataggcaa

SEQ ID NO: 944772 - DNA, 15 bp, Homo sapiens
aagcacgcataggca

SEQ ID NO: 944773 - DNA, 15 bp, Homo sapiens
aaagcacgcataggc

SEQ ID NO: 944774 - DNA, 15 bp, Homo sapiens
aaaagcacgcatagg

SEQ ID NO: 944775 - DNA, 15 bp, Homo sapiens
caaaagcacgcatag

SEQ ID NO: 944776 - DNA, 15 bp, Homo sapiens
tcaaaagcacgcata

SEQ ID NO: 944777 - DNA, 15 bp, Homo sapiens
ttcaaaagcacgcat

SEQ ID NO: 944778 - DNA, 15 bp, Homo sapiens
tttcaaaagcacgca

SEQ ID NO: 944779 - DNA, 15 bp, Homo sapiens
ttttcaaaagcacgc

SEQ ID NO: 944780 - DNA, 15 bp, Homo sapiens
gttttcaaaagcacg

SEQ ID NO: 944781 - DNA, 15 bp, Homo sapiens
ggttttcaaaagcac

SEQ ID NO: 944782 - DNA, 15 bp, Homo sapiens
tggttttcaaaagca

SEQ ID NO: 944783 - DNA, 15 bp, Homo sapiens
atggttttcaaaagc

SEQ ID NO: 944784 - DNA, 15 bp, Homo sapiens
tatggttttcaaaag

SEQ ID NO: 944785 - DNA, 15 bp, Homo sapiens
atatggttttcaaaa

SEQ ID NO: 944786 - DNA, 15 bp, Homo sapiens
aatatggttttcaaa

SEQ ID NO: 944787 - DNA, 15 bp, Homo sapiens
aaatatggttttcaa

SEQ ID NO: 944788 - DNA, 15 bp, Homo sapiens
aaaatatggttttca

SEQ ID NO: 944789 - DNA, 15 bp, Homo sapiens
taaaatatggttttc

SEQ ID NO: 944790 - DNA, 15 bp, Homo sapiens
ttaaaatatggtttt

SEQ ID NO: 944791 - DNA, 15 bp, Homo sapiens
attaaaatatggttt

SEQ ID NO: 944792 - DNA, 15 bp, Homo sapiens
tattaaaatatggtt

SEQ ID NO: 944793 - DNA, 15 bp, Homo sapiens
atattaaaatatggt

SEQ ID NO: 944794 - DNA, 15 bp, Homo sapiens
aatattaaaatatgg

SEQ ID NO: 944795 - DNA, 15 bp, Homo sapiens
taatattaaaatatg

SEQ ID NO: 944796 - DNA, 15 bp, Homo sapiens
gtaatattaaaatat

SEQ ID NO: 944797 - DNA, 15 bp, Homo sapiens
cgtaatattaaaata

SEQ ID NO: 944798 - DNA, 15 bp, Homo sapiens
gcgtaatattaaaat

SEQ ID NO: 944799 - DNA, 15 bp, Homo sapiens
agcgtaatattaaaa

SEQ ID NO: 944800 - DNA, 15 bp, Homo sapiens
aagcgtaatattaaa

SEQ ID NO: 944801 - DNA, 15 bp, Homo sapiens
aaagcgtaatattaa

SEQ ID NO: 944802 - DNA, 15 bp, Homo sapiens
caaagcgtaatatta

SEQ ID NO: 944803 - DNA, 15 bp, Homo sapiens
acaaagcgtaatatt

SEQ ID NO: 944804 - DNA, 15 bp, Homo sapiens
aacaaagcgtaatat

SEQ ID NO: 944805 - DNA, 15 bp, Homo sapiens
taacaaagcgtaata

SEQ ID NO: 944806 - DNA, 15 bp, Homo sapiens
ttaacaaagcgtaat

SEQ ID NO: 944807 - DNA, 15 bp, Homo sapiens
tttaacaaagcgtaa

SEQ ID NO: 944808 - DNA, 15 bp, Homo sapiens
ttttaacaaagcgta

SEQ ID NO: 944809 - DNA, 15 bp, Homo sapiens
tttttaacaaagcgt

SEQ ID NO: 944810 - DNA, 15 bp, Homo sapiens
atttttaacaaagcg

SEQ ID NO: 944811 - DNA, 15 bp, Homo sapiens
catttttaacaaagc

SEQ ID NO: 944812 - DNA, 15 bp, Homo sapiens
acatttttaacaaag

SEQ ID NO: 944813 - DNA, 15 bp, Homo sapiens
cacatttttaacaaa

SEQ ID NO: 944814 - DNA, 15 bp, Homo sapiens
acacatttttaacaa

SEQ ID NO: 944815 - DNA, 15 bp, Homo sapiens
tacacatttttaaca

SEQ ID NO: 944816 - DNA, 15 bp, Homo sapiens
atacacatttttaac

SEQ ID NO: 944817 - DNA, 15 bp, Homo sapiens
gatacacatttttaa

SEQ ID NO: 944818 - DNA, 15 bp, Homo sapiens
agatacacattttta

SEQ ID NO: 944819 - DNA, 15 bp, Homo sapiens
aagatacacattttt

SEQ ID NO: 944820 - DNA, 15 bp, Homo sapiens
aaagatacacatttt

SEQ ID NO: 944821 - DNA, 15 bp, Homo sapiens
taaagatacacattt

SEQ ID NO: 944822 - DNA, 15 bp, Homo sapiens
ataaagatacacatt

SEQ ID NO: 944823 - DNA, 15 bp, Homo sapiens
tataaagatacacat

SEQ ID NO: 944824 - DNA, 15 bp, Homo sapiens
ttataaagatacaca

SEQ ID NO: 944825 - DNA, 15 bp, Homo sapiens
tttataaagatacac

SEQ ID NO: 944826 - DNA, 15 bp, Homo sapiens
atttataaagataca

SEQ ID NO: 944827 - DNA, 15 bp, Homo sapiens
gatttataaagatac

SEQ ID NO: 944828 - DNA, 15 bp, Homo sapiens
ggatttataaagata

SEQ ID NO: 944829 - DNA, 15 bp, Homo sapiens
aggatttataaagat

SEQ ID NO: 944830 - DNA, 15 bp, Homo sapiens
gaggatttataaaga

SEQ ID NO: 944831 - DNA, 15 bp, Homo sapiens
tgaggatttataaag

SEQ ID NO: 944832 - DNA, 15 bp, Homo sapiens
atgaggatttataaa

SEQ ID NO: 944833 - DNA, 15 bp, Homo sapiens
tatgaggatttataa

SEQ ID NO: 944834 - DNA, 15 bp, Homo sapiens
atatgaggatttata

SEQ ID NO: 944835 - DNA, 15 bp, Homo sapiens
aatatgaggatttat

SEQ ID NO: 944836 - DNA, 15 bp, Homo sapiens
aaatatgaggattta

SEQ ID NO: 944837 - DNA, 15 bp, Homo sapiens
gaaatatgaggattt

SEQ ID NO: 944838 - DNA, 15 bp, Homo sapiens
ggaaatatgaggatt

SEQ ID NO: 944839 - DNA, 15 bp, Homo sapiens
tggaaatatgaggat

SEQ ID NO: 944840 - DNA, 15 bp, Homo sapiens
atggaaatatgagga

SEQ ID NO: 944841 - DNA, 15 bp, Homo sapiens
catggaaatatgagg

SEQ ID NO: 944842 - DNA, 15 bp, Homo sapiens
ccatggaaatatgag

SEQ ID NO: 944843 - DNA, 15 bp, Homo sapiens
gccatggaaatatga

SEQ ID NO: 944844 - DNA, 15 bp, Homo sapiens
tgccatggaaatatg

SEQ ID NO: 944845 - DNA, 15 bp, Homo sapiens
ttgccatggaaatat

SEQ ID NO: 944846 - DNA, 15 bp, Homo sapiens
tttgccatggaaata

SEQ ID NO: 944847 - DNA, 15 bp, Homo sapiens
gtttgccatggaaat

SEQ ID NO: 944848 - DNA, 15 bp, Homo sapiens
ggtttgccatggaaa

SEQ ID NO: 944849 - DNA, 15 bp, Homo sapiens
aggtttgccatggaa

SEQ ID NO: 944850 - DNA, 15 bp, Homo sapiens
aaggtttgccatgga

SEQ ID NO: 944851 - DNA, 15 bp, Homo sapiens
taaggtttgccatgg

SEQ ID NO: 944852 - DNA, 15 bp, Homo sapiens
ataaggtttgccatg

SEQ ID NO: 944853 - DNA, 15 bp, Homo sapiens
gataaggtttgccat

SEQ ID NO: 944854 - DNA, 15 bp, Homo sapiens
agataaggtttgcca

SEQ ID NO: 944855 - DNA, 15 bp, Homo sapiens
aagataaggtttgcc

SEQ ID NO: 944856 - DNA, 15 bp, Homo sapiens
gaagataaggtttgc

SEQ ID NO: 944857 - DNA, 15 bp, Homo sapiens
agaagataaggtttg

SEQ ID NO: 944858 - DNA, 15 bp, Homo sapiens
tagaagataaggttt

SEQ ID NO: 944859 - DNA, 15 bp, Homo sapiens
ttagaagataaggtt

SEQ ID NO: 944860 - DNA, 15 bp, Homo sapiens
gttagaagataaggt

SEQ ID NO: 944861 - DNA, 15 bp, Homo sapiens
agttagaagataagg

SEQ ID NO: 944862 - DNA, 15 bp, Homo sapiens
aagttagaagataag

SEQ ID NO: 944863 - DNA, 15 bp, Homo sapiens
aaagttagaagataa

SEQ ID NO: 944864 - DNA, 15 bp, Homo sapiens
aaaagttagaagata

SEQ ID NO: 944865 - DNA, 15 bp, Homo sapiens
gaaaagttagaagat

SEQ ID NO: 944866 - DNA, 15 bp, Homo sapiens
tgaaaagttagaaga

SEQ ID NO: 944867 - DNA, 15 bp, Homo sapiens
atgaaaagttagaag

SEQ ID NO: 944868 - DNA, 15 bp, Homo sapiens
aatgaaaagttagaa

SEQ ID NO: 944869 - DNA, 15 bp, Homo sapiens
caatgaaaagttaga

SEQ ID NO: 944870 - DNA, 15 bp, Homo sapiens
acaatgaaaagttag

SEQ ID NO: 944871 - DNA, 15 bp, Homo sapiens
gacaatgaaaagtta

SEQ ID NO: 944872 - DNA, 15 bp, Homo sapiens
ggacaatgaaaagtt

SEQ ID NO: 944873 - DNA, 15 bp, Homo sapiens
aggacaatgaaaagt

SEQ ID NO: 944874 - DNA, 15 bp, Homo sapiens
gaggacaatgaaaag

SEQ ID NO: 944875 - DNA, 15 bp, Homo sapiens
tgaggacaatgaaaa

SEQ ID NO: 944876 - DNA, 15 bp, Homo sapiens
ttgaggacaatgaaa

SEQ ID NO: 944877 - DNA, 15 bp, Homo sapiens
tttgaggacaatgaa

SEQ ID NO: 944878 - DNA, 15 bp, Homo sapiens
ctttgaggacaatga

SEQ ID NO: 944879 - DNA, 15 bp, Homo sapiens
tctttgaggacaatg

SEQ ID NO: 944880 - DNA, 15 bp, Homo sapiens
atctttgaggacaat

SEQ ID NO: 944881 - DNA, 15 bp, Homo sapiens
aatctttgaggacaa

SEQ ID NO: 944882 - DNA, 15 bp, Homo sapiens
taatctttgaggaca

SEQ ID NO: 944883 - DNA, 15 bp, Homo sapiens
ttaatctttgaggac

SEQ ID NO: 944884 - DNA, 15 bp, Homo sapiens
cttaatctttgagga

SEQ ID NO: 944885 - DNA, 15 bp, Homo sapiens
tcttaatctttgagg

SEQ ID NO: 944886 - DNA, 15 bp, Homo sapiens
atcttaatctttgag

SEQ ID NO: 944887 - DNA, 15 bp, Homo sapiens
aatcttaatctttga

SEQ ID NO: 944888 - DNA, 15 bp, Homo sapiens
gaatcttaatctttg

SEQ ID NO: 944889 - DNA, 15 bp, Homo sapiens
agaatcttaatcttt

SEQ ID NO: 944890 - DNA, 15 bp, Homo sapiens
aagaatcttaatctt

SEQ ID NO: 944891 - DNA, 15 bp, Homo sapiens
taagaatcttaatct

SEQ ID NO: 944892 - DNA, 15 bp, Homo sapiens
ttaagaatcttaatc

SEQ ID NO: 944893 - DNA, 15 bp, Homo sapiens
tttaagaatcttaat

SEQ ID NO: 944894 - DNA, 15 bp, Homo sapiens
gtttaagaatcttaa

SEQ ID NO: 944895 - DNA, 15 bp, Homo sapiens
tgtttaagaatctta

SEQ ID NO: 944896 - DNA, 15 bp, Homo sapiens
atgtttaagaatctt

SEQ ID NO: 944897 - DNA, 15 bp, Homo sapiens
catgtttaagaatct

SEQ ID NO: 944898 - DNA, 15 bp, Homo sapiens
acatgtttaagaatc

SEQ ID NO: 944899 - DNA, 15 bp, Homo sapiens
aacatgtttaagaat

SEQ ID NO: 944900 - DNA, 15 bp, Homo sapiens
gaacatgtttaagaa

SEQ ID NO: 944901 - DNA, 15 bp, Homo sapiens
ggaacatgtttaaga

SEQ ID NO: 944902 - DNA, 15 bp, Homo sapiens
aggaacatgtttaag

SEQ ID NO: 944903 - DNA, 15 bp, Homo sapiens
caggaacatgtttaa

SEQ ID NO: 944904 - DNA, 15 bp, Homo sapiens
tcaggaacatgttta

SEQ ID NO: 944905 - DNA, 15 bp, Homo sapiens
ttcaggaacatgttt

SEQ ID NO: 944906 - DNA, 15 bp, Homo sapiens
cttcaggaacatgtt

SEQ ID NO: 944907 - DNA, 15 bp, Homo sapiens
ccttcaggaacatgt

SEQ ID NO: 944908 - DNA, 15 bp, Homo sapiens
accttcaggaacatg

SEQ ID NO: 944909 - DNA, 15 bp, Homo sapiens
caccttcaggaacat

SEQ ID NO: 944910 - DNA, 15 bp, Homo sapiens
gcaccttcaggaaca

SEQ ID NO: 944911 - DNA, 15 bp, Homo sapiens
agcaccttcaggaac

SEQ ID NO: 944912 - DNA, 15 bp, Homo sapiens
cagcaccttcaggaa

SEQ ID NO: 944913 - DNA, 15 bp, Homo sapiens
tcagcaccttcagga

SEQ ID NO: 944914 - DNA, 15 bp, Homo sapiens
ctcagcaccttcagg

SEQ ID NO: 944915 - DNA, 15 bp, Homo sapiens
tctcagcaccttcag

SEQ ID NO: 944916 - DNA, 15 bp, Homo sapiens
gtctcagcaccttca

SEQ ID NO: 944917 - DNA, 15 bp, Homo sapiens
tgtctcagcaccttc

SEQ ID NO: 944918 - DNA, 15 bp, Homo sapiens
ctgtctcagcacctt

SEQ ID NO: 944919 - DNA, 15 bp, Homo sapiens
tctgtctcagcacct

SEQ ID NO: 944920 - DNA, 15 bp, Homo sapiens
ctctgtctcagcacc

SEQ ID NO: 944921 - DNA, 15 bp, Homo sapiens
gctctgtctcagcac

SEQ ID NO: 944922 - DNA, 15 bp, Homo sapiens
tgctctgtctcagca

SEQ ID NO: 944923 - DNA, 15 bp, Homo sapiens
ttgctctgtctcagc

SEQ ID NO: 944924 - DNA, 15 bp, Homo sapiens
cttgctctgtctcag

SEQ ID NO: 944925 - DNA, 15 bp, Homo sapiens
ccttgctctgtctca

SEQ ID NO: 944926 - DNA, 15 bp, Homo sapiens
gccttgctctgtctc

SEQ ID NO: 944927 - DNA, 15 bp, Homo sapiens
ggccttgctctgtct

SEQ ID NO: 944928 - DNA, 15 bp, Homo sapiens
aggccttgctctgtc

SEQ ID NO: 944929 - DNA, 15 bp, Homo sapiens
aaggccttgctctgt

SEQ ID NO: 944930 - DNA, 15 bp, Homo sapiens
taaggccttgctctg

SEQ ID NO: 944931 - DNA, 15 bp, Homo sapiens
ttaaggccttgctct

SEQ ID NO: 944932 - DNA, 15 bp, Homo sapiens
tttaaggccttgctc

SEQ ID NO: 944933 - DNA, 15 bp, Homo sapiens
gtttaaggccttgct

SEQ ID NO: 944934 - DNA, 15 bp, Homo sapiens
cgtttaaggccttgc

SEQ ID NO: 944935 - DNA, 15 bp, Homo sapiens
ccgtttaaggccttg

SEQ ID NO: 944936 - DNA, 15 bp, Homo sapiens
cccgtttaaggcctt

SEQ ID NO: 944937 - DNA, 15 bp, Homo sapiens
tcccgtttaaggcct

SEQ ID NO: 944938 - DNA, 15 bp, Homo sapiens
ctcccgtttaaggcc

SEQ ID NO: 944939 - DNA, 15 bp, Homo sapiens
gctcccgtttaaggc

SEQ ID NO: 944940 - DNA, 15 bp, Homo sapiens
agctcccgtttaagg

SEQ ID NO: 944941 - DNA, 15 bp, Homo sapiens
aagctcccgtttaag

SEQ ID NO: 944942 - DNA, 15 bp, Homo sapiens
gaagctcccgtttaa

SEQ ID NO: 944943 - DNA, 15 bp, Homo sapiens
tgaagctcccgttta

SEQ ID NO: 944944 - DNA, 15 bp, Homo sapiens
ttgaagctcccgttt

SEQ ID NO: 944945 - DNA, 15 bp, Homo sapiens
cttgaagctcccgtt

SEQ ID NO: 944946 - DNA, 15 bp, Homo sapiens
acttgaagctcccgt

SEQ ID NO: 944947 - DNA, 15 bp, Homo sapiens
aacttgaagctcccg

SEQ ID NO: 944948 - DNA, 15 bp, Homo sapiens
gaacttgaagctccc

SEQ ID NO: 944949 - DNA, 15 bp, Homo sapiens
agaacttgaagctcc

SEQ ID NO: 944950 - DNA, 15 bp, Homo sapiens
aagaacttgaagctc

SEQ ID NO: 944951 - DNA, 15 bp, Homo sapiens
taagaacttgaagct

SEQ ID NO: 944952 - DNA, 15 bp, Homo sapiens
ctaagaacttgaagc

SEQ ID NO: 944953 - DNA, 15 bp, Homo sapiens
cctaagaacttgaag

SEQ ID NO: 944954 - DNA, 15 bp, Homo sapiens
acctaagaacttgaa

SEQ ID NO: 944955 - DNA, 15 bp, Homo sapiens
tacctaagaacttga

SEQ ID NO: 944956 - DNA, 15 bp, Homo sapiens
gtacctaagaacttg

SEQ ID NO: 944957 - DNA, 15 bp, Homo sapiens
tgtacctaagaactt

SEQ ID NO: 944958 - DNA, 15 bp, Homo sapiens
atgtacctaagaact

SEQ ID NO: 944959 - DNA, 15 bp, Homo sapiens
gatgtacctaagaac

SEQ ID NO: 944960 - DNA, 15 bp, Homo sapiens
tgatgtacctaagaa

SEQ ID NO: 944961 - DNA, 15 bp, Homo sapiens
atgatgtacctaaga

SEQ ID NO: 944962 - DNA, 15 bp, Homo sapiens
catgatgtacctaag

SEQ ID NO: 944963 - DNA, 15 bp, Homo sapiens
acatgatgtacctaa

SEQ ID NO: 944964 - DNA, 15 bp, Homo sapiens
tacatgatgtaccta

SEQ ID NO: 944965 - DNA, 15 bp, Homo sapiens
atacatgatgtacct

SEQ ID NO: 944966 - DNA, 15 bp, Homo sapiens
aatacatgatgtacc

SEQ ID NO: 944967 - DNA, 15 bp, Homo sapiens
gaatacatgatgtac

SEQ ID NO: 944968 - DNA, 15 bp, Homo sapiens
tgaatacatgatgta

SEQ ID NO: 944969 - DNA, 15 bp, Homo sapiens
atgaatacatgatgt

SEQ ID NO: 944970 - DNA, 15 bp, Homo sapiens
tatgaatacatgatg

SEQ ID NO: 944971 - DNA, 15 bp, Homo sapiens
atatgaatacatgat

SEQ ID NO: 944972 - DNA, 15 bp, Homo sapiens
catatgaatacatga

SEQ ID NO: 944973 - DNA, 15 bp, Homo sapiens
tcatatgaatacatg

SEQ ID NO: 944974 - DNA, 15 bp, Homo sapiens
gtcatatgaatacat

SEQ ID NO: 944975 - DNA, 15 bp, Homo sapiens
agtcatatgaataca

SEQ ID NO: 944976 - DNA, 15 bp, Homo sapiens
tagtcatatgaatac

SEQ ID NO: 944977 - DNA, 15 bp, Homo sapiens
gtagtcatatgaata

SEQ ID NO: 944978 - DNA, 15 bp, Homo sapiens
agtagtcatatgaat

SEQ ID NO: 944979 - DNA, 15 bp, Homo sapiens
aagtagtcatatgaa

SEQ ID NO: 944980 - DNA, 15 bp, Homo sapiens
aaagtagtcatatga

SEQ ID NO: 944981 - DNA, 15 bp, Homo sapiens
caaagtagtcatatg

SEQ ID NO: 944982 - DNA, 15 bp, Homo sapiens
acaaagtagtcatat

SEQ ID NO: 944983 - DNA, 15 bp, Homo sapiens
aacaaagtagtcata

SEQ ID NO: 944984 - DNA, 15 bp, Homo sapiens
aaacaaagtagtcat

SEQ ID NO: 944985 - DNA, 15 bp, Homo sapiens
aaaacaaagtagtca

SEQ ID NO: 944986 - DNA, 15 bp, Homo sapiens
aaaaacaaagtagtc

SEQ ID NO: 944987 - DNA, 15 bp, Homo sapiens
aaaaaacaaagtagt

SEQ ID NO: 944988 - DNA, 15 bp, Homo sapiens
aaaaaaacaaagtag

SEQ ID NO: 944989 - DNA, 15 bp, Homo sapiens
gaaaaaaacaaagta

SEQ ID NO: 944990 - DNA, 15 bp, Homo sapiens
agaaaaaaacaaagt

SEQ ID NO: 944991 - DNA, 15 bp, Homo sapiens
aagaaaaaaacaaag

SEQ ID NO: 944992 - DNA, 15 bp, Homo sapiens
aaagaaaaaaacaaa

SEQ ID NO: 944993 - DNA, 15 bp, Homo sapiens
taaagaaaaaaacaa

SEQ ID NO: 944994 - DNA, 15 bp, Homo sapiens
ttaaagaaaaaaaca

SEQ ID NO: 944995 - DNA, 15 bp, Homo sapiens
tttaaagaaaaaaac

SEQ ID NO: 944996 - DNA, 15 bp, Homo sapiens
ttttaaagaaaaaaa

SEQ ID NO: 944997 - DNA, 15 bp, Homo sapiens
tttttaaagaaaaaa

SEQ ID NO: 944998 - DNA, 15 bp, Homo sapiens
ttttttaaagaaaaa

SEQ ID NO: 944999 - DNA, 15 bp, Homo sapiens
tttttttaaagaaaa

SEQ ID NO: 945000 - DNA, 15 bp, Homo sapiens
ttttttttaaagaaa

SEQ ID NO: 945001 - DNA, 15 bp, Homo sapiens
tttttttttaaagaa

SEQ ID NO: 945002 - DNA, 15 bp, Homo sapiens
ttttttttttaaaga

SEQ ID NO: 945003 - DNA, 15 bp, Homo sapiens
attttttttttaaag

SEQ ID NO: 945004 - DNA, 15 bp, Homo sapiens
aattttttttttaaa

SEQ ID NO: 945005 - DNA, 15 bp, Homo sapiens
taattttttttttaa

SEQ ID NO: 945006 - DNA, 15 bp, Homo sapiens
ataatttttttttta

SEQ ID NO: 945007 - DNA, 15 bp, Homo sapiens
aataatttttttttt

SEQ ID NO: 945008 - DNA, 15 bp, Homo sapiens
taataattttttttt

SEQ ID NO: 945009 - DNA, 15 bp, Homo sapiens
ctaataatttttttt

SEQ ID NO: 945010 - DNA, 15 bp, Homo sapiens
actaataattttttt

SEQ ID NO: 945011 - DNA, 15 bp, Homo sapiens
aactaataatttttt

SEQ ID NO: 945012 - DNA, 15 bp, Homo sapiens
aaactaataattttt

SEQ ID NO: 945013 - DNA, 15 bp, Homo sapiens
aaaactaataatttt

SEQ ID NO: 945014 - DNA, 15 bp, Homo sapiens
aaaaactaataattt

SEQ ID NO: 945015 - DNA, 15 bp, Homo sapiens
taaaaactaataatt

SEQ ID NO: 945016 - DNA, 15 bp, Homo sapiens
ataaaaactaataat

SEQ ID NO: 945017 - DNA, 15 bp, Homo sapiens
tataaaaactaataa

SEQ ID NO: 945018 - DNA, 15 bp, Homo sapiens
atataaaaactaata

SEQ ID NO: 945019 - DNA, 15 bp, Homo sapiens
tatataaaaactaat

SEQ ID NO: 945020 - DNA, 15 bp, Homo sapiens
gtatataaaaactaa

SEQ ID NO: 945021 - DNA, 15 bp, Homo sapiens
agtatataaaaacta

SEQ ID NO: 945022 - DNA, 15 bp, Homo sapiens
gagtatataaaaact

SEQ ID NO: 945023 - DNA, 15 bp, Homo sapiens
ggagtatataaaaac

SEQ ID NO: 945024 - DNA, 15 bp, Homo sapiens
cggagtatataaaaa

SEQ ID NO: 945025 - DNA, 15 bp, Homo sapiens
tcggagtatataaaa

SEQ ID NO: 945026 - DNA, 15 bp, Homo sapiens
ttcggagtatataaa

SEQ ID NO: 945027 - DNA, 15 bp, Homo sapiens
attcggagtatataa

SEQ ID NO: 945028 - DNA, 15 bp, Homo sapiens
aattcggagtatata

SEQ ID NO: 945029 - DNA, 15 bp, Homo sapiens
caattcggagtatat

SEQ ID NO: 945030 - DNA, 15 bp, Homo sapiens
gcaattcggagtata

SEQ ID NO: 945031 - DNA, 15 bp, Homo sapiens
agcaattcggagtat

SEQ ID NO: 945032 - DNA, 15 bp, Homo sapiens
tagcaattcggagta

SEQ ID NO: 945033 - DNA, 15 bp, Homo sapiens
gtagcaattcggagt

SEQ ID NO: 945034 - DNA, 15 bp, Homo sapiens
tgtagcaattcggag

SEQ ID NO: 945035 - DNA, 15 bp, Homo sapiens
ttgtagcaattcgga

SEQ ID NO: 945036 - DNA, 15 bp, Homo sapiens
gttgtagcaattcgg

SEQ ID NO: 945037 - DNA, 15 bp, Homo sapiens
agttgtagcaattcg

SEQ ID NO: 945038 - DNA, 15 bp, Homo sapiens
tagttgtagcaattc

SEQ ID NO: 945039 - DNA, 15 bp, Homo sapiens
ctagttgtagcaatt

SEQ ID NO: 945040 - DNA, 15 bp, Homo sapiens
tctagttgtagcaat

SEQ ID NO: 945041 - DNA, 15 bp, Homo sapiens
ctctagttgtagcaa

SEQ ID NO: 945042 - DNA, 15 bp, Homo sapiens
tctctagttgtagca

SEQ ID NO: 945043 - DNA, 15 bp, Homo sapiens
gtctctagttgtagc

SEQ ID NO: 945044 - DNA, 15 bp, Homo sapiens
tgtctctagttgtag

SEQ ID NO: 945045 - DNA, 15 bp, Homo sapiens
ttgtctctagttgta

SEQ ID NO: 945046 - DNA, 15 bp, Homo sapiens
cttgtctctagttgt

SEQ ID NO: 945047 - DNA, 15 bp, Homo sapiens
gcttgtctctagttg

SEQ ID NO: 945048 - DNA, 15 bp, Homo sapiens
tgcttgtctctagtt

SEQ ID NO: 945049 - DNA, 15 bp, Homo sapiens
atgcttgtctctagt

SEQ ID NO: 945050 - DNA, 15 bp, Homo sapiens
aatgcttgtctctag

SEQ ID NO: 945051 - DNA, 15 bp, Homo sapiens
aaatgcttgtctcta

SEQ ID NO: 945052 - DNA, 15 bp, Homo sapiens
aaaatgcttgtctct

SEQ ID NO: 945053 - DNA, 15 bp, Homo sapiens
aaaaatgcttgtctc

SEQ ID NO: 945054 - DNA, 15 bp, Homo sapiens
gaaaaatgcttgtct

SEQ ID NO: 945055 - DNA, 15 bp, Homo sapiens
cgaaaaatgcttgtc

SEQ ID NO: 945056 - DNA, 15 bp, Homo sapiens
tcgaaaaatgcttgt

SEQ ID NO: 945057 - DNA, 15 bp, Homo sapiens
gtcgaaaaatgcttg

SEQ ID NO: 945058 - DNA, 15 bp, Homo sapiens
agtcgaaaaatgctt

SEQ ID NO: 945059 - DNA, 15 bp, Homo sapiens
aagtcgaaaaatgct

SEQ ID NO: 945060 - DNA, 15 bp, Homo sapiens
aaagtcgaaaaatgc

SEQ ID NO: 945061 - DNA, 15 bp, Homo sapiens
taaagtcgaaaaatg

SEQ ID NO: 945062 - DNA, 15 bp, Homo sapiens
gtaaagtcgaaaaat

SEQ ID NO: 945063 - DNA, 15 bp, Homo sapiens
agtaaagtcgaaaaa

SEQ ID NO: 945064 - DNA, 15 bp, Homo sapiens
cagtaaagtcgaaaa

SEQ ID NO: 945065 - DNA, 15 bp, Homo sapiens
gcagtaaagtcgaaa

SEQ ID NO: 945066 - DNA, 15 bp, Homo sapiens
ggcagtaaagtcgaa

SEQ ID NO: 945067 - DNA, 15 bp, Homo sapiens
aggcagtaaagtcga

SEQ ID NO: 945068 - DNA, 15 bp, Homo sapiens
taggcagtaaagtcg

SEQ ID NO: 945069 - DNA, 15 bp, Homo sapiens
ttaggcagtaaagtc

SEQ ID NO: 945070 - DNA, 15 bp, Homo sapiens
gttaggcagtaaagt

SEQ ID NO: 945071 - DNA, 15 bp, Homo sapiens
tgttaggcagtaaag

SEQ ID NO: 945072 - DNA, 15 bp, Homo sapiens
ctgttaggcagtaaa

SEQ ID NO: 945073 - DNA, 15 bp, Homo sapiens
cctgttaggcagtaa

SEQ ID NO: 945074 - DNA, 15 bp, Homo sapiens
gcctgttaggcagta

SEQ ID NO: 945075 - DNA, 15 bp, Homo sapiens
agcctgttaggcagt

SEQ ID NO: 945076 - DNA, 15 bp, Homo sapiens
aagcctgttaggcag

SEQ ID NO: 945077 - DNA, 15 bp, Homo sapiens
taagcctgttaggca

SEQ ID NO: 945078 - DNA, 15 bp, Homo sapiens
ataagcctgttaggc

SEQ ID NO: 945079 - DNA, 15 bp, Homo sapiens
aataagcctgttagg

SEQ ID NO: 945080 - DNA, 15 bp, Homo sapiens
taataagcctgttag

SEQ ID NO: 945081 - DNA, 15 bp, Homo sapiens
ctaataagcctgtta

SEQ ID NO: 945082 - DNA, 15 bp, Homo sapiens
cctaataagcctgtt

SEQ ID NO: 945083 - DNA, 15 bp, Homo sapiens
acctaataagcctgt

SEQ ID NO: 945084 - DNA, 15 bp, Homo sapiens
gacctaataagcctg

SEQ ID NO: 945085 - DNA, 15 bp, Homo sapiens
ggacctaataagcct

SEQ ID NO: 945086 - DNA, 15 bp, Homo sapiens
aggacctaataagcc

SEQ ID NO: 945087 - DNA, 15 bp, Homo sapiens
aaggacctaataagc

SEQ ID NO: 945088 - DNA, 15 bp, Homo sapiens
taaggacctaataag

SEQ ID NO: 945089 - DNA, 15 bp, Homo sapiens
ataaggacctaataa

SEQ ID NO: 945090 - DNA, 15 bp, Homo sapiens
aataaggacctaata

SEQ ID NO: 945091 - DNA, 15 bp, Homo sapiens
aaataaggacctaat

SEQ ID NO: 945092 - DNA, 15 bp, Homo sapiens
gaaataaggacctaa

SEQ ID NO: 945093 - DNA, 15 bp, Homo sapiens
agaaataaggaccta

SEQ ID NO: 945094 - DNA, 15 bp, Homo sapiens
aagaaataaggacct

SEQ ID NO: 945095 - DNA, 15 bp, Homo sapiens
gaagaaataaggacc

SEQ ID NO: 945096 - DNA, 15 bp, Homo sapiens
ggaagaaataaggac

SEQ ID NO: 945097 - DNA, 15 bp, Homo sapiens
gggaagaaataagga

SEQ ID NO: 945098 - DNA, 15 bp, Homo sapiens
agggaagaaataagg

SEQ ID NO: 945099 - DNA, 15 bp, Homo sapiens
gagggaagaaataag

SEQ ID NO: 945100 - DNA, 15 bp, Homo sapiens
agagggaagaaataa

SEQ ID NO: 945101 - DNA, 15 bp, Homo sapiens
tagagggaagaaata

SEQ ID NO: 945102 - DNA, 15 bp, Homo sapiens
ttagagggaagaaat

SEQ ID NO: 945103 - DNA, 15 bp, Homo sapiens
attagagggaagaaa

SEQ ID NO: 945104 - DNA, 15 bp, Homo sapiens
cattagagggaagaa

SEQ ID NO: 945105 - DNA, 15 bp, Homo sapiens
gcattagagggaaga

SEQ ID NO: 945106 - DNA, 15 bp, Homo sapiens
agcattagagggaag

SEQ ID NO: 945107 - DNA, 15 bp, Homo sapiens
tagcattagagggaa

SEQ ID NO: 945108 - DNA, 15 bp, Homo sapiens
ttagcattagaggga

SEQ ID NO: 945109 - DNA, 15 bp, Homo sapiens
attagcattagaggg

SEQ ID NO: 945110 - DNA, 15 bp, Homo sapiens
gattagcattagagg

SEQ ID NO: 945111 - DNA, 15 bp, Homo sapiens
tgattagcattagag

SEQ ID NO: 945112 - DNA, 15 bp, Homo sapiens
gtgattagcattaga

SEQ ID NO: 945113 - DNA, 15 bp, Homo sapiens
agtgattagcattag

SEQ ID NO: 945114 - DNA, 15 bp, Homo sapiens
gagtgattagcatta

SEQ ID NO: 945115 - DNA, 15 bp, Homo sapiens
agagtgattagcatt

SEQ ID NO: 945116 - DNA, 15 bp, Homo sapiens
aagagtgattagcat

SEQ ID NO: 945117 - DNA, 15 bp, Homo sapiens
aaagagtgattagca

SEQ ID NO: 945118 - DNA, 15 bp, Homo sapiens
aaaagagtgattagc

SEQ ID NO: 945119 - DNA, 15 bp, Homo sapiens
aaaaagagtgattag

SEQ ID NO: 945120 - DNA, 15 bp, Homo sapiens
gaaaaagagtgatta

SEQ ID NO: 945121 - DNA, 15 bp, Homo sapiens
tgaaaaagagtgatt

SEQ ID NO: 945122 - DNA, 15 bp, Homo sapiens
atgaaaaagagtgat

SEQ ID NO: 945123 - DNA, 15 bp, Homo sapiens
tatgaaaaagagtga

SEQ ID NO: 945124 - DNA, 15 bp, Homo sapiens
ttatgaaaaagagtg

SEQ ID NO: 945125 - DNA, 15 bp, Homo sapiens
attatgaaaaagagt

SEQ ID NO: 945126 - DNA, 15 bp, Homo sapiens
tattatgaaaaagag

SEQ ID NO: 945127 - DNA, 15 bp, Homo sapiens
gtattatgaaaaaga

SEQ ID NO: 945128 - DNA, 15 bp, Homo sapiens
tgtattatgaaaaag

SEQ ID NO: 945129 - DNA, 15 bp, Homo sapiens
gtgtattatgaaaaa

SEQ ID NO: 945130 - DNA, 15 bp, Homo sapiens
tgtgtattatgaaaa

SEQ ID NO: 945131 - DNA, 15 bp, Homo sapiens
gtgtgtattatgaaa

SEQ ID NO: 945132 - DNA, 15 bp, Homo sapiens
agtgtgtattatgaa

SEQ ID NO: 945133 - DNA, 15 bp, Homo sapiens
tagtgtgtattatga

SEQ ID NO: 945134 - DNA, 15 bp, Homo sapiens
ctagtgtgtattatg

SEQ ID NO: 945135 - DNA, 15 bp, Homo sapiens
tctagtgtgtattat

SEQ ID NO: 945136 - DNA, 15 bp, Homo sapiens
ttctagtgtgtatta

SEQ ID NO: 945137 - DNA, 15 bp, Homo sapiens
tttctagtgtgtatt

SEQ ID NO: 945138 - DNA, 15 bp, Homo sapiens
ttttctagtgtgtat

SEQ ID NO: 945139 - DNA, 15 bp, Homo sapiens
tttttctagtgtgta

SEQ ID NO: 945140 - DNA, 15 bp, Homo sapiens
ttttttctagtgtgt

SEQ ID NO: 945141 - DNA, 15 bp, Homo sapiens
tttttttctagtgtg

SEQ ID NO: 945142 - DNA, 15 bp, Homo sapiens
ctttttttctagtgt

SEQ ID NO: 945143 - DNA, 15 bp, Homo sapiens
cctttttttctagtg

SEQ ID NO: 945144 - DNA, 15 bp, Homo sapiens
tcctttttttctagt

SEQ ID NO: 945145 - DNA, 15 bp, Homo sapiens
atcctttttttctag

SEQ ID NO: 945146 - DNA, 15 bp, Homo sapiens
tatcctttttttcta

SEQ ID NO: 945147 - DNA, 15 bp, Homo sapiens
ttatcctttttttct

SEQ ID NO: 945148 - DNA, 15 bp, Homo sapiens
tttatcctttttttc

SEQ ID NO: 945149 - DNA, 15 bp, Homo sapiens
gtttatccttttttt

SEQ ID NO: 945150 - DNA, 15 bp, Homo sapiens
ggtttatcctttttt

SEQ ID NO: 945151 - DNA, 15 bp, Homo sapiens
gggtttatccttttt

SEQ ID NO: 945152 - DNA, 15 bp, Homo sapiens
tgggtttatcctttt

SEQ ID NO: 945153 - DNA, 15 bp, Homo sapiens
ttgggtttatccttt

SEQ ID NO: 945154 - DNA, 15 bp, Homo sapiens
gttgggtttatcctt

SEQ ID NO: 945155 - DNA, 15 bp, Homo sapiens
agttgggtttatcct

SEQ ID NO: 945156 - DNA, 15 bp, Homo sapiens
gagttgggtttatcc

SEQ ID NO: 945157 - DNA, 15 bp, Homo sapiens
agagttgggtttatc

SEQ ID NO: 945158 - DNA, 15 bp, Homo sapiens
tagagttgggtttat

SEQ ID NO: 945159 - DNA, 15 bp, Homo sapiens
ttagagttgggttta

SEQ ID NO: 945160 - DNA, 15 bp, Homo sapiens
cttagagttgggttt

SEQ ID NO: 945161 - DNA, 15 bp, Homo sapiens
acttagagttgggtt

SEQ ID NO: 945162 - DNA, 15 bp, Homo sapiens
aacttagagttgggt

SEQ ID NO: 945163 - DNA, 15 bp, Homo sapiens
aaacttagagttggg

SEQ ID NO: 945164 - DNA, 15 bp, Homo sapiens
gaaacttagagttgg

SEQ ID NO: 945165 - DNA, 15 bp, Homo sapiens
ggaaacttagagttg

SEQ ID NO: 945166 - DNA, 15 bp, Homo sapiens
tggaaacttagagtt

SEQ ID NO: 945167 - DNA, 15 bp, Homo sapiens
ctggaaacttagagt

SEQ ID NO: 945168 - DNA, 15 bp, Homo sapiens
actggaaacttagag

SEQ ID NO: 945169 - DNA, 15 bp, Homo sapiens
aactggaaacttaga

SEQ ID NO: 945170 - DNA, 15 bp, Homo sapiens
aaactggaaacttag

SEQ ID NO: 945171 - DNA, 15 bp, Homo sapiens
caaactggaaactta

SEQ ID NO: 945172 - DNA, 15 bp, Homo sapiens
acaaactggaaactt

SEQ ID NO: 945173 - DNA, 15 bp, Homo sapiens
tacaaactggaaact

SEQ ID NO: 945174 - DNA, 15 bp, Homo sapiens
ttacaaactggaaac

SEQ ID NO: 945175 - DNA, 15 bp, Homo sapiens
attacaaactggaaa

SEQ ID NO: 945176 - DNA, 15 bp, Homo sapiens
aattacaaactggaa

SEQ ID NO: 945177 - DNA, 15 bp, Homo sapiens
aaattacaaactgga

SEQ ID NO: 945178 - DNA, 15 bp, Homo sapiens
taaattacaaactgg

SEQ ID NO: 945179 - DNA, 15 bp, Homo sapiens
ctaaattacaaactg

SEQ ID NO: 945180 - DNA, 15 bp, Homo sapiens
actaaattacaaact

SEQ ID NO: 945181 - DNA, 15 bp, Homo sapiens
aactaaattacaaac

SEQ ID NO: 945182 - DNA, 15 bp, Homo sapiens
aaactaaattacaaa

SEQ ID NO: 945183 - DNA, 15 bp, Homo sapiens
taaactaaattacaa

SEQ ID NO: 945184 - DNA, 15 bp, Homo sapiens
ttaaactaaattaca

SEQ ID NO: 945185 - DNA, 15 bp, Homo sapiens
tttaaactaaattac

SEQ ID NO: 945186 - DNA, 15 bp, Homo sapiens
gtttaaactaaatta

SEQ ID NO: 945187 - DNA, 15 bp, Homo sapiens
agtttaaactaaatt

SEQ ID NO: 945188 - DNA, 15 bp, Homo sapiens
aagtttaaactaaat

SEQ ID NO: 945189 - DNA, 15 bp, Homo sapiens
aaagtttaaactaaa

SEQ ID NO: 945190 - DNA, 15 bp, Homo sapiens
aaaagtttaaactaa

SEQ ID NO: 945191 - DNA, 15 bp, Homo sapiens
gaaaagtttaaacta

SEQ ID NO: 945192 - DNA, 15 bp, Homo sapiens
agaaaagtttaaact

SEQ ID NO: 945193 - DNA, 15 bp, Homo sapiens
tagaaaagtttaaac

SEQ ID NO: 945194 - DNA, 15 bp, Homo sapiens
ttagaaaagtttaaa

SEQ ID NO: 945195 - DNA, 15 bp, Homo sapiens
cttagaaaagtttaa

SEQ ID NO: 945196 - DNA, 15 bp, Homo sapiens
tcttagaaaagttta

SEQ ID NO: 945197 - DNA, 15 bp, Homo sapiens
ctcttagaaaagttt

SEQ ID NO: 945198 - DNA, 15 bp, Homo sapiens
gctcttagaaaagtt

SEQ ID NO: 945199 - DNA, 15 bp, Homo sapiens
tgctcttagaaaagt

SEQ ID NO: 945200 - DNA, 15 bp, Homo sapiens
atgctcttagaaaag

SEQ ID NO: 945201 - DNA, 15 bp, Homo sapiens
tatgctcttagaaaa

SEQ ID NO: 945202 - DNA, 15 bp, Homo sapiens
ctatgctcttagaaa

SEQ ID NO: 945203 - DNA, 15 bp, Homo sapiens
tctatgctcttagaa

SEQ ID NO: 945204 - DNA, 15 bp, Homo sapiens
ttctatgctcttaga

SEQ ID NO: 945205 - DNA, 15 bp, Homo sapiens
attctatgctcttag

SEQ ID NO: 945206 - DNA, 15 bp, Homo sapiens
cattctatgctctta

SEQ ID NO: 945207 - DNA, 15 bp, Homo sapiens
tcattctatgctctt

SEQ ID NO: 945208 - DNA, 15 bp, Homo sapiens
ctcattctatgctct

SEQ ID NO: 945209 - DNA, 15 bp, Homo sapiens
actcattctatgctc

SEQ ID NO: 945210 - DNA, 15 bp, Homo sapiens
aactcattctatgct

SEQ ID NO: 945211 - DNA, 15 bp, Homo sapiens
taactcattctatgc

SEQ ID NO: 945212 - DNA, 15 bp, Homo sapiens
ttaactcattctatg

SEQ ID NO: 945213 - DNA, 15 bp, Homo sapiens
tttaactcattctat

SEQ ID NO: 945214 - DNA, 15 bp, Homo sapiens
gtttaactcattcta

SEQ ID NO: 945215 - DNA, 15 bp, Homo sapiens
ggtttaactcattct

SEQ ID NO: 945216 - DNA, 15 bp, Homo sapiens
aggtttaactcattc

SEQ ID NO: 945217 - DNA, 15 bp, Homo sapiens
aaggtttaactcatt

SEQ ID NO: 945218 - DNA, 15 bp, Homo sapiens
taaggtttaactcat

SEQ ID NO: 945219 - DNA, 15 bp, Homo sapiens
ctaaggtttaactca

SEQ ID NO: 945220 - DNA, 15 bp, Homo sapiens
gctaaggtttaactc

SEQ ID NO: 945221 - DNA, 15 bp, Homo sapiens
agctaaggtttaact

SEQ ID NO: 945222 - DNA, 15 bp, Homo sapiens
aagctaaggtttaac

SEQ ID NO: 945223 - DNA, 15 bp, Homo sapiens
gaagctaaggtttaa

SEQ ID NO: 945224 - DNA, 15 bp, Homo sapiens
ggaagctaaggttta

SEQ ID NO: 945225 - DNA, 15 bp, Homo sapiens
gggaagctaaggttt

SEQ ID NO: 945226 - DNA, 15 bp, Homo sapiens
tgggaagctaaggtt

SEQ ID NO: 945227 - DNA, 15 bp, Homo sapiens
ctgggaagctaaggt

SEQ ID NO: 945228 - DNA, 15 bp, Homo sapiens
tctgggaagctaagg

SEQ ID NO: 945229 - DNA, 15 bp, Homo sapiens
ctctgggaagctaag

SEQ ID NO: 945230 - DNA, 15 bp, Homo sapiens
cctctgggaagctaa

SEQ ID NO: 945231 - DNA, 15 bp, Homo sapiens
tcctctgggaagcta

SEQ ID NO: 945232 - DNA, 15 bp, Homo sapiens
ttcctctgggaagct

SEQ ID NO: 945233 - DNA, 15 bp, Homo sapiens
tttcctctgggaagc

SEQ ID NO: 945234 - DNA, 15 bp, Homo sapiens
ttttcctctgggaag

SEQ ID NO: 945235 - DNA, 15 bp, Homo sapiens
attttcctctgggaa

SEQ ID NO: 945236 - DNA, 15 bp, Homo sapiens
tattttcctctggga

SEQ ID NO: 945237 - DNA, 15 bp, Homo sapiens
gtattttcctctggg

SEQ ID NO: 945238 - DNA, 15 bp, Homo sapiens
agtattttcctctgg

SEQ ID NO: 945239 - DNA, 15 bp, Homo sapiens
tagtattttcctctg

SEQ ID NO: 945240 - DNA, 15 bp, Homo sapiens
ttagtattttcctct

SEQ ID NO: 945241 - DNA, 15 bp, Homo sapiens
attagtattttcctc

SEQ ID NO: 945242 - DNA, 15 bp, Homo sapiens
cattagtattttcct

SEQ ID NO: 945243 - DNA, 15 bp, Homo sapiens
tcattagtattttcc

SEQ ID NO: 945244 - DNA, 15 bp, Homo sapiens
ttcattagtattttc

SEQ ID NO: 945245 - DNA, 15 bp, Homo sapiens
tttcattagtatttt

SEQ ID NO: 945246 - DNA, 15 bp, Homo sapiens
ctttcattagtattt

SEQ ID NO: 945247 - DNA, 15 bp, Homo sapiens
tctttcattagtatt

SEQ ID NO: 945248 - DNA, 15 bp, Homo sapiens
ctctttcattagtat

SEQ ID NO: 945249 - DNA, 15 bp, Homo sapiens
tctctttcattagta

SEQ ID NO: 945250 - DNA, 15 bp, Homo sapiens
ttctctttcattagt

SEQ ID NO: 945251 - DNA, 15 bp, Homo sapiens
gttctctttcattag

SEQ ID NO: 945252 - DNA, 15 bp, Homo sapiens
tgttctctttcatta

SEQ ID NO: 945253 - DNA, 15 bp, Homo sapiens
ttgttctctttcatt

SEQ ID NO: 945254 - DNA, 15 bp, Homo sapiens
cttgttctctttcat

SEQ ID NO: 945255 - DNA, 15 bp, Homo sapiens
acttgttctctttca

SEQ ID NO: 945256 - DNA, 15 bp, Homo sapiens
tacttgttctctttc

SEQ ID NO: 945257 - DNA, 15 bp, Homo sapiens
ttacttgttctcttt

SEQ ID NO: 945258 - DNA, 15 bp, Homo sapiens
attacttgttctctt

SEQ ID NO: 945259 - DNA, 15 bp, Homo sapiens
aattacttgttctct

SEQ ID NO: 945260 - DNA, 15 bp, Homo sapiens
aaattacttgttctc

SEQ ID NO: 945261 - DNA, 15 bp, Homo sapiens
aaaattacttgttct

SEQ ID NO: 945262 - DNA, 15 bp, Homo sapiens
aaaaattacttgttc

SEQ ID NO: 945263 - DNA, 15 bp, Homo sapiens
aaaaaattacttgtt

SEQ ID NO: 945264 - DNA, 15 bp, Homo sapiens
aaaaaaattacttgt

SEQ ID NO: 945265 - DNA, 15 bp, Homo sapiens
taaaaaaattacttg

SEQ ID NO: 945266 - DNA, 15 bp, Homo sapiens
gtaaaaaaattactt

SEQ ID NO: 945267 - DNA, 15 bp, Homo sapiens
agtaaaaaaattact

SEQ ID NO: 945268 - DNA, 15 bp, Homo sapiens
aagtaaaaaaattac

SEQ ID NO: 945269 - DNA, 15 bp, Homo sapiens
aaagtaaaaaaatta

SEQ ID NO: 945270 - DNA, 15 bp, Homo sapiens
gaaagtaaaaaaatt

SEQ ID NO: 945271 - DNA, 15 bp, Homo sapiens
tgaaagtaaaaaaat

SEQ ID NO: 945272 - DNA, 15 bp, Homo sapiens
ctgaaagtaaaaaaa

SEQ ID NO: 945273 - DNA, 15 bp, Homo sapiens
cctgaaagtaaaaaa

SEQ ID NO: 945274 - DNA, 15 bp, Homo sapiens
ccctgaaagtaaaaa

SEQ ID NO: 945275 - DNA, 15 bp, Homo sapiens
cccctgaaagtaaaa

SEQ ID NO: 945276 - DNA, 15 bp, Homo sapiens
acccctgaaagtaaa

SEQ ID NO: 945277 - DNA, 15 bp, Homo sapiens
gacccctgaaagtaa

SEQ ID NO: 945278 - DNA, 15 bp, Homo sapiens
agacccctgaaagta

SEQ ID NO: 945279 - DNA, 15 bp, Homo sapiens
gagacccctgaaagt

SEQ ID NO: 945280 - DNA, 15 bp, Homo sapiens
agagacccctgaaag

SEQ ID NO: 945281 - DNA, 15 bp, Homo sapiens
cagagacccctgaaa

SEQ ID NO: 945282 - DNA, 15 bp, Homo sapiens
acagagacccctgaa

SEQ ID NO: 945283 - DNA, 15 bp, Homo sapiens
tacagagacccctga

SEQ ID NO: 945284 - DNA, 15 bp, Homo sapiens
ctacagagacccctg

SEQ ID NO: 945285 - DNA, 15 bp, Homo sapiens
gctacagagacccct

SEQ ID NO: 945286 - DNA, 15 bp, Homo sapiens
ggctacagagacccc

SEQ ID NO: 945287 - DNA, 15 bp, Homo sapiens
aggctacagagaccc

SEQ ID NO: 945288 - DNA, 15 bp, Homo sapiens
caggctacagagacc

SEQ ID NO: 945289 - DNA, 15 bp, Homo sapiens
gcaggctacagagac

SEQ ID NO: 945290 - DNA, 15 bp, Homo sapiens
agcaggctacagaga

SEQ ID NO: 945291 - DNA, 15 bp, Homo sapiens
aagcaggctacagag

SEQ ID NO: 945292 - DNA, 15 bp, Homo sapiens
aaagcaggctacaga

SEQ ID NO: 945293 - DNA, 15 bp, Homo sapiens
gaaagcaggctacag

SEQ ID NO: 945294 - DNA, 15 bp, Homo sapiens
tgaaagcaggctaca

SEQ ID NO: 945295 - DNA, 15 bp, Homo sapiens
atgaaagcaggctac

SEQ ID NO: 945296 - DNA, 15 bp, Homo sapiens
aatgaaagcaggcta

SEQ ID NO: 945297 - DNA, 15 bp, Homo sapiens
taatgaaagcaggct

SEQ ID NO: 945298 - DNA, 15 bp, Homo sapiens
ttaatgaaagcaggc

SEQ ID NO: 945299 - DNA, 15 bp, Homo sapiens
cttaatgaaagcagg

SEQ ID NO: 945300 - DNA, 15 bp, Homo sapiens
gcttaatgaaagcag

SEQ ID NO: 945301 - DNA, 15 bp, Homo sapiens
agcttaatgaaagca

SEQ ID NO: 945302 - DNA, 15 bp, Homo sapiens
gagcttaatgaaagc

SEQ ID NO: 945303 - DNA, 15 bp, Homo sapiens
ggagcttaatgaaag

SEQ ID NO: 945304 - DNA, 15 bp, Homo sapiens
aggagcttaatgaaa

SEQ ID NO: 945305 - DNA, 15 bp, Homo sapiens
gaggagcttaatgaa

SEQ ID NO: 945306 - DNA, 15 bp, Homo sapiens
agaggagcttaatga

SEQ ID NO: 945307 - DNA, 15 bp, Homo sapiens
aagaggagcttaatg

SEQ ID NO: 945308 - DNA, 15 bp, Homo sapiens
taagaggagcttaat

SEQ ID NO: 945309 - DNA, 15 bp, Homo sapiens
ataagaggagcttaa

SEQ ID NO: 945310 - DNA, 15 bp, Homo sapiens
tataagaggagctta

SEQ ID NO: 945311 - DNA, 15 bp, Homo sapiens
ttataagaggagctt

SEQ ID NO: 945312 - DNA, 15 bp, Homo sapiens
gttataagaggagct

SEQ ID NO: 945313 - DNA, 15 bp, Homo sapiens
cgttataagaggagc

SEQ ID NO: 945314 - DNA, 15 bp, Homo sapiens
tcgttataagaggag

SEQ ID NO: 945315 - DNA, 15 bp, Homo sapiens
ttcgttataagagga

SEQ ID NO: 945316 - DNA, 15 bp, Homo sapiens
tttcgttataagagg

SEQ ID NO: 945317 - DNA, 15 bp, Homo sapiens
gtttcgttataagag

SEQ ID NO: 945318 - DNA, 15 bp, Homo sapiens
ggtttcgttataaga

SEQ ID NO: 945319 - DNA, 15 bp, Homo sapiens
tggtttcgttataag

SEQ ID NO: 945320 - DNA, 15 bp, Homo sapiens
gtggtttcgttataa

SEQ ID NO: 945321 - DNA, 15 bp, Homo sapiens
tgtggtttcgttata

SEQ ID NO: 945322 - DNA, 15 bp, Homo sapiens
gtgtggtttcgttat

SEQ ID NO: 945323 - DNA, 15 bp, Homo sapiens
agtgtggtttcgtta

SEQ ID NO: 945324 - DNA, 15 bp, Homo sapiens
aagtgtggtttcgtt

SEQ ID NO: 945325 - DNA, 15 bp, Homo sapiens
caagtgtggtttcgt

SEQ ID NO: 945326 - DNA, 15 bp, Homo sapiens
gcaagtgtggtttcg

SEQ ID NO: 945327 - DNA, 15 bp, Homo sapiens
tgcaagtgtggtttc

SEQ ID NO: 945328 - DNA, 15 bp, Homo sapiens
ttgcaagtgtggttt

SEQ ID NO: 945329 - DNA, 15 bp, Homo sapiens
tttgcaagtgtggtt

SEQ ID NO: 945330 - DNA, 15 bp, Homo sapiens
atttgcaagtgtggt

SEQ ID NO: 945331 - DNA, 15 bp, Homo sapiens
catttgcaagtgtgg

SEQ ID NO: 945332 - DNA, 15 bp, Homo sapiens
gcatttgcaagtgtg

SEQ ID NO: 945333 - DNA, 15 bp, Homo sapiens
ggcatttgcaagtgt

SEQ ID NO: 945334 - DNA, 15 bp, Homo sapiens
tggcatttgcaagtg

SEQ ID NO: 945335 - DNA, 15 bp, Homo sapiens
atggcatttgcaagt

SEQ ID NO: 945336 - DNA, 15 bp, Homo sapiens
gatggcatttgcaag

SEQ ID NO: 945337 - DNA, 15 bp, Homo sapiens
tgatggcatttgcaa

SEQ ID NO: 945338 - DNA, 15 bp, Homo sapiens
ctgatggcatttgca

SEQ ID NO: 945339 - DNA, 15 bp, Homo sapiens
cctgatggcatttgc

SEQ ID NO: 945340 - DNA, 15 bp, Homo sapiens
acctgatggcatttg

SEQ ID NO: 945341 - DNA, 15 bp, Homo sapiens
gacctgatggcattt

SEQ ID NO: 945342 - DNA, 15 bp, Homo sapiens
tgacctgatggcatt

SEQ ID NO: 945343 - DNA, 15 bp, Homo sapiens
ctgacctgatggcat

SEQ ID NO: 945344 - DNA, 15 bp, Homo sapiens
tctgacctgatggca

SEQ ID NO: 945345 - DNA, 15 bp, Homo sapiens
atctgacctgatggc

SEQ ID NO: 945346 - DNA, 15 bp, Homo sapiens
tatctgacctgatgg

SEQ ID NO: 945347 - DNA, 15 bp, Homo sapiens
atatctgacctgatg

SEQ ID NO: 945348 - DNA, 15 bp, Homo sapiens
aatatctgacctgat

SEQ ID NO: 945349 - DNA, 15 bp, Homo sapiens
taatatctgacctga

SEQ ID NO: 945350 - DNA, 15 bp, Homo sapiens
ttaatatctgacctg

SEQ ID NO: 945351 - DNA, 15 bp, Homo sapiens
cttaatatctgacct

SEQ ID NO: 945352 - DNA, 15 bp, Homo sapiens
tcttaatatctgacc

SEQ ID NO: 945353 - DNA, 15 bp, Homo sapiens
ttcttaatatctgac

SEQ ID NO: 945354 - DNA, 15 bp, Homo sapiens
tttcttaatatctga

SEQ ID NO: 945355 - DNA, 15 bp, Homo sapiens
ttttcttaatatctg

SEQ ID NO: 945356 - DNA, 15 bp, Homo sapiens
tttttcttaatatct

SEQ ID NO: 945357 - DNA, 15 bp, Homo sapiens
gtttttcttaatatc

SEQ ID NO: 945358 - DNA, 15 bp, Homo sapiens
cgtttttcttaatat

SEQ ID NO: 945359 - DNA, 15 bp, Homo sapiens
acgtttttcttaata

SEQ ID NO: 945360 - DNA, 15 bp, Homo sapiens
cacgtttttcttaat

SEQ ID NO: 945361 - DNA, 15 bp, Homo sapiens
tcacgtttttcttaa

SEQ ID NO: 945362 - DNA, 15 bp, Homo sapiens
ttcacgtttttctta

SEQ ID NO: 945363 - DNA, 15 bp, Homo sapiens
cttcacgtttttctt

SEQ ID NO: 945364 - DNA, 15 bp, Homo sapiens
ccttcacgtttttct

SEQ ID NO: 945365 - DNA, 15 bp, Homo sapiens
gccttcacgtttttc

SEQ ID NO: 945366 - DNA, 15 bp, Homo sapiens
agccttcacgttttt

SEQ ID NO: 945367 - DNA, 15 bp, Homo sapiens
aagccttcacgtttt

SEQ ID NO: 945368 - DNA, 15 bp, Homo sapiens
aaagccttcacgttt

SEQ ID NO: 945369 - DNA, 15 bp, Homo sapiens
aaaagccttcacgtt

SEQ ID NO: 945370 - DNA, 15 bp, Homo sapiens
caaaagccttcacgt

SEQ ID NO: 945371 - DNA, 15 bp, Homo sapiens
acaaaagccttcacg

SEQ ID NO: 945372 - DNA, 15 bp, Homo sapiens
tacaaaagccttcac

SEQ ID NO: 945373 - DNA, 15 bp, Homo sapiens
atacaaaagccttca

SEQ ID NO: 945374 - DNA, 15 bp, Homo sapiens
aatacaaaagccttc

SEQ ID NO: 945375 - DNA, 15 bp, Homo sapiens
gaatacaaaagcctt

SEQ ID NO: 945376 - DNA, 15 bp, Homo sapiens
ggaatacaaaagcct

SEQ ID NO: 945377 - DNA, 15 bp, Homo sapiens
tggaatacaaaagcc

SEQ ID NO: 945378 - DNA, 15 bp, Homo sapiens
ctggaatacaaaagc

SEQ ID NO: 945379 - DNA, 15 bp, Homo sapiens
cctggaatacaaaag

SEQ ID NO: 945380 - DNA, 15 bp, Homo sapiens
gcctggaatacaaaa

SEQ ID NO: 945381 - DNA, 15 bp, Homo sapiens
agcctggaatacaaa

SEQ ID NO: 945382 - DNA, 15 bp, Homo sapiens
aagcctggaatacaa

SEQ ID NO: 945383 - DNA, 15 bp, Homo sapiens
aaagcctggaataca

SEQ ID NO: 945384 - DNA, 15 bp, Homo sapiens
aaaagcctggaatac

SEQ ID NO: 945385 - DNA, 15 bp, Homo sapiens
aaaaagcctggaata

SEQ ID NO: 945386 - DNA, 15 bp, Homo sapiens
caaaaagcctggaat

SEQ ID NO: 945387 - DNA, 15 bp, Homo sapiens
acaaaaagcctggaa

SEQ ID NO: 945388 - DNA, 15 bp, Homo sapiens
aacaaaaagcctgga

SEQ ID NO: 945389 - DNA, 15 bp, Homo sapiens
aaacaaaaagcctgg

SEQ ID NO: 945390 - DNA, 15 bp, Homo sapiens
caaacaaaaagcctg

SEQ ID NO: 945391 - DNA, 15 bp, Homo sapiens
tcaaacaaaaagcct

SEQ ID NO: 945392 - DNA, 15 bp, Homo sapiens
ctcaaacaaaaagcc

SEQ ID NO: 945393 - DNA, 15 bp, Homo sapiens
tctcaaacaaaaagc

SEQ ID NO: 945394 - DNA, 15 bp, Homo sapiens
ttctcaaacaaaaag

SEQ ID NO: 945395 - DNA, 15 bp, Homo sapiens
attctcaaacaaaaa

SEQ ID NO: 945396 - DNA, 15 bp, Homo sapiens
cattctcaaacaaaa

SEQ ID NO: 945397 - DNA, 15 bp, Homo sapiens
ccattctcaaacaaa

SEQ ID NO: 945398 - DNA, 15 bp, Homo sapiens
accattctcaaacaa

SEQ ID NO: 945399 - DNA, 15 bp, Homo sapiens
caccattctcaaaca

SEQ ID NO: 945400 - DNA, 15 bp, Homo sapiens
tcaccattctcaaac

SEQ ID NO: 945401 - DNA, 15 bp, Homo sapiens
gtcaccattctcaaa

SEQ ID NO: 945402 - DNA, 15 bp, Homo sapiens
tgtcaccattctcaa

SEQ ID NO: 945403 - DNA, 15 bp, Homo sapiens
atgtcaccattctca

SEQ ID NO: 945404 - DNA, 15 bp, Homo sapiens
aatgtcaccattctc

SEQ ID NO: 945405 - DNA, 15 bp, Homo sapiens
caatgtcaccattct

SEQ ID NO: 945406 - DNA, 15 bp, Homo sapiens
acaatgtcaccattc

SEQ ID NO: 945407 - DNA, 15 bp, Homo sapiens
tacaatgtcaccatt

SEQ ID NO: 945408 - DNA, 15 bp, Homo sapiens
ctacaatgtcaccat

SEQ ID NO: 945409 - DNA, 15 bp, Homo sapiens
gctacaatgtcacca

SEQ ID NO: 945410 - DNA, 15 bp, Homo sapiens
tgctacaatgtcacc

SEQ ID NO: 945411 - DNA, 15 bp, Homo sapiens
atgctacaatgtcac

SEQ ID NO: 945412 - DNA, 15 bp, Homo sapiens
aatgctacaatgtca

SEQ ID NO: 945413 - DNA, 15 bp, Homo sapiens
caatgctacaatgtc

SEQ ID NO: 945414 - DNA, 15 bp, Homo sapiens
tcaatgctacaatgt

SEQ ID NO: 945415 - DNA, 15 bp, Homo sapiens
ctcaatgctacaatg

SEQ ID NO: 945416 - DNA, 15 bp, Homo sapiens
tctcaatgctacaat

SEQ ID NO: 945417 - DNA, 15 bp, Homo sapiens
ctctcaatgctacaa

SEQ ID NO: 945418 - DNA, 15 bp, Homo sapiens
actctcaatgctaca

SEQ ID NO: 945419 - DNA, 15 bp, Homo sapiens
tactctcaatgctac

SEQ ID NO: 945420 - DNA, 15 bp, Homo sapiens
ttactctcaatgcta

SEQ ID NO: 945421 - DNA, 15 bp, Homo sapiens
tttactctcaatgct

SEQ ID NO: 945422 - DNA, 15 bp, Homo sapiens
atttactctcaatgc

SEQ ID NO: 945423 - DNA, 15 bp, Homo sapiens
catttactctcaatg

SEQ ID NO: 945424 - DNA, 15 bp, Homo sapiens
acatttactctcaat

SEQ ID NO: 945425 - DNA, 15 bp, Homo sapiens
aacatttactctcaa

SEQ ID NO: 945426 - DNA, 15 bp, Homo sapiens
aaacatttactctca

SEQ ID NO: 945427 - DNA, 15 bp, Homo sapiens
taaacatttactctc

SEQ ID NO: 945428 - DNA, 15 bp, Homo sapiens
gtaaacatttactct

SEQ ID NO: 945429 - DNA, 15 bp, Homo sapiens
agtaaacatttactc

SEQ ID NO: 945430 - DNA, 15 bp, Homo sapiens
aagtaaacatttact

SEQ ID NO: 945431 - DNA, 15 bp, Homo sapiens
gaagtaaacatttac

SEQ ID NO: 945432 - DNA, 15 bp, Homo sapiens
cgaagtaaacattta

SEQ ID NO: 945433 - DNA, 15 bp, Homo sapiens
tcgaagtaaacattt

SEQ ID NO: 945434 - DNA, 15 bp, Homo sapiens
atcgaagtaaacatt

SEQ ID NO: 945435 - DNA, 15 bp, Homo sapiens
tatcgaagtaaacat

SEQ ID NO: 945436 - DNA, 15 bp, Homo sapiens
ttatcgaagtaaaca

SEQ ID NO: 945437 - DNA, 15 bp, Homo sapiens
tttatcgaagtaaac

SEQ ID NO: 945438 - DNA, 15 bp, Homo sapiens
ctttatcgaagtaaa

SEQ ID NO: 945439 - DNA, 15 bp, Homo sapiens
cctttatcgaagtaa

SEQ ID NO: 945440 - DNA, 15 bp, Homo sapiens
gcctttatcgaagta

SEQ ID NO: 945441 - DNA, 15 bp, Homo sapiens
agcctttatcgaagt

SEQ ID NO: 945442 - DNA, 15 bp, Homo sapiens
tagcctttatcgaag

SEQ ID NO: 945443 - DNA, 15 bp, Homo sapiens
ctagcctttatcgaa

SEQ ID NO: 945444 - DNA, 15 bp, Homo sapiens
gctagcctttatcga

SEQ ID NO: 945445 - DNA, 15 bp, Homo sapiens
agctagcctttatcg

SEQ ID NO: 945446 - DNA, 15 bp, Homo sapiens
aagctagcctttatc

SEQ ID NO: 945447 - DNA, 15 bp, Homo sapiens
caagctagcctttat

SEQ ID NO: 945448 - DNA, 15 bp, Homo sapiens
acaagctagccttta

SEQ ID NO: 945449 - DNA, 15 bp, Homo sapiens
aacaagctagccttt

SEQ ID NO: 945450 - DNA, 15 bp, Homo sapiens
gaacaagctagcctt

SEQ ID NO: 945451 - DNA, 15 bp, Homo sapiens
agaacaagctagcct

SEQ ID NO: 945452 - DNA, 15 bp, Homo sapiens
cagaacaagctagcc

SEQ ID NO: 945453 - DNA, 15 bp, Homo sapiens
tcagaacaagctagc

SEQ ID NO: 945454 - DNA, 15 bp, Homo sapiens
atcagaacaagctag

SEQ ID NO: 945455 - DNA, 15 bp, Homo sapiens
aatcagaacaagcta

SEQ ID NO: 945456 - DNA, 15 bp, Homo sapiens
taatcagaacaagct

SEQ ID NO: 945457 - DNA, 15 bp, Homo sapiens
gtaatcagaacaagc

SEQ ID NO: 945458 - DNA, 15 bp, Homo sapiens
agtaatcagaacaag

SEQ ID NO: 945459 - DNA, 15 bp, Homo sapiens
cagtaatcagaacaa

SEQ ID NO: 945460 - DNA, 15 bp, Homo sapiens
acagtaatcagaaca

SEQ ID NO: 945461 - DNA, 15 bp, Homo sapiens
tacagtaatcagaac

SEQ ID NO: 945462 - DNA, 15 bp, Homo sapiens
gtacagtaatcagaa

SEQ ID NO: 945463 - DNA, 15 bp, Homo sapiens
tgtacagtaatcaga

SEQ ID NO: 945464 - DNA, 15 bp, Homo sapiens
atgtacagtaatcag

SEQ ID NO: 945465 - DNA, 15 bp, Homo sapiens
gatgtacagtaatca

SEQ ID NO: 945466 - DNA, 15 bp, Homo sapiens
tgatgtacagtaatc

SEQ ID NO: 945467 - DNA, 15 bp, Homo sapiens
gtgatgtacagtaat

SEQ ID NO: 945468 - DNA, 15 bp, Homo sapiens
agtgatgtacagtaa

SEQ ID NO: 945469 - DNA, 15 bp, Homo sapiens
tagtgatgtacagta

SEQ ID NO: 945470 - DNA, 15 bp, Homo sapiens
ctagtgatgtacagt

SEQ ID NO: 945471 - DNA, 15 bp, Homo sapiens
actagtgatgtacag

SEQ ID NO: 945472 - DNA, 15 bp, Homo sapiens
aactagtgatgtaca

SEQ ID NO: 945473 - DNA, 15 bp, Homo sapiens
gaactagtgatgtac

SEQ ID NO: 945474 - DNA, 15 bp, Homo sapiens
tgaactagtgatgta

SEQ ID NO: 945475 - DNA, 15 bp, Homo sapiens
atgaactagtgatgt

SEQ ID NO: 945476 - DNA, 15 bp, Homo sapiens
tatgaactagtgatg

SEQ ID NO: 945477 - DNA, 15 bp, Homo sapiens
ttatgaactagtgat

SEQ ID NO: 945478 - DNA, 15 bp, Homo sapiens
cttatgaactagtga

SEQ ID NO: 945479 - DNA, 15 bp, Homo sapiens
tcttatgaactagtg

SEQ ID NO: 945480 - DNA, 15 bp, Homo sapiens
ttcttatgaactagt

SEQ ID NO: 945481 - DNA, 15 bp, Homo sapiens
tttcttatgaactag

SEQ ID NO: 945482 - DNA, 15 bp, Homo sapiens
atttcttatgaacta

SEQ ID NO: 945483 - DNA, 15 bp, Homo sapiens
catttcttatgaact

SEQ ID NO: 945484 - DNA, 15 bp, Homo sapiens
gcatttcttatgaac

SEQ ID NO: 945485 - DNA, 15 bp, Homo sapiens
ggcatttcttatgaa

SEQ ID NO: 945486 - DNA, 15 bp, Homo sapiens
gggcatttcttatga

SEQ ID NO: 945487 - DNA, 15 bp, Homo sapiens
tgggcatttcttatg

SEQ ID NO: 945488 - DNA, 15 bp, Homo sapiens
atgggcatttcttat

SEQ ID NO: 945489 - DNA, 15 bp, Homo sapiens
tatgggcatttctta

SEQ ID NO: 945490 - DNA, 15 bp, Homo sapiens
atatgggcatttctt

SEQ ID NO: 945491 - DNA, 15 bp, Homo sapiens
tatatgggcatttct

SEQ ID NO: 945492 - DNA, 15 bp, Homo sapiens
atatatgggcatttc

SEQ ID NO: 945493 - DNA, 15 bp, Homo sapiens
aatatatgggcattt

SEQ ID NO: 945494 - DNA, 15 bp, Homo sapiens
aaatatatgggcatt

SEQ ID NO: 945495 - DNA, 15 bp, Homo sapiens
aaaatatatgggcat

SEQ ID NO: 945496 - DNA, 15 bp, Homo sapiens
taaaatatatgggca

SEQ ID NO: 945497 - DNA, 15 bp, Homo sapiens
ataaaatatatgggc

SEQ ID NO: 945498 - DNA, 15 bp, Homo sapiens
cataaaatatatggg

SEQ ID NO: 945499 - DNA, 15 bp, Homo sapiens
tcataaaatatatgg

SEQ ID NO: 945500 - DNA, 15 bp, Homo sapiens
ttcataaaatatatg

SEQ ID NO: 945501 - DNA, 15 bp, Homo sapiens
cttcataaaatatat

SEQ ID NO: 945502 - DNA, 15 bp, Homo sapiens
gcttcataaaatata

SEQ ID NO: 945503 - DNA, 15 bp, Homo sapiens
tgcttcataaaatat

SEQ ID NO: 945504 - DNA, 15 bp, Homo sapiens
ttgcttcataaaata

SEQ ID NO: 945505 - DNA, 15 bp, Homo sapiens
attgcttcataaaat

SEQ ID NO: 945506 - DNA, 15 bp, Homo sapiens
tattgcttcataaaa

SEQ ID NO: 945507 - DNA, 15 bp, Homo sapiens
atattgcttcataaa

SEQ ID NO: 945508 - DNA, 15 bp, Homo sapiens
gatattgcttcataa

SEQ ID NO: 945509 - DNA, 15 bp, Homo sapiens
agatattgcttcata

SEQ ID NO: 945510 - DNA, 15 bp, Homo sapiens
cagatattgcttcat

SEQ ID NO: 945511 - DNA, 15 bp, Homo sapiens
gcagatattgcttca

SEQ ID NO: 945512 - DNA, 15 bp, Homo sapiens
agcagatattgcttc

SEQ ID NO: 945513 - DNA, 15 bp, Homo sapiens
aagcagatattgctt

SEQ ID NO: 945514 - DNA, 15 bp, Homo sapiens
aaagcagatattgct

SEQ ID NO: 945515 - DNA, 15 bp, Homo sapiens
taaagcagatattgc

SEQ ID NO: 945516 - DNA, 15 bp, Homo sapiens
ataaagcagatattg

SEQ ID NO: 945517 - DNA, 15 bp, Homo sapiens
aataaagcagatatt

SEQ ID NO: 945518 - DNA, 15 bp, Homo sapiens
aaataaagcagatat

SEQ ID NO: 945519 - DNA, 15 bp, Homo sapiens
aaaataaagcagata

SEQ ID NO: 945520 - DNA, 15 bp, Homo sapiens
aaaaataaagcagat

SEQ ID NO: 945521 - DNA, 15 bp, Homo sapiens
aaaaaataaagcaga

SEQ ID NO: 945522 - DNA, 15 bp, Homo sapiens
aaaaaaataaagcag

SEQ ID NO: 945523 - DNA, 15 bp, Homo sapiens
taaaaaaataaagca

SEQ ID NO: 945524 - DNA, 15 bp, Homo sapiens
ttaaaaaaataaagc

SEQ ID NO: 945525 - DNA, 15 bp, Homo sapiens
gttaaaaaaataaag

SEQ ID NO: 945526 - DNA, 15 bp, Homo sapiens
tgttaaaaaaataaa

SEQ ID NO: 945527 - DNA, 15 bp, Homo sapiens
gtgttaaaaaaataa

SEQ ID NO: 945528 - DNA, 15 bp, Homo sapiens
tgtgttaaaaaaata

SEQ ID NO: 945529 - DNA, 15 bp, Homo sapiens
atgtgttaaaaaaat

SEQ ID NO: 945530 - DNA, 15 bp, Homo sapiens
aatgtgttaaaaaaa

SEQ ID NO: 945531 - DNA, 15 bp, Homo sapiens
taatgtgttaaaaaa

SEQ ID NO: 945532 - DNA, 15 bp, Homo sapiens
ataatgtgttaaaaa

SEQ ID NO: 945533 - DNA, 15 bp, Homo sapiens
gataatgtgttaaaa

SEQ ID NO: 945534 - DNA, 15 bp, Homo sapiens
tgataatgtgttaaa

SEQ ID NO: 945535 - DNA, 15 bp, Homo sapiens
atgataatgtgttaa

SEQ ID NO: 945536 - DNA, 15 bp, Homo sapiens
aatgataatgtgtta

SEQ ID NO: 945537 - DNA, 15 bp, Homo sapiens
caatgataatgtgtt

SEQ ID NO: 945538 - DNA, 15 bp, Homo sapiens
acaatgataatgtgt

SEQ ID NO: 945539 - DNA, 15 bp, Homo sapiens
cacaatgataatgtg

SEQ ID NO: 945540 - DNA, 15 bp, Homo sapiens
acacaatgataatgt

SEQ ID NO: 945541 - DNA, 15 bp, Homo sapiens
aacacaatgataatg

SEQ ID NO: 945542 - DNA, 15 bp, Homo sapiens
gaacacaatgataat

SEQ ID NO: 945543 - DNA, 15 bp, Homo sapiens
agaacacaatgataa

SEQ ID NO: 945544 - DNA, 15 bp, Homo sapiens
tagaacacaatgata

SEQ ID NO: 945545 - DNA, 15 bp, Homo sapiens
ctagaacacaatgat

SEQ ID NO: 945546 - DNA, 15 bp, Homo sapiens
tctagaacacaatga

SEQ ID NO: 945547 - DNA, 15 bp, Homo sapiens
atctagaacacaatg

SEQ ID NO: 945548 - DNA, 15 bp, Homo sapiens
aatctagaacacaat

SEQ ID NO: 945549 - DNA, 15 bp, Homo sapiens
taatctagaacacaa

SEQ ID NO: 945550 - DNA, 15 bp, Homo sapiens
ctaatctagaacaca

SEQ ID NO: 945551 - DNA, 15 bp, Homo sapiens
gctaatctagaacac

SEQ ID NO: 945552 - DNA, 15 bp, Homo sapiens
agctaatctagaaca

SEQ ID NO: 945553 - DNA, 15 bp, Homo sapiens
tagctaatctagaac

SEQ ID NO: 945554 - DNA, 15 bp, Homo sapiens
ttagctaatctagaa

SEQ ID NO: 945555 - DNA, 15 bp, Homo sapiens
attagctaatctaga

SEQ ID NO: 945556 - DNA, 15 bp, Homo sapiens
gattagctaatctag

SEQ ID NO: 945557 - DNA, 15 bp, Homo sapiens
tgattagctaatcta

SEQ ID NO: 945558 - DNA, 15 bp, Homo sapiens
atgattagctaatct

SEQ ID NO: 945559 - DNA, 15 bp, Homo sapiens
gatgattagctaatc

SEQ ID NO: 945560 - DNA, 15 bp, Homo sapiens
tgatgattagctaat

SEQ ID NO: 945561 - DNA, 15 bp, Homo sapiens
ctgatgattagctaa

SEQ ID NO: 945562 - DNA, 15 bp, Homo sapiens
gctgatgattagcta

SEQ ID NO: 945563 - DNA, 15 bp, Homo sapiens
agctgatgattagct

SEQ ID NO: 945564 - DNA, 15 bp, Homo sapiens
cagctgatgattagc

SEQ ID NO: 945565 - DNA, 15 bp, Homo sapiens
ccagctgatgattag

SEQ ID NO: 945566 - DNA, 15 bp, Homo sapiens
tccagctgatgatta

SEQ ID NO: 945567 - DNA, 15 bp, Homo sapiens
atccagctgatgatt

SEQ ID NO: 945568 - DNA, 15 bp, Homo sapiens
tatccagctgatgat

SEQ ID NO: 945569 - DNA, 15 bp, Homo sapiens
ttatccagctgatga

SEQ ID NO: 945570 - DNA, 15 bp, Homo sapiens
tttatccagctgatg

SEQ ID NO: 945571 - DNA, 15 bp, Homo sapiens
ctttatccagctgat

SEQ ID NO: 945572 - DNA, 15 bp, Homo sapiens
tctttatccagctga

SEQ ID NO: 945573 - DNA, 15 bp, Homo sapiens
ctctttatccagctg

SEQ ID NO: 945574 - DNA, 15 bp, Homo sapiens
tctctttatccagct

SEQ ID NO: 945575 - DNA, 15 bp, Homo sapiens
ttctctttatccagc

SEQ ID NO: 945576 - DNA, 15 bp, Homo sapiens
tttctctttatccag

SEQ ID NO: 945577 - DNA, 15 bp, Homo sapiens
ctttctctttatcca

SEQ ID NO: 945578 - DNA, 15 bp, Homo sapiens
gctttctctttatcc

SEQ ID NO: 945579 - DNA, 15 bp, Homo sapiens
tgctttctctttatc

SEQ ID NO: 945580 - DNA, 15 bp, Homo sapiens
ctgctttctctttat

SEQ ID NO: 945581 - DNA, 15 bp, Homo sapiens
tctgctttctcttta

SEQ ID NO: 945582 - DNA, 15 bp, Homo sapiens
ttctgctttctcttt

SEQ ID NO: 945583 - DNA, 15 bp, Homo sapiens
attctgctttctctt

SEQ ID NO: 945584 - DNA, 15 bp, Homo sapiens
aattctgctttctct

SEQ ID NO: 945585 - DNA, 15 bp, Homo sapiens
taattctgctttctc

SEQ ID NO: 945586 - DNA, 15 bp, Homo sapiens
ttaattctgctttct

SEQ ID NO: 945587 - DNA, 15 bp, Homo sapiens
attaattctgctttc

SEQ ID NO: 945588 - DNA, 15 bp, Homo sapiens
gattaattctgcttt

SEQ ID NO: 945589 - DNA, 15 bp, Homo sapiens
ggattaattctgctt

SEQ ID NO: 945590 - DNA, 15 bp, Homo sapiens
tggattaattctgct

SEQ ID NO: 945591 - DNA, 15 bp, Homo sapiens
atggattaattctgc

SEQ ID NO: 945592 - DNA, 15 bp, Homo sapiens
gatggattaattctg

SEQ ID NO: 945593 - DNA, 15 bp, Homo sapiens
tgatggattaattct

SEQ ID NO: 945594 - DNA, 15 bp, Homo sapiens
ctgatggattaattc

SEQ ID NO: 945595 - DNA, 15 bp, Homo sapiens
tctgatggattaatt

SEQ ID NO: 945596 - DNA, 15 bp, Homo sapiens
atctgatggattaat

SEQ ID NO: 945597 - DNA, 15 bp, Homo sapiens
tatctgatggattaa

SEQ ID NO: 945598 - DNA, 15 bp, Homo sapiens
ctatctgatggatta

SEQ ID NO: 945599 - DNA, 15 bp, Homo sapiens
tctatctgatggatt

SEQ ID NO: 945600 - DNA, 15 bp, Homo sapiens
ttctatctgatggat

SEQ ID NO: 945601 - DNA, 15 bp, Homo sapiens
cttctatctgatgga

SEQ ID NO: 945602 - DNA, 15 bp, Homo sapiens
tcactgcaacaacca

SEQ ID NO: 945603 - DNA, 15 bp, Homo sapiens
ctcactgcaacaacc

SEQ ID NO: 945604 - DNA, 15 bp, Homo sapiens
gctcactgcaacaac

SEQ ID NO: 945605 - DNA, 15 bp, Homo sapiens
ggctcactgcaacaa

SEQ ID NO: 945606 - DNA, 15 bp, Homo sapiens
tggctcactgcaaca

SEQ ID NO: 945607 - DNA, 15 bp, Homo sapiens
aatcttggctcactg

SEQ ID NO: 945608 - DNA, 15 bp, Homo sapiens
caatcttggctcact

SEQ ID NO: 945609 - DNA, 15 bp, Homo sapiens
gcaatcttggctcac

SEQ ID NO: 945610 - DNA, 15 bp, Homo sapiens
tgcaatcttggctca

SEQ ID NO: 945611 - DNA, 15 bp, Homo sapiens
gtgcaatcttggctc

SEQ ID NO: 945612 - DNA, 15 bp, Homo sapiens
ggtgcaatcttggct

SEQ ID NO: 945613 - DNA, 15 bp, Homo sapiens
tggtgcaatcttggc

SEQ ID NO: 945614 - DNA, 15 bp, Homo sapiens
gtggtgcaatcttgg

SEQ ID NO: 945615 - DNA, 15 bp, Homo sapiens
agtggtgcaatcttg

SEQ ID NO: 945616 - DNA, 15 bp, Homo sapiens
cagtggtgcaatctt

SEQ ID NO: 945617 - DNA, 15 bp, Homo sapiens
gcagtggtgcaatct

SEQ ID NO: 945618 - DNA, 15 bp, Homo sapiens
tgcagtggtgcaatc

SEQ ID NO: 945619 - DNA, 15 bp, Homo sapiens
gtgcagtggtgcaat

SEQ ID NO: 945620 - DNA, 15 bp, Homo sapiens
agtgcagtggtgcaa

SEQ ID NO: 945621 - DNA, 15 bp, Homo sapiens
gagtgcagtggtgca

SEQ ID NO: 945622 - DNA, 15 bp, Homo sapiens
agagtgcagtggtgc

SEQ ID NO: 945623 - DNA, 15 bp, Homo sapiens
tagagtgcagtggtg

SEQ ID NO: 945624 - DNA, 15 bp, Homo sapiens
ctagagtgcagtggt

SEQ ID NO: 945625 - DNA, 15 bp, Homo sapiens
gctagagtgcagtgg

SEQ ID NO: 945626 - DNA, 15 bp, Homo sapiens
ggctagagtgcagtg

SEQ ID NO: 945627 - DNA, 15 bp, Homo sapiens
aggctagagtgcagt

SEQ ID NO: 945628 - DNA, 15 bp, Homo sapiens
caggctagagtgcag

SEQ ID NO: 945629 - DNA, 15 bp, Homo sapiens
ccaggctagagtgca

SEQ ID NO: 945630 - DNA, 15 bp, Homo sapiens
cccaggctagagtgc

SEQ ID NO: 945631 - DNA, 15 bp, Homo sapiens
gcccaggctagagtg

SEQ ID NO: 945632 - DNA, 15 bp, Homo sapiens
cgcccaggctagagt

SEQ ID NO: 945633 - DNA, 15 bp, Homo sapiens
tcgcccaggctagag

SEQ ID NO: 945634 - DNA, 15 bp, Homo sapiens
gtcgcccaggctaga

SEQ ID NO: 945635 - DNA, 15 bp, Homo sapiens
tgtcgcccaggctag

SEQ ID NO: 945636 - DNA, 15 bp, Homo sapiens
ctgtcgcccaggcta

SEQ ID NO: 945637 - DNA, 15 bp, Homo sapiens
actctgtcgcccagg

SEQ ID NO: 945638 - DNA, 15 bp, Homo sapiens
cactctgtcgcccag

SEQ ID NO: 945639 - DNA, 15 bp, Homo sapiens
tcactctgtcgccca

SEQ ID NO: 945640 - DNA, 15 bp, Homo sapiens
ctcactctgtcgccc

SEQ ID NO: 945641 - DNA, 15 bp, Homo sapiens
tctcactctgtcgcc

SEQ ID NO: 945642 - DNA, 15 bp, Homo sapiens
gtctcactctgtcgc

SEQ ID NO: 945643 - DNA, 15 bp, Homo sapiens
agtctcactctgtcg

SEQ ID NO: 945644 - DNA, 15 bp, Homo sapiens
acagtctcactctgt

SEQ ID NO: 945645 - DNA, 15 bp, Homo sapiens
gacagtctcactctg

SEQ ID NO: 945646 - DNA, 15 bp, Homo sapiens
agacagtctcactct

SEQ ID NO: 945647 - DNA, 15 bp, Homo sapiens
gagacagtctcactc

SEQ ID NO: 945648 - DNA, 15 bp, Homo sapiens
tgagacagtctcact

SEQ ID NO: 945649 - DNA, 15 bp, Homo sapiens
ttgagacagtctcac

SEQ ID NO: 945650 - DNA, 15 bp, Homo sapiens
tttgagacagtctca

SEQ ID NO: 945651 - DNA, 15 bp, Homo sapiens
ttttgagacagtctc

SEQ ID NO: 945652 - DNA, 15 bp, Homo sapiens
tttttgagacagtct

SEQ ID NO: 945653 - DNA, 15 bp, Homo sapiens
ttttttgagacagtc

SEQ ID NO: 945654 - DNA, 15 bp, Homo sapiens
tttttttgagacagt

SEQ ID NO: 945655 - DNA, 15 bp, Homo sapiens
atctttttttttttt

SEQ ID NO: 945656 - DNA, 15 bp, Homo sapiens
tatcttttttttttt

SEQ ID NO: 945657 - DNA, 15 bp, Homo sapiens
gtatctttttttttt

SEQ ID NO: 945658 - DNA, 15 bp, Homo sapiens
agtatcttttttttt

SEQ ID NO: 945659 - DNA, 15 bp, Homo sapiens
aagtatctttttttt

SEQ ID NO: 945660 - DNA, 15 bp, Homo sapiens
caagtatcttttttt

SEQ ID NO: 945661 - DNA, 15 bp, Homo sapiens
acaagtatctttttt

SEQ ID NO: 945662 - DNA, 15 bp, Homo sapiens
gacaagtatcttttt

SEQ ID NO: 945663 - DNA, 15 bp, Homo sapiens
ggacaagtatctttt

SEQ ID NO: 945664 - DNA, 15 bp, Homo sapiens
gggacaagtatcttt

SEQ ID NO: 945665 - DNA, 15 bp, Homo sapiens
tgggacaagtatctt

SEQ ID NO: 945666 - DNA, 15 bp, Homo sapiens
ctgggacaagtatct

SEQ ID NO: 945667 - DNA, 15 bp, Homo sapiens
gctgggacaagtatc

SEQ ID NO: 945668 - DNA, 15 bp, Homo sapiens
ggctgggacaagtat

SEQ ID NO: 945669 - DNA, 15 bp, Homo sapiens
tggctgggacaagta

SEQ ID NO: 945670 - DNA, 15 bp, Homo sapiens
atggctgggacaagt

SEQ ID NO: 945671 - DNA, 15 bp, Homo sapiens
catggctgggacaag

SEQ ID NO: 945672 - DNA, 15 bp, Homo sapiens
tcatggctgggacaa

SEQ ID NO: 945673 - DNA, 15 bp, Homo sapiens
ttcatggctgggaca

SEQ ID NO: 945674 - DNA, 15 bp, Homo sapiens
tttcatggctgggac

SEQ ID NO: 945675 - DNA, 15 bp, Homo sapiens
ttttcatggctggga

SEQ ID NO: 945676 - DNA, 15 bp, Homo sapiens
attttcatggctggg

SEQ ID NO: 945677 - DNA, 15 bp, Homo sapiens
cattttcatggctgg

SEQ ID NO: 945678 - DNA, 15 bp, Homo sapiens
acattttcatggctg

SEQ ID NO: 945679 - DNA, 15 bp, Homo sapiens
aacattttcatggct

SEQ ID NO: 945680 - DNA, 15 bp, Homo sapiens
aaacattttcatggc

SEQ ID NO: 945681 - DNA, 15 bp, Homo sapiens
caaacattttcatgg

SEQ ID NO: 945682 - DNA, 15 bp, Homo sapiens
gcaaacattttcatg

SEQ ID NO: 945683 - DNA, 15 bp, Homo sapiens
agcaaacattttcat

SEQ ID NO: 945684 - DNA, 15 bp, Homo sapiens
cagcaaacattttca

SEQ ID NO: 945685 - DNA, 15 bp, Homo sapiens
gcagcaaacattttc

SEQ ID NO: 945686 - DNA, 15 bp, Homo sapiens
ggcagcaaacatttt

SEQ ID NO: 945687 - DNA, 15 bp, Homo sapiens
gggcagcaaacattt

SEQ ID NO: 945688 - DNA, 15 bp, Homo sapiens
ggggcagcaaacatt

SEQ ID NO: 945689 - DNA, 15 bp, Homo sapiens
aggggcagcaaacat

SEQ ID NO: 945690 - DNA, 15 bp, Homo sapiens
aaggggcagcaaaca

SEQ ID NO: 945691 - DNA, 15 bp, Homo sapiens
taaggggcagcaaac

SEQ ID NO: 945692 - DNA, 15 bp, Homo sapiens
gtaaggggcagcaaa

SEQ ID NO: 945693 - DNA, 15 bp, Homo sapiens
agtaaggggcagcaa

SEQ ID NO: 945694 - DNA, 15 bp, Homo sapiens
aagtaaggggcagca

SEQ ID NO: 945695 - DNA, 15 bp, Homo sapiens
aaagtaaggggcagc

SEQ ID NO: 945696 - DNA, 15 bp, Homo sapiens
gaaagtaaggggcag

SEQ ID NO: 945697 - DNA, 15 bp, Homo sapiens
cgaaagtaaggggca

SEQ ID NO: 945698 - DNA, 15 bp, Homo sapiens
gcgaaagtaaggggc

SEQ ID NO: 945699 - DNA, 15 bp, Homo sapiens
tgcgaaagtaagggg

SEQ ID NO: 945700 - DNA, 15 bp, Homo sapiens
ttgcgaaagtaaggg

SEQ ID NO: 945701 - DNA, 15 bp, Homo sapiens
tttgcgaaagtaagg

SEQ ID NO: 945702 - DNA, 15 bp, Homo sapiens
gtttgcgaaagtaag

SEQ ID NO: 945703 - DNA, 15 bp, Homo sapiens
agtttgcgaaagtaa

SEQ ID NO: 945704 - DNA, 15 bp, Homo sapiens
aagtttgcgaaagta

SEQ ID NO: 945705 - DNA, 15 bp, Homo sapiens
aaagtttgcgaaagt

SEQ ID NO: 945706 - DNA, 15 bp, Homo sapiens
aaaagtttgcgaaag

SEQ ID NO: 945707 - DNA, 15 bp, Homo sapiens
taaaagtttgcgaaa

SEQ ID NO: 945708 - DNA, 15 bp, Homo sapiens
ctaaaagtttgcgaa

SEQ ID NO: 945709 - DNA, 15 bp, Homo sapiens
actaaaagtttgcga

SEQ ID NO: 945710 - DNA, 15 bp, Homo sapiens
tactaaaagtttgcg

SEQ ID NO: 945711 - DNA, 15 bp, Homo sapiens
atactaaaagtttgc

SEQ ID NO: 945712 - DNA, 15 bp, Homo sapiens
aatactaaaagtttg

SEQ ID NO: 945713 - DNA, 15 bp, Homo sapiens
aaatactaaaagttt

SEQ ID NO: 945714 - DNA, 15 bp, Homo sapiens
aaaatactaaaagtt

SEQ ID NO: 945715 - DNA, 15 bp, Homo sapiens
taaaatactaaaagt

SEQ ID NO: 945716 - DNA, 15 bp, Homo sapiens
ataaaatactaaaag

SEQ ID NO: 945717 - DNA, 15 bp, Homo sapiens
aataaaatactaaaa

SEQ ID NO: 945718 - DNA, 15 bp, Homo sapiens
taataaaatactaaa

SEQ ID NO: 945719 - DNA, 15 bp, Homo sapiens
ataataaaatactaa

SEQ ID NO: 945720 - DNA, 15 bp, Homo sapiens
aataataaaatacta

SEQ ID NO: 945721 - DNA, 15 bp, Homo sapiens
aaataataaaatact

SEQ ID NO: 945722 - DNA, 15 bp, Homo sapiens
aaaataataaaatac

SEQ ID NO: 945723 - DNA, 15 bp, Homo sapiens
aaaaataataaaata

SEQ ID NO: 945724 - DNA, 15 bp, Homo sapiens
gaaaaataataaaat

SEQ ID NO: 945725 - DNA, 15 bp, Homo sapiens
tgaaaaataataaaa

SEQ ID NO: 945726 - DNA, 15 bp, Homo sapiens
ttgaaaaataataaa

SEQ ID NO: 945727 - DNA, 15 bp, Homo sapiens
attgaaaaataataa

SEQ ID NO: 945728 - DNA, 15 bp, Homo sapiens
cattgaaaaataata

SEQ ID NO: 945729 - DNA, 15 bp, Homo sapiens
ccattgaaaaataat

SEQ ID NO: 945730 - DNA, 15 bp, Homo sapiens
gccattgaaaaataa

SEQ ID NO: 945731 - DNA, 15 bp, Homo sapiens
agccattgaaaaata

SEQ ID NO: 945732 - DNA, 15 bp, Homo sapiens
cagccattgaaaaat

SEQ ID NO: 945733 - DNA, 15 bp, Homo sapiens
acagccattgaaaaa

SEQ ID NO: 945734 - DNA, 15 bp, Homo sapiens
ttacagccattgaaa

SEQ ID NO: 945735 - DNA, 15 bp, Homo sapiens
tttacagccattgaa

SEQ ID NO: 945736 - DNA, 15 bp, Homo sapiens
ttttacagccattga

SEQ ID NO: 945737 - DNA, 15 bp, Homo sapiens
attttacagccattg

SEQ ID NO: 945738 - DNA, 15 bp, Homo sapiens
tattttacagccatt

SEQ ID NO: 945739 - DNA, 15 bp, Homo sapiens
atattttacagccat

SEQ ID NO: 945740 - DNA, 15 bp, Homo sapiens
catattttacagcca

SEQ ID NO: 945741 - DNA, 15 bp, Homo sapiens
tcatattttacagcc

SEQ ID NO: 945742 - DNA, 15 bp, Homo sapiens
gtcatattttacagc

SEQ ID NO: 945743 - DNA, 15 bp, Homo sapiens
agtcatattttacag

SEQ ID NO: 945744 - DNA, 15 bp, Homo sapiens
aagtcatattttaca

SEQ ID NO: 945745 - DNA, 15 bp, Homo sapiens
taagtcatattttac

SEQ ID NO: 945746 - DNA, 15 bp, Homo sapiens
ataagtcatatttta

SEQ ID NO: 945747 - DNA, 15 bp, Homo sapiens
aataagtcatatttt

SEQ ID NO: 945748 - DNA, 15 bp, Homo sapiens
taataagtcatattt

SEQ ID NO: 945749 - DNA, 15 bp, Homo sapiens
ttaataagtcatatt

SEQ ID NO: 945750 - DNA, 15 bp, Homo sapiens
tttaataagtcatat

SEQ ID NO: 945751 - DNA, 15 bp, Homo sapiens
atttaataagtcata

SEQ ID NO: 945752 - DNA, 15 bp, Homo sapiens
catttaataagtcat

SEQ ID NO: 945753 - DNA, 15 bp, Homo sapiens
acatttaataagtca

SEQ ID NO: 945754 - DNA, 15 bp, Homo sapiens
tacatttaataagtc

SEQ ID NO: 945755 - DNA, 15 bp, Homo sapiens
ctacatttaataagt

SEQ ID NO: 945756 - DNA, 15 bp, Homo sapiens
actacatttaataag

SEQ ID NO: 945757 - DNA, 15 bp, Homo sapiens
tactacatttaataa

SEQ ID NO: 945758 - DNA, 15 bp, Homo sapiens
atactacatttaata

SEQ ID NO: 945759 - DNA, 15 bp, Homo sapiens
tatactacatttaat

SEQ ID NO: 945760 - DNA, 15 bp, Homo sapiens
ttatactacatttaa

SEQ ID NO: 945761 - DNA, 15 bp, Homo sapiens
attatactacattta

SEQ ID NO: 945762 - DNA, 15 bp, Homo sapiens
tattatactacattt

SEQ ID NO: 945763 - DNA, 15 bp, Homo sapiens
atattatactacatt

SEQ ID NO: 945764 - DNA, 15 bp, Homo sapiens
tatattatactacat

SEQ ID NO: 945765 - DNA, 15 bp, Homo sapiens
ttatattatactaca

SEQ ID NO: 945766 - DNA, 15 bp, Homo sapiens
tttatattatactac

SEQ ID NO: 945767 - DNA, 15 bp, Homo sapiens
ctttatattatacta

SEQ ID NO: 945768 - DNA, 15 bp, Homo sapiens
tctttatattatact

SEQ ID NO: 945769 - DNA, 15 bp, Homo sapiens
ttctttatattatac

SEQ ID NO: 945770 - DNA, 15 bp, Homo sapiens
tttctttatattata

SEQ ID NO: 945771 - DNA, 15 bp, Homo sapiens
ttttctttatattat

SEQ ID NO: 945772 - DNA, 15 bp, Homo sapiens
cttttctttatatta

SEQ ID NO: 945773 - DNA, 15 bp, Homo sapiens
tcttttctttatatt

SEQ ID NO: 945774 - DNA, 15 bp, Homo sapiens
ctcttttctttatat

SEQ ID NO: 945775 - DNA, 15 bp, Homo sapiens
tctcttttctttata

SEQ ID NO: 945776 - DNA, 15 bp, Homo sapiens
atctcttttctttat

SEQ ID NO: 945777 - DNA, 15 bp, Homo sapiens
tatctcttttcttta

SEQ ID NO: 945778 - DNA, 15 bp, Homo sapiens
atatctcttttcttt

SEQ ID NO: 945779 - DNA, 15 bp, Homo sapiens
gatatctcttttctt

SEQ ID NO: 945780 - DNA, 15 bp, Homo sapiens
agatatctcttttct

SEQ ID NO: 945781 - DNA, 15 bp, Homo sapiens
tagatatctcttttc

SEQ ID NO: 945782 - DNA, 15 bp, Homo sapiens
ctagatatctctttt

SEQ ID NO: 945783 - DNA, 15 bp, Homo sapiens
gctagatatctcttt

SEQ ID NO: 945784 - DNA, 15 bp, Homo sapiens
tgctagatatctctt

SEQ ID NO: 945785 - DNA, 15 bp, Homo sapiens
ttgctagatatctct

SEQ ID NO: 945786 - DNA, 15 bp, Homo sapiens
tttgctagatatctc

SEQ ID NO: 945787 - DNA, 15 bp, Homo sapiens
ctttgctagatatct

SEQ ID NO: 945788 - DNA, 15 bp, Homo sapiens
tctttgctagatatc

SEQ ID NO: 945789 - DNA, 15 bp, Homo sapiens
atctttgctagatat

SEQ ID NO: 945790 - DNA, 15 bp, Homo sapiens
tatctttgctagata

SEQ ID NO: 945791 - DNA, 15 bp, Homo sapiens
ctatctttgctagat

SEQ ID NO: 945792 - DNA, 15 bp, Homo sapiens
gctatctttgctaga

SEQ ID NO: 945793 - DNA, 15 bp, Homo sapiens
tgctatctttgctag

SEQ ID NO: 945794 - DNA, 15 bp, Homo sapiens
atgctatctttgcta

SEQ ID NO: 945795 - DNA, 15 bp, Homo sapiens
aatgctatctttgct

SEQ ID NO: 945796 - DNA, 15 bp, Homo sapiens
taatgctatctttgc

SEQ ID NO: 945797 - DNA, 15 bp, Homo sapiens
ttaatgctatctttg

SEQ ID NO: 945798 - DNA, 15 bp, Homo sapiens
tttaatgctatcttt

SEQ ID NO: 945799 - DNA, 15 bp, Homo sapiens
ctttaatgctatctt

SEQ ID NO: 945800 - DNA, 15 bp, Homo sapiens
gctttaatgctatct

SEQ ID NO: 945801 - DNA, 15 bp, Homo sapiens
tgctttaatgctatc

SEQ ID NO: 945802 - DNA, 15 bp, Homo sapiens
ttgctttaatgctat

SEQ ID NO: 945803 - DNA, 15 bp, Homo sapiens
tttgctttaatgcta

SEQ ID NO: 945804 - DNA, 15 bp, Homo sapiens
ttttgctttaatgct

SEQ ID NO: 945805 - DNA, 15 bp, Homo sapiens
tttttgctttaatgc

SEQ ID NO: 945806 - DNA, 15 bp, Homo sapiens
atttttgctttaatg

SEQ ID NO: 945807 - DNA, 15 bp, Homo sapiens
gatttttgctttaat

SEQ ID NO: 945808 - DNA, 15 bp, Homo sapiens
ggatttttgctttaa

SEQ ID NO: 945809 - DNA, 15 bp, Homo sapiens
aggatttttgcttta

SEQ ID NO: 945810 - DNA, 15 bp, Homo sapiens
taggatttttgcttt

SEQ ID NO: 945811 - DNA, 15 bp, Homo sapiens
ataggatttttgctt

SEQ ID NO: 945812 - DNA, 15 bp, Homo sapiens
aataggatttttgct

SEQ ID NO: 945813 - DNA, 15 bp, Homo sapiens
aaataggatttttgc

SEQ ID NO: 945814 - DNA, 15 bp, Homo sapiens
caaataggatttttg

SEQ ID NO: 945815 - DNA, 15 bp, Homo sapiens
gcaaataggattttt

SEQ ID NO: 945816 - DNA, 15 bp, Homo sapiens
ggcaaataggatttt

SEQ ID NO: 945817 - DNA, 15 bp, Homo sapiens
aggcaaataggattt

SEQ ID NO: 945818 - DNA, 15 bp, Homo sapiens
caggcaaataggatt

SEQ ID NO: 945819 - DNA, 15 bp, Homo sapiens
gcaggcaaataggat

SEQ ID NO: 945820 - DNA, 15 bp, Homo sapiens
agcaggcaaatagga

SEQ ID NO: 945821 - DNA, 15 bp, Homo sapiens
cagcaggcaaatagg

SEQ ID NO: 945822 - DNA, 15 bp, Homo sapiens
tcagcaggcaaatag

SEQ ID NO: 945823 - DNA, 15 bp, Homo sapiens
atcagcaggcaaata

SEQ ID NO: 945824 - DNA, 15 bp, Homo sapiens
tatcagcaggcaaat

SEQ ID NO: 945825 - DNA, 15 bp, Homo sapiens
ttatcagcaggcaaa

SEQ ID NO: 945826 - DNA, 15 bp, Homo sapiens
tttatcagcaggcaa

SEQ ID NO: 945827 - DNA, 15 bp, Homo sapiens
ctttatcagcaggca

SEQ ID NO: 945828 - DNA, 15 bp, Homo sapiens
actttatcagcaggc

SEQ ID NO: 945829 - DNA, 15 bp, Homo sapiens
aactttatcagcagg

SEQ ID NO: 945830 - DNA, 15 bp, Homo sapiens
taactttatcagcag

SEQ ID NO: 945831 - DNA, 15 bp, Homo sapiens
ctaactttatcagca

SEQ ID NO: 945832 - DNA, 15 bp, Homo sapiens
tctaactttatcagc

SEQ ID NO: 945833 - DNA, 15 bp, Homo sapiens
ctctaactttatcag

SEQ ID NO: 945834 - DNA, 15 bp, Homo sapiens
cctctaactttatca

SEQ ID NO: 945835 - DNA, 15 bp, Homo sapiens
acctctaactttatc

SEQ ID NO: 945836 - DNA, 15 bp, Homo sapiens
cacctctaactttat

SEQ ID NO: 945837 - DNA, 15 bp, Homo sapiens
acacctctaacttta

SEQ ID NO: 945838 - DNA, 15 bp, Homo sapiens
aacacctctaacttt

SEQ ID NO: 945839 - DNA, 15 bp, Homo sapiens
taacacctctaactt

SEQ ID NO: 945840 - DNA, 15 bp, Homo sapiens
ttaacacctctaact

SEQ ID NO: 945841 - DNA, 15 bp, Homo sapiens
gttaacacctctaac

SEQ ID NO: 945842 - DNA, 15 bp, Homo sapiens
agttaacacctctaa

SEQ ID NO: 945843 - DNA, 15 bp, Homo sapiens
aagttaacacctcta

SEQ ID NO: 945844 - DNA, 15 bp, Homo sapiens
caagttaacacctct

SEQ ID NO: 945845 - DNA, 15 bp, Homo sapiens
ccaagttaacacctc

SEQ ID NO: 945846 - DNA, 15 bp, Homo sapiens
tccaagttaacacct

SEQ ID NO: 945847 - DNA, 15 bp, Homo sapiens
ctccaagttaacacc

SEQ ID NO: 945848 - DNA, 15 bp, Homo sapiens
cctccaagttaacac

SEQ ID NO: 945849 - DNA, 15 bp, Homo sapiens
ccctccaagttaaca

SEQ ID NO: 945850 - DNA, 15 bp, Homo sapiens
accctccaagttaac

SEQ ID NO: 945851 - DNA, 15 bp, Homo sapiens
caccctccaagttaa

SEQ ID NO: 945852 - DNA, 15 bp, Homo sapiens
tcaccctccaagtta

SEQ ID NO: 945853 - DNA, 15 bp, Homo sapiens
ttcaccctccaagtt

SEQ ID NO: 945854 - DNA, 15 bp, Homo sapiens
attcaccctccaagt

SEQ ID NO: 945855 - DNA, 15 bp, Homo sapiens
gattcaccctccaag

SEQ ID NO: 945856 - DNA, 15 bp, Homo sapiens
ggattcaccctccaa

SEQ ID NO: 945857 - DNA, 15 bp, Homo sapiens
tggattcaccctcca

SEQ ID NO: 945858 - DNA, 15 bp, Homo sapiens
ttggattcaccctcc

SEQ ID NO: 945859 - DNA, 15 bp, Homo sapiens
attggattcaccctc

SEQ ID NO: 945860 - DNA, 15 bp, Homo sapiens
tattggattcaccct

SEQ ID NO: 945861 - DNA, 15 bp, Homo sapiens
ttattggattcaccc

SEQ ID NO: 945862 - DNA, 15 bp, Homo sapiens
tttattggattcacc

SEQ ID NO: 945863 - DNA, 15 bp, Homo sapiens
atttattggattcac

SEQ ID NO: 945864 - DNA, 15 bp, Homo sapiens
aatttattggattca

SEQ ID NO: 945865 - DNA, 15 bp, Homo sapiens
taatttattggattc

SEQ ID NO: 945866 - DNA, 15 bp, Homo sapiens
ctaatttattggatt

SEQ ID NO: 945867 - DNA, 15 bp, Homo sapiens
tctaatttattggat

SEQ ID NO: 945868 - DNA, 15 bp, Homo sapiens
ttctaatttattgga

SEQ ID NO: 945869 - DNA, 15 bp, Homo sapiens
gttctaatttattgg

SEQ ID NO: 945870 - DNA, 15 bp, Homo sapiens
agttctaatttattg

SEQ ID NO: 945871 - DNA, 15 bp, Homo sapiens
aagttctaatttatt

SEQ ID NO: 945872 - DNA, 15 bp, Homo sapiens
aaagttctaatttat

SEQ ID NO: 945873 - DNA, 15 bp, Homo sapiens
aaaagttctaattta

SEQ ID NO: 945874 - DNA, 15 bp, Homo sapiens
caaaagttctaattt

SEQ ID NO: 945875 - DNA, 15 bp, Homo sapiens
acaaaagttctaatt

SEQ ID NO: 945876 - DNA, 15 bp, Homo sapiens
cacaaaagttctaat

SEQ ID NO: 945877 - DNA, 15 bp, Homo sapiens
gcacaaaagttctaa

SEQ ID NO: 945878 - DNA, 15 bp, Homo sapiens
agcacaaaagttcta

SEQ ID NO: 945879 - DNA, 15 bp, Homo sapiens
tagcacaaaagttct

SEQ ID NO: 945880 - DNA, 15 bp, Homo sapiens
atagcacaaaagttc

SEQ ID NO: 945881 - DNA, 15 bp, Homo sapiens
tatagcacaaaagtt

SEQ ID NO: 945882 - DNA, 15 bp, Homo sapiens
atatagcacaaaagt

SEQ ID NO: 945883 - DNA, 15 bp, Homo sapiens
aatatagcacaaaag

SEQ ID NO: 945884 - DNA, 15 bp, Homo sapiens
aaatatagcacaaaa

SEQ ID NO: 945885 - DNA, 15 bp, Homo sapiens
caaatatagcacaaa

SEQ ID NO: 945886 - DNA, 15 bp, Homo sapiens
ccaaatatagcacaa

SEQ ID NO: 945887 - DNA, 15 bp, Homo sapiens
tccaaatatagcaca

SEQ ID NO: 945888 - DNA, 15 bp, Homo sapiens
ctccaaatatagcac

SEQ ID NO: 945889 - DNA, 15 bp, Homo sapiens
tctccaaatatagca

SEQ ID NO: 945890 - DNA, 15 bp, Homo sapiens
gtctccaaatatagc

SEQ ID NO: 945891 - DNA, 15 bp, Homo sapiens
agtctccaaatatag

SEQ ID NO: 945892 - DNA, 15 bp, Homo sapiens
aagtctccaaatata

SEQ ID NO: 945893 - DNA, 15 bp, Homo sapiens
aaagtctccaaatat

SEQ ID NO: 945894 - DNA, 15 bp, Homo sapiens
aaaagtctccaaata

SEQ ID NO: 945895 - DNA, 15 bp, Homo sapiens
caaaagtctccaaat

SEQ ID NO: 945896 - DNA, 15 bp, Homo sapiens
acaaaagtctccaaa

SEQ ID NO: 945897 - DNA, 15 bp, Homo sapiens
aacaaaagtctccaa

SEQ ID NO: 945898 - DNA, 15 bp, Homo sapiens
aaacaaaagtctcca

SEQ ID NO: 945899 - DNA, 15 bp, Homo sapiens
aaaacaaaagtctcc

SEQ ID NO: 945900 - DNA, 15 bp, Homo sapiens
gaaaacaaaagtctc

SEQ ID NO: 945901 - DNA, 15 bp, Homo sapiens
ggaaaacaaaagtct

SEQ ID NO: 945902 - DNA, 15 bp, Homo sapiens
aggaaaacaaaagtc

SEQ ID NO: 945903 - DNA, 15 bp, Homo sapiens
taggaaaacaaaagt

SEQ ID NO: 945904 - DNA, 15 bp, Homo sapiens
gtaggaaaacaaaag

SEQ ID NO: 945905 - DNA, 15 bp, Homo sapiens
ggtaggaaaacaaaa

SEQ ID NO: 945906 - DNA, 15 bp, Homo sapiens
tggtaggaaaacaaa

SEQ ID NO: 945907 - DNA, 15 bp, Homo sapiens
ttggtaggaaaacaa

SEQ ID NO: 945908 - DNA, 15 bp, Homo sapiens
tttggtaggaaaaca

SEQ ID NO: 945909 - DNA, 15 bp, Homo sapiens
ctttggtaggaaaac

SEQ ID NO: 945910 - DNA, 15 bp, Homo sapiens
actttggtaggaaaa

SEQ ID NO: 945911 - DNA, 15 bp, Homo sapiens
tactttggtaggaaa

SEQ ID NO: 945912 - DNA, 15 bp, Homo sapiens
atactttggtaggaa

SEQ ID NO: 945913 - DNA, 15 bp, Homo sapiens
gatactttggtagga

SEQ ID NO: 945914 - DNA, 15 bp, Homo sapiens
tgatactttggtagg

SEQ ID NO: 945915 - DNA, 15 bp, Homo sapiens
ctgatactttggtag

SEQ ID NO: 945916 - DNA, 15 bp, Homo sapiens
cctgatactttggta

SEQ ID NO: 945917 - DNA, 15 bp, Homo sapiens
ccctgatactttggt

SEQ ID NO: 945918 - DNA, 15 bp, Homo sapiens
gccctgatactttgg

SEQ ID NO: 945919 - DNA, 15 bp, Homo sapiens
agccctgatactttg

SEQ ID NO: 945920 - DNA, 15 bp, Homo sapiens
tagccctgatacttt

SEQ ID NO: 945921 - DNA, 15 bp, Homo sapiens
atagccctgatactt

SEQ ID NO: 945922 - DNA, 15 bp, Homo sapiens
catagccctgatact

SEQ ID NO: 945923 - DNA, 15 bp, Homo sapiens
acatagccctgatac

SEQ ID NO: 945924 - DNA, 15 bp, Homo sapiens
gacatagccctgata

SEQ ID NO: 945925 - DNA, 15 bp, Homo sapiens
agacatagccctgat

SEQ ID NO: 945926 - DNA, 15 bp, Homo sapiens
aagacatagccctga

SEQ ID NO: 945927 - DNA, 15 bp, Homo sapiens
taagacatagccctg

SEQ ID NO: 945928 - DNA, 15 bp, Homo sapiens
gtaagacatagccct

SEQ ID NO: 945929 - DNA, 15 bp, Homo sapiens
agtaagacatagccc

SEQ ID NO: 945930 - DNA, 15 bp, Homo sapiens
aagtaagacatagcc

SEQ ID NO: 945931 - DNA, 15 bp, Homo sapiens
taagtaagacatagc

SEQ ID NO: 945932 - DNA, 15 bp, Homo sapiens
ataagtaagacatag

SEQ ID NO: 945933 - DNA, 15 bp, Homo sapiens
gataagtaagacata

SEQ ID NO: 945934 - DNA, 15 bp, Homo sapiens
agataagtaagacat

SEQ ID NO: 945935 - DNA, 15 bp, Homo sapiens
aagataagtaagaca

SEQ ID NO: 945936 - DNA, 15 bp, Homo sapiens
aaagataagtaagac

SEQ ID NO: 945937 - DNA, 15 bp, Homo sapiens
caaagataagtaaga

SEQ ID NO: 945938 - DNA, 15 bp, Homo sapiens
acaaagataagtaag

SEQ ID NO: 945939 - DNA, 15 bp, Homo sapiens
tacaaagataagtaa

SEQ ID NO: 945940 - DNA, 15 bp, Homo sapiens
atacaaagataagta

SEQ ID NO: 945941 - DNA, 15 bp, Homo sapiens
aatacaaagataagt

SEQ ID NO: 945942 - DNA, 15 bp, Homo sapiens
taatacaaagataag

SEQ ID NO: 945943 - DNA, 15 bp, Homo sapiens
gtaatacaaagataa

SEQ ID NO: 945944 - DNA, 15 bp, Homo sapiens
tgtaatacaaagata

SEQ ID NO: 945945 - DNA, 15 bp, Homo sapiens
gtgtaatacaaagat

SEQ ID NO: 945946 - DNA, 15 bp, Homo sapiens
tgtgtaatacaaaga

SEQ ID NO: 945947 - DNA, 15 bp, Homo sapiens
ctgtgtaatacaaag

SEQ ID NO: 945948 - DNA, 15 bp, Homo sapiens
gctgtgtaatacaaa

SEQ ID NO: 945949 - DNA, 15 bp, Homo sapiens
ggctgtgtaatacaa

SEQ ID NO: 945950 - DNA, 15 bp, Homo sapiens
aggctgtgtaataca

SEQ ID NO: 945951 - DNA, 15 bp, Homo sapiens
caggctgtgtaatac

SEQ ID NO: 945952 - DNA, 15 bp, Homo sapiens
gcaggctgtgtaata

SEQ ID NO: 945953 - DNA, 15 bp, Homo sapiens
tgcaggctgtgtaat

SEQ ID NO: 945954 - DNA, 15 bp, Homo sapiens
atgcaggctgtgtaa

SEQ ID NO: 945955 - DNA, 15 bp, Homo sapiens
catgcaggctgtgta

SEQ ID NO: 945956 - DNA, 15 bp, Homo sapiens
tcatgcaggctgtgt

SEQ ID NO: 945957 - DNA, 15 bp, Homo sapiens
gtcatgcaggctgtg

SEQ ID NO: 945958 - DNA, 15 bp, Homo sapiens
tgtcatgcaggctgt

SEQ ID NO: 945959 - DNA, 15 bp, Homo sapiens
gtgtcatgcaggctg

SEQ ID NO: 945960 - DNA, 15 bp, Homo sapiens
cgtgtcatgcaggct

SEQ ID NO: 945961 - DNA, 15 bp, Homo sapiens
acgtgtcatgcaggc

SEQ ID NO: 945962 - DNA, 15 bp, Homo sapiens
aacgtgtcatgcagg

SEQ ID NO: 945963 - DNA, 15 bp, Homo sapiens
aaacgtgtcatgcag

SEQ ID NO: 945964 - DNA, 15 bp, Homo sapiens
aaaacgtgtcatgca

SEQ ID NO: 945965 - DNA, 15 bp, Homo sapiens
caaaacgtgtcatgc

SEQ ID NO: 945966 - DNA, 15 bp, Homo sapiens
gcaaaacgtgtcatg

SEQ ID NO: 945967 - DNA, 15 bp, Homo sapiens
tgcaaaacgtgtcat

SEQ ID NO: 945968 - DNA, 15 bp, Homo sapiens
gtgcaaaacgtgtca

SEQ ID NO: 945969 - DNA, 15 bp, Homo sapiens
tgtgcaaaacgtgtc

SEQ ID NO: 945970 - DNA, 15 bp, Homo sapiens
atgtgcaaaacgtgt

SEQ ID NO: 945971 - DNA, 15 bp, Homo sapiens
tatgtgcaaaacgtg

SEQ ID NO: 945972 - DNA, 15 bp, Homo sapiens
ctatgtgcaaaacgt

SEQ ID NO: 945973 - DNA, 15 bp, Homo sapiens
actatgtgcaaaacg

SEQ ID NO: 945974 - DNA, 15 bp, Homo sapiens
tactatgtgcaaaac

SEQ ID NO: 945975 - DNA, 15 bp, Homo sapiens
ttactatgtgcaaaa

SEQ ID NO: 945976 - DNA, 15 bp, Homo sapiens
attactatgtgcaaa

SEQ ID NO: 945977 - DNA, 15 bp, Homo sapiens
aattactatgtgcaa

SEQ ID NO: 945978 - DNA, 15 bp, Homo sapiens
caattactatgtgca

SEQ ID NO: 945979 - DNA, 15 bp, Homo sapiens
gcaattactatgtgc

SEQ ID NO: 945980 - DNA, 15 bp, Homo sapiens
tgcaattactatgtg

SEQ ID NO: 945981 - DNA, 15 bp, Homo sapiens
gtgcaattactatgt

SEQ ID NO: 945982 - DNA, 15 bp, Homo sapiens
tgtgcaattactatg

SEQ ID NO: 945983 - DNA, 15 bp, Homo sapiens
ctgtgcaattactat

SEQ ID NO: 945984 - DNA, 15 bp, Homo sapiens
actgtgcaattacta

SEQ ID NO: 945985 - DNA, 15 bp, Homo sapiens
tactgtgcaattact

SEQ ID NO: 945986 - DNA, 15 bp, Homo sapiens
ttactgtgcaattac

SEQ ID NO: 945987 - DNA, 15 bp, Homo sapiens
tttactgtgcaatta

SEQ ID NO: 945988 - DNA, 15 bp, Homo sapiens
atttactgtgcaatt

SEQ ID NO: 945989 - DNA, 15 bp, Homo sapiens
catttactgtgcaat

SEQ ID NO: 945990 - DNA, 15 bp, Homo sapiens
acatttactgtgcaa

SEQ ID NO: 945991 - DNA, 15 bp, Homo sapiens
cacatttactgtgca

SEQ ID NO: 945992 - DNA, 15 bp, Homo sapiens
acacatttactgtgc

SEQ ID NO: 945993 - DNA, 15 bp, Homo sapiens
tacacatttactgtg

SEQ ID NO: 945994 - DNA, 15 bp, Homo sapiens
ttacacatttactgt

SEQ ID NO: 945995 - DNA, 15 bp, Homo sapiens
attacacatttactg

SEQ ID NO: 945996 - DNA, 15 bp, Homo sapiens
tattacacatttact

SEQ ID NO: 945997 - DNA, 15 bp, Homo sapiens
ttattacacatttac

SEQ ID NO: 945998 - DNA, 15 bp, Homo sapiens
gttattacacattta

SEQ ID NO: 945999 - DNA, 15 bp, Homo sapiens
ggttattacacattt

SEQ ID NO: 946000 - DNA, 15 bp, Homo sapiens
aggttattacacatt

SEQ ID NO: 946001 - DNA, 15 bp, Homo sapiens
taggttattacacat

SEQ ID NO: 946002 - DNA, 15 bp, Homo sapiens
gtaggttattacaca

SEQ ID NO: 946003 - DNA, 15 bp, Homo sapiens
tgtaggttattacac

SEQ ID NO: 946004 - DNA, 15 bp, Homo sapiens
atgtaggttattaca

SEQ ID NO: 946005 - DNA, 15 bp, Homo sapiens
catgtaggttattac

SEQ ID NO: 946006 - DNA, 15 bp, Homo sapiens
ccatgtaggttatta

SEQ ID NO: 946007 - DNA, 15 bp, Homo sapiens
tccatgtaggttatt

SEQ ID NO: 946008 - DNA, 15 bp, Homo sapiens
ttccatgtaggttat

SEQ ID NO: 946009 - DNA, 15 bp, Homo sapiens
attccatgtaggtta

SEQ ID NO: 946010 - DNA, 15 bp, Homo sapiens
tattccatgtaggtt

SEQ ID NO: 946011 - DNA, 15 bp, Homo sapiens
ctattccatgtaggt

SEQ ID NO: 946012 - DNA, 15 bp, Homo sapiens
gctattccatgtagg

SEQ ID NO: 946013 - DNA, 15 bp, Homo sapiens
ggctattccatgtag

SEQ ID NO: 946014 - DNA, 15 bp, Homo sapiens
tggctattccatgta

SEQ ID NO: 946015 - DNA, 15 bp, Homo sapiens
ctggctattccatgt

SEQ ID NO: 946016 - DNA, 15 bp, Homo sapiens
actggctattccatg

SEQ ID NO: 946017 - DNA, 15 bp, Homo sapiens
cactggctattccat

SEQ ID NO: 946018 - DNA, 15 bp, Homo sapiens
acactggctattcca

SEQ ID NO: 946019 - DNA, 15 bp, Homo sapiens
aacactggctattcc

SEQ ID NO: 946020 - DNA, 15 bp, Homo sapiens
caacactggctattc

SEQ ID NO: 946021 - DNA, 15 bp, Homo sapiens
acaacactggctatt

SEQ ID NO: 946022 - DNA, 15 bp, Homo sapiens
cacaacactggctat

SEQ ID NO: 946023 - DNA, 15 bp, Homo sapiens
acacaacactggcta

SEQ ID NO: 946024 - DNA, 15 bp, Homo sapiens
aacacaacactggct

SEQ ID NO: 946025 - DNA, 15 bp, Homo sapiens
caacacaacactggc

SEQ ID NO: 946026 - DNA, 15 bp, Homo sapiens
ccaacacaacactgg

SEQ ID NO: 946027 - DNA, 15 bp, Homo sapiens
tccaacacaacactg

SEQ ID NO: 946028 - DNA, 15 bp, Homo sapiens
atccaacacaacact

SEQ ID NO: 946029 - DNA, 15 bp, Homo sapiens
tatccaacacaacac

SEQ ID NO: 946030 - DNA, 15 bp, Homo sapiens
ctatccaacacaaca

SEQ ID NO: 946031 - DNA, 15 bp, Homo sapiens
gctatccaacacaac

SEQ ID NO: 946032 - DNA, 15 bp, Homo sapiens
cgctatccaacacaa

SEQ ID NO: 946033 - DNA, 15 bp, Homo sapiens
ccgctatccaacaca

SEQ ID NO: 946034 - DNA, 15 bp, Homo sapiens
cccgctatccaacac

SEQ ID NO: 946035 - DNA, 15 bp, Homo sapiens
tcccgctatccaaca

SEQ ID NO: 946036 - DNA, 15 bp, Homo sapiens
ctcccgctatccaac

SEQ ID NO: 946037 - DNA, 15 bp, Homo sapiens
gctcccgctatccaa

SEQ ID NO: 946038 - DNA, 15 bp, Homo sapiens
tgctcccgctatcca

SEQ ID NO: 946039 - DNA, 15 bp, Homo sapiens
atgctcccgctatcc

SEQ ID NO: 946040 - DNA, 15 bp, Homo sapiens
aatgctcccgctatc

SEQ ID NO: 946041 - DNA, 15 bp, Homo sapiens
aaatgctcccgctat

SEQ ID NO: 946042 - DNA, 15 bp, Homo sapiens
caaatgctcccgcta

SEQ ID NO: 946043 - DNA, 15 bp, Homo sapiens
ccaaatgctcccgct

SEQ ID NO: 946044 - DNA, 15 bp, Homo sapiens
gccaaatgctcccgc

SEQ ID NO: 946045 - DNA, 15 bp, Homo sapiens
agccaaatgctcccg

SEQ ID NO: 946046 - DNA, 15 bp, Homo sapiens
tagccaaatgctccc

SEQ ID NO: 946047 - DNA, 15 bp, Homo sapiens
ctagccaaatgctcc

SEQ ID NO: 946048 - DNA, 15 bp, Homo sapiens
gctagccaaatgctc

SEQ ID NO: 946049 - DNA, 15 bp, Homo sapiens
agctagccaaatgct

SEQ ID NO: 946050 - DNA, 15 bp, Homo sapiens
aagctagccaaatgc

SEQ ID NO: 946051 - DNA, 15 bp, Homo sapiens
taagctagccaaatg

SEQ ID NO: 946052 - DNA, 15 bp, Homo sapiens
ataagctagccaaat

SEQ ID NO: 946053 - DNA, 15 bp, Homo sapiens
cataagctagccaaa

SEQ ID NO: 946054 - DNA, 15 bp, Homo sapiens
ccataagctagccaa

SEQ ID NO: 946055 - DNA, 15 bp, Homo sapiens
accataagctagcca

SEQ ID NO: 946056 - DNA, 15 bp, Homo sapiens
aaccataagctagcc

SEQ ID NO: 946057 - DNA, 15 bp, Homo sapiens
taaccataagctagc

SEQ ID NO: 946058 - DNA, 15 bp, Homo sapiens
ataaccataagctag

SEQ ID NO: 946059 - DNA, 15 bp, Homo sapiens
tataaccataagcta

SEQ ID NO: 946060 - DNA, 15 bp, Homo sapiens
ctataaccataagct

SEQ ID NO: 946061 - DNA, 15 bp, Homo sapiens
actataaccataagc

SEQ ID NO: 946062 - DNA, 15 bp, Homo sapiens
gactataaccataag

SEQ ID NO: 946063 - DNA, 15 bp, Homo sapiens
ggactataaccataa

SEQ ID NO: 946064 - DNA, 15 bp, Homo sapiens
gggactataaccata

SEQ ID NO: 946065 - DNA, 15 bp, Homo sapiens
agggactataaccat

SEQ ID NO: 946066 - DNA, 15 bp, Homo sapiens
aagggactataacca

SEQ ID NO: 946067 - DNA, 15 bp, Homo sapiens
taagggactataacc

SEQ ID NO: 946068 - DNA, 15 bp, Homo sapiens
gtaagggactataac

SEQ ID NO: 946069 - DNA, 15 bp, Homo sapiens
ggtaagggactataa

SEQ ID NO: 946070 - DNA, 15 bp, Homo sapiens
gggtaagggactata

SEQ ID NO: 946071 - DNA, 15 bp, Homo sapiens
tgggtaagggactat

SEQ ID NO: 946072 - DNA, 15 bp, Homo sapiens
ttgggtaagggacta

SEQ ID NO: 946073 - DNA, 15 bp, Homo sapiens
gttgggtaagggact

SEQ ID NO: 946074 - DNA, 15 bp, Homo sapiens
tgttgggtaagggac

SEQ ID NO: 946075 - DNA, 15 bp, Homo sapiens
ctgttgggtaaggga

SEQ ID NO: 946076 - DNA, 15 bp, Homo sapiens
actgttgggtaaggg

SEQ ID NO: 946077 - DNA, 15 bp, Homo sapiens
gactgttgggtaagg

SEQ ID NO: 946078 - DNA, 15 bp, Homo sapiens
agactgttgggtaag

SEQ ID NO: 946079 - DNA, 15 bp, Homo sapiens
cagactgttgggtaa

SEQ ID NO: 946080 - DNA, 15 bp, Homo sapiens
gcagactgttgggta

SEQ ID NO: 946081 - DNA, 15 bp, Homo sapiens
agcagactgttgggt

SEQ ID NO: 946082 - DNA, 15 bp, Homo sapiens
aagcagactgttggg

SEQ ID NO: 946083 - DNA, 15 bp, Homo sapiens
aaagcagactgttgg

SEQ ID NO: 946084 - DNA, 15 bp, Homo sapiens
aaaagcagactgttg

SEQ ID NO: 946085 - DNA, 15 bp, Homo sapiens
gaaaagcagactgtt

SEQ ID NO: 946086 - DNA, 15 bp, Homo sapiens
agaaaagcagactgt

SEQ ID NO: 946087 - DNA, 15 bp, Homo sapiens
aagaaaagcagactg

SEQ ID NO: 946088 - DNA, 15 bp, Homo sapiens
gaagaaaagcagact

SEQ ID NO: 946089 - DNA, 15 bp, Homo sapiens
agaagaaaagcagac

SEQ ID NO: 946090 - DNA, 15 bp, Homo sapiens
cagaagaaaagcaga

SEQ ID NO: 946091 - DNA, 15 bp, Homo sapiens
acagaagaaaagcag

SEQ ID NO: 946092 - DNA, 15 bp, Homo sapiens
aacagaagaaaagca

SEQ ID NO: 946093 - DNA, 15 bp, Homo sapiens
caacagaagaaaagc

SEQ ID NO: 946094 - DNA, 15 bp, Homo sapiens
acaacagaagaaaag

SEQ ID NO: 946095 - DNA, 15 bp, Homo sapiens
tacaacagaagaaaa

SEQ ID NO: 946096 - DNA, 15 bp, Homo sapiens
gtacaacagaagaaa

SEQ ID NO: 946097 - DNA, 15 bp, Homo sapiens
agtacaacagaagaa

SEQ ID NO: 946098 - DNA, 15 bp, Homo sapiens
aagtacaacagaaga

SEQ ID NO: 946099 - DNA, 15 bp, Homo sapiens
aaagtacaacagaag

SEQ ID NO: 946100 - DNA, 15 bp, Homo sapiens
aaaagtacaacagaa

SEQ ID NO: 946101 - DNA, 15 bp, Homo sapiens
taaaagtacaacaga

SEQ ID NO: 946102 - DNA, 15 bp, Homo sapiens
ctaaaagtacaacag

SEQ ID NO: 946103 - DNA, 15 bp, Homo sapiens
actaaaagtacaaca

SEQ ID NO: 946104 - DNA, 15 bp, Homo sapiens
tactaaaagtacaac

SEQ ID NO: 946105 - DNA, 15 bp, Homo sapiens
gtactaaaagtacaa

SEQ ID NO: 946106 - DNA, 15 bp, Homo sapiens
ggtactaaaagtaca

SEQ ID NO: 946107 - DNA, 15 bp, Homo sapiens
aggtactaaaagtac

SEQ ID NO: 946108 - DNA, 15 bp, Homo sapiens
taggtactaaaagta

SEQ ID NO: 946109 - DNA, 15 bp, Homo sapiens
ttaggtactaaaagt

SEQ ID NO: 946110 - DNA, 15 bp, Homo sapiens
gttaggtactaaaag

SEQ ID NO: 946111 - DNA, 15 bp, Homo sapiens
tgttaggtactaaaa

SEQ ID NO: 946112 - DNA, 15 bp, Homo sapiens
ttgttaggtactaaa

SEQ ID NO: 946113 - DNA, 15 bp, Homo sapiens
cttgttaggtactaa

SEQ ID NO: 946114 - DNA, 15 bp, Homo sapiens
acttgttaggtacta

SEQ ID NO: 946115 - DNA, 15 bp, Homo sapiens
aacttgttaggtact

SEQ ID NO: 946116 - DNA, 15 bp, Homo sapiens
aaacttgttaggtac

SEQ ID NO: 946117 - DNA, 15 bp, Homo sapiens
gaaacttgttaggta

SEQ ID NO: 946118 - DNA, 15 bp, Homo sapiens
ggaaacttgttaggt

SEQ ID NO: 946119 - DNA, 15 bp, Homo sapiens
gggaaacttgttagg

SEQ ID NO: 946120 - DNA, 15 bp, Homo sapiens
agggaaacttgttag

SEQ ID NO: 946121 - DNA, 15 bp, Homo sapiens
cagggaaacttgtta

SEQ ID NO: 946122 - DNA, 15 bp, Homo sapiens
ccagggaaacttgtt

SEQ ID NO: 946123 - DNA, 15 bp, Homo sapiens
gccagggaaacttgt

SEQ ID NO: 946124 - DNA, 15 bp, Homo sapiens
agccagggaaacttg

SEQ ID NO: 946125 - DNA, 15 bp, Homo sapiens
aagccagggaaactt

SEQ ID NO: 946126 - DNA, 15 bp, Homo sapiens
aaagccagggaaact

SEQ ID NO: 946127 - DNA, 15 bp, Homo sapiens
taaagccagggaaac

SEQ ID NO: 946128 - DNA, 15 bp, Homo sapiens
ctaaagccagggaaa

SEQ ID NO: 946129 - DNA, 15 bp, Homo sapiens
cctaaagccagggaa

SEQ ID NO: 946130 - DNA, 15 bp, Homo sapiens
tcctaaagccaggga

SEQ ID NO: 946131 - DNA, 15 bp, Homo sapiens
atcctaaagccaggg

SEQ ID NO: 946132 - DNA, 15 bp, Homo sapiens
aatcctaaagccagg

SEQ ID NO: 946133 - DNA, 15 bp, Homo sapiens
aaatcctaaagccag

SEQ ID NO: 946134 - DNA, 15 bp, Homo sapiens
aaaatcctaaagcca

SEQ ID NO: 946135 - DNA, 15 bp, Homo sapiens
aaaaatcctaaagcc

SEQ ID NO: 946136 - DNA, 15 bp, Homo sapiens
aaaaaatcctaaagc

SEQ ID NO: 946137 - DNA, 15 bp, Homo sapiens
gaaaaaatcctaaag

SEQ ID NO: 946138 - DNA, 15 bp, Homo sapiens
ggaaaaaatcctaaa

SEQ ID NO: 946139 - DNA, 15 bp, Homo sapiens
tggaaaaaatcctaa

SEQ ID NO: 946140 - DNA, 15 bp, Homo sapiens
atggaaaaaatccta

SEQ ID NO: 946141 - DNA, 15 bp, Homo sapiens
catggaaaaaatcct

SEQ ID NO: 946142 - DNA, 15 bp, Homo sapiens
acatggaaaaaatcc

SEQ ID NO: 946143 - DNA, 15 bp, Homo sapiens
tacatggaaaaaatc

SEQ ID NO: 946144 - DNA, 15 bp, Homo sapiens
ttacatggaaaaaat

SEQ ID NO: 946145 - DNA, 15 bp, Homo sapiens
tttacatggaaaaaa

SEQ ID NO: 946146 - DNA, 15 bp, Homo sapiens
ttttacatggaaaaa

SEQ ID NO: 946147 - DNA, 15 bp, Homo sapiens
attttacatggaaaa

SEQ ID NO: 946148 - DNA, 15 bp, Homo sapiens
aattttacatggaaa

SEQ ID NO: 946149 - DNA, 15 bp, Homo sapiens
aaattttacatggaa

SEQ ID NO: 946150 - DNA, 15 bp, Homo sapiens
gaaattttacatgga

SEQ ID NO: 946151 - DNA, 15 bp, Homo sapiens
agaaattttacatgg

SEQ ID NO: 946152 - DNA, 15 bp, Homo sapiens
tagaaattttacatg

SEQ ID NO: 946153 - DNA, 15 bp, Homo sapiens
atagaaattttacat

SEQ ID NO: 946154 - DNA, 15 bp, Homo sapiens
gatagaaattttaca

SEQ ID NO: 946155 - DNA, 15 bp, Homo sapiens
tgatagaaattttac

SEQ ID NO: 946156 - DNA, 15 bp, Homo sapiens
atgatagaaatttta

SEQ ID NO: 946157 - DNA, 15 bp, Homo sapiens
catgatagaaatttt

SEQ ID NO: 946158 - DNA, 15 bp, Homo sapiens
acatgatagaaattt

SEQ ID NO: 946159 - DNA, 15 bp, Homo sapiens
cacatgatagaaatt

SEQ ID NO: 946160 - DNA, 15 bp, Homo sapiens
tcacatgatagaaat

SEQ ID NO: 946161 - DNA, 15 bp, Homo sapiens
ttcacatgatagaaa

SEQ ID NO: 946162 - DNA, 15 bp, Homo sapiens
cttcacatgatagaa

SEQ ID NO: 946163 - DNA, 15 bp, Homo sapiens
tcttcacatgataga

SEQ ID NO: 946164 - DNA, 15 bp, Homo sapiens
ttcttcacatgatag

SEQ ID NO: 946165 - DNA, 15 bp, Homo sapiens
tttcttcacatgata

SEQ ID NO: 946166 - DNA, 15 bp, Homo sapiens
ttttcttcacatgat

SEQ ID NO: 946167 - DNA, 15 bp, Homo sapiens
tttttcttcacatga

SEQ ID NO: 946168 - DNA, 15 bp, Homo sapiens
ttttttcttcacatg

SEQ ID NO: 946169 - DNA, 15 bp, Homo sapiens
attttttcttcacat

SEQ ID NO: 946170 - DNA, 15 bp, Homo sapiens
tattttttcttcaca

SEQ ID NO: 946171 - DNA, 15 bp, Homo sapiens
ttattttttcttcac

SEQ ID NO: 946172 - DNA, 15 bp, Homo sapiens
gttattttttcttca

SEQ ID NO: 946173 - DNA, 15 bp, Homo sapiens
agttattttttcttc

SEQ ID NO: 946174 - DNA, 15 bp, Homo sapiens
aagttattttttctt

SEQ ID NO: 946175 - DNA, 15 bp, Homo sapiens
caagttattttttct

SEQ ID NO: 946176 - DNA, 15 bp, Homo sapiens
ccaagttattttttc

SEQ ID NO: 946177 - DNA, 15 bp, Homo sapiens
gccaagttatttttt

SEQ ID NO: 946178 - DNA, 15 bp, Homo sapiens
ggccaagttattttt

SEQ ID NO: 946179 - DNA, 15 bp, Homo sapiens
aggccaagttatttt

SEQ ID NO: 946180 - DNA, 15 bp, Homo sapiens
taggccaagttattt

SEQ ID NO: 946181 - DNA, 15 bp, Homo sapiens
gtaggccaagttatt

SEQ ID NO: 946182 - DNA, 15 bp, Homo sapiens
tgtaggccaagttat

SEQ ID NO: 946183 - DNA, 15 bp, Homo sapiens
gtgtaggccaagtta

SEQ ID NO: 946184 - DNA, 15 bp, Homo sapiens
agtgtaggccaagtt

SEQ ID NO: 946185 - DNA, 15 bp, Homo sapiens
aagtgtaggccaagt

SEQ ID NO: 946186 - DNA, 15 bp, Homo sapiens
gaagtgtaggccaag

SEQ ID NO: 946187 - DNA, 15 bp, Homo sapiens
agaagtgtaggccaa

SEQ ID NO: 946188 - DNA, 15 bp, Homo sapiens
tagaagtgtaggcca

SEQ ID NO: 946189 - DNA, 15 bp, Homo sapiens
ttagaagtgtaggcc

SEQ ID NO: 946190 - DNA, 15 bp, Homo sapiens
attagaagtgtaggc

SEQ ID NO: 946191 - DNA, 15 bp, Homo sapiens
tattagaagtgtagg

SEQ ID NO: 946192 - DNA, 15 bp, Homo sapiens
gtattagaagtgtag

SEQ ID NO: 946193 - DNA, 15 bp, Homo sapiens
ggtattagaagtgta

SEQ ID NO: 946194 - DNA, 15 bp, Homo sapiens
aggtattagaagtgt

SEQ ID NO: 946195 - DNA, 15 bp, Homo sapiens
taggtattagaagtg

SEQ ID NO: 946196 - DNA, 15 bp, Homo sapiens
ctaggtattagaagt

SEQ ID NO: 946197 - DNA, 15 bp, Homo sapiens
gctaggtattagaag

SEQ ID NO: 946198 - DNA, 15 bp, Homo sapiens
tgctaggtattagaa

SEQ ID NO: 946199 - DNA, 15 bp, Homo sapiens
gtgctaggtattaga

SEQ ID NO: 946200 - DNA, 15 bp, Homo sapiens
tgtgctaggtattag

SEQ ID NO: 946201 - DNA, 15 bp, Homo sapiens
atgtgctaggtatta

SEQ ID NO: 946202 - DNA, 15 bp, Homo sapiens
tatgtgctaggtatt

SEQ ID NO: 946203 - DNA, 15 bp, Homo sapiens
gtatgtgctaggtat

SEQ ID NO: 946204 - DNA, 15 bp, Homo sapiens
ggtatgtgctaggta

SEQ ID NO: 946205 - DNA, 15 bp, Homo sapiens
aggtatgtgctaggt

SEQ ID NO: 946206 - DNA, 15 bp, Homo sapiens
gaggtatgtgctagg

SEQ ID NO: 946207 - DNA, 15 bp, Homo sapiens
agaggtatgtgctag

SEQ ID NO: 946208 - DNA, 15 bp, Homo sapiens
aagaggtatgtgcta

SEQ ID NO: 946209 - DNA, 15 bp, Homo sapiens
aaagaggtatgtgct

SEQ ID NO: 946210 - DNA, 15 bp, Homo sapiens
gaaagaggtatgtgc

SEQ ID NO: 946211 - DNA, 15 bp, Homo sapiens
agaaagaggtatgtg

SEQ ID NO: 946212 - DNA, 15 bp, Homo sapiens
cagaaagaggtatgt

SEQ ID NO: 946213 - DNA, 15 bp, Homo sapiens
gcagaaagaggtatg

SEQ ID NO: 946214 - DNA, 15 bp, Homo sapiens
ggcagaaagaggtat

SEQ ID NO: 946215 - DNA, 15 bp, Homo sapiens
aggcagaaagaggta

SEQ ID NO: 946216 - DNA, 15 bp, Homo sapiens
caggcagaaagaggt

SEQ ID NO: 946217 - DNA, 15 bp, Homo sapiens
gcaggcagaaagagg

SEQ ID NO: 946218 - DNA, 15 bp, Homo sapiens
agcaggcagaaagag

SEQ ID NO: 946219 - DNA, 15 bp, Homo sapiens
tagcaggcagaaaga

SEQ ID NO: 946220 - DNA, 15 bp, Homo sapiens
atagcaggcagaaag

SEQ ID NO: 946221 - DNA, 15 bp, Homo sapiens
catagcaggcagaaa

SEQ ID NO: 946222 - DNA, 15 bp, Homo sapiens
tcatagcaggcagaa

SEQ ID NO: 946223 - DNA, 15 bp, Homo sapiens
ttcatagcaggcaga

SEQ ID NO: 946224 - DNA, 15 bp, Homo sapiens
tttcatagcaggcag

SEQ ID NO: 946225 - DNA, 15 bp, Homo sapiens
atttcatagcaggca

SEQ ID NO: 946226 - DNA, 15 bp, Homo sapiens
aatttcatagcaggc

SEQ ID NO: 946227 - DNA, 15 bp, Homo sapiens
taatttcatagcagg

SEQ ID NO: 946228 - DNA, 15 bp, Homo sapiens
ataatttcatagcag

SEQ ID NO: 946229 - DNA, 15 bp, Homo sapiens
tataatttcatagca

SEQ ID NO: 946230 - DNA, 15 bp, Homo sapiens
ttataatttcatagc

SEQ ID NO: 946231 - DNA, 15 bp, Homo sapiens
attataatttcatag

SEQ ID NO: 946232 - DNA, 15 bp, Homo sapiens
tattataatttcata

SEQ ID NO: 946233 - DNA, 15 bp, Homo sapiens
gtattataatttcat

SEQ ID NO: 946234 - DNA, 15 bp, Homo sapiens
agtattataatttca

SEQ ID NO: 946235 - DNA, 15 bp, Homo sapiens
aagtattataatttc

SEQ ID NO: 946236 - DNA, 15 bp, Homo sapiens
caagtattataattt

SEQ ID NO: 946237 - DNA, 15 bp, Homo sapiens
tcaagtattataatt

SEQ ID NO: 946238 - DNA, 15 bp, Homo sapiens
atcaagtattataat

SEQ ID NO: 946239 - DNA, 15 bp, Homo sapiens
catcaagtattataa

SEQ ID NO: 946240 - DNA, 15 bp, Homo sapiens
ccatcaagtattata

SEQ ID NO: 946241 - DNA, 15 bp, Homo sapiens
tccatcaagtattat

SEQ ID NO: 946242 - DNA, 15 bp, Homo sapiens
ctccatcaagtatta

SEQ ID NO: 946243 - DNA, 15 bp, Homo sapiens
cctccatcaagtatt

SEQ ID NO: 946244 - DNA, 15 bp, Homo sapiens
ccctccatcaagtat

SEQ ID NO: 946245 - DNA, 15 bp, Homo sapiens
tccctccatcaagta

SEQ ID NO: 946246 - DNA, 15 bp, Homo sapiens
ctccctccatcaagt

SEQ ID NO: 946247 - DNA, 15 bp, Homo sapiens
cctccctccatcaag

SEQ ID NO: 946248 - DNA, 15 bp, Homo sapiens
gcctccctccatcaa

SEQ ID NO: 946249 - DNA, 15 bp, Homo sapiens
tgcctccctccatca

SEQ ID NO: 946250 - DNA, 15 bp, Homo sapiens
ctgcctccctccatc

SEQ ID NO: 946251 - DNA, 15 bp, Homo sapiens
gctgcctccctccat

SEQ ID NO: 946252 - DNA, 15 bp, Homo sapiens
tgctgcctccctcca

SEQ ID NO: 946253 - DNA, 15 bp, Homo sapiens
atgctgcctccctcc

SEQ ID NO: 946254 - DNA, 15 bp, Homo sapiens
aatgctgcctccctc

SEQ ID NO: 946255 - DNA, 15 bp, Homo sapiens
taatgctgcctccct

SEQ ID NO: 946256 - DNA, 15 bp, Homo sapiens
ttaatgctgcctccc

SEQ ID NO: 946257 - DNA, 15 bp, Homo sapiens
cttaatgctgcctcc

SEQ ID NO: 946258 - DNA, 15 bp, Homo sapiens
acttaatgctgcctc

SEQ ID NO: 946259 - DNA, 15 bp, Homo sapiens
cacttaatgctgcct

SEQ ID NO: 946260 - DNA, 15 bp, Homo sapiens
acacttaatgctgcc

SEQ ID NO: 946261 - DNA, 15 bp, Homo sapiens
aacacttaatgctgc

SEQ ID NO: 946262 - DNA, 15 bp, Homo sapiens
aaacacttaatgctg

SEQ ID NO: 946263 - DNA, 15 bp, Homo sapiens
taaacacttaatgct

SEQ ID NO: 946264 - DNA, 15 bp, Homo sapiens
gtaaacacttaatgc

SEQ ID NO: 946265 - DNA, 15 bp, Homo sapiens
tgtaaacacttaatg

SEQ ID NO: 946266 - DNA, 15 bp, Homo sapiens
atgtaaacacttaat

SEQ ID NO: 946267 - DNA, 15 bp, Homo sapiens
gatgtaaacacttaa

SEQ ID NO: 946268 - DNA, 15 bp, Homo sapiens
ggatgtaaacactta

SEQ ID NO: 946269 - DNA, 15 bp, Homo sapiens
aggatgtaaacactt

SEQ ID NO: 946270 - DNA, 15 bp, Homo sapiens
caggatgtaaacact

SEQ ID NO: 946271 - DNA, 15 bp, Homo sapiens
tcaggatgtaaacac

SEQ ID NO: 946272 - DNA, 15 bp, Homo sapiens
ttcaggatgtaaaca

SEQ ID NO: 946273 - DNA, 15 bp, Homo sapiens
cttcaggatgtaaac

SEQ ID NO: 946274 - DNA, 15 bp, Homo sapiens
acttcaggatgtaaa

SEQ ID NO: 946275 - DNA, 15 bp, Homo sapiens
tacttcaggatgtaa

SEQ ID NO: 946276 - DNA, 15 bp, Homo sapiens
atacttcaggatgta

SEQ ID NO: 946277 - DNA, 15 bp, Homo sapiens
aatacttcaggatgt

SEQ ID NO: 946278 - DNA, 15 bp, Homo sapiens
aaatacttcaggatg

SEQ ID NO: 946279 - DNA, 15 bp, Homo sapiens
gaaatacttcaggat

SEQ ID NO: 946280 - DNA, 15 bp, Homo sapiens
tgaaatacttcagga

SEQ ID NO: 946281 - DNA, 15 bp, Homo sapiens
ctgaaatacttcagg

SEQ ID NO: 946282 - DNA, 15 bp, Homo sapiens
gctgaaatacttcag

SEQ ID NO: 946283 - DNA, 15 bp, Homo sapiens
ggctgaaatacttca

SEQ ID NO: 946284 - DNA, 15 bp, Homo sapiens
tggctgaaatacttc

SEQ ID NO: 946285 - DNA, 15 bp, Homo sapiens
atggctgaaatactt

SEQ ID NO: 946286 - DNA, 15 bp, Homo sapiens
tatggctgaaatact

SEQ ID NO: 946287 - DNA, 15 bp, Homo sapiens
ttatggctgaaatac

SEQ ID NO: 946288 - DNA, 15 bp, Homo sapiens
gttatggctgaaata

SEQ ID NO: 946289 - DNA, 15 bp, Homo sapiens
tgttatggctgaaat

SEQ ID NO: 946290 - DNA, 15 bp, Homo sapiens
atgttatggctgaaa

SEQ ID NO: 946291 - DNA, 15 bp, Homo sapiens
gatgttatggctgaa

SEQ ID NO: 946292 - DNA, 15 bp, Homo sapiens
ggatgttatggctga

SEQ ID NO: 946293 - DNA, 15 bp, Homo sapiens
tggatgttatggctg

SEQ ID NO: 946294 - DNA, 15 bp, Homo sapiens
ctggatgttatggct

SEQ ID NO: 946295 - DNA, 15 bp, Homo sapiens
actggatgttatggc

SEQ ID NO: 946296 - DNA, 15 bp, Homo sapiens
cactggatgttatgg

SEQ ID NO: 946297 - DNA, 15 bp, Homo sapiens
acactggatgttatg

SEQ ID NO: 946298 - DNA, 15 bp, Homo sapiens
aacactggatgttat

SEQ ID NO: 946299 - DNA, 15 bp, Homo sapiens
aaacactggatgtta

SEQ ID NO: 946300 - DNA, 15 bp, Homo sapiens
aaaacactggatgtt

SEQ ID NO: 946301 - DNA, 15 bp, Homo sapiens
gaaaacactggatgt

SEQ ID NO: 946302 - DNA, 15 bp, Homo sapiens
ggaaaacactggatg

SEQ ID NO: 946303 - DNA, 15 bp, Homo sapiens
tggaaaacactggat

SEQ ID NO: 946304 - DNA, 15 bp, Homo sapiens
ctggaaaacactgga

SEQ ID NO: 946305 - DNA, 15 bp, Homo sapiens
cctggaaaacactgg

SEQ ID NO: 946306 - DNA, 15 bp, Homo sapiens
acctggaaaacactg

SEQ ID NO: 946307 - DNA, 15 bp, Homo sapiens
aacctggaaaacact

SEQ ID NO: 946308 - DNA, 15 bp, Homo sapiens
gaacctggaaaacac

SEQ ID NO: 946309 - DNA, 15 bp, Homo sapiens
agaacctggaaaaca

SEQ ID NO: 946310 - DNA, 15 bp, Homo sapiens
tagaacctggaaaac

SEQ ID NO: 946311 - DNA, 15 bp, Homo sapiens
ctagaacctggaaaa

SEQ ID NO: 946312 - DNA, 15 bp, Homo sapiens
cctagaacctggaaa

SEQ ID NO: 946313 - DNA, 15 bp, Homo sapiens
acctagaacctggaa

SEQ ID NO: 946314 - DNA, 15 bp, Homo sapiens
aacctagaacctgga

SEQ ID NO: 946315 - DNA, 15 bp, Homo sapiens
aaacctagaacctgg

SEQ ID NO: 946316 - DNA, 15 bp, Homo sapiens
gaaacctagaacctg

SEQ ID NO: 946317 - DNA, 15 bp, Homo sapiens
tgaaacctagaacct

SEQ ID NO: 946318 - DNA, 15 bp, Homo sapiens
atgaaacctagaacc

SEQ ID NO: 946319 - DNA, 15 bp, Homo sapiens
tatgaaacctagaac

SEQ ID NO: 946320 - DNA, 15 bp, Homo sapiens
ttatgaaacctagaa

SEQ ID NO: 946321 - DNA, 15 bp, Homo sapiens
tttatgaaacctaga

SEQ ID NO: 946322 - DNA, 15 bp, Homo sapiens
ttttatgaaacctag

SEQ ID NO: 946323 - DNA, 15 bp, Homo sapiens
attttatgaaaccta

SEQ ID NO: 946324 - DNA, 15 bp, Homo sapiens
cattttatgaaacct

SEQ ID NO: 946325 - DNA, 15 bp, Homo sapiens
acattttatgaaacc

SEQ ID NO: 946326 - DNA, 15 bp, Homo sapiens
tacattttatgaaac

SEQ ID NO: 946327 - DNA, 15 bp, Homo sapiens
atacattttatgaaa

SEQ ID NO: 946328 - DNA, 15 bp, Homo sapiens
gatacattttatgaa

SEQ ID NO: 946329 - DNA, 15 bp, Homo sapiens
agatacattttatga

SEQ ID NO: 946330 - DNA, 15 bp, Homo sapiens
gagatacattttatg

SEQ ID NO: 946331 - DNA, 15 bp, Homo sapiens
agagatacattttat

SEQ ID NO: 946332 - DNA, 15 bp, Homo sapiens
cagagatacatttta

SEQ ID NO: 946333 - DNA, 15 bp, Homo sapiens
acagagatacatttt

SEQ ID NO: 946334 - DNA, 15 bp, Homo sapiens
aacagagatacattt

SEQ ID NO: 946335 - DNA, 15 bp, Homo sapiens
gaacagagatacatt

SEQ ID NO: 946336 - DNA, 15 bp, Homo sapiens
agaacagagatacat

SEQ ID NO: 946337 - DNA, 15 bp, Homo sapiens
gagaacagagataca

SEQ ID NO: 946338 - DNA, 15 bp, Homo sapiens
agagaacagagatac

SEQ ID NO: 946339 - DNA, 15 bp, Homo sapiens
tagagaacagagata

SEQ ID NO: 946340 - DNA, 15 bp, Homo sapiens
ctagagaacagagat

SEQ ID NO: 946341 - DNA, 15 bp, Homo sapiens
tctagagaacagaga

SEQ ID NO: 946342 - DNA, 15 bp, Homo sapiens
ttctagagaacagag

SEQ ID NO: 946343 - DNA, 15 bp, Homo sapiens
gttctagagaacaga

SEQ ID NO: 946344 - DNA, 15 bp, Homo sapiens
tgttctagagaacag

SEQ ID NO: 946345 - DNA, 15 bp, Homo sapiens
ttgttctagagaaca

SEQ ID NO: 946346 - DNA, 15 bp, Homo sapiens
tttgttctagagaac

SEQ ID NO: 946347 - DNA, 15 bp, Homo sapiens
atttgttctagagaa

SEQ ID NO: 946348 - DNA, 15 bp, Homo sapiens
gatttgttctagaga

SEQ ID NO: 946349 - DNA, 15 bp, Homo sapiens
ggatttgttctagag

SEQ ID NO: 946350 - DNA, 15 bp, Homo sapiens
tggatttgttctaga

SEQ ID NO: 946351 - DNA, 15 bp, Homo sapiens
atggatttgttctag

SEQ ID NO: 946352 - DNA, 15 bp, Homo sapiens
aatggatttgttcta

SEQ ID NO: 946353 - DNA, 15 bp, Homo sapiens
taatggatttgttct

SEQ ID NO: 946354 - DNA, 15 bp, Homo sapiens
gtaatggatttgttc

SEQ ID NO: 946355 - DNA, 15 bp, Homo sapiens
ggtaatggatttgtt

SEQ ID NO: 946356 - DNA, 15 bp, Homo sapiens
aggtaatggatttgt

SEQ ID NO: 946357 - DNA, 15 bp, Homo sapiens
aaggtaatggatttg

SEQ ID NO: 946358 - DNA, 15 bp, Homo sapiens
caaggtaatggattt

SEQ ID NO: 946359 - DNA, 15 bp, Homo sapiens
tcaaggtaatggatt

SEQ ID NO: 946360 - DNA, 15 bp, Homo sapiens
ttcaaggtaatggat

SEQ ID NO: 946361 - DNA, 15 bp, Homo sapiens
gttcaaggtaatgga

SEQ ID NO: 946362 - DNA, 15 bp, Homo sapiens
agttcaaggtaatgg

SEQ ID NO: 946363 - DNA, 15 bp, Homo sapiens
gagttcaaggtaatg

SEQ ID NO: 946364 - DNA, 15 bp, Homo sapiens
tgagttcaaggtaat

SEQ ID NO: 946365 - DNA, 15 bp, Homo sapiens
atgagttcaaggtaa

SEQ ID NO: 946366 - DNA, 15 bp, Homo sapiens
aatgagttcaaggta

SEQ ID NO: 946367 - DNA, 15 bp, Homo sapiens
gaatgagttcaaggt

SEQ ID NO: 946368 - DNA, 15 bp, Homo sapiens
cgaatgagttcaagg

SEQ ID NO: 946369 - DNA, 15 bp, Homo sapiens
acgaatgagttcaag

SEQ ID NO: 946370 - DNA, 15 bp, Homo sapiens
tacgaatgagttcaa

SEQ ID NO: 946371 - DNA, 15 bp, Homo sapiens
ctacgaatgagttca

SEQ ID NO: 946372 - DNA, 15 bp, Homo sapiens
actacgaatgagttc

SEQ ID NO: 946373 - DNA, 15 bp, Homo sapiens
cactacgaatgagtt

SEQ ID NO: 946374 - DNA, 15 bp, Homo sapiens
ccactacgaatgagt

SEQ ID NO: 946375 - DNA, 15 bp, Homo sapiens
cccactacgaatgag

SEQ ID NO: 946376 - DNA, 15 bp, Homo sapiens
tcccactacgaatga

SEQ ID NO: 946377 - DNA, 15 bp, Homo sapiens
ttcccactacgaatg

SEQ ID NO: 946378 - DNA, 15 bp, Homo sapiens
tttcccactacgaat

SEQ ID NO: 946379 - DNA, 15 bp, Homo sapiens
ttttcccactacgaa

SEQ ID NO: 946380 - DNA, 15 bp, Homo sapiens
tttttcccactacga

SEQ ID NO: 946381 - DNA, 15 bp, Homo sapiens
ctttttcccactacg

SEQ ID NO: 946382 - DNA, 15 bp, Homo sapiens
gctttttcccactac

SEQ ID NO: 946383 - DNA, 15 bp, Homo sapiens
agctttttcccacta

SEQ ID NO: 946384 - DNA, 15 bp, Homo sapiens
cagctttttcccact

SEQ ID NO: 946385 - DNA, 15 bp, Homo sapiens
tcagctttttcccac

SEQ ID NO: 946386 - DNA, 15 bp, Homo sapiens
ctcagctttttccca

SEQ ID NO: 946387 - DNA, 15 bp, Homo sapiens
actcagctttttccc

SEQ ID NO: 946388 - DNA, 15 bp, Homo sapiens
gactcagctttttcc

SEQ ID NO: 946389 - DNA, 15 bp, Homo sapiens
agactcagctttttc

SEQ ID NO: 946390 - DNA, 15 bp, Homo sapiens
tagactcagcttttt

SEQ ID NO: 946391 - DNA, 15 bp, Homo sapiens
ttagactcagctttt

SEQ ID NO: 946392 - DNA, 15 bp, Homo sapiens
attagactcagcttt

SEQ ID NO: 946393 - DNA, 15 bp, Homo sapiens
aattagactcagctt

SEQ ID NO: 946394 - DNA, 15 bp, Homo sapiens
aaattagactcagct

SEQ ID NO: 946395 - DNA, 15 bp, Homo sapiens
caaattagactcagc

SEQ ID NO: 946396 - DNA, 15 bp, Homo sapiens
acaaattagactcag

SEQ ID NO: 946397 - DNA, 15 bp, Homo sapiens
tacaaattagactca

SEQ ID NO: 946398 - DNA, 15 bp, Homo sapiens
atacaaattagactc

SEQ ID NO: 946399 - DNA, 15 bp, Homo sapiens
catacaaattagact

SEQ ID NO: 946400 - DNA, 15 bp, Homo sapiens
tcatacaaattagac

SEQ ID NO: 946401 - DNA, 15 bp, Homo sapiens
gtcatacaaattaga

SEQ ID NO: 946402 - DNA, 15 bp, Homo sapiens
agtcatacaaattag

SEQ ID NO: 946403 - DNA, 15 bp, Homo sapiens
aagtcatacaaatta

SEQ ID NO: 946404 - DNA, 15 bp, Homo sapiens
aaagtcatacaaatt

SEQ ID NO: 946405 - DNA, 15 bp, Homo sapiens
aaaagtcatacaaat

SEQ ID NO: 946406 - DNA, 15 bp, Homo sapiens
aaaaagtcatacaaa

SEQ ID NO: 946407 - DNA, 15 bp, Homo sapiens
gaaaaagtcatacaa

SEQ ID NO: 946408 - DNA, 15 bp, Homo sapiens
tgaaaaagtcataca

SEQ ID NO: 946409 - DNA, 15 bp, Homo sapiens
ttgaaaaagtcatac

SEQ ID NO: 946410 - DNA, 15 bp, Homo sapiens
gttgaaaaagtcata

SEQ ID NO: 946411 - DNA, 15 bp, Homo sapiens
tgttgaaaaagtcat

SEQ ID NO: 946412 - DNA, 15 bp, Homo sapiens
ctgttgaaaaagtca

SEQ ID NO: 946413 - DNA, 15 bp, Homo sapiens
tctgttgaaaaagtc

SEQ ID NO: 946414 - DNA, 15 bp, Homo sapiens
atctgttgaaaaagt

SEQ ID NO: 946415 - DNA, 15 bp, Homo sapiens
catctgttgaaaaag

SEQ ID NO: 946416 - DNA, 15 bp, Homo sapiens
gcatctgttgaaaaa

SEQ ID NO: 946417 - DNA, 15 bp, Homo sapiens
agcatctgttgaaaa

SEQ ID NO: 946418 - DNA, 15 bp, Homo sapiens
cagcatctgttgaaa

SEQ ID NO: 946419 - DNA, 15 bp, Homo sapiens
tcagcatctgttgaa

SEQ ID NO: 946420 - DNA, 15 bp, Homo sapiens
atcagcatctgttga

SEQ ID NO: 946421 - DNA, 15 bp, Homo sapiens
gatcagcatctgttg

SEQ ID NO: 946422 - DNA, 15 bp, Homo sapiens
tgatcagcatctgtt

SEQ ID NO: 946423 - DNA, 15 bp, Homo sapiens
ttgatcagcatctgt

SEQ ID NO: 946424 - DNA, 15 bp, Homo sapiens
gttgatcagcatctg

SEQ ID NO: 946425 - DNA, 15 bp, Homo sapiens
agttgatcagcatct

SEQ ID NO: 946426 - DNA, 15 bp, Homo sapiens
tagttgatcagcatc

SEQ ID NO: 946427 - DNA, 15 bp, Homo sapiens
ttagttgatcagcat

SEQ ID NO: 946428 - DNA, 15 bp, Homo sapiens
tttagttgatcagca

SEQ ID NO: 946429 - DNA, 15 bp, Homo sapiens
ctttagttgatcagc

SEQ ID NO: 946430 - DNA, 15 bp, Homo sapiens
cctttagttgatcag

SEQ ID NO: 946431 - DNA, 15 bp, Homo sapiens
tcctttagttgatca

SEQ ID NO: 946432 - DNA, 15 bp, Homo sapiens
ttcctttagttgatc

SEQ ID NO: 946433 - DNA, 15 bp, Homo sapiens
tttcctttagttgat

SEQ ID NO: 946434 - DNA, 15 bp, Homo sapiens
ttttcctttagttga

SEQ ID NO: 946435 - DNA, 15 bp, Homo sapiens
tttttcctttagttg

SEQ ID NO: 946436 - DNA, 15 bp, Homo sapiens
ttttttcctttagtt

SEQ ID NO: 946437 - DNA, 15 bp, Homo sapiens
attttttcctttagt

SEQ ID NO: 946438 - DNA, 15 bp, Homo sapiens
tattttttcctttag

SEQ ID NO: 946439 - DNA, 15 bp, Homo sapiens
ttattttttccttta

SEQ ID NO: 946440 - DNA, 15 bp, Homo sapiens
tttattttttccttt

SEQ ID NO: 946441 - DNA, 15 bp, Homo sapiens
ttttattttttcctt

SEQ ID NO: 946442 - DNA, 15 bp, Homo sapiens
cttttattttttcct

SEQ ID NO: 946443 - DNA, 15 bp, Homo sapiens
tcttttattttttcc

SEQ ID NO: 946444 - DNA, 15 bp, Homo sapiens
atcttttattttttc

SEQ ID NO: 946445 - DNA, 15 bp, Homo sapiens
gatcttttatttttt

SEQ ID NO: 946446 - DNA, 15 bp, Homo sapiens
agatcttttattttt

SEQ ID NO: 946447 - DNA, 15 bp, Homo sapiens
tagatcttttatttt

SEQ ID NO: 946448 - DNA, 15 bp, Homo sapiens
ctagatcttttattt

SEQ ID NO: 946449 - DNA, 15 bp, Homo sapiens
tctagatcttttatt

SEQ ID NO: 946450 - DNA, 15 bp, Homo sapiens
ctctagatcttttat

SEQ ID NO: 946451 - DNA, 15 bp, Homo sapiens
tctctagatctttta

SEQ ID NO: 946452 - DNA, 15 bp, Homo sapiens
gtctctagatctttt

SEQ ID NO: 946453 - DNA, 15 bp, Homo sapiens
tgtctctagatcttt

SEQ ID NO: 946454 - DNA, 15 bp, Homo sapiens
gtgtctctagatctt

SEQ ID NO: 946455 - DNA, 15 bp, Homo sapiens
tgtgtctctagatct

SEQ ID NO: 946456 - DNA, 15 bp, Homo sapiens
ctgtgtctctagatc

SEQ ID NO: 946457 - DNA, 15 bp, Homo sapiens
gctgtgtctctagat

SEQ ID NO: 946458 - DNA, 15 bp, Homo sapiens
agctgtgtctctaga

SEQ ID NO: 946459 - DNA, 15 bp, Homo sapiens
gagctgtgtctctag

SEQ ID NO: 946460 - DNA, 15 bp, Homo sapiens
tgagctgtgtctcta

SEQ ID NO: 946461 - DNA, 15 bp, Homo sapiens
ttgagctgtgtctct

SEQ ID NO: 946462 - DNA, 15 bp, Homo sapiens
tttgagctgtgtctc

SEQ ID NO: 946463 - DNA, 15 bp, Homo sapiens
ttttgagctgtgtct

SEQ ID NO: 946464 - DNA, 15 bp, Homo sapiens
attttgagctgtgtc

SEQ ID NO: 946465 - DNA, 15 bp, Homo sapiens
cattttgagctgtgt

SEQ ID NO: 946466 - DNA, 15 bp, Homo sapiens
acattttgagctgtg

SEQ ID NO: 946467 - DNA, 15 bp, Homo sapiens
gacattttgagctgt

SEQ ID NO: 946468 - DNA, 15 bp, Homo sapiens
tgacattttgagctg

SEQ ID NO: 946469 - DNA, 15 bp, Homo sapiens
ctgacattttgagct

SEQ ID NO: 946470 - DNA, 15 bp, Homo sapiens
tctgacattttgagc

SEQ ID NO: 946471 - DNA, 15 bp, Homo sapiens
atctgacattttgag

SEQ ID NO: 946472 - DNA, 15 bp, Homo sapiens
gatctgacattttga

SEQ ID NO: 946473 - DNA, 15 bp, Homo sapiens
agatctgacattttg

SEQ ID NO: 946474 - DNA, 15 bp, Homo sapiens
tagatctgacatttt

SEQ ID NO: 946475 - DNA, 15 bp, Homo sapiens
ctagatctgacattt

SEQ ID NO: 946476 - DNA, 15 bp, Homo sapiens
tctagatctgacatt

SEQ ID NO: 946477 - DNA, 15 bp, Homo sapiens
ttctagatctgacat

SEQ ID NO: 946478 - DNA, 15 bp, Homo sapiens
tttctagatctgaca

SEQ ID NO: 946479 - DNA, 15 bp, Homo sapiens
ttttctagatctgac

SEQ ID NO: 946480 - DNA, 15 bp, Homo sapiens
cttttctagatctga

SEQ ID NO: 946481 - DNA, 15 bp, Homo sapiens
gcttttctagatctg

SEQ ID NO: 946482 - DNA, 15 bp, Homo sapiens
tgcttttctagatct

SEQ ID NO: 946483 - DNA, 15 bp, Homo sapiens
ctgcttttctagatc

SEQ ID NO: 946484 - DNA, 15 bp, Homo sapiens
gctgcttttctagat

SEQ ID NO: 946485 - DNA, 15 bp, Homo sapiens
tgctgcttttctaga

SEQ ID NO: 946486 - DNA, 15 bp, Homo sapiens
atgctgcttttctag

SEQ ID NO: 946487 - DNA, 15 bp, Homo sapiens
aatgctgcttttcta

SEQ ID NO: 946488 - DNA, 15 bp, Homo sapiens
aaatgctgcttttct

SEQ ID NO: 946489 - DNA, 15 bp, Homo sapiens
caaatgctgcttttc

SEQ ID NO: 946490 - DNA, 15 bp, Homo sapiens
tcaaatgctgctttt

SEQ ID NO: 946491 - DNA, 15 bp, Homo sapiens
ttcaaatgctgcttt

SEQ ID NO: 946492 - DNA, 15 bp, Homo sapiens
cttcaaatgctgctt

SEQ ID NO: 946493 - DNA, 15 bp, Homo sapiens
ccttcaaatgctgct

SEQ ID NO: 946494 - DNA, 15 bp, Homo sapiens
accttcaaatgctgc

SEQ ID NO: 946495 - DNA, 15 bp, Homo sapiens
taccttcaaatgctg

SEQ ID NO: 946496 - DNA, 15 bp, Homo sapiens
ttaccttcaaatgct

SEQ ID NO: 946497 - DNA, 15 bp, Homo sapiens
attaccttcaaatgc

SEQ ID NO: 946498 - DNA, 15 bp, Homo sapiens
tattaccttcaaatg

SEQ ID NO: 946499 - DNA, 15 bp, Homo sapiens
atattaccttcaaat

SEQ ID NO: 946500 - DNA, 15 bp, Homo sapiens
aatattaccttcaaa

SEQ ID NO: 946501 - DNA, 15 bp, Homo sapiens
aaatattaccttcaa

SEQ ID NO: 946502 - DNA, 15 bp, Homo sapiens
taaatattaccttca

SEQ ID NO: 946503 - DNA, 15 bp, Homo sapiens
ttaaatattaccttc

SEQ ID NO: 946504 - DNA, 15 bp, Homo sapiens
attaaatattacctt

SEQ ID NO: 946505 - DNA, 15 bp, Homo sapiens
aattaaatattacct

SEQ ID NO: 946506 - DNA, 15 bp, Homo sapiens
taattaaatattacc

SEQ ID NO: 946507 - DNA, 15 bp, Homo sapiens
ataattaaatattac

SEQ ID NO: 946508 - DNA, 15 bp, Homo sapiens
tataattaaatatta

SEQ ID NO: 946509 - DNA, 15 bp, Homo sapiens
atataattaaatatt

SEQ ID NO: 946510 - DNA, 15 bp, Homo sapiens
aatataattaaatat

SEQ ID NO: 946511 - DNA, 15 bp, Homo sapiens
aaatataattaaata

SEQ ID NO: 946512 - DNA, 15 bp, Homo sapiens
aaaatataattaaat

SEQ ID NO: 946513 - DNA, 15 bp, Homo sapiens
taaaatataattaaa

SEQ ID NO: 946514 - DNA, 15 bp, Homo sapiens
ctaaaatataattaa

SEQ ID NO: 946515 - DNA, 15 bp, Homo sapiens
actaaaatataatta

SEQ ID NO: 946516 - DNA, 15 bp, Homo sapiens
tactaaaatataatt

SEQ ID NO: 946517 - DNA, 15 bp, Homo sapiens
atactaaaatataat

SEQ ID NO: 946518 - DNA, 15 bp, Homo sapiens
gatactaaaatataa

SEQ ID NO: 946519 - DNA, 15 bp, Homo sapiens
cgatactaaaatata

SEQ ID NO: 946520 - DNA, 15 bp, Homo sapiens
acgatactaaaatat

SEQ ID NO: 946521 - DNA, 15 bp, Homo sapiens
aacgatactaaaata

SEQ ID NO: 946522 - DNA, 15 bp, Homo sapiens
aaacgatactaaaat

SEQ ID NO: 946523 - DNA, 15 bp, Homo sapiens
aaaacgatactaaaa

SEQ ID NO: 946524 - DNA, 15 bp, Homo sapiens
caaaacgatactaaa

SEQ ID NO: 946525 - DNA, 15 bp, Homo sapiens
acaaaacgatactaa

SEQ ID NO: 946526 - DNA, 15 bp, Homo sapiens
cacaaaacgatacta

SEQ ID NO: 946527 - DNA, 15 bp, Homo sapiens
tcacaaaacgatact

SEQ ID NO: 946528 - DNA, 15 bp, Homo sapiens
ttcacaaaacgatac

SEQ ID NO: 946529 - DNA, 15 bp, Homo sapiens
tttcacaaaacgata

SEQ ID NO: 946530 - DNA, 15 bp, Homo sapiens
ttttcacaaaacgat

SEQ ID NO: 946531 - DNA, 15 bp, Homo sapiens
gttttcacaaaacga

SEQ ID NO: 946532 - DNA, 15 bp, Homo sapiens
tgttttcacaaaacg

SEQ ID NO: 946533 - DNA, 15 bp, Homo sapiens
ctgttttcacaaaac

SEQ ID NO: 946534 - DNA, 15 bp, Homo sapiens
gctgttttcacaaaa

SEQ ID NO: 946535 - DNA, 15 bp, Homo sapiens
agctgttttcacaaa

SEQ ID NO: 946536 - DNA, 15 bp, Homo sapiens
cagctgttttcacaa

SEQ ID NO: 946537 - DNA, 15 bp, Homo sapiens
acagctgttttcaca

SEQ ID NO: 946538 - DNA, 15 bp, Homo sapiens
aacagctgttttcac

SEQ ID NO: 946539 - DNA, 15 bp, Homo sapiens
caacagctgttttca

SEQ ID NO: 946540 - DNA, 15 bp, Homo sapiens
tcaacagctgttttc

SEQ ID NO: 946541 - DNA, 15 bp, Homo sapiens
ttcaacagctgtttt

SEQ ID NO: 946542 - DNA, 15 bp, Homo sapiens
tttcaacagctgttt

SEQ ID NO: 946543 - DNA, 15 bp, Homo sapiens
ttttcaacagctgtt

SEQ ID NO: 946544 - DNA, 15 bp, Homo sapiens
gttttcaacagctgt

SEQ ID NO: 946545 - DNA, 15 bp, Homo sapiens
agttttcaacagctg

SEQ ID NO: 946546 - DNA, 15 bp, Homo sapiens
tagttttcaacagct

SEQ ID NO: 946547 - DNA, 15 bp, Homo sapiens
atagttttcaacagc

SEQ ID NO: 946548 - DNA, 15 bp, Homo sapiens
aatagttttcaacag

SEQ ID NO: 946549 - DNA, 15 bp, Homo sapiens
aaatagttttcaaca

SEQ ID NO: 946550 - DNA, 15 bp, Homo sapiens
aaaatagttttcaac

SEQ ID NO: 946551 - DNA, 15 bp, Homo sapiens
gaaaatagttttcaa

SEQ ID NO: 946552 - DNA, 15 bp, Homo sapiens
tgaaaatagttttca

SEQ ID NO: 946553 - DNA, 15 bp, Homo sapiens
atgaaaatagttttc

SEQ ID NO: 946554 - DNA, 15 bp, Homo sapiens
aatgaaaatagtttt

SEQ ID NO: 946555 - DNA, 15 bp, Homo sapiens
taatgaaaatagttt

SEQ ID NO: 946556 - DNA, 15 bp, Homo sapiens
gtaatgaaaatagtt

SEQ ID NO: 946557 - DNA, 15 bp, Homo sapiens
ggtaatgaaaatagt

SEQ ID NO: 946558 - DNA, 15 bp, Homo sapiens
tggtaatgaaaatag

SEQ ID NO: 946559 - DNA, 15 bp, Homo sapiens
atggtaatgaaaata

SEQ ID NO: 946560 - DNA, 15 bp, Homo sapiens
gatggtaatgaaaat

SEQ ID NO: 946561 - DNA, 15 bp, Homo sapiens
agatggtaatgaaaa

SEQ ID NO: 946562 - DNA, 15 bp, Homo sapiens
aagatggtaatgaaa

SEQ ID NO: 946563 - DNA, 15 bp, Homo sapiens
aaagatggtaatgaa

SEQ ID NO: 946564 - DNA, 15 bp, Homo sapiens
taaagatggtaatga

SEQ ID NO: 946565 - DNA, 15 bp, Homo sapiens
ttaaagatggtaatg

SEQ ID NO: 946566 - DNA, 15 bp, Homo sapiens
gttaaagatggtaat

SEQ ID NO: 946567 - DNA, 15 bp, Homo sapiens
agttaaagatggtaa

SEQ ID NO: 946568 - DNA, 15 bp, Homo sapiens
tagttaaagatggta

SEQ ID NO: 946569 - DNA, 15 bp, Homo sapiens
gtagttaaagatggt

SEQ ID NO: 946570 - DNA, 15 bp, Homo sapiens
cgtagttaaagatgg

SEQ ID NO: 946571 - DNA, 15 bp, Homo sapiens
acgtagttaaagatg

SEQ ID NO: 946572 - DNA, 15 bp, Homo sapiens
tacgtagttaaagat

SEQ ID NO: 946573 - DNA, 15 bp, Homo sapiens
atacgtagttaaaga

SEQ ID NO: 946574 - DNA, 15 bp, Homo sapiens
gatacgtagttaaag

SEQ ID NO: 946575 - DNA, 15 bp, Homo sapiens
ggatacgtagttaaa

SEQ ID NO: 946576 - DNA, 15 bp, Homo sapiens
aggatacgtagttaa

SEQ ID NO: 946577 - DNA, 15 bp, Homo sapiens
taggatacgtagtta

SEQ ID NO: 946578 - DNA, 15 bp, Homo sapiens
ttaggatacgtagtt

SEQ ID NO: 946579 - DNA, 15 bp, Homo sapiens
tttaggatacgtagt

SEQ ID NO: 946580 - DNA, 15 bp, Homo sapiens
ttttaggatacgtag

SEQ ID NO: 946581 - DNA, 15 bp, Homo sapiens
tttttaggatacgta

SEQ ID NO: 946582 - DNA, 15 bp, Homo sapiens
ttttttaggatacgt

SEQ ID NO: 946583 - DNA, 15 bp, Homo sapiens
attttttaggatacg

SEQ ID NO: 946584 - DNA, 15 bp, Homo sapiens
aattttttaggatac

SEQ ID NO: 946585 - DNA, 15 bp, Homo sapiens
gaattttttaggata

SEQ ID NO: 946586 - DNA, 15 bp, Homo sapiens
tgaattttttaggat

SEQ ID NO: 946587 - DNA, 15 bp, Homo sapiens
ctgaattttttagga

SEQ ID NO: 946588 - DNA, 15 bp, Homo sapiens
actgaattttttagg

SEQ ID NO: 946589 - DNA, 15 bp, Homo sapiens
tactgaattttttag

SEQ ID NO: 946590 - DNA, 15 bp, Homo sapiens
ttactgaatttttta

SEQ ID NO: 946591 - DNA, 15 bp, Homo sapiens
attactgaatttttt

SEQ ID NO: 946592 - DNA, 15 bp, Homo sapiens
tattactgaattttt

SEQ ID NO: 946593 - DNA, 15 bp, Homo sapiens
ttattactgaatttt

SEQ ID NO: 946594 - DNA, 15 bp, Homo sapiens
gttattactgaattt

SEQ ID NO: 946595 - DNA, 15 bp, Homo sapiens
tgttattactgaatt

SEQ ID NO: 946596 - DNA, 15 bp, Homo sapiens
atgttattactgaat

SEQ ID NO: 946597 - DNA, 15 bp, Homo sapiens
gatgttattactgaa

SEQ ID NO: 946598 - DNA, 15 bp, Homo sapiens
agatgttattactga

SEQ ID NO: 946599 - DNA, 15 bp, Homo sapiens
aagatgttattactg

SEQ ID NO: 946600 - DNA, 15 bp, Homo sapiens
taagatgttattact

SEQ ID NO: 946601 - DNA, 15 bp, Homo sapiens
ataagatgttattac

SEQ ID NO: 946602 - DNA, 15 bp, Homo sapiens
tataagatgttatta

SEQ ID NO: 946603 - DNA, 15 bp, Homo sapiens
atataagatgttatt

SEQ ID NO: 946604 - DNA, 15 bp, Homo sapiens
aatataagatgttat

SEQ ID NO: 946605 - DNA, 15 bp, Homo sapiens
aaatataagatgtta

SEQ ID NO: 946606 - DNA, 15 bp, Homo sapiens
caaatataagatgtt

SEQ ID NO: 946607 - DNA, 15 bp, Homo sapiens
tcaaatataagatgt

SEQ ID NO: 946608 - DNA, 15 bp, Homo sapiens
gtcaaatataagatg

SEQ ID NO: 946609 - DNA, 15 bp, Homo sapiens
ggtcaaatataagat

SEQ ID NO: 946610 - DNA, 15 bp, Homo sapiens
aggtcaaatataaga

SEQ ID NO: 946611 - DNA, 15 bp, Homo sapiens
aaggtcaaatataag

SEQ ID NO: 946612 - DNA, 15 bp, Homo sapiens
aaaggtcaaatataa

SEQ ID NO: 946613 - DNA, 15 bp, Homo sapiens
taaaggtcaaatata

SEQ ID NO: 946614 - DNA, 15 bp, Homo sapiens
ataaaggtcaaatat

SEQ ID NO: 946615 - DNA, 15 bp, Homo sapiens
tataaaggtcaaata

SEQ ID NO: 946616 - DNA, 15 bp, Homo sapiens
atataaaggtcaaat

SEQ ID NO: 946617 - DNA, 15 bp, Homo sapiens
aatataaaggtcaaa

SEQ ID NO: 946618 - DNA, 15 bp, Homo sapiens
caatataaaggtcaa

SEQ ID NO: 946619 - DNA, 15 bp, Homo sapiens
gcaatataaaggtca

SEQ ID NO: 946620 - DNA, 15 bp, Homo sapiens
tgcaatataaaggtc

SEQ ID NO: 946621 - DNA, 15 bp, Homo sapiens
ttgcaatataaaggt

SEQ ID NO: 946622 - DNA, 15 bp, Homo sapiens
tttgcaatataaagg

SEQ ID NO: 946623 - DNA, 15 bp, Homo sapiens
ctttgcaatataaag

SEQ ID NO: 946624 - DNA, 15 bp, Homo sapiens
actttgcaatataaa

SEQ ID NO: 946625 - DNA, 15 bp, Homo sapiens
aactttgcaatataa

SEQ ID NO: 946626 - DNA, 15 bp, Homo sapiens
taactttgcaatata

SEQ ID NO: 946627 - DNA, 15 bp, Homo sapiens
ttaactttgcaatat

SEQ ID NO: 946628 - DNA, 15 bp, Homo sapiens
attaactttgcaata

SEQ ID NO: 946629 - DNA, 15 bp, Homo sapiens
aattaactttgcaat

SEQ ID NO: 946630 - DNA, 15 bp, Homo sapiens
taattaactttgcaa

SEQ ID NO: 946631 - DNA, 15 bp, Homo sapiens
ataattaactttgca

SEQ ID NO: 946632 - DNA, 15 bp, Homo sapiens
cataattaactttgc

SEQ ID NO: 946633 - DNA, 15 bp, Homo sapiens
acataattaactttg

SEQ ID NO: 946634 - DNA, 15 bp, Homo sapiens
aacataattaacttt

SEQ ID NO: 946635 - DNA, 15 bp, Homo sapiens
gaacataattaactt

SEQ ID NO: 946636 - DNA, 15 bp, Homo sapiens
tgaacataattaact

SEQ ID NO: 946637 - DNA, 15 bp, Homo sapiens
atgaacataattaac

SEQ ID NO: 946638 - DNA, 15 bp, Homo sapiens
gatgaacataattaa

SEQ ID NO: 946639 - DNA, 15 bp, Homo sapiens
agatgaacataatta

SEQ ID NO: 946640 - DNA, 15 bp, Homo sapiens
cagatgaacataatt

SEQ ID NO: 946641 - DNA, 15 bp, Homo sapiens
tcagatgaacataat

SEQ ID NO: 946642 - DNA, 15 bp, Homo sapiens
gtcagatgaacataa

SEQ ID NO: 946643 - DNA, 15 bp, Homo sapiens
agtcagatgaacata

SEQ ID NO: 946644 - DNA, 15 bp, Homo sapiens
tagtcagatgaacat

SEQ ID NO: 946645 - DNA, 15 bp, Homo sapiens
atagtcagatgaaca

SEQ ID NO: 946646 - DNA, 15 bp, Homo sapiens
aatagtcagatgaac

SEQ ID NO: 946647 - DNA, 15 bp, Homo sapiens
gaatagtcagatgaa

SEQ ID NO: 946648 - DNA, 15 bp, Homo sapiens
ggaatagtcagatga

SEQ ID NO: 946649 - DNA, 15 bp, Homo sapiens
aggaatagtcagatg

SEQ ID NO: 946650 - DNA, 15 bp, Homo sapiens
taggaatagtcagat

SEQ ID NO: 946651 - DNA, 15 bp, Homo sapiens
ttaggaatagtcaga

SEQ ID NO: 946652 - DNA, 15 bp, Homo sapiens
gttaggaatagtcag

SEQ ID NO: 946653 - DNA, 15 bp, Homo sapiens
tgttaggaatagtca

SEQ ID NO: 946654 - DNA, 15 bp, Homo sapiens
atgttaggaatagtc

SEQ ID NO: 946655 - DNA, 15 bp, Homo sapiens
tatgttaggaatagt

SEQ ID NO: 946656 - DNA, 15 bp, Homo sapiens
atatgttaggaatag

SEQ ID NO: 946657 - DNA, 15 bp, Homo sapiens
aatatgttaggaata

SEQ ID NO: 946658 - DNA, 15 bp, Homo sapiens
taatatgttaggaat

SEQ ID NO: 946659 - DNA, 15 bp, Homo sapiens
ctaatatgttaggaa

SEQ ID NO: 946660 - DNA, 15 bp, Homo sapiens
tctaatatgttagga

SEQ ID NO: 946661 - DNA, 15 bp, Homo sapiens
ctctaatatgttagg

SEQ ID NO: 946662 - DNA, 15 bp, Homo sapiens
actctaatatgttag

SEQ ID NO: 946663 - DNA, 15 bp, Homo sapiens
aactctaatatgtta

SEQ ID NO: 946664 - DNA, 15 bp, Homo sapiens
taactctaatatgtt

SEQ ID NO: 946665 - DNA, 15 bp, Homo sapiens
ttaactctaatatgt

SEQ ID NO: 946666 - DNA, 15 bp, Homo sapiens
gttaactctaatatg

SEQ ID NO: 946667 - DNA, 15 bp, Homo sapiens
tgttaactctaatat

SEQ ID NO: 946668 - DNA, 15 bp, Homo sapiens
ttgttaactctaata

SEQ ID NO: 946669 - DNA, 15 bp, Homo sapiens
tttgttaactctaat

SEQ ID NO: 946670 - DNA, 15 bp, Homo sapiens
ttttgttaactctaa

SEQ ID NO: 946671 - DNA, 15 bp, Homo sapiens
tttttgttaactcta

SEQ ID NO: 946672 - DNA, 15 bp, Homo sapiens
ttttttgttaactct

SEQ ID NO: 946673 - DNA, 15 bp, Homo sapiens
attttttgttaactc

SEQ ID NO: 946674 - DNA, 15 bp, Homo sapiens
aattttttgttaact

SEQ ID NO: 946675 - DNA, 15 bp, Homo sapiens
gaattttttgttaac

SEQ ID NO: 946676 - DNA, 15 bp, Homo sapiens
tgaattttttgttaa

SEQ ID NO: 946677 - DNA, 15 bp, Homo sapiens
ctgaattttttgtta

SEQ ID NO: 946678 - DNA, 15 bp, Homo sapiens
tctgaattttttgtt

SEQ ID NO: 946679 - DNA, 15 bp, Homo sapiens
gtctgaattttttgt

SEQ ID NO: 946680 - DNA, 15 bp, Homo sapiens
agtctgaattttttg

SEQ ID NO: 946681 - DNA, 15 bp, Homo sapiens
gagtctgaatttttt

SEQ ID NO: 946682 - DNA, 15 bp, Homo sapiens
tgagtctgaattttt

SEQ ID NO: 946683 - DNA, 15 bp, Homo sapiens
ttgagtctgaatttt

SEQ ID NO: 946684 - DNA, 15 bp, Homo sapiens
gttgagtctgaattt

SEQ ID NO: 946685 - DNA, 15 bp, Homo sapiens
tgttgagtctgaatt

SEQ ID NO: 946686 - DNA, 15 bp, Homo sapiens
atgttgagtctgaat

SEQ ID NO: 946687 - DNA, 15 bp, Homo sapiens
tatgttgagtctgaa

SEQ ID NO: 946688 - DNA, 15 bp, Homo sapiens
ctatgttgagtctga

SEQ ID NO: 946689 - DNA, 15 bp, Homo sapiens
cctatgttgagtctg

SEQ ID NO: 946690 - DNA, 15 bp, Homo sapiens
tcctatgttgagtct

SEQ ID NO: 946691 - DNA, 15 bp, Homo sapiens
atcctatgttgagtc

SEQ ID NO: 946692 - DNA, 15 bp, Homo sapiens
aatcctatgttgagt

SEQ ID NO: 946693 - DNA, 15 bp, Homo sapiens
taatcctatgttgag

SEQ ID NO: 946694 - DNA, 15 bp, Homo sapiens
ttaatcctatgttga

SEQ ID NO: 946695 - DNA, 15 bp, Homo sapiens
cttaatcctatgttg

SEQ ID NO: 946696 - DNA, 15 bp, Homo sapiens
acttaatcctatgtt

SEQ ID NO: 946697 - DNA, 15 bp, Homo sapiens
tacttaatcctatgt

SEQ ID NO: 946698 - DNA, 15 bp, Homo sapiens
ctacttaatcctatg

SEQ ID NO: 946699 - DNA, 15 bp, Homo sapiens
actacttaatcctat

SEQ ID NO: 946700 - DNA, 15 bp, Homo sapiens
tactacttaatccta

SEQ ID NO: 946701 - DNA, 15 bp, Homo sapiens
ttactacttaatcct

SEQ ID NO: 946702 - DNA, 15 bp, Homo sapiens
tttactacttaatcc

SEQ ID NO: 946703 - DNA, 15 bp, Homo sapiens
atttactacttaatc

SEQ ID NO: 946704 - DNA, 15 bp, Homo sapiens
aatttactacttaat

SEQ ID NO: 946705 - DNA, 15 bp, Homo sapiens
aaatttactacttaa

SEQ ID NO: 946706 - DNA, 15 bp, Homo sapiens
taaatttactactta

SEQ ID NO: 946707 - DNA, 15 bp, Homo sapiens
ataaatttactactt

SEQ ID NO: 946708 - DNA, 15 bp, Homo sapiens
aataaatttactact

SEQ ID NO: 946709 - DNA, 15 bp, Homo sapiens
aaataaatttactac

SEQ ID NO: 946710 - DNA, 15 bp, Homo sapiens
aaaataaatttacta

SEQ ID NO: 946711 - DNA, 15 bp, Homo sapiens
aaaaataaatttact

SEQ ID NO: 946712 - DNA, 15 bp, Homo sapiens
aaaaaataaatttac

SEQ ID NO: 946713 - DNA, 15 bp, Homo sapiens
taaaaaataaattta

SEQ ID NO: 946714 - DNA, 15 bp, Homo sapiens
ttaaaaaataaattt

SEQ ID NO: 946715 - DNA, 15 bp, Homo sapiens
attaaaaaataaatt

SEQ ID NO: 946716 - DNA, 15 bp, Homo sapiens
aattaaaaaataaat

SEQ ID NO: 946717 - DNA, 15 bp, Homo sapiens
caattaaaaaataaa

SEQ ID NO: 946718 - DNA, 15 bp, Homo sapiens
acaattaaaaaataa

SEQ ID NO: 946719 - DNA, 15 bp, Homo sapiens
tacaattaaaaaata

SEQ ID NO: 946720 - DNA, 15 bp, Homo sapiens
ttacaattaaaaaat

SEQ ID NO: 946721 - DNA, 15 bp, Homo sapiens
gttacaattaaaaaa

SEQ ID NO: 946722 - DNA, 15 bp, Homo sapiens
tgttacaattaaaaa

SEQ ID NO: 946723 - DNA, 15 bp, Homo sapiens
ttgttacaattaaaa

SEQ ID NO: 946724 - DNA, 15 bp, Homo sapiens
tttgttacaattaaa

SEQ ID NO: 946725 - DNA, 15 bp, Homo sapiens
atttgttacaattaa

SEQ ID NO: 946726 - DNA, 15 bp, Homo sapiens
tatttgttacaatta

SEQ ID NO: 946727 - DNA, 15 bp, Homo sapiens
atatttgttacaatt

SEQ ID NO: 946728 - DNA, 15 bp, Homo sapiens
tatatttgttacaat

SEQ ID NO: 946729 - DNA, 15 bp, Homo sapiens
atatatttgttacaa

SEQ ID NO: 946730 - DNA, 15 bp, Homo sapiens
catatatttgttaca

SEQ ID NO: 946731 - DNA, 15 bp, Homo sapiens
gcatatatttgttac

SEQ ID NO: 946732 - DNA, 15 bp, Homo sapiens
ggcatatatttgtta

SEQ ID NO: 946733 - DNA, 15 bp, Homo sapiens
tggcatatatttgtt

SEQ ID NO: 946734 - DNA, 15 bp, Homo sapiens
atggcatatatttgt

SEQ ID NO: 946735 - DNA, 15 bp, Homo sapiens
aatggcatatatttg

SEQ ID NO: 946736 - DNA, 15 bp, Homo sapiens
taatggcatatattt

SEQ ID NO: 946737 - DNA, 15 bp, Homo sapiens
ctaatggcatatatt

SEQ ID NO: 946738 - DNA, 15 bp, Homo sapiens
actaatggcatatat

SEQ ID NO: 946739 - DNA, 15 bp, Homo sapiens
tactaatggcatata

SEQ ID NO: 946740 - DNA, 15 bp, Homo sapiens
atactaatggcatat

SEQ ID NO: 946741 - DNA, 15 bp, Homo sapiens
catactaatggcata

SEQ ID NO: 946742 - DNA, 15 bp, Homo sapiens
acatactaatggcat

SEQ ID NO: 946743 - DNA, 15 bp, Homo sapiens
aacatactaatggca

SEQ ID NO: 946744 - DNA, 15 bp, Homo sapiens
gaacatactaatggc

SEQ ID NO: 946745 - DNA, 15 bp, Homo sapiens
agaacatactaatgg

SEQ ID NO: 946746 - DNA, 15 bp, Homo sapiens
aagaacatactaatg

SEQ ID NO: 946747 - DNA, 15 bp, Homo sapiens
taagaacatactaat

SEQ ID NO: 946748 - DNA, 15 bp, Homo sapiens
ttaagaacatactaa

SEQ ID NO: 946749 - DNA, 15 bp, Homo sapiens
cttaagaacatacta

SEQ ID NO: 946750 - DNA, 15 bp, Homo sapiens
acttaagaacatact

SEQ ID NO: 946751 - DNA, 15 bp, Homo sapiens
aacttaagaacatac

SEQ ID NO: 946752 - DNA, 15 bp, Homo sapiens
aaacttaagaacata

SEQ ID NO: 946753 - DNA, 15 bp, Homo sapiens
aaaacttaagaacat

SEQ ID NO: 946754 - DNA, 15 bp, Homo sapiens
caaaacttaagaaca

SEQ ID NO: 946755 - DNA, 15 bp, Homo sapiens
ccaaaacttaagaac

SEQ ID NO: 946756 - DNA, 15 bp, Homo sapiens
cccaaaacttaagaa

SEQ ID NO: 946757 - DNA, 15 bp, Homo sapiens
acccaaaacttaaga

SEQ ID NO: 946758 - DNA, 15 bp, Homo sapiens
gacccaaaacttaag

SEQ ID NO: 946759 - DNA, 15 bp, Homo sapiens
tgacccaaaacttaa

SEQ ID NO: 946760 - DNA, 15 bp, Homo sapiens
gtgacccaaaactta

SEQ ID NO: 946761 - DNA, 15 bp, Homo sapiens
tgtgacccaaaactt

SEQ ID NO: 946762 - DNA, 15 bp, Homo sapiens
atgtgacccaaaact

SEQ ID NO: 946763 - DNA, 15 bp, Homo sapiens
aatgtgacccaaaac

SEQ ID NO: 946764 - DNA, 15 bp, Homo sapiens
caatgtgacccaaaa

SEQ ID NO: 946765 - DNA, 15 bp, Homo sapiens
ccaatgtgacccaaa

SEQ ID NO: 946766 - DNA, 15 bp, Homo sapiens
gccaatgtgacccaa

SEQ ID NO: 946767 - DNA, 15 bp, Homo sapiens
tgccaatgtgaccca

SEQ ID NO: 946768 - DNA, 15 bp, Homo sapiens
ttgccaatgtgaccc

SEQ ID NO: 946769 - DNA, 15 bp, Homo sapiens
gttgccaatgtgacc

SEQ ID NO: 946770 - DNA, 15 bp, Homo sapiens
tgttgccaatgtgac

SEQ ID NO: 946771 - DNA, 15 bp, Homo sapiens
ctgttgccaatgtga

SEQ ID NO: 946772 - DNA, 15 bp, Homo sapiens
actgttgccaatgtg

SEQ ID NO: 946773 - DNA, 15 bp, Homo sapiens
cactgttgccaatgt

SEQ ID NO: 946774 - DNA, 15 bp, Homo sapiens
acactgttgccaatg

SEQ ID NO: 946775 - DNA, 15 bp, Homo sapiens
gacactgttgccaat

SEQ ID NO: 946776 - DNA, 15 bp, Homo sapiens
agacactgttgccaa

SEQ ID NO: 946777 - DNA, 15 bp, Homo sapiens
aagacactgttgcca

SEQ ID NO: 946778 - DNA, 15 bp, Homo sapiens
aaagacactgttgcc

SEQ ID NO: 946779 - DNA, 15 bp, Homo sapiens
taaagacactgttgc

SEQ ID NO: 946780 - DNA, 15 bp, Homo sapiens
ataaagacactgttg

SEQ ID NO: 946781 - DNA, 15 bp, Homo sapiens
aataaagacactgtt

SEQ ID NO: 946782 - DNA, 15 bp, Homo sapiens
aaataaagacactgt

SEQ ID NO: 946783 - DNA, 15 bp, Homo sapiens
aaaataaagacactg

SEQ ID NO: 946784 - DNA, 15 bp, Homo sapiens
aaaaataaagacact

SEQ ID NO: 946785 - DNA, 15 bp, Homo sapiens
aaaaaataaagacac

SEQ ID NO: 946786 - DNA, 15 bp, Homo sapiens
aaaaaaataaagaca

SEQ ID NO: 946787 - DNA, 15 bp, Homo sapiens
aaaaaaaataaagac

SEQ ID NO: 946788 - DNA, 15 bp, Homo sapiens
aaaaaaaaataaaga

SEQ ID NO: 946789 - DNA, 15 bp, Homo sapiens
aaaaaaaaaataaag

SEQ ID NO: 946790 - DNA, 15 bp, Homo sapiens
caaaaaaaaaataaa

SEQ ID NO: 946791 - DNA, 15 bp, Homo sapiens
tcaaaaaaaaaataa

SEQ ID NO: 946792 - DNA, 15 bp, Homo sapiens
ttcaaaaaaaaaata

SEQ ID NO: 946793 - DNA, 15 bp, Homo sapiens
tttcaaaaaaaaaat

SEQ ID NO: 946794 - DNA, 15 bp, Homo sapiens
agaatttcaaaaaaa

SEQ ID NO: 946795 - DNA, 15 bp, Homo sapiens
aagaatttcaaaaaa

SEQ ID NO: 946796 - DNA, 15 bp, Homo sapiens
aaagaatttcaaaaa

SEQ ID NO: 946797 - DNA, 15 bp, Homo sapiens
aaaagaatttcaaaa

SEQ ID NO: 946798 - DNA, 15 bp, Homo sapiens
gaaaagaatttcaaa

SEQ ID NO: 946799 - DNA, 15 bp, Homo sapiens
tgaaaagaatttcaa

SEQ ID NO: 946800 - DNA, 15 bp, Homo sapiens
ctgaaaagaatttca

SEQ ID NO: 946801 - DNA, 15 bp, Homo sapiens
cctgaaaagaatttc

SEQ ID NO: 946802 - DNA, 15 bp, Homo sapiens
tcctgaaaagaattt

SEQ ID NO: 946803 - DNA, 15 bp, Homo sapiens
ttcctgaaaagaatt

SEQ ID NO: 946804 - DNA, 15 bp, Homo sapiens
attcctgaaaagaat

SEQ ID NO: 946805 - DNA, 15 bp, Homo sapiens
gattcctgaaaagaa

SEQ ID NO: 946806 - DNA, 15 bp, Homo sapiens
ggattcctgaaaaga

SEQ ID NO: 946807 - DNA, 15 bp, Homo sapiens
aggattcctgaaaag

SEQ ID NO: 946808 - DNA, 15 bp, Homo sapiens
taggattcctgaaaa

SEQ ID NO: 946809 - DNA, 15 bp, Homo sapiens
ttaggattcctgaaa

SEQ ID NO: 946810 - DNA, 15 bp, Homo sapiens
cttaggattcctgaa

SEQ ID NO: 946811 - DNA, 15 bp, Homo sapiens
ccttaggattcctga

SEQ ID NO: 946812 - DNA, 15 bp, Homo sapiens
accttaggattcctg

SEQ ID NO: 946813 - DNA, 15 bp, Homo sapiens
aaccttaggattcct

SEQ ID NO: 946814 - DNA, 15 bp, Homo sapiens
taaccttaggattcc

SEQ ID NO: 946815 - DNA, 15 bp, Homo sapiens
ataaccttaggattc

SEQ ID NO: 946816 - DNA, 15 bp, Homo sapiens
tataaccttaggatt

SEQ ID NO: 946817 - DNA, 15 bp, Homo sapiens
ctataaccttaggat

SEQ ID NO: 946818 - DNA, 15 bp, Homo sapiens
actataaccttagga

SEQ ID NO: 946819 - DNA, 15 bp, Homo sapiens
aactataaccttagg

SEQ ID NO: 946820 - DNA, 15 bp, Homo sapiens
gaactataaccttag

SEQ ID NO: 946821 - DNA, 15 bp, Homo sapiens
ggaactataacctta

SEQ ID NO: 946822 - DNA, 15 bp, Homo sapiens
gggaactataacctt

SEQ ID NO: 946823 - DNA, 15 bp, Homo sapiens
agggaactataacct

SEQ ID NO: 946824 - DNA, 15 bp, Homo sapiens
aagggaactataacc

SEQ ID NO: 946825 - DNA, 15 bp, Homo sapiens
taagggaactataac

SEQ ID NO: 946826 - DNA, 15 bp, Homo sapiens
ttaagggaactataa

SEQ ID NO: 946827 - DNA, 15 bp, Homo sapiens
tttaagggaactata

SEQ ID NO: 946828 - DNA, 15 bp, Homo sapiens
ttttaagggaactat

SEQ ID NO: 946829 - DNA, 15 bp, Homo sapiens
tttttaagggaacta

SEQ ID NO: 946830 - DNA, 15 bp, Homo sapiens
ttttttaagggaact

SEQ ID NO: 946831 - DNA, 15 bp, Homo sapiens
tttttttaagggaac

SEQ ID NO: 946832 - DNA, 15 bp, Homo sapiens
atttttttaagggaa

SEQ ID NO: 946833 - DNA, 15 bp, Homo sapiens
tatttttttaaggga

SEQ ID NO: 946834 - DNA, 15 bp, Homo sapiens
atatttttttaaggg

SEQ ID NO: 946835 - DNA, 15 bp, Homo sapiens
aatatttttttaagg

SEQ ID NO: 946836 - DNA, 15 bp, Homo sapiens
aaatatttttttaag

SEQ ID NO: 946837 - DNA, 15 bp, Homo sapiens
caaatatttttttaa

SEQ ID NO: 946838 - DNA, 15 bp, Homo sapiens
gcaaatattttttta

SEQ ID NO: 946839 - DNA, 15 bp, Homo sapiens
agcaaatattttttt

SEQ ID NO: 946840 - DNA, 15 bp, Homo sapiens
cagcaaatatttttt

SEQ ID NO: 946841 - DNA, 15 bp, Homo sapiens
acagcaaatattttt

SEQ ID NO: 946842 - DNA, 15 bp, Homo sapiens
aacagcaaatatttt

SEQ ID NO: 946843 - DNA, 15 bp, Homo sapiens
aaacagcaaatattt

SEQ ID NO: 946844 - DNA, 15 bp, Homo sapiens
aaaacagcaaatatt

SEQ ID NO: 946845 - DNA, 15 bp, Homo sapiens
taaaacagcaaatat

SEQ ID NO: 946846 - DNA, 15 bp, Homo sapiens
gtaaaacagcaaata

SEQ ID NO: 946847 - DNA, 15 bp, Homo sapiens
ggtaaaacagcaaat

SEQ ID NO: 946848 - DNA, 15 bp, Homo sapiens
aggtaaaacagcaaa

SEQ ID NO: 946849 - DNA, 15 bp, Homo sapiens
gaggtaaaacagcaa

SEQ ID NO: 946850 - DNA, 15 bp, Homo sapiens
agaggtaaaacagca

SEQ ID NO: 946851 - DNA, 15 bp, Homo sapiens
aagaggtaaaacagc

SEQ ID NO: 946852 - DNA, 15 bp, Homo sapiens
aaagaggtaaaacag

SEQ ID NO: 946853 - DNA, 15 bp, Homo sapiens
aaaagaggtaaaaca

SEQ ID NO: 946854 - DNA, 15 bp, Homo sapiens
taaaagaggtaaaac

SEQ ID NO: 946855 - DNA, 15 bp, Homo sapiens
ttaaaagaggtaaaa

SEQ ID NO: 946856 - DNA, 15 bp, Homo sapiens
cttaaaagaggtaaa

SEQ ID NO: 946857 - DNA, 15 bp, Homo sapiens
tcttaaaagaggtaa

SEQ ID NO: 946858 - DNA, 15 bp, Homo sapiens
gtcttaaaagaggta

SEQ ID NO: 946859 - DNA, 15 bp, Homo sapiens
agtcttaaaagaggt

SEQ ID NO: 946860 - DNA, 15 bp, Homo sapiens
cagtcttaaaagagg

SEQ ID NO: 946861 - DNA, 15 bp, Homo sapiens
acagtcttaaaagag

SEQ ID NO: 946862 - DNA, 15 bp, Homo sapiens
tacagtcttaaaaga

SEQ ID NO: 946863 - DNA, 15 bp, Homo sapiens
ttacagtcttaaaag

SEQ ID NO: 946864 - DNA, 15 bp, Homo sapiens
tttacagtcttaaaa

SEQ ID NO: 946865 - DNA, 15 bp, Homo sapiens
gtttacagtcttaaa

SEQ ID NO: 946866 - DNA, 15 bp, Homo sapiens
tgtttacagtcttaa

SEQ ID NO: 946867 - DNA, 15 bp, Homo sapiens
ctgtttacagtctta

SEQ ID NO: 946868 - DNA, 15 bp, Homo sapiens
cctgtttacagtctt

SEQ ID NO: 946869 - DNA, 15 bp, Homo sapiens
tcctgtttacagtct

SEQ ID NO: 946870 - DNA, 15 bp, Homo sapiens
gtcctgtttacagtc

SEQ ID NO: 946871 - DNA, 15 bp, Homo sapiens
tgtcctgtttacagt

SEQ ID NO: 946872 - DNA, 15 bp, Homo sapiens
ttgtcctgtttacag

SEQ ID NO: 946873 - DNA, 15 bp, Homo sapiens
tttgtcctgtttaca

SEQ ID NO: 946874 - DNA, 15 bp, Homo sapiens
ttttgtcctgtttac

SEQ ID NO: 946875 - DNA, 15 bp, Homo sapiens
tttttgtcctgttta

SEQ ID NO: 946876 - DNA, 15 bp, Homo sapiens
ctttttgtcctgttt

SEQ ID NO: 946877 - DNA, 15 bp, Homo sapiens
cctttttgtcctgtt

SEQ ID NO: 946878 - DNA, 15 bp, Homo sapiens
gcctttttgtcctgt

SEQ ID NO: 946879 - DNA, 15 bp, Homo sapiens
tgcctttttgtcctg

SEQ ID NO: 946880 - DNA, 15 bp, Homo sapiens
atgcctttttgtcct

SEQ ID NO: 946881 - DNA, 15 bp, Homo sapiens
catgcctttttgtcc

SEQ ID NO: 946882 - DNA, 15 bp, Homo sapiens
ccatgcctttttgtc

SEQ ID NO: 946883 - DNA, 15 bp, Homo sapiens
tccatgcctttttgt

SEQ ID NO: 946884 - DNA, 15 bp, Homo sapiens
atccatgcctttttg

SEQ ID NO: 946885 - DNA, 15 bp, Homo sapiens
tatccatgccttttt

SEQ ID NO: 946886 - DNA, 15 bp, Homo sapiens
atatccatgcctttt

SEQ ID NO: 946887 - DNA, 15 bp, Homo sapiens
catatccatgccttt

SEQ ID NO: 946888 - DNA, 15 bp, Homo sapiens
tcatatccatgcctt

SEQ ID NO: 946889 - DNA, 15 bp, Homo sapiens
ctcatatccatgcct

SEQ ID NO: 946890 - DNA, 15 bp, Homo sapiens
tctcatatccatgcc

SEQ ID NO: 946891 - DNA, 15 bp, Homo sapiens
ttctcatatccatgc

SEQ ID NO: 946892 - DNA, 15 bp, Homo sapiens
attctcatatccatg

SEQ ID NO: 946893 - DNA, 15 bp, Homo sapiens
aattctcatatccat

SEQ ID NO: 946894 - DNA, 15 bp, Homo sapiens
taattctcatatcca

SEQ ID NO: 946895 - DNA, 15 bp, Homo sapiens
ctaattctcatatcc

SEQ ID NO: 946896 - DNA, 15 bp, Homo sapiens
gctaattctcatatc

SEQ ID NO: 946897 - DNA, 15 bp, Homo sapiens
agctaattctcatat

SEQ ID NO: 946898 - DNA, 15 bp, Homo sapiens
tagctaattctcata

SEQ ID NO: 946899 - DNA, 15 bp, Homo sapiens
ctagctaattctcat

SEQ ID NO: 946900 - DNA, 15 bp, Homo sapiens
actagctaattctca

SEQ ID NO: 946901 - DNA, 15 bp, Homo sapiens
cactagctaattctc

SEQ ID NO: 946902 - DNA, 15 bp, Homo sapiens
tcactagctaattct

SEQ ID NO: 946903 - DNA, 15 bp, Homo sapiens
atcactagctaattc

SEQ ID NO: 946904 - DNA, 15 bp, Homo sapiens
gatcactagctaatt

SEQ ID NO: 946905 - DNA, 15 bp, Homo sapiens
tgatcactagctaat

SEQ ID NO: 946906 - DNA, 15 bp, Homo sapiens
gtgatcactagctaa

SEQ ID NO: 946907 - DNA, 15 bp, Homo sapiens
agtgatcactagcta

SEQ ID NO: 946908 - DNA, 15 bp, Homo sapiens
cagtgatcactagct

SEQ ID NO: 946909 - DNA, 15 bp, Homo sapiens
ccagtgatcactagc

SEQ ID NO: 946910 - DNA, 15 bp, Homo sapiens
gccagtgatcactag

SEQ ID NO: 946911 - DNA, 15 bp, Homo sapiens
agccagtgatcacta

SEQ ID NO: 946912 - DNA, 15 bp, Homo sapiens
tagccagtgatcact

SEQ ID NO: 946913 - DNA, 15 bp, Homo sapiens
atagccagtgatcac

SEQ ID NO: 946914 - DNA, 15 bp, Homo sapiens
aatagccagtgatca

SEQ ID NO: 946915 - DNA, 15 bp, Homo sapiens
gaatagccagtgatc

SEQ ID NO: 946916 - DNA, 15 bp, Homo sapiens
agaatagccagtgat

SEQ ID NO: 946917 - DNA, 15 bp, Homo sapiens
tagaatagccagtga

SEQ ID NO: 946918 - DNA, 15 bp, Homo sapiens
ttagaatagccagtg

SEQ ID NO: 946919 - DNA, 15 bp, Homo sapiens
tttagaatagccagt

SEQ ID NO: 946920 - DNA, 15 bp, Homo sapiens
atttagaatagccag

SEQ ID NO: 946921 - DNA, 15 bp, Homo sapiens
tatttagaatagcca

SEQ ID NO: 946922 - DNA, 15 bp, Homo sapiens
ctatttagaatagcc

SEQ ID NO: 946923 - DNA, 15 bp, Homo sapiens
actatttagaatagc

SEQ ID NO: 946924 - DNA, 15 bp, Homo sapiens
gactatttagaatag

SEQ ID NO: 946925 - DNA, 15 bp, Homo sapiens
tgactatttagaata

SEQ ID NO: 946926 - DNA, 15 bp, Homo sapiens
gtgactatttagaat

SEQ ID NO: 946927 - DNA, 15 bp, Homo sapiens
agtgactatttagaa

SEQ ID NO: 946928 - DNA, 15 bp, Homo sapiens
tagtgactatttaga

SEQ ID NO: 946929 - DNA, 15 bp, Homo sapiens
ttagtgactatttag

SEQ ID NO: 946930 - DNA, 15 bp, Homo sapiens
cttagtgactattta

SEQ ID NO: 946931 - DNA, 15 bp, Homo sapiens
ccttagtgactattt

SEQ ID NO: 946932 - DNA, 15 bp, Homo sapiens
gccttagtgactatt

SEQ ID NO: 946933 - DNA, 15 bp, Homo sapiens
agccttagtgactat

SEQ ID NO: 946934 - DNA, 15 bp, Homo sapiens
aagccttagtgacta

SEQ ID NO: 946935 - DNA, 15 bp, Homo sapiens
caagccttagtgact

SEQ ID NO: 946936 - DNA, 15 bp, Homo sapiens
tcaagccttagtgac

SEQ ID NO: 946937 - DNA, 15 bp, Homo sapiens
ttcaagccttagtga

SEQ ID NO: 946938 - DNA, 15 bp, Homo sapiens
attcaagccttagtg

SEQ ID NO: 946939 - DNA, 15 bp, Homo sapiens
aattcaagccttagt

SEQ ID NO: 946940 - DNA, 15 bp, Homo sapiens
caattcaagccttag

SEQ ID NO: 946941 - DNA, 15 bp, Homo sapiens
acaattcaagcctta

SEQ ID NO: 946942 - DNA, 15 bp, Homo sapiens
gacaattcaagcctt

SEQ ID NO: 946943 - DNA, 15 bp, Homo sapiens
agacaattcaagcct

SEQ ID NO: 946944 - DNA, 15 bp, Homo sapiens
gagacaattcaagcc

SEQ ID NO: 946945 - DNA, 15 bp, Homo sapiens
agagacaattcaagc

SEQ ID NO: 946946 - DNA, 15 bp, Homo sapiens
aagagacaattcaag

SEQ ID NO: 946947 - DNA, 15 bp, Homo sapiens
gaagagacaattcaa

SEQ ID NO: 946948 - DNA, 15 bp, Homo sapiens
tgaagagacaattca

SEQ ID NO: 946949 - DNA, 15 bp, Homo sapiens
gtgaagagacaattc

SEQ ID NO: 946950 - DNA, 15 bp, Homo sapiens
ggtgaagagacaatt

SEQ ID NO: 946951 - DNA, 15 bp, Homo sapiens
tggtgaagagacaat

SEQ ID NO: 946952 - DNA, 15 bp, Homo sapiens
ctggtgaagagacaa

SEQ ID NO: 946953 - DNA, 15 bp, Homo sapiens
tctggtgaagagaca

SEQ ID NO: 946954 - DNA, 15 bp, Homo sapiens
atctggtgaagagac

SEQ ID NO: 946955 - DNA, 15 bp, Homo sapiens
catctggtgaagaga

SEQ ID NO: 946956 - DNA, 15 bp, Homo sapiens
gcatctggtgaagag

SEQ ID NO: 946957 - DNA, 15 bp, Homo sapiens
ggcatctggtgaaga

SEQ ID NO: 946958 - DNA, 15 bp, Homo sapiens
aggcatctggtgaag

SEQ ID NO: 946959 - DNA, 15 bp, Homo sapiens
caggcatctggtgaa

SEQ ID NO: 946960 - DNA, 15 bp, Homo sapiens
acaggcatctggtga

SEQ ID NO: 946961 - DNA, 15 bp, Homo sapiens
gacaggcatctggtg

SEQ ID NO: 946962 - DNA, 15 bp, Homo sapiens
tgacaggcatctggt

SEQ ID NO: 946963 - DNA, 15 bp, Homo sapiens
ctgacaggcatctgg

SEQ ID NO: 946964 - DNA, 15 bp, Homo sapiens
tctgacaggcatctg

SEQ ID NO: 946965 - DNA, 15 bp, Homo sapiens
ttctgacaggcatct

SEQ ID NO: 946966 - DNA, 15 bp, Homo sapiens
cttctgacaggcatc

SEQ ID NO: 946967 - DNA, 15 bp, Homo sapiens
acttctgacaggcat

SEQ ID NO: 946968 - DNA, 15 bp, Homo sapiens
gacttctgacaggca

SEQ ID NO: 946969 - DNA, 15 bp, Homo sapiens
ggacttctgacaggc

SEQ ID NO: 946970 - DNA, 15 bp, Homo sapiens
gggacttctgacagg

SEQ ID NO: 946971 - DNA, 15 bp, Homo sapiens
tgggacttctgacag

SEQ ID NO: 946972 - DNA, 15 bp, Homo sapiens
ttgggacttctgaca

SEQ ID NO: 946973 - DNA, 15 bp, Homo sapiens
tttgggacttctgac

SEQ ID NO: 946974 - DNA, 15 bp, Homo sapiens
ctttgggacttctga

SEQ ID NO: 946975 - DNA, 15 bp, Homo sapiens
cctttgggacttctg

SEQ ID NO: 946976 - DNA, 15 bp, Homo sapiens
acctttgggacttct

SEQ ID NO: 946977 - DNA, 15 bp, Homo sapiens
aacctttgggacttc

SEQ ID NO: 946978 - DNA, 15 bp, Homo sapiens
aaacctttgggactt

SEQ ID NO: 946979 - DNA, 15 bp, Homo sapiens
gaaacctttgggact

SEQ ID NO: 946980 - DNA, 15 bp, Homo sapiens
ggaaacctttgggac

SEQ ID NO: 946981 - DNA, 15 bp, Homo sapiens
gggaaacctttggga

SEQ ID NO: 946982 - DNA, 15 bp, Homo sapiens
agggaaacctttggg

SEQ ID NO: 946983 - DNA, 15 bp, Homo sapiens
cagggaaacctttgg

SEQ ID NO: 946984 - DNA, 15 bp, Homo sapiens
tcagggaaacctttg

SEQ ID NO: 946985 - DNA, 15 bp, Homo sapiens
atcagggaaaccttt

SEQ ID NO: 946986 - DNA, 15 bp, Homo sapiens
gatcagggaaacctt

SEQ ID NO: 946987 - DNA, 15 bp, Homo sapiens
tgatcagggaaacct

SEQ ID NO: 946988 - DNA, 15 bp, Homo sapiens
atgatcagggaaacc

SEQ ID NO: 946989 - DNA, 15 bp, Homo sapiens
tatgatcagggaaac

SEQ ID NO: 946990 - DNA, 15 bp, Homo sapiens
atatgatcagggaaa

SEQ ID NO: 946991 - DNA, 15 bp, Homo sapiens
aatatgatcagggaa

SEQ ID NO: 946992 - DNA, 15 bp, Homo sapiens
taatatgatcaggga

SEQ ID NO: 946993 - DNA, 15 bp, Homo sapiens
ttaatatgatcaggg

SEQ ID NO: 946994 - DNA, 15 bp, Homo sapiens
attaatatgatcagg

SEQ ID NO: 946995 - DNA, 15 bp, Homo sapiens
tattaatatgatcag

SEQ ID NO: 946996 - DNA, 15 bp, Homo sapiens
ttattaatatgatca

SEQ ID NO: 946997 - DNA, 15 bp, Homo sapiens
gttattaatatgatc

SEQ ID NO: 946998 - DNA, 15 bp, Homo sapiens
agttattaatatgat

SEQ ID NO: 946999 - DNA, 15 bp, Homo sapiens
aagttattaatatga

SEQ ID NO: 947000 - DNA, 15 bp, Homo sapiens
aaagttattaatatg

SEQ ID NO: 947001 - DNA, 15 bp, Homo sapiens
taaagttattaatat

SEQ ID NO: 947002 - DNA, 15 bp, Homo sapiens
ataaagttattaata

SEQ ID NO: 947003 - DNA, 15 bp, Homo sapiens
tataaagttattaat

SEQ ID NO: 947004 - DNA, 15 bp, Homo sapiens
ttataaagttattaa

SEQ ID NO: 947005 - DNA, 15 bp, Homo sapiens
tttataaagttatta

SEQ ID NO: 947006 - DNA, 15 bp, Homo sapiens
ttttataaagttatt

SEQ ID NO: 947007 - DNA, 15 bp, Homo sapiens
tttttataaagttat

SEQ ID NO: 947008 - DNA, 15 bp, Homo sapiens
ttttttataaagtta

SEQ ID NO: 947009 - DNA, 15 bp, Homo sapiens
attttttataaagtt

SEQ ID NO: 947010 - DNA, 15 bp, Homo sapiens
aattttttataaagt

SEQ ID NO: 947011 - DNA, 15 bp, Homo sapiens
caattttttataaag

SEQ ID NO: 947012 - DNA, 15 bp, Homo sapiens
tcaattttttataaa

SEQ ID NO: 947013 - DNA, 15 bp, Homo sapiens
atcaattttttataa

SEQ ID NO: 947014 - DNA, 15 bp, Homo sapiens
gatcaattttttata

SEQ ID NO: 947015 - DNA, 15 bp, Homo sapiens
tgatcaattttttat

SEQ ID NO: 947016 - DNA, 15 bp, Homo sapiens
atgatcaatttttta

SEQ ID NO: 947017 - DNA, 15 bp, Homo sapiens
aatgatcaatttttt

SEQ ID NO: 947018 - DNA, 15 bp, Homo sapiens
taatgatcaattttt

SEQ ID NO: 947019 - DNA, 15 bp, Homo sapiens
ataatgatcaatttt

SEQ ID NO: 947020 - DNA, 15 bp, Homo sapiens
aataatgatcaattt

SEQ ID NO: 947021 - DNA, 15 bp, Homo sapiens
gaataatgatcaatt

SEQ ID NO: 947022 - DNA, 15 bp, Homo sapiens
tgaataatgatcaat

SEQ ID NO: 947023 - DNA, 15 bp, Homo sapiens
atgaataatgatcaa

SEQ ID NO: 947024 - DNA, 15 bp, Homo sapiens
aatgaataatgatca

SEQ ID NO: 947025 - DNA, 15 bp, Homo sapiens
taatgaataatgatc

SEQ ID NO: 947026 - DNA, 15 bp, Homo sapiens
ttaatgaataatgat

SEQ ID NO: 947027 - DNA, 15 bp, Homo sapiens
tttaatgaataatga

SEQ ID NO: 947028 - DNA, 15 bp, Homo sapiens
atttaatgaataatg

SEQ ID NO: 947029 - DNA, 15 bp, Homo sapiens
tatttaatgaataat

SEQ ID NO: 947030 - DNA, 15 bp, Homo sapiens
atatttaatgaataa

SEQ ID NO: 947031 - DNA, 15 bp, Homo sapiens
aatatttaatgaata

SEQ ID NO: 947032 - DNA, 15 bp, Homo sapiens
taatatttaatgaat

SEQ ID NO: 947033 - DNA, 15 bp, Homo sapiens
ctaatatttaatgaa

SEQ ID NO: 947034 - DNA, 15 bp, Homo sapiens
tctaatatttaatga

SEQ ID NO: 947035 - DNA, 15 bp, Homo sapiens
atctaatatttaatg

SEQ ID NO: 947036 - DNA, 15 bp, Homo sapiens
tatctaatatttaat

SEQ ID NO: 947037 - DNA, 15 bp, Homo sapiens
atatctaatatttaa

SEQ ID NO: 947038 - DNA, 15 bp, Homo sapiens
aatatctaatattta

SEQ ID NO: 947039 - DNA, 15 bp, Homo sapiens
taatatctaatattt

SEQ ID NO: 947040 - DNA, 15 bp, Homo sapiens
ctaatatctaatatt

SEQ ID NO: 947041 - DNA, 15 bp, Homo sapiens
actaatatctaatat

SEQ ID NO: 947042 - DNA, 15 bp, Homo sapiens
tactaatatctaata

SEQ ID NO: 947043 - DNA, 15 bp, Homo sapiens
ttactaatatctaat

SEQ ID NO: 947044 - DNA, 15 bp, Homo sapiens
cttactaatatctaa

SEQ ID NO: 947045 - DNA, 15 bp, Homo sapiens
ccttactaatatcta

SEQ ID NO: 947046 - DNA, 15 bp, Homo sapiens
tccttactaatatct

SEQ ID NO: 947047 - DNA, 15 bp, Homo sapiens
ttccttactaatatc

SEQ ID NO: 947048 - DNA, 15 bp, Homo sapiens
tttccttactaatat

SEQ ID NO: 947049 - DNA, 15 bp, Homo sapiens
ttttccttactaata

SEQ ID NO: 947050 - DNA, 15 bp, Homo sapiens
attttccttactaat

SEQ ID NO: 947051 - DNA, 15 bp, Homo sapiens
tattttccttactaa

SEQ ID NO: 947052 - DNA, 15 bp, Homo sapiens
atattttccttacta

SEQ ID NO: 947053 - DNA, 15 bp, Homo sapiens
tatattttccttact

SEQ ID NO: 947054 - DNA, 15 bp, Homo sapiens
ttatattttccttac

SEQ ID NO: 947055 - DNA, 15 bp, Homo sapiens
tttatattttcctta

SEQ ID NO: 947056 - DNA, 15 bp, Homo sapiens
atttatattttcctt

SEQ ID NO: 947057 - DNA, 15 bp, Homo sapiens
catttatattttcct

SEQ ID NO: 947058 - DNA, 15 bp, Homo sapiens
tcatttatattttcc

SEQ ID NO: 947059 - DNA, 15 bp, Homo sapiens
ttcatttatattttc

SEQ ID NO: 947060 - DNA, 15 bp, Homo sapiens
cttcatttatatttt

SEQ ID NO: 947061 - DNA, 15 bp, Homo sapiens
acttcatttatattt

SEQ ID NO: 947062 - DNA, 15 bp, Homo sapiens
gacttcatttatatt

SEQ ID NO: 947063 - DNA, 15 bp, Homo sapiens
agacttcatttatat

SEQ ID NO: 947064 - DNA, 15 bp, Homo sapiens
tagacttcatttata

SEQ ID NO: 947065 - DNA, 15 bp, Homo sapiens
ttagacttcatttat

SEQ ID NO: 947066 - DNA, 15 bp, Homo sapiens
tttagacttcattta

SEQ ID NO: 947067 - DNA, 15 bp, Homo sapiens
gtttagacttcattt

SEQ ID NO: 947068 - DNA, 15 bp, Homo sapiens
ggtttagacttcatt

SEQ ID NO: 947069 - DNA, 15 bp, Homo sapiens
tggtttagacttcat

SEQ ID NO: 947070 - DNA, 15 bp, Homo sapiens
ttggtttagacttca

SEQ ID NO: 947071 - DNA, 15 bp, Homo sapiens
tttggtttagacttc

SEQ ID NO: 947072 - DNA, 15 bp, Homo sapiens
ttttggtttagactt

SEQ ID NO: 947073 - DNA, 15 bp, Homo sapiens
gttttggtttagact

SEQ ID NO: 947074 - DNA, 15 bp, Homo sapiens
agttttggtttagac

SEQ ID NO: 947075 - DNA, 15 bp, Homo sapiens
gagttttggtttaga

SEQ ID NO: 947076 - DNA, 15 bp, Homo sapiens
agagttttggtttag

SEQ ID NO: 947077 - DNA, 15 bp, Homo sapiens
aagagttttggttta

SEQ ID NO: 947078 - DNA, 15 bp, Homo sapiens
taagagttttggttt

SEQ ID NO: 947079 - DNA, 15 bp, Homo sapiens
ttaagagttttggtt

SEQ ID NO: 947080 - DNA, 15 bp, Homo sapiens
gttaagagttttggt

SEQ ID NO: 947081 - DNA, 15 bp, Homo sapiens
ggttaagagttttgg

SEQ ID NO: 947082 - DNA, 15 bp, Homo sapiens
tggttaagagttttg

SEQ ID NO: 947083 - DNA, 15 bp, Homo sapiens
ctggttaagagtttt

SEQ ID NO: 947084 - DNA, 15 bp, Homo sapiens
tctggttaagagttt

SEQ ID NO: 947085 - DNA, 15 bp, Homo sapiens
gtctggttaagagtt

SEQ ID NO: 947086 - DNA, 15 bp, Homo sapiens
agtctggttaagagt

SEQ ID NO: 947087 - DNA, 15 bp, Homo sapiens
tagtctggttaagag

SEQ ID NO: 947088 - DNA, 15 bp, Homo sapiens
ttagtctggttaaga

SEQ ID NO: 947089 - DNA, 15 bp, Homo sapiens
gttagtctggttaag

SEQ ID NO: 947090 - DNA, 15 bp, Homo sapiens
agttagtctggttaa

SEQ ID NO: 947091 - DNA, 15 bp, Homo sapiens
aagttagtctggtta

SEQ ID NO: 947092 - DNA, 15 bp, Homo sapiens
gaagttagtctggtt

SEQ ID NO: 947093 - DNA, 15 bp, Homo sapiens
tgaagttagtctggt

SEQ ID NO: 947094 - DNA, 15 bp, Homo sapiens
ttgaagttagtctgg

SEQ ID NO: 947095 - DNA, 15 bp, Homo sapiens
attgaagttagtctg

SEQ ID NO: 947096 - DNA, 15 bp, Homo sapiens
cattgaagttagtct

SEQ ID NO: 947097 - DNA, 15 bp, Homo sapiens
acattgaagttagtc

SEQ ID NO: 947098 - DNA, 15 bp, Homo sapiens
aacattgaagttagt

SEQ ID NO: 947099 - DNA, 15 bp, Homo sapiens
taacattgaagttag

SEQ ID NO: 947100 - DNA, 15 bp, Homo sapiens
ataacattgaagtta

SEQ ID NO: 947101 - DNA, 15 bp, Homo sapiens
cataacattgaagtt

SEQ ID NO: 947102 - DNA, 15 bp, Homo sapiens
tcataacattgaagt

SEQ ID NO: 947103 - DNA, 15 bp, Homo sapiens
ttcataacattgaag

SEQ ID NO: 947104 - DNA, 15 bp, Homo sapiens
attcataacattgaa

SEQ ID NO: 947105 - DNA, 15 bp, Homo sapiens
gattcataacattga

SEQ ID NO: 947106 - DNA, 15 bp, Homo sapiens
tgattcataacattg

SEQ ID NO: 947107 - DNA, 15 bp, Homo sapiens
gtgattcataacatt

SEQ ID NO: 947108 - DNA, 15 bp, Homo sapiens
tgtgattcataacat

SEQ ID NO: 947109 - DNA, 15 bp, Homo sapiens
ttgtgattcataaca

SEQ ID NO: 947110 - DNA, 15 bp, Homo sapiens
tttgtgattcataac

SEQ ID NO: 947111 - DNA, 15 bp, Homo sapiens
ttttgtgattcataa

SEQ ID NO: 947112 - DNA, 15 bp, Homo sapiens
attttgtgattcata

SEQ ID NO: 947113 - DNA, 15 bp, Homo sapiens
gattttgtgattcat

SEQ ID NO: 947114 - DNA, 15 bp, Homo sapiens
agattttgtgattca

SEQ ID NO: 947115 - DNA, 15 bp, Homo sapiens
aagattttgtgattc

SEQ ID NO: 947116 - DNA, 15 bp, Homo sapiens
aaagattttgtgatt

SEQ ID NO: 947117 - DNA, 15 bp, Homo sapiens
aaaagattttgtgat

SEQ ID NO: 947118 - DNA, 15 bp, Homo sapiens
aaaaagattttgtga

SEQ ID NO: 947119 - DNA, 15 bp, Homo sapiens
caaaaagattttgtg

SEQ ID NO: 947120 - DNA, 15 bp, Homo sapiens
tcaaaaagattttgt

SEQ ID NO: 947121 - DNA, 15 bp, Homo sapiens
atcaaaaagattttg

SEQ ID NO: 947122 - DNA, 15 bp, Homo sapiens
aatcaaaaagatttt

SEQ ID NO: 947123 - DNA, 15 bp, Homo sapiens
caatcaaaaagattt

SEQ ID NO: 947124 - DNA, 15 bp, Homo sapiens
tcaatcaaaaagatt

SEQ ID NO: 947125 - DNA, 15 bp, Homo sapiens
atcaatcaaaaagat

SEQ ID NO: 947126 - DNA, 15 bp, Homo sapiens
aatcaatcaaaaaga

SEQ ID NO: 947127 - DNA, 15 bp, Homo sapiens
caatcaatcaaaaag

SEQ ID NO: 947128 - DNA, 15 bp, Homo sapiens
gcaatcaatcaaaaa

SEQ ID NO: 947129 - DNA, 15 bp, Homo sapiens
agcaatcaatcaaaa

SEQ ID NO: 947130 - DNA, 15 bp, Homo sapiens
gagcaatcaatcaaa

SEQ ID NO: 947131 - DNA, 15 bp, Homo sapiens
agagcaatcaatcaa

SEQ ID NO: 947132 - DNA, 15 bp, Homo sapiens
tagagcaatcaatca

SEQ ID NO: 947133 - DNA, 15 bp, Homo sapiens
atagagcaatcaatc

SEQ ID NO: 947134 - DNA, 15 bp, Homo sapiens
aatagagcaatcaat

SEQ ID NO: 947135 - DNA, 15 bp, Homo sapiens
caatagagcaatcaa

SEQ ID NO: 947136 - DNA, 15 bp, Homo sapiens
tcaatagagcaatca

SEQ ID NO: 947137 - DNA, 15 bp, Homo sapiens
gtcaatagagcaatc

SEQ ID NO: 947138 - DNA, 15 bp, Homo sapiens
tgtcaatagagcaat

SEQ ID NO: 947139 - DNA, 15 bp, Homo sapiens
ttgtcaatagagcaa

SEQ ID NO: 947140 - DNA, 15 bp, Homo sapiens
cttgtcaatagagca

SEQ ID NO: 947141 - DNA, 15 bp, Homo sapiens
gcttgtcaatagagc

SEQ ID NO: 947142 - DNA, 15 bp, Homo sapiens
agcttgtcaatagag

SEQ ID NO: 947143 - DNA, 15 bp, Homo sapiens
gagcttgtcaataga

SEQ ID NO: 947144 - DNA, 15 bp, Homo sapiens
agagcttgtcaatag

SEQ ID NO: 947145 - DNA, 15 bp, Homo sapiens
aagagcttgtcaata

SEQ ID NO: 947146 - DNA, 15 bp, Homo sapiens
taagagcttgtcaat

SEQ ID NO: 947147 - DNA, 15 bp, Homo sapiens
ataagagcttgtcaa

SEQ ID NO: 947148 - DNA, 15 bp, Homo sapiens
tataagagcttgtca

SEQ ID NO: 947149 - DNA, 15 bp, Homo sapiens
atataagagcttgtc

SEQ ID NO: 947150 - DNA, 15 bp, Homo sapiens
catataagagcttgt

SEQ ID NO: 947151 - DNA, 15 bp, Homo sapiens
gcatataagagcttg

SEQ ID NO: 947152 - DNA, 15 bp, Homo sapiens
agcatataagagctt

SEQ ID NO: 947153 - DNA, 15 bp, Homo sapiens
aagcatataagagct

SEQ ID NO: 947154 - DNA, 15 bp, Homo sapiens
aaagcatataagagc

SEQ ID NO: 947155 - DNA, 15 bp, Homo sapiens
aaaagcatataagag

SEQ ID NO: 947156 - DNA, 15 bp, Homo sapiens
taaaagcatataaga

SEQ ID NO: 947157 - DNA, 15 bp, Homo sapiens
ctaaaagcatataag

SEQ ID NO: 947158 - DNA, 15 bp, Homo sapiens
tctaaaagcatataa

SEQ ID NO: 947159 - DNA, 15 bp, Homo sapiens
ctctaaaagcatata

SEQ ID NO: 947160 - DNA, 15 bp, Homo sapiens
tctctaaaagcatat

SEQ ID NO: 947161 - DNA, 15 bp, Homo sapiens
ttctctaaaagcata

SEQ ID NO: 947162 - DNA, 15 bp, Homo sapiens
tttctctaaaagcat

SEQ ID NO: 947163 - DNA, 15 bp, Homo sapiens
ctttctctaaaagca

SEQ ID NO: 947164 - DNA, 15 bp, Homo sapiens
tctttctctaaaagc

SEQ ID NO: 947165 - DNA, 15 bp, Homo sapiens
atctttctctaaaag

SEQ ID NO: 947166 - DNA, 15 bp, Homo sapiens
aatctttctctaaaa

SEQ ID NO: 947167 - DNA, 15 bp, Homo sapiens
taatctttctctaaa

SEQ ID NO: 947168 - DNA, 15 bp, Homo sapiens
ttaatctttctctaa

SEQ ID NO: 947169 - DNA, 15 bp, Homo sapiens
cttaatctttctcta

SEQ ID NO: 947170 - DNA, 15 bp, Homo sapiens
acttaatctttctct

SEQ ID NO: 947171 - DNA, 15 bp, Homo sapiens
gacttaatctttctc

SEQ ID NO: 947172 - DNA, 15 bp, Homo sapiens
ggacttaatctttct

SEQ ID NO: 947173 - DNA, 15 bp, Homo sapiens
gggacttaatctttc

SEQ ID NO: 947174 - DNA, 15 bp, Homo sapiens
tgggacttaatcttt

SEQ ID NO: 947175 - DNA, 15 bp, Homo sapiens
atgggacttaatctt

SEQ ID NO: 947176 - DNA, 15 bp, Homo sapiens
aatgggacttaatct

SEQ ID NO: 947177 - DNA, 15 bp, Homo sapiens
taatgggacttaatc

SEQ ID NO: 947178 - DNA, 15 bp, Homo sapiens
ataatgggacttaat

SEQ ID NO: 947179 - DNA, 15 bp, Homo sapiens
tataatgggacttaa

SEQ ID NO: 947180 - DNA, 15 bp, Homo sapiens
ttataatgggactta

SEQ ID NO: 947181 - DNA, 15 bp, Homo sapiens
cttataatgggactt

SEQ ID NO: 947182 - DNA, 15 bp, Homo sapiens
tcttataatgggact

SEQ ID NO: 947183 - DNA, 15 bp, Homo sapiens
ctcttataatgggac

SEQ ID NO: 947184 - DNA, 15 bp, Homo sapiens
tctcttataatggga

SEQ ID NO: 947185 - DNA, 15 bp, Homo sapiens
atctcttataatggg

SEQ ID NO: 947186 - DNA, 15 bp, Homo sapiens
catctcttataatgg

SEQ ID NO: 947187 - DNA, 15 bp, Homo sapiens
tcatctcttataatg

SEQ ID NO: 947188 - DNA, 15 bp, Homo sapiens
atcatctcttataat

SEQ ID NO: 947189 - DNA, 15 bp, Homo sapiens
tatcatctcttataa

SEQ ID NO: 947190 - DNA, 15 bp, Homo sapiens
ttatcatctcttata

SEQ ID NO: 947191 - DNA, 15 bp, Homo sapiens
tttatcatctcttat

SEQ ID NO: 947192 - DNA, 15 bp, Homo sapiens
atttatcatctctta

SEQ ID NO: 947193 - DNA, 15 bp, Homo sapiens
aatttatcatctctt

SEQ ID NO: 947194 - DNA, 15 bp, Homo sapiens
aaatttatcatctct

SEQ ID NO: 947195 - DNA, 15 bp, Homo sapiens
aaaatttatcatctc

SEQ ID NO: 947196 - DNA, 15 bp, Homo sapiens
taaaatttatcatct

SEQ ID NO: 947197 - DNA, 15 bp, Homo sapiens
ctaaaatttatcatc

SEQ ID NO: 947198 - DNA, 15 bp, Homo sapiens
actaaaatttatcat

SEQ ID NO: 947199 - DNA, 15 bp, Homo sapiens
gactaaaatttatca

SEQ ID NO: 947200 - DNA, 15 bp, Homo sapiens
tgactaaaatttatc

SEQ ID NO: 947201 - DNA, 15 bp, Homo sapiens
ttgactaaaatttat

SEQ ID NO: 947202 - DNA, 15 bp, Homo sapiens
tttgactaaaattta

SEQ ID NO: 947203 - DNA, 15 bp, Homo sapiens
ctttgactaaaattt

SEQ ID NO: 947204 - DNA, 15 bp, Homo sapiens
tctttgactaaaatt

SEQ ID NO: 947205 - DNA, 15 bp, Homo sapiens
gtctttgactaaaat

SEQ ID NO: 947206 - DNA, 15 bp, Homo sapiens
agtctttgactaaaa

SEQ ID NO: 947207 - DNA, 15 bp, Homo sapiens
tagtctttgactaaa

SEQ ID NO: 947208 - DNA, 15 bp, Homo sapiens
ctagtctttgactaa

SEQ ID NO: 947209 - DNA, 15 bp, Homo sapiens
tctagtctttgacta

SEQ ID NO: 947210 - DNA, 15 bp, Homo sapiens
ttctagtctttgact

SEQ ID NO: 947211 - DNA, 15 bp, Homo sapiens
gttctagtctttgac

SEQ ID NO: 947212 - DNA, 15 bp, Homo sapiens
tgttctagtctttga

SEQ ID NO: 947213 - DNA, 15 bp, Homo sapiens
gtgttctagtctttg

SEQ ID NO: 947214 - DNA, 15 bp, Homo sapiens
tgtgttctagtcttt

SEQ ID NO: 947215 - DNA, 15 bp, Homo sapiens
ttgtgttctagtctt

SEQ ID NO: 947216 - DNA, 15 bp, Homo sapiens
gttgtgttctagtct

SEQ ID NO: 947217 - DNA, 15 bp, Homo sapiens
agttgtgttctagtc

SEQ ID NO: 947218 - DNA, 15 bp, Homo sapiens
aagttgtgttctagt

SEQ ID NO: 947219 - DNA, 15 bp, Homo sapiens
taagttgtgttctag

SEQ ID NO: 947220 - DNA, 15 bp, Homo sapiens
gtaagttgtgttcta

SEQ ID NO: 947221 - DNA, 15 bp, Homo sapiens
tgtaagttgtgttct

SEQ ID NO: 947222 - DNA, 15 bp, Homo sapiens
ctgtaagttgtgttc

SEQ ID NO: 947223 - DNA, 15 bp, Homo sapiens
tctgtaagttgtgtt

SEQ ID NO: 947224 - DNA, 15 bp, Homo sapiens
ttctgtaagttgtgt

SEQ ID NO: 947225 - DNA, 15 bp, Homo sapiens
attctgtaagttgtg

SEQ ID NO: 947226 - DNA, 15 bp, Homo sapiens
tattctgtaagttgt

SEQ ID NO: 947227 - DNA, 15 bp, Homo sapiens
gtattctgtaagttg

SEQ ID NO: 947228 - DNA, 15 bp, Homo sapiens
tgtattctgtaagtt

SEQ ID NO: 947229 - DNA, 15 bp, Homo sapiens
atgtattctgtaagt

SEQ ID NO: 947230 - DNA, 15 bp, Homo sapiens
tatgtattctgtaag

SEQ ID NO: 947231 - DNA, 15 bp, Homo sapiens
ttatgtattctgtaa

SEQ ID NO: 947232 - DNA, 15 bp, Homo sapiens
gttatgtattctgta

SEQ ID NO: 947233 - DNA, 15 bp, Homo sapiens
agttatgtattctgt

SEQ ID NO: 947234 - DNA, 15 bp, Homo sapiens
cagttatgtattctg

SEQ ID NO: 947235 - DNA, 15 bp, Homo sapiens
ccagttatgtattct

SEQ ID NO: 947236 - DNA, 15 bp, Homo sapiens
tccagttatgtattc

SEQ ID NO: 947237 - DNA, 15 bp, Homo sapiens
gtccagttatgtatt

SEQ ID NO: 947238 - DNA, 15 bp, Homo sapiens
agtccagttatgtat

SEQ ID NO: 947239 - DNA, 15 bp, Homo sapiens
aagtccagttatgta

SEQ ID NO: 947240 - DNA, 15 bp, Homo sapiens
caagtccagttatgt

SEQ ID NO: 947241 - DNA, 15 bp, Homo sapiens
tcaagtccagttatg

SEQ ID NO: 947242 - DNA, 15 bp, Homo sapiens
gtcaagtccagttat

SEQ ID NO: 947243 - DNA, 15 bp, Homo sapiens
tgtcaagtccagtta

SEQ ID NO: 947244 - DNA, 15 bp, Homo sapiens
ctgtcaagtccagtt

SEQ ID NO: 947245 - DNA, 15 bp, Homo sapiens
actgtcaagtccagt

SEQ ID NO: 947246 - DNA, 15 bp, Homo sapiens
aactgtcaagtccag

SEQ ID NO: 947247 - DNA, 15 bp, Homo sapiens
taactgtcaagtcca

SEQ ID NO: 947248 - DNA, 15 bp, Homo sapiens
ttaactgtcaagtcc

SEQ ID NO: 947249 - DNA, 15 bp, Homo sapiens
gttaactgtcaagtc

SEQ ID NO: 947250 - DNA, 15 bp, Homo sapiens
tgttaactgtcaagt

SEQ ID NO: 947251 - DNA, 15 bp, Homo sapiens
ttgttaactgtcaag

SEQ ID NO: 947252 - DNA, 15 bp, Homo sapiens
gttgttaactgtcaa

SEQ ID NO: 947253 - DNA, 15 bp, Homo sapiens
agttgttaactgtca

SEQ ID NO: 947254 - DNA, 15 bp, Homo sapiens
aagttgttaactgtc

SEQ ID NO: 947255 - DNA, 15 bp, Homo sapiens
taagttgttaactgt

SEQ ID NO: 947256 - DNA, 15 bp, Homo sapiens
ctaagttgttaactg

SEQ ID NO: 947257 - DNA, 15 bp, Homo sapiens
actaagttgttaact

SEQ ID NO: 947258 - DNA, 15 bp, Homo sapiens
aactaagttgttaac

SEQ ID NO: 947259 - DNA, 15 bp, Homo sapiens
taactaagttgttaa

SEQ ID NO: 947260 - DNA, 15 bp, Homo sapiens
ataactaagttgtta

SEQ ID NO: 947261 - DNA, 15 bp, Homo sapiens
aataactaagttgtt

SEQ ID NO: 947262 - DNA, 15 bp, Homo sapiens
aaataactaagttgt

SEQ ID NO: 947263 - DNA, 15 bp, Homo sapiens
taaataactaagttg

SEQ ID NO: 947264 - DNA, 15 bp, Homo sapiens
gtaaataactaagtt

SEQ ID NO: 947265 - DNA, 15 bp, Homo sapiens
tgtaaataactaagt

SEQ ID NO: 947266 - DNA, 15 bp, Homo sapiens
gtgtaaataactaag

SEQ ID NO: 947267 - DNA, 15 bp, Homo sapiens
agtgtaaataactaa

SEQ ID NO: 947268 - DNA, 15 bp, Homo sapiens
cagtgtaaataacta

SEQ ID NO: 947269 - DNA, 15 bp, Homo sapiens
acagtgtaaataact

SEQ ID NO: 947270 - DNA, 15 bp, Homo sapiens
tacagtgtaaataac

SEQ ID NO: 947271 - DNA, 15 bp, Homo sapiens
gtacagtgtaaataa

SEQ ID NO: 947272 - DNA, 15 bp, Homo sapiens
tgtacagtgtaaata

SEQ ID NO: 947273 - DNA, 15 bp, Homo sapiens
ttgtacagtgtaaat

SEQ ID NO: 947274 - DNA, 15 bp, Homo sapiens
attgtacagtgtaaa

SEQ ID NO: 947275 - DNA, 15 bp, Homo sapiens
cattgtacagtgtaa

SEQ ID NO: 947276 - DNA, 15 bp, Homo sapiens
ccattgtacagtgta

SEQ ID NO: 947277 - DNA, 15 bp, Homo sapiens
tccattgtacagtgt

SEQ ID NO: 947278 - DNA, 15 bp, Homo sapiens
ttccattgtacagtg

SEQ ID NO: 947279 - DNA, 15 bp, Homo sapiens
gttccattgtacagt

SEQ ID NO: 947280 - DNA, 15 bp, Homo sapiens
tgttccattgtacag

SEQ ID NO: 947281 - DNA, 15 bp, Homo sapiens
ttgttccattgtaca

SEQ ID NO: 947282 - DNA, 15 bp, Homo sapiens
tttgttccattgtac

SEQ ID NO: 947283 - DNA, 15 bp, Homo sapiens
ctttgttccattgta

SEQ ID NO: 947284 - DNA, 15 bp, Homo sapiens
tctttgttccattgt

SEQ ID NO: 947285 - DNA, 15 bp, Homo sapiens
ttctttgttccattg

SEQ ID NO: 947286 - DNA, 15 bp, Homo sapiens
tttctttgttccatt

SEQ ID NO: 947287 - DNA, 15 bp, Homo sapiens
ttttctttgttccat

SEQ ID NO: 947288 - DNA, 15 bp, Homo sapiens
tttttctttgttcca

SEQ ID NO: 947289 - DNA, 15 bp, Homo sapiens
atttttctttgttcc

SEQ ID NO: 947290 - DNA, 15 bp, Homo sapiens
gatttttctttgttc

SEQ ID NO: 947291 - DNA, 15 bp, Homo sapiens
agatttttctttgtt

SEQ ID NO: 947292 - DNA, 15 bp, Homo sapiens
aagatttttctttgt

SEQ ID NO: 947293 - DNA, 15 bp, Homo sapiens
taagatttttctttg

SEQ ID NO: 947294 - DNA, 15 bp, Homo sapiens
ttaagatttttcttt

SEQ ID NO: 947295 - DNA, 15 bp, Homo sapiens
attaagatttttctt

SEQ ID NO: 947296 - DNA, 15 bp, Homo sapiens
aattaagatttttct

SEQ ID NO: 947297 - DNA, 15 bp, Homo sapiens
gaattaagatttttc

SEQ ID NO: 947298 - DNA, 15 bp, Homo sapiens
agaattaagattttt

SEQ ID NO: 947299 - DNA, 15 bp, Homo sapiens
aagaattaagatttt

SEQ ID NO: 947300 - DNA, 15 bp, Homo sapiens
gaagaattaagattt

SEQ ID NO: 947301 - DNA, 15 bp, Homo sapiens
agaagaattaagatt

SEQ ID NO: 947302 - DNA, 15 bp, Homo sapiens
cagaagaattaagat

SEQ ID NO: 947303 - DNA, 15 bp, Homo sapiens
gcagaagaattaaga

SEQ ID NO: 947304 - DNA, 15 bp, Homo sapiens
ggcagaagaattaag

SEQ ID NO: 947305 - DNA, 15 bp, Homo sapiens
aggcagaagaattaa

SEQ ID NO: 947306 - DNA, 15 bp, Homo sapiens
aaggcagaagaatta

SEQ ID NO: 947307 - DNA, 15 bp, Homo sapiens
aaaggcagaagaatt

SEQ ID NO: 947308 - DNA, 15 bp, Homo sapiens
taaaggcagaagaat

SEQ ID NO: 947309 - DNA, 15 bp, Homo sapiens
ataaaggcagaagaa

SEQ ID NO: 947310 - DNA, 15 bp, Homo sapiens
aataaaggcagaaga

SEQ ID NO: 947311 - DNA, 15 bp, Homo sapiens
caataaaggcagaag

SEQ ID NO: 947312 - DNA, 15 bp, Homo sapiens
gcaataaaggcagaa

SEQ ID NO: 947313 - DNA, 15 bp, Homo sapiens
agcaataaaggcaga

SEQ ID NO: 947314 - DNA, 15 bp, Homo sapiens
cagcaataaaggcag

SEQ ID NO: 947315 - DNA, 15 bp, Homo sapiens
acagcaataaaggca

SEQ ID NO: 947316 - DNA, 15 bp, Homo sapiens
tacagcaataaaggc

SEQ ID NO: 947317 - DNA, 15 bp, Homo sapiens
atacagcaataaagg

SEQ ID NO: 947318 - DNA, 15 bp, Homo sapiens
aatacagcaataaag

SEQ ID NO: 947319 - DNA, 15 bp, Homo sapiens
aaatacagcaataaa

SEQ ID NO: 947320 - DNA, 15 bp, Homo sapiens
caaatacagcaataa

SEQ ID NO: 947321 - DNA, 15 bp, Homo sapiens
tcaaatacagcaata

SEQ ID NO: 947322 - DNA, 15 bp, Homo sapiens
gtcaaatacagcaat

SEQ ID NO: 947323 - DNA, 15 bp, Homo sapiens
ggtcaaatacagcaa

SEQ ID NO: 947324 - DNA, 15 bp, Homo sapiens
tggtcaaatacagca

SEQ ID NO: 947325 - DNA, 15 bp, Homo sapiens
atggtcaaatacagc

SEQ ID NO: 947326 - DNA, 15 bp, Homo sapiens
aatggtcaaatacag

SEQ ID NO: 947327 - DNA, 15 bp, Homo sapiens
gaatggtcaaataca

SEQ ID NO: 947328 - DNA, 15 bp, Homo sapiens
tgaatggtcaaatac

SEQ ID NO: 947329 - DNA, 15 bp, Homo sapiens
ctgaatggtcaaata

SEQ ID NO: 947330 - DNA, 15 bp, Homo sapiens
cctgaatggtcaaat

SEQ ID NO: 947331 - DNA, 15 bp, Homo sapiens
tcctgaatggtcaaa

SEQ ID NO: 947332 - DNA, 15 bp, Homo sapiens
ttcctgaatggtcaa

SEQ ID NO: 947333 - DNA, 15 bp, Homo sapiens
attcctgaatggtca

SEQ ID NO: 947334 - DNA, 15 bp, Homo sapiens
tattcctgaatggtc

SEQ ID NO: 947335 - DNA, 15 bp, Homo sapiens
gtattcctgaatggt

SEQ ID NO: 947336 - DNA, 15 bp, Homo sapiens
agtattcctgaatgg

SEQ ID NO: 947337 - DNA, 15 bp, Homo sapiens
aagtattcctgaatg

SEQ ID NO: 947338 - DNA, 15 bp, Homo sapiens
aaagtattcctgaat

SEQ ID NO: 947339 - DNA, 15 bp, Homo sapiens
caaagtattcctgaa

SEQ ID NO: 947340 - DNA, 15 bp, Homo sapiens
ccaaagtattcctga

SEQ ID NO: 947341 - DNA, 15 bp, Homo sapiens
gccaaagtattcctg

SEQ ID NO: 947342 - DNA, 15 bp, Homo sapiens
agccaaagtattcct

SEQ ID NO: 947343 - DNA, 15 bp, Homo sapiens
aagccaaagtattcc

SEQ ID NO: 947344 - DNA, 15 bp, Homo sapiens
aaagccaaagtattc

SEQ ID NO: 947345 - DNA, 15 bp, Homo sapiens
gaaagccaaagtatt

SEQ ID NO: 947346 - DNA, 15 bp, Homo sapiens
tgaaagccaaagtat

SEQ ID NO: 947347 - DNA, 15 bp, Homo sapiens
atgaaagccaaagta

SEQ ID NO: 947348 - DNA, 15 bp, Homo sapiens
tatgaaagccaaagt

SEQ ID NO: 947349 - DNA, 15 bp, Homo sapiens
atatgaaagccaaag

SEQ ID NO: 947350 - DNA, 15 bp, Homo sapiens
aatatgaaagccaaa

SEQ ID NO: 947351 - DNA, 15 bp, Homo sapiens
aaatatgaaagccaa

SEQ ID NO: 947352 - DNA, 15 bp, Homo sapiens
taaatatgaaagcca

SEQ ID NO: 947353 - DNA, 15 bp, Homo sapiens
gtaaatatgaaagcc

SEQ ID NO: 947354 - DNA, 15 bp, Homo sapiens
tgtaaatatgaaagc

SEQ ID NO: 947355 - DNA, 15 bp, Homo sapiens
ttgtaaatatgaaag

SEQ ID NO: 947356 - DNA, 15 bp, Homo sapiens
attgtaaatatgaaa

SEQ ID NO: 947357 - DNA, 15 bp, Homo sapiens
aattgtaaatatgaa

SEQ ID NO: 947358 - DNA, 15 bp, Homo sapiens
taattgtaaatatga

SEQ ID NO: 947359 - DNA, 15 bp, Homo sapiens
ttaattgtaaatatg

SEQ ID NO: 947360 - DNA, 15 bp, Homo sapiens
tttaattgtaaatat

SEQ ID NO: 947361 - DNA, 15 bp, Homo sapiens
atttaattgtaaata

SEQ ID NO: 947362 - DNA, 15 bp, Homo sapiens
gatttaattgtaaat

SEQ ID NO: 947363 - DNA, 15 bp, Homo sapiens
agatttaattgtaaa

SEQ ID NO: 947364 - DNA, 15 bp, Homo sapiens
gagatttaattgtaa

SEQ ID NO: 947365 - DNA, 15 bp, Homo sapiens
ggagatttaattgta

SEQ ID NO: 947366 - DNA, 15 bp, Homo sapiens
aggagatttaattgt

SEQ ID NO: 947367 - DNA, 15 bp, Homo sapiens
aaggagatttaattg

SEQ ID NO: 947368 - DNA, 15 bp, Homo sapiens
caaggagatttaatt

SEQ ID NO: 947369 - DNA, 15 bp, Homo sapiens
acaaggagatttaat

SEQ ID NO: 947370 - DNA, 15 bp, Homo sapiens
aacaaggagatttaa

SEQ ID NO: 947371 - DNA, 15 bp, Homo sapiens
gaacaaggagattta

SEQ ID NO: 947372 - DNA, 15 bp, Homo sapiens
tgaacaaggagattt

SEQ ID NO: 947373 - DNA, 15 bp, Homo sapiens
ttgaacaaggagatt

SEQ ID NO: 947374 - DNA, 15 bp, Homo sapiens
tttgaacaaggagat

SEQ ID NO: 947375 - DNA, 15 bp, Homo sapiens
gtttgaacaaggaga

SEQ ID NO: 947376 - DNA, 15 bp, Homo sapiens
cgtttgaacaaggag

SEQ ID NO: 947377 - DNA, 15 bp, Homo sapiens
acgtttgaacaagga

SEQ ID NO: 947378 - DNA, 15 bp, Homo sapiens
tacgtttgaacaagg

SEQ ID NO: 947379 - DNA, 15 bp, Homo sapiens
ttacgtttgaacaag

SEQ ID NO: 947380 - DNA, 15 bp, Homo sapiens
tttacgtttgaacaa

SEQ ID NO: 947381 - DNA, 15 bp, Homo sapiens
ttttacgtttgaaca

SEQ ID NO: 947382 - DNA, 15 bp, Homo sapiens
attttacgtttgaac

SEQ ID NO: 947383 - DNA, 15 bp, Homo sapiens
tattttacgtttgaa

SEQ ID NO: 947384 - DNA, 15 bp, Homo sapiens
atattttacgtttga

SEQ ID NO: 947385 - DNA, 15 bp, Homo sapiens
catattttacgtttg

SEQ ID NO: 947386 - DNA, 15 bp, Homo sapiens
acatattttacgttt

SEQ ID NO: 947387 - DNA, 15 bp, Homo sapiens
tacatattttacgtt

SEQ ID NO: 947388 - DNA, 15 bp, Homo sapiens
atacatattttacgt

SEQ ID NO: 947389 - DNA, 15 bp, Homo sapiens
tatacatattttacg

SEQ ID NO: 947390 - DNA, 15 bp, Homo sapiens
atatacatattttac

SEQ ID NO: 947391 - DNA, 15 bp, Homo sapiens
aatatacatatttta

SEQ ID NO: 947392 - DNA, 15 bp, Homo sapiens
aaatatacatatttt

SEQ ID NO: 947393 - DNA, 15 bp, Homo sapiens
gaaatatacatattt

SEQ ID NO: 947394 - DNA, 15 bp, Homo sapiens
ggaaatatacatatt

SEQ ID NO: 947395 - DNA, 15 bp, Homo sapiens
aggaaatatacatat

SEQ ID NO: 947396 - DNA, 15 bp, Homo sapiens
taggaaatatacata

SEQ ID NO: 947397 - DNA, 15 bp, Homo sapiens
ataggaaatatacat

SEQ ID NO: 947398 - DNA, 15 bp, Homo sapiens
tataggaaatataca

SEQ ID NO: 947399 - DNA, 15 bp, Homo sapiens
atataggaaatatac

SEQ ID NO: 947400 - DNA, 15 bp, Homo sapiens
catataggaaatata

SEQ ID NO: 947401 - DNA, 15 bp, Homo sapiens
gcatataggaaatat

SEQ ID NO: 947402 - DNA, 15 bp, Homo sapiens
tgcatataggaaata

SEQ ID NO: 947403 - DNA, 15 bp, Homo sapiens
ttgcatataggaaat

SEQ ID NO: 947404 - DNA, 15 bp, Homo sapiens
gttgcatataggaaa

SEQ ID NO: 947405 - DNA, 15 bp, Homo sapiens
agttgcatataggaa

SEQ ID NO: 947406 - DNA, 15 bp, Homo sapiens
aagttgcatatagga

SEQ ID NO: 947407 - DNA, 15 bp, Homo sapiens
aaagttgcatatagg

SEQ ID NO: 947408 - DNA, 15 bp, Homo sapiens
aaaagttgcatatag

SEQ ID NO: 947409 - DNA, 15 bp, Homo sapiens
taaaagttgcatata

SEQ ID NO: 947410 - DNA, 15 bp, Homo sapiens
ttaaaagttgcatat

SEQ ID NO: 947411 - DNA, 15 bp, Homo sapiens
tttaaaagttgcata

SEQ ID NO: 947412 - DNA, 15 bp, Homo sapiens
ctttaaaagttgcat

SEQ ID NO: 947413 - DNA, 15 bp, Homo sapiens
tctttaaaagttgca

SEQ ID NO: 947414 - DNA, 15 bp, Homo sapiens
atctttaaaagttgc

SEQ ID NO: 947415 - DNA, 15 bp, Homo sapiens
tatctttaaaagttg

SEQ ID NO: 947416 - DNA, 15 bp, Homo sapiens
ttatctttaaaagtt

SEQ ID NO: 947417 - DNA, 15 bp, Homo sapiens
attatctttaaaagt

SEQ ID NO: 947418 - DNA, 15 bp, Homo sapiens
cattatctttaaaag

SEQ ID NO: 947419 - DNA, 15 bp, Homo sapiens
acattatctttaaaa

SEQ ID NO: 947420 - DNA, 15 bp, Homo sapiens
aacattatctttaaa

SEQ ID NO: 947421 - DNA, 15 bp, Homo sapiens
aaacattatctttaa

SEQ ID NO: 947422 - DNA, 15 bp, Homo sapiens
gaaacattatcttta

SEQ ID NO: 947423 - DNA, 15 bp, Homo sapiens
ggaaacattatcttt

SEQ ID NO: 947424 - DNA, 15 bp, Homo sapiens
tggaaacattatctt

SEQ ID NO: 947425 - DNA, 15 bp, Homo sapiens
atggaaacattatct

SEQ ID NO: 947426 - DNA, 15 bp, Homo sapiens
aatggaaacattatc

SEQ ID NO: 947427 - DNA, 15 bp, Homo sapiens
taatggaaacattat

SEQ ID NO: 947428 - DNA, 15 bp, Homo sapiens
ctaatggaaacatta

SEQ ID NO: 947429 - DNA, 15 bp, Homo sapiens
cctaatggaaacatt

SEQ ID NO: 947430 - DNA, 15 bp, Homo sapiens
tcctaatggaaacat

SEQ ID NO: 947431 - DNA, 15 bp, Homo sapiens
ctcctaatggaaaca

SEQ ID NO: 947432 - DNA, 15 bp, Homo sapiens
cctcctaatggaaac

SEQ ID NO: 947433 - DNA, 15 bp, Homo sapiens
tcctcctaatggaaa

SEQ ID NO: 947434 - DNA, 15 bp, Homo sapiens
ttcctcctaatggaa

SEQ ID NO: 947435 - DNA, 15 bp, Homo sapiens
tttcctcctaatgga

SEQ ID NO: 947436 - DNA, 15 bp, Homo sapiens
atttcctcctaatgg

SEQ ID NO: 947437 - DNA, 15 bp, Homo sapiens
tatttcctcctaatg

SEQ ID NO: 947438 - DNA, 15 bp, Homo sapiens
ttatttcctcctaat

SEQ ID NO: 947439 - DNA, 15 bp, Homo sapiens
tttatttcctcctaa

SEQ ID NO: 947440 - DNA, 15 bp, Homo sapiens
ctttatttcctccta

SEQ ID NO: 947441 - DNA, 15 bp, Homo sapiens
tctttatttcctcct

SEQ ID NO: 947442 - DNA, 15 bp, Homo sapiens
ttctttatttcctcc

SEQ ID NO: 947443 - DNA, 15 bp, Homo sapiens
cttctttatttcctc

SEQ ID NO: 947444 - DNA, 15 bp, Homo sapiens
gcttctttatttcct

SEQ ID NO: 947445 - DNA, 15 bp, Homo sapiens
agcttctttatttcc

SEQ ID NO: 947446 - DNA, 15 bp, Homo sapiens
cagcttctttatttc

SEQ ID NO: 947447 - DNA, 15 bp, Homo sapiens
tcagcttctttattt

SEQ ID NO: 947448 - DNA, 15 bp, Homo sapiens
ttcagcttctttatt

SEQ ID NO: 947449 - DNA, 15 bp, Homo sapiens
tttcagcttctttat

SEQ ID NO: 947450 - DNA, 15 bp, Homo sapiens
ttttcagcttcttta

SEQ ID NO: 947451 - DNA, 15 bp, Homo sapiens
tttttcagcttcttt

SEQ ID NO: 947452 - DNA, 15 bp, Homo sapiens
ttttttcagcttctt

SEQ ID NO: 947453 - DNA, 15 bp, Homo sapiens
cttttttcagcttct

SEQ ID NO: 947454 - DNA, 15 bp, Homo sapiens
tcttttttcagcttc

SEQ ID NO: 947455 - DNA, 15 bp, Homo sapiens
ttcttttttcagctt

SEQ ID NO: 947456 - DNA, 15 bp, Homo sapiens
gttcttttttcagct

SEQ ID NO: 947457 - DNA, 15 bp, Homo sapiens
agttcttttttcagc

SEQ ID NO: 947458 - DNA, 15 bp, Homo sapiens
cagttcttttttcag

SEQ ID NO: 947459 - DNA, 15 bp, Homo sapiens
ccagttcttttttca

SEQ ID NO: 947460 - DNA, 15 bp, Homo sapiens
tccagttcttttttc

SEQ ID NO: 947461 - DNA, 15 bp, Homo sapiens
ttccagttctttttt

SEQ ID NO: 947462 - DNA, 15 bp, Homo sapiens
tttccagttcttttt

SEQ ID NO: 947463 - DNA, 15 bp, Homo sapiens
ttttccagttctttt

SEQ ID NO: 947464 - DNA, 15 bp, Homo sapiens
attttccagttcttt

SEQ ID NO: 947465 - DNA, 15 bp, Homo sapiens
aattttccagttctt

SEQ ID NO: 947466 - DNA, 15 bp, Homo sapiens
aaattttccagttct

SEQ ID NO: 947467 - DNA, 15 bp, Homo sapiens
aaaattttccagttc

SEQ ID NO: 947468 - DNA, 15 bp, Homo sapiens
caaaattttccagtt

SEQ ID NO: 947469 - DNA, 15 bp, Homo sapiens
tcaaaattttccagt

SEQ ID NO: 947470 - DNA, 15 bp, Homo sapiens
atcaaaattttccag

SEQ ID NO: 947471 - DNA, 15 bp, Homo sapiens
gatcaaaattttcca

SEQ ID NO: 947472 - DNA, 15 bp, Homo sapiens
ggatcaaaattttcc

SEQ ID NO: 947473 - DNA, 15 bp, Homo sapiens
aggatcaaaattttc

SEQ ID NO: 947474 - DNA, 15 bp, Homo sapiens
aaggatcaaaatttt

SEQ ID NO: 947475 - DNA, 15 bp, Homo sapiens
gaaggatcaaaattt

SEQ ID NO: 947476 - DNA, 15 bp, Homo sapiens
tgaaggatcaaaatt

SEQ ID NO: 947477 - DNA, 15 bp, Homo sapiens
atgaaggatcaaaat

SEQ ID NO: 947478 - DNA, 15 bp, Homo sapiens
aatgaaggatcaaaa

SEQ ID NO: 947479 - DNA, 15 bp, Homo sapiens
aaatgaaggatcaaa

SEQ ID NO: 947480 - DNA, 15 bp, Homo sapiens
aaaatgaaggatcaa

SEQ ID NO: 947481 - DNA, 15 bp, Homo sapiens
aaaaatgaaggatca

SEQ ID NO: 947482 - DNA, 15 bp, Homo sapiens
aaaaaatgaaggatc

SEQ ID NO: 947483 - DNA, 15 bp, Homo sapiens
caaaaaatgaaggat

SEQ ID NO: 947484 - DNA, 15 bp, Homo sapiens
tcaaaaaatgaagga

SEQ ID NO: 947485 - DNA, 15 bp, Homo sapiens
ttcaaaaaatgaagg

SEQ ID NO: 947486 - DNA, 15 bp, Homo sapiens
cttcaaaaaatgaag

SEQ ID NO: 947487 - DNA, 15 bp, Homo sapiens
tcttcaaaaaatgaa

SEQ ID NO: 947488 - DNA, 15 bp, Homo sapiens
ttcttcaaaaaatga

SEQ ID NO: 947489 - DNA, 15 bp, Homo sapiens
tttcttcaaaaaatg

SEQ ID NO: 947490 - DNA, 15 bp, Homo sapiens
atttcttcaaaaaat

SEQ ID NO: 947491 - DNA, 15 bp, Homo sapiens
aatttcttcaaaaaa

SEQ ID NO: 947492 - DNA, 15 bp, Homo sapiens
caatttcttcaaaaa

SEQ ID NO: 947493 - DNA, 15 bp, Homo sapiens
tcaatttcttcaaaa

SEQ ID NO: 947494 - DNA, 15 bp, Homo sapiens
ttcaatttcttcaaa

SEQ ID NO: 947495 - DNA, 15 bp, Homo sapiens
cttcaatttcttcaa

SEQ ID NO: 947496 - DNA, 15 bp, Homo sapiens
tcttcaatttcttca

SEQ ID NO: 947497 - DNA, 15 bp, Homo sapiens
atcttcaatttcttc

SEQ ID NO: 947498 - DNA, 15 bp, Homo sapiens
gatcttcaatttctt

SEQ ID NO: 947499 - DNA, 15 bp, Homo sapiens
agatcttcaatttct

SEQ ID NO: 947500 - DNA, 15 bp, Homo sapiens
aagatcttcaatttc

SEQ ID NO: 947501 - DNA, 15 bp, Homo sapiens
taagatcttcaattt

SEQ ID NO: 947502 - DNA, 15 bp, Homo sapiens
ttaagatcttcaatt

SEQ ID NO: 947503 - DNA, 15 bp, Homo sapiens
cttaagatcttcaat

SEQ ID NO: 947504 - DNA, 15 bp, Homo sapiens
acttaagatcttcaa

SEQ ID NO: 947505 - DNA, 15 bp, Homo sapiens
tacttaagatcttca

SEQ ID NO: 947506 - DNA, 15 bp, Homo sapiens
atacttaagatcttc

SEQ ID NO: 947507 - DNA, 15 bp, Homo sapiens
tatacttaagatctt

SEQ ID NO: 947508 - DNA, 15 bp, Homo sapiens
ttatacttaagatct

SEQ ID NO: 947509 - DNA, 15 bp, Homo sapiens
attatacttaagatc

SEQ ID NO: 947510 - DNA, 15 bp, Homo sapiens
aattatacttaagat

SEQ ID NO: 947511 - DNA, 15 bp, Homo sapiens
taattatacttaaga

SEQ ID NO: 947512 - DNA, 15 bp, Homo sapiens
gtaattatacttaag

SEQ ID NO: 947513 - DNA, 15 bp, Homo sapiens
tgtaattatacttaa

SEQ ID NO: 947514 - DNA, 15 bp, Homo sapiens
ttgtaattatactta

SEQ ID NO: 947515 - DNA, 15 bp, Homo sapiens
cttgtaattatactt

SEQ ID NO: 947516 - DNA, 15 bp, Homo sapiens
ccttgtaattatact

SEQ ID NO: 947517 - DNA, 15 bp, Homo sapiens
tccttgtaattatac

SEQ ID NO: 947518 - DNA, 15 bp, Homo sapiens
ttccttgtaattata

SEQ ID NO: 947519 - DNA, 15 bp, Homo sapiens
cttccttgtaattat

SEQ ID NO: 947520 - DNA, 15 bp, Homo sapiens
tcttccttgtaatta

SEQ ID NO: 947521 - DNA, 15 bp, Homo sapiens
ttcttccttgtaatt

SEQ ID NO: 947522 - DNA, 15 bp, Homo sapiens
cttcttccttgtaat

SEQ ID NO: 947523 - DNA, 15 bp, Homo sapiens
acttcttccttgtaa

SEQ ID NO: 947524 - DNA, 15 bp, Homo sapiens
cacttcttccttgta

SEQ ID NO: 947525 - DNA, 15 bp, Homo sapiens
tcacttcttccttgt

SEQ ID NO: 947526 - DNA, 15 bp, Homo sapiens
ttcacttcttccttg

SEQ ID NO: 947527 - DNA, 15 bp, Homo sapiens
cttcacttcttcctt

SEQ ID NO: 947528 - DNA, 15 bp, Homo sapiens
tcttcacttcttcct

SEQ ID NO: 947529 - DNA, 15 bp, Homo sapiens
ttcttcacttcttcc

SEQ ID NO: 947530 - DNA, 15 bp, Homo sapiens
cttcttcacttcttc

SEQ ID NO: 947531 - DNA, 15 bp, Homo sapiens
tcttcttcacttctt

SEQ ID NO: 947532 - DNA, 15 bp, Homo sapiens
ttcttcttcacttct

SEQ ID NO: 947533 - DNA, 15 bp, Homo sapiens
attcttcttcacttc

SEQ ID NO: 947534 - DNA, 15 bp, Homo sapiens
tattcttcttcactt

SEQ ID NO: 947535 - DNA, 15 bp, Homo sapiens
atattcttcttcact

SEQ ID NO: 947536 - DNA, 15 bp, Homo sapiens
aatattcttcttcac

SEQ ID NO: 947537 - DNA, 15 bp, Homo sapiens
gaatattcttcttca

SEQ ID NO: 947538 - DNA, 15 bp, Homo sapiens
agaatattcttcttc

SEQ ID NO: 947539 - DNA, 15 bp, Homo sapiens
gagaatattcttctt

SEQ ID NO: 947540 - DNA, 15 bp, Homo sapiens
agagaatattcttct

SEQ ID NO: 947541 - DNA, 15 bp, Homo sapiens
aagagaatattcttc

SEQ ID NO: 947542 - DNA, 15 bp, Homo sapiens
taagagaatattctt

SEQ ID NO: 947543 - DNA, 15 bp, Homo sapiens
ctaagagaatattct

SEQ ID NO: 947544 - DNA, 15 bp, Homo sapiens
tctaagagaatattc

SEQ ID NO: 947545 - DNA, 15 bp, Homo sapiens
ttctaagagaatatt

SEQ ID NO: 947546 - DNA, 15 bp, Homo sapiens
cttctaagagaatat

SEQ ID NO: 947547 - DNA, 15 bp, Homo sapiens
tcttctaagagaata

SEQ ID NO: 947548 - DNA, 15 bp, Homo sapiens
ctcttctaagagaat

SEQ ID NO: 947549 - DNA, 15 bp, Homo sapiens
tctcttctaagagaa

SEQ ID NO: 947550 - DNA, 15 bp, Homo sapiens
ttctcttctaagaga

SEQ ID NO: 947551 - DNA, 15 bp, Homo sapiens
cttctcttctaagag

SEQ ID NO: 947552 - DNA, 15 bp, Homo sapiens
ccttctcttctaaga

SEQ ID NO: 947553 - DNA, 15 bp, Homo sapiens
accttctcttctaag

SEQ ID NO: 947554 - DNA, 15 bp, Homo sapiens
taccttctcttctaa

SEQ ID NO: 947555 - DNA, 15 bp, Homo sapiens
ttaccttctcttcta

SEQ ID NO: 947556 - DNA, 15 bp, Homo sapiens
tttaccttctcttct

SEQ ID NO: 947557 - DNA, 15 bp, Homo sapiens
ttttaccttctcttc

SEQ ID NO: 947558 - DNA, 15 bp, Homo sapiens
tttttaccttctctt

SEQ ID NO: 947559 - DNA, 15 bp, Homo sapiens
ttttttaccttctct

SEQ ID NO: 947560 - DNA, 15 bp, Homo sapiens
tttttttaccttctc

SEQ ID NO: 947561 - DNA, 15 bp, Homo sapiens
gtttttttaccttct

SEQ ID NO: 947562 - DNA, 15 bp, Homo sapiens
agtttttttaccttc

SEQ ID NO: 947563 - DNA, 15 bp, Homo sapiens
aagtttttttacctt

SEQ ID NO: 947564 - DNA, 15 bp, Homo sapiens
aaagtttttttacct

SEQ ID NO: 947565 - DNA, 15 bp, Homo sapiens
gaaagtttttttacc

SEQ ID NO: 947566 - DNA, 15 bp, Homo sapiens
tgaaagtttttttac

SEQ ID NO: 947567 - DNA, 15 bp, Homo sapiens
ctgaaagttttttta

SEQ ID NO: 947568 - DNA, 15 bp, Homo sapiens
tctgaaagttttttt

SEQ ID NO: 947569 - DNA, 15 bp, Homo sapiens
ttctgaaagtttttt

SEQ ID NO: 947570 - DNA, 15 bp, Homo sapiens
gttctgaaagttttt

SEQ ID NO: 947571 - DNA, 15 bp, Homo sapiens
tgttctgaaagtttt

SEQ ID NO: 947572 - DNA, 15 bp, Homo sapiens
ttgttctgaaagttt

SEQ ID NO: 947573 - DNA, 15 bp, Homo sapiens
attgttctgaaagtt

SEQ ID NO: 947574 - DNA, 15 bp, Homo sapiens
aattgttctgaaagt

SEQ ID NO: 947575 - DNA, 15 bp, Homo sapiens
caattgttctgaaag

SEQ ID NO: 947576 - DNA, 15 bp, Homo sapiens
ccaattgttctgaaa

SEQ ID NO: 947577 - DNA, 15 bp, Homo sapiens
cccaattgttctgaa

SEQ ID NO: 947578 - DNA, 15 bp, Homo sapiens
tcccaattgttctga

SEQ ID NO: 947579 - DNA, 15 bp, Homo sapiens
ctcccaattgttctg

SEQ ID NO: 947580 - DNA, 15 bp, Homo sapiens
actcccaattgttct

SEQ ID NO: 947581 - DNA, 15 bp, Homo sapiens
aactcccaattgttc

SEQ ID NO: 947582 - DNA, 15 bp, Homo sapiens
caactcccaattgtt

SEQ ID NO: 947583 - DNA, 15 bp, Homo sapiens
tcaactcccaattgt

SEQ ID NO: 947584 - DNA, 15 bp, Homo sapiens
ttcaactcccaattg

SEQ ID NO: 947585 - DNA, 15 bp, Homo sapiens
attcaactcccaatt

SEQ ID NO: 947586 - DNA, 15 bp, Homo sapiens
aattcaactcccaat

SEQ ID NO: 947587 - DNA, 15 bp, Homo sapiens
taattcaactcccaa

SEQ ID NO: 947588 - DNA, 15 bp, Homo sapiens
ttaattcaactccca

SEQ ID NO: 947589 - DNA, 15 bp, Homo sapiens
gttaattcaactccc

SEQ ID NO: 947590 - DNA, 15 bp, Homo sapiens
agttaattcaactcc

SEQ ID NO: 947591 - DNA, 15 bp, Homo sapiens
tagttaattcaactc

SEQ ID NO: 947592 - DNA, 15 bp, Homo sapiens
ctagttaattcaact

SEQ ID NO: 947593 - DNA, 15 bp, Homo sapiens
gctagttaattcaac

SEQ ID NO: 947594 - DNA, 15 bp, Homo sapiens
ggctagttaattcaa

SEQ ID NO: 947595 - DNA, 15 bp, Homo sapiens
gggctagttaattca

SEQ ID NO: 947596 - DNA, 15 bp, Homo sapiens
agggctagttaattc

SEQ ID NO: 947597 - DNA, 15 bp, Homo sapiens
cagggctagttaatt

SEQ ID NO: 947598 - DNA, 15 bp, Homo sapiens
acagggctagttaat

SEQ ID NO: 947599 - DNA, 15 bp, Homo sapiens
aacagggctagttaa

SEQ ID NO: 947600 - DNA, 15 bp, Homo sapiens
caacagggctagtta

SEQ ID NO: 947601 - DNA, 15 bp, Homo sapiens
gcaacagggctagtt

SEQ ID NO: 947602 - DNA, 15 bp, Homo sapiens
agcaacagggctagt

SEQ ID NO: 947603 - DNA, 15 bp, Homo sapiens
cagcaacagggctag

SEQ ID NO: 947604 - DNA, 15 bp, Homo sapiens
gcagcaacagggcta

SEQ ID NO: 947605 - DNA, 15 bp, Homo sapiens
agcagcaacagggct

SEQ ID NO: 947606 - DNA, 15 bp, Homo sapiens
aagcagcaacagggc

SEQ ID NO: 947607 - DNA, 15 bp, Homo sapiens
gaagcagcaacaggg

SEQ ID NO: 947608 - DNA, 15 bp, Homo sapiens
agaagcagcaacagg

SEQ ID NO: 947609 - DNA, 15 bp, Homo sapiens
cagaagcagcaacag

SEQ ID NO: 947610 - DNA, 15 bp, Homo sapiens
tcagaagcagcaaca

SEQ ID NO: 947611 - DNA, 15 bp, Homo sapiens
ttcagaagcagcaac

SEQ ID NO: 947612 - DNA, 15 bp, Homo sapiens
cttcagaagcagcaa

SEQ ID NO: 947613 - DNA, 15 bp, Homo sapiens
tcttcagaagcagca

SEQ ID NO: 947614 - DNA, 15 bp, Homo sapiens
ctcttcagaagcagc

SEQ ID NO: 947615 - DNA, 15 bp, Homo sapiens
actcttcagaagcag

SEQ ID NO: 947616 - DNA, 15 bp, Homo sapiens
aactcttcagaagca

SEQ ID NO: 947617 - DNA, 15 bp, Homo sapiens
aaactcttcagaagc

SEQ ID NO: 947618 - DNA, 15 bp, Homo sapiens
caaactcttcagaag

SEQ ID NO: 947619 - DNA, 15 bp, Homo sapiens
tcaaactcttcagaa

SEQ ID NO: 947620 - DNA, 15 bp, Homo sapiens
ttcaaactcttcaga

SEQ ID NO: 947621 - DNA, 15 bp, Homo sapiens
cttcaaactcttcag

SEQ ID NO: 947622 - DNA, 15 bp, Homo sapiens
tcttcaaactcttca

SEQ ID NO: 947623 - DNA, 15 bp, Homo sapiens
atcttcaaactcttc

SEQ ID NO: 947624 - DNA, 15 bp, Homo sapiens
catcttcaaactctt

SEQ ID NO: 947625 - DNA, 15 bp, Homo sapiens
tcatcttcaaactct

SEQ ID NO: 947626 - DNA, 15 bp, Homo sapiens
ttcatcttcaaactc

SEQ ID NO: 947627 - DNA, 15 bp, Homo sapiens
cttcatcttcaaact

SEQ ID NO: 947628 - DNA, 15 bp, Homo sapiens
tcttcatcttcaaac

SEQ ID NO: 947629 - DNA, 15 bp, Homo sapiens
ttcttcatcttcaaa

SEQ ID NO: 947630 - DNA, 15 bp, Homo sapiens
cttcttcatcttcaa

SEQ ID NO: 947631 - DNA, 15 bp, Homo sapiens
tcttcttcatcttca

SEQ ID NO: 947632 - DNA, 15 bp, Homo sapiens
ttcttcttcatcttc

SEQ ID NO: 947633 - DNA, 15 bp, Homo sapiens
tttcttcttcatctt

SEQ ID NO: 947634 - DNA, 15 bp, Homo sapiens
ctttcttcttcatct

SEQ ID NO: 947635 - DNA, 15 bp, Homo sapiens
actttcttcttcatc

SEQ ID NO: 947636 - DNA, 15 bp, Homo sapiens
gactttcttcttcat

SEQ ID NO: 947637 - DNA, 15 bp, Homo sapiens
ggactttcttcttca

SEQ ID NO: 947638 - DNA, 15 bp, Homo sapiens
aggactttcttcttc

SEQ ID NO: 947639 - DNA, 15 bp, Homo sapiens
caggactttcttctt

SEQ ID NO: 947640 - DNA, 15 bp, Homo sapiens
acaggactttcttct

SEQ ID NO: 947641 - DNA, 15 bp, Homo sapiens
aacaggactttcttc

SEQ ID NO: 947642 - DNA, 15 bp, Homo sapiens
taacaggactttctt

SEQ ID NO: 947643 - DNA, 15 bp, Homo sapiens
ttaacaggactttct

SEQ ID NO: 947644 - DNA, 15 bp, Homo sapiens
attaacaggactttc

SEQ ID NO: 947645 - DNA, 15 bp, Homo sapiens
aattaacaggacttt

SEQ ID NO: 947646 - DNA, 15 bp, Homo sapiens
aaattaacaggactt

SEQ ID NO: 947647 - DNA, 15 bp, Homo sapiens
gaaattaacaggact

SEQ ID NO: 947648 - DNA, 15 bp, Homo sapiens
ggaaattaacaggac

SEQ ID NO: 947649 - DNA, 15 bp, Homo sapiens
gggaaattaacagga

SEQ ID NO: 947650 - DNA, 15 bp, Homo sapiens
ggggaaattaacagg

SEQ ID NO: 947651 - DNA, 15 bp, Homo sapiens
tggggaaattaacag

SEQ ID NO: 947652 - DNA, 15 bp, Homo sapiens
atggggaaattaaca

SEQ ID NO: 947653 - DNA, 15 bp, Homo sapiens
aatggggaaattaac

SEQ ID NO: 947654 - DNA, 15 bp, Homo sapiens
aaatggggaaattaa

SEQ ID NO: 947655 - DNA, 15 bp, Homo sapiens
taaatggggaaatta

SEQ ID NO: 947656 - DNA, 15 bp, Homo sapiens
gtaaatggggaaatt

SEQ ID NO: 947657 - DNA, 15 bp, Homo sapiens
agtaaatggggaaat

SEQ ID NO: 947658 - DNA, 15 bp, Homo sapiens
tagtaaatggggaaa

SEQ ID NO: 947659 - DNA, 15 bp, Homo sapiens
ttagtaaatggggaa

SEQ ID NO: 947660 - DNA, 15 bp, Homo sapiens
tttagtaaatgggga

SEQ ID NO: 947661 - DNA, 15 bp, Homo sapiens
ctttagtaaatgggg

SEQ ID NO: 947662 - DNA, 15 bp, Homo sapiens
cctttagtaaatggg

SEQ ID NO: 947663 - DNA, 15 bp, Homo sapiens
acctttagtaaatgg

SEQ ID NO: 947664 - DNA, 15 bp, Homo sapiens
gacctttagtaaatg

SEQ ID NO: 947665 - DNA, 15 bp, Homo sapiens
tgacctttagtaaat

SEQ ID NO: 947666 - DNA, 15 bp, Homo sapiens
gtgacctttagtaaa

SEQ ID NO: 947667 - DNA, 15 bp, Homo sapiens
ggtgacctttagtaa

SEQ ID NO: 947668 - DNA, 15 bp, Homo sapiens
aggtgacctttagta

SEQ ID NO: 947669 - DNA, 15 bp, Homo sapiens
taggtgacctttagt

SEQ ID NO: 947670 - DNA, 15 bp, Homo sapiens
ataggtgacctttag

SEQ ID NO: 947671 - DNA, 15 bp, Homo sapiens
tataggtgaccttta

SEQ ID NO: 947672 - DNA, 15 bp, Homo sapiens
ttataggtgaccttt

SEQ ID NO: 947673 - DNA, 15 bp, Homo sapiens
tttataggtgacctt

SEQ ID NO: 947674 - DNA, 15 bp, Homo sapiens
gtttataggtgacct

SEQ ID NO: 947675 - DNA, 15 bp, Homo sapiens
agtttataggtgacc

SEQ ID NO: 947676 - DNA, 15 bp, Homo sapiens
aagtttataggtgac

SEQ ID NO: 947677 - DNA, 15 bp, Homo sapiens
aaagtttataggtga

SEQ ID NO: 947678 - DNA, 15 bp, Homo sapiens
caaagtttataggtg

SEQ ID NO: 947679 - DNA, 15 bp, Homo sapiens
acaaagtttataggt

SEQ ID NO: 947680 - DNA, 15 bp, Homo sapiens
aacaaagtttatagg

SEQ ID NO: 947681 - DNA, 15 bp, Homo sapiens
aaacaaagtttatag

SEQ ID NO: 947682 - DNA, 15 bp, Homo sapiens
gaaacaaagtttata

SEQ ID NO: 947683 - DNA, 15 bp, Homo sapiens
tgaaacaaagtttat

SEQ ID NO: 947684 - DNA, 15 bp, Homo sapiens
atgaaacaaagttta

SEQ ID NO: 947685 - DNA, 15 bp, Homo sapiens
aatgaaacaaagttt

SEQ ID NO: 947686 - DNA, 15 bp, Homo sapiens
aaatgaaacaaagtt

SEQ ID NO: 947687 - DNA, 15 bp, Homo sapiens
taaatgaaacaaagt

SEQ ID NO: 947688 - DNA, 15 bp, Homo sapiens
ttaaatgaaacaaag

SEQ ID NO: 947689 - DNA, 15 bp, Homo sapiens
gttaaatgaaacaaa

SEQ ID NO: 947690 - DNA, 15 bp, Homo sapiens
agttaaatgaaacaa

SEQ ID NO: 947691 - DNA, 15 bp, Homo sapiens
tagttaaatgaaaca

SEQ ID NO: 947692 - DNA, 15 bp, Homo sapiens
atagttaaatgaaac

SEQ ID NO: 947693 - DNA, 15 bp, Homo sapiens
aatagttaaatgaaa

SEQ ID NO: 947694 - DNA, 15 bp, Homo sapiens
aaatagttaaatgaa

SEQ ID NO: 947695 - DNA, 15 bp, Homo sapiens
taaatagttaaatga

SEQ ID NO: 947696 - DNA, 15 bp, Homo sapiens
ataaatagttaaatg

SEQ ID NO: 947697 - DNA, 15 bp, Homo sapiens
aataaatagttaaat

SEQ ID NO: 947698 - DNA, 15 bp, Homo sapiens
taataaatagttaaa

SEQ ID NO: 947699 - DNA, 15 bp, Homo sapiens
ttaataaatagttaa

SEQ ID NO: 947700 - DNA, 15 bp, Homo sapiens
gttaataaatagtta

SEQ ID NO: 947701 - DNA, 15 bp, Homo sapiens
agttaataaatagtt

SEQ ID NO: 947702 - DNA, 15 bp, Homo sapiens
aagttaataaatagt

SEQ ID NO: 947703 - DNA, 15 bp, Homo sapiens
aaagttaataaatag

SEQ ID NO: 947704 - DNA, 15 bp, Homo sapiens
taaagttaataaata

SEQ ID NO: 947705 - DNA, 15 bp, Homo sapiens
ataaagttaataaat

SEQ ID NO: 947706 - DNA, 15 bp, Homo sapiens
tataaagttaataaa

SEQ ID NO: 947707 - DNA, 15 bp, Homo sapiens
ttataaagttaataa

SEQ ID NO: 947708 - DNA, 15 bp, Homo sapiens
cttataaagttaata

SEQ ID NO: 947709 - DNA, 15 bp, Homo sapiens
acttataaagttaat

SEQ ID NO: 947710 - DNA, 15 bp, Homo sapiens
aacttataaagttaa

SEQ ID NO: 947711 - DNA, 15 bp, Homo sapiens
taacttataaagtta

SEQ ID NO: 947712 - DNA, 15 bp, Homo sapiens
ttaacttataaagtt

SEQ ID NO: 947713 - DNA, 15 bp, Homo sapiens
tttaacttataaagt

SEQ ID NO: 947714 - DNA, 15 bp, Homo sapiens
atttaacttataaag

SEQ ID NO: 947715 - DNA, 15 bp, Homo sapiens
tatttaacttataaa

SEQ ID NO: 947716 - DNA, 15 bp, Homo sapiens
atatttaacttataa

SEQ ID NO: 947717 - DNA, 15 bp, Homo sapiens
tatatttaacttata

SEQ ID NO: 947718 - DNA, 15 bp, Homo sapiens
gtatatttaacttat

SEQ ID NO: 947719 - DNA, 15 bp, Homo sapiens
agtatatttaactta

SEQ ID NO: 947720 - DNA, 15 bp, Homo sapiens
aagtatatttaactt

SEQ ID NO: 947721 - DNA, 15 bp, Homo sapiens
caagtatatttaact

SEQ ID NO: 947722 - DNA, 15 bp, Homo sapiens
ccaagtatatttaac

SEQ ID NO: 947723 - DNA, 15 bp, Homo sapiens
tccaagtatatttaa

SEQ ID NO: 947724 - DNA, 15 bp, Homo sapiens
ttccaagtatattta

SEQ ID NO: 947725 - DNA, 15 bp, Homo sapiens
tttccaagtatattt

SEQ ID NO: 947726 - DNA, 15 bp, Homo sapiens
atttccaagtatatt

SEQ ID NO: 947727 - DNA, 15 bp, Homo sapiens
tatttccaagtatat

SEQ ID NO: 947728 - DNA, 15 bp, Homo sapiens
ttatttccaagtata

SEQ ID NO: 947729 - DNA, 15 bp, Homo sapiens
cttatttccaagtat

SEQ ID NO: 947730 - DNA, 15 bp, Homo sapiens
gcttatttccaagta

SEQ ID NO: 947731 - DNA, 15 bp, Homo sapiens
tgcttatttccaagt

SEQ ID NO: 947732 - DNA, 15 bp, Homo sapiens
ctgcttatttccaag

SEQ ID NO: 947733 - DNA, 15 bp, Homo sapiens
actgcttatttccaa

SEQ ID NO: 947734 - DNA, 15 bp, Homo sapiens
aactgcttatttcca

SEQ ID NO: 947735 - DNA, 15 bp, Homo sapiens
gaactgcttatttcc

SEQ ID NO: 947736 - DNA, 15 bp, Homo sapiens
agaactgcttatttc

SEQ ID NO: 947737 - DNA, 15 bp, Homo sapiens
gagaactgcttattt

SEQ ID NO: 947738 - DNA, 15 bp, Homo sapiens
ggagaactgcttatt

SEQ ID NO: 947739 - DNA, 15 bp, Homo sapiens
cggagaactgcttat

SEQ ID NO: 947740 - DNA, 15 bp, Homo sapiens
tcggagaactgctta

SEQ ID NO: 947741 - DNA, 15 bp, Homo sapiens
ttcggagaactgctt

SEQ ID NO: 947742 - DNA, 15 bp, Homo sapiens
gttcggagaactgct

SEQ ID NO: 947743 - DNA, 15 bp, Homo sapiens
agttcggagaactgc

SEQ ID NO: 947744 - DNA, 15 bp, Homo sapiens
cagttcggagaactg

SEQ ID NO: 947745 - DNA, 15 bp, Homo sapiens
acagttcggagaact

SEQ ID NO: 947746 - DNA, 15 bp, Homo sapiens
tacagttcggagaac

SEQ ID NO: 947747 - DNA, 15 bp, Homo sapiens
ctacagttcggagaa

SEQ ID NO: 947748 - DNA, 15 bp, Homo sapiens
actacagttcggaga

SEQ ID NO: 947749 - DNA, 15 bp, Homo sapiens
tactacagttcggag

SEQ ID NO: 947750 - DNA, 15 bp, Homo sapiens
atactacagttcgga

SEQ ID NO: 947751 - DNA, 15 bp, Homo sapiens
aatactacagttcgg

SEQ ID NO: 947752 - DNA, 15 bp, Homo sapiens
aaatactacagttcg

SEQ ID NO: 947753 - DNA, 15 bp, Homo sapiens
gaaatactacagttc

SEQ ID NO: 947754 - DNA, 15 bp, Homo sapiens
ggaaatactacagtt

SEQ ID NO: 947755 - DNA, 15 bp, Homo sapiens
aggaaatactacagt

SEQ ID NO: 947756 - DNA, 15 bp, Homo sapiens
aaggaaatactacag

SEQ ID NO: 947757 - DNA, 15 bp, Homo sapiens
gaaggaaatactaca

SEQ ID NO: 947758 - DNA, 15 bp, Homo sapiens
agaaggaaatactac

SEQ ID NO: 947759 - DNA, 15 bp, Homo sapiens
gagaaggaaatacta

SEQ ID NO: 947760 - DNA, 15 bp, Homo sapiens
tgagaaggaaatact

SEQ ID NO: 947761 - DNA, 15 bp, Homo sapiens
gtgagaaggaaatac

SEQ ID NO: 947762 - DNA, 15 bp, Homo sapiens
agtgagaaggaaata

SEQ ID NO: 947763 - DNA, 15 bp, Homo sapiens
tagtgagaaggaaat

SEQ ID NO: 947764 - DNA, 15 bp, Homo sapiens
gtagtgagaaggaaa

SEQ ID NO: 947765 - DNA, 15 bp, Homo sapiens
ggtagtgagaaggaa

SEQ ID NO: 947766 - DNA, 15 bp, Homo sapiens
aggtagtgagaagga

SEQ ID NO: 947767 - DNA, 15 bp, Homo sapiens
aaggtagtgagaagg

SEQ ID NO: 947768 - DNA, 15 bp, Homo sapiens
caaggtagtgagaag

SEQ ID NO: 947769 - DNA, 15 bp, Homo sapiens
acaaggtagtgagaa

SEQ ID NO: 947770 - DNA, 15 bp, Homo sapiens
tacaaggtagtgaga

SEQ ID NO: 947771 - DNA, 15 bp, Homo sapiens
gtacaaggtagtgag

SEQ ID NO: 947772 - DNA, 15 bp, Homo sapiens
ggtacaaggtagtga

SEQ ID NO: 947773 - DNA, 15 bp, Homo sapiens
aggtacaaggtagtg

SEQ ID NO: 947774 - DNA, 15 bp, Homo sapiens
aaggtacaaggtagt

SEQ ID NO: 947775 - DNA, 15 bp, Homo sapiens
aaaggtacaaggtag

SEQ ID NO: 947776 - DNA, 15 bp, Homo sapiens
taaaggtacaaggta

SEQ ID NO: 947777 - DNA, 15 bp, Homo sapiens
ataaaggtacaaggt

SEQ ID NO: 947778 - DNA, 15 bp, Homo sapiens
tataaaggtacaagg

SEQ ID NO: 947779 - DNA, 15 bp, Homo sapiens
gtataaaggtacaag

SEQ ID NO: 947780 - DNA, 15 bp, Homo sapiens
agtataaaggtacaa

SEQ ID NO: 947781 - DNA, 15 bp, Homo sapiens
aagtataaaggtaca

SEQ ID NO: 947782 - DNA, 15 bp, Homo sapiens
taagtataaaggtac

SEQ ID NO: 947783 - DNA, 15 bp, Homo sapiens
ctaagtataaaggta

SEQ ID NO: 947784 - DNA, 15 bp, Homo sapiens
tctaagtataaaggt

SEQ ID NO: 947785 - DNA, 15 bp, Homo sapiens
atctaagtataaagg

SEQ ID NO: 947786 - DNA, 15 bp, Homo sapiens
aatctaagtataaag

SEQ ID NO: 947787 - DNA, 15 bp, Homo sapiens
caatctaagtataaa

SEQ ID NO: 947788 - DNA, 15 bp, Homo sapiens
ccaatctaagtataa

SEQ ID NO: 947789 - DNA, 15 bp, Homo sapiens
tccaatctaagtata

SEQ ID NO: 947790 - DNA, 15 bp, Homo sapiens
ttccaatctaagtat

SEQ ID NO: 947791 - DNA, 15 bp, Homo sapiens
attccaatctaagta

SEQ ID NO: 947792 - DNA, 15 bp, Homo sapiens
aattccaatctaagt

SEQ ID NO: 947793 - DNA, 15 bp, Homo sapiens
gaattccaatctaag

SEQ ID NO: 947794 - DNA, 15 bp, Homo sapiens
agaattccaatctaa

SEQ ID NO: 947795 - DNA, 15 bp, Homo sapiens
aagaattccaatcta

SEQ ID NO: 947796 - DNA, 15 bp, Homo sapiens
taagaattccaatct

SEQ ID NO: 947797 - DNA, 15 bp, Homo sapiens
ttaagaattccaatc

SEQ ID NO: 947798 - DNA, 15 bp, Homo sapiens
attaagaattccaat

SEQ ID NO: 947799 - DNA, 15 bp, Homo sapiens
tattaagaattccaa

SEQ ID NO: 947800 - DNA, 15 bp, Homo sapiens
ttattaagaattcca

SEQ ID NO: 947801 - DNA, 15 bp, Homo sapiens
tttattaagaattcc

SEQ ID NO: 947802 - DNA, 15 bp, Homo sapiens
atttattaagaattc

SEQ ID NO: 947803 - DNA, 15 bp, Homo sapiens
tatttattaagaatt

SEQ ID NO: 947804 - DNA, 15 bp, Homo sapiens
ttatttattaagaat

SEQ ID NO: 947805 - DNA, 15 bp, Homo sapiens
tttatttattaagaa

SEQ ID NO: 947806 - DNA, 15 bp, Homo sapiens
ttttatttattaaga

SEQ ID NO: 947807 - DNA, 15 bp, Homo sapiens
attttatttattaag

SEQ ID NO: 947808 - DNA, 15 bp, Homo sapiens
aattttatttattaa

SEQ ID NO: 947809 - DNA, 15 bp, Homo sapiens
taattttatttatta

SEQ ID NO: 947810 - DNA, 15 bp, Homo sapiens
ataattttatttatt

SEQ ID NO: 947811 - DNA, 15 bp, Homo sapiens
tataattttatttat

SEQ ID NO: 947812 - DNA, 15 bp, Homo sapiens
atataattttattta

SEQ ID NO: 947813 - DNA, 15 bp, Homo sapiens
catataattttattt

SEQ ID NO: 947814 - DNA, 15 bp, Homo sapiens
tcatataattttatt

SEQ ID NO: 947815 - DNA, 15 bp, Homo sapiens
ttcatataattttat

SEQ ID NO: 947816 - DNA, 15 bp, Homo sapiens
tttcatataatttta

SEQ ID NO: 947817 - DNA, 15 bp, Homo sapiens
atttcatataatttt

SEQ ID NO: 947818 - DNA, 15 bp, Homo sapiens
aatttcatataattt

SEQ ID NO: 947819 - DNA, 15 bp, Homo sapiens
aaatttcatataatt

SEQ ID NO: 947820 - DNA, 15 bp, Homo sapiens
aaaatttcatataat

SEQ ID NO: 947821 - DNA, 15 bp, Homo sapiens
gaaaatttcatataa

SEQ ID NO: 947822 - DNA, 15 bp, Homo sapiens
tgaaaatttcatata

SEQ ID NO: 947823 - DNA, 15 bp, Homo sapiens
ttgaaaatttcatat

SEQ ID NO: 947824 - DNA, 15 bp, Homo sapiens
gttgaaaatttcata

SEQ ID NO: 947825 - DNA, 15 bp, Homo sapiens
agttgaaaatttcat

SEQ ID NO: 947826 - DNA, 15 bp, Homo sapiens
aagttgaaaatttca

SEQ ID NO: 947827 - DNA, 15 bp, Homo sapiens
taagttgaaaatttc

SEQ ID NO: 947828 - DNA, 15 bp, Homo sapiens
ataagttgaaaattt

SEQ ID NO: 947829 - DNA, 15 bp, Homo sapiens
aataagttgaaaatt

SEQ ID NO: 947830 - DNA, 15 bp, Homo sapiens
taataagttgaaaat

SEQ ID NO: 947831 - DNA, 15 bp, Homo sapiens
ataataagttgaaaa

SEQ ID NO: 947832 - DNA, 15 bp, Homo sapiens
tataataagttgaaa

SEQ ID NO: 947833 - DNA, 15 bp, Homo sapiens
ttataataagttgaa

SEQ ID NO: 947834 - DNA, 15 bp, Homo sapiens
tttataataagttga

SEQ ID NO: 947835 - DNA, 15 bp, Homo sapiens
ttttataataagttg

SEQ ID NO: 947836 - DNA, 15 bp, Homo sapiens
cttttataataagtt

SEQ ID NO: 947837 - DNA, 15 bp, Homo sapiens
acttttataataagt

SEQ ID NO: 947838 - DNA, 15 bp, Homo sapiens
tacttttataataag

SEQ ID NO: 947839 - DNA, 15 bp, Homo sapiens
atacttttataataa

SEQ ID NO: 947840 - DNA, 15 bp, Homo sapiens
tatacttttataata

SEQ ID NO: 947841 - DNA, 15 bp, Homo sapiens
atatacttttataat

SEQ ID NO: 947842 - DNA, 15 bp, Homo sapiens
tatatacttttataa

SEQ ID NO: 947843 - DNA, 15 bp, Homo sapiens
gtatatacttttata

SEQ ID NO: 947844 - DNA, 15 bp, Homo sapiens
agtatatacttttat

SEQ ID NO: 947845 - DNA, 15 bp, Homo sapiens
aagtatatactttta

SEQ ID NO: 947846 - DNA, 15 bp, Homo sapiens
caagtatatactttt

SEQ ID NO: 947847 - DNA, 15 bp, Homo sapiens
tcaagtatatacttt

SEQ ID NO: 947848 - DNA, 15 bp, Homo sapiens
ttcaagtatatactt

SEQ ID NO: 947849 - DNA, 15 bp, Homo sapiens
cttcaagtatatact

SEQ ID NO: 947850 - DNA, 15 bp, Homo sapiens
tcttcaagtatatac

SEQ ID NO: 947851 - DNA, 15 bp, Homo sapiens
gtcttcaagtatata

SEQ ID NO: 947852 - DNA, 15 bp, Homo sapiens
agtcttcaagtatat

SEQ ID NO: 947853 - DNA, 15 bp, Homo sapiens
aagtcttcaagtata

SEQ ID NO: 947854 - DNA, 15 bp, Homo sapiens
caagtcttcaagtat

SEQ ID NO: 947855 - DNA, 15 bp, Homo sapiens
acaagtcttcaagta

SEQ ID NO: 947856 - DNA, 15 bp, Homo sapiens
aacaagtcttcaagt

SEQ ID NO: 947857 - DNA, 15 bp, Homo sapiens
taacaagtcttcaag

SEQ ID NO: 947858 - DNA, 15 bp, Homo sapiens
gtaacaagtcttcaa

SEQ ID NO: 947859 - DNA, 15 bp, Homo sapiens
tgtaacaagtcttca

SEQ ID NO: 947860 - DNA, 15 bp, Homo sapiens
ctgtaacaagtcttc

SEQ ID NO: 947861 - DNA, 15 bp, Homo sapiens
gctgtaacaagtctt

SEQ ID NO: 947862 - DNA, 15 bp, Homo sapiens
ggctgtaacaagtct

SEQ ID NO: 947863 - DNA, 15 bp, Homo sapiens
tggctgtaacaagtc

SEQ ID NO: 947864 - DNA, 15 bp, Homo sapiens
atggctgtaacaagt

SEQ ID NO: 947865 - DNA, 15 bp, Homo sapiens
gatggctgtaacaag

SEQ ID NO: 947866 - DNA, 15 bp, Homo sapiens
tgatggctgtaacaa

SEQ ID NO: 947867 - DNA, 15 bp, Homo sapiens
ttgatggctgtaaca

SEQ ID NO: 947868 - DNA, 15 bp, Homo sapiens
tttgatggctgtaac

SEQ ID NO: 947869 - DNA, 15 bp, Homo sapiens
atttgatggctgtaa

SEQ ID NO: 947870 - DNA, 15 bp, Homo sapiens
tatttgatggctgta

SEQ ID NO: 947871 - DNA, 15 bp, Homo sapiens
ctatttgatggctgt

SEQ ID NO: 947872 - DNA, 15 bp, Homo sapiens
cctatttgatggctg

SEQ ID NO: 947873 - DNA, 15 bp, Homo sapiens
gcctatttgatggct

SEQ ID NO: 947874 - DNA, 15 bp, Homo sapiens
tgcctatttgatggc

SEQ ID NO: 947875 - DNA, 15 bp, Homo sapiens
ctgcctatttgatgg

SEQ ID NO: 947876 - DNA, 15 bp, Homo sapiens
actgcctatttgatg

SEQ ID NO: 947877 - DNA, 15 bp, Homo sapiens
cactgcctatttgat

SEQ ID NO: 947878 - DNA, 15 bp, Homo sapiens
tcactgcctatttga

SEQ ID NO: 947879 - DNA, 15 bp, Homo sapiens
ctcactgcctatttg

SEQ ID NO: 947880 - DNA, 15 bp, Homo sapiens
gctcactgcctattt

SEQ ID NO: 947881 - DNA, 15 bp, Homo sapiens
agctcactgcctatt

SEQ ID NO: 947882 - DNA, 15 bp, Homo sapiens
gagctcactgcctat

SEQ ID NO: 947883 - DNA, 15 bp, Homo sapiens
agagctcactgccta

SEQ ID NO: 947884 - DNA, 15 bp, Homo sapiens
cagagctcactgcct

SEQ ID NO: 947885 - DNA, 15 bp, Homo sapiens
ccagagctcactgcc

SEQ ID NO: 947886 - DNA, 15 bp, Homo sapiens
accagagctcactgc

SEQ ID NO: 947887 - DNA, 15 bp, Homo sapiens
caccagagctcactg

SEQ ID NO: 947888 - DNA, 15 bp, Homo sapiens
tcaccagagctcact

SEQ ID NO: 947889 - DNA, 15 bp, Homo sapiens
ttcaccagagctcac

SEQ ID NO: 947890 - DNA, 15 bp, Homo sapiens
attcaccagagctca

SEQ ID NO: 947891 - DNA, 15 bp, Homo sapiens
aattcaccagagctc

SEQ ID NO: 947892 - DNA, 15 bp, Homo sapiens
aaattcaccagagct

SEQ ID NO: 947893 - DNA, 15 bp, Homo sapiens
gaaattcaccagagc

SEQ ID NO: 947894 - DNA, 15 bp, Homo sapiens
agaaattcaccagag

SEQ ID NO: 947895 - DNA, 15 bp, Homo sapiens
gagaaattcaccaga

SEQ ID NO: 947896 - DNA, 15 bp, Homo sapiens
agagaaattcaccag

SEQ ID NO: 947897 - DNA, 15 bp, Homo sapiens
tagagaaattcacca

SEQ ID NO: 947898 - DNA, 15 bp, Homo sapiens
gtagagaaattcacc

SEQ ID NO: 947899 - DNA, 15 bp, Homo sapiens
tgtagagaaattcac

SEQ ID NO: 947900 - DNA, 15 bp, Homo sapiens
atgtagagaaattca

SEQ ID NO: 947901 - DNA, 15 bp, Homo sapiens
aatgtagagaaattc

SEQ ID NO: 947902 - DNA, 15 bp, Homo sapiens
gaatgtagagaaatt

SEQ ID NO: 947903 - DNA, 15 bp, Homo sapiens
tgaatgtagagaaat

SEQ ID NO: 947904 - DNA, 15 bp, Homo sapiens
atgaatgtagagaaa

SEQ ID NO: 947905 - DNA, 15 bp, Homo sapiens
tatgaatgtagagaa

SEQ ID NO: 947906 - DNA, 15 bp, Homo sapiens
ttatgaatgtagaga

SEQ ID NO: 947907 - DNA, 15 bp, Homo sapiens
attatgaatgtagag

SEQ ID NO: 947908 - DNA, 15 bp, Homo sapiens
cattatgaatgtaga

SEQ ID NO: 947909 - DNA, 15 bp, Homo sapiens
gcattatgaatgtag

SEQ ID NO: 947910 - DNA, 15 bp, Homo sapiens
agcattatgaatgta

SEQ ID NO: 947911 - DNA, 15 bp, Homo sapiens
aagcattatgaatgt

SEQ ID NO: 947912 - DNA, 15 bp, Homo sapiens
aaagcattatgaatg

SEQ ID NO: 947913 - DNA, 15 bp, Homo sapiens
taaagcattatgaat

SEQ ID NO: 947914 - DNA, 15 bp, Homo sapiens
ttaaagcattatgaa

SEQ ID NO: 947915 - DNA, 15 bp, Homo sapiens
cttaaagcattatga

SEQ ID NO: 947916 - DNA, 15 bp, Homo sapiens
acttaaagcattatg

SEQ ID NO: 947917 - DNA, 15 bp, Homo sapiens
aacttaaagcattat

SEQ ID NO: 947918 - DNA, 15 bp, Homo sapiens
aaacttaaagcatta

SEQ ID NO: 947919 - DNA, 15 bp, Homo sapiens
aaaacttaaagcatt

SEQ ID NO: 947920 - DNA, 15 bp, Homo sapiens
aaaaacttaaagcat

SEQ ID NO: 947921 - DNA, 15 bp, Homo sapiens
aaaaaacttaaagca

SEQ ID NO: 947922 - DNA, 15 bp, Homo sapiens
taaaaaacttaaagc

SEQ ID NO: 947923 - DNA, 15 bp, Homo sapiens
ttaaaaaacttaaag

SEQ ID NO: 947924 - DNA, 15 bp, Homo sapiens
tttaaaaaacttaaa

SEQ ID NO: 947925 - DNA, 15 bp, Homo sapiens
ctttaaaaaacttaa

SEQ ID NO: 947926 - DNA, 15 bp, Homo sapiens
tctttaaaaaactta

SEQ ID NO: 947927 - DNA, 15 bp, Homo sapiens
ttctttaaaaaactt

SEQ ID NO: 947928 - DNA, 15 bp, Homo sapiens
attctttaaaaaact

SEQ ID NO: 947929 - DNA, 15 bp, Homo sapiens
tattctttaaaaaac

SEQ ID NO: 947930 - DNA, 15 bp, Homo sapiens
atattctttaaaaaa

SEQ ID NO: 947931 - DNA, 15 bp, Homo sapiens
catattctttaaaaa

SEQ ID NO: 947932 - DNA, 15 bp, Homo sapiens
tcatattctttaaaa

SEQ ID NO: 947933 - DNA, 15 bp, Homo sapiens
ctcatattctttaaa

SEQ ID NO: 947934 - DNA, 15 bp, Homo sapiens
cctcatattctttaa

SEQ ID NO: 947935 - DNA, 15 bp, Homo sapiens
ccctcatattcttta

SEQ ID NO: 947936 - DNA, 15 bp, Homo sapiens
accctcatattcttt

SEQ ID NO: 947937 - DNA, 15 bp, Homo sapiens
taccctcatattctt

SEQ ID NO: 947938 - DNA, 15 bp, Homo sapiens
ttaccctcatattct

SEQ ID NO: 947939 - DNA, 15 bp, Homo sapiens
tttaccctcatattc

SEQ ID NO: 947940 - DNA, 15 bp, Homo sapiens
atttaccctcatatt

SEQ ID NO: 947941 - DNA, 15 bp, Homo sapiens
aatttaccctcatat

SEQ ID NO: 947942 - DNA, 15 bp, Homo sapiens
gaatttaccctcata

SEQ ID NO: 947943 - DNA, 15 bp, Homo sapiens
tgaatttaccctcat

SEQ ID NO: 947944 - DNA, 15 bp, Homo sapiens
ctgaatttaccctca

SEQ ID NO: 947945 - DNA, 15 bp, Homo sapiens
gctgaatttaccctc

SEQ ID NO: 947946 - DNA, 15 bp, Homo sapiens
tgctgaatttaccct

SEQ ID NO: 947947 - DNA, 15 bp, Homo sapiens
ttgctgaatttaccc

SEQ ID NO: 947948 - DNA, 15 bp, Homo sapiens
attgctgaatttacc

SEQ ID NO: 947949 - DNA, 15 bp, Homo sapiens
aattgctgaatttac

SEQ ID NO: 947950 - DNA, 15 bp, Homo sapiens
aaattgctgaattta

SEQ ID NO: 947951 - DNA, 15 bp, Homo sapiens
aaaattgctgaattt

SEQ ID NO: 947952 - DNA, 15 bp, Homo sapiens
taaaattgctgaatt

SEQ ID NO: 947953 - DNA, 15 bp, Homo sapiens
ttaaaattgctgaat

SEQ ID NO: 947954 - DNA, 15 bp, Homo sapiens
cttaaaattgctgaa

SEQ ID NO: 947955 - DNA, 15 bp, Homo sapiens
tcttaaaattgctga

SEQ ID NO: 947956 - DNA, 15 bp, Homo sapiens
atcttaaaattgctg

SEQ ID NO: 947957 - DNA, 15 bp, Homo sapiens
aatcttaaaattgct

SEQ ID NO: 947958 - DNA, 15 bp, Homo sapiens
aaatcttaaaattgc

SEQ ID NO: 947959 - DNA, 15 bp, Homo sapiens
taaatcttaaaattg

SEQ ID NO: 947960 - DNA, 15 bp, Homo sapiens
ttaaatcttaaaatt

SEQ ID NO: 947961 - DNA, 15 bp, Homo sapiens
tttaaatcttaaaat

SEQ ID NO: 947962 - DNA, 15 bp, Homo sapiens
ttttaaatcttaaaa

SEQ ID NO: 947963 - DNA, 15 bp, Homo sapiens
attttaaatcttaaa

SEQ ID NO: 947964 - DNA, 15 bp, Homo sapiens
aattttaaatcttaa

SEQ ID NO: 947965 - DNA, 15 bp, Homo sapiens
caattttaaatctta

SEQ ID NO: 947966 - DNA, 15 bp, Homo sapiens
ccaattttaaatctt

SEQ ID NO: 947967 - DNA, 15 bp, Homo sapiens
tccaattttaaatct

SEQ ID NO: 947968 - DNA, 15 bp, Homo sapiens
ctccaattttaaatc

SEQ ID NO: 947969 - DNA, 15 bp, Homo sapiens
actccaattttaaat

SEQ ID NO: 947970 - DNA, 15 bp, Homo sapiens
aactccaattttaaa

SEQ ID NO: 947971 - DNA, 15 bp, Homo sapiens
aaactccaattttaa

SEQ ID NO: 947972 - DNA, 15 bp, Homo sapiens
taaactccaatttta

SEQ ID NO: 947973 - DNA, 15 bp, Homo sapiens
ataaactccaatttt

SEQ ID NO: 947974 - DNA, 15 bp, Homo sapiens
tataaactccaattt

SEQ ID NO: 947975 - DNA, 15 bp, Homo sapiens
atataaactccaatt

SEQ ID NO: 947976 - DNA, 15 bp, Homo sapiens
tatataaactccaat

SEQ ID NO: 947977 - DNA, 15 bp, Homo sapiens
atatataaactccaa

SEQ ID NO: 947978 - DNA, 15 bp, Homo sapiens
tatatataaactcca

SEQ ID NO: 947979 - DNA, 15 bp, Homo sapiens
gtatatataaactcc

SEQ ID NO: 947980 - DNA, 15 bp, Homo sapiens
agtatatataaactc

SEQ ID NO: 947981 - DNA, 15 bp, Homo sapiens
aagtatatataaact

SEQ ID NO: 947982 - DNA, 15 bp, Homo sapiens
taagtatatataaac

SEQ ID NO: 947983 - DNA, 15 bp, Homo sapiens
ataagtatatataaa

SEQ ID NO: 947984 - DNA, 15 bp, Homo sapiens
aataagtatatataa

SEQ ID NO: 947985 - DNA, 15 bp, Homo sapiens
aaataagtatatata

SEQ ID NO: 947986 - DNA, 15 bp, Homo sapiens
taaataagtatatat

SEQ ID NO: 947987 - DNA, 15 bp, Homo sapiens
ataaataagtatata

SEQ ID NO: 947988 - DNA, 15 bp, Homo sapiens
tataaataagtatat

SEQ ID NO: 947989 - DNA, 15 bp, Homo sapiens
gtataaataagtata

SEQ ID NO: 947990 - DNA, 15 bp, Homo sapiens
tgtataaataagtat

SEQ ID NO: 947991 - DNA, 15 bp, Homo sapiens
atgtataaataagta

SEQ ID NO: 947992 - DNA, 15 bp, Homo sapiens
catgtataaataagt

SEQ ID NO: 947993 - DNA, 15 bp, Homo sapiens
acatgtataaataag

SEQ ID NO: 947994 - DNA, 15 bp, Homo sapiens
cacatgtataaataa

SEQ ID NO: 947995 - DNA, 15 bp, Homo sapiens
acacatgtataaata

SEQ ID NO: 947996 - DNA, 15 bp, Homo sapiens
aacacatgtataaat

SEQ ID NO: 947997 - DNA, 15 bp, Homo sapiens
taacacatgtataaa

SEQ ID NO: 947998 - DNA, 15 bp, Homo sapiens
ttaacacatgtataa

SEQ ID NO: 947999 - DNA, 15 bp, Homo sapiens
cttaacacatgtata

SEQ ID NO: 948000 - DNA, 15 bp, Homo sapiens
tcttaacacatgtat

SEQ ID NO: 948001 - DNA, 15 bp, Homo sapiens
atcttaacacatgta

SEQ ID NO: 948002 - DNA, 15 bp, Homo sapiens
aatcttaacacatgt

SEQ ID NO: 948003 - DNA, 15 bp, Homo sapiens
gaatcttaacacatg

SEQ ID NO: 948004 - DNA, 15 bp, Homo sapiens
agaatcttaacacat

SEQ ID NO: 948005 - DNA, 15 bp, Homo sapiens
gagaatcttaacaca

SEQ ID NO: 948006 - DNA, 15 bp, Homo sapiens
tgagaatcttaacac

SEQ ID NO: 948007 - DNA, 15 bp, Homo sapiens
ttgagaatcttaaca

SEQ ID NO: 948008 - DNA, 15 bp, Homo sapiens
tttgagaatcttaac

SEQ ID NO: 948009 - DNA, 15 bp, Homo sapiens
atttgagaatcttaa

SEQ ID NO: 948010 - DNA, 15 bp, Homo sapiens
gatttgagaatctta

SEQ ID NO: 948011 - DNA, 15 bp, Homo sapiens
ggatttgagaatctt

SEQ ID NO: 948012 - DNA, 15 bp, Homo sapiens
aggatttgagaatct

SEQ ID NO: 948013 - DNA, 15 bp, Homo sapiens
taggatttgagaatc

SEQ ID NO: 948014 - DNA, 15 bp, Homo sapiens
ataggatttgagaat

SEQ ID NO: 948015 - DNA, 15 bp, Homo sapiens
cataggatttgagaa

SEQ ID NO: 948016 - DNA, 15 bp, Homo sapiens
tcataggatttgaga

SEQ ID NO: 948017 - DNA, 15 bp, Homo sapiens
atcataggatttgag

SEQ ID NO: 948018 - DNA, 15 bp, Homo sapiens
tatcataggatttga

SEQ ID NO: 948019 - DNA, 15 bp, Homo sapiens
atatcataggatttg

SEQ ID NO: 948020 - DNA, 15 bp, Homo sapiens
tatatcataggattt

SEQ ID NO: 948021 - DNA, 15 bp, Homo sapiens
atatatcataggatt

SEQ ID NO: 948022 - DNA, 15 bp, Homo sapiens
tatatatcataggat

SEQ ID NO: 948023 - DNA, 15 bp, Homo sapiens
gtatatatcatagga

SEQ ID NO: 948024 - DNA, 15 bp, Homo sapiens
tgtatatatcatagg

SEQ ID NO: 948025 - DNA, 15 bp, Homo sapiens
gtgtatatatcatag

SEQ ID NO: 948026 - DNA, 15 bp, Homo sapiens
tgtgtatatatcata

SEQ ID NO: 948027 - DNA, 15 bp, Homo sapiens
ctgtgtatatatcat

SEQ ID NO: 948028 - DNA, 15 bp, Homo sapiens
tctgtgtatatatca

SEQ ID NO: 948029 - DNA, 15 bp, Homo sapiens
atctgtgtatatatc

SEQ ID NO: 948030 - DNA, 15 bp, Homo sapiens
catctgtgtatatat

SEQ ID NO: 948031 - DNA, 15 bp, Homo sapiens
acatctgtgtatata

SEQ ID NO: 948032 - DNA, 15 bp, Homo sapiens
tacatctgtgtatat

SEQ ID NO: 948033 - DNA, 15 bp, Homo sapiens
ctacatctgtgtata

SEQ ID NO: 948034 - DNA, 15 bp, Homo sapiens
tctacatctgtgtat

SEQ ID NO: 948035 - DNA, 15 bp, Homo sapiens
gtctacatctgtgta

SEQ ID NO: 948036 - DNA, 15 bp, Homo sapiens
tgtctacatctgtgt

SEQ ID NO: 948037 - DNA, 15 bp, Homo sapiens
atgtctacatctgtg

SEQ ID NO: 948038 - DNA, 15 bp, Homo sapiens
tatgtctacatctgt

SEQ ID NO: 948039 - DNA, 15 bp, Homo sapiens
gtatgtctacatctg

SEQ ID NO: 948040 - DNA, 15 bp, Homo sapiens
tgtatgtctacatct

SEQ ID NO: 948041 - DNA, 15 bp, Homo sapiens
gtgtatgtctacatc

SEQ ID NO: 948042 - DNA, 15 bp, Homo sapiens
tgtgtatgtctacat

SEQ ID NO: 948043 - DNA, 15 bp, Homo sapiens
gtgtgtatgtctaca

SEQ ID NO: 948044 - DNA, 15 bp, Homo sapiens
tgtgtgtatgtctac

SEQ ID NO: 948045 - DNA, 15 bp, Homo sapiens
atgtgtgtatgtcta

SEQ ID NO: 948046 - DNA, 15 bp, Homo sapiens
tatgtgtgtatgtct

SEQ ID NO: 948047 - DNA, 15 bp, Homo sapiens
atatgtgtgtatgtc

SEQ ID NO: 948048 - DNA, 15 bp, Homo sapiens
tatatgtgtgtatgt

SEQ ID NO: 948049 - DNA, 15 bp, Homo sapiens
ctatatgtgtgtatg

SEQ ID NO: 948050 - DNA, 15 bp, Homo sapiens
cctatatgtgtgtat

SEQ ID NO: 948051 - DNA, 15 bp, Homo sapiens
acctatatgtgtgta

SEQ ID NO: 948052 - DNA, 15 bp, Homo sapiens
aacctatatgtgtgt

SEQ ID NO: 948053 - DNA, 15 bp, Homo sapiens
taacctatatgtgtg

SEQ ID NO: 948054 - DNA, 15 bp, Homo sapiens
ataacctatatgtgt

SEQ ID NO: 948055 - DNA, 15 bp, Homo sapiens
cataacctatatgtg

SEQ ID NO: 948056 - DNA, 15 bp, Homo sapiens
tcataacctatatgt

SEQ ID NO: 948057 - DNA, 15 bp, Homo sapiens
ctcataacctatatg

SEQ ID NO: 948058 - DNA, 15 bp, Homo sapiens
cctcataacctatat

SEQ ID NO: 948059 - DNA, 15 bp, Homo sapiens
acctcataacctata

SEQ ID NO: 948060 - DNA, 15 bp, Homo sapiens
aacctcataacctat

SEQ ID NO: 948061 - DNA, 15 bp, Homo sapiens
caacctcataaccta

SEQ ID NO: 948062 - DNA, 15 bp, Homo sapiens
tcaacctcataacct

SEQ ID NO: 948063 - DNA, 15 bp, Homo sapiens
ctcaacctcataacc

SEQ ID NO: 948064 - DNA, 15 bp, Homo sapiens
gctcaacctcataac

SEQ ID NO: 948065 - DNA, 15 bp, Homo sapiens
ggctcaacctcataa

SEQ ID NO: 948066 - DNA, 15 bp, Homo sapiens
cggctcaacctcata

SEQ ID NO: 948067 - DNA, 15 bp, Homo sapiens
acggctcaacctcat

SEQ ID NO: 948068 - DNA, 15 bp, Homo sapiens
tacggctcaacctca

SEQ ID NO: 948069 - DNA, 15 bp, Homo sapiens
atacggctcaacctc

SEQ ID NO: 948070 - DNA, 15 bp, Homo sapiens
catacggctcaacct

SEQ ID NO: 948071 - DNA, 15 bp, Homo sapiens
acatacggctcaacc

SEQ ID NO: 948072 - DNA, 15 bp, Homo sapiens
aacatacggctcaac

SEQ ID NO: 948073 - DNA, 15 bp, Homo sapiens
aaacatacggctcaa

SEQ ID NO: 948074 - DNA, 15 bp, Homo sapiens
aaaacatacggctca

SEQ ID NO: 948075 - DNA, 15 bp, Homo sapiens
caaaacatacggctc

SEQ ID NO: 948076 - DNA, 15 bp, Homo sapiens
acaaaacatacggct

SEQ ID NO: 948077 - DNA, 15 bp, Homo sapiens
aacaaaacatacggc

SEQ ID NO: 948078 - DNA, 15 bp, Homo sapiens
taacaaaacatacgg

SEQ ID NO: 948079 - DNA, 15 bp, Homo sapiens
ttaacaaaacatacg

SEQ ID NO: 948080 - DNA, 15 bp, Homo sapiens
tttaacaaaacatac

SEQ ID NO: 948081 - DNA, 15 bp, Homo sapiens
atttaacaaaacata

SEQ ID NO: 948082 - DNA, 15 bp, Homo sapiens
tatttaacaaaacat

SEQ ID NO: 948083 - DNA, 15 bp, Homo sapiens
atatttaacaaaaca

SEQ ID NO: 948084 - DNA, 15 bp, Homo sapiens
gatatttaacaaaac

SEQ ID NO: 948085 - DNA, 15 bp, Homo sapiens
agatatttaacaaaa

SEQ ID NO: 948086 - DNA, 15 bp, Homo sapiens
tagatatttaacaaa

SEQ ID NO: 948087 - DNA, 15 bp, Homo sapiens
ctagatatttaacaa

SEQ ID NO: 948088 - DNA, 15 bp, Homo sapiens
gctagatatttaaca

SEQ ID NO: 948089 - DNA, 15 bp, Homo sapiens
tgctagatatttaac

SEQ ID NO: 948090 - DNA, 15 bp, Homo sapiens
ttgctagatatttaa

SEQ ID NO: 948091 - DNA, 15 bp, Homo sapiens
tttgctagatattta

SEQ ID NO: 948092 - DNA, 15 bp, Homo sapiens
ttttgctagatattt

SEQ ID NO: 948093 - DNA, 15 bp, Homo sapiens
attttgctagatatt

SEQ ID NO: 948094 - DNA, 15 bp, Homo sapiens
aattttgctagatat

SEQ ID NO: 948095 - DNA, 15 bp, Homo sapiens
taattttgctagata

SEQ ID NO: 948096 - DNA, 15 bp, Homo sapiens
ttaattttgctagat

SEQ ID NO: 948097 - DNA, 15 bp, Homo sapiens
tttaattttgctaga

SEQ ID NO: 948098 - DNA, 15 bp, Homo sapiens
atttaattttgctag

SEQ ID NO: 948099 - DNA, 15 bp, Homo sapiens
aatttaattttgcta

SEQ ID NO: 948100 - DNA, 15 bp, Homo sapiens
caatttaattttgct

SEQ ID NO: 948101 - DNA, 15 bp, Homo sapiens
tcaatttaattttgc

SEQ ID NO: 948102 - DNA, 15 bp, Homo sapiens
ctcaatttaattttg

SEQ ID NO: 948103 - DNA, 15 bp, Homo sapiens
gctcaatttaatttt

SEQ ID NO: 948104 - DNA, 15 bp, Homo sapiens
agctcaatttaattt

SEQ ID NO: 948105 - DNA, 15 bp, Homo sapiens
aagctcaatttaatt

SEQ ID NO: 948106 - DNA, 15 bp, Homo sapiens
taagctcaatttaat

SEQ ID NO: 948107 - DNA, 15 bp, Homo sapiens
ttaagctcaatttaa

SEQ ID NO: 948108 - DNA, 15 bp, Homo sapiens
tttaagctcaattta

SEQ ID NO: 948109 - DNA, 15 bp, Homo sapiens
gtttaagctcaattt

SEQ ID NO: 948110 - DNA, 15 bp, Homo sapiens
agtttaagctcaatt

SEQ ID NO: 948111 - DNA, 15 bp, Homo sapiens
tagtttaagctcaat

SEQ ID NO: 948112 - DNA, 15 bp, Homo sapiens
atagtttaagctcaa

SEQ ID NO: 948113 - DNA, 15 bp, Homo sapiens
aatagtttaagctca

SEQ ID NO: 948114 - DNA, 15 bp, Homo sapiens
aaatagtttaagctc

SEQ ID NO: 948115 - DNA, 15 bp, Homo sapiens
taaatagtttaagct

SEQ ID NO: 948116 - DNA, 15 bp, Homo sapiens
ttaaatagtttaagc

SEQ ID NO: 948117 - DNA, 15 bp, Homo sapiens
attaaatagtttaag

SEQ ID NO: 948118 - DNA, 15 bp, Homo sapiens
aattaaatagtttaa

SEQ ID NO: 948119 - DNA, 15 bp, Homo sapiens
aaattaaatagttta

SEQ ID NO: 948120 - DNA, 15 bp, Homo sapiens
aaaattaaatagttt

SEQ ID NO: 948121 - DNA, 15 bp, Homo sapiens
caaaattaaatagtt

SEQ ID NO: 948122 - DNA, 15 bp, Homo sapiens
tcaaaattaaatagt

SEQ ID NO: 948123 - DNA, 15 bp, Homo sapiens
ttcaaaattaaatag

SEQ ID NO: 948124 - DNA, 15 bp, Homo sapiens
tttcaaaattaaata

SEQ ID NO: 948125 - DNA, 15 bp, Homo sapiens
ttttcaaaattaaat

SEQ ID NO: 948126 - DNA, 15 bp, Homo sapiens
attttcaaaattaaa

SEQ ID NO: 948127 - DNA, 15 bp, Homo sapiens
aattttcaaaattaa

SEQ ID NO: 948128 - DNA, 15 bp, Homo sapiens
taattttcaaaatta

SEQ ID NO: 948129 - DNA, 15 bp, Homo sapiens
ctaattttcaaaatt

SEQ ID NO: 948130 - DNA, 15 bp, Homo sapiens
actaattttcaaaat

SEQ ID NO: 948131 - DNA, 15 bp, Homo sapiens
cactaattttcaaaa

SEQ ID NO: 948132 - DNA, 15 bp, Homo sapiens
tcactaattttcaaa

SEQ ID NO: 948133 - DNA, 15 bp, Homo sapiens
gtcactaattttcaa

SEQ ID NO: 948134 - DNA, 15 bp, Homo sapiens
tgtcactaattttca

SEQ ID NO: 948135 - DNA, 15 bp, Homo sapiens
atgtcactaattttc

SEQ ID NO: 948136 - DNA, 15 bp, Homo sapiens
aatgtcactaatttt

SEQ ID NO: 948137 - DNA, 15 bp, Homo sapiens
taatgtcactaattt

SEQ ID NO: 948138 - DNA, 15 bp, Homo sapiens
ttaatgtcactaatt

SEQ ID NO: 948139 - DNA, 15 bp, Homo sapiens
tttaatgtcactaat

SEQ ID NO: 948140 - DNA, 15 bp, Homo sapiens
atttaatgtcactaa

SEQ ID NO: 948141 - DNA, 15 bp, Homo sapiens
aatttaatgtcacta

SEQ ID NO: 948142 - DNA, 15 bp, Homo sapiens
caatttaatgtcact

SEQ ID NO: 948143 - DNA, 15 bp, Homo sapiens
acaatttaatgtcac

SEQ ID NO: 948144 - DNA, 15 bp, Homo sapiens
aacaatttaatgtca

SEQ ID NO: 948145 - DNA, 15 bp, Homo sapiens
caacaatttaatgtc

SEQ ID NO: 948146 - DNA, 15 bp, Homo sapiens
acaacaatttaatgt

SEQ ID NO: 948147 - DNA, 15 bp, Homo sapiens
gacaacaatttaatg

SEQ ID NO: 948148 - DNA, 15 bp, Homo sapiens
agacaacaatttaat

SEQ ID NO: 948149 - DNA, 15 bp, Homo sapiens
aagacaacaatttaa

SEQ ID NO: 948150 - DNA, 15 bp, Homo sapiens
aaagacaacaattta

SEQ ID NO: 948151 - DNA, 15 bp, Homo sapiens
taaagacaacaattt

SEQ ID NO: 948152 - DNA, 15 bp, Homo sapiens
ttaaagacaacaatt

SEQ ID NO: 948153 - DNA, 15 bp, Homo sapiens
tttaaagacaacaat

SEQ ID NO: 948154 - DNA, 15 bp, Homo sapiens
atttaaagacaacaa

SEQ ID NO: 948155 - DNA, 15 bp, Homo sapiens
aatttaaagacaaca

SEQ ID NO: 948156 - DNA, 15 bp, Homo sapiens
taatttaaagacaac

SEQ ID NO: 948157 - DNA, 15 bp, Homo sapiens
gtaatttaaagacaa

SEQ ID NO: 948158 - DNA, 15 bp, Homo sapiens
ggtaatttaaagaca

SEQ ID NO: 948159 - DNA, 15 bp, Homo sapiens
tggtaatttaaagac

SEQ ID NO: 948160 - DNA, 15 bp, Homo sapiens
gtggtaatttaaaga

SEQ ID NO: 948161 - DNA, 15 bp, Homo sapiens
agtggtaatttaaag

SEQ ID NO: 948162 - DNA, 15 bp, Homo sapiens
gagtggtaatttaaa

SEQ ID NO: 948163 - DNA, 15 bp, Homo sapiens
tgagtggtaatttaa

SEQ ID NO: 948164 - DNA, 15 bp, Homo sapiens
ctgagtggtaattta

SEQ ID NO: 948165 - DNA, 15 bp, Homo sapiens
actgagtggtaattt

SEQ ID NO: 948166 - DNA, 15 bp, Homo sapiens
aactgagtggtaatt

SEQ ID NO: 948167 - DNA, 15 bp, Homo sapiens
taactgagtggtaat

SEQ ID NO: 948168 - DNA, 15 bp, Homo sapiens
ataactgagtggtaa

SEQ ID NO: 948169 - DNA, 15 bp, Homo sapiens
tataactgagtggta

SEQ ID NO: 948170 - DNA, 15 bp, Homo sapiens
ctataactgagtggt

SEQ ID NO: 948171 - DNA, 15 bp, Homo sapiens
actataactgagtgg

SEQ ID NO: 948172 - DNA, 15 bp, Homo sapiens
cactataactgagtg

SEQ ID NO: 948173 - DNA, 15 bp, Homo sapiens
tcactataactgagt

SEQ ID NO: 948174 - DNA, 15 bp, Homo sapiens
ttcactataactgag

SEQ ID NO: 948175 - DNA, 15 bp, Homo sapiens
cttcactataactga

SEQ ID NO: 948176 - DNA, 15 bp, Homo sapiens
tcttcactataactg

SEQ ID NO: 948177 - DNA, 15 bp, Homo sapiens
ctcttcactataact

SEQ ID NO: 948178 - DNA, 15 bp, Homo sapiens
tctcttcactataac

SEQ ID NO: 948179 - DNA, 15 bp, Homo sapiens
ttctcttcactataa

SEQ ID NO: 948180 - DNA, 15 bp, Homo sapiens
attctcttcactata

SEQ ID NO: 948181 - DNA, 15 bp, Homo sapiens
gattctcttcactat

SEQ ID NO: 948182 - DNA, 15 bp, Homo sapiens
ggattctcttcacta

SEQ ID NO: 948183 - DNA, 15 bp, Homo sapiens
tggattctcttcact

SEQ ID NO: 948184 - DNA, 15 bp, Homo sapiens
ctggattctcttcac

SEQ ID NO: 948185 - DNA, 15 bp, Homo sapiens
gctggattctcttca

SEQ ID NO: 948186 - DNA, 15 bp, Homo sapiens
ggctggattctcttc

SEQ ID NO: 948187 - DNA, 15 bp, Homo sapiens
aggctggattctctt

SEQ ID NO: 948188 - DNA, 15 bp, Homo sapiens
aaggctggattctct

SEQ ID NO: 948189 - DNA, 15 bp, Homo sapiens
aaaggctggattctc

SEQ ID NO: 948190 - DNA, 15 bp, Homo sapiens
caaaggctggattct

SEQ ID NO: 948191 - DNA, 15 bp, Homo sapiens
acaaaggctggattc

SEQ ID NO: 948192 - DNA, 15 bp, Homo sapiens
gacaaaggctggatt

SEQ ID NO: 948193 - DNA, 15 bp, Homo sapiens
ggacaaaggctggat

SEQ ID NO: 948194 - DNA, 15 bp, Homo sapiens
tggacaaaggctgga

SEQ ID NO: 948195 - DNA, 15 bp, Homo sapiens
ttggacaaaggctgg

SEQ ID NO: 948196 - DNA, 15 bp, Homo sapiens
cttggacaaaggctg

SEQ ID NO: 948197 - DNA, 15 bp, Homo sapiens
gcttggacaaaggct

SEQ ID NO: 948198 - DNA, 15 bp, Homo sapiens
agcttggacaaaggc

SEQ ID NO: 948199 - DNA, 15 bp, Homo sapiens
aagcttggacaaagg

SEQ ID NO: 948200 - DNA, 15 bp, Homo sapiens
taagcttggacaaag

SEQ ID NO: 948201 - DNA, 15 bp, Homo sapiens
ctaagcttggacaaa

SEQ ID NO: 948202 - DNA, 15 bp, Homo sapiens
cctaagcttggacaa

SEQ ID NO: 948203 - DNA, 15 bp, Homo sapiens
tcctaagcttggaca

SEQ ID NO: 948204 - DNA, 15 bp, Homo sapiens
ctcctaagcttggac

SEQ ID NO: 948205 - DNA, 15 bp, Homo sapiens
gctcctaagcttgga

SEQ ID NO: 948206 - DNA, 15 bp, Homo sapiens
agctcctaagcttgg

SEQ ID NO: 948207 - DNA, 15 bp, Homo sapiens
aagctcctaagcttg

SEQ ID NO: 948208 - DNA, 15 bp, Homo sapiens
taagctcctaagctt

SEQ ID NO: 948209 - DNA, 15 bp, Homo sapiens
gtaagctcctaagct

SEQ ID NO: 948210 - DNA, 15 bp, Homo sapiens
agtaagctcctaagc

SEQ ID NO: 948211 - DNA, 15 bp, Homo sapiens
tagtaagctcctaag

SEQ ID NO: 948212 - DNA, 15 bp, Homo sapiens
atagtaagctcctaa

SEQ ID NO: 948213 - DNA, 15 bp, Homo sapiens
aatagtaagctccta

SEQ ID NO: 948214 - DNA, 15 bp, Homo sapiens
taatagtaagctcct

SEQ ID NO: 948215 - DNA, 15 bp, Homo sapiens
gtaatagtaagctcc

SEQ ID NO: 948216 - DNA, 15 bp, Homo sapiens
agtaatagtaagctc

SEQ ID NO: 948217 - DNA, 15 bp, Homo sapiens
aagtaatagtaagct

SEQ ID NO: 948218 - DNA, 15 bp, Homo sapiens
taagtaatagtaagc

SEQ ID NO: 948219 - DNA, 15 bp, Homo sapiens
ataagtaatagtaag

SEQ ID NO: 948220 - DNA, 15 bp, Homo sapiens
cataagtaatagtaa

SEQ ID NO: 948221 - DNA, 15 bp, Homo sapiens
acataagtaatagta

SEQ ID NO: 948222 - DNA, 15 bp, Homo sapiens
aacataagtaatagt

SEQ ID NO: 948223 - DNA, 15 bp, Homo sapiens
aaacataagtaatag

SEQ ID NO: 948224 - DNA, 15 bp, Homo sapiens
aaaacataagtaata

SEQ ID NO: 948225 - DNA, 15 bp, Homo sapiens
aaaaacataagtaat

SEQ ID NO: 948226 - DNA, 15 bp, Homo sapiens
taaaaacataagtaa

SEQ ID NO: 948227 - DNA, 15 bp, Homo sapiens
ataaaaacataagta

SEQ ID NO: 948228 - DNA, 15 bp, Homo sapiens
cataaaaacataagt

SEQ ID NO: 948229 - DNA, 15 bp, Homo sapiens
ccataaaaacataag

SEQ ID NO: 948230 - DNA, 15 bp, Homo sapiens
gccataaaaacataa

SEQ ID NO: 948231 - DNA, 15 bp, Homo sapiens
agccataaaaacata

SEQ ID NO: 948232 - DNA, 15 bp, Homo sapiens
tagccataaaaacat

SEQ ID NO: 948233 - DNA, 15 bp, Homo sapiens
ctagccataaaaaca

SEQ ID NO: 948234 - DNA, 15 bp, Homo sapiens
tctagccataaaaac

SEQ ID NO: 948235 - DNA, 15 bp, Homo sapiens
ctctagccataaaaa

SEQ ID NO: 948236 - DNA, 15 bp, Homo sapiens
tctctagccataaaa

SEQ ID NO: 948237 - DNA, 15 bp, Homo sapiens
atctctagccataaa

SEQ ID NO: 948238 - DNA, 15 bp, Homo sapiens
aatctctagccataa

SEQ ID NO: 948239 - DNA, 15 bp, Homo sapiens
taatctctagccata

SEQ ID NO: 948240 - DNA, 15 bp, Homo sapiens
ttaatctctagccat

SEQ ID NO: 948241 - DNA, 15 bp, Homo sapiens
tttaatctctagcca

SEQ ID NO: 948242 - DNA, 15 bp, Homo sapiens
ttttaatctctagcc

SEQ ID NO: 948243 - DNA, 15 bp, Homo sapiens
attttaatctctagc

SEQ ID NO: 948244 - DNA, 15 bp, Homo sapiens
aattttaatctctag

SEQ ID NO: 948245 - DNA, 15 bp, Homo sapiens
taattttaatctcta

SEQ ID NO: 948246 - DNA, 15 bp, Homo sapiens
ttaattttaatctct

SEQ ID NO: 948247 - DNA, 15 bp, Homo sapiens
attaattttaatctc

SEQ ID NO: 948248 - DNA, 15 bp, Homo sapiens
aattaattttaatct

SEQ ID NO: 948249 - DNA, 15 bp, Homo sapiens
aaattaattttaatc

SEQ ID NO: 948250 - DNA, 15 bp, Homo sapiens
caaattaattttaat

SEQ ID NO: 948251 - DNA, 15 bp, Homo sapiens
gcaaattaattttaa

SEQ ID NO: 948252 - DNA, 15 bp, Homo sapiens
agcaaattaatttta

SEQ ID NO: 948253 - DNA, 15 bp, Homo sapiens
cagcaaattaatttt

SEQ ID NO: 948254 - DNA, 15 bp, Homo sapiens
ccagcaaattaattt

SEQ ID NO: 948255 - DNA, 15 bp, Homo sapiens
accagcaaattaatt

SEQ ID NO: 948256 - DNA, 15 bp, Homo sapiens
aaccagcaaattaat

SEQ ID NO: 948257 - DNA, 15 bp, Homo sapiens
aaaccagcaaattaa

SEQ ID NO: 948258 - DNA, 15 bp, Homo sapiens
aaaaccagcaaatta

SEQ ID NO: 948259 - DNA, 15 bp, Homo sapiens
aaaaaccagcaaatt

SEQ ID NO: 948260 - DNA, 15 bp, Homo sapiens
taaaaaccagcaaat

SEQ ID NO: 948261 - DNA, 15 bp, Homo sapiens
ttaaaaaccagcaaa

SEQ ID NO: 948262 - DNA, 15 bp, Homo sapiens
attaaaaaccagcaa

SEQ ID NO: 948263 - DNA, 15 bp, Homo sapiens
tattaaaaaccagca

SEQ ID NO: 948264 - DNA, 15 bp, Homo sapiens
ttattaaaaaccagc

SEQ ID NO: 948265 - DNA, 15 bp, Homo sapiens
tttattaaaaaccag

SEQ ID NO: 948266 - DNA, 15 bp, Homo sapiens
ttttattaaaaacca

SEQ ID NO: 948267 - DNA, 15 bp, Homo sapiens
attttattaaaaacc

SEQ ID NO: 948268 - DNA, 15 bp, Homo sapiens
aattttattaaaaac

SEQ ID NO: 948269 - DNA, 15 bp, Homo sapiens
aaattttattaaaaa

SEQ ID NO: 948270 - DNA, 15 bp, Homo sapiens
aaaattttattaaaa

SEQ ID NO: 948271 - DNA, 15 bp, Homo sapiens
caaaattttattaaa

SEQ ID NO: 948272 - DNA, 15 bp, Homo sapiens
tcaaaattttattaa

SEQ ID NO: 948273 - DNA, 15 bp, Homo sapiens
ttcaaaattttatta

SEQ ID NO: 948274 - DNA, 15 bp, Homo sapiens
attcaaaattttatt

SEQ ID NO: 948275 - DNA, 15 bp, Homo sapiens
tattcaaaattttat

SEQ ID NO: 948276 - DNA, 15 bp, Homo sapiens
ctattcaaaatttta

SEQ ID NO: 948277 - DNA, 15 bp, Homo sapiens
cctattcaaaatttt

SEQ ID NO: 948278 - DNA, 15 bp, Homo sapiens
acctattcaaaattt

SEQ ID NO: 948279 - DNA, 15 bp, Homo sapiens
tacctattcaaaatt

SEQ ID NO: 948280 - DNA, 15 bp, Homo sapiens
gtacctattcaaaat

SEQ ID NO: 948281 - DNA, 15 bp, Homo sapiens
agtacctattcaaaa

SEQ ID NO: 948282 - DNA, 15 bp, Homo sapiens
aagtacctattcaaa

SEQ ID NO: 948283 - DNA, 15 bp, Homo sapiens
caagtacctattcaa

SEQ ID NO: 948284 - DNA, 15 bp, Homo sapiens
tcaagtacctattca

SEQ ID NO: 948285 - DNA, 15 bp, Homo sapiens
ttcaagtacctattc

SEQ ID NO: 948286 - DNA, 15 bp, Homo sapiens
tttcaagtacctatt

SEQ ID NO: 948287 - DNA, 15 bp, Homo sapiens
gtttcaagtacctat

SEQ ID NO: 948288 - DNA, 15 bp, Homo sapiens
agtttcaagtaccta

SEQ ID NO: 948289 - DNA, 15 bp, Homo sapiens
cagtttcaagtacct

SEQ ID NO: 948290 - DNA, 15 bp, Homo sapiens
ccagtttcaagtacc

SEQ ID NO: 948291 - DNA, 15 bp, Homo sapiens
tccagtttcaagtac

SEQ ID NO: 948292 - DNA, 15 bp, Homo sapiens
ttccagtttcaagta

SEQ ID NO: 948293 - DNA, 15 bp, Homo sapiens
tttccagtttcaagt

SEQ ID NO: 948294 - DNA, 15 bp, Homo sapiens
ttttccagtttcaag

SEQ ID NO: 948295 - DNA, 15 bp, Homo sapiens
attttccagtttcaa

SEQ ID NO: 948296 - DNA, 15 bp, Homo sapiens
aattttccagtttca

SEQ ID NO: 948297 - DNA, 15 bp, Homo sapiens
gaattttccagtttc

SEQ ID NO: 948298 - DNA, 15 bp, Homo sapiens
tgaattttccagttt

SEQ ID NO: 948299 - DNA, 15 bp, Homo sapiens
atgaattttccagtt

SEQ ID NO: 948300 - DNA, 15 bp, Homo sapiens
aatgaattttccagt

SEQ ID NO: 948301 - DNA, 15 bp, Homo sapiens
aaatgaattttccag

SEQ ID NO: 948302 - DNA, 15 bp, Homo sapiens
gaaatgaattttcca

SEQ ID NO: 948303 - DNA, 15 bp, Homo sapiens
agaaatgaattttcc

SEQ ID NO: 948304 - DNA, 15 bp, Homo sapiens
aagaaatgaattttc

SEQ ID NO: 948305 - DNA, 15 bp, Homo sapiens
gaagaaatgaatttt

SEQ ID NO: 948306 - DNA, 15 bp, Homo sapiens
tgaagaaatgaattt

SEQ ID NO: 948307 - DNA, 15 bp, Homo sapiens
gtgaagaaatgaatt

SEQ ID NO: 948308 - DNA, 15 bp, Homo sapiens
tgtgaagaaatgaat

SEQ ID NO: 948309 - DNA, 15 bp, Homo sapiens
ttgtgaagaaatgaa

SEQ ID NO: 948310 - DNA, 15 bp, Homo sapiens
tttgtgaagaaatga

SEQ ID NO: 948311 - DNA, 15 bp, Homo sapiens
atttgtgaagaaatg

SEQ ID NO: 948312 - DNA, 15 bp, Homo sapiens
catttgtgaagaaat

SEQ ID NO: 948313 - DNA, 15 bp, Homo sapiens
ccatttgtgaagaaa

SEQ ID NO: 948314 - DNA, 15 bp, Homo sapiens
accatttgtgaagaa

SEQ ID NO: 948315 - DNA, 15 bp, Homo sapiens
taccatttgtgaaga

SEQ ID NO: 948316 - DNA, 15 bp, Homo sapiens
ctaccatttgtgaag

SEQ ID NO: 948317 - DNA, 15 bp, Homo sapiens
tctaccatttgtgaa

SEQ ID NO: 948318 - DNA, 15 bp, Homo sapiens
ttctaccatttgtga

SEQ ID NO: 948319 - DNA, 15 bp, Homo sapiens
tttctaccatttgtg

SEQ ID NO: 948320 - DNA, 15 bp, Homo sapiens
ttttctaccatttgt

SEQ ID NO: 948321 - DNA, 15 bp, Homo sapiens
gttttctaccatttg

SEQ ID NO: 948322 - DNA, 15 bp, Homo sapiens
tgttttctaccattt

SEQ ID NO: 948323 - DNA, 15 bp, Homo sapiens
atgttttctaccatt

SEQ ID NO: 948324 - DNA, 15 bp, Homo sapiens
tatgttttctaccat

SEQ ID NO: 948325 - DNA, 15 bp, Homo sapiens
atatgttttctacca

SEQ ID NO: 948326 - DNA, 15 bp, Homo sapiens
aatatgttttctacc

SEQ ID NO: 948327 - DNA, 15 bp, Homo sapiens
caatatgttttctac

SEQ ID NO: 948328 - DNA, 15 bp, Homo sapiens
tcaatatgttttcta

SEQ ID NO: 948329 - DNA, 15 bp, Homo sapiens
atcaatatgttttct

SEQ ID NO: 948330 - DNA, 15 bp, Homo sapiens
catcaatatgttttc

SEQ ID NO: 948331 - DNA, 15 bp, Homo sapiens
acatcaatatgtttt

SEQ ID NO: 948332 - DNA, 15 bp, Homo sapiens
aacatcaatatgttt

SEQ ID NO: 948333 - DNA, 15 bp, Homo sapiens
aaacatcaatatgtt

SEQ ID NO: 948334 - DNA, 15 bp, Homo sapiens
gaaacatcaatatgt

SEQ ID NO: 948335 - DNA, 15 bp, Homo sapiens
tgaaacatcaatatg

SEQ ID NO: 948336 - DNA, 15 bp, Homo sapiens
atgaaacatcaatat

SEQ ID NO: 948337 - DNA, 15 bp, Homo sapiens
tatgaaacatcaata

SEQ ID NO: 948338 - DNA, 15 bp, Homo sapiens
ttatgaaacatcaat

SEQ ID NO: 948339 - DNA, 15 bp, Homo sapiens
attatgaaacatcaa

SEQ ID NO: 948340 - DNA, 15 bp, Homo sapiens
cattatgaaacatca

SEQ ID NO: 948341 - DNA, 15 bp, Homo sapiens
tcattatgaaacatc

SEQ ID NO: 948342 - DNA, 15 bp, Homo sapiens
ttcattatgaaacat

SEQ ID NO: 948343 - DNA, 15 bp, Homo sapiens
gttcattatgaaaca

SEQ ID NO: 948344 - DNA, 15 bp, Homo sapiens
tgttcattatgaaac

SEQ ID NO: 948345 - DNA, 15 bp, Homo sapiens
ctgttcattatgaaa

SEQ ID NO: 948346 - DNA, 15 bp, Homo sapiens
tctgttcattatgaa

SEQ ID NO: 948347 - DNA, 15 bp, Homo sapiens
ttctgttcattatga

SEQ ID NO: 948348 - DNA, 15 bp, Homo sapiens
tttctgttcattatg

SEQ ID NO: 948349 - DNA, 15 bp, Homo sapiens
gtttctgttcattat

SEQ ID NO: 948350 - DNA, 15 bp, Homo sapiens
ggtttctgttcatta

SEQ ID NO: 948351 - DNA, 15 bp, Homo sapiens
aggtttctgttcatt

SEQ ID NO: 948352 - DNA, 15 bp, Homo sapiens
aaggtttctgttcat

SEQ ID NO: 948353 - DNA, 15 bp, Homo sapiens
caaggtttctgttca

SEQ ID NO: 948354 - DNA, 15 bp, Homo sapiens
tcaaggtttctgttc

SEQ ID NO: 948355 - DNA, 15 bp, Homo sapiens
ctcaaggtttctgtt

SEQ ID NO: 948356 - DNA, 15 bp, Homo sapiens
tctcaaggtttctgt

SEQ ID NO: 948357 - DNA, 15 bp, Homo sapiens
atctcaaggtttctg

SEQ ID NO: 948358 - DNA, 15 bp, Homo sapiens
tatctcaaggtttct

SEQ ID NO: 948359 - DNA, 15 bp, Homo sapiens
atatctcaaggtttc

SEQ ID NO: 948360 - DNA, 15 bp, Homo sapiens
aatatctcaaggttt

SEQ ID NO: 948361 - DNA, 15 bp, Homo sapiens
aaatatctcaaggtt

SEQ ID NO: 948362 - DNA, 15 bp, Homo sapiens
aaaatatctcaaggt

SEQ ID NO: 948363 - DNA, 15 bp, Homo sapiens
aaaaatatctcaagg

SEQ ID NO: 948364 - DNA, 15 bp, Homo sapiens
taaaaatatctcaag

SEQ ID NO: 948365 - DNA, 15 bp, Homo sapiens
ttaaaaatatctcaa

SEQ ID NO: 948366 - DNA, 15 bp, Homo sapiens
tttaaaaatatctca

SEQ ID NO: 948367 - DNA, 15 bp, Homo sapiens
atttaaaaatatctc

SEQ ID NO: 948368 - DNA, 15 bp, Homo sapiens
tatttaaaaatatct

SEQ ID NO: 948369 - DNA, 15 bp, Homo sapiens
atatttaaaaatatc

SEQ ID NO: 948370 - DNA, 15 bp, Homo sapiens
catatttaaaaatat

SEQ ID NO: 948371 - DNA, 15 bp, Homo sapiens
ccatatttaaaaata

SEQ ID NO: 948372 - DNA, 15 bp, Homo sapiens
accatatttaaaaat

SEQ ID NO: 948373 - DNA, 15 bp, Homo sapiens
taccatatttaaaaa

SEQ ID NO: 948374 - DNA, 15 bp, Homo sapiens
ctaccatatttaaaa

SEQ ID NO: 948375 - DNA, 15 bp, Homo sapiens
tctaccatatttaaa

SEQ ID NO: 948376 - DNA, 15 bp, Homo sapiens
ttctaccatatttaa

SEQ ID NO: 948377 - DNA, 15 bp, Homo sapiens
attctaccatattta

SEQ ID NO: 948378 - DNA, 15 bp, Homo sapiens
tattctaccatattt

SEQ ID NO: 948379 - DNA, 15 bp, Homo sapiens
atattctaccatatt

SEQ ID NO: 948380 - DNA, 15 bp, Homo sapiens
aatattctaccatat

SEQ ID NO: 948381 - DNA, 15 bp, Homo sapiens
gaatattctaccata

SEQ ID NO: 948382 - DNA, 15 bp, Homo sapiens
tgaatattctaccat

SEQ ID NO: 948383 - DNA, 15 bp, Homo sapiens
ttgaatattctacca

SEQ ID NO: 948384 - DNA, 15 bp, Homo sapiens
cttgaatattctacc

SEQ ID NO: 948385 - DNA, 15 bp, Homo sapiens
tcttgaatattctac

SEQ ID NO: 948386 - DNA, 15 bp, Homo sapiens
atcttgaatattcta

SEQ ID NO: 948387 - DNA, 15 bp, Homo sapiens
aatcttgaatattct

SEQ ID NO: 948388 - DNA, 15 bp, Homo sapiens
taatcttgaatattc

SEQ ID NO: 948389 - DNA, 15 bp, Homo sapiens
ctaatcttgaatatt

SEQ ID NO: 948390 - DNA, 15 bp, Homo sapiens
tctaatcttgaatat

SEQ ID NO: 948391 - DNA, 15 bp, Homo sapiens
ttctaatcttgaata

SEQ ID NO: 948392 - DNA, 15 bp, Homo sapiens
attctaatcttgaat

SEQ ID NO: 948393 - DNA, 15 bp, Homo sapiens
tattctaatcttgaa

SEQ ID NO: 948394 - DNA, 15 bp, Homo sapiens
atattctaatcttga

SEQ ID NO: 948395 - DNA, 15 bp, Homo sapiens
tatattctaatcttg

SEQ ID NO: 948396 - DNA, 15 bp, Homo sapiens
ttatattctaatctt

SEQ ID NO: 948397 - DNA, 15 bp, Homo sapiens
attatattctaatct

SEQ ID NO: 948398 - DNA, 15 bp, Homo sapiens
cattatattctaatc

SEQ ID NO: 948399 - DNA, 15 bp, Homo sapiens
tcattatattctaat

SEQ ID NO: 948400 - DNA, 15 bp, Homo sapiens
atcattatattctaa

SEQ ID NO: 948401 - DNA, 15 bp, Homo sapiens
tatcattatattcta

SEQ ID NO: 948402 - DNA, 15 bp, Homo sapiens
ttatcattatattct

SEQ ID NO: 948403 - DNA, 15 bp, Homo sapiens
tttatcattatattc

SEQ ID NO: 948404 - DNA, 15 bp, Homo sapiens
gtttatcattatatt

SEQ ID NO: 948405 - DNA, 15 bp, Homo sapiens
agtttatcattatat

SEQ ID NO: 948406 - DNA, 15 bp, Homo sapiens
tagtttatcattata

SEQ ID NO: 948407 - DNA, 15 bp, Homo sapiens
ttagtttatcattat

SEQ ID NO: 948408 - DNA, 15 bp, Homo sapiens
attagtttatcatta

SEQ ID NO: 948409 - DNA, 15 bp, Homo sapiens
aattagtttatcatt

SEQ ID NO: 948410 - DNA, 15 bp, Homo sapiens
aaattagtttatcat

SEQ ID NO: 948411 - DNA, 15 bp, Homo sapiens
aaaattagtttatca

SEQ ID NO: 948412 - DNA, 15 bp, Homo sapiens
taaaattagtttatc

SEQ ID NO: 948413 - DNA, 15 bp, Homo sapiens
ataaaattagtttat

SEQ ID NO: 948414 - DNA, 15 bp, Homo sapiens
aataaaattagttta

SEQ ID NO: 948415 - DNA, 15 bp, Homo sapiens
aaataaaattagttt

SEQ ID NO: 948416 - DNA, 15 bp, Homo sapiens
caaataaaattagtt

SEQ ID NO: 948417 - DNA, 15 bp, Homo sapiens
gcaaataaaattagt

SEQ ID NO: 948418 - DNA, 15 bp, Homo sapiens
tgcaaataaaattag

SEQ ID NO: 948419 - DNA, 15 bp, Homo sapiens
atgcaaataaaatta

SEQ ID NO: 948420 - DNA, 15 bp, Homo sapiens
aatgcaaataaaatt

SEQ ID NO: 948421 - DNA, 15 bp, Homo sapiens
aaatgcaaataaaat

SEQ ID NO: 948422 - DNA, 15 bp, Homo sapiens
aaaatgcaaataaaa

SEQ ID NO: 948423 - DNA, 15 bp, Homo sapiens
taaaatgcaaataaa

SEQ ID NO: 948424 - DNA, 15 bp, Homo sapiens
ataaaatgcaaataa

SEQ ID NO: 948425 - DNA, 15 bp, Homo sapiens
tataaaatgcaaata

SEQ ID NO: 948426 - DNA, 15 bp, Homo sapiens
gtataaaatgcaaat

SEQ ID NO: 948427 - DNA, 15 bp, Homo sapiens
tgtataaaatgcaaa

SEQ ID NO: 948428 - DNA, 15 bp, Homo sapiens
atgtataaaatgcaa

SEQ ID NO: 948429 - DNA, 15 bp, Homo sapiens
gatgtataaaatgca

SEQ ID NO: 948430 - DNA, 15 bp, Homo sapiens
tgatgtataaaatgc

SEQ ID NO: 948431 - DNA, 15 bp, Homo sapiens
ttgatgtataaaatg

SEQ ID NO: 948432 - DNA, 15 bp, Homo sapiens
tttgatgtataaaat

SEQ ID NO: 948433 - DNA, 15 bp, Homo sapiens
atttgatgtataaaa

SEQ ID NO: 948434 - DNA, 15 bp, Homo sapiens
tatttgatgtataaa

SEQ ID NO: 948435 - DNA, 15 bp, Homo sapiens
atatttgatgtataa

SEQ ID NO: 948436 - DNA, 15 bp, Homo sapiens
aatatttgatgtata

SEQ ID NO: 948437 - DNA, 15 bp, Homo sapiens
taatatttgatgtat

SEQ ID NO: 948438 - DNA, 15 bp, Homo sapiens
ataatatttgatgta

SEQ ID NO: 948439 - DNA, 15 bp, Homo sapiens
tataatatttgatgt

SEQ ID NO: 948440 - DNA, 15 bp, Homo sapiens
atataatatttgatg

SEQ ID NO: 948441 - DNA, 15 bp, Homo sapiens
gatataatatttgat

SEQ ID NO: 948442 - DNA, 15 bp, Homo sapiens
agatataatatttga

SEQ ID NO: 948443 - DNA, 15 bp, Homo sapiens
aagatataatatttg

SEQ ID NO: 948444 - DNA, 15 bp, Homo sapiens
aaagatataatattt

SEQ ID NO: 948445 - DNA, 15 bp, Homo sapiens
caaagatataatatt

SEQ ID NO: 948446 - DNA, 15 bp, Homo sapiens
tcaaagatataatat

SEQ ID NO: 948447 - DNA, 15 bp, Homo sapiens
ctcaaagatataata

SEQ ID NO: 948448 - DNA, 15 bp, Homo sapiens
actcaaagatataat

SEQ ID NO: 948449 - DNA, 15 bp, Homo sapiens
gactcaaagatataa

SEQ ID NO: 948450 - DNA, 15 bp, Homo sapiens
agactcaaagatata

SEQ ID NO: 948451 - DNA, 15 bp, Homo sapiens
tagactcaaagatat

SEQ ID NO: 948452 - DNA, 15 bp, Homo sapiens
ttagactcaaagata

SEQ ID NO: 948453 - DNA, 15 bp, Homo sapiens
gttagactcaaagat

SEQ ID NO: 948454 - DNA, 15 bp, Homo sapiens
tgttagactcaaaga

SEQ ID NO: 948455 - DNA, 15 bp, Homo sapiens
ttgttagactcaaag

SEQ ID NO: 948456 - DNA, 15 bp, Homo sapiens
tttgttagactcaaa

SEQ ID NO: 948457 - DNA, 15 bp, Homo sapiens
atttgttagactcaa

SEQ ID NO: 948458 - DNA, 15 bp, Homo sapiens
aatttgttagactca

SEQ ID NO: 948459 - DNA, 15 bp, Homo sapiens
aaatttgttagactc

SEQ ID NO: 948460 - DNA, 15 bp, Homo sapiens
gaaatttgttagact

SEQ ID NO: 948461 - DNA, 15 bp, Homo sapiens
agaaatttgttagac

SEQ ID NO: 948462 - DNA, 15 bp, Homo sapiens
cagaaatttgttaga

SEQ ID NO: 948463 - DNA, 15 bp, Homo sapiens
tcagaaatttgttag

SEQ ID NO: 948464 - DNA, 15 bp, Homo sapiens
atcagaaatttgtta

SEQ ID NO: 948465 - DNA, 15 bp, Homo sapiens
aatcagaaatttgtt

SEQ ID NO: 948466 - DNA, 15 bp, Homo sapiens
taatcagaaatttgt

SEQ ID NO: 948467 - DNA, 15 bp, Homo sapiens
ataatcagaaatttg

SEQ ID NO: 948468 - DNA, 15 bp, Homo sapiens
gataatcagaaattt

SEQ ID NO: 948469 - DNA, 15 bp, Homo sapiens
agataatcagaaatt

SEQ ID NO: 948470 - DNA, 15 bp, Homo sapiens
tagataatcagaaat

SEQ ID NO: 948471 - DNA, 15 bp, Homo sapiens
atagataatcagaaa

SEQ ID NO: 948472 - DNA, 15 bp, Homo sapiens
aatagataatcagaa

SEQ ID NO: 948473 - DNA, 15 bp, Homo sapiens
aaatagataatcaga

SEQ ID NO: 948474 - DNA, 15 bp, Homo sapiens
aaaatagataatcag

SEQ ID NO: 948475 - DNA, 15 bp, Homo sapiens
aaaaatagataatca

SEQ ID NO: 948476 - DNA, 15 bp, Homo sapiens
taaaaatagataatc

SEQ ID NO: 948477 - DNA, 15 bp, Homo sapiens
ttaaaaatagataat

SEQ ID NO: 948478 - DNA, 15 bp, Homo sapiens
tttaaaaatagataa

SEQ ID NO: 948479 - DNA, 15 bp, Homo sapiens
ttttaaaaatagata

SEQ ID NO: 948480 - DNA, 15 bp, Homo sapiens
tttttaaaaatagat

SEQ ID NO: 948481 - DNA, 15 bp, Homo sapiens
ttttttaaaaataga

SEQ ID NO: 948482 - DNA, 15 bp, Homo sapiens
attttttaaaaatag

SEQ ID NO: 948483 - DNA, 15 bp, Homo sapiens
cattttttaaaaata

SEQ ID NO: 948484 - DNA, 15 bp, Homo sapiens
tcattttttaaaaat

SEQ ID NO: 948485 - DNA, 15 bp, Homo sapiens
atcattttttaaaaa

SEQ ID NO: 948486 - DNA, 15 bp, Homo sapiens
aatcattttttaaaa

SEQ ID NO: 948487 - DNA, 15 bp, Homo sapiens
taatcattttttaaa

SEQ ID NO: 948488 - DNA, 15 bp, Homo sapiens
ttaatcattttttaa

SEQ ID NO: 948489 - DNA, 15 bp, Homo sapiens
tttaatcatttttta

SEQ ID NO: 948490 - DNA, 15 bp, Homo sapiens
gtttaatcatttttt

SEQ ID NO: 948491 - DNA, 15 bp, Homo sapiens
tgtttaatcattttt

SEQ ID NO: 948492 - DNA, 15 bp, Homo sapiens
ttgtttaatcatttt

SEQ ID NO: 948493 - DNA, 15 bp, Homo sapiens
tttgtttaatcattt

SEQ ID NO: 948494 - DNA, 15 bp, Homo sapiens
gtttgtttaatcatt

SEQ ID NO: 948495 - DNA, 15 bp, Homo sapiens
tgtttgtttaatcat

SEQ ID NO: 948496 - DNA, 15 bp, Homo sapiens
gtgtttgtttaatca

SEQ ID NO: 948497 - DNA, 15 bp, Homo sapiens
agtgtttgtttaatc

SEQ ID NO: 948498 - DNA, 15 bp, Homo sapiens
aagtgtttgtttaat

SEQ ID NO: 948499 - DNA, 15 bp, Homo sapiens
taagtgtttgtttaa

SEQ ID NO: 948500 - DNA, 15 bp, Homo sapiens
ttaagtgtttgttta

SEQ ID NO: 948501 - DNA, 15 bp, Homo sapiens
attaagtgtttgttt

SEQ ID NO: 948502 - DNA, 15 bp, Homo sapiens
tattaagtgtttgtt

SEQ ID NO: 948503 - DNA, 15 bp, Homo sapiens
atattaagtgtttgt

SEQ ID NO: 948504 - DNA, 15 bp, Homo sapiens
gatattaagtgtttg

SEQ ID NO: 948505 - DNA, 15 bp, Homo sapiens
tgatattaagtgttt

SEQ ID NO: 948506 - DNA, 15 bp, Homo sapiens
ttgatattaagtgtt

SEQ ID NO: 948507 - DNA, 15 bp, Homo sapiens
tttgatattaagtgt

SEQ ID NO: 948508 - DNA, 15 bp, Homo sapiens
ctttgatattaagtg

SEQ ID NO: 948509 - DNA, 15 bp, Homo sapiens
cctttgatattaagt

SEQ ID NO: 948510 - DNA, 15 bp, Homo sapiens
gcctttgatattaag

SEQ ID NO: 948511 - DNA, 15 bp, Homo sapiens
tgcctttgatattaa

SEQ ID NO: 948512 - DNA, 15 bp, Homo sapiens
ctgcctttgatatta

SEQ ID NO: 948513 - DNA, 15 bp, Homo sapiens
tctgcctttgatatt

SEQ ID NO: 948514 - DNA, 15 bp, Homo sapiens
ctctgcctttgatat

SEQ ID NO: 948515 - DNA, 15 bp, Homo sapiens
actctgcctttgata

SEQ ID NO: 948516 - DNA, 15 bp, Homo sapiens
gactctgcctttgat

SEQ ID NO: 948517 - DNA, 15 bp, Homo sapiens
tgactctgcctttga

SEQ ID NO: 948518 - DNA, 15 bp, Homo sapiens
gtgactctgcctttg

SEQ ID NO: 948519 - DNA, 15 bp, Homo sapiens
tgtgactctgccttt

SEQ ID NO: 948520 - DNA, 15 bp, Homo sapiens
atgtgactctgcctt

SEQ ID NO: 948521 - DNA, 15 bp, Homo sapiens
aatgtgactctgcct

SEQ ID NO: 948522 - DNA, 15 bp, Homo sapiens
aaatgtgactctgcc

SEQ ID NO: 948523 - DNA, 15 bp, Homo sapiens
caaatgtgactctgc

SEQ ID NO: 948524 - DNA, 15 bp, Homo sapiens
acaaatgtgactctg

SEQ ID NO: 948525 - DNA, 15 bp, Homo sapiens
aacaaatgtgactct

SEQ ID NO: 948526 - DNA, 15 bp, Homo sapiens
gaacaaatgtgactc

SEQ ID NO: 948527 - DNA, 15 bp, Homo sapiens
tgaacaaatgtgact

SEQ ID NO: 948528 - DNA, 15 bp, Homo sapiens
ctgaacaaatgtgac

SEQ ID NO: 948529 - DNA, 15 bp, Homo sapiens
cctgaacaaatgtga

SEQ ID NO: 948530 - DNA, 15 bp, Homo sapiens
acctgaacaaatgtg

SEQ ID NO: 948531 - DNA, 15 bp, Homo sapiens
aacctgaacaaatgt

SEQ ID NO: 948532 - DNA, 15 bp, Homo sapiens
gaacctgaacaaatg

SEQ ID NO: 948533 - DNA, 15 bp, Homo sapiens
tgaacctgaacaaat

SEQ ID NO: 948534 - DNA, 15 bp, Homo sapiens
atgaacctgaacaaa

SEQ ID NO: 948535 - DNA, 15 bp, Homo sapiens
catgaacctgaacaa

SEQ ID NO: 948536 - DNA, 15 bp, Homo sapiens
acatgaacctgaaca

SEQ ID NO: 948537 - DNA, 15 bp, Homo sapiens
aacatgaacctgaac

SEQ ID NO: 948538 - DNA, 15 bp, Homo sapiens
caacatgaacctgaa

SEQ ID NO: 948539 - DNA, 15 bp, Homo sapiens
tcaacatgaacctga

SEQ ID NO: 948540 - DNA, 15 bp, Homo sapiens
atcaacatgaacctg

SEQ ID NO: 948541 - DNA, 15 bp, Homo sapiens
tatcaacatgaacct

SEQ ID NO: 948542 - DNA, 15 bp, Homo sapiens
ttatcaacatgaacc

SEQ ID NO: 948543 - DNA, 15 bp, Homo sapiens
attatcaacatgaac

SEQ ID NO: 948544 - DNA, 15 bp, Homo sapiens
tattatcaacatgaa

SEQ ID NO: 948545 - DNA, 15 bp, Homo sapiens
ttattatcaacatga

SEQ ID NO: 948546 - DNA, 15 bp, Homo sapiens
gttattatcaacatg

SEQ ID NO: 948547 - DNA, 15 bp, Homo sapiens
agttattatcaacat

SEQ ID NO: 948548 - DNA, 15 bp, Homo sapiens
cagttattatcaaca

SEQ ID NO: 948549 - DNA, 15 bp, Homo sapiens
ccagttattatcaac

SEQ ID NO: 948550 - DNA, 15 bp, Homo sapiens
accagttattatcaa

SEQ ID NO: 948551 - DNA, 15 bp, Homo sapiens
gaccagttattatca

SEQ ID NO: 948552 - DNA, 15 bp, Homo sapiens
agaccagttattatc

SEQ ID NO: 948553 - DNA, 15 bp, Homo sapiens
aagaccagttattat

SEQ ID NO: 948554 - DNA, 15 bp, Homo sapiens
caagaccagttatta

SEQ ID NO: 948555 - DNA, 15 bp, Homo sapiens
tcaagaccagttatt

SEQ ID NO: 948556 - DNA, 15 bp, Homo sapiens
ttcaagaccagttat

SEQ ID NO: 948557 - DNA, 15 bp, Homo sapiens
attcaagaccagtta

SEQ ID NO: 948558 - DNA, 15 bp, Homo sapiens
aattcaagaccagtt

SEQ ID NO: 948559 - DNA, 15 bp, Homo sapiens
gaattcaagaccagt

SEQ ID NO: 948560 - DNA, 15 bp, Homo sapiens
tgaattcaagaccag

SEQ ID NO: 948561 - DNA, 15 bp, Homo sapiens
atgaattcaagacca

SEQ ID NO: 948562 - DNA, 15 bp, Homo sapiens
catgaattcaagacc

SEQ ID NO: 948563 - DNA, 15 bp, Homo sapiens
acatgaattcaagac

SEQ ID NO: 948564 - DNA, 15 bp, Homo sapiens
tacatgaattcaaga

SEQ ID NO: 948565 - DNA, 15 bp, Homo sapiens
ttacatgaattcaag

SEQ ID NO: 948566 - DNA, 15 bp, Homo sapiens
cttacatgaattcaa

SEQ ID NO: 948567 - DNA, 15 bp, Homo sapiens
acttacatgaattca

SEQ ID NO: 948568 - DNA, 15 bp, Homo sapiens
tacttacatgaattc

SEQ ID NO: 948569 - DNA, 15 bp, Homo sapiens
atacttacatgaatt

SEQ ID NO: 948570 - DNA, 15 bp, Homo sapiens
gatacttacatgaat

SEQ ID NO: 948571 - DNA, 15 bp, Homo sapiens
agatacttacatgaa

SEQ ID NO: 948572 - DNA, 15 bp, Homo sapiens
cagatacttacatga

SEQ ID NO: 948573 - DNA, 15 bp, Homo sapiens
ccagatacttacatg

SEQ ID NO: 948574 - DNA, 15 bp, Homo sapiens
tccagatacttacat

SEQ ID NO: 948575 - DNA, 15 bp, Homo sapiens
ttccagatacttaca

SEQ ID NO: 948576 - DNA, 15 bp, Homo sapiens
attccagatacttac

SEQ ID NO: 948577 - DNA, 15 bp, Homo sapiens
aattccagatactta

SEQ ID NO: 948578 - DNA, 15 bp, Homo sapiens
caattccagatactt

SEQ ID NO: 948579 - DNA, 15 bp, Homo sapiens
ccaattccagatact

SEQ ID NO: 948580 - DNA, 15 bp, Homo sapiens
gccaattccagatac

SEQ ID NO: 948581 - DNA, 15 bp, Homo sapiens
ggccaattccagata

SEQ ID NO: 948582 - DNA, 15 bp, Homo sapiens
tggccaattccagat

SEQ ID NO: 948583 - DNA, 15 bp, Homo sapiens
ctggccaattccaga

SEQ ID NO: 948584 - DNA, 15 bp, Homo sapiens
gctggccaattccag

SEQ ID NO: 948585 - DNA, 15 bp, Homo sapiens
tgctggccaattcca

SEQ ID NO: 948586 - DNA, 15 bp, Homo sapiens
atgctggccaattcc

SEQ ID NO: 948587 - DNA, 15 bp, Homo sapiens
tatgctggccaattc

SEQ ID NO: 948588 - DNA, 15 bp, Homo sapiens
ttatgctggccaatt

SEQ ID NO: 948589 - DNA, 15 bp, Homo sapiens
cttatgctggccaat

SEQ ID NO: 948590 - DNA, 15 bp, Homo sapiens
gcttatgctggccaa

SEQ ID NO: 948591 - DNA, 15 bp, Homo sapiens
ggcttatgctggcca

SEQ ID NO: 948592 - DNA, 15 bp, Homo sapiens
tggcttatgctggcc

SEQ ID NO: 948593 - DNA, 15 bp, Homo sapiens
ttggcttatgctggc

SEQ ID NO: 948594 - DNA, 15 bp, Homo sapiens
cttggcttatgctgg

SEQ ID NO: 948595 - DNA, 15 bp, Homo sapiens
tcttggcttatgctg

SEQ ID NO: 948596 - DNA, 15 bp, Homo sapiens
atcttggcttatgct

SEQ ID NO: 948597 - DNA, 15 bp, Homo sapiens
catcttggcttatgc

SEQ ID NO: 948598 - DNA, 15 bp, Homo sapiens
tcatcttggcttatg

SEQ ID NO: 948599 - DNA, 15 bp, Homo sapiens
atcatcttggcttat

SEQ ID NO: 948600 - DNA, 15 bp, Homo sapiens
catcatcttggctta

SEQ ID NO: 948601 - DNA, 15 bp, Homo sapiens
ccatcatcttggctt

SEQ ID NO: 948602 - DNA, 15 bp, Homo sapiens
gccatcatcttggct

SEQ ID NO: 948603 - DNA, 15 bp, Homo sapiens
cgccatcatcttggc

SEQ ID NO: 948604 - DNA, 15 bp, Homo sapiens
tcgccatcatcttgg

SEQ ID NO: 948605 - DNA, 15 bp, Homo sapiens
atcgccatcatcttg

SEQ ID NO: 948606 - DNA, 15 bp, Homo sapiens
catcgccatcatctt

SEQ ID NO: 948607 - DNA, 15 bp, Homo sapiens
ccatcgccatcatct

SEQ ID NO: 948608 - DNA, 15 bp, Homo sapiens
tccatcgccatcatc

SEQ ID NO: 948609 - DNA, 15 bp, Homo sapiens
gtccatcgccatcat

SEQ ID NO: 948610 - DNA, 15 bp, Homo sapiens
ggtccatcgccatca

SEQ ID NO: 948611 - DNA, 15 bp, Homo sapiens
aggtccatcgccatc

SEQ ID NO: 948612 - DNA, 15 bp, Homo sapiens
caggtccatcgccat

SEQ ID NO: 948613 - DNA, 15 bp, Homo sapiens
ccaggtccatcgcca

SEQ ID NO: 948614 - DNA, 15 bp, Homo sapiens
tccaggtccatcgcc

SEQ ID NO: 948615 - DNA, 15 bp, Homo sapiens
ttccaggtccatcgc

SEQ ID NO: 948616 - DNA, 15 bp, Homo sapiens
tttccaggtccatcg

SEQ ID NO: 948617 - DNA, 15 bp, Homo sapiens
ctttccaggtccatc

SEQ ID NO: 948618 - DNA, 15 bp, Homo sapiens
tctttccaggtccat

SEQ ID NO: 948619 - DNA, 15 bp, Homo sapiens
ctctttccaggtcca

SEQ ID NO: 948620 - DNA, 15 bp, Homo sapiens
tctctttccaggtcc

SEQ ID NO: 948621 - DNA, 15 bp, Homo sapiens
ttctctttccaggtc

SEQ ID NO: 948622 - DNA, 15 bp, Homo sapiens
tttctctttccaggt

SEQ ID NO: 948623 - DNA, 15 bp, Homo sapiens
ttttctctttccagg

SEQ ID NO: 948624 - DNA, 15 bp, Homo sapiens
tttttctctttccag

SEQ ID NO: 948625 - DNA, 15 bp, Homo sapiens
ttttttctctttcca

SEQ ID NO: 948626 - DNA, 15 bp, Homo sapiens
cttttttctctttcc

SEQ ID NO: 948627 - DNA, 15 bp, Homo sapiens
ccttttttctctttc

SEQ ID NO: 948628 - DNA, 15 bp, Homo sapiens
accttttttctcttt

SEQ ID NO: 948629 - DNA, 15 bp, Homo sapiens
taccttttttctctt

SEQ ID NO: 948630 - DNA, 15 bp, Homo sapiens
ataccttttttctct

SEQ ID NO: 948631 - DNA, 15 bp, Homo sapiens
aataccttttttctc

SEQ ID NO: 948632 - DNA, 15 bp, Homo sapiens
taataccttttttct

SEQ ID NO: 948633 - DNA, 15 bp, Homo sapiens
ctaataccttttttc

SEQ ID NO: 948634 - DNA, 15 bp, Homo sapiens
gctaatacctttttt

SEQ ID NO: 948635 - DNA, 15 bp, Homo sapiens
agctaataccttttt

SEQ ID NO: 948636 - DNA, 15 bp, Homo sapiens
aagctaatacctttt

SEQ ID NO: 948637 - DNA, 15 bp, Homo sapiens
aaagctaataccttt

SEQ ID NO: 948638 - DNA, 15 bp, Homo sapiens
taaagctaatacctt

SEQ ID NO: 948639 - DNA, 15 bp, Homo sapiens
ctaaagctaatacct

SEQ ID NO: 948640 - DNA, 15 bp, Homo sapiens
gctaaagctaatacc

SEQ ID NO: 948641 - DNA, 15 bp, Homo sapiens
tgctaaagctaatac

SEQ ID NO: 948642 - DNA, 15 bp, Homo sapiens
atgctaaagctaata

SEQ ID NO: 948643 - DNA, 15 bp, Homo sapiens
tatgctaaagctaat

SEQ ID NO: 948644 - DNA, 15 bp, Homo sapiens
gtatgctaaagctaa

SEQ ID NO: 948645 - DNA, 15 bp, Homo sapiens
tgtatgctaaagcta

SEQ ID NO: 948646 - DNA, 15 bp, Homo sapiens
ctgtatgctaaagct

SEQ ID NO: 948647 - DNA, 15 bp, Homo sapiens
tctgtatgctaaagc

SEQ ID NO: 948648 - DNA, 15 bp, Homo sapiens
atctgtatgctaaag

SEQ ID NO: 948649 - DNA, 15 bp, Homo sapiens
tatctgtatgctaaa

SEQ ID NO: 948650 - DNA, 15 bp, Homo sapiens
gtatctgtatgctaa

SEQ ID NO: 948651 - DNA, 15 bp, Homo sapiens
agtatctgtatgcta

SEQ ID NO: 948652 - DNA, 15 bp, Homo sapiens
tagtatctgtatgct

SEQ ID NO: 948653 - DNA, 15 bp, Homo sapiens
atagtatctgtatgc

SEQ ID NO: 948654 - DNA, 15 bp, Homo sapiens
gatagtatctgtatg

SEQ ID NO: 948655 - DNA, 15 bp, Homo sapiens
agatagtatctgtat

SEQ ID NO: 948656 - DNA, 15 bp, Homo sapiens
aagatagtatctgta

SEQ ID NO: 948657 - DNA, 15 bp, Homo sapiens
gaagatagtatctgt

SEQ ID NO: 948658 - DNA, 15 bp, Homo sapiens
tgaagatagtatctg

SEQ ID NO: 948659 - DNA, 15 bp, Homo sapiens
atgaagatagtatct

SEQ ID NO: 948660 - DNA, 15 bp, Homo sapiens
aatgaagatagtatc

SEQ ID NO: 948661 - DNA, 15 bp, Homo sapiens
gaatgaagatagtat

SEQ ID NO: 948662 - DNA, 15 bp, Homo sapiens
tgaatgaagatagta

SEQ ID NO: 948663 - DNA, 15 bp, Homo sapiens
gtgaatgaagatagt

SEQ ID NO: 948664 - DNA, 15 bp, Homo sapiens
agtgaatgaagatag

SEQ ID NO: 948665 - DNA, 15 bp, Homo sapiens
aagtgaatgaagata

SEQ ID NO: 948666 - DNA, 15 bp, Homo sapiens
taagtgaatgaagat

SEQ ID NO: 948667 - DNA, 15 bp, Homo sapiens
ctaagtgaatgaaga

SEQ ID NO: 948668 - DNA, 15 bp, Homo sapiens
tctaagtgaatgaag

SEQ ID NO: 948669 - DNA, 15 bp, Homo sapiens
ttctaagtgaatgaa

SEQ ID NO: 948670 - DNA, 15 bp, Homo sapiens
tttctaagtgaatga

SEQ ID NO: 948671 - DNA, 15 bp, Homo sapiens
atttctaagtgaatg

SEQ ID NO: 948672 - DNA, 15 bp, Homo sapiens
tatttctaagtgaat

SEQ ID NO: 948673 - DNA, 15 bp, Homo sapiens
atatttctaagtgaa

SEQ ID NO: 948674 - DNA, 15 bp, Homo sapiens
aatatttctaagtga

SEQ ID NO: 948675 - DNA, 15 bp, Homo sapiens
aaatatttctaagtg

SEQ ID NO: 948676 - DNA, 15 bp, Homo sapiens
caaatatttctaagt

SEQ ID NO: 948677 - DNA, 15 bp, Homo sapiens
tcaaatatttctaag

SEQ ID NO: 948678 - DNA, 15 bp, Homo sapiens
ctcaaatatttctaa

SEQ ID NO: 948679 - DNA, 15 bp, Homo sapiens
actcaaatatttcta

SEQ ID NO: 948680 - DNA, 15 bp, Homo sapiens
cactcaaatatttct

SEQ ID NO: 948681 - DNA, 15 bp, Homo sapiens
gcactcaaatatttc

SEQ ID NO: 948682 - DNA, 15 bp, Homo sapiens
ggcactcaaatattt

SEQ ID NO: 948683 - DNA, 15 bp, Homo sapiens
gggcactcaaatatt

SEQ ID NO: 948684 - DNA, 15 bp, Homo sapiens
tgggcactcaaatat

SEQ ID NO: 948685 - DNA, 15 bp, Homo sapiens
gtgggcactcaaata

SEQ ID NO: 948686 - DNA, 15 bp, Homo sapiens
agtgggcactcaaat

SEQ ID NO: 948687 - DNA, 15 bp, Homo sapiens
cagtgggcactcaaa

SEQ ID NO: 948688 - DNA, 15 bp, Homo sapiens
acagtgggcactcaa

SEQ ID NO: 948689 - DNA, 15 bp, Homo sapiens
gacagtgggcactca

SEQ ID NO: 948690 - DNA, 15 bp, Homo sapiens
agacagtgggcactc

SEQ ID NO: 948691 - DNA, 15 bp, Homo sapiens
cagacagtgggcact

SEQ ID NO: 948692 - DNA, 15 bp, Homo sapiens
gcagacagtgggcac

SEQ ID NO: 948693 - DNA, 15 bp, Homo sapiens
ggcagacagtgggca

SEQ ID NO: 948694 - DNA, 15 bp, Homo sapiens
tggcagacagtgggc

SEQ ID NO: 948695 - DNA, 15 bp, Homo sapiens
ctggcagacagtggg

SEQ ID NO: 948696 - DNA, 15 bp, Homo sapiens
cctggcagacagtgg

SEQ ID NO: 948697 - DNA, 15 bp, Homo sapiens
acctggcagacagtg

SEQ ID NO: 948698 - DNA, 15 bp, Homo sapiens
tacctggcagacagt

SEQ ID NO: 948699 - DNA, 15 bp, Homo sapiens
gtacctggcagacag

SEQ ID NO: 948700 - DNA, 15 bp, Homo sapiens
agtacctggcagaca

SEQ ID NO: 948701 - DNA, 15 bp, Homo sapiens
cagtacctggcagac

SEQ ID NO: 948702 - DNA, 15 bp, Homo sapiens
ccagtacctggcaga

SEQ ID NO: 948703 - DNA, 15 bp, Homo sapiens
cccagtacctggcag

SEQ ID NO: 948704 - DNA, 15 bp, Homo sapiens
acccagtacctggca

SEQ ID NO: 948705 - DNA, 15 bp, Homo sapiens
tacccagtacctggc

SEQ ID NO: 948706 - DNA, 15 bp, Homo sapiens
ttacccagtacctgg

SEQ ID NO: 948707 - DNA, 15 bp, Homo sapiens
cttacccagtacctg

SEQ ID NO: 948708 - DNA, 15 bp, Homo sapiens
tcttacccagtacct

SEQ ID NO: 948709 - DNA, 15 bp, Homo sapiens
gtcttacccagtacc

SEQ ID NO: 948710 - DNA, 15 bp, Homo sapiens
agtcttacccagtac

SEQ ID NO: 948711 - DNA, 15 bp, Homo sapiens
gagtcttacccagta

SEQ ID NO: 948712 - DNA, 15 bp, Homo sapiens
ggagtcttacccagt

SEQ ID NO: 948713 - DNA, 15 bp, Homo sapiens
tggagtcttacccag

SEQ ID NO: 948714 - DNA, 15 bp, Homo sapiens
gtggagtcttaccca

SEQ ID NO: 948715 - DNA, 15 bp, Homo sapiens
agtggagtcttaccc

SEQ ID NO: 948716 - DNA, 15 bp, Homo sapiens
aagtggagtcttacc

SEQ ID NO: 948717 - DNA, 15 bp, Homo sapiens
aaagtggagtcttac

SEQ ID NO: 948718 - DNA, 15 bp, Homo sapiens
taaagtggagtctta

SEQ ID NO: 948719 - DNA, 15 bp, Homo sapiens
ataaagtggagtctt

SEQ ID NO: 948720 - DNA, 15 bp, Homo sapiens
gataaagtggagtct

SEQ ID NO: 948721 - DNA, 15 bp, Homo sapiens
agataaagtggagtc

SEQ ID NO: 948722 - DNA, 15 bp, Homo sapiens
aagataaagtggagt

SEQ ID NO: 948723 - DNA, 15 bp, Homo sapiens
taagataaagtggag

SEQ ID NO: 948724 - DNA, 15 bp, Homo sapiens
gtaagataaagtgga

SEQ ID NO: 948725 - DNA, 15 bp, Homo sapiens
agtaagataaagtgg

SEQ ID NO: 948726 - DNA, 15 bp, Homo sapiens
cagtaagataaagtg

SEQ ID NO: 948727 - DNA, 15 bp, Homo sapiens
acagtaagataaagt

SEQ ID NO: 948728 - DNA, 15 bp, Homo sapiens
aacagtaagataaag

SEQ ID NO: 948729 - DNA, 15 bp, Homo sapiens
aaacagtaagataaa

SEQ ID NO: 948730 - DNA, 15 bp, Homo sapiens
aaaacagtaagataa

SEQ ID NO: 948731 - DNA, 15 bp, Homo sapiens
aaaaacagtaagata

SEQ ID NO: 948732 - DNA, 15 bp, Homo sapiens
aaaaaacagtaagat

SEQ ID NO: 948733 - DNA, 15 bp, Homo sapiens
aaaaaaacagtaaga

SEQ ID NO: 948734 - DNA, 15 bp, Homo sapiens
aaaaaaaacagtaag

SEQ ID NO: 948735 - DNA, 15 bp, Homo sapiens
aaaaaaaaacagtaa

SEQ ID NO: 948736 - DNA, 15 bp, Homo sapiens
aaaaaaaaaacagta

SEQ ID NO: 948737 - DNA, 15 bp, Homo sapiens
aaaaaaaaaaacagt

SEQ ID NO: 948738 - DNA, 15 bp, Homo sapiens
taaaaaaaaaaacag

SEQ ID NO: 948739 - DNA, 15 bp, Homo sapiens
ataaaaaaaaaaaca

SEQ ID NO: 948740 - DNA, 15 bp, Homo sapiens
tataaaaaaaaaaac

SEQ ID NO: 948741 - DNA, 15 bp, Homo sapiens
ctataaaaaaaaaaa

SEQ ID NO: 948742 - DNA, 15 bp, Homo sapiens
gctataaaaaaaaaa

SEQ ID NO: 948743 - DNA, 15 bp, Homo sapiens
agctataaaaaaaaa

SEQ ID NO: 948744 - DNA, 15 bp, Homo sapiens
cagctataaaaaaaa

SEQ ID NO: 948745 - DNA, 15 bp, Homo sapiens
ccagctataaaaaaa

SEQ ID NO: 948746 - DNA, 15 bp, Homo sapiens
accagctataaaaaa

SEQ ID NO: 948747 - DNA, 15 bp, Homo sapiens
gaccagctataaaaa

SEQ ID NO: 948748 - DNA, 15 bp, Homo sapiens
agaccagctataaaa

SEQ ID NO: 948749 - DNA, 15 bp, Homo sapiens
aagaccagctataaa

SEQ ID NO: 948750 - DNA, 15 bp, Homo sapiens
gaagaccagctataa

SEQ ID NO: 948751 - DNA, 15 bp, Homo sapiens
agaagaccagctata

SEQ ID NO: 948752 - DNA, 15 bp, Homo sapiens
gagaagaccagctat

SEQ ID NO: 948753 - DNA, 15 bp, Homo sapiens
ggagaagaccagcta

SEQ ID NO: 948754 - DNA, 15 bp, Homo sapiens
aggagaagaccagct

SEQ ID NO: 948755 - DNA, 15 bp, Homo sapiens
caggagaagaccagc

SEQ ID NO: 948756 - DNA, 15 bp, Homo sapiens
tcaggagaagaccag

SEQ ID NO: 948757 - DNA, 15 bp, Homo sapiens
gtcaggagaagacca

SEQ ID NO: 948758 - DNA, 15 bp, Homo sapiens
tgtcaggagaagacc

SEQ ID NO: 948759 - DNA, 15 bp, Homo sapiens
atgtcaggagaagac

SEQ ID NO: 948760 - DNA, 15 bp, Homo sapiens
tatgtcaggagaaga

SEQ ID NO: 948761 - DNA, 15 bp, Homo sapiens
atatgtcaggagaag

SEQ ID NO: 948762 - DNA, 15 bp, Homo sapiens
aatatgtcaggagaa

SEQ ID NO: 948763 - DNA, 15 bp, Homo sapiens
taatatgtcaggaga

SEQ ID NO: 948764 - DNA, 15 bp, Homo sapiens
gtaatatgtcaggag

SEQ ID NO: 948765 - DNA, 15 bp, Homo sapiens
tgtaatatgtcagga

SEQ ID NO: 948766 - DNA, 15 bp, Homo sapiens
atgtaatatgtcagg

SEQ ID NO: 948767 - DNA, 15 bp, Homo sapiens
tatgtaatatgtcag

SEQ ID NO: 948768 - DNA, 15 bp, Homo sapiens
atatgtaatatgtca

SEQ ID NO: 948769 - DNA, 15 bp, Homo sapiens
aatatgtaatatgtc

SEQ ID NO: 948770 - DNA, 15 bp, Homo sapiens
aaatatgtaatatgt

SEQ ID NO: 948771 - DNA, 15 bp, Homo sapiens
caaatatgtaatatg

SEQ ID NO: 948772 - DNA, 15 bp, Homo sapiens
acaaatatgtaatat

SEQ ID NO: 948773 - DNA, 15 bp, Homo sapiens
aacaaatatgtaata

SEQ ID NO: 948774 - DNA, 15 bp, Homo sapiens
aaacaaatatgtaat

SEQ ID NO: 948775 - DNA, 15 bp, Homo sapiens
taaacaaatatgtaa

SEQ ID NO: 948776 - DNA, 15 bp, Homo sapiens
ataaacaaatatgta

SEQ ID NO: 948777 - DNA, 15 bp, Homo sapiens
aataaacaaatatgt

SEQ ID NO: 948778 - DNA, 15 bp, Homo sapiens
caataaacaaatatg

SEQ ID NO: 948779 - DNA, 15 bp, Homo sapiens
acaataaacaaatat

SEQ ID NO: 948780 - DNA, 15 bp, Homo sapiens
gacaataaacaaata

SEQ ID NO: 948781 - DNA, 15 bp, Homo sapiens
agacaataaacaaat

SEQ ID NO: 948782 - DNA, 15 bp, Homo sapiens
tagacaataaacaaa

SEQ ID NO: 948783 - DNA, 15 bp, Homo sapiens
atagacaataaacaa

SEQ ID NO: 948784 - DNA, 15 bp, Homo sapiens
gatagacaataaaca

SEQ ID NO: 948785 - DNA, 15 bp, Homo sapiens
agatagacaataaac

SEQ ID NO: 948786 - DNA, 15 bp, Homo sapiens
aagatagacaataaa

SEQ ID NO: 948787 - DNA, 15 bp, Homo sapiens
gaagatagacaataa

SEQ ID NO: 948788 - DNA, 15 bp, Homo sapiens
ggaagatagacaata

SEQ ID NO: 948789 - DNA, 15 bp, Homo sapiens
gggaagatagacaat

SEQ ID NO: 948790 - DNA, 15 bp, Homo sapiens
ggggaagatagacaa

SEQ ID NO: 948791 - DNA, 15 bp, Homo sapiens
tggggaagatagaca

SEQ ID NO: 948792 - DNA, 15 bp, Homo sapiens
atggggaagatagac

SEQ ID NO: 948793 - DNA, 15 bp, Homo sapiens
aatggggaagataga

SEQ ID NO: 948794 - DNA, 15 bp, Homo sapiens
taatggggaagatag

SEQ ID NO: 948795 - DNA, 15 bp, Homo sapiens
ctaatggggaagata

SEQ ID NO: 948796 - DNA, 15 bp, Homo sapiens
tctaatggggaagat

SEQ ID NO: 948797 - DNA, 15 bp, Homo sapiens
ttctaatggggaaga

SEQ ID NO: 948798 - DNA, 15 bp, Homo sapiens
attctaatggggaag

SEQ ID NO: 948799 - DNA, 15 bp, Homo sapiens
cattctaatggggaa

SEQ ID NO: 948800 - DNA, 15 bp, Homo sapiens
acattctaatgggga

SEQ ID NO: 948801 - DNA, 15 bp, Homo sapiens
cacattctaatgggg

SEQ ID NO: 948802 - DNA, 15 bp, Homo sapiens
tcacattctaatggg

SEQ ID NO: 948803 - DNA, 15 bp, Homo sapiens
ctcacattctaatgg

SEQ ID NO: 948804 - DNA, 15 bp, Homo sapiens
gctcacattctaatg

SEQ ID NO: 948805 - DNA, 15 bp, Homo sapiens
agctcacattctaat

SEQ ID NO: 948806 - DNA, 15 bp, Homo sapiens
aagctcacattctaa

SEQ ID NO: 948807 - DNA, 15 bp, Homo sapiens
gaagctcacattcta

SEQ ID NO: 948808 - DNA, 15 bp, Homo sapiens
tgaagctcacattct

SEQ ID NO: 948809 - DNA, 15 bp, Homo sapiens
atgaagctcacattc

SEQ ID NO: 948810 - DNA, 15 bp, Homo sapiens
catgaagctcacatt

SEQ ID NO: 948811 - DNA, 15 bp, Homo sapiens
tcatgaagctcacat

SEQ ID NO: 948812 - DNA, 15 bp, Homo sapiens
ttcatgaagctcaca

SEQ ID NO: 948813 - DNA, 15 bp, Homo sapiens
cttcatgaagctcac

SEQ ID NO: 948814 - DNA, 15 bp, Homo sapiens
ccttcatgaagctca

SEQ ID NO: 948815 - DNA, 15 bp, Homo sapiens
gccttcatgaagctc

SEQ ID NO: 948816 - DNA, 15 bp, Homo sapiens
tgccttcatgaagct

SEQ ID NO: 948817 - DNA, 15 bp, Homo sapiens
ctgccttcatgaagc

SEQ ID NO: 948818 - DNA, 15 bp, Homo sapiens
tctgccttcatgaag

SEQ ID NO: 948819 - DNA, 15 bp, Homo sapiens
gtctgccttcatgaa

SEQ ID NO: 948820 - DNA, 15 bp, Homo sapiens
tgtctgccttcatga

SEQ ID NO: 948821 - DNA, 15 bp, Homo sapiens
gtgtctgccttcatg

SEQ ID NO: 948822 - DNA, 15 bp, Homo sapiens
ggtgtctgccttcat

SEQ ID NO: 948823 - DNA, 15 bp, Homo sapiens
aggtgtctgccttca

SEQ ID NO: 948824 - DNA, 15 bp, Homo sapiens
aaggtgtctgccttc

SEQ ID NO: 948825 - DNA, 15 bp, Homo sapiens
caaggtgtctgcctt

SEQ ID NO: 948826 - DNA, 15 bp, Homo sapiens
acaaggtgtctgcct

SEQ ID NO: 948827 - DNA, 15 bp, Homo sapiens
aacaaggtgtctgcc

SEQ ID NO: 948828 - DNA, 15 bp, Homo sapiens
aaacaaggtgtctgc

SEQ ID NO: 948829 - DNA, 15 bp, Homo sapiens
aaaacaaggtgtctg

SEQ ID NO: 948830 - DNA, 15 bp, Homo sapiens
caaaacaaggtgtct

SEQ ID NO: 948831 - DNA, 15 bp, Homo sapiens
acaaaacaaggtgtc

SEQ ID NO: 948832 - DNA, 15 bp, Homo sapiens
aacaaaacaaggtgt

SEQ ID NO: 948833 - DNA, 15 bp, Homo sapiens
caacaaaacaaggtg

SEQ ID NO: 948834 - DNA, 15 bp, Homo sapiens
tcaacaaaacaaggt

SEQ ID NO: 948835 - DNA, 15 bp, Homo sapiens
gtcaacaaaacaagg

SEQ ID NO: 948836 - DNA, 15 bp, Homo sapiens
agtcaacaaaacaag

SEQ ID NO: 948837 - DNA, 15 bp, Homo sapiens
cagtcaacaaaacaa

SEQ ID NO: 948838 - DNA, 15 bp, Homo sapiens
acagtcaacaaaaca

SEQ ID NO: 948839 - DNA, 15 bp, Homo sapiens
cacagtcaacaaaac

SEQ ID NO: 948840 - DNA, 15 bp, Homo sapiens
acacagtcaacaaaa

SEQ ID NO: 948841 - DNA, 15 bp, Homo sapiens
tacacagtcaacaaa

SEQ ID NO: 948842 - DNA, 15 bp, Homo sapiens
atacacagtcaacaa

SEQ ID NO: 948843 - DNA, 15 bp, Homo sapiens
catacacagtcaaca

SEQ ID NO: 948844 - DNA, 15 bp, Homo sapiens
acatacacagtcaac

SEQ ID NO: 948845 - DNA, 15 bp, Homo sapiens
gacatacacagtcaa

SEQ ID NO: 948846 - DNA, 15 bp, Homo sapiens
ggacatacacagtca

SEQ ID NO: 948847 - DNA, 15 bp, Homo sapiens
tggacatacacagtc

SEQ ID NO: 948848 - DNA, 15 bp, Homo sapiens
ctggacatacacagt

SEQ ID NO: 948849 - DNA, 15 bp, Homo sapiens
gctggacatacacag

SEQ ID NO: 948850 - DNA, 15 bp, Homo sapiens
tgctggacatacaca

SEQ ID NO: 948851 - DNA, 15 bp, Homo sapiens
gtgctggacatacac

SEQ ID NO: 948852 - DNA, 15 bp, Homo sapiens
ggtgctggacataca

SEQ ID NO: 948853 - DNA, 15 bp, Homo sapiens
aggtgctggacatac

SEQ ID NO: 948854 - DNA, 15 bp, Homo sapiens
caggtgctggacata

SEQ ID NO: 948855 - DNA, 15 bp, Homo sapiens
ccaggtgctggacat

SEQ ID NO: 948856 - DNA, 15 bp, Homo sapiens
tccaggtgctggaca

SEQ ID NO: 948857 - DNA, 15 bp, Homo sapiens
ttccaggtgctggac

SEQ ID NO: 948858 - DNA, 15 bp, Homo sapiens
tttccaggtgctgga

SEQ ID NO: 948859 - DNA, 15 bp, Homo sapiens
gtttccaggtgctgg

SEQ ID NO: 948860 - DNA, 15 bp, Homo sapiens
tgtttccaggtgctg

SEQ ID NO: 948861 - DNA, 15 bp, Homo sapiens
atgtttccaggtgct

SEQ ID NO: 948862 - DNA, 15 bp, Homo sapiens
catgtttccaggtgc

SEQ ID NO: 948863 - DNA, 15 bp, Homo sapiens
gcatgtttccaggtg

SEQ ID NO: 948864 - DNA, 15 bp, Homo sapiens
ggcatgtttccaggt

SEQ ID NO: 948865 - DNA, 15 bp, Homo sapiens
tggcatgtttccagg

SEQ ID NO: 948866 - DNA, 15 bp, Homo sapiens
ctggcatgtttccag

SEQ ID NO: 948867 - DNA, 15 bp, Homo sapiens
cctggcatgtttcca

SEQ ID NO: 948868 - DNA, 15 bp, Homo sapiens
tcctggcatgtttcc

SEQ ID NO: 948869 - DNA, 15 bp, Homo sapiens
ttcctggcatgtttc

SEQ ID NO: 948870 - DNA, 15 bp, Homo sapiens
gttcctggcatgttt

SEQ ID NO: 948871 - DNA, 15 bp, Homo sapiens
tgttcctggcatgtt

SEQ ID NO: 948872 - DNA, 15 bp, Homo sapiens
atgttcctggcatgt

SEQ ID NO: 948873 - DNA, 15 bp, Homo sapiens
aatgttcctggcatg

SEQ ID NO: 948874 - DNA, 15 bp, Homo sapiens
taatgttcctggcat

SEQ ID NO: 948875 - DNA, 15 bp, Homo sapiens
ataatgttcctggca

SEQ ID NO: 948876 - DNA, 15 bp, Homo sapiens
gataatgttcctggc

SEQ ID NO: 948877 - DNA, 15 bp, Homo sapiens
tgataatgttcctgg

SEQ ID NO: 948878 - DNA, 15 bp, Homo sapiens
ctgataatgttcctg

SEQ ID NO: 948879 - DNA, 15 bp, Homo sapiens
cctgataatgttcct

SEQ ID NO: 948880 - DNA, 15 bp, Homo sapiens
ccctgataatgttcc

SEQ ID NO: 948881 - DNA, 15 bp, Homo sapiens
cccctgataatgttc

SEQ ID NO: 948882 - DNA, 15 bp, Homo sapiens
gcccctgataatgtt

SEQ ID NO: 948883 - DNA, 15 bp, Homo sapiens
agcccctgataatgt

SEQ ID NO: 948884 - DNA, 15 bp, Homo sapiens
gagcccctgataatg

SEQ ID NO: 948885 - DNA, 15 bp, Homo sapiens
ggagcccctgataat

SEQ ID NO: 948886 - DNA, 15 bp, Homo sapiens
tggagcccctgataa

SEQ ID NO: 948887 - DNA, 15 bp, Homo sapiens
atggagcccctgata

SEQ ID NO: 948888 - DNA, 15 bp, Homo sapiens
tatggagcccctgat

SEQ ID NO: 948889 - DNA, 15 bp, Homo sapiens
ttatggagcccctga

SEQ ID NO: 948890 - DNA, 15 bp, Homo sapiens
tttatggagcccctg

SEQ ID NO: 948891 - DNA, 15 bp, Homo sapiens
ttttatggagcccct

SEQ ID NO: 948892 - DNA, 15 bp, Homo sapiens
attttatggagcccc

SEQ ID NO: 948893 - DNA, 15 bp, Homo sapiens
cattttatggagccc

SEQ ID NO: 948894 - DNA, 15 bp, Homo sapiens
acattttatggagcc

SEQ ID NO: 948895 - DNA, 15 bp, Homo sapiens
aacattttatggagc

SEQ ID NO: 948896 - DNA, 15 bp, Homo sapiens
taacattttatggag

SEQ ID NO: 948897 - DNA, 15 bp, Homo sapiens
ataacattttatgga

SEQ ID NO: 948898 - DNA, 15 bp, Homo sapiens
cataacattttatgg

SEQ ID NO: 948899 - DNA, 15 bp, Homo sapiens
tcataacattttatg

SEQ ID NO: 948900 - DNA, 15 bp, Homo sapiens
ttcataacattttat

SEQ ID NO: 948901 - DNA, 15 bp, Homo sapiens
attcataacatttta

SEQ ID NO: 948902 - DNA, 15 bp, Homo sapiens
gattcataacatttt

SEQ ID NO: 948903 - DNA, 15 bp, Homo sapiens
tgattcataacattt

SEQ ID NO: 948904 - DNA, 15 bp, Homo sapiens
atgattcataacatt

SEQ ID NO: 948905 - DNA, 15 bp, Homo sapiens
tatgattcataacat

SEQ ID NO: 948906 - DNA, 15 bp, Homo sapiens
ctatgattcataaca

SEQ ID NO: 948907 - DNA, 15 bp, Homo sapiens
tctatgattcataac

SEQ ID NO: 948908 - DNA, 15 bp, Homo sapiens
ctctatgattcataa

SEQ ID NO: 948909 - DNA, 15 bp, Homo sapiens
gctctatgattcata

SEQ ID NO: 948910 - DNA, 15 bp, Homo sapiens
ggctctatgattcat

SEQ ID NO: 948911 - DNA, 15 bp, Homo sapiens
aggctctatgattca

SEQ ID NO: 948912 - DNA, 15 bp, Homo sapiens
caggctctatgattc

SEQ ID NO: 948913 - DNA, 15 bp, Homo sapiens
acaggctctatgatt

SEQ ID NO: 948914 - DNA, 15 bp, Homo sapiens
aacaggctctatgat

SEQ ID NO: 948915 - DNA, 15 bp, Homo sapiens
caacaggctctatga

SEQ ID NO: 948916 - DNA, 15 bp, Homo sapiens
gcaacaggctctatg

SEQ ID NO: 948917 - DNA, 15 bp, Homo sapiens
agcaacaggctctat

SEQ ID NO: 948918 - DNA, 15 bp, Homo sapiens
cagcaacaggctcta

SEQ ID NO: 948919 - DNA, 15 bp, Homo sapiens
tcagcaacaggctct

SEQ ID NO: 948920 - DNA, 15 bp, Homo sapiens
ctcagcaacaggctc

SEQ ID NO: 948921 - DNA, 15 bp, Homo sapiens
actcagcaacaggct

SEQ ID NO: 948922 - DNA, 15 bp, Homo sapiens
tactcagcaacaggc

SEQ ID NO: 948923 - DNA, 15 bp, Homo sapiens
gtactcagcaacagg

SEQ ID NO: 948924 - DNA, 15 bp, Homo sapiens
tgtactcagcaacag

SEQ ID NO: 948925 - DNA, 15 bp, Homo sapiens
ctgtactcagcaaca

SEQ ID NO: 948926 - DNA, 15 bp, Homo sapiens
tctgtactcagcaac

SEQ ID NO: 948927 - DNA, 15 bp, Homo sapiens
gtctgtactcagcaa

SEQ ID NO: 948928 - DNA, 15 bp, Homo sapiens
agtctgtactcagca

SEQ ID NO: 948929 - DNA, 15 bp, Homo sapiens
tagtctgtactcagc

SEQ ID NO: 948930 - DNA, 15 bp, Homo sapiens
ctagtctgtactcag

SEQ ID NO: 948931 - DNA, 15 bp, Homo sapiens
gctagtctgtactca

SEQ ID NO: 948932 - DNA, 15 bp, Homo sapiens
agctagtctgtactc

SEQ ID NO: 948933 - DNA, 15 bp, Homo sapiens
tagctagtctgtact

SEQ ID NO: 948934 - DNA, 15 bp, Homo sapiens
gtagctagtctgtac

SEQ ID NO: 948935 - DNA, 15 bp, Homo sapiens
ggtagctagtctgta

SEQ ID NO: 948936 - DNA, 15 bp, Homo sapiens
aggtagctagtctgt

SEQ ID NO: 948937 - DNA, 15 bp, Homo sapiens
caggtagctagtctg

SEQ ID NO: 948938 - DNA, 15 bp, Homo sapiens
tcaggtagctagtct

SEQ ID NO: 948939 - DNA, 15 bp, Homo sapiens
ttcaggtagctagtc

SEQ ID NO: 948940 - DNA, 15 bp, Homo sapiens
tttcaggtagctagt

SEQ ID NO: 948941 - DNA, 15 bp, Homo sapiens
ttttcaggtagctag

SEQ ID NO: 948942 - DNA, 15 bp, Homo sapiens
tttttcaggtagcta

SEQ ID NO: 948943 - DNA, 15 bp, Homo sapiens
atttttcaggtagct

SEQ ID NO: 948944 - DNA, 15 bp, Homo sapiens
catttttcaggtagc

SEQ ID NO: 948945 - DNA, 15 bp, Homo sapiens
acatttttcaggtag

SEQ ID NO: 948946 - DNA, 15 bp, Homo sapiens
cacatttttcaggta

SEQ ID NO: 948947 - DNA, 15 bp, Homo sapiens
ccacatttttcaggt

SEQ ID NO: 948948 - DNA, 15 bp, Homo sapiens
cccacatttttcagg

SEQ ID NO: 948949 - DNA, 15 bp, Homo sapiens
gcccacatttttcag

SEQ ID NO: 948950 - DNA, 15 bp, Homo sapiens
tgcccacatttttca

SEQ ID NO: 948951 - DNA, 15 bp, Homo sapiens
ttgcccacatttttc

SEQ ID NO: 948952 - DNA, 15 bp, Homo sapiens
cttgcccacattttt

SEQ ID NO: 948953 - DNA, 15 bp, Homo sapiens
ccttgcccacatttt

SEQ ID NO: 948954 - DNA, 15 bp, Homo sapiens
tccttgcccacattt

SEQ ID NO: 948955 - DNA, 15 bp, Homo sapiens
ctccttgcccacatt

SEQ ID NO: 948956 - DNA, 15 bp, Homo sapiens
cctccttgcccacat

SEQ ID NO: 948957 - DNA, 15 bp, Homo sapiens
gcctccttgcccaca

SEQ ID NO: 948958 - DNA, 15 bp, Homo sapiens
tgcctccttgcccac

SEQ ID NO: 948959 - DNA, 15 bp, Homo sapiens
atgcctccttgccca

SEQ ID NO: 948960 - DNA, 15 bp, Homo sapiens
aatgcctccttgccc

SEQ ID NO: 948961 - DNA, 15 bp, Homo sapiens
gaatgcctccttgcc

SEQ ID NO: 948962 - DNA, 15 bp, Homo sapiens
agaatgcctccttgc

SEQ ID NO: 948963 - DNA, 15 bp, Homo sapiens
tagaatgcctccttg

SEQ ID NO: 948964 - DNA, 15 bp, Homo sapiens
ttagaatgcctcctt

SEQ ID NO: 948965 - DNA, 15 bp, Homo sapiens
attagaatgcctcct

SEQ ID NO: 948966 - DNA, 15 bp, Homo sapiens
aattagaatgcctcc

SEQ ID NO: 948967 - DNA, 15 bp, Homo sapiens
caattagaatgcctc

SEQ ID NO: 948968 - DNA, 15 bp, Homo sapiens
tcaattagaatgcct

SEQ ID NO: 948969 - DNA, 15 bp, Homo sapiens
ttcaattagaatgcc

SEQ ID NO: 948970 - DNA, 15 bp, Homo sapiens
tttcaattagaatgc

SEQ ID NO: 948971 - DNA, 15 bp, Homo sapiens
ctttcaattagaatg

SEQ ID NO: 948972 - DNA, 15 bp, Homo sapiens
cctttcaattagaat

SEQ ID NO: 948973 - DNA, 15 bp, Homo sapiens
tcctttcaattagaa

SEQ ID NO: 948974 - DNA, 15 bp, Homo sapiens
ttcctttcaattaga

SEQ ID NO: 948975 - DNA, 15 bp, Homo sapiens
attcctttcaattag

SEQ ID NO: 948976 - DNA, 15 bp, Homo sapiens
cattcctttcaatta

SEQ ID NO: 948977 - DNA, 15 bp, Homo sapiens
acattcctttcaatt

SEQ ID NO: 948978 - DNA, 15 bp, Homo sapiens
aacattcctttcaat

SEQ ID NO: 948979 - DNA, 15 bp, Homo sapiens
taacattcctttcaa

SEQ ID NO: 948980 - DNA, 15 bp, Homo sapiens
ataacattcctttca

SEQ ID NO: 948981 - DNA, 15 bp, Homo sapiens
tataacattcctttc

SEQ ID NO: 948982 - DNA, 15 bp, Homo sapiens
atataacattccttt

SEQ ID NO: 948983 - DNA, 15 bp, Homo sapiens
catataacattcctt

SEQ ID NO: 948984 - DNA, 15 bp, Homo sapiens
tcatataacattcct

SEQ ID NO: 948985 - DNA, 15 bp, Homo sapiens
atcatataacattcc

SEQ ID NO: 948986 - DNA, 15 bp, Homo sapiens
tatcatataacattc

SEQ ID NO: 948987 - DNA, 15 bp, Homo sapiens
ctatcatataacatt

SEQ ID NO: 948988 - DNA, 15 bp, Homo sapiens
tctatcatataacat

SEQ ID NO: 948989 - DNA, 15 bp, Homo sapiens
ttctatcatataaca

SEQ ID NO: 948990 - DNA, 15 bp, Homo sapiens
attctatcatataac

SEQ ID NO: 948991 - DNA, 15 bp, Homo sapiens
cattctatcatataa

SEQ ID NO: 948992 - DNA, 15 bp, Homo sapiens
ccattctatcatata

SEQ ID NO: 948993 - DNA, 15 bp, Homo sapiens
tccattctatcatat

SEQ ID NO: 948994 - DNA, 15 bp, Homo sapiens
ctccattctatcata

SEQ ID NO: 948995 - DNA, 15 bp, Homo sapiens
actccattctatcat

SEQ ID NO: 948996 - DNA, 15 bp, Homo sapiens
aactccattctatca

SEQ ID NO: 948997 - DNA, 15 bp, Homo sapiens
aaactccattctatc

SEQ ID NO: 948998 - DNA, 15 bp, Homo sapiens
aaaactccattctat

SEQ ID NO: 948999 - DNA, 15 bp, Homo sapiens
aaaaactccattcta

SEQ ID NO: 949000 - DNA, 15 bp, Homo sapiens
aaaaaactccattct

SEQ ID NO: 949001 - DNA, 15 bp, Homo sapiens
caaaaaactccattc

SEQ ID NO: 949002 - DNA, 15 bp, Homo sapiens
gcaaaaaactccatt

SEQ ID NO: 949003 - DNA, 15 bp, Homo sapiens
agcaaaaaactccat

SEQ ID NO: 949004 - DNA, 15 bp, Homo sapiens
gagcaaaaaactcca

SEQ ID NO: 949005 - DNA, 15 bp, Homo sapiens
agagcaaaaaactcc

SEQ ID NO: 949006 - DNA, 15 bp, Homo sapiens
tagagcaaaaaactc

SEQ ID NO: 949007 - DNA, 15 bp, Homo sapiens
ttagagcaaaaaact

SEQ ID NO: 949008 - DNA, 15 bp, Homo sapiens
attagagcaaaaaac

SEQ ID NO: 949009 - DNA, 15 bp, Homo sapiens
aattagagcaaaaaa

SEQ ID NO: 949010 - DNA, 15 bp, Homo sapiens
caattagagcaaaaa

SEQ ID NO: 949011 - DNA, 15 bp, Homo sapiens
gcaattagagcaaaa

SEQ ID NO: 949012 - DNA, 15 bp, Homo sapiens
tgcaattagagcaaa

SEQ ID NO: 949013 - DNA, 15 bp, Homo sapiens
ttgcaattagagcaa

SEQ ID NO: 949014 - DNA, 15 bp, Homo sapiens
attgcaattagagca

SEQ ID NO: 949015 - DNA, 15 bp, Homo sapiens
gattgcaattagagc

SEQ ID NO: 949016 - DNA, 15 bp, Homo sapiens
tgattgcaattagag

SEQ ID NO: 949017 - DNA, 15 bp, Homo sapiens
atgattgcaattaga

SEQ ID NO: 949018 - DNA, 15 bp, Homo sapiens
catgattgcaattag

SEQ ID NO: 949019 - DNA, 15 bp, Homo sapiens
acatgattgcaatta

SEQ ID NO: 949020 - DNA, 15 bp, Homo sapiens
tacatgattgcaatt

SEQ ID NO: 949021 - DNA, 15 bp, Homo sapiens
ttacatgattgcaat

SEQ ID NO: 949022 - DNA, 15 bp, Homo sapiens
tttacatgattgcaa

SEQ ID NO: 949023 - DNA, 15 bp, Homo sapiens
atttacatgattgca

SEQ ID NO: 949024 - DNA, 15 bp, Homo sapiens
tatttacatgattgc

SEQ ID NO: 949025 - DNA, 15 bp, Homo sapiens
atatttacatgattg

SEQ ID NO: 949026 - DNA, 15 bp, Homo sapiens
catatttacatgatt

SEQ ID NO: 949027 - DNA, 15 bp, Homo sapiens
ccatatttacatgat

SEQ ID NO: 949028 - DNA, 15 bp, Homo sapiens
accatatttacatga

SEQ ID NO: 949029 - DNA, 15 bp, Homo sapiens
aaccatatttacatg

SEQ ID NO: 949030 - DNA, 15 bp, Homo sapiens
taaccatatttacat

SEQ ID NO: 949031 - DNA, 15 bp, Homo sapiens
gtaaccatatttaca

SEQ ID NO: 949032 - DNA, 15 bp, Homo sapiens
tgtaaccatatttac

SEQ ID NO: 949033 - DNA, 15 bp, Homo sapiens
ctgtaaccatattta

SEQ ID NO: 949034 - DNA, 15 bp, Homo sapiens
gctgtaaccatattt

SEQ ID NO: 949035 - DNA, 15 bp, Homo sapiens
tgctgtaaccatatt

SEQ ID NO: 949036 - DNA, 15 bp, Homo sapiens
ttgctgtaaccatat

SEQ ID NO: 949037 - DNA, 15 bp, Homo sapiens
tttgctgtaaccata

SEQ ID NO: 949038 - DNA, 15 bp, Homo sapiens
gtttgctgtaaccat

SEQ ID NO: 949039 - DNA, 15 bp, Homo sapiens
tgtttgctgtaacca

SEQ ID NO: 949040 - DNA, 15 bp, Homo sapiens
gtgtttgctgtaacc

SEQ ID NO: 949041 - DNA, 15 bp, Homo sapiens
tgtgtttgctgtaac

SEQ ID NO: 949042 - DNA, 15 bp, Homo sapiens
ctgtgtttgctgtaa

SEQ ID NO: 949043 - DNA, 15 bp, Homo sapiens
actgtgtttgctgta

SEQ ID NO: 949044 - DNA, 15 bp, Homo sapiens
cactgtgtttgctgt

SEQ ID NO: 949045 - DNA, 15 bp, Homo sapiens
acactgtgtttgctg

SEQ ID NO: 949046 - DNA, 15 bp, Homo sapiens
cacactgtgtttgct

SEQ ID NO: 949047 - DNA, 15 bp, Homo sapiens
tcacactgtgtttgc

SEQ ID NO: 949048 - DNA, 15 bp, Homo sapiens
ctcacactgtgtttg

SEQ ID NO: 949049 - DNA, 15 bp, Homo sapiens
actcacactgtgttt

SEQ ID NO: 949050 - DNA, 15 bp, Homo sapiens
cactcacactgtgtt

SEQ ID NO: 949051 - DNA, 15 bp, Homo sapiens
acactcacactgtgt

SEQ ID NO: 949052 - DNA, 15 bp, Homo sapiens
cacactcacactgtg

SEQ ID NO: 949053 - DNA, 15 bp, Homo sapiens
acacactcacactgt

SEQ ID NO: 949054 - DNA, 15 bp, Homo sapiens
aacacactcacactg

SEQ ID NO: 949055 - DNA, 15 bp, Homo sapiens
aaacacactcacact

SEQ ID NO: 949056 - DNA, 15 bp, Homo sapiens
caaacacactcacac

SEQ ID NO: 949057 - DNA, 15 bp, Homo sapiens
gcaaacacactcaca

SEQ ID NO: 949058 - DNA, 15 bp, Homo sapiens
cgcaaacacactcac

SEQ ID NO: 949059 - DNA, 15 bp, Homo sapiens
ccgcaaacacactca

SEQ ID NO: 949060 - DNA, 15 bp, Homo sapiens
cccgcaaacacactc

SEQ ID NO: 949061 - DNA, 15 bp, Homo sapiens
ccccgcaaacacact

SEQ ID NO: 949062 - DNA, 15 bp, Homo sapiens
cccccgcaaacacac

SEQ ID NO: 949063 - DNA, 15 bp, Homo sapiens
gcccccgcaaacaca

SEQ ID NO: 949064 - DNA, 15 bp, Homo sapiens
tgcccccgcaaacac

SEQ ID NO: 949065 - DNA, 15 bp, Homo sapiens
ctgcccccgcaaaca

SEQ ID NO: 949066 - DNA, 15 bp, Homo sapiens
tctgcccccgcaaac

SEQ ID NO: 949067 - DNA, 15 bp, Homo sapiens
ctctgcccccgcaaa

SEQ ID NO: 949068 - DNA, 15 bp, Homo sapiens
cctctgcccccgcaa

SEQ ID NO: 949069 - DNA, 15 bp, Homo sapiens
acctctgcccccgca

SEQ ID NO: 949070 - DNA, 15 bp, Homo sapiens
cacctctgcccccgc

SEQ ID NO: 949071 - DNA, 15 bp, Homo sapiens
ccacctctgcccccg

SEQ ID NO: 949072 - DNA, 15 bp, Homo sapiens
tccacctctgccccc

SEQ ID NO: 949073 - DNA, 15 bp, Homo sapiens
ctccacctctgcccc

SEQ ID NO: 949074 - DNA, 15 bp, Homo sapiens
tctccacctctgccc

SEQ ID NO: 949075 - DNA, 15 bp, Homo sapiens
ctctccacctctgcc

SEQ ID NO: 949076 - DNA, 15 bp, Homo sapiens
gctctccacctctgc

SEQ ID NO: 949077 - DNA, 15 bp, Homo sapiens
tgctctccacctctg

SEQ ID NO: 949078 - DNA, 15 bp, Homo sapiens
ctgctctccacctct

SEQ ID NO: 949079 - DNA, 15 bp, Homo sapiens
actgctctccacctc

SEQ ID NO: 949080 - DNA, 15 bp, Homo sapiens
aactgctctccacct

SEQ ID NO: 949081 - DNA, 15 bp, Homo sapiens
gaactgctctccacc

SEQ ID NO: 949082 - DNA, 15 bp, Homo sapiens
agaactgctctccac

SEQ ID NO: 949083 - DNA, 15 bp, Homo sapiens
cagaactgctctcca

SEQ ID NO: 949084 - DNA, 15 bp, Homo sapiens
ccagaactgctctcc

SEQ ID NO: 949085 - DNA, 15 bp, Homo sapiens
cccagaactgctctc

SEQ ID NO: 949086 - DNA, 15 bp, Homo sapiens
tcccagaactgctct

SEQ ID NO: 949087 - DNA, 15 bp, Homo sapiens
ttcccagaactgctc

SEQ ID NO: 949088 - DNA, 15 bp, Homo sapiens
tttcccagaactgct

SEQ ID NO: 949089 - DNA, 15 bp, Homo sapiens
atttcccagaactgc

SEQ ID NO: 949090 - DNA, 15 bp, Homo sapiens
aatttcccagaactg

SEQ ID NO: 949091 - DNA, 15 bp, Homo sapiens
taatttcccagaact

SEQ ID NO: 949092 - DNA, 15 bp, Homo sapiens
ttaatttcccagaac

SEQ ID NO: 949093 - DNA, 15 bp, Homo sapiens
cttaatttcccagaa

SEQ ID NO: 949094 - DNA, 15 bp, Homo sapiens
acttaatttcccaga

SEQ ID NO: 949095 - DNA, 15 bp, Homo sapiens
tacttaatttcccag

SEQ ID NO: 949096 - DNA, 15 bp, Homo sapiens
ctacttaatttccca

SEQ ID NO: 949097 - DNA, 15 bp, Homo sapiens
cctacttaatttccc

SEQ ID NO: 949098 - DNA, 15 bp, Homo sapiens
ccctacttaatttcc

SEQ ID NO: 949099 - DNA, 15 bp, Homo sapiens
cccctacttaatttc

SEQ ID NO: 949100 - DNA, 15 bp, Homo sapiens
gcccctacttaattt

SEQ ID NO: 949101 - DNA, 15 bp, Homo sapiens
ggcccctacttaatt

SEQ ID NO: 949102 - DNA, 15 bp, Homo sapiens
tggcccctacttaat

SEQ ID NO: 949103 - DNA, 15 bp, Homo sapiens
ctggcccctacttaa

SEQ ID NO: 949104 - DNA, 15 bp, Homo sapiens
tctggcccctactta

SEQ ID NO: 949105 - DNA, 15 bp, Homo sapiens
atctggcccctactt

SEQ ID NO: 949106 - DNA, 15 bp, Homo sapiens
gatctggcccctact

SEQ ID NO: 949107 - DNA, 15 bp, Homo sapiens
tgatctggcccctac

SEQ ID NO: 949108 - DNA, 15 bp, Homo sapiens
atgatctggccccta

SEQ ID NO: 949109 - DNA, 15 bp, Homo sapiens
catgatctggcccct

SEQ ID NO: 949110 - DNA, 15 bp, Homo sapiens
tcatgatctggcccc

SEQ ID NO: 949111 - DNA, 15 bp, Homo sapiens
ttcatgatctggccc

SEQ ID NO: 949112 - DNA, 15 bp, Homo sapiens
attcatgatctggcc

SEQ ID NO: 949113 - DNA, 15 bp, Homo sapiens
cattcatgatctggc

SEQ ID NO: 949114 - DNA, 15 bp, Homo sapiens
acattcatgatctgg

SEQ ID NO: 949115 - DNA, 15 bp, Homo sapiens
aacattcatgatctg

SEQ ID NO: 949116 - DNA, 15 bp, Homo sapiens
aaacattcatgatct

SEQ ID NO: 949117 - DNA, 15 bp, Homo sapiens
taaacattcatgatc

SEQ ID NO: 949118 - DNA, 15 bp, Homo sapiens
ttaaacattcatgat

SEQ ID NO: 949119 - DNA, 15 bp, Homo sapiens
attaaacattcatga

SEQ ID NO: 949120 - DNA, 15 bp, Homo sapiens
cattaaacattcatg

SEQ ID NO: 949121 - DNA, 15 bp, Homo sapiens
acattaaacattcat

SEQ ID NO: 949122 - DNA, 15 bp, Homo sapiens
tacattaaacattca

SEQ ID NO: 949123 - DNA, 15 bp, Homo sapiens
ttacattaaacattc

SEQ ID NO: 949124 - DNA, 15 bp, Homo sapiens
gttacattaaacatt

SEQ ID NO: 949125 - DNA, 15 bp, Homo sapiens
agttacattaaacat

SEQ ID NO: 949126 - DNA, 15 bp, Homo sapiens
cagttacattaaaca

SEQ ID NO: 949127 - DNA, 15 bp, Homo sapiens
tcagttacattaaac

SEQ ID NO: 949128 - DNA, 15 bp, Homo sapiens
ttcagttacattaaa

SEQ ID NO: 949129 - DNA, 15 bp, Homo sapiens
gttcagttacattaa

SEQ ID NO: 949130 - DNA, 15 bp, Homo sapiens
tgttcagttacatta

SEQ ID NO: 949131 - DNA, 15 bp, Homo sapiens
ctgttcagttacatt

SEQ ID NO: 949132 - DNA, 15 bp, Homo sapiens
tctgttcagttacat

SEQ ID NO: 949133 - DNA, 15 bp, Homo sapiens
atctgttcagttaca

SEQ ID NO: 949134 - DNA, 15 bp, Homo sapiens
aatctgttcagttac

SEQ ID NO: 949135 - DNA, 15 bp, Homo sapiens
aaatctgttcagtta

SEQ ID NO: 949136 - DNA, 15 bp, Homo sapiens
taaatctgttcagtt

SEQ ID NO: 949137 - DNA, 15 bp, Homo sapiens
ataaatctgttcagt

SEQ ID NO: 949138 - DNA, 15 bp, Homo sapiens
cataaatctgttcag

SEQ ID NO: 949139 - DNA, 15 bp, Homo sapiens
gcataaatctgttca

SEQ ID NO: 949140 - DNA, 15 bp, Homo sapiens
tgcataaatctgttc

SEQ ID NO: 949141 - DNA, 15 bp, Homo sapiens
ctgcataaatctgtt

SEQ ID NO: 949142 - DNA, 15 bp, Homo sapiens
cctgcataaatctgt

SEQ ID NO: 949143 - DNA, 15 bp, Homo sapiens
tcctgcataaatctg

SEQ ID NO: 949144 - DNA, 15 bp, Homo sapiens
ttcctgcataaatct

SEQ ID NO: 949145 - DNA, 15 bp, Homo sapiens
tttcctgcataaatc

SEQ ID NO: 949146 - DNA, 15 bp, Homo sapiens
ctttcctgcataaat

SEQ ID NO: 949147 - DNA, 15 bp, Homo sapiens
actttcctgcataaa

SEQ ID NO: 949148 - DNA, 15 bp, Homo sapiens
tactttcctgcataa

SEQ ID NO: 949149 - DNA, 15 bp, Homo sapiens
ttactttcctgcata

SEQ ID NO: 949150 - DNA, 15 bp, Homo sapiens
attactttcctgcat

SEQ ID NO: 949151 - DNA, 15 bp, Homo sapiens
tattactttcctgca

SEQ ID NO: 949152 - DNA, 15 bp, Homo sapiens
atattactttcctgc

SEQ ID NO: 949153 - DNA, 15 bp, Homo sapiens
catattactttcctg

SEQ ID NO: 949154 - DNA, 15 bp, Homo sapiens
gcatattactttcct

SEQ ID NO: 949155 - DNA, 15 bp, Homo sapiens
agcatattactttcc

SEQ ID NO: 949156 - DNA, 15 bp, Homo sapiens
gagcatattactttc

SEQ ID NO: 949157 - DNA, 15 bp, Homo sapiens
tgagcatattacttt

SEQ ID NO: 949158 - DNA, 15 bp, Homo sapiens
atgagcatattactt

SEQ ID NO: 949159 - DNA, 15 bp, Homo sapiens
aatgagcatattact

SEQ ID NO: 949160 - DNA, 15 bp, Homo sapiens
gaatgagcatattac

SEQ ID NO: 949161 - DNA, 15 bp, Homo sapiens
tgaatgagcatatta

SEQ ID NO: 949162 - DNA, 15 bp, Homo sapiens
atgaatgagcatatt

SEQ ID NO: 949163 - DNA, 15 bp, Homo sapiens
aatgaatgagcatat

SEQ ID NO: 949164 - DNA, 15 bp, Homo sapiens
aaatgaatgagcata

SEQ ID NO: 949165 - DNA, 15 bp, Homo sapiens
caaatgaatgagcat

SEQ ID NO: 949166 - DNA, 15 bp, Homo sapiens
acaaatgaatgagca

SEQ ID NO: 949167 - DNA, 15 bp, Homo sapiens
cacaaatgaatgagc

SEQ ID NO: 949168 - DNA, 15 bp, Homo sapiens
tcacaaatgaatgag

SEQ ID NO: 949169 - DNA, 15 bp, Homo sapiens
ttcacaaatgaatga

SEQ ID NO: 949170 - DNA, 15 bp, Homo sapiens
cttcacaaatgaatg

SEQ ID NO: 949171 - DNA, 15 bp, Homo sapiens
tcttcacaaatgaat

SEQ ID NO: 949172 - DNA, 15 bp, Homo sapiens
ttcttcacaaatgaa

SEQ ID NO: 949173 - DNA, 15 bp, Homo sapiens
attcttcacaaatga

SEQ ID NO: 949174 - DNA, 15 bp, Homo sapiens
cattcttcacaaatg

SEQ ID NO: 949175 - DNA, 15 bp, Homo sapiens
ccattcttcacaaat

SEQ ID NO: 949176 - DNA, 15 bp, Homo sapiens
tccattcttcacaaa

SEQ ID NO: 949177 - DNA, 15 bp, Homo sapiens
ctccattcttcacaa

SEQ ID NO: 949178 - DNA, 15 bp, Homo sapiens
tctccattcttcaca

SEQ ID NO: 949179 - DNA, 15 bp, Homo sapiens
ctctccattcttcac

SEQ ID NO: 949180 - DNA, 15 bp, Homo sapiens
cctctccattcttca

SEQ ID NO: 949181 - DNA, 15 bp, Homo sapiens
tcctctccattcttc

SEQ ID NO: 949182 - DNA, 15 bp, Homo sapiens
gtcctctccattctt

SEQ ID NO: 949183 - DNA, 15 bp, Homo sapiens
tgtcctctccattct

SEQ ID NO: 949184 - DNA, 15 bp, Homo sapiens
ctgtcctctccattc

SEQ ID NO: 949185 - DNA, 15 bp, Homo sapiens
cctgtcctctccatt

SEQ ID NO: 949186 - DNA, 15 bp, Homo sapiens
ccctgtcctctccat

SEQ ID NO: 949187 - DNA, 15 bp, Homo sapiens
gccctgtcctctcca

SEQ ID NO: 949188 - DNA, 15 bp, Homo sapiens
agccctgtcctctcc

SEQ ID NO: 949189 - DNA, 15 bp, Homo sapiens
tagccctgtcctctc

SEQ ID NO: 949190 - DNA, 15 bp, Homo sapiens
ttagccctgtcctct

SEQ ID NO: 949191 - DNA, 15 bp, Homo sapiens
tttagccctgtcctc

SEQ ID NO: 949192 - DNA, 15 bp, Homo sapiens
ttttagccctgtcct

SEQ ID NO: 949193 - DNA, 15 bp, Homo sapiens
gttttagccctgtcc

SEQ ID NO: 949194 - DNA, 15 bp, Homo sapiens
agttttagccctgtc

SEQ ID NO: 949195 - DNA, 15 bp, Homo sapiens
cagttttagccctgt

SEQ ID NO: 949196 - DNA, 15 bp, Homo sapiens
tcagttttagccctg

SEQ ID NO: 949197 - DNA, 15 bp, Homo sapiens
ttcagttttagccct

SEQ ID NO: 949198 - DNA, 15 bp, Homo sapiens
tttcagttttagccc

SEQ ID NO: 949199 - DNA, 15 bp, Homo sapiens
ctttcagttttagcc

SEQ ID NO: 949200 - DNA, 15 bp, Homo sapiens
tctttcagttttagc

SEQ ID NO: 949201 - DNA, 15 bp, Homo sapiens
atctttcagttttag

SEQ ID NO: 949202 - DNA, 15 bp, Homo sapiens
tatctttcagtttta

SEQ ID NO: 949203 - DNA, 15 bp, Homo sapiens
gtatctttcagtttt

SEQ ID NO: 949204 - DNA, 15 bp, Homo sapiens
agtatctttcagttt

SEQ ID NO: 949205 - DNA, 15 bp, Homo sapiens
tagtatctttcagtt

SEQ ID NO: 949206 - DNA, 15 bp, Homo sapiens
atagtatctttcagt

SEQ ID NO: 949207 - DNA, 15 bp, Homo sapiens
aatagtatctttcag

SEQ ID NO: 949208 - DNA, 15 bp, Homo sapiens
aaatagtatctttca

SEQ ID NO: 949209 - DNA, 15 bp, Homo sapiens
aaaatagtatctttc

SEQ ID NO: 949210 - DNA, 15 bp, Homo sapiens
aaaaatagtatcttt

SEQ ID NO: 949211 - DNA, 15 bp, Homo sapiens
caaaaatagtatctt

SEQ ID NO: 949212 - DNA, 15 bp, Homo sapiens
ccaaaaatagtatct

SEQ ID NO: 949213 - DNA, 15 bp, Homo sapiens
tccaaaaatagtatc

SEQ ID NO: 949214 - DNA, 15 bp, Homo sapiens
ctccaaaaatagtat

SEQ ID NO: 949215 - DNA, 15 bp, Homo sapiens
cctccaaaaatagta

SEQ ID NO: 949216 - DNA, 15 bp, Homo sapiens
ccctccaaaaatagt

SEQ ID NO: 949217 - DNA, 15 bp, Homo sapiens
accctccaaaaatag

SEQ ID NO: 949218 - DNA, 15 bp, Homo sapiens
caccctccaaaaata

SEQ ID NO: 949219 - DNA, 15 bp, Homo sapiens
tcaccctccaaaaat

SEQ ID NO: 949220 - DNA, 15 bp, Homo sapiens
atcaccctccaaaaa

SEQ ID NO: 949221 - DNA, 15 bp, Homo sapiens
tatcaccctccaaaa

SEQ ID NO: 949222 - DNA, 15 bp, Homo sapiens
atatcaccctccaaa

SEQ ID NO: 949223 - DNA, 15 bp, Homo sapiens
catatcaccctccaa

SEQ ID NO: 949224 - DNA, 15 bp, Homo sapiens
tcatatcaccctcca

SEQ ID NO: 949225 - DNA, 15 bp, Homo sapiens
atcatatcaccctcc

SEQ ID NO: 949226 - DNA, 15 bp, Homo sapiens
tatcatatcaccctc

SEQ ID NO: 949227 - DNA, 15 bp, Homo sapiens
ctatcatatcaccct

SEQ ID NO: 949228 - DNA, 15 bp, Homo sapiens
actatcatatcaccc

SEQ ID NO: 949229 - DNA, 15 bp, Homo sapiens
aactatcatatcacc

SEQ ID NO: 949230 - DNA, 15 bp, Homo sapiens
taactatcatatcac

SEQ ID NO: 949231 - DNA, 15 bp, Homo sapiens
ttaactatcatatca

SEQ ID NO: 949232 - DNA, 15 bp, Homo sapiens
tttaactatcatatc

SEQ ID NO: 949233 - DNA, 15 bp, Homo sapiens
ctttaactatcatat

SEQ ID NO: 949234 - DNA, 15 bp, Homo sapiens
gctttaactatcata

SEQ ID NO: 949235 - DNA, 15 bp, Homo sapiens
tgctttaactatcat

SEQ ID NO: 949236 - DNA, 15 bp, Homo sapiens
atgctttaactatca

SEQ ID NO: 949237 - DNA, 15 bp, Homo sapiens
catgctttaactatc

SEQ ID NO: 949238 - DNA, 15 bp, Homo sapiens
tcatgctttaactat

SEQ ID NO: 949239 - DNA, 15 bp, Homo sapiens
ttcatgctttaacta

SEQ ID NO: 949240 - DNA, 15 bp, Homo sapiens
attcatgctttaact

SEQ ID NO: 949241 - DNA, 15 bp, Homo sapiens
gattcatgctttaac

SEQ ID NO: 949242 - DNA, 15 bp, Homo sapiens
agattcatgctttaa

SEQ ID NO: 949243 - DNA, 15 bp, Homo sapiens
aagattcatgcttta

SEQ ID NO: 949244 - DNA, 15 bp, Homo sapiens
caagattcatgcttt

SEQ ID NO: 949245 - DNA, 15 bp, Homo sapiens
ccaagattcatgctt

SEQ ID NO: 949246 - DNA, 15 bp, Homo sapiens
gccaagattcatgct

SEQ ID NO: 949247 - DNA, 15 bp, Homo sapiens
agccaagattcatgc

SEQ ID NO: 949248 - DNA, 15 bp, Homo sapiens
aagccaagattcatg

SEQ ID NO: 949249 - DNA, 15 bp, Homo sapiens
taagccaagattcat

SEQ ID NO: 949250 - DNA, 15 bp, Homo sapiens
ttaagccaagattca

SEQ ID NO: 949251 - DNA, 15 bp, Homo sapiens
tttaagccaagattc

SEQ ID NO: 949252 - DNA, 15 bp, Homo sapiens
atttaagccaagatt

SEQ ID NO: 949253 - DNA, 15 bp, Homo sapiens
aatttaagccaagat

SEQ ID NO: 949254 - DNA, 15 bp, Homo sapiens
taatttaagccaaga

SEQ ID NO: 949255 - DNA, 15 bp, Homo sapiens
ttaatttaagccaag

SEQ ID NO: 949256 - DNA, 15 bp, Homo sapiens
tttaatttaagccaa

SEQ ID NO: 949257 - DNA, 15 bp, Homo sapiens
ttttaatttaagcca

SEQ ID NO: 949258 - DNA, 15 bp, Homo sapiens
attttaatttaagcc

SEQ ID NO: 949259 - DNA, 15 bp, Homo sapiens
aattttaatttaagc

SEQ ID NO: 949260 - DNA, 15 bp, Homo sapiens
taattttaatttaag

SEQ ID NO: 949261 - DNA, 15 bp, Homo sapiens
ttaattttaatttaa

SEQ ID NO: 949262 - DNA, 15 bp, Homo sapiens
gttaattttaattta

SEQ ID NO: 949263 - DNA, 15 bp, Homo sapiens
tgttaattttaattt

SEQ ID NO: 949264 - DNA, 15 bp, Homo sapiens
ctgttaattttaatt

SEQ ID NO: 949265 - DNA, 15 bp, Homo sapiens
actgttaattttaat

SEQ ID NO: 949266 - DNA, 15 bp, Homo sapiens
aactgttaattttaa

SEQ ID NO: 949267 - DNA, 15 bp, Homo sapiens
caactgttaatttta

SEQ ID NO: 949268 - DNA, 15 bp, Homo sapiens
ccaactgttaatttt

SEQ ID NO: 949269 - DNA, 15 bp, Homo sapiens
cccaactgttaattt

SEQ ID NO: 949270 - DNA, 15 bp, Homo sapiens
tcccaactgttaatt

SEQ ID NO: 949271 - DNA, 15 bp, Homo sapiens
ttcccaactgttaat

SEQ ID NO: 949272 - DNA, 15 bp, Homo sapiens
cttcccaactgttaa

SEQ ID NO: 949273 - DNA, 15 bp, Homo sapiens
tcttcccaactgtta

SEQ ID NO: 949274 - DNA, 15 bp, Homo sapiens
ttcttcccaactgtt

SEQ ID NO: 949275 - DNA, 15 bp, Homo sapiens
cttcttcccaactgt

SEQ ID NO: 949276 - DNA, 15 bp, Homo sapiens
acttcttcccaactg

SEQ ID NO: 949277 - DNA, 15 bp, Homo sapiens
tacttcttcccaact

SEQ ID NO: 949278 - DNA, 15 bp, Homo sapiens
gtacttcttcccaac

SEQ ID NO: 949279 - DNA, 15 bp, Homo sapiens
tgtacttcttcccaa

SEQ ID NO: 949280 - DNA, 15 bp, Homo sapiens
atgtacttcttccca

SEQ ID NO: 949281 - DNA, 15 bp, Homo sapiens
tatgtacttcttccc

SEQ ID NO: 949282 - DNA, 15 bp, Homo sapiens
ctatgtacttcttcc

SEQ ID NO: 949283 - DNA, 15 bp, Homo sapiens
tctatgtacttcttc

SEQ ID NO: 949284 - DNA, 15 bp, Homo sapiens
atctatgtacttctt

SEQ ID NO: 949285 - DNA, 15 bp, Homo sapiens
aatctatgtacttct

SEQ ID NO: 949286 - DNA, 15 bp, Homo sapiens
taatctatgtacttc

SEQ ID NO: 949287 - DNA, 15 bp, Homo sapiens
ctaatctatgtactt

SEQ ID NO: 949288 - DNA, 15 bp, Homo sapiens
tctaatctatgtact

SEQ ID NO: 949289 - DNA, 15 bp, Homo sapiens
ttctaatctatgtac

SEQ ID NO: 949290 - DNA, 15 bp, Homo sapiens
gttctaatctatgta

SEQ ID NO: 949291 - DNA, 15 bp, Homo sapiens
agttctaatctatgt

SEQ ID NO: 949292 - DNA, 15 bp, Homo sapiens
cagttctaatctatg

SEQ ID NO: 949293 - DNA, 15 bp, Homo sapiens
acagttctaatctat

SEQ ID NO: 949294 - DNA, 15 bp, Homo sapiens
aacagttctaatcta

SEQ ID NO: 949295 - DNA, 15 bp, Homo sapiens
taacagttctaatct

SEQ ID NO: 949296 - DNA, 15 bp, Homo sapiens
ctaacagttctaatc

SEQ ID NO: 949297 - DNA, 15 bp, Homo sapiens
cctaacagttctaat

SEQ ID NO: 949298 - DNA, 15 bp, Homo sapiens
tcctaacagttctaa

SEQ ID NO: 949299 - DNA, 15 bp, Homo sapiens
ttcctaacagttcta

SEQ ID NO: 949300 - DNA, 15 bp, Homo sapiens
attcctaacagttct

SEQ ID NO: 949301 - DNA, 15 bp, Homo sapiens
aattcctaacagttc

SEQ ID NO: 949302 - DNA, 15 bp, Homo sapiens
caattcctaacagtt

SEQ ID NO: 949303 - DNA, 15 bp, Homo sapiens
tcaattcctaacagt

SEQ ID NO: 949304 - DNA, 15 bp, Homo sapiens
atcaattcctaacag

SEQ ID NO: 949305 - DNA, 15 bp, Homo sapiens
tatcaattcctaaca

SEQ ID NO: 949306 - DNA, 15 bp, Homo sapiens
ttatcaattcctaac

SEQ ID NO: 949307 - DNA, 15 bp, Homo sapiens
gttatcaattcctaa

SEQ ID NO: 949308 - DNA, 15 bp, Homo sapiens
agttatcaattccta

SEQ ID NO: 949309 - DNA, 15 bp, Homo sapiens
cagttatcaattcct

SEQ ID NO: 949310 - DNA, 15 bp, Homo sapiens
ccagttatcaattcc

SEQ ID NO: 949311 - DNA, 15 bp, Homo sapiens
tccagttatcaattc

SEQ ID NO: 949312 - DNA, 15 bp, Homo sapiens
atccagttatcaatt

SEQ ID NO: 949313 - DNA, 15 bp, Homo sapiens
catccagttatcaat

SEQ ID NO: 949314 - DNA, 15 bp, Homo sapiens
acatccagttatcaa

SEQ ID NO: 949315 - DNA, 15 bp, Homo sapiens
tacatccagttatca

SEQ ID NO: 949316 - DNA, 15 bp, Homo sapiens
atacatccagttatc

SEQ ID NO: 949317 - DNA, 15 bp, Homo sapiens
catacatccagttat

SEQ ID NO: 949318 - DNA, 15 bp, Homo sapiens
tcatacatccagtta

SEQ ID NO: 949319 - DNA, 15 bp, Homo sapiens
ttcatacatccagtt

SEQ ID NO: 949320 - DNA, 15 bp, Homo sapiens
cttcatacatccagt

SEQ ID NO: 949321 - DNA, 15 bp, Homo sapiens
acttcatacatccag

SEQ ID NO: 949322 - DNA, 15 bp, Homo sapiens
tacttcatacatcca

SEQ ID NO: 949323 - DNA, 15 bp, Homo sapiens
ttacttcatacatcc

SEQ ID NO: 949324 - DNA, 15 bp, Homo sapiens
attacttcatacatc

SEQ ID NO: 949325 - DNA, 15 bp, Homo sapiens
cattacttcatacat

SEQ ID NO: 949326 - DNA, 15 bp, Homo sapiens
tcattacttcataca

SEQ ID NO: 949327 - DNA, 15 bp, Homo sapiens
ttcattacttcatac

SEQ ID NO: 949328 - DNA, 15 bp, Homo sapiens
tttcattacttcata

SEQ ID NO: 949329 - DNA, 15 bp, Homo sapiens
ttttcattacttcat

SEQ ID NO: 949330 - DNA, 15 bp, Homo sapiens
cttttcattacttca

SEQ ID NO: 949331 - DNA, 15 bp, Homo sapiens
tcttttcattacttc

SEQ ID NO: 949332 - DNA, 15 bp, Homo sapiens
ctcttttcattactt

SEQ ID NO: 949333 - DNA, 15 bp, Homo sapiens
cctcttttcattact

SEQ ID NO: 949334 - DNA, 15 bp, Homo sapiens
ccctcttttcattac

SEQ ID NO: 949335 - DNA, 15 bp, Homo sapiens
cccctcttttcatta

SEQ ID NO: 949336 - DNA, 15 bp, Homo sapiens
acccctcttttcatt

SEQ ID NO: 949337 - DNA, 15 bp, Homo sapiens
aacccctcttttcat

SEQ ID NO: 949338 - DNA, 15 bp, Homo sapiens
taacccctcttttca

SEQ ID NO: 949339 - DNA, 15 bp, Homo sapiens
ttaacccctcttttc

SEQ ID NO: 949340 - DNA, 15 bp, Homo sapiens
tttaacccctctttt

SEQ ID NO: 949341 - DNA, 15 bp, Homo sapiens
ttttaacccctcttt

SEQ ID NO: 949342 - DNA, 15 bp, Homo sapiens
attttaacccctctt

SEQ ID NO: 949343 - DNA, 15 bp, Homo sapiens
aattttaacccctct

SEQ ID NO: 949344 - DNA, 15 bp, Homo sapiens
taattttaacccctc

SEQ ID NO: 949345 - DNA, 15 bp, Homo sapiens
ttaattttaacccct

SEQ ID NO: 949346 - DNA, 15 bp, Homo sapiens
attaattttaacccc

SEQ ID NO: 949347 - DNA, 15 bp, Homo sapiens
tattaattttaaccc

SEQ ID NO: 949348 - DNA, 15 bp, Homo sapiens
atattaattttaacc

SEQ ID NO: 949349 - DNA, 15 bp, Homo sapiens
gatattaattttaac

SEQ ID NO: 949350 - DNA, 15 bp, Homo sapiens
ggatattaattttaa

SEQ ID NO: 949351 - DNA, 15 bp, Homo sapiens
tggatattaatttta

SEQ ID NO: 949352 - DNA, 15 bp, Homo sapiens
ttggatattaatttt

SEQ ID NO: 949353 - DNA, 15 bp, Homo sapiens
cttggatattaattt

SEQ ID NO: 949354 - DNA, 15 bp, Homo sapiens
acttggatattaatt

SEQ ID NO: 949355 - DNA, 15 bp, Homo sapiens
aacttggatattaat

SEQ ID NO: 949356 - DNA, 15 bp, Homo sapiens
aaacttggatattaa

SEQ ID NO: 949357 - DNA, 15 bp, Homo sapiens
aaaacttggatatta

SEQ ID NO: 949358 - DNA, 15 bp, Homo sapiens
aaaaacttggatatt

SEQ ID NO: 949359 - DNA, 15 bp, Homo sapiens
taaaaacttggatat

SEQ ID NO: 949360 - DNA, 15 bp, Homo sapiens
gtaaaaacttggata

SEQ ID NO: 949361 - DNA, 15 bp, Homo sapiens
agtaaaaacttggat

SEQ ID NO: 949362 - DNA, 15 bp, Homo sapiens
aagtaaaaacttgga

SEQ ID NO: 949363 - DNA, 15 bp, Homo sapiens
gaagtaaaaacttgg

SEQ ID NO: 949364 - DNA, 15 bp, Homo sapiens
tgaagtaaaaacttg

SEQ ID NO: 949365 - DNA, 15 bp, Homo sapiens
ctgaagtaaaaactt

SEQ ID NO: 949366 - DNA, 15 bp, Homo sapiens
actgaagtaaaaact

SEQ ID NO: 949367 - DNA, 15 bp, Homo sapiens
cactgaagtaaaaac

SEQ ID NO: 949368 - DNA, 15 bp, Homo sapiens
tcactgaagtaaaaa

SEQ ID NO: 949369 - DNA, 15 bp, Homo sapiens
ttcactgaagtaaaa

SEQ ID NO: 949370 - DNA, 15 bp, Homo sapiens
attcactgaagtaaa

SEQ ID NO: 949371 - DNA, 15 bp, Homo sapiens
aattcactgaagtaa

SEQ ID NO: 949372 - DNA, 15 bp, Homo sapiens
taattcactgaagta

SEQ ID NO: 949373 - DNA, 15 bp, Homo sapiens
ataattcactgaagt

SEQ ID NO: 949374 - DNA, 15 bp, Homo sapiens
cataattcactgaag

SEQ ID NO: 949375 - DNA, 15 bp, Homo sapiens
acataattcactgaa

SEQ ID NO: 949376 - DNA, 15 bp, Homo sapiens
cacataattcactga

SEQ ID NO: 949377 - DNA, 15 bp, Homo sapiens
ccacataattcactg

SEQ ID NO: 949378 - DNA, 15 bp, Homo sapiens
tccacataattcact

SEQ ID NO: 949379 - DNA, 15 bp, Homo sapiens
gtccacataattcac

SEQ ID NO: 949380 - DNA, 15 bp, Homo sapiens
agtccacataattca

SEQ ID NO: 949381 - DNA, 15 bp, Homo sapiens
gagtccacataattc

SEQ ID NO: 949382 - DNA, 15 bp, Homo sapiens
tgagtccacataatt

SEQ ID NO: 949383 - DNA, 15 bp, Homo sapiens
ctgagtccacataat

SEQ ID NO: 949384 - DNA, 15 bp, Homo sapiens
tctgagtccacataa

SEQ ID NO: 949385 - DNA, 15 bp, Homo sapiens
ctctgagtccacata

SEQ ID NO: 949386 - DNA, 15 bp, Homo sapiens
tctctgagtccacat

SEQ ID NO: 949387 - DNA, 15 bp, Homo sapiens
ctctctgagtccaca

SEQ ID NO: 949388 - DNA, 15 bp, Homo sapiens
actctctgagtccac

SEQ ID NO: 949389 - DNA, 15 bp, Homo sapiens
aactctctgagtcca

SEQ ID NO: 949390 - DNA, 15 bp, Homo sapiens
taactctctgagtcc

SEQ ID NO: 949391 - DNA, 15 bp, Homo sapiens
gtaactctctgagtc

SEQ ID NO: 949392 - DNA, 15 bp, Homo sapiens
tgtaactctctgagt

SEQ ID NO: 949393 - DNA, 15 bp, Homo sapiens
ttgtaactctctgag

SEQ ID NO: 949394 - DNA, 15 bp, Homo sapiens
gttgtaactctctga

SEQ ID NO: 949395 - DNA, 15 bp, Homo sapiens
agttgtaactctctg

SEQ ID NO: 949396 - DNA, 15 bp, Homo sapiens
tagttgtaactctct

SEQ ID NO: 949397 - DNA, 15 bp, Homo sapiens
ctagttgtaactctc

SEQ ID NO: 949398 - DNA, 15 bp, Homo sapiens
cctagttgtaactct

SEQ ID NO: 949399 - DNA, 15 bp, Homo sapiens
gcctagttgtaactc

SEQ ID NO: 949400 - DNA, 15 bp, Homo sapiens
ggcctagttgtaact

SEQ ID NO: 949401 - DNA, 15 bp, Homo sapiens
gggcctagttgtaac

SEQ ID NO: 949402 - DNA, 15 bp, Homo sapiens
tgggcctagttgtaa

SEQ ID NO: 949403 - DNA, 15 bp, Homo sapiens
ctgggcctagttgta

SEQ ID NO: 949404 - DNA, 15 bp, Homo sapiens
actgggcctagttgt

SEQ ID NO: 949405 - DNA, 15 bp, Homo sapiens
aactgggcctagttg

SEQ ID NO: 949406 - DNA, 15 bp, Homo sapiens
aaactgggcctagtt

SEQ ID NO: 949407 - DNA, 15 bp, Homo sapiens
aaaactgggcctagt

SEQ ID NO: 949408 - DNA, 15 bp, Homo sapiens
caaaactgggcctag

SEQ ID NO: 949409 - DNA, 15 bp, Homo sapiens
tcaaaactgggccta

SEQ ID NO: 949410 - DNA, 15 bp, Homo sapiens
ttcaaaactgggcct

SEQ ID NO: 949411 - DNA, 15 bp, Homo sapiens
attcaaaactgggcc

SEQ ID NO: 949412 - DNA, 15 bp, Homo sapiens
tattcaaaactgggc

SEQ ID NO: 949413 - DNA, 15 bp, Homo sapiens
atattcaaaactggg

SEQ ID NO: 949414 - DNA, 15 bp, Homo sapiens
aatattcaaaactgg

SEQ ID NO: 949415 - DNA, 15 bp, Homo sapiens
taatattcaaaactg

SEQ ID NO: 949416 - DNA, 15 bp, Homo sapiens
ataatattcaaaact

SEQ ID NO: 949417 - DNA, 15 bp, Homo sapiens
cataatattcaaaac

SEQ ID NO: 949418 - DNA, 15 bp, Homo sapiens
tcataatattcaaaa

SEQ ID NO: 949419 - DNA, 15 bp, Homo sapiens
ttcataatattcaaa

SEQ ID NO: 949420 - DNA, 15 bp, Homo sapiens
attcataatattcaa

SEQ ID NO: 949421 - DNA, 15 bp, Homo sapiens
aattcataatattca

SEQ ID NO: 949422 - DNA, 15 bp, Homo sapiens
aaattcataatattc

SEQ ID NO: 949423 - DNA, 15 bp, Homo sapiens
gaaattcataatatt

SEQ ID NO: 949424 - DNA, 15 bp, Homo sapiens
tgaaattcataatat

SEQ ID NO: 949425 - DNA, 15 bp, Homo sapiens
ctgaaattcataata

SEQ ID NO: 949426 - DNA, 15 bp, Homo sapiens
cctgaaattcataat

SEQ ID NO: 949427 - DNA, 15 bp, Homo sapiens
acctgaaattcataa

SEQ ID NO: 949428 - DNA, 15 bp, Homo sapiens
tacctgaaattcata

SEQ ID NO: 949429 - DNA, 15 bp, Homo sapiens
gtacctgaaattcat

SEQ ID NO: 949430 - DNA, 15 bp, Homo sapiens
ggtacctgaaattca

SEQ ID NO: 949431 - DNA, 15 bp, Homo sapiens
aggtacctgaaattc

SEQ ID NO: 949432 - DNA, 15 bp, Homo sapiens
caggtacctgaaatt

SEQ ID NO: 949433 - DNA, 15 bp, Homo sapiens
acaggtacctgaaat

SEQ ID NO: 949434 - DNA, 15 bp, Homo sapiens
cacaggtacctgaaa

SEQ ID NO: 949435 - DNA, 15 bp, Homo sapiens
tcacaggtacctgaa

SEQ ID NO: 949436 - DNA, 15 bp, Homo sapiens
ctcacaggtacctga

SEQ ID NO: 949437 - DNA, 15 bp, Homo sapiens
tctcacaggtacctg

SEQ ID NO: 949438 - DNA, 15 bp, Homo sapiens
ttctcacaggtacct

SEQ ID NO: 949439 - DNA, 15 bp, Homo sapiens
tttctcacaggtacc

SEQ ID NO: 949440 - DNA, 15 bp, Homo sapiens
atttctcacaggtac

SEQ ID NO: 949441 - DNA, 15 bp, Homo sapiens
gatttctcacaggta

SEQ ID NO: 949442 - DNA, 15 bp, Homo sapiens
tgatttctcacaggt

SEQ ID NO: 949443 - DNA, 15 bp, Homo sapiens
ttgatttctcacagg

SEQ ID NO: 949444 - DNA, 15 bp, Homo sapiens
tttgatttctcacag

SEQ ID NO: 949445 - DNA, 15 bp, Homo sapiens
gtttgatttctcaca

SEQ ID NO: 949446 - DNA, 15 bp, Homo sapiens
tgtttgatttctcac

SEQ ID NO: 949447 - DNA, 15 bp, Homo sapiens
ctgtttgatttctca

SEQ ID NO: 949448 - DNA, 15 bp, Homo sapiens
tctgtttgatttctc

SEQ ID NO: 949449 - DNA, 15 bp, Homo sapiens
gtctgtttgatttct

SEQ ID NO: 949450 - DNA, 15 bp, Homo sapiens
tgtctgtttgatttc

SEQ ID NO: 949451 - DNA, 15 bp, Homo sapiens
ttgtctgtttgattt

SEQ ID NO: 949452 - DNA, 15 bp, Homo sapiens
cttgtctgtttgatt

SEQ ID NO: 949453 - DNA, 15 bp, Homo sapiens
acttgtctgtttgat

SEQ ID NO: 949454 - DNA, 15 bp, Homo sapiens
gacttgtctgtttga

SEQ ID NO: 949455 - DNA, 15 bp, Homo sapiens
ggacttgtctgtttg

SEQ ID NO: 949456 - DNA, 15 bp, Homo sapiens
tggacttgtctgttt

SEQ ID NO: 949457 - DNA, 15 bp, Homo sapiens
ctggacttgtctgtt

SEQ ID NO: 949458 - DNA, 15 bp, Homo sapiens
cctggacttgtctgt

SEQ ID NO: 949459 - DNA, 15 bp, Homo sapiens
tcctggacttgtctg

SEQ ID NO: 949460 - DNA, 15 bp, Homo sapiens
ctcctggacttgtct

SEQ ID NO: 949461 - DNA, 15 bp, Homo sapiens
tctcctggacttgtc

SEQ ID NO: 949462 - DNA, 15 bp, Homo sapiens
gtctcctggacttgt

SEQ ID NO: 949463 - DNA, 15 bp, Homo sapiens
tgtctcctggacttg

SEQ ID NO: 949464 - DNA, 15 bp, Homo sapiens
ctgtctcctggactt

SEQ ID NO: 949465 - DNA, 15 bp, Homo sapiens
tctgtctcctggact

SEQ ID NO: 949466 - DNA, 15 bp, Homo sapiens
ttctgtctcctggac

SEQ ID NO: 949467 - DNA, 15 bp, Homo sapiens
tttctgtctcctgga

SEQ ID NO: 949468 - DNA, 15 bp, Homo sapiens
ctttctgtctcctgg

SEQ ID NO: 949469 - DNA, 15 bp, Homo sapiens
cctttctgtctcctg

SEQ ID NO: 949470 - DNA, 15 bp, Homo sapiens
ccctttctgtctcct

SEQ ID NO: 949471 - DNA, 15 bp, Homo sapiens
tccctttctgtctcc

SEQ ID NO: 949472 - DNA, 15 bp, Homo sapiens
ttccctttctgtctc

SEQ ID NO: 949473 - DNA, 15 bp, Homo sapiens
gttccctttctgtct

SEQ ID NO: 949474 - DNA, 15 bp, Homo sapiens
tgttccctttctgtc

SEQ ID NO: 949475 - DNA, 15 bp, Homo sapiens
ttgttccctttctgt

SEQ ID NO: 949476 - DNA, 15 bp, Homo sapiens
tttgttccctttctg

SEQ ID NO: 949477 - DNA, 15 bp, Homo sapiens
ctttgttccctttct

SEQ ID NO: 949478 - DNA, 15 bp, Homo sapiens
actttgttccctttc

SEQ ID NO: 949479 - DNA, 15 bp, Homo sapiens
tactttgttcccttt

SEQ ID NO: 949480 - DNA, 15 bp, Homo sapiens
atactttgttccctt

SEQ ID NO: 949481 - DNA, 15 bp, Homo sapiens
tatactttgttccct

SEQ ID NO: 949482 - DNA, 15 bp, Homo sapiens
ttatactttgttccc

SEQ ID NO: 949483 - DNA, 15 bp, Homo sapiens
cttatactttgttcc

SEQ ID NO: 949484 - DNA, 15 bp, Homo sapiens
tcttatactttgttc

SEQ ID NO: 949485 - DNA, 15 bp, Homo sapiens
atcttatactttgtt

SEQ ID NO: 949486 - DNA, 15 bp, Homo sapiens
tatcttatactttgt

SEQ ID NO: 949487 - DNA, 15 bp, Homo sapiens
ttatcttatactttg

SEQ ID NO: 949488 - DNA, 15 bp, Homo sapiens
attatcttatacttt

SEQ ID NO: 949489 - DNA, 15 bp, Homo sapiens
aattatcttatactt

SEQ ID NO: 949490 - DNA, 15 bp, Homo sapiens
gaattatcttatact

SEQ ID NO: 949491 - DNA, 15 bp, Homo sapiens
tgaattatcttatac

SEQ ID NO: 949492 - DNA, 15 bp, Homo sapiens
atgaattatcttata

SEQ ID NO: 949493 - DNA, 15 bp, Homo sapiens
aatgaattatcttat

SEQ ID NO: 949494 - DNA, 15 bp, Homo sapiens
gaatgaattatctta

SEQ ID NO: 949495 - DNA, 15 bp, Homo sapiens
agaatgaattatctt

SEQ ID NO: 949496 - DNA, 15 bp, Homo sapiens
cagaatgaattatct

SEQ ID NO: 949497 - DNA, 15 bp, Homo sapiens
acagaatgaattatc

SEQ ID NO: 949498 - DNA, 15 bp, Homo sapiens
tacagaatgaattat

SEQ ID NO: 949499 - DNA, 15 bp, Homo sapiens
atacagaatgaatta

SEQ ID NO: 949500 - DNA, 15 bp, Homo sapiens
tatacagaatgaatt

SEQ ID NO: 949501 - DNA, 15 bp, Homo sapiens
atatacagaatgaat

SEQ ID NO: 949502 - DNA, 15 bp, Homo sapiens
tatatacagaatgaa

SEQ ID NO: 949503 - DNA, 15 bp, Homo sapiens
atatatacagaatga

SEQ ID NO: 949504 - DNA, 15 bp, Homo sapiens
gatatatacagaatg

SEQ ID NO: 949505 - DNA, 15 bp, Homo sapiens
tgatatatacagaat

SEQ ID NO: 949506 - DNA, 15 bp, Homo sapiens
ttgatatatacagaa

SEQ ID NO: 949507 - DNA, 15 bp, Homo sapiens
gttgatatatacaga

SEQ ID NO: 949508 - DNA, 15 bp, Homo sapiens
agttgatatatacag

SEQ ID NO: 949509 - DNA, 15 bp, Homo sapiens
cagttgatatataca

SEQ ID NO: 949510 - DNA, 15 bp, Homo sapiens
gcagttgatatatac

SEQ ID NO: 949511 - DNA, 15 bp, Homo sapiens
agcagttgatatata

SEQ ID NO: 949512 - DNA, 15 bp, Homo sapiens
tagcagttgatatat

SEQ ID NO: 949513 - DNA, 15 bp, Homo sapiens
gtagcagttgatata

SEQ ID NO: 949514 - DNA, 15 bp, Homo sapiens
ggtagcagttgatat

SEQ ID NO: 949515 - DNA, 15 bp, Homo sapiens
aggtagcagttgata

SEQ ID NO: 949516 - DNA, 15 bp, Homo sapiens
aaggtagcagttgat

SEQ ID NO: 949517 - DNA, 15 bp, Homo sapiens
caaggtagcagttga

SEQ ID NO: 949518 - DNA, 15 bp, Homo sapiens
ccaaggtagcagttg

SEQ ID NO: 949519 - DNA, 15 bp, Homo sapiens
gccaaggtagcagtt

SEQ ID NO: 949520 - DNA, 15 bp, Homo sapiens
tgccaaggtagcagt

SEQ ID NO: 949521 - DNA, 15 bp, Homo sapiens
gtgccaaggtagcag

SEQ ID NO: 949522 - DNA, 15 bp, Homo sapiens
agtgccaaggtagca

SEQ ID NO: 949523 - DNA, 15 bp, Homo sapiens
gagtgccaaggtagc

SEQ ID NO: 949524 - DNA, 15 bp, Homo sapiens
agagtgccaaggtag

SEQ ID NO: 949525 - DNA, 15 bp, Homo sapiens
aagagtgccaaggta

SEQ ID NO: 949526 - DNA, 15 bp, Homo sapiens
aaagagtgccaaggt

SEQ ID NO: 949527 - DNA, 15 bp, Homo sapiens
aaaagagtgccaagg

SEQ ID NO: 949528 - DNA, 15 bp, Homo sapiens
aaaaagagtgccaag

SEQ ID NO: 949529 - DNA, 15 bp, Homo sapiens
taaaaagagtgccaa

SEQ ID NO: 949530 - DNA, 15 bp, Homo sapiens
gtaaaaagagtgcca

SEQ ID NO: 949531 - DNA, 15 bp, Homo sapiens
agtaaaaagagtgcc

SEQ ID NO: 949532 - DNA, 15 bp, Homo sapiens
gagtaaaaagagtgc

SEQ ID NO: 949533 - DNA, 15 bp, Homo sapiens
tgagtaaaaagagtg

SEQ ID NO: 949534 - DNA, 15 bp, Homo sapiens
ttgagtaaaaagagt

SEQ ID NO: 949535 - DNA, 15 bp, Homo sapiens
gttgagtaaaaagag

SEQ ID NO: 949536 - DNA, 15 bp, Homo sapiens
tgttgagtaaaaaga

SEQ ID NO: 949537 - DNA, 15 bp, Homo sapiens
ctgttgagtaaaaag

SEQ ID NO: 949538 - DNA, 15 bp, Homo sapiens
tctgttgagtaaaaa

SEQ ID NO: 949539 - DNA, 15 bp, Homo sapiens
atctgttgagtaaaa

SEQ ID NO: 949540 - DNA, 15 bp, Homo sapiens
aatctgttgagtaaa

SEQ ID NO: 949541 - DNA, 15 bp, Homo sapiens
gaatctgttgagtaa

SEQ ID NO: 949542 - DNA, 15 bp, Homo sapiens
agaatctgttgagta

SEQ ID NO: 949543 - DNA, 15 bp, Homo sapiens
tagaatctgttgagt

SEQ ID NO: 949544 - DNA, 15 bp, Homo sapiens
gtagaatctgttgag

SEQ ID NO: 949545 - DNA, 15 bp, Homo sapiens
tgtagaatctgttga

SEQ ID NO: 949546 - DNA, 15 bp, Homo sapiens
gtgtagaatctgttg

SEQ ID NO: 949547 - DNA, 15 bp, Homo sapiens
agtgtagaatctgtt

SEQ ID NO: 949548 - DNA, 15 bp, Homo sapiens
gagtgtagaatctgt

SEQ ID NO: 949549 - DNA, 15 bp, Homo sapiens
tgagtgtagaatctg

SEQ ID NO: 949550 - DNA, 15 bp, Homo sapiens
ttgagtgtagaatct

SEQ ID NO: 949551 - DNA, 15 bp, Homo sapiens
cttgagtgtagaatc

SEQ ID NO: 949552 - DNA, 15 bp, Homo sapiens
acttgagtgtagaat

SEQ ID NO: 949553 - DNA, 15 bp, Homo sapiens
gacttgagtgtagaa

SEQ ID NO: 949554 - DNA, 15 bp, Homo sapiens
agacttgagtgtaga

SEQ ID NO: 949555 - DNA, 15 bp, Homo sapiens
cagacttgagtgtag

SEQ ID NO: 949556 - DNA, 15 bp, Homo sapiens
ccagacttgagtgta

SEQ ID NO: 949557 - DNA, 15 bp, Homo sapiens
cccagacttgagtgt

SEQ ID NO: 949558 - DNA, 15 bp, Homo sapiens
tcccagacttgagtg

SEQ ID NO: 949559 - DNA, 15 bp, Homo sapiens
ctcccagacttgagt

SEQ ID NO: 949560 - DNA, 15 bp, Homo sapiens
tctcccagacttgag

SEQ ID NO: 949561 - DNA, 15 bp, Homo sapiens
atctcccagacttga

SEQ ID NO: 949562 - DNA, 15 bp, Homo sapiens
catctcccagacttg

SEQ ID NO: 949563 - DNA, 15 bp, Homo sapiens
gcatctcccagactt

SEQ ID NO: 949564 - DNA, 15 bp, Homo sapiens
agcatctcccagact

SEQ ID NO: 949565 - DNA, 15 bp, Homo sapiens
cagcatctcccagac

SEQ ID NO: 949566 - DNA, 15 bp, Homo sapiens
tcagcatctcccaga

SEQ ID NO: 949567 - DNA, 15 bp, Homo sapiens
ctcagcatctcccag

SEQ ID NO: 949568 - DNA, 15 bp, Homo sapiens
actcagcatctccca

SEQ ID NO: 949569 - DNA, 15 bp, Homo sapiens
aactcagcatctccc

SEQ ID NO: 949570 - DNA, 15 bp, Homo sapiens
taactcagcatctcc

SEQ ID NO: 949571 - DNA, 15 bp, Homo sapiens
ttaactcagcatctc

SEQ ID NO: 949572 - DNA, 15 bp, Homo sapiens
cttaactcagcatct

SEQ ID NO: 949573 - DNA, 15 bp, Homo sapiens
acttaactcagcatc

SEQ ID NO: 949574 - DNA, 15 bp, Homo sapiens
aacttaactcagcat

SEQ ID NO: 949575 - DNA, 15 bp, Homo sapiens
taacttaactcagca

SEQ ID NO: 949576 - DNA, 15 bp, Homo sapiens
ctaacttaactcagc

SEQ ID NO: 949577 - DNA, 15 bp, Homo sapiens
actaacttaactcag

SEQ ID NO: 949578 - DNA, 15 bp, Homo sapiens
tactaacttaactca

SEQ ID NO: 949579 - DNA, 15 bp, Homo sapiens
gtactaacttaactc

SEQ ID NO: 949580 - DNA, 15 bp, Homo sapiens
tgtactaacttaact

SEQ ID NO: 949581 - DNA, 15 bp, Homo sapiens
ttgtactaacttaac

SEQ ID NO: 949582 - DNA, 15 bp, Homo sapiens
cttgtactaacttaa

SEQ ID NO: 949583 - DNA, 15 bp, Homo sapiens
tcttgtactaactta

SEQ ID NO: 949584 - DNA, 15 bp, Homo sapiens
atcttgtactaactt

SEQ ID NO: 949585 - DNA, 15 bp, Homo sapiens
catcttgtactaact

SEQ ID NO: 949586 - DNA, 15 bp, Homo sapiens
acatcttgtactaac

SEQ ID NO: 949587 - DNA, 15 bp, Homo sapiens
gacatcttgtactaa

SEQ ID NO: 949588 - DNA, 15 bp, Homo sapiens
agacatcttgtacta

SEQ ID NO: 949589 - DNA, 15 bp, Homo sapiens
gagacatcttgtact

SEQ ID NO: 949590 - DNA, 15 bp, Homo sapiens
agagacatcttgtac

SEQ ID NO: 949591 - DNA, 15 bp, Homo sapiens
cagagacatcttgta

SEQ ID NO: 949592 - DNA, 15 bp, Homo sapiens
tcagagacatcttgt

SEQ ID NO: 949593 - DNA, 15 bp, Homo sapiens
ctcagagacatcttg

SEQ ID NO: 949594 - DNA, 15 bp, Homo sapiens
tctcagagacatctt

SEQ ID NO: 949595 - DNA, 15 bp, Homo sapiens
ctctcagagacatct

SEQ ID NO: 949596 - DNA, 15 bp, Homo sapiens
gctctcagagacatc

SEQ ID NO: 949597 - DNA, 15 bp, Homo sapiens
tgctctcagagacat

SEQ ID NO: 949598 - DNA, 15 bp, Homo sapiens
gtgctctcagagaca

SEQ ID NO: 949599 - DNA, 15 bp, Homo sapiens
agtgctctcagagac

SEQ ID NO: 949600 - DNA, 15 bp, Homo sapiens
tagtgctctcagaga

SEQ ID NO: 949601 - DNA, 15 bp, Homo sapiens
gtagtgctctcagag

SEQ ID NO: 949602 - DNA, 15 bp, Homo sapiens
agtagtgctctcaga

SEQ ID NO: 949603 - DNA, 15 bp, Homo sapiens
cagtagtgctctcag

SEQ ID NO: 949604 - DNA, 15 bp, Homo sapiens
acagtagtgctctca

SEQ ID NO: 949605 - DNA, 15 bp, Homo sapiens
cacagtagtgctctc

SEQ ID NO: 949606 - DNA, 15 bp, Homo sapiens
gcacagtagtgctct

SEQ ID NO: 949607 - DNA, 15 bp, Homo sapiens
tgcacagtagtgctc

SEQ ID NO: 949608 - DNA, 15 bp, Homo sapiens
ttgcacagtagtgct

SEQ ID NO: 949609 - DNA, 15 bp, Homo sapiens
gttgcacagtagtgc

SEQ ID NO: 949610 - DNA, 15 bp, Homo sapiens
tgttgcacagtagtg

SEQ ID NO: 949611 - DNA, 15 bp, Homo sapiens
atgttgcacagtagt

SEQ ID NO: 949612 - DNA, 15 bp, Homo sapiens
catgttgcacagtag

SEQ ID NO: 949613 - DNA, 15 bp, Homo sapiens
tcatgttgcacagta

SEQ ID NO: 949614 - DNA, 15 bp, Homo sapiens
ttcatgttgcacagt

SEQ ID NO: 949615 - DNA, 15 bp, Homo sapiens
attcatgttgcacag

SEQ ID NO: 949616 - DNA, 15 bp, Homo sapiens
aattcatgttgcaca

SEQ ID NO: 949617 - DNA, 15 bp, Homo sapiens
aaattcatgttgcac

SEQ ID NO: 949618 - DNA, 15 bp, Homo sapiens
gaaattcatgttgca

SEQ ID NO: 949619 - DNA, 15 bp, Homo sapiens
ggaaattcatgttgc

SEQ ID NO: 949620 - DNA, 15 bp, Homo sapiens
tggaaattcatgttg

SEQ ID NO: 949621 - DNA, 15 bp, Homo sapiens
gtggaaattcatgtt

SEQ ID NO: 949622 - DNA, 15 bp, Homo sapiens
cgtggaaattcatgt

SEQ ID NO: 949623 - DNA, 15 bp, Homo sapiens
gcgtggaaattcatg

SEQ ID NO: 949624 - DNA, 15 bp, Homo sapiens
tgcgtggaaattcat

SEQ ID NO: 949625 - DNA, 15 bp, Homo sapiens
ctgcgtggaaattca

SEQ ID NO: 949626 - DNA, 15 bp, Homo sapiens
cctgcgtggaaattc

SEQ ID NO: 949627 - DNA, 15 bp, Homo sapiens
ccctgcgtggaaatt

SEQ ID NO: 949628 - DNA, 15 bp, Homo sapiens
cccctgcgtggaaat

SEQ ID NO: 949629 - DNA, 15 bp, Homo sapiens
tcccctgcgtggaaa

SEQ ID NO: 949630 - DNA, 15 bp, Homo sapiens
atcccctgcgtggaa

SEQ ID NO: 949631 - DNA, 15 bp, Homo sapiens
tatcccctgcgtgga

SEQ ID NO: 949632 - DNA, 15 bp, Homo sapiens
atatcccctgcgtgg

SEQ ID NO: 949633 - DNA, 15 bp, Homo sapiens
tatatcccctgcgtg

SEQ ID NO: 949634 - DNA, 15 bp, Homo sapiens
atatatcccctgcgt

SEQ ID NO: 949635 - DNA, 15 bp, Homo sapiens
tatatatcccctgcg

SEQ ID NO: 949636 - DNA, 15 bp, Homo sapiens
tggtatgtgatatgt

SEQ ID NO: 949637 - DNA, 15 bp, Homo sapiens
ggtatgtgatatgtg

SEQ ID NO: 949638 - DNA, 15 bp, Homo sapiens
gtatgtgatatgtgt

SEQ ID NO: 949639 - DNA, 15 bp, Homo sapiens
tatgtgatatgtgtg

SEQ ID NO: 949640 - DNA, 15 bp, Homo sapiens
atgtgatatgtgtgt

SEQ ID NO: 949641 - DNA, 15 bp, Homo sapiens
tgtgatatgtgtgtg

SEQ ID NO: 949642 - DNA, 15 bp, Homo sapiens
gtgatatgtgtgtgt

SEQ ID NO: 949643 - DNA, 15 bp, Homo sapiens
tgatatgtgtgtgtc

SEQ ID NO: 949644 - DNA, 15 bp, Homo sapiens
gatatgtgtgtgtcc

SEQ ID NO: 949645 - DNA, 15 bp, Homo sapiens
atatgtgtgtgtccc

SEQ ID NO: 949646 - DNA, 15 bp, Homo sapiens
tatgtgtgtgtccct

SEQ ID NO: 949647 - DNA, 15 bp, Homo sapiens
atgtgtgtgtccctg

SEQ ID NO: 949648 - DNA, 15 bp, Homo sapiens
tgtgtgtgtccctgc

SEQ ID NO: 949649 - DNA, 15 bp, Homo sapiens
gtgtgtgtccctgcc

SEQ ID NO: 949650 - DNA, 15 bp, Homo sapiens
tgtgtgtccctgccc

SEQ ID NO: 949651 - DNA, 15 bp, Homo sapiens
gtgtgtccctgccca

SEQ ID NO: 949652 - DNA, 15 bp, Homo sapiens
tgtgtccctgcccaa

SEQ ID NO: 949653 - DNA, 15 bp, Homo sapiens
gtgtccctgcccaaa

SEQ ID NO: 949654 - DNA, 15 bp, Homo sapiens
tgtccctgcccaaat

SEQ ID NO: 949655 - DNA, 15 bp, Homo sapiens
gtccctgcccaaatc

SEQ ID NO: 949656 - DNA, 15 bp, Homo sapiens
tccctgcccaaatct

SEQ ID NO: 949657 - DNA, 15 bp, Homo sapiens
ccctgcccaaatctt

SEQ ID NO: 949658 - DNA, 15 bp, Homo sapiens
cctgcccaaatctta

SEQ ID NO: 949659 - DNA, 15 bp, Homo sapiens
ctgcccaaatcttat

SEQ ID NO: 949660 - DNA, 15 bp, Homo sapiens
tgcccaaatcttata

SEQ ID NO: 949661 - DNA, 15 bp, Homo sapiens
gcccaaatcttatat

SEQ ID NO: 949662 - DNA, 15 bp, Homo sapiens
cccaaatcttatatc

SEQ ID NO: 949663 - DNA, 15 bp, Homo sapiens
ccaaatcttatatca

SEQ ID NO: 949664 - DNA, 15 bp, Homo sapiens
caaatcttatatcaa

SEQ ID NO: 949665 - DNA, 15 bp, Homo sapiens
aaatcttatatcaaa

SEQ ID NO: 949666 - DNA, 15 bp, Homo sapiens
aatcttatatcaaaa

SEQ ID NO: 949667 - DNA, 15 bp, Homo sapiens
atcttatatcaaaat

SEQ ID NO: 949668 - DNA, 15 bp, Homo sapiens
tcttatatcaaaatg

SEQ ID NO: 949669 - DNA, 15 bp, Homo sapiens
cttatatcaaaatgt

SEQ ID NO: 949670 - DNA, 15 bp, Homo sapiens
ttatatcaaaatgta

SEQ ID NO: 949671 - DNA, 15 bp, Homo sapiens
tatatcaaaatgtaa

SEQ ID NO: 949672 - DNA, 15 bp, Homo sapiens
atatcaaaatgtaat

SEQ ID NO: 949673 - DNA, 15 bp, Homo sapiens
tatcaaaatgtaatc

SEQ ID NO: 949674 - DNA, 15 bp, Homo sapiens
atcaaaatgtaatcc

SEQ ID NO: 949675 - DNA, 15 bp, Homo sapiens
tcaaaatgtaatccc

SEQ ID NO: 949676 - DNA, 15 bp, Homo sapiens
caaaatgtaatcccc

SEQ ID NO: 949677 - DNA, 15 bp, Homo sapiens
aaaatgtaatcccca

SEQ ID NO: 949678 - DNA, 15 bp, Homo sapiens
aaatgtaatccccaa

SEQ ID NO: 949679 - DNA, 15 bp, Homo sapiens
aatgtaatccccaat

SEQ ID NO: 949680 - DNA, 15 bp, Homo sapiens
atgtaatccccaata

SEQ ID NO: 949681 - DNA, 15 bp, Homo sapiens
tgtaatccccaatat

SEQ ID NO: 949682 - DNA, 15 bp, Homo sapiens
gtaatccccaatatt

SEQ ID NO: 949683 - DNA, 15 bp, Homo sapiens
taatccccaatattg

SEQ ID NO: 949684 - DNA, 15 bp, Homo sapiens
aatccccaatattgg

SEQ ID NO: 949685 - DNA, 15 bp, Homo sapiens
atccccaatattgga

SEQ ID NO: 949686 - DNA, 15 bp, Homo sapiens
tccccaatattggaa

SEQ ID NO: 949687 - DNA, 15 bp, Homo sapiens
ccccaatattggaag

SEQ ID NO: 949688 - DNA, 15 bp, Homo sapiens
cccaatattggaagt

SEQ ID NO: 949689 - DNA, 15 bp, Homo sapiens
ccaatattggaagtg

SEQ ID NO: 949690 - DNA, 15 bp, Homo sapiens
caatattggaagtgg

SEQ ID NO: 949691 - DNA, 15 bp, Homo sapiens
aatattggaagtggg

SEQ ID NO: 949692 - DNA, 15 bp, Homo sapiens
atattggaagtgggg

SEQ ID NO: 949693 - DNA, 15 bp, Homo sapiens
tattggaagtggggc

SEQ ID NO: 949694 - DNA, 15 bp, Homo sapiens
attggaagtggggcc

SEQ ID NO: 949695 - DNA, 15 bp, Homo sapiens
ttggaagtggggcct

SEQ ID NO: 949696 - DNA, 15 bp, Homo sapiens
tggaagtggggcctg

SEQ ID NO: 949697 - DNA, 15 bp, Homo sapiens
ggaagtggggcctgg

SEQ ID NO: 949698 - DNA, 15 bp, Homo sapiens
gaagtggggcctggt

SEQ ID NO: 949699 - DNA, 15 bp, Homo sapiens
aagtggggcctggtg

SEQ ID NO: 949700 - DNA, 15 bp, Homo sapiens
agtggggcctggtgg

SEQ ID NO: 949701 - DNA, 15 bp, Homo sapiens
gtggggcctggtggg

SEQ ID NO: 949702 - DNA, 15 bp, Homo sapiens
tggggcctggtggga

SEQ ID NO: 949703 - DNA, 15 bp, Homo sapiens
ggggcctggtgggaa

SEQ ID NO: 949704 - DNA, 15 bp, Homo sapiens
gggcctggtgggaaa

SEQ ID NO: 949705 - DNA, 15 bp, Homo sapiens
ggcctggtgggaaat

SEQ ID NO: 949706 - DNA, 15 bp, Homo sapiens
gcctggtgggaaatg

SEQ ID NO: 949707 - DNA, 15 bp, Homo sapiens
cctggtgggaaatga

SEQ ID NO: 949708 - DNA, 15 bp, Homo sapiens
ctggtgggaaatgat

SEQ ID NO: 949709 - DNA, 15 bp, Homo sapiens
tggtgggaaatgatt

SEQ ID NO: 949710 - DNA, 15 bp, Homo sapiens
ggtgggaaatgattg

SEQ ID NO: 949711 - DNA, 15 bp, Homo sapiens
gtgggaaatgattgg

SEQ ID NO: 949712 - DNA, 15 bp, Homo sapiens
tgggaaatgattgga

SEQ ID NO: 949713 - DNA, 15 bp, Homo sapiens
gggaaatgattggat

SEQ ID NO: 949714 - DNA, 15 bp, Homo sapiens
ggaaatgattggatt

SEQ ID NO: 949715 - DNA, 15 bp, Homo sapiens
gaaatgattggatta

SEQ ID NO: 949716 - DNA, 15 bp, Homo sapiens
aaatgattggattat

SEQ ID NO: 949717 - DNA, 15 bp, Homo sapiens
aatgattggattatt

SEQ ID NO: 949718 - DNA, 15 bp, Homo sapiens
atgattggattatta

SEQ ID NO: 949719 - DNA, 15 bp, Homo sapiens
tgattggattattag

SEQ ID NO: 949720 - DNA, 15 bp, Homo sapiens
gattggattattagg

SEQ ID NO: 949721 - DNA, 15 bp, Homo sapiens
attggattattaggg

SEQ ID NO: 949722 - DNA, 15 bp, Homo sapiens
ttggattattagggt

SEQ ID NO: 949723 - DNA, 15 bp, Homo sapiens
tggattattagggtg

SEQ ID NO: 949724 - DNA, 15 bp, Homo sapiens
ggattattagggtgg

SEQ ID NO: 949725 - DNA, 15 bp, Homo sapiens
gattattagggtgga

SEQ ID NO: 949726 - DNA, 15 bp, Homo sapiens
attattagggtggat

SEQ ID NO: 949727 - DNA, 15 bp, Homo sapiens
ttattagggtggatt

SEQ ID NO: 949728 - DNA, 15 bp, Homo sapiens
tattagggtggattt

SEQ ID NO: 949729 - DNA, 15 bp, Homo sapiens
attagggtggatttc

SEQ ID NO: 949730 - DNA, 15 bp, Homo sapiens
ttagggtggatttcc

SEQ ID NO: 949731 - DNA, 15 bp, Homo sapiens
tagggtggatttcct

SEQ ID NO: 949732 - DNA, 15 bp, Homo sapiens
agggtggatttccta

SEQ ID NO: 949733 - DNA, 15 bp, Homo sapiens
gggtggatttcctat

SEQ ID NO: 949734 - DNA, 15 bp, Homo sapiens
ggtggatttcctatg

SEQ ID NO: 949735 - DNA, 15 bp, Homo sapiens
gtggatttcctatga

SEQ ID NO: 949736 - DNA, 15 bp, Homo sapiens
tggatttcctatgaa

SEQ ID NO: 949737 - DNA, 15 bp, Homo sapiens
ggatttcctatgaat

SEQ ID NO: 949738 - DNA, 15 bp, Homo sapiens
gatttcctatgaatg

SEQ ID NO: 949739 - DNA, 15 bp, Homo sapiens
atttcctatgaatgg

SEQ ID NO: 949740 - DNA, 15 bp, Homo sapiens
tttcctatgaatggt

SEQ ID NO: 949741 - DNA, 15 bp, Homo sapiens
ttcctatgaatggtt

SEQ ID NO: 949742 - DNA, 15 bp, Homo sapiens
tcctatgaatggttt

SEQ ID NO: 949743 - DNA, 15 bp, Homo sapiens
cctatgaatggttta

SEQ ID NO: 949744 - DNA, 15 bp, Homo sapiens
ctatgaatggtttag

SEQ ID NO: 949745 - DNA, 15 bp, Homo sapiens
tatgaatggtttagc

SEQ ID NO: 949746 - DNA, 15 bp, Homo sapiens
atgaatggtttagca

SEQ ID NO: 949747 - DNA, 15 bp, Homo sapiens
tgaatggtttagcac

SEQ ID NO: 949748 - DNA, 15 bp, Homo sapiens
gaatggtttagcacc

SEQ ID NO: 949749 - DNA, 15 bp, Homo sapiens
aatggtttagcacca

SEQ ID NO: 949750 - DNA, 15 bp, Homo sapiens
atggtttagcaccac

SEQ ID NO: 949751 - DNA, 15 bp, Homo sapiens
tggtttagcaccacc

SEQ ID NO: 949752 - DNA, 15 bp, Homo sapiens
ggtttagcaccaccc

SEQ ID NO: 949753 - DNA, 15 bp, Homo sapiens
gtttagcaccacccc

SEQ ID NO: 949754 - DNA, 15 bp, Homo sapiens
tttagcaccacccca

SEQ ID NO: 949755 - DNA, 15 bp, Homo sapiens
ttagcaccaccccac

SEQ ID NO: 949756 - DNA, 15 bp, Homo sapiens
tagcaccaccccact

SEQ ID NO: 949757 - DNA, 15 bp, Homo sapiens
agcaccaccccactt

SEQ ID NO: 949758 - DNA, 15 bp, Homo sapiens
gcaccaccccacttg

SEQ ID NO: 949759 - DNA, 15 bp, Homo sapiens
caccaccccacttgg

SEQ ID NO: 949760 - DNA, 15 bp, Homo sapiens
accaccccacttggt

SEQ ID NO: 949761 - DNA, 15 bp, Homo sapiens
ccaccccacttggta

SEQ ID NO: 949762 - DNA, 15 bp, Homo sapiens
caccccacttggtac

SEQ ID NO: 949763 - DNA, 15 bp, Homo sapiens
accccacttggtact

SEQ ID NO: 949764 - DNA, 15 bp, Homo sapiens
ccccacttggtactg

SEQ ID NO: 949765 - DNA, 15 bp, Homo sapiens
cccacttggtactgt

SEQ ID NO: 949766 - DNA, 15 bp, Homo sapiens
ccacttggtactgta

SEQ ID NO: 949767 - DNA, 15 bp, Homo sapiens
cacttggtactgtat

SEQ ID NO: 949768 - DNA, 15 bp, Homo sapiens
acttggtactgtatt

SEQ ID NO: 949769 - DNA, 15 bp, Homo sapiens
cttggtactgtattt

SEQ ID NO: 949770 - DNA, 15 bp, Homo sapiens
ttggtactgtatttg

SEQ ID NO: 949771 - DNA, 15 bp, Homo sapiens
tggtactgtatttgc

SEQ ID NO: 949772 - DNA, 15 bp, Homo sapiens
ggtactgtatttgct

SEQ ID NO: 949773 - DNA, 15 bp, Homo sapiens
gtactgtatttgcta

SEQ ID NO: 949774 - DNA, 15 bp, Homo sapiens
tactgtatttgctac

SEQ ID NO: 949775 - DNA, 15 bp, Homo sapiens
actgtatttgctaca

SEQ ID NO: 949776 - DNA, 15 bp, Homo sapiens
ctgtatttgctacaa

SEQ ID NO: 949777 - DNA, 15 bp, Homo sapiens
tgtatttgctacaat

SEQ ID NO: 949778 - DNA, 15 bp, Homo sapiens
gtatttgctacaatg

SEQ ID NO: 949779 - DNA, 15 bp, Homo sapiens
tatttgctacaatga

SEQ ID NO: 949780 - DNA, 15 bp, Homo sapiens
atttgctacaatgag

SEQ ID NO: 949781 - DNA, 15 bp, Homo sapiens
tttgctacaatgagt

SEQ ID NO: 949782 - DNA, 15 bp, Homo sapiens
ttgctacaatgagtt

SEQ ID NO: 949783 - DNA, 15 bp, Homo sapiens
tgctacaatgagttc

SEQ ID NO: 949784 - DNA, 15 bp, Homo sapiens
gctacaatgagttct

SEQ ID NO: 949785 - DNA, 15 bp, Homo sapiens
ctacaatgagttctt

SEQ ID NO: 949786 - DNA, 15 bp, Homo sapiens
tacaatgagttcttg

SEQ ID NO: 949787 - DNA, 15 bp, Homo sapiens
acaatgagttcttga

SEQ ID NO: 949788 - DNA, 15 bp, Homo sapiens
caatgagttcttgag

SEQ ID NO: 949789 - DNA, 15 bp, Homo sapiens
aatgagttcttgaga

SEQ ID NO: 949790 - DNA, 15 bp, Homo sapiens
atgagttcttgagag

SEQ ID NO: 949791 - DNA, 15 bp, Homo sapiens
tgagttcttgagaga

SEQ ID NO: 949792 - DNA, 15 bp, Homo sapiens
gagttcttgagagag

SEQ ID NO: 949793 - DNA, 15 bp, Homo sapiens
agttcttgagagagc

SEQ ID NO: 949794 - DNA, 15 bp, Homo sapiens
gttcttgagagagct

SEQ ID NO: 949795 - DNA, 15 bp, Homo sapiens
ttcttgagagagctg

SEQ ID NO: 949796 - DNA, 15 bp, Homo sapiens
tcttgagagagctgg

SEQ ID NO: 949797 - DNA, 15 bp, Homo sapiens
cttgagagagctggc

SEQ ID NO: 949798 - DNA, 15 bp, Homo sapiens
ttgagagagctggct

SEQ ID NO: 949799 - DNA, 15 bp, Homo sapiens
tgagagagctggctg

SEQ ID NO: 949800 - DNA, 15 bp, Homo sapiens
gagagagctggctgt

SEQ ID NO: 949801 - DNA, 15 bp, Homo sapiens
agagagctggctgtt

SEQ ID NO: 949802 - DNA, 15 bp, Homo sapiens
gagagctggctgttc

SEQ ID NO: 949803 - DNA, 15 bp, Homo sapiens
agagctggctgttca

SEQ ID NO: 949804 - DNA, 15 bp, Homo sapiens
gagctggctgttcaa

SEQ ID NO: 949805 - DNA, 15 bp, Homo sapiens
agctggctgttcaaa

SEQ ID NO: 949806 - DNA, 15 bp, Homo sapiens
gctggctgttcaaaa

SEQ ID NO: 949807 - DNA, 15 bp, Homo sapiens
ctggctgttcaaaac

SEQ ID NO: 949808 - DNA, 15 bp, Homo sapiens
tggctgttcaaaact

SEQ ID NO: 949809 - DNA, 15 bp, Homo sapiens
ggctgttcaaaactg

SEQ ID NO: 949810 - DNA, 15 bp, Homo sapiens
gctgttcaaaactgt

SEQ ID NO: 949811 - DNA, 15 bp, Homo sapiens
ctgttcaaaactgtg

SEQ ID NO: 949812 - DNA, 15 bp, Homo sapiens
tgttcaaaactgtgt

SEQ ID NO: 949813 - DNA, 15 bp, Homo sapiens
gttcaaaactgtgta

SEQ ID NO: 949814 - DNA, 15 bp, Homo sapiens
ttcaaaactgtgtag

SEQ ID NO: 949815 - DNA, 15 bp, Homo sapiens
tcaaaactgtgtagc

SEQ ID NO: 949816 - DNA, 15 bp, Homo sapiens
caaaactgtgtagca

SEQ ID NO: 949817 - DNA, 15 bp, Homo sapiens
aaaactgtgtagcac

SEQ ID NO: 949818 - DNA, 15 bp, Homo sapiens
aaactgtgtagcacc

SEQ ID NO: 949819 - DNA, 15 bp, Homo sapiens
aactgtgtagcacct

SEQ ID NO: 949820 - DNA, 15 bp, Homo sapiens
actgtgtagcacctc

SEQ ID NO: 949821 - DNA, 15 bp, Homo sapiens
ctgtgtagcacctcc

SEQ ID NO: 949822 - DNA, 15 bp, Homo sapiens
tgtgtagcacctccc

SEQ ID NO: 949823 - DNA, 15 bp, Homo sapiens
gtgtagcacctccca

SEQ ID NO: 949824 - DNA, 15 bp, Homo sapiens
tgtagcacctcccac

SEQ ID NO: 949825 - DNA, 15 bp, Homo sapiens
gtagcacctcccacc

SEQ ID NO: 949826 - DNA, 15 bp, Homo sapiens
tagcacctcccaccg

SEQ ID NO: 949827 - DNA, 15 bp, Homo sapiens
agcacctcccaccgt

SEQ ID NO: 949828 - DNA, 15 bp, Homo sapiens
gcacctcccaccgta

SEQ ID NO: 949829 - DNA, 15 bp, Homo sapiens
cacctcccaccgtac

SEQ ID NO: 949830 - DNA, 15 bp, Homo sapiens
acctcccaccgtact

SEQ ID NO: 949831 - DNA, 15 bp, Homo sapiens
cctcccaccgtactc

SEQ ID NO: 949832 - DNA, 15 bp, Homo sapiens
ctcccaccgtactcc

SEQ ID NO: 949833 - DNA, 15 bp, Homo sapiens
tcccaccgtactcct

SEQ ID NO: 949834 - DNA, 15 bp, Homo sapiens
cccaccgtactcctc

SEQ ID NO: 949835 - DNA, 15 bp, Homo sapiens
ccaccgtactcctct

SEQ ID NO: 949836 - DNA, 15 bp, Homo sapiens
caccgtactcctctt

SEQ ID NO: 949837 - DNA, 15 bp, Homo sapiens
accgtactcctcttg

SEQ ID NO: 949838 - DNA, 15 bp, Homo sapiens
ccgtactcctcttgc

SEQ ID NO: 949839 - DNA, 15 bp, Homo sapiens
cgtactcctcttgct

SEQ ID NO: 949840 - DNA, 15 bp, Homo sapiens
gtactcctcttgctc

SEQ ID NO: 949841 - DNA, 15 bp, Homo sapiens
tactcctcttgctcc

SEQ ID NO: 949842 - DNA, 15 bp, Homo sapiens
actcctcttgctcct

SEQ ID NO: 949843 - DNA, 15 bp, Homo sapiens
ctcctcttgctcctg

SEQ ID NO: 949844 - DNA, 15 bp, Homo sapiens
tcctcttgctcctgc

SEQ ID NO: 949845 - DNA, 15 bp, Homo sapiens
cctcttgctcctgct

SEQ ID NO: 949846 - DNA, 15 bp, Homo sapiens
ctcttgctcctgctt

SEQ ID NO: 949847 - DNA, 15 bp, Homo sapiens
tcttgctcctgcttt

SEQ ID NO: 949848 - DNA, 15 bp, Homo sapiens
cttgctcctgctttt

SEQ ID NO: 949849 - DNA, 15 bp, Homo sapiens
ttgctcctgcttttg

SEQ ID NO: 949850 - DNA, 15 bp, Homo sapiens
tgctcctgcttttgc

SEQ ID NO: 949851 - DNA, 15 bp, Homo sapiens
gctcctgcttttgct

SEQ ID NO: 949852 - DNA, 15 bp, Homo sapiens
ctcctgcttttgcta

SEQ ID NO: 949853 - DNA, 15 bp, Homo sapiens
tcctgcttttgctat

SEQ ID NO: 949854 - DNA, 15 bp, Homo sapiens
cctgcttttgctatg

SEQ ID NO: 949855 - DNA, 15 bp, Homo sapiens
ctgcttttgctatgt

SEQ ID NO: 949856 - DNA, 15 bp, Homo sapiens
tgcttttgctatgtg

SEQ ID NO: 949857 - DNA, 15 bp, Homo sapiens
gcttttgctatgtga

SEQ ID NO: 949858 - DNA, 15 bp, Homo sapiens
cttttgctatgtgaa

SEQ ID NO: 949859 - DNA, 15 bp, Homo sapiens
ttttgctatgtgaag

SEQ ID NO: 949860 - DNA, 15 bp, Homo sapiens
tttgctatgtgaagt

SEQ ID NO: 949861 - DNA, 15 bp, Homo sapiens
ttgctatgtgaagtg

SEQ ID NO: 949862 - DNA, 15 bp, Homo sapiens
tgctatgtgaagtgc

SEQ ID NO: 949863 - DNA, 15 bp, Homo sapiens
gctatgtgaagtgcc

SEQ ID NO: 949864 - DNA, 15 bp, Homo sapiens
ctatgtgaagtgcct

SEQ ID NO: 949865 - DNA, 15 bp, Homo sapiens
tatgtgaagtgcctg

SEQ ID NO: 949866 - DNA, 15 bp, Homo sapiens
atgtgaagtgcctgc

SEQ ID NO: 949867 - DNA, 15 bp, Homo sapiens
tgtgaagtgcctgct

SEQ ID NO: 949868 - DNA, 15 bp, Homo sapiens
gtgaagtgcctgctc

SEQ ID NO: 949869 - DNA, 15 bp, Homo sapiens
tgaagtgcctgctcc

SEQ ID NO: 949870 - DNA, 15 bp, Homo sapiens
gaagtgcctgctcct

SEQ ID NO: 949871 - DNA, 15 bp, Homo sapiens
aagtgcctgctcctg

SEQ ID NO: 949872 - DNA, 15 bp, Homo sapiens
agtgcctgctcctgc

SEQ ID NO: 949873 - DNA, 15 bp, Homo sapiens
gtgcctgctcctgct

SEQ ID NO: 949874 - DNA, 15 bp, Homo sapiens
tgcctgctcctgctt

SEQ ID NO: 949875 - DNA, 15 bp, Homo sapiens
gcctgctcctgcttc

SEQ ID NO: 949876 - DNA, 15 bp, Homo sapiens
cctgctcctgcttcc

SEQ ID NO: 949877 - DNA, 15 bp, Homo sapiens
ctgctcctgcttccc

SEQ ID NO: 949878 - DNA, 15 bp, Homo sapiens
tgctcctgcttcccc

SEQ ID NO: 949879 - DNA, 15 bp, Homo sapiens
gctcctgcttcccct

SEQ ID NO: 949880 - DNA, 15 bp, Homo sapiens
ctcctgcttcccctt

SEQ ID NO: 949881 - DNA, 15 bp, Homo sapiens
tcctgcttccccttc

SEQ ID NO: 949882 - DNA, 15 bp, Homo sapiens
cctgcttccccttct

SEQ ID NO: 949883 - DNA, 15 bp, Homo sapiens
ctgcttccccttctg

SEQ ID NO: 949884 - DNA, 15 bp, Homo sapiens
tgcttccccttctgc

SEQ ID NO: 949885 - DNA, 15 bp, Homo sapiens
gcttccccttctgcc

SEQ ID NO: 949886 - DNA, 15 bp, Homo sapiens
cttccccttctgcca

SEQ ID NO: 949887 - DNA, 15 bp, Homo sapiens
ttccccttctgccat

SEQ ID NO: 949888 - DNA, 15 bp, Homo sapiens
tccccttctgccatg

SEQ ID NO: 949889 - DNA, 15 bp, Homo sapiens
ccccttctgccatga

SEQ ID NO: 949890 - DNA, 15 bp, Homo sapiens
cccttctgccatgac

SEQ ID NO: 949891 - DNA, 15 bp, Homo sapiens
ccttctgccatgact

SEQ ID NO: 949892 - DNA, 15 bp, Homo sapiens
cttctgccatgactg

SEQ ID NO: 949893 - DNA, 15 bp, Homo sapiens
ttctgccatgactgc

SEQ ID NO: 949894 - DNA, 15 bp, Homo sapiens
tctgccatgactgca

SEQ ID NO: 949895 - DNA, 15 bp, Homo sapiens
ctgccatgactgcaa

SEQ ID NO: 949896 - DNA, 15 bp, Homo sapiens
tgccatgactgcaag

SEQ ID NO: 949897 - DNA, 15 bp, Homo sapiens
gccatgactgcaagc

SEQ ID NO: 949898 - DNA, 15 bp, Homo sapiens
ccatgactgcaagct

SEQ ID NO: 949899 - DNA, 15 bp, Homo sapiens
catgactgcaagctt

SEQ ID NO: 949900 - DNA, 15 bp, Homo sapiens
atgactgcaagcttc

SEQ ID NO: 949901 - DNA, 15 bp, Homo sapiens
tgactgcaagcttct

SEQ ID NO: 949902 - DNA, 15 bp, Homo sapiens
gactgcaagcttctt

SEQ ID NO: 949903 - DNA, 15 bp, Homo sapiens
actgcaagcttcttg

SEQ ID NO: 949904 - DNA, 15 bp, Homo sapiens
ctgcaagcttcttga

SEQ ID NO: 949905 - DNA, 15 bp, Homo sapiens
tgcaagcttcttgag

SEQ ID NO: 949906 - DNA, 15 bp, Homo sapiens
gcaagcttcttgagg

SEQ ID NO: 949907 - DNA, 15 bp, Homo sapiens
caagcttcttgaggc

SEQ ID NO: 949908 - DNA, 15 bp, Homo sapiens
aagcttcttgaggcc

SEQ ID NO: 949909 - DNA, 15 bp, Homo sapiens
agcttcttgaggcct

SEQ ID NO: 949910 - DNA, 15 bp, Homo sapiens
gcttcttgaggcctc

SEQ ID NO: 949911 - DNA, 15 bp, Homo sapiens
cttcttgaggcctcc

SEQ ID NO: 949912 - DNA, 15 bp, Homo sapiens
ttcttgaggcctccc

SEQ ID NO: 949913 - DNA, 15 bp, Homo sapiens
tcttgaggcctcccc

SEQ ID NO: 949914 - DNA, 15 bp, Homo sapiens
cttgaggcctcccca

SEQ ID NO: 949915 - DNA, 15 bp, Homo sapiens
ttgaggcctccccag

SEQ ID NO: 949916 - DNA, 15 bp, Homo sapiens
tgaggcctccccaga

SEQ ID NO: 949917 - DNA, 15 bp, Homo sapiens
gaggcctccccagaa

SEQ ID NO: 949918 - DNA, 15 bp, Homo sapiens
aggcctccccagaag

SEQ ID NO: 949919 - DNA, 15 bp, Homo sapiens
ggcctccccagaagc

SEQ ID NO: 949920 - DNA, 15 bp, Homo sapiens
gcctccccagaagca

SEQ ID NO: 949921 - DNA, 15 bp, Homo sapiens
cctccccagaagcag

SEQ ID NO: 949922 - DNA, 15 bp, Homo sapiens
ctccccagaagcaga

SEQ ID NO: 949923 - DNA, 15 bp, Homo sapiens
tccccagaagcagat

SEQ ID NO: 949924 - DNA, 15 bp, Homo sapiens
ccccagaagcagatg

SEQ ID NO: 949925 - DNA, 15 bp, Homo sapiens
cccagaagcagatgc

SEQ ID NO: 949926 - DNA, 15 bp, Homo sapiens
ccagaagcagatgct

SEQ ID NO: 949927 - DNA, 15 bp, Homo sapiens
cagaagcagatgctg

SEQ ID NO: 949928 - DNA, 15 bp, Homo sapiens
agaagcagatgctgc

SEQ ID NO: 949929 - DNA, 15 bp, Homo sapiens
gaagcagatgctgct

SEQ ID NO: 949930 - DNA, 15 bp, Homo sapiens
aagcagatgctgcta

SEQ ID NO: 949931 - DNA, 15 bp, Homo sapiens
agcagatgctgctat

SEQ ID NO: 949932 - DNA, 15 bp, Homo sapiens
gcagatgctgctatg

SEQ ID NO: 949933 - DNA, 15 bp, Homo sapiens
cagatgctgctatgc

SEQ ID NO: 949934 - DNA, 15 bp, Homo sapiens
agatgctgctatgct

SEQ ID NO: 949935 - DNA, 15 bp, Homo sapiens
gatgctgctatgctt

SEQ ID NO: 949936 - DNA, 15 bp, Homo sapiens
atgctgctatgcttc

SEQ ID NO: 949937 - DNA, 15 bp, Homo sapiens
tgctgctatgcttct

SEQ ID NO: 949938 - DNA, 15 bp, Homo sapiens
gctgctatgcttctt

SEQ ID NO: 949939 - DNA, 15 bp, Homo sapiens
ctgctatgcttcttg

SEQ ID NO: 949940 - DNA, 15 bp, Homo sapiens
tgctatgcttcttgt

SEQ ID NO: 949941 - DNA, 15 bp, Homo sapiens
gctatgcttcttgta

SEQ ID NO: 949942 - DNA, 15 bp, Homo sapiens
ctatgcttcttgtac

SEQ ID NO: 949943 - DNA, 15 bp, Homo sapiens
tatgcttcttgtaca

SEQ ID NO: 949944 - DNA, 15 bp, Homo sapiens
atgcttcttgtacag

SEQ ID NO: 949945 - DNA, 15 bp, Homo sapiens
tgcttcttgtacagc

SEQ ID NO: 949946 - DNA, 15 bp, Homo sapiens
gcttcttgtacagct

SEQ ID NO: 949947 - DNA, 15 bp, Homo sapiens
cttcttgtacagctg

SEQ ID NO: 949948 - DNA, 15 bp, Homo sapiens
ttcttgtacagctga

SEQ ID NO: 949949 - DNA, 15 bp, Homo sapiens
tcttgtacagctgac

SEQ ID NO: 949950 - DNA, 15 bp, Homo sapiens
cttgtacagctgaca

SEQ ID NO: 949951 - DNA, 15 bp, Homo sapiens
ttgtacagctgacag

SEQ ID NO: 949952 - DNA, 15 bp, Homo sapiens
tgtacagctgacaga

SEQ ID NO: 949953 - DNA, 15 bp, Homo sapiens
gtacagctgacagaa

SEQ ID NO: 949954 - DNA, 15 bp, Homo sapiens
tacagctgacagaac

SEQ ID NO: 949955 - DNA, 15 bp, Homo sapiens
acagctgacagaact

SEQ ID NO: 949956 - DNA, 15 bp, Homo sapiens
cagctgacagaactg

SEQ ID NO: 949957 - DNA, 15 bp, Homo sapiens
agctgacagaactgt

SEQ ID NO: 949958 - DNA, 15 bp, Homo sapiens
gctgacagaactgtg

SEQ ID NO: 949959 - DNA, 15 bp, Homo sapiens
ctgacagaactgtga

SEQ ID NO: 949960 - DNA, 15 bp, Homo sapiens
tgacagaactgtgag

SEQ ID NO: 949961 - DNA, 15 bp, Homo sapiens
gacagaactgtgagc

SEQ ID NO: 949962 - DNA, 15 bp, Homo sapiens
acagaactgtgagcc

SEQ ID NO: 949963 - DNA, 15 bp, Homo sapiens
cagaactgtgagcca

SEQ ID NO: 949964 - DNA, 15 bp, Homo sapiens
agaactgtgagccaa

SEQ ID NO: 949965 - DNA, 15 bp, Homo sapiens
gaactgtgagccaat

SEQ ID NO: 949966 - DNA, 15 bp, Homo sapiens
aactgtgagccaata

SEQ ID NO: 949967 - DNA, 15 bp, Homo sapiens
actgtgagccaataa

SEQ ID NO: 949968 - DNA, 15 bp, Homo sapiens
ctgtgagccaataaa

SEQ ID NO: 949969 - DNA, 15 bp, Homo sapiens
tgtgagccaataaaa

SEQ ID NO: 949970 - DNA, 15 bp, Homo sapiens
gtgagccaataaaac

SEQ ID NO: 949971 - DNA, 15 bp, Homo sapiens
tgagccaataaaacc

SEQ ID NO: 949972 - DNA, 15 bp, Homo sapiens
gagccaataaaacct

SEQ ID NO: 949973 - DNA, 15 bp, Homo sapiens
agccaataaaacctc

SEQ ID NO: 949974 - DNA, 15 bp, Homo sapiens
gccaataaaacctct

SEQ ID NO: 949975 - DNA, 15 bp, Homo sapiens
ccaataaaacctctt

SEQ ID NO: 949976 - DNA, 15 bp, Homo sapiens
caataaaacctcttt

SEQ ID NO: 949977 - DNA, 15 bp, Homo sapiens
aataaaacctctttt

SEQ ID NO: 949978 - DNA, 15 bp, Homo sapiens
ataaaacctcttttc

SEQ ID NO: 949979 - DNA, 15 bp, Homo sapiens
taaaacctcttttct

SEQ ID NO: 949980 - DNA, 15 bp, Homo sapiens
aaaacctcttttctt

SEQ ID NO: 949981 - DNA, 15 bp, Homo sapiens
aaacctcttttctta

SEQ ID NO: 949982 - DNA, 15 bp, Homo sapiens
aacctcttttcttat

SEQ ID NO: 949983 - DNA, 15 bp, Homo sapiens
acctcttttcttata

SEQ ID NO: 949984 - DNA, 15 bp, Homo sapiens
cctcttttcttatat

SEQ ID NO: 949985 - DNA, 15 bp, Homo sapiens
ctcttttcttatata

SEQ ID NO: 949986 - DNA, 15 bp, Homo sapiens
tcttttcttatatat

SEQ ID NO: 949987 - DNA, 15 bp, Homo sapiens
cttttcttatatatt

SEQ ID NO: 949988 - DNA, 15 bp, Homo sapiens
ttttcttatatatta

SEQ ID NO: 949989 - DNA, 15 bp, Homo sapiens
tttcttatatattac

SEQ ID NO: 949990 - DNA, 15 bp, Homo sapiens
ttcttatatattacc

SEQ ID NO: 949991 - DNA, 15 bp, Homo sapiens
tcttatatattaccc

SEQ ID NO: 949992 - DNA, 15 bp, Homo sapiens
cttatatattaccct

SEQ ID NO: 949993 - DNA, 15 bp, Homo sapiens
ttatatattaccctg

SEQ ID NO: 949994 - DNA, 15 bp, Homo sapiens
tatatattaccctgt

SEQ ID NO: 949995 - DNA, 15 bp, Homo sapiens
atatattaccctgtc

SEQ ID NO: 949996 - DNA, 15 bp, Homo sapiens
tatattaccctgtct

SEQ ID NO: 949997 - DNA, 15 bp, Homo sapiens
atattaccctgtctc

SEQ ID NO: 949998 - DNA, 15 bp, Homo sapiens
tattaccctgtctca

SEQ ID NO: 949999 - DNA, 15 bp, Homo sapiens
attaccctgtctcag

SEQ ID NO: 950000 - DNA, 15 bp, Homo sapiens
ttaccctgtctcagg

SEQ ID NO: 950001 - DNA, 15 bp, Homo sapiens
taccctgtctcaggt

SEQ ID NO: 950002 - DNA, 15 bp, Homo sapiens
accctgtctcaggta

SEQ ID NO: 950003 - DNA, 15 bp, Homo sapiens
ccctgtctcaggtat

SEQ ID NO: 950004 - DNA, 15 bp, Homo sapiens
cctgtctcaggtatt

SEQ ID NO: 950005 - DNA, 15 bp, Homo sapiens
ctgtctcaggtattt

SEQ ID NO: 950006 - DNA, 15 bp, Homo sapiens
tgtctcaggtatttc

SEQ ID NO: 950007 - DNA, 15 bp, Homo sapiens
gtctcaggtatttct

SEQ ID NO: 950008 - DNA, 15 bp, Homo sapiens
tctcaggtatttctt

SEQ ID NO: 950009 - DNA, 15 bp, Homo sapiens
ctcaggtatttcttc

SEQ ID NO: 950010 - DNA, 15 bp, Homo sapiens
tcaggtatttcttcg

SEQ ID NO: 950011 - DNA, 15 bp, Homo sapiens
caggtatttcttcgt

SEQ ID NO: 950012 - DNA, 15 bp, Homo sapiens
aggtatttcttcgta

SEQ ID NO: 950013 - DNA, 15 bp, Homo sapiens
ggtatttcttcgtag

SEQ ID NO: 950014 - DNA, 15 bp, Homo sapiens
gtatttcttcgtagc

SEQ ID NO: 950015 - DNA, 15 bp, Homo sapiens
tatttcttcgtagca

SEQ ID NO: 950016 - DNA, 15 bp, Homo sapiens
atttcttcgtagcaa

SEQ ID NO: 950017 - DNA, 15 bp, Homo sapiens
tttcttcgtagcaat

SEQ ID NO: 950018 - DNA, 15 bp, Homo sapiens
ttcttcgtagcaata

SEQ ID NO: 950019 - DNA, 15 bp, Homo sapiens
tcttcgtagcaatac

SEQ ID NO: 950020 - DNA, 15 bp, Homo sapiens
cttcgtagcaataca

SEQ ID NO: 950021 - DNA, 15 bp, Homo sapiens
ttcgtagcaatacaa

SEQ ID NO: 950022 - DNA, 15 bp, Homo sapiens
tcgtagcaatacaag

SEQ ID NO: 950023 - DNA, 15 bp, Homo sapiens
cgtagcaatacaaga

SEQ ID NO: 950024 - DNA, 15 bp, Homo sapiens
gtagcaatacaagaa

SEQ ID NO: 950025 - DNA, 15 bp, Homo sapiens
tagcaatacaagaat

SEQ ID NO: 950026 - DNA, 15 bp, Homo sapiens
agcaatacaagaata

SEQ ID NO: 950027 - DNA, 15 bp, Homo sapiens
gcaatacaagaatag

SEQ ID NO: 950028 - DNA, 15 bp, Homo sapiens
caatacaagaatagc

SEQ ID NO: 950029 - DNA, 15 bp, Homo sapiens
aatacaagaatagcc

SEQ ID NO: 950030 - DNA, 15 bp, Homo sapiens
atacaagaatagcct

SEQ ID NO: 950031 - DNA, 15 bp, Homo sapiens
tacaagaatagccta

SEQ ID NO: 950032 - DNA, 15 bp, Homo sapiens
acaagaatagcctaa

SEQ ID NO: 950033 - DNA, 15 bp, Homo sapiens
caagaatagcctaat

SEQ ID NO: 950034 - DNA, 15 bp, Homo sapiens
aagaatagcctaatc

SEQ ID NO: 950035 - DNA, 15 bp, Homo sapiens
agaatagcctaatct

SEQ ID NO: 950036 - DNA, 15 bp, Homo sapiens
gaatagcctaatcta

SEQ ID NO: 950037 - DNA, 15 bp, Homo sapiens
aatagcctaatctag

SEQ ID NO: 950038 - DNA, 15 bp, Homo sapiens
atagcctaatctaga

SEQ ID NO: 950039 - DNA, 15 bp, Homo sapiens
tagcctaatctagaa

SEQ ID NO: 950040 - DNA, 15 bp, Homo sapiens
agcctaatctagaaa

SEQ ID NO: 950041 - DNA, 15 bp, Homo sapiens
gcctaatctagaaaa

SEQ ID NO: 950042 - DNA, 15 bp, Homo sapiens
cctaatctagaaaat

SEQ ID NO: 950043 - DNA, 15 bp, Homo sapiens
ctaatctagaaaatg

SEQ ID NO: 950044 - DNA, 15 bp, Homo sapiens
taatctagaaaatga

SEQ ID NO: 950045 - DNA, 15 bp, Homo sapiens
aatctagaaaatgag

SEQ ID NO: 950046 - DNA, 15 bp, Homo sapiens
atctagaaaatgaga

SEQ ID NO: 950047 - DNA, 15 bp, Homo sapiens
tctagaaaatgagac

SEQ ID NO: 950048 - DNA, 15 bp, Homo sapiens
ctagaaaatgagacc

SEQ ID NO: 950049 - DNA, 15 bp, Homo sapiens
tagaaaatgagacca

SEQ ID NO: 950050 - DNA, 15 bp, Homo sapiens
agaaaatgagaccat

SEQ ID NO: 950051 - DNA, 15 bp, Homo sapiens
gaaaatgagaccatt

SEQ ID NO: 950052 - DNA, 15 bp, Homo sapiens
aaaatgagaccattt

SEQ ID NO: 950053 - DNA, 15 bp, Homo sapiens
aaatgagaccattta

SEQ ID NO: 950054 - DNA, 15 bp, Homo sapiens
aatgagaccatttaa

SEQ ID NO: 950055 - DNA, 15 bp, Homo sapiens
atgagaccatttaat

SEQ ID NO: 950056 - DNA, 15 bp, Homo sapiens
tgagaccatttaata

SEQ ID NO: 950057 - DNA, 15 bp, Homo sapiens
gagaccatttaatat

SEQ ID NO: 950058 - DNA, 15 bp, Homo sapiens
agaccatttaatatg

SEQ ID NO: 950059 - DNA, 15 bp, Homo sapiens
gaccatttaatatgg

SEQ ID NO: 950060 - DNA, 15 bp, Homo sapiens
accatttaatatggc

SEQ ID NO: 950061 - DNA, 15 bp, Homo sapiens
ccatttaatatggcc

SEQ ID NO: 950062 - DNA, 15 bp, Homo sapiens
catttaatatggcca

SEQ ID NO: 950063 - DNA, 15 bp, Homo sapiens
atttaatatggccag

SEQ ID NO: 950064 - DNA, 15 bp, Homo sapiens
tttaatatggccagc

SEQ ID NO: 950065 - DNA, 15 bp, Homo sapiens
ttaatatggccagct

SEQ ID NO: 950066 - DNA, 15 bp, Homo sapiens
taatatggccagcta

SEQ ID NO: 950067 - DNA, 15 bp, Homo sapiens
aatatggccagctaa

SEQ ID NO: 950068 - DNA, 15 bp, Homo sapiens
atatggccagctaaa

SEQ ID NO: 950069 - DNA, 15 bp, Homo sapiens
tatggccagctaaac

SEQ ID NO: 950070 - DNA, 15 bp, Homo sapiens
atggccagctaaacc

SEQ ID NO: 950071 - DNA, 15 bp, Homo sapiens
tggccagctaaacca

SEQ ID NO: 950072 - DNA, 15 bp, Homo sapiens
ggccagctaaaccat

SEQ ID NO: 950073 - DNA, 15 bp, Homo sapiens
gccagctaaaccatc

SEQ ID NO: 950074 - DNA, 15 bp, Homo sapiens
ccagctaaaccatca

SEQ ID NO: 950075 - DNA, 15 bp, Homo sapiens
cagctaaaccatcag

SEQ ID NO: 950076 - DNA, 15 bp, Homo sapiens
agctaaaccatcagt

SEQ ID NO: 950077 - DNA, 15 bp, Homo sapiens
gctaaaccatcagtt

SEQ ID NO: 950078 - DNA, 15 bp, Homo sapiens
ctaaaccatcagttc

SEQ ID NO: 950079 - DNA, 15 bp, Homo sapiens
taaaccatcagttca

SEQ ID NO: 950080 - DNA, 15 bp, Homo sapiens
aaaccatcagttcaa

SEQ ID NO: 950081 - DNA, 15 bp, Homo sapiens
aaccatcagttcaaa

SEQ ID NO: 950082 - DNA, 15 bp, Homo sapiens
accatcagttcaaaa

SEQ ID NO: 950083 - DNA, 15 bp, Homo sapiens
ccatcagttcaaaac

SEQ ID NO: 950084 - DNA, 15 bp, Homo sapiens
catcagttcaaaacc

SEQ ID NO: 950085 - DNA, 15 bp, Homo sapiens
atcagttcaaaacct

SEQ ID NO: 950086 - DNA, 15 bp, Homo sapiens
tcagttcaaaacctc

SEQ ID NO: 950087 - DNA, 15 bp, Homo sapiens
cagttcaaaacctca

SEQ ID NO: 950088 - DNA, 15 bp, Homo sapiens
agttcaaaacctcaa

SEQ ID NO: 950089 - DNA, 15 bp, Homo sapiens
gttcaaaacctcaac

SEQ ID NO: 950090 - DNA, 15 bp, Homo sapiens
ttcaaaacctcaaca

SEQ ID NO: 950091 - DNA, 15 bp, Homo sapiens
tcaaaacctcaacat

SEQ ID NO: 950092 - DNA, 15 bp, Homo sapiens
caaaacctcaacatt

SEQ ID NO: 950093 - DNA, 15 bp, Homo sapiens
aaaacctcaacatta

SEQ ID NO: 950094 - DNA, 15 bp, Homo sapiens
aaacctcaacattat

SEQ ID NO: 950095 - DNA, 15 bp, Homo sapiens
aacctcaacattatg

SEQ ID NO: 950096 - DNA, 15 bp, Homo sapiens
acctcaacattatga

SEQ ID NO: 950097 - DNA, 15 bp, Homo sapiens
cctcaacattatgat

SEQ ID NO: 950098 - DNA, 15 bp, Homo sapiens
ctcaacattatgatt

SEQ ID NO: 950099 - DNA, 15 bp, Homo sapiens
tcaacattatgatta

SEQ ID NO: 950100 - DNA, 15 bp, Homo sapiens
caacattatgattaa

SEQ ID NO: 950101 - DNA, 15 bp, Homo sapiens
aacattatgattaaa

SEQ ID NO: 950102 - DNA, 15 bp, Homo sapiens
acattatgattaaaa

SEQ ID NO: 950103 - DNA, 15 bp, Homo sapiens
cattatgattaaaat

SEQ ID NO: 950104 - DNA, 15 bp, Homo sapiens
attatgattaaaatc

SEQ ID NO: 950105 - DNA, 15 bp, Homo sapiens
ttatgattaaaatca

SEQ ID NO: 950106 - DNA, 15 bp, Homo sapiens
tatgattaaaatcat

SEQ ID NO: 950107 - DNA, 15 bp, Homo sapiens
atgattaaaatcata

SEQ ID NO: 950108 - DNA, 15 bp, Homo sapiens
tgattaaaatcataa

SEQ ID NO: 950109 - DNA, 15 bp, Homo sapiens
gattaaaatcataac

SEQ ID NO: 950110 - DNA, 15 bp, Homo sapiens
attaaaatcataaca

SEQ ID NO: 950111 - DNA, 15 bp, Homo sapiens
ttaaaatcataacag

SEQ ID NO: 950112 - DNA, 15 bp, Homo sapiens
taaaatcataacaga

SEQ ID NO: 950113 - DNA, 15 bp, Homo sapiens
aaaatcataacagat

SEQ ID NO: 950114 - DNA, 15 bp, Homo sapiens
aaatcataacagata

SEQ ID NO: 950115 - DNA, 15 bp, Homo sapiens
aatcataacagatac

SEQ ID NO: 950116 - DNA, 15 bp, Homo sapiens
atcataacagatact

SEQ ID NO: 950117 - DNA, 15 bp, Homo sapiens
tcataacagatacta

SEQ ID NO: 950118 - DNA, 15 bp, Homo sapiens
cataacagatactag

SEQ ID NO: 950119 - DNA, 15 bp, Homo sapiens
ataacagatactagc

SEQ ID NO: 950120 - DNA, 15 bp, Homo sapiens
taacagatactagca

SEQ ID NO: 950121 - DNA, 15 bp, Homo sapiens
aacagatactagcat

SEQ ID NO: 950122 - DNA, 15 bp, Homo sapiens
acagatactagcata

SEQ ID NO: 950123 - DNA, 15 bp, Homo sapiens
cagatactagcataa

SEQ ID NO: 950124 - DNA, 15 bp, Homo sapiens
agatactagcataaa

SEQ ID NO: 950125 - DNA, 15 bp, Homo sapiens
gatactagcataaat

SEQ ID NO: 950126 - DNA, 15 bp, Homo sapiens
atactagcataaatt

SEQ ID NO: 950127 - DNA, 15 bp, Homo sapiens
tactagcataaattg

SEQ ID NO: 950128 - DNA, 15 bp, Homo sapiens
actagcataaattga

SEQ ID NO: 950129 - DNA, 15 bp, Homo sapiens
ctagcataaattgag

SEQ ID NO: 950130 - DNA, 15 bp, Homo sapiens
tagcataaattgagg

SEQ ID NO: 950131 - DNA, 15 bp, Homo sapiens
agcataaattgaggg

SEQ ID NO: 950132 - DNA, 15 bp, Homo sapiens
gcataaattgaggga

SEQ ID NO: 950133 - DNA, 15 bp, Homo sapiens
cataaattgagggaa

SEQ ID NO: 950134 - DNA, 15 bp, Homo sapiens
ataaattgagggaat

SEQ ID NO: 950135 - DNA, 15 bp, Homo sapiens
taaattgagggaatg

SEQ ID NO: 950136 - DNA, 15 bp, Homo sapiens
aaattgagggaatgg

SEQ ID NO: 950137 - DNA, 15 bp, Homo sapiens
aattgagggaatgga

SEQ ID NO: 950138 - DNA, 15 bp, Homo sapiens
attgagggaatggac

SEQ ID NO: 950139 - DNA, 15 bp, Homo sapiens
ttgagggaatggaca

SEQ ID NO: 950140 - DNA, 15 bp, Homo sapiens
tgagggaatggacac

SEQ ID NO: 950141 - DNA, 15 bp, Homo sapiens
gagggaatggacaca

SEQ ID NO: 950142 - DNA, 15 bp, Homo sapiens
agggaatggacacat

SEQ ID NO: 950143 - DNA, 15 bp, Homo sapiens
gggaatggacacata

SEQ ID NO: 950144 - DNA, 15 bp, Homo sapiens
ggaatggacacatag

SEQ ID NO: 950145 - DNA, 15 bp, Homo sapiens
gaatggacacatagt

SEQ ID NO: 950146 - DNA, 15 bp, Homo sapiens
aatggacacatagtt

SEQ ID NO: 950147 - DNA, 15 bp, Homo sapiens
atggacacatagttc

SEQ ID NO: 950148 - DNA, 15 bp, Homo sapiens
tggacacatagttct

SEQ ID NO: 950149 - DNA, 15 bp, Homo sapiens
ggacacatagttctg

SEQ ID NO: 950150 - DNA, 15 bp, Homo sapiens
gacacatagttctga

SEQ ID NO: 950151 - DNA, 15 bp, Homo sapiens
acacatagttctgag

SEQ ID NO: 950152 - DNA, 15 bp, Homo sapiens
cacatagttctgagg

SEQ ID NO: 950153 - DNA, 15 bp, Homo sapiens
acatagttctgaggg

SEQ ID NO: 950154 - DNA, 15 bp, Homo sapiens
catagttctgagggt

SEQ ID NO: 950155 - DNA, 15 bp, Homo sapiens
atagttctgagggtc

SEQ ID NO: 950156 - DNA, 15 bp, Homo sapiens
tagttctgagggtct

SEQ ID NO: 950157 - DNA, 15 bp, Homo sapiens
agttctgagggtctc

SEQ ID NO: 950158 - DNA, 15 bp, Homo sapiens
gttctgagggtctct

SEQ ID NO: 950159 - DNA, 15 bp, Homo sapiens
ttctgagggtctctg

SEQ ID NO: 950160 - DNA, 15 bp, Homo sapiens
tctgagggtctctgg

SEQ ID NO: 950161 - DNA, 15 bp, Homo sapiens
ctgagggtctctgga

SEQ ID NO: 950162 - DNA, 15 bp, Homo sapiens
tgagggtctctggag

SEQ ID NO: 950163 - DNA, 15 bp, Homo sapiens
gagggtctctggaga

SEQ ID NO: 950164 - DNA, 15 bp, Homo sapiens
agggtctctggagat

SEQ ID NO: 950165 - DNA, 15 bp, Homo sapiens
gggtctctggagatc

SEQ ID NO: 950166 - DNA, 15 bp, Homo sapiens
ggtctctggagatca

SEQ ID NO: 950167 - DNA, 15 bp, Homo sapiens
gtctctggagatcaa

SEQ ID NO: 950168 - DNA, 15 bp, Homo sapiens
tctctggagatcaaa

SEQ ID NO: 950169 - DNA, 15 bp, Homo sapiens
ctctggagatcaaag

SEQ ID NO: 950170 - DNA, 15 bp, Homo sapiens
tctggagatcaaagg

SEQ ID NO: 950171 - DNA, 15 bp, Homo sapiens
ctggagatcaaaggt

SEQ ID NO: 950172 - DNA, 15 bp, Homo sapiens
tggagatcaaaggta

SEQ ID NO: 950173 - DNA, 15 bp, Homo sapiens
ggagatcaaaggtag

SEQ ID NO: 950174 - DNA, 15 bp, Homo sapiens
gagatcaaaggtagg

SEQ ID NO: 950175 - DNA, 15 bp, Homo sapiens
agatcaaaggtaggt

SEQ ID NO: 950176 - DNA, 15 bp, Homo sapiens
gatcaaaggtaggta

SEQ ID NO: 950177 - DNA, 15 bp, Homo sapiens
atcaaaggtaggtat

SEQ ID NO: 950178 - DNA, 15 bp, Homo sapiens
tcaaaggtaggtata

SEQ ID NO: 950179 - DNA, 15 bp, Homo sapiens
caaaggtaggtatag

SEQ ID NO: 950180 - DNA, 15 bp, Homo sapiens
aaaggtaggtataga

SEQ ID NO: 950181 - DNA, 15 bp, Homo sapiens
aaggtaggtatagag

SEQ ID NO: 950182 - DNA, 15 bp, Homo sapiens
aggtaggtatagagg

SEQ ID NO: 950183 - DNA, 15 bp, Homo sapiens
ggtaggtatagagga

SEQ ID NO: 950184 - DNA, 15 bp, Homo sapiens
gtaggtatagaggag

SEQ ID NO: 950185 - DNA, 15 bp, Homo sapiens
taggtatagaggagg

SEQ ID NO: 950186 - DNA, 15 bp, Homo sapiens
aggtatagaggagga

SEQ ID NO: 950187 - DNA, 15 bp, Homo sapiens
ggtatagaggaggac

SEQ ID NO: 950188 - DNA, 15 bp, Homo sapiens
gtatagaggaggaca

SEQ ID NO: 950189 - DNA, 15 bp, Homo sapiens
tatagaggaggacaa

SEQ ID NO: 950190 - DNA, 15 bp, Homo sapiens
atagaggaggacaag

SEQ ID NO: 950191 - DNA, 15 bp, Homo sapiens
tagaggaggacaagc

SEQ ID NO: 950192 - DNA, 15 bp, Homo sapiens
agaggaggacaagct

SEQ ID NO: 950193 - DNA, 15 bp, Homo sapiens
gaggaggacaagctg

SEQ ID NO: 950194 - DNA, 15 bp, Homo sapiens
aggaggacaagctgt

SEQ ID NO: 950195 - DNA, 15 bp, Homo sapiens
ggaggacaagctgtg

SEQ ID NO: 950196 - DNA, 15 bp, Homo sapiens
gaggacaagctgtgt

SEQ ID NO: 950197 - DNA, 15 bp, Homo sapiens
aggacaagctgtgta

SEQ ID NO: 950198 - DNA, 15 bp, Homo sapiens
ggacaagctgtgtag

SEQ ID NO: 950199 - DNA, 15 bp, Homo sapiens
gacaagctgtgtaga

SEQ ID NO: 950200 - DNA, 15 bp, Homo sapiens
acaagctgtgtagaa

SEQ ID NO: 950201 - DNA, 15 bp, Homo sapiens
caagctgtgtagaat

SEQ ID NO: 950202 - DNA, 15 bp, Homo sapiens
aagctgtgtagaata

SEQ ID NO: 950203 - DNA, 15 bp, Homo sapiens
agctgtgtagaataa

SEQ ID NO: 950204 - DNA, 15 bp, Homo sapiens
gctgtgtagaataat

SEQ ID NO: 950205 - DNA, 15 bp, Homo sapiens
ctgtgtagaataatg

SEQ ID NO: 950206 - DNA, 15 bp, Homo sapiens
tgtgtagaataatgt

SEQ ID NO: 950207 - DNA, 15 bp, Homo sapiens
gtgtagaataatgta

SEQ ID NO: 950208 - DNA, 15 bp, Homo sapiens
tgtagaataatgtat

SEQ ID NO: 950209 - DNA, 15 bp, Homo sapiens
gtagaataatgtata

SEQ ID NO: 950210 - DNA, 15 bp, Homo sapiens
tagaataatgtataa

SEQ ID NO: 950211 - DNA, 15 bp, Homo sapiens
agaataatgtataat

SEQ ID NO: 950212 - DNA, 15 bp, Homo sapiens
gaataatgtataata

SEQ ID NO: 950213 - DNA, 15 bp, Homo sapiens
aataatgtataatag

SEQ ID NO: 950214 - DNA, 15 bp, Homo sapiens
ataatgtataatagg

SEQ ID NO: 950215 - DNA, 15 bp, Homo sapiens
taatgtataataggg

SEQ ID NO: 950216 - DNA, 15 bp, Homo sapiens
aatgtataatagggc

SEQ ID NO: 950217 - DNA, 15 bp, Homo sapiens
atgtataatagggcc

SEQ ID NO: 950218 - DNA, 15 bp, Homo sapiens
tgtataatagggcca

SEQ ID NO: 950219 - DNA, 15 bp, Homo sapiens
gtataatagggccat

SEQ ID NO: 950220 - DNA, 15 bp, Homo sapiens
tataatagggccata

SEQ ID NO: 950221 - DNA, 15 bp, Homo sapiens
ataatagggccatat

SEQ ID NO: 950222 - DNA, 15 bp, Homo sapiens
taatagggccatatt

SEQ ID NO: 950223 - DNA, 15 bp, Homo sapiens
aatagggccatattt

SEQ ID NO: 950224 - DNA, 15 bp, Homo sapiens
atagggccatatttt

SEQ ID NO: 950225 - DNA, 15 bp, Homo sapiens
tagggccatattttc

SEQ ID NO: 950226 - DNA, 15 bp, Homo sapiens
agggccatattttcc

SEQ ID NO: 950227 - DNA, 15 bp, Homo sapiens
gggccatattttccc

SEQ ID NO: 950228 - DNA, 15 bp, Homo sapiens
ggccatattttcccc

SEQ ID NO: 950229 - DNA, 15 bp, Homo sapiens
gccatattttccccc

SEQ ID NO: 950230 - DNA, 15 bp, Homo sapiens
ccatattttccccct

SEQ ID NO: 950231 - DNA, 15 bp, Homo sapiens
catattttccccctt

SEQ ID NO: 950232 - DNA, 15 bp, Homo sapiens
atattttccccctta

SEQ ID NO: 950233 - DNA, 15 bp, Homo sapiens
tattttcccccttac

SEQ ID NO: 950234 - DNA, 15 bp, Homo sapiens
attttcccccttact

SEQ ID NO: 950235 - DNA, 15 bp, Homo sapiens
ttttcccccttacta

SEQ ID NO: 950236 - DNA, 15 bp, Homo sapiens
tttcccccttactat

SEQ ID NO: 950237 - DNA, 15 bp, Homo sapiens
ttcccccttactatc

SEQ ID NO: 950238 - DNA, 15 bp, Homo sapiens
tcccccttactatca

SEQ ID NO: 950239 - DNA, 15 bp, Homo sapiens
cccccttactatcaa

SEQ ID NO: 950240 - DNA, 15 bp, Homo sapiens
ccccttactatcaaa

SEQ ID NO: 950241 - DNA, 15 bp, Homo sapiens
cccttactatcaaaa

SEQ ID NO: 950242 - DNA, 15 bp, Homo sapiens
ccttactatcaaaag

SEQ ID NO: 950243 - DNA, 15 bp, Homo sapiens
cttactatcaaaaga

SEQ ID NO: 950244 - DNA, 15 bp, Homo sapiens
ttactatcaaaagat

SEQ ID NO: 950245 - DNA, 15 bp, Homo sapiens
tactatcaaaagatt

SEQ ID NO: 950246 - DNA, 15 bp, Homo sapiens
actatcaaaagattt

SEQ ID NO: 950247 - DNA, 15 bp, Homo sapiens
ctatcaaaagatttt

SEQ ID NO: 950248 - DNA, 15 bp, Homo sapiens
tatcaaaagattttt

SEQ ID NO: 950249 - DNA, 15 bp, Homo sapiens
atcaaaagatttttt

SEQ ID NO: 950250 - DNA, 15 bp, Homo sapiens
tcaaaagattttttt

SEQ ID NO: 950251 - DNA, 15 bp, Homo sapiens
caaaagatttttttt

SEQ ID NO: 950252 - DNA, 15 bp, Homo sapiens
aaaagattttttttc

SEQ ID NO: 950253 - DNA, 15 bp, Homo sapiens
aaagattttttttca

SEQ ID NO: 950254 - DNA, 15 bp, Homo sapiens
aagattttttttcaa

SEQ ID NO: 950255 - DNA, 15 bp, Homo sapiens
agattttttttcaaa

SEQ ID NO: 950256 - DNA, 15 bp, Homo sapiens
gattttttttcaaaa

SEQ ID NO: 950257 - DNA, 15 bp, Homo sapiens
attttttttcaaaag

SEQ ID NO: 950258 - DNA, 15 bp, Homo sapiens
ttttttttcaaaagc

SEQ ID NO: 950259 - DNA, 15 bp, Homo sapiens
tttttttcaaaagct

SEQ ID NO: 950260 - DNA, 15 bp, Homo sapiens
ttttttcaaaagcta

SEQ ID NO: 950261 - DNA, 15 bp, Homo sapiens
tttttcaaaagctag

SEQ ID NO: 950262 - DNA, 15 bp, Homo sapiens
ttttcaaaagctaga

SEQ ID NO: 950263 - DNA, 15 bp, Homo sapiens
tttcaaaagctagaa

SEQ ID NO: 950264 - DNA, 15 bp, Homo sapiens
ttcaaaagctagaat

SEQ ID NO: 950265 - DNA, 15 bp, Homo sapiens
tcaaaagctagaatt

SEQ ID NO: 950266 - DNA, 15 bp, Homo sapiens
caaaagctagaattg

SEQ ID NO: 950267 - DNA, 15 bp, Homo sapiens
aaaagctagaattgg

SEQ ID NO: 950268 - DNA, 15 bp, Homo sapiens
aaagctagaattggg

SEQ ID NO: 950269 - DNA, 15 bp, Homo sapiens
aagctagaattgggt

SEQ ID NO: 950270 - DNA, 15 bp, Homo sapiens
agctagaattgggtg

SEQ ID NO: 950271 - DNA, 15 bp, Homo sapiens
gctagaattgggtga

SEQ ID NO: 950272 - DNA, 15 bp, Homo sapiens
ctagaattgggtgag

SEQ ID NO: 950273 - DNA, 15 bp, Homo sapiens
tagaattgggtgaga

SEQ ID NO: 950274 - DNA, 15 bp, Homo sapiens
agaattgggtgagaa

SEQ ID NO: 950275 - DNA, 15 bp, Homo sapiens
gaattgggtgagaac

SEQ ID NO: 950276 - DNA, 15 bp, Homo sapiens
aattgggtgagaaca

SEQ ID NO: 950277 - DNA, 15 bp, Homo sapiens
attgggtgagaacaa

SEQ ID NO: 950278 - DNA, 15 bp, Homo sapiens
ttgggtgagaacaaa

SEQ ID NO: 950279 - DNA, 15 bp, Homo sapiens
tgggtgagaacaaaa

SEQ ID NO: 950280 - DNA, 15 bp, Homo sapiens
gggtgagaacaaaaa

SEQ ID NO: 950281 - DNA, 15 bp, Homo sapiens
ggtgagaacaaaaag

SEQ ID NO: 950282 - DNA, 15 bp, Homo sapiens
gtgagaacaaaaagg

SEQ ID NO: 950283 - DNA, 15 bp, Homo sapiens
tgagaacaaaaaggc

SEQ ID NO: 950284 - DNA, 15 bp, Homo sapiens
gagaacaaaaaggcg

SEQ ID NO: 950285 - DNA, 15 bp, Homo sapiens
agaacaaaaaggcga

SEQ ID NO: 950286 - DNA, 15 bp, Homo sapiens
gaacaaaaaggcgaa

SEQ ID NO: 950287 - DNA, 15 bp, Homo sapiens
aacaaaaaggcgaat

SEQ ID NO: 950288 - DNA, 15 bp, Homo sapiens
acaaaaaggcgaata

SEQ ID NO: 950289 - DNA, 15 bp, Homo sapiens
caaaaaggcgaataa

SEQ ID NO: 950290 - DNA, 15 bp, Homo sapiens
aaaaaggcgaataaa

SEQ ID NO: 950291 - DNA, 15 bp, Homo sapiens
aaaaggcgaataaag

SEQ ID NO: 950292 - DNA, 15 bp, Homo sapiens
aaaggcgaataaagt

SEQ ID NO: 950293 - DNA, 15 bp, Homo sapiens
aaggcgaataaagtc

SEQ ID NO: 950294 - DNA, 15 bp, Homo sapiens
aggcgaataaagtct

SEQ ID NO: 950295 - DNA, 15 bp, Homo sapiens
ggcgaataaagtctt

SEQ ID NO: 950296 - DNA, 15 bp, Homo sapiens
gcgaataaagtcttc

SEQ ID NO: 950297 - DNA, 15 bp, Homo sapiens
cgaataaagtcttct

SEQ ID NO: 950298 - DNA, 15 bp, Homo sapiens
gaataaagtcttctt

SEQ ID NO: 950299 - DNA, 15 bp, Homo sapiens
aataaagtcttctta

SEQ ID NO: 950300 - DNA, 15 bp, Homo sapiens
ataaagtcttcttac

SEQ ID NO: 950301 - DNA, 15 bp, Homo sapiens
taaagtcttcttact

SEQ ID NO: 950302 - DNA, 15 bp, Homo sapiens
aaagtcttcttacta

SEQ ID NO: 950303 - DNA, 15 bp, Homo sapiens
aagtcttcttactaa

SEQ ID NO: 950304 - DNA, 15 bp, Homo sapiens
agtcttcttactaaa

SEQ ID NO: 950305 - DNA, 15 bp, Homo sapiens
gtcttcttactaaat

SEQ ID NO: 950306 - DNA, 15 bp, Homo sapiens
tcttcttactaaata

SEQ ID NO: 950307 - DNA, 15 bp, Homo sapiens
cttcttactaaataa

SEQ ID NO: 950308 - DNA, 15 bp, Homo sapiens
ttcttactaaataag

SEQ ID NO: 950309 - DNA, 15 bp, Homo sapiens
tcttactaaataaga

SEQ ID NO: 950310 - DNA, 15 bp, Homo sapiens
cttactaaataagac

SEQ ID NO: 950311 - DNA, 15 bp, Homo sapiens
ttactaaataagaca

SEQ ID NO: 950312 - DNA, 15 bp, Homo sapiens
tactaaataagacaa

SEQ ID NO: 950313 - DNA, 15 bp, Homo sapiens
actaaataagacaaa

SEQ ID NO: 950314 - DNA, 15 bp, Homo sapiens
ctaaataagacaaaa

SEQ ID NO: 950315 - DNA, 15 bp, Homo sapiens
taaataagacaaaat

SEQ ID NO: 950316 - DNA, 15 bp, Homo sapiens
aaataagacaaaata

SEQ ID NO: 950317 - DNA, 15 bp, Homo sapiens
aataagacaaaataa

SEQ ID NO: 950318 - DNA, 15 bp, Homo sapiens
ataagacaaaataat

SEQ ID NO: 950319 - DNA, 15 bp, Homo sapiens
taagacaaaataatt

SEQ ID NO: 950320 - DNA, 15 bp, Homo sapiens
aagacaaaataatta

SEQ ID NO: 950321 - DNA, 15 bp, Homo sapiens
agacaaaataattat

SEQ ID NO: 950322 - DNA, 15 bp, Homo sapiens
gacaaaataattata

SEQ ID NO: 950323 - DNA, 15 bp, Homo sapiens
acaaaataattatat

SEQ ID NO: 950324 - DNA, 15 bp, Homo sapiens
caaaataattatatg

SEQ ID NO: 950325 - DNA, 15 bp, Homo sapiens
aaaataattatatgt

SEQ ID NO: 950326 - DNA, 15 bp, Homo sapiens
aaataattatatgtg

SEQ ID NO: 950327 - DNA, 15 bp, Homo sapiens
aataattatatgtgc

SEQ ID NO: 950328 - DNA, 15 bp, Homo sapiens
ataattatatgtgct

SEQ ID NO: 950329 - DNA, 15 bp, Homo sapiens
taattatatgtgctt

SEQ ID NO: 950330 - DNA, 15 bp, Homo sapiens
aattatatgtgcttg

SEQ ID NO: 950331 - DNA, 15 bp, Homo sapiens
attatatgtgcttgt

SEQ ID NO: 950332 - DNA, 15 bp, Homo sapiens
ttatatgtgcttgtg

SEQ ID NO: 950333 - DNA, 15 bp, Homo sapiens
tatatgtgcttgtga

SEQ ID NO: 950334 - DNA, 15 bp, Homo sapiens
atatgtgcttgtgat

SEQ ID NO: 950335 - DNA, 15 bp, Homo sapiens
tatgtgcttgtgatc

SEQ ID NO: 950336 - DNA, 15 bp, Homo sapiens
atgtgcttgtgatca

SEQ ID NO: 950337 - DNA, 15 bp, Homo sapiens
tgtgcttgtgatcag

SEQ ID NO: 950338 - DNA, 15 bp, Homo sapiens
gtgcttgtgatcaga

SEQ ID NO: 950339 - DNA, 15 bp, Homo sapiens
tgcttgtgatcagag

SEQ ID NO: 950340 - DNA, 15 bp, Homo sapiens
gcttgtgatcagagg

SEQ ID NO: 950341 - DNA, 15 bp, Homo sapiens
cttgtgatcagagga

SEQ ID NO: 950342 - DNA, 15 bp, Homo sapiens
ttgtgatcagaggaa

SEQ ID NO: 950343 - DNA, 15 bp, Homo sapiens
tgtgatcagaggaat

SEQ ID NO: 950344 - DNA, 15 bp, Homo sapiens
gtgatcagaggaatg

SEQ ID NO: 950345 - DNA, 15 bp, Homo sapiens
tgatcagaggaatga

SEQ ID NO: 950346 - DNA, 15 bp, Homo sapiens
gatcagaggaatgaa

SEQ ID NO: 950347 - DNA, 15 bp, Homo sapiens
atcagaggaatgaaa

SEQ ID NO: 950348 - DNA, 15 bp, Homo sapiens
tcagaggaatgaaag

SEQ ID NO: 950349 - DNA, 15 bp, Homo sapiens
cagaggaatgaaaga

SEQ ID NO: 950350 - DNA, 15 bp, Homo sapiens
agaggaatgaaagat

SEQ ID NO: 950351 - DNA, 15 bp, Homo sapiens
gaggaatgaaagatt

SEQ ID NO: 950352 - DNA, 15 bp, Homo sapiens
aggaatgaaagattc

SEQ ID NO: 950353 - DNA, 15 bp, Homo sapiens
ggaatgaaagattcc

SEQ ID NO: 950354 - DNA, 15 bp, Homo sapiens
gaatgaaagattcca

SEQ ID NO: 950355 - DNA, 15 bp, Homo sapiens
aatgaaagattccat

SEQ ID NO: 950356 - DNA, 15 bp, Homo sapiens
atgaaagattccatc

SEQ ID NO: 950357 - DNA, 15 bp, Homo sapiens
tgaaagattccatcc

SEQ ID NO: 950358 - DNA, 15 bp, Homo sapiens
gaaagattccatccc

SEQ ID NO: 950359 - DNA, 15 bp, Homo sapiens
aaagattccatccct

SEQ ID NO: 950360 - DNA, 15 bp, Homo sapiens
aagattccatcccta

SEQ ID NO: 950361 - DNA, 15 bp, Homo sapiens
agattccatccctaa

SEQ ID NO: 950362 - DNA, 15 bp, Homo sapiens
gattccatccctaac

SEQ ID NO: 950363 - DNA, 15 bp, Homo sapiens
attccatccctaacc

SEQ ID NO: 950364 - DNA, 15 bp, Homo sapiens
ttccatccctaacct

SEQ ID NO: 950365 - DNA, 15 bp, Homo sapiens
tccatccctaacctt

SEQ ID NO: 950366 - DNA, 15 bp, Homo sapiens
ccatccctaaccttg

SEQ ID NO: 950367 - DNA, 15 bp, Homo sapiens
catccctaaccttga

SEQ ID NO: 950368 - DNA, 15 bp, Homo sapiens
atccctaaccttgag

SEQ ID NO: 950369 - DNA, 15 bp, Homo sapiens
tccctaaccttgaga

SEQ ID NO: 950370 - DNA, 15 bp, Homo sapiens
ccctaaccttgagag

SEQ ID NO: 950371 - DNA, 15 bp, Homo sapiens
cctaaccttgagagg

SEQ ID NO: 950372 - DNA, 15 bp, Homo sapiens
ctaaccttgagaggc

SEQ ID NO: 950373 - DNA, 15 bp, Homo sapiens
taaccttgagaggct

SEQ ID NO: 950374 - DNA, 15 bp, Homo sapiens
aaccttgagaggctt

SEQ ID NO: 950375 - DNA, 15 bp, Homo sapiens
accttgagaggcttc

SEQ ID NO: 950376 - DNA, 15 bp, Homo sapiens
ccttgagaggcttcc

SEQ ID NO: 950377 - DNA, 15 bp, Homo sapiens
cttgagaggcttcca

SEQ ID NO: 950378 - DNA, 15 bp, Homo sapiens
ttgagaggcttccaa

SEQ ID NO: 950379 - DNA, 15 bp, Homo sapiens
tgagaggcttccaaa

SEQ ID NO: 950380 - DNA, 15 bp, Homo sapiens
gagaggcttccaaat

SEQ ID NO: 950381 - DNA, 15 bp, Homo sapiens
agaggcttccaaatt

SEQ ID NO: 950382 - DNA, 15 bp, Homo sapiens
gaggcttccaaattt

SEQ ID NO: 950383 - DNA, 15 bp, Homo sapiens
aggcttccaaatttg

SEQ ID NO: 950384 - DNA, 15 bp, Homo sapiens
ggcttccaaatttgg

SEQ ID NO: 950385 - DNA, 15 bp, Homo sapiens
gcttccaaatttggg

SEQ ID NO: 950386 - DNA, 15 bp, Homo sapiens
cttccaaatttgggg

SEQ ID NO: 950387 - DNA, 15 bp, Homo sapiens
ttccaaatttgggga

SEQ ID NO: 950388 - DNA, 15 bp, Homo sapiens
tccaaatttggggaa

SEQ ID NO: 950389 - DNA, 15 bp, Homo sapiens
ccaaatttggggaat

SEQ ID NO: 950390 - DNA, 15 bp, Homo sapiens
caaatttggggaatg

SEQ ID NO: 950391 - DNA, 15 bp, Homo sapiens
aaatttggggaatgg

SEQ ID NO: 950392 - DNA, 15 bp, Homo sapiens
aatttggggaatggg

SEQ ID NO: 950393 - DNA, 15 bp, Homo sapiens
atttggggaatgggg

SEQ ID NO: 950394 - DNA, 15 bp, Homo sapiens
tttggggaatgggga

SEQ ID NO: 950395 - DNA, 15 bp, Homo sapiens
ttggggaatggggaa

SEQ ID NO: 950396 - DNA, 15 bp, Homo sapiens
tggggaatggggaaa

SEQ ID NO: 950397 - DNA, 15 bp, Homo sapiens
ggggaatggggaaag

SEQ ID NO: 950398 - DNA, 15 bp, Homo sapiens
gggaatggggaaaga

SEQ ID NO: 950399 - DNA, 15 bp, Homo sapiens
ggaatggggaaagag

SEQ ID NO: 950400 - DNA, 15 bp, Homo sapiens
gaatggggaaagagg

SEQ ID NO: 950401 - DNA, 15 bp, Homo sapiens
aatggggaaagaggc

SEQ ID NO: 950402 - DNA, 15 bp, Homo sapiens
atggggaaagaggcc

SEQ ID NO: 950403 - DNA, 15 bp, Homo sapiens
tggggaaagaggcca

SEQ ID NO: 950404 - DNA, 15 bp, Homo sapiens
ggggaaagaggccac

SEQ ID NO: 950405 - DNA, 15 bp, Homo sapiens
gggaaagaggccaca

SEQ ID NO: 950406 - DNA, 15 bp, Homo sapiens
ggaaagaggccacaa

SEQ ID NO: 950407 - DNA, 15 bp, Homo sapiens
gaaagaggccacaat

SEQ ID NO: 950408 - DNA, 15 bp, Homo sapiens
aaagaggccacaatg

SEQ ID NO: 950409 - DNA, 15 bp, Homo sapiens
aagaggccacaatga

SEQ ID NO: 950410 - DNA, 15 bp, Homo sapiens
agaggccacaatgac

SEQ ID NO: 950411 - DNA, 15 bp, Homo sapiens
gaggccacaatgacc

SEQ ID NO: 950412 - DNA, 15 bp, Homo sapiens
aggccacaatgaccg

SEQ ID NO: 950413 - DNA, 15 bp, Homo sapiens
ggccacaatgaccga

SEQ ID NO: 950414 - DNA, 15 bp, Homo sapiens
gccacaatgaccgag

SEQ ID NO: 950415 - DNA, 15 bp, Homo sapiens
ccacaatgaccgaga

SEQ ID NO: 950416 - DNA, 15 bp, Homo sapiens
cacaatgaccgagaa

SEQ ID NO: 950417 - DNA, 15 bp, Homo sapiens
acaatgaccgagaaa

SEQ ID NO: 950418 - DNA, 15 bp, Homo sapiens
caatgaccgagaaac

SEQ ID NO: 950419 - DNA, 15 bp, Homo sapiens
aatgaccgagaaaca

SEQ ID NO: 950420 - DNA, 15 bp, Homo sapiens
atgaccgagaaacat

SEQ ID NO: 950421 - DNA, 15 bp, Homo sapiens
tgaccgagaaacata

SEQ ID NO: 950422 - DNA, 15 bp, Homo sapiens
gaccgagaaacatac

SEQ ID NO: 950423 - DNA, 15 bp, Homo sapiens
accgagaaacatact

SEQ ID NO: 950424 - DNA, 15 bp, Homo sapiens
ccgagaaacatactg

SEQ ID NO: 950425 - DNA, 15 bp, Homo sapiens
cgagaaacatactgt

SEQ ID NO: 950426 - DNA, 15 bp, Homo sapiens
gagaaacatactgtt

SEQ ID NO: 950427 - DNA, 15 bp, Homo sapiens
agaaacatactgtta

SEQ ID NO: 950428 - DNA, 15 bp, Homo sapiens
gaaacatactgttaa

SEQ ID NO: 950429 - DNA, 15 bp, Homo sapiens
aaacatactgttaac

SEQ ID NO: 950430 - DNA, 15 bp, Homo sapiens
aacatactgttaaca

SEQ ID NO: 950431 - DNA, 15 bp, Homo sapiens
acatactgttaacat

SEQ ID NO: 950432 - DNA, 15 bp, Homo sapiens
catactgttaacatt

SEQ ID NO: 950433 - DNA, 15 bp, Homo sapiens
atactgttaacattg

SEQ ID NO: 950434 - DNA, 15 bp, Homo sapiens
tactgttaacattgc

SEQ ID NO: 950435 - DNA, 15 bp, Homo sapiens
actgttaacattgca

SEQ ID NO: 950436 - DNA, 15 bp, Homo sapiens
ctgttaacattgcag

SEQ ID NO: 950437 - DNA, 15 bp, Homo sapiens
tgttaacattgcaga

SEQ ID NO: 950438 - DNA, 15 bp, Homo sapiens
gttaacattgcagag

SEQ ID NO: 950439 - DNA, 15 bp, Homo sapiens
ttaacattgcagaga

SEQ ID NO: 950440 - DNA, 15 bp, Homo sapiens
taacattgcagagag

SEQ ID NO: 950441 - DNA, 15 bp, Homo sapiens
aacattgcagagagt

SEQ ID NO: 950442 - DNA, 15 bp, Homo sapiens
acattgcagagagtt

SEQ ID NO: 950443 - DNA, 15 bp, Homo sapiens
cattgcagagagtta

SEQ ID NO: 950444 - DNA, 15 bp, Homo sapiens
attgcagagagttac

SEQ ID NO: 950445 - DNA, 15 bp, Homo sapiens
ttgcagagagttaca

SEQ ID NO: 950446 - DNA, 15 bp, Homo sapiens
tgcagagagttacat

SEQ ID NO: 950447 - DNA, 15 bp, Homo sapiens
gcagagagttacatg

SEQ ID NO: 950448 - DNA, 15 bp, Homo sapiens
cagagagttacatgt

SEQ ID NO: 950449 - DNA, 15 bp, Homo sapiens
agagagttacatgtt

SEQ ID NO: 950450 - DNA, 15 bp, Homo sapiens
gagagttacatgtta

SEQ ID NO: 950451 - DNA, 15 bp, Homo sapiens
agagttacatgttat

SEQ ID NO: 950452 - DNA, 15 bp, Homo sapiens
gagttacatgttatg

SEQ ID NO: 950453 - DNA, 15 bp, Homo sapiens
agttacatgttatgt

SEQ ID NO: 950454 - DNA, 15 bp, Homo sapiens
gttacatgttatgtt

SEQ ID NO: 950455 - DNA, 15 bp, Homo sapiens
ttacatgttatgttt

SEQ ID NO: 950456 - DNA, 15 bp, Homo sapiens
tacatgttatgtttc

SEQ ID NO: 950457 - DNA, 15 bp, Homo sapiens
acatgttatgtttca

SEQ ID NO: 950458 - DNA, 15 bp, Homo sapiens
catgttatgtttcaa

SEQ ID NO: 950459 - DNA, 15 bp, Homo sapiens
atgttatgtttcaac

SEQ ID NO: 950460 - DNA, 15 bp, Homo sapiens
tgttatgtttcaaca

SEQ ID NO: 950461 - DNA, 15 bp, Homo sapiens
gttatgtttcaacaa

SEQ ID NO: 950462 - DNA, 15 bp, Homo sapiens
ttatgtttcaacaat

SEQ ID NO: 950463 - DNA, 15 bp, Homo sapiens
tatgtttcaacaatt

SEQ ID NO: 950464 - DNA, 15 bp, Homo sapiens
atgtttcaacaattt

SEQ ID NO: 950465 - DNA, 15 bp, Homo sapiens
tgtttcaacaattta

SEQ ID NO: 950466 - DNA, 15 bp, Homo sapiens
gtttcaacaatttat

SEQ ID NO: 950467 - DNA, 15 bp, Homo sapiens
tttcaacaatttatt

SEQ ID NO: 950468 - DNA, 15 bp, Homo sapiens
ttcaacaatttattc

SEQ ID NO: 950469 - DNA, 15 bp, Homo sapiens
tcaacaatttattca

SEQ ID NO: 950470 - DNA, 15 bp, Homo sapiens
caacaatttattcaa

SEQ ID NO: 950471 - DNA, 15 bp, Homo sapiens
aacaatttattcaat

SEQ ID NO: 950472 - DNA, 15 bp, Homo sapiens
acaatttattcaata

SEQ ID NO: 950473 - DNA, 15 bp, Homo sapiens
caatttattcaatat

SEQ ID NO: 950474 - DNA, 15 bp, Homo sapiens
aatttattcaatatc

SEQ ID NO: 950475 - DNA, 15 bp, Homo sapiens
atttattcaatatct

SEQ ID NO: 950476 - DNA, 15 bp, Homo sapiens
tttattcaatatcta

SEQ ID NO: 950477 - DNA, 15 bp, Homo sapiens
ttattcaatatctat

SEQ ID NO: 950478 - DNA, 15 bp, Homo sapiens
tattcaatatctatg

SEQ ID NO: 950479 - DNA, 15 bp, Homo sapiens
attcaatatctatgt

SEQ ID NO: 950480 - DNA, 15 bp, Homo sapiens
ttcaatatctatgtg

SEQ ID NO: 950481 - DNA, 15 bp, Homo sapiens
tcaatatctatgtgc

SEQ ID NO: 950482 - DNA, 15 bp, Homo sapiens
caatatctatgtgcc

SEQ ID NO: 950483 - DNA, 15 bp, Homo sapiens
aatatctatgtgcca

SEQ ID NO: 950484 - DNA, 15 bp, Homo sapiens
atatctatgtgccag

SEQ ID NO: 950485 - DNA, 15 bp, Homo sapiens
tatctatgtgccagg

SEQ ID NO: 950486 - DNA, 15 bp, Homo sapiens
atctatgtgccaggt

SEQ ID NO: 950487 - DNA, 15 bp, Homo sapiens
tctatgtgccaggta

SEQ ID NO: 950488 - DNA, 15 bp, Homo sapiens
ctatgtgccaggtag

SEQ ID NO: 950489 - DNA, 15 bp, Homo sapiens
tatgtgccaggtagt

SEQ ID NO: 950490 - DNA, 15 bp, Homo sapiens
atgtgccaggtagtg

SEQ ID NO: 950491 - DNA, 15 bp, Homo sapiens
tgtgccaggtagtgt

SEQ ID NO: 950492 - DNA, 15 bp, Homo sapiens
gtgccaggtagtgta

SEQ ID NO: 950493 - DNA, 15 bp, Homo sapiens
tgccaggtagtgtag

SEQ ID NO: 950494 - DNA, 15 bp, Homo sapiens
gccaggtagtgtaga

SEQ ID NO: 950495 - DNA, 15 bp, Homo sapiens
ccaggtagtgtagat

SEQ ID NO: 950496 - DNA, 15 bp, Homo sapiens
caggtagtgtagata

SEQ ID NO: 950497 - DNA, 15 bp, Homo sapiens
aggtagtgtagataa

SEQ ID NO: 950498 - DNA, 15 bp, Homo sapiens
ggtagtgtagataaa

SEQ ID NO: 950499 - DNA, 15 bp, Homo sapiens
gtagtgtagataaaa

SEQ ID NO: 950500 - DNA, 15 bp, Homo sapiens
tagtgtagataaaat

SEQ ID NO: 950501 - DNA, 15 bp, Homo sapiens
agtgtagataaaata

SEQ ID NO: 950502 - DNA, 15 bp, Homo sapiens
gtgtagataaaataa

SEQ ID NO: 950503 - DNA, 15 bp, Homo sapiens
tgtagataaaataat

SEQ ID NO: 950504 - DNA, 15 bp, Homo sapiens
gtagataaaataatt

SEQ ID NO: 950505 - DNA, 15 bp, Homo sapiens
tagataaaataattc

SEQ ID NO: 950506 - DNA, 15 bp, Homo sapiens
agataaaataattca

SEQ ID NO: 950507 - DNA, 15 bp, Homo sapiens
gataaaataattcat

SEQ ID NO: 950508 - DNA, 15 bp, Homo sapiens
ataaaataattcatt

SEQ ID NO: 950509 - DNA, 15 bp, Homo sapiens
taaaataattcattt

SEQ ID NO: 950510 - DNA, 15 bp, Homo sapiens
aaaataattcattta

SEQ ID NO: 950511 - DNA, 15 bp, Homo sapiens
aaataattcatttat

SEQ ID NO: 950512 - DNA, 15 bp, Homo sapiens
aataattcatttatt

SEQ ID NO: 950513 - DNA, 15 bp, Homo sapiens
ataattcatttatta

SEQ ID NO: 950514 - DNA, 15 bp, Homo sapiens
taattcatttattac

SEQ ID NO: 950515 - DNA, 15 bp, Homo sapiens
aattcatttattact

SEQ ID NO: 950516 - DNA, 15 bp, Homo sapiens
attcatttattactt

SEQ ID NO: 950517 - DNA, 15 bp, Homo sapiens
ttcatttattacttg

SEQ ID NO: 950518 - DNA, 15 bp, Homo sapiens
tcatttattacttga

SEQ ID NO: 950519 - DNA, 15 bp, Homo sapiens
catttattacttgag

SEQ ID NO: 950520 - DNA, 15 bp, Homo sapiens
atttattacttgaga

SEQ ID NO: 950521 - DNA, 15 bp, Homo sapiens
tttattacttgagac

SEQ ID NO: 950522 - DNA, 15 bp, Homo sapiens
ttattacttgagacc

SEQ ID NO: 950523 - DNA, 15 bp, Homo sapiens
tattacttgagacct

SEQ ID NO: 950524 - DNA, 15 bp, Homo sapiens
attacttgagacctt

SEQ ID NO: 950525 - DNA, 15 bp, Homo sapiens
ttacttgagacctta

SEQ ID NO: 950526 - DNA, 15 bp, Homo sapiens
tacttgagaccttaa

SEQ ID NO: 950527 - DNA, 15 bp, Homo sapiens
acttgagaccttaaa

SEQ ID NO: 950528 - DNA, 15 bp, Homo sapiens
cttgagaccttaaat

SEQ ID NO: 950529 - DNA, 15 bp, Homo sapiens
ttgagaccttaaatg

SEQ ID NO: 950530 - DNA, 15 bp, Homo sapiens
tgagaccttaaatga

SEQ ID NO: 950531 - DNA, 15 bp, Homo sapiens
gagaccttaaatgac

SEQ ID NO: 950532 - DNA, 15 bp, Homo sapiens
agaccttaaatgact

SEQ ID NO: 950533 - DNA, 15 bp, Homo sapiens
gaccttaaatgactt

SEQ ID NO: 950534 - DNA, 15 bp, Homo sapiens
accttaaatgactta

SEQ ID NO: 950535 - DNA, 15 bp, Homo sapiens
ccttaaatgacttat

SEQ ID NO: 950536 - DNA, 15 bp, Homo sapiens
cttaaatgacttatg

SEQ ID NO: 950537 - DNA, 15 bp, Homo sapiens
ttaaatgacttatgt

SEQ ID NO: 950538 - DNA, 15 bp, Homo sapiens
taaatgacttatgtt

SEQ ID NO: 950539 - DNA, 15 bp, Homo sapiens
aaatgacttatgttt

SEQ ID NO: 950540 - DNA, 15 bp, Homo sapiens
aatgacttatgtttt

SEQ ID NO: 950541 - DNA, 15 bp, Homo sapiens
atgacttatgttttt

SEQ ID NO: 950542 - DNA, 15 bp, Homo sapiens
tgacttatgttttta

SEQ ID NO: 950543 - DNA, 15 bp, Homo sapiens
gacttatgtttttat

SEQ ID NO: 950544 - DNA, 15 bp, Homo sapiens
acttatgtttttatt

SEQ ID NO: 950545 - DNA, 15 bp, Homo sapiens
cttatgtttttattc

SEQ ID NO: 950546 - DNA, 15 bp, Homo sapiens
ttatgtttttattct

SEQ ID NO: 950547 - DNA, 15 bp, Homo sapiens
tatgtttttattcta

SEQ ID NO: 950548 - DNA, 15 bp, Homo sapiens
atgtttttattctac

SEQ ID NO: 950549 - DNA, 15 bp, Homo sapiens
tgtttttattctact

SEQ ID NO: 950550 - DNA, 15 bp, Homo sapiens
gtttttattctactt

SEQ ID NO: 950551 - DNA, 15 bp, Homo sapiens
tttttattctacttt

SEQ ID NO: 950552 - DNA, 15 bp, Homo sapiens
ttttattctactttt

SEQ ID NO: 950553 - DNA, 15 bp, Homo sapiens
tttattctacttttc

SEQ ID NO: 950554 - DNA, 15 bp, Homo sapiens
ttattctacttttcc

SEQ ID NO: 950555 - DNA, 15 bp, Homo sapiens
tattctacttttcca

SEQ ID NO: 950556 - DNA, 15 bp, Homo sapiens
attctacttttccac

SEQ ID NO: 950557 - DNA, 15 bp, Homo sapiens
ttctacttttccacc

SEQ ID NO: 950558 - DNA, 15 bp, Homo sapiens
tctacttttccacct

SEQ ID NO: 950559 - DNA, 15 bp, Homo sapiens
ctacttttccacctg

SEQ ID NO: 950560 - DNA, 15 bp, Homo sapiens
tacttttccacctgg

SEQ ID NO: 950561 - DNA, 15 bp, Homo sapiens
acttttccacctggg

SEQ ID NO: 950562 - DNA, 15 bp, Homo sapiens
cttttccacctggga

SEQ ID NO: 950563 - DNA, 15 bp, Homo sapiens
ttttccacctgggaa

SEQ ID NO: 950564 - DNA, 15 bp, Homo sapiens
tttccacctgggaaa

SEQ ID NO: 950565 - DNA, 15 bp, Homo sapiens
ttccacctgggaaat

SEQ ID NO: 950566 - DNA, 15 bp, Homo sapiens
tccacctgggaaatt

SEQ ID NO: 950567 - DNA, 15 bp, Homo sapiens
ccacctgggaaattt

SEQ ID NO: 950568 - DNA, 15 bp, Homo sapiens
cacctgggaaattta

SEQ ID NO: 950569 - DNA, 15 bp, Homo sapiens
acctgggaaatttag

SEQ ID NO: 950570 - DNA, 15 bp, Homo sapiens
cctgggaaatttagg

SEQ ID NO: 950571 - DNA, 15 bp, Homo sapiens
ctgggaaatttaggt

SEQ ID NO: 950572 - DNA, 15 bp, Homo sapiens
tgggaaatttaggtt

SEQ ID NO: 950573 - DNA, 15 bp, Homo sapiens
gggaaatttaggttt

SEQ ID NO: 950574 - DNA, 15 bp, Homo sapiens
ggaaatttaggttta

SEQ ID NO: 950575 - DNA, 15 bp, Homo sapiens
gaaatttaggtttat

SEQ ID NO: 950576 - DNA, 15 bp, Homo sapiens
aaatttaggtttatt

SEQ ID NO: 950577 - DNA, 15 bp, Homo sapiens
aatttaggtttatta

SEQ ID NO: 950578 - DNA, 15 bp, Homo sapiens
atttaggtttattaa

SEQ ID NO: 950579 - DNA, 15 bp, Homo sapiens
tttaggtttattaat

SEQ ID NO: 950580 - DNA, 15 bp, Homo sapiens
ttaggtttattaata

SEQ ID NO: 950581 - DNA, 15 bp, Homo sapiens
taggtttattaatat

SEQ ID NO: 950582 - DNA, 15 bp, Homo sapiens
aggtttattaatata

SEQ ID NO: 950583 - DNA, 15 bp, Homo sapiens
ggtttattaatatag

SEQ ID NO: 950584 - DNA, 15 bp, Homo sapiens
gtttattaatataga

SEQ ID NO: 950585 - DNA, 15 bp, Homo sapiens
tttattaatatagaa

SEQ ID NO: 950586 - DNA, 15 bp, Homo sapiens
ttattaatatagaat

SEQ ID NO: 950587 - DNA, 15 bp, Homo sapiens
tattaatatagaatt

SEQ ID NO: 950588 - DNA, 15 bp, Homo sapiens
attaatatagaattt

SEQ ID NO: 950589 - DNA, 15 bp, Homo sapiens
ttaatatagaatttt

SEQ ID NO: 950590 - DNA, 15 bp, Homo sapiens
taatatagaatttta

SEQ ID NO: 950591 - DNA, 15 bp, Homo sapiens
aatatagaattttag

SEQ ID NO: 950592 - DNA, 15 bp, Homo sapiens
atatagaattttagt

SEQ ID NO: 950593 - DNA, 15 bp, Homo sapiens
tatagaattttagtt

SEQ ID NO: 950594 - DNA, 15 bp, Homo sapiens
atagaattttagttt

SEQ ID NO: 950595 - DNA, 15 bp, Homo sapiens
tagaattttagttta

SEQ ID NO: 950596 - DNA, 15 bp, Homo sapiens
agaattttagtttag

SEQ ID NO: 950597 - DNA, 15 bp, Homo sapiens
gaattttagtttaga

SEQ ID NO: 950598 - DNA, 15 bp, Homo sapiens
aattttagtttagaa

SEQ ID NO: 950599 - DNA, 15 bp, Homo sapiens
attttagtttagaaa

SEQ ID NO: 950600 - DNA, 15 bp, Homo sapiens
ttttagtttagaaat

SEQ ID NO: 950601 - DNA, 15 bp, Homo sapiens
tttagtttagaaatc

SEQ ID NO: 950602 - DNA, 15 bp, Homo sapiens
ttagtttagaaatca

SEQ ID NO: 950603 - DNA, 15 bp, Homo sapiens
tagtttagaaatcaa

SEQ ID NO: 950604 - DNA, 15 bp, Homo sapiens
agtttagaaatcaat

SEQ ID NO: 950605 - DNA, 15 bp, Homo sapiens
gtttagaaatcaata

SEQ ID NO: 950606 - DNA, 15 bp, Homo sapiens
tttagaaatcaatat

SEQ ID NO: 950607 - DNA, 15 bp, Homo sapiens
ttagaaatcaatatc

SEQ ID NO: 950608 - DNA, 15 bp, Homo sapiens
tagaaatcaatatcc

SEQ ID NO: 950609 - DNA, 15 bp, Homo sapiens
agaaatcaatatccc

SEQ ID NO: 950610 - DNA, 15 bp, Homo sapiens
gaaatcaatatcccc

SEQ ID NO: 950611 - DNA, 15 bp, Homo sapiens
aaatcaatatccccc

SEQ ID NO: 950612 - DNA, 15 bp, Homo sapiens
aatcaatatccccca

SEQ ID NO: 950613 - DNA, 15 bp, Homo sapiens
atcaatatcccccag

SEQ ID NO: 950614 - DNA, 15 bp, Homo sapiens
tcaatatcccccaga

SEQ ID NO: 950615 - DNA, 15 bp, Homo sapiens
caatatcccccagaa

SEQ ID NO: 950616 - DNA, 15 bp, Homo sapiens
aatatcccccagaaa

SEQ ID NO: 950617 - DNA, 15 bp, Homo sapiens
atatcccccagaaat

SEQ ID NO: 950618 - DNA, 15 bp, Homo sapiens
tatcccccagaaatt

SEQ ID NO: 950619 - DNA, 15 bp, Homo sapiens
atcccccagaaattt

SEQ ID NO: 950620 - DNA, 15 bp, Homo sapiens
tcccccagaaatttg

SEQ ID NO: 950621 - DNA, 15 bp, Homo sapiens
cccccagaaatttga

SEQ ID NO: 950622 - DNA, 15 bp, Homo sapiens
ccccagaaatttgaa

SEQ ID NO: 950623 - DNA, 15 bp, Homo sapiens
cccagaaatttgaag

SEQ ID NO: 950624 - DNA, 15 bp, Homo sapiens
ccagaaatttgaagc

SEQ ID NO: 950625 - DNA, 15 bp, Homo sapiens
cagaaatttgaagca

SEQ ID NO: 950626 - DNA, 15 bp, Homo sapiens
agaaatttgaagcat

SEQ ID NO: 950627 - DNA, 15 bp, Homo sapiens
gaaatttgaagcatt

SEQ ID NO: 950628 - DNA, 15 bp, Homo sapiens
aaatttgaagcatta

SEQ ID NO: 950629 - DNA, 15 bp, Homo sapiens
aatttgaagcattac

SEQ ID NO: 950630 - DNA, 15 bp, Homo sapiens
atttgaagcattact

SEQ ID NO: 950631 - DNA, 15 bp, Homo sapiens
tttgaagcattactc

SEQ ID NO: 950632 - DNA, 15 bp, Homo sapiens
ttgaagcattactct

SEQ ID NO: 950633 - DNA, 15 bp, Homo sapiens
tgaagcattactctc

SEQ ID NO: 950634 - DNA, 15 bp, Homo sapiens
gaagcattactctct

SEQ ID NO: 950635 - DNA, 15 bp, Homo sapiens
aagcattactctctt

SEQ ID NO: 950636 - DNA, 15 bp, Homo sapiens
agcattactctcttt

SEQ ID NO: 950637 - DNA, 15 bp, Homo sapiens
gcattactctctttt

SEQ ID NO: 950638 - DNA, 15 bp, Homo sapiens
cattactctcttttt

SEQ ID NO: 950639 - DNA, 15 bp, Homo sapiens
attactctctttttt

SEQ ID NO: 950640 - DNA, 15 bp, Homo sapiens
ttactctctttttta

SEQ ID NO: 950641 - DNA, 15 bp, Homo sapiens
tactctcttttttat

SEQ ID NO: 950642 - DNA, 15 bp, Homo sapiens
actctcttttttatt

SEQ ID NO: 950643 - DNA, 15 bp, Homo sapiens
ctctcttttttattt

SEQ ID NO: 950644 - DNA, 15 bp, Homo sapiens
tctcttttttatttt

SEQ ID NO: 950645 - DNA, 15 bp, Homo sapiens
ctcttttttattttg

SEQ ID NO: 950646 - DNA, 15 bp, Homo sapiens
tcttttttattttgg

SEQ ID NO: 950647 - DNA, 15 bp, Homo sapiens
cttttttattttgga

SEQ ID NO: 950648 - DNA, 15 bp, Homo sapiens
ttttttattttggaa

SEQ ID NO: 950649 - DNA, 15 bp, Homo sapiens
tttttattttggaaa

SEQ ID NO: 950650 - DNA, 15 bp, Homo sapiens
ttttattttggaaag

SEQ ID NO: 950651 - DNA, 15 bp, Homo sapiens
tttattttggaaagg

SEQ ID NO: 950652 - DNA, 15 bp, Homo sapiens
ttattttggaaagga

SEQ ID NO: 950653 - DNA, 15 bp, Homo sapiens
tattttggaaaggaa

SEQ ID NO: 950654 - DNA, 15 bp, Homo sapiens
attttggaaaggaat

SEQ ID NO: 950655 - DNA, 15 bp, Homo sapiens
ttttggaaaggaatt

SEQ ID NO: 950656 - DNA, 15 bp, Homo sapiens
tttggaaaggaatta

SEQ ID NO: 950657 - DNA, 15 bp, Homo sapiens
ttggaaaggaattat

SEQ ID NO: 950658 - DNA, 15 bp, Homo sapiens
tggaaaggaattatc

SEQ ID NO: 950659 - DNA, 15 bp, Homo sapiens
ggaaaggaattatcc

SEQ ID NO: 950660 - DNA, 15 bp, Homo sapiens
gaaaggaattatcct

SEQ ID NO: 950661 - DNA, 15 bp, Homo sapiens
aaaggaattatcctc

SEQ ID NO: 950662 - DNA, 15 bp, Homo sapiens
aaggaattatcctct

SEQ ID NO: 950663 - DNA, 15 bp, Homo sapiens
aggaattatcctctt

SEQ ID NO: 950664 - DNA, 15 bp, Homo sapiens
ggaattatcctcttt

SEQ ID NO: 950665 - DNA, 15 bp, Homo sapiens
gaattatcctctttt

SEQ ID NO: 950666 - DNA, 15 bp, Homo sapiens
aattatcctctttta

SEQ ID NO: 950667 - DNA, 15 bp, Homo sapiens
attatcctcttttac

SEQ ID NO: 950668 - DNA, 15 bp, Homo sapiens
ttatcctcttttaca

SEQ ID NO: 950669 - DNA, 15 bp, Homo sapiens
tatcctcttttacag

SEQ ID NO: 950670 - DNA, 15 bp, Homo sapiens
atcctcttttacaga

SEQ ID NO: 950671 - DNA, 15 bp, Homo sapiens
tcctcttttacagat

SEQ ID NO: 950672 - DNA, 15 bp, Homo sapiens
cctcttttacagatc

SEQ ID NO: 950673 - DNA, 15 bp, Homo sapiens
ctcttttacagatca

SEQ ID NO: 950674 - DNA, 15 bp, Homo sapiens
tcttttacagatcag

SEQ ID NO: 950675 - DNA, 15 bp, Homo sapiens
cttttacagatcagg

SEQ ID NO: 950676 - DNA, 15 bp, Homo sapiens
ttttacagatcagga

SEQ ID NO: 950677 - DNA, 15 bp, Homo sapiens
tttacagatcaggaa

SEQ ID NO: 950678 - DNA, 15 bp, Homo sapiens
ttacagatcaggaaa

SEQ ID NO: 950679 - DNA, 15 bp, Homo sapiens
tacagatcaggaaaa

SEQ ID NO: 950680 - DNA, 15 bp, Homo sapiens
acagatcaggaaaat

SEQ ID NO: 950681 - DNA, 15 bp, Homo sapiens
cagatcaggaaaatt

SEQ ID NO: 950682 - DNA, 15 bp, Homo sapiens
agatcaggaaaatta

SEQ ID NO: 950683 - DNA, 15 bp, Homo sapiens
gatcaggaaaattac

SEQ ID NO: 950684 - DNA, 15 bp, Homo sapiens
atcaggaaaattact

SEQ ID NO: 950685 - DNA, 15 bp, Homo sapiens
tcaggaaaattactt

SEQ ID NO: 950686 - DNA, 15 bp, Homo sapiens
caggaaaattacttt

SEQ ID NO: 950687 - DNA, 15 bp, Homo sapiens
aggaaaattactttc

SEQ ID NO: 950688 - DNA, 15 bp, Homo sapiens
ggaaaattactttcc

SEQ ID NO: 950689 - DNA, 15 bp, Homo sapiens
gaaaattactttcca

SEQ ID NO: 950690 - DNA, 15 bp, Homo sapiens
aaaattactttccat

SEQ ID NO: 950691 - DNA, 15 bp, Homo sapiens
aaattactttccatc

SEQ ID NO: 950692 - DNA, 15 bp, Homo sapiens
aattactttccatct

SEQ ID NO: 950693 - DNA, 15 bp, Homo sapiens
attactttccatctg

SEQ ID NO: 950694 - DNA, 15 bp, Homo sapiens
ttactttccatctga

SEQ ID NO: 950695 - DNA, 15 bp, Homo sapiens
tactttccatctgaa

SEQ ID NO: 950696 - DNA, 15 bp, Homo sapiens
actttccatctgaaa

SEQ ID NO: 950697 - DNA, 15 bp, Homo sapiens
ctttccatctgaaag

SEQ ID NO: 950698 - DNA, 15 bp, Homo sapiens
tttccatctgaaaga

SEQ ID NO: 950699 - DNA, 15 bp, Homo sapiens
ttccatctgaaagat

SEQ ID NO: 950700 - DNA, 15 bp, Homo sapiens
tccatctgaaagatg

SEQ ID NO: 950701 - DNA, 15 bp, Homo sapiens
ccatctgaaagatgt

SEQ ID NO: 950702 - DNA, 15 bp, Homo sapiens
catctgaaagatgta

SEQ ID NO: 950703 - DNA, 15 bp, Homo sapiens
atctgaaagatgtat

SEQ ID NO: 950704 - DNA, 15 bp, Homo sapiens
tctgaaagatgtatt

SEQ ID NO: 950705 - DNA, 15 bp, Homo sapiens
ctgaaagatgtattc

SEQ ID NO: 950706 - DNA, 15 bp, Homo sapiens
tgaaagatgtattct

SEQ ID NO: 950707 - DNA, 15 bp, Homo sapiens
gaaagatgtattctc

SEQ ID NO: 950708 - DNA, 15 bp, Homo sapiens
aaagatgtattctca

SEQ ID NO: 950709 - DNA, 15 bp, Homo sapiens
aagatgtattctcac

SEQ ID NO: 950710 - DNA, 15 bp, Homo sapiens
agatgtattctcacc

SEQ ID NO: 950711 - DNA, 15 bp, Homo sapiens
gatgtattctcacct

SEQ ID NO: 950712 - DNA, 15 bp, Homo sapiens
atgtattctcaccta

SEQ ID NO: 950713 - DNA, 15 bp, Homo sapiens
tgtattctcacctat

SEQ ID NO: 950714 - DNA, 15 bp, Homo sapiens
gtattctcacctatt

SEQ ID NO: 950715 - DNA, 15 bp, Homo sapiens
tattctcacctattt

SEQ ID NO: 950716 - DNA, 15 bp, Homo sapiens
attctcacctatttc

SEQ ID NO: 950717 - DNA, 15 bp, Homo sapiens
ttctcacctatttca

SEQ ID NO: 950718 - DNA, 15 bp, Homo sapiens
tctcacctatttcac

SEQ ID NO: 950719 - DNA, 15 bp, Homo sapiens
ctcacctatttcaca

SEQ ID NO: 950720 - DNA, 15 bp, Homo sapiens
tcacctatttcacac

SEQ ID NO: 950721 - DNA, 15 bp, Homo sapiens
cacctatttcacaca

SEQ ID NO: 950722 - DNA, 15 bp, Homo sapiens
acctatttcacacag

SEQ ID NO: 950723 - DNA, 15 bp, Homo sapiens
cctatttcacacagt

SEQ ID NO: 950724 - DNA, 15 bp, Homo sapiens
ctatttcacacagtt

SEQ ID NO: 950725 - DNA, 15 bp, Homo sapiens
tatttcacacagtta

SEQ ID NO: 950726 - DNA, 15 bp, Homo sapiens
atttcacacagttaa

SEQ ID NO: 950727 - DNA, 15 bp, Homo sapiens
tttcacacagttaat

SEQ ID NO: 950728 - DNA, 15 bp, Homo sapiens
ttcacacagttaata

SEQ ID NO: 950729 - DNA, 15 bp, Homo sapiens
tcacacagttaatat

SEQ ID NO: 950730 - DNA, 15 bp, Homo sapiens
cacacagttaatata

SEQ ID NO: 950731 - DNA, 15 bp, Homo sapiens
acacagttaatatat

SEQ ID NO: 950732 - DNA, 15 bp, Homo sapiens
cacagttaatatatg

SEQ ID NO: 950733 - DNA, 15 bp, Homo sapiens
acagttaatatatga

SEQ ID NO: 950734 - DNA, 15 bp, Homo sapiens
cagttaatatatgac

SEQ ID NO: 950735 - DNA, 15 bp, Homo sapiens
agttaatatatgaca

SEQ ID NO: 950736 - DNA, 15 bp, Homo sapiens
gttaatatatgacat

SEQ ID NO: 950737 - DNA, 15 bp, Homo sapiens
ttaatatatgacata

SEQ ID NO: 950738 - DNA, 15 bp, Homo sapiens
taatatatgacataa

SEQ ID NO: 950739 - DNA, 15 bp, Homo sapiens
aatatatgacataac

SEQ ID NO: 950740 - DNA, 15 bp, Homo sapiens
atatatgacataact

SEQ ID NO: 950741 - DNA, 15 bp, Homo sapiens
tatatgacataacta

SEQ ID NO: 950742 - DNA, 15 bp, Homo sapiens
atatgacataactaa

SEQ ID NO: 950743 - DNA, 15 bp, Homo sapiens
tatgacataactaaa

SEQ ID NO: 950744 - DNA, 15 bp, Homo sapiens
atgacataactaaaa

SEQ ID NO: 950745 - DNA, 15 bp, Homo sapiens
tgacataactaaaat

SEQ ID NO: 950746 - DNA, 15 bp, Homo sapiens
gacataactaaaatt

SEQ ID NO: 950747 - DNA, 15 bp, Homo sapiens
acataactaaaatta

SEQ ID NO: 950748 - DNA, 15 bp, Homo sapiens
cataactaaaattag

SEQ ID NO: 950749 - DNA, 15 bp, Homo sapiens
ataactaaaattaga

SEQ ID NO: 950750 - DNA, 15 bp, Homo sapiens
taactaaaattagaa

SEQ ID NO: 950751 - DNA, 15 bp, Homo sapiens
aactaaaattagaat

SEQ ID NO: 950752 - DNA, 15 bp, Homo sapiens
actaaaattagaatc

SEQ ID NO: 950753 - DNA, 15 bp, Homo sapiens
ctaaaattagaatcc

SEQ ID NO: 950754 - DNA, 15 bp, Homo sapiens
taaaattagaatcca

SEQ ID NO: 950755 - DNA, 15 bp, Homo sapiens
aaaattagaatccat

SEQ ID NO: 950756 - DNA, 15 bp, Homo sapiens
aaattagaatccatt

SEQ ID NO: 950757 - DNA, 15 bp, Homo sapiens
aattagaatccattc

SEQ ID NO: 950758 - DNA, 15 bp, Homo sapiens
attagaatccattct

SEQ ID NO: 950759 - DNA, 15 bp, Homo sapiens
ttagaatccattcta

SEQ ID NO: 950760 - DNA, 15 bp, Homo sapiens
tagaatccattctat

SEQ ID NO: 950761 - DNA, 15 bp, Homo sapiens
agaatccattctata

SEQ ID NO: 950762 - DNA, 15 bp, Homo sapiens
gaatccattctatat

SEQ ID NO: 950763 - DNA, 15 bp, Homo sapiens
aatccattctatatg

SEQ ID NO: 950764 - DNA, 15 bp, Homo sapiens
atccattctatatga

SEQ ID NO: 950765 - DNA, 15 bp, Homo sapiens
tccattctatatgat

SEQ ID NO: 950766 - DNA, 15 bp, Homo sapiens
ccattctatatgata

SEQ ID NO: 950767 - DNA, 15 bp, Homo sapiens
cattctatatgatat

SEQ ID NO: 950768 - DNA, 15 bp, Homo sapiens
attctatatgatatc

SEQ ID NO: 950769 - DNA, 15 bp, Homo sapiens
ttctatatgatatca

SEQ ID NO: 950770 - DNA, 15 bp, Homo sapiens
tctatatgatatcaa

SEQ ID NO: 950771 - DNA, 15 bp, Homo sapiens
ctatatgatatcaag

SEQ ID NO: 950772 - DNA, 15 bp, Homo sapiens
tatatgatatcaagc

SEQ ID NO: 950773 - DNA, 15 bp, Homo sapiens
atatgatatcaagct

SEQ ID NO: 950774 - DNA, 15 bp, Homo sapiens
tatgatatcaagctg

SEQ ID NO: 950775 - DNA, 15 bp, Homo sapiens
atgatatcaagctga

SEQ ID NO: 950776 - DNA, 15 bp, Homo sapiens
tgatatcaagctgat

SEQ ID NO: 950777 - DNA, 15 bp, Homo sapiens
gatatcaagctgata

SEQ ID NO: 950778 - DNA, 15 bp, Homo sapiens
atatcaagctgataa

SEQ ID NO: 950779 - DNA, 15 bp, Homo sapiens
tatcaagctgataag

SEQ ID NO: 950780 - DNA, 15 bp, Homo sapiens
atcaagctgataagg

SEQ ID NO: 950781 - DNA, 15 bp, Homo sapiens
tcaagctgataaggg

SEQ ID NO: 950782 - DNA, 15 bp, Homo sapiens
caagctgataagggt

SEQ ID NO: 950783 - DNA, 15 bp, Homo sapiens
aagctgataagggtt

SEQ ID NO: 950784 - DNA, 15 bp, Homo sapiens
agctgataagggttt

SEQ ID NO: 950785 - DNA, 15 bp, Homo sapiens
gctgataagggttta

SEQ ID NO: 950786 - DNA, 15 bp, Homo sapiens
ctgataagggtttaa

SEQ ID NO: 950787 - DNA, 15 bp, Homo sapiens
tgataagggtttaat

SEQ ID NO: 950788 - DNA, 15 bp, Homo sapiens
gataagggtttaatc

SEQ ID NO: 950789 - DNA, 15 bp, Homo sapiens
ataagggtttaatcc

SEQ ID NO: 950790 - DNA, 15 bp, Homo sapiens
taagggtttaatccc

SEQ ID NO: 950791 - DNA, 15 bp, Homo sapiens
aagggtttaatccca

SEQ ID NO: 950792 - DNA, 15 bp, Homo sapiens
agggtttaatcccaa

SEQ ID NO: 950793 - DNA, 15 bp, Homo sapiens
gggtttaatcccaac

SEQ ID NO: 950794 - DNA, 15 bp, Homo sapiens
ggtttaatcccaaca

SEQ ID NO: 950795 - DNA, 15 bp, Homo sapiens
gtttaatcccaacag

SEQ ID NO: 950796 - DNA, 15 bp, Homo sapiens
tttaatcccaacagt

SEQ ID NO: 950797 - DNA, 15 bp, Homo sapiens
ttaatcccaacagtt

SEQ ID NO: 950798 - DNA, 15 bp, Homo sapiens
taatcccaacagttt

SEQ ID NO: 950799 - DNA, 15 bp, Homo sapiens
aatcccaacagttta

SEQ ID NO: 950800 - DNA, 15 bp, Homo sapiens
atcccaacagtttaa

SEQ ID NO: 950801 - DNA, 15 bp, Homo sapiens
tcccaacagtttaac

SEQ ID NO: 950802 - DNA, 15 bp, Homo sapiens
cccaacagtttaaca

SEQ ID NO: 950803 - DNA, 15 bp, Homo sapiens
ccaacagtttaacag

SEQ ID NO: 950804 - DNA, 15 bp, Homo sapiens
caacagtttaacagt

SEQ ID NO: 950805 - DNA, 15 bp, Homo sapiens
aacagtttaacagtg

SEQ ID NO: 950806 - DNA, 15 bp, Homo sapiens
acagtttaacagtga

SEQ ID NO: 950807 - DNA, 15 bp, Homo sapiens
cagtttaacagtgac

SEQ ID NO: 950808 - DNA, 15 bp, Homo sapiens
agtttaacagtgacc

SEQ ID NO: 950809 - DNA, 15 bp, Homo sapiens
gtttaacagtgacct

SEQ ID NO: 950810 - DNA, 15 bp, Homo sapiens
tttaacagtgacctt

SEQ ID NO: 950811 - DNA, 15 bp, Homo sapiens
ttaacagtgaccttc

SEQ ID NO: 950812 - DNA, 15 bp, Homo sapiens
taacagtgaccttca

SEQ ID NO: 950813 - DNA, 15 bp, Homo sapiens
aacagtgaccttcaa

SEQ ID NO: 950814 - DNA, 15 bp, Homo sapiens
acagtgaccttcaaa

SEQ ID NO: 950815 - DNA, 15 bp, Homo sapiens
cagtgaccttcaaaa

SEQ ID NO: 950816 - DNA, 15 bp, Homo sapiens
agtgaccttcaaaac

SEQ ID NO: 950817 - DNA, 15 bp, Homo sapiens
gtgaccttcaaaaca

SEQ ID NO: 950818 - DNA, 15 bp, Homo sapiens
tgaccttcaaaacag

SEQ ID NO: 950819 - DNA, 15 bp, Homo sapiens
gaccttcaaaacagt

SEQ ID NO: 950820 - DNA, 15 bp, Homo sapiens
accttcaaaacagta

SEQ ID NO: 950821 - DNA, 15 bp, Homo sapiens
ccttcaaaacagtaa

SEQ ID NO: 950822 - DNA, 15 bp, Homo sapiens
cttcaaaacagtaaa

SEQ ID NO: 950823 - DNA, 15 bp, Homo sapiens
ttcaaaacagtaaaa

SEQ ID NO: 950824 - DNA, 15 bp, Homo sapiens
tcaaaacagtaaaaa

SEQ ID NO: 950825 - DNA, 15 bp, Homo sapiens
caaaacagtaaaaat

SEQ ID NO: 950826 - DNA, 15 bp, Homo sapiens
aaaacagtaaaaata

SEQ ID NO: 950827 - DNA, 15 bp, Homo sapiens
aaacagtaaaaatac

SEQ ID NO: 950828 - DNA, 15 bp, Homo sapiens
aacagtaaaaatacc

SEQ ID NO: 950829 - DNA, 15 bp, Homo sapiens
acagtaaaaataccc

SEQ ID NO: 950830 - DNA, 15 bp, Homo sapiens
cagtaaaaataccct

SEQ ID NO: 950831 - DNA, 15 bp, Homo sapiens
agtaaaaataccctc

SEQ ID NO: 950832 - DNA, 15 bp, Homo sapiens
gtaaaaataccctca

SEQ ID NO: 950833 - DNA, 15 bp, Homo sapiens
taaaaataccctcat

SEQ ID NO: 950834 - DNA, 15 bp, Homo sapiens
aaaaataccctcata

SEQ ID NO: 950835 - DNA, 15 bp, Homo sapiens
aaaataccctcataa

SEQ ID NO: 950836 - DNA, 15 bp, Homo sapiens
aaataccctcataaa

SEQ ID NO: 950837 - DNA, 15 bp, Homo sapiens
aataccctcataaaa

SEQ ID NO: 950838 - DNA, 15 bp, Homo sapiens
ataccctcataaaaa

SEQ ID NO: 950839 - DNA, 15 bp, Homo sapiens
taccctcataaaaat

SEQ ID NO: 950840 - DNA, 15 bp, Homo sapiens
accctcataaaaatg

SEQ ID NO: 950841 - DNA, 15 bp, Homo sapiens
ccctcataaaaatga

SEQ ID NO: 950842 - DNA, 15 bp, Homo sapiens
cctcataaaaatgaa

SEQ ID NO: 950843 - DNA, 15 bp, Homo sapiens
ctcataaaaatgaac

SEQ ID NO: 950844 - DNA, 15 bp, Homo sapiens
tcataaaaatgaacc

SEQ ID NO: 950845 - DNA, 15 bp, Homo sapiens
cataaaaatgaacca

SEQ ID NO: 950846 - DNA, 15 bp, Homo sapiens
ataaaaatgaaccat

SEQ ID NO: 950847 - DNA, 15 bp, Homo sapiens
taaaaatgaaccata

SEQ ID NO: 950848 - DNA, 15 bp, Homo sapiens
aaaaatgaaccatat

SEQ ID NO: 950849 - DNA, 15 bp, Homo sapiens
aaaatgaaccatatg

SEQ ID NO: 950850 - DNA, 15 bp, Homo sapiens
aaatgaaccatatgg

SEQ ID NO: 950851 - DNA, 15 bp, Homo sapiens
aatgaaccatatgga

SEQ ID NO: 950852 - DNA, 15 bp, Homo sapiens
atgaaccatatggat

SEQ ID NO: 950853 - DNA, 15 bp, Homo sapiens
tgaaccatatggatg

SEQ ID NO: 950854 - DNA, 15 bp, Homo sapiens
gaaccatatggatga

SEQ ID NO: 950855 - DNA, 15 bp, Homo sapiens
aaccatatggatgaa

SEQ ID NO: 950856 - DNA, 15 bp, Homo sapiens
accatatggatgaat

SEQ ID NO: 950857 - DNA, 15 bp, Homo sapiens
ccatatggatgaata

SEQ ID NO: 950858 - DNA, 15 bp, Homo sapiens
catatggatgaataa

SEQ ID NO: 950859 - DNA, 15 bp, Homo sapiens
atatggatgaataaa

SEQ ID NO: 950860 - DNA, 15 bp, Homo sapiens
tatggatgaataaaa

SEQ ID NO: 950861 - DNA, 15 bp, Homo sapiens
atggatgaataaaat

SEQ ID NO: 950862 - DNA, 15 bp, Homo sapiens
tggatgaataaaata

SEQ ID NO: 950863 - DNA, 15 bp, Homo sapiens
ggatgaataaaatat

SEQ ID NO: 950864 - DNA, 15 bp, Homo sapiens
gatgaataaaatatt

SEQ ID NO: 950865 - DNA, 15 bp, Homo sapiens
atgaataaaatatta

SEQ ID NO: 950866 - DNA, 15 bp, Homo sapiens
tgaataaaatattaa

SEQ ID NO: 950867 - DNA, 15 bp, Homo sapiens
gaataaaatattaaa

SEQ ID NO: 950868 - DNA, 15 bp, Homo sapiens
aataaaatattaaat

SEQ ID NO: 950869 - DNA, 15 bp, Homo sapiens
ataaaatattaaatt

SEQ ID NO: 950870 - DNA, 15 bp, Homo sapiens
taaaatattaaatta

SEQ ID NO: 950871 - DNA, 15 bp, Homo sapiens
aaaatattaaattat

SEQ ID NO: 950872 - DNA, 15 bp, Homo sapiens
aaatattaaattatt

SEQ ID NO: 950873 - DNA, 15 bp, Homo sapiens
aatattaaattattg

SEQ ID NO: 950874 - DNA, 15 bp, Homo sapiens
atattaaattattga

SEQ ID NO: 950875 - DNA, 15 bp, Homo sapiens
tattaaattattgaa

SEQ ID NO: 950876 - DNA, 15 bp, Homo sapiens
attaaattattgaac

SEQ ID NO: 950877 - DNA, 15 bp, Homo sapiens
ttaaattattgaact

SEQ ID NO: 950878 - DNA, 15 bp, Homo sapiens
taaattattgaacta

SEQ ID NO: 950879 - DNA, 15 bp, Homo sapiens
aaattattgaactaa

SEQ ID NO: 950880 - DNA, 15 bp, Homo sapiens
aattattgaactaaa

SEQ ID NO: 950881 - DNA, 15 bp, Homo sapiens
attattgaactaaac

SEQ ID NO: 950882 - DNA, 15 bp, Homo sapiens
ttattgaactaaact

SEQ ID NO: 950883 - DNA, 15 bp, Homo sapiens
tattgaactaaactt

SEQ ID NO: 950884 - DNA, 15 bp, Homo sapiens
attgaactaaacttt

SEQ ID NO: 950885 - DNA, 15 bp, Homo sapiens
ttgaactaaactttt

SEQ ID NO: 950886 - DNA, 15 bp, Homo sapiens
tgaactaaacttttg

SEQ ID NO: 950887 - DNA, 15 bp, Homo sapiens
gaactaaacttttgg

SEQ ID NO: 950888 - DNA, 15 bp, Homo sapiens
aactaaacttttggg

SEQ ID NO: 950889 - DNA, 15 bp, Homo sapiens
actaaacttttgggt

SEQ ID NO: 950890 - DNA, 15 bp, Homo sapiens
ctaaacttttgggtt

SEQ ID NO: 950891 - DNA, 15 bp, Homo sapiens
taaacttttgggttc

SEQ ID NO: 950892 - DNA, 15 bp, Homo sapiens
aaacttttgggttct

SEQ ID NO: 950893 - DNA, 15 bp, Homo sapiens
aacttttgggttctc

SEQ ID NO: 950894 - DNA, 15 bp, Homo sapiens
acttttgggttctcg

SEQ ID NO: 950895 - DNA, 15 bp, Homo sapiens
cttttgggttctcga

SEQ ID NO: 950896 - DNA, 15 bp, Homo sapiens
ttttgggttctcgat

SEQ ID NO: 950897 - DNA, 15 bp, Homo sapiens
tttgggttctcgata

SEQ ID NO: 950898 - DNA, 15 bp, Homo sapiens
ttgggttctcgatat

SEQ ID NO: 950899 - DNA, 15 bp, Homo sapiens
tgggttctcgatata

SEQ ID NO: 950900 - DNA, 15 bp, Homo sapiens
gggttctcgatatat

SEQ ID NO: 950901 - DNA, 15 bp, Homo sapiens
ggttctcgatatata

SEQ ID NO: 950902 - DNA, 15 bp, Homo sapiens
gttctcgatatataa

SEQ ID NO: 950903 - DNA, 15 bp, Homo sapiens
ttctcgatatataac

SEQ ID NO: 950904 - DNA, 15 bp, Homo sapiens
tctcgatatataacc

SEQ ID NO: 950905 - DNA, 15 bp, Homo sapiens
ctcgatatataacct

SEQ ID NO: 950906 - DNA, 15 bp, Homo sapiens
tcgatatataaccta

SEQ ID NO: 950907 - DNA, 15 bp, Homo sapiens
cgatatataacctaa

SEQ ID NO: 950908 - DNA, 15 bp, Homo sapiens
gatatataacctaaa

SEQ ID NO: 950909 - DNA, 15 bp, Homo sapiens
atatataacctaaat

SEQ ID NO: 950910 - DNA, 15 bp, Homo sapiens
tatataacctaaata

SEQ ID NO: 950911 - DNA, 15 bp, Homo sapiens
atataacctaaataa

SEQ ID NO: 950912 - DNA, 15 bp, Homo sapiens
tataacctaaataac

SEQ ID NO: 950913 - DNA, 15 bp, Homo sapiens
ataacctaaataact

SEQ ID NO: 950914 - DNA, 15 bp, Homo sapiens
taacctaaataacta

SEQ ID NO: 950915 - DNA, 15 bp, Homo sapiens
aacctaaataactat

SEQ ID NO: 950916 - DNA, 15 bp, Homo sapiens
acctaaataactatt

SEQ ID NO: 950917 - DNA, 15 bp, Homo sapiens
cctaaataactatta

SEQ ID NO: 950918 - DNA, 15 bp, Homo sapiens
ctaaataactattat

SEQ ID NO: 950919 - DNA, 15 bp, Homo sapiens
taaataactattatg

SEQ ID NO: 950920 - DNA, 15 bp, Homo sapiens
aaataactattatgt

SEQ ID NO: 950921 - DNA, 15 bp, Homo sapiens
aataactattatgta

SEQ ID NO: 950922 - DNA, 15 bp, Homo sapiens
ataactattatgtaa

SEQ ID NO: 950923 - DNA, 15 bp, Homo sapiens
taactattatgtaag

SEQ ID NO: 950924 - DNA, 15 bp, Homo sapiens
aactattatgtaaga

SEQ ID NO: 950925 - DNA, 15 bp, Homo sapiens
actattatgtaagag

SEQ ID NO: 950926 - DNA, 15 bp, Homo sapiens
ctattatgtaagaga

SEQ ID NO: 950927 - DNA, 15 bp, Homo sapiens
tattatgtaagagat

SEQ ID NO: 950928 - DNA, 15 bp, Homo sapiens
attatgtaagagata

SEQ ID NO: 950929 - DNA, 15 bp, Homo sapiens
ttatgtaagagatag

SEQ ID NO: 950930 - DNA, 15 bp, Homo sapiens
tatgtaagagatagg

SEQ ID NO: 950931 - DNA, 15 bp, Homo sapiens
atgtaagagatagga

SEQ ID NO: 950932 - DNA, 15 bp, Homo sapiens
tgtaagagataggac

SEQ ID NO: 950933 - DNA, 15 bp, Homo sapiens
gtaagagataggaca

SEQ ID NO: 950934 - DNA, 15 bp, Homo sapiens
taagagataggacaa

SEQ ID NO: 950935 - DNA, 15 bp, Homo sapiens
aagagataggacaaa

SEQ ID NO: 950936 - DNA, 15 bp, Homo sapiens
agagataggacaaag

SEQ ID NO: 950937 - DNA, 15 bp, Homo sapiens
gagataggacaaaga

SEQ ID NO: 950938 - DNA, 15 bp, Homo sapiens
agataggacaaagat

SEQ ID NO: 950939 - DNA, 15 bp, Homo sapiens
gataggacaaagatt

SEQ ID NO: 950940 - DNA, 15 bp, Homo sapiens
ataggacaaagattc

SEQ ID NO: 950941 - DNA, 15 bp, Homo sapiens
taggacaaagattca

SEQ ID NO: 950942 - DNA, 15 bp, Homo sapiens
aggacaaagattcaa

SEQ ID NO: 950943 - DNA, 15 bp, Homo sapiens
ggacaaagattcaaa

SEQ ID NO: 950944 - DNA, 15 bp, Homo sapiens
gacaaagattcaaaa

SEQ ID NO: 950945 - DNA, 15 bp, Homo sapiens
acaaagattcaaaat

SEQ ID NO: 950946 - DNA, 15 bp, Homo sapiens
caaagattcaaaatt

SEQ ID NO: 950947 - DNA, 15 bp, Homo sapiens
aaagattcaaaattt

SEQ ID NO: 950948 - DNA, 15 bp, Homo sapiens
aagattcaaaatttg

SEQ ID NO: 950949 - DNA, 15 bp, Homo sapiens
agattcaaaatttgt

SEQ ID NO: 950950 - DNA, 15 bp, Homo sapiens
gattcaaaatttgta

SEQ ID NO: 950951 - DNA, 15 bp, Homo sapiens
attcaaaatttgtaa

SEQ ID NO: 950952 - DNA, 15 bp, Homo sapiens
ttcaaaatttgtaat

SEQ ID NO: 950953 - DNA, 15 bp, Homo sapiens
tcaaaatttgtaata

SEQ ID NO: 950954 - DNA, 15 bp, Homo sapiens
caaaatttgtaataa

SEQ ID NO: 950955 - DNA, 15 bp, Homo sapiens
aaaatttgtaataac

SEQ ID NO: 950956 - DNA, 15 bp, Homo sapiens
aaatttgtaataacc

SEQ ID NO: 950957 - DNA, 15 bp, Homo sapiens
aatttgtaataacca

SEQ ID NO: 950958 - DNA, 15 bp, Homo sapiens
atttgtaataaccac

SEQ ID NO: 950959 - DNA, 15 bp, Homo sapiens
tttgtaataaccact

SEQ ID NO: 950960 - DNA, 15 bp, Homo sapiens
ttgtaataaccactt

SEQ ID NO: 950961 - DNA, 15 bp, Homo sapiens
tgtaataaccacttc

SEQ ID NO: 950962 - DNA, 15 bp, Homo sapiens
gtaataaccacttct

SEQ ID NO: 950963 - DNA, 15 bp, Homo sapiens
taataaccacttctt

SEQ ID NO: 950964 - DNA, 15 bp, Homo sapiens
aataaccacttcttc

SEQ ID NO: 950965 - DNA, 15 bp, Homo sapiens
ataaccacttcttct

SEQ ID NO: 950966 - DNA, 15 bp, Homo sapiens
taaccacttcttctg

SEQ ID NO: 950967 - DNA, 15 bp, Homo sapiens
aaccacttcttctgc

SEQ ID NO: 950968 - DNA, 15 bp, Homo sapiens
accacttcttctgca

SEQ ID NO: 950969 - DNA, 15 bp, Homo sapiens
ccacttcttctgcaa

SEQ ID NO: 950970 - DNA, 15 bp, Homo sapiens
cacttcttctgcaag

SEQ ID NO: 950971 - DNA, 15 bp, Homo sapiens
acttcttctgcaaga

SEQ ID NO: 950972 - DNA, 15 bp, Homo sapiens
cttcttctgcaagag

SEQ ID NO: 950973 - DNA, 15 bp, Homo sapiens
ttcttctgcaagaga

SEQ ID NO: 950974 - DNA, 15 bp, Homo sapiens
tcttctgcaagagaa

SEQ ID NO: 950975 - DNA, 15 bp, Homo sapiens
cttctgcaagagaaa

SEQ ID NO: 950976 - DNA, 15 bp, Homo sapiens
ttctgcaagagaaat

SEQ ID NO: 950977 - DNA, 15 bp, Homo sapiens
tctgcaagagaaatt

SEQ ID NO: 950978 - DNA, 15 bp, Homo sapiens
ctgcaagagaaattg

SEQ ID NO: 950979 - DNA, 15 bp, Homo sapiens
tgcaagagaaattgg

SEQ ID NO: 950980 - DNA, 15 bp, Homo sapiens
gcaagagaaattggc

SEQ ID NO: 950981 - DNA, 15 bp, Homo sapiens
caagagaaattggca

SEQ ID NO: 950982 - DNA, 15 bp, Homo sapiens
aagagaaattggcaa

SEQ ID NO: 950983 - DNA, 15 bp, Homo sapiens
agagaaattggcaat

SEQ ID NO: 950984 - DNA, 15 bp, Homo sapiens
gagaaattggcaata

SEQ ID NO: 950985 - DNA, 15 bp, Homo sapiens
agaaattggcaatat

SEQ ID NO: 950986 - DNA, 15 bp, Homo sapiens
gaaattggcaatatg

SEQ ID NO: 950987 - DNA, 15 bp, Homo sapiens
aaattggcaatatgt

SEQ ID NO: 950988 - DNA, 15 bp, Homo sapiens
aattggcaatatgtg

SEQ ID NO: 950989 - DNA, 15 bp, Homo sapiens
attggcaatatgtgt

SEQ ID NO: 950990 - DNA, 15 bp, Homo sapiens
ttggcaatatgtgta

SEQ ID NO: 950991 - DNA, 15 bp, Homo sapiens
tggcaatatgtgtac

SEQ ID NO: 950992 - DNA, 15 bp, Homo sapiens
ggcaatatgtgtact

SEQ ID NO: 950993 - DNA, 15 bp, Homo sapiens
gcaatatgtgtactt

SEQ ID NO: 950994 - DNA, 15 bp, Homo sapiens
caatatgtgtactta

SEQ ID NO: 950995 - DNA, 15 bp, Homo sapiens
aatatgtgtacttac

SEQ ID NO: 950996 - DNA, 15 bp, Homo sapiens
atatgtgtacttact

SEQ ID NO: 950997 - DNA, 15 bp, Homo sapiens
tatgtgtacttacta

SEQ ID NO: 950998 - DNA, 15 bp, Homo sapiens
atgtgtacttactat

SEQ ID NO: 950999 - DNA, 15 bp, Homo sapiens
tgtgtacttactatt

SEQ ID NO: 951000 - DNA, 15 bp, Homo sapiens
gtgtacttactattt

SEQ ID NO: 951001 - DNA, 15 bp, Homo sapiens
tgtacttactatttt

SEQ ID NO: 951002 - DNA, 15 bp, Homo sapiens
gtacttactattttt

SEQ ID NO: 951003 - DNA, 15 bp, Homo sapiens
tacttactattttta

SEQ ID NO: 951004 - DNA, 15 bp, Homo sapiens
acttactatttttac

SEQ ID NO: 951005 - DNA, 15 bp, Homo sapiens
cttactatttttact

SEQ ID NO: 951006 - DNA, 15 bp, Homo sapiens
ttactatttttactc

SEQ ID NO: 951007 - DNA, 15 bp, Homo sapiens
tactatttttactct

SEQ ID NO: 951008 - DNA, 15 bp, Homo sapiens
actatttttactctt

SEQ ID NO: 951009 - DNA, 15 bp, Homo sapiens
ctatttttactctta

SEQ ID NO: 951010 - DNA, 15 bp, Homo sapiens
tatttttactcttaa

SEQ ID NO: 951011 - DNA, 15 bp, Homo sapiens
atttttactcttaaa

SEQ ID NO: 951012 - DNA, 15 bp, Homo sapiens
tttttactcttaaat

SEQ ID NO: 951013 - DNA, 15 bp, Homo sapiens
ttttactcttaaatt

SEQ ID NO: 951014 - DNA, 15 bp, Homo sapiens
tttactcttaaattc

SEQ ID NO: 951015 - DNA, 15 bp, Homo sapiens
ttactcttaaattct

SEQ ID NO: 951016 - DNA, 15 bp, Homo sapiens
tactcttaaattctt

SEQ ID NO: 951017 - DNA, 15 bp, Homo sapiens
actcttaaattctta

SEQ ID NO: 951018 - DNA, 15 bp, Homo sapiens
ctcttaaattcttat

SEQ ID NO: 951019 - DNA, 15 bp, Homo sapiens
tcttaaattcttatc

SEQ ID NO: 951020 - DNA, 15 bp, Homo sapiens
cttaaattcttatct

SEQ ID NO: 951021 - DNA, 15 bp, Homo sapiens
ttaaattcttatcta

SEQ ID NO: 951022 - DNA, 15 bp, Homo sapiens
taaattcttatctat

SEQ ID NO: 951023 - DNA, 15 bp, Homo sapiens
aaattcttatctatt

SEQ ID NO: 951024 - DNA, 15 bp, Homo sapiens
aattcttatctattt

SEQ ID NO: 951025 - DNA, 15 bp, Homo sapiens
attcttatctattta

SEQ ID NO: 951026 - DNA, 15 bp, Homo sapiens
ttcttatctatttat

SEQ ID NO: 951027 - DNA, 15 bp, Homo sapiens
tcttatctatttata

SEQ ID NO: 951028 - DNA, 15 bp, Homo sapiens
cttatctatttatat

SEQ ID NO: 951029 - DNA, 15 bp, Homo sapiens
ttatctatttatatt

SEQ ID NO: 951030 - DNA, 15 bp, Homo sapiens
tatctatttatattg

SEQ ID NO: 951031 - DNA, 15 bp, Homo sapiens
atctatttatattga

SEQ ID NO: 951032 - DNA, 15 bp, Homo sapiens
tctatttatattgaa

SEQ ID NO: 951033 - DNA, 15 bp, Homo sapiens
ctatttatattgaag

SEQ ID NO: 951034 - DNA, 15 bp, Homo sapiens
tatttatattgaagt

SEQ ID NO: 951035 - DNA, 15 bp, Homo sapiens
atttatattgaagtt

SEQ ID NO: 951036 - DNA, 15 bp, Homo sapiens
tttatattgaagttg

SEQ ID NO: 951037 - DNA, 15 bp, Homo sapiens
ttatattgaagttgc

SEQ ID NO: 951038 - DNA, 15 bp, Homo sapiens
tatattgaagttgcc

SEQ ID NO: 951039 - DNA, 15 bp, Homo sapiens
atattgaagttgcca

SEQ ID NO: 951040 - DNA, 15 bp, Homo sapiens
tattgaagttgccat

SEQ ID NO: 951041 - DNA, 15 bp, Homo sapiens
attgaagttgccata

SEQ ID NO: 951042 - DNA, 15 bp, Homo sapiens
ttgaagttgccatat

SEQ ID NO: 951043 - DNA, 15 bp, Homo sapiens
tgaagttgccatatt

SEQ ID NO: 951044 - DNA, 15 bp, Homo sapiens
gaagttgccatattt

SEQ ID NO: 951045 - DNA, 15 bp, Homo sapiens
aagttgccatatttt

SEQ ID NO: 951046 - DNA, 15 bp, Homo sapiens
agttgccatatttta

SEQ ID NO: 951047 - DNA, 15 bp, Homo sapiens
gttgccatattttaa

SEQ ID NO: 951048 - DNA, 15 bp, Homo sapiens
ttgccatattttaaa

SEQ ID NO: 951049 - DNA, 15 bp, Homo sapiens
tgccatattttaaaa

SEQ ID NO: 951050 - DNA, 15 bp, Homo sapiens
gccatattttaaaat

SEQ ID NO: 951051 - DNA, 15 bp, Homo sapiens
ccatattttaaaatg

SEQ ID NO: 951052 - DNA, 15 bp, Homo sapiens
catattttaaaatgt

SEQ ID NO: 951053 - DNA, 15 bp, Homo sapiens
atattttaaaatgtt

SEQ ID NO: 951054 - DNA, 15 bp, Homo sapiens
tattttaaaatgttg

SEQ ID NO: 951055 - DNA, 15 bp, Homo sapiens
attttaaaatgttga

SEQ ID NO: 951056 - DNA, 15 bp, Homo sapiens
ttttaaaatgttgaa

SEQ ID NO: 951057 - DNA, 15 bp, Homo sapiens
tttaaaatgttgaaa

SEQ ID NO: 951058 - DNA, 15 bp, Homo sapiens
ttaaaatgttgaaat

SEQ ID NO: 951059 - DNA, 15 bp, Homo sapiens
taaaatgttgaaata

SEQ ID NO: 951060 - DNA, 15 bp, Homo sapiens
aaaatgttgaaatat

SEQ ID NO: 951061 - DNA, 15 bp, Homo sapiens
aaatgttgaaatata

SEQ ID NO: 951062 - DNA, 15 bp, Homo sapiens
aatgttgaaatatat

SEQ ID NO: 951063 - DNA, 15 bp, Homo sapiens
atgttgaaatatatc

SEQ ID NO: 951064 - DNA, 15 bp, Homo sapiens
tgttgaaatatatca

SEQ ID NO: 951065 - DNA, 15 bp, Homo sapiens
gttgaaatatatcac

SEQ ID NO: 951066 - DNA, 15 bp, Homo sapiens
ttgaaatatatcaca

SEQ ID NO: 951067 - DNA, 15 bp, Homo sapiens
tgaaatatatcacat

SEQ ID NO: 951068 - DNA, 15 bp, Homo sapiens
gaaatatatcacatc

SEQ ID NO: 951069 - DNA, 15 bp, Homo sapiens
aaatatatcacatct

SEQ ID NO: 951070 - DNA, 15 bp, Homo sapiens
aatatatcacatctc

SEQ ID NO: 951071 - DNA, 15 bp, Homo sapiens
atatatcacatctct

SEQ ID NO: 951072 - DNA, 15 bp, Homo sapiens
tatatcacatctctt

SEQ ID NO: 951073 - DNA, 15 bp, Homo sapiens
atatcacatctcttt

SEQ ID NO: 951074 - DNA, 15 bp, Homo sapiens
tatcacatctctttt

SEQ ID NO: 951075 - DNA, 15 bp, Homo sapiens
atcacatctcttttg

SEQ ID NO: 951076 - DNA, 15 bp, Homo sapiens
tcacatctcttttgc

SEQ ID NO: 951077 - DNA, 15 bp, Homo sapiens
cacatctcttttgcc

SEQ ID NO: 951078 - DNA, 15 bp, Homo sapiens
acatctcttttgcct

SEQ ID NO: 951079 - DNA, 15 bp, Homo sapiens
catctcttttgcctt

SEQ ID NO: 951080 - DNA, 15 bp, Homo sapiens
atctcttttgcctta

SEQ ID NO: 951081 - DNA, 15 bp, Homo sapiens
tctcttttgccttac

SEQ ID NO: 951082 - DNA, 15 bp, Homo sapiens
ctcttttgccttact

SEQ ID NO: 951083 - DNA, 15 bp, Homo sapiens
tcttttgccttactc

SEQ ID NO: 951084 - DNA, 15 bp, Homo sapiens
cttttgccttactca

SEQ ID NO: 951085 - DNA, 15 bp, Homo sapiens
ttttgccttactcac

SEQ ID NO: 951086 - DNA, 15 bp, Homo sapiens
tttgccttactcaca

SEQ ID NO: 951087 - DNA, 15 bp, Homo sapiens
ttgccttactcacaa

SEQ ID NO: 951088 - DNA, 15 bp, Homo sapiens
tgccttactcacaag

SEQ ID NO: 951089 - DNA, 15 bp, Homo sapiens
gccttactcacaaga

SEQ ID NO: 951090 - DNA, 15 bp, Homo sapiens
ccttactcacaagac

SEQ ID NO: 951091 - DNA, 15 bp, Homo sapiens
cttactcacaagaca

SEQ ID NO: 951092 - DNA, 15 bp, Homo sapiens
ttactcacaagacag

SEQ ID NO: 951093 - DNA, 15 bp, Homo sapiens
tactcacaagacaga

SEQ ID NO: 951094 - DNA, 15 bp, Homo sapiens
actcacaagacagaa

SEQ ID NO: 951095 - DNA, 15 bp, Homo sapiens
ctcacaagacagaaa

SEQ ID NO: 951096 - DNA, 15 bp, Homo sapiens
tcacaagacagaaaa

SEQ ID NO: 951097 - DNA, 15 bp, Homo sapiens
cacaagacagaaaaa

SEQ ID NO: 951098 - DNA, 15 bp, Homo sapiens
acaagacagaaaaaa

SEQ ID NO: 951099 - DNA, 15 bp, Homo sapiens
caagacagaaaaaag

SEQ ID NO: 951100 - DNA, 15 bp, Homo sapiens
aagacagaaaaaaga

SEQ ID NO: 951101 - DNA, 15 bp, Homo sapiens
agacagaaaaaagag

SEQ ID NO: 951102 - DNA, 15 bp, Homo sapiens
gacagaaaaaagaga

SEQ ID NO: 951103 - DNA, 15 bp, Homo sapiens
acagaaaaaagagaa

SEQ ID NO: 951104 - DNA, 15 bp, Homo sapiens
cagaaaaaagagaaa

SEQ ID NO: 951105 - DNA, 15 bp, Homo sapiens
agaaaaaagagaaat

SEQ ID NO: 951106 - DNA, 15 bp, Homo sapiens
gaaaaaagagaaata

SEQ ID NO: 951107 - DNA, 15 bp, Homo sapiens
aaaaaagagaaataa

SEQ ID NO: 951108 - DNA, 15 bp, Homo sapiens
aaaaagagaaataaa

SEQ ID NO: 951109 - DNA, 15 bp, Homo sapiens
aaaagagaaataaag

SEQ ID NO: 951110 - DNA, 15 bp, Homo sapiens
aaagagaaataaagt

SEQ ID NO: 951111 - DNA, 15 bp, Homo sapiens
aagagaaataaagtc

SEQ ID NO: 951112 - DNA, 15 bp, Homo sapiens
agagaaataaagtca

SEQ ID NO: 951113 - DNA, 15 bp, Homo sapiens
gagaaataaagtcaa

SEQ ID NO: 951114 - DNA, 15 bp, Homo sapiens
agaaataaagtcaat

SEQ ID NO: 951115 - DNA, 15 bp, Homo sapiens
gaaataaagtcaatt

SEQ ID NO: 951116 - DNA, 15 bp, Homo sapiens
aaataaagtcaatta

SEQ ID NO: 951117 - DNA, 15 bp, Homo sapiens
aataaagtcaattag

SEQ ID NO: 951118 - DNA, 15 bp, Homo sapiens
ataaagtcaattagc

SEQ ID NO: 951119 - DNA, 15 bp, Homo sapiens
taaagtcaattagca

SEQ ID NO: 951120 - DNA, 15 bp, Homo sapiens
aaagtcaattagcaa

SEQ ID NO: 951121 - DNA, 15 bp, Homo sapiens
aagtcaattagcaag

SEQ ID NO: 951122 - DNA, 15 bp, Homo sapiens
agtcaattagcaaga

SEQ ID NO: 951123 - DNA, 15 bp, Homo sapiens
gtcaattagcaagaa

SEQ ID NO: 951124 - DNA, 15 bp, Homo sapiens
tcaattagcaagaaa

SEQ ID NO: 951125 - DNA, 15 bp, Homo sapiens
caattagcaagaaac

SEQ ID NO: 951126 - DNA, 15 bp, Homo sapiens
aattagcaagaaaca

SEQ ID NO: 951127 - DNA, 15 bp, Homo sapiens
attagcaagaaacag

SEQ ID NO: 951128 - DNA, 15 bp, Homo sapiens
ttagcaagaaacagg

SEQ ID NO: 951129 - DNA, 15 bp, Homo sapiens
tagcaagaaacaggc

SEQ ID NO: 951130 - DNA, 15 bp, Homo sapiens
agcaagaaacaggca

SEQ ID NO: 951131 - DNA, 15 bp, Homo sapiens
gcaagaaacaggcat

SEQ ID NO: 951132 - DNA, 15 bp, Homo sapiens
caagaaacaggcatg

SEQ ID NO: 951133 - DNA, 15 bp, Homo sapiens
aagaaacaggcatgt

SEQ ID NO: 951134 - DNA, 15 bp, Homo sapiens
agaaacaggcatgta

SEQ ID NO: 951135 - DNA, 15 bp, Homo sapiens
gaaacaggcatgtat

SEQ ID NO: 951136 - DNA, 15 bp, Homo sapiens
aaacaggcatgtatt

SEQ ID NO: 951137 - DNA, 15 bp, Homo sapiens
aacaggcatgtatta

SEQ ID NO: 951138 - DNA, 15 bp, Homo sapiens
acaggcatgtattac

SEQ ID NO: 951139 - DNA, 15 bp, Homo sapiens
caggcatgtattaca

SEQ ID NO: 951140 - DNA, 15 bp, Homo sapiens
aggcatgtattacac

SEQ ID NO: 951141 - DNA, 15 bp, Homo sapiens
ggcatgtattacacc

SEQ ID NO: 951142 - DNA, 15 bp, Homo sapiens
gcatgtattacacct

SEQ ID NO: 951143 - DNA, 15 bp, Homo sapiens
catgtattacaccta

SEQ ID NO: 951144 - DNA, 15 bp, Homo sapiens
atgtattacacctat

SEQ ID NO: 951145 - DNA, 15 bp, Homo sapiens
tgtattacacctatt

SEQ ID NO: 951146 - DNA, 15 bp, Homo sapiens
gtattacacctattg

SEQ ID NO: 951147 - DNA, 15 bp, Homo sapiens
tattacacctattgc

SEQ ID NO: 951148 - DNA, 15 bp, Homo sapiens
attacacctattgct

SEQ ID NO: 951149 - DNA, 15 bp, Homo sapiens
ttacacctattgctc

SEQ ID NO: 951150 - DNA, 15 bp, Homo sapiens
tacacctattgctct

SEQ ID NO: 951151 - DNA, 15 bp, Homo sapiens
acacctattgctctc

SEQ ID NO: 951152 - DNA, 15 bp, Homo sapiens
cacctattgctctcc

SEQ ID NO: 951153 - DNA, 15 bp, Homo sapiens
acctattgctctccc

SEQ ID NO: 951154 - DNA, 15 bp, Homo sapiens
cctattgctctccct

SEQ ID NO: 951155 - DNA, 15 bp, Homo sapiens
ctattgctctcccta

SEQ ID NO: 951156 - DNA, 15 bp, Homo sapiens
tattgctctccctat

SEQ ID NO: 951157 - DNA, 15 bp, Homo sapiens
attgctctccctata

SEQ ID NO: 951158 - DNA, 15 bp, Homo sapiens
ttgctctccctatac

SEQ ID NO: 951159 - DNA, 15 bp, Homo sapiens
tgctctccctataca

SEQ ID NO: 951160 - DNA, 15 bp, Homo sapiens
gctctccctatacat

SEQ ID NO: 951161 - DNA, 15 bp, Homo sapiens
ctctccctatacatt

SEQ ID NO: 951162 - DNA, 15 bp, Homo sapiens
tctccctatacattt

SEQ ID NO: 951163 - DNA, 15 bp, Homo sapiens
ctccctatacatttg

SEQ ID NO: 951164 - DNA, 15 bp, Homo sapiens
tccctatacatttgg

SEQ ID NO: 951165 - DNA, 15 bp, Homo sapiens
ccctatacatttggt

SEQ ID NO: 951166 - DNA, 15 bp, Homo sapiens
cctatacatttggtt

SEQ ID NO: 951167 - DNA, 15 bp, Homo sapiens
ctatacatttggttt

SEQ ID NO: 951168 - DNA, 15 bp, Homo sapiens
tatacatttggtttt

SEQ ID NO: 951169 - DNA, 15 bp, Homo sapiens
atacatttggttttc

SEQ ID NO: 951170 - DNA, 15 bp, Homo sapiens
tacatttggttttca

SEQ ID NO: 951171 - DNA, 15 bp, Homo sapiens
acatttggttttcac

SEQ ID NO: 951172 - DNA, 15 bp, Homo sapiens
catttggttttcaca

SEQ ID NO: 951173 - DNA, 15 bp, Homo sapiens
atttggttttcacat

SEQ ID NO: 951174 - DNA, 15 bp, Homo sapiens
tttggttttcacata

SEQ ID NO: 951175 - DNA, 15 bp, Homo sapiens
ttggttttcacataa

SEQ ID NO: 951176 - DNA, 15 bp, Homo sapiens
tggttttcacataaa

SEQ ID NO: 951177 - DNA, 15 bp, Homo sapiens
ggttttcacataaat

SEQ ID NO: 951178 - DNA, 15 bp, Homo sapiens
gttttcacataaata

SEQ ID NO: 951179 - DNA, 15 bp, Homo sapiens
ttttcacataaatat

SEQ ID NO: 951180 - DNA, 15 bp, Homo sapiens
tttcacataaatata

SEQ ID NO: 951181 - DNA, 15 bp, Homo sapiens
ttcacataaatatat

SEQ ID NO: 951182 - DNA, 15 bp, Homo sapiens
tcacataaatatata

SEQ ID NO: 951183 - DNA, 15 bp, Homo sapiens
cacataaatatatat

SEQ ID NO: 951184 - DNA, 15 bp, Homo sapiens
acataaatatatatt

SEQ ID NO: 951185 - DNA, 15 bp, Homo sapiens
cataaatatatatta

SEQ ID NO: 951186 - DNA, 15 bp, Homo sapiens
ataaatatatattat

SEQ ID NO: 951187 - DNA, 15 bp, Homo sapiens
taaatatatattatt

SEQ ID NO: 951188 - DNA, 15 bp, Homo sapiens
aaatatatattattt

SEQ ID NO: 951189 - DNA, 15 bp, Homo sapiens
aatatatattatttt

SEQ ID NO: 951190 - DNA, 15 bp, Homo sapiens
atatatattattttt

SEQ ID NO: 951191 - DNA, 15 bp, Homo sapiens
tatatattattttta

SEQ ID NO: 951192 - DNA, 15 bp, Homo sapiens
atatattatttttaa

SEQ ID NO: 951193 - DNA, 15 bp, Homo sapiens
tatattatttttaag

SEQ ID NO: 951194 - DNA, 15 bp, Homo sapiens
atattatttttaaga

SEQ ID NO: 951195 - DNA, 15 bp, Homo sapiens
tattatttttaagaa

SEQ ID NO: 951196 - DNA, 15 bp, Homo sapiens
attatttttaagaag

SEQ ID NO: 951197 - DNA, 15 bp, Homo sapiens
ttatttttaagaagt

SEQ ID NO: 951198 - DNA, 15 bp, Homo sapiens
tatttttaagaagtt

SEQ ID NO: 951199 - DNA, 15 bp, Homo sapiens
atttttaagaagtta

SEQ ID NO: 951200 - DNA, 15 bp, Homo sapiens
tttttaagaagttaa

SEQ ID NO: 951201 - DNA, 15 bp, Homo sapiens
ttttaagaagttaag

SEQ ID NO: 951202 - DNA, 15 bp, Homo sapiens
tttaagaagttaagc

SEQ ID NO: 951203 - DNA, 15 bp, Homo sapiens
ttaagaagttaagcc

SEQ ID NO: 951204 - DNA, 15 bp, Homo sapiens
taagaagttaagcca

SEQ ID NO: 951205 - DNA, 15 bp, Homo sapiens
aagaagttaagccaa

SEQ ID NO: 951206 - DNA, 15 bp, Homo sapiens
agaagttaagccaaa

SEQ ID NO: 951207 - DNA, 15 bp, Homo sapiens
gaagttaagccaaaa

SEQ ID NO: 951208 - DNA, 15 bp, Homo sapiens
aagttaagccaaaac

SEQ ID NO: 951209 - DNA, 15 bp, Homo sapiens
agttaagccaaaact

SEQ ID NO: 951210 - DNA, 15 bp, Homo sapiens
gttaagccaaaacta

SEQ ID NO: 951211 - DNA, 15 bp, Homo sapiens
ttaagccaaaactac

SEQ ID NO: 951212 - DNA, 15 bp, Homo sapiens
taagccaaaactacc

SEQ ID NO: 951213 - DNA, 15 bp, Homo sapiens
aagccaaaactacct

SEQ ID NO: 951214 - DNA, 15 bp, Homo sapiens
agccaaaactaccta

SEQ ID NO: 951215 - DNA, 15 bp, Homo sapiens
gccaaaactacctat

SEQ ID NO: 951216 - DNA, 15 bp, Homo sapiens
ccaaaactacctatt

SEQ ID NO: 951217 - DNA, 15 bp, Homo sapiens
caaaactacctattg

SEQ ID NO: 951218 - DNA, 15 bp, Homo sapiens
aaaactacctattgg

SEQ ID NO: 951219 - DNA, 15 bp, Homo sapiens
aaactacctattggg

SEQ ID NO: 951220 - DNA, 15 bp, Homo sapiens
aactacctattgggt

SEQ ID NO: 951221 - DNA, 15 bp, Homo sapiens
actacctattgggta

SEQ ID NO: 951222 - DNA, 15 bp, Homo sapiens
ctacctattgggtac

SEQ ID NO: 951223 - DNA, 15 bp, Homo sapiens
tacctattgggtact

SEQ ID NO: 951224 - DNA, 15 bp, Homo sapiens
acctattgggtacta

SEQ ID NO: 951225 - DNA, 15 bp, Homo sapiens
cctattgggtactat

SEQ ID NO: 951226 - DNA, 15 bp, Homo sapiens
ctattgggtactata

SEQ ID NO: 951227 - DNA, 15 bp, Homo sapiens
tattgggtactatac

SEQ ID NO: 951228 - DNA, 15 bp, Homo sapiens
attgggtactatact

SEQ ID NO: 951229 - DNA, 15 bp, Homo sapiens
ttgggtactatactc

SEQ ID NO: 951230 - DNA, 15 bp, Homo sapiens
tgggtactatactcg

SEQ ID NO: 951231 - DNA, 15 bp, Homo sapiens
gggtactatactcgc

SEQ ID NO: 951232 - DNA, 15 bp, Homo sapiens
ggtactatactcgct

SEQ ID NO: 951233 - DNA, 15 bp, Homo sapiens
gtactatactcgctg

SEQ ID NO: 951234 - DNA, 15 bp, Homo sapiens
tactatactcgctgt

SEQ ID NO: 951235 - DNA, 15 bp, Homo sapiens
actatactcgctgtc

SEQ ID NO: 951236 - DNA, 15 bp, Homo sapiens
ctatactcgctgtct

SEQ ID NO: 951237 - DNA, 15 bp, Homo sapiens
tatactcgctgtctg

SEQ ID NO: 951238 - DNA, 15 bp, Homo sapiens
atactcgctgtctgg

SEQ ID NO: 951239 - DNA, 15 bp, Homo sapiens
tactcgctgtctggg

SEQ ID NO: 951240 - DNA, 15 bp, Homo sapiens
actcgctgtctgggt

SEQ ID NO: 951241 - DNA, 15 bp, Homo sapiens
ctcgctgtctgggtg

SEQ ID NO: 951242 - DNA, 15 bp, Homo sapiens
tcgctgtctgggtga

SEQ ID NO: 951243 - DNA, 15 bp, Homo sapiens
cgctgtctgggtgac

SEQ ID NO: 951244 - DNA, 15 bp, Homo sapiens
gctgtctgggtgaca

SEQ ID NO: 951245 - DNA, 15 bp, Homo sapiens
ctgtctgggtgacag

SEQ ID NO: 951246 - DNA, 15 bp, Homo sapiens
tgtctgggtgacaga

SEQ ID NO: 951247 - DNA, 15 bp, Homo sapiens
gtctgggtgacagat

SEQ ID NO: 951248 - DNA, 15 bp, Homo sapiens
tctgggtgacagatt

SEQ ID NO: 951249 - DNA, 15 bp, Homo sapiens
ctgggtgacagattg

SEQ ID NO: 951250 - DNA, 15 bp, Homo sapiens
tgggtgacagattgg

SEQ ID NO: 951251 - DNA, 15 bp, Homo sapiens
gggtgacagattggt

SEQ ID NO: 951252 - DNA, 15 bp, Homo sapiens
ggtgacagattggta

SEQ ID NO: 951253 - DNA, 15 bp, Homo sapiens
gtgacagattggtac

SEQ ID NO: 951254 - DNA, 15 bp, Homo sapiens
tgacagattggtacc

SEQ ID NO: 951255 - DNA, 15 bp, Homo sapiens
gacagattggtaccc

SEQ ID NO: 951256 - DNA, 15 bp, Homo sapiens
acagattggtacccc

SEQ ID NO: 951257 - DNA, 15 bp, Homo sapiens
cagattggtacccca

SEQ ID NO: 951258 - DNA, 15 bp, Homo sapiens
agattggtaccccaa

SEQ ID NO: 951259 - DNA, 15 bp, Homo sapiens
gattggtaccccaaa

SEQ ID NO: 951260 - DNA, 15 bp, Homo sapiens
attggtaccccaaac

SEQ ID NO: 951261 - DNA, 15 bp, Homo sapiens
ttggtaccccaaaca

SEQ ID NO: 951262 - DNA, 15 bp, Homo sapiens
tggtaccccaaacat

SEQ ID NO: 951263 - DNA, 15 bp, Homo sapiens
ggtaccccaaacatc

SEQ ID NO: 951264 - DNA, 15 bp, Homo sapiens
gtaccccaaacatca

SEQ ID NO: 951265 - DNA, 15 bp, Homo sapiens
taccccaaacatcag

SEQ ID NO: 951266 - DNA, 15 bp, Homo sapiens
accccaaacatcagc

SEQ ID NO: 951267 - DNA, 15 bp, Homo sapiens
ccccaaacatcagca

SEQ ID NO: 951268 - DNA, 15 bp, Homo sapiens
cccaaacatcagcat

SEQ ID NO: 951269 - DNA, 15 bp, Homo sapiens
ccaaacatcagcata

SEQ ID NO: 951270 - DNA, 15 bp, Homo sapiens
caaacatcagcataa

SEQ ID NO: 951271 - DNA, 15 bp, Homo sapiens
aaacatcagcataac

SEQ ID NO: 951272 - DNA, 15 bp, Homo sapiens
aacatcagcataacg

SEQ ID NO: 951273 - DNA, 15 bp, Homo sapiens
acatcagcataacgc

SEQ ID NO: 951274 - DNA, 15 bp, Homo sapiens
catcagcataacgca

SEQ ID NO: 951275 - DNA, 15 bp, Homo sapiens
atcagcataacgcaa

SEQ ID NO: 951276 - DNA, 15 bp, Homo sapiens
tcagcataacgcaat

SEQ ID NO: 951277 - DNA, 15 bp, Homo sapiens
cagcataacgcaata

SEQ ID NO: 951278 - DNA, 15 bp, Homo sapiens
agcataacgcaatat

SEQ ID NO: 951279 - DNA, 15 bp, Homo sapiens
gcataacgcaatata

SEQ ID NO: 951280 - DNA, 15 bp, Homo sapiens
cataacgcaatatac

SEQ ID NO: 951281 - DNA, 15 bp, Homo sapiens
ataacgcaatatacc

SEQ ID NO: 951282 - DNA, 15 bp, Homo sapiens
taacgcaatataccc

SEQ ID NO: 951283 - DNA, 15 bp, Homo sapiens
aacgcaatataccca

SEQ ID NO: 951284 - DNA, 15 bp, Homo sapiens
acgcaatatacccac

SEQ ID NO: 951285 - DNA, 15 bp, Homo sapiens
cgcaatatacccacg

SEQ ID NO: 951286 - DNA, 15 bp, Homo sapiens
gcaatatacccacgt

SEQ ID NO: 951287 - DNA, 15 bp, Homo sapiens
caatatacccacgtg

SEQ ID NO: 951288 - DNA, 15 bp, Homo sapiens
aatatacccacgtga

SEQ ID NO: 951289 - DNA, 15 bp, Homo sapiens
atatacccacgtgac

SEQ ID NO: 951290 - DNA, 15 bp, Homo sapiens
tatacccacgtgaca

SEQ ID NO: 951291 - DNA, 15 bp, Homo sapiens
atacccacgtgacaa

SEQ ID NO: 951292 - DNA, 15 bp, Homo sapiens
tacccacgtgacaaa

SEQ ID NO: 951293 - DNA, 15 bp, Homo sapiens
acccacgtgacaaat

SEQ ID NO: 951294 - DNA, 15 bp, Homo sapiens
cccacgtgacaaatc

SEQ ID NO: 951295 - DNA, 15 bp, Homo sapiens
ccacgtgacaaatct

SEQ ID NO: 951296 - DNA, 15 bp, Homo sapiens
cacgtgacaaatctg

SEQ ID NO: 951297 - DNA, 15 bp, Homo sapiens
acgtgacaaatctgc

SEQ ID NO: 951298 - DNA, 15 bp, Homo sapiens
cgtgacaaatctgca

SEQ ID NO: 951299 - DNA, 15 bp, Homo sapiens
gtgacaaatctgcat

SEQ ID NO: 951300 - DNA, 15 bp, Homo sapiens
tgacaaatctgcata

SEQ ID NO: 951301 - DNA, 15 bp, Homo sapiens
gacaaatctgcatat

SEQ ID NO: 951302 - DNA, 15 bp, Homo sapiens
acaaatctgcatatg

SEQ ID NO: 951303 - DNA, 15 bp, Homo sapiens
caaatctgcatatgt

SEQ ID NO: 951304 - DNA, 15 bp, Homo sapiens
aaatctgcatatgta

SEQ ID NO: 951305 - DNA, 15 bp, Homo sapiens
aatctgcatatgtag

SEQ ID NO: 951306 - DNA, 15 bp, Homo sapiens
atctgcatatgtagc

SEQ ID NO: 951307 - DNA, 15 bp, Homo sapiens
tctgcatatgtagcc

SEQ ID NO: 951308 - DNA, 15 bp, Homo sapiens
ctgcatatgtagccc

SEQ ID NO: 951309 - DNA, 15 bp, Homo sapiens
tgcatatgtagccct

SEQ ID NO: 951310 - DNA, 15 bp, Homo sapiens
gcatatgtagccctg

SEQ ID NO: 951311 - DNA, 15 bp, Homo sapiens
catatgtagccctgt

SEQ ID NO: 951312 - DNA, 15 bp, Homo sapiens
atatgtagccctgta

SEQ ID NO: 951313 - DNA, 15 bp, Homo sapiens
tatgtagccctgtat

SEQ ID NO: 951314 - DNA, 15 bp, Homo sapiens
atgtagccctgtatc

SEQ ID NO: 951315 - DNA, 15 bp, Homo sapiens
tgtagccctgtatct

SEQ ID NO: 951316 - DNA, 15 bp, Homo sapiens
gtagccctgtatcta

SEQ ID NO: 951317 - DNA, 15 bp, Homo sapiens
tagccctgtatctaa

SEQ ID NO: 951318 - DNA, 15 bp, Homo sapiens
agccctgtatctaaa

SEQ ID NO: 951319 - DNA, 15 bp, Homo sapiens
gccctgtatctaaaa

SEQ ID NO: 951320 - DNA, 15 bp, Homo sapiens
ccctgtatctaaaat

SEQ ID NO: 951321 - DNA, 15 bp, Homo sapiens
cctgtatctaaaata

SEQ ID NO: 951322 - DNA, 15 bp, Homo sapiens
ctgtatctaaaataa

SEQ ID NO: 951323 - DNA, 15 bp, Homo sapiens
tgtatctaaaataaa

SEQ ID NO: 951324 - DNA, 15 bp, Homo sapiens
gtatctaaaataaaa

SEQ ID NO: 951325 - DNA, 15 bp, Homo sapiens
tatctaaaataaaag

SEQ ID NO: 951326 - DNA, 15 bp, Homo sapiens
atctaaaataaaagt

SEQ ID NO: 951327 - DNA, 15 bp, Homo sapiens
tctaaaataaaagtt

SEQ ID NO: 951328 - DNA, 15 bp, Homo sapiens
ctaaaataaaagtta

SEQ ID NO: 951329 - DNA, 15 bp, Homo sapiens
taaaataaaagttaa

SEQ ID NO: 951330 - DNA, 15 bp, Homo sapiens
aaaataaaagttaaa

SEQ ID NO: 951331 - DNA, 15 bp, Homo sapiens
aaataaaagttaaaa

SEQ ID NO: 951332 - DNA, 15 bp, Homo sapiens
aataaaagttaaaaa

SEQ ID NO: 951333 - DNA, 15 bp, Homo sapiens
ataaaagttaaaaaa

SEQ ID NO: 951334 - DNA, 15 bp, Homo sapiens
taaaagttaaaaaaa

SEQ ID NO: 951335 - DNA, 15 bp, Homo sapiens
aaaagttaaaaaaaa

SEQ ID NO: 951336 - DNA, 15 bp, Homo sapiens
aaagttaaaaaaaaa

SEQ ID NO: 951337 - DNA, 15 bp, Homo sapiens
aagttaaaaaaaaaa

SEQ ID NO: 951338 - DNA, 15 bp, Homo sapiens
agttaaaaaaaaaaa

SEQ ID NO: 951339 - DNA, 15 bp, Homo sapiens
gttaaaaaaaaaaaa

SEQ ID NO: 951340 - DNA, 15 bp, Homo sapiens
ttaaaaaaaaaaaag

SEQ ID NO: 951341 - DNA, 15 bp, Homo sapiens
taaaaaaaaaaaagc

SEQ ID NO: 951342 - DNA, 15 bp, Homo sapiens
aaaaaaaaaaaagca

SEQ ID NO: 951343 - DNA, 15 bp, Homo sapiens
aaaaaaaaaaagcag

SEQ ID NO: 951344 - DNA, 15 bp, Homo sapiens
aaaaaaaaaagcagc

SEQ ID NO: 951345 - DNA, 15 bp, Homo sapiens
aaaaaaaaagcagca

SEQ ID NO: 951346 - DNA, 15 bp, Homo sapiens
aaaaaaaagcagcag

SEQ ID NO: 951347 - DNA, 15 bp, Homo sapiens
aaaaaaagcagcagc

SEQ ID NO: 951348 - DNA, 15 bp, Homo sapiens
aaaaaagcagcagcc

SEQ ID NO: 951349 - DNA, 15 bp, Homo sapiens
aaaaagcagcagcca

SEQ ID NO: 951350 - DNA, 15 bp, Homo sapiens
aaaagcagcagccaa

SEQ ID NO: 951351 - DNA, 15 bp, Homo sapiens
aaagcagcagccaag

SEQ ID NO: 951352 - DNA, 15 bp, Homo sapiens
aagcagcagccaagg

SEQ ID NO: 951353 - DNA, 15 bp, Homo sapiens
agcagcagccaaggt

SEQ ID NO: 951354 - DNA, 15 bp, Homo sapiens
gcagcagccaaggta

SEQ ID NO: 951355 - DNA, 15 bp, Homo sapiens
cagcagccaaggtac

SEQ ID NO: 951356 - DNA, 15 bp, Homo sapiens
agcagccaaggtaca

SEQ ID NO: 951357 - DNA, 15 bp, Homo sapiens
gcagccaaggtacac

SEQ ID NO: 951358 - DNA, 15 bp, Homo sapiens
cagccaaggtacaca

SEQ ID NO: 951359 - DNA, 15 bp, Homo sapiens
agccaaggtacacag

SEQ ID NO: 951360 - DNA, 15 bp, Homo sapiens
gccaaggtacacagg

SEQ ID NO: 951361 - DNA, 15 bp, Homo sapiens
ccaaggtacacaggc

SEQ ID NO: 951362 - DNA, 15 bp, Homo sapiens
caaggtacacaggca

SEQ ID NO: 951363 - DNA, 15 bp, Homo sapiens
aaggtacacaggcaa

SEQ ID NO: 951364 - DNA, 15 bp, Homo sapiens
aggtacacaggcaaa

SEQ ID NO: 951365 - DNA, 15 bp, Homo sapiens
ggtacacaggcaaag

SEQ ID NO: 951366 - DNA, 15 bp, Homo sapiens
gtacacaggcaaaga

SEQ ID NO: 951367 - DNA, 15 bp, Homo sapiens
tacacaggcaaagaa

SEQ ID NO: 951368 - DNA, 15 bp, Homo sapiens
acacaggcaaagaaa

SEQ ID NO: 951369 - DNA, 15 bp, Homo sapiens
cacaggcaaagaaat

SEQ ID NO: 951370 - DNA, 15 bp, Homo sapiens
acaggcaaagaaata

SEQ ID NO: 951371 - DNA, 15 bp, Homo sapiens
caggcaaagaaataa

SEQ ID NO: 951372 - DNA, 15 bp, Homo sapiens
aggcaaagaaataac

SEQ ID NO: 951373 - DNA, 15 bp, Homo sapiens
ggcaaagaaataacc

SEQ ID NO: 951374 - DNA, 15 bp, Homo sapiens
gcaaagaaataacca

SEQ ID NO: 951375 - DNA, 15 bp, Homo sapiens
caaagaaataaccaa

SEQ ID NO: 951376 - DNA, 15 bp, Homo sapiens
aaagaaataaccaag

SEQ ID NO: 951377 - DNA, 15 bp, Homo sapiens
aagaaataaccaagt

SEQ ID NO: 951378 - DNA, 15 bp, Homo sapiens
agaaataaccaagta

SEQ ID NO: 951379 - DNA, 15 bp, Homo sapiens
gaaataaccaagtac

SEQ ID NO: 951380 - DNA, 15 bp, Homo sapiens
aaataaccaagtact

SEQ ID NO: 951381 - DNA, 15 bp, Homo sapiens
aataaccaagtactg

SEQ ID NO: 951382 - DNA, 15 bp, Homo sapiens
ataaccaagtactgc

SEQ ID NO: 951383 - DNA, 15 bp, Homo sapiens
taaccaagtactgct

SEQ ID NO: 951384 - DNA, 15 bp, Homo sapiens
aaccaagtactgctt

SEQ ID NO: 951385 - DNA, 15 bp, Homo sapiens
accaagtactgcttt

SEQ ID NO: 951386 - DNA, 15 bp, Homo sapiens
ccaagtactgcttta

SEQ ID NO: 951387 - DNA, 15 bp, Homo sapiens
caagtactgctttaa

SEQ ID NO: 951388 - DNA, 15 bp, Homo sapiens
aagtactgctttaaa

SEQ ID NO: 951389 - DNA, 15 bp, Homo sapiens
agtactgctttaaag

SEQ ID NO: 951390 - DNA, 15 bp, Homo sapiens
gtactgctttaaagt

SEQ ID NO: 951391 - DNA, 15 bp, Homo sapiens
tactgctttaaagta

SEQ ID NO: 951392 - DNA, 15 bp, Homo sapiens
actgctttaaagtac

SEQ ID NO: 951393 - DNA, 15 bp, Homo sapiens
ctgctttaaagtact

SEQ ID NO: 951394 - DNA, 15 bp, Homo sapiens
tgctttaaagtactc

SEQ ID NO: 951395 - DNA, 15 bp, Homo sapiens
gctttaaagtactca

SEQ ID NO: 951396 - DNA, 15 bp, Homo sapiens
ctttaaagtactcat

SEQ ID NO: 951397 - DNA, 15 bp, Homo sapiens
tttaaagtactcatc

SEQ ID NO: 951398 - DNA, 15 bp, Homo sapiens
ttaaagtactcatcc

SEQ ID NO: 951399 - DNA, 15 bp, Homo sapiens
taaagtactcatcct

SEQ ID NO: 951400 - DNA, 15 bp, Homo sapiens
aaagtactcatcctc

SEQ ID NO: 951401 - DNA, 15 bp, Homo sapiens
aagtactcatcctca

SEQ ID NO: 951402 - DNA, 15 bp, Homo sapiens
agtactcatcctcag

SEQ ID NO: 951403 - DNA, 15 bp, Homo sapiens
gtactcatcctcagc

SEQ ID NO: 951404 - DNA, 15 bp, Homo sapiens
tactcatcctcagct

SEQ ID NO: 951405 - DNA, 15 bp, Homo sapiens
actcatcctcagctt

SEQ ID NO: 951406 - DNA, 15 bp, Homo sapiens
ctcatcctcagcttc

SEQ ID NO: 951407 - DNA, 15 bp, Homo sapiens
tcatcctcagcttcc

SEQ ID NO: 951408 - DNA, 15 bp, Homo sapiens
catcctcagcttcct

SEQ ID NO: 951409 - DNA, 15 bp, Homo sapiens
atcctcagcttcctg

SEQ ID NO: 951410 - DNA, 15 bp, Homo sapiens
tcctcagcttcctgt

SEQ ID NO: 951411 - DNA, 15 bp, Homo sapiens
cctcagcttcctgtt

SEQ ID NO: 951412 - DNA, 15 bp, Homo sapiens
ctcagcttcctgttc

SEQ ID NO: 951413 - DNA, 15 bp, Homo sapiens
tcagcttcctgttca

SEQ ID NO: 951414 - DNA, 15 bp, Homo sapiens
cagcttcctgttcaa

SEQ ID NO: 951415 - DNA, 15 bp, Homo sapiens
agcttcctgttcaat

SEQ ID NO: 951416 - DNA, 15 bp, Homo sapiens
gcttcctgttcaatt

SEQ ID NO: 951417 - DNA, 15 bp, Homo sapiens
cttcctgttcaattt

SEQ ID NO: 951418 - DNA, 15 bp, Homo sapiens
ttcctgttcaattta

SEQ ID NO: 951419 - DNA, 15 bp, Homo sapiens
tcctgttcaatttat

SEQ ID NO: 951420 - DNA, 15 bp, Homo sapiens
cctgttcaatttatt

SEQ ID NO: 951421 - DNA, 15 bp, Homo sapiens
ctgttcaatttatta

SEQ ID NO: 951422 - DNA, 15 bp, Homo sapiens
tgttcaatttattac

SEQ ID NO: 951423 - DNA, 15 bp, Homo sapiens
gttcaatttattaca

SEQ ID NO: 951424 - DNA, 15 bp, Homo sapiens
ttcaatttattacaa

SEQ ID NO: 951425 - DNA, 15 bp, Homo sapiens
tcaatttattacaaa

SEQ ID NO: 951426 - DNA, 15 bp, Homo sapiens
caatttattacaaac

SEQ ID NO: 951427 - DNA, 15 bp, Homo sapiens
aatttattacaaaca

SEQ ID NO: 951428 - DNA, 15 bp, Homo sapiens
atttattacaaacat

SEQ ID NO: 951429 - DNA, 15 bp, Homo sapiens
tttattacaaacatg

SEQ ID NO: 951430 - DNA, 15 bp, Homo sapiens
ttattacaaacatgt

SEQ ID NO: 951431 - DNA, 15 bp, Homo sapiens
tattacaaacatgtt

SEQ ID NO: 951432 - DNA, 15 bp, Homo sapiens
attacaaacatgtta

SEQ ID NO: 951433 - DNA, 15 bp, Homo sapiens
ttacaaacatgttac

SEQ ID NO: 951434 - DNA, 15 bp, Homo sapiens
tacaaacatgttacg

SEQ ID NO: 951435 - DNA, 15 bp, Homo sapiens
acaaacatgttacgt

SEQ ID NO: 951436 - DNA, 15 bp, Homo sapiens
caaacatgttacgtt

SEQ ID NO: 951437 - DNA, 15 bp, Homo sapiens
aaacatgttacgttt

SEQ ID NO: 951438 - DNA, 15 bp, Homo sapiens
aacatgttacgtttc

SEQ ID NO: 951439 - DNA, 15 bp, Homo sapiens
acatgttacgtttca

SEQ ID NO: 951440 - DNA, 15 bp, Homo sapiens
catgttacgtttcat

SEQ ID NO: 951441 - DNA, 15 bp, Homo sapiens
atgttacgtttcata

SEQ ID NO: 951442 - DNA, 15 bp, Homo sapiens
tgttacgtttcatat

SEQ ID NO: 951443 - DNA, 15 bp, Homo sapiens
gttacgtttcatata

SEQ ID NO: 951444 - DNA, 15 bp, Homo sapiens
ttacgtttcatataa

SEQ ID NO: 951445 - DNA, 15 bp, Homo sapiens
tacgtttcatataaa

SEQ ID NO: 951446 - DNA, 15 bp, Homo sapiens
acgtttcatataaac

SEQ ID NO: 951447 - DNA, 15 bp, Homo sapiens
cgtttcatataaaca

SEQ ID NO: 951448 - DNA, 15 bp, Homo sapiens
gtttcatataaacat

SEQ ID NO: 951449 - DNA, 15 bp, Homo sapiens
tttcatataaacatt

SEQ ID NO: 951450 - DNA, 15 bp, Homo sapiens
ttcatataaacattt

SEQ ID NO: 951451 - DNA, 15 bp, Homo sapiens
tcatataaacatttt

SEQ ID NO: 951452 - DNA, 15 bp, Homo sapiens
catataaacatttta

SEQ ID NO: 951453 - DNA, 15 bp, Homo sapiens
atataaacattttag

SEQ ID NO: 951454 - DNA, 15 bp, Homo sapiens
tataaacattttagg

SEQ ID NO: 951455 - DNA, 15 bp, Homo sapiens
ataaacattttaggg

SEQ ID NO: 951456 - DNA, 15 bp, Homo sapiens
taaacattttagggt

SEQ ID NO: 951457 - DNA, 15 bp, Homo sapiens
aaacattttagggtt

SEQ ID NO: 951458 - DNA, 15 bp, Homo sapiens
aacattttagggtta

SEQ ID NO: 951459 - DNA, 15 bp, Homo sapiens
acattttagggttaa

SEQ ID NO: 951460 - DNA, 15 bp, Homo sapiens
cattttagggttaaa

SEQ ID NO: 951461 - DNA, 15 bp, Homo sapiens
attttagggttaaaa

SEQ ID NO: 951462 - DNA, 15 bp, Homo sapiens
ttttagggttaaaaa

SEQ ID NO: 951463 - DNA, 15 bp, Homo sapiens
tttagggttaaaaat

SEQ ID NO: 951464 - DNA, 15 bp, Homo sapiens
ttagggttaaaaatc

SEQ ID NO: 951465 - DNA, 15 bp, Homo sapiens
tagggttaaaaatct

SEQ ID NO: 951466 - DNA, 15 bp, Homo sapiens
agggttaaaaatctg

SEQ ID NO: 951467 - DNA, 15 bp, Homo sapiens
gggttaaaaatctgt

SEQ ID NO: 951468 - DNA, 15 bp, Homo sapiens
ggttaaaaatctgta

SEQ ID NO: 951469 - DNA, 15 bp, Homo sapiens
gttaaaaatctgtaa

SEQ ID NO: 951470 - DNA, 15 bp, Homo sapiens
ttaaaaatctgtaac

SEQ ID NO: 951471 - DNA, 15 bp, Homo sapiens
taaaaatctgtaact

SEQ ID NO: 951472 - DNA, 15 bp, Homo sapiens
aaaaatctgtaactg

SEQ ID NO: 951473 - DNA, 15 bp, Homo sapiens
aaaatctgtaactgt

SEQ ID NO: 951474 - DNA, 15 bp, Homo sapiens
aaatctgtaactgtt

SEQ ID NO: 951475 - DNA, 15 bp, Homo sapiens
aatctgtaactgttg

SEQ ID NO: 951476 - DNA, 15 bp, Homo sapiens
atctgtaactgttgt

SEQ ID NO: 951477 - DNA, 15 bp, Homo sapiens
tctgtaactgttgtg

SEQ ID NO: 951478 - DNA, 15 bp, Homo sapiens
ctgtaactgttgtga

SEQ ID NO: 951479 - DNA, 15 bp, Homo sapiens
tgtaactgttgtgat

SEQ ID NO: 951480 - DNA, 15 bp, Homo sapiens
gtaactgttgtgatg

SEQ ID NO: 951481 - DNA, 15 bp, Homo sapiens
taactgttgtgatga

SEQ ID NO: 951482 - DNA, 15 bp, Homo sapiens
aactgttgtgatgat

SEQ ID NO: 951483 - DNA, 15 bp, Homo sapiens
actgttgtgatgata

SEQ ID NO: 951484 - DNA, 15 bp, Homo sapiens
ctgttgtgatgataa

SEQ ID NO: 951485 - DNA, 15 bp, Homo sapiens
tgttgtgatgataat

SEQ ID NO: 951486 - DNA, 15 bp, Homo sapiens
gttgtgatgataatg

SEQ ID NO: 951487 - DNA, 15 bp, Homo sapiens
ttgtgatgataatgt

SEQ ID NO: 951488 - DNA, 15 bp, Homo sapiens
tgtgatgataatgtt

SEQ ID NO: 951489 - DNA, 15 bp, Homo sapiens
gtgatgataatgttg

SEQ ID NO: 951490 - DNA, 15 bp, Homo sapiens
tgatgataatgttga

SEQ ID NO: 951491 - DNA, 15 bp, Homo sapiens
gatgataatgttgat

SEQ ID NO: 951492 - DNA, 15 bp, Homo sapiens
atgataatgttgata

SEQ ID NO: 951493 - DNA, 15 bp, Homo sapiens
tgataatgttgataa

SEQ ID NO: 951494 - DNA, 15 bp, Homo sapiens
gataatgttgataaa

SEQ ID NO: 951495 - DNA, 15 bp, Homo sapiens
ataatgttgataaag

SEQ ID NO: 951496 - DNA, 15 bp, Homo sapiens
taatgttgataaaga

SEQ ID NO: 951497 - DNA, 15 bp, Homo sapiens
aatgttgataaagaa

SEQ ID NO: 951498 - DNA, 15 bp, Homo sapiens
atgttgataaagaat

SEQ ID NO: 951499 - DNA, 15 bp, Homo sapiens
tgttgataaagaatt

SEQ ID NO: 951500 - DNA, 15 bp, Homo sapiens
gttgataaagaatta

SEQ ID NO: 951501 - DNA, 15 bp, Homo sapiens
ttgataaagaattag

SEQ ID NO: 951502 - DNA, 15 bp, Homo sapiens
tgataaagaattaga

SEQ ID NO: 951503 - DNA, 15 bp, Homo sapiens
gataaagaattagaa

SEQ ID NO: 951504 - DNA, 15 bp, Homo sapiens
ataaagaattagaag

SEQ ID NO: 951505 - DNA, 15 bp, Homo sapiens
taaagaattagaagt

SEQ ID NO: 951506 - DNA, 15 bp, Homo sapiens
aaagaattagaagta

SEQ ID NO: 951507 - DNA, 15 bp, Homo sapiens
aagaattagaagtaa

SEQ ID NO: 951508 - DNA, 15 bp, Homo sapiens
agaattagaagtaat

SEQ ID NO: 951509 - DNA, 15 bp, Homo sapiens
gaattagaagtaata

SEQ ID NO: 951510 - DNA, 15 bp, Homo sapiens
aattagaagtaataa

SEQ ID NO: 951511 - DNA, 15 bp, Homo sapiens
attagaagtaataaa

SEQ ID NO: 951512 - DNA, 15 bp, Homo sapiens
ttagaagtaataaaa

SEQ ID NO: 951513 - DNA, 15 bp, Homo sapiens
tagaagtaataaaat

SEQ ID NO: 951514 - DNA, 15 bp, Homo sapiens
agaagtaataaaata

SEQ ID NO: 951515 - DNA, 15 bp, Homo sapiens
gaagtaataaaatac

SEQ ID NO: 951516 - DNA, 15 bp, Homo sapiens
aagtaataaaatacc

SEQ ID NO: 951517 - DNA, 15 bp, Homo sapiens
agtaataaaatacca

SEQ ID NO: 951518 - DNA, 15 bp, Homo sapiens
gtaataaaataccag

SEQ ID NO: 951519 - DNA, 15 bp, Homo sapiens
taataaaataccaga

SEQ ID NO: 951520 - DNA, 15 bp, Homo sapiens
aataaaataccagaa

SEQ ID NO: 951521 - DNA, 15 bp, Homo sapiens
ataaaataccagaat

SEQ ID NO: 951522 - DNA, 15 bp, Homo sapiens
taaaataccagaata

SEQ ID NO: 951523 - DNA, 15 bp, Homo sapiens
aaaataccagaatat

SEQ ID NO: 951524 - DNA, 15 bp, Homo sapiens
aaataccagaatatt

SEQ ID NO: 951525 - DNA, 15 bp, Homo sapiens
aataccagaatattt

SEQ ID NO: 951526 - DNA, 15 bp, Homo sapiens
ataccagaatatttc

SEQ ID NO: 951527 - DNA, 15 bp, Homo sapiens
taccagaatatttca

SEQ ID NO: 951528 - DNA, 15 bp, Homo sapiens
accagaatatttcaa

SEQ ID NO: 951529 - DNA, 15 bp, Homo sapiens
ccagaatatttcaaa

SEQ ID NO: 951530 - DNA, 15 bp, Homo sapiens
cagaatatttcaaaa

SEQ ID NO: 951531 - DNA, 15 bp, Homo sapiens
agaatatttcaaaat

SEQ ID NO: 951532 - DNA, 15 bp, Homo sapiens
gaatatttcaaaatc

SEQ ID NO: 951533 - DNA, 15 bp, Homo sapiens
aatatttcaaaatct

SEQ ID NO: 951534 - DNA, 15 bp, Homo sapiens
atatttcaaaatctg

SEQ ID NO: 951535 - DNA, 15 bp, Homo sapiens
tatttcaaaatctga

SEQ ID NO: 951536 - DNA, 15 bp, Homo sapiens
atttcaaaatctgag

SEQ ID NO: 951537 - DNA, 15 bp, Homo sapiens
tttcaaaatctgaga

SEQ ID NO: 951538 - DNA, 15 bp, Homo sapiens
ttcaaaatctgagac

SEQ ID NO: 951539 - DNA, 15 bp, Homo sapiens
tcaaaatctgagaca

SEQ ID NO: 951540 - DNA, 15 bp, Homo sapiens
caaaatctgagacat

SEQ ID NO: 951541 - DNA, 15 bp, Homo sapiens
aaaatctgagacatg

SEQ ID NO: 951542 - DNA, 15 bp, Homo sapiens
aaatctgagacatgt

SEQ ID NO: 951543 - DNA, 15 bp, Homo sapiens
aatctgagacatgta

SEQ ID NO: 951544 - DNA, 15 bp, Homo sapiens
atctgagacatgtac

SEQ ID NO: 951545 - DNA, 15 bp, Homo sapiens
tctgagacatgtaca

SEQ ID NO: 951546 - DNA, 15 bp, Homo sapiens
ctgagacatgtacaa

SEQ ID NO: 951547 - DNA, 15 bp, Homo sapiens
tgagacatgtacaag

SEQ ID NO: 951548 - DNA, 15 bp, Homo sapiens
gagacatgtacaagt

SEQ ID NO: 951549 - DNA, 15 bp, Homo sapiens
agacatgtacaagta

SEQ ID NO: 951550 - DNA, 15 bp, Homo sapiens
gacatgtacaagtaa

SEQ ID NO: 951551 - DNA, 15 bp, Homo sapiens
acatgtacaagtaat

SEQ ID NO: 951552 - DNA, 15 bp, Homo sapiens
catgtacaagtaata

SEQ ID NO: 951553 - DNA, 15 bp, Homo sapiens
atgtacaagtaatat

SEQ ID NO: 951554 - DNA, 15 bp, Homo sapiens
tgtacaagtaatatg

SEQ ID NO: 951555 - DNA, 15 bp, Homo sapiens
gtacaagtaatatgt

SEQ ID NO: 951556 - DNA, 15 bp, Homo sapiens
tacaagtaatatgta

SEQ ID NO: 951557 - DNA, 15 bp, Homo sapiens
acaagtaatatgtaa

SEQ ID NO: 951558 - DNA, 15 bp, Homo sapiens
caagtaatatgtaag

SEQ ID NO: 951559 - DNA, 15 bp, Homo sapiens
aagtaatatgtaagt

SEQ ID NO: 951560 - DNA, 15 bp, Homo sapiens
agtaatatgtaagta

SEQ ID NO: 951561 - DNA, 15 bp, Homo sapiens
gtaatatgtaagtaa

SEQ ID NO: 951562 - DNA, 15 bp, Homo sapiens
taatatgtaagtaat

SEQ ID NO: 951563 - DNA, 15 bp, Homo sapiens
aatatgtaagtaatt

SEQ ID NO: 951564 - DNA, 15 bp, Homo sapiens
atatgtaagtaatta

SEQ ID NO: 951565 - DNA, 15 bp, Homo sapiens
tatgtaagtaattac

SEQ ID NO: 951566 - DNA, 15 bp, Homo sapiens
atgtaagtaattact

SEQ ID NO: 951567 - DNA, 15 bp, Homo sapiens
tgtaagtaattactt

SEQ ID NO: 951568 - DNA, 15 bp, Homo sapiens
gtaagtaattactta

SEQ ID NO: 951569 - DNA, 15 bp, Homo sapiens
taagtaattacttac

SEQ ID NO: 951570 - DNA, 15 bp, Homo sapiens
aagtaattacttacc

SEQ ID NO: 951571 - DNA, 15 bp, Homo sapiens
agtaattacttacct

SEQ ID NO: 951572 - DNA, 15 bp, Homo sapiens
gtaattacttacctc

SEQ ID NO: 951573 - DNA, 15 bp, Homo sapiens
taattacttacctca

SEQ ID NO: 951574 - DNA, 15 bp, Homo sapiens
aattacttacctcag

SEQ ID NO: 951575 - DNA, 15 bp, Homo sapiens
attacttacctcaga

SEQ ID NO: 951576 - DNA, 15 bp, Homo sapiens
ttacttacctcagac

SEQ ID NO: 951577 - DNA, 15 bp, Homo sapiens
tacttacctcagaca

SEQ ID NO: 951578 - DNA, 15 bp, Homo sapiens
acttacctcagacat

SEQ ID NO: 951579 - DNA, 15 bp, Homo sapiens
cttacctcagacata

SEQ ID NO: 951580 - DNA, 15 bp, Homo sapiens
ttacctcagacatag

SEQ ID NO: 951581 - DNA, 15 bp, Homo sapiens
tacctcagacatagg

SEQ ID NO: 951582 - DNA, 15 bp, Homo sapiens
acctcagacataggg

SEQ ID NO: 951583 - DNA, 15 bp, Homo sapiens
cctcagacatagggg

SEQ ID NO: 951584 - DNA, 15 bp, Homo sapiens
ctcagacataggggt

SEQ ID NO: 951585 - DNA, 15 bp, Homo sapiens
tcagacataggggtt

SEQ ID NO: 951586 - DNA, 15 bp, Homo sapiens
cagacataggggttc

SEQ ID NO: 951587 - DNA, 15 bp, Homo sapiens
agacataggggttcc

SEQ ID NO: 951588 - DNA, 15 bp, Homo sapiens
gacataggggttccc

SEQ ID NO: 951589 - DNA, 15 bp, Homo sapiens
acataggggttcccc

SEQ ID NO: 951590 - DNA, 15 bp, Homo sapiens
cataggggttcccca

SEQ ID NO: 951591 - DNA, 15 bp, Homo sapiens
ataggggttccccag

SEQ ID NO: 951592 - DNA, 15 bp, Homo sapiens
taggggttccccaga

SEQ ID NO: 951593 - DNA, 15 bp, Homo sapiens
aggggttccccagaa

SEQ ID NO: 951594 - DNA, 15 bp, Homo sapiens
ggggttccccagaag

SEQ ID NO: 951595 - DNA, 15 bp, Homo sapiens
gggttccccagaagt

SEQ ID NO: 951596 - DNA, 15 bp, Homo sapiens
ggttccccagaagtc

SEQ ID NO: 951597 - DNA, 15 bp, Homo sapiens
gttccccagaagtca

SEQ ID NO: 951598 - DNA, 15 bp, Homo sapiens
ttccccagaagtcat

SEQ ID NO: 951599 - DNA, 15 bp, Homo sapiens
tccccagaagtcatt

SEQ ID NO: 951600 - DNA, 15 bp, Homo sapiens
ccccagaagtcattt

SEQ ID NO: 951601 - DNA, 15 bp, Homo sapiens
cccagaagtcatttt

SEQ ID NO: 951602 - DNA, 15 bp, Homo sapiens
ccagaagtcattttg

SEQ ID NO: 951603 - DNA, 15 bp, Homo sapiens
cagaagtcattttga

SEQ ID NO: 951604 - DNA, 15 bp, Homo sapiens
agaagtcattttgaa

SEQ ID NO: 951605 - DNA, 15 bp, Homo sapiens
gaagtcattttgaaa

SEQ ID NO: 951606 - DNA, 15 bp, Homo sapiens
aagtcattttgaaat

SEQ ID NO: 951607 - DNA, 15 bp, Homo sapiens
agtcattttgaaata

SEQ ID NO: 951608 - DNA, 15 bp, Homo sapiens
gtcattttgaaataa

SEQ ID NO: 951609 - DNA, 15 bp, Homo sapiens
tcattttgaaataaa

SEQ ID NO: 951610 - DNA, 15 bp, Homo sapiens
cattttgaaataaag

SEQ ID NO: 951611 - DNA, 15 bp, Homo sapiens
attttgaaataaagt

SEQ ID NO: 951612 - DNA, 15 bp, Homo sapiens
ttttgaaataaagtt

SEQ ID NO: 951613 - DNA, 15 bp, Homo sapiens
tttgaaataaagttt

SEQ ID NO: 951614 - DNA, 15 bp, Homo sapiens
ttgaaataaagtttt

SEQ ID NO: 951615 - DNA, 15 bp, Homo sapiens
tgaaataaagttttt

SEQ ID NO: 951616 - DNA, 15 bp, Homo sapiens
gaaataaagttttta

SEQ ID NO: 951617 - DNA, 15 bp, Homo sapiens
aaataaagtttttaa

SEQ ID NO: 951618 - DNA, 15 bp, Homo sapiens
aataaagtttttaaa

SEQ ID NO: 951619 - DNA, 15 bp, Homo sapiens
ataaagtttttaaag

SEQ ID NO: 951620 - DNA, 15 bp, Homo sapiens
taaagtttttaaagg

SEQ ID NO: 951621 - DNA, 15 bp, Homo sapiens
aaagtttttaaaggt

SEQ ID NO: 951622 - DNA, 15 bp, Homo sapiens
aagtttttaaaggtg

SEQ ID NO: 951623 - DNA, 15 bp, Homo sapiens
agtttttaaaggtgt

SEQ ID NO: 951624 - DNA, 15 bp, Homo sapiens
gtttttaaaggtgta

SEQ ID NO: 951625 - DNA, 15 bp, Homo sapiens
tttttaaaggtgtag

SEQ ID NO: 951626 - DNA, 15 bp, Homo sapiens
ttttaaaggtgtaga

SEQ ID NO: 951627 - DNA, 15 bp, Homo sapiens
tttaaaggtgtagat

SEQ ID NO: 951628 - DNA, 15 bp, Homo sapiens
ttaaaggtgtagatg

SEQ ID NO: 951629 - DNA, 15 bp, Homo sapiens
taaaggtgtagatgg

SEQ ID NO: 951630 - DNA, 15 bp, Homo sapiens
aaaggtgtagatgga

SEQ ID NO: 951631 - DNA, 15 bp, Homo sapiens
aaggtgtagatggat

SEQ ID NO: 951632 - DNA, 15 bp, Homo sapiens
aggtgtagatggatg

SEQ ID NO: 951633 - DNA, 15 bp, Homo sapiens
ggtgtagatggatgc

SEQ ID NO: 951634 - DNA, 15 bp, Homo sapiens
gtgtagatggatgca

SEQ ID NO: 951635 - DNA, 15 bp, Homo sapiens
tgtagatggatgcaa

SEQ ID NO: 951636 - DNA, 15 bp, Homo sapiens
gtagatggatgcaag

SEQ ID NO: 951637 - DNA, 15 bp, Homo sapiens
tagatggatgcaagt

SEQ ID NO: 951638 - DNA, 15 bp, Homo sapiens
agatggatgcaagtc

SEQ ID NO: 951639 - DNA, 15 bp, Homo sapiens
gatggatgcaagtct

SEQ ID NO: 951640 - DNA, 15 bp, Homo sapiens
atggatgcaagtctt

SEQ ID NO: 951641 - DNA, 15 bp, Homo sapiens
tggatgcaagtcttt

SEQ ID NO: 951642 - DNA, 15 bp, Homo sapiens
ggatgcaagtctttg

SEQ ID NO: 951643 - DNA, 15 bp, Homo sapiens
gatgcaagtctttgt

SEQ ID NO: 951644 - DNA, 15 bp, Homo sapiens
atgcaagtctttgtt

SEQ ID NO: 951645 - DNA, 15 bp, Homo sapiens
tgcaagtctttgtta

SEQ ID NO: 951646 - DNA, 15 bp, Homo sapiens
gcaagtctttgttat

SEQ ID NO: 951647 - DNA, 15 bp, Homo sapiens
caagtctttgttatc

SEQ ID NO: 951648 - DNA, 15 bp, Homo sapiens
aagtctttgttatcc

SEQ ID NO: 951649 - DNA, 15 bp, Homo sapiens
agtctttgttatcca

SEQ ID NO: 951650 - DNA, 15 bp, Homo sapiens
gtctttgttatccag

SEQ ID NO: 951651 - DNA, 15 bp, Homo sapiens
tctttgttatccagt

SEQ ID NO: 951652 - DNA, 15 bp, Homo sapiens
ctttgttatccagta

SEQ ID NO: 951653 - DNA, 15 bp, Homo sapiens
tttgttatccagtat

SEQ ID NO: 951654 - DNA, 15 bp, Homo sapiens
ttgttatccagtatt

SEQ ID NO: 951655 - DNA, 15 bp, Homo sapiens
tgttatccagtattg

SEQ ID NO: 951656 - DNA, 15 bp, Homo sapiens
gttatccagtattgc

SEQ ID NO: 951657 - DNA, 15 bp, Homo sapiens
ttatccagtattgct

SEQ ID NO: 951658 - DNA, 15 bp, Homo sapiens
tatccagtattgctg

SEQ ID NO: 951659 - DNA, 15 bp, Homo sapiens
atccagtattgctga

SEQ ID NO: 951660 - DNA, 15 bp, Homo sapiens
tccagtattgctgaa

SEQ ID NO: 951661 - DNA, 15 bp, Homo sapiens
ccagtattgctgaaa

SEQ ID NO: 951662 - DNA, 15 bp, Homo sapiens
cagtattgctgaaac

SEQ ID NO: 951663 - DNA, 15 bp, Homo sapiens
agtattgctgaaaca

SEQ ID NO: 951664 - DNA, 15 bp, Homo sapiens
gtattgctgaaacat

SEQ ID NO: 951665 - DNA, 15 bp, Homo sapiens
tattgctgaaacatc

SEQ ID NO: 951666 - DNA, 15 bp, Homo sapiens
attgctgaaacatca

SEQ ID NO: 951667 - DNA, 15 bp, Homo sapiens
ttgctgaaacatcat

SEQ ID NO: 951668 - DNA, 15 bp, Homo sapiens
tgctgaaacatcatc

SEQ ID NO: 951669 - DNA, 15 bp, Homo sapiens
gctgaaacatcatca

SEQ ID NO: 951670 - DNA, 15 bp, Homo sapiens
ctgaaacatcatcaa

SEQ ID NO: 951671 - DNA, 15 bp, Homo sapiens
tgaaacatcatcaaa

SEQ ID NO: 951672 - DNA, 15 bp, Homo sapiens
gaaacatcatcaaaa

SEQ ID NO: 951673 - DNA, 15 bp, Homo sapiens
aaacatcatcaaaaa

SEQ ID NO: 951674 - DNA, 15 bp, Homo sapiens
aacatcatcaaaaac

SEQ ID NO: 951675 - DNA, 15 bp, Homo sapiens
acatcatcaaaaaca

SEQ ID NO: 951676 - DNA, 15 bp, Homo sapiens
catcatcaaaaacaa

SEQ ID NO: 951677 - DNA, 15 bp, Homo sapiens
atcatcaaaaacaaa

SEQ ID NO: 951678 - DNA, 15 bp, Homo sapiens
tcatcaaaaacaaaa

SEQ ID NO: 951679 - DNA, 15 bp, Homo sapiens
catcaaaaacaaaac

SEQ ID NO: 951680 - DNA, 15 bp, Homo sapiens
atcaaaaacaaaacc

SEQ ID NO: 951681 - DNA, 15 bp, Homo sapiens
tcaaaaacaaaacca

SEQ ID NO: 951682 - DNA, 15 bp, Homo sapiens
caaaaacaaaaccac

SEQ ID NO: 951683 - DNA, 15 bp, Homo sapiens
aaaaacaaaaccaca

SEQ ID NO: 951684 - DNA, 15 bp, Homo sapiens
aaaacaaaaccacaa

SEQ ID NO: 951685 - DNA, 15 bp, Homo sapiens
aaacaaaaccacaaa

SEQ ID NO: 951686 - DNA, 15 bp, Homo sapiens
aacaaaaccacaaaa

SEQ ID NO: 951687 - DNA, 15 bp, Homo sapiens
acaaaaccacaaaag

SEQ ID NO: 951688 - DNA, 15 bp, Homo sapiens
caaaaccacaaaaga

SEQ ID NO: 951689 - DNA, 15 bp, Homo sapiens
aaaaccacaaaagag

SEQ ID NO: 951690 - DNA, 15 bp, Homo sapiens
aaaccacaaaagagg

SEQ ID NO: 951691 - DNA, 15 bp, Homo sapiens
aaccacaaaagaggc

SEQ ID NO: 951692 - DNA, 15 bp, Homo sapiens
accacaaaagaggct

SEQ ID NO: 951693 - DNA, 15 bp, Homo sapiens
ccacaaaagaggctg

SEQ ID NO: 951694 - DNA, 15 bp, Homo sapiens
cacaaaagaggctgt

SEQ ID NO: 951695 - DNA, 15 bp, Homo sapiens
acaaaagaggctgtt

SEQ ID NO: 951696 - DNA, 15 bp, Homo sapiens
caaaagaggctgttc

SEQ ID NO: 951697 - DNA, 15 bp, Homo sapiens
aaaagaggctgttcc

SEQ ID NO: 951698 - DNA, 15 bp, Homo sapiens
aaagaggctgttcca

SEQ ID NO: 951699 - DNA, 15 bp, Homo sapiens
aagaggctgttccaa

SEQ ID NO: 951700 - DNA, 15 bp, Homo sapiens
agaggctgttccaat

SEQ ID NO: 951701 - DNA, 15 bp, Homo sapiens
gaggctgttccaata

SEQ ID NO: 951702 - DNA, 15 bp, Homo sapiens
aggctgttccaatag

SEQ ID NO: 951703 - DNA, 15 bp, Homo sapiens
ggctgttccaatagc

SEQ ID NO: 951704 - DNA, 15 bp, Homo sapiens
gctgttccaatagca

SEQ ID NO: 951705 - DNA, 15 bp, Homo sapiens
ctgttccaatagcag

SEQ ID NO: 951706 - DNA, 15 bp, Homo sapiens
tgttccaatagcagg

SEQ ID NO: 951707 - DNA, 15 bp, Homo sapiens
gttccaatagcaggc

SEQ ID NO: 951708 - DNA, 15 bp, Homo sapiens
ttccaatagcaggca

SEQ ID NO: 951709 - DNA, 15 bp, Homo sapiens
tccaatagcaggcag

SEQ ID NO: 951710 - DNA, 15 bp, Homo sapiens
ccaatagcaggcagt

SEQ ID NO: 951711 - DNA, 15 bp, Homo sapiens
caatagcaggcagta

SEQ ID NO: 951712 - DNA, 15 bp, Homo sapiens
aatagcaggcagtaa

SEQ ID NO: 951713 - DNA, 15 bp, Homo sapiens
atagcaggcagtaac

SEQ ID NO: 951714 - DNA, 15 bp, Homo sapiens
tagcaggcagtaacc

SEQ ID NO: 951715 - DNA, 15 bp, Homo sapiens
agcaggcagtaacca

SEQ ID NO: 951716 - DNA, 15 bp, Homo sapiens
gcaggcagtaaccac

SEQ ID NO: 951717 - DNA, 15 bp, Homo sapiens
caggcagtaaccaca

SEQ ID NO: 951718 - DNA, 15 bp, Homo sapiens
aggcagtaaccacac

SEQ ID NO: 951719 - DNA, 15 bp, Homo sapiens
ggcagtaaccacacc

SEQ ID NO: 951720 - DNA, 15 bp, Homo sapiens
gcagtaaccacacct

SEQ ID NO: 951721 - DNA, 15 bp, Homo sapiens
cagtaaccacaccta

SEQ ID NO: 951722 - DNA, 15 bp, Homo sapiens
agtaaccacacctac

SEQ ID NO: 951723 - DNA, 15 bp, Homo sapiens
gtaaccacacctact

SEQ ID NO: 951724 - DNA, 15 bp, Homo sapiens
taaccacacctacta

SEQ ID NO: 951725 - DNA, 15 bp, Homo sapiens
aaccacacctactat

SEQ ID NO: 951726 - DNA, 15 bp, Homo sapiens
accacacctactatt

SEQ ID NO: 951727 - DNA, 15 bp, Homo sapiens
ccacacctactatta

SEQ ID NO: 951728 - DNA, 15 bp, Homo sapiens
cacacctactattaa

SEQ ID NO: 951729 - DNA, 15 bp, Homo sapiens
acacctactattaag

SEQ ID NO: 951730 - DNA, 15 bp, Homo sapiens
cacctactattaagg

SEQ ID NO: 951731 - DNA, 15 bp, Homo sapiens
acctactattaaggt

SEQ ID NO: 951732 - DNA, 15 bp, Homo sapiens
cctactattaaggtt

SEQ ID NO: 951733 - DNA, 15 bp, Homo sapiens
ctactattaaggtta

SEQ ID NO: 951734 - DNA, 15 bp, Homo sapiens
tactattaaggttat

SEQ ID NO: 951735 - DNA, 15 bp, Homo sapiens
actattaaggttatt

SEQ ID NO: 951736 - DNA, 15 bp, Homo sapiens
ctattaaggttattt

SEQ ID NO: 951737 - DNA, 15 bp, Homo sapiens
tattaaggttatttc

SEQ ID NO: 951738 - DNA, 15 bp, Homo sapiens
attaaggttatttct

SEQ ID NO: 951739 - DNA, 15 bp, Homo sapiens
ttaaggttatttctt

SEQ ID NO: 951740 - DNA, 15 bp, Homo sapiens
taaggttatttcttt

SEQ ID NO: 951741 - DNA, 15 bp, Homo sapiens
aaggttatttctttt

SEQ ID NO: 951742 - DNA, 15 bp, Homo sapiens
aggttatttctttta

SEQ ID NO: 951743 - DNA, 15 bp, Homo sapiens
ggttatttcttttag

SEQ ID NO: 951744 - DNA, 15 bp, Homo sapiens
gttatttcttttagg

SEQ ID NO: 951745 - DNA, 15 bp, Homo sapiens
ttatttcttttaggt

SEQ ID NO: 951746 - DNA, 15 bp, Homo sapiens
tatttcttttaggtt

SEQ ID NO: 951747 - DNA, 15 bp, Homo sapiens
atttcttttaggtta

SEQ ID NO: 951748 - DNA, 15 bp, Homo sapiens
tttcttttaggttaa

SEQ ID NO: 951749 - DNA, 15 bp, Homo sapiens
ttcttttaggttaat

SEQ ID NO: 951750 - DNA, 15 bp, Homo sapiens
tcttttaggttaata

SEQ ID NO: 951751 - DNA, 15 bp, Homo sapiens
cttttaggttaatat

SEQ ID NO: 951752 - DNA, 15 bp, Homo sapiens
ttttaggttaatatt

SEQ ID NO: 951753 - DNA, 15 bp, Homo sapiens
tttaggttaatatta

SEQ ID NO: 951754 - DNA, 15 bp, Homo sapiens
ttaggttaatattag

SEQ ID NO: 951755 - DNA, 15 bp, Homo sapiens
taggttaatattagc

SEQ ID NO: 951756 - DNA, 15 bp, Homo sapiens
aggttaatattagcc

SEQ ID NO: 951757 - DNA, 15 bp, Homo sapiens
ggttaatattagcca

SEQ ID NO: 951758 - DNA, 15 bp, Homo sapiens
gttaatattagccat

SEQ ID NO: 951759 - DNA, 15 bp, Homo sapiens
ttaatattagccatc

SEQ ID NO: 951760 - DNA, 15 bp, Homo sapiens
taatattagccatct

SEQ ID NO: 951761 - DNA, 15 bp, Homo sapiens
aatattagccatctt

SEQ ID NO: 951762 - DNA, 15 bp, Homo sapiens
atattagccatcttt

SEQ ID NO: 951763 - DNA, 15 bp, Homo sapiens
tattagccatctttt

SEQ ID NO: 951764 - DNA, 15 bp, Homo sapiens
attagccatcttttc

SEQ ID NO: 951765 - DNA, 15 bp, Homo sapiens
ttagccatcttttct

SEQ ID NO: 951766 - DNA, 15 bp, Homo sapiens
tagccatcttttcta

SEQ ID NO: 951767 - DNA, 15 bp, Homo sapiens
agccatcttttctat

SEQ ID NO: 951768 - DNA, 15 bp, Homo sapiens
gccatcttttctata

SEQ ID NO: 951769 - DNA, 15 bp, Homo sapiens
ccatcttttctataa

SEQ ID NO: 951770 - DNA, 15 bp, Homo sapiens
catcttttctataag

SEQ ID NO: 951771 - DNA, 15 bp, Homo sapiens
atcttttctataagc

SEQ ID NO: 951772 - DNA, 15 bp, Homo sapiens
tcttttctataagca

SEQ ID NO: 951773 - DNA, 15 bp, Homo sapiens
cttttctataagcac

SEQ ID NO: 951774 - DNA, 15 bp, Homo sapiens
ttttctataagcact

SEQ ID NO: 951775 - DNA, 15 bp, Homo sapiens
tttctataagcactt

SEQ ID NO: 951776 - DNA, 15 bp, Homo sapiens
ttctataagcacttc

SEQ ID NO: 951777 - DNA, 15 bp, Homo sapiens
tctataagcacttct

SEQ ID NO: 951778 - DNA, 15 bp, Homo sapiens
ctataagcacttctg

SEQ ID NO: 951779 - DNA, 15 bp, Homo sapiens
tataagcacttctgg

SEQ ID NO: 951780 - DNA, 15 bp, Homo sapiens
ataagcacttctgga

SEQ ID NO: 951781 - DNA, 15 bp, Homo sapiens
taagcacttctggac

SEQ ID NO: 951782 - DNA, 15 bp, Homo sapiens
aagcacttctggaca

SEQ ID NO: 951783 - DNA, 15 bp, Homo sapiens
agcacttctggacaa

SEQ ID NO: 951784 - DNA, 15 bp, Homo sapiens
gcacttctggacaaa

SEQ ID NO: 951785 - DNA, 15 bp, Homo sapiens
cacttctggacaaaa

SEQ ID NO: 951786 - DNA, 15 bp, Homo sapiens
acttctggacaaaaa

SEQ ID NO: 951787 - DNA, 15 bp, Homo sapiens
cttctggacaaaaac

SEQ ID NO: 951788 - DNA, 15 bp, Homo sapiens
ttctggacaaaaact

SEQ ID NO: 951789 - DNA, 15 bp, Homo sapiens
tctggacaaaaactg

SEQ ID NO: 951790 - DNA, 15 bp, Homo sapiens
ctggacaaaaactgg

SEQ ID NO: 951791 - DNA, 15 bp, Homo sapiens
tggacaaaaactgga

SEQ ID NO: 951792 - DNA, 15 bp, Homo sapiens
ggacaaaaactggaa

SEQ ID NO: 951793 - DNA, 15 bp, Homo sapiens
gacaaaaactggaaa

SEQ ID NO: 951794 - DNA, 15 bp, Homo sapiens
acaaaaactggaaaa

SEQ ID NO: 951795 - DNA, 15 bp, Homo sapiens
caaaaactggaaaaa

SEQ ID NO: 951796 - DNA, 15 bp, Homo sapiens
aaaaactggaaaaaa

SEQ ID NO: 951797 - DNA, 15 bp, Homo sapiens
aaaactggaaaaaaa

SEQ ID NO: 951798 - DNA, 15 bp, Homo sapiens
aaactggaaaaaaaa

SEQ ID NO: 951799 - DNA, 15 bp, Homo sapiens
aactggaaaaaaaat

SEQ ID NO: 951800 - DNA, 15 bp, Homo sapiens
actggaaaaaaaatc

SEQ ID NO: 951801 - DNA, 15 bp, Homo sapiens
ctggaaaaaaaatca

SEQ ID NO: 951802 - DNA, 15 bp, Homo sapiens
tggaaaaaaaatcat

SEQ ID NO: 951803 - DNA, 15 bp, Homo sapiens
ggaaaaaaaatcatg

SEQ ID NO: 951804 - DNA, 15 bp, Homo sapiens
gaaaaaaaatcatga

SEQ ID NO: 951805 - DNA, 15 bp, Homo sapiens
aaaaaaaatcatgaa

SEQ ID NO: 951806 - DNA, 15 bp, Homo sapiens
aaaaaaatcatgaag

SEQ ID NO: 951807 - DNA, 15 bp, Homo sapiens
aaaaaatcatgaaga

SEQ ID NO: 951808 - DNA, 15 bp, Homo sapiens
aaaaatcatgaagat

SEQ ID NO: 951809 - DNA, 15 bp, Homo sapiens
aaaatcatgaagata

SEQ ID NO: 951810 - DNA, 15 bp, Homo sapiens
aaatcatgaagataa

SEQ ID NO: 951811 - DNA, 15 bp, Homo sapiens
aatcatgaagataaa

SEQ ID NO: 951812 - DNA, 15 bp, Homo sapiens
atcatgaagataaaa

SEQ ID NO: 951813 - DNA, 15 bp, Homo sapiens
tcatgaagataaaat

SEQ ID NO: 951814 - DNA, 15 bp, Homo sapiens
catgaagataaaata

SEQ ID NO: 951815 - DNA, 15 bp, Homo sapiens
atgaagataaaataa

SEQ ID NO: 951816 - DNA, 15 bp, Homo sapiens
tgaagataaaataag

SEQ ID NO: 951817 - DNA, 15 bp, Homo sapiens
gaagataaaataagg

SEQ ID NO: 951818 - DNA, 15 bp, Homo sapiens
aagataaaataagga

SEQ ID NO: 951819 - DNA, 15 bp, Homo sapiens
agataaaataaggaa

SEQ ID NO: 951820 - DNA, 15 bp, Homo sapiens
gataaaataaggaac

SEQ ID NO: 951821 - DNA, 15 bp, Homo sapiens
ataaaataaggaaca

SEQ ID NO: 951822 - DNA, 15 bp, Homo sapiens
taaaataaggaacat

SEQ ID NO: 951823 - DNA, 15 bp, Homo sapiens
aaaataaggaacata

SEQ ID NO: 951824 - DNA, 15 bp, Homo sapiens
aaataaggaacatat

SEQ ID NO: 951825 - DNA, 15 bp, Homo sapiens
aataaggaacatatt

SEQ ID NO: 951826 - DNA, 15 bp, Homo sapiens
ataaggaacatattt

SEQ ID NO: 951827 - DNA, 15 bp, Homo sapiens
taaggaacatattta

SEQ ID NO: 951828 - DNA, 15 bp, Homo sapiens
aaggaacatatttat

SEQ ID NO: 951829 - DNA, 15 bp, Homo sapiens
aggaacatatttatt

SEQ ID NO: 951830 - DNA, 15 bp, Homo sapiens
ggaacatatttattc

SEQ ID NO: 951831 - DNA, 15 bp, Homo sapiens
gaacatatttattcc

SEQ ID NO: 951832 - DNA, 15 bp, Homo sapiens
aacatatttattcca

SEQ ID NO: 951833 - DNA, 15 bp, Homo sapiens
acatatttattccaa

SEQ ID NO: 951834 - DNA, 15 bp, Homo sapiens
catatttattccaag

SEQ ID NO: 951835 - DNA, 15 bp, Homo sapiens
atatttattccaagt

SEQ ID NO: 951836 - DNA, 15 bp, Homo sapiens
tatttattccaagta

SEQ ID NO: 951837 - DNA, 15 bp, Homo sapiens
atttattccaagtaa

SEQ ID NO: 951838 - DNA, 15 bp, Homo sapiens
tttattccaagtaag

SEQ ID NO: 951839 - DNA, 15 bp, Homo sapiens
ttattccaagtaagt

SEQ ID NO: 951840 - DNA, 15 bp, Homo sapiens
tattccaagtaagtt

SEQ ID NO: 951841 - DNA, 15 bp, Homo sapiens
attccaagtaagttc

SEQ ID NO: 951842 - DNA, 15 bp, Homo sapiens
ttccaagtaagttca

SEQ ID NO: 951843 - DNA, 15 bp, Homo sapiens
tccaagtaagttcaa

SEQ ID NO: 951844 - DNA, 15 bp, Homo sapiens
ccaagtaagttcaat

SEQ ID NO: 951845 - DNA, 15 bp, Homo sapiens
caagtaagttcaatt

SEQ ID NO: 951846 - DNA, 15 bp, Homo sapiens
aagtaagttcaattt

SEQ ID NO: 951847 - DNA, 15 bp, Homo sapiens
agtaagttcaatttt

SEQ ID NO: 951848 - DNA, 15 bp, Homo sapiens
gtaagttcaatttta

SEQ ID NO: 951849 - DNA, 15 bp, Homo sapiens
taagttcaattttag

SEQ ID NO: 951850 - DNA, 15 bp, Homo sapiens
aagttcaattttagt

SEQ ID NO: 951851 - DNA, 15 bp, Homo sapiens
agttcaattttagta

SEQ ID NO: 951852 - DNA, 15 bp, Homo sapiens
gttcaattttagtag

SEQ ID NO: 951853 - DNA, 15 bp, Homo sapiens
ttcaattttagtagg

SEQ ID NO: 951854 - DNA, 15 bp, Homo sapiens
tcaattttagtaggt

SEQ ID NO: 951855 - DNA, 15 bp, Homo sapiens
caattttagtaggtg

SEQ ID NO: 951856 - DNA, 15 bp, Homo sapiens
aattttagtaggtgg

SEQ ID NO: 951857 - DNA, 15 bp, Homo sapiens
attttagtaggtggg

SEQ ID NO: 951858 - DNA, 15 bp, Homo sapiens
ttttagtaggtgggt

SEQ ID NO: 951859 - DNA, 15 bp, Homo sapiens
tttagtaggtgggta

SEQ ID NO: 951860 - DNA, 15 bp, Homo sapiens
ttagtaggtgggtaa

SEQ ID NO: 951861 - DNA, 15 bp, Homo sapiens
tagtaggtgggtaag

SEQ ID NO: 951862 - DNA, 15 bp, Homo sapiens
agtaggtgggtaagt

SEQ ID NO: 951863 - DNA, 15 bp, Homo sapiens
gtaggtgggtaagta

SEQ ID NO: 951864 - DNA, 15 bp, Homo sapiens
taggtgggtaagtaa

SEQ ID NO: 951865 - DNA, 15 bp, Homo sapiens
aggtgggtaagtaat

SEQ ID NO: 951866 - DNA, 15 bp, Homo sapiens
ggtgggtaagtaatt

SEQ ID NO: 951867 - DNA, 15 bp, Homo sapiens
gtgggtaagtaattg

SEQ ID NO: 951868 - DNA, 15 bp, Homo sapiens
tgggtaagtaattgc

SEQ ID NO: 951869 - DNA, 15 bp, Homo sapiens
gggtaagtaattgca

SEQ ID NO: 951870 - DNA, 15 bp, Homo sapiens
ggtaagtaattgcat

SEQ ID NO: 951871 - DNA, 15 bp, Homo sapiens
gtaagtaattgcata

SEQ ID NO: 951872 - DNA, 15 bp, Homo sapiens
taagtaattgcatat

SEQ ID NO: 951873 - DNA, 15 bp, Homo sapiens
aagtaattgcatatt

SEQ ID NO: 951874 - DNA, 15 bp, Homo sapiens
agtaattgcatatta

SEQ ID NO: 951875 - DNA, 15 bp, Homo sapiens
gtaattgcatattaa

SEQ ID NO: 951876 - DNA, 15 bp, Homo sapiens
taattgcatattaat

SEQ ID NO: 951877 - DNA, 15 bp, Homo sapiens
aattgcatattaatt

SEQ ID NO: 951878 - DNA, 15 bp, Homo sapiens
attgcatattaattc

SEQ ID NO: 951879 - DNA, 15 bp, Homo sapiens
ttgcatattaattct

SEQ ID NO: 951880 - DNA, 15 bp, Homo sapiens
tgcatattaattctc

SEQ ID NO: 951881 - DNA, 15 bp, Homo sapiens
gcatattaattctcc

SEQ ID NO: 951882 - DNA, 15 bp, Homo sapiens
catattaattctcca

SEQ ID NO: 951883 - DNA, 15 bp, Homo sapiens
atattaattctccag

SEQ ID NO: 951884 - DNA, 15 bp, Homo sapiens
tattaattctccaga

SEQ ID NO: 951885 - DNA, 15 bp, Homo sapiens
attaattctccagag

SEQ ID NO: 951886 - DNA, 15 bp, Homo sapiens
ttaattctccagaga

SEQ ID NO: 951887 - DNA, 15 bp, Homo sapiens
taattctccagagaa

SEQ ID NO: 951888 - DNA, 15 bp, Homo sapiens
aattctccagagaaa

SEQ ID NO: 951889 - DNA, 15 bp, Homo sapiens
attctccagagaaaa

SEQ ID NO: 951890 - DNA, 15 bp, Homo sapiens
ttctccagagaaaag

SEQ ID NO: 951891 - DNA, 15 bp, Homo sapiens
tctccagagaaaagc

SEQ ID NO: 951892 - DNA, 15 bp, Homo sapiens
ctccagagaaaagcg

SEQ ID NO: 951893 - DNA, 15 bp, Homo sapiens
tccagagaaaagcgc

SEQ ID NO: 951894 - DNA, 15 bp, Homo sapiens
ccagagaaaagcgca

SEQ ID NO: 951895 - DNA, 15 bp, Homo sapiens
cagagaaaagcgcag

SEQ ID NO: 951896 - DNA, 15 bp, Homo sapiens
agagaaaagcgcagc

SEQ ID NO: 951897 - DNA, 15 bp, Homo sapiens
gagaaaagcgcagct

SEQ ID NO: 951898 - DNA, 15 bp, Homo sapiens
agaaaagcgcagcta

SEQ ID NO: 951899 - DNA, 15 bp, Homo sapiens
gaaaagcgcagctaa

SEQ ID NO: 951900 - DNA, 15 bp, Homo sapiens
aaaagcgcagctaaa

SEQ ID NO: 951901 - DNA, 15 bp, Homo sapiens
aaagcgcagctaaaa

SEQ ID NO: 951902 - DNA, 15 bp, Homo sapiens
aagcgcagctaaaat

SEQ ID NO: 951903 - DNA, 15 bp, Homo sapiens
agcgcagctaaaatg

SEQ ID NO: 951904 - DNA, 15 bp, Homo sapiens
gcgcagctaaaatgc

SEQ ID NO: 951905 - DNA, 15 bp, Homo sapiens
cgcagctaaaatgcc

SEQ ID NO: 951906 - DNA, 15 bp, Homo sapiens
gcagctaaaatgcca

SEQ ID NO: 951907 - DNA, 15 bp, Homo sapiens
cagctaaaatgccat

SEQ ID NO: 951908 - DNA, 15 bp, Homo sapiens
agctaaaatgccatc

SEQ ID NO: 951909 - DNA, 15 bp, Homo sapiens
gctaaaatgccatcc

SEQ ID NO: 951910 - DNA, 15 bp, Homo sapiens
ctaaaatgccatcca

SEQ ID NO: 951911 - DNA, 15 bp, Homo sapiens
taaaatgccatccac

SEQ ID NO: 951912 - DNA, 15 bp, Homo sapiens
aaaatgccatccact

SEQ ID NO: 951913 - DNA, 15 bp, Homo sapiens
aaatgccatccactt

SEQ ID NO: 951914 - DNA, 15 bp, Homo sapiens
aatgccatccacttc

SEQ ID NO: 951915 - DNA, 15 bp, Homo sapiens
atgccatccacttct

SEQ ID NO: 951916 - DNA, 15 bp, Homo sapiens
tgccatccacttcta

SEQ ID NO: 951917 - DNA, 15 bp, Homo sapiens
gccatccacttctaa

SEQ ID NO: 951918 - DNA, 15 bp, Homo sapiens
ccatccacttctaag

SEQ ID NO: 951919 - DNA, 15 bp, Homo sapiens
catccacttctaaga

SEQ ID NO: 951920 - DNA, 15 bp, Homo sapiens
atccacttctaagaa

SEQ ID NO: 951921 - DNA, 15 bp, Homo sapiens
tccacttctaagaag

SEQ ID NO: 951922 - DNA, 15 bp, Homo sapiens
ccacttctaagaagc

SEQ ID NO: 951923 - DNA, 15 bp, Homo sapiens
cacttctaagaagca

SEQ ID NO: 951924 - DNA, 15 bp, Homo sapiens
acttctaagaagcat

SEQ ID NO: 951925 - DNA, 15 bp, Homo sapiens
cttctaagaagcata

SEQ ID NO: 951926 - DNA, 15 bp, Homo sapiens
ttctaagaagcataa

SEQ ID NO: 951927 - DNA, 15 bp, Homo sapiens
tctaagaagcataag

SEQ ID NO: 951928 - DNA, 15 bp, Homo sapiens
ctaagaagcataagc

SEQ ID NO: 951929 - DNA, 15 bp, Homo sapiens
taagaagcataagct

SEQ ID NO: 951930 - DNA, 15 bp, Homo sapiens
aagaagcataagcta

SEQ ID NO: 951931 - DNA, 15 bp, Homo sapiens
agaagcataagctag

SEQ ID NO: 951932 - DNA, 15 bp, Homo sapiens
gaagcataagctagt

SEQ ID NO: 951933 - DNA, 15 bp, Homo sapiens
aagcataagctagtc

SEQ ID NO: 951934 - DNA, 15 bp, Homo sapiens
agcataagctagtca

SEQ ID NO: 951935 - DNA, 15 bp, Homo sapiens
gcataagctagtcac

SEQ ID NO: 951936 - DNA, 15 bp, Homo sapiens
cataagctagtcaca

SEQ ID NO: 951937 - DNA, 15 bp, Homo sapiens
ataagctagtcacat

SEQ ID NO: 951938 - DNA, 15 bp, Homo sapiens
taagctagtcacatt

SEQ ID NO: 951939 - DNA, 15 bp, Homo sapiens
aagctagtcacattg

SEQ ID NO: 951940 - DNA, 15 bp, Homo sapiens
agctagtcacattgt

SEQ ID NO: 951941 - DNA, 15 bp, Homo sapiens
gctagtcacattgtt

SEQ ID NO: 951942 - DNA, 15 bp, Homo sapiens
ctagtcacattgttg

SEQ ID NO: 951943 - DNA, 15 bp, Homo sapiens
tagtcacattgttga

SEQ ID NO: 951944 - DNA, 15 bp, Homo sapiens
agtcacattgttgaa

SEQ ID NO: 951945 - DNA, 15 bp, Homo sapiens
gtcacattgttgaaa

SEQ ID NO: 951946 - DNA, 15 bp, Homo sapiens
tcacattgttgaaac

SEQ ID NO: 951947 - DNA, 15 bp, Homo sapiens
cacattgttgaaact

SEQ ID NO: 951948 - DNA, 15 bp, Homo sapiens
acattgttgaaactc

SEQ ID NO: 951949 - DNA, 15 bp, Homo sapiens
cattgttgaaactca

SEQ ID NO: 951950 - DNA, 15 bp, Homo sapiens
attgttgaaactcag

SEQ ID NO: 951951 - DNA, 15 bp, Homo sapiens
ttgttgaaactcagc

SEQ ID NO: 951952 - DNA, 15 bp, Homo sapiens
tgttgaaactcagcc

SEQ ID NO: 951953 - DNA, 15 bp, Homo sapiens
gttgaaactcagccc

SEQ ID NO: 951954 - DNA, 15 bp, Homo sapiens
ttgaaactcagcccc

SEQ ID NO: 951955 - DNA, 15 bp, Homo sapiens
tgaaactcagcccca

SEQ ID NO: 951956 - DNA, 15 bp, Homo sapiens
gaaactcagccccat

SEQ ID NO: 951957 - DNA, 15 bp, Homo sapiens
aaactcagccccatc

SEQ ID NO: 951958 - DNA, 15 bp, Homo sapiens
aactcagccccatct

SEQ ID NO: 951959 - DNA, 15 bp, Homo sapiens
actcagccccatctc

SEQ ID NO: 951960 - DNA, 15 bp, Homo sapiens
ctcagccccatctct

SEQ ID NO: 951961 - DNA, 15 bp, Homo sapiens
tcagccccatctctt

SEQ ID NO: 951962 - DNA, 15 bp, Homo sapiens
cagccccatctctta

SEQ ID NO: 951963 - DNA, 15 bp, Homo sapiens
agccccatctcttac

SEQ ID NO: 951964 - DNA, 15 bp, Homo sapiens
gccccatctcttact

SEQ ID NO: 951965 - DNA, 15 bp, Homo sapiens
ccccatctcttactg

SEQ ID NO: 951966 - DNA, 15 bp, Homo sapiens
cccatctcttactgg

SEQ ID NO: 951967 - DNA, 15 bp, Homo sapiens
ccatctcttactgga

SEQ ID NO: 951968 - DNA, 15 bp, Homo sapiens
catctcttactggat

SEQ ID NO: 951969 - DNA, 15 bp, Homo sapiens
atctcttactggata

SEQ ID NO: 951970 - DNA, 15 bp, Homo sapiens
tctcttactggataa

SEQ ID NO: 951971 - DNA, 15 bp, Homo sapiens
ctcttactggataat

SEQ ID NO: 951972 - DNA, 15 bp, Homo sapiens
tcttactggataatg

SEQ ID NO: 951973 - DNA, 15 bp, Homo sapiens
cttactggataatgt

SEQ ID NO: 951974 - DNA, 15 bp, Homo sapiens
ttactggataatgtc

SEQ ID NO: 951975 - DNA, 15 bp, Homo sapiens
tactggataatgtcc

SEQ ID NO: 951976 - DNA, 15 bp, Homo sapiens
actggataatgtccc

SEQ ID NO: 951977 - DNA, 15 bp, Homo sapiens
ctggataatgtccct

SEQ ID NO: 951978 - DNA, 15 bp, Homo sapiens
tggataatgtccctg

SEQ ID NO: 951979 - DNA, 15 bp, Homo sapiens
ggataatgtccctga

SEQ ID NO: 951980 - DNA, 15 bp, Homo sapiens
gataatgtccctgat

SEQ ID NO: 951981 - DNA, 15 bp, Homo sapiens
ataatgtccctgata

SEQ ID NO: 951982 - DNA, 15 bp, Homo sapiens
taatgtccctgataa

SEQ ID NO: 951983 - DNA, 15 bp, Homo sapiens
aatgtccctgataac

SEQ ID NO: 951984 - DNA, 15 bp, Homo sapiens
atgtccctgataacg

SEQ ID NO: 951985 - DNA, 15 bp, Homo sapiens
tgtccctgataacgg

SEQ ID NO: 951986 - DNA, 15 bp, Homo sapiens
gtccctgataacggg

SEQ ID NO: 951987 - DNA, 15 bp, Homo sapiens
tccctgataacgggg

SEQ ID NO: 951988 - DNA, 15 bp, Homo sapiens
ccctgataacgggga

SEQ ID NO: 951989 - DNA, 15 bp, Homo sapiens
cctgataacggggac

SEQ ID NO: 951990 - DNA, 15 bp, Homo sapiens
ctgataacggggaca

SEQ ID NO: 951991 - DNA, 15 bp, Homo sapiens
tgataacggggacat

SEQ ID NO: 951992 - DNA, 15 bp, Homo sapiens
gataacggggacatt

SEQ ID NO: 951993 - DNA, 15 bp, Homo sapiens
ataacggggacatta

SEQ ID NO: 951994 - DNA, 15 bp, Homo sapiens
taacggggacattat

SEQ ID NO: 951995 - DNA, 15 bp, Homo sapiens
aacggggacattatg

SEQ ID NO: 951996 - DNA, 15 bp, Homo sapiens
acggggacattatgt

SEQ ID NO: 951997 - DNA, 15 bp, Homo sapiens
cggggacattatgtc

SEQ ID NO: 951998 - DNA, 15 bp, Homo sapiens
ggggacattatgtca

SEQ ID NO: 951999 - DNA, 15 bp, Homo sapiens
gggacattatgtcag

SEQ ID NO: 952000 - DNA, 15 bp, Homo sapiens
ggacattatgtcagc

SEQ ID NO: 952001 - DNA, 15 bp, Homo sapiens
gacattatgtcagcc

SEQ ID NO: 952002 - DNA, 15 bp, Homo sapiens
acattatgtcagccc

SEQ ID NO: 952003 - DNA, 15 bp, Homo sapiens
cattatgtcagcccc

SEQ ID NO: 952004 - DNA, 15 bp, Homo sapiens
attatgtcagccccc

SEQ ID NO: 952005 - DNA, 15 bp, Homo sapiens
ttatgtcagccccct

SEQ ID NO: 952006 - DNA, 15 bp, Homo sapiens
tatgtcagccccctc

SEQ ID NO: 952007 - DNA, 15 bp, Homo sapiens
atgtcagccccctct

SEQ ID NO: 952008 - DNA, 15 bp, Homo sapiens
tgtcagccccctctc

SEQ ID NO: 952009 - DNA, 15 bp, Homo sapiens
gtcagccccctctct

SEQ ID NO: 952010 - DNA, 15 bp, Homo sapiens
tcagccccctctctt

SEQ ID NO: 952011 - DNA, 15 bp, Homo sapiens
cagccccctctctta

SEQ ID NO: 952012 - DNA, 15 bp, Homo sapiens
agccccctctcttac

SEQ ID NO: 952013 - DNA, 15 bp, Homo sapiens
gccccctctcttacg

SEQ ID NO: 952014 - DNA, 15 bp, Homo sapiens
ccccctctcttacgg

SEQ ID NO: 952015 - DNA, 15 bp, Homo sapiens
cccctctcttacggg

SEQ ID NO: 952016 - DNA, 15 bp, Homo sapiens
ccctctcttacggga

SEQ ID NO: 952017 - DNA, 15 bp, Homo sapiens
cctctcttacgggat

SEQ ID NO: 952018 - DNA, 15 bp, Homo sapiens
ctctcttacgggata

SEQ ID NO: 952019 - DNA, 15 bp, Homo sapiens
tctcttacgggataa

SEQ ID NO: 952020 - DNA, 15 bp, Homo sapiens
ctcttacgggataaa

SEQ ID NO: 952021 - DNA, 15 bp, Homo sapiens
tcttacgggataaag

SEQ ID NO: 952022 - DNA, 15 bp, Homo sapiens
cttacgggataaagc

SEQ ID NO: 952023 - DNA, 15 bp, Homo sapiens
ttacgggataaagcc

SEQ ID NO: 952024 - DNA, 15 bp, Homo sapiens
tacgggataaagcca

SEQ ID NO: 952025 - DNA, 15 bp, Homo sapiens
acgggataaagccaa

SEQ ID NO: 952026 - DNA, 15 bp, Homo sapiens
cgggataaagccaag

SEQ ID NO: 952027 - DNA, 15 bp, Homo sapiens
gggataaagccaagt

SEQ ID NO: 952028 - DNA, 15 bp, Homo sapiens
ggataaagccaagta

SEQ ID NO: 952029 - DNA, 15 bp, Homo sapiens
gataaagccaagtaa

SEQ ID NO: 952030 - DNA, 15 bp, Homo sapiens
ataaagccaagtaac

SEQ ID NO: 952031 - DNA, 15 bp, Homo sapiens
taaagccaagtaacc

SEQ ID NO: 952032 - DNA, 15 bp, Homo sapiens
aaagccaagtaacct

SEQ ID NO: 952033 - DNA, 15 bp, Homo sapiens
aagccaagtaacctc

SEQ ID NO: 952034 - DNA, 15 bp, Homo sapiens
agccaagtaacctct

SEQ ID NO: 952035 - DNA, 15 bp, Homo sapiens
gccaagtaacctctc

SEQ ID NO: 952036 - DNA, 15 bp, Homo sapiens
ccaagtaacctctcc

SEQ ID NO: 952037 - DNA, 15 bp, Homo sapiens
caagtaacctctcct

SEQ ID NO: 952038 - DNA, 15 bp, Homo sapiens
aagtaacctctccta

SEQ ID NO: 952039 - DNA, 15 bp, Homo sapiens
agtaacctctcctat

SEQ ID NO: 952040 - DNA, 15 bp, Homo sapiens
gtaacctctcctatt

SEQ ID NO: 952041 - DNA, 15 bp, Homo sapiens
taacctctcctattc

SEQ ID NO: 952042 - DNA, 15 bp, Homo sapiens
aacctctcctattcc

SEQ ID NO: 952043 - DNA, 15 bp, Homo sapiens
acctctcctattcca

SEQ ID NO: 952044 - DNA, 15 bp, Homo sapiens
cctctcctattccaa

SEQ ID NO: 952045 - DNA, 15 bp, Homo sapiens
ctctcctattccaag

SEQ ID NO: 952046 - DNA, 15 bp, Homo sapiens
tctcctattccaagg

SEQ ID NO: 952047 - DNA, 15 bp, Homo sapiens
ctcctattccaaggc

SEQ ID NO: 952048 - DNA, 15 bp, Homo sapiens
tcctattccaaggca

SEQ ID NO: 952049 - DNA, 15 bp, Homo sapiens
cctattccaaggcag

SEQ ID NO: 952050 - DNA, 15 bp, Homo sapiens
ctattccaaggcaga

SEQ ID NO: 952051 - DNA, 15 bp, Homo sapiens
tattccaaggcagaa

SEQ ID NO: 952052 - DNA, 15 bp, Homo sapiens
attccaaggcagaag

SEQ ID NO: 952053 - DNA, 15 bp, Homo sapiens
ttccaaggcagaaga

SEQ ID NO: 952054 - DNA, 15 bp, Homo sapiens
tccaaggcagaagac

SEQ ID NO: 952055 - DNA, 15 bp, Homo sapiens
ccaaggcagaagact

SEQ ID NO: 952056 - DNA, 15 bp, Homo sapiens
caaggcagaagactg

SEQ ID NO: 952057 - DNA, 15 bp, Homo sapiens
aaggcagaagactgg

SEQ ID NO: 952058 - DNA, 15 bp, Homo sapiens
aggcagaagactgga

SEQ ID NO: 952059 - DNA, 15 bp, Homo sapiens
ggcagaagactggag

SEQ ID NO: 952060 - DNA, 15 bp, Homo sapiens
gcagaagactggagg

SEQ ID NO: 952061 - DNA, 15 bp, Homo sapiens
cagaagactggaggt

SEQ ID NO: 952062 - DNA, 15 bp, Homo sapiens
agaagactggaggtt

SEQ ID NO: 952063 - DNA, 15 bp, Homo sapiens
gaagactggaggttt

SEQ ID NO: 952064 - DNA, 15 bp, Homo sapiens
aagactggaggtttc

SEQ ID NO: 952065 - DNA, 15 bp, Homo sapiens
agactggaggtttcc

SEQ ID NO: 952066 - DNA, 15 bp, Homo sapiens
gactggaggtttcct

SEQ ID NO: 952067 - DNA, 15 bp, Homo sapiens
actggaggtttcctc

SEQ ID NO: 952068 - DNA, 15 bp, Homo sapiens
ctggaggtttcctct

SEQ ID NO: 952069 - DNA, 15 bp, Homo sapiens
tggaggtttcctctg

SEQ ID NO: 952070 - DNA, 15 bp, Homo sapiens
ggaggtttcctctgt

SEQ ID NO: 952071 - DNA, 15 bp, Homo sapiens
gaggtttcctctgtg

SEQ ID NO: 952072 - DNA, 15 bp, Homo sapiens
aggtttcctctgtgg

SEQ ID NO: 952073 - DNA, 15 bp, Homo sapiens
ggtttcctctgtgga

SEQ ID NO: 952074 - DNA, 15 bp, Homo sapiens
gtttcctctgtggat

SEQ ID NO: 952075 - DNA, 15 bp, Homo sapiens
tttcctctgtggatt

SEQ ID NO: 952076 - DNA, 15 bp, Homo sapiens
ttcctctgtggatta

SEQ ID NO: 952077 - DNA, 15 bp, Homo sapiens
tcctctgtggattat

SEQ ID NO: 952078 - DNA, 15 bp, Homo sapiens
cctctgtggattatt

SEQ ID NO: 952079 - DNA, 15 bp, Homo sapiens
ctctgtggattattt

SEQ ID NO: 952080 - DNA, 15 bp, Homo sapiens
tctgtggattattta

SEQ ID NO: 952081 - DNA, 15 bp, Homo sapiens
ctgtggattatttaa

SEQ ID NO: 952082 - DNA, 15 bp, Homo sapiens
tgtggattatttaaa

SEQ ID NO: 952083 - DNA, 15 bp, Homo sapiens
gtggattatttaaaa

SEQ ID NO: 952084 - DNA, 15 bp, Homo sapiens
tggattatttaaaac

SEQ ID NO: 952085 - DNA, 15 bp, Homo sapiens
ggattatttaaaaca

SEQ ID NO: 952086 - DNA, 15 bp, Homo sapiens
gattatttaaaacat

SEQ ID NO: 952087 - DNA, 15 bp, Homo sapiens
attatttaaaacata

SEQ ID NO: 952088 - DNA, 15 bp, Homo sapiens
ttatttaaaacatag

SEQ ID NO: 952089 - DNA, 15 bp, Homo sapiens
tatttaaaacatagg

SEQ ID NO: 952090 - DNA, 15 bp, Homo sapiens
atttaaaacataggg

SEQ ID NO: 952091 - DNA, 15 bp, Homo sapiens
tttaaaacatagggt

SEQ ID NO: 952092 - DNA, 15 bp, Homo sapiens
ttaaaacatagggtc

SEQ ID NO: 952093 - DNA, 15 bp, Homo sapiens
taaaacatagggtct

SEQ ID NO: 952094 - DNA, 15 bp, Homo sapiens
aaaacatagggtctc

SEQ ID NO: 952095 - DNA, 15 bp, Homo sapiens
aaacatagggtctct

SEQ ID NO: 952096 - DNA, 15 bp, Homo sapiens
aacatagggtctctg

SEQ ID NO: 952097 - DNA, 15 bp, Homo sapiens
acatagggtctctga

SEQ ID NO: 952098 - DNA, 15 bp, Homo sapiens
catagggtctctgat

SEQ ID NO: 952099 - DNA, 15 bp, Homo sapiens
atagggtctctgata

SEQ ID NO: 952100 - DNA, 15 bp, Homo sapiens
tagggtctctgataa

SEQ ID NO: 952101 - DNA, 15 bp, Homo sapiens
agggtctctgataac

SEQ ID NO: 952102 - DNA, 15 bp, Homo sapiens
gggtctctgataaca

SEQ ID NO: 952103 - DNA, 15 bp, Homo sapiens
ggtctctgataacag

SEQ ID NO: 952104 - DNA, 15 bp, Homo sapiens
gtctctgataacagg

SEQ ID NO: 952105 - DNA, 15 bp, Homo sapiens
tctctgataacaggg

SEQ ID NO: 952106 - DNA, 15 bp, Homo sapiens
ctctgataacaggga

SEQ ID NO: 952107 - DNA, 15 bp, Homo sapiens
tctgataacagggaa

SEQ ID NO: 952108 - DNA, 15 bp, Homo sapiens
ctgataacagggaaa

SEQ ID NO: 952109 - DNA, 15 bp, Homo sapiens
tgataacagggaaaa

SEQ ID NO: 952110 - DNA, 15 bp, Homo sapiens
gataacagggaaaag

SEQ ID NO: 952111 - DNA, 15 bp, Homo sapiens
ataacagggaaaagg

SEQ ID NO: 952112 - DNA, 15 bp, Homo sapiens
taacagggaaaaggc

SEQ ID NO: 952113 - DNA, 15 bp, Homo sapiens
aacagggaaaaggca

SEQ ID NO: 952114 - DNA, 15 bp, Homo sapiens
acagggaaaaggcag

SEQ ID NO: 952115 - DNA, 15 bp, Homo sapiens
cagggaaaaggcagc

SEQ ID NO: 952116 - DNA, 15 bp, Homo sapiens
agggaaaaggcagca

SEQ ID NO: 952117 - DNA, 15 bp, Homo sapiens
gggaaaaggcagcat

SEQ ID NO: 952118 - DNA, 15 bp, Homo sapiens
ggaaaaggcagcata

SEQ ID NO: 952119 - DNA, 15 bp, Homo sapiens
gaaaaggcagcatat

SEQ ID NO: 952120 - DNA, 15 bp, Homo sapiens
aaaaggcagcatatt

SEQ ID NO: 952121 - DNA, 15 bp, Homo sapiens
aaaggcagcatattg

SEQ ID NO: 952122 - DNA, 15 bp, Homo sapiens
aaggcagcatattga

SEQ ID NO: 952123 - DNA, 15 bp, Homo sapiens
aggcagcatattgaa

SEQ ID NO: 952124 - DNA, 15 bp, Homo sapiens
ggcagcatattgaaa

SEQ ID NO: 952125 - DNA, 15 bp, Homo sapiens
gcagcatattgaaaa

SEQ ID NO: 952126 - DNA, 15 bp, Homo sapiens
cagcatattgaaaat

SEQ ID NO: 952127 - DNA, 15 bp, Homo sapiens
agcatattgaaaata

SEQ ID NO: 952128 - DNA, 15 bp, Homo sapiens
gcatattgaaaataa

SEQ ID NO: 952129 - DNA, 15 bp, Homo sapiens
catattgaaaataaa

SEQ ID NO: 952130 - DNA, 15 bp, Homo sapiens
atattgaaaataaag

SEQ ID NO: 952131 - DNA, 15 bp, Homo sapiens
tattgaaaataaagg

SEQ ID NO: 952132 - DNA, 15 bp, Homo sapiens
attgaaaataaaggc

SEQ ID NO: 952133 - DNA, 15 bp, Homo sapiens
ttgaaaataaaggct

SEQ ID NO: 952134 - DNA, 15 bp, Homo sapiens
tgaaaataaaggcta

SEQ ID NO: 952135 - DNA, 15 bp, Homo sapiens
gaaaataaaggctaa

SEQ ID NO: 952136 - DNA, 15 bp, Homo sapiens
aaaataaaggctaag

SEQ ID NO: 952137 - DNA, 15 bp, Homo sapiens
aaataaaggctaagt

SEQ ID NO: 952138 - DNA, 15 bp, Homo sapiens
aataaaggctaagta

SEQ ID NO: 952139 - DNA, 15 bp, Homo sapiens
ataaaggctaagtaa

SEQ ID NO: 952140 - DNA, 15 bp, Homo sapiens
taaaggctaagtaaa

SEQ ID NO: 952141 - DNA, 15 bp, Homo sapiens
aaaggctaagtaaaa

SEQ ID NO: 952142 - DNA, 15 bp, Homo sapiens
aaggctaagtaaaaa

SEQ ID NO: 952143 - DNA, 15 bp, Homo sapiens
aggctaagtaaaaaa

SEQ ID NO: 952144 - DNA, 15 bp, Homo sapiens
ggctaagtaaaaaaa

SEQ ID NO: 952145 - DNA, 15 bp, Homo sapiens
gctaagtaaaaaaaa

SEQ ID NO: 952146 - DNA, 15 bp, Homo sapiens
ctaagtaaaaaaaag

SEQ ID NO: 952147 - DNA, 15 bp, Homo sapiens
taagtaaaaaaaagt

SEQ ID NO: 952148 - DNA, 15 bp, Homo sapiens
aagtaaaaaaaagtc

SEQ ID NO: 952149 - DNA, 15 bp, Homo sapiens
agtaaaaaaaagtct

SEQ ID NO: 952150 - DNA, 15 bp, Homo sapiens
gtaaaaaaaagtctg

SEQ ID NO: 952151 - DNA, 15 bp, Homo sapiens
taaaaaaaagtctgt

SEQ ID NO: 952152 - DNA, 15 bp, Homo sapiens
aaaaaaaagtctgtc

SEQ ID NO: 952153 - DNA, 15 bp, Homo sapiens
aaaaaaagtctgtcc

SEQ ID NO: 952154 - DNA, 15 bp, Homo sapiens
aaaaaagtctgtcca

SEQ ID NO: 952155 - DNA, 15 bp, Homo sapiens
aaaaagtctgtccat

SEQ ID NO: 952156 - DNA, 15 bp, Homo sapiens
aaaagtctgtccata

SEQ ID NO: 952157 - DNA, 15 bp, Homo sapiens
aaagtctgtccatat

SEQ ID NO: 952158 - DNA, 15 bp, Homo sapiens
aagtctgtccatata

SEQ ID NO: 952159 - DNA, 15 bp, Homo sapiens
agtctgtccatatat

SEQ ID NO: 952160 - DNA, 15 bp, Homo sapiens
gtctgtccatatatt

SEQ ID NO: 952161 - DNA, 15 bp, Homo sapiens
tctgtccatatattt

SEQ ID NO: 952162 - DNA, 15 bp, Homo sapiens
ctgtccatatatttt

SEQ ID NO: 952163 - DNA, 15 bp, Homo sapiens
tgtccatatatttta

SEQ ID NO: 952164 - DNA, 15 bp, Homo sapiens
gtccatatattttag

SEQ ID NO: 952165 - DNA, 15 bp, Homo sapiens
tccatatattttagg

SEQ ID NO: 952166 - DNA, 15 bp, Homo sapiens
ccatatattttaggt

SEQ ID NO: 952167 - DNA, 15 bp, Homo sapiens
catatattttaggtt

SEQ ID NO: 952168 - DNA, 15 bp, Homo sapiens
atatattttaggttg

SEQ ID NO: 952169 - DNA, 15 bp, Homo sapiens
tatattttaggttga

SEQ ID NO: 952170 - DNA, 15 bp, Homo sapiens
atattttaggttgag

SEQ ID NO: 952171 - DNA, 15 bp, Homo sapiens
tattttaggttgaga

SEQ ID NO: 952172 - DNA, 15 bp, Homo sapiens
attttaggttgagac

SEQ ID NO: 952173 - DNA, 15 bp, Homo sapiens
ttttaggttgagacc

SEQ ID NO: 952174 - DNA, 15 bp, Homo sapiens
tttaggttgagaccc

SEQ ID NO: 952175 - DNA, 15 bp, Homo sapiens
ttaggttgagaccct

SEQ ID NO: 952176 - DNA, 15 bp, Homo sapiens
taggttgagaccctc

SEQ ID NO: 952177 - DNA, 15 bp, Homo sapiens
aggttgagaccctcc

SEQ ID NO: 952178 - DNA, 15 bp, Homo sapiens
ggttgagaccctcca

SEQ ID NO: 952179 - DNA, 15 bp, Homo sapiens
gttgagaccctccat

SEQ ID NO: 952180 - DNA, 15 bp, Homo sapiens
ttgagaccctccatc

SEQ ID NO: 952181 - DNA, 15 bp, Homo sapiens
tgagaccctccatcc

SEQ ID NO: 952182 - DNA, 15 bp, Homo sapiens
gagaccctccatccc

SEQ ID NO: 952183 - DNA, 15 bp, Homo sapiens
agaccctccatccct

SEQ ID NO: 952184 - DNA, 15 bp, Homo sapiens
gaccctccatccctt

SEQ ID NO: 952185 - DNA, 15 bp, Homo sapiens
accctccatcccttt

SEQ ID NO: 952186 - DNA, 15 bp, Homo sapiens
ccctccatccctttt

SEQ ID NO: 952187 - DNA, 15 bp, Homo sapiens
cctccatcccttttc

SEQ ID NO: 952188 - DNA, 15 bp, Homo sapiens
ctccatcccttttct

SEQ ID NO: 952189 - DNA, 15 bp, Homo sapiens
tccatcccttttcta

SEQ ID NO: 952190 - DNA, 15 bp, Homo sapiens
ccatcccttttctac

SEQ ID NO: 952191 - DNA, 15 bp, Homo sapiens
catcccttttctact

SEQ ID NO: 952192 - DNA, 15 bp, Homo sapiens
atcccttttctactg

SEQ ID NO: 952193 - DNA, 15 bp, Homo sapiens
tcccttttctactgg

SEQ ID NO: 952194 - DNA, 15 bp, Homo sapiens
cccttttctactggg

SEQ ID NO: 952195 - DNA, 15 bp, Homo sapiens
ccttttctactgggc

SEQ ID NO: 952196 - DNA, 15 bp, Homo sapiens
cttttctactgggca

SEQ ID NO: 952197 - DNA, 15 bp, Homo sapiens
ttttctactgggcac

SEQ ID NO: 952198 - DNA, 15 bp, Homo sapiens
tttctactgggcaca

SEQ ID NO: 952199 - DNA, 15 bp, Homo sapiens
ttctactgggcacaa

SEQ ID NO: 952200 - DNA, 15 bp, Homo sapiens
tctactgggcacaaa

SEQ ID NO: 952201 - DNA, 15 bp, Homo sapiens
ctactgggcacaaaa

SEQ ID NO: 952202 - DNA, 15 bp, Homo sapiens
tactgggcacaaaat

SEQ ID NO: 952203 - DNA, 15 bp, Homo sapiens
actgggcacaaaatt

SEQ ID NO: 952204 - DNA, 15 bp, Homo sapiens
ctgggcacaaaattc

SEQ ID NO: 952205 - DNA, 15 bp, Homo sapiens
tgggcacaaaattct

SEQ ID NO: 952206 - DNA, 15 bp, Homo sapiens
gggcacaaaattctg

SEQ ID NO: 952207 - DNA, 15 bp, Homo sapiens
ggcacaaaattctgt

SEQ ID NO: 952208 - DNA, 15 bp, Homo sapiens
gcacaaaattctgta

SEQ ID NO: 952209 - DNA, 15 bp, Homo sapiens
cacaaaattctgtaa

SEQ ID NO: 952210 - DNA, 15 bp, Homo sapiens
acaaaattctgtaaa

SEQ ID NO: 952211 - DNA, 15 bp, Homo sapiens
caaaattctgtaaaa

SEQ ID NO: 952212 - DNA, 15 bp, Homo sapiens
aaaattctgtaaaac

SEQ ID NO: 952213 - DNA, 15 bp, Homo sapiens
aaattctgtaaaact

SEQ ID NO: 952214 - DNA, 15 bp, Homo sapiens
aattctgtaaaactt

SEQ ID NO: 952215 - DNA, 15 bp, Homo sapiens
attctgtaaaacttt

SEQ ID NO: 952216 - DNA, 15 bp, Homo sapiens
ttctgtaaaacttta

SEQ ID NO: 952217 - DNA, 15 bp, Homo sapiens
tctgtaaaactttac

SEQ ID NO: 952218 - DNA, 15 bp, Homo sapiens
ctgtaaaactttaca

SEQ ID NO: 952219 - DNA, 15 bp, Homo sapiens
tgtaaaactttacaa

SEQ ID NO: 952220 - DNA, 15 bp, Homo sapiens
gtaaaactttacaac

SEQ ID NO: 952221 - DNA, 15 bp, Homo sapiens
taaaactttacaaca

SEQ ID NO: 952222 - DNA, 15 bp, Homo sapiens
aaaactttacaacac

SEQ ID NO: 952223 - DNA, 15 bp, Homo sapiens
aaactttacaacact

SEQ ID NO: 952224 - DNA, 15 bp, Homo sapiens
aactttacaacactg

SEQ ID NO: 952225 - DNA, 15 bp, Homo sapiens
actttacaacactga

SEQ ID NO: 952226 - DNA, 15 bp, Homo sapiens
ctttacaacactgaa

SEQ ID NO: 952227 - DNA, 15 bp, Homo sapiens
tttacaacactgaaa

SEQ ID NO: 952228 - DNA, 15 bp, Homo sapiens
ttacaacactgaaaa

SEQ ID NO: 952229 - DNA, 15 bp, Homo sapiens
tacaacactgaaaac

SEQ ID NO: 952230 - DNA, 15 bp, Homo sapiens
acaacactgaaaaca

SEQ ID NO: 952231 - DNA, 15 bp, Homo sapiens
caacactgaaaacaa

SEQ ID NO: 952232 - DNA, 15 bp, Homo sapiens
aacactgaaaacaaa

SEQ ID NO: 952233 - DNA, 15 bp, Homo sapiens
acactgaaaacaaat

SEQ ID NO: 952234 - DNA, 15 bp, Homo sapiens
cactgaaaacaaata

SEQ ID NO: 952235 - DNA, 15 bp, Homo sapiens
actgaaaacaaatag

SEQ ID NO: 952236 - DNA, 15 bp, Homo sapiens
ctgaaaacaaatagg

SEQ ID NO: 952237 - DNA, 15 bp, Homo sapiens
tgaaaacaaatagga

SEQ ID NO: 952238 - DNA, 15 bp, Homo sapiens
gaaaacaaataggat

SEQ ID NO: 952239 - DNA, 15 bp, Homo sapiens
aaaacaaataggatt

SEQ ID NO: 952240 - DNA, 15 bp, Homo sapiens
aaacaaataggattc

SEQ ID NO: 952241 - DNA, 15 bp, Homo sapiens
aacaaataggattct

SEQ ID NO: 952242 - DNA, 15 bp, Homo sapiens
acaaataggattcta

SEQ ID NO: 952243 - DNA, 15 bp, Homo sapiens
caaataggattctaa

SEQ ID NO: 952244 - DNA, 15 bp, Homo sapiens
aaataggattctaaa

SEQ ID NO: 952245 - DNA, 15 bp, Homo sapiens
aataggattctaaaa

SEQ ID NO: 952246 - DNA, 15 bp, Homo sapiens
ataggattctaaaag

SEQ ID NO: 952247 - DNA, 15 bp, Homo sapiens
taggattctaaaagc

SEQ ID NO: 952248 - DNA, 15 bp, Homo sapiens
aggattctaaaagct

SEQ ID NO: 952249 - DNA, 15 bp, Homo sapiens
ggattctaaaagctt

SEQ ID NO: 952250 - DNA, 15 bp, Homo sapiens
gattctaaaagcttc

SEQ ID NO: 952251 - DNA, 15 bp, Homo sapiens
attctaaaagcttct

SEQ ID NO: 952252 - DNA, 15 bp, Homo sapiens
ttctaaaagcttctg

SEQ ID NO: 952253 - DNA, 15 bp, Homo sapiens
tctaaaagcttctgg

SEQ ID NO: 952254 - DNA, 15 bp, Homo sapiens
ctaaaagcttctgga

SEQ ID NO: 952255 - DNA, 15 bp, Homo sapiens
taaaagcttctggaa

SEQ ID NO: 952256 - DNA, 15 bp, Homo sapiens
aaaagcttctggaaa

SEQ ID NO: 952257 - DNA, 15 bp, Homo sapiens
aaagcttctggaaat

SEQ ID NO: 952258 - DNA, 15 bp, Homo sapiens
aagcttctggaaata

SEQ ID NO: 952259 - DNA, 15 bp, Homo sapiens
agcttctggaaataa

SEQ ID NO: 952260 - DNA, 15 bp, Homo sapiens
gcttctggaaataaa

SEQ ID NO: 952261 - DNA, 15 bp, Homo sapiens
cttctggaaataaaa

SEQ ID NO: 952262 - DNA, 15 bp, Homo sapiens
ttctggaaataaaaa

SEQ ID NO: 952263 - DNA, 15 bp, Homo sapiens
tctggaaataaaaaa

SEQ ID NO: 952264 - DNA, 15 bp, Homo sapiens
ctggaaataaaaaag

SEQ ID NO: 952265 - DNA, 15 bp, Homo sapiens
tggaaataaaaaagg

SEQ ID NO: 952266 - DNA, 15 bp, Homo sapiens
ggaaataaaaaaggt

SEQ ID NO: 952267 - DNA, 15 bp, Homo sapiens
gaaataaaaaaggtt

SEQ ID NO: 952268 - DNA, 15 bp, Homo sapiens
aaataaaaaaggttc

SEQ ID NO: 952269 - DNA, 15 bp, Homo sapiens
aataaaaaaggttcc

SEQ ID NO: 952270 - DNA, 15 bp, Homo sapiens
ataaaaaaggttcca

SEQ ID NO: 952271 - DNA, 15 bp, Homo sapiens
taaaaaaggttccag

SEQ ID NO: 952272 - DNA, 15 bp, Homo sapiens
aaaaaaggttccaga

SEQ ID NO: 952273 - DNA, 15 bp, Homo sapiens
aaaaaggttccagag

SEQ ID NO: 952274 - DNA, 15 bp, Homo sapiens
aaaaggttccagagt

SEQ ID NO: 952275 - DNA, 15 bp, Homo sapiens
aaaggttccagagta

SEQ ID NO: 952276 - DNA, 15 bp, Homo sapiens
aaggttccagagtaa

SEQ ID NO: 952277 - DNA, 15 bp, Homo sapiens
aggttccagagtaag

SEQ ID NO: 952278 - DNA, 15 bp, Homo sapiens
ggttccagagtaagg

SEQ ID NO: 952279 - DNA, 15 bp, Homo sapiens
gttccagagtaagga

SEQ ID NO: 952280 - DNA, 15 bp, Homo sapiens
ttccagagtaaggat

SEQ ID NO: 952281 - DNA, 15 bp, Homo sapiens
tccagagtaaggatc

SEQ ID NO: 952282 - DNA, 15 bp, Homo sapiens
ccagagtaaggatca

SEQ ID NO: 952283 - DNA, 15 bp, Homo sapiens
cagagtaaggatcag

SEQ ID NO: 952284 - DNA, 15 bp, Homo sapiens
agagtaaggatcagg

SEQ ID NO: 952285 - DNA, 15 bp, Homo sapiens
gagtaaggatcagga

SEQ ID NO: 952286 - DNA, 15 bp, Homo sapiens
agtaaggatcaggaa

SEQ ID NO: 952287 - DNA, 15 bp, Homo sapiens
gtaaggatcaggaat

SEQ ID NO: 952288 - DNA, 15 bp, Homo sapiens
taaggatcaggaatc

SEQ ID NO: 952289 - DNA, 15 bp, Homo sapiens
aaggatcaggaatca

SEQ ID NO: 952290 - DNA, 15 bp, Homo sapiens
aggatcaggaatcaa

SEQ ID NO: 952291 - DNA, 15 bp, Homo sapiens
ggatcaggaatcaaa

SEQ ID NO: 952292 - DNA, 15 bp, Homo sapiens
gatcaggaatcaaaa

SEQ ID NO: 952293 - DNA, 15 bp, Homo sapiens
atcaggaatcaaaaa

SEQ ID NO: 952294 - DNA, 15 bp, Homo sapiens
tcaggaatcaaaaat

SEQ ID NO: 952295 - DNA, 15 bp, Homo sapiens
caggaatcaaaaatc

SEQ ID NO: 952296 - DNA, 15 bp, Homo sapiens
aggaatcaaaaatct

SEQ ID NO: 952297 - DNA, 15 bp, Homo sapiens
ggaatcaaaaatctt

SEQ ID NO: 952298 - DNA, 15 bp, Homo sapiens
gaatcaaaaatcttt

SEQ ID NO: 952299 - DNA, 15 bp, Homo sapiens
aatcaaaaatctttt

SEQ ID NO: 952300 - DNA, 15 bp, Homo sapiens
atcaaaaatcttttt

SEQ ID NO: 952301 - DNA, 15 bp, Homo sapiens
tcaaaaatctttttt

SEQ ID NO: 952302 - DNA, 15 bp, Homo sapiens
caaaaatcttttttt

SEQ ID NO: 952303 - DNA, 15 bp, Homo sapiens
aaaaatctttttttt

SEQ ID NO: 952304 - DNA, 15 bp, Homo sapiens
aaaatcttttttttt

SEQ ID NO: 952305 - DNA, 15 bp, Homo sapiens
aaatctttttttttt

SEQ ID NO: 952306 - DNA, 15 bp, Homo sapiens
aatcttttttttttc

SEQ ID NO: 952307 - DNA, 15 bp, Homo sapiens
atcttttttttttca

SEQ ID NO: 952308 - DNA, 15 bp, Homo sapiens
tcttttttttttcac

SEQ ID NO: 952309 - DNA, 15 bp, Homo sapiens
cttttttttttcacc

SEQ ID NO: 952310 - DNA, 15 bp, Homo sapiens
ttttttttttcaccc

SEQ ID NO: 952311 - DNA, 15 bp, Homo sapiens
tttttttttcaccca

SEQ ID NO: 952312 - DNA, 15 bp, Homo sapiens
ttttttttcacccaa

SEQ ID NO: 952313 - DNA, 15 bp, Homo sapiens
tttttttcacccaaa

SEQ ID NO: 952314 - DNA, 15 bp, Homo sapiens
ttttttcacccaaaa

SEQ ID NO: 952315 - DNA, 15 bp, Homo sapiens
tttttcacccaaaat

SEQ ID NO: 952316 - DNA, 15 bp, Homo sapiens
ttttcacccaaaatg

SEQ ID NO: 952317 - DNA, 15 bp, Homo sapiens
tttcacccaaaatgc

SEQ ID NO: 952318 - DNA, 15 bp, Homo sapiens
ttcacccaaaatgct

SEQ ID NO: 952319 - DNA, 15 bp, Homo sapiens
tcacccaaaatgctg

SEQ ID NO: 952320 - DNA, 15 bp, Homo sapiens
cacccaaaatgctgt

SEQ ID NO: 952321 - DNA, 15 bp, Homo sapiens
acccaaaatgctgtt

SEQ ID NO: 952322 - DNA, 15 bp, Homo sapiens
cccaaaatgctgtta

SEQ ID NO: 952323 - DNA, 15 bp, Homo sapiens
ccaaaatgctgttag

SEQ ID NO: 952324 - DNA, 15 bp, Homo sapiens
caaaatgctgttaga

SEQ ID NO: 952325 - DNA, 15 bp, Homo sapiens
aaaatgctgttagaa

SEQ ID NO: 952326 - DNA, 15 bp, Homo sapiens
aaatgctgttagaaa

SEQ ID NO: 952327 - DNA, 15 bp, Homo sapiens
aatgctgttagaaac

SEQ ID NO: 952328 - DNA, 15 bp, Homo sapiens
atgctgttagaaaca

SEQ ID NO: 952329 - DNA, 15 bp, Homo sapiens
tgctgttagaaacaa

SEQ ID NO: 952330 - DNA, 15 bp, Homo sapiens
gctgttagaaacaaa

SEQ ID NO: 952331 - DNA, 15 bp, Homo sapiens
ctgttagaaacaaaa

SEQ ID NO: 952332 - DNA, 15 bp, Homo sapiens
tgttagaaacaaaac

SEQ ID NO: 952333 - DNA, 15 bp, Homo sapiens
gttagaaacaaaaca

SEQ ID NO: 952334 - DNA, 15 bp, Homo sapiens
ttagaaacaaaacaa

SEQ ID NO: 952335 - DNA, 15 bp, Homo sapiens
tagaaacaaaacaaa

SEQ ID NO: 952336 - DNA, 15 bp, Homo sapiens
agaaacaaaacaaaa

SEQ ID NO: 952337 - DNA, 15 bp, Homo sapiens
gaaacaaaacaaaac

SEQ ID NO: 952338 - DNA, 15 bp, Homo sapiens
aaacaaaacaaaaca

SEQ ID NO: 952339 - DNA, 15 bp, Homo sapiens
aacaaaacaaaacaa

SEQ ID NO: 952340 - DNA, 15 bp, Homo sapiens
acaaaacaaaacaaa

SEQ ID NO: 952341 - DNA, 15 bp, Homo sapiens
caaaacaaaacaaaa

SEQ ID NO: 952342 - DNA, 15 bp, Homo sapiens
aaaacaaaacaaaaa

SEQ ID NO: 952343 - DNA, 15 bp, Homo sapiens
aaacaaaacaaaaaa

SEQ ID NO: 952344 - DNA, 15 bp, Homo sapiens
aacaaaacaaaaaat

SEQ ID NO: 952345 - DNA, 15 bp, Homo sapiens
acaaaacaaaaaatt

SEQ ID NO: 952346 - DNA, 15 bp, Homo sapiens
caaaacaaaaaattc

SEQ ID NO: 952347 - DNA, 15 bp, Homo sapiens
aaaacaaaaaattcc

SEQ ID NO: 952348 - DNA, 15 bp, Homo sapiens
aaacaaaaaattccc

SEQ ID NO: 952349 - DNA, 15 bp, Homo sapiens
aacaaaaaattccct

SEQ ID NO: 952350 - DNA, 15 bp, Homo sapiens
acaaaaaattccctt

SEQ ID NO: 952351 - DNA, 15 bp, Homo sapiens
caaaaaattcccttc

SEQ ID NO: 952352 - DNA, 15 bp, Homo sapiens
aaaaaattcccttcc

SEQ ID NO: 952353 - DNA, 15 bp, Homo sapiens
aaaaattcccttcca

SEQ ID NO: 952354 - DNA, 15 bp, Homo sapiens
aaaattcccttccaa

SEQ ID NO: 952355 - DNA, 15 bp, Homo sapiens
aaattcccttccaaa

SEQ ID NO: 952356 - DNA, 15 bp, Homo sapiens
aattcccttccaaaa

SEQ ID NO: 952357 - DNA, 15 bp, Homo sapiens
attcccttccaaaat

SEQ ID NO: 952358 - DNA, 15 bp, Homo sapiens
ttcccttccaaaata

SEQ ID NO: 952359 - DNA, 15 bp, Homo sapiens
tcccttccaaaataa

SEQ ID NO: 952360 - DNA, 15 bp, Homo sapiens
cccttccaaaataaa

SEQ ID NO: 952361 - DNA, 15 bp, Homo sapiens
ccttccaaaataaaa

SEQ ID NO: 952362 - DNA, 15 bp, Homo sapiens
cttccaaaataaaaa

SEQ ID NO: 952363 - DNA, 15 bp, Homo sapiens
ttccaaaataaaaaa

SEQ ID NO: 952364 - DNA, 15 bp, Homo sapiens
tccaaaataaaaaag

SEQ ID NO: 952365 - DNA, 15 bp, Homo sapiens
ccaaaataaaaaagg

SEQ ID NO: 952366 - DNA, 15 bp, Homo sapiens
caaaataaaaaagga

SEQ ID NO: 952367 - DNA, 15 bp, Homo sapiens
aaaataaaaaaggag

SEQ ID NO: 952368 - DNA, 15 bp, Homo sapiens
aaataaaaaaggagt

SEQ ID NO: 952369 - DNA, 15 bp, Homo sapiens
aataaaaaaggagta

SEQ ID NO: 952370 - DNA, 15 bp, Homo sapiens
ataaaaaaggagtaa

SEQ ID NO: 952371 - DNA, 15 bp, Homo sapiens
taaaaaaggagtaat

SEQ ID NO: 952372 - DNA, 15 bp, Homo sapiens
aaaaaaggagtaatg

SEQ ID NO: 952373 - DNA, 15 bp, Homo sapiens
aaaaaggagtaatgc

SEQ ID NO: 952374 - DNA, 15 bp, Homo sapiens
aaaaggagtaatgct

SEQ ID NO: 952375 - DNA, 15 bp, Homo sapiens
aaaggagtaatgctt

SEQ ID NO: 952376 - DNA, 15 bp, Homo sapiens
aaggagtaatgcttc

SEQ ID NO: 952377 - DNA, 15 bp, Homo sapiens
aggagtaatgcttca

SEQ ID NO: 952378 - DNA, 15 bp, Homo sapiens
ggagtaatgcttcaa

SEQ ID NO: 952379 - DNA, 15 bp, Homo sapiens
gagtaatgcttcaaa

SEQ ID NO: 952380 - DNA, 15 bp, Homo sapiens
agtaatgcttcaaac

SEQ ID NO: 952381 - DNA, 15 bp, Homo sapiens
gtaatgcttcaaact

SEQ ID NO: 952382 - DNA, 15 bp, Homo sapiens
taatgcttcaaactt

SEQ ID NO: 952383 - DNA, 15 bp, Homo sapiens
aatgcttcaaacttc

SEQ ID NO: 952384 - DNA, 15 bp, Homo sapiens
atgcttcaaacttct

SEQ ID NO: 952385 - DNA, 15 bp, Homo sapiens
tgcttcaaacttctg

SEQ ID NO: 952386 - DNA, 15 bp, Homo sapiens
gcttcaaacttctga

SEQ ID NO: 952387 - DNA, 15 bp, Homo sapiens
cttcaaacttctgag

SEQ ID NO: 952388 - DNA, 15 bp, Homo sapiens
ttcaaacttctgagg

SEQ ID NO: 952389 - DNA, 15 bp, Homo sapiens
tcaaacttctgaggc

SEQ ID NO: 952390 - DNA, 15 bp, Homo sapiens
caaacttctgaggca

SEQ ID NO: 952391 - DNA, 15 bp, Homo sapiens
aaacttctgaggcat

SEQ ID NO: 952392 - DNA, 15 bp, Homo sapiens
aacttctgaggcata

SEQ ID NO: 952393 - DNA, 15 bp, Homo sapiens
acttctgaggcatat

SEQ ID NO: 952394 - DNA, 15 bp, Homo sapiens
cttctgaggcatatt

SEQ ID NO: 952395 - DNA, 15 bp, Homo sapiens
ttctgaggcatattg

SEQ ID NO: 952396 - DNA, 15 bp, Homo sapiens
tctgaggcatattga

SEQ ID NO: 952397 - DNA, 15 bp, Homo sapiens
ctgaggcatattgat

SEQ ID NO: 952398 - DNA, 15 bp, Homo sapiens
tgaggcatattgatt

SEQ ID NO: 952399 - DNA, 15 bp, Homo sapiens
gaggcatattgattt

SEQ ID NO: 952400 - DNA, 15 bp, Homo sapiens
aggcatattgatttc

SEQ ID NO: 952401 - DNA, 15 bp, Homo sapiens
ggcatattgatttct

SEQ ID NO: 952402 - DNA, 15 bp, Homo sapiens
gcatattgatttcta

SEQ ID NO: 952403 - DNA, 15 bp, Homo sapiens
catattgatttctaa

SEQ ID NO: 952404 - DNA, 15 bp, Homo sapiens
atattgatttctaaa

SEQ ID NO: 952405 - DNA, 15 bp, Homo sapiens
tattgatttctaaac

SEQ ID NO: 952406 - DNA, 15 bp, Homo sapiens
attgatttctaaact

SEQ ID NO: 952407 - DNA, 15 bp, Homo sapiens
ttgatttctaaacta

SEQ ID NO: 952408 - DNA, 15 bp, Homo sapiens
tgatttctaaactaa

SEQ ID NO: 952409 - DNA, 15 bp, Homo sapiens
gatttctaaactaaa

SEQ ID NO: 952410 - DNA, 15 bp, Homo sapiens
atttctaaactaaaa

SEQ ID NO: 952411 - DNA, 15 bp, Homo sapiens
tttctaaactaaaat

SEQ ID NO: 952412 - DNA, 15 bp, Homo sapiens
ttctaaactaaaatt

SEQ ID NO: 952413 - DNA, 15 bp, Homo sapiens
tctaaactaaaattc

SEQ ID NO: 952414 - DNA, 15 bp, Homo sapiens
ctaaactaaaattct

SEQ ID NO: 952415 - DNA, 15 bp, Homo sapiens
taaactaaaattcta

SEQ ID NO: 952416 - DNA, 15 bp, Homo sapiens
aaactaaaattctat

SEQ ID NO: 952417 - DNA, 15 bp, Homo sapiens
aactaaaattctata

SEQ ID NO: 952418 - DNA, 15 bp, Homo sapiens
actaaaattctatat

SEQ ID NO: 952419 - DNA, 15 bp, Homo sapiens
ctaaaattctatatt

SEQ ID NO: 952420 - DNA, 15 bp, Homo sapiens
taaaattctatatta

SEQ ID NO: 952421 - DNA, 15 bp, Homo sapiens
aaaattctatattaa

SEQ ID NO: 952422 - DNA, 15 bp, Homo sapiens
aaattctatattaat

SEQ ID NO: 952423 - DNA, 15 bp, Homo sapiens
aattctatattaata

SEQ ID NO: 952424 - DNA, 15 bp, Homo sapiens
attctatattaataa

SEQ ID NO: 952425 - DNA, 15 bp, Homo sapiens
ttctatattaataaa

SEQ ID NO: 952426 - DNA, 15 bp, Homo sapiens
tctatattaataaac

SEQ ID NO: 952427 - DNA, 15 bp, Homo sapiens
ctatattaataaacc

SEQ ID NO: 952428 - DNA, 15 bp, Homo sapiens
tatattaataaacct

SEQ ID NO: 952429 - DNA, 15 bp, Homo sapiens
atattaataaaccta

SEQ ID NO: 952430 - DNA, 15 bp, Homo sapiens
tattaataaacctaa

SEQ ID NO: 952431 - DNA, 15 bp, Homo sapiens
attaataaacctaag

SEQ ID NO: 952432 - DNA, 15 bp, Homo sapiens
ttaataaacctaagt

SEQ ID NO: 952433 - DNA, 15 bp, Homo sapiens
taataaacctaagtt

SEQ ID NO: 952434 - DNA, 15 bp, Homo sapiens
aataaacctaagttt

SEQ ID NO: 952435 - DNA, 15 bp, Homo sapiens
ataaacctaagtttt

SEQ ID NO: 952436 - DNA, 15 bp, Homo sapiens
taaacctaagttttc

SEQ ID NO: 952437 - DNA, 15 bp, Homo sapiens
aaacctaagttttcc

SEQ ID NO: 952438 - DNA, 15 bp, Homo sapiens
aacctaagttttcca

SEQ ID NO: 952439 - DNA, 15 bp, Homo sapiens
acctaagttttccag

SEQ ID NO: 952440 - DNA, 15 bp, Homo sapiens
cctaagttttccagg

SEQ ID NO: 952441 - DNA, 15 bp, Homo sapiens
ctaagttttccaggt

SEQ ID NO: 952442 - DNA, 15 bp, Homo sapiens
taagttttccaggtg

SEQ ID NO: 952443 - DNA, 15 bp, Homo sapiens
aagttttccaggtgg

SEQ ID NO: 952444 - DNA, 15 bp, Homo sapiens
agttttccaggtggg

SEQ ID NO: 952445 - DNA, 15 bp, Homo sapiens
gttttccaggtggga

SEQ ID NO: 952446 - DNA, 15 bp, Homo sapiens
ttttccaggtgggaa

SEQ ID NO: 952447 - DNA, 15 bp, Homo sapiens
tttccaggtgggaaa

SEQ ID NO: 952448 - DNA, 15 bp, Homo sapiens
ttccaggtgggaaag

SEQ ID NO: 952449 - DNA, 15 bp, Homo sapiens
tccaggtgggaaagt

SEQ ID NO: 952450 - DNA, 15 bp, Homo sapiens
ccaggtgggaaagta

SEQ ID NO: 952451 - DNA, 15 bp, Homo sapiens
caggtgggaaagtag

SEQ ID NO: 952452 - DNA, 15 bp, Homo sapiens
aggtgggaaagtaga

SEQ ID NO: 952453 - DNA, 15 bp, Homo sapiens
ggtgggaaagtagaa

SEQ ID NO: 952454 - DNA, 15 bp, Homo sapiens
gtgggaaagtagaat

SEQ ID NO: 952455 - DNA, 15 bp, Homo sapiens
tgggaaagtagaata

SEQ ID NO: 952456 - DNA, 15 bp, Homo sapiens
gggaaagtagaataa

SEQ ID NO: 952457 - DNA, 15 bp, Homo sapiens
ggaaagtagaataaa

SEQ ID NO: 952458 - DNA, 15 bp, Homo sapiens
gaaagtagaataaaa

SEQ ID NO: 952459 - DNA, 15 bp, Homo sapiens
aaagtagaataaaaa

SEQ ID NO: 952460 - DNA, 15 bp, Homo sapiens
aagtagaataaaaac

SEQ ID NO: 952461 - DNA, 15 bp, Homo sapiens
agtagaataaaaacc

SEQ ID NO: 952462 - DNA, 15 bp, Homo sapiens
gtagaataaaaacct

SEQ ID NO: 952463 - DNA, 15 bp, Homo sapiens
tagaataaaaaccta

SEQ ID NO: 952464 - DNA, 15 bp, Homo sapiens
agaataaaaacctaa

SEQ ID NO: 952465 - DNA, 15 bp, Homo sapiens
gaataaaaacctaag

SEQ ID NO: 952466 - DNA, 15 bp, Homo sapiens
aataaaaacctaagt

SEQ ID NO: 952467 - DNA, 15 bp, Homo sapiens
ataaaaacctaagtc

SEQ ID NO: 952468 - DNA, 15 bp, Homo sapiens
taaaaacctaagtca

SEQ ID NO: 952469 - DNA, 15 bp, Homo sapiens
aaaaacctaagtcat

SEQ ID NO: 952470 - DNA, 15 bp, Homo sapiens
aaaacctaagtcatt

SEQ ID NO: 952471 - DNA, 15 bp, Homo sapiens
aaacctaagtcatta

SEQ ID NO: 952472 - DNA, 15 bp, Homo sapiens
aacctaagtcattaa

SEQ ID NO: 952473 - DNA, 15 bp, Homo sapiens
acctaagtcattaaa

SEQ ID NO: 952474 - DNA, 15 bp, Homo sapiens
cctaagtcattaaag

SEQ ID NO: 952475 - DNA, 15 bp, Homo sapiens
ctaagtcattaaagg

SEQ ID NO: 952476 - DNA, 15 bp, Homo sapiens
taagtcattaaaggt

SEQ ID NO: 952477 - DNA, 15 bp, Homo sapiens
aagtcattaaaggtc

SEQ ID NO: 952478 - DNA, 15 bp, Homo sapiens
agtcattaaaggtct

SEQ ID NO: 952479 - DNA, 15 bp, Homo sapiens
gtcattaaaggtctc

SEQ ID NO: 952480 - DNA, 15 bp, Homo sapiens
tcattaaaggtctca

SEQ ID NO: 952481 - DNA, 15 bp, Homo sapiens
cattaaaggtctcaa

SEQ ID NO: 952482 - DNA, 15 bp, Homo sapiens
attaaaggtctcaaa

SEQ ID NO: 952483 - DNA, 15 bp, Homo sapiens
ttaaaggtctcaaaa

SEQ ID NO: 952484 - DNA, 15 bp, Homo sapiens
taaaggtctcaaaaa

SEQ ID NO: 952485 - DNA, 15 bp, Homo sapiens
aaaggtctcaaaaaa

SEQ ID NO: 952486 - DNA, 15 bp, Homo sapiens
aaggtctcaaaaaat

SEQ ID NO: 952487 - DNA, 15 bp, Homo sapiens
aggtctcaaaaaatt

SEQ ID NO: 952488 - DNA, 15 bp, Homo sapiens
ggtctcaaaaaattt

SEQ ID NO: 952489 - DNA, 15 bp, Homo sapiens
gtctcaaaaaattta

SEQ ID NO: 952490 - DNA, 15 bp, Homo sapiens
tctcaaaaaatttac

SEQ ID NO: 952491 - DNA, 15 bp, Homo sapiens
ctcaaaaaatttacc

SEQ ID NO: 952492 - DNA, 15 bp, Homo sapiens
tcaaaaaatttacct

SEQ ID NO: 952493 - DNA, 15 bp, Homo sapiens
caaaaaatttacctc

SEQ ID NO: 952494 - DNA, 15 bp, Homo sapiens
aaaaaatttacctct

SEQ ID NO: 952495 - DNA, 15 bp, Homo sapiens
aaaaatttacctctg

SEQ ID NO: 952496 - DNA, 15 bp, Homo sapiens
aaaatttacctctga

SEQ ID NO: 952497 - DNA, 15 bp, Homo sapiens
aaatttacctctgat

SEQ ID NO: 952498 - DNA, 15 bp, Homo sapiens
aatttacctctgatg

SEQ ID NO: 952499 - DNA, 15 bp, Homo sapiens
atttacctctgatgt

SEQ ID NO: 952500 - DNA, 15 bp, Homo sapiens
tttacctctgatgtt

SEQ ID NO: 952501 - DNA, 15 bp, Homo sapiens
ttacctctgatgttc

SEQ ID NO: 952502 - DNA, 15 bp, Homo sapiens
tacctctgatgttcc

SEQ ID NO: 952503 - DNA, 15 bp, Homo sapiens
acctctgatgttcct

SEQ ID NO: 952504 - DNA, 15 bp, Homo sapiens
cctctgatgttcctt

SEQ ID NO: 952505 - DNA, 15 bp, Homo sapiens
ctctgatgttccttt

SEQ ID NO: 952506 - DNA, 15 bp, Homo sapiens
tctgatgttcctttt

SEQ ID NO: 952507 - DNA, 15 bp, Homo sapiens
ctgatgttccttttc

SEQ ID NO: 952508 - DNA, 15 bp, Homo sapiens
tgatgttccttttca

SEQ ID NO: 952509 - DNA, 15 bp, Homo sapiens
gatgttccttttcaa

SEQ ID NO: 952510 - DNA, 15 bp, Homo sapiens
atgttccttttcaag

SEQ ID NO: 952511 - DNA, 15 bp, Homo sapiens
tgttccttttcaaga

SEQ ID NO: 952512 - DNA, 15 bp, Homo sapiens
gttccttttcaagaa

SEQ ID NO: 952513 - DNA, 15 bp, Homo sapiens
ttccttttcaagaaa

SEQ ID NO: 952514 - DNA, 15 bp, Homo sapiens
tccttttcaagaaac

SEQ ID NO: 952515 - DNA, 15 bp, Homo sapiens
ccttttcaagaaact

SEQ ID NO: 952516 - DNA, 15 bp, Homo sapiens
cttttcaagaaacta

SEQ ID NO: 952517 - DNA, 15 bp, Homo sapiens
ttttcaagaaactag

SEQ ID NO: 952518 - DNA, 15 bp, Homo sapiens
tttcaagaaactagg

SEQ ID NO: 952519 - DNA, 15 bp, Homo sapiens
ttcaagaaactagga

SEQ ID NO: 952520 - DNA, 15 bp, Homo sapiens
tcaagaaactaggag

SEQ ID NO: 952521 - DNA, 15 bp, Homo sapiens
caagaaactaggaga

SEQ ID NO: 952522 - DNA, 15 bp, Homo sapiens
aagaaactaggagaa

SEQ ID NO: 952523 - DNA, 15 bp, Homo sapiens
agaaactaggagaaa

SEQ ID NO: 952524 - DNA, 15 bp, Homo sapiens
gaaactaggagaaaa

SEQ ID NO: 952525 - DNA, 15 bp, Homo sapiens
aaactaggagaaaag

SEQ ID NO: 952526 - DNA, 15 bp, Homo sapiens
aactaggagaaaagg

SEQ ID NO: 952527 - DNA, 15 bp, Homo sapiens
actaggagaaaaggt

SEQ ID NO: 952528 - DNA, 15 bp, Homo sapiens
ctaggagaaaaggta

SEQ ID NO: 952529 - DNA, 15 bp, Homo sapiens
taggagaaaaggtac

SEQ ID NO: 952530 - DNA, 15 bp, Homo sapiens
aggagaaaaggtaca

SEQ ID NO: 952531 - DNA, 15 bp, Homo sapiens
ggagaaaaggtacac

SEQ ID NO: 952532 - DNA, 15 bp, Homo sapiens
gagaaaaggtacact

SEQ ID NO: 952533 - DNA, 15 bp, Homo sapiens
agaaaaggtacacta

SEQ ID NO: 952534 - DNA, 15 bp, Homo sapiens
gaaaaggtacactag

SEQ ID NO: 952535 - DNA, 15 bp, Homo sapiens
aaaaggtacactagt

SEQ ID NO: 952536 - DNA, 15 bp, Homo sapiens
aaaggtacactagta

SEQ ID NO: 952537 - DNA, 15 bp, Homo sapiens
aaggtacactagtaa

SEQ ID NO: 952538 - DNA, 15 bp, Homo sapiens
aggtacactagtaaa

SEQ ID NO: 952539 - DNA, 15 bp, Homo sapiens
ggtacactagtaaaa

SEQ ID NO: 952540 - DNA, 15 bp, Homo sapiens
gtacactagtaaaat

SEQ ID NO: 952541 - DNA, 15 bp, Homo sapiens
tacactagtaaaatg

SEQ ID NO: 952542 - DNA, 15 bp, Homo sapiens
acactagtaaaatga

SEQ ID NO: 952543 - DNA, 15 bp, Homo sapiens
cactagtaaaatgaa

SEQ ID NO: 952544 - DNA, 15 bp, Homo sapiens
actagtaaaatgaaa

SEQ ID NO: 952545 - DNA, 15 bp, Homo sapiens
ctagtaaaatgaaac

SEQ ID NO: 952546 - DNA, 15 bp, Homo sapiens
tagtaaaatgaaaca

SEQ ID NO: 952547 - DNA, 15 bp, Homo sapiens
agtaaaatgaaacag

SEQ ID NO: 952548 - DNA, 15 bp, Homo sapiens
gtaaaatgaaacagt

SEQ ID NO: 952549 - DNA, 15 bp, Homo sapiens
taaaatgaaacagta

SEQ ID NO: 952550 - DNA, 15 bp, Homo sapiens
aaaatgaaacagtat

SEQ ID NO: 952551 - DNA, 15 bp, Homo sapiens
aaatgaaacagtata

SEQ ID NO: 952552 - DNA, 15 bp, Homo sapiens
aatgaaacagtatat

SEQ ID NO: 952553 - DNA, 15 bp, Homo sapiens
atgaaacagtatatt

SEQ ID NO: 952554 - DNA, 15 bp, Homo sapiens
tgaaacagtatatta

SEQ ID NO: 952555 - DNA, 15 bp, Homo sapiens
gaaacagtatattaa

SEQ ID NO: 952556 - DNA, 15 bp, Homo sapiens
aaacagtatattaag

SEQ ID NO: 952557 - DNA, 15 bp, Homo sapiens
aacagtatattaaga

SEQ ID NO: 952558 - DNA, 15 bp, Homo sapiens
acagtatattaagaa

SEQ ID NO: 952559 - DNA, 15 bp, Homo sapiens
cagtatattaagaaa

SEQ ID NO: 952560 - DNA, 15 bp, Homo sapiens
agtatattaagaaac

SEQ ID NO: 952561 - DNA, 15 bp, Homo sapiens
gtatattaagaaaca

SEQ ID NO: 952562 - DNA, 15 bp, Homo sapiens
tatattaagaaacaa

SEQ ID NO: 952563 - DNA, 15 bp, Homo sapiens
atattaagaaacaaa

SEQ ID NO: 952564 - DNA, 15 bp, Homo sapiens
tattaagaaacaaag

SEQ ID NO: 952565 - DNA, 15 bp, Homo sapiens
attaagaaacaaaga

SEQ ID NO: 952566 - DNA, 15 bp, Homo sapiens
ttaagaaacaaagat

SEQ ID NO: 952567 - DNA, 15 bp, Homo sapiens
taagaaacaaagata

SEQ ID NO: 952568 - DNA, 15 bp, Homo sapiens
aagaaacaaagatac

SEQ ID NO: 952569 - DNA, 15 bp, Homo sapiens
agaaacaaagataca

SEQ ID NO: 952570 - DNA, 15 bp, Homo sapiens
gaaacaaagatacag

SEQ ID NO: 952571 - DNA, 15 bp, Homo sapiens
aaacaaagatacaga

SEQ ID NO: 952572 - DNA, 15 bp, Homo sapiens
aacaaagatacagaa

SEQ ID NO: 952573 - DNA, 15 bp, Homo sapiens
acaaagatacagaaa

SEQ ID NO: 952574 - DNA, 15 bp, Homo sapiens
caaagatacagaaat

SEQ ID NO: 952575 - DNA, 15 bp, Homo sapiens
aaagatacagaaatc

SEQ ID NO: 952576 - DNA, 15 bp, Homo sapiens
aagatacagaaatca

SEQ ID NO: 952577 - DNA, 15 bp, Homo sapiens
agatacagaaatcag

SEQ ID NO: 952578 - DNA, 15 bp, Homo sapiens
gatacagaaatcagg

SEQ ID NO: 952579 - DNA, 15 bp, Homo sapiens
atacagaaatcagga

SEQ ID NO: 952580 - DNA, 15 bp, Homo sapiens
tacagaaatcaggaa

SEQ ID NO: 952581 - DNA, 15 bp, Homo sapiens
acagaaatcaggaaa

SEQ ID NO: 952582 - DNA, 15 bp, Homo sapiens
cagaaatcaggaaat

SEQ ID NO: 952583 - DNA, 15 bp, Homo sapiens
agaaatcaggaaatg

SEQ ID NO: 952584 - DNA, 15 bp, Homo sapiens
gaaatcaggaaatgg

SEQ ID NO: 952585 - DNA, 15 bp, Homo sapiens
aaatcaggaaatggg

SEQ ID NO: 952586 - DNA, 15 bp, Homo sapiens
aatcaggaaatggga

SEQ ID NO: 952587 - DNA, 15 bp, Homo sapiens
atcaggaaatgggat

SEQ ID NO: 952588 - DNA, 15 bp, Homo sapiens
tcaggaaatgggatc

SEQ ID NO: 952589 - DNA, 15 bp, Homo sapiens
caggaaatgggatcc

SEQ ID NO: 952590 - DNA, 15 bp, Homo sapiens
aggaaatgggatcca

SEQ ID NO: 952591 - DNA, 15 bp, Homo sapiens
ggaaatgggatccaa

SEQ ID NO: 952592 - DNA, 15 bp, Homo sapiens
gaaatgggatccaat

SEQ ID NO: 952593 - DNA, 15 bp, Homo sapiens
aaatgggatccaata

SEQ ID NO: 952594 - DNA, 15 bp, Homo sapiens
aatgggatccaatat

SEQ ID NO: 952595 - DNA, 15 bp, Homo sapiens
atgggatccaatata

SEQ ID NO: 952596 - DNA, 15 bp, Homo sapiens
tgggatccaatatag

SEQ ID NO: 952597 - DNA, 15 bp, Homo sapiens
gggatccaatatagg

SEQ ID NO: 952598 - DNA, 15 bp, Homo sapiens
ggatccaatatagga

SEQ ID NO: 952599 - DNA, 15 bp, Homo sapiens
gatccaatataggac

SEQ ID NO: 952600 - DNA, 15 bp, Homo sapiens
atccaatataggaca

SEQ ID NO: 952601 - DNA, 15 bp, Homo sapiens
tccaatataggacag

SEQ ID NO: 952602 - DNA, 15 bp, Homo sapiens
ccaatataggacagc

SEQ ID NO: 952603 - DNA, 15 bp, Homo sapiens
caatataggacagct

SEQ ID NO: 952604 - DNA, 15 bp, Homo sapiens
aatataggacagcta

SEQ ID NO: 952605 - DNA, 15 bp, Homo sapiens
atataggacagctat

SEQ ID NO: 952606 - DNA, 15 bp, Homo sapiens
tataggacagctata

SEQ ID NO: 952607 - DNA, 15 bp, Homo sapiens
ataggacagctatat

SEQ ID NO: 952608 - DNA, 15 bp, Homo sapiens
taggacagctatata

SEQ ID NO: 952609 - DNA, 15 bp, Homo sapiens
aggacagctatatat

SEQ ID NO: 952610 - DNA, 15 bp, Homo sapiens
ggacagctatatata

SEQ ID NO: 952611 - DNA, 15 bp, Homo sapiens
gacagctatatatac

SEQ ID NO: 952612 - DNA, 15 bp, Homo sapiens
acagctatatataca

SEQ ID NO: 952613 - DNA, 15 bp, Homo sapiens
cagctatatatacat

SEQ ID NO: 952614 - DNA, 15 bp, Homo sapiens
agctatatatacatg

SEQ ID NO: 952615 - DNA, 15 bp, Homo sapiens
gctatatatacatgt

SEQ ID NO: 952616 - DNA, 15 bp, Homo sapiens
ctatatatacatgtt

SEQ ID NO: 952617 - DNA, 15 bp, Homo sapiens
tatatatacatgttg

SEQ ID NO: 952618 - DNA, 15 bp, Homo sapiens
atatatacatgttgt

SEQ ID NO: 952619 - DNA, 15 bp, Homo sapiens
tatatacatgttgta

SEQ ID NO: 952620 - DNA, 15 bp, Homo sapiens
atatacatgttgtaa

SEQ ID NO: 952621 - DNA, 15 bp, Homo sapiens
tatacatgttgtaat

SEQ ID NO: 952622 - DNA, 15 bp, Homo sapiens
atacatgttgtaatt

SEQ ID NO: 952623 - DNA, 15 bp, Homo sapiens
tacatgttgtaattt

SEQ ID NO: 952624 - DNA, 15 bp, Homo sapiens
acatgttgtaattta

SEQ ID NO: 952625 - DNA, 15 bp, Homo sapiens
catgttgtaatttag

SEQ ID NO: 952626 - DNA, 15 bp, Homo sapiens
atgttgtaatttaga

SEQ ID NO: 952627 - DNA, 15 bp, Homo sapiens
tgttgtaatttagaa

SEQ ID NO: 952628 - DNA, 15 bp, Homo sapiens
gttgtaatttagaaa

SEQ ID NO: 952629 - DNA, 15 bp, Homo sapiens
ttgtaatttagaaaa

SEQ ID NO: 952630 - DNA, 15 bp, Homo sapiens
tgtaatttagaaaaa

SEQ ID NO: 952631 - DNA, 15 bp, Homo sapiens
gtaatttagaaaaac

SEQ ID NO: 952632 - DNA, 15 bp, Homo sapiens
taatttagaaaaacc

SEQ ID NO: 952633 - DNA, 15 bp, Homo sapiens
aatttagaaaaaccg

SEQ ID NO: 952634 - DNA, 15 bp, Homo sapiens
atttagaaaaaccga

SEQ ID NO: 952635 - DNA, 15 bp, Homo sapiens
tttagaaaaaccgaa

SEQ ID NO: 952636 - DNA, 15 bp, Homo sapiens
ttagaaaaaccgaat

SEQ ID NO: 952637 - DNA, 15 bp, Homo sapiens
tagaaaaaccgaatg

SEQ ID NO: 952638 - DNA, 15 bp, Homo sapiens
agaaaaaccgaatga

SEQ ID NO: 952639 - DNA, 15 bp, Homo sapiens
gaaaaaccgaatgaa

SEQ ID NO: 952640 - DNA, 15 bp, Homo sapiens
aaaaaccgaatgaaa

SEQ ID NO: 952641 - DNA, 15 bp, Homo sapiens
aaaaccgaatgaaac

SEQ ID NO: 952642 - DNA, 15 bp, Homo sapiens
aaaccgaatgaaaca

SEQ ID NO: 952643 - DNA, 15 bp, Homo sapiens
aaccgaatgaaacaa

SEQ ID NO: 952644 - DNA, 15 bp, Homo sapiens
accgaatgaaacaac

SEQ ID NO: 952645 - DNA, 15 bp, Homo sapiens
ccgaatgaaacaact

SEQ ID NO: 952646 - DNA, 15 bp, Homo sapiens
cgaatgaaacaactc

SEQ ID NO: 952647 - DNA, 15 bp, Homo sapiens
gaatgaaacaactca

SEQ ID NO: 952648 - DNA, 15 bp, Homo sapiens
aatgaaacaactcag

SEQ ID NO: 952649 - DNA, 15 bp, Homo sapiens
atgaaacaactcagg

SEQ ID NO: 952650 - DNA, 15 bp, Homo sapiens
tgaaacaactcagga

SEQ ID NO: 952651 - DNA, 15 bp, Homo sapiens
gaaacaactcaggat

SEQ ID NO: 952652 - DNA, 15 bp, Homo sapiens
aaacaactcaggata

SEQ ID NO: 952653 - DNA, 15 bp, Homo sapiens
aacaactcaggatat

SEQ ID NO: 952654 - DNA, 15 bp, Homo sapiens
acaactcaggatatc

SEQ ID NO: 952655 - DNA, 15 bp, Homo sapiens
caactcaggatatct

SEQ ID NO: 952656 - DNA, 15 bp, Homo sapiens
aactcaggatatcta

SEQ ID NO: 952657 - DNA, 15 bp, Homo sapiens
actcaggatatctac

SEQ ID NO: 952658 - DNA, 15 bp, Homo sapiens
ctcaggatatctacc

SEQ ID NO: 952659 - DNA, 15 bp, Homo sapiens
tcaggatatctacct

SEQ ID NO: 952660 - DNA, 15 bp, Homo sapiens
caggatatctacctt

SEQ ID NO: 952661 - DNA, 15 bp, Homo sapiens
aggatatctaccttt

SEQ ID NO: 952662 - DNA, 15 bp, Homo sapiens
ggatatctacctttg

SEQ ID NO: 952663 - DNA, 15 bp, Homo sapiens
gatatctacctttgg

SEQ ID NO: 952664 - DNA, 15 bp, Homo sapiens
atatctacctttggg

SEQ ID NO: 952665 - DNA, 15 bp, Homo sapiens
tatctacctttgggt

SEQ ID NO: 952666 - DNA, 15 bp, Homo sapiens
atctacctttgggta

SEQ ID NO: 952667 - DNA, 15 bp, Homo sapiens
tctacctttgggtag

SEQ ID NO: 952668 - DNA, 15 bp, Homo sapiens
ctacctttgggtagg

SEQ ID NO: 952669 - DNA, 15 bp, Homo sapiens
tacctttgggtaggt

SEQ ID NO: 952670 - DNA, 15 bp, Homo sapiens
acctttgggtaggta

SEQ ID NO: 952671 - DNA, 15 bp, Homo sapiens
cctttgggtaggtaa

SEQ ID NO: 952672 - DNA, 15 bp, Homo sapiens
ctttgggtaggtaaa

SEQ ID NO: 952673 - DNA, 15 bp, Homo sapiens
tttgggtaggtaaaa

SEQ ID NO: 952674 - DNA, 15 bp, Homo sapiens
ttgggtaggtaaaaa

SEQ ID NO: 952675 - DNA, 15 bp, Homo sapiens
tgggtaggtaaaaat

SEQ ID NO: 952676 - DNA, 15 bp, Homo sapiens
gggtaggtaaaaatc

SEQ ID NO: 952677 - DNA, 15 bp, Homo sapiens
ggtaggtaaaaatca

SEQ ID NO: 952678 - DNA, 15 bp, Homo sapiens
gtaggtaaaaatcaa

SEQ ID NO: 952679 - DNA, 15 bp, Homo sapiens
taggtaaaaatcaag

SEQ ID NO: 952680 - DNA, 15 bp, Homo sapiens
aggtaaaaatcaagt

SEQ ID NO: 952681 - DNA, 15 bp, Homo sapiens
ggtaaaaatcaagtt

SEQ ID NO: 952682 - DNA, 15 bp, Homo sapiens
gtaaaaatcaagttt

SEQ ID NO: 952683 - DNA, 15 bp, Homo sapiens
taaaaatcaagtttt

SEQ ID NO: 952684 - DNA, 15 bp, Homo sapiens
aaaaatcaagttttg

SEQ ID NO: 952685 - DNA, 15 bp, Homo sapiens
aaaatcaagttttgt

SEQ ID NO: 952686 - DNA, 15 bp, Homo sapiens
aaatcaagttttgtg

SEQ ID NO: 952687 - DNA, 15 bp, Homo sapiens
aatcaagttttgtgt

SEQ ID NO: 952688 - DNA, 15 bp, Homo sapiens
atcaagttttgtgta

SEQ ID NO: 952689 - DNA, 15 bp, Homo sapiens
tcaagttttgtgtac

SEQ ID NO: 952690 - DNA, 15 bp, Homo sapiens
caagttttgtgtaca

SEQ ID NO: 952691 - DNA, 15 bp, Homo sapiens
aagttttgtgtacag

SEQ ID NO: 952692 - DNA, 15 bp, Homo sapiens
agttttgtgtacagg

SEQ ID NO: 952693 - DNA, 15 bp, Homo sapiens
gttttgtgtacaggt

SEQ ID NO: 952694 - DNA, 15 bp, Homo sapiens
ttttgtgtacaggtc

SEQ ID NO: 952695 - DNA, 15 bp, Homo sapiens
tttgtgtacaggtca

SEQ ID NO: 952696 - DNA, 15 bp, Homo sapiens
ttgtgtacaggtcag

SEQ ID NO: 952697 - DNA, 15 bp, Homo sapiens
tgtgtacaggtcaga

SEQ ID NO: 952698 - DNA, 15 bp, Homo sapiens
gtgtacaggtcagaa

SEQ ID NO: 952699 - DNA, 15 bp, Homo sapiens
tgtacaggtcagaaa

SEQ ID NO: 952700 - DNA, 15 bp, Homo sapiens
gtacaggtcagaaac

SEQ ID NO: 952701 - DNA, 15 bp, Homo sapiens
tacaggtcagaaacc

SEQ ID NO: 952702 - DNA, 15 bp, Homo sapiens
acaggtcagaaacct

SEQ ID NO: 952703 - DNA, 15 bp, Homo sapiens
caggtcagaaacctc

SEQ ID NO: 952704 - DNA, 15 bp, Homo sapiens
aggtcagaaacctct

SEQ ID NO: 952705 - DNA, 15 bp, Homo sapiens
ggtcagaaacctctc

SEQ ID NO: 952706 - DNA, 15 bp, Homo sapiens
gtcagaaacctctct

SEQ ID NO: 952707 - DNA, 15 bp, Homo sapiens
tcagaaacctctctt

SEQ ID NO: 952708 - DNA, 15 bp, Homo sapiens
cagaaacctctcttc

SEQ ID NO: 952709 - DNA, 15 bp, Homo sapiens
agaaacctctcttcc

SEQ ID NO: 952710 - DNA, 15 bp, Homo sapiens
gaaacctctcttccc

SEQ ID NO: 952711 - DNA, 15 bp, Homo sapiens
aaacctctcttccca

SEQ ID NO: 952712 - DNA, 15 bp, Homo sapiens
aacctctcttcccat

SEQ ID NO: 952713 - DNA, 15 bp, Homo sapiens
acctctcttcccata

SEQ ID NO: 952714 - DNA, 15 bp, Homo sapiens
cctctcttcccataa

SEQ ID NO: 952715 - DNA, 15 bp, Homo sapiens
ctctcttcccataaa

SEQ ID NO: 952716 - DNA, 15 bp, Homo sapiens
tctcttcccataaat

SEQ ID NO: 952717 - DNA, 15 bp, Homo sapiens
ctcttcccataaata

SEQ ID NO: 952718 - DNA, 15 bp, Homo sapiens
tcttcccataaataa

SEQ ID NO: 952719 - DNA, 15 bp, Homo sapiens
cttcccataaataac

SEQ ID NO: 952720 - DNA, 15 bp, Homo sapiens
ttcccataaataacc

SEQ ID NO: 952721 - DNA, 15 bp, Homo sapiens
tcccataaataacct

SEQ ID NO: 952722 - DNA, 15 bp, Homo sapiens
cccataaataacctc

SEQ ID NO: 952723 - DNA, 15 bp, Homo sapiens
ccataaataacctca

SEQ ID NO: 952724 - DNA, 15 bp, Homo sapiens
cataaataacctcag

SEQ ID NO: 952725 - DNA, 15 bp, Homo sapiens
ataaataacctcagg

SEQ ID NO: 952726 - DNA, 15 bp, Homo sapiens
taaataacctcaggc

SEQ ID NO: 952727 - DNA, 15 bp, Homo sapiens
aaataacctcaggcc

SEQ ID NO: 952728 - DNA, 15 bp, Homo sapiens
aataacctcaggcca

SEQ ID NO: 952729 - DNA, 15 bp, Homo sapiens
ataacctcaggccac

SEQ ID NO: 952730 - DNA, 15 bp, Homo sapiens
taacctcaggccact

SEQ ID NO: 952731 - DNA, 15 bp, Homo sapiens
aacctcaggccactg

SEQ ID NO: 952732 - DNA, 15 bp, Homo sapiens
acctcaggccactgg

SEQ ID NO: 952733 - DNA, 15 bp, Homo sapiens
cctcaggccactggc

SEQ ID NO: 952734 - DNA, 15 bp, Homo sapiens
ctcaggccactggct

SEQ ID NO: 952735 - DNA, 15 bp, Homo sapiens
tcaggccactggctt

SEQ ID NO: 952736 - DNA, 15 bp, Homo sapiens
caggccactggcttg

SEQ ID NO: 952737 - DNA, 15 bp, Homo sapiens
aggccactggcttgg

SEQ ID NO: 952738 - DNA, 15 bp, Homo sapiens
ggccactggcttggt

SEQ ID NO: 952739 - DNA, 15 bp, Homo sapiens
gccactggcttggta

SEQ ID NO: 952740 - DNA, 15 bp, Homo sapiens
ccactggcttggtaa

SEQ ID NO: 952741 - DNA, 15 bp, Homo sapiens
cactggcttggtaac

SEQ ID NO: 952742 - DNA, 15 bp, Homo sapiens
actggcttggtaaca

SEQ ID NO: 952743 - DNA, 15 bp, Homo sapiens
ctggcttggtaacat

SEQ ID NO: 952744 - DNA, 15 bp, Homo sapiens
tggcttggtaacatc

SEQ ID NO: 952745 - DNA, 15 bp, Homo sapiens
ggcttggtaacatca

SEQ ID NO: 952746 - DNA, 15 bp, Homo sapiens
gcttggtaacatcaa

SEQ ID NO: 952747 - DNA, 15 bp, Homo sapiens
cttggtaacatcaat

SEQ ID NO: 952748 - DNA, 15 bp, Homo sapiens
ttggtaacatcaatt

SEQ ID NO: 952749 - DNA, 15 bp, Homo sapiens
tggtaacatcaattc

SEQ ID NO: 952750 - DNA, 15 bp, Homo sapiens
ggtaacatcaattca

SEQ ID NO: 952751 - DNA, 15 bp, Homo sapiens
gtaacatcaattcac

SEQ ID NO: 952752 - DNA, 15 bp, Homo sapiens
taacatcaattcact

SEQ ID NO: 952753 - DNA, 15 bp, Homo sapiens
aacatcaattcactt

SEQ ID NO: 952754 - DNA, 15 bp, Homo sapiens
acatcaattcacttg

SEQ ID NO: 952755 - DNA, 15 bp, Homo sapiens
catcaattcacttgg

SEQ ID NO: 952756 - DNA, 15 bp, Homo sapiens
atcaattcacttggg

SEQ ID NO: 952757 - DNA, 15 bp, Homo sapiens
tcaattcacttgggg

SEQ ID NO: 952758 - DNA, 15 bp, Homo sapiens
caattcacttggggt

SEQ ID NO: 952759 - DNA, 15 bp, Homo sapiens
aattcacttggggtg

SEQ ID NO: 952760 - DNA, 15 bp, Homo sapiens
attcacttggggtga

SEQ ID NO: 952761 - DNA, 15 bp, Homo sapiens
ttcacttggggtgac

SEQ ID NO: 952762 - DNA, 15 bp, Homo sapiens
tcacttggggtgaca

SEQ ID NO: 952763 - DNA, 15 bp, Homo sapiens
cacttggggtgacaa

SEQ ID NO: 952764 - DNA, 15 bp, Homo sapiens
acttggggtgacaaa

SEQ ID NO: 952765 - DNA, 15 bp, Homo sapiens
cttggggtgacaaac

SEQ ID NO: 952766 - DNA, 15 bp, Homo sapiens
ttggggtgacaaact

SEQ ID NO: 952767 - DNA, 15 bp, Homo sapiens
tggggtgacaaactg

SEQ ID NO: 952768 - DNA, 15 bp, Homo sapiens
ggggtgacaaactgt

SEQ ID NO: 952769 - DNA, 15 bp, Homo sapiens
gggtgacaaactgtt

SEQ ID NO: 952770 - DNA, 15 bp, Homo sapiens
ggtgacaaactgttg

SEQ ID NO: 952771 - DNA, 15 bp, Homo sapiens
gtgacaaactgttgt

SEQ ID NO: 952772 - DNA, 15 bp, Homo sapiens
tgacaaactgttgtt

SEQ ID NO: 952773 - DNA, 15 bp, Homo sapiens
gacaaactgttgttt

SEQ ID NO: 952774 - DNA, 15 bp, Homo sapiens
acaaactgttgtttg

SEQ ID NO: 952775 - DNA, 15 bp, Homo sapiens
caaactgttgtttgg

SEQ ID NO: 952776 - DNA, 15 bp, Homo sapiens
aaactgttgtttggt

SEQ ID NO: 952777 - DNA, 15 bp, Homo sapiens
aactgttgtttggtt

SEQ ID NO: 952778 - DNA, 15 bp, Homo sapiens
actgttgtttggtta

SEQ ID NO: 952779 - DNA, 15 bp, Homo sapiens
ctgttgtttggttaa

SEQ ID NO: 952780 - DNA, 15 bp, Homo sapiens
tgttgtttggttaaa

SEQ ID NO: 952781 - DNA, 15 bp, Homo sapiens
gttgtttggttaaat

SEQ ID NO: 952782 - DNA, 15 bp, Homo sapiens
ttgtttggttaaatg

SEQ ID NO: 952783 - DNA, 15 bp, Homo sapiens
tgtttggttaaatgt

SEQ ID NO: 952784 - DNA, 15 bp, Homo sapiens
gtttggttaaatgtt

SEQ ID NO: 952785 - DNA, 15 bp, Homo sapiens
tttggttaaatgttc

SEQ ID NO: 952786 - DNA, 15 bp, Homo sapiens
ttggttaaatgttct

SEQ ID NO: 952787 - DNA, 15 bp, Homo sapiens
tggttaaatgttcta

SEQ ID NO: 952788 - DNA, 15 bp, Homo sapiens
ggttaaatgttctaa

SEQ ID NO: 952789 - DNA, 15 bp, Homo sapiens
gttaaatgttctaac

SEQ ID NO: 952790 - DNA, 15 bp, Homo sapiens
ttaaatgttctaacc

SEQ ID NO: 952791 - DNA, 15 bp, Homo sapiens
taaatgttctaacca

SEQ ID NO: 952792 - DNA, 15 bp, Homo sapiens
aaatgttctaaccac

SEQ ID NO: 952793 - DNA, 15 bp, Homo sapiens
aatgttctaaccaca

SEQ ID NO: 952794 - DNA, 15 bp, Homo sapiens
atgttctaaccacag

SEQ ID NO: 952795 - DNA, 15 bp, Homo sapiens
tgttctaaccacagg

SEQ ID NO: 952796 - DNA, 15 bp, Homo sapiens
gttctaaccacagga

SEQ ID NO: 952797 - DNA, 15 bp, Homo sapiens
ttctaaccacaggaa

SEQ ID NO: 952798 - DNA, 15 bp, Homo sapiens
tctaaccacaggaaa

SEQ ID NO: 952799 - DNA, 15 bp, Homo sapiens
ctaaccacaggaaag

SEQ ID NO: 952800 - DNA, 15 bp, Homo sapiens
taaccacaggaaagt

SEQ ID NO: 952801 - DNA, 15 bp, Homo sapiens
aaccacaggaaagtt

SEQ ID NO: 952802 - DNA, 15 bp, Homo sapiens
accacaggaaagttt

SEQ ID NO: 952803 - DNA, 15 bp, Homo sapiens
ccacaggaaagttta

SEQ ID NO: 952804 - DNA, 15 bp, Homo sapiens
cacaggaaagtttaa

SEQ ID NO: 952805 - DNA, 15 bp, Homo sapiens
acaggaaagtttaaa

SEQ ID NO: 952806 - DNA, 15 bp, Homo sapiens
caggaaagtttaaaa

SEQ ID NO: 952807 - DNA, 15 bp, Homo sapiens
aggaaagtttaaaat

SEQ ID NO: 952808 - DNA, 15 bp, Homo sapiens
ggaaagtttaaaatt

SEQ ID NO: 952809 - DNA, 15 bp, Homo sapiens
gaaagtttaaaatta

SEQ ID NO: 952810 - DNA, 15 bp, Homo sapiens
aaagtttaaaattaa

SEQ ID NO: 952811 - DNA, 15 bp, Homo sapiens
aagtttaaaattaat

SEQ ID NO: 952812 - DNA, 15 bp, Homo sapiens
agtttaaaattaata

SEQ ID NO: 952813 - DNA, 15 bp, Homo sapiens
gtttaaaattaatag

SEQ ID NO: 952814 - DNA, 15 bp, Homo sapiens
tttaaaattaataga

SEQ ID NO: 952815 - DNA, 15 bp, Homo sapiens
ttaaaattaatagaa

SEQ ID NO: 952816 - DNA, 15 bp, Homo sapiens
taaaattaatagaag

SEQ ID NO: 952817 - DNA, 15 bp, Homo sapiens
aaaattaatagaaga

SEQ ID NO: 952818 - DNA, 15 bp, Homo sapiens
aaattaatagaagaa

SEQ ID NO: 952819 - DNA, 15 bp, Homo sapiens
aattaatagaagaaa

SEQ ID NO: 952820 - DNA, 15 bp, Homo sapiens
attaatagaagaaaa

SEQ ID NO: 952821 - DNA, 15 bp, Homo sapiens
ttaatagaagaaaaa

SEQ ID NO: 952822 - DNA, 15 bp, Homo sapiens
taatagaagaaaaaa

SEQ ID NO: 952823 - DNA, 15 bp, Homo sapiens
aatagaagaaaaaag

SEQ ID NO: 952824 - DNA, 15 bp, Homo sapiens
atagaagaaaaaagt

SEQ ID NO: 952825 - DNA, 15 bp, Homo sapiens
tagaagaaaaaagta

SEQ ID NO: 952826 - DNA, 15 bp, Homo sapiens
agaagaaaaaagtaa

SEQ ID NO: 952827 - DNA, 15 bp, Homo sapiens
gaagaaaaaagtaaa

SEQ ID NO: 952828 - DNA, 15 bp, Homo sapiens
aagaaaaaagtaaat

SEQ ID NO: 952829 - DNA, 15 bp, Homo sapiens
agaaaaaagtaaatt

SEQ ID NO: 952830 - DNA, 15 bp, Homo sapiens
gaaaaaagtaaatta

SEQ ID NO: 952831 - DNA, 15 bp, Homo sapiens
aaaaaagtaaattaa

SEQ ID NO: 952832 - DNA, 15 bp, Homo sapiens
aaaaagtaaattaaa

SEQ ID NO: 952833 - DNA, 15 bp, Homo sapiens
aaaagtaaattaaac

SEQ ID NO: 952834 - DNA, 15 bp, Homo sapiens
aaagtaaattaaacc

SEQ ID NO: 952835 - DNA, 15 bp, Homo sapiens
aagtaaattaaacct

SEQ ID NO: 952836 - DNA, 15 bp, Homo sapiens
agtaaattaaacctg

SEQ ID NO: 952837 - DNA, 15 bp, Homo sapiens
gtaaattaaacctgt

SEQ ID NO: 952838 - DNA, 15 bp, Homo sapiens
taaattaaacctgtg

SEQ ID NO: 952839 - DNA, 15 bp, Homo sapiens
aaattaaacctgtgg

SEQ ID NO: 952840 - DNA, 15 bp, Homo sapiens
aattaaacctgtggt

SEQ ID NO: 952841 - DNA, 15 bp, Homo sapiens
attaaacctgtggtt

SEQ ID NO: 952842 - DNA, 15 bp, Homo sapiens
ttaaacctgtggttt

SEQ ID NO: 952843 - DNA, 15 bp, Homo sapiens
taaacctgtggtttc

SEQ ID NO: 952844 - DNA, 15 bp, Homo sapiens
aaacctgtggtttca

SEQ ID NO: 952845 - DNA, 15 bp, Homo sapiens
aacctgtggtttcag

SEQ ID NO: 952846 - DNA, 15 bp, Homo sapiens
acctgtggtttcagt

SEQ ID NO: 952847 - DNA, 15 bp, Homo sapiens
cctgtggtttcagtg

SEQ ID NO: 952848 - DNA, 15 bp, Homo sapiens
ctgtggtttcagtgc

SEQ ID NO: 952849 - DNA, 15 bp, Homo sapiens
tgtggtttcagtgct

SEQ ID NO: 952850 - DNA, 15 bp, Homo sapiens
gtggtttcagtgctt

SEQ ID NO: 952851 - DNA, 15 bp, Homo sapiens
tggtttcagtgcttt

SEQ ID NO: 952852 - DNA, 15 bp, Homo sapiens
ggtttcagtgcttta

SEQ ID NO: 952853 - DNA, 15 bp, Homo sapiens
gtttcagtgctttaa

SEQ ID NO: 952854 - DNA, 15 bp, Homo sapiens
tttcagtgctttaaa

SEQ ID NO: 952855 - DNA, 15 bp, Homo sapiens
ttcagtgctttaaag

SEQ ID NO: 952856 - DNA, 15 bp, Homo sapiens
tcagtgctttaaagt

SEQ ID NO: 952857 - DNA, 15 bp, Homo sapiens
cagtgctttaaagtt

SEQ ID NO: 952858 - DNA, 15 bp, Homo sapiens
agtgctttaaagtta

SEQ ID NO: 952859 - DNA, 15 bp, Homo sapiens
gtgctttaaagttat

SEQ ID NO: 952860 - DNA, 15 bp, Homo sapiens
tgctttaaagttata

SEQ ID NO: 952861 - DNA, 15 bp, Homo sapiens
gctttaaagttatac

SEQ ID NO: 952862 - DNA, 15 bp, Homo sapiens
ctttaaagttatact

SEQ ID NO: 952863 - DNA, 15 bp, Homo sapiens
tttaaagttatactt

SEQ ID NO: 952864 - DNA, 15 bp, Homo sapiens
ttaaagttatacttg

SEQ ID NO: 952865 - DNA, 15 bp, Homo sapiens
taaagttatacttgg

SEQ ID NO: 952866 - DNA, 15 bp, Homo sapiens
aaagttatacttggg

SEQ ID NO: 952867 - DNA, 15 bp, Homo sapiens
aagttatacttggga

SEQ ID NO: 952868 - DNA, 15 bp, Homo sapiens
agttatacttgggaa

SEQ ID NO: 952869 - DNA, 15 bp, Homo sapiens
gttatacttgggaac

SEQ ID NO: 952870 - DNA, 15 bp, Homo sapiens
ttatacttgggaaca

SEQ ID NO: 952871 - DNA, 15 bp, Homo sapiens
tatacttgggaacaa

SEQ ID NO: 952872 - DNA, 15 bp, Homo sapiens
atacttgggaacaac

SEQ ID NO: 952873 - DNA, 15 bp, Homo sapiens
tacttgggaacaact

SEQ ID NO: 952874 - DNA, 15 bp, Homo sapiens
acttgggaacaactt

SEQ ID NO: 952875 - DNA, 15 bp, Homo sapiens
cttgggaacaactta

SEQ ID NO: 952876 - DNA, 15 bp, Homo sapiens
ttgggaacaacttat

SEQ ID NO: 952877 - DNA, 15 bp, Homo sapiens
tgggaacaacttatg

SEQ ID NO: 952878 - DNA, 15 bp, Homo sapiens
gggaacaacttatgt

SEQ ID NO: 952879 - DNA, 15 bp, Homo sapiens
ggaacaacttatgta

SEQ ID NO: 952880 - DNA, 15 bp, Homo sapiens
gaacaacttatgtat

SEQ ID NO: 952881 - DNA, 15 bp, Homo sapiens
aacaacttatgtatc

SEQ ID NO: 952882 - DNA, 15 bp, Homo sapiens
acaacttatgtatct

SEQ ID NO: 952883 - DNA, 15 bp, Homo sapiens
caacttatgtatcta

SEQ ID NO: 952884 - DNA, 15 bp, Homo sapiens
aacttatgtatctaa

SEQ ID NO: 952885 - DNA, 15 bp, Homo sapiens
acttatgtatctaat

SEQ ID NO: 952886 - DNA, 15 bp, Homo sapiens
cttatgtatctaatt

SEQ ID NO: 952887 - DNA, 15 bp, Homo sapiens
ttatgtatctaattt

SEQ ID NO: 952888 - DNA, 15 bp, Homo sapiens
tatgtatctaatttt

SEQ ID NO: 952889 - DNA, 15 bp, Homo sapiens
atgtatctaattttt

SEQ ID NO: 952890 - DNA, 15 bp, Homo sapiens
tgtatctaattttta

SEQ ID NO: 952891 - DNA, 15 bp, Homo sapiens
gtatctaatttttag

SEQ ID NO: 952892 - DNA, 15 bp, Homo sapiens
tatctaatttttaga

SEQ ID NO: 952893 - DNA, 15 bp, Homo sapiens
atctaatttttagag

SEQ ID NO: 952894 - DNA, 15 bp, Homo sapiens
tctaatttttagagt

SEQ ID NO: 952895 - DNA, 15 bp, Homo sapiens
ctaatttttagagta

SEQ ID NO: 952896 - DNA, 15 bp, Homo sapiens
taatttttagagtac

SEQ ID NO: 952897 - DNA, 15 bp, Homo sapiens
aatttttagagtact

SEQ ID NO: 952898 - DNA, 15 bp, Homo sapiens
atttttagagtactt

SEQ ID NO: 952899 - DNA, 15 bp, Homo sapiens
tttttagagtacttg

SEQ ID NO: 952900 - DNA, 15 bp, Homo sapiens
ttttagagtacttgc

SEQ ID NO: 952901 - DNA, 15 bp, Homo sapiens
tttagagtacttgca

SEQ ID NO: 952902 - DNA, 15 bp, Homo sapiens
ttagagtacttgcaa

SEQ ID NO: 952903 - DNA, 15 bp, Homo sapiens
tagagtacttgcaat

SEQ ID NO: 952904 - DNA, 15 bp, Homo sapiens
agagtacttgcaatg

SEQ ID NO: 952905 - DNA, 15 bp, Homo sapiens
gagtacttgcaatgt

SEQ ID NO: 952906 - DNA, 15 bp, Homo sapiens
agtacttgcaatgtt

SEQ ID NO: 952907 - DNA, 15 bp, Homo sapiens
gtacttgcaatgttt

SEQ ID NO: 952908 - DNA, 15 bp, Homo sapiens
tacttgcaatgttta

SEQ ID NO: 952909 - DNA, 15 bp, Homo sapiens
acttgcaatgtttaa

SEQ ID NO: 952910 - DNA, 15 bp, Homo sapiens
cttgcaatgtttaag

SEQ ID NO: 952911 - DNA, 15 bp, Homo sapiens
ttgcaatgtttaaga

SEQ ID NO: 952912 - DNA, 15 bp, Homo sapiens
tgcaatgtttaagag

SEQ ID NO: 952913 - DNA, 15 bp, Homo sapiens
gcaatgtttaagaga

SEQ ID NO: 952914 - DNA, 15 bp, Homo sapiens
caatgtttaagagaa

SEQ ID NO: 952915 - DNA, 15 bp, Homo sapiens
aatgtttaagagaat

SEQ ID NO: 952916 - DNA, 15 bp, Homo sapiens
atgtttaagagaatc

SEQ ID NO: 952917 - DNA, 15 bp, Homo sapiens
tgtttaagagaatct

SEQ ID NO: 952918 - DNA, 15 bp, Homo sapiens
gtttaagagaatcta

SEQ ID NO: 952919 - DNA, 15 bp, Homo sapiens
tttaagagaatctaa

SEQ ID NO: 952920 - DNA, 15 bp, Homo sapiens
ttaagagaatctaac

SEQ ID NO: 952921 - DNA, 15 bp, Homo sapiens
taagagaatctaaca

SEQ ID NO: 952922 - DNA, 15 bp, Homo sapiens
aagagaatctaacat

SEQ ID NO: 952923 - DNA, 15 bp, Homo sapiens
agagaatctaacatc

SEQ ID NO: 952924 - DNA, 15 bp, Homo sapiens
gagaatctaacatcc

SEQ ID NO: 952925 - DNA, 15 bp, Homo sapiens
agaatctaacatcct

SEQ ID NO: 952926 - DNA, 15 bp, Homo sapiens
gaatctaacatcctg

SEQ ID NO: 952927 - DNA, 15 bp, Homo sapiens
aatctaacatcctgg

SEQ ID NO: 952928 - DNA, 15 bp, Homo sapiens
atctaacatcctgga

SEQ ID NO: 952929 - DNA, 15 bp, Homo sapiens
tctaacatcctggag

SEQ ID NO: 952930 - DNA, 15 bp, Homo sapiens
ctaacatcctggaga

SEQ ID NO: 952931 - DNA, 15 bp, Homo sapiens
taacatcctggagac

SEQ ID NO: 952932 - DNA, 15 bp, Homo sapiens
aacatcctggagact

SEQ ID NO: 952933 - DNA, 15 bp, Homo sapiens
acatcctggagactt

SEQ ID NO: 952934 - DNA, 15 bp, Homo sapiens
catcctggagacttg

SEQ ID NO: 952935 - DNA, 15 bp, Homo sapiens
atcctggagacttga

SEQ ID NO: 952936 - DNA, 15 bp, Homo sapiens
tcctggagacttgat

SEQ ID NO: 952937 - DNA, 15 bp, Homo sapiens
cctggagacttgata

SEQ ID NO: 952938 - DNA, 15 bp, Homo sapiens
ctggagacttgatac

SEQ ID NO: 952939 - DNA, 15 bp, Homo sapiens
tggagacttgataca

SEQ ID NO: 952940 - DNA, 15 bp, Homo sapiens
ggagacttgatacat

SEQ ID NO: 952941 - DNA, 15 bp, Homo sapiens
gagacttgatacatt

SEQ ID NO: 952942 - DNA, 15 bp, Homo sapiens
agacttgatacatta

SEQ ID NO: 952943 - DNA, 15 bp, Homo sapiens
gacttgatacattag

SEQ ID NO: 952944 - DNA, 15 bp, Homo sapiens
acttgatacattagc

SEQ ID NO: 952945 - DNA, 15 bp, Homo sapiens
cttgatacattagct

SEQ ID NO: 952946 - DNA, 15 bp, Homo sapiens
ttgatacattagctg

SEQ ID NO: 952947 - DNA, 15 bp, Homo sapiens
tgatacattagctgt

SEQ ID NO: 952948 - DNA, 15 bp, Homo sapiens
gatacattagctgtt

SEQ ID NO: 952949 - DNA, 15 bp, Homo sapiens
atacattagctgtta

SEQ ID NO: 952950 - DNA, 15 bp, Homo sapiens
tacattagctgttaa

SEQ ID NO: 952951 - DNA, 15 bp, Homo sapiens
acattagctgttaaa

SEQ ID NO: 952952 - DNA, 15 bp, Homo sapiens
cattagctgttaaat

SEQ ID NO: 952953 - DNA, 15 bp, Homo sapiens
attagctgttaaatt

SEQ ID NO: 952954 - DNA, 15 bp, Homo sapiens
ttagctgttaaatta

SEQ ID NO: 952955 - DNA, 15 bp, Homo sapiens
tagctgttaaattat

SEQ ID NO: 952956 - DNA, 15 bp, Homo sapiens
agctgttaaattatt

SEQ ID NO: 952957 - DNA, 15 bp, Homo sapiens
gctgttaaattattg

SEQ ID NO: 952958 - DNA, 15 bp, Homo sapiens
ctgttaaattattgt

SEQ ID NO: 952959 - DNA, 15 bp, Homo sapiens
tgttaaattattgtt

SEQ ID NO: 952960 - DNA, 15 bp, Homo sapiens
gttaaattattgtta

SEQ ID NO: 952961 - DNA, 15 bp, Homo sapiens
ttaaattattgttaa

SEQ ID NO: 952962 - DNA, 15 bp, Homo sapiens
taaattattgttaaa

SEQ ID NO: 952963 - DNA, 15 bp, Homo sapiens
aaattattgttaaat

SEQ ID NO: 952964 - DNA, 15 bp, Homo sapiens
aattattgttaaatt

SEQ ID NO: 952965 - DNA, 15 bp, Homo sapiens
attattgttaaatta

SEQ ID NO: 952966 - DNA, 15 bp, Homo sapiens
ttattgttaaattaa

SEQ ID NO: 952967 - DNA, 15 bp, Homo sapiens
tattgttaaattaaa

SEQ ID NO: 952968 - DNA, 15 bp, Homo sapiens
attgttaaattaaat

SEQ ID NO: 952969 - DNA, 15 bp, Homo sapiens
ttgttaaattaaata

SEQ ID NO: 952970 - DNA, 15 bp, Homo sapiens
tgttaaattaaataa

SEQ ID NO: 952971 - DNA, 15 bp, Homo sapiens
gttaaattaaataat

SEQ ID NO: 952972 - DNA, 15 bp, Homo sapiens
ttaaattaaataatt

SEQ ID NO: 952973 - DNA, 15 bp, Homo sapiens
taaattaaataattt

SEQ ID NO: 952974 - DNA, 15 bp, Homo sapiens
aaattaaataattta

SEQ ID NO: 952975 - DNA, 15 bp, Homo sapiens
aattaaataatttaa

SEQ ID NO: 952976 - DNA, 15 bp, Homo sapiens
attaaataatttaaa

SEQ ID NO: 952977 - DNA, 15 bp, Homo sapiens
ttaaataatttaaaa

SEQ ID NO: 952978 - DNA, 15 bp, Homo sapiens
taaataatttaaaat

SEQ ID NO: 952979 - DNA, 15 bp, Homo sapiens
aaataatttaaaata

SEQ ID NO: 952980 - DNA, 15 bp, Homo sapiens
aataatttaaaataa

SEQ ID NO: 952981 - DNA, 15 bp, Homo sapiens
ataatttaaaataaa

SEQ ID NO: 952982 - DNA, 15 bp, Homo sapiens
taatttaaaataaat

SEQ ID NO: 952983 - DNA, 15 bp, Homo sapiens
aatttaaaataaatt

SEQ ID NO: 952984 - DNA, 15 bp, Homo sapiens
atttaaaataaatta

SEQ ID NO: 952985 - DNA, 15 bp, Homo sapiens
tttaaaataaattaa

SEQ ID NO: 952986 - DNA, 15 bp, Homo sapiens
ttaaaataaattaaa

SEQ ID NO: 952987 - DNA, 15 bp, Homo sapiens
taaaataaattaaat

SEQ ID NO: 952988 - DNA, 15 bp, Homo sapiens
aaaataaattaaata

SEQ ID NO: 952989 - DNA, 15 bp, Homo sapiens
aaataaattaaataa

SEQ ID NO: 952990 - DNA, 15 bp, Homo sapiens
aataaattaaataat

SEQ ID NO: 952991 - DNA, 15 bp, Homo sapiens
ataaattaaataatt

SEQ ID NO: 952992 - DNA, 15 bp, Homo sapiens
taaataatttaaaaa

SEQ ID NO: 952993 - DNA, 15 bp, Homo sapiens
aaataatttaaaaat

SEQ ID NO: 952994 - DNA, 15 bp, Homo sapiens
aataatttaaaaata

SEQ ID NO: 952995 - DNA, 15 bp, Homo sapiens
ataatttaaaaatat

SEQ ID NO: 952996 - DNA, 15 bp, Homo sapiens
taatttaaaaatata

SEQ ID NO: 952997 - DNA, 15 bp, Homo sapiens
aatttaaaaatatat

SEQ ID NO: 952998 - DNA, 15 bp, Homo sapiens
atttaaaaatatata

SEQ ID NO: 952999 - DNA, 15 bp, Homo sapiens
tttaaaaatatataa

SEQ ID NO: 953000 - DNA, 15 bp, Homo sapiens
ttaaaaatatataaa

SEQ ID NO: 953001 - DNA, 15 bp, Homo sapiens
taaaaatatataaaa

SEQ ID NO: 953002 - DNA, 15 bp, Homo sapiens
aaaaatatataaaaa

SEQ ID NO: 953003 - DNA, 15 bp, Homo sapiens
aaaatatataaaaat

SEQ ID NO: 953004 - DNA, 15 bp, Homo sapiens
aaatatataaaaata

SEQ ID NO: 953005 - DNA, 15 bp, Homo sapiens
aatatataaaaatat

SEQ ID NO: 953006 - DNA, 15 bp, Homo sapiens
atatataaaaatata

SEQ ID NO: 953007 - DNA, 15 bp, Homo sapiens
tatataaaaatatac

SEQ ID NO: 953008 - DNA, 15 bp, Homo sapiens
atataaaaatataca

SEQ ID NO: 953009 - DNA, 15 bp, Homo sapiens
tataaaaatatacaa

SEQ ID NO: 953010 - DNA, 15 bp, Homo sapiens
ataaaaatatacaat

SEQ ID NO: 953011 - DNA, 15 bp, Homo sapiens
taaaaatatacaata

SEQ ID NO: 953012 - DNA, 15 bp, Homo sapiens
aaaaatatacaataa

SEQ ID NO: 953013 - DNA, 15 bp, Homo sapiens
aaaatatacaataat

SEQ ID NO: 953014 - DNA, 15 bp, Homo sapiens
aaatatacaataata

SEQ ID NO: 953015 - DNA, 15 bp, Homo sapiens
aatatacaataatat

SEQ ID NO: 953016 - DNA, 15 bp, Homo sapiens
atatacaataatatg

SEQ ID NO: 953017 - DNA, 15 bp, Homo sapiens
tatacaataatatgc

SEQ ID NO: 953018 - DNA, 15 bp, Homo sapiens
atacaataatatgca

SEQ ID NO: 953019 - DNA, 15 bp, Homo sapiens
tacaataatatgcat

SEQ ID NO: 953020 - DNA, 15 bp, Homo sapiens
acaataatatgcata

SEQ ID NO: 953021 - DNA, 15 bp, Homo sapiens
caataatatgcataa

SEQ ID NO: 953022 - DNA, 15 bp, Homo sapiens
aataatatgcataat

SEQ ID NO: 953023 - DNA, 15 bp, Homo sapiens
ataatatgcataata

SEQ ID NO: 953024 - DNA, 15 bp, Homo sapiens
taatatgcataataa

SEQ ID NO: 953025 - DNA, 15 bp, Homo sapiens
aatatgcataataaa

SEQ ID NO: 953026 - DNA, 15 bp, Homo sapiens
atatgcataataaac

SEQ ID NO: 953027 - DNA, 15 bp, Homo sapiens
tatgcataataaaca

SEQ ID NO: 953028 - DNA, 15 bp, Homo sapiens
atgcataataaacaa

SEQ ID NO: 953029 - DNA, 15 bp, Homo sapiens
tgcataataaacaat

SEQ ID NO: 953030 - DNA, 15 bp, Homo sapiens
gcataataaacaata

SEQ ID NO: 953031 - DNA, 15 bp, Homo sapiens
cataataaacaatat

SEQ ID NO: 953032 - DNA, 15 bp, Homo sapiens
ataataaacaatatt

SEQ ID NO: 953033 - DNA, 15 bp, Homo sapiens
taataaacaatatta

SEQ ID NO: 953034 - DNA, 15 bp, Homo sapiens
aataaacaatattaa

SEQ ID NO: 953035 - DNA, 15 bp, Homo sapiens
ataaacaatattaaa

SEQ ID NO: 953036 - DNA, 15 bp, Homo sapiens
taaacaatattaaat

SEQ ID NO: 953037 - DNA, 15 bp, Homo sapiens
aaacaatattaaatt

SEQ ID NO: 953038 - DNA, 15 bp, Homo sapiens
aacaatattaaatta

SEQ ID NO: 953039 - DNA, 15 bp, Homo sapiens
acaatattaaattat

SEQ ID NO: 953040 - DNA, 15 bp, Homo sapiens
caatattaaattatg

SEQ ID NO: 953041 - DNA, 15 bp, Homo sapiens
aatattaaattatgc

SEQ ID NO: 953042 - DNA, 15 bp, Homo sapiens
atattaaattatgca

SEQ ID NO: 953043 - DNA, 15 bp, Homo sapiens
tattaaattatgcat

SEQ ID NO: 953044 - DNA, 15 bp, Homo sapiens
attaaattatgcatc

SEQ ID NO: 953045 - DNA, 15 bp, Homo sapiens
ttaaattatgcatct

SEQ ID NO: 953046 - DNA, 15 bp, Homo sapiens
taaattatgcatctg

SEQ ID NO: 953047 - DNA, 15 bp, Homo sapiens
aaattatgcatctga

SEQ ID NO: 953048 - DNA, 15 bp, Homo sapiens
aattatgcatctgat

SEQ ID NO: 953049 - DNA, 15 bp, Homo sapiens
attatgcatctgatt

SEQ ID NO: 953050 - DNA, 15 bp, Homo sapiens
ttatgcatctgattt

SEQ ID NO: 953051 - DNA, 15 bp, Homo sapiens
tatgcatctgatttt

SEQ ID NO: 953052 - DNA, 15 bp, Homo sapiens
atgcatctgattttt

SEQ ID NO: 953053 - DNA, 15 bp, Homo sapiens
tgcatctgatttttt

SEQ ID NO: 953054 - DNA, 15 bp, Homo sapiens
gcatctgatttttta

SEQ ID NO: 953055 - DNA, 15 bp, Homo sapiens
catctgattttttag

SEQ ID NO: 953056 - DNA, 15 bp, Homo sapiens
atctgattttttaga

SEQ ID NO: 953057 - DNA, 15 bp, Homo sapiens
tctgattttttagag

SEQ ID NO: 953058 - DNA, 15 bp, Homo sapiens
ctgattttttagagt

SEQ ID NO: 953059 - DNA, 15 bp, Homo sapiens
tgattttttagagta

SEQ ID NO: 953060 - DNA, 15 bp, Homo sapiens
gattttttagagtaa

SEQ ID NO: 953061 - DNA, 15 bp, Homo sapiens
attttttagagtaac

SEQ ID NO: 953062 - DNA, 15 bp, Homo sapiens
ttttttagagtaact

SEQ ID NO: 953063 - DNA, 15 bp, Homo sapiens
tttttagagtaactg

SEQ ID NO: 953064 - DNA, 15 bp, Homo sapiens
ttttagagtaactgc

SEQ ID NO: 953065 - DNA, 15 bp, Homo sapiens
tttagagtaactgca

SEQ ID NO: 953066 - DNA, 15 bp, Homo sapiens
ttagagtaactgcaa

SEQ ID NO: 953067 - DNA, 15 bp, Homo sapiens
tagagtaactgcaac

SEQ ID NO: 953068 - DNA, 15 bp, Homo sapiens
agagtaactgcaacc

SEQ ID NO: 953069 - DNA, 15 bp, Homo sapiens
gagtaactgcaacct

SEQ ID NO: 953070 - DNA, 15 bp, Homo sapiens
agtaactgcaacctt

SEQ ID NO: 953071 - DNA, 15 bp, Homo sapiens
gtaactgcaaccttt

SEQ ID NO: 953072 - DNA, 15 bp, Homo sapiens
taactgcaaccttta

SEQ ID NO: 953073 - DNA, 15 bp, Homo sapiens
aactgcaacctttaa

SEQ ID NO: 953074 - DNA, 15 bp, Homo sapiens
actgcaacctttaag

SEQ ID NO: 953075 - DNA, 15 bp, Homo sapiens
ctgcaacctttaaga

SEQ ID NO: 953076 - DNA, 15 bp, Homo sapiens
tgcaacctttaagag

SEQ ID NO: 953077 - DNA, 15 bp, Homo sapiens
gcaacctttaagaga

SEQ ID NO: 953078 - DNA, 15 bp, Homo sapiens
caacctttaagagaa

SEQ ID NO: 953079 - DNA, 15 bp, Homo sapiens
aacctttaagagaat

SEQ ID NO: 953080 - DNA, 15 bp, Homo sapiens
acctttaagagaatc

SEQ ID NO: 953081 - DNA, 15 bp, Homo sapiens
cctttaagagaatct

SEQ ID NO: 953082 - DNA, 15 bp, Homo sapiens
ctttaagagaatctg

SEQ ID NO: 953083 - DNA, 15 bp, Homo sapiens
tttaagagaatctga

SEQ ID NO: 953084 - DNA, 15 bp, Homo sapiens
ttaagagaatctgac

SEQ ID NO: 953085 - DNA, 15 bp, Homo sapiens
taagagaatctgaca

SEQ ID NO: 953086 - DNA, 15 bp, Homo sapiens
aagagaatctgacat

SEQ ID NO: 953087 - DNA, 15 bp, Homo sapiens
agagaatctgacatc

SEQ ID NO: 953088 - DNA, 15 bp, Homo sapiens
gagaatctgacatcc

SEQ ID NO: 953089 - DNA, 15 bp, Homo sapiens
agaatctgacatcct

SEQ ID NO: 953090 - DNA, 15 bp, Homo sapiens
gaatctgacatcctg

SEQ ID NO: 953091 - DNA, 15 bp, Homo sapiens
aatctgacatcctgg

SEQ ID NO: 953092 - DNA, 15 bp, Homo sapiens
atctgacatcctgga

SEQ ID NO: 953093 - DNA, 15 bp, Homo sapiens
tctgacatcctggag

SEQ ID NO: 953094 - DNA, 15 bp, Homo sapiens
ctgacatcctggaga

SEQ ID NO: 953095 - DNA, 15 bp, Homo sapiens
tgacatcctggagac

SEQ ID NO: 953096 - DNA, 15 bp, Homo sapiens
gacatcctggagact

SEQ ID NO: 953097 - DNA, 15 bp, Homo sapiens
catcctggagacttt

SEQ ID NO: 953098 - DNA, 15 bp, Homo sapiens
atcctggagactttg

SEQ ID NO: 953099 - DNA, 15 bp, Homo sapiens
tcctggagactttga

SEQ ID NO: 953100 - DNA, 15 bp, Homo sapiens
cctggagactttgat

SEQ ID NO: 953101 - DNA, 15 bp, Homo sapiens
ctggagactttgata

SEQ ID NO: 953102 - DNA, 15 bp, Homo sapiens
tggagactttgatat

SEQ ID NO: 953103 - DNA, 15 bp, Homo sapiens
ggagactttgatata

SEQ ID NO: 953104 - DNA, 15 bp, Homo sapiens
gagactttgatatat

SEQ ID NO: 953105 - DNA, 15 bp, Homo sapiens
agactttgatatatt

SEQ ID NO: 953106 - DNA, 15 bp, Homo sapiens
gactttgatatatta

SEQ ID NO: 953107 - DNA, 15 bp, Homo sapiens
actttgatatattag

SEQ ID NO: 953108 - DNA, 15 bp, Homo sapiens
ctttgatatattagc

SEQ ID NO: 953109 - DNA, 15 bp, Homo sapiens
tttgatatattagct

SEQ ID NO: 953110 - DNA, 15 bp, Homo sapiens
ttgatatattagctg

SEQ ID NO: 953111 - DNA, 15 bp, Homo sapiens
tgatatattagctgc

SEQ ID NO: 953112 - DNA, 15 bp, Homo sapiens
gatatattagctgca

SEQ ID NO: 953113 - DNA, 15 bp, Homo sapiens
atatattagctgcat

SEQ ID NO: 953114 - DNA, 15 bp, Homo sapiens
tatattagctgcata

SEQ ID NO: 953115 - DNA, 15 bp, Homo sapiens
atattagctgcataa

SEQ ID NO: 953116 - DNA, 15 bp, Homo sapiens
tattagctgcataac

SEQ ID NO: 953117 - DNA, 15 bp, Homo sapiens
attagctgcataact

SEQ ID NO: 953118 - DNA, 15 bp, Homo sapiens
ttagctgcataacta

SEQ ID NO: 953119 - DNA, 15 bp, Homo sapiens
tagctgcataactat

SEQ ID NO: 953120 - DNA, 15 bp, Homo sapiens
agctgcataactata

SEQ ID NO: 953121 - DNA, 15 bp, Homo sapiens
gctgcataactataa

SEQ ID NO: 953122 - DNA, 15 bp, Homo sapiens
ctgcataactataat

SEQ ID NO: 953123 - DNA, 15 bp, Homo sapiens
tgcataactataatt

SEQ ID NO: 953124 - DNA, 15 bp, Homo sapiens
gcataactataattt

SEQ ID NO: 953125 - DNA, 15 bp, Homo sapiens
cataactataatttt

SEQ ID NO: 953126 - DNA, 15 bp, Homo sapiens
ataactataatttta

SEQ ID NO: 953127 - DNA, 15 bp, Homo sapiens
taactataattttaa

SEQ ID NO: 953128 - DNA, 15 bp, Homo sapiens
aactataattttaaa

SEQ ID NO: 953129 - DNA, 15 bp, Homo sapiens
actataattttaaaa

SEQ ID NO: 953130 - DNA, 15 bp, Homo sapiens
ctataattttaaaat

SEQ ID NO: 953131 - DNA, 15 bp, Homo sapiens
tataattttaaaata

SEQ ID NO: 953132 - DNA, 15 bp, Homo sapiens
ataattttaaaatat

SEQ ID NO: 953133 - DNA, 15 bp, Homo sapiens
taattttaaaatata

SEQ ID NO: 953134 - DNA, 15 bp, Homo sapiens
aattttaaaatatac

SEQ ID NO: 953135 - DNA, 15 bp, Homo sapiens
attttaaaatataca

SEQ ID NO: 953136 - DNA, 15 bp, Homo sapiens
ttttaaaatatacaa

SEQ ID NO: 953137 - DNA, 15 bp, Homo sapiens
tttaaaatatacaat

SEQ ID NO: 953138 - DNA, 15 bp, Homo sapiens
ttaaaatatacaata

SEQ ID NO: 953139 - DNA, 15 bp, Homo sapiens
taaaatatacaataa

SEQ ID NO: 953140 - DNA, 15 bp, Homo sapiens
aatatacaataatac

SEQ ID NO: 953141 - DNA, 15 bp, Homo sapiens
atatacaataatacg

SEQ ID NO: 953142 - DNA, 15 bp, Homo sapiens
tatacaataatacgt

SEQ ID NO: 953143 - DNA, 15 bp, Homo sapiens
atacaataatacgta

SEQ ID NO: 953144 - DNA, 15 bp, Homo sapiens
tacaataatacgtat

SEQ ID NO: 953145 - DNA, 15 bp, Homo sapiens
acaataatacgtata

SEQ ID NO: 953146 - DNA, 15 bp, Homo sapiens
caataatacgtataa

SEQ ID NO: 953147 - DNA, 15 bp, Homo sapiens
aataatacgtataat

SEQ ID NO: 953148 - DNA, 15 bp, Homo sapiens
ataatacgtataata

SEQ ID NO: 953149 - DNA, 15 bp, Homo sapiens
taatacgtataataa

SEQ ID NO: 953150 - DNA, 15 bp, Homo sapiens
aatacgtataataaa

SEQ ID NO: 953151 - DNA, 15 bp, Homo sapiens
atacgtataataaac

SEQ ID NO: 953152 - DNA, 15 bp, Homo sapiens
tacgtataataaaca

SEQ ID NO: 953153 - DNA, 15 bp, Homo sapiens
acgtataataaacat

SEQ ID NO: 953154 - DNA, 15 bp, Homo sapiens
cgtataataaacata

SEQ ID NO: 953155 - DNA, 15 bp, Homo sapiens
gtataataaacatat

SEQ ID NO: 953156 - DNA, 15 bp, Homo sapiens
tataataaacatatt

SEQ ID NO: 953157 - DNA, 15 bp, Homo sapiens
ataataaacatatta

SEQ ID NO: 953158 - DNA, 15 bp, Homo sapiens
taataaacatattaa

SEQ ID NO: 953159 - DNA, 15 bp, Homo sapiens
aataaacatattaaa

SEQ ID NO: 953160 - DNA, 15 bp, Homo sapiens
ataaacatattaaac

SEQ ID NO: 953161 - DNA, 15 bp, Homo sapiens
taaacatattaaaca

SEQ ID NO: 953162 - DNA, 15 bp, Homo sapiens
aaacatattaaacat

SEQ ID NO: 953163 - DNA, 15 bp, Homo sapiens
aacatattaaacata

SEQ ID NO: 953164 - DNA, 15 bp, Homo sapiens
acatattaaacataa

SEQ ID NO: 953165 - DNA, 15 bp, Homo sapiens
catattaaacataat

SEQ ID NO: 953166 - DNA, 15 bp, Homo sapiens
atattaaacataata

SEQ ID NO: 953167 - DNA, 15 bp, Homo sapiens
tattaaacataataa

SEQ ID NO: 953168 - DNA, 15 bp, Homo sapiens
attaaacataataaa

SEQ ID NO: 953169 - DNA, 15 bp, Homo sapiens
ttaaacataataaac

SEQ ID NO: 953170 - DNA, 15 bp, Homo sapiens
taaacataataaaca

SEQ ID NO: 953171 - DNA, 15 bp, Homo sapiens
aaacataataaacat

SEQ ID NO: 953172 - DNA, 15 bp, Homo sapiens
aacataataaacata

SEQ ID NO: 953173 - DNA, 15 bp, Homo sapiens
acataataaacatat

SEQ ID NO: 953174 - DNA, 15 bp, Homo sapiens
cataataaacatatt

SEQ ID NO: 953175 - DNA, 15 bp, Homo sapiens
taaacatattaaact

SEQ ID NO: 953176 - DNA, 15 bp, Homo sapiens
aaacatattaaacta

SEQ ID NO: 953177 - DNA, 15 bp, Homo sapiens
aacatattaaactac

SEQ ID NO: 953178 - DNA, 15 bp, Homo sapiens
acatattaaactact

SEQ ID NO: 953179 - DNA, 15 bp, Homo sapiens
catattaaactactg

SEQ ID NO: 953180 - DNA, 15 bp, Homo sapiens
atattaaactactga

SEQ ID NO: 953181 - DNA, 15 bp, Homo sapiens
tattaaactactgac

SEQ ID NO: 953182 - DNA, 15 bp, Homo sapiens
attaaactactgact

SEQ ID NO: 953183 - DNA, 15 bp, Homo sapiens
ttaaactactgacta

SEQ ID NO: 953184 - DNA, 15 bp, Homo sapiens
taaactactgactat

SEQ ID NO: 953185 - DNA, 15 bp, Homo sapiens
aaactactgactatg

SEQ ID NO: 953186 - DNA, 15 bp, Homo sapiens
aactactgactatgt

SEQ ID NO: 953187 - DNA, 15 bp, Homo sapiens
actactgactatgta

SEQ ID NO: 953188 - DNA, 15 bp, Homo sapiens
ctactgactatgtag

SEQ ID NO: 953189 - DNA, 15 bp, Homo sapiens
tactgactatgtagt

SEQ ID NO: 953190 - DNA, 15 bp, Homo sapiens
actgactatgtagtt

SEQ ID NO: 953191 - DNA, 15 bp, Homo sapiens
ctgactatgtagttt

SEQ ID NO: 953192 - DNA, 15 bp, Homo sapiens
tgactatgtagtttc

SEQ ID NO: 953193 - DNA, 15 bp, Homo sapiens
gactatgtagtttct

SEQ ID NO: 953194 - DNA, 15 bp, Homo sapiens
actatgtagtttctg

SEQ ID NO: 953195 - DNA, 15 bp, Homo sapiens
ctatgtagtttctgg

SEQ ID NO: 953196 - DNA, 15 bp, Homo sapiens
tatgtagtttctgga

SEQ ID NO: 953197 - DNA, 15 bp, Homo sapiens
atgtagtttctggat

SEQ ID NO: 953198 - DNA, 15 bp, Homo sapiens
tgtagtttctggatt

SEQ ID NO: 953199 - DNA, 15 bp, Homo sapiens
gtagtttctggattc

SEQ ID NO: 953200 - DNA, 15 bp, Homo sapiens
tagtttctggattca

SEQ ID NO: 953201 - DNA, 15 bp, Homo sapiens
agtttctggattcac

SEQ ID NO: 953202 - DNA, 15 bp, Homo sapiens
gtttctggattcaca

SEQ ID NO: 953203 - DNA, 15 bp, Homo sapiens
tttctggattcacaa

SEQ ID NO: 953204 - DNA, 15 bp, Homo sapiens
ttctggattcacaac

SEQ ID NO: 953205 - DNA, 15 bp, Homo sapiens
tctggattcacaact

SEQ ID NO: 953206 - DNA, 15 bp, Homo sapiens
ctggattcacaacta

SEQ ID NO: 953207 - DNA, 15 bp, Homo sapiens
tggattcacaactat

SEQ ID NO: 953208 - DNA, 15 bp, Homo sapiens
ggattcacaactata

SEQ ID NO: 953209 - DNA, 15 bp, Homo sapiens
gattcacaactatag

SEQ ID NO: 953210 - DNA, 15 bp, Homo sapiens
attcacaactatagt

SEQ ID NO: 953211 - DNA, 15 bp, Homo sapiens
ttcacaactatagtt

SEQ ID NO: 953212 - DNA, 15 bp, Homo sapiens
tcacaactatagttg

SEQ ID NO: 953213 - DNA, 15 bp, Homo sapiens
cacaactatagttga

SEQ ID NO: 953214 - DNA, 15 bp, Homo sapiens
acaactatagttgaa

SEQ ID NO: 953215 - DNA, 15 bp, Homo sapiens
caactatagttgaaa

SEQ ID NO: 953216 - DNA, 15 bp, Homo sapiens
aactatagttgaaaa

SEQ ID NO: 953217 - DNA, 15 bp, Homo sapiens
actatagttgaaaag

SEQ ID NO: 953218 - DNA, 15 bp, Homo sapiens
ctatagttgaaaagt

SEQ ID NO: 953219 - DNA, 15 bp, Homo sapiens
tatagttgaaaagta

SEQ ID NO: 953220 - DNA, 15 bp, Homo sapiens
atagttgaaaagtat

SEQ ID NO: 953221 - DNA, 15 bp, Homo sapiens
tagttgaaaagtata

SEQ ID NO: 953222 - DNA, 15 bp, Homo sapiens
agttgaaaagtataa

SEQ ID NO: 953223 - DNA, 15 bp, Homo sapiens
gttgaaaagtataat

SEQ ID NO: 953224 - DNA, 15 bp, Homo sapiens
ttgaaaagtataata

SEQ ID NO: 953225 - DNA, 15 bp, Homo sapiens
tgaaaagtataataa

SEQ ID NO: 953226 - DNA, 15 bp, Homo sapiens
gaaaagtataataat

SEQ ID NO: 953227 - DNA, 15 bp, Homo sapiens
aaaagtataataatt

SEQ ID NO: 953228 - DNA, 15 bp, Homo sapiens
aaagtataataatta

SEQ ID NO: 953229 - DNA, 15 bp, Homo sapiens
aagtataataattag

SEQ ID NO: 953230 - DNA, 15 bp, Homo sapiens
agtataataattagc

SEQ ID NO: 953231 - DNA, 15 bp, Homo sapiens
gtataataattagct

SEQ ID NO: 953232 - DNA, 15 bp, Homo sapiens
tataataattagcta

SEQ ID NO: 953233 - DNA, 15 bp, Homo sapiens
ataataattagctaa

SEQ ID NO: 953234 - DNA, 15 bp, Homo sapiens
taataattagctaaa

SEQ ID NO: 953235 - DNA, 15 bp, Homo sapiens
aataattagctaaat

SEQ ID NO: 953236 - DNA, 15 bp, Homo sapiens
ataattagctaaata

SEQ ID NO: 953237 - DNA, 15 bp, Homo sapiens
taattagctaaatac

SEQ ID NO: 953238 - DNA, 15 bp, Homo sapiens
aattagctaaataca

SEQ ID NO: 953239 - DNA, 15 bp, Homo sapiens
attagctaaatacac

SEQ ID NO: 953240 - DNA, 15 bp, Homo sapiens
ttagctaaatacaca

SEQ ID NO: 953241 - DNA, 15 bp, Homo sapiens
tagctaaatacacaa

SEQ ID NO: 953242 - DNA, 15 bp, Homo sapiens
agctaaatacacaaa

SEQ ID NO: 953243 - DNA, 15 bp, Homo sapiens
gctaaatacacaaat

SEQ ID NO: 953244 - DNA, 15 bp, Homo sapiens
ctaaatacacaaata

SEQ ID NO: 953245 - DNA, 15 bp, Homo sapiens
taaatacacaaatag

SEQ ID NO: 953246 - DNA, 15 bp, Homo sapiens
aaatacacaaatagt

SEQ ID NO: 953247 - DNA, 15 bp, Homo sapiens
aatacacaaatagta

SEQ ID NO: 953248 - DNA, 15 bp, Homo sapiens
atacacaaatagtat

SEQ ID NO: 953249 - DNA, 15 bp, Homo sapiens
tacacaaatagtatt

SEQ ID NO: 953250 - DNA, 15 bp, Homo sapiens
acacaaatagtattg

SEQ ID NO: 953251 - DNA, 15 bp, Homo sapiens
cacaaatagtattgg

SEQ ID NO: 953252 - DNA, 15 bp, Homo sapiens
acaaatagtattgga

SEQ ID NO: 953253 - DNA, 15 bp, Homo sapiens
caaatagtattggaa

SEQ ID NO: 953254 - DNA, 15 bp, Homo sapiens
aaatagtattggaat

SEQ ID NO: 953255 - DNA, 15 bp, Homo sapiens
aatagtattggaatt

SEQ ID NO: 953256 - DNA, 15 bp, Homo sapiens
atagtattggaattt

SEQ ID NO: 953257 - DNA, 15 bp, Homo sapiens
tagtattggaatttt

SEQ ID NO: 953258 - DNA, 15 bp, Homo sapiens
agtattggaattttt

SEQ ID NO: 953259 - DNA, 15 bp, Homo sapiens
gtattggaattttta

SEQ ID NO: 953260 - DNA, 15 bp, Homo sapiens
tattggaatttttat

SEQ ID NO: 953261 - DNA, 15 bp, Homo sapiens
attggaatttttata

SEQ ID NO: 953262 - DNA, 15 bp, Homo sapiens
ttggaatttttataa

SEQ ID NO: 953263 - DNA, 15 bp, Homo sapiens
tggaatttttataag

SEQ ID NO: 953264 - DNA, 15 bp, Homo sapiens
ggaatttttataaga

SEQ ID NO: 953265 - DNA, 15 bp, Homo sapiens
gaatttttataagaa

SEQ ID NO: 953266 - DNA, 15 bp, Homo sapiens
aatttttataagaac

SEQ ID NO: 953267 - DNA, 15 bp, Homo sapiens
atttttataagaact

SEQ ID NO: 953268 - DNA, 15 bp, Homo sapiens
tttttataagaactt

SEQ ID NO: 953269 - DNA, 15 bp, Homo sapiens
ttttataagaacttg

SEQ ID NO: 953270 - DNA, 15 bp, Homo sapiens
tttataagaacttgg

SEQ ID NO: 953271 - DNA, 15 bp, Homo sapiens
ttataagaacttggg

SEQ ID NO: 953272 - DNA, 15 bp, Homo sapiens
tataagaacttggga

SEQ ID NO: 953273 - DNA, 15 bp, Homo sapiens
ataagaacttgggat

SEQ ID NO: 953274 - DNA, 15 bp, Homo sapiens
taagaacttgggatt

SEQ ID NO: 953275 - DNA, 15 bp, Homo sapiens
aagaacttgggattt

SEQ ID NO: 953276 - DNA, 15 bp, Homo sapiens
agaacttgggatttg

SEQ ID NO: 953277 - DNA, 15 bp, Homo sapiens
gaacttgggatttgc

SEQ ID NO: 953278 - DNA, 15 bp, Homo sapiens
aacttgggatttgct

SEQ ID NO: 953279 - DNA, 15 bp, Homo sapiens
acttgggatttgcta

SEQ ID NO: 953280 - DNA, 15 bp, Homo sapiens
cttgggatttgctat

SEQ ID NO: 953281 - DNA, 15 bp, Homo sapiens
ttgggatttgctata

SEQ ID NO: 953282 - DNA, 15 bp, Homo sapiens
tgggatttgctatag

SEQ ID NO: 953283 - DNA, 15 bp, Homo sapiens
gggatttgctatagt

SEQ ID NO: 953284 - DNA, 15 bp, Homo sapiens
ggatttgctatagtt

SEQ ID NO: 953285 - DNA, 15 bp, Homo sapiens
gatttgctatagttt

SEQ ID NO: 953286 - DNA, 15 bp, Homo sapiens
atttgctatagtttc

SEQ ID NO: 953287 - DNA, 15 bp, Homo sapiens
tttgctatagtttca

SEQ ID NO: 953288 - DNA, 15 bp, Homo sapiens
ttgctatagtttcaa

SEQ ID NO: 953289 - DNA, 15 bp, Homo sapiens
tgctatagtttcaag

SEQ ID NO: 953290 - DNA, 15 bp, Homo sapiens
gctatagtttcaagt

SEQ ID NO: 953291 - DNA, 15 bp, Homo sapiens
ctatagtttcaagtt

SEQ ID NO: 953292 - DNA, 15 bp, Homo sapiens
tatagtttcaagttt

SEQ ID NO: 953293 - DNA, 15 bp, Homo sapiens
atagtttcaagtttt

SEQ ID NO: 953294 - DNA, 15 bp, Homo sapiens
tagtttcaagtttta

SEQ ID NO: 953295 - DNA, 15 bp, Homo sapiens
agtttcaagttttat

SEQ ID NO: 953296 - DNA, 15 bp, Homo sapiens
gtttcaagttttatt

SEQ ID NO: 953297 - DNA, 15 bp, Homo sapiens
tttcaagttttattt

SEQ ID NO: 953298 - DNA, 15 bp, Homo sapiens
ttcaagttttatttc

SEQ ID NO: 953299 - DNA, 15 bp, Homo sapiens
tcaagttttatttcc

SEQ ID NO: 953300 - DNA, 15 bp, Homo sapiens
caagttttatttcct

SEQ ID NO: 953301 - DNA, 15 bp, Homo sapiens
aagttttatttccta

SEQ ID NO: 953302 - DNA, 15 bp, Homo sapiens
agttttatttcctaa

SEQ ID NO: 953303 - DNA, 15 bp, Homo sapiens
gttttatttcctaaa

SEQ ID NO: 953304 - DNA, 15 bp, Homo sapiens
ttttatttcctaaat

SEQ ID NO: 953305 - DNA, 15 bp, Homo sapiens
tttatttcctaaatt

SEQ ID NO: 953306 - DNA, 15 bp, Homo sapiens
ttatttcctaaattt

SEQ ID NO: 953307 - DNA, 15 bp, Homo sapiens
tatttcctaaattta

SEQ ID NO: 953308 - DNA, 15 bp, Homo sapiens
atttcctaaatttaa

SEQ ID NO: 953309 - DNA, 15 bp, Homo sapiens
tttcctaaatttaat

SEQ ID NO: 953310 - DNA, 15 bp, Homo sapiens
ttcctaaatttaatc

SEQ ID NO: 953311 - DNA, 15 bp, Homo sapiens
tcctaaatttaatca

SEQ ID NO: 953312 - DNA, 15 bp, Homo sapiens
cctaaatttaatcag

SEQ ID NO: 953313 - DNA, 15 bp, Homo sapiens
ctaaatttaatcagt

SEQ ID NO: 953314 - DNA, 15 bp, Homo sapiens
taaatttaatcagtt

SEQ ID NO: 953315 - DNA, 15 bp, Homo sapiens
aaatttaatcagtta

SEQ ID NO: 953316 - DNA, 15 bp, Homo sapiens
aatttaatcagttat

SEQ ID NO: 953317 - DNA, 15 bp, Homo sapiens
atttaatcagttatt

SEQ ID NO: 953318 - DNA, 15 bp, Homo sapiens
tttaatcagttattt

SEQ ID NO: 953319 - DNA, 15 bp, Homo sapiens
ttaatcagttattta

SEQ ID NO: 953320 - DNA, 15 bp, Homo sapiens
taatcagttatttaa

SEQ ID NO: 953321 - DNA, 15 bp, Homo sapiens
aatcagttatttaag

SEQ ID NO: 953322 - DNA, 15 bp, Homo sapiens
atcagttatttaagt

SEQ ID NO: 953323 - DNA, 15 bp, Homo sapiens
tcagttatttaagta

SEQ ID NO: 953324 - DNA, 15 bp, Homo sapiens
cagttatttaagtac

SEQ ID NO: 953325 - DNA, 15 bp, Homo sapiens
agttatttaagtact

SEQ ID NO: 953326 - DNA, 15 bp, Homo sapiens
gttatttaagtactg

SEQ ID NO: 953327 - DNA, 15 bp, Homo sapiens
ttatttaagtactga

SEQ ID NO: 953328 - DNA, 15 bp, Homo sapiens
tatttaagtactgag

SEQ ID NO: 953329 - DNA, 15 bp, Homo sapiens
atttaagtactgaga

SEQ ID NO: 953330 - DNA, 15 bp, Homo sapiens
tttaagtactgagaa

SEQ ID NO: 953331 - DNA, 15 bp, Homo sapiens
ttaagtactgagaaa

SEQ ID NO: 953332 - DNA, 15 bp, Homo sapiens
taagtactgagaaag

SEQ ID NO: 953333 - DNA, 15 bp, Homo sapiens
aagtactgagaaagt

SEQ ID NO: 953334 - DNA, 15 bp, Homo sapiens
agtactgagaaagtt

SEQ ID NO: 953335 - DNA, 15 bp, Homo sapiens
gtactgagaaagttt

SEQ ID NO: 953336 - DNA, 15 bp, Homo sapiens
tactgagaaagtttt

SEQ ID NO: 953337 - DNA, 15 bp, Homo sapiens
actgagaaagttttc

SEQ ID NO: 953338 - DNA, 15 bp, Homo sapiens
ctgagaaagttttct

SEQ ID NO: 953339 - DNA, 15 bp, Homo sapiens
tgagaaagttttctt

SEQ ID NO: 953340 - DNA, 15 bp, Homo sapiens
gagaaagttttcttt

SEQ ID NO: 953341 - DNA, 15 bp, Homo sapiens
agaaagttttctttg

SEQ ID NO: 953342 - DNA, 15 bp, Homo sapiens
gaaagttttctttgt

SEQ ID NO: 953343 - DNA, 15 bp, Homo sapiens
aaagttttctttgtt

SEQ ID NO: 953344 - DNA, 15 bp, Homo sapiens
aagttttctttgtta

SEQ ID NO: 953345 - DNA, 15 bp, Homo sapiens
agttttctttgttaa

SEQ ID NO: 953346 - DNA, 15 bp, Homo sapiens
gttttctttgttaag

SEQ ID NO: 953347 - DNA, 15 bp, Homo sapiens
ttttctttgttaagt

SEQ ID NO: 953348 - DNA, 15 bp, Homo sapiens
tttctttgttaagtt

SEQ ID NO: 953349 - DNA, 15 bp, Homo sapiens
ttctttgttaagtta

SEQ ID NO: 953350 - DNA, 15 bp, Homo sapiens
tctttgttaagttag

SEQ ID NO: 953351 - DNA, 15 bp, Homo sapiens
ctttgttaagttagg

SEQ ID NO: 953352 - DNA, 15 bp, Homo sapiens
tttgttaagttaggc

SEQ ID NO: 953353 - DNA, 15 bp, Homo sapiens
ttgttaagttaggca

SEQ ID NO: 953354 - DNA, 15 bp, Homo sapiens
tgttaagttaggcat

SEQ ID NO: 953355 - DNA, 15 bp, Homo sapiens
gttaagttaggcatc

SEQ ID NO: 953356 - DNA, 15 bp, Homo sapiens
ttaagttaggcatct

SEQ ID NO: 953357 - DNA, 15 bp, Homo sapiens
taagttaggcatctg

SEQ ID NO: 953358 - DNA, 15 bp, Homo sapiens
aagttaggcatctga

SEQ ID NO: 953359 - DNA, 15 bp, Homo sapiens
agttaggcatctgaa

SEQ ID NO: 953360 - DNA, 15 bp, Homo sapiens
gttaggcatctgaag

SEQ ID NO: 953361 - DNA, 15 bp, Homo sapiens
ttaggcatctgaagt

SEQ ID NO: 953362 - DNA, 15 bp, Homo sapiens
taggcatctgaagta

SEQ ID NO: 953363 - DNA, 15 bp, Homo sapiens
aggcatctgaagtac

SEQ ID NO: 953364 - DNA, 15 bp, Homo sapiens
ggcatctgaagtact

SEQ ID NO: 953365 - DNA, 15 bp, Homo sapiens
gcatctgaagtactt

SEQ ID NO: 953366 - DNA, 15 bp, Homo sapiens
catctgaagtactta

SEQ ID NO: 953367 - DNA, 15 bp, Homo sapiens
atctgaagtacttaa

SEQ ID NO: 953368 - DNA, 15 bp, Homo sapiens
tctgaagtacttaaa

SEQ ID NO: 953369 - DNA, 15 bp, Homo sapiens
ctgaagtacttaaaa

SEQ ID NO: 953370 - DNA, 15 bp, Homo sapiens
tgaagtacttaaaaa

SEQ ID NO: 953371 - DNA, 15 bp, Homo sapiens
gaagtacttaaaaat

SEQ ID NO: 953372 - DNA, 15 bp, Homo sapiens
aagtacttaaaaatg

SEQ ID NO: 953373 - DNA, 15 bp, Homo sapiens
agtacttaaaaatga

SEQ ID NO: 953374 - DNA, 15 bp, Homo sapiens
gtacttaaaaatgaa

SEQ ID NO: 953375 - DNA, 15 bp, Homo sapiens
tacttaaaaatgaat

SEQ ID NO: 953376 - DNA, 15 bp, Homo sapiens
acttaaaaatgaata

SEQ ID NO: 953377 - DNA, 15 bp, Homo sapiens
cttaaaaatgaatac

SEQ ID NO: 953378 - DNA, 15 bp, Homo sapiens
ttaaaaatgaataca

SEQ ID NO: 953379 - DNA, 15 bp, Homo sapiens
taaaaatgaatacat

SEQ ID NO: 953380 - DNA, 15 bp, Homo sapiens
aaaaatgaatacatt

SEQ ID NO: 953381 - DNA, 15 bp, Homo sapiens
aaaatgaatacattc

SEQ ID NO: 953382 - DNA, 15 bp, Homo sapiens
aaatgaatacattca

SEQ ID NO: 953383 - DNA, 15 bp, Homo sapiens
aatgaatacattcaa

SEQ ID NO: 953384 - DNA, 15 bp, Homo sapiens
atgaatacattcaaa

SEQ ID NO: 953385 - DNA, 15 bp, Homo sapiens
tgaatacattcaaaa

SEQ ID NO: 953386 - DNA, 15 bp, Homo sapiens
gaatacattcaaaat

SEQ ID NO: 953387 - DNA, 15 bp, Homo sapiens
aatacattcaaaata

SEQ ID NO: 953388 - DNA, 15 bp, Homo sapiens
atacattcaaaataa

SEQ ID NO: 953389 - DNA, 15 bp, Homo sapiens
tacattcaaaataat

SEQ ID NO: 953390 - DNA, 15 bp, Homo sapiens
acattcaaaataatt

SEQ ID NO: 953391 - DNA, 15 bp, Homo sapiens
cattcaaaataattc

SEQ ID NO: 953392 - DNA, 15 bp, Homo sapiens
attcaaaataattca

SEQ ID NO: 953393 - DNA, 15 bp, Homo sapiens
ttcaaaataattcaa

SEQ ID NO: 953394 - DNA, 15 bp, Homo sapiens
tcaaaataattcaat

SEQ ID NO: 953395 - DNA, 15 bp, Homo sapiens
caaaataattcaatt

SEQ ID NO: 953396 - DNA, 15 bp, Homo sapiens
aaaataattcaattc

SEQ ID NO: 953397 - DNA, 15 bp, Homo sapiens
aaataattcaattct

SEQ ID NO: 953398 - DNA, 15 bp, Homo sapiens
aataattcaattctt

SEQ ID NO: 953399 - DNA, 15 bp, Homo sapiens
ataattcaattcttc

SEQ ID NO: 953400 - DNA, 15 bp, Homo sapiens
taattcaattcttca

SEQ ID NO: 953401 - DNA, 15 bp, Homo sapiens
aattcaattcttcaa

SEQ ID NO: 953402 - DNA, 15 bp, Homo sapiens
attcaattcttcaat

SEQ ID NO: 953403 - DNA, 15 bp, Homo sapiens
ttcaattcttcaata

SEQ ID NO: 953404 - DNA, 15 bp, Homo sapiens
tcaattcttcaatat

SEQ ID NO: 953405 - DNA, 15 bp, Homo sapiens
caattcttcaatata

SEQ ID NO: 953406 - DNA, 15 bp, Homo sapiens
aattcttcaatatat

SEQ ID NO: 953407 - DNA, 15 bp, Homo sapiens
attcttcaatatatc

SEQ ID NO: 953408 - DNA, 15 bp, Homo sapiens
ttcttcaatatatct

SEQ ID NO: 953409 - DNA, 15 bp, Homo sapiens
tcttcaatatatctt

SEQ ID NO: 953410 - DNA, 15 bp, Homo sapiens
cttcaatatatcttt

SEQ ID NO: 953411 - DNA, 15 bp, Homo sapiens
ttcaatatatcttta

SEQ ID NO: 953412 - DNA, 15 bp, Homo sapiens
tcaatatatctttat

SEQ ID NO: 953413 - DNA, 15 bp, Homo sapiens
caatatatctttatt

SEQ ID NO: 953414 - DNA, 15 bp, Homo sapiens
aatatatctttattt

SEQ ID NO: 953415 - DNA, 15 bp, Homo sapiens
atatatctttatttt

SEQ ID NO: 953416 - DNA, 15 bp, Homo sapiens
tatatctttatttta

SEQ ID NO: 953417 - DNA, 15 bp, Homo sapiens
atatctttattttac

SEQ ID NO: 953418 - DNA, 15 bp, Homo sapiens
tatctttattttaca

SEQ ID NO: 953419 - DNA, 15 bp, Homo sapiens
atctttattttacat

SEQ ID NO: 953420 - DNA, 15 bp, Homo sapiens
tctttattttacata

SEQ ID NO: 953421 - DNA, 15 bp, Homo sapiens
ctttattttacatat

SEQ ID NO: 953422 - DNA, 15 bp, Homo sapiens
tttattttacatata

SEQ ID NO: 953423 - DNA, 15 bp, Homo sapiens
ttattttacatatat

SEQ ID NO: 953424 - DNA, 15 bp, Homo sapiens
tattttacatatata

SEQ ID NO: 953425 - DNA, 15 bp, Homo sapiens
attttacatatatat

SEQ ID NO: 953426 - DNA, 15 bp, Homo sapiens
ttttacatatatata

SEQ ID NO: 953427 - DNA, 15 bp, Homo sapiens
tttacatatatatac

SEQ ID NO: 953428 - DNA, 15 bp, Homo sapiens
ttacatatatataca

SEQ ID NO: 953429 - DNA, 15 bp, Homo sapiens
tacatatatatacat

SEQ ID NO: 953430 - DNA, 15 bp, Homo sapiens
acatatatatacata

SEQ ID NO: 953431 - DNA, 15 bp, Homo sapiens
catatatatacatat

SEQ ID NO: 953432 - DNA, 15 bp, Homo sapiens
atatatatacatata

SEQ ID NO: 953433 - DNA, 15 bp, Homo sapiens
tatatatacatatat

SEQ ID NO: 953434 - DNA, 15 bp, Homo sapiens
atatatacatatata

SEQ ID NO: 953435 - DNA, 15 bp, Homo sapiens
tatatacatatatat

SEQ ID NO: 953436 - DNA, 15 bp, Homo sapiens
atatacatatatatg

SEQ ID NO: 953437 - DNA, 15 bp, Homo sapiens
tatacatatatatgt

SEQ ID NO: 953438 - DNA, 15 bp, Homo sapiens
atacatatatatgta

SEQ ID NO: 953439 - DNA, 15 bp, Homo sapiens
tacatatatatgtat

SEQ ID NO: 953440 - DNA, 15 bp, Homo sapiens
acatatatatgtata

SEQ ID NO: 953441 - DNA, 15 bp, Homo sapiens
catatatatgtatat

SEQ ID NO: 953442 - DNA, 15 bp, Homo sapiens
atatatatgtatata

SEQ ID NO: 953443 - DNA, 15 bp, Homo sapiens
tatatatgtatatat

SEQ ID NO: 953444 - DNA, 15 bp, Homo sapiens
atatatgtatatata

SEQ ID NO: 953445 - DNA, 15 bp, Homo sapiens
tatatgtatatatat

SEQ ID NO: 953446 - DNA, 15 bp, Homo sapiens
atatgtatatatata

SEQ ID NO: 953447 - DNA, 15 bp, Homo sapiens
tatgtatatatatat

SEQ ID NO: 953448 - DNA, 15 bp, Homo sapiens
atgtatatatatata

SEQ ID NO: 953449 - DNA, 15 bp, Homo sapiens
tgtatatatatatat

SEQ ID NO: 953450 - DNA, 15 bp, Homo sapiens
gtatatatatatata

SEQ ID NO: 953451 - DNA, 15 bp, Homo sapiens
tatatatatatatac

SEQ ID NO: 953452 - DNA, 15 bp, Homo sapiens
atatatatatataca

SEQ ID NO: 953453 - DNA, 15 bp, Homo sapiens
tatatatatatacac

SEQ ID NO: 953454 - DNA, 15 bp, Homo sapiens
atatatatatacaca

SEQ ID NO: 953455 - DNA, 15 bp, Homo sapiens
tatatatatacacac

SEQ ID NO: 953456 - DNA, 15 bp, Homo sapiens
atatatatacacaca

SEQ ID NO: 953457 - DNA, 15 bp, Homo sapiens
tatatatacacacac

SEQ ID NO: 953458 - DNA, 15 bp, Homo sapiens
atatatacacacaca

SEQ ID NO: 953459 - DNA, 15 bp, Homo sapiens
tatatacacacacac

SEQ ID NO: 953460 - DNA, 15 bp, Homo sapiens
atatacacacacaca

SEQ ID NO: 953461 - DNA, 15 bp, Homo sapiens
tatacacacacacac

SEQ ID NO: 953462 - DNA, 15 bp, Homo sapiens
atacacacacacaca

SEQ ID NO: 953463 - DNA, 15 bp, Homo sapiens
tacacacacacacac

SEQ ID NO: 953464 - DNA, 15 bp, Homo sapiens
acacacacacacaca

SEQ ID NO: 953465 - DNA, 15 bp, Homo sapiens
cacacacacacacac

SEQ ID NO: 953466 - DNA, 15 bp, Homo sapiens
cacacacacacacaa

SEQ ID NO: 953467 - DNA, 15 bp, Homo sapiens
acacacacacacaaa

SEQ ID NO: 953468 - DNA, 15 bp, Homo sapiens
cacacacacacaaat

SEQ ID NO: 953469 - DNA, 15 bp, Homo sapiens
acacacacacaaata

SEQ ID NO: 953470 - DNA, 15 bp, Homo sapiens
cacacacacaaatat

SEQ ID NO: 953471 - DNA, 15 bp, Homo sapiens
acacacacaaatata

SEQ ID NO: 953472 - DNA, 15 bp, Homo sapiens
cacacacaaatatat

SEQ ID NO: 953473 - DNA, 15 bp, Homo sapiens
acacacaaatatata

SEQ ID NO: 953474 - DNA, 15 bp, Homo sapiens
cacacaaatatatag

SEQ ID NO: 953475 - DNA, 15 bp, Homo sapiens
acacaaatatatagg

SEQ ID NO: 953476 - DNA, 15 bp, Homo sapiens
cacaaatatataggt

SEQ ID NO: 953477 - DNA, 15 bp, Homo sapiens
acaaatatataggta

SEQ ID NO: 953478 - DNA, 15 bp, Homo sapiens
caaatatataggtat

SEQ ID NO: 953479 - DNA, 15 bp, Homo sapiens
aaatatataggtatg

SEQ ID NO: 953480 - DNA, 15 bp, Homo sapiens
aatatataggtatgt

SEQ ID NO: 953481 - DNA, 15 bp, Homo sapiens
atatataggtatgta

SEQ ID NO: 953482 - DNA, 15 bp, Homo sapiens
tatataggtatgtat

SEQ ID NO: 953483 - DNA, 15 bp, Homo sapiens
atataggtatgtata

SEQ ID NO: 953484 - DNA, 15 bp, Homo sapiens
tataggtatgtatat

SEQ ID NO: 953485 - DNA, 15 bp, Homo sapiens
ataggtatgtatatg

SEQ ID NO: 953486 - DNA, 15 bp, Homo sapiens
taggtatgtatatgg

SEQ ID NO: 953487 - DNA, 15 bp, Homo sapiens
aggtatgtatatggt

SEQ ID NO: 953488 - DNA, 15 bp, Homo sapiens
ggtatgtatatggtt

SEQ ID NO: 953489 - DNA, 15 bp, Homo sapiens
gtatgtatatggttc

SEQ ID NO: 953490 - DNA, 15 bp, Homo sapiens
tatgtatatggttct

SEQ ID NO: 953491 - DNA, 15 bp, Homo sapiens
atgtatatggttctt

SEQ ID NO: 953492 - DNA, 15 bp, Homo sapiens
tgtatatggttcttc

SEQ ID NO: 953493 - DNA, 15 bp, Homo sapiens
gtatatggttcttct

SEQ ID NO: 953494 - DNA, 15 bp, Homo sapiens
tatatggttcttctg

SEQ ID NO: 953495 - DNA, 15 bp, Homo sapiens
atatggttcttctgt

SEQ ID NO: 953496 - DNA, 15 bp, Homo sapiens
tatggttcttctgtt

SEQ ID NO: 953497 - DNA, 15 bp, Homo sapiens
atggttcttctgtta

SEQ ID NO: 953498 - DNA, 15 bp, Homo sapiens
tggttcttctgttag

SEQ ID NO: 953499 - DNA, 15 bp, Homo sapiens
ggttcttctgttagt

SEQ ID NO: 953500 - DNA, 15 bp, Homo sapiens
gttcttctgttagtt

SEQ ID NO: 953501 - DNA, 15 bp, Homo sapiens
ttcttctgttagttg

SEQ ID NO: 953502 - DNA, 15 bp, Homo sapiens
tcttctgttagttgt

SEQ ID NO: 953503 - DNA, 15 bp, Homo sapiens
cttctgttagttgtg

SEQ ID NO: 953504 - DNA, 15 bp, Homo sapiens
ttctgttagttgtgc

SEQ ID NO: 953505 - DNA, 15 bp, Homo sapiens
tctgttagttgtgcc

SEQ ID NO: 953506 - DNA, 15 bp, Homo sapiens
ctgttagttgtgcct

SEQ ID NO: 953507 - DNA, 15 bp, Homo sapiens
tgttagttgtgcctg

SEQ ID NO: 953508 - DNA, 15 bp, Homo sapiens
gttagttgtgcctgg

SEQ ID NO: 953509 - DNA, 15 bp, Homo sapiens
ttagttgtgcctggg

SEQ ID NO: 953510 - DNA, 15 bp, Homo sapiens
tagttgtgcctgggg

SEQ ID NO: 953511 - DNA, 15 bp, Homo sapiens
agttgtgcctggggt

SEQ ID NO: 953512 - DNA, 15 bp, Homo sapiens
gttgtgcctggggtc

SEQ ID NO: 953513 - DNA, 15 bp, Homo sapiens
ttgtgcctggggtca

SEQ ID NO: 953514 - DNA, 15 bp, Homo sapiens
tgtgcctggggtcac

SEQ ID NO: 953515 - DNA, 15 bp, Homo sapiens
gtgcctggggtcact

SEQ ID NO: 953516 - DNA, 15 bp, Homo sapiens
tgcctggggtcactc

SEQ ID NO: 953517 - DNA, 15 bp, Homo sapiens
gcctggggtcactca

SEQ ID NO: 953518 - DNA, 15 bp, Homo sapiens
cctggggtcactcat

SEQ ID NO: 953519 - DNA, 15 bp, Homo sapiens
ctggggtcactcatg

SEQ ID NO: 953520 - DNA, 15 bp, Homo sapiens
tggggtcactcatgt

SEQ ID NO: 953521 - DNA, 15 bp, Homo sapiens
ggggtcactcatgtg

SEQ ID NO: 953522 - DNA, 15 bp, Homo sapiens
gggtcactcatgtgc

SEQ ID NO: 953523 - DNA, 15 bp, Homo sapiens
ggtcactcatgtgct

SEQ ID NO: 953524 - DNA, 15 bp, Homo sapiens
gtcactcatgtgctt

SEQ ID NO: 953525 - DNA, 15 bp, Homo sapiens
tcactcatgtgctta

SEQ ID NO: 953526 - DNA, 15 bp, Homo sapiens
cactcatgtgcttat

SEQ ID NO: 953527 - DNA, 15 bp, Homo sapiens
actcatgtgcttata

SEQ ID NO: 953528 - DNA, 15 bp, Homo sapiens
ctcatgtgcttatag

SEQ ID NO: 953529 - DNA, 15 bp, Homo sapiens
tcatgtgcttatagt

SEQ ID NO: 953530 - DNA, 15 bp, Homo sapiens
catgtgcttatagtt

SEQ ID NO: 953531 - DNA, 15 bp, Homo sapiens
atgtgcttatagtta

SEQ ID NO: 953532 - DNA, 15 bp, Homo sapiens
tgtgcttatagttat

SEQ ID NO: 953533 - DNA, 15 bp, Homo sapiens
gtgcttatagttatc

SEQ ID NO: 953534 - DNA, 15 bp, Homo sapiens
tgcttatagttatcc

SEQ ID NO: 953535 - DNA, 15 bp, Homo sapiens
gcttatagttatcca

SEQ ID NO: 953536 - DNA, 15 bp, Homo sapiens
cttatagttatccag

SEQ ID NO: 953537 - DNA, 15 bp, Homo sapiens
ttatagttatccagt

SEQ ID NO: 953538 - DNA, 15 bp, Homo sapiens
tatagttatccagtg

SEQ ID NO: 953539 - DNA, 15 bp, Homo sapiens
atagttatccagtgg

SEQ ID NO: 953540 - DNA, 15 bp, Homo sapiens
tagttatccagtggc

SEQ ID NO: 953541 - DNA, 15 bp, Homo sapiens
agttatccagtggct

SEQ ID NO: 953542 - DNA, 15 bp, Homo sapiens
gttatccagtggctt

SEQ ID NO: 953543 - DNA, 15 bp, Homo sapiens
ttatccagtggcttg

SEQ ID NO: 953544 - DNA, 15 bp, Homo sapiens
tatccagtggcttga

SEQ ID NO: 953545 - DNA, 15 bp, Homo sapiens
atccagtggcttgat

SEQ ID NO: 953546 - DNA, 15 bp, Homo sapiens
tccagtggcttgatt

SEQ ID NO: 953547 - DNA, 15 bp, Homo sapiens
ccagtggcttgatta

SEQ ID NO: 953548 - DNA, 15 bp, Homo sapiens
cagtggcttgattag

SEQ ID NO: 953549 - DNA, 15 bp, Homo sapiens
agtggcttgattagg

SEQ ID NO: 953550 - DNA, 15 bp, Homo sapiens
gtggcttgattaggg

SEQ ID NO: 953551 - DNA, 15 bp, Homo sapiens
tggcttgattagggc

SEQ ID NO: 953552 - DNA, 15 bp, Homo sapiens
ggcttgattagggct

SEQ ID NO: 953553 - DNA, 15 bp, Homo sapiens
gcttgattagggctg

SEQ ID NO: 953554 - DNA, 15 bp, Homo sapiens
cttgattagggctgg

SEQ ID NO: 953555 - DNA, 15 bp, Homo sapiens
ttgattagggctgga

SEQ ID NO: 953556 - DNA, 15 bp, Homo sapiens
tgattagggctggat

SEQ ID NO: 953557 - DNA, 15 bp, Homo sapiens
gattagggctggatg

SEQ ID NO: 953558 - DNA, 15 bp, Homo sapiens
attagggctggatgg

SEQ ID NO: 953559 - DNA, 15 bp, Homo sapiens
ttagggctggatggc

SEQ ID NO: 953560 - DNA, 15 bp, Homo sapiens
tagggctggatggct

SEQ ID NO: 953561 - DNA, 15 bp, Homo sapiens
agggctggatggctt

SEQ ID NO: 953562 - DNA, 15 bp, Homo sapiens
gggctggatggcttt

SEQ ID NO: 953563 - DNA, 15 bp, Homo sapiens
ggctggatggctttt

SEQ ID NO: 953564 - DNA, 15 bp, Homo sapiens
gctggatggctttta

SEQ ID NO: 953565 - DNA, 15 bp, Homo sapiens
ctggatggcttttaa

SEQ ID NO: 953566 - DNA, 15 bp, Homo sapiens
tggatggcttttaaa

SEQ ID NO: 953567 - DNA, 15 bp, Homo sapiens
ggatggcttttaaag

SEQ ID NO: 953568 - DNA, 15 bp, Homo sapiens
gatggcttttaaagg

SEQ ID NO: 953569 - DNA, 15 bp, Homo sapiens
atggcttttaaaggg

SEQ ID NO: 953570 - DNA, 15 bp, Homo sapiens
tggcttttaaagggt

SEQ ID NO: 953571 - DNA, 15 bp, Homo sapiens
ggcttttaaagggta

SEQ ID NO: 953572 - DNA, 15 bp, Homo sapiens
gcttttaaagggtag

SEQ ID NO: 953573 - DNA, 15 bp, Homo sapiens
cttttaaagggtaga

SEQ ID NO: 953574 - DNA, 15 bp, Homo sapiens
ttttaaagggtagat

SEQ ID NO: 953575 - DNA, 15 bp, Homo sapiens
tttaaagggtagatt

SEQ ID NO: 953576 - DNA, 15 bp, Homo sapiens
ttaaagggtagattt

SEQ ID NO: 953577 - DNA, 15 bp, Homo sapiens
taaagggtagatttc

SEQ ID NO: 953578 - DNA, 15 bp, Homo sapiens
aaagggtagatttct

SEQ ID NO: 953579 - DNA, 15 bp, Homo sapiens
aagggtagatttctc

SEQ ID NO: 953580 - DNA, 15 bp, Homo sapiens
agggtagatttctca

SEQ ID NO: 953581 - DNA, 15 bp, Homo sapiens
gggtagatttctcag

SEQ ID NO: 953582 - DNA, 15 bp, Homo sapiens
ggtagatttctcagc

SEQ ID NO: 953583 - DNA, 15 bp, Homo sapiens
gtagatttctcagct

SEQ ID NO: 953584 - DNA, 15 bp, Homo sapiens
tagatttctcagctt

SEQ ID NO: 953585 - DNA, 15 bp, Homo sapiens
agatttctcagcttt

SEQ ID NO: 953586 - DNA, 15 bp, Homo sapiens
gatttctcagctttg

SEQ ID NO: 953587 - DNA, 15 bp, Homo sapiens
atttctcagctttga

SEQ ID NO: 953588 - DNA, 15 bp, Homo sapiens
tttctcagctttgaa

SEQ ID NO: 953589 - DNA, 15 bp, Homo sapiens
ttctcagctttgaaa

SEQ ID NO: 953590 - DNA, 15 bp, Homo sapiens
tctcagctttgaaaa

SEQ ID NO: 953591 - DNA, 15 bp, Homo sapiens
ctcagctttgaaaac

SEQ ID NO: 953592 - DNA, 15 bp, Homo sapiens
tcagctttgaaaact

SEQ ID NO: 953593 - DNA, 15 bp, Homo sapiens
cagctttgaaaacta

SEQ ID NO: 953594 - DNA, 15 bp, Homo sapiens
agctttgaaaactag

SEQ ID NO: 953595 - DNA, 15 bp, Homo sapiens
gctttgaaaactagt

SEQ ID NO: 953596 - DNA, 15 bp, Homo sapiens
ctttgaaaactagtc

SEQ ID NO: 953597 - DNA, 15 bp, Homo sapiens
tttgaaaactagtct

SEQ ID NO: 953598 - DNA, 15 bp, Homo sapiens
ttgaaaactagtctc

SEQ ID NO: 953599 - DNA, 15 bp, Homo sapiens
tgaaaactagtctct

SEQ ID NO: 953600 - DNA, 15 bp, Homo sapiens
gaaaactagtctctg

SEQ ID NO: 953601 - DNA, 15 bp, Homo sapiens
aaaactagtctctgc

SEQ ID NO: 953602 - DNA, 15 bp, Homo sapiens
aaactagtctctgct

SEQ ID NO: 953603 - DNA, 15 bp, Homo sapiens
aactagtctctgcta

SEQ ID NO: 953604 - DNA, 15 bp, Homo sapiens
actagtctctgctac

SEQ ID NO: 953605 - DNA, 15 bp, Homo sapiens
ctagtctctgctact

SEQ ID NO: 953606 - DNA, 15 bp, Homo sapiens
tagtctctgctactt

SEQ ID NO: 953607 - DNA, 15 bp, Homo sapiens
agtctctgctactta

SEQ ID NO: 953608 - DNA, 15 bp, Homo sapiens
gtctctgctacttat

SEQ ID NO: 953609 - DNA, 15 bp, Homo sapiens
tctctgctacttatt

SEQ ID NO: 953610 - DNA, 15 bp, Homo sapiens
ctctgctacttatta

SEQ ID NO: 953611 - DNA, 15 bp, Homo sapiens
tctgctacttattaa

SEQ ID NO: 953612 - DNA, 15 bp, Homo sapiens
ctgctacttattaac

SEQ ID NO: 953613 - DNA, 15 bp, Homo sapiens
tgctacttattaaca

SEQ ID NO: 953614 - DNA, 15 bp, Homo sapiens
gctacttattaacac

SEQ ID NO: 953615 - DNA, 15 bp, Homo sapiens
ctacttattaacaca

SEQ ID NO: 953616 - DNA, 15 bp, Homo sapiens
tacttattaacacat

SEQ ID NO: 953617 - DNA, 15 bp, Homo sapiens
acttattaacacatc

SEQ ID NO: 953618 - DNA, 15 bp, Homo sapiens
cttattaacacatcc

SEQ ID NO: 953619 - DNA, 15 bp, Homo sapiens
ttattaacacatcct

SEQ ID NO: 953620 - DNA, 15 bp, Homo sapiens
tattaacacatcctc

SEQ ID NO: 953621 - DNA, 15 bp, Homo sapiens
attaacacatcctct

SEQ ID NO: 953622 - DNA, 15 bp, Homo sapiens
ttaacacatcctcta

SEQ ID NO: 953623 - DNA, 15 bp, Homo sapiens
taacacatcctctaa

SEQ ID NO: 953624 - DNA, 15 bp, Homo sapiens
aacacatcctctaat

SEQ ID NO: 953625 - DNA, 15 bp, Homo sapiens
acacatcctctaata

SEQ ID NO: 953626 - DNA, 15 bp, Homo sapiens
cacatcctctaatag

SEQ ID NO: 953627 - DNA, 15 bp, Homo sapiens
acatcctctaatagg

SEQ ID NO: 953628 - DNA, 15 bp, Homo sapiens
catcctctaataggt

SEQ ID NO: 953629 - DNA, 15 bp, Homo sapiens
atcctctaataggtt

SEQ ID NO: 953630 - DNA, 15 bp, Homo sapiens
tcctctaataggtta

SEQ ID NO: 953631 - DNA, 15 bp, Homo sapiens
cctctaataggttat

SEQ ID NO: 953632 - DNA, 15 bp, Homo sapiens
ctctaataggttatc

SEQ ID NO: 953633 - DNA, 15 bp, Homo sapiens
tctaataggttatct

SEQ ID NO: 953634 - DNA, 15 bp, Homo sapiens
ctaataggttatctt

SEQ ID NO: 953635 - DNA, 15 bp, Homo sapiens
taataggttatctta

SEQ ID NO: 953636 - DNA, 15 bp, Homo sapiens
aataggttatcttag

SEQ ID NO: 953637 - DNA, 15 bp, Homo sapiens
ataggttatcttagg

SEQ ID NO: 953638 - DNA, 15 bp, Homo sapiens
taggttatcttaggc

SEQ ID NO: 953639 - DNA, 15 bp, Homo sapiens
aggttatcttaggct

SEQ ID NO: 953640 - DNA, 15 bp, Homo sapiens
ggttatcttaggctt

SEQ ID NO: 953641 - DNA, 15 bp, Homo sapiens
gttatcttaggcttc

SEQ ID NO: 953642 - DNA, 15 bp, Homo sapiens
ttatcttaggcttct

SEQ ID NO: 953643 - DNA, 15 bp, Homo sapiens
tatcttaggcttctt

SEQ ID NO: 953644 - DNA, 15 bp, Homo sapiens
atcttaggcttctta

SEQ ID NO: 953645 - DNA, 15 bp, Homo sapiens
tcttaggcttcttaa

SEQ ID NO: 953646 - DNA, 15 bp, Homo sapiens
cttaggcttcttaaa

SEQ ID NO: 953647 - DNA, 15 bp, Homo sapiens
ttaggcttcttaaat

SEQ ID NO: 953648 - DNA, 15 bp, Homo sapiens
taggcttcttaaatg

SEQ ID NO: 953649 - DNA, 15 bp, Homo sapiens
aggcttcttaaatga

SEQ ID NO: 953650 - DNA, 15 bp, Homo sapiens
ggcttcttaaatgat

SEQ ID NO: 953651 - DNA, 15 bp, Homo sapiens
gcttcttaaatgatg

SEQ ID NO: 953652 - DNA, 15 bp, Homo sapiens
cttcttaaatgatga

SEQ ID NO: 953653 - DNA, 15 bp, Homo sapiens
ttcttaaatgatgat

SEQ ID NO: 953654 - DNA, 15 bp, Homo sapiens
tcttaaatgatgatc

SEQ ID NO: 953655 - DNA, 15 bp, Homo sapiens
cttaaatgatgatct

SEQ ID NO: 953656 - DNA, 15 bp, Homo sapiens
ttaaatgatgatctc

SEQ ID NO: 953657 - DNA, 15 bp, Homo sapiens
taaatgatgatctca

SEQ ID NO: 953658 - DNA, 15 bp, Homo sapiens
aaatgatgatctcag

SEQ ID NO: 953659 - DNA, 15 bp, Homo sapiens
aatgatgatctcagg

SEQ ID NO: 953660 - DNA, 15 bp, Homo sapiens
atgatgatctcagga

SEQ ID NO: 953661 - DNA, 15 bp, Homo sapiens
tgatgatctcaggac

SEQ ID NO: 953662 - DNA, 15 bp, Homo sapiens
gatgatctcaggaca

SEQ ID NO: 953663 - DNA, 15 bp, Homo sapiens
atgatctcaggacaa

SEQ ID NO: 953664 - DNA, 15 bp, Homo sapiens
tgatctcaggacaac

SEQ ID NO: 953665 - DNA, 15 bp, Homo sapiens
gatctcaggacaaca

SEQ ID NO: 953666 - DNA, 15 bp, Homo sapiens
atctcaggacaacag

SEQ ID NO: 953667 - DNA, 15 bp, Homo sapiens
tctcaggacaacagg

SEQ ID NO: 953668 - DNA, 15 bp, Homo sapiens
ctcaggacaacagga

SEQ ID NO: 953669 - DNA, 15 bp, Homo sapiens
tcaggacaacaggag

SEQ ID NO: 953670 - DNA, 15 bp, Homo sapiens
caggacaacaggagg

SEQ ID NO: 953671 - DNA, 15 bp, Homo sapiens
aggacaacaggaggg

SEQ ID NO: 953672 - DNA, 15 bp, Homo sapiens
ggacaacaggagggc

SEQ ID NO: 953673 - DNA, 15 bp, Homo sapiens
gacaacaggagggca

SEQ ID NO: 953674 - DNA, 15 bp, Homo sapiens
acaacaggagggcaa

SEQ ID NO: 953675 - DNA, 15 bp, Homo sapiens
caacaggagggcaag

SEQ ID NO: 953676 - DNA, 15 bp, Homo sapiens
aacaggagggcaagg

SEQ ID NO: 953677 - DNA, 15 bp, Homo sapiens
acaggagggcaaggt

SEQ ID NO: 953678 - DNA, 15 bp, Homo sapiens
caggagggcaaggtt

SEQ ID NO: 953679 - DNA, 15 bp, Homo sapiens
aggagggcaaggttc

SEQ ID NO: 953680 - DNA, 15 bp, Homo sapiens
ggagggcaaggttca

SEQ ID NO: 953681 - DNA, 15 bp, Homo sapiens
gagggcaaggttcaa

SEQ ID NO: 953682 - DNA, 15 bp, Homo sapiens
agggcaaggttcaat

SEQ ID NO: 953683 - DNA, 15 bp, Homo sapiens
gggcaaggttcaatg

SEQ ID NO: 953684 - DNA, 15 bp, Homo sapiens
ggcaaggttcaatgc

SEQ ID NO: 953685 - DNA, 15 bp, Homo sapiens
gcaaggttcaatgca

SEQ ID NO: 953686 - DNA, 15 bp, Homo sapiens
caaggttcaatgcac

SEQ ID NO: 953687 - DNA, 15 bp, Homo sapiens
aaggttcaatgcaca

SEQ ID NO: 953688 - DNA, 15 bp, Homo sapiens
aggttcaatgcacaa

SEQ ID NO: 953689 - DNA, 15 bp, Homo sapiens
ggttcaatgcacaag

SEQ ID NO: 953690 - DNA, 15 bp, Homo sapiens
gttcaatgcacaagc

SEQ ID NO: 953691 - DNA, 15 bp, Homo sapiens
ttcaatgcacaagct

SEQ ID NO: 953692 - DNA, 15 bp, Homo sapiens
tcaatgcacaagctc

SEQ ID NO: 953693 - DNA, 15 bp, Homo sapiens
caatgcacaagctct

SEQ ID NO: 953694 - DNA, 15 bp, Homo sapiens
aatgcacaagctctt

SEQ ID NO: 953695 - DNA, 15 bp, Homo sapiens
atgcacaagctcttt

SEQ ID NO: 953696 - DNA, 15 bp, Homo sapiens
tgcacaagctcttta

SEQ ID NO: 953697 - DNA, 15 bp, Homo sapiens
gcacaagctctttat

SEQ ID NO: 953698 - DNA, 15 bp, Homo sapiens
cacaagctctttata

SEQ ID NO: 953699 - DNA, 15 bp, Homo sapiens
aggaaagttaggtag

SEQ ID NO: 953700 - DNA, 15 bp, Homo sapiens
ggaaagttaggtaga

SEQ ID NO: 953701 - DNA, 15 bp, Homo sapiens
gaaagttaggtagag

SEQ ID NO: 953702 - DNA, 15 bp, Homo sapiens
aaagttaggtagaga

SEQ ID NO: 953703 - DNA, 15 bp, Homo sapiens
aagttaggtagagat

SEQ ID NO: 953704 - DNA, 15 bp, Homo sapiens
agttaggtagagatg

SEQ ID NO: 953705 - DNA, 15 bp, Homo sapiens
gttaggtagagatgt

SEQ ID NO: 953706 - DNA, 15 bp, Homo sapiens
ttaggtagagatgta

SEQ ID NO: 953707 - DNA, 15 bp, Homo sapiens
taggtagagatgtat

SEQ ID NO: 953708 - DNA, 15 bp, Homo sapiens
aggtagagatgtatc

SEQ ID NO: 953709 - DNA, 15 bp, Homo sapiens
ggtagagatgtatca

SEQ ID NO: 953710 - DNA, 15 bp, Homo sapiens
gtagagatgtatcat

SEQ ID NO: 953711 - DNA, 15 bp, Homo sapiens
tagagatgtatcata

SEQ ID NO: 953712 - DNA, 15 bp, Homo sapiens
agagatgtatcatac

SEQ ID NO: 953713 - DNA, 15 bp, Homo sapiens
gagatgtatcatact

SEQ ID NO: 953714 - DNA, 15 bp, Homo sapiens
agatgtatcatactc

SEQ ID NO: 953715 - DNA, 15 bp, Homo sapiens
gatgtatcatactcc

SEQ ID NO: 953716 - DNA, 15 bp, Homo sapiens
atgtatcatactcca

SEQ ID NO: 953717 - DNA, 15 bp, Homo sapiens
tgtatcatactccag

SEQ ID NO: 953718 - DNA, 15 bp, Homo sapiens
gtatcatactccagc

SEQ ID NO: 953719 - DNA, 15 bp, Homo sapiens
tatcatactccagca

SEQ ID NO: 953720 - DNA, 15 bp, Homo sapiens
atcatactccagcat

SEQ ID NO: 953721 - DNA, 15 bp, Homo sapiens
tcatactccagcatg

SEQ ID NO: 953722 - DNA, 15 bp, Homo sapiens
catactccagcatga

SEQ ID NO: 953723 - DNA, 15 bp, Homo sapiens
atactccagcatgat

SEQ ID NO: 953724 - DNA, 15 bp, Homo sapiens
tactccagcatgatt

SEQ ID NO: 953725 - DNA, 15 bp, Homo sapiens
actccagcatgattg

SEQ ID NO: 953726 - DNA, 15 bp, Homo sapiens
ctccagcatgattgt

SEQ ID NO: 953727 - DNA, 15 bp, Homo sapiens
tccagcatgattgtg

SEQ ID NO: 953728 - DNA, 15 bp, Homo sapiens
ccagcatgattgtga

SEQ ID NO: 953729 - DNA, 15 bp, Homo sapiens
cagcatgattgtgag

SEQ ID NO: 953730 - DNA, 15 bp, Homo sapiens
agcatgattgtgagc

SEQ ID NO: 953731 - DNA, 15 bp, Homo sapiens
gcatgattgtgagca

SEQ ID NO: 953732 - DNA, 15 bp, Homo sapiens
catgattgtgagcag

SEQ ID NO: 953733 - DNA, 15 bp, Homo sapiens
atgattgtgagcaga

SEQ ID NO: 953734 - DNA, 15 bp, Homo sapiens
tgattgtgagcagac

SEQ ID NO: 953735 - DNA, 15 bp, Homo sapiens
gattgtgagcagacg

SEQ ID NO: 953736 - DNA, 15 bp, Homo sapiens
attgtgagcagacga

SEQ ID NO: 953737 - DNA, 15 bp, Homo sapiens
ttgtgagcagacgag

SEQ ID NO: 953738 - DNA, 15 bp, Homo sapiens
tgtgagcagacgagc

SEQ ID NO: 953739 - DNA, 15 bp, Homo sapiens
gtgagcagacgagca

SEQ ID NO: 953740 - DNA, 15 bp, Homo sapiens
tgagcagacgagcag

SEQ ID NO: 953741 - DNA, 15 bp, Homo sapiens
gagcagacgagcagg

SEQ ID NO: 953742 - DNA, 15 bp, Homo sapiens
agcagacgagcagga

SEQ ID NO: 953743 - DNA, 15 bp, Homo sapiens
gcagacgagcaggat

SEQ ID NO: 953744 - DNA, 15 bp, Homo sapiens
cagacgagcaggatg

SEQ ID NO: 953745 - DNA, 15 bp, Homo sapiens
agacgagcaggatga

SEQ ID NO: 953746 - DNA, 15 bp, Homo sapiens
gacgagcaggatgag

SEQ ID NO: 953747 - DNA, 15 bp, Homo sapiens
acgagcaggatgagc

SEQ ID NO: 953748 - DNA, 15 bp, Homo sapiens
cgagcaggatgagca

SEQ ID NO: 953749 - DNA, 15 bp, Homo sapiens
gagcaggatgagcaa

SEQ ID NO: 953750 - DNA, 15 bp, Homo sapiens
agcaggatgagcaaa

SEQ ID NO: 953751 - DNA, 15 bp, Homo sapiens
gcaggatgagcaaaa

SEQ ID NO: 953752 - DNA, 15 bp, Homo sapiens
caggatgagcaaaac

SEQ ID NO: 953753 - DNA, 15 bp, Homo sapiens
aggatgagcaaaact

SEQ ID NO: 953754 - DNA, 15 bp, Homo sapiens
ggatgagcaaaactt

SEQ ID NO: 953755 - DNA, 15 bp, Homo sapiens
gatgagcaaaacttg

SEQ ID NO: 953756 - DNA, 15 bp, Homo sapiens
atgagcaaaacttgc

SEQ ID NO: 953757 - DNA, 15 bp, Homo sapiens
tgagcaaaacttgca

SEQ ID NO: 953758 - DNA, 15 bp, Homo sapiens
gagcaaaacttgcac

SEQ ID NO: 953759 - DNA, 15 bp, Homo sapiens
agcaaaacttgcacg

SEQ ID NO: 953760 - DNA, 15 bp, Homo sapiens
gcaaaacttgcacga

SEQ ID NO: 953761 - DNA, 15 bp, Homo sapiens
caaaacttgcacgag

SEQ ID NO: 953762 - DNA, 15 bp, Homo sapiens
aaaacttgcacgagt

SEQ ID NO: 953763 - DNA, 15 bp, Homo sapiens
aaacttgcacgagta

SEQ ID NO: 953764 - DNA, 15 bp, Homo sapiens
aacttgcacgagtaa

SEQ ID NO: 953765 - DNA, 15 bp, Homo sapiens
acttgcacgagtaag

SEQ ID NO: 953766 - DNA, 15 bp, Homo sapiens
cttgcacgagtaaga

SEQ ID NO: 953767 - DNA, 15 bp, Homo sapiens
ttgcacgagtaagag

SEQ ID NO: 953768 - DNA, 15 bp, Homo sapiens
tgcacgagtaagagt

SEQ ID NO: 953769 - DNA, 15 bp, Homo sapiens
gcacgagtaagagtg

SEQ ID NO: 953770 - DNA, 15 bp, Homo sapiens
cacgagtaagagtgg

SEQ ID NO: 953771 - DNA, 15 bp, Homo sapiens
acgagtaagagtggt

SEQ ID NO: 953772 - DNA, 15 bp, Homo sapiens
cgagtaagagtggta

SEQ ID NO: 953773 - DNA, 15 bp, Homo sapiens
gagtaagagtggtaa

SEQ ID NO: 953774 - DNA, 15 bp, Homo sapiens
agtaagagtggtaaa

SEQ ID NO: 953775 - DNA, 15 bp, Homo sapiens
gtaagagtggtaaac

SEQ ID NO: 953776 - DNA, 15 bp, Homo sapiens
taagagtggtaaaca

SEQ ID NO: 953777 - DNA, 15 bp, Homo sapiens
aagagtggtaaacac

SEQ ID NO: 953778 - DNA, 15 bp, Homo sapiens
agagtggtaaacacc

SEQ ID NO: 953779 - DNA, 15 bp, Homo sapiens
gagtggtaaacacca

SEQ ID NO: 953780 - DNA, 15 bp, Homo sapiens
agtggtaaacaccag

SEQ ID NO: 953781 - DNA, 15 bp, Homo sapiens
gtggtaaacaccaga

SEQ ID NO: 953782 - DNA, 15 bp, Homo sapiens
tggtaaacaccagag

SEQ ID NO: 953783 - DNA, 15 bp, Homo sapiens
ggtaaacaccagaga

SEQ ID NO: 953784 - DNA, 15 bp, Homo sapiens
gtaaacaccagagaa

SEQ ID NO: 953785 - DNA, 15 bp, Homo sapiens
taaacaccagagaag

SEQ ID NO: 953786 - DNA, 15 bp, Homo sapiens
aaacaccagagaagg

SEQ ID NO: 953787 - DNA, 15 bp, Homo sapiens
aacaccagagaaggc

SEQ ID NO: 953788 - DNA, 15 bp, Homo sapiens
acaccagagaaggcg

SEQ ID NO: 953789 - DNA, 15 bp, Homo sapiens
caccagagaaggcgc

SEQ ID NO: 953790 - DNA, 15 bp, Homo sapiens
accagagaaggcgct

SEQ ID NO: 953791 - DNA, 15 bp, Homo sapiens
ccagagaaggcgctt

SEQ ID NO: 953792 - DNA, 15 bp, Homo sapiens
cagagaaggcgcttt

SEQ ID NO: 953793 - DNA, 15 bp, Homo sapiens
agagaaggcgctttc

SEQ ID NO: 953794 - DNA, 15 bp, Homo sapiens
gagaaggcgctttca

SEQ ID NO: 953795 - DNA, 15 bp, Homo sapiens
agaaggcgctttcat

SEQ ID NO: 953796 - DNA, 15 bp, Homo sapiens
gaaggcgctttcatg

SEQ ID NO: 953797 - DNA, 15 bp, Homo sapiens
aaggcgctttcatgg

SEQ ID NO: 953798 - DNA, 15 bp, Homo sapiens
aggcgctttcatgga

SEQ ID NO: 953799 - DNA, 15 bp, Homo sapiens
ggcgctttcatggaa

SEQ ID NO: 953800 - DNA, 15 bp, Homo sapiens
gcgctttcatggaag

SEQ ID NO: 953801 - DNA, 15 bp, Homo sapiens
cgctttcatggaagg

SEQ ID NO: 953802 - DNA, 15 bp, Homo sapiens
gctttcatggaaggg

SEQ ID NO: 953803 - DNA, 15 bp, Homo sapiens
ctttcatggaagggc

SEQ ID NO: 953804 - DNA, 15 bp, Homo sapiens
tttcatggaagggca

SEQ ID NO: 953805 - DNA, 15 bp, Homo sapiens
ttcatggaagggcac

SEQ ID NO: 953806 - DNA, 15 bp, Homo sapiens
tcatggaagggcacc

SEQ ID NO: 953807 - DNA, 15 bp, Homo sapiens
catggaagggcaccc

SEQ ID NO: 953808 - DNA, 15 bp, Homo sapiens
atggaagggcaccct

SEQ ID NO: 953809 - DNA, 15 bp, Homo sapiens
tggaagggcacccta

SEQ ID NO: 953810 - DNA, 15 bp, Homo sapiens
ggaagggcaccctag

SEQ ID NO: 953811 - DNA, 15 bp, Homo sapiens
gaagggcaccctagg

SEQ ID NO: 953812 - DNA, 15 bp, Homo sapiens
aagggcaccctaggt

SEQ ID NO: 953813 - DNA, 15 bp, Homo sapiens
agggcaccctaggta

SEQ ID NO: 953814 - DNA, 15 bp, Homo sapiens
gggcaccctaggtaa

SEQ ID NO: 953815 - DNA, 15 bp, Homo sapiens
ggcaccctaggtaac

SEQ ID NO: 953816 - DNA, 15 bp, Homo sapiens
gcaccctaggtaacc

SEQ ID NO: 953817 - DNA, 15 bp, Homo sapiens
caccctaggtaacca

SEQ ID NO: 953818 - DNA, 15 bp, Homo sapiens
accctaggtaaccaa

SEQ ID NO: 953819 - DNA, 15 bp, Homo sapiens
ccctaggtaaccaag

SEQ ID NO: 953820 - DNA, 15 bp, Homo sapiens
cctaggtaaccaagc

SEQ ID NO: 953821 - DNA, 15 bp, Homo sapiens
ctaggtaaccaagca

SEQ ID NO: 953822 - DNA, 15 bp, Homo sapiens
taggtaaccaagcaa

SEQ ID NO: 953823 - DNA, 15 bp, Homo sapiens
aggtaaccaagcaag

SEQ ID NO: 953824 - DNA, 15 bp, Homo sapiens
ggtaaccaagcaagt

SEQ ID NO: 953825 - DNA, 15 bp, Homo sapiens
gtaaccaagcaagtg

SEQ ID NO: 953826 - DNA, 15 bp, Homo sapiens
taaccaagcaagtgg

SEQ ID NO: 953827 - DNA, 15 bp, Homo sapiens
aaccaagcaagtggc

SEQ ID NO: 953828 - DNA, 15 bp, Homo sapiens
accaagcaagtggca

SEQ ID NO: 953829 - DNA, 15 bp, Homo sapiens
ccaagcaagtggcaa

SEQ ID NO: 953830 - DNA, 15 bp, Homo sapiens
caagcaagtggcaac

SEQ ID NO: 953831 - DNA, 15 bp, Homo sapiens
aagcaagtggcaaca

SEQ ID NO: 953832 - DNA, 15 bp, Homo sapiens
agcaagtggcaacaa

SEQ ID NO: 953833 - DNA, 15 bp, Homo sapiens
gcaagtggcaacaat

SEQ ID NO: 953834 - DNA, 15 bp, Homo sapiens
caagtggcaacaata

SEQ ID NO: 953835 - DNA, 15 bp, Homo sapiens
aagtggcaacaatag

SEQ ID NO: 953836 - DNA, 15 bp, Homo sapiens
agtggcaacaatagt

SEQ ID NO: 953837 - DNA, 15 bp, Homo sapiens
gtggcaacaatagta

SEQ ID NO: 953838 - DNA, 15 bp, Homo sapiens
tggcaacaatagtac

SEQ ID NO: 953839 - DNA, 15 bp, Homo sapiens
ggcaacaatagtaca

SEQ ID NO: 953840 - DNA, 15 bp, Homo sapiens
gcaacaatagtacag

SEQ ID NO: 953841 - DNA, 15 bp, Homo sapiens
caacaatagtacagg

SEQ ID NO: 953842 - DNA, 15 bp, Homo sapiens
aacaatagtacaggt

SEQ ID NO: 953843 - DNA, 15 bp, Homo sapiens
acaatagtacaggtg

SEQ ID NO: 953844 - DNA, 15 bp, Homo sapiens
caatagtacaggtga

SEQ ID NO: 953845 - DNA, 15 bp, Homo sapiens
aatagtacaggtgag

SEQ ID NO: 953846 - DNA, 15 bp, Homo sapiens
atagtacaggtgagt

SEQ ID NO: 953847 - DNA, 15 bp, Homo sapiens
tagtacaggtgagtc

SEQ ID NO: 953848 - DNA, 15 bp, Homo sapiens
agtacaggtgagtcc

SEQ ID NO: 953849 - DNA, 15 bp, Homo sapiens
gtacaggtgagtcct

SEQ ID NO: 953850 - DNA, 15 bp, Homo sapiens
tacaggtgagtcctt

SEQ ID NO: 953851 - DNA, 15 bp, Homo sapiens
acaggtgagtccttg

SEQ ID NO: 953852 - DNA, 15 bp, Homo sapiens
caggtgagtccttgg

SEQ ID NO: 953853 - DNA, 15 bp, Homo sapiens
aggtgagtccttgga

SEQ ID NO: 953854 - DNA, 15 bp, Homo sapiens
ggtgagtccttggat

SEQ ID NO: 953855 - DNA, 15 bp, Homo sapiens
gtgagtccttggatc

SEQ ID NO: 953856 - DNA, 15 bp, Homo sapiens
tgagtccttggatcc

SEQ ID NO: 953857 - DNA, 15 bp, Homo sapiens
gagtccttggatccc

SEQ ID NO: 953858 - DNA, 15 bp, Homo sapiens
agtccttggatccct

SEQ ID NO: 953859 - DNA, 15 bp, Homo sapiens
gtccttggatccctt

SEQ ID NO: 953860 - DNA, 15 bp, Homo sapiens
tccttggatcccttc

SEQ ID NO: 953861 - DNA, 15 bp, Homo sapiens
ccttggatcccttct

SEQ ID NO: 953862 - DNA, 15 bp, Homo sapiens
cttggatcccttctc

SEQ ID NO: 953863 - DNA, 15 bp, Homo sapiens
ttggatcccttctct

SEQ ID NO: 953864 - DNA, 15 bp, Homo sapiens
tggatcccttctctc

SEQ ID NO: 953865 - DNA, 15 bp, Homo sapiens
ggatcccttctctct

SEQ ID NO: 953866 - DNA, 15 bp, Homo sapiens
gatcccttctctctc

SEQ ID NO: 953867 - DNA, 15 bp, Homo sapiens
atcccttctctctcc

SEQ ID NO: 953868 - DNA, 15 bp, Homo sapiens
tcccttctctctcca

SEQ ID NO: 953869 - DNA, 15 bp, Homo sapiens
cccttctctctccac

SEQ ID NO: 953870 - DNA, 15 bp, Homo sapiens
ccttctctctccacc

SEQ ID NO: 953871 - DNA, 15 bp, Homo sapiens
cttctctctccaccc

SEQ ID NO: 953872 - DNA, 15 bp, Homo sapiens
ttctctctccacccc

SEQ ID NO: 953873 - DNA, 15 bp, Homo sapiens
tctctctccaccccc

SEQ ID NO: 953874 - DNA, 15 bp, Homo sapiens
ctctctccacccccg

SEQ ID NO: 953875 - DNA, 15 bp, Homo sapiens
tctctccacccccgg

SEQ ID NO: 953876 - DNA, 15 bp, Homo sapiens
ctctccacccccggc

SEQ ID NO: 953877 - DNA, 15 bp, Homo sapiens
tctccacccccggca

SEQ ID NO: 953878 - DNA, 15 bp, Homo sapiens
ctccacccccggcag

SEQ ID NO: 953879 - DNA, 15 bp, Homo sapiens
tccacccccggcagt

SEQ ID NO: 953880 - DNA, 15 bp, Homo sapiens
ccacccccggcagtg

SEQ ID NO: 953881 - DNA, 15 bp, Homo sapiens
cacccccggcagtgg

SEQ ID NO: 953882 - DNA, 15 bp, Homo sapiens
acccccggcagtggt

SEQ ID NO: 953883 - DNA, 15 bp, Homo sapiens
cccccggcagtggtc

SEQ ID NO: 953884 - DNA, 15 bp, Homo sapiens
ccccggcagtggtcc

SEQ ID NO: 953885 - DNA, 15 bp, Homo sapiens
cccggcagtggtccg

SEQ ID NO: 953886 - DNA, 15 bp, Homo sapiens
ccggcagtggtccgg

SEQ ID NO: 953887 - DNA, 15 bp, Homo sapiens
cggcagtggtccgga

SEQ ID NO: 953888 - DNA, 15 bp, Homo sapiens
ggcagtggtccggac

SEQ ID NO: 953889 - DNA, 15 bp, Homo sapiens
gcagtggtccggaca

SEQ ID NO: 953890 - DNA, 15 bp, Homo sapiens
cagtggtccggacaa

SEQ ID NO: 953891 - DNA, 15 bp, Homo sapiens
agtggtccggacaag

SEQ ID NO: 953892 - DNA, 15 bp, Homo sapiens
gtggtccggacaagt

SEQ ID NO: 953893 - DNA, 15 bp, Homo sapiens
tggtccggacaagta

SEQ ID NO: 953894 - DNA, 15 bp, Homo sapiens
ggtccggacaagtac

SEQ ID NO: 953895 - DNA, 15 bp, Homo sapiens
gtccggacaagtact

SEQ ID NO: 953896 - DNA, 15 bp, Homo sapiens
tccggacaagtacta

SEQ ID NO: 953897 - DNA, 15 bp, Homo sapiens
ccggacaagtactaa

SEQ ID NO: 953898 - DNA, 15 bp, Homo sapiens
cggacaagtactaac

SEQ ID NO: 953899 - DNA, 15 bp, Homo sapiens
ggacaagtactaacc

SEQ ID NO: 953900 - DNA, 15 bp, Homo sapiens
gacaagtactaacct

SEQ ID NO: 953901 - DNA, 15 bp, Homo sapiens
acaagtactaacctc

SEQ ID NO: 953902 - DNA, 15 bp, Homo sapiens
caagtactaacctct

SEQ ID NO: 953903 - DNA, 15 bp, Homo sapiens
aagtactaacctctc

SEQ ID NO: 953904 - DNA, 15 bp, Homo sapiens
agtactaacctctcc

SEQ ID NO: 953905 - DNA, 15 bp, Homo sapiens
gtactaacctctcct

SEQ ID NO: 953906 - DNA, 15 bp, Homo sapiens
tactaacctctcctc

SEQ ID NO: 953907 - DNA, 15 bp, Homo sapiens
actaacctctcctct

SEQ ID NO: 953908 - DNA, 15 bp, Homo sapiens
ctaacctctcctctc

SEQ ID NO: 953909 - DNA, 15 bp, Homo sapiens
taacctctcctctct

SEQ ID NO: 953910 - DNA, 15 bp, Homo sapiens
aacctctcctctcta

SEQ ID NO: 953911 - DNA, 15 bp, Homo sapiens
acctctcctctctag

SEQ ID NO: 953912 - DNA, 15 bp, Homo sapiens
cctctcctctctaga

SEQ ID NO: 953913 - DNA, 15 bp, Homo sapiens
ctctcctctctagag

SEQ ID NO: 953914 - DNA, 15 bp, Homo sapiens
tctcctctctagagc

SEQ ID NO: 953915 - DNA, 15 bp, Homo sapiens
ctcctctctagagcc

SEQ ID NO: 953916 - DNA, 15 bp, Homo sapiens
tcctctctagagcct

SEQ ID NO: 953917 - DNA, 15 bp, Homo sapiens
cctctctagagcctt

SEQ ID NO: 953918 - DNA, 15 bp, Homo sapiens
ctctctagagccttg

SEQ ID NO: 953919 - DNA, 15 bp, Homo sapiens
tctctagagccttga

SEQ ID NO: 953920 - DNA, 15 bp, Homo sapiens
ctctagagccttgac

SEQ ID NO: 953921 - DNA, 15 bp, Homo sapiens
tctagagccttgact

SEQ ID NO: 953922 - DNA, 15 bp, Homo sapiens
ctagagccttgactt

SEQ ID NO: 953923 - DNA, 15 bp, Homo sapiens
tagagccttgacttt

SEQ ID NO: 953924 - DNA, 15 bp, Homo sapiens
agagccttgacttta

SEQ ID NO: 953925 - DNA, 15 bp, Homo sapiens
gagccttgactttat

SEQ ID NO: 953926 - DNA, 15 bp, Homo sapiens
agccttgactttata

SEQ ID NO: 953927 - DNA, 15 bp, Homo sapiens
gccttgactttatac

SEQ ID NO: 953928 - DNA, 15 bp, Homo sapiens
ccttgactttatact

SEQ ID NO: 953929 - DNA, 15 bp, Homo sapiens
cttgactttatacta

SEQ ID NO: 953930 - DNA, 15 bp, Homo sapiens
ttgactttatactag

SEQ ID NO: 953931 - DNA, 15 bp, Homo sapiens
tgactttatactagc

SEQ ID NO: 953932 - DNA, 15 bp, Homo sapiens
gactttatactagct

SEQ ID NO: 953933 - DNA, 15 bp, Homo sapiens
actttatactagctc

SEQ ID NO: 953934 - DNA, 15 bp, Homo sapiens
ctttatactagctcc

SEQ ID NO: 953935 - DNA, 15 bp, Homo sapiens
tttatactagctcca

SEQ ID NO: 953936 - DNA, 15 bp, Homo sapiens
ttatactagctccac

SEQ ID NO: 953937 - DNA, 15 bp, Homo sapiens
tatactagctccaca

SEQ ID NO: 953938 - DNA, 15 bp, Homo sapiens
atactagctccacaa

SEQ ID NO: 953939 - DNA, 15 bp, Homo sapiens
tactagctccacaac

SEQ ID NO: 953940 - DNA, 15 bp, Homo sapiens
actagctccacaacc

SEQ ID NO: 953941 - DNA, 15 bp, Homo sapiens
ctagctccacaacca

SEQ ID NO: 953942 - DNA, 15 bp, Homo sapiens
tagctccacaaccat

SEQ ID NO: 953943 - DNA, 15 bp, Homo sapiens
agctccacaaccatc

SEQ ID NO: 953944 - DNA, 15 bp, Homo sapiens
gctccacaaccatca

SEQ ID NO: 953945 - DNA, 15 bp, Homo sapiens
ctccacaaccatcaa

SEQ ID NO: 953946 - DNA, 15 bp, Homo sapiens
tccacaaccatcaag

SEQ ID NO: 953947 - DNA, 15 bp, Homo sapiens
ccacaaccatcaagc

SEQ ID NO: 953948 - DNA, 15 bp, Homo sapiens
cacaaccatcaagcc

SEQ ID NO: 953949 - DNA, 15 bp, Homo sapiens
acaaccatcaagccc

SEQ ID NO: 953950 - DNA, 15 bp, Homo sapiens
caaccatcaagcccc

SEQ ID NO: 953951 - DNA, 15 bp, Homo sapiens
aaccatcaagcccca

SEQ ID NO: 953952 - DNA, 15 bp, Homo sapiens
accatcaagccccac

SEQ ID NO: 953953 - DNA, 15 bp, Homo sapiens
ccatcaagccccacg

SEQ ID NO: 953954 - DNA, 15 bp, Homo sapiens
catcaagccccacga

SEQ ID NO: 953955 - DNA, 15 bp, Homo sapiens
atcaagccccacgat

SEQ ID NO: 953956 - DNA, 15 bp, Homo sapiens
tcaagccccacgatc

SEQ ID NO: 953957 - DNA, 15 bp, Homo sapiens
caagccccacgatcc

SEQ ID NO: 953958 - DNA, 15 bp, Homo sapiens
aagccccacgatccg

SEQ ID NO: 953959 - DNA, 15 bp, Homo sapiens
agccccacgatccgc

SEQ ID NO: 953960 - DNA, 15 bp, Homo sapiens
gccccacgatccgcg

SEQ ID NO: 953961 - DNA, 15 bp, Homo sapiens
ccccacgatccgcga

SEQ ID NO: 953962 - DNA, 15 bp, Homo sapiens
cccacgatccgcgaa

SEQ ID NO: 953963 - DNA, 15 bp, Homo sapiens
ccacgatccgcgaaa

SEQ ID NO: 953964 - DNA, 15 bp, Homo sapiens
cacgatccgcgaaag

SEQ ID NO: 953965 - DNA, 15 bp, Homo sapiens
acgatccgcgaaagg

SEQ ID NO: 953966 - DNA, 15 bp, Homo sapiens
cgatccgcgaaagga

SEQ ID NO: 953967 - DNA, 15 bp, Homo sapiens
gatccgcgaaaggaa

SEQ ID NO: 953968 - DNA, 15 bp, Homo sapiens
atccgcgaaaggaat

SEQ ID NO: 953969 - DNA, 15 bp, Homo sapiens
tccgcgaaaggaatg

SEQ ID NO: 953970 - DNA, 15 bp, Homo sapiens
ccgcgaaaggaatgg

SEQ ID NO: 953971 - DNA, 15 bp, Homo sapiens
cgcgaaaggaatggt

SEQ ID NO: 953972 - DNA, 15 bp, Homo sapiens
gcgaaaggaatggtg

SEQ ID NO: 953973 - DNA, 15 bp, Homo sapiens
cgaaaggaatggtgc

SEQ ID NO: 953974 - DNA, 15 bp, Homo sapiens
gaaaggaatggtgct

SEQ ID NO: 953975 - DNA, 15 bp, Homo sapiens
aaaggaatggtgcta

SEQ ID NO: 953976 - DNA, 15 bp, Homo sapiens
aaggaatggtgctac

SEQ ID NO: 953977 - DNA, 15 bp, Homo sapiens
aggaatggtgctaca

SEQ ID NO: 953978 - DNA, 15 bp, Homo sapiens
ggaatggtgctacag

SEQ ID NO: 953979 - DNA, 15 bp, Homo sapiens
gaatggtgctacagg

SEQ ID NO: 953980 - DNA, 15 bp, Homo sapiens
aatggtgctacaggt

SEQ ID NO: 953981 - DNA, 15 bp, Homo sapiens
atggtgctacaggta

SEQ ID NO: 953982 - DNA, 15 bp, Homo sapiens
tggtgctacaggtaa

SEQ ID NO: 953983 - DNA, 15 bp, Homo sapiens
ggtgctacaggtaag

SEQ ID NO: 953984 - DNA, 15 bp, Homo sapiens
gtgctacaggtaagg

SEQ ID NO: 953985 - DNA, 15 bp, Homo sapiens
tgctacaggtaaggc

SEQ ID NO: 953986 - DNA, 15 bp, Homo sapiens
gctacaggtaaggcg

SEQ ID NO: 953987 - DNA, 15 bp, Homo sapiens
ctacaggtaaggcgg

SEQ ID NO: 953988 - DNA, 15 bp, Homo sapiens
tacaggtaaggcggg

SEQ ID NO: 953989 - DNA, 15 bp, Homo sapiens
acaggtaaggcgggc

SEQ ID NO: 953990 - DNA, 15 bp, Homo sapiens
caggtaaggcgggcg

SEQ ID NO: 953991 - DNA, 15 bp, Homo sapiens
aggtaaggcgggcgg

SEQ ID NO: 953992 - DNA, 15 bp, Homo sapiens
ggtaaggcgggcggg

SEQ ID NO: 953993 - DNA, 15 bp, Homo sapiens
gtaaggcgggcgggg

SEQ ID NO: 953994 - DNA, 15 bp, Homo sapiens
taaggcgggcggggt

SEQ ID NO: 953995 - DNA, 15 bp, Homo sapiens
aaggcgggcggggtc

SEQ ID NO: 953996 - DNA, 15 bp, Homo sapiens
aggcgggcggggtcg

SEQ ID NO: 953997 - DNA, 15 bp, Homo sapiens
ggcgggcggggtcgg

SEQ ID NO: 953998 - DNA, 15 bp, Homo sapiens
gcgggcggggtcggg

SEQ ID NO: 953999 - DNA, 15 bp, Homo sapiens
cgggcggggtcggga

SEQ ID NO: 954000 - DNA, 15 bp, Homo sapiens
gggcggggtcgggat

SEQ ID NO: 954001 - DNA, 15 bp, Homo sapiens
ggcggggtcgggatg

SEQ ID NO: 954002 - DNA, 15 bp, Homo sapiens
gcggggtcgggatgc

SEQ ID NO: 954003 - DNA, 15 bp, Homo sapiens
cggggtcgggatgcc

SEQ ID NO: 954004 - DNA, 15 bp, Homo sapiens
ggggtcgggatgccg

SEQ ID NO: 954005 - DNA, 15 bp, Homo sapiens
gggtcgggatgccga

SEQ ID NO: 954006 - DNA, 15 bp, Homo sapiens
ggtcgggatgccgag

SEQ ID NO: 954007 - DNA, 15 bp, Homo sapiens
gtcgggatgccgaga

SEQ ID NO: 954008 - DNA, 15 bp, Homo sapiens
tcgggatgccgagac

SEQ ID NO: 954009 - DNA, 15 bp, Homo sapiens
cgggatgccgagacc

SEQ ID NO: 954010 - DNA, 15 bp, Homo sapiens
gggatgccgagacct

SEQ ID NO: 954011 - DNA, 15 bp, Homo sapiens
ggatgccgagacctc

SEQ ID NO: 954012 - DNA, 15 bp, Homo sapiens
gatgccgagacctct

SEQ ID NO: 954013 - DNA, 15 bp, Homo sapiens
atgccgagacctctt

SEQ ID NO: 954014 - DNA, 15 bp, Homo sapiens
tgccgagacctcttg

SEQ ID NO: 954015 - DNA, 15 bp, Homo sapiens
gccgagacctcttgt

SEQ ID NO: 954016 - DNA, 15 bp, Homo sapiens
ccgagacctcttgtc

SEQ ID NO: 954017 - DNA, 15 bp, Homo sapiens
cgagacctcttgtca

SEQ ID NO: 954018 - DNA, 15 bp, Homo sapiens
gagacctcttgtcaa

SEQ ID NO: 954019 - DNA, 15 bp, Homo sapiens
agacctcttgtcaat

SEQ ID NO: 954020 - DNA, 15 bp, Homo sapiens
gacctcttgtcaatt

SEQ ID NO: 954021 - DNA, 15 bp, Homo sapiens
acctcttgtcaattc

SEQ ID NO: 954022 - DNA, 15 bp, Homo sapiens
cctcttgtcaattct

SEQ ID NO: 954023 - DNA, 15 bp, Homo sapiens
ctcttgtcaattctt

SEQ ID NO: 954024 - DNA, 15 bp, Homo sapiens
tcttgtcaattcttc

SEQ ID NO: 954025 - DNA, 15 bp, Homo sapiens
cttgtcaattcttcg

SEQ ID NO: 954026 - DNA, 15 bp, Homo sapiens
ttgtcaattcttcgc

SEQ ID NO: 954027 - DNA, 15 bp, Homo sapiens
tgtcaattcttcgct

SEQ ID NO: 954028 - DNA, 15 bp, Homo sapiens
gtcaattcttcgctc

SEQ ID NO: 954029 - DNA, 15 bp, Homo sapiens
tcaattcttcgctcg

SEQ ID NO: 954030 - DNA, 15 bp, Homo sapiens
caattcttcgctcgc

SEQ ID NO: 954031 - DNA, 15 bp, Homo sapiens
aattcttcgctcgcc

SEQ ID NO: 954032 - DNA, 15 bp, Homo sapiens
attcttcgctcgccc

SEQ ID NO: 954033 - DNA, 15 bp, Homo sapiens
ttcttcgctcgcccc

SEQ ID NO: 954034 - DNA, 15 bp, Homo sapiens
tcttcgctcgccccc

SEQ ID NO: 954035 - DNA, 15 bp, Homo sapiens
cttcgctcgccccca

SEQ ID NO: 954036 - DNA, 15 bp, Homo sapiens
ttcgctcgcccccaa

SEQ ID NO: 954037 - DNA, 15 bp, Homo sapiens
tcgctcgcccccaaa

SEQ ID NO: 954038 - DNA, 15 bp, Homo sapiens
cgctcgcccccaaac

SEQ ID NO: 954039 - DNA, 15 bp, Homo sapiens
gctcgcccccaaacg

SEQ ID NO: 954040 - DNA, 15 bp, Homo sapiens
ctcgcccccaaacga

SEQ ID NO: 954041 - DNA, 15 bp, Homo sapiens
tcgcccccaaacgag

SEQ ID NO: 954042 - DNA, 15 bp, Homo sapiens
cgcccccaaacgagg

SEQ ID NO: 954043 - DNA, 15 bp, Homo sapiens
gcccccaaacgagga

SEQ ID NO: 954044 - DNA, 15 bp, Homo sapiens
cccccaaacgaggat

SEQ ID NO: 954045 - DNA, 15 bp, Homo sapiens
ccccaaacgaggatc

SEQ ID NO: 954046 - DNA, 15 bp, Homo sapiens
cccaaacgaggatca

SEQ ID NO: 954047 - DNA, 15 bp, Homo sapiens
ccaaacgaggatcac

SEQ ID NO: 954048 - DNA, 15 bp, Homo sapiens
caaacgaggatcacg

SEQ ID NO: 954049 - DNA, 15 bp, Homo sapiens
aaacgaggatcacgg

SEQ ID NO: 954050 - DNA, 15 bp, Homo sapiens
aacgaggatcacggc

SEQ ID NO: 954051 - DNA, 15 bp, Homo sapiens
acgaggatcacggct

SEQ ID NO: 954052 - DNA, 15 bp, Homo sapiens
cgaggatcacggctg

SEQ ID NO: 954053 - DNA, 15 bp, Homo sapiens
gaggatcacggctgc

SEQ ID NO: 954054 - DNA, 15 bp, Homo sapiens
aggatcacggctgcg

SEQ ID NO: 954055 - DNA, 15 bp, Homo sapiens
ggatcacggctgcgc

SEQ ID NO: 954056 - DNA, 15 bp, Homo sapiens
gatcacggctgcgcg

SEQ ID NO: 954057 - DNA, 15 bp, Homo sapiens
atcacggctgcgcgg

SEQ ID NO: 954058 - DNA, 15 bp, Homo sapiens
tcacggctgcgcggc

SEQ ID NO: 954059 - DNA, 15 bp, Homo sapiens
cacggctgcgcggct

SEQ ID NO: 954060 - DNA, 15 bp, Homo sapiens
acggctgcgcggctc

SEQ ID NO: 954061 - DNA, 15 bp, Homo sapiens
cggctgcgcggctct

SEQ ID NO: 954062 - DNA, 15 bp, Homo sapiens
ggctgcgcggctctc

SEQ ID NO: 954063 - DNA, 15 bp, Homo sapiens
gctgcgcggctctca

SEQ ID NO: 954064 - DNA, 15 bp, Homo sapiens
ctgcgcggctctcac

SEQ ID NO: 954065 - DNA, 15 bp, Homo sapiens
tgcgcggctctcact

SEQ ID NO: 954066 - DNA, 15 bp, Homo sapiens
gcgcggctctcactc

SEQ ID NO: 954067 - DNA, 15 bp, Homo sapiens
cgcggctctcactct

SEQ ID NO: 954068 - DNA, 15 bp, Homo sapiens
gcggctctcactcta

SEQ ID NO: 954069 - DNA, 15 bp, Homo sapiens
cggctctcactctaa

SEQ ID NO: 954070 - DNA, 15 bp, Homo sapiens
ggctctcactctaac

SEQ ID NO: 954071 - DNA, 15 bp, Homo sapiens
gctctcactctaact

SEQ ID NO: 954072 - DNA, 15 bp, Homo sapiens
ctctcactctaacta

SEQ ID NO: 954073 - DNA, 15 bp, Homo sapiens
tctcactctaactat

SEQ ID NO: 954074 - DNA, 15 bp, Homo sapiens
ctcactctaactatc

SEQ ID NO: 954075 - DNA, 15 bp, Homo sapiens
tcactctaactatca

SEQ ID NO: 954076 - DNA, 15 bp, Homo sapiens
cactctaactatcaa

SEQ ID NO: 954077 - DNA, 15 bp, Homo sapiens
actctaactatcaag

SEQ ID NO: 954078 - DNA, 15 bp, Homo sapiens
ctctaactatcaaga

SEQ ID NO: 954079 - DNA, 15 bp, Homo sapiens
tctaactatcaagac

SEQ ID NO: 954080 - DNA, 15 bp, Homo sapiens
ctaactatcaagaca

SEQ ID NO: 954081 - DNA, 15 bp, Homo sapiens
taactatcaagacag

SEQ ID NO: 954082 - DNA, 15 bp, Homo sapiens
aactatcaagacaga

SEQ ID NO: 954083 - DNA, 15 bp, Homo sapiens
actatcaagacagat

SEQ ID NO: 954084 - DNA, 15 bp, Homo sapiens
ctatcaagacagatt

SEQ ID NO: 954085 - DNA, 15 bp, Homo sapiens
tatcaagacagattc

SEQ ID NO: 954086 - DNA, 15 bp, Homo sapiens
atcaagacagattct

SEQ ID NO: 954087 - DNA, 15 bp, Homo sapiens
tcaagacagattctg

SEQ ID NO: 954088 - DNA, 15 bp, Homo sapiens
caagacagattctga

SEQ ID NO: 954089 - DNA, 15 bp, Homo sapiens
aagacagattctgat

SEQ ID NO: 954090 - DNA, 15 bp, Homo sapiens
agacagattctgata

SEQ ID NO: 954091 - DNA, 15 bp, Homo sapiens
gacagattctgatac

SEQ ID NO: 954092 - DNA, 15 bp, Homo sapiens
acagattctgatact

SEQ ID NO: 954093 - DNA, 15 bp, Homo sapiens
cagattctgatacta

SEQ ID NO: 954094 - DNA, 15 bp, Homo sapiens
agattctgatactaa

SEQ ID NO: 954095 - DNA, 15 bp, Homo sapiens
gattctgatactaaa

SEQ ID NO: 954096 - DNA, 15 bp, Homo sapiens
attctgatactaaac

SEQ ID NO: 954097 - DNA, 15 bp, Homo sapiens
ttctgatactaaaca

SEQ ID NO: 954098 - DNA, 15 bp, Homo sapiens
tctgatactaaacaa

SEQ ID NO: 954099 - DNA, 15 bp, Homo sapiens
ctgatactaaacaag

SEQ ID NO: 954100 - DNA, 15 bp, Homo sapiens
tgatactaaacaagg

SEQ ID NO: 954101 - DNA, 15 bp, Homo sapiens
gatactaaacaaggc

SEQ ID NO: 954102 - DNA, 15 bp, Homo sapiens
atactaaacaaggct

SEQ ID NO: 954103 - DNA, 15 bp, Homo sapiens
tactaaacaaggcta

SEQ ID NO: 954104 - DNA, 15 bp, Homo sapiens
actaaacaaggctaa

SEQ ID NO: 954105 - DNA, 15 bp, Homo sapiens
ctaaacaaggctaaa

SEQ ID NO: 954106 - DNA, 15 bp, Homo sapiens
taaacaaggctaaaa

SEQ ID NO: 954107 - DNA, 15 bp, Homo sapiens
aaacaaggctaaaac

SEQ ID NO: 954108 - DNA, 15 bp, Homo sapiens
aacaaggctaaaact

SEQ ID NO: 954109 - DNA, 15 bp, Homo sapiens
acaaggctaaaactt

SEQ ID NO: 954110 - DNA, 15 bp, Homo sapiens
caaggctaaaacttt

SEQ ID NO: 954111 - DNA, 15 bp, Homo sapiens
aaggctaaaactttt

SEQ ID NO: 954112 - DNA, 15 bp, Homo sapiens
aggctaaaacttttt

SEQ ID NO: 954113 - DNA, 15 bp, Homo sapiens
ggctaaaactttttg

SEQ ID NO: 954114 - DNA, 15 bp, Homo sapiens
gctaaaactttttgt

SEQ ID NO: 954115 - DNA, 15 bp, Homo sapiens
ctaaaactttttgtt

SEQ ID NO: 954116 - DNA, 15 bp, Homo sapiens
taaaactttttgttt

SEQ ID NO: 954117 - DNA, 15 bp, Homo sapiens
aaaactttttgtttt

SEQ ID NO: 954118 - DNA, 15 bp, Homo sapiens
aaactttttgttttt

SEQ ID NO: 954119 - DNA, 15 bp, Homo sapiens
aactttttgtttttt

SEQ ID NO: 954120 - DNA, 15 bp, Homo sapiens
actttttgttttttc

SEQ ID NO: 954121 - DNA, 15 bp, Homo sapiens
ctttttgttttttcc

SEQ ID NO: 954122 - DNA, 15 bp, Homo sapiens
tttttgttttttcct

SEQ ID NO: 954123 - DNA, 15 bp, Homo sapiens
ttttgttttttcctt

SEQ ID NO: 954124 - DNA, 15 bp, Homo sapiens
tttgttttttccttc

SEQ ID NO: 954125 - DNA, 15 bp, Homo sapiens
ttgttttttccttct

SEQ ID NO: 954126 - DNA, 15 bp, Homo sapiens
tgttttttccttctt

SEQ ID NO: 954127 - DNA, 15 bp, Homo sapiens
gttttttccttctta

SEQ ID NO: 954128 - DNA, 15 bp, Homo sapiens
ttttttccttcttac

SEQ ID NO: 954129 - DNA, 15 bp, Homo sapiens
tttttccttcttaca

SEQ ID NO: 954130 - DNA, 15 bp, Homo sapiens
ttttccttcttacag

SEQ ID NO: 954131 - DNA, 15 bp, Homo sapiens
tttccttcttacaga

SEQ ID NO: 954132 - DNA, 15 bp, Homo sapiens
ttccttcttacagaa

SEQ ID NO: 954133 - DNA, 15 bp, Homo sapiens
tccttcttacagaag

SEQ ID NO: 954134 - DNA, 15 bp, Homo sapiens
ccttcttacagaagg

SEQ ID NO: 954135 - DNA, 15 bp, Homo sapiens
cttcttacagaaggc

SEQ ID NO: 954136 - DNA, 15 bp, Homo sapiens
ttcttacagaaggca

SEQ ID NO: 954137 - DNA, 15 bp, Homo sapiens
tcttacagaaggcac

SEQ ID NO: 954138 - DNA, 15 bp, Homo sapiens
cttacagaaggcact

SEQ ID NO: 954139 - DNA, 15 bp, Homo sapiens
ttacagaaggcacta

SEQ ID NO: 954140 - DNA, 15 bp, Homo sapiens
tacagaaggcactac

SEQ ID NO: 954141 - DNA, 15 bp, Homo sapiens
acagaaggcactacc

SEQ ID NO: 954142 - DNA, 15 bp, Homo sapiens
cagaaggcactaccc

SEQ ID NO: 954143 - DNA, 15 bp, Homo sapiens
agaaggcactaccct

SEQ ID NO: 954144 - DNA, 15 bp, Homo sapiens
gaaggcactaccctg

SEQ ID NO: 954145 - DNA, 15 bp, Homo sapiens
aaggcactaccctgg

SEQ ID NO: 954146 - DNA, 15 bp, Homo sapiens
aggcactaccctgga

SEQ ID NO: 954147 - DNA, 15 bp, Homo sapiens
ggcactaccctggac

SEQ ID NO: 954148 - DNA, 15 bp, Homo sapiens
gcactaccctggacg

SEQ ID NO: 954149 - DNA, 15 bp, Homo sapiens
cactaccctggacgc

SEQ ID NO: 954150 - DNA, 15 bp, Homo sapiens
actaccctggacgcc

SEQ ID NO: 954151 - DNA, 15 bp, Homo sapiens
ctaccctggacgccg

SEQ ID NO: 954152 - DNA, 15 bp, Homo sapiens
taccctggacgccgc

SEQ ID NO: 954153 - DNA, 15 bp, Homo sapiens
accctggacgccgct

SEQ ID NO: 954154 - DNA, 15 bp, Homo sapiens
ccctggacgccgctt

SEQ ID NO: 954155 - DNA, 15 bp, Homo sapiens
cctggacgccgcttg

SEQ ID NO: 954156 - DNA, 15 bp, Homo sapiens
ctggacgccgcttgc

SEQ ID NO: 954157 - DNA, 15 bp, Homo sapiens
tggacgccgcttgca

SEQ ID NO: 954158 - DNA, 15 bp, Homo sapiens
ggacgccgcttgcaa

SEQ ID NO: 954159 - DNA, 15 bp, Homo sapiens
gacgccgcttgcaaa

SEQ ID NO: 954160 - DNA, 15 bp, Homo sapiens
acgccgcttgcaaac

SEQ ID NO: 954161 - DNA, 15 bp, Homo sapiens
cgccgcttgcaaacg

SEQ ID NO: 954162 - DNA, 15 bp, Homo sapiens
gccgcttgcaaacgc

SEQ ID NO: 954163 - DNA, 15 bp, Homo sapiens
ccgcttgcaaacgcc

SEQ ID NO: 954164 - DNA, 15 bp, Homo sapiens
cgcttgcaaacgcct

SEQ ID NO: 954165 - DNA, 15 bp, Homo sapiens
gcttgcaaacgcctg

SEQ ID NO: 954166 - DNA, 15 bp, Homo sapiens
cttgcaaacgcctga

SEQ ID NO: 954167 - DNA, 15 bp, Homo sapiens
ttgcaaacgcctgaa

SEQ ID NO: 954168 - DNA, 15 bp, Homo sapiens
tgcaaacgcctgaag

SEQ ID NO: 954169 - DNA, 15 bp, Homo sapiens
gcaaacgcctgaaga

SEQ ID NO: 954170 - DNA, 15 bp, Homo sapiens
caaacgcctgaagag

SEQ ID NO: 954171 - DNA, 15 bp, Homo sapiens
aaacgcctgaagaga

SEQ ID NO: 954172 - DNA, 15 bp, Homo sapiens
aacgcctgaagagaa

SEQ ID NO: 954173 - DNA, 15 bp, Homo sapiens
acgcctgaagagaag

SEQ ID NO: 954174 - DNA, 15 bp, Homo sapiens
cgcctgaagagaagg

SEQ ID NO: 954175 - DNA, 15 bp, Homo sapiens
gcctgaagagaaggc

SEQ ID NO: 954176 - DNA, 15 bp, Homo sapiens
cctgaagagaaggca

SEQ ID NO: 954177 - DNA, 15 bp, Homo sapiens
ctgaagagaaggcag

SEQ ID NO: 954178 - DNA, 15 bp, Homo sapiens
tgaagagaaggcagg

SEQ ID NO: 954179 - DNA, 15 bp, Homo sapiens
gaagagaaggcaggg

SEQ ID NO: 954180 - DNA, 15 bp, Homo sapiens
aagagaaggcagggt

SEQ ID NO: 954181 - DNA, 15 bp, Homo sapiens
agagaaggcagggtg

SEQ ID NO: 954182 - DNA, 15 bp, Homo sapiens
gagaaggcagggtgt

SEQ ID NO: 954183 - DNA, 15 bp, Homo sapiens
agaaggcagggtgtt

SEQ ID NO: 954184 - DNA, 15 bp, Homo sapiens
gaaggcagggtgttc

SEQ ID NO: 954185 - DNA, 15 bp, Homo sapiens
aaggcagggtgttcc

SEQ ID NO: 954186 - DNA, 15 bp, Homo sapiens
aggcagggtgttccc

SEQ ID NO: 954187 - DNA, 15 bp, Homo sapiens
ggcagggtgttccca

SEQ ID NO: 954188 - DNA, 15 bp, Homo sapiens
gcagggtgttcccac

SEQ ID NO: 954189 - DNA, 15 bp, Homo sapiens
cagggtgttcccact

SEQ ID NO: 954190 - DNA, 15 bp, Homo sapiens
agggtgttcccactt

SEQ ID NO: 954191 - DNA, 15 bp, Homo sapiens
gggtgttcccacttt

SEQ ID NO: 954192 - DNA, 15 bp, Homo sapiens
ggtgttcccactttt

SEQ ID NO: 954193 - DNA, 15 bp, Homo sapiens
gtgttcccacttttt

SEQ ID NO: 954194 - DNA, 15 bp, Homo sapiens
tgttcccactttttc

SEQ ID NO: 954195 - DNA, 15 bp, Homo sapiens
gttcccactttttca

SEQ ID NO: 954196 - DNA, 15 bp, Homo sapiens
ttcccactttttcag

SEQ ID NO: 954197 - DNA, 15 bp, Homo sapiens
tcccactttttcaga

SEQ ID NO: 954198 - DNA, 15 bp, Homo sapiens
cccactttttcagaa

SEQ ID NO: 954199 - DNA, 15 bp, Homo sapiens
ccactttttcagaat

SEQ ID NO: 954200 - DNA, 15 bp, Homo sapiens
cactttttcagaatg

SEQ ID NO: 954201 - DNA, 15 bp, Homo sapiens
actttttcagaatgg

SEQ ID NO: 954202 - DNA, 15 bp, Homo sapiens
ctttttcagaatggg

SEQ ID NO: 954203 - DNA, 15 bp, Homo sapiens
tttttcagaatggga

SEQ ID NO: 954204 - DNA, 15 bp, Homo sapiens
ttttcagaatgggac

SEQ ID NO: 954205 - DNA, 15 bp, Homo sapiens
tttcagaatgggacc

SEQ ID NO: 954206 - DNA, 15 bp, Homo sapiens
ttcagaatgggacca

SEQ ID NO: 954207 - DNA, 15 bp, Homo sapiens
tcagaatgggaccag

SEQ ID NO: 954208 - DNA, 15 bp, Homo sapiens
cagaatgggaccagg

SEQ ID NO: 954209 - DNA, 15 bp, Homo sapiens
agaatgggaccaggc

SEQ ID NO: 954210 - DNA, 15 bp, Homo sapiens
gaatgggaccaggcc

SEQ ID NO: 954211 - DNA, 15 bp, Homo sapiens
aatgggaccaggccc

SEQ ID NO: 954212 - DNA, 15 bp, Homo sapiens
atgggaccaggccct

SEQ ID NO: 954213 - DNA, 15 bp, Homo sapiens
tgggaccaggcccta

SEQ ID NO: 954214 - DNA, 15 bp, Homo sapiens
gggaccaggccctac

SEQ ID NO: 954215 - DNA, 15 bp, Homo sapiens
ggaccaggccctacg

SEQ ID NO: 954216 - DNA, 15 bp, Homo sapiens
gaccaggccctacgg

SEQ ID NO: 954217 - DNA, 15 bp, Homo sapiens
accaggccctacggc

SEQ ID NO: 954218 - DNA, 15 bp, Homo sapiens
ccaggccctacggcc

SEQ ID NO: 954219 - DNA, 15 bp, Homo sapiens
caggccctacggccc

SEQ ID NO: 954220 - DNA, 15 bp, Homo sapiens
aggccctacggcccc

SEQ ID NO: 954221 - DNA, 15 bp, Homo sapiens
ggccctacggcccca

SEQ ID NO: 954222 - DNA, 15 bp, Homo sapiens
gccctacggccccaa

SEQ ID NO: 954223 - DNA, 15 bp, Homo sapiens
ccctacggccccaat

SEQ ID NO: 954224 - DNA, 15 bp, Homo sapiens
cctacggccccaata

SEQ ID NO: 954225 - DNA, 15 bp, Homo sapiens
ctacggccccaatag

SEQ ID NO: 954226 - DNA, 15 bp, Homo sapiens
tacggccccaatagc

SEQ ID NO: 954227 - DNA, 15 bp, Homo sapiens
acggccccaatagca

SEQ ID NO: 954228 - DNA, 15 bp, Homo sapiens
cggccccaatagcag

SEQ ID NO: 954229 - DNA, 15 bp, Homo sapiens
ggccccaatagcaga

SEQ ID NO: 954230 - DNA, 15 bp, Homo sapiens
gccccaatagcagaa

SEQ ID NO: 954231 - DNA, 15 bp, Homo sapiens
ccccaatagcagaag

SEQ ID NO: 954232 - DNA, 15 bp, Homo sapiens
cccaatagcagaagc

SEQ ID NO: 954233 - DNA, 15 bp, Homo sapiens
ccaatagcagaagct

SEQ ID NO: 954234 - DNA, 15 bp, Homo sapiens
caatagcagaagctt

SEQ ID NO: 954235 - DNA, 15 bp, Homo sapiens
aatagcagaagcttc

SEQ ID NO: 954236 - DNA, 15 bp, Homo sapiens
atagcagaagcttct

SEQ ID NO: 954237 - DNA, 15 bp, Homo sapiens
tagcagaagcttctc

SEQ ID NO: 954238 - DNA, 15 bp, Homo sapiens
agcagaagcttctct

SEQ ID NO: 954239 - DNA, 15 bp, Homo sapiens
gcagaagcttctcta

SEQ ID NO: 954240 - DNA, 15 bp, Homo sapiens
cagaagcttctctaa

SEQ ID NO: 954241 - DNA, 15 bp, Homo sapiens
agaagcttctctaac

SEQ ID NO: 954242 - DNA, 15 bp, Homo sapiens
gaagcttctctaacc

SEQ ID NO: 954243 - DNA, 15 bp, Homo sapiens
aagcttctctaaccc

SEQ ID NO: 954244 - DNA, 15 bp, Homo sapiens
agcttctctaaccca

SEQ ID NO: 954245 - DNA, 15 bp, Homo sapiens
gcttctctaacccag

SEQ ID NO: 954246 - DNA, 15 bp, Homo sapiens
cttctctaacccagg

SEQ ID NO: 954247 - DNA, 15 bp, Homo sapiens
ttctctaacccagga

SEQ ID NO: 954248 - DNA, 15 bp, Homo sapiens
tctctaacccaggac

SEQ ID NO: 954249 - DNA, 15 bp, Homo sapiens
ctctaacccaggact

SEQ ID NO: 954250 - DNA, 15 bp, Homo sapiens
tctaacccaggactg

SEQ ID NO: 954251 - DNA, 15 bp, Homo sapiens
ctaacccaggactgc

SEQ ID NO: 954252 - DNA, 15 bp, Homo sapiens
taacccaggactgct

SEQ ID NO: 954253 - DNA, 15 bp, Homo sapiens
aacccaggactgctc

SEQ ID NO: 954254 - DNA, 15 bp, Homo sapiens
acccaggactgctcc

SEQ ID NO: 954255 - DNA, 15 bp, Homo sapiens
cccaggactgctccc

SEQ ID NO: 954256 - DNA, 15 bp, Homo sapiens
ccaggactgctcccc

SEQ ID NO: 954257 - DNA, 15 bp, Homo sapiens
caggactgctcccct

SEQ ID NO: 954258 - DNA, 15 bp, Homo sapiens
aggactgctcccctc

SEQ ID NO: 954259 - DNA, 15 bp, Homo sapiens
ggactgctcccctca

SEQ ID NO: 954260 - DNA, 15 bp, Homo sapiens
gactgctcccctcaa

SEQ ID NO: 954261 - DNA, 15 bp, Homo sapiens
actgctcccctcaat

SEQ ID NO: 954262 - DNA, 15 bp, Homo sapiens
ctgctcccctcaatt

SEQ ID NO: 954263 - DNA, 15 bp, Homo sapiens
tgctcccctcaattc

SEQ ID NO: 954264 - DNA, 15 bp, Homo sapiens
gctcccctcaattcc

SEQ ID NO: 954265 - DNA, 15 bp, Homo sapiens
ctcccctcaattcct

SEQ ID NO: 954266 - DNA, 15 bp, Homo sapiens
tcccctcaattcctc

SEQ ID NO: 954267 - DNA, 15 bp, Homo sapiens
cccctcaattcctcc

SEQ ID NO: 954268 - DNA, 15 bp, Homo sapiens
ccctcaattcctccc

SEQ ID NO: 954269 - DNA, 15 bp, Homo sapiens
cctcaattcctccca

SEQ ID NO: 954270 - DNA, 15 bp, Homo sapiens
ctcaattcctcccaa

SEQ ID NO: 954271 - DNA, 15 bp, Homo sapiens
tcaattcctcccaat

SEQ ID NO: 954272 - DNA, 15 bp, Homo sapiens
caattcctcccaata

SEQ ID NO: 954273 - DNA, 15 bp, Homo sapiens
aattcctcccaatat

SEQ ID NO: 954274 - DNA, 15 bp, Homo sapiens
attcctcccaatatg

SEQ ID NO: 954275 - DNA, 15 bp, Homo sapiens
ttcctcccaatatgc

SEQ ID NO: 954276 - DNA, 15 bp, Homo sapiens
tcctcccaatatgct

SEQ ID NO: 954277 - DNA, 15 bp, Homo sapiens
cctcccaatatgctg

SEQ ID NO: 954278 - DNA, 15 bp, Homo sapiens
ctcccaatatgctga

SEQ ID NO: 954279 - DNA, 15 bp, Homo sapiens
tcccaatatgctgac

SEQ ID NO: 954280 - DNA, 15 bp, Homo sapiens
cccaatatgctgacc

SEQ ID NO: 954281 - DNA, 15 bp, Homo sapiens
ccaatatgctgaccg

SEQ ID NO: 954282 - DNA, 15 bp, Homo sapiens
caatatgctgaccga

SEQ ID NO: 954283 - DNA, 15 bp, Homo sapiens
aatatgctgaccgac

SEQ ID NO: 954284 - DNA, 15 bp, Homo sapiens
atatgctgaccgaca

SEQ ID NO: 954285 - DNA, 15 bp, Homo sapiens
tatgctgaccgacag

SEQ ID NO: 954286 - DNA, 15 bp, Homo sapiens
atgctgaccgacagc

SEQ ID NO: 954287 - DNA, 15 bp, Homo sapiens
tgctgaccgacagct

SEQ ID NO: 954288 - DNA, 15 bp, Homo sapiens
gctgaccgacagctc

SEQ ID NO: 954289 - DNA, 15 bp, Homo sapiens
ctgaccgacagctcg

SEQ ID NO: 954290 - DNA, 15 bp, Homo sapiens
tgaccgacagctcga

SEQ ID NO: 954291 - DNA, 15 bp, Homo sapiens
gaccgacagctcgac

SEQ ID NO: 954292 - DNA, 15 bp, Homo sapiens
accgacagctcgacc

SEQ ID NO: 954293 - DNA, 15 bp, Homo sapiens
ccgacagctcgacct

SEQ ID NO: 954294 - DNA, 15 bp, Homo sapiens
cgacagctcgacctc

SEQ ID NO: 954295 - DNA, 15 bp, Homo sapiens
gacagctcgacctca

SEQ ID NO: 954296 - DNA, 15 bp, Homo sapiens
acagctcgacctcac

SEQ ID NO: 954297 - DNA, 15 bp, Homo sapiens
cagctcgacctcacc

SEQ ID NO: 954298 - DNA, 15 bp, Homo sapiens
agctcgacctcacct

SEQ ID NO: 954299 - DNA, 15 bp, Homo sapiens
gctcgacctcacctg

SEQ ID NO: 954300 - DNA, 15 bp, Homo sapiens
ctcgacctcacctgg

SEQ ID NO: 954301 - DNA, 15 bp, Homo sapiens
tcgacctcacctggg

SEQ ID NO: 954302 - DNA, 15 bp, Homo sapiens
cgacctcacctgggg

SEQ ID NO: 954303 - DNA, 15 bp, Homo sapiens
gacctcacctggggg

SEQ ID NO: 954304 - DNA, 15 bp, Homo sapiens
acctcacctgggggc

SEQ ID NO: 954305 - DNA, 15 bp, Homo sapiens
cctcacctgggggcg

SEQ ID NO: 954306 - DNA, 15 bp, Homo sapiens
ctcacctgggggcgg

SEQ ID NO: 954307 - DNA, 15 bp, Homo sapiens
tcacctgggggcggt

SEQ ID NO: 954308 - DNA, 15 bp, Homo sapiens
cacctgggggcggtt

SEQ ID NO: 954309 - DNA, 15 bp, Homo sapiens
acctgggggcggttc

SEQ ID NO: 954310 - DNA, 15 bp, Homo sapiens
cctgggggcggttcc

SEQ ID NO: 954311 - DNA, 15 bp, Homo sapiens
ctgggggcggttccg

SEQ ID NO: 954312 - DNA, 15 bp, Homo sapiens
tgggggcggttccgc

SEQ ID NO: 954313 - DNA, 15 bp, Homo sapiens
gggggcggttccgcc

SEQ ID NO: 954314 - DNA, 15 bp, Homo sapiens
ggggcggttccgcca

SEQ ID NO: 954315 - DNA, 15 bp, Homo sapiens
gggcggttccgccag

SEQ ID NO: 954316 - DNA, 15 bp, Homo sapiens
ggcggttccgccagg

SEQ ID NO: 954317 - DNA, 15 bp, Homo sapiens
gcggttccgccaggg

SEQ ID NO: 954318 - DNA, 15 bp, Homo sapiens
cggttccgccagggg

SEQ ID NO: 954319 - DNA, 15 bp, Homo sapiens
ggttccgccagggga

SEQ ID NO: 954320 - DNA, 15 bp, Homo sapiens
gttccgccaggggat

SEQ ID NO: 954321 - DNA, 15 bp, Homo sapiens
ttccgccaggggatg

SEQ ID NO: 954322 - DNA, 15 bp, Homo sapiens
tccgccaggggatgg

SEQ ID NO: 954323 - DNA, 15 bp, Homo sapiens
ccgccaggggatggc

SEQ ID NO: 954324 - DNA, 15 bp, Homo sapiens
cgccaggggatggct

SEQ ID NO: 954325 - DNA, 15 bp, Homo sapiens
gccaggggatggctt

SEQ ID NO: 954326 - DNA, 15 bp, Homo sapiens
ccaggggatggctta

SEQ ID NO: 954327 - DNA, 15 bp, Homo sapiens
caggggatggcttag

SEQ ID NO: 954328 - DNA, 15 bp, Homo sapiens
aggggatggcttagg

SEQ ID NO: 954329 - DNA, 15 bp, Homo sapiens
ggggatggcttagga

SEQ ID NO: 954330 - DNA, 15 bp, Homo sapiens
gggatggcttaggaa

SEQ ID NO: 954331 - DNA, 15 bp, Homo sapiens
ggatggcttaggaaa

SEQ ID NO: 954332 - DNA, 15 bp, Homo sapiens
gatggcttaggaaaa

SEQ ID NO: 954333 - DNA, 15 bp, Homo sapiens
atggcttaggaaaac

SEQ ID NO: 954334 - DNA, 15 bp, Homo sapiens
tggcttaggaaaacc

SEQ ID NO: 954335 - DNA, 15 bp, Homo sapiens
ggcttaggaaaacct

SEQ ID NO: 954336 - DNA, 15 bp, Homo sapiens
gcttaggaaaacctc

SEQ ID NO: 954337 - DNA, 15 bp, Homo sapiens
cttaggaaaacctca

SEQ ID NO: 954338 - DNA, 15 bp, Homo sapiens
ttaggaaaacctcag

SEQ ID NO: 954339 - DNA, 15 bp, Homo sapiens
taggaaaacctcagg

SEQ ID NO: 954340 - DNA, 15 bp, Homo sapiens
aggaaaacctcagga

SEQ ID NO: 954341 - DNA, 15 bp, Homo sapiens
ggaaaacctcaggaa

SEQ ID NO: 954342 - DNA, 15 bp, Homo sapiens
gaaaacctcaggaag

SEQ ID NO: 954343 - DNA, 15 bp, Homo sapiens
aaaacctcaggaaga

SEQ ID NO: 954344 - DNA, 15 bp, Homo sapiens
aaacctcaggaagag

SEQ ID NO: 954345 - DNA, 15 bp, Homo sapiens
aacctcaggaagagc

SEQ ID NO: 954346 - DNA, 15 bp, Homo sapiens
acctcaggaagagca

SEQ ID NO: 954347 - DNA, 15 bp, Homo sapiens
cctcaggaagagcag

SEQ ID NO: 954348 - DNA, 15 bp, Homo sapiens
ctcaggaagagcagc

SEQ ID NO: 954349 - DNA, 15 bp, Homo sapiens
tcaggaagagcagcc

SEQ ID NO: 954350 - DNA, 15 bp, Homo sapiens
caggaagagcagccc

SEQ ID NO: 954351 - DNA, 15 bp, Homo sapiens
aggaagagcagccca

SEQ ID NO: 954352 - DNA, 15 bp, Homo sapiens
ggaagagcagcccag

SEQ ID NO: 954353 - DNA, 15 bp, Homo sapiens
gaagagcagcccagc

SEQ ID NO: 954354 - DNA, 15 bp, Homo sapiens
aagagcagcccagcg

SEQ ID NO: 954355 - DNA, 15 bp, Homo sapiens
agagcagcccagcga

SEQ ID NO: 954356 - DNA, 15 bp, Homo sapiens
gagcagcccagcgag

SEQ ID NO: 954357 - DNA, 15 bp, Homo sapiens
agcagcccagcgagt

SEQ ID NO: 954358 - DNA, 15 bp, Homo sapiens
gcagcccagcgagtg

SEQ ID NO: 954359 - DNA, 15 bp, Homo sapiens
cagcccagcgagtga

SEQ ID NO: 954360 - DNA, 15 bp, Homo sapiens
agcccagcgagtgac

SEQ ID NO: 954361 - DNA, 15 bp, Homo sapiens
gcccagcgagtgacg

SEQ ID NO: 954362 - DNA, 15 bp, Homo sapiens
cccagcgagtgacgc

SEQ ID NO: 954363 - DNA, 15 bp, Homo sapiens
ccagcgagtgacgcc

SEQ ID NO: 954364 - DNA, 15 bp, Homo sapiens
cagcgagtgacgcca

SEQ ID NO: 954365 - DNA, 15 bp, Homo sapiens
agcgagtgacgccac

SEQ ID NO: 954366 - DNA, 15 bp, Homo sapiens
gcgagtgacgccact

SEQ ID NO: 954367 - DNA, 15 bp, Homo sapiens
cgagtgacgccactg

SEQ ID NO: 954368 - DNA, 15 bp, Homo sapiens
gagtgacgccactga

SEQ ID NO: 954369 - DNA, 15 bp, Homo sapiens
agtgacgccactgaa

SEQ ID NO: 954370 - DNA, 15 bp, Homo sapiens
gtgacgccactgaaa

SEQ ID NO: 954371 - DNA, 15 bp, Homo sapiens
tgacgccactgaaac

SEQ ID NO: 954372 - DNA, 15 bp, Homo sapiens
gacgccactgaaacc

SEQ ID NO: 954373 - DNA, 15 bp, Homo sapiens
acgccactgaaacca

SEQ ID NO: 954374 - DNA, 15 bp, Homo sapiens
cgccactgaaaccac

SEQ ID NO: 954375 - DNA, 15 bp, Homo sapiens
gccactgaaaccaca

SEQ ID NO: 954376 - DNA, 15 bp, Homo sapiens
ccactgaaaccacag

SEQ ID NO: 954377 - DNA, 15 bp, Homo sapiens
cactgaaaccacagt

SEQ ID NO: 954378 - DNA, 15 bp, Homo sapiens
actgaaaccacagtc

SEQ ID NO: 954379 - DNA, 15 bp, Homo sapiens
ctgaaaccacagtca

SEQ ID NO: 954380 - DNA, 15 bp, Homo sapiens
tgaaaccacagtcat

SEQ ID NO: 954381 - DNA, 15 bp, Homo sapiens
gaaaccacagtcatg

SEQ ID NO: 954382 - DNA, 15 bp, Homo sapiens
aaaccacagtcatgg

SEQ ID NO: 954383 - DNA, 15 bp, Homo sapiens
aaccacagtcatggt

SEQ ID NO: 954384 - DNA, 15 bp, Homo sapiens
accacagtcatggtc

SEQ ID NO: 954385 - DNA, 15 bp, Homo sapiens
ccacagtcatggtct

SEQ ID NO: 954386 - DNA, 15 bp, Homo sapiens
cacagtcatggtcta

SEQ ID NO: 954387 - DNA, 15 bp, Homo sapiens
acagtcatggtctac

SEQ ID NO: 954388 - DNA, 15 bp, Homo sapiens
cagtcatggtctacc

SEQ ID NO: 954389 - DNA, 15 bp, Homo sapiens
agtcatggtctacct

SEQ ID NO: 954390 - DNA, 15 bp, Homo sapiens
gtcatggtctacctc

SEQ ID NO: 954391 - DNA, 15 bp, Homo sapiens
tcatggtctacctcg

SEQ ID NO: 954392 - DNA, 15 bp, Homo sapiens
catggtctacctcgt

SEQ ID NO: 954393 - DNA, 15 bp, Homo sapiens
atggtctacctcgtt

SEQ ID NO: 954394 - DNA, 15 bp, Homo sapiens
tggtctacctcgttc

SEQ ID NO: 954395 - DNA, 15 bp, Homo sapiens
ggtctacctcgttca

SEQ ID NO: 954396 - DNA, 15 bp, Homo sapiens
gtctacctcgttcag

SEQ ID NO: 954397 - DNA, 15 bp, Homo sapiens
tctacctcgttcagg

SEQ ID NO: 954398 - DNA, 15 bp, Homo sapiens
ctacctcgttcaggc

SEQ ID NO: 954399 - DNA, 15 bp, Homo sapiens
tacctcgttcaggcc

SEQ ID NO: 954400 - DNA, 15 bp, Homo sapiens
acctcgttcaggcca

SEQ ID NO: 954401 - DNA, 15 bp, Homo sapiens
cctcgttcaggccac

SEQ ID NO: 954402 - DNA, 15 bp, Homo sapiens
ctcgttcaggccacc

SEQ ID NO: 954403 - DNA, 15 bp, Homo sapiens
tcgttcaggccacca

SEQ ID NO: 954404 - DNA, 15 bp, Homo sapiens
cgttcaggccaccag

SEQ ID NO: 954405 - DNA, 15 bp, Homo sapiens
gttcaggccaccagt

SEQ ID NO: 954406 - DNA, 15 bp, Homo sapiens
ttcaggccaccagtt

SEQ ID NO: 954407 - DNA, 15 bp, Homo sapiens
tcaggccaccagttt

SEQ ID NO: 954408 - DNA, 15 bp, Homo sapiens
caggccaccagtttg

SEQ ID NO: 954409 - DNA, 15 bp, Homo sapiens
aggccaccagtttgc

SEQ ID NO: 954410 - DNA, 15 bp, Homo sapiens
ggccaccagtttgca

SEQ ID NO: 954411 - DNA, 15 bp, Homo sapiens
gccaccagtttgcag

SEQ ID NO: 954412 - DNA, 15 bp, Homo sapiens
ccaccagtttgcagg

SEQ ID NO: 954413 - DNA, 15 bp, Homo sapiens
caccagtttgcaggc

SEQ ID NO: 954414 - DNA, 15 bp, Homo sapiens
accagtttgcaggcg

SEQ ID NO: 954415 - DNA, 15 bp, Homo sapiens
ccagtttgcaggcgc

SEQ ID NO: 954416 - DNA, 15 bp, Homo sapiens
cagtttgcaggcgcc

SEQ ID NO: 954417 - DNA, 15 bp, Homo sapiens
agtttgcaggcgcct

SEQ ID NO: 954418 - DNA, 15 bp, Homo sapiens
gtttgcaggcgcctg

SEQ ID NO: 954419 - DNA, 15 bp, Homo sapiens
tttgcaggcgcctga

SEQ ID NO: 954420 - DNA, 15 bp, Homo sapiens
ttgcaggcgcctgag

SEQ ID NO: 954421 - DNA, 15 bp, Homo sapiens
tgcaggcgcctgagc

SEQ ID NO: 954422 - DNA, 15 bp, Homo sapiens
gcaggcgcctgagcc

SEQ ID NO: 954423 - DNA, 15 bp, Homo sapiens
caggcgcctgagccg

SEQ ID NO: 954424 - DNA, 15 bp, Homo sapiens
aggcgcctgagccgc

SEQ ID NO: 954425 - DNA, 15 bp, Homo sapiens
ggcgcctgagccgct

SEQ ID NO: 954426 - DNA, 15 bp, Homo sapiens
gcgcctgagccgctg

SEQ ID NO: 954427 - DNA, 15 bp, Homo sapiens
cgcctgagccgctgc

SEQ ID NO: 954428 - DNA, 15 bp, Homo sapiens
gcctgagccgctgct

SEQ ID NO: 954429 - DNA, 15 bp, Homo sapiens
cctgagccgctgctc

SEQ ID NO: 954430 - DNA, 15 bp, Homo sapiens
ctgagccgctgctcc

SEQ ID NO: 954431 - DNA, 15 bp, Homo sapiens
tgagccgctgctcct

SEQ ID NO: 954432 - DNA, 15 bp, Homo sapiens
gagccgctgctcctc

SEQ ID NO: 954433 - DNA, 15 bp, Homo sapiens
agccgctgctcctcc

SEQ ID NO: 954434 - DNA, 15 bp, Homo sapiens
gccgctgctcctccc

SEQ ID NO: 954435 - DNA, 15 bp, Homo sapiens
ccgctgctcctcccg

SEQ ID NO: 954436 - DNA, 15 bp, Homo sapiens
cgctgctcctcccgc

SEQ ID NO: 954437 - DNA, 15 bp, Homo sapiens
gctgctcctcccgcc

SEQ ID NO: 954438 - DNA, 15 bp, Homo sapiens
ctgctcctcccgcct

SEQ ID NO: 954439 - DNA, 15 bp, Homo sapiens
tgctcctcccgcctc

SEQ ID NO: 954440 - DNA, 15 bp, Homo sapiens
gctcctcccgcctct

SEQ ID NO: 954441 - DNA, 15 bp, Homo sapiens
ctcctcccgcctctc

SEQ ID NO: 954442 - DNA, 15 bp, Homo sapiens
tcctcccgcctctcg

SEQ ID NO: 954443 - DNA, 15 bp, Homo sapiens
cctcccgcctctcgg

SEQ ID NO: 954444 - DNA, 15 bp, Homo sapiens
ctcccgcctctcggt

SEQ ID NO: 954445 - DNA, 15 bp, Homo sapiens
tcccgcctctcggtc

SEQ ID NO: 954446 - DNA, 15 bp, Homo sapiens
cccgcctctcggtcc

SEQ ID NO: 954447 - DNA, 15 bp, Homo sapiens
ccgcctctcggtcct

SEQ ID NO: 954448 - DNA, 15 bp, Homo sapiens
cgcctctcggtcctt

SEQ ID NO: 954449 - DNA, 15 bp, Homo sapiens
gcctctcggtccttc

SEQ ID NO: 954450 - DNA, 15 bp, Homo sapiens
cctctcggtccttcc

SEQ ID NO: 954451 - DNA, 15 bp, Homo sapiens
ctctcggtccttccc

SEQ ID NO: 954452 - DNA, 15 bp, Homo sapiens
tctcggtccttcccc

SEQ ID NO: 954453 - DNA, 15 bp, Homo sapiens
ctcggtccttccccg

SEQ ID NO: 954454 - DNA, 15 bp, Homo sapiens
tcggtccttccccgc

SEQ ID NO: 954455 - DNA, 15 bp, Homo sapiens
cggtccttccccgcc

SEQ ID NO: 954456 - DNA, 15 bp, Homo sapiens
ggtccttccccgccg

SEQ ID NO: 954457 - DNA, 15 bp, Homo sapiens
gtccttccccgccgc

SEQ ID NO: 954458 - DNA, 15 bp, Homo sapiens
tccttccccgccgcc

SEQ ID NO: 954459 - DNA, 15 bp, Homo sapiens
ccttccccgccgccc

SEQ ID NO: 954460 - DNA, 15 bp, Homo sapiens
cttccccgccgcccc

SEQ ID NO: 954461 - DNA, 15 bp, Homo sapiens
ttccccgccgccccg

SEQ ID NO: 954462 - DNA, 15 bp, Homo sapiens
tccccgccgccccgg

SEQ ID NO: 954463 - DNA, 15 bp, Homo sapiens
ccccgccgccccggt

SEQ ID NO: 954464 - DNA, 15 bp, Homo sapiens
cccgccgccccggta

SEQ ID NO: 954465 - DNA, 15 bp, Homo sapiens
ccgccgccccggtac

SEQ ID NO: 954466 - DNA, 15 bp, Homo sapiens
cgccgccccggtacc

SEQ ID NO: 954467 - DNA, 15 bp, Homo sapiens
gccgccccggtaccg

SEQ ID NO: 954468 - DNA, 15 bp, Homo sapiens
ccgccccggtaccgt

SEQ ID NO: 954469 - DNA, 15 bp, Homo sapiens
cgccccggtaccgtc

SEQ ID NO: 954470 - DNA, 15 bp, Homo sapiens
gccccggtaccgtcg

SEQ ID NO: 954471 - DNA, 15 bp, Homo sapiens
ccccggtaccgtcgc

SEQ ID NO: 954472 - DNA, 15 bp, Homo sapiens
cccggtaccgtcgca

SEQ ID NO: 954473 - DNA, 15 bp, Homo sapiens
ccggtaccgtcgcag

SEQ ID NO: 954474 - DNA, 15 bp, Homo sapiens
cggtaccgtcgcagt

SEQ ID NO: 954475 - DNA, 15 bp, Homo sapiens
ggtaccgtcgcagtc

SEQ ID NO: 954476 - DNA, 15 bp, Homo sapiens
gtaccgtcgcagtct

SEQ ID NO: 954477 - DNA, 15 bp, Homo sapiens
taccgtcgcagtctt

SEQ ID NO: 954478 - DNA, 15 bp, Homo sapiens
accgtcgcagtctta

SEQ ID NO: 954479 - DNA, 15 bp, Homo sapiens
ccgtcgcagtcttac

SEQ ID NO: 954480 - DNA, 15 bp, Homo sapiens
cgtcgcagtcttacg

SEQ ID NO: 954481 - DNA, 15 bp, Homo sapiens
gtcgcagtcttacgc

SEQ ID NO: 954482 - DNA, 15 bp, Homo sapiens
tcgcagtcttacgcg

SEQ ID NO: 954483 - DNA, 15 bp, Homo sapiens
cgcagtcttacgcgt

SEQ ID NO: 954484 - DNA, 15 bp, Homo sapiens
gcagtcttacgcgtt

SEQ ID NO: 954485 - DNA, 15 bp, Homo sapiens
cagtcttacgcgttg

SEQ ID NO: 954486 - DNA, 15 bp, Homo sapiens
agtcttacgcgttgc

SEQ ID NO: 954487 - DNA, 15 bp, Homo sapiens
gtcttacgcgttgca

SEQ ID NO: 954488 - DNA, 15 bp, Homo sapiens
tcttacgcgttgcat

SEQ ID NO: 954489 - DNA, 15 bp, Homo sapiens
cttacgcgttgcatg

SEQ ID NO: 954490 - DNA, 15 bp, Homo sapiens
ttacgcgttgcatgc

SEQ ID NO: 954491 - DNA, 15 bp, Homo sapiens
tacgcgttgcatgcc

SEQ ID NO: 954492 - DNA, 15 bp, Homo sapiens
acgcgttgcatgccg

SEQ ID NO: 954493 - DNA, 15 bp, Homo sapiens
cgcgttgcatgccgg

SEQ ID NO: 954494 - DNA, 15 bp, Homo sapiens
gcgttgcatgccggg

SEQ ID NO: 954495 - DNA, 15 bp, Homo sapiens
cgttgcatgccggga

SEQ ID NO: 954496 - DNA, 15 bp, Homo sapiens
gttgcatgccgggag

SEQ ID NO: 954497 - DNA, 15 bp, Homo sapiens
ttgcatgccgggagc

SEQ ID NO: 954498 - DNA, 15 bp, Homo sapiens
tgcatgccgggagcg

SEQ ID NO: 954499 - DNA, 15 bp, Homo sapiens
gcatgccgggagcgc

SEQ ID NO: 954500 - DNA, 15 bp, Homo sapiens
catgccgggagcgcc

SEQ ID NO: 954501 - DNA, 15 bp, Homo sapiens
atgccgggagcgcct

SEQ ID NO: 954502 - DNA, 15 bp, Homo sapiens
tgccgggagcgcctt

SEQ ID NO: 954503 - DNA, 15 bp, Homo sapiens
gccgggagcgcctta

SEQ ID NO: 954504 - DNA, 15 bp, Homo sapiens
ccgggagcgccttac

SEQ ID NO: 954505 - DNA, 15 bp, Homo sapiens
cgggagcgccttacc

SEQ ID NO: 954506 - DNA, 15 bp, Homo sapiens
gggagcgccttacct

SEQ ID NO: 954507 - DNA, 15 bp, Homo sapiens
ggagcgccttacctc

SEQ ID NO: 954508 - DNA, 15 bp, Homo sapiens
gagcgccttacctcc

SEQ ID NO: 954509 - DNA, 15 bp, Homo sapiens
agcgccttacctcct

SEQ ID NO: 954510 - DNA, 15 bp, Homo sapiens
gcgccttacctcctc

SEQ ID NO: 954511 - DNA, 15 bp, Homo sapiens
cgccttacctcctct

SEQ ID NO: 954512 - DNA, 15 bp, Homo sapiens
gccttacctcctctt

SEQ ID NO: 954513 - DNA, 15 bp, Homo sapiens
ccttacctcctcttc

SEQ ID NO: 954514 - DNA, 15 bp, Homo sapiens
cttacctcctcttct

SEQ ID NO: 954515 - DNA, 15 bp, Homo sapiens
ttacctcctcttctc

SEQ ID NO: 954516 - DNA, 15 bp, Homo sapiens
tacctcctcttctca

SEQ ID NO: 954517 - DNA, 15 bp, Homo sapiens
acctcctcttctcag

SEQ ID NO: 954518 - DNA, 15 bp, Homo sapiens
cctcctcttctcagg

SEQ ID NO: 954519 - DNA, 15 bp, Homo sapiens
ctcctcttctcaggg

SEQ ID NO: 954520 - DNA, 15 bp, Homo sapiens
tcctcttctcaggga

SEQ ID NO: 954521 - DNA, 15 bp, Homo sapiens
cctcttctcagggac

SEQ ID NO: 954522 - DNA, 15 bp, Homo sapiens
ctcttctcagggact

SEQ ID NO: 954523 - DNA, 15 bp, Homo sapiens
tcttctcagggactt

SEQ ID NO: 954524 - DNA, 15 bp, Homo sapiens
cttctcagggacttc

SEQ ID NO: 954525 - DNA, 15 bp, Homo sapiens
ttctcagggacttca

SEQ ID NO: 954526 - DNA, 15 bp, Homo sapiens
tctcagggacttcag

SEQ ID NO: 954527 - DNA, 15 bp, Homo sapiens
ctcagggacttcagt

SEQ ID NO: 954528 - DNA, 15 bp, Homo sapiens
tcagggacttcagtt

SEQ ID NO: 954529 - DNA, 15 bp, Homo sapiens
cagggacttcagttc

SEQ ID NO: 954530 - DNA, 15 bp, Homo sapiens
agggacttcagttcc

SEQ ID NO: 954531 - DNA, 15 bp, Homo sapiens
gggacttcagttccc

SEQ ID NO: 954532 - DNA, 15 bp, Homo sapiens
ggacttcagttccca

SEQ ID NO: 954533 - DNA, 15 bp, Homo sapiens
gacttcagttcccag

SEQ ID NO: 954534 - DNA, 15 bp, Homo sapiens
acttcagttcccagc

SEQ ID NO: 954535 - DNA, 15 bp, Homo sapiens
cttcagttcccagca

SEQ ID NO: 954536 - DNA, 15 bp, Homo sapiens
ttcagttcccagcat

SEQ ID NO: 954537 - DNA, 15 bp, Homo sapiens
tcagttcccagcatg

SEQ ID NO: 954538 - DNA, 15 bp, Homo sapiens
cagttcccagcatgc

SEQ ID NO: 954539 - DNA, 15 bp, Homo sapiens
agttcccagcatgca

SEQ ID NO: 954540 - DNA, 15 bp, Homo sapiens
gttcccagcatgcag

SEQ ID NO: 954541 - DNA, 15 bp, Homo sapiens
ttcccagcatgcaga

SEQ ID NO: 954542 - DNA, 15 bp, Homo sapiens
tcccagcatgcagaa

SEQ ID NO: 954543 - DNA, 15 bp, Homo sapiens
cccagcatgcagaag

SEQ ID NO: 954544 - DNA, 15 bp, Homo sapiens
ccagcatgcagaagc

SEQ ID NO: 954545 - DNA, 15 bp, Homo sapiens
cagcatgcagaagcc

SEQ ID NO: 954546 - DNA, 15 bp, Homo sapiens
agcatgcagaagcct

SEQ ID NO: 954547 - DNA, 15 bp, Homo sapiens
gcatgcagaagcctc

SEQ ID NO: 954548 - DNA, 15 bp, Homo sapiens
catgcagaagcctca

SEQ ID NO: 954549 - DNA, 15 bp, Homo sapiens
atgcagaagcctcag

SEQ ID NO: 954550 - DNA, 15 bp, Homo sapiens
tgcagaagcctcagg

SEQ ID NO: 954551 - DNA, 15 bp, Homo sapiens
gcagaagcctcaggc

SEQ ID NO: 954552 - DNA, 15 bp, Homo sapiens
cagaagcctcaggca

SEQ ID NO: 954553 - DNA, 15 bp, Homo sapiens
agaagcctcaggcag

SEQ ID NO: 954554 - DNA, 15 bp, Homo sapiens
gaagcctcaggcaga

SEQ ID NO: 954555 - DNA, 15 bp, Homo sapiens
aagcctcaggcagaa

SEQ ID NO: 954556 - DNA, 15 bp, Homo sapiens
agcctcaggcagaac

SEQ ID NO: 954557 - DNA, 15 bp, Homo sapiens
gcctcaggcagaact

SEQ ID NO: 954558 - DNA, 15 bp, Homo sapiens
cctcaggcagaactg

SEQ ID NO: 954559 - DNA, 15 bp, Homo sapiens
ctcaggcagaactgc

SEQ ID NO: 954560 - DNA, 15 bp, Homo sapiens
tcaggcagaactgca

SEQ ID NO: 954561 - DNA, 15 bp, Homo sapiens
caggcagaactgcac

SEQ ID NO: 954562 - DNA, 15 bp, Homo sapiens
aggcagaactgcact

SEQ ID NO: 954563 - DNA, 15 bp, Homo sapiens
ggcagaactgcactc

SEQ ID NO: 954564 - DNA, 15 bp, Homo sapiens
gcagaactgcactct

SEQ ID NO: 954565 - DNA, 15 bp, Homo sapiens
cagaactgcactctg

SEQ ID NO: 954566 - DNA, 15 bp, Homo sapiens
agaactgcactctgg

SEQ ID NO: 954567 - DNA, 15 bp, Homo sapiens
gaactgcactctggg

SEQ ID NO: 954568 - DNA, 15 bp, Homo sapiens
aactgcactctggga

SEQ ID NO: 954569 - DNA, 15 bp, Homo sapiens
actgcactctgggat

SEQ ID NO: 954570 - DNA, 15 bp, Homo sapiens
ctgcactctgggatt

SEQ ID NO: 954571 - DNA, 15 bp, Homo sapiens
tgcactctgggattt

SEQ ID NO: 954572 - DNA, 15 bp, Homo sapiens
gcactctgggatttg

SEQ ID NO: 954573 - DNA, 15 bp, Homo sapiens
cactctgggatttga

SEQ ID NO: 954574 - DNA, 15 bp, Homo sapiens
actctgggatttgaa

SEQ ID NO: 954575 - DNA, 15 bp, Homo sapiens
ctctgggatttgaag

SEQ ID NO: 954576 - DNA, 15 bp, Homo sapiens
tctgggatttgaagt

SEQ ID NO: 954577 - DNA, 15 bp, Homo sapiens
ctgggatttgaagtc

SEQ ID NO: 954578 - DNA, 15 bp, Homo sapiens
tgggatttgaagtcc

SEQ ID NO: 954579 - DNA, 15 bp, Homo sapiens
gggatttgaagtcct

SEQ ID NO: 954580 - DNA, 15 bp, Homo sapiens
ggatttgaagtcctc

SEQ ID NO: 954581 - DNA, 15 bp, Homo sapiens
gatttgaagtcctcg

SEQ ID NO: 954582 - DNA, 15 bp, Homo sapiens
atttgaagtcctcgt

SEQ ID NO: 954583 - DNA, 15 bp, Homo sapiens
tttgaagtcctcgtt

SEQ ID NO: 954584 - DNA, 15 bp, Homo sapiens
ttgaagtcctcgttc

SEQ ID NO: 954585 - DNA, 15 bp, Homo sapiens
tgaagtcctcgttcc

SEQ ID NO: 954586 - DNA, 15 bp, Homo sapiens
gaagtcctcgttcca

SEQ ID NO: 954587 - DNA, 15 bp, Homo sapiens
aagtcctcgttccac

SEQ ID NO: 954588 - DNA, 15 bp, Homo sapiens
agtcctcgttccacg

SEQ ID NO: 954589 - DNA, 15 bp, Homo sapiens
gtcctcgttccacgc

SEQ ID NO: 954590 - DNA, 15 bp, Homo sapiens
tcctcgttccacgcc

SEQ ID NO: 954591 - DNA, 15 bp, Homo sapiens
cctcgttccacgcct

SEQ ID NO: 954592 - DNA, 15 bp, Homo sapiens
ctcgttccacgcctt

SEQ ID NO: 954593 - DNA, 15 bp, Homo sapiens
tcgttccacgccttc

SEQ ID NO: 954594 - DNA, 15 bp, Homo sapiens
cgttccacgccttct

SEQ ID NO: 954595 - DNA, 15 bp, Homo sapiens
gttccacgccttctc

SEQ ID NO: 954596 - DNA, 15 bp, Homo sapiens
ttccacgccttctca

SEQ ID NO: 954597 - DNA, 15 bp, Homo sapiens
tccacgccttctcat

SEQ ID NO: 954598 - DNA, 15 bp, Homo sapiens
ccacgccttctcatc

SEQ ID NO: 954599 - DNA, 15 bp, Homo sapiens
cacgccttctcatca

SEQ ID NO: 954600 - DNA, 15 bp, Homo sapiens
acgccttctcatcat

SEQ ID NO: 954601 - DNA, 15 bp, Homo sapiens
cgccttctcatcatc

SEQ ID NO: 954602 - DNA, 15 bp, Homo sapiens
gccttctcatcatcc

SEQ ID NO: 954603 - DNA, 15 bp, Homo sapiens
ccttctcatcatcct

SEQ ID NO: 954604 - DNA, 15 bp, Homo sapiens
cttctcatcatcctg

SEQ ID NO: 954605 - DNA, 15 bp, Homo sapiens
ttctcatcatcctga

SEQ ID NO: 954606 - DNA, 15 bp, Homo sapiens
tctcatcatcctgaa

SEQ ID NO: 954607 - DNA, 15 bp, Homo sapiens
ctcatcatcctgaac

SEQ ID NO: 954608 - DNA, 15 bp, Homo sapiens
tcatcatcctgaaca

SEQ ID NO: 954609 - DNA, 15 bp, Homo sapiens
gcttgccaggattag

SEQ ID NO: 954610 - DNA, 15 bp, Homo sapiens
cttgccaggattagg

SEQ ID NO: 954611 - DNA, 15 bp, Homo sapiens
ttgccaggattaggg

SEQ ID NO: 954612 - DNA, 15 bp, Homo sapiens
tgccaggattagggt

SEQ ID NO: 954613 - DNA, 15 bp, Homo sapiens
gccaggattagggtg

SEQ ID NO: 954614 - DNA, 15 bp, Homo sapiens
ccaggattagggtgt

SEQ ID NO: 954615 - DNA, 15 bp, Homo sapiens
caggattagggtgtt

SEQ ID NO: 954616 - DNA, 15 bp, Homo sapiens
aggattagggtgttc

SEQ ID NO: 954617 - DNA, 15 bp, Homo sapiens
ggattagggtgttcg

SEQ ID NO: 954618 - DNA, 15 bp, Homo sapiens
gattagggtgttcgc

SEQ ID NO: 954619 - DNA, 15 bp, Homo sapiens
attagggtgttcgcg

SEQ ID NO: 954620 - DNA, 15 bp, Homo sapiens
ttagggtgttcgcgc

SEQ ID NO: 954621 - DNA, 15 bp, Homo sapiens
tagggtgttcgcgcg

SEQ ID NO: 954622 - DNA, 15 bp, Homo sapiens
agggtgttcgcgcgc

SEQ ID NO: 954623 - DNA, 15 bp, Homo sapiens
gggtgttcgcgcgca

SEQ ID NO: 954624 - DNA, 15 bp, Homo sapiens
ggtgttcgcgcgcat

SEQ ID NO: 954625 - DNA, 15 bp, Homo sapiens
gtgttcgcgcgcatt

SEQ ID NO: 954626 - DNA, 15 bp, Homo sapiens
tgttcgcgcgcattg

SEQ ID NO: 954627 - DNA, 15 bp, Homo sapiens
gttcgcgcgcattgt

SEQ ID NO: 954628 - DNA, 15 bp, Homo sapiens
ttcgcgcgcattgtg

SEQ ID NO: 954629 - DNA, 15 bp, Homo sapiens
tcgcgcgcattgtgg

SEQ ID NO: 954630 - DNA, 15 bp, Homo sapiens
cgcgcgcattgtggg

SEQ ID NO: 954631 - DNA, 15 bp, Homo sapiens
gcgcgcattgtgggt

SEQ ID NO: 954632 - DNA, 15 bp, Homo sapiens
cgcgcattgtgggta

SEQ ID NO: 954633 - DNA, 15 bp, Homo sapiens
gcgcattgtgggtag

SEQ ID NO: 954634 - DNA, 15 bp, Homo sapiens
cgcattgtgggtagg

SEQ ID NO: 954635 - DNA, 15 bp, Homo sapiens
gcattgtgggtaggg

SEQ ID NO: 954636 - DNA, 15 bp, Homo sapiens
cattgtgggtagggg

SEQ ID NO: 954637 - DNA, 15 bp, Homo sapiens
attgtgggtaggggt

SEQ ID NO: 954638 - DNA, 15 bp, Homo sapiens
ttgtgggtaggggtg

SEQ ID NO: 954639 - DNA, 15 bp, Homo sapiens
tgtgggtaggggtgt

SEQ ID NO: 954640 - DNA, 15 bp, Homo sapiens
gtgggtaggggtgtg

SEQ ID NO: 954641 - DNA, 15 bp, Homo sapiens
tgggtaggggtgtgg

SEQ ID NO: 954642 - DNA, 15 bp, Homo sapiens
gggtaggggtgtgga

SEQ ID NO: 954643 - DNA, 15 bp, Homo sapiens
ggtaggggtgtggag

SEQ ID NO: 954644 - DNA, 15 bp, Homo sapiens
gtaggggtgtggagg

SEQ ID NO: 954645 - DNA, 15 bp, Homo sapiens
taggggtgtggagga

SEQ ID NO: 954646 - DNA, 15 bp, Homo sapiens
aggggtgtggaggaa

SEQ ID NO: 954647 - DNA, 15 bp, Homo sapiens
ggggtgtggaggaag

SEQ ID NO: 954648 - DNA, 15 bp, Homo sapiens
gggtgtggaggaagg

SEQ ID NO: 954649 - DNA, 15 bp, Homo sapiens
ggtgtggaggaaggg

SEQ ID NO: 954650 - DNA, 15 bp, Homo sapiens
gtgtggaggaaggga

SEQ ID NO: 954651 - DNA, 15 bp, Homo sapiens
tgtggaggaagggat

SEQ ID NO: 954652 - DNA, 15 bp, Homo sapiens
gtggaggaagggatc

SEQ ID NO: 954653 - DNA, 15 bp, Homo sapiens
tggaggaagggatcc

SEQ ID NO: 954654 - DNA, 15 bp, Homo sapiens
ggaggaagggatcca

SEQ ID NO: 954655 - DNA, 15 bp, Homo sapiens
gaggaagggatccag

SEQ ID NO: 954656 - DNA, 15 bp, Homo sapiens
aggaagggatccaga

SEQ ID NO: 954657 - DNA, 15 bp, Homo sapiens
ggaagggatccagaa

SEQ ID NO: 954658 - DNA, 15 bp, Homo sapiens
gaagggatccagaaa

SEQ ID NO: 954659 - DNA, 15 bp, Homo sapiens
aagggatccagaaat

SEQ ID NO: 954660 - DNA, 15 bp, Homo sapiens
agggatccagaaatc

SEQ ID NO: 954661 - DNA, 15 bp, Homo sapiens
gggatccagaaatct

SEQ ID NO: 954662 - DNA, 15 bp, Homo sapiens
ggatccagaaatctt

SEQ ID NO: 954663 - DNA, 15 bp, Homo sapiens
gatccagaaatctta

SEQ ID NO: 954664 - DNA, 15 bp, Homo sapiens
atccagaaatcttaa

SEQ ID NO: 954665 - DNA, 15 bp, Homo sapiens
tccagaaatcttaag

SEQ ID NO: 954666 - DNA, 15 bp, Homo sapiens
ccagaaatcttaagt

SEQ ID NO: 954667 - DNA, 15 bp, Homo sapiens
cagaaatcttaagta

SEQ ID NO: 954668 - DNA, 15 bp, Homo sapiens
agaaatcttaagtat

SEQ ID NO: 954669 - DNA, 15 bp, Homo sapiens
gaaatcttaagtatt

SEQ ID NO: 954670 - DNA, 15 bp, Homo sapiens
aaatcttaagtatta

SEQ ID NO: 954671 - DNA, 15 bp, Homo sapiens
aatcttaagtattaa

SEQ ID NO: 954672 - DNA, 15 bp, Homo sapiens
atcttaagtattaac

SEQ ID NO: 954673 - DNA, 15 bp, Homo sapiens
tcttaagtattaact

SEQ ID NO: 954674 - DNA, 15 bp, Homo sapiens
cttaagtattaactt

SEQ ID NO: 954675 - DNA, 15 bp, Homo sapiens
ttaagtattaactta

SEQ ID NO: 954676 - DNA, 15 bp, Homo sapiens
taagtattaacttag

SEQ ID NO: 954677 - DNA, 15 bp, Homo sapiens
aagtattaacttaga

SEQ ID NO: 954678 - DNA, 15 bp, Homo sapiens
agtattaacttagat

SEQ ID NO: 954679 - DNA, 15 bp, Homo sapiens
gtattaacttagatt

SEQ ID NO: 954680 - DNA, 15 bp, Homo sapiens
tattaacttagatta

SEQ ID NO: 954681 - DNA, 15 bp, Homo sapiens
attaacttagattag

SEQ ID NO: 954682 - DNA, 15 bp, Homo sapiens
ttaacttagattagt

SEQ ID NO: 954683 - DNA, 15 bp, Homo sapiens
taacttagattagtg

SEQ ID NO: 954684 - DNA, 15 bp, Homo sapiens
aacttagattagtgt

SEQ ID NO: 954685 - DNA, 15 bp, Homo sapiens
acttagattagtgtt

SEQ ID NO: 954686 - DNA, 15 bp, Homo sapiens
cttagattagtgtta

SEQ ID NO: 954687 - DNA, 15 bp, Homo sapiens
ttagattagtgttag

SEQ ID NO: 954688 - DNA, 15 bp, Homo sapiens
tagattagtgttagc

SEQ ID NO: 954689 - DNA, 15 bp, Homo sapiens
agattagtgttagca

SEQ ID NO: 954690 - DNA, 15 bp, Homo sapiens
gattagtgttagcaa

SEQ ID NO: 954691 - DNA, 15 bp, Homo sapiens
attagtgttagcaag

SEQ ID NO: 954692 - DNA, 15 bp, Homo sapiens
ttagtgttagcaagg

SEQ ID NO: 954693 - DNA, 15 bp, Homo sapiens
tagtgttagcaagga

SEQ ID NO: 954694 - DNA, 15 bp, Homo sapiens
agtgttagcaaggaa

SEQ ID NO: 954695 - DNA, 15 bp, Homo sapiens
gtgttagcaaggaag

SEQ ID NO: 954696 - DNA, 15 bp, Homo sapiens
tgttagcaaggaagc

SEQ ID NO: 954697 - DNA, 15 bp, Homo sapiens
gttagcaaggaagcc

SEQ ID NO: 954698 - DNA, 15 bp, Homo sapiens
ttagcaaggaagccg

SEQ ID NO: 954699 - DNA, 15 bp, Homo sapiens
tagcaaggaagccgt

SEQ ID NO: 954700 - DNA, 15 bp, Homo sapiens
agcaaggaagccgtc

SEQ ID NO: 954701 - DNA, 15 bp, Homo sapiens
gcaaggaagccgtca

SEQ ID NO: 954702 - DNA, 15 bp, Homo sapiens
caaggaagccgtcac

SEQ ID NO: 954703 - DNA, 15 bp, Homo sapiens
aaggaagccgtcaca

SEQ ID NO: 954704 - DNA, 15 bp, Homo sapiens
aggaagccgtcacat

SEQ ID NO: 954705 - DNA, 15 bp, Homo sapiens
ggaagccgtcacatt

SEQ ID NO: 954706 - DNA, 15 bp, Homo sapiens
gaagccgtcacattt

SEQ ID NO: 954707 - DNA, 15 bp, Homo sapiens
aagccgtcacatttt

SEQ ID NO: 954708 - DNA, 15 bp, Homo sapiens
agccgtcacatttta

SEQ ID NO: 954709 - DNA, 15 bp, Homo sapiens
gccgtcacattttat

SEQ ID NO: 954710 - DNA, 15 bp, Homo sapiens
ccgtcacattttatt

SEQ ID NO: 954711 - DNA, 15 bp, Homo sapiens
cgtcacattttattt

SEQ ID NO: 954712 - DNA, 15 bp, Homo sapiens
gtcacattttattta

SEQ ID NO: 954713 - DNA, 15 bp, Homo sapiens
tcacattttatttag

SEQ ID NO: 954714 - DNA, 15 bp, Homo sapiens
cacattttatttagc

SEQ ID NO: 954715 - DNA, 15 bp, Homo sapiens
acattttatttagcc

SEQ ID NO: 954716 - DNA, 15 bp, Homo sapiens
cattttatttagccg

SEQ ID NO: 954717 - DNA, 15 bp, Homo sapiens
attttatttagccgg

SEQ ID NO: 954718 - DNA, 15 bp, Homo sapiens
ttttatttagccggg

SEQ ID NO: 954719 - DNA, 15 bp, Homo sapiens
tttatttagccggga

SEQ ID NO: 954720 - DNA, 15 bp, Homo sapiens
ttatttagccgggac

SEQ ID NO: 954721 - DNA, 15 bp, Homo sapiens
tatttagccgggaca

SEQ ID NO: 954722 - DNA, 15 bp, Homo sapiens
atttagccgggacac

SEQ ID NO: 954723 - DNA, 15 bp, Homo sapiens
tttagccgggacact

SEQ ID NO: 954724 - DNA, 15 bp, Homo sapiens
ttagccgggacactc

SEQ ID NO: 954725 - DNA, 15 bp, Homo sapiens
tagccgggacactct

SEQ ID NO: 954726 - DNA, 15 bp, Homo sapiens
agccgggacactctg

SEQ ID NO: 954727 - DNA, 15 bp, Homo sapiens
gccgggacactctga

SEQ ID NO: 954728 - DNA, 15 bp, Homo sapiens
ccgggacactctgac

SEQ ID NO: 954729 - DNA, 15 bp, Homo sapiens
cgggacactctgaca

SEQ ID NO: 954730 - DNA, 15 bp, Homo sapiens
gggacactctgacag

SEQ ID NO: 954731 - DNA, 15 bp, Homo sapiens
ggacactctgacagt

SEQ ID NO: 954732 - DNA, 15 bp, Homo sapiens
gacactctgacagtt

SEQ ID NO: 954733 - DNA, 15 bp, Homo sapiens
acactctgacagttt

SEQ ID NO: 954734 - DNA, 15 bp, Homo sapiens
cactctgacagtttg

SEQ ID NO: 954735 - DNA, 15 bp, Homo sapiens
actctgacagtttgt

SEQ ID NO: 954736 - DNA, 15 bp, Homo sapiens
ctctgacagtttgtg

SEQ ID NO: 954737 - DNA, 15 bp, Homo sapiens
tctgacagtttgtgc

SEQ ID NO: 954738 - DNA, 15 bp, Homo sapiens
ctgacagtttgtgcc

SEQ ID NO: 954739 - DNA, 15 bp, Homo sapiens
tgacagtttgtgccg

SEQ ID NO: 954740 - DNA, 15 bp, Homo sapiens
gacagtttgtgccga

SEQ ID NO: 954741 - DNA, 15 bp, Homo sapiens
acagtttgtgccgac

SEQ ID NO: 954742 - DNA, 15 bp, Homo sapiens
cagtttgtgccgact

SEQ ID NO: 954743 - DNA, 15 bp, Homo sapiens
agtttgtgccgactg

SEQ ID NO: 954744 - DNA, 15 bp, Homo sapiens
gtttgtgccgactgc

SEQ ID NO: 954745 - DNA, 15 bp, Homo sapiens
tttgtgccgactgct

SEQ ID NO: 954746 - DNA, 15 bp, Homo sapiens
ttgtgccgactgcta

SEQ ID NO: 954747 - DNA, 15 bp, Homo sapiens
tgtgccgactgctat

SEQ ID NO: 954748 - DNA, 15 bp, Homo sapiens
gtgccgactgctatt

SEQ ID NO: 954749 - DNA, 15 bp, Homo sapiens
tgccgactgctattt

SEQ ID NO: 954750 - DNA, 15 bp, Homo sapiens
gccgactgctatttt

SEQ ID NO: 954751 - DNA, 15 bp, Homo sapiens
ccgactgctattttt

SEQ ID NO: 954752 - DNA, 15 bp, Homo sapiens
cgactgctatttttg

SEQ ID NO: 954753 - DNA, 15 bp, Homo sapiens
gactgctatttttga

SEQ ID NO: 954754 - DNA, 15 bp, Homo sapiens
actgctatttttgat

SEQ ID NO: 954755 - DNA, 15 bp, Homo sapiens
ctgctatttttgatc

SEQ ID NO: 954756 - DNA, 15 bp, Homo sapiens
tgctatttttgatca

SEQ ID NO: 954757 - DNA, 15 bp, Homo sapiens
gctatttttgatcaa

SEQ ID NO: 954758 - DNA, 15 bp, Homo sapiens
ctatttttgatcaag

SEQ ID NO: 954759 - DNA, 15 bp, Homo sapiens
tatttttgatcaagg

SEQ ID NO: 954760 - DNA, 15 bp, Homo sapiens
atttttgatcaaggc

SEQ ID NO: 954761 - DNA, 15 bp, Homo sapiens
tttttgatcaaggct

SEQ ID NO: 954762 - DNA, 15 bp, Homo sapiens
ttttgatcaaggcta

SEQ ID NO: 954763 - DNA, 15 bp, Homo sapiens
tttgatcaaggctat

SEQ ID NO: 954764 - DNA, 15 bp, Homo sapiens
ttgatcaaggctatt

SEQ ID NO: 954765 - DNA, 15 bp, Homo sapiens
tgatcaaggctattt

SEQ ID NO: 954766 - DNA, 15 bp, Homo sapiens
gatcaaggctatttt

SEQ ID NO: 954767 - DNA, 15 bp, Homo sapiens
atcaaggctattttg

SEQ ID NO: 954768 - DNA, 15 bp, Homo sapiens
tcaaggctattttgc

SEQ ID NO: 954769 - DNA, 15 bp, Homo sapiens
caaggctattttgcc

SEQ ID NO: 954770 - DNA, 15 bp, Homo sapiens
aaggctattttgccc

SEQ ID NO: 954771 - DNA, 15 bp, Homo sapiens
aggctattttgccca

SEQ ID NO: 954772 - DNA, 15 bp, Homo sapiens
ggctattttgcccac

SEQ ID NO: 954773 - DNA, 15 bp, Homo sapiens
gctattttgcccact

SEQ ID NO: 954774 - DNA, 15 bp, Homo sapiens
ctattttgcccactt

SEQ ID NO: 954775 - DNA, 15 bp, Homo sapiens
tattttgcccacttg

SEQ ID NO: 954776 - DNA, 15 bp, Homo sapiens
attttgcccacttgt

SEQ ID NO: 954777 - DNA, 15 bp, Homo sapiens
ttttgcccacttgtc

SEQ ID NO: 954778 - DNA, 15 bp, Homo sapiens
tttgcccacttgtct

SEQ ID NO: 954779 - DNA, 15 bp, Homo sapiens
ttgcccacttgtcta

SEQ ID NO: 954780 - DNA, 15 bp, Homo sapiens
tgcccacttgtctat

SEQ ID NO: 954781 - DNA, 15 bp, Homo sapiens
gcccacttgtctatt

SEQ ID NO: 954782 - DNA, 15 bp, Homo sapiens
cccacttgtctattt

SEQ ID NO: 954783 - DNA, 15 bp, Homo sapiens
ccacttgtctatttt

SEQ ID NO: 954784 - DNA, 15 bp, Homo sapiens
cacttgtctattttg

SEQ ID NO: 954785 - DNA, 15 bp, Homo sapiens
acttgtctattttgt

SEQ ID NO: 954786 - DNA, 15 bp, Homo sapiens
cttgtctattttgtg

SEQ ID NO: 954787 - DNA, 15 bp, Homo sapiens
ttgtctattttgtgg

SEQ ID NO: 954788 - DNA, 15 bp, Homo sapiens
tgtctattttgtggc

SEQ ID NO: 954789 - DNA, 15 bp, Homo sapiens
gtctattttgtggcc

SEQ ID NO: 954790 - DNA, 15 bp, Homo sapiens
tctattttgtggccc

SEQ ID NO: 954791 - DNA, 15 bp, Homo sapiens
ctattttgtggccca

SEQ ID NO: 954792 - DNA, 15 bp, Homo sapiens
tattttgtggcccaa

SEQ ID NO: 954793 - DNA, 15 bp, Homo sapiens
attttgtggcccaat

SEQ ID NO: 954794 - DNA, 15 bp, Homo sapiens
ttttgtggcccaatt

SEQ ID NO: 954795 - DNA, 15 bp, Homo sapiens
tttgtggcccaattg

SEQ ID NO: 954796 - DNA, 15 bp, Homo sapiens
ttgtggcccaattgt

SEQ ID NO: 954797 - DNA, 15 bp, Homo sapiens
tgtggcccaattgtc

SEQ ID NO: 954798 - DNA, 15 bp, Homo sapiens
gtggcccaattgtct

SEQ ID NO: 954799 - DNA, 15 bp, Homo sapiens
tggcccaattgtctg

SEQ ID NO: 954800 - DNA, 15 bp, Homo sapiens
ggcccaattgtctgt

SEQ ID NO: 954801 - DNA, 15 bp, Homo sapiens
gcccaattgtctgtt

SEQ ID NO: 954802 - DNA, 15 bp, Homo sapiens
cccaattgtctgttt

SEQ ID NO: 954803 - DNA, 15 bp, Homo sapiens
ccaattgtctgtttt

SEQ ID NO: 954804 - DNA, 15 bp, Homo sapiens
caattgtctgttttg

SEQ ID NO: 954805 - DNA, 15 bp, Homo sapiens
aattgtctgttttgc

SEQ ID NO: 954806 - DNA, 15 bp, Homo sapiens
attgtctgttttgct

SEQ ID NO: 954807 - DNA, 15 bp, Homo sapiens
ttgtctgttttgcta

SEQ ID NO: 954808 - DNA, 15 bp, Homo sapiens
tgtctgttttgctaa

SEQ ID NO: 954809 - DNA, 15 bp, Homo sapiens
gtctgttttgctaac

SEQ ID NO: 954810 - DNA, 15 bp, Homo sapiens
tctgttttgctaaca

SEQ ID NO: 954811 - DNA, 15 bp, Homo sapiens
ctgttttgctaacat

SEQ ID NO: 954812 - DNA, 15 bp, Homo sapiens
tgttttgctaacatc

SEQ ID NO: 954813 - DNA, 15 bp, Homo sapiens
gttttgctaacatca

SEQ ID NO: 954814 - DNA, 15 bp, Homo sapiens
ttttgctaacatcag

SEQ ID NO: 954815 - DNA, 15 bp, Homo sapiens
tttgctaacatcaga

SEQ ID NO: 954816 - DNA, 15 bp, Homo sapiens
ttgctaacatcagaa

SEQ ID NO: 954817 - DNA, 15 bp, Homo sapiens
tgctaacatcagaaa

SEQ ID NO: 954818 - DNA, 15 bp, Homo sapiens
gctaacatcagaaag

SEQ ID NO: 954819 - DNA, 15 bp, Homo sapiens
ctaacatcagaaagt

SEQ ID NO: 954820 - DNA, 15 bp, Homo sapiens
taacatcagaaagtt

SEQ ID NO: 954821 - DNA, 15 bp, Homo sapiens
aacatcagaaagtta

SEQ ID NO: 954822 - DNA, 15 bp, Homo sapiens
acatcagaaagttat

SEQ ID NO: 954823 - DNA, 15 bp, Homo sapiens
catcagaaagttata

SEQ ID NO: 954824 - DNA, 15 bp, Homo sapiens
atcagaaagttataa

SEQ ID NO: 954825 - DNA, 15 bp, Homo sapiens
tcagaaagttataat

SEQ ID NO: 954826 - DNA, 15 bp, Homo sapiens
cagaaagttataatg

SEQ ID NO: 954827 - DNA, 15 bp, Homo sapiens
agaaagttataatga

SEQ ID NO: 954828 - DNA, 15 bp, Homo sapiens
gaaagttataatgaa

SEQ ID NO: 954829 - DNA, 15 bp, Homo sapiens
aaagttataatgaaa

SEQ ID NO: 954830 - DNA, 15 bp, Homo sapiens
aagttataatgaaat

SEQ ID NO: 954831 - DNA, 15 bp, Homo sapiens
agttataatgaaata

SEQ ID NO: 954832 - DNA, 15 bp, Homo sapiens
gttataatgaaataa

SEQ ID NO: 954833 - DNA, 15 bp, Homo sapiens
ttataatgaaataat

SEQ ID NO: 954834 - DNA, 15 bp, Homo sapiens
tataatgaaataatc

SEQ ID NO: 954835 - DNA, 15 bp, Homo sapiens
ataatgaaataatct

SEQ ID NO: 954836 - DNA, 15 bp, Homo sapiens
taatgaaataatctg

SEQ ID NO: 954837 - DNA, 15 bp, Homo sapiens
aatgaaataatctgc

SEQ ID NO: 954838 - DNA, 15 bp, Homo sapiens
atgaaataatctgca

SEQ ID NO: 954839 - DNA, 15 bp, Homo sapiens
tgaaataatctgcaa

SEQ ID NO: 954840 - DNA, 15 bp, Homo sapiens
gaaataatctgcaaa

SEQ ID NO: 954841 - DNA, 15 bp, Homo sapiens
aaataatctgcaaaa

SEQ ID NO: 954842 - DNA, 15 bp, Homo sapiens
aataatctgcaaaaa

SEQ ID NO: 954843 - DNA, 15 bp, Homo sapiens
ataatctgcaaaaaa

SEQ ID NO: 954844 - DNA, 15 bp, Homo sapiens
taatctgcaaaaaat

SEQ ID NO: 954845 - DNA, 15 bp, Homo sapiens
aatctgcaaaaaatg

SEQ ID NO: 954846 - DNA, 15 bp, Homo sapiens
atctgcaaaaaatgt

SEQ ID NO: 954847 - DNA, 15 bp, Homo sapiens
tctgcaaaaaatgta

SEQ ID NO: 954848 - DNA, 15 bp, Homo sapiens
ctgcaaaaaatgtaa

SEQ ID NO: 954849 - DNA, 15 bp, Homo sapiens
tgcaaaaaatgtaag

SEQ ID NO: 954850 - DNA, 15 bp, Homo sapiens
gcaaaaaatgtaagg

SEQ ID NO: 954851 - DNA, 15 bp, Homo sapiens
caaaaaatgtaaggt

SEQ ID NO: 954852 - DNA, 15 bp, Homo sapiens
aaaaaatgtaaggtg

SEQ ID NO: 954853 - DNA, 15 bp, Homo sapiens
aaaaatgtaaggtgc

SEQ ID NO: 954854 - DNA, 15 bp, Homo sapiens
aaaatgtaaggtgct

SEQ ID NO: 954855 - DNA, 15 bp, Homo sapiens
aaatgtaaggtgcta

SEQ ID NO: 954856 - DNA, 15 bp, Homo sapiens
aatgtaaggtgctag

SEQ ID NO: 954857 - DNA, 15 bp, Homo sapiens
atgtaaggtgctaga

SEQ ID NO: 954858 - DNA, 15 bp, Homo sapiens
tgtaaggtgctagaa

SEQ ID NO: 954859 - DNA, 15 bp, Homo sapiens
gtaaggtgctagaaa

SEQ ID NO: 954860 - DNA, 15 bp, Homo sapiens
taaggtgctagaaaa

SEQ ID NO: 954861 - DNA, 15 bp, Homo sapiens
aaggtgctagaaaac

SEQ ID NO: 954862 - DNA, 15 bp, Homo sapiens
aggtgctagaaaacc

SEQ ID NO: 954863 - DNA, 15 bp, Homo sapiens
ggtgctagaaaacca

SEQ ID NO: 954864 - DNA, 15 bp, Homo sapiens
gtgctagaaaaccaa

SEQ ID NO: 954865 - DNA, 15 bp, Homo sapiens
tgctagaaaaccaat

SEQ ID NO: 954866 - DNA, 15 bp, Homo sapiens
gctagaaaaccaata

SEQ ID NO: 954867 - DNA, 15 bp, Homo sapiens
ctagaaaaccaataa

SEQ ID NO: 954868 - DNA, 15 bp, Homo sapiens
tagaaaaccaataat

SEQ ID NO: 954869 - DNA, 15 bp, Homo sapiens
agaaaaccaataata

SEQ ID NO: 954870 - DNA, 15 bp, Homo sapiens
gaaaaccaataatac

SEQ ID NO: 954871 - DNA, 15 bp, Homo sapiens
aaaaccaataatact

SEQ ID NO: 954872 - DNA, 15 bp, Homo sapiens
aaaccaataatactg

SEQ ID NO: 954873 - DNA, 15 bp, Homo sapiens
aaccaataatactgt

SEQ ID NO: 954874 - DNA, 15 bp, Homo sapiens
accaataatactgtg

SEQ ID NO: 954875 - DNA, 15 bp, Homo sapiens
ccaataatactgtgt

SEQ ID NO: 954876 - DNA, 15 bp, Homo sapiens
caataatactgtgta

SEQ ID NO: 954877 - DNA, 15 bp, Homo sapiens
aataatactgtgtac

SEQ ID NO: 954878 - DNA, 15 bp, Homo sapiens
ataatactgtgtacc

SEQ ID NO: 954879 - DNA, 15 bp, Homo sapiens
taatactgtgtacct

SEQ ID NO: 954880 - DNA, 15 bp, Homo sapiens
aatactgtgtacctt

SEQ ID NO: 954881 - DNA, 15 bp, Homo sapiens
atactgtgtaccttg

SEQ ID NO: 954882 - DNA, 15 bp, Homo sapiens
tactgtgtaccttga

SEQ ID NO: 954883 - DNA, 15 bp, Homo sapiens
actgtgtaccttgaa

SEQ ID NO: 954884 - DNA, 15 bp, Homo sapiens
ctgtgtaccttgaaa

SEQ ID NO: 954885 - DNA, 15 bp, Homo sapiens
tgtgtaccttgaaaa

SEQ ID NO: 954886 - DNA, 15 bp, Homo sapiens
gtgtaccttgaaaat

SEQ ID NO: 954887 - DNA, 15 bp, Homo sapiens
tgtaccttgaaaatg

SEQ ID NO: 954888 - DNA, 15 bp, Homo sapiens
gtaccttgaaaatgc

SEQ ID NO: 954889 - DNA, 15 bp, Homo sapiens
taccttgaaaatgct

SEQ ID NO: 954890 - DNA, 15 bp, Homo sapiens
accttgaaaatgcta

SEQ ID NO: 954891 - DNA, 15 bp, Homo sapiens
ccttgaaaatgctaa

SEQ ID NO: 954892 - DNA, 15 bp, Homo sapiens
cttgaaaatgctaat

SEQ ID NO: 954893 - DNA, 15 bp, Homo sapiens
ttgaaaatgctaata

SEQ ID NO: 954894 - DNA, 15 bp, Homo sapiens
tgaaaatgctaatat

SEQ ID NO: 954895 - DNA, 15 bp, Homo sapiens
gaaaatgctaatata

SEQ ID NO: 954896 - DNA, 15 bp, Homo sapiens
aaaatgctaatatac

SEQ ID NO: 954897 - DNA, 15 bp, Homo sapiens
aaatgctaatataca

SEQ ID NO: 954898 - DNA, 15 bp, Homo sapiens
aatgctaatatacac

SEQ ID NO: 954899 - DNA, 15 bp, Homo sapiens
atgctaatatacacc

SEQ ID NO: 954900 - DNA, 15 bp, Homo sapiens
tgctaatatacacct

SEQ ID NO: 954901 - DNA, 15 bp, Homo sapiens
gctaatatacacctg

SEQ ID NO: 954902 - DNA, 15 bp, Homo sapiens
ctaatatacacctgt

SEQ ID NO: 954903 - DNA, 15 bp, Homo sapiens
taatatacacctgtt

SEQ ID NO: 954904 - DNA, 15 bp, Homo sapiens
aatatacacctgttt

SEQ ID NO: 954905 - DNA, 15 bp, Homo sapiens
atatacacctgtttt

SEQ ID NO: 954906 - DNA, 15 bp, Homo sapiens
tatacacctgttttg

SEQ ID NO: 954907 - DNA, 15 bp, Homo sapiens
atacacctgttttgt

SEQ ID NO: 954908 - DNA, 15 bp, Homo sapiens
tacacctgttttgtt

SEQ ID NO: 954909 - DNA, 15 bp, Homo sapiens
acacctgttttgtta

SEQ ID NO: 954910 - DNA, 15 bp, Homo sapiens
cacctgttttgttac

SEQ ID NO: 954911 - DNA, 15 bp, Homo sapiens
acctgttttgttaca

SEQ ID NO: 954912 - DNA, 15 bp, Homo sapiens
cctgttttgttacag

SEQ ID NO: 954913 - DNA, 15 bp, Homo sapiens
ctgttttgttacaga

SEQ ID NO: 954914 - DNA, 15 bp, Homo sapiens
tgttttgttacagag

SEQ ID NO: 954915 - DNA, 15 bp, Homo sapiens
gttttgttacagagg

SEQ ID NO: 954916 - DNA, 15 bp, Homo sapiens
ttttgttacagaggt

SEQ ID NO: 954917 - DNA, 15 bp, Homo sapiens
tttgttacagaggtg

SEQ ID NO: 954918 - DNA, 15 bp, Homo sapiens
ttgttacagaggtgg

SEQ ID NO: 954919 - DNA, 15 bp, Homo sapiens
tgttacagaggtgga

SEQ ID NO: 954920 - DNA, 15 bp, Homo sapiens
gttacagaggtggag

SEQ ID NO: 954921 - DNA, 15 bp, Homo sapiens
ttacagaggtggagc

SEQ ID NO: 954922 - DNA, 15 bp, Homo sapiens
tacagaggtggagca

SEQ ID NO: 954923 - DNA, 15 bp, Homo sapiens
acagaggtggagcac

SEQ ID NO: 954924 - DNA, 15 bp, Homo sapiens
cagaggtggagcaca

SEQ ID NO: 954925 - DNA, 15 bp, Homo sapiens
agaggtggagcacag

SEQ ID NO: 954926 - DNA, 15 bp, Homo sapiens
gaggtggagcacagt

SEQ ID NO: 954927 - DNA, 15 bp, Homo sapiens
aggtggagcacagtg

SEQ ID NO: 954928 - DNA, 15 bp, Homo sapiens
ggtggagcacagtga

SEQ ID NO: 954929 - DNA, 15 bp, Homo sapiens
gtggagcacagtgaa

SEQ ID NO: 954930 - DNA, 15 bp, Homo sapiens
tggagcacagtgaaa

SEQ ID NO: 954931 - DNA, 15 bp, Homo sapiens
ggagcacagtgaaag

SEQ ID NO: 954932 - DNA, 15 bp, Homo sapiens
gagcacagtgaaaga

SEQ ID NO: 954933 - DNA, 15 bp, Homo sapiens
agcacagtgaaagaa

SEQ ID NO: 954934 - DNA, 15 bp, Homo sapiens
gcacagtgaaagaat

SEQ ID NO: 954935 - DNA, 15 bp, Homo sapiens
cacagtgaaagaatt

SEQ ID NO: 954936 - DNA, 15 bp, Homo sapiens
acagtgaaagaattc

SEQ ID NO: 954937 - DNA, 15 bp, Homo sapiens
cagtgaaagaattca

SEQ ID NO: 954938 - DNA, 15 bp, Homo sapiens
agtgaaagaattcaa

SEQ ID NO: 954939 - DNA, 15 bp, Homo sapiens
gtgaaagaattcaag

SEQ ID NO: 954940 - DNA, 15 bp, Homo sapiens
tgaaagaattcaaga

SEQ ID NO: 954941 - DNA, 15 bp, Homo sapiens
gaaagaattcaagat

SEQ ID NO: 954942 - DNA, 15 bp, Homo sapiens
aaagaattcaagatg

SEQ ID NO: 954943 - DNA, 15 bp, Homo sapiens
aagaattcaagatgc

SEQ ID NO: 954944 - DNA, 15 bp, Homo sapiens
agaattcaagatgcc

SEQ ID NO: 954945 - DNA, 15 bp, Homo sapiens
gaattcaagatgcca

SEQ ID NO: 954946 - DNA, 15 bp, Homo sapiens
aattcaagatgccac

SEQ ID NO: 954947 - DNA, 15 bp, Homo sapiens
attcaagatgccacc

SEQ ID NO: 954948 - DNA, 15 bp, Homo sapiens
ttcaagatgccacct

SEQ ID NO: 954949 - DNA, 15 bp, Homo sapiens
tcaagatgccaccta

SEQ ID NO: 954950 - DNA, 15 bp, Homo sapiens
caagatgccacctaa

SEQ ID NO: 954951 - DNA, 15 bp, Homo sapiens
aagatgccacctaat

SEQ ID NO: 954952 - DNA, 15 bp, Homo sapiens
agatgccacctaata

SEQ ID NO: 954953 - DNA, 15 bp, Homo sapiens
gatgccacctaatat

SEQ ID NO: 954954 - DNA, 15 bp, Homo sapiens
atgccacctaatata

SEQ ID NO: 954955 - DNA, 15 bp, Homo sapiens
tgccacctaatataa

SEQ ID NO: 954956 - DNA, 15 bp, Homo sapiens
gccacctaatataaa

SEQ ID NO: 954957 - DNA, 15 bp, Homo sapiens
ccacctaatataaac

SEQ ID NO: 954958 - DNA, 15 bp, Homo sapiens
cacctaatataaact

SEQ ID NO: 954959 - DNA, 15 bp, Homo sapiens
acctaatataaactg

SEQ ID NO: 954960 - DNA, 15 bp, Homo sapiens
cctaatataaactgg

SEQ ID NO: 954961 - DNA, 15 bp, Homo sapiens
atatttaatgtaccc

SEQ ID NO: 954962 - DNA, 15 bp, Homo sapiens
tatttaatgtaccct

SEQ ID NO: 954963 - DNA, 15 bp, Homo sapiens
atttaatgtaccctt

SEQ ID NO: 954964 - DNA, 15 bp, Homo sapiens
tttaatgtacccttt

SEQ ID NO: 954965 - DNA, 15 bp, Homo sapiens
ttaatgtaccctttt

SEQ ID NO: 954966 - DNA, 15 bp, Homo sapiens
taatgtacccttttg

SEQ ID NO: 954967 - DNA, 15 bp, Homo sapiens
aatgtacccttttga

SEQ ID NO: 954968 - DNA, 15 bp, Homo sapiens
atgtacccttttgaa

SEQ ID NO: 954969 - DNA, 15 bp, Homo sapiens
tgtacccttttgaaa

SEQ ID NO: 954970 - DNA, 15 bp, Homo sapiens
gtacccttttgaaaa

SEQ ID NO: 954971 - DNA, 15 bp, Homo sapiens
tacccttttgaaaaa

SEQ ID NO: 954972 - DNA, 15 bp, Homo sapiens
acccttttgaaaaag

SEQ ID NO: 954973 - DNA, 15 bp, Homo sapiens
cccttttgaaaaagg

SEQ ID NO: 954974 - DNA, 15 bp, Homo sapiens
ccttttgaaaaaggc

SEQ ID NO: 954975 - DNA, 15 bp, Homo sapiens
cttttgaaaaaggct

SEQ ID NO: 954976 - DNA, 15 bp, Homo sapiens
ttttgaaaaaggctt

SEQ ID NO: 954977 - DNA, 15 bp, Homo sapiens
tttgaaaaaggcttt

SEQ ID NO: 954978 - DNA, 15 bp, Homo sapiens
ttgaaaaaggctttt

SEQ ID NO: 954979 - DNA, 15 bp, Homo sapiens
tgaaaaaggcttttt

SEQ ID NO: 954980 - DNA, 15 bp, Homo sapiens
gaaaaaggctttttt

SEQ ID NO: 954981 - DNA, 15 bp, Homo sapiens
aaaaaggcttttttc

SEQ ID NO: 954982 - DNA, 15 bp, Homo sapiens
aaaaggcttttttct

SEQ ID NO: 954983 - DNA, 15 bp, Homo sapiens
aaaggcttttttctt

SEQ ID NO: 954984 - DNA, 15 bp, Homo sapiens
aaggcttttttcttt

SEQ ID NO: 954985 - DNA, 15 bp, Homo sapiens
aggcttttttcttta

SEQ ID NO: 954986 - DNA, 15 bp, Homo sapiens
ggcttttttctttaa

SEQ ID NO: 954987 - DNA, 15 bp, Homo sapiens
gcttttttctttaac

SEQ ID NO: 954988 - DNA, 15 bp, Homo sapiens
cttttttctttaact

SEQ ID NO: 954989 - DNA, 15 bp, Homo sapiens
ttttttctttaacta

SEQ ID NO: 954990 - DNA, 15 bp, Homo sapiens
tttttctttaactaa

SEQ ID NO: 954991 - DNA, 15 bp, Homo sapiens
ttttctttaactaac

SEQ ID NO: 954992 - DNA, 15 bp, Homo sapiens
tttctttaactaacc

SEQ ID NO: 954993 - DNA, 15 bp, Homo sapiens
ttctttaactaacca

SEQ ID NO: 954994 - DNA, 15 bp, Homo sapiens
tctttaactaaccat

SEQ ID NO: 954995 - DNA, 15 bp, Homo sapiens
ctttaactaaccata

SEQ ID NO: 954996 - DNA, 15 bp, Homo sapiens
tttaactaaccatag

SEQ ID NO: 954997 - DNA, 15 bp, Homo sapiens
ttaactaaccatagt

SEQ ID NO: 954998 - DNA, 15 bp, Homo sapiens
taactaaccatagta

SEQ ID NO: 954999 - DNA, 15 bp, Homo sapiens
aactaaccatagtaa

SEQ ID NO: 955000 - DNA, 15 bp, Homo sapiens
actaaccatagtaac

SEQ ID NO: 955001 - DNA, 15 bp, Homo sapiens
ctaaccatagtaact

SEQ ID NO: 955002 - DNA, 15 bp, Homo sapiens
taaccatagtaactt

SEQ ID NO: 955003 - DNA, 15 bp, Homo sapiens
aaccatagtaacttt

SEQ ID NO: 955004 - DNA, 15 bp, Homo sapiens
accatagtaacttta

SEQ ID NO: 955005 - DNA, 15 bp, Homo sapiens
ccatagtaactttat

SEQ ID NO: 955006 - DNA, 15 bp, Homo sapiens
catagtaactttatt

SEQ ID NO: 955007 - DNA, 15 bp, Homo sapiens
atagtaactttatta

SEQ ID NO: 955008 - DNA, 15 bp, Homo sapiens
tagtaactttattat

SEQ ID NO: 955009 - DNA, 15 bp, Homo sapiens
agtaactttattata

SEQ ID NO: 955010 - DNA, 15 bp, Homo sapiens
gtaactttattatac

SEQ ID NO: 955011 - DNA, 15 bp, Homo sapiens
taactttattatacc

SEQ ID NO: 955012 - DNA, 15 bp, Homo sapiens
aactttattatacct

SEQ ID NO: 955013 - DNA, 15 bp, Homo sapiens
actttattataccta

SEQ ID NO: 955014 - DNA, 15 bp, Homo sapiens
ctttattatacctaa

SEQ ID NO: 955015 - DNA, 15 bp, Homo sapiens
tttattatacctaac

SEQ ID NO: 955016 - DNA, 15 bp, Homo sapiens
ttattatacctaaca

SEQ ID NO: 955017 - DNA, 15 bp, Homo sapiens
tattatacctaacaa

SEQ ID NO: 955018 - DNA, 15 bp, Homo sapiens
attatacctaacaaa

SEQ ID NO: 955019 - DNA, 15 bp, Homo sapiens
ttatacctaacaaaa

SEQ ID NO: 955020 - DNA, 15 bp, Homo sapiens
tatacctaacaaaat

SEQ ID NO: 955021 - DNA, 15 bp, Homo sapiens
atacctaacaaaatg

SEQ ID NO: 955022 - DNA, 15 bp, Homo sapiens
tacctaacaaaatga

SEQ ID NO: 955023 - DNA, 15 bp, Homo sapiens
acctaacaaaatgac

SEQ ID NO: 955024 - DNA, 15 bp, Homo sapiens
cctaacaaaatgaca

SEQ ID NO: 955025 - DNA, 15 bp, Homo sapiens
ctaacaaaatgacag

SEQ ID NO: 955026 - DNA, 15 bp, Homo sapiens
taacaaaatgacagt

SEQ ID NO: 955027 - DNA, 15 bp, Homo sapiens
aacaaaatgacagta

SEQ ID NO: 955028 - DNA, 15 bp, Homo sapiens
acaaaatgacagtaa

SEQ ID NO: 955029 - DNA, 15 bp, Homo sapiens
caaaatgacagtaat

SEQ ID NO: 955030 - DNA, 15 bp, Homo sapiens
aaaatgacagtaatt

SEQ ID NO: 955031 - DNA, 15 bp, Homo sapiens
aaatgacagtaattt

SEQ ID NO: 955032 - DNA, 15 bp, Homo sapiens
aatgacagtaatttt

SEQ ID NO: 955033 - DNA, 15 bp, Homo sapiens
atgacagtaattttc

SEQ ID NO: 955034 - DNA, 15 bp, Homo sapiens
tgacagtaattttct

SEQ ID NO: 955035 - DNA, 15 bp, Homo sapiens
gacagtaattttcta

SEQ ID NO: 955036 - DNA, 15 bp, Homo sapiens
acagtaattttctaa

SEQ ID NO: 955037 - DNA, 15 bp, Homo sapiens
cagtaattttctaat

SEQ ID NO: 955038 - DNA, 15 bp, Homo sapiens
agtaattttctaata

SEQ ID NO: 955039 - DNA, 15 bp, Homo sapiens
gtaattttctaatat

SEQ ID NO: 955040 - DNA, 15 bp, Homo sapiens
taattttctaatatc

SEQ ID NO: 955041 - DNA, 15 bp, Homo sapiens
aattttctaatatcg

SEQ ID NO: 955042 - DNA, 15 bp, Homo sapiens
attttctaatatcgc

SEQ ID NO: 955043 - DNA, 15 bp, Homo sapiens
ttttctaatatcgcc

SEQ ID NO: 955044 - DNA, 15 bp, Homo sapiens
tttctaatatcgcct

SEQ ID NO: 955045 - DNA, 15 bp, Homo sapiens
ttctaatatcgccta

SEQ ID NO: 955046 - DNA, 15 bp, Homo sapiens
tctaatatcgcctaa

SEQ ID NO: 955047 - DNA, 15 bp, Homo sapiens
ctaatatcgcctaat

SEQ ID NO: 955048 - DNA, 15 bp, Homo sapiens
taatatcgcctaata

SEQ ID NO: 955049 - DNA, 15 bp, Homo sapiens
aatatcgcctaatac

SEQ ID NO: 955050 - DNA, 15 bp, Homo sapiens
atatcgcctaatacc

SEQ ID NO: 955051 - DNA, 15 bp, Homo sapiens
tatcgcctaataccc

SEQ ID NO: 955052 - DNA, 15 bp, Homo sapiens
atcgcctaataccct

SEQ ID NO: 955053 - DNA, 15 bp, Homo sapiens
tcgcctaataccctg

SEQ ID NO: 955054 - DNA, 15 bp, Homo sapiens
cgcctaataccctga

SEQ ID NO: 955055 - DNA, 15 bp, Homo sapiens
gcctaataccctgat

SEQ ID NO: 955056 - DNA, 15 bp, Homo sapiens
cctaataccctgatt

SEQ ID NO: 955057 - DNA, 15 bp, Homo sapiens
ctaataccctgatta

SEQ ID NO: 955058 - DNA, 15 bp, Homo sapiens
taataccctgattat

SEQ ID NO: 955059 - DNA, 15 bp, Homo sapiens
aataccctgattata

SEQ ID NO: 955060 - DNA, 15 bp, Homo sapiens
ataccctgattatag

SEQ ID NO: 955061 - DNA, 15 bp, Homo sapiens
taccctgattatagt

SEQ ID NO: 955062 - DNA, 15 bp, Homo sapiens
accctgattatagtc

SEQ ID NO: 955063 - DNA, 15 bp, Homo sapiens
ccctgattatagtca

SEQ ID NO: 955064 - DNA, 15 bp, Homo sapiens
cctgattatagtcac

SEQ ID NO: 955065 - DNA, 15 bp, Homo sapiens
ctgattatagtcaca

SEQ ID NO: 955066 - DNA, 15 bp, Homo sapiens
tgattatagtcacat

SEQ ID NO: 955067 - DNA, 15 bp, Homo sapiens
gattatagtcacatt

SEQ ID NO: 955068 - DNA, 15 bp, Homo sapiens
attatagtcacattt

SEQ ID NO: 955069 - DNA, 15 bp, Homo sapiens
ttatagtcacatttt

SEQ ID NO: 955070 - DNA, 15 bp, Homo sapiens
tatagtcacattttt

SEQ ID NO: 955071 - DNA, 15 bp, Homo sapiens
atagtcacatttttt

SEQ ID NO: 955072 - DNA, 15 bp, Homo sapiens
tagtcacatttttta

SEQ ID NO: 955073 - DNA, 15 bp, Homo sapiens
agtcacattttttac

SEQ ID NO: 955074 - DNA, 15 bp, Homo sapiens
gtcacattttttaca

SEQ ID NO: 955075 - DNA, 15 bp, Homo sapiens
tcacattttttacat

SEQ ID NO: 955076 - DNA, 15 bp, Homo sapiens
cacattttttacatt

SEQ ID NO: 955077 - DNA, 15 bp, Homo sapiens
acattttttacattt

SEQ ID NO: 955078 - DNA, 15 bp, Homo sapiens
cattttttacatttt

SEQ ID NO: 955079 - DNA, 15 bp, Homo sapiens
attttttacattttt

SEQ ID NO: 955080 - DNA, 15 bp, Homo sapiens
ttttttacatttttt

SEQ ID NO: 955081 - DNA, 15 bp, Homo sapiens
tttttacattttttg

SEQ ID NO: 955082 - DNA, 15 bp, Homo sapiens
ttttacattttttga

SEQ ID NO: 955083 - DNA, 15 bp, Homo sapiens
tttacattttttgat

SEQ ID NO: 955084 - DNA, 15 bp, Homo sapiens
ttacattttttgatc

SEQ ID NO: 955085 - DNA, 15 bp, Homo sapiens
tacattttttgatca

SEQ ID NO: 955086 - DNA, 15 bp, Homo sapiens
acattttttgatcaa

SEQ ID NO: 955087 - DNA, 15 bp, Homo sapiens
cattttttgatcaaa

SEQ ID NO: 955088 - DNA, 15 bp, Homo sapiens
attttttgatcaaag

SEQ ID NO: 955089 - DNA, 15 bp, Homo sapiens
ttttttgatcaaaga

SEQ ID NO: 955090 - DNA, 15 bp, Homo sapiens
tttttgatcaaagaa

SEQ ID NO: 955091 - DNA, 15 bp, Homo sapiens
ttttgatcaaagaat

SEQ ID NO: 955092 - DNA, 15 bp, Homo sapiens
tttgatcaaagaata

SEQ ID NO: 955093 - DNA, 15 bp, Homo sapiens
ttgatcaaagaataa

SEQ ID NO: 955094 - DNA, 15 bp, Homo sapiens
tgatcaaagaataag

SEQ ID NO: 955095 - DNA, 15 bp, Homo sapiens
gatcaaagaataagc

SEQ ID NO: 955096 - DNA, 15 bp, Homo sapiens
atcaaagaataagca

SEQ ID NO: 955097 - DNA, 15 bp, Homo sapiens
tcaaagaataagcat

SEQ ID NO: 955098 - DNA, 15 bp, Homo sapiens
caaagaataagcatt

SEQ ID NO: 955099 - DNA, 15 bp, Homo sapiens
aaagaataagcattt

SEQ ID NO: 955100 - DNA, 15 bp, Homo sapiens
aagaataagcatttg

SEQ ID NO: 955101 - DNA, 15 bp, Homo sapiens
agaataagcatttgg

SEQ ID NO: 955102 - DNA, 15 bp, Homo sapiens
gaataagcatttgga

SEQ ID NO: 955103 - DNA, 15 bp, Homo sapiens
aataagcatttggat

SEQ ID NO: 955104 - DNA, 15 bp, Homo sapiens
ataagcatttggatg

SEQ ID NO: 955105 - DNA, 15 bp, Homo sapiens
taagcatttggatgt

SEQ ID NO: 955106 - DNA, 15 bp, Homo sapiens
aagcatttggatgtt

SEQ ID NO: 955107 - DNA, 15 bp, Homo sapiens
agcatttggatgtta

SEQ ID NO: 955108 - DNA, 15 bp, Homo sapiens
gcatttggatgttac

SEQ ID NO: 955109 - DNA, 15 bp, Homo sapiens
catttggatgttaca

SEQ ID NO: 955110 - DNA, 15 bp, Homo sapiens
atttggatgttacat

SEQ ID NO: 955111 - DNA, 15 bp, Homo sapiens
tttggatgttacatc

SEQ ID NO: 955112 - DNA, 15 bp, Homo sapiens
ttggatgttacatct

SEQ ID NO: 955113 - DNA, 15 bp, Homo sapiens
tggatgttacatctc

SEQ ID NO: 955114 - DNA, 15 bp, Homo sapiens
ggatgttacatctca

SEQ ID NO: 955115 - DNA, 15 bp, Homo sapiens
gatgttacatctcat

SEQ ID NO: 955116 - DNA, 15 bp, Homo sapiens
atgttacatctcata

SEQ ID NO: 955117 - DNA, 15 bp, Homo sapiens
tgttacatctcataa

SEQ ID NO: 955118 - DNA, 15 bp, Homo sapiens
gttacatctcataaa

SEQ ID NO: 955119 - DNA, 15 bp, Homo sapiens
ttacatctcataaat

SEQ ID NO: 955120 - DNA, 15 bp, Homo sapiens
tacatctcataaatc

SEQ ID NO: 955121 - DNA, 15 bp, Homo sapiens
acatctcataaatct

SEQ ID NO: 955122 - DNA, 15 bp, Homo sapiens
catctcataaatctt

SEQ ID NO: 955123 - DNA, 15 bp, Homo sapiens
atctcataaatcttt

SEQ ID NO: 955124 - DNA, 15 bp, Homo sapiens
tctcataaatctttt

SEQ ID NO: 955125 - DNA, 15 bp, Homo sapiens
ctcataaatcttttt

SEQ ID NO: 955126 - DNA, 15 bp, Homo sapiens
tcataaatcttttta

SEQ ID NO: 955127 - DNA, 15 bp, Homo sapiens
cataaatctttttaa

SEQ ID NO: 955128 - DNA, 15 bp, Homo sapiens
ataaatctttttaat

SEQ ID NO: 955129 - DNA, 15 bp, Homo sapiens
taaatctttttaata

SEQ ID NO: 955130 - DNA, 15 bp, Homo sapiens
aaatctttttaatat

SEQ ID NO: 955131 - DNA, 15 bp, Homo sapiens
aatctttttaatata

SEQ ID NO: 955132 - DNA, 15 bp, Homo sapiens
atctttttaatatag

SEQ ID NO: 955133 - DNA, 15 bp, Homo sapiens
tctttttaatataga

SEQ ID NO: 955134 - DNA, 15 bp, Homo sapiens
ctttttaatatagaa

SEQ ID NO: 955135 - DNA, 15 bp, Homo sapiens
tttttaatatagaat

SEQ ID NO: 955136 - DNA, 15 bp, Homo sapiens
ttttaatatagaatc

SEQ ID NO: 955137 - DNA, 15 bp, Homo sapiens
tttaatatagaatcc

SEQ ID NO: 955138 - DNA, 15 bp, Homo sapiens
ttaatatagaatccc

SEQ ID NO: 955139 - DNA, 15 bp, Homo sapiens
taatatagaatcccc

SEQ ID NO: 955140 - DNA, 15 bp, Homo sapiens
aatatagaatcccct

SEQ ID NO: 955141 - DNA, 15 bp, Homo sapiens
atatagaatcccctt

SEQ ID NO: 955142 - DNA, 15 bp, Homo sapiens
tatagaatccccttg

SEQ ID NO: 955143 - DNA, 15 bp, Homo sapiens
atagaatccccttgg

SEQ ID NO: 955144 - DNA, 15 bp, Homo sapiens
tagaatccccttggt

SEQ ID NO: 955145 - DNA, 15 bp, Homo sapiens
agaatccccttggtt

SEQ ID NO: 955146 - DNA, 15 bp, Homo sapiens
gaatccccttggttt

SEQ ID NO: 955147 - DNA, 15 bp, Homo sapiens
aatccccttggtttt

SEQ ID NO: 955148 - DNA, 15 bp, Homo sapiens
atccccttggttttc

SEQ ID NO: 955149 - DNA, 15 bp, Homo sapiens
tccccttggttttct

SEQ ID NO: 955150 - DNA, 15 bp, Homo sapiens
ccccttggttttctt

SEQ ID NO: 955151 - DNA, 15 bp, Homo sapiens
cccttggttttcttt

SEQ ID NO: 955152 - DNA, 15 bp, Homo sapiens
ccttggttttctttt

SEQ ID NO: 955153 - DNA, 15 bp, Homo sapiens
cttggttttcttttt

SEQ ID NO: 955154 - DNA, 15 bp, Homo sapiens
ttggttttctttttc

SEQ ID NO: 955155 - DNA, 15 bp, Homo sapiens
tggttttctttttct

SEQ ID NO: 955156 - DNA, 15 bp, Homo sapiens
ggttttctttttctc

SEQ ID NO: 955157 - DNA, 15 bp, Homo sapiens
gttttctttttctcc

SEQ ID NO: 955158 - DNA, 15 bp, Homo sapiens
ttttctttttctcca

SEQ ID NO: 955159 - DNA, 15 bp, Homo sapiens
tttctttttctccaa

SEQ ID NO: 955160 - DNA, 15 bp, Homo sapiens
ttctttttctccaaa

SEQ ID NO: 955161 - DNA, 15 bp, Homo sapiens
tctttttctccaaaa

SEQ ID NO: 955162 - DNA, 15 bp, Homo sapiens
ctttttctccaaaaa

SEQ ID NO: 955163 - DNA, 15 bp, Homo sapiens
tttttctccaaaaaa

SEQ ID NO: 955164 - DNA, 15 bp, Homo sapiens
ttttctccaaaaaat

SEQ ID NO: 955165 - DNA, 15 bp, Homo sapiens
tttctccaaaaaatg

SEQ ID NO: 955166 - DNA, 15 bp, Homo sapiens
ttctccaaaaaatgt

SEQ ID NO: 955167 - DNA, 15 bp, Homo sapiens
tctccaaaaaatgtt

SEQ ID NO: 955168 - DNA, 15 bp, Homo sapiens
ctccaaaaaatgttt

SEQ ID NO: 955169 - DNA, 15 bp, Homo sapiens
tccaaaaaatgtttg

SEQ ID NO: 955170 - DNA, 15 bp, Homo sapiens
ccaaaaaatgtttga

SEQ ID NO: 955171 - DNA, 15 bp, Homo sapiens
caaaaaatgtttgaa

SEQ ID NO: 955172 - DNA, 15 bp, Homo sapiens
aaaaaatgtttgaag

SEQ ID NO: 955173 - DNA, 15 bp, Homo sapiens
aaaaatgtttgaaga

SEQ ID NO: 955174 - DNA, 15 bp, Homo sapiens
aaaatgtttgaagat

SEQ ID NO: 955175 - DNA, 15 bp, Homo sapiens
aaatgtttgaagatg

SEQ ID NO: 955176 - DNA, 15 bp, Homo sapiens
aatgtttgaagatgt

SEQ ID NO: 955177 - DNA, 15 bp, Homo sapiens
atgtttgaagatgta

SEQ ID NO: 955178 - DNA, 15 bp, Homo sapiens
tgtttgaagatgtat

SEQ ID NO: 955179 - DNA, 15 bp, Homo sapiens
gtttgaagatgtatc

SEQ ID NO: 955180 - DNA, 15 bp, Homo sapiens
tttgaagatgtatct

SEQ ID NO: 955181 - DNA, 15 bp, Homo sapiens
ttgaagatgtatcta

SEQ ID NO: 955182 - DNA, 15 bp, Homo sapiens
tgaagatgtatctaa

SEQ ID NO: 955183 - DNA, 15 bp, Homo sapiens
gaagatgtatctaac

SEQ ID NO: 955184 - DNA, 15 bp, Homo sapiens
aagatgtatctaact

SEQ ID NO: 955185 - DNA, 15 bp, Homo sapiens
agatgtatctaactt

SEQ ID NO: 955186 - DNA, 15 bp, Homo sapiens
gatgtatctaacttt

SEQ ID NO: 955187 - DNA, 15 bp, Homo sapiens
atgtatctaactttt

SEQ ID NO: 955188 - DNA, 15 bp, Homo sapiens
tgtatctaacttttg

SEQ ID NO: 955189 - DNA, 15 bp, Homo sapiens
gtatctaacttttgt

SEQ ID NO: 955190 - DNA, 15 bp, Homo sapiens
tatctaacttttgtg

SEQ ID NO: 955191 - DNA, 15 bp, Homo sapiens
atctaacttttgtgt

SEQ ID NO: 955192 - DNA, 15 bp, Homo sapiens
tctaacttttgtgtg

SEQ ID NO: 955193 - DNA, 15 bp, Homo sapiens
ctaacttttgtgtgt

SEQ ID NO: 955194 - DNA, 15 bp, Homo sapiens
taacttttgtgtgtg

SEQ ID NO: 955195 - DNA, 15 bp, Homo sapiens
aacttttgtgtgtgt

SEQ ID NO: 955196 - DNA, 15 bp, Homo sapiens
acttttgtgtgtgtg

SEQ ID NO: 955197 - DNA, 15 bp, Homo sapiens
cttttgtgtgtgtgt

SEQ ID NO: 955198 - DNA, 15 bp, Homo sapiens
ttttgtgtgtgtgtc

SEQ ID NO: 955199 - DNA, 15 bp, Homo sapiens
tttgtgtgtgtgtca

SEQ ID NO: 955200 - DNA, 15 bp, Homo sapiens
ttgtgtgtgtgtcat

SEQ ID NO: 955201 - DNA, 15 bp, Homo sapiens
tgtgtgtgtgtcatt

SEQ ID NO: 955202 - DNA, 15 bp, Homo sapiens
gtgtgtgtgtcattt

SEQ ID NO: 955203 - DNA, 15 bp, Homo sapiens
tgtgtgtgtcatttt

SEQ ID NO: 955204 - DNA, 15 bp, Homo sapiens
gtgtgtgtcatttta

SEQ ID NO: 955205 - DNA, 15 bp, Homo sapiens
tgtgtgtcattttac

SEQ ID NO: 955206 - DNA, 15 bp, Homo sapiens
gtgtgtcattttact

SEQ ID NO: 955207 - DNA, 15 bp, Homo sapiens
tgtgtcattttactt

SEQ ID NO: 955208 - DNA, 15 bp, Homo sapiens
gtgtcattttacttg

SEQ ID NO: 955209 - DNA, 15 bp, Homo sapiens
tgtcattttacttgt

SEQ ID NO: 955210 - DNA, 15 bp, Homo sapiens
gtcattttacttgtt

SEQ ID NO: 955211 - DNA, 15 bp, Homo sapiens
tcattttacttgttc

SEQ ID NO: 955212 - DNA, 15 bp, Homo sapiens
cattttacttgttcc

SEQ ID NO: 955213 - DNA, 15 bp, Homo sapiens
attttacttgttcct

SEQ ID NO: 955214 - DNA, 15 bp, Homo sapiens
ttttacttgttcctg

SEQ ID NO: 955215 - DNA, 15 bp, Homo sapiens
tttacttgttcctgt

SEQ ID NO: 955216 - DNA, 15 bp, Homo sapiens
ttacttgttcctgtg

SEQ ID NO: 955217 - DNA, 15 bp, Homo sapiens
tacttgttcctgtgt

SEQ ID NO: 955218 - DNA, 15 bp, Homo sapiens
acttgttcctgtgtc

SEQ ID NO: 955219 - DNA, 15 bp, Homo sapiens
cttgttcctgtgtcc

SEQ ID NO: 955220 - DNA, 15 bp, Homo sapiens
ttgttcctgtgtccc

SEQ ID NO: 955221 - DNA, 15 bp, Homo sapiens
tgttcctgtgtccct

SEQ ID NO: 955222 - DNA, 15 bp, Homo sapiens
gttcctgtgtccctt

SEQ ID NO: 955223 - DNA, 15 bp, Homo sapiens
ttcctgtgtcccttg

SEQ ID NO: 955224 - DNA, 15 bp, Homo sapiens
tcctgtgtcccttgt

SEQ ID NO: 955225 - DNA, 15 bp, Homo sapiens
cctgtgtcccttgta

SEQ ID NO: 955226 - DNA, 15 bp, Homo sapiens
ctgtgtcccttgtat

SEQ ID NO: 955227 - DNA, 15 bp, Homo sapiens
tgtgtcccttgtatt

SEQ ID NO: 955228 - DNA, 15 bp, Homo sapiens
gtgtcccttgtatta

SEQ ID NO: 955229 - DNA, 15 bp, Homo sapiens
tgtcccttgtattac

SEQ ID NO: 955230 - DNA, 15 bp, Homo sapiens
gtcccttgtattact

SEQ ID NO: 955231 - DNA, 15 bp, Homo sapiens
tcccttgtattacta

SEQ ID NO: 955232 - DNA, 15 bp, Homo sapiens
cccttgtattactaa

SEQ ID NO: 955233 - DNA, 15 bp, Homo sapiens
ccttgtattactaaa

SEQ ID NO: 955234 - DNA, 15 bp, Homo sapiens
cttgtattactaaaa

SEQ ID NO: 955235 - DNA, 15 bp, Homo sapiens
ttgtattactaaaag

SEQ ID NO: 955236 - DNA, 15 bp, Homo sapiens
tgtattactaaaagt

SEQ ID NO: 955237 - DNA, 15 bp, Homo sapiens
gtattactaaaagtt

SEQ ID NO: 955238 - DNA, 15 bp, Homo sapiens
tattactaaaagtta

SEQ ID NO: 955239 - DNA, 15 bp, Homo sapiens
attactaaaagttag

SEQ ID NO: 955240 - DNA, 15 bp, Homo sapiens
ttactaaaagttagg

SEQ ID NO: 955241 - DNA, 15 bp, Homo sapiens
tactaaaagttaggt

SEQ ID NO: 955242 - DNA, 15 bp, Homo sapiens
actaaaagttaggtc

SEQ ID NO: 955243 - DNA, 15 bp, Homo sapiens
ctaaaagttaggtca

SEQ ID NO: 955244 - DNA, 15 bp, Homo sapiens
taaaagttaggtcag

SEQ ID NO: 955245 - DNA, 15 bp, Homo sapiens
aaaagttaggtcaga

SEQ ID NO: 955246 - DNA, 15 bp, Homo sapiens
aaagttaggtcagaa

SEQ ID NO: 955247 - DNA, 15 bp, Homo sapiens
aagttaggtcagaac

SEQ ID NO: 955248 - DNA, 15 bp, Homo sapiens
agttaggtcagaacc

SEQ ID NO: 955249 - DNA, 15 bp, Homo sapiens
gttaggtcagaaccc

SEQ ID NO: 955250 - DNA, 15 bp, Homo sapiens
ttaggtcagaaccct

SEQ ID NO: 955251 - DNA, 15 bp, Homo sapiens
taggtcagaacccta

SEQ ID NO: 955252 - DNA, 15 bp, Homo sapiens
aggtcagaaccctaa

SEQ ID NO: 955253 - DNA, 15 bp, Homo sapiens
ggtcagaaccctaag

SEQ ID NO: 955254 - DNA, 15 bp, Homo sapiens
gtcagaaccctaagt

SEQ ID NO: 955255 - DNA, 15 bp, Homo sapiens
tcagaaccctaagtt

SEQ ID NO: 955256 - DNA, 15 bp, Homo sapiens
cagaaccctaagtta

SEQ ID NO: 955257 - DNA, 15 bp, Homo sapiens
agaaccctaagttac

SEQ ID NO: 955258 - DNA, 15 bp, Homo sapiens
gaaccctaagttaca

SEQ ID NO: 955259 - DNA, 15 bp, Homo sapiens
aaccctaagttacat

SEQ ID NO: 955260 - DNA, 15 bp, Homo sapiens
accctaagttacatt

SEQ ID NO: 955261 - DNA, 15 bp, Homo sapiens
ccctaagttacattc

SEQ ID NO: 955262 - DNA, 15 bp, Homo sapiens
cctaagttacattca

SEQ ID NO: 955263 - DNA, 15 bp, Homo sapiens
ctaagttacattcag

SEQ ID NO: 955264 - DNA, 15 bp, Homo sapiens
taagttacattcagg

SEQ ID NO: 955265 - DNA, 15 bp, Homo sapiens
aagttacattcaggt

SEQ ID NO: 955266 - DNA, 15 bp, Homo sapiens
agttacattcaggtt

SEQ ID NO: 955267 - DNA, 15 bp, Homo sapiens
gttacattcaggttt

SEQ ID NO: 955268 - DNA, 15 bp, Homo sapiens
ttacattcaggttta

SEQ ID NO: 955269 - DNA, 15 bp, Homo sapiens
tacattcaggtttaa

SEQ ID NO: 955270 - DNA, 15 bp, Homo sapiens
acattcaggtttaaa

SEQ ID NO: 955271 - DNA, 15 bp, Homo sapiens
cattcaggtttaaac

SEQ ID NO: 955272 - DNA, 15 bp, Homo sapiens
attcaggtttaaaca

SEQ ID NO: 955273 - DNA, 15 bp, Homo sapiens
ttcaggtttaaacat

SEQ ID NO: 955274 - DNA, 15 bp, Homo sapiens
tcaggtttaaacatt

SEQ ID NO: 955275 - DNA, 15 bp, Homo sapiens
caggtttaaacattt

SEQ ID NO: 955276 - DNA, 15 bp, Homo sapiens
aggtttaaacatttt

SEQ ID NO: 955277 - DNA, 15 bp, Homo sapiens
ggtttaaacattttt

SEQ ID NO: 955278 - DNA, 15 bp, Homo sapiens
gtttaaacatttttg

SEQ ID NO: 955279 - DNA, 15 bp, Homo sapiens
tttaaacatttttgg

SEQ ID NO: 955280 - DNA, 15 bp, Homo sapiens
ttaaacatttttggc

SEQ ID NO: 955281 - DNA, 15 bp, Homo sapiens
taaacatttttggca

SEQ ID NO: 955282 - DNA, 15 bp, Homo sapiens
aaacatttttggcaa

SEQ ID NO: 955283 - DNA, 15 bp, Homo sapiens
aacatttttggcaag

SEQ ID NO: 955284 - DNA, 15 bp, Homo sapiens
acatttttggcaaga

SEQ ID NO: 955285 - DNA, 15 bp, Homo sapiens
catttttggcaagaa

SEQ ID NO: 955286 - DNA, 15 bp, Homo sapiens
atttttggcaagaat

SEQ ID NO: 955287 - DNA, 15 bp, Homo sapiens
tttttggcaagaata

SEQ ID NO: 955288 - DNA, 15 bp, Homo sapiens
ttttggcaagaatac

SEQ ID NO: 955289 - DNA, 15 bp, Homo sapiens
tttggcaagaatact

SEQ ID NO: 955290 - DNA, 15 bp, Homo sapiens
ttggcaagaatactt

SEQ ID NO: 955291 - DNA, 15 bp, Homo sapiens
tggcaagaatacttc

SEQ ID NO: 955292 - DNA, 15 bp, Homo sapiens
gggttctttactttc

SEQ ID NO: 955293 - DNA, 15 bp, Homo sapiens
ggttctttactttcc

SEQ ID NO: 955294 - DNA, 15 bp, Homo sapiens
gttctttactttcca

SEQ ID NO: 955295 - DNA, 15 bp, Homo sapiens
ttctttactttccac

SEQ ID NO: 955296 - DNA, 15 bp, Homo sapiens
tctttactttccact

SEQ ID NO: 955297 - DNA, 15 bp, Homo sapiens
ctttactttccactt

SEQ ID NO: 955298 - DNA, 15 bp, Homo sapiens
tttactttccacttt

SEQ ID NO: 955299 - DNA, 15 bp, Homo sapiens
ttactttccacttta

SEQ ID NO: 955300 - DNA, 15 bp, Homo sapiens
tactttccactttaa

SEQ ID NO: 955301 - DNA, 15 bp, Homo sapiens
actttccactttaaa

SEQ ID NO: 955302 - DNA, 15 bp, Homo sapiens
ctttccactttaaag

SEQ ID NO: 955303 - DNA, 15 bp, Homo sapiens
tttccactttaaagg

SEQ ID NO: 955304 - DNA, 15 bp, Homo sapiens
ttccactttaaaggt

SEQ ID NO: 955305 - DNA, 15 bp, Homo sapiens
tccactttaaaggtt

SEQ ID NO: 955306 - DNA, 15 bp, Homo sapiens
ccactttaaaggttg

SEQ ID NO: 955307 - DNA, 15 bp, Homo sapiens
cactttaaaggttgt

SEQ ID NO: 955308 - DNA, 15 bp, Homo sapiens
actttaaaggttgta

SEQ ID NO: 955309 - DNA, 15 bp, Homo sapiens
ctttaaaggttgtaa

SEQ ID NO: 955310 - DNA, 15 bp, Homo sapiens
tttaaaggttgtaat

SEQ ID NO: 955311 - DNA, 15 bp, Homo sapiens
ttaaaggttgtaatg

SEQ ID NO: 955312 - DNA, 15 bp, Homo sapiens
taaaggttgtaatgg

SEQ ID NO: 955313 - DNA, 15 bp, Homo sapiens
aaaggttgtaatggg

SEQ ID NO: 955314 - DNA, 15 bp, Homo sapiens
aaggttgtaatgggt

SEQ ID NO: 955315 - DNA, 15 bp, Homo sapiens
aggttgtaatgggtg

SEQ ID NO: 955316 - DNA, 15 bp, Homo sapiens
ggttgtaatgggtga

SEQ ID NO: 955317 - DNA, 15 bp, Homo sapiens
gttgtaatgggtgat

SEQ ID NO: 955318 - DNA, 15 bp, Homo sapiens
ttgtaatgggtgatg

SEQ ID NO: 955319 - DNA, 15 bp, Homo sapiens
tgtaatgggtgatgt

SEQ ID NO: 955320 - DNA, 15 bp, Homo sapiens
gtaatgggtgatgtc

SEQ ID NO: 955321 - DNA, 15 bp, Homo sapiens
taatgggtgatgtca

SEQ ID NO: 955322 - DNA, 15 bp, Homo sapiens
aatgggtgatgtcag

SEQ ID NO: 955323 - DNA, 15 bp, Homo sapiens
atgggtgatgtcagg

SEQ ID NO: 955324 - DNA, 15 bp, Homo sapiens
tgggtgatgtcaggc

SEQ ID NO: 955325 - DNA, 15 bp, Homo sapiens
gggtgatgtcaggct

SEQ ID NO: 955326 - DNA, 15 bp, Homo sapiens
ggtgatgtcaggcta

SEQ ID NO: 955327 - DNA, 15 bp, Homo sapiens
gtgatgtcaggctaa

SEQ ID NO: 955328 - DNA, 15 bp, Homo sapiens
tgatgtcaggctaat

SEQ ID NO: 955329 - DNA, 15 bp, Homo sapiens
gatgtcaggctaata

SEQ ID NO: 955330 - DNA, 15 bp, Homo sapiens
atgtcaggctaataa

SEQ ID NO: 955331 - DNA, 15 bp, Homo sapiens
tgtcaggctaataaa

SEQ ID NO: 955332 - DNA, 15 bp, Homo sapiens
gtcaggctaataaac

SEQ ID NO: 955333 - DNA, 15 bp, Homo sapiens
tcaggctaataaacc

SEQ ID NO: 955334 - DNA, 15 bp, Homo sapiens
caggctaataaacct

SEQ ID NO: 955335 - DNA, 15 bp, Homo sapiens
aggctaataaaccta

SEQ ID NO: 955336 - DNA, 15 bp, Homo sapiens
ggctaataaacctat

SEQ ID NO: 955337 - DNA, 15 bp, Homo sapiens
gctaataaacctatt

SEQ ID NO: 955338 - DNA, 15 bp, Homo sapiens
ctaataaacctattt

SEQ ID NO: 955339 - DNA, 15 bp, Homo sapiens
taataaacctatttt

SEQ ID NO: 955340 - DNA, 15 bp, Homo sapiens
aataaacctattttc

SEQ ID NO: 955341 - DNA, 15 bp, Homo sapiens
ataaacctattttca

SEQ ID NO: 955342 - DNA, 15 bp, Homo sapiens
taaacctattttcag

SEQ ID NO: 955343 - DNA, 15 bp, Homo sapiens
aaacctattttcagc

SEQ ID NO: 955344 - DNA, 15 bp, Homo sapiens
aacctattttcagct

SEQ ID NO: 955345 - DNA, 15 bp, Homo sapiens
acctattttcagctt

SEQ ID NO: 955346 - DNA, 15 bp, Homo sapiens
cctattttcagcttg

SEQ ID NO: 955347 - DNA, 15 bp, Homo sapiens
ctattttcagcttga

SEQ ID NO: 955348 - DNA, 15 bp, Homo sapiens
tattttcagcttgat

SEQ ID NO: 955349 - DNA, 15 bp, Homo sapiens
attttcagcttgatc

SEQ ID NO: 955350 - DNA, 15 bp, Homo sapiens
ttttcagcttgatct

SEQ ID NO: 955351 - DNA, 15 bp, Homo sapiens
tttcagcttgatcta

SEQ ID NO: 955352 - DNA, 15 bp, Homo sapiens
ttcagcttgatctaa

SEQ ID NO: 955353 - DNA, 15 bp, Homo sapiens
tcagcttgatctaaa

SEQ ID NO: 955354 - DNA, 15 bp, Homo sapiens
cagcttgatctaaag

SEQ ID NO: 955355 - DNA, 15 bp, Homo sapiens
agcttgatctaaagc

SEQ ID NO: 955356 - DNA, 15 bp, Homo sapiens
gcttgatctaaagct

SEQ ID NO: 955357 - DNA, 15 bp, Homo sapiens
cttgatctaaagctt

SEQ ID NO: 955358 - DNA, 15 bp, Homo sapiens
ttgatctaaagctta

SEQ ID NO: 955359 - DNA, 15 bp, Homo sapiens
tgatctaaagcttaa

SEQ ID NO: 955360 - DNA, 15 bp, Homo sapiens
gatctaaagcttaat

SEQ ID NO: 955361 - DNA, 15 bp, Homo sapiens
atctaaagcttaata

SEQ ID NO: 955362 - DNA, 15 bp, Homo sapiens
tctaaagcttaatac

SEQ ID NO: 955363 - DNA, 15 bp, Homo sapiens
ctaaagcttaatact

SEQ ID NO: 955364 - DNA, 15 bp, Homo sapiens
taaagcttaatactg

SEQ ID NO: 955365 - DNA, 15 bp, Homo sapiens
aaagcttaatactga

SEQ ID NO: 955366 - DNA, 15 bp, Homo sapiens
aagcttaatactgag

SEQ ID NO: 955367 - DNA, 15 bp, Homo sapiens
agcttaatactgagc

SEQ ID NO: 955368 - DNA, 15 bp, Homo sapiens
gcttaatactgagca

SEQ ID NO: 955369 - DNA, 15 bp, Homo sapiens
cttaatactgagcat

SEQ ID NO: 955370 - DNA, 15 bp, Homo sapiens
ttaatactgagcatc

SEQ ID NO: 955371 - DNA, 15 bp, Homo sapiens
taatactgagcatca

SEQ ID NO: 955372 - DNA, 15 bp, Homo sapiens
aatactgagcatcaa

SEQ ID NO: 955373 - DNA, 15 bp, Homo sapiens
atactgagcatcaag

SEQ ID NO: 955374 - DNA, 15 bp, Homo sapiens
tactgagcatcaaga

SEQ ID NO: 955375 - DNA, 15 bp, Homo sapiens
actgagcatcaagaa

SEQ ID NO: 955376 - DNA, 15 bp, Homo sapiens
ctgagcatcaagaaa

SEQ ID NO: 955377 - DNA, 15 bp, Homo sapiens
tgagcatcaagaaat

SEQ ID NO: 955378 - DNA, 15 bp, Homo sapiens
gagcatcaagaaatt

SEQ ID NO: 955379 - DNA, 15 bp, Homo sapiens
agcatcaagaaattc

SEQ ID NO: 955380 - DNA, 15 bp, Homo sapiens
gcatcaagaaattct

SEQ ID NO: 955381 - DNA, 15 bp, Homo sapiens
catcaagaaattctt

SEQ ID NO: 955382 - DNA, 15 bp, Homo sapiens
atcaagaaattcttt

SEQ ID NO: 955383 - DNA, 15 bp, Homo sapiens
tcaagaaattcttta

SEQ ID NO: 955384 - DNA, 15 bp, Homo sapiens
caagaaattctttaa

SEQ ID NO: 955385 - DNA, 15 bp, Homo sapiens
aagaaattctttaat

SEQ ID NO: 955386 - DNA, 15 bp, Homo sapiens
agaaattctttaata

SEQ ID NO: 955387 - DNA, 15 bp, Homo sapiens
gaaattctttaataa

SEQ ID NO: 955388 - DNA, 15 bp, Homo sapiens
aaattctttaataaa

SEQ ID NO: 955389 - DNA, 15 bp, Homo sapiens
aattctttaataaat

SEQ ID NO: 955390 - DNA, 15 bp, Homo sapiens
attctttaataaata

SEQ ID NO: 955391 - DNA, 15 bp, Homo sapiens
ttctttaataaatat

SEQ ID NO: 955392 - DNA, 15 bp, Homo sapiens
tctttaataaatata

SEQ ID NO: 955393 - DNA, 15 bp, Homo sapiens
ctttaataaatataa

SEQ ID NO: 955394 - DNA, 15 bp, Homo sapiens
tttaataaatataag

SEQ ID NO: 955395 - DNA, 15 bp, Homo sapiens
ttaataaatataagt

SEQ ID NO: 955396 - DNA, 15 bp, Homo sapiens
taataaatataagtg

SEQ ID NO: 955397 - DNA, 15 bp, Homo sapiens
aataaatataagtga

SEQ ID NO: 955398 - DNA, 15 bp, Homo sapiens
ataaatataagtgat

SEQ ID NO: 955399 - DNA, 15 bp, Homo sapiens
taaatataagtgata

SEQ ID NO: 955400 - DNA, 15 bp, Homo sapiens
aaatataagtgatat

SEQ ID NO: 955401 - DNA, 15 bp, Homo sapiens
aatataagtgatatt

SEQ ID NO: 955402 - DNA, 15 bp, Homo sapiens
atataagtgatattt

SEQ ID NO: 955403 - DNA, 15 bp, Homo sapiens
tataagtgatattta

SEQ ID NO: 955404 - DNA, 15 bp, Homo sapiens
ataagtgatatttat

SEQ ID NO: 955405 - DNA, 15 bp, Homo sapiens
taagtgatatttatt

SEQ ID NO: 955406 - DNA, 15 bp, Homo sapiens
aagtgatatttattc

SEQ ID NO: 955407 - DNA, 15 bp, Homo sapiens
agtgatatttattca

SEQ ID NO: 955408 - DNA, 15 bp, Homo sapiens
gtgatatttattcag

SEQ ID NO: 955409 - DNA, 15 bp, Homo sapiens
tgatatttattcaga

SEQ ID NO: 955410 - DNA, 15 bp, Homo sapiens
gatatttattcagac

SEQ ID NO: 955411 - DNA, 15 bp, Homo sapiens
atatttattcagaca

SEQ ID NO: 955412 - DNA, 15 bp, Homo sapiens
tatttattcagacat

SEQ ID NO: 955413 - DNA, 15 bp, Homo sapiens
atttattcagacatg

SEQ ID NO: 955414 - DNA, 15 bp, Homo sapiens
tttattcagacatgt

SEQ ID NO: 955415 - DNA, 15 bp, Homo sapiens
ttattcagacatgta

SEQ ID NO: 955416 - DNA, 15 bp, Homo sapiens
tattcagacatgtaa

SEQ ID NO: 955417 - DNA, 15 bp, Homo sapiens
attcagacatgtaat

SEQ ID NO: 955418 - DNA, 15 bp, Homo sapiens
ttcagacatgtaata

SEQ ID NO: 955419 - DNA, 15 bp, Homo sapiens
tcagacatgtaataa

SEQ ID NO: 955420 - DNA, 15 bp, Homo sapiens
cagacatgtaataag

SEQ ID NO: 955421 - DNA, 15 bp, Homo sapiens
agacatgtaataagg

SEQ ID NO: 955422 - DNA, 15 bp, Homo sapiens
gacatgtaataagga

SEQ ID NO: 955423 - DNA, 15 bp, Homo sapiens
acatgtaataaggaa

SEQ ID NO: 955424 - DNA, 15 bp, Homo sapiens
catgtaataaggaaa

SEQ ID NO: 955425 - DNA, 15 bp, Homo sapiens
atgtaataaggaaat

SEQ ID NO: 955426 - DNA, 15 bp, Homo sapiens
tgtaataaggaaatg

SEQ ID NO: 955427 - DNA, 15 bp, Homo sapiens
gtaataaggaaatgt

SEQ ID NO: 955428 - DNA, 15 bp, Homo sapiens
taataaggaaatgtt

SEQ ID NO: 955429 - DNA, 15 bp, Homo sapiens
aataaggaaatgttc

SEQ ID NO: 955430 - DNA, 15 bp, Homo sapiens
ataaggaaatgttca

SEQ ID NO: 955431 - DNA, 15 bp, Homo sapiens
taaggaaatgttcat

SEQ ID NO: 955432 - DNA, 15 bp, Homo sapiens
aaggaaatgttcatg

SEQ ID NO: 955433 - DNA, 15 bp, Homo sapiens
aggaaatgttcatgt

SEQ ID NO: 955434 - DNA, 15 bp, Homo sapiens
ggaaatgttcatgtc

SEQ ID NO: 955435 - DNA, 15 bp, Homo sapiens
gaaatgttcatgtct

SEQ ID NO: 955436 - DNA, 15 bp, Homo sapiens
aaatgttcatgtctt

SEQ ID NO: 955437 - DNA, 15 bp, Homo sapiens
aatgttcatgtctta

SEQ ID NO: 955438 - DNA, 15 bp, Homo sapiens
atgttcatgtcttat

SEQ ID NO: 955439 - DNA, 15 bp, Homo sapiens
tgttcatgtcttatt

SEQ ID NO: 955440 - DNA, 15 bp, Homo sapiens
gttcatgtcttattt

SEQ ID NO: 955441 - DNA, 15 bp, Homo sapiens
ttcatgtcttatttt

SEQ ID NO: 955442 - DNA, 15 bp, Homo sapiens
tcatgtcttattttt

SEQ ID NO: 955443 - DNA, 15 bp, Homo sapiens
catgtcttatttttg

SEQ ID NO: 955444 - DNA, 15 bp, Homo sapiens
atgtcttatttttgt

SEQ ID NO: 955445 - DNA, 15 bp, Homo sapiens
tgtcttatttttgtg

SEQ ID NO: 955446 - DNA, 15 bp, Homo sapiens
gtcttatttttgtgt

SEQ ID NO: 955447 - DNA, 15 bp, Homo sapiens
tcttatttttgtgtt

SEQ ID NO: 955448 - DNA, 15 bp, Homo sapiens
cttatttttgtgtta

SEQ ID NO: 955449 - DNA, 15 bp, Homo sapiens
ttatttttgtgttag

SEQ ID NO: 955450 - DNA, 15 bp, Homo sapiens
tatttttgtgttaga

SEQ ID NO: 955451 - DNA, 15 bp, Homo sapiens
atttttgtgttagat

SEQ ID NO: 955452 - DNA, 15 bp, Homo sapiens
tttttgtgttagatt

SEQ ID NO: 955453 - DNA, 15 bp, Homo sapiens
ttttgtgttagattt

SEQ ID NO: 955454 - DNA, 15 bp, Homo sapiens
tttgtgttagatttt

SEQ ID NO: 955455 - DNA, 15 bp, Homo sapiens
ttgtgttagattttt

SEQ ID NO: 955456 - DNA, 15 bp, Homo sapiens
tgtgttagatttttt

SEQ ID NO: 955457 - DNA, 15 bp, Homo sapiens
gtgttagattttttt

SEQ ID NO: 955458 - DNA, 15 bp, Homo sapiens
tgttagattttttta

SEQ ID NO: 955459 - DNA, 15 bp, Homo sapiens
gttagatttttttag

SEQ ID NO: 955460 - DNA, 15 bp, Homo sapiens
ttagatttttttaga

SEQ ID NO: 955461 - DNA, 15 bp, Homo sapiens
tagatttttttagaa

SEQ ID NO: 955462 - DNA, 15 bp, Homo sapiens
agatttttttagaat

SEQ ID NO: 955463 - DNA, 15 bp, Homo sapiens
gatttttttagaatc

SEQ ID NO: 955464 - DNA, 15 bp, Homo sapiens
atttttttagaatct

SEQ ID NO: 955465 - DNA, 15 bp, Homo sapiens
tttttttagaatcta

SEQ ID NO: 955466 - DNA, 15 bp, Homo sapiens
ttttttagaatctac

SEQ ID NO: 955467 - DNA, 15 bp, Homo sapiens
tttttagaatctact

SEQ ID NO: 955468 - DNA, 15 bp, Homo sapiens
ttttagaatctactt

SEQ ID NO: 955469 - DNA, 15 bp, Homo sapiens
tttagaatctacttt

SEQ ID NO: 955470 - DNA, 15 bp, Homo sapiens
ttagaatctactttt

SEQ ID NO: 955471 - DNA, 15 bp, Homo sapiens
tagaatctacttttg

SEQ ID NO: 955472 - DNA, 15 bp, Homo sapiens
agaatctacttttgt

SEQ ID NO: 955473 - DNA, 15 bp, Homo sapiens
gaatctacttttgtt

SEQ ID NO: 955474 - DNA, 15 bp, Homo sapiens
aatctacttttgtta

SEQ ID NO: 955475 - DNA, 15 bp, Homo sapiens
atctacttttgttag

SEQ ID NO: 955476 - DNA, 15 bp, Homo sapiens
tctacttttgttaga

SEQ ID NO: 955477 - DNA, 15 bp, Homo sapiens
ctacttttgttagag

SEQ ID NO: 955478 - DNA, 15 bp, Homo sapiens
tacttttgttagagt

SEQ ID NO: 955479 - DNA, 15 bp, Homo sapiens
acttttgttagagtt

SEQ ID NO: 955480 - DNA, 15 bp, Homo sapiens
cttttgttagagttt

SEQ ID NO: 955481 - DNA, 15 bp, Homo sapiens
ttttgttagagtttt

SEQ ID NO: 955482 - DNA, 15 bp, Homo sapiens
tttgttagagtttta

SEQ ID NO: 955483 - DNA, 15 bp, Homo sapiens
ttgttagagttttat

SEQ ID NO: 955484 - DNA, 15 bp, Homo sapiens
tgttagagttttata

SEQ ID NO: 955485 - DNA, 15 bp, Homo sapiens
gttagagttttataa

SEQ ID NO: 955486 - DNA, 15 bp, Homo sapiens
ttagagttttataaa

SEQ ID NO: 955487 - DNA, 15 bp, Homo sapiens
tagagttttataaat

SEQ ID NO: 955488 - DNA, 15 bp, Homo sapiens
agagttttataaata

SEQ ID NO: 955489 - DNA, 15 bp, Homo sapiens
gagttttataaatac

SEQ ID NO: 955490 - DNA, 15 bp, Homo sapiens
agttttataaataca

SEQ ID NO: 955491 - DNA, 15 bp, Homo sapiens
gttttataaatacag

SEQ ID NO: 955492 - DNA, 15 bp, Homo sapiens
ttttataaatacagt

SEQ ID NO: 955493 - DNA, 15 bp, Homo sapiens
tttataaatacagtt

SEQ ID NO: 955494 - DNA, 15 bp, Homo sapiens
ttataaatacagtta

SEQ ID NO: 955495 - DNA, 15 bp, Homo sapiens
tataaatacagttag

SEQ ID NO: 955496 - DNA, 15 bp, Homo sapiens
ataaatacagttagt

SEQ ID NO: 955497 - DNA, 15 bp, Homo sapiens
taaatacagttagtg

SEQ ID NO: 955498 - DNA, 15 bp, Homo sapiens
aaatacagttagtgt

SEQ ID NO: 955499 - DNA, 15 bp, Homo sapiens
aatacagttagtgtt

SEQ ID NO: 955500 - DNA, 15 bp, Homo sapiens
atacagttagtgttt

SEQ ID NO: 955501 - DNA, 15 bp, Homo sapiens
tacagttagtgtttg

SEQ ID NO: 955502 - DNA, 15 bp, Homo sapiens
acagttagtgtttga

SEQ ID NO: 955503 - DNA, 15 bp, Homo sapiens
cagttagtgtttgag

SEQ ID NO: 955504 - DNA, 15 bp, Homo sapiens
agttagtgtttgaga

SEQ ID NO: 955505 - DNA, 15 bp, Homo sapiens
gttagtgtttgagat

SEQ ID NO: 955506 - DNA, 15 bp, Homo sapiens
ttagtgtttgagata

SEQ ID NO: 955507 - DNA, 15 bp, Homo sapiens
tagtgtttgagatag

SEQ ID NO: 955508 - DNA, 15 bp, Homo sapiens
agtgtttgagataga

SEQ ID NO: 955509 - DNA, 15 bp, Homo sapiens
gtgtttgagatagaa

SEQ ID NO: 955510 - DNA, 15 bp, Homo sapiens
tgtttgagatagaaa

SEQ ID NO: 955511 - DNA, 15 bp, Homo sapiens
gtttgagatagaaag

SEQ ID NO: 955512 - DNA, 15 bp, Homo sapiens
tttgagatagaaaga

SEQ ID NO: 955513 - DNA, 15 bp, Homo sapiens
ttgagatagaaagag

SEQ ID NO: 955514 - DNA, 15 bp, Homo sapiens
tgagatagaaagaga

SEQ ID NO: 955515 - DNA, 15 bp, Homo sapiens
gagatagaaagagaa

SEQ ID NO: 955516 - DNA, 15 bp, Homo sapiens
agatagaaagagaaa

SEQ ID NO: 955517 - DNA, 15 bp, Homo sapiens
gatagaaagagaaaa

SEQ ID NO: 955518 - DNA, 15 bp, Homo sapiens
atagaaagagaaaag

SEQ ID NO: 955519 - DNA, 15 bp, Homo sapiens
tagaaagagaaaaga

SEQ ID NO: 955520 - DNA, 15 bp, Homo sapiens
agaaagagaaaagaa

SEQ ID NO: 955521 - DNA, 15 bp, Homo sapiens
gaaagagaaaagaat

SEQ ID NO: 955522 - DNA, 15 bp, Homo sapiens
aaagagaaaagaatt

SEQ ID NO: 955523 - DNA, 15 bp, Homo sapiens
aagagaaaagaatta

SEQ ID NO: 955524 - DNA, 15 bp, Homo sapiens
agagaaaagaattag

SEQ ID NO: 955525 - DNA, 15 bp, Homo sapiens
gagaaaagaattagt

SEQ ID NO: 955526 - DNA, 15 bp, Homo sapiens
agaaaagaattagtt

SEQ ID NO: 955527 - DNA, 15 bp, Homo sapiens
gaaaagaattagttt

SEQ ID NO: 955528 - DNA, 15 bp, Homo sapiens
aaaagaattagtttt

SEQ ID NO: 955529 - DNA, 15 bp, Homo sapiens
aaagaattagttttc

SEQ ID NO: 955530 - DNA, 15 bp, Homo sapiens
aagaattagttttct

SEQ ID NO: 955531 - DNA, 15 bp, Homo sapiens
agaattagttttctt

SEQ ID NO: 955532 - DNA, 15 bp, Homo sapiens
gaattagttttcttc

SEQ ID NO: 955533 - DNA, 15 bp, Homo sapiens
aattagttttcttcc

SEQ ID NO: 955534 - DNA, 15 bp, Homo sapiens
attagttttcttcct

SEQ ID NO: 955535 - DNA, 15 bp, Homo sapiens
ttagttttcttcctc

SEQ ID NO: 955536 - DNA, 15 bp, Homo sapiens
tagttttcttcctct

SEQ ID NO: 955537 - DNA, 15 bp, Homo sapiens
agttttcttcctctt

SEQ ID NO: 955538 - DNA, 15 bp, Homo sapiens
gttttcttcctcttc

SEQ ID NO: 955539 - DNA, 15 bp, Homo sapiens
ttttcttcctcttct

SEQ ID NO: 955540 - DNA, 15 bp, Homo sapiens
tttcttcctcttcta

SEQ ID NO: 955541 - DNA, 15 bp, Homo sapiens
ttcttcctcttctac

SEQ ID NO: 955542 - DNA, 15 bp, Homo sapiens
tcttcctcttctacc

SEQ ID NO: 955543 - DNA, 15 bp, Homo sapiens
cttcctcttctacct

SEQ ID NO: 955544 - DNA, 15 bp, Homo sapiens
ttcctcttctacctg

SEQ ID NO: 955545 - DNA, 15 bp, Homo sapiens
tcctcttctacctgc

SEQ ID NO: 955546 - DNA, 15 bp, Homo sapiens
cctcttctacctgct

SEQ ID NO: 955547 - DNA, 15 bp, Homo sapiens
ctcttctacctgctc

SEQ ID NO: 955548 - DNA, 15 bp, Homo sapiens
tcttctacctgctca

SEQ ID NO: 955549 - DNA, 15 bp, Homo sapiens
cttctacctgctcat

SEQ ID NO: 955550 - DNA, 15 bp, Homo sapiens
ttctacctgctcatg

SEQ ID NO: 955551 - DNA, 15 bp, Homo sapiens
tctacctgctcatga

SEQ ID NO: 955552 - DNA, 15 bp, Homo sapiens
ctacctgctcatgaa

SEQ ID NO: 955553 - DNA, 15 bp, Homo sapiens
tacctgctcatgaac

SEQ ID NO: 955554 - DNA, 15 bp, Homo sapiens
acctgctcatgaact

SEQ ID NO: 955555 - DNA, 15 bp, Homo sapiens
cctgctcatgaactt

SEQ ID NO: 955556 - DNA, 15 bp, Homo sapiens
ctgctcatgaacttg

SEQ ID NO: 955557 - DNA, 15 bp, Homo sapiens
tgctcatgaacttga

SEQ ID NO: 955558 - DNA, 15 bp, Homo sapiens
gctcatgaacttgat

SEQ ID NO: 955559 - DNA, 15 bp, Homo sapiens
ctcatgaacttgatt

SEQ ID NO: 955560 - DNA, 15 bp, Homo sapiens
tcatgaacttgattt

SEQ ID NO: 955561 - DNA, 15 bp, Homo sapiens
catgaacttgatttt

SEQ ID NO: 955562 - DNA, 15 bp, Homo sapiens
atgaacttgattttt

SEQ ID NO: 955563 - DNA, 15 bp, Homo sapiens
tgaacttgatttttt

SEQ ID NO: 955564 - DNA, 15 bp, Homo sapiens
gaacttgattttttt

SEQ ID NO: 955565 - DNA, 15 bp, Homo sapiens
aacttgatttttttc

SEQ ID NO: 955566 - DNA, 15 bp, Homo sapiens
acttgatttttttct

SEQ ID NO: 955567 - DNA, 15 bp, Homo sapiens
cttgatttttttctc

SEQ ID NO: 955568 - DNA, 15 bp, Homo sapiens
ttgatttttttctcc

SEQ ID NO: 955569 - DNA, 15 bp, Homo sapiens
tgatttttttctccc

SEQ ID NO: 955570 - DNA, 15 bp, Homo sapiens
gatttttttctccca

SEQ ID NO: 955571 - DNA, 15 bp, Homo sapiens
atttttttctcccaa

SEQ ID NO: 955572 - DNA, 15 bp, Homo sapiens
tttttttctcccaac

SEQ ID NO: 955573 - DNA, 15 bp, Homo sapiens
ttttttctcccaaca

SEQ ID NO: 955574 - DNA, 15 bp, Homo sapiens
tttttctcccaacaa

SEQ ID NO: 955575 - DNA, 15 bp, Homo sapiens
ttttctcccaacaat

SEQ ID NO: 955576 - DNA, 15 bp, Homo sapiens
tttctcccaacaatt

SEQ ID NO: 955577 - DNA, 15 bp, Homo sapiens
ttctcccaacaattg

SEQ ID NO: 955578 - DNA, 15 bp, Homo sapiens
tctcccaacaattga

SEQ ID NO: 955579 - DNA, 15 bp, Homo sapiens
ctcccaacaattgaa

SEQ ID NO: 955580 - DNA, 15 bp, Homo sapiens
tcccaacaattgaag

SEQ ID NO: 955581 - DNA, 15 bp, Homo sapiens
cccaacaattgaaga

SEQ ID NO: 955582 - DNA, 15 bp, Homo sapiens
ccaacaattgaagag

SEQ ID NO: 955583 - DNA, 15 bp, Homo sapiens
caacaattgaagagc

SEQ ID NO: 955584 - DNA, 15 bp, Homo sapiens
aacaattgaagagcc

SEQ ID NO: 955585 - DNA, 15 bp, Homo sapiens
acaattgaagagcca

SEQ ID NO: 955586 - DNA, 15 bp, Homo sapiens
caattgaagagccaa

SEQ ID NO: 955587 - DNA, 15 bp, Homo sapiens
aattgaagagccaag

SEQ ID NO: 955588 - DNA, 15 bp, Homo sapiens
attgaagagccaaga

SEQ ID NO: 955589 - DNA, 15 bp, Homo sapiens
ttgaagagccaagaa

SEQ ID NO: 955590 - DNA, 15 bp, Homo sapiens
tgaagagccaagaaa

SEQ ID NO: 955591 - DNA, 15 bp, Homo sapiens
gaagagccaagaaaa

SEQ ID NO: 955592 - DNA, 15 bp, Homo sapiens
aagagccaagaaaaa

SEQ ID NO: 955593 - DNA, 15 bp, Homo sapiens
agagccaagaaaaag

SEQ ID NO: 955594 - DNA, 15 bp, Homo sapiens
gagccaagaaaaagg

SEQ ID NO: 955595 - DNA, 15 bp, Homo sapiens
agccaagaaaaaggg

SEQ ID NO: 955596 - DNA, 15 bp, Homo sapiens
gccaagaaaaaggga

SEQ ID NO: 955597 - DNA, 15 bp, Homo sapiens
ccaagaaaaagggag

SEQ ID NO: 955598 - DNA, 15 bp, Homo sapiens
caagaaaaagggaga

SEQ ID NO: 955599 - DNA, 15 bp, Homo sapiens
aagaaaaagggagat

SEQ ID NO: 955600 - DNA, 15 bp, Homo sapiens
agaaaaagggagatt

SEQ ID NO: 955601 - DNA, 15 bp, Homo sapiens
gaaaaagggagattc

SEQ ID NO: 955602 - DNA, 15 bp, Homo sapiens
aaaaagggagattct

SEQ ID NO: 955603 - DNA, 15 bp, Homo sapiens
aaaagggagattctt

SEQ ID NO: 955604 - DNA, 15 bp, Homo sapiens
aaagggagattctta

SEQ ID NO: 955605 - DNA, 15 bp, Homo sapiens
aagggagattcttaa

SEQ ID NO: 955606 - DNA, 15 bp, Homo sapiens
agggagattcttaag

SEQ ID NO: 955607 - DNA, 15 bp, Homo sapiens
gggagattcttaaga

SEQ ID NO: 955608 - DNA, 15 bp, Homo sapiens
ggagattcttaagag

SEQ ID NO: 955609 - DNA, 15 bp, Homo sapiens
gagattcttaagaga

SEQ ID NO: 955610 - DNA, 15 bp, Homo sapiens
agattcttaagagat

SEQ ID NO: 955611 - DNA, 15 bp, Homo sapiens
gattcttaagagatg

SEQ ID NO: 955612 - DNA, 15 bp, Homo sapiens
attcttaagagatgg

SEQ ID NO: 955613 - DNA, 15 bp, Homo sapiens
ttcttaagagatggg

SEQ ID NO: 955614 - DNA, 15 bp, Homo sapiens
tcttaagagatggga

SEQ ID NO: 955615 - DNA, 15 bp, Homo sapiens
cttaagagatgggaa

SEQ ID NO: 955616 - DNA, 15 bp, Homo sapiens
ttaagagatgggaaa

SEQ ID NO: 955617 - DNA, 15 bp, Homo sapiens
taagagatgggaaat

SEQ ID NO: 955618 - DNA, 15 bp, Homo sapiens
aagagatgggaaata

SEQ ID NO: 955619 - DNA, 15 bp, Homo sapiens
agagatgggaaatag

SEQ ID NO: 955620 - DNA, 15 bp, Homo sapiens
gagatgggaaataga

SEQ ID NO: 955621 - DNA, 15 bp, Homo sapiens
agatgggaaatagaa

SEQ ID NO: 955622 - DNA, 15 bp, Homo sapiens
gatgggaaatagaat

SEQ ID NO: 955623 - DNA, 15 bp, Homo sapiens
atgggaaatagaatc

SEQ ID NO: 955624 - DNA, 15 bp, Homo sapiens
tgggaaatagaatct

SEQ ID NO: 955625 - DNA, 15 bp, Homo sapiens
gggaaatagaatctc

SEQ ID NO: 955626 - DNA, 15 bp, Homo sapiens
ggaaatagaatctca

SEQ ID NO: 955627 - DNA, 15 bp, Homo sapiens
gaaatagaatctcat

SEQ ID NO: 955628 - DNA, 15 bp, Homo sapiens
aaatagaatctcatc

SEQ ID NO: 955629 - DNA, 15 bp, Homo sapiens
aatagaatctcatct

SEQ ID NO: 955630 - DNA, 15 bp, Homo sapiens
atagaatctcatcta

SEQ ID NO: 955631 - DNA, 15 bp, Homo sapiens
tagaatctcatctac

SEQ ID NO: 955632 - DNA, 15 bp, Homo sapiens
agaatctcatctacc

SEQ ID NO: 955633 - DNA, 15 bp, Homo sapiens
gaatctcatctaccc

SEQ ID NO: 955634 - DNA, 15 bp, Homo sapiens
aatctcatctacccc

SEQ ID NO: 955635 - DNA, 15 bp, Homo sapiens
atctcatctacccct

SEQ ID NO: 955636 - DNA, 15 bp, Homo sapiens
tctcatctacccctg

SEQ ID NO: 955637 - DNA, 15 bp, Homo sapiens
ctcatctacccctgt

SEQ ID NO: 955638 - DNA, 15 bp, Homo sapiens
tcatctacccctgtt

SEQ ID NO: 955639 - DNA, 15 bp, Homo sapiens
catctacccctgttt

SEQ ID NO: 955640 - DNA, 15 bp, Homo sapiens
atctacccctgtttc

SEQ ID NO: 955641 - DNA, 15 bp, Homo sapiens
tctacccctgtttcc

SEQ ID NO: 955642 - DNA, 15 bp, Homo sapiens
ctacccctgtttccc

SEQ ID NO: 955643 - DNA, 15 bp, Homo sapiens
tacccctgtttcccc

SEQ ID NO: 955644 - DNA, 15 bp, Homo sapiens
acccctgtttccccc

SEQ ID NO: 955645 - DNA, 15 bp, Homo sapiens
cccctgtttccccca

SEQ ID NO: 955646 - DNA, 15 bp, Homo sapiens
ccctgtttcccccag

SEQ ID NO: 955647 - DNA, 15 bp, Homo sapiens
cctgtttcccccaga

SEQ ID NO: 955648 - DNA, 15 bp, Homo sapiens
ctgtttcccccagaa

SEQ ID NO: 955649 - DNA, 15 bp, Homo sapiens
tgtttcccccagaac

SEQ ID NO: 955650 - DNA, 15 bp, Homo sapiens
gtttcccccagaaca

SEQ ID NO: 955651 - DNA, 15 bp, Homo sapiens
tttcccccagaacag

SEQ ID NO: 955652 - DNA, 15 bp, Homo sapiens
ttcccccagaacagt

SEQ ID NO: 955653 - DNA, 15 bp, Homo sapiens
tcccccagaacagtg

SEQ ID NO: 955654 - DNA, 15 bp, Homo sapiens
cccccagaacagtga

SEQ ID NO: 955655 - DNA, 15 bp, Homo sapiens
ccccagaacagtgaa

SEQ ID NO: 955656 - DNA, 15 bp, Homo sapiens
cccagaacagtgaaa

SEQ ID NO: 955657 - DNA, 15 bp, Homo sapiens
ccagaacagtgaaac

SEQ ID NO: 955658 - DNA, 15 bp, Homo sapiens
cagaacagtgaaact

SEQ ID NO: 955659 - DNA, 15 bp, Homo sapiens
agaacagtgaaactg

SEQ ID NO: 955660 - DNA, 15 bp, Homo sapiens
gaacagtgaaactga

SEQ ID NO: 955661 - DNA, 15 bp, Homo sapiens
aacagtgaaactgaa

SEQ ID NO: 955662 - DNA, 15 bp, Homo sapiens
acagtgaaactgaat

SEQ ID NO: 955663 - DNA, 15 bp, Homo sapiens
cagtgaaactgaatc

SEQ ID NO: 955664 - DNA, 15 bp, Homo sapiens
agtgaaactgaatct

SEQ ID NO: 955665 - DNA, 15 bp, Homo sapiens
gtgaaactgaatctt

SEQ ID NO: 955666 - DNA, 15 bp, Homo sapiens
tgaaactgaatctta

SEQ ID NO: 955667 - DNA, 15 bp, Homo sapiens
gaaactgaatcttaa

SEQ ID NO: 955668 - DNA, 15 bp, Homo sapiens
aaactgaatcttaag

SEQ ID NO: 955669 - DNA, 15 bp, Homo sapiens
aactgaatcttaagg

SEQ ID NO: 955670 - DNA, 15 bp, Homo sapiens
actgaatcttaaggg

SEQ ID NO: 955671 - DNA, 15 bp, Homo sapiens
ctgaatcttaagggt

SEQ ID NO: 955672 - DNA, 15 bp, Homo sapiens
tgaatcttaagggta

SEQ ID NO: 955673 - DNA, 15 bp, Homo sapiens
gaatcttaagggtaa

SEQ ID NO: 955674 - DNA, 15 bp, Homo sapiens
aatcttaagggtaag

SEQ ID NO: 955675 - DNA, 15 bp, Homo sapiens
atcttaagggtaaga

SEQ ID NO: 955676 - DNA, 15 bp, Homo sapiens
tcttaagggtaagat

SEQ ID NO: 955677 - DNA, 15 bp, Homo sapiens
cttaagggtaagata

SEQ ID NO: 955678 - DNA, 15 bp, Homo sapiens
ttaagggtaagatag

SEQ ID NO: 955679 - DNA, 15 bp, Homo sapiens
taagggtaagataga

SEQ ID NO: 955680 - DNA, 15 bp, Homo sapiens
aagggtaagatagaa

SEQ ID NO: 955681 - DNA, 15 bp, Homo sapiens
agggtaagatagaat

SEQ ID NO: 955682 - DNA, 15 bp, Homo sapiens
gggtaagatagaata

SEQ ID NO: 955683 - DNA, 15 bp, Homo sapiens
ggtaagatagaatag

SEQ ID NO: 955684 - DNA, 15 bp, Homo sapiens
gtaagatagaatagt

SEQ ID NO: 955685 - DNA, 15 bp, Homo sapiens
taagatagaatagtg

SEQ ID NO: 955686 - DNA, 15 bp, Homo sapiens
aagatagaatagtgt

SEQ ID NO: 955687 - DNA, 15 bp, Homo sapiens
agatagaatagtgtg

SEQ ID NO: 955688 - DNA, 15 bp, Homo sapiens
gatagaatagtgtgt

SEQ ID NO: 955689 - DNA, 15 bp, Homo sapiens
atagaatagtgtgta

SEQ ID NO: 955690 - DNA, 15 bp, Homo sapiens
tagaatagtgtgtac

SEQ ID NO: 955691 - DNA, 15 bp, Homo sapiens
agaatagtgtgtact

SEQ ID NO: 955692 - DNA, 15 bp, Homo sapiens
gaatagtgtgtactt

SEQ ID NO: 955693 - DNA, 15 bp, Homo sapiens
aatagtgtgtactta

SEQ ID NO: 955694 - DNA, 15 bp, Homo sapiens
atagtgtgtacttaa

SEQ ID NO: 955695 - DNA, 15 bp, Homo sapiens
tagtgtgtacttaac

SEQ ID NO: 955696 - DNA, 15 bp, Homo sapiens
agtgtgtacttaact

SEQ ID NO: 955697 - DNA, 15 bp, Homo sapiens
gtgtgtacttaactt

SEQ ID NO: 955698 - DNA, 15 bp, Homo sapiens
tgtgtacttaactta

SEQ ID NO: 955699 - DNA, 15 bp, Homo sapiens
gtgtacttaacttag

SEQ ID NO: 955700 - DNA, 15 bp, Homo sapiens
tgtacttaacttaga

SEQ ID NO: 955701 - DNA, 15 bp, Homo sapiens
gtacttaacttagat

SEQ ID NO: 955702 - DNA, 15 bp, Homo sapiens
tacttaacttagatg

SEQ ID NO: 955703 - DNA, 15 bp, Homo sapiens
acttaacttagatgg

SEQ ID NO: 955704 - DNA, 15 bp, Homo sapiens
cttaacttagatgga

SEQ ID NO: 955705 - DNA, 15 bp, Homo sapiens
ttaacttagatggag

SEQ ID NO: 955706 - DNA, 15 bp, Homo sapiens
taacttagatggaga

SEQ ID NO: 955707 - DNA, 15 bp, Homo sapiens
aacttagatggagaa

SEQ ID NO: 955708 - DNA, 15 bp, Homo sapiens
acttagatggagaag

SEQ ID NO: 955709 - DNA, 15 bp, Homo sapiens
cttagatggagaaga

SEQ ID NO: 955710 - DNA, 15 bp, Homo sapiens
ttagatggagaagaa

SEQ ID NO: 955711 - DNA, 15 bp, Homo sapiens
tagatggagaagaaa

SEQ ID NO: 955712 - DNA, 15 bp, Homo sapiens
agatggagaagaaag

SEQ ID NO: 955713 - DNA, 15 bp, Homo sapiens
gatggagaagaaagg

SEQ ID NO: 955714 - DNA, 15 bp, Homo sapiens
atggagaagaaaggc

SEQ ID NO: 955715 - DNA, 15 bp, Homo sapiens
tggagaagaaaggct

SEQ ID NO: 955716 - DNA, 15 bp, Homo sapiens
ggagaagaaaggctg

SEQ ID NO: 955717 - DNA, 15 bp, Homo sapiens
gagaagaaaggctgc

SEQ ID NO: 955718 - DNA, 15 bp, Homo sapiens
agaagaaaggctgcc

SEQ ID NO: 955719 - DNA, 15 bp, Homo sapiens
gaagaaaggctgcca

SEQ ID NO: 955720 - DNA, 15 bp, Homo sapiens
aagaaaggctgccaa

SEQ ID NO: 955721 - DNA, 15 bp, Homo sapiens
agaaaggctgccaaa

SEQ ID NO: 955722 - DNA, 15 bp, Homo sapiens
gaaaggctgccaaaa

SEQ ID NO: 955723 - DNA, 15 bp, Homo sapiens
aaaggctgccaaaat

SEQ ID NO: 955724 - DNA, 15 bp, Homo sapiens
aaggctgccaaaatg

SEQ ID NO: 955725 - DNA, 15 bp, Homo sapiens
aggctgccaaaatga

SEQ ID NO: 955726 - DNA, 15 bp, Homo sapiens
ggctgccaaaatgag

SEQ ID NO: 955727 - DNA, 15 bp, Homo sapiens
gctgccaaaatgaga

SEQ ID NO: 955728 - DNA, 15 bp, Homo sapiens
ctgccaaaatgagat

SEQ ID NO: 955729 - DNA, 15 bp, Homo sapiens
tgccaaaatgagatc

SEQ ID NO: 955730 - DNA, 15 bp, Homo sapiens
gccaaaatgagatct

SEQ ID NO: 955731 - DNA, 15 bp, Homo sapiens
ccaaaatgagatctg

SEQ ID NO: 955732 - DNA, 15 bp, Homo sapiens
caaaatgagatctga

SEQ ID NO: 955733 - DNA, 15 bp, Homo sapiens
aaaatgagatctgaa

SEQ ID NO: 955734 - DNA, 15 bp, Homo sapiens
aaatgagatctgaag

SEQ ID NO: 955735 - DNA, 15 bp, Homo sapiens
aatgagatctgaagc

SEQ ID NO: 955736 - DNA, 15 bp, Homo sapiens
atgagatctgaagcg

SEQ ID NO: 955737 - DNA, 15 bp, Homo sapiens
tgagatctgaagcgc

SEQ ID NO: 955738 - DNA, 15 bp, Homo sapiens
gagatctgaagcgct

SEQ ID NO: 955739 - DNA, 15 bp, Homo sapiens
agatctgaagcgcta

SEQ ID NO: 955740 - DNA, 15 bp, Homo sapiens
gatctgaagcgctat

SEQ ID NO: 955741 - DNA, 15 bp, Homo sapiens
atctgaagcgctatt

SEQ ID NO: 955742 - DNA, 15 bp, Homo sapiens
tctgaagcgctatta

SEQ ID NO: 955743 - DNA, 15 bp, Homo sapiens
ctgaagcgctattac

SEQ ID NO: 955744 - DNA, 15 bp, Homo sapiens
tgaagcgctattaca

SEQ ID NO: 955745 - DNA, 15 bp, Homo sapiens
gaagcgctattacaa

SEQ ID NO: 955746 - DNA, 15 bp, Homo sapiens
aagcgctattacaaa

SEQ ID NO: 955747 - DNA, 15 bp, Homo sapiens
agcgctattacaaat

SEQ ID NO: 955748 - DNA, 15 bp, Homo sapiens
gcgctattacaaata

SEQ ID NO: 955749 - DNA, 15 bp, Homo sapiens
cgctattacaaatat

SEQ ID NO: 955750 - DNA, 15 bp, Homo sapiens
gctattacaaatatt

SEQ ID NO: 955751 - DNA, 15 bp, Homo sapiens
ctattacaaatattt

SEQ ID NO: 955752 - DNA, 15 bp, Homo sapiens
tattacaaatatttc

SEQ ID NO: 955753 - DNA, 15 bp, Homo sapiens
attacaaatatttcc

SEQ ID NO: 955754 - DNA, 15 bp, Homo sapiens
ttacaaatatttcca

SEQ ID NO: 955755 - DNA, 15 bp, Homo sapiens
tacaaatatttccat

SEQ ID NO: 955756 - DNA, 15 bp, Homo sapiens
acaaatatttccatc

SEQ ID NO: 955757 - DNA, 15 bp, Homo sapiens
caaatatttccatcg

SEQ ID NO: 955758 - DNA, 15 bp, Homo sapiens
aaatatttccatcgt

SEQ ID NO: 955759 - DNA, 15 bp, Homo sapiens
aatatttccatcgtt

SEQ ID NO: 955760 - DNA, 15 bp, Homo sapiens
atatttccatcgtta

SEQ ID NO: 955761 - DNA, 15 bp, Homo sapiens
tatttccatcgttac

SEQ ID NO: 955762 - DNA, 15 bp, Homo sapiens
atttccatcgttact

SEQ ID NO: 955763 - DNA, 15 bp, Homo sapiens
tttccatcgttactg

SEQ ID NO: 955764 - DNA, 15 bp, Homo sapiens
ttccatcgttactgt

SEQ ID NO: 955765 - DNA, 15 bp, Homo sapiens
tccatcgttactgta

SEQ ID NO: 955766 - DNA, 15 bp, Homo sapiens
ccatcgttactgtac

SEQ ID NO: 955767 - DNA, 15 bp, Homo sapiens
catcgttactgtact

SEQ ID NO: 955768 - DNA, 15 bp, Homo sapiens
atcgttactgtactt

SEQ ID NO: 955769 - DNA, 15 bp, Homo sapiens
tcgttactgtacttc

SEQ ID NO: 955770 - DNA, 15 bp, Homo sapiens
cgttactgtacttca

SEQ ID NO: 955771 - DNA, 15 bp, Homo sapiens
gttactgtacttcag

SEQ ID NO: 955772 - DNA, 15 bp, Homo sapiens
ttactgtacttcaga

SEQ ID NO: 955773 - DNA, 15 bp, Homo sapiens
tactgtacttcagaa

SEQ ID NO: 955774 - DNA, 15 bp, Homo sapiens
actgtacttcagaat

SEQ ID NO: 955775 - DNA, 15 bp, Homo sapiens
ctgtacttcagaatg

SEQ ID NO: 955776 - DNA, 15 bp, Homo sapiens
tgtacttcagaatga

SEQ ID NO: 955777 - DNA, 15 bp, Homo sapiens
gtacttcagaatgaa

SEQ ID NO: 955778 - DNA, 15 bp, Homo sapiens
tacttcagaatgaat

SEQ ID NO: 955779 - DNA, 15 bp, Homo sapiens
acttcagaatgaatt

SEQ ID NO: 955780 - DNA, 15 bp, Homo sapiens
cttcagaatgaatta

SEQ ID NO: 955781 - DNA, 15 bp, Homo sapiens
ttcagaatgaattac

SEQ ID NO: 955782 - DNA, 15 bp, Homo sapiens
tcagaatgaattaca

SEQ ID NO: 955783 - DNA, 15 bp, Homo sapiens
cagaatgaattacaa

SEQ ID NO: 955784 - DNA, 15 bp, Homo sapiens
agaatgaattacaac

SEQ ID NO: 955785 - DNA, 15 bp, Homo sapiens
gaatgaattacaacc

SEQ ID NO: 955786 - DNA, 15 bp, Homo sapiens
aatgaattacaaccg

SEQ ID NO: 955787 - DNA, 15 bp, Homo sapiens
atgaattacaaccgt

SEQ ID NO: 955788 - DNA, 15 bp, Homo sapiens
tgaattacaaccgta

SEQ ID NO: 955789 - DNA, 15 bp, Homo sapiens
gaattacaaccgtaa

SEQ ID NO: 955790 - DNA, 15 bp, Homo sapiens
aattacaaccgtaag

SEQ ID NO: 955791 - DNA, 15 bp, Homo sapiens
attacaaccgtaagt

SEQ ID NO: 955792 - DNA, 15 bp, Homo sapiens
ttacaaccgtaagtt

SEQ ID NO: 955793 - DNA, 15 bp, Homo sapiens
tacaaccgtaagttt

SEQ ID NO: 955794 - DNA, 15 bp, Homo sapiens
acaaccgtaagtttt

SEQ ID NO: 955795 - DNA, 15 bp, Homo sapiens
caaccgtaagttttt

SEQ ID NO: 955796 - DNA, 15 bp, Homo sapiens
aaccgtaagtttttt

SEQ ID NO: 955797 - DNA, 15 bp, Homo sapiens
accgtaagttttttt

SEQ ID NO: 955798 - DNA, 15 bp, Homo sapiens
ccgtaagttttttta

SEQ ID NO: 955799 - DNA, 15 bp, Homo sapiens
cgtaagtttttttac

SEQ ID NO: 955800 - DNA, 15 bp, Homo sapiens
gtaagtttttttact

SEQ ID NO: 955801 - DNA, 15 bp, Homo sapiens
taagtttttttactt

SEQ ID NO: 955802 - DNA, 15 bp, Homo sapiens
aagtttttttacttc

SEQ ID NO: 955803 - DNA, 15 bp, Homo sapiens
agtttttttacttcc

SEQ ID NO: 955804 - DNA, 15 bp, Homo sapiens
gtttttttacttcct

SEQ ID NO: 955805 - DNA, 15 bp, Homo sapiens
tttttttacttcctc

SEQ ID NO: 955806 - DNA, 15 bp, Homo sapiens
ttttttacttcctca

SEQ ID NO: 955807 - DNA, 15 bp, Homo sapiens
tttttacttcctcat

SEQ ID NO: 955808 - DNA, 15 bp, Homo sapiens
ttttacttcctcatt

SEQ ID NO: 955809 - DNA, 15 bp, Homo sapiens
tttacttcctcattc

SEQ ID NO: 955810 - DNA, 15 bp, Homo sapiens
ttacttcctcattca

SEQ ID NO: 955811 - DNA, 15 bp, Homo sapiens
tacttcctcattcat

SEQ ID NO: 955812 - DNA, 15 bp, Homo sapiens
acttcctcattcata

SEQ ID NO: 955813 - DNA, 15 bp, Homo sapiens
cttcctcattcataa

SEQ ID NO: 955814 - DNA, 15 bp, Homo sapiens
ttcctcattcataaa

SEQ ID NO: 955815 - DNA, 15 bp, Homo sapiens
tcctcattcataaat

SEQ ID NO: 955816 - DNA, 15 bp, Homo sapiens
cctcattcataaatt

SEQ ID NO: 955817 - DNA, 15 bp, Homo sapiens
ctcattcataaattt

SEQ ID NO: 955818 - DNA, 15 bp, Homo sapiens
tcattcataaatttg

SEQ ID NO: 955819 - DNA, 15 bp, Homo sapiens
cattcataaatttga

SEQ ID NO: 955820 - DNA, 15 bp, Homo sapiens
attcataaatttgat

SEQ ID NO: 955821 - DNA, 15 bp, Homo sapiens
ttcataaatttgatt

SEQ ID NO: 955822 - DNA, 15 bp, Homo sapiens
tcataaatttgatta

SEQ ID NO: 955823 - DNA, 15 bp, Homo sapiens
cataaatttgattat

SEQ ID NO: 955824 - DNA, 15 bp, Homo sapiens
ataaatttgattatt

SEQ ID NO: 955825 - DNA, 15 bp, Homo sapiens
taaatttgattattc

SEQ ID NO: 955826 - DNA, 15 bp, Homo sapiens
aaatttgattattcc

SEQ ID NO: 955827 - DNA, 15 bp, Homo sapiens
aatttgattattcct

SEQ ID NO: 955828 - DNA, 15 bp, Homo sapiens
atttgattattcctt

SEQ ID NO: 955829 - DNA, 15 bp, Homo sapiens
tttgattattcctta

SEQ ID NO: 955830 - DNA, 15 bp, Homo sapiens
ttgattattccttat

SEQ ID NO: 955831 - DNA, 15 bp, Homo sapiens
tgattattccttata

SEQ ID NO: 955832 - DNA, 15 bp, Homo sapiens
gattattccttatac

SEQ ID NO: 955833 - DNA, 15 bp, Homo sapiens
attattccttatacc

SEQ ID NO: 955834 - DNA, 15 bp, Homo sapiens
ttattccttatacca

SEQ ID NO: 955835 - DNA, 15 bp, Homo sapiens
tattccttataccac

SEQ ID NO: 955836 - DNA, 15 bp, Homo sapiens
attccttataccact

SEQ ID NO: 955837 - DNA, 15 bp, Homo sapiens
ttccttataccactt

SEQ ID NO: 955838 - DNA, 15 bp, Homo sapiens
tccttataccacttc

SEQ ID NO: 955839 - DNA, 15 bp, Homo sapiens
ccttataccacttct

SEQ ID NO: 955840 - DNA, 15 bp, Homo sapiens
cttataccacttctc

SEQ ID NO: 955841 - DNA, 15 bp, Homo sapiens
ttataccacttctca

SEQ ID NO: 955842 - DNA, 15 bp, Homo sapiens
tataccacttctcag

SEQ ID NO: 955843 - DNA, 15 bp, Homo sapiens
ataccacttctcagc

SEQ ID NO: 955844 - DNA, 15 bp, Homo sapiens
taccacttctcagct

SEQ ID NO: 955845 - DNA, 15 bp, Homo sapiens
accacttctcagctt

SEQ ID NO: 955846 - DNA, 15 bp, Homo sapiens
ccacttctcagcttt

SEQ ID NO: 955847 - DNA, 15 bp, Homo sapiens
cacttctcagctttc

SEQ ID NO: 955848 - DNA, 15 bp, Homo sapiens
acttctcagctttca

SEQ ID NO: 955849 - DNA, 15 bp, Homo sapiens
cttctcagctttcat

SEQ ID NO: 955850 - DNA, 15 bp, Homo sapiens
ttctcagctttcatc

SEQ ID NO: 955851 - DNA, 15 bp, Homo sapiens
tctcagctttcatca

SEQ ID NO: 955852 - DNA, 15 bp, Homo sapiens
ctcagctttcatcat

SEQ ID NO: 955853 - DNA, 15 bp, Homo sapiens
tcagctttcatcatt

SEQ ID NO: 955854 - DNA, 15 bp, Homo sapiens
cagctttcatcattc

SEQ ID NO: 955855 - DNA, 15 bp, Homo sapiens
agctttcatcattct

SEQ ID NO: 955856 - DNA, 15 bp, Homo sapiens
gctttcatcattctt

SEQ ID NO: 955857 - DNA, 15 bp, Homo sapiens
ctttcatcattcttt

SEQ ID NO: 955858 - DNA, 15 bp, Homo sapiens
tttcatcattcttta

SEQ ID NO: 955859 - DNA, 15 bp, Homo sapiens
ttcatcattctttat

SEQ ID NO: 955860 - DNA, 15 bp, Homo sapiens
tcatcattctttatt

SEQ ID NO: 955861 - DNA, 15 bp, Homo sapiens
catcattctttattg

SEQ ID NO: 955862 - DNA, 15 bp, Homo sapiens
atcattctttattgt

SEQ ID NO: 955863 - DNA, 15 bp, Homo sapiens
tcattctttattgta

SEQ ID NO: 955864 - DNA, 15 bp, Homo sapiens
cattctttattgtac

SEQ ID NO: 955865 - DNA, 15 bp, Homo sapiens
attctttattgtact

SEQ ID NO: 955866 - DNA, 15 bp, Homo sapiens
ttctttattgtactt

SEQ ID NO: 955867 - DNA, 15 bp, Homo sapiens
tctttattgtacttt

SEQ ID NO: 955868 - DNA, 15 bp, Homo sapiens
ctttattgtactttt

SEQ ID NO: 955869 - DNA, 15 bp, Homo sapiens
tttattgtacttttc

SEQ ID NO: 955870 - DNA, 15 bp, Homo sapiens
ttattgtacttttct

SEQ ID NO: 955871 - DNA, 15 bp, Homo sapiens
tattgtacttttcta

SEQ ID NO: 955872 - DNA, 15 bp, Homo sapiens
attgtacttttctat

SEQ ID NO: 955873 - DNA, 15 bp, Homo sapiens
ttgtacttttctatg

SEQ ID NO: 955874 - DNA, 15 bp, Homo sapiens
tgtacttttctatgt

SEQ ID NO: 955875 - DNA, 15 bp, Homo sapiens
gtacttttctatgta

SEQ ID NO: 955876 - DNA, 15 bp, Homo sapiens
tacttttctatgtaa

SEQ ID NO: 955877 - DNA, 15 bp, Homo sapiens
acttttctatgtaat

SEQ ID NO: 955878 - DNA, 15 bp, Homo sapiens
cttttctatgtaatg

SEQ ID NO: 955879 - DNA, 15 bp, Homo sapiens
ttttctatgtaatgt

SEQ ID NO: 955880 - DNA, 15 bp, Homo sapiens
tttctatgtaatgtt

SEQ ID NO: 955881 - DNA, 15 bp, Homo sapiens
ttctatgtaatgttt

SEQ ID NO: 955882 - DNA, 15 bp, Homo sapiens
tctatgtaatgtttg

SEQ ID NO: 955883 - DNA, 15 bp, Homo sapiens
ctatgtaatgtttgc

SEQ ID NO: 955884 - DNA, 15 bp, Homo sapiens
tatgtaatgtttgcc

SEQ ID NO: 955885 - DNA, 15 bp, Homo sapiens
atgtaatgtttgcct

SEQ ID NO: 955886 - DNA, 15 bp, Homo sapiens
tgtaatgtttgccta

SEQ ID NO: 955887 - DNA, 15 bp, Homo sapiens
gtaatgtttgcctat

SEQ ID NO: 955888 - DNA, 15 bp, Homo sapiens
taatgtttgcctatt

SEQ ID NO: 955889 - DNA, 15 bp, Homo sapiens
aatgtttgcctatta

SEQ ID NO: 955890 - DNA, 15 bp, Homo sapiens
atgtttgcctattat

SEQ ID NO: 955891 - DNA, 15 bp, Homo sapiens
tgtttgcctattata

SEQ ID NO: 955892 - DNA, 15 bp, Homo sapiens
gtttgcctattatac

SEQ ID NO: 955893 - DNA, 15 bp, Homo sapiens
tttgcctattataca

SEQ ID NO: 955894 - DNA, 15 bp, Homo sapiens
ttgcctattatacag

SEQ ID NO: 955895 - DNA, 15 bp, Homo sapiens
tgcctattatacagc

SEQ ID NO: 955896 - DNA, 15 bp, Homo sapiens
gcctattatacagca

SEQ ID NO: 955897 - DNA, 15 bp, Homo sapiens
cctattatacagcaa

SEQ ID NO: 955898 - DNA, 15 bp, Homo sapiens
ctattatacagcaac

SEQ ID NO: 955899 - DNA, 15 bp, Homo sapiens
tattatacagcaact

SEQ ID NO: 955900 - DNA, 15 bp, Homo sapiens
attatacagcaactt

SEQ ID NO: 955901 - DNA, 15 bp, Homo sapiens
ttatacagcaactta

SEQ ID NO: 955902 - DNA, 15 bp, Homo sapiens
tatacagcaacttaa

SEQ ID NO: 955903 - DNA, 15 bp, Homo sapiens
atacagcaacttaag

SEQ ID NO: 955904 - DNA, 15 bp, Homo sapiens
tacagcaacttaaga

SEQ ID NO: 955905 - DNA, 15 bp, Homo sapiens
acagcaacttaagag

SEQ ID NO: 955906 - DNA, 15 bp, Homo sapiens
cagcaacttaagaga

SEQ ID NO: 955907 - DNA, 15 bp, Homo sapiens
agcaacttaagagaa

SEQ ID NO: 955908 - DNA, 15 bp, Homo sapiens
gcaacttaagagaac

SEQ ID NO: 955909 - DNA, 15 bp, Homo sapiens
caacttaagagaact

SEQ ID NO: 955910 - DNA, 15 bp, Homo sapiens
aacttaagagaactg

SEQ ID NO: 955911 - DNA, 15 bp, Homo sapiens
acttaagagaactgt

SEQ ID NO: 955912 - DNA, 15 bp, Homo sapiens
cttaagagaactgta

SEQ ID NO: 955913 - DNA, 15 bp, Homo sapiens
ttaagagaactgtaa

SEQ ID NO: 955914 - DNA, 15 bp, Homo sapiens
taagagaactgtaag

SEQ ID NO: 955915 - DNA, 15 bp, Homo sapiens
aagagaactgtaagt

SEQ ID NO: 955916 - DNA, 15 bp, Homo sapiens
agagaactgtaagtt

SEQ ID NO: 955917 - DNA, 15 bp, Homo sapiens
gagaactgtaagttt

SEQ ID NO: 955918 - DNA, 15 bp, Homo sapiens
agaactgtaagtttg

SEQ ID NO: 955919 - DNA, 15 bp, Homo sapiens
gaactgtaagtttgg

SEQ ID NO: 955920 - DNA, 15 bp, Homo sapiens
aactgtaagtttgga

SEQ ID NO: 955921 - DNA, 15 bp, Homo sapiens
actgtaagtttggac

SEQ ID NO: 955922 - DNA, 15 bp, Homo sapiens
ctgtaagtttggaca

SEQ ID NO: 955923 - DNA, 15 bp, Homo sapiens
tgtaagtttggacat

SEQ ID NO: 955924 - DNA, 15 bp, Homo sapiens
gtaagtttggacatt

SEQ ID NO: 955925 - DNA, 15 bp, Homo sapiens
taagtttggacattt

SEQ ID NO: 955926 - DNA, 15 bp, Homo sapiens
aagtttggacatttc

SEQ ID NO: 955927 - DNA, 15 bp, Homo sapiens
agtttggacatttca

SEQ ID NO: 955928 - DNA, 15 bp, Homo sapiens
gtttggacatttcat

SEQ ID NO: 955929 - DNA, 15 bp, Homo sapiens
tttggacatttcatt

SEQ ID NO: 955930 - DNA, 15 bp, Homo sapiens
ttggacatttcattt

SEQ ID NO: 955931 - DNA, 15 bp, Homo sapiens
tggacatttcatttt

SEQ ID NO: 955932 - DNA, 15 bp, Homo sapiens
ggacatttcattttg

SEQ ID NO: 955933 - DNA, 15 bp, Homo sapiens
gacatttcattttgg

SEQ ID NO: 955934 - DNA, 15 bp, Homo sapiens
acatttcattttggt

SEQ ID NO: 955935 - DNA, 15 bp, Homo sapiens
catttcattttggtg

SEQ ID NO: 955936 - DNA, 15 bp, Homo sapiens
atttcattttggtgt

SEQ ID NO: 955937 - DNA, 15 bp, Homo sapiens
tttcattttggtgtt

SEQ ID NO: 955938 - DNA, 15 bp, Homo sapiens
ttcattttggtgttg

SEQ ID NO: 955939 - DNA, 15 bp, Homo sapiens
tcattttggtgttga

SEQ ID NO: 955940 - DNA, 15 bp, Homo sapiens
cattttggtgttgat

SEQ ID NO: 955941 - DNA, 15 bp, Homo sapiens
attttggtgttgata

SEQ ID NO: 955942 - DNA, 15 bp, Homo sapiens
ttttggtgttgataa

SEQ ID NO: 955943 - DNA, 15 bp, Homo sapiens
tttggtgttgataat

SEQ ID NO: 955944 - DNA, 15 bp, Homo sapiens
ttggtgttgataata

SEQ ID NO: 955945 - DNA, 15 bp, Homo sapiens
tggtgttgataatag

SEQ ID NO: 955946 - DNA, 15 bp, Homo sapiens
ggtgttgataataga

SEQ ID NO: 955947 - DNA, 15 bp, Homo sapiens
gtgttgataatagaa

SEQ ID NO: 955948 - DNA, 15 bp, Homo sapiens
tgttgataatagaat

SEQ ID NO: 955949 - DNA, 15 bp, Homo sapiens
gttgataatagaata

SEQ ID NO: 955950 - DNA, 15 bp, Homo sapiens
ttgataatagaatat

SEQ ID NO: 955951 - DNA, 15 bp, Homo sapiens
tgataatagaatatc

SEQ ID NO: 955952 - DNA, 15 bp, Homo sapiens
gataatagaatatct

SEQ ID NO: 955953 - DNA, 15 bp, Homo sapiens
ataatagaatatctt

SEQ ID NO: 955954 - DNA, 15 bp, Homo sapiens
taatagaatatcttt

SEQ ID NO: 955955 - DNA, 15 bp, Homo sapiens
aatagaatatctttg

SEQ ID NO: 955956 - DNA, 15 bp, Homo sapiens
atagaatatctttga

SEQ ID NO: 955957 - DNA, 15 bp, Homo sapiens
tagaatatctttgaa

SEQ ID NO: 955958 - DNA, 15 bp, Homo sapiens
agaatatctttgaat

SEQ ID NO: 955959 - DNA, 15 bp, Homo sapiens
gaatatctttgaata

SEQ ID NO: 955960 - DNA, 15 bp, Homo sapiens
aatatctttgaatag

SEQ ID NO: 955961 - DNA, 15 bp, Homo sapiens
atatctttgaatagt

SEQ ID NO: 955962 - DNA, 15 bp, Homo sapiens
tatctttgaatagtt

SEQ ID NO: 955963 - DNA, 15 bp, Homo sapiens
atctttgaatagttc

SEQ ID NO: 955964 - DNA, 15 bp, Homo sapiens
tctttgaatagttct

SEQ ID NO: 955965 - DNA, 15 bp, Homo sapiens
ctttgaatagttcta

SEQ ID NO: 955966 - DNA, 15 bp, Homo sapiens
tttgaatagttctat

SEQ ID NO: 955967 - DNA, 15 bp, Homo sapiens
ttgaatagttctata

SEQ ID NO: 955968 - DNA, 15 bp, Homo sapiens
tgaatagttctatag

SEQ ID NO: 955969 - DNA, 15 bp, Homo sapiens
gaatagttctatagt

SEQ ID NO: 955970 - DNA, 15 bp, Homo sapiens
aatagttctatagtt

SEQ ID NO: 955971 - DNA, 15 bp, Homo sapiens
atagttctatagttg

SEQ ID NO: 955972 - DNA, 15 bp, Homo sapiens
tagttctatagttga

SEQ ID NO: 955973 - DNA, 15 bp, Homo sapiens
agttctatagttgat

SEQ ID NO: 955974 - DNA, 15 bp, Homo sapiens
gttctatagttgatg

SEQ ID NO: 955975 - DNA, 15 bp, Homo sapiens
ttctatagttgatga

SEQ ID NO: 955976 - DNA, 15 bp, Homo sapiens
tctatagttgatgag

SEQ ID NO: 955977 - DNA, 15 bp, Homo sapiens
ctatagttgatgagt

SEQ ID NO: 955978 - DNA, 15 bp, Homo sapiens
tatagttgatgagta

SEQ ID NO: 955979 - DNA, 15 bp, Homo sapiens
atagttgatgagtag

SEQ ID NO: 955980 - DNA, 15 bp, Homo sapiens
tagttgatgagtaga

SEQ ID NO: 955981 - DNA, 15 bp, Homo sapiens
agttgatgagtagaa

SEQ ID NO: 955982 - DNA, 15 bp, Homo sapiens
gttgatgagtagaac

SEQ ID NO: 955983 - DNA, 15 bp, Homo sapiens
ttgatgagtagaacc

SEQ ID NO: 955984 - DNA, 15 bp, Homo sapiens
tgatgagtagaacca

SEQ ID NO: 955985 - DNA, 15 bp, Homo sapiens
gatgagtagaaccat

SEQ ID NO: 955986 - DNA, 15 bp, Homo sapiens
atgagtagaaccatg

SEQ ID NO: 955987 - DNA, 15 bp, Homo sapiens
tgagtagaaccatga

SEQ ID NO: 955988 - DNA, 15 bp, Homo sapiens
gagtagaaccatgaa

SEQ ID NO: 955989 - DNA, 15 bp, Homo sapiens
agtagaaccatgaac

SEQ ID NO: 955990 - DNA, 15 bp, Homo sapiens
gtagaaccatgaacc

SEQ ID NO: 955991 - DNA, 15 bp, Homo sapiens
tagaaccatgaacca

SEQ ID NO: 955992 - DNA, 15 bp, Homo sapiens
agaaccatgaaccaa

SEQ ID NO: 955993 - DNA, 15 bp, Homo sapiens
gaaccatgaaccaag

SEQ ID NO: 955994 - DNA, 15 bp, Homo sapiens
aaccatgaaccaagt

SEQ ID NO: 955995 - DNA, 15 bp, Homo sapiens
accatgaaccaagta

SEQ ID NO: 955996 - DNA, 15 bp, Homo sapiens
ccatgaaccaagtaa

SEQ ID NO: 955997 - DNA, 15 bp, Homo sapiens
catgaaccaagtaac

SEQ ID NO: 955998 - DNA, 15 bp, Homo sapiens
atgaaccaagtaact

SEQ ID NO: 955999 - DNA, 15 bp, Homo sapiens
tgaaccaagtaactt

SEQ ID NO: 956000 - DNA, 15 bp, Homo sapiens
gaaccaagtaactta

SEQ ID NO: 956001 - DNA, 15 bp, Homo sapiens
aaccaagtaacttaa

SEQ ID NO: 956002 - DNA, 15 bp, Homo sapiens
accaagtaacttaaa

SEQ ID NO: 956003 - DNA, 15 bp, Homo sapiens
ccaagtaacttaaag

SEQ ID NO: 956004 - DNA, 15 bp, Homo sapiens
caagtaacttaaagt

SEQ ID NO: 956005 - DNA, 15 bp, Homo sapiens
aagtaacttaaagtc

SEQ ID NO: 956006 - DNA, 15 bp, Homo sapiens
agtaacttaaagtcc

SEQ ID NO: 956007 - DNA, 15 bp, Homo sapiens
gtaacttaaagtcct

SEQ ID NO: 956008 - DNA, 15 bp, Homo sapiens
taacttaaagtcctt

SEQ ID NO: 956009 - DNA, 15 bp, Homo sapiens
aacttaaagtccttg

SEQ ID NO: 956010 - DNA, 15 bp, Homo sapiens
acttaaagtccttga

SEQ ID NO: 956011 - DNA, 15 bp, Homo sapiens
cttaaagtccttgat

SEQ ID NO: 956012 - DNA, 15 bp, Homo sapiens
ttaaagtccttgatg

SEQ ID NO: 956013 - DNA, 15 bp, Homo sapiens
taaagtccttgatgt

SEQ ID NO: 956014 - DNA, 15 bp, Homo sapiens
aaagtccttgatgtt

SEQ ID NO: 956015 - DNA, 15 bp, Homo sapiens
aagtccttgatgtta

SEQ ID NO: 956016 - DNA, 15 bp, Homo sapiens
agtccttgatgttat

SEQ ID NO: 956017 - DNA, 15 bp, Homo sapiens
gtccttgatgttatt

SEQ ID NO: 956018 - DNA, 15 bp, Homo sapiens
tccttgatgttattt

SEQ ID NO: 956019 - DNA, 15 bp, Homo sapiens
ccttgatgttattta

SEQ ID NO: 956020 - DNA, 15 bp, Homo sapiens
cttgatgttatttat

SEQ ID NO: 956021 - DNA, 15 bp, Homo sapiens
ttgatgttatttatt

SEQ ID NO: 956022 - DNA, 15 bp, Homo sapiens
tgatgttatttatta

SEQ ID NO: 956023 - DNA, 15 bp, Homo sapiens
gatgttatttattac

SEQ ID NO: 956024 - DNA, 15 bp, Homo sapiens
atgttatttattaca

SEQ ID NO: 956025 - DNA, 15 bp, Homo sapiens
tgttatttattacag

SEQ ID NO: 956026 - DNA, 15 bp, Homo sapiens
gttatttattacaga

SEQ ID NO: 956027 - DNA, 15 bp, Homo sapiens
ttatttattacagag

SEQ ID NO: 956028 - DNA, 15 bp, Homo sapiens
tatttattacagaga

SEQ ID NO: 956029 - DNA, 15 bp, Homo sapiens
atttattacagagaa

SEQ ID NO: 956030 - DNA, 15 bp, Homo sapiens
tttattacagagaac

SEQ ID NO: 956031 - DNA, 15 bp, Homo sapiens
ttattacagagaact

SEQ ID NO: 956032 - DNA, 15 bp, Homo sapiens
tattacagagaacta

SEQ ID NO: 956033 - DNA, 15 bp, Homo sapiens
attacagagaactat

SEQ ID NO: 956034 - DNA, 15 bp, Homo sapiens
ttacagagaactata

SEQ ID NO: 956035 - DNA, 15 bp, Homo sapiens
tacagagaactataa

SEQ ID NO: 956036 - DNA, 15 bp, Homo sapiens
acagagaactataat

SEQ ID NO: 956037 - DNA, 15 bp, Homo sapiens
cagagaactataata

SEQ ID NO: 956038 - DNA, 15 bp, Homo sapiens
agagaactataatag

SEQ ID NO: 956039 - DNA, 15 bp, Homo sapiens
gagaactataataga

SEQ ID NO: 956040 - DNA, 15 bp, Homo sapiens
agaactataatagaa

SEQ ID NO: 956041 - DNA, 15 bp, Homo sapiens
gaactataatagaag

SEQ ID NO: 956042 - DNA, 15 bp, Homo sapiens
aactataatagaagc

SEQ ID NO: 956043 - DNA, 15 bp, Homo sapiens
actataatagaagct

SEQ ID NO: 956044 - DNA, 15 bp, Homo sapiens
ctataatagaagctc

SEQ ID NO: 956045 - DNA, 15 bp, Homo sapiens
tataatagaagctct

SEQ ID NO: 956046 - DNA, 15 bp, Homo sapiens
ataatagaagctctc

SEQ ID NO: 956047 - DNA, 15 bp, Homo sapiens
taatagaagctctcc

SEQ ID NO: 956048 - DNA, 15 bp, Homo sapiens
aatagaagctctccc

SEQ ID NO: 956049 - DNA, 15 bp, Homo sapiens
atagaagctctcccg

SEQ ID NO: 956050 - DNA, 15 bp, Homo sapiens
tagaagctctcccgc

SEQ ID NO: 956051 - DNA, 15 bp, Homo sapiens
agaagctctcccgct

SEQ ID NO: 956052 - DNA, 15 bp, Homo sapiens
gaagctctcccgcta

SEQ ID NO: 956053 - DNA, 15 bp, Homo sapiens
aagctctcccgctaa

SEQ ID NO: 956054 - DNA, 15 bp, Homo sapiens
agctctcccgctaat

SEQ ID NO: 956055 - DNA, 15 bp, Homo sapiens
gctctcccgctaatg

SEQ ID NO: 956056 - DNA, 15 bp, Homo sapiens
ctctcccgctaatgt

SEQ ID NO: 956057 - DNA, 15 bp, Homo sapiens
tctcccgctaatgtt

SEQ ID NO: 956058 - DNA, 15 bp, Homo sapiens
ctcccgctaatgttt

SEQ ID NO: 956059 - DNA, 15 bp, Homo sapiens
tcccgctaatgtttc

SEQ ID NO: 956060 - DNA, 15 bp, Homo sapiens
cccgctaatgtttcc

SEQ ID NO: 956061 - DNA, 15 bp, Homo sapiens
ccgctaatgtttcca

SEQ ID NO: 956062 - DNA, 15 bp, Homo sapiens
cgctaatgtttccat

SEQ ID NO: 956063 - DNA, 15 bp, Homo sapiens
gctaatgtttccatc

SEQ ID NO: 956064 - DNA, 15 bp, Homo sapiens
ctaatgtttccatca

SEQ ID NO: 956065 - DNA, 15 bp, Homo sapiens
taatgtttccatcat

SEQ ID NO: 956066 - DNA, 15 bp, Homo sapiens
aatgtttccatcatg

SEQ ID NO: 956067 - DNA, 15 bp, Homo sapiens
atgtttccatcatgt

SEQ ID NO: 956068 - DNA, 15 bp, Homo sapiens
tgtttccatcatgtg

SEQ ID NO: 956069 - DNA, 15 bp, Homo sapiens
gtttccatcatgtgt

SEQ ID NO: 956070 - DNA, 15 bp, Homo sapiens
tttccatcatgtgta

SEQ ID NO: 956071 - DNA, 15 bp, Homo sapiens
ttccatcatgtgtac

SEQ ID NO: 956072 - DNA, 15 bp, Homo sapiens
tccatcatgtgtaca

SEQ ID NO: 956073 - DNA, 15 bp, Homo sapiens
ccatcatgtgtacaa

SEQ ID NO: 956074 - DNA, 15 bp, Homo sapiens
catcatgtgtacaaa

SEQ ID NO: 956075 - DNA, 15 bp, Homo sapiens
atcatgtgtacaaaa

SEQ ID NO: 956076 - DNA, 15 bp, Homo sapiens
tcatgtgtacaaaaa

SEQ ID NO: 956077 - DNA, 15 bp, Homo sapiens
catgtgtacaaaaag

SEQ ID NO: 956078 - DNA, 15 bp, Homo sapiens
atgtgtacaaaaagt

SEQ ID NO: 956079 - DNA, 15 bp, Homo sapiens
tgtgtacaaaaagtt

SEQ ID NO: 956080 - DNA, 15 bp, Homo sapiens
gtgtacaaaaagttt

SEQ ID NO: 956081 - DNA, 15 bp, Homo sapiens
tgtacaaaaagtttt

SEQ ID NO: 956082 - DNA, 15 bp, Homo sapiens
gtacaaaaagttttc

SEQ ID NO: 956083 - DNA, 15 bp, Homo sapiens
tacaaaaagttttct

SEQ ID NO: 956084 - DNA, 15 bp, Homo sapiens
acaaaaagttttctt

SEQ ID NO: 956085 - DNA, 15 bp, Homo sapiens
caaaaagttttcttg

SEQ ID NO: 956086 - DNA, 15 bp, Homo sapiens
aaaaagttttcttgt

SEQ ID NO: 956087 - DNA, 15 bp, Homo sapiens
aaaagttttcttgtt

SEQ ID NO: 956088 - DNA, 15 bp, Homo sapiens
aaagttttcttgtta

SEQ ID NO: 956089 - DNA, 15 bp, Homo sapiens
aagttttcttgttat

SEQ ID NO: 956090 - DNA, 15 bp, Homo sapiens
agttttcttgttatt

SEQ ID NO: 956091 - DNA, 15 bp, Homo sapiens
gttttcttgttatta

SEQ ID NO: 956092 - DNA, 15 bp, Homo sapiens
ttttcttgttattaa

SEQ ID NO: 956093 - DNA, 15 bp, Homo sapiens
tttcttgttattaaa

SEQ ID NO: 956094 - DNA, 15 bp, Homo sapiens
ttcttgttattaaag

SEQ ID NO: 956095 - DNA, 15 bp, Homo sapiens
tcttgttattaaagc

SEQ ID NO: 956096 - DNA, 15 bp, Homo sapiens
cttgttattaaagct

SEQ ID NO: 956097 - DNA, 15 bp, Homo sapiens
ttgttattaaagcta

SEQ ID NO: 956098 - DNA, 15 bp, Homo sapiens
tgttattaaagctag

SEQ ID NO: 956099 - DNA, 15 bp, Homo sapiens
gttattaaagctagt

SEQ ID NO: 956100 - DNA, 15 bp, Homo sapiens
ttattaaagctagtc

SEQ ID NO: 956101 - DNA, 15 bp, Homo sapiens
tattaaagctagtcc

SEQ ID NO: 956102 - DNA, 15 bp, Homo sapiens
attaaagctagtccg

SEQ ID NO: 956103 - DNA, 15 bp, Homo sapiens
ttaaagctagtccgt

SEQ ID NO: 956104 - DNA, 15 bp, Homo sapiens
taaagctagtccgtt

SEQ ID NO: 956105 - DNA, 15 bp, Homo sapiens
aaagctagtccgttt

SEQ ID NO: 956106 - DNA, 15 bp, Homo sapiens
aagctagtccgttta

SEQ ID NO: 956107 - DNA, 15 bp, Homo sapiens
agctagtccgtttaa

SEQ ID NO: 956108 - DNA, 15 bp, Homo sapiens
gctagtccgtttaac

SEQ ID NO: 956109 - DNA, 15 bp, Homo sapiens
ctagtccgtttaact

SEQ ID NO: 956110 - DNA, 15 bp, Homo sapiens
tagtccgtttaactt

SEQ ID NO: 956111 - DNA, 15 bp, Homo sapiens
agtccgtttaactta

SEQ ID NO: 956112 - DNA, 15 bp, Homo sapiens
gtccgtttaacttac

SEQ ID NO: 956113 - DNA, 15 bp, Homo sapiens
tccgtttaacttaca

SEQ ID NO: 956114 - DNA, 15 bp, Homo sapiens
ccgtttaacttacaa

SEQ ID NO: 956115 - DNA, 15 bp, Homo sapiens
cgtttaacttacaat

SEQ ID NO: 956116 - DNA, 15 bp, Homo sapiens
gtttaacttacaata

SEQ ID NO: 956117 - DNA, 15 bp, Homo sapiens
tttaacttacaataa

SEQ ID NO: 956118 - DNA, 15 bp, Homo sapiens
ttaacttacaataag

SEQ ID NO: 956119 - DNA, 15 bp, Homo sapiens
taacttacaataagc

SEQ ID NO: 956120 - DNA, 15 bp, Homo sapiens
aacttacaataagca

SEQ ID NO: 956121 - DNA, 15 bp, Homo sapiens
acttacaataagcat

SEQ ID NO: 956122 - DNA, 15 bp, Homo sapiens
cttacaataagcata

SEQ ID NO: 956123 - DNA, 15 bp, Homo sapiens
ttacaataagcataa

SEQ ID NO: 956124 - DNA, 15 bp, Homo sapiens
tacaataagcataaa

SEQ ID NO: 956125 - DNA, 15 bp, Homo sapiens
acaataagcataaat

SEQ ID NO: 956126 - DNA, 15 bp, Homo sapiens
caataagcataaata

SEQ ID NO: 956127 - DNA, 15 bp, Homo sapiens
aataagcataaatag

SEQ ID NO: 956128 - DNA, 15 bp, Homo sapiens
ataagcataaatagc

SEQ ID NO: 956129 - DNA, 15 bp, Homo sapiens
taagcataaatagct

SEQ ID NO: 956130 - DNA, 15 bp, Homo sapiens
aagcataaatagcta

SEQ ID NO: 956131 - DNA, 15 bp, Homo sapiens
agcataaatagctaa

SEQ ID NO: 956132 - DNA, 15 bp, Homo sapiens
gcataaatagctaag

SEQ ID NO: 956133 - DNA, 15 bp, Homo sapiens
cataaatagctaagc

SEQ ID NO: 956134 - DNA, 15 bp, Homo sapiens
ataaatagctaagct

SEQ ID NO: 956135 - DNA, 15 bp, Homo sapiens
taaatagctaagctg

SEQ ID NO: 956136 - DNA, 15 bp, Homo sapiens
aaatagctaagctgt

SEQ ID NO: 956137 - DNA, 15 bp, Homo sapiens
aatagctaagctgtg

SEQ ID NO: 956138 - DNA, 15 bp, Homo sapiens
atagctaagctgtga

SEQ ID NO: 956139 - DNA, 15 bp, Homo sapiens
tagctaagctgtgaa

SEQ ID NO: 956140 - DNA, 15 bp, Homo sapiens
agctaagctgtgaaa

SEQ ID NO: 956141 - DNA, 15 bp, Homo sapiens
gctaagctgtgaaag

SEQ ID NO: 956142 - DNA, 15 bp, Homo sapiens
ctaagctgtgaaagt

SEQ ID NO: 956143 - DNA, 15 bp, Homo sapiens
taagctgtgaaagtt

SEQ ID NO: 956144 - DNA, 15 bp, Homo sapiens
aagctgtgaaagtta

SEQ ID NO: 956145 - DNA, 15 bp, Homo sapiens
agctgtgaaagttac

SEQ ID NO: 956146 - DNA, 15 bp, Homo sapiens
gctgtgaaagttacc

SEQ ID NO: 956147 - DNA, 15 bp, Homo sapiens
ctgtgaaagttacct

SEQ ID NO: 956148 - DNA, 15 bp, Homo sapiens
tgtgaaagttacctg

SEQ ID NO: 956149 - DNA, 15 bp, Homo sapiens
gtgaaagttacctgt

SEQ ID NO: 956150 - DNA, 15 bp, Homo sapiens
tgaaagttacctgtg

SEQ ID NO: 956151 - DNA, 15 bp, Homo sapiens
gaaagttacctgtga

SEQ ID NO: 956152 - DNA, 15 bp, Homo sapiens
aaagttacctgtgat

SEQ ID NO: 956153 - DNA, 15 bp, Homo sapiens
aagttacctgtgata

SEQ ID NO: 956154 - DNA, 15 bp, Homo sapiens
agttacctgtgataa

SEQ ID NO: 956155 - DNA, 15 bp, Homo sapiens
gttacctgtgataat

SEQ ID NO: 956156 - DNA, 15 bp, Homo sapiens
ttacctgtgataatg

SEQ ID NO: 956157 - DNA, 15 bp, Homo sapiens
tacctgtgataatgc

SEQ ID NO: 956158 - DNA, 15 bp, Homo sapiens
acctgtgataatgct

SEQ ID NO: 956159 - DNA, 15 bp, Homo sapiens
cctgtgataatgcta

SEQ ID NO: 956160 - DNA, 15 bp, Homo sapiens
ctgtgataatgctaa

SEQ ID NO: 956161 - DNA, 15 bp, Homo sapiens
tgtgataatgctaat

SEQ ID NO: 956162 - DNA, 15 bp, Homo sapiens
gtgataatgctaatt

SEQ ID NO: 956163 - DNA, 15 bp, Homo sapiens
tgataatgctaattt

SEQ ID NO: 956164 - DNA, 15 bp, Homo sapiens
gataatgctaatttt

SEQ ID NO: 956165 - DNA, 15 bp, Homo sapiens
ataatgctaattttc

SEQ ID NO: 956166 - DNA, 15 bp, Homo sapiens
taatgctaattttcc

SEQ ID NO: 956167 - DNA, 15 bp, Homo sapiens
aatgctaattttccc

SEQ ID NO: 956168 - DNA, 15 bp, Homo sapiens
atgctaattttccca

SEQ ID NO: 956169 - DNA, 15 bp, Homo sapiens
tgctaattttcccat

SEQ ID NO: 956170 - DNA, 15 bp, Homo sapiens
gctaattttcccatt

SEQ ID NO: 956171 - DNA, 15 bp, Homo sapiens
ctaattttcccattt

SEQ ID NO: 956172 - DNA, 15 bp, Homo sapiens
taattttcccattta

SEQ ID NO: 956173 - DNA, 15 bp, Homo sapiens
aattttcccatttat

SEQ ID NO: 956174 - DNA, 15 bp, Homo sapiens
attttcccatttatt

SEQ ID NO: 956175 - DNA, 15 bp, Homo sapiens
ttttcccatttatta

SEQ ID NO: 956176 - DNA, 15 bp, Homo sapiens
tttcccatttattaa

SEQ ID NO: 956177 - DNA, 15 bp, Homo sapiens
ttcccatttattaaa

SEQ ID NO: 956178 - DNA, 15 bp, Homo sapiens
tcccatttattaaaa

SEQ ID NO: 956179 - DNA, 15 bp, Homo sapiens
cccatttattaaaag

SEQ ID NO: 956180 - DNA, 15 bp, Homo sapiens
ccatttattaaaagg

SEQ ID NO: 956181 - DNA, 15 bp, Homo sapiens
catttattaaaaggc

SEQ ID NO: 956182 - DNA, 15 bp, Homo sapiens
atttattaaaaggca

SEQ ID NO: 956183 - DNA, 15 bp, Homo sapiens
tttattaaaaggcaa

SEQ ID NO: 956184 - DNA, 15 bp, Homo sapiens
ttattaaaaggcaag

SEQ ID NO: 956185 - DNA, 15 bp, Homo sapiens
tattaaaaggcaagt

SEQ ID NO: 956186 - DNA, 15 bp, Homo sapiens
attaaaaggcaagtt

SEQ ID NO: 956187 - DNA, 15 bp, Homo sapiens
ttaaaaggcaagttg

SEQ ID NO: 956188 - DNA, 15 bp, Homo sapiens
taaaaggcaagttgt

SEQ ID NO: 956189 - DNA, 15 bp, Homo sapiens
aaaaggcaagttgtt

SEQ ID NO: 956190 - DNA, 15 bp, Homo sapiens
aaaggcaagttgttt

SEQ ID NO: 956191 - DNA, 15 bp, Homo sapiens
aaggcaagttgtttt

SEQ ID NO: 956192 - DNA, 15 bp, Homo sapiens
aggcaagttgttttc

SEQ ID NO: 956193 - DNA, 15 bp, Homo sapiens
ggcaagttgttttcc

SEQ ID NO: 956194 - DNA, 15 bp, Homo sapiens
gcaagttgttttccg

SEQ ID NO: 956195 - DNA, 15 bp, Homo sapiens
caagttgttttccga

SEQ ID NO: 956196 - DNA, 15 bp, Homo sapiens
aagttgttttccgat

SEQ ID NO: 956197 - DNA, 15 bp, Homo sapiens
agttgttttccgatc

SEQ ID NO: 956198 - DNA, 15 bp, Homo sapiens
gttgttttccgatca

SEQ ID NO: 956199 - DNA, 15 bp, Homo sapiens
ttgttttccgatcat

SEQ ID NO: 956200 - DNA, 15 bp, Homo sapiens
tgttttccgatcata

SEQ ID NO: 956201 - DNA, 15 bp, Homo sapiens
gttttccgatcataa

SEQ ID NO: 956202 - DNA, 15 bp, Homo sapiens
ttttccgatcataag

SEQ ID NO: 956203 - DNA, 15 bp, Homo sapiens
tttccgatcataaga

SEQ ID NO: 956204 - DNA, 15 bp, Homo sapiens
ttccgatcataagaa

SEQ ID NO: 956205 - DNA, 15 bp, Homo sapiens
tccgatcataagaaa

SEQ ID NO: 956206 - DNA, 15 bp, Homo sapiens
ccgatcataagaaat

SEQ ID NO: 956207 - DNA, 15 bp, Homo sapiens
cgatcataagaaatt

SEQ ID NO: 956208 - DNA, 15 bp, Homo sapiens
gatcataagaaattt

SEQ ID NO: 956209 - DNA, 15 bp, Homo sapiens
atcataagaaattta

SEQ ID NO: 956210 - DNA, 15 bp, Homo sapiens
tcataagaaatttag

SEQ ID NO: 956211 - DNA, 15 bp, Homo sapiens
cataagaaatttaga

SEQ ID NO: 956212 - DNA, 15 bp, Homo sapiens
ataagaaatttagaa

SEQ ID NO: 956213 - DNA, 15 bp, Homo sapiens
taagaaatttagaaa

SEQ ID NO: 956214 - DNA, 15 bp, Homo sapiens
aagaaatttagaaaa

SEQ ID NO: 956215 - DNA, 15 bp, Homo sapiens
agaaatttagaaaag

SEQ ID NO: 956216 - DNA, 15 bp, Homo sapiens
gaaatttagaaaagc

SEQ ID NO: 956217 - DNA, 15 bp, Homo sapiens
aaatttagaaaagcc

SEQ ID NO: 956218 - DNA, 15 bp, Homo sapiens
aatttagaaaagcca

SEQ ID NO: 956219 - DNA, 15 bp, Homo sapiens
atttagaaaagccat

SEQ ID NO: 956220 - DNA, 15 bp, Homo sapiens
tttagaaaagccatc

SEQ ID NO: 956221 - DNA, 15 bp, Homo sapiens
ttagaaaagccatcc

SEQ ID NO: 956222 - DNA, 15 bp, Homo sapiens
tagaaaagccatcca

SEQ ID NO: 956223 - DNA, 15 bp, Homo sapiens
agaaaagccatccaa

SEQ ID NO: 956224 - DNA, 15 bp, Homo sapiens
gaaaagccatccaaa

SEQ ID NO: 956225 - DNA, 15 bp, Homo sapiens
aaaagccatccaaag

SEQ ID NO: 956226 - DNA, 15 bp, Homo sapiens
aaagccatccaaaga

SEQ ID NO: 956227 - DNA, 15 bp, Homo sapiens
aagccatccaaagat

SEQ ID NO: 956228 - DNA, 15 bp, Homo sapiens
agccatccaaagata

SEQ ID NO: 956229 - DNA, 15 bp, Homo sapiens
gccatccaaagataa

SEQ ID NO: 956230 - DNA, 15 bp, Homo sapiens
ccatccaaagataaa

SEQ ID NO: 956231 - DNA, 15 bp, Homo sapiens
catccaaagataaat

SEQ ID NO: 956232 - DNA, 15 bp, Homo sapiens
atccaaagataaatt

SEQ ID NO: 956233 - DNA, 15 bp, Homo sapiens
tccaaagataaattc

SEQ ID NO: 956234 - DNA, 15 bp, Homo sapiens
ccaaagataaattcc

SEQ ID NO: 956235 - DNA, 15 bp, Homo sapiens
caaagataaattccg

SEQ ID NO: 956236 - DNA, 15 bp, Homo sapiens
aaagataaattccga

SEQ ID NO: 956237 - DNA, 15 bp, Homo sapiens
aagataaattccgag

SEQ ID NO: 956238 - DNA, 15 bp, Homo sapiens
agataaattccgagt

SEQ ID NO: 956239 - DNA, 15 bp, Homo sapiens
gataaattccgagtg

SEQ ID NO: 956240 - DNA, 15 bp, Homo sapiens
ataaattccgagtga

SEQ ID NO: 956241 - DNA, 15 bp, Homo sapiens
taaattccgagtgat

SEQ ID NO: 956242 - DNA, 15 bp, Homo sapiens
aaattccgagtgata

SEQ ID NO: 956243 - DNA, 15 bp, Homo sapiens
aattccgagtgatat

SEQ ID NO: 956244 - DNA, 15 bp, Homo sapiens
attccgagtgatata

SEQ ID NO: 956245 - DNA, 15 bp, Homo sapiens
ttccgagtgatatat

SEQ ID NO: 956246 - DNA, 15 bp, Homo sapiens
tccgagtgatatatt

SEQ ID NO: 956247 - DNA, 15 bp, Homo sapiens
ccgagtgatatattc

SEQ ID NO: 956248 - DNA, 15 bp, Homo sapiens
cgagtgatatattcc

SEQ ID NO: 956249 - DNA, 15 bp, Homo sapiens
gagtgatatattcct

SEQ ID NO: 956250 - DNA, 15 bp, Homo sapiens
agtgatatattcctg

SEQ ID NO: 956251 - DNA, 15 bp, Homo sapiens
gtgatatattcctgc

SEQ ID NO: 956252 - DNA, 15 bp, Homo sapiens
tgatatattcctgct

SEQ ID NO: 956253 - DNA, 15 bp, Homo sapiens
gatatattcctgctg

SEQ ID NO: 956254 - DNA, 15 bp, Homo sapiens
atatattcctgctgt

SEQ ID NO: 956255 - DNA, 15 bp, Homo sapiens
tatattcctgctgtt

SEQ ID NO: 956256 - DNA, 15 bp, Homo sapiens
atattcctgctgttt

SEQ ID NO: 956257 - DNA, 15 bp, Homo sapiens
tattcctgctgtttg

SEQ ID NO: 956258 - DNA, 15 bp, Homo sapiens
attcctgctgtttgt

SEQ ID NO: 956259 - DNA, 15 bp, Homo sapiens
ttcctgctgtttgtt

SEQ ID NO: 956260 - DNA, 15 bp, Homo sapiens
tcctgctgtttgtta

SEQ ID NO: 956261 - DNA, 15 bp, Homo sapiens
cctgctgtttgttat

SEQ ID NO: 956262 - DNA, 15 bp, Homo sapiens
ctgctgtttgttatg

SEQ ID NO: 956263 - DNA, 15 bp, Homo sapiens
tgctgtttgttatgt

SEQ ID NO: 956264 - DNA, 15 bp, Homo sapiens
gctgtttgttatgtt

SEQ ID NO: 956265 - DNA, 15 bp, Homo sapiens
ctgtttgttatgttt

SEQ ID NO: 956266 - DNA, 15 bp, Homo sapiens
tgtttgttatgtttt

SEQ ID NO: 956267 - DNA, 15 bp, Homo sapiens
gtttgttatgttttc

SEQ ID NO: 956268 - DNA, 15 bp, Homo sapiens
tttgttatgttttct

SEQ ID NO: 956269 - DNA, 15 bp, Homo sapiens
ttgttatgttttctc

SEQ ID NO: 956270 - DNA, 15 bp, Homo sapiens
tgttatgttttctca

SEQ ID NO: 956271 - DNA, 15 bp, Homo sapiens
gttatgttttctcaa

SEQ ID NO: 956272 - DNA, 15 bp, Homo sapiens
ttatgttttctcaaa

SEQ ID NO: 956273 - DNA, 15 bp, Homo sapiens
tatgttttctcaaat

SEQ ID NO: 956274 - DNA, 15 bp, Homo sapiens
atgttttctcaaatt

SEQ ID NO: 956275 - DNA, 15 bp, Homo sapiens
tgttttctcaaatta

SEQ ID NO: 956276 - DNA, 15 bp, Homo sapiens
gttttctcaaattaa

SEQ ID NO: 956277 - DNA, 15 bp, Homo sapiens
ttttctcaaattaat

SEQ ID NO: 956278 - DNA, 15 bp, Homo sapiens
tttctcaaattaatt

SEQ ID NO: 956279 - DNA, 15 bp, Homo sapiens
ttctcaaattaattg

SEQ ID NO: 956280 - DNA, 15 bp, Homo sapiens
tctcaaattaattga

SEQ ID NO: 956281 - DNA, 15 bp, Homo sapiens
ctcaaattaattgag

SEQ ID NO: 956282 - DNA, 15 bp, Homo sapiens
tcaaattaattgagt

SEQ ID NO: 956283 - DNA, 15 bp, Homo sapiens
caaattaattgagtt

SEQ ID NO: 956284 - DNA, 15 bp, Homo sapiens
aaattaattgagttt

SEQ ID NO: 956285 - DNA, 15 bp, Homo sapiens
aattaattgagtttt

SEQ ID NO: 956286 - DNA, 15 bp, Homo sapiens
attaattgagtttta

SEQ ID NO: 956287 - DNA, 15 bp, Homo sapiens
ttaattgagttttat

SEQ ID NO: 956288 - DNA, 15 bp, Homo sapiens
taattgagttttatt

SEQ ID NO: 956289 - DNA, 15 bp, Homo sapiens
aattgagttttattt

SEQ ID NO: 956290 - DNA, 15 bp, Homo sapiens
attgagttttatttt

SEQ ID NO: 956291 - DNA, 15 bp, Homo sapiens
ttgagttttatttta

SEQ ID NO: 956292 - DNA, 15 bp, Homo sapiens
tgagttttattttac

SEQ ID NO: 956293 - DNA, 15 bp, Homo sapiens
gagttttattttaca

SEQ ID NO: 956294 - DNA, 15 bp, Homo sapiens
agttttattttacaa

SEQ ID NO: 956295 - DNA, 15 bp, Homo sapiens
gttttattttacaat

SEQ ID NO: 956296 - DNA, 15 bp, Homo sapiens
ttttattttacaatg

SEQ ID NO: 956297 - DNA, 15 bp, Homo sapiens
tttattttacaatga

SEQ ID NO: 956298 - DNA, 15 bp, Homo sapiens
ttattttacaatgac

SEQ ID NO: 956299 - DNA, 15 bp, Homo sapiens
tattttacaatgaca

SEQ ID NO: 956300 - DNA, 15 bp, Homo sapiens
attttacaatgacag

SEQ ID NO: 956301 - DNA, 15 bp, Homo sapiens
ttttacaatgacagg

SEQ ID NO: 956302 - DNA, 15 bp, Homo sapiens
tttacaatgacagga

SEQ ID NO: 956303 - DNA, 15 bp, Homo sapiens
ttacaatgacaggag

SEQ ID NO: 956304 - DNA, 15 bp, Homo sapiens
tacaatgacaggagt

SEQ ID NO: 956305 - DNA, 15 bp, Homo sapiens
acaatgacaggagtt

SEQ ID NO: 956306 - DNA, 15 bp, Homo sapiens
caatgacaggagtta

SEQ ID NO: 956307 - DNA, 15 bp, Homo sapiens
aatgacaggagttat

SEQ ID NO: 956308 - DNA, 15 bp, Homo sapiens
atgacaggagttatt

SEQ ID NO: 956309 - DNA, 15 bp, Homo sapiens
tgacaggagttatta

SEQ ID NO: 956310 - DNA, 15 bp, Homo sapiens
gacaggagttattaa

SEQ ID NO: 956311 - DNA, 15 bp, Homo sapiens
acaggagttattaaa

SEQ ID NO: 956312 - DNA, 15 bp, Homo sapiens
caggagttattaaag

SEQ ID NO: 956313 - DNA, 15 bp, Homo sapiens
aggagttattaaagt

SEQ ID NO: 956314 - DNA, 15 bp, Homo sapiens
ggagttattaaagta

SEQ ID NO: 956315 - DNA, 15 bp, Homo sapiens
gagttattaaagtat

SEQ ID NO: 956316 - DNA, 15 bp, Homo sapiens
agttattaaagtatt

SEQ ID NO: 956317 - DNA, 15 bp, Homo sapiens
gttattaaagtattt

SEQ ID NO: 956318 - DNA, 15 bp, Homo sapiens
ttattaaagtatttt

SEQ ID NO: 956319 - DNA, 15 bp, Homo sapiens
tattaaagtatttta

SEQ ID NO: 956320 - DNA, 15 bp, Homo sapiens
attaaagtattttat

SEQ ID NO: 956321 - DNA, 15 bp, Homo sapiens
ttaaagtattttatt

SEQ ID NO: 956322 - DNA, 15 bp, Homo sapiens
taaagtattttattt

SEQ ID NO: 956323 - DNA, 15 bp, Homo sapiens
aaagtattttatttt

SEQ ID NO: 956324 - DNA, 15 bp, Homo sapiens
aagtattttattttt

SEQ ID NO: 956325 - DNA, 15 bp, Homo sapiens
agtattttattttta

SEQ ID NO: 956326 - DNA, 15 bp, Homo sapiens
gtattttatttttat

SEQ ID NO: 956327 - DNA, 15 bp, Homo sapiens
tattttatttttatt

SEQ ID NO: 956328 - DNA, 15 bp, Homo sapiens
attttatttttatta

SEQ ID NO: 956329 - DNA, 15 bp, Homo sapiens
ttttatttttattat

SEQ ID NO: 956330 - DNA, 15 bp, Homo sapiens
tttatttttattatg

SEQ ID NO: 956331 - DNA, 15 bp, Homo sapiens
ttatttttattatga

SEQ ID NO: 956332 - DNA, 15 bp, Homo sapiens
tatttttattatgat

SEQ ID NO: 956333 - DNA, 15 bp, Homo sapiens
atttttattatgatt

SEQ ID NO: 956334 - DNA, 15 bp, Homo sapiens
tttttattatgatta

SEQ ID NO: 956335 - DNA, 15 bp, Homo sapiens
ttttattatgattaa

SEQ ID NO: 956336 - DNA, 15 bp, Homo sapiens
tttattatgattaag

SEQ ID NO: 956337 - DNA, 15 bp, Homo sapiens
ttattatgattaaga

SEQ ID NO: 956338 - DNA, 15 bp, Homo sapiens
tattatgattaagat

SEQ ID NO: 956339 - DNA, 15 bp, Homo sapiens
attatgattaagatt

SEQ ID NO: 956340 - DNA, 15 bp, Homo sapiens
ttatgattaagattt

SEQ ID NO: 956341 - DNA, 15 bp, Homo sapiens
tatgattaagatttt

SEQ ID NO: 956342 - DNA, 15 bp, Homo sapiens
atgattaagattttc

SEQ ID NO: 956343 - DNA, 15 bp, Homo sapiens
tgattaagattttca

SEQ ID NO: 956344 - DNA, 15 bp, Homo sapiens
gattaagattttcaa

SEQ ID NO: 956345 - DNA, 15 bp, Homo sapiens
attaagattttcaaa

SEQ ID NO: 956346 - DNA, 15 bp, Homo sapiens
ttaagattttcaaag

SEQ ID NO: 956347 - DNA, 15 bp, Homo sapiens
taagattttcaaagt

SEQ ID NO: 956348 - DNA, 15 bp, Homo sapiens
aagattttcaaagta

SEQ ID NO: 956349 - DNA, 15 bp, Homo sapiens
agattttcaaagtaa

SEQ ID NO: 956350 - DNA, 15 bp, Homo sapiens
gattttcaaagtaac

SEQ ID NO: 956351 - DNA, 15 bp, Homo sapiens
attttcaaagtaaca

SEQ ID NO: 956352 - DNA, 15 bp, Homo sapiens
ttttcaaagtaacat

SEQ ID NO: 956353 - DNA, 15 bp, Homo sapiens
tttcaaagtaacatt

SEQ ID NO: 956354 - DNA, 15 bp, Homo sapiens
ttcaaagtaacattt

SEQ ID NO: 956355 - DNA, 15 bp, Homo sapiens
tcaaagtaacatttc

SEQ ID NO: 956356 - DNA, 15 bp, Homo sapiens
caaagtaacatttct

SEQ ID NO: 956357 - DNA, 15 bp, Homo sapiens
aaagtaacatttctt

SEQ ID NO: 956358 - DNA, 15 bp, Homo sapiens
aagtaacatttctta

SEQ ID NO: 956359 - DNA, 15 bp, Homo sapiens
agtaacatttcttat

SEQ ID NO: 956360 - DNA, 15 bp, Homo sapiens
gtaacatttcttata

SEQ ID NO: 956361 - DNA, 15 bp, Homo sapiens
taacatttcttatat

SEQ ID NO: 956362 - DNA, 15 bp, Homo sapiens
aacatttcttatatg

SEQ ID NO: 956363 - DNA, 15 bp, Homo sapiens
acatttcttatatga

SEQ ID NO: 956364 - DNA, 15 bp, Homo sapiens
catttcttatatgaa

SEQ ID NO: 956365 - DNA, 15 bp, Homo sapiens
atttcttatatgaaa

SEQ ID NO: 956366 - DNA, 15 bp, Homo sapiens
tttcttatatgaaag

SEQ ID NO: 956367 - DNA, 15 bp, Homo sapiens
ttcttatatgaaaga

SEQ ID NO: 956368 - DNA, 15 bp, Homo sapiens
tcttatatgaaagaa

SEQ ID NO: 956369 - DNA, 15 bp, Homo sapiens
cttatatgaaagaaa

SEQ ID NO: 956370 - DNA, 15 bp, Homo sapiens
ttatatgaaagaaat

SEQ ID NO: 956371 - DNA, 15 bp, Homo sapiens
tatatgaaagaaatt

SEQ ID NO: 956372 - DNA, 15 bp, Homo sapiens
atatgaaagaaatta

SEQ ID NO: 956373 - DNA, 15 bp, Homo sapiens
tatgaaagaaattat

SEQ ID NO: 956374 - DNA, 15 bp, Homo sapiens
atgaaagaaattatg

SEQ ID NO: 956375 - DNA, 15 bp, Homo sapiens
tgaaagaaattatgt

SEQ ID NO: 956376 - DNA, 15 bp, Homo sapiens
gaaagaaattatgtt

SEQ ID NO: 956377 - DNA, 15 bp, Homo sapiens
aaagaaattatgtta

SEQ ID NO: 956378 - DNA, 15 bp, Homo sapiens
aagaaattatgttaa

SEQ ID NO: 956379 - DNA, 15 bp, Homo sapiens
agaaattatgttaat

SEQ ID NO: 956380 - DNA, 15 bp, Homo sapiens
gaaattatgttaatg

SEQ ID NO: 956381 - DNA, 15 bp, Homo sapiens
aaattatgttaatgc

SEQ ID NO: 956382 - DNA, 15 bp, Homo sapiens
aattatgttaatgca

SEQ ID NO: 956383 - DNA, 15 bp, Homo sapiens
attatgttaatgcat

SEQ ID NO: 956384 - DNA, 15 bp, Homo sapiens
ttatgttaatgcatg

SEQ ID NO: 956385 - DNA, 15 bp, Homo sapiens
tatgttaatgcatgt

SEQ ID NO: 956386 - DNA, 15 bp, Homo sapiens
atgttaatgcatgtt

SEQ ID NO: 956387 - DNA, 15 bp, Homo sapiens
tgttaatgcatgttt

SEQ ID NO: 956388 - DNA, 15 bp, Homo sapiens
gttaatgcatgtttt

SEQ ID NO: 956389 - DNA, 15 bp, Homo sapiens
ttaatgcatgttttt

SEQ ID NO: 956390 - DNA, 15 bp, Homo sapiens
taatgcatgtttttc

SEQ ID NO: 956391 - DNA, 15 bp, Homo sapiens
aatgcatgtttttct

SEQ ID NO: 956392 - DNA, 15 bp, Homo sapiens
atgcatgtttttctt

SEQ ID NO: 956393 - DNA, 15 bp, Homo sapiens
tgcatgtttttctta

SEQ ID NO: 956394 - DNA, 15 bp, Homo sapiens
gcatgtttttcttac

SEQ ID NO: 956395 - DNA, 15 bp, Homo sapiens
catgtttttcttaca

SEQ ID NO: 956396 - DNA, 15 bp, Homo sapiens
atgtttttcttacat

SEQ ID NO: 956397 - DNA, 15 bp, Homo sapiens
tgtttttcttacatg

SEQ ID NO: 956398 - DNA, 15 bp, Homo sapiens
gtttttcttacatgg

SEQ ID NO: 956399 - DNA, 15 bp, Homo sapiens
tttttcttacatggg

SEQ ID NO: 956400 - DNA, 15 bp, Homo sapiens
ttttcttacatggga

SEQ ID NO: 956401 - DNA, 15 bp, Homo sapiens
tttcttacatgggaa

SEQ ID NO: 956402 - DNA, 15 bp, Homo sapiens
ttcttacatgggaaa

SEQ ID NO: 956403 - DNA, 15 bp, Homo sapiens
tcttacatgggaaat

SEQ ID NO: 956404 - DNA, 15 bp, Homo sapiens
cttacatgggaaatc

SEQ ID NO: 956405 - DNA, 15 bp, Homo sapiens
ttacatgggaaatca

SEQ ID NO: 956406 - DNA, 15 bp, Homo sapiens
tacatgggaaatcat

SEQ ID NO: 956407 - DNA, 15 bp, Homo sapiens
acatgggaaatcata

SEQ ID NO: 956408 - DNA, 15 bp, Homo sapiens
catgggaaatcatat

SEQ ID NO: 956409 - DNA, 15 bp, Homo sapiens
atgggaaatcatata

SEQ ID NO: 956410 - DNA, 15 bp, Homo sapiens
tgggaaatcatatat

SEQ ID NO: 956411 - DNA, 15 bp, Homo sapiens
gggaaatcatatatt

SEQ ID NO: 956412 - DNA, 15 bp, Homo sapiens
ggaaatcatatattt

SEQ ID NO: 956413 - DNA, 15 bp, Homo sapiens
gaaatcatatatttt

SEQ ID NO: 956414 - DNA, 15 bp, Homo sapiens
aaatcatatatttta

SEQ ID NO: 956415 - DNA, 15 bp, Homo sapiens
aatcatatattttaa

SEQ ID NO: 956416 - DNA, 15 bp, Homo sapiens
atcatatattttaaa

SEQ ID NO: 956417 - DNA, 15 bp, Homo sapiens
tcatatattttaaaa

SEQ ID NO: 956418 - DNA, 15 bp, Homo sapiens
catatattttaaaaa

SEQ ID NO: 956419 - DNA, 15 bp, Homo sapiens
atatattttaaaaat

SEQ ID NO: 956420 - DNA, 15 bp, Homo sapiens
tatattttaaaaatg

SEQ ID NO: 956421 - DNA, 15 bp, Homo sapiens
atattttaaaaatga

SEQ ID NO: 956422 - DNA, 15 bp, Homo sapiens
tattttaaaaatgat

SEQ ID NO: 956423 - DNA, 15 bp, Homo sapiens
attttaaaaatgatt

SEQ ID NO: 956424 - DNA, 15 bp, Homo sapiens
ttttaaaaatgattt

SEQ ID NO: 956425 - DNA, 15 bp, Homo sapiens
tttaaaaatgatttt

SEQ ID NO: 956426 - DNA, 15 bp, Homo sapiens
ttaaaaatgatttta

SEQ ID NO: 956427 - DNA, 15 bp, Homo sapiens
taaaaatgattttaa

SEQ ID NO: 956428 - DNA, 15 bp, Homo sapiens
aaaaatgattttaaa

SEQ ID NO: 956429 - DNA, 15 bp, Homo sapiens
aaaatgattttaaaa

SEQ ID NO: 956430 - DNA, 15 bp, Homo sapiens
aaatgattttaaaat

SEQ ID NO: 956431 - DNA, 15 bp, Homo sapiens
aatgattttaaaatt

SEQ ID NO: 956432 - DNA, 15 bp, Homo sapiens
atgattttaaaattc

SEQ ID NO: 956433 - DNA, 15 bp, Homo sapiens
tgattttaaaattcg

SEQ ID NO: 956434 - DNA, 15 bp, Homo sapiens
gattttaaaattcgt

SEQ ID NO: 956435 - DNA, 15 bp, Homo sapiens
attttaaaattcgtt

SEQ ID NO: 956436 - DNA, 15 bp, Homo sapiens
ttttaaaattcgttt

SEQ ID NO: 956437 - DNA, 15 bp, Homo sapiens
tttaaaattcgtttt

SEQ ID NO: 956438 - DNA, 15 bp, Homo sapiens
ttaaaattcgtttta

SEQ ID NO: 956439 - DNA, 15 bp, Homo sapiens
taaaattcgttttac

SEQ ID NO: 956440 - DNA, 15 bp, Homo sapiens
aaaattcgttttact

SEQ ID NO: 956441 - DNA, 15 bp, Homo sapiens
aaattcgttttactt

SEQ ID NO: 956442 - DNA, 15 bp, Homo sapiens
aattcgttttacttt

SEQ ID NO: 956443 - DNA, 15 bp, Homo sapiens
attcgttttacttta

SEQ ID NO: 956444 - DNA, 15 bp, Homo sapiens
ttcgttttactttaa

SEQ ID NO: 956445 - DNA, 15 bp, Homo sapiens
tcgttttactttaag

SEQ ID NO: 956446 - DNA, 15 bp, Homo sapiens
cgttttactttaagt

SEQ ID NO: 956447 - DNA, 15 bp, Homo sapiens
gttttactttaagtt

SEQ ID NO: 956448 - DNA, 15 bp, Homo sapiens
ttttactttaagttg

SEQ ID NO: 956449 - DNA, 15 bp, Homo sapiens
tttactttaagttgt

SEQ ID NO: 956450 - DNA, 15 bp, Homo sapiens
ttactttaagttgta

SEQ ID NO: 956451 - DNA, 15 bp, Homo sapiens
tactttaagttgtat

SEQ ID NO: 956452 - DNA, 15 bp, Homo sapiens
actttaagttgtatt

SEQ ID NO: 956453 - DNA, 15 bp, Homo sapiens
ctttaagttgtatta

SEQ ID NO: 956454 - DNA, 15 bp, Homo sapiens
tttaagttgtattat

SEQ ID NO: 956455 - DNA, 15 bp, Homo sapiens
ttaagttgtattatc

SEQ ID NO: 956456 - DNA, 15 bp, Homo sapiens
taagttgtattatct

SEQ ID NO: 956457 - DNA, 15 bp, Homo sapiens
aagttgtattatctt

SEQ ID NO: 956458 - DNA, 15 bp, Homo sapiens
agttgtattatcttt

SEQ ID NO: 956459 - DNA, 15 bp, Homo sapiens
gttgtattatctttc

SEQ ID NO: 956460 - DNA, 15 bp, Homo sapiens
ttgtattatctttct

SEQ ID NO: 956461 - DNA, 15 bp, Homo sapiens
tgtattatctttctc

SEQ ID NO: 956462 - DNA, 15 bp, Homo sapiens
gtattatctttctca

SEQ ID NO: 956463 - DNA, 15 bp, Homo sapiens
tattatctttctcaa

SEQ ID NO: 956464 - DNA, 15 bp, Homo sapiens
attatctttctcaaa

SEQ ID NO: 956465 - DNA, 15 bp, Homo sapiens
ttatctttctcaaaa

SEQ ID NO: 956466 - DNA, 15 bp, Homo sapiens
tatctttctcaaaag

SEQ ID NO: 956467 - DNA, 15 bp, Homo sapiens
atctttctcaaaagt

SEQ ID NO: 956468 - DNA, 15 bp, Homo sapiens
tctttctcaaaagtg

SEQ ID NO: 956469 - DNA, 15 bp, Homo sapiens
ctttctcaaaagtgg

SEQ ID NO: 956470 - DNA, 15 bp, Homo sapiens
tttctcaaaagtggc

SEQ ID NO: 956471 - DNA, 15 bp, Homo sapiens
ttctcaaaagtggct

SEQ ID NO: 956472 - DNA, 15 bp, Homo sapiens
tctcaaaagtggcta

SEQ ID NO: 956473 - DNA, 15 bp, Homo sapiens
ctcaaaagtggctag

SEQ ID NO: 956474 - DNA, 15 bp, Homo sapiens
tcaaaagtggctagt

SEQ ID NO: 956475 - DNA, 15 bp, Homo sapiens
caaaagtggctagtg

SEQ ID NO: 956476 - DNA, 15 bp, Homo sapiens
aaaagtggctagtgc

SEQ ID NO: 956477 - DNA, 15 bp, Homo sapiens
aaagtggctagtgct

SEQ ID NO: 956478 - DNA, 15 bp, Homo sapiens
aagtggctagtgctt

SEQ ID NO: 956479 - DNA, 15 bp, Homo sapiens
agtggctagtgcttg

SEQ ID NO: 956480 - DNA, 15 bp, Homo sapiens
gtggctagtgcttga

SEQ ID NO: 956481 - DNA, 15 bp, Homo sapiens
tggctagtgcttgac

SEQ ID NO: 956482 - DNA, 15 bp, Homo sapiens
ggctagtgcttgacc

SEQ ID NO: 956483 - DNA, 15 bp, Homo sapiens
gctagtgcttgacca

SEQ ID NO: 956484 - DNA, 15 bp, Homo sapiens
ctagtgcttgaccag

SEQ ID NO: 956485 - DNA, 15 bp, Homo sapiens
tagtgcttgaccaga

SEQ ID NO: 956486 - DNA, 15 bp, Homo sapiens
agtgcttgaccagaa

SEQ ID NO: 956487 - DNA, 15 bp, Homo sapiens
gtgcttgaccagaaa

SEQ ID NO: 956488 - DNA, 15 bp, Homo sapiens
tgcttgaccagaaaa

SEQ ID NO: 956489 - DNA, 15 bp, Homo sapiens
gcttgaccagaaaaa

SEQ ID NO: 956490 - DNA, 15 bp, Homo sapiens
cttgaccagaaaaaa

SEQ ID NO: 956491 - DNA, 15 bp, Homo sapiens
ttgaccagaaaaaaa

SEQ ID NO: 956492 - DNA, 15 bp, Homo sapiens
tgaccagaaaaaaag

SEQ ID NO: 956493 - DNA, 15 bp, Homo sapiens
gaccagaaaaaaaga

SEQ ID NO: 956494 - DNA, 15 bp, Homo sapiens
accagaaaaaaagac

SEQ ID NO: 956495 - DNA, 15 bp, Homo sapiens
ccagaaaaaaagaca

SEQ ID NO: 956496 - DNA, 15 bp, Homo sapiens
cagaaaaaaagacac

SEQ ID NO: 956497 - DNA, 15 bp, Homo sapiens
agaaaaaaagacacc

SEQ ID NO: 956498 - DNA, 15 bp, Homo sapiens
gaaaaaaagacacca

SEQ ID NO: 956499 - DNA, 15 bp, Homo sapiens
aaaaaaagacaccag

SEQ ID NO: 956500 - DNA, 15 bp, Homo sapiens
aaaaaagacaccagc

SEQ ID NO: 956501 - DNA, 15 bp, Homo sapiens
aaaaagacaccagca

SEQ ID NO: 956502 - DNA, 15 bp, Homo sapiens
aaaagacaccagcat

SEQ ID NO: 956503 - DNA, 15 bp, Homo sapiens
aaagacaccagcata

SEQ ID NO: 956504 - DNA, 15 bp, Homo sapiens
aagacaccagcataa

SEQ ID NO: 956505 - DNA, 15 bp, Homo sapiens
agacaccagcataac

SEQ ID NO: 956506 - DNA, 15 bp, Homo sapiens
gacaccagcataact

SEQ ID NO: 956507 - DNA, 15 bp, Homo sapiens
acaccagcataactc

SEQ ID NO: 956508 - DNA, 15 bp, Homo sapiens
caccagcataactca

SEQ ID NO: 956509 - DNA, 15 bp, Homo sapiens
accagcataactcag

SEQ ID NO: 956510 - DNA, 15 bp, Homo sapiens
ccagcataactcagt

SEQ ID NO: 956511 - DNA, 15 bp, Homo sapiens
cagcataactcagtg

SEQ ID NO: 956512 - DNA, 15 bp, Homo sapiens
agcataactcagtgt

SEQ ID NO: 956513 - DNA, 15 bp, Homo sapiens
gcataactcagtgta

SEQ ID NO: 956514 - DNA, 15 bp, Homo sapiens
cataactcagtgtat

SEQ ID NO: 956515 - DNA, 15 bp, Homo sapiens
ataactcagtgtatc

SEQ ID NO: 956516 - DNA, 15 bp, Homo sapiens
taactcagtgtatct

SEQ ID NO: 956517 - DNA, 15 bp, Homo sapiens
aactcagtgtatctt

SEQ ID NO: 956518 - DNA, 15 bp, Homo sapiens
actcagtgtatcttt

SEQ ID NO: 956519 - DNA, 15 bp, Homo sapiens
ctcagtgtatcttta

SEQ ID NO: 956520 - DNA, 15 bp, Homo sapiens
tcagtgtatctttat

SEQ ID NO: 956521 - DNA, 15 bp, Homo sapiens
cagtgtatctttatt

SEQ ID NO: 956522 - DNA, 15 bp, Homo sapiens
agtgtatctttattt

SEQ ID NO: 956523 - DNA, 15 bp, Homo sapiens
gtgtatctttattta

SEQ ID NO: 956524 - DNA, 15 bp, Homo sapiens
tgtatctttatttac

SEQ ID NO: 956525 - DNA, 15 bp, Homo sapiens
gtatctttatttaca

SEQ ID NO: 956526 - DNA, 15 bp, Homo sapiens
tatctttatttacat

SEQ ID NO: 956527 - DNA, 15 bp, Homo sapiens
atctttatttacata

SEQ ID NO: 956528 - DNA, 15 bp, Homo sapiens
tctttatttacatag

SEQ ID NO: 956529 - DNA, 15 bp, Homo sapiens
ctttatttacatagg

SEQ ID NO: 956530 - DNA, 15 bp, Homo sapiens
tttatttacatagga

SEQ ID NO: 956531 - DNA, 15 bp, Homo sapiens
ttatttacataggaa

SEQ ID NO: 956532 - DNA, 15 bp, Homo sapiens
tatttacataggaaa

SEQ ID NO: 956533 - DNA, 15 bp, Homo sapiens
atttacataggaaat

SEQ ID NO: 956534 - DNA, 15 bp, Homo sapiens
tttacataggaaatg

SEQ ID NO: 956535 - DNA, 15 bp, Homo sapiens
ttacataggaaatgg

SEQ ID NO: 956536 - DNA, 15 bp, Homo sapiens
tacataggaaatggc

SEQ ID NO: 956537 - DNA, 15 bp, Homo sapiens
acataggaaatggcc

SEQ ID NO: 956538 - DNA, 15 bp, Homo sapiens
cataggaaatggcca

SEQ ID NO: 956539 - DNA, 15 bp, Homo sapiens
ataggaaatggccat

SEQ ID NO: 956540 - DNA, 15 bp, Homo sapiens
taggaaatggccatt

SEQ ID NO: 956541 - DNA, 15 bp, Homo sapiens
aggaaatggccattt

SEQ ID NO: 956542 - DNA, 15 bp, Homo sapiens
ggaaatggccatttt

SEQ ID NO: 956543 - DNA, 15 bp, Homo sapiens
gaaatggccattttc

SEQ ID NO: 956544 - DNA, 15 bp, Homo sapiens
aaatggccattttca

SEQ ID NO: 956545 - DNA, 15 bp, Homo sapiens
aatggccattttcaa

SEQ ID NO: 956546 - DNA, 15 bp, Homo sapiens
atggccattttcaag

SEQ ID NO: 956547 - DNA, 15 bp, Homo sapiens
tggccattttcaaga

SEQ ID NO: 956548 - DNA, 15 bp, Homo sapiens
ggccattttcaagat

SEQ ID NO: 956549 - DNA, 15 bp, Homo sapiens
gccattttcaagatt

SEQ ID NO: 956550 - DNA, 15 bp, Homo sapiens
ccattttcaagattg

SEQ ID NO: 956551 - DNA, 15 bp, Homo sapiens
cattttcaagattgc

SEQ ID NO: 956552 - DNA, 15 bp, Homo sapiens
attttcaagattgca

SEQ ID NO: 956553 - DNA, 15 bp, Homo sapiens
ttttcaagattgcag

SEQ ID NO: 956554 - DNA, 15 bp, Homo sapiens
tttcaagattgcagc

SEQ ID NO: 956555 - DNA, 15 bp, Homo sapiens
ttcaagattgcagct

SEQ ID NO: 956556 - DNA, 15 bp, Homo sapiens
tcaagattgcagctc

SEQ ID NO: 956557 - DNA, 15 bp, Homo sapiens
caagattgcagctct

SEQ ID NO: 956558 - DNA, 15 bp, Homo sapiens
aagattgcagctctc

SEQ ID NO: 956559 - DNA, 15 bp, Homo sapiens
agattgcagctctcc

SEQ ID NO: 956560 - DNA, 15 bp, Homo sapiens
gattgcagctctcca

SEQ ID NO: 956561 - DNA, 15 bp, Homo sapiens
attgcagctctccaa

SEQ ID NO: 956562 - DNA, 15 bp, Homo sapiens
ttgcagctctccaaa

SEQ ID NO: 956563 - DNA, 15 bp, Homo sapiens
tgcagctctccaaaa

SEQ ID NO: 956564 - DNA, 15 bp, Homo sapiens
gcagctctccaaaaa

SEQ ID NO: 956565 - DNA, 15 bp, Homo sapiens
cagctctccaaaaag

SEQ ID NO: 956566 - DNA, 15 bp, Homo sapiens
agctctccaaaaagt

SEQ ID NO: 956567 - DNA, 15 bp, Homo sapiens
gctctccaaaaagtt

SEQ ID NO: 956568 - DNA, 15 bp, Homo sapiens
ctctccaaaaagttg

SEQ ID NO: 956569 - DNA, 15 bp, Homo sapiens
tctccaaaaagttgt

SEQ ID NO: 956570 - DNA, 15 bp, Homo sapiens
ctccaaaaagttgta

SEQ ID NO: 956571 - DNA, 15 bp, Homo sapiens
tccaaaaagttgtag

SEQ ID NO: 956572 - DNA, 15 bp, Homo sapiens
ccaaaaagttgtaga

SEQ ID NO: 956573 - DNA, 15 bp, Homo sapiens
caaaaagttgtagat

SEQ ID NO: 956574 - DNA, 15 bp, Homo sapiens
aaaaagttgtagata

SEQ ID NO: 956575 - DNA, 15 bp, Homo sapiens
aaaagttgtagataa

SEQ ID NO: 956576 - DNA, 15 bp, Homo sapiens
aaagttgtagataat

SEQ ID NO: 956577 - DNA, 15 bp, Homo sapiens
aagttgtagataata

SEQ ID NO: 956578 - DNA, 15 bp, Homo sapiens
agttgtagataatag

SEQ ID NO: 956579 - DNA, 15 bp, Homo sapiens
gttgtagataatagt

SEQ ID NO: 956580 - DNA, 15 bp, Homo sapiens
ttgtagataatagtg

SEQ ID NO: 956581 - DNA, 15 bp, Homo sapiens
tgtagataatagtgt

SEQ ID NO: 956582 - DNA, 15 bp, Homo sapiens
gtagataatagtgtt

SEQ ID NO: 956583 - DNA, 15 bp, Homo sapiens
tagataatagtgttt

SEQ ID NO: 956584 - DNA, 15 bp, Homo sapiens
agataatagtgtttc

SEQ ID NO: 956585 - DNA, 15 bp, Homo sapiens
gataatagtgtttct

SEQ ID NO: 956586 - DNA, 15 bp, Homo sapiens
ataatagtgtttctt

SEQ ID NO: 956587 - DNA, 15 bp, Homo sapiens
taatagtgtttcttt

SEQ ID NO: 956588 - DNA, 15 bp, Homo sapiens
aatagtgtttctttg

SEQ ID NO: 956589 - DNA, 15 bp, Homo sapiens
atagtgtttctttgt

SEQ ID NO: 956590 - DNA, 15 bp, Homo sapiens
tagtgtttctttgtc

SEQ ID NO: 956591 - DNA, 15 bp, Homo sapiens
agtgtttctttgtct

SEQ ID NO: 956592 - DNA, 15 bp, Homo sapiens
gtgtttctttgtctg

SEQ ID NO: 956593 - DNA, 15 bp, Homo sapiens
tgtttctttgtctga

SEQ ID NO: 956594 - DNA, 15 bp, Homo sapiens
gtttctttgtctgaa

SEQ ID NO: 956595 - DNA, 15 bp, Homo sapiens
tttctttgtctgaac

SEQ ID NO: 956596 - DNA, 15 bp, Homo sapiens
ttctttgtctgaact

SEQ ID NO: 956597 - DNA, 15 bp, Homo sapiens
tctttgtctgaacta

SEQ ID NO: 956598 - DNA, 15 bp, Homo sapiens
ctttgtctgaactag

SEQ ID NO: 956599 - DNA, 15 bp, Homo sapiens
tttgtctgaactaga

SEQ ID NO: 956600 - DNA, 15 bp, Homo sapiens
ttgtctgaactagaa

SEQ ID NO: 956601 - DNA, 15 bp, Homo sapiens
tgtctgaactagaac

SEQ ID NO: 956602 - DNA, 15 bp, Homo sapiens
gtctgaactagaact

SEQ ID NO: 956603 - DNA, 15 bp, Homo sapiens
tctgaactagaactg

SEQ ID NO: 956604 - DNA, 15 bp, Homo sapiens
ctgaactagaactgg

SEQ ID NO: 956605 - DNA, 15 bp, Homo sapiens
tgaactagaactggc

SEQ ID NO: 956606 - DNA, 15 bp, Homo sapiens
gaactagaactggct

SEQ ID NO: 956607 - DNA, 15 bp, Homo sapiens
aactagaactggcta

SEQ ID NO: 956608 - DNA, 15 bp, Homo sapiens
actagaactggctaa

SEQ ID NO: 956609 - DNA, 15 bp, Homo sapiens
ctagaactggctaat

SEQ ID NO: 956610 - DNA, 15 bp, Homo sapiens
tagaactggctaata

SEQ ID NO: 956611 - DNA, 15 bp, Homo sapiens
agaactggctaataa

SEQ ID NO: 956612 - DNA, 15 bp, Homo sapiens
gaactggctaataaa

SEQ ID NO: 956613 - DNA, 15 bp, Homo sapiens
aactggctaataaac

SEQ ID NO: 956614 - DNA, 15 bp, Homo sapiens
actggctaataaaca

SEQ ID NO: 956615 - DNA, 15 bp, Homo sapiens
ctggctaataaacag

SEQ ID NO: 956616 - DNA, 15 bp, Homo sapiens
tggctaataaacagt

SEQ ID NO: 956617 - DNA, 15 bp, Homo sapiens
ggctaataaacagta

SEQ ID NO: 956618 - DNA, 15 bp, Homo sapiens
gctaataaacagtac

SEQ ID NO: 956619 - DNA, 15 bp, Homo sapiens
ctaataaacagtaca

SEQ ID NO: 956620 - DNA, 15 bp, Homo sapiens
taataaacagtacaa

SEQ ID NO: 956621 - DNA, 15 bp, Homo sapiens
aataaacagtacaat

SEQ ID NO: 956622 - DNA, 15 bp, Homo sapiens
ataaacagtacaatg

SEQ ID NO: 956623 - DNA, 15 bp, Homo sapiens
taaacagtacaatga

SEQ ID NO: 956624 - DNA, 15 bp, Homo sapiens
aaacagtacaatgaa

SEQ ID NO: 956625 - DNA, 15 bp, Homo sapiens
aacagtacaatgaac

SEQ ID NO: 956626 - DNA, 15 bp, Homo sapiens
acagtacaatgaact

SEQ ID NO: 956627 - DNA, 15 bp, Homo sapiens
cagtacaatgaactg

SEQ ID NO: 956628 - DNA, 15 bp, Homo sapiens
agtacaatgaactga

SEQ ID NO: 956629 - DNA, 15 bp, Homo sapiens
gtacaatgaactgac

SEQ ID NO: 956630 - DNA, 15 bp, Homo sapiens
tacaatgaactgact

SEQ ID NO: 956631 - DNA, 15 bp, Homo sapiens
acaatgaactgactg

SEQ ID NO: 956632 - DNA, 15 bp, Homo sapiens
caatgaactgactgc

SEQ ID NO: 956633 - DNA, 15 bp, Homo sapiens
aatgaactgactgct

SEQ ID NO: 956634 - DNA, 15 bp, Homo sapiens
atgaactgactgcta

SEQ ID NO: 956635 - DNA, 15 bp, Homo sapiens
tgaactgactgctaa

SEQ ID NO: 956636 - DNA, 15 bp, Homo sapiens
gaactgactgctaag

SEQ ID NO: 956637 - DNA, 15 bp, Homo sapiens
aactgactgctaagt

SEQ ID NO: 956638 - DNA, 15 bp, Homo sapiens
actgactgctaagta

SEQ ID NO: 956639 - DNA, 15 bp, Homo sapiens
ctgactgctaagtac

SEQ ID NO: 956640 - DNA, 15 bp, Homo sapiens
tgactgctaagtaca

SEQ ID NO: 956641 - DNA, 15 bp, Homo sapiens
gactgctaagtacag

SEQ ID NO: 956642 - DNA, 15 bp, Homo sapiens
actgctaagtacagg

SEQ ID NO: 956643 - DNA, 15 bp, Homo sapiens
ctgctaagtacaggg

SEQ ID NO: 956644 - DNA, 15 bp, Homo sapiens
tgctaagtacaggga

SEQ ID NO: 956645 - DNA, 15 bp, Homo sapiens
gctaagtacagggac

SEQ ID NO: 956646 - DNA, 15 bp, Homo sapiens
ctaagtacagggaca

SEQ ID NO: 956647 - DNA, 15 bp, Homo sapiens
taagtacagggacat

SEQ ID NO: 956648 - DNA, 15 bp, Homo sapiens
aagtacagggacatc

SEQ ID NO: 956649 - DNA, 15 bp, Homo sapiens
agtacagggacatct

SEQ ID NO: 956650 - DNA, 15 bp, Homo sapiens
gtacagggacatctt

SEQ ID NO: 956651 - DNA, 15 bp, Homo sapiens
tacagggacatcttg

SEQ ID NO: 956652 - DNA, 15 bp, Homo sapiens
acagggacatcttgc

SEQ ID NO: 956653 - DNA, 15 bp, Homo sapiens
cagggacatcttgca

SEQ ID NO: 956654 - DNA, 15 bp, Homo sapiens
agggacatcttgcaa

SEQ ID NO: 956655 - DNA, 15 bp, Homo sapiens
gggacatcttgcaaa

SEQ ID NO: 956656 - DNA, 15 bp, Homo sapiens
ggacatcttgcaaaa

SEQ ID NO: 956657 - DNA, 15 bp, Homo sapiens
gacatcttgcaaaaa

SEQ ID NO: 956658 - DNA, 15 bp, Homo sapiens
acatcttgcaaaaag

SEQ ID NO: 956659 - DNA, 15 bp, Homo sapiens
catcttgcaaaaaga

SEQ ID NO: 956660 - DNA, 15 bp, Homo sapiens
atcttgcaaaaagat

SEQ ID NO: 956661 - DNA, 15 bp, Homo sapiens
tcttgcaaaaagata

SEQ ID NO: 956662 - DNA, 15 bp, Homo sapiens
cttgcaaaaagataa

SEQ ID NO: 956663 - DNA, 15 bp, Homo sapiens
ttgcaaaaagataat

SEQ ID NO: 956664 - DNA, 15 bp, Homo sapiens
tgcaaaaagataata

SEQ ID NO: 956665 - DNA, 15 bp, Homo sapiens
gcaaaaagataatat

SEQ ID NO: 956666 - DNA, 15 bp, Homo sapiens
caaaaagataatatg

SEQ ID NO: 956667 - DNA, 15 bp, Homo sapiens
aaaaagataatatgc

SEQ ID NO: 956668 - DNA, 15 bp, Homo sapiens
aaaagataatatgct

SEQ ID NO: 956669 - DNA, 15 bp, Homo sapiens
aaagataatatgctt

SEQ ID NO: 956670 - DNA, 15 bp, Homo sapiens
aagataatatgcttg

SEQ ID NO: 956671 - DNA, 15 bp, Homo sapiens
agataatatgcttgt

SEQ ID NO: 956672 - DNA, 15 bp, Homo sapiens
gataatatgcttgtt

SEQ ID NO: 956673 - DNA, 15 bp, Homo sapiens
ataatatgcttgttc

SEQ ID NO: 956674 - DNA, 15 bp, Homo sapiens
taatatgcttgttca

SEQ ID NO: 956675 - DNA, 15 bp, Homo sapiens
aatatgcttgttcaa

SEQ ID NO: 956676 - DNA, 15 bp, Homo sapiens
atatgcttgttcaaa

SEQ ID NO: 956677 - DNA, 15 bp, Homo sapiens
tatgcttgttcaaag

SEQ ID NO: 956678 - DNA, 15 bp, Homo sapiens
atgcttgttcaaaga

SEQ ID NO: 956679 - DNA, 15 bp, Homo sapiens
tgcttgttcaaagaa

SEQ ID NO: 956680 - DNA, 15 bp, Homo sapiens
gcttgttcaaagaac

SEQ ID NO: 956681 - DNA, 15 bp, Homo sapiens
cttgttcaaagaaca

SEQ ID NO: 956682 - DNA, 15 bp, Homo sapiens
ttgttcaaagaacaa

SEQ ID NO: 956683 - DNA, 15 bp, Homo sapiens
tgttcaaagaacaag

SEQ ID NO: 956684 - DNA, 15 bp, Homo sapiens
gttcaaagaacaagt

SEQ ID NO: 956685 - DNA, 15 bp, Homo sapiens
ttcaaagaacaagta

SEQ ID NO: 956686 - DNA, 15 bp, Homo sapiens
tcaaagaacaagtaa

SEQ ID NO: 956687 - DNA, 15 bp, Homo sapiens
caaagaacaagtaac

SEQ ID NO: 956688 - DNA, 15 bp, Homo sapiens
aaagaacaagtaact

SEQ ID NO: 956689 - DNA, 15 bp, Homo sapiens
aagaacaagtaactt

SEQ ID NO: 956690 - DNA, 15 bp, Homo sapiens
agaacaagtaacttg

SEQ ID NO: 956691 - DNA, 15 bp, Homo sapiens
gaacaagtaacttgg

SEQ ID NO: 956692 - DNA, 15 bp, Homo sapiens
aacaagtaacttgga

SEQ ID NO: 956693 - DNA, 15 bp, Homo sapiens
acaagtaacttggaa

SEQ ID NO: 956694 - DNA, 15 bp, Homo sapiens
caagtaacttggaac

SEQ ID NO: 956695 - DNA, 15 bp, Homo sapiens
aagtaacttggaaca

SEQ ID NO: 956696 - DNA, 15 bp, Homo sapiens
agtaacttggaacac

SEQ ID NO: 956697 - DNA, 15 bp, Homo sapiens
gtaacttggaacacc

SEQ ID NO: 956698 - DNA, 15 bp, Homo sapiens
taacttggaacacct

SEQ ID NO: 956699 - DNA, 15 bp, Homo sapiens
aacttggaacacctg

SEQ ID NO: 956700 - DNA, 15 bp, Homo sapiens
acttggaacacctgg

SEQ ID NO: 956701 - DNA, 15 bp, Homo sapiens
cttggaacacctgga

SEQ ID NO: 956702 - DNA, 15 bp, Homo sapiens
ttggaacacctggag

SEQ ID NO: 956703 - DNA, 15 bp, Homo sapiens
tggaacacctggagg

SEQ ID NO: 956704 - DNA, 15 bp, Homo sapiens
ggaacacctggaggt

SEQ ID NO: 956705 - DNA, 15 bp, Homo sapiens
gaacacctggaggta

SEQ ID NO: 956706 - DNA, 15 bp, Homo sapiens
aacacctggaggtaa

SEQ ID NO: 956707 - DNA, 15 bp, Homo sapiens
acacctggaggtaag

SEQ ID NO: 956708 - DNA, 15 bp, Homo sapiens
cacctggaggtaagt

SEQ ID NO: 956709 - DNA, 15 bp, Homo sapiens
acctggaggtaagtt

SEQ ID NO: 956710 - DNA, 15 bp, Homo sapiens
cctggaggtaagttt

SEQ ID NO: 956711 - DNA, 15 bp, Homo sapiens
ctggaggtaagtttg

SEQ ID NO: 956712 - DNA, 15 bp, Homo sapiens
tggaggtaagtttgt

SEQ ID NO: 956713 - DNA, 15 bp, Homo sapiens
ggaggtaagtttgtg

SEQ ID NO: 956714 - DNA, 15 bp, Homo sapiens
gaggtaagtttgtgt

SEQ ID NO: 956715 - DNA, 15 bp, Homo sapiens
aggtaagtttgtgtg

SEQ ID NO: 956716 - DNA, 15 bp, Homo sapiens
ggtaagtttgtgtga

SEQ ID NO: 956717 - DNA, 15 bp, Homo sapiens
gtaagtttgtgtgat

SEQ ID NO: 956718 - DNA, 15 bp, Homo sapiens
taagtttgtgtgatt

SEQ ID NO: 956719 - DNA, 15 bp, Homo sapiens
aagtttgtgtgattc

SEQ ID NO: 956720 - DNA, 15 bp, Homo sapiens
agtttgtgtgattct

SEQ ID NO: 956721 - DNA, 15 bp, Homo sapiens
gtttgtgtgattctt

SEQ ID NO: 956722 - DNA, 15 bp, Homo sapiens
tttgtgtgattcttg

SEQ ID NO: 956723 - DNA, 15 bp, Homo sapiens
ttgtgtgattcttga

SEQ ID NO: 956724 - DNA, 15 bp, Homo sapiens
tgtgtgattcttgaa

SEQ ID NO: 956725 - DNA, 15 bp, Homo sapiens
gtgtgattcttgaac

SEQ ID NO: 956726 - DNA, 15 bp, Homo sapiens
tgtgattcttgaacc

SEQ ID NO: 956727 - DNA, 15 bp, Homo sapiens
gtgattcttgaacct

SEQ ID NO: 956728 - DNA, 15 bp, Homo sapiens
tgattcttgaacctt

SEQ ID NO: 956729 - DNA, 15 bp, Homo sapiens
gattcttgaaccttg

SEQ ID NO: 956730 - DNA, 15 bp, Homo sapiens
attcttgaaccttgt

SEQ ID NO: 956731 - DNA, 15 bp, Homo sapiens
ttcttgaaccttgtg

SEQ ID NO: 956732 - DNA, 15 bp, Homo sapiens
tcttgaaccttgtga

SEQ ID NO: 956733 - DNA, 15 bp, Homo sapiens
cttgaaccttgtgaa

SEQ ID NO: 956734 - DNA, 15 bp, Homo sapiens
ttgaaccttgtgaaa

SEQ ID NO: 956735 - DNA, 15 bp, Homo sapiens
tgaaccttgtgaaat

SEQ ID NO: 956736 - DNA, 15 bp, Homo sapiens
gaaccttgtgaaatt

SEQ ID NO: 956737 - DNA, 15 bp, Homo sapiens
aaccttgtgaaatta

SEQ ID NO: 956738 - DNA, 15 bp, Homo sapiens
accttgtgaaattag

SEQ ID NO: 956739 - DNA, 15 bp, Homo sapiens
ccttgtgaaattagc

SEQ ID NO: 956740 - DNA, 15 bp, Homo sapiens
cttgtgaaattagcc

SEQ ID NO: 956741 - DNA, 15 bp, Homo sapiens
ttgtgaaattagcca

SEQ ID NO: 956742 - DNA, 15 bp, Homo sapiens
tgtgaaattagccat

SEQ ID NO: 956743 - DNA, 15 bp, Homo sapiens
gtgaaattagccatt

SEQ ID NO: 956744 - DNA, 15 bp, Homo sapiens
tgaaattagccattt

SEQ ID NO: 956745 - DNA, 15 bp, Homo sapiens
gaaattagccatttt

SEQ ID NO: 956746 - DNA, 15 bp, Homo sapiens
aaattagccattttt

SEQ ID NO: 956747 - DNA, 15 bp, Homo sapiens
aattagccatttttc

SEQ ID NO: 956748 - DNA, 15 bp, Homo sapiens
attagccatttttct

SEQ ID NO: 956749 - DNA, 15 bp, Homo sapiens
ttagccatttttctt

SEQ ID NO: 956750 - DNA, 15 bp, Homo sapiens
tagccatttttcttc

SEQ ID NO: 956751 - DNA, 15 bp, Homo sapiens
agccatttttcttca

SEQ ID NO: 956752 - DNA, 15 bp, Homo sapiens
gccatttttcttcaa

SEQ ID NO: 956753 - DNA, 15 bp, Homo sapiens
ccatttttcttcaat

SEQ ID NO: 956754 - DNA, 15 bp, Homo sapiens
catttttcttcaata

SEQ ID NO: 956755 - DNA, 15 bp, Homo sapiens
atttttcttcaatat

SEQ ID NO: 956756 - DNA, 15 bp, Homo sapiens
tttttcttcaatatt

SEQ ID NO: 956757 - DNA, 15 bp, Homo sapiens
ttttcttcaatattt

SEQ ID NO: 956758 - DNA, 15 bp, Homo sapiens
tttcttcaatatttt

SEQ ID NO: 956759 - DNA, 15 bp, Homo sapiens
ttcttcaatattttt

SEQ ID NO: 956760 - DNA, 15 bp, Homo sapiens
tcttcaatatttttg

SEQ ID NO: 956761 - DNA, 15 bp, Homo sapiens
cttcaatatttttgt

SEQ ID NO: 956762 - DNA, 15 bp, Homo sapiens
ttcaatatttttgtg

SEQ ID NO: 956763 - DNA, 15 bp, Homo sapiens
tcaatatttttgtgt

SEQ ID NO: 956764 - DNA, 15 bp, Homo sapiens
caatatttttgtgtt

SEQ ID NO: 956765 - DNA, 15 bp, Homo sapiens
aatatttttgtgttt

SEQ ID NO: 956766 - DNA, 15 bp, Homo sapiens
atatttttgtgtttg

SEQ ID NO: 956767 - DNA, 15 bp, Homo sapiens
tatttttgtgtttgg

SEQ ID NO: 956768 - DNA, 15 bp, Homo sapiens
atttttgtgtttggg

SEQ ID NO: 956769 - DNA, 15 bp, Homo sapiens
tttttgtgtttgggg

SEQ ID NO: 956770 - DNA, 15 bp, Homo sapiens
ttttgtgtttggggg

SEQ ID NO: 956771 - DNA, 15 bp, Homo sapiens
tttgtgtttgggggg

SEQ ID NO: 956772 - DNA, 15 bp, Homo sapiens
ttgtgtttgggggga

SEQ ID NO: 956773 - DNA, 15 bp, Homo sapiens
tgtgtttggggggat

SEQ ID NO: 956774 - DNA, 15 bp, Homo sapiens
gtgtttggggggatt

SEQ ID NO: 956775 - DNA, 15 bp, Homo sapiens
tgtttggggggattt

SEQ ID NO: 956776 - DNA, 15 bp, Homo sapiens
gtttggggggatttg

SEQ ID NO: 956777 - DNA, 15 bp, Homo sapiens
tttggggggatttgg

SEQ ID NO: 956778 - DNA, 15 bp, Homo sapiens
ttggggggatttggc

SEQ ID NO: 956779 - DNA, 15 bp, Homo sapiens
tggggggatttggca

SEQ ID NO: 956780 - DNA, 15 bp, Homo sapiens
ggggggatttggcag

SEQ ID NO: 956781 - DNA, 15 bp, Homo sapiens
gggggatttggcaga

SEQ ID NO: 956782 - DNA, 15 bp, Homo sapiens
ggggatttggcagat

SEQ ID NO: 956783 - DNA, 15 bp, Homo sapiens
gggatttggcagatt

SEQ ID NO: 956784 - DNA, 15 bp, Homo sapiens
ggatttggcagattt

SEQ ID NO: 956785 - DNA, 15 bp, Homo sapiens
gatttggcagatttt

SEQ ID NO: 956786 - DNA, 15 bp, Homo sapiens
atttggcagatttta

SEQ ID NO: 956787 - DNA, 15 bp, Homo sapiens
tttggcagattttaa

SEQ ID NO: 956788 - DNA, 15 bp, Homo sapiens
ttggcagattttaat

SEQ ID NO: 956789 - DNA, 15 bp, Homo sapiens
tggcagattttaatt

SEQ ID NO: 956790 - DNA, 15 bp, Homo sapiens
ggcagattttaatta

SEQ ID NO: 956791 - DNA, 15 bp, Homo sapiens
gcagattttaattaa

SEQ ID NO: 956792 - DNA, 15 bp, Homo sapiens
cagattttaattaaa

SEQ ID NO: 956793 - DNA, 15 bp, Homo sapiens
agattttaattaaag

SEQ ID NO: 956794 - DNA, 15 bp, Homo sapiens
gattttaattaaagt

SEQ ID NO: 956795 - DNA, 15 bp, Homo sapiens
attttaattaaagtt

SEQ ID NO: 956796 - DNA, 15 bp, Homo sapiens
ttttaattaaagttt

SEQ ID NO: 956797 - DNA, 15 bp, Homo sapiens
tttaattaaagtttg

SEQ ID NO: 956798 - DNA, 15 bp, Homo sapiens
ttaattaaagtttgc

SEQ ID NO: 956799 - DNA, 15 bp, Homo sapiens
taattaaagtttgcc

SEQ ID NO: 956800 - DNA, 15 bp, Homo sapiens
aattaaagtttgcct

SEQ ID NO: 956801 - DNA, 15 bp, Homo sapiens
attaaagtttgcctg

SEQ ID NO: 956802 - DNA, 15 bp, Homo sapiens
ttaaagtttgcctgc

SEQ ID NO: 956803 - DNA, 15 bp, Homo sapiens
taaagtttgcctgca

SEQ ID NO: 956804 - DNA, 15 bp, Homo sapiens
aaagtttgcctgcat

SEQ ID NO: 956805 - DNA, 15 bp, Homo sapiens
aagtttgcctgcatt

SEQ ID NO: 956806 - DNA, 15 bp, Homo sapiens
agtttgcctgcattt

SEQ ID NO: 956807 - DNA, 15 bp, Homo sapiens
gtttgcctgcattta

SEQ ID NO: 956808 - DNA, 15 bp, Homo sapiens
tttgcctgcatttat

SEQ ID NO: 956809 - DNA, 15 bp, Homo sapiens
ttgcctgcatttata

SEQ ID NO: 956810 - DNA, 15 bp, Homo sapiens
tgcctgcatttatat

SEQ ID NO: 956811 - DNA, 15 bp, Homo sapiens
gcctgcatttatata

SEQ ID NO: 956812 - DNA, 15 bp, Homo sapiens
cctgcatttatataa

SEQ ID NO: 956813 - DNA, 15 bp, Homo sapiens
ctgcatttatataaa

SEQ ID NO: 956814 - DNA, 15 bp, Homo sapiens
tgcatttatataaat

SEQ ID NO: 956815 - DNA, 15 bp, Homo sapiens
gcatttatataaatt

SEQ ID NO: 956816 - DNA, 15 bp, Homo sapiens
catttatataaattt

SEQ ID NO: 956817 - DNA, 15 bp, Homo sapiens
atttatataaattta

SEQ ID NO: 956818 - DNA, 15 bp, Homo sapiens
tttatataaatttaa

SEQ ID NO: 956819 - DNA, 15 bp, Homo sapiens
ttatataaatttaac

SEQ ID NO: 956820 - DNA, 15 bp, Homo sapiens
tatataaatttaaca

SEQ ID NO: 956821 - DNA, 15 bp, Homo sapiens
atataaatttaacag

SEQ ID NO: 956822 - DNA, 15 bp, Homo sapiens
tataaatttaacaga

SEQ ID NO: 956823 - DNA, 15 bp, Homo sapiens
ataaatttaacagag

SEQ ID NO: 956824 - DNA, 15 bp, Homo sapiens
taaatttaacagaga

SEQ ID NO: 956825 - DNA, 15 bp, Homo sapiens
aaatttaacagagat

SEQ ID NO: 956826 - DNA, 15 bp, Homo sapiens
aatttaacagagata

SEQ ID NO: 956827 - DNA, 15 bp, Homo sapiens
atttaacagagatat

SEQ ID NO: 956828 - DNA, 15 bp, Homo sapiens
tttaacagagatata

SEQ ID NO: 956829 - DNA, 15 bp, Homo sapiens
ttaacagagatataa

SEQ ID NO: 956830 - DNA, 15 bp, Homo sapiens
taacagagatataat

SEQ ID NO: 956831 - DNA, 15 bp, Homo sapiens
aacagagatataatt

SEQ ID NO: 956832 - DNA, 15 bp, Homo sapiens
acagagatataatta

SEQ ID NO: 956833 - DNA, 15 bp, Homo sapiens
cagagatataattat

SEQ ID NO: 956834 - DNA, 15 bp, Homo sapiens
agagatataattatc

SEQ ID NO: 956835 - DNA, 15 bp, Homo sapiens
gagatataattatcc

SEQ ID NO: 956836 - DNA, 15 bp, Homo sapiens
agatataattatcca

SEQ ID NO: 956837 - DNA, 15 bp, Homo sapiens
gatataattatccat

SEQ ID NO: 956838 - DNA, 15 bp, Homo sapiens
atataattatccata

SEQ ID NO: 956839 - DNA, 15 bp, Homo sapiens
tataattatccatat

SEQ ID NO: 956840 - DNA, 15 bp, Homo sapiens
ataattatccatatt

SEQ ID NO: 956841 - DNA, 15 bp, Homo sapiens
taattatccatatta

SEQ ID NO: 956842 - DNA, 15 bp, Homo sapiens
aattatccatattat

SEQ ID NO: 956843 - DNA, 15 bp, Homo sapiens
attatccatattatt

SEQ ID NO: 956844 - DNA, 15 bp, Homo sapiens
ttatccatattattc

SEQ ID NO: 956845 - DNA, 15 bp, Homo sapiens
tatccatattattca

SEQ ID NO: 956846 - DNA, 15 bp, Homo sapiens
atccatattattcat

SEQ ID NO: 956847 - DNA, 15 bp, Homo sapiens
tccatattattcatt

SEQ ID NO: 956848 - DNA, 15 bp, Homo sapiens
ccatattattcattc

SEQ ID NO: 956849 - DNA, 15 bp, Homo sapiens
catattattcattca

SEQ ID NO: 956850 - DNA, 15 bp, Homo sapiens
atattattcattcag

SEQ ID NO: 956851 - DNA, 15 bp, Homo sapiens
tattattcattcagt

SEQ ID NO: 956852 - DNA, 15 bp, Homo sapiens
attattcattcagtt

SEQ ID NO: 956853 - DNA, 15 bp, Homo sapiens
ttattcattcagttt

SEQ ID NO: 956854 - DNA, 15 bp, Homo sapiens
tattcattcagttta

SEQ ID NO: 956855 - DNA, 15 bp, Homo sapiens
attcattcagtttag

SEQ ID NO: 956856 - DNA, 15 bp, Homo sapiens
ttcattcagtttagt

SEQ ID NO: 956857 - DNA, 15 bp, Homo sapiens
tcattcagtttagtt

SEQ ID NO: 956858 - DNA, 15 bp, Homo sapiens
cattcagtttagtta

SEQ ID NO: 956859 - DNA, 15 bp, Homo sapiens
attcagtttagttat

SEQ ID NO: 956860 - DNA, 15 bp, Homo sapiens
ttcagtttagttata

SEQ ID NO: 956861 - DNA, 15 bp, Homo sapiens
tcagtttagttataa

SEQ ID NO: 956862 - DNA, 15 bp, Homo sapiens
cagtttagttataaa

SEQ ID NO: 956863 - DNA, 15 bp, Homo sapiens
agtttagttataaat

SEQ ID NO: 956864 - DNA, 15 bp, Homo sapiens
gtttagttataaata

SEQ ID NO: 956865 - DNA, 15 bp, Homo sapiens
tttagttataaatat

SEQ ID NO: 956866 - DNA, 15 bp, Homo sapiens
ttagttataaatatt

SEQ ID NO: 956867 - DNA, 15 bp, Homo sapiens
tagttataaatattt

SEQ ID NO: 956868 - DNA, 15 bp, Homo sapiens
agttataaatatttt

SEQ ID NO: 956869 - DNA, 15 bp, Homo sapiens
gttataaatattttg

SEQ ID NO: 956870 - DNA, 15 bp, Homo sapiens
ttataaatattttgt

SEQ ID NO: 956871 - DNA, 15 bp, Homo sapiens
tataaatattttgtt

SEQ ID NO: 956872 - DNA, 15 bp, Homo sapiens
ataaatattttgttc

SEQ ID NO: 956873 - DNA, 15 bp, Homo sapiens
taaatattttgttcc

SEQ ID NO: 956874 - DNA, 15 bp, Homo sapiens
aaatattttgttccc

SEQ ID NO: 956875 - DNA, 15 bp, Homo sapiens
aatattttgttccca

SEQ ID NO: 956876 - DNA, 15 bp, Homo sapiens
atattttgttcccac

SEQ ID NO: 956877 - DNA, 15 bp, Homo sapiens
tattttgttcccaca

SEQ ID NO: 956878 - DNA, 15 bp, Homo sapiens
attttgttcccacat

SEQ ID NO: 956879 - DNA, 15 bp, Homo sapiens
ttttgttcccacata

SEQ ID NO: 956880 - DNA, 15 bp, Homo sapiens
tttgttcccacataa

SEQ ID NO: 956881 - DNA, 15 bp, Homo sapiens
ttgttcccacataac

SEQ ID NO: 956882 - DNA, 15 bp, Homo sapiens
tgttcccacataaca

SEQ ID NO: 956883 - DNA, 15 bp, Homo sapiens
gttcccacataacac

SEQ ID NO: 956884 - DNA, 15 bp, Homo sapiens
ttcccacataacaca

SEQ ID NO: 956885 - DNA, 15 bp, Homo sapiens
tcccacataacacac

SEQ ID NO: 956886 - DNA, 15 bp, Homo sapiens
cccacataacacaca

SEQ ID NO: 956887 - DNA, 15 bp, Homo sapiens
ccacataacacacac

SEQ ID NO: 956888 - DNA, 15 bp, Homo sapiens
cacataacacacaca

SEQ ID NO: 956889 - DNA, 15 bp, Homo sapiens
acataacacacacac

SEQ ID NO: 956890 - DNA, 15 bp, Homo sapiens
cataacacacacaca

SEQ ID NO: 956891 - DNA, 15 bp, Homo sapiens
ataacacacacacac

SEQ ID NO: 956892 - DNA, 15 bp, Homo sapiens
taacacacacacaca

SEQ ID NO: 956893 - DNA, 15 bp, Homo sapiens
aacacacacacacac

SEQ ID NO: 956894 - DNA, 15 bp, Homo sapiens
acacacacacacaat

SEQ ID NO: 956895 - DNA, 15 bp, Homo sapiens
cacacacacacaata

SEQ ID NO: 956896 - DNA, 15 bp, Homo sapiens
acacacacacaatat

SEQ ID NO: 956897 - DNA, 15 bp, Homo sapiens
cacacacacaatata

SEQ ID NO: 956898 - DNA, 15 bp, Homo sapiens
acacacacaatatat

SEQ ID NO: 956899 - DNA, 15 bp, Homo sapiens
cacacacaatatatt

SEQ ID NO: 956900 - DNA, 15 bp, Homo sapiens
acacacaatatatta

SEQ ID NO: 956901 - DNA, 15 bp, Homo sapiens
cacacaatatattat

SEQ ID NO: 956902 - DNA, 15 bp, Homo sapiens
acacaatatattatc

SEQ ID NO: 956903 - DNA, 15 bp, Homo sapiens
cacaatatattatct

SEQ ID NO: 956904 - DNA, 15 bp, Homo sapiens
acaatatattatcta

SEQ ID NO: 956905 - DNA, 15 bp, Homo sapiens
caatatattatctat

SEQ ID NO: 956906 - DNA, 15 bp, Homo sapiens
aatatattatctatt

SEQ ID NO: 956907 - DNA, 15 bp, Homo sapiens
atatattatctattt

SEQ ID NO: 956908 - DNA, 15 bp, Homo sapiens
tatattatctattta

SEQ ID NO: 956909 - DNA, 15 bp, Homo sapiens
atattatctatttat

SEQ ID NO: 956910 - DNA, 15 bp, Homo sapiens
tattatctatttata

SEQ ID NO: 956911 - DNA, 15 bp, Homo sapiens
attatctatttatag

SEQ ID NO: 956912 - DNA, 15 bp, Homo sapiens
ttatctatttatagt

SEQ ID NO: 956913 - DNA, 15 bp, Homo sapiens
tatctatttatagtg

SEQ ID NO: 956914 - DNA, 15 bp, Homo sapiens
atctatttatagtgg

SEQ ID NO: 956915 - DNA, 15 bp, Homo sapiens
tctatttatagtggc

SEQ ID NO: 956916 - DNA, 15 bp, Homo sapiens
ctatttatagtggct

SEQ ID NO: 956917 - DNA, 15 bp, Homo sapiens
tatttatagtggctg

SEQ ID NO: 956918 - DNA, 15 bp, Homo sapiens
atttatagtggctga

SEQ ID NO: 956919 - DNA, 15 bp, Homo sapiens
tttatagtggctgaa

SEQ ID NO: 956920 - DNA, 15 bp, Homo sapiens
ttatagtggctgaat

SEQ ID NO: 956921 - DNA, 15 bp, Homo sapiens
tatagtggctgaatg

SEQ ID NO: 956922 - DNA, 15 bp, Homo sapiens
atagtggctgaatga

SEQ ID NO: 956923 - DNA, 15 bp, Homo sapiens
tagtggctgaatgac

SEQ ID NO: 956924 - DNA, 15 bp, Homo sapiens
agtggctgaatgact

SEQ ID NO: 956925 - DNA, 15 bp, Homo sapiens
gtggctgaatgactt

SEQ ID NO: 956926 - DNA, 15 bp, Homo sapiens
tggctgaatgacttc

SEQ ID NO: 956927 - DNA, 15 bp, Homo sapiens
ggctgaatgacttct

SEQ ID NO: 956928 - DNA, 15 bp, Homo sapiens
gctgaatgacttctg

SEQ ID NO: 956929 - DNA, 15 bp, Homo sapiens
ctgaatgacttctga

SEQ ID NO: 956930 - DNA, 15 bp, Homo sapiens
tgaatgacttctgaa

SEQ ID NO: 956931 - DNA, 15 bp, Homo sapiens
gaatgacttctgaat

SEQ ID NO: 956932 - DNA, 15 bp, Homo sapiens
aatgacttctgaatg

SEQ ID NO: 956933 - DNA, 15 bp, Homo sapiens
atgacttctgaatga

SEQ ID NO: 956934 - DNA, 15 bp, Homo sapiens
tgacttctgaatgat

SEQ ID NO: 956935 - DNA, 15 bp, Homo sapiens
gacttctgaatgatt

SEQ ID NO: 956936 - DNA, 15 bp, Homo sapiens
acttctgaatgatta

SEQ ID NO: 956937 - DNA, 15 bp, Homo sapiens
cttctgaatgattat

SEQ ID NO: 956938 - DNA, 15 bp, Homo sapiens
ttctgaatgattatc

SEQ ID NO: 956939 - DNA, 15 bp, Homo sapiens
tctgaatgattatct

SEQ ID NO: 956940 - DNA, 15 bp, Homo sapiens
ctgaatgattatcta

SEQ ID NO: 956941 - DNA, 15 bp, Homo sapiens
tgaatgattatctag

SEQ ID NO: 956942 - DNA, 15 bp, Homo sapiens
gaatgattatctaga

SEQ ID NO: 956943 - DNA, 15 bp, Homo sapiens
aatgattatctagat

SEQ ID NO: 956944 - DNA, 15 bp, Homo sapiens
atgattatctagatc

SEQ ID NO: 956945 - DNA, 15 bp, Homo sapiens
tgattatctagatca

SEQ ID NO: 956946 - DNA, 15 bp, Homo sapiens
gattatctagatcat

SEQ ID NO: 956947 - DNA, 15 bp, Homo sapiens
attatctagatcatt

SEQ ID NO: 956948 - DNA, 15 bp, Homo sapiens
ttatctagatcattc

SEQ ID NO: 956949 - DNA, 15 bp, Homo sapiens
tatctagatcattct

SEQ ID NO: 956950 - DNA, 15 bp, Homo sapiens
atctagatcattctc

SEQ ID NO: 956951 - DNA, 15 bp, Homo sapiens
tctagatcattctcc

SEQ ID NO: 956952 - DNA, 15 bp, Homo sapiens
ctagatcattctcct

SEQ ID NO: 956953 - DNA, 15 bp, Homo sapiens
tagatcattctcctt

SEQ ID NO: 956954 - DNA, 15 bp, Homo sapiens
agatcattctcctta

SEQ ID NO: 956955 - DNA, 15 bp, Homo sapiens
gatcattctccttag

SEQ ID NO: 956956 - DNA, 15 bp, Homo sapiens
atcattctccttagg

SEQ ID NO: 956957 - DNA, 15 bp, Homo sapiens
tcattctccttaggt

SEQ ID NO: 956958 - DNA, 15 bp, Homo sapiens
cattctccttaggtc

SEQ ID NO: 956959 - DNA, 15 bp, Homo sapiens
attctccttaggtca

SEQ ID NO: 956960 - DNA, 15 bp, Homo sapiens
ttctccttaggtcac

SEQ ID NO: 956961 - DNA, 15 bp, Homo sapiens
tctccttaggtcact

SEQ ID NO: 956962 - DNA, 15 bp, Homo sapiens
ctccttaggtcactt

SEQ ID NO: 956963 - DNA, 15 bp, Homo sapiens
tccttaggtcacttg

SEQ ID NO: 956964 - DNA, 15 bp, Homo sapiens
ccttaggtcacttgc

SEQ ID NO: 956965 - DNA, 15 bp, Homo sapiens
cttaggtcacttgca

SEQ ID NO: 956966 - DNA, 15 bp, Homo sapiens
ttaggtcacttgcat

SEQ ID NO: 956967 - DNA, 15 bp, Homo sapiens
taggtcacttgcatg

SEQ ID NO: 956968 - DNA, 15 bp, Homo sapiens
aggtcacttgcatga

SEQ ID NO: 956969 - DNA, 15 bp, Homo sapiens
ggtcacttgcatgat

SEQ ID NO: 956970 - DNA, 15 bp, Homo sapiens
gtcacttgcatgatt

SEQ ID NO: 956971 - DNA, 15 bp, Homo sapiens
tcacttgcatgattt

SEQ ID NO: 956972 - DNA, 15 bp, Homo sapiens
cacttgcatgattta

SEQ ID NO: 956973 - DNA, 15 bp, Homo sapiens
acttgcatgatttag

SEQ ID NO: 956974 - DNA, 15 bp, Homo sapiens
cttgcatgatttagc

SEQ ID NO: 956975 - DNA, 15 bp, Homo sapiens
ttgcatgatttagct

SEQ ID NO: 956976 - DNA, 15 bp, Homo sapiens
tgcatgatttagctg

SEQ ID NO: 956977 - DNA, 15 bp, Homo sapiens
gcatgatttagctga

SEQ ID NO: 956978 - DNA, 15 bp, Homo sapiens
catgatttagctgaa

SEQ ID NO: 956979 - DNA, 15 bp, Homo sapiens
atgatttagctgaat

SEQ ID NO: 956980 - DNA, 15 bp, Homo sapiens
tgatttagctgaatc

SEQ ID NO: 956981 - DNA, 15 bp, Homo sapiens
gatttagctgaatca

SEQ ID NO: 956982 - DNA, 15 bp, Homo sapiens
atttagctgaatcaa

SEQ ID NO: 956983 - DNA, 15 bp, Homo sapiens
tttagctgaatcaaa

SEQ ID NO: 956984 - DNA, 15 bp, Homo sapiens
ttagctgaatcaaac

SEQ ID NO: 956985 - DNA, 15 bp, Homo sapiens
tagctgaatcaaacc

SEQ ID NO: 956986 - DNA, 15 bp, Homo sapiens
agctgaatcaaacct

SEQ ID NO: 956987 - DNA, 15 bp, Homo sapiens
gctgaatcaaacctc

SEQ ID NO: 956988 - DNA, 15 bp, Homo sapiens
ctgaatcaaacctct

SEQ ID NO: 956989 - DNA, 15 bp, Homo sapiens
tgaatcaaacctctt

SEQ ID NO: 956990 - DNA, 15 bp, Homo sapiens
gaatcaaacctcttt

SEQ ID NO: 956991 - DNA, 15 bp, Homo sapiens
aatcaaacctctttt

SEQ ID NO: 956992 - DNA, 15 bp, Homo sapiens
atcaaacctctttta

SEQ ID NO: 956993 - DNA, 15 bp, Homo sapiens
tcaaacctcttttaa

SEQ ID NO: 956994 - DNA, 15 bp, Homo sapiens
caaacctcttttaac

SEQ ID NO: 956995 - DNA, 15 bp, Homo sapiens
aaacctcttttaacc

SEQ ID NO: 956996 - DNA, 15 bp, Homo sapiens
aacctcttttaacca

SEQ ID NO: 956997 - DNA, 15 bp, Homo sapiens
acctcttttaaccag

SEQ ID NO: 956998 - DNA, 15 bp, Homo sapiens
cctcttttaaccaga

SEQ ID NO: 956999 - DNA, 15 bp, Homo sapiens
ctcttttaaccagac

SEQ ID NO: 957000 - DNA, 15 bp, Homo sapiens
tcttttaaccagaca

SEQ ID NO: 957001 - DNA, 15 bp, Homo sapiens
cttttaaccagacat

SEQ ID NO: 957002 - DNA, 15 bp, Homo sapiens
ttttaaccagacatc

SEQ ID NO: 957003 - DNA, 15 bp, Homo sapiens
tttaaccagacatct

SEQ ID NO: 957004 - DNA, 15 bp, Homo sapiens
ttaaccagacatcta

SEQ ID NO: 957005 - DNA, 15 bp, Homo sapiens
taaccagacatctaa

SEQ ID NO: 957006 - DNA, 15 bp, Homo sapiens
aaccagacatctaag

SEQ ID NO: 957007 - DNA, 15 bp, Homo sapiens
accagacatctaaga

SEQ ID NO: 957008 - DNA, 15 bp, Homo sapiens
ccagacatctaagag

SEQ ID NO: 957009 - DNA, 15 bp, Homo sapiens
cagacatctaagaga

SEQ ID NO: 957010 - DNA, 15 bp, Homo sapiens
agacatctaagagaa

SEQ ID NO: 957011 - DNA, 15 bp, Homo sapiens
gacatctaagagaaa

SEQ ID NO: 957012 - DNA, 15 bp, Homo sapiens
acatctaagagaaaa

SEQ ID NO: 957013 - DNA, 15 bp, Homo sapiens
catctaagagaaaaa

SEQ ID NO: 957014 - DNA, 15 bp, Homo sapiens
atctaagagaaaaag

SEQ ID NO: 957015 - DNA, 15 bp, Homo sapiens
tctaagagaaaaagg

SEQ ID NO: 957016 - DNA, 15 bp, Homo sapiens
ctaagagaaaaagga

SEQ ID NO: 957017 - DNA, 15 bp, Homo sapiens
taagagaaaaaggag

SEQ ID NO: 957018 - DNA, 15 bp, Homo sapiens
aagagaaaaaggagc

SEQ ID NO: 957019 - DNA, 15 bp, Homo sapiens
agagaaaaaggagca

SEQ ID NO: 957020 - DNA, 15 bp, Homo sapiens
gagaaaaaggagcat

SEQ ID NO: 957021 - DNA, 15 bp, Homo sapiens
agaaaaaggagcatg

SEQ ID NO: 957022 - DNA, 15 bp, Homo sapiens
gaaaaaggagcatga

SEQ ID NO: 957023 - DNA, 15 bp, Homo sapiens
aaaaaggagcatgaa

SEQ ID NO: 957024 - DNA, 15 bp, Homo sapiens
aaaaggagcatgaaa

SEQ ID NO: 957025 - DNA, 15 bp, Homo sapiens
aaaggagcatgaaac

SEQ ID NO: 957026 - DNA, 15 bp, Homo sapiens
aaggagcatgaaaca

SEQ ID NO: 957027 - DNA, 15 bp, Homo sapiens
aggagcatgaaacag

SEQ ID NO: 957028 - DNA, 15 bp, Homo sapiens
ggagcatgaaacagg

SEQ ID NO: 957029 - DNA, 15 bp, Homo sapiens
gagcatgaaacaggt

SEQ ID NO: 957030 - DNA, 15 bp, Homo sapiens
agcatgaaacaggta

SEQ ID NO: 957031 - DNA, 15 bp, Homo sapiens
gcatgaaacaggtag

SEQ ID NO: 957032 - DNA, 15 bp, Homo sapiens
catgaaacaggtaga

SEQ ID NO: 957033 - DNA, 15 bp, Homo sapiens
atgaaacaggtagaa

SEQ ID NO: 957034 - DNA, 15 bp, Homo sapiens
tgaaacaggtagaat

SEQ ID NO: 957035 - DNA, 15 bp, Homo sapiens
gaaacaggtagaata

SEQ ID NO: 957036 - DNA, 15 bp, Homo sapiens
aaacaggtagaatat

SEQ ID NO: 957037 - DNA, 15 bp, Homo sapiens
aacaggtagaatatt

SEQ ID NO: 957038 - DNA, 15 bp, Homo sapiens
acaggtagaatattg

SEQ ID NO: 957039 - DNA, 15 bp, Homo sapiens
caggtagaatattgt

SEQ ID NO: 957040 - DNA, 15 bp, Homo sapiens
aggtagaatattgta

SEQ ID NO: 957041 - DNA, 15 bp, Homo sapiens
ggtagaatattgtaa

SEQ ID NO: 957042 - DNA, 15 bp, Homo sapiens
gtagaatattgtaat

SEQ ID NO: 957043 - DNA, 15 bp, Homo sapiens
tagaatattgtaatc

SEQ ID NO: 957044 - DNA, 15 bp, Homo sapiens
agaatattgtaatca

SEQ ID NO: 957045 - DNA, 15 bp, Homo sapiens
gaatattgtaatcaa

SEQ ID NO: 957046 - DNA, 15 bp, Homo sapiens
aatattgtaatcaaa

SEQ ID NO: 957047 - DNA, 15 bp, Homo sapiens
atattgtaatcaaag

SEQ ID NO: 957048 - DNA, 15 bp, Homo sapiens
tattgtaatcaaagg

SEQ ID NO: 957049 - DNA, 15 bp, Homo sapiens
attgtaatcaaagga

SEQ ID NO: 957050 - DNA, 15 bp, Homo sapiens
ttgtaatcaaaggag

SEQ ID NO: 957051 - DNA, 15 bp, Homo sapiens
tgtaatcaaaggagg

SEQ ID NO: 957052 - DNA, 15 bp, Homo sapiens
gtaatcaaaggaggg

SEQ ID NO: 957053 - DNA, 15 bp, Homo sapiens
taatcaaaggaggga

SEQ ID NO: 957054 - DNA, 15 bp, Homo sapiens
aatcaaaggagggaa

SEQ ID NO: 957055 - DNA, 15 bp, Homo sapiens
atcaaaggagggaag

SEQ ID NO: 957056 - DNA, 15 bp, Homo sapiens
tcaaaggagggaagc

SEQ ID NO: 957057 - DNA, 15 bp, Homo sapiens
caaaggagggaagca

SEQ ID NO: 957058 - DNA, 15 bp, Homo sapiens
aaaggagggaagcac

SEQ ID NO: 957059 - DNA, 15 bp, Homo sapiens
aaggagggaagcact

SEQ ID NO: 957060 - DNA, 15 bp, Homo sapiens
aggagggaagcactc

SEQ ID NO: 957061 - DNA, 15 bp, Homo sapiens
ggagggaagcactca

SEQ ID NO: 957062 - DNA, 15 bp, Homo sapiens
gagggaagcactcat

SEQ ID NO: 957063 - DNA, 15 bp, Homo sapiens
agggaagcactcatt

SEQ ID NO: 957064 - DNA, 15 bp, Homo sapiens
gggaagcactcatta

SEQ ID NO: 957065 - DNA, 15 bp, Homo sapiens
ggaagcactcattaa

SEQ ID NO: 957066 - DNA, 15 bp, Homo sapiens
gaagcactcattaag

SEQ ID NO: 957067 - DNA, 15 bp, Homo sapiens
aagcactcattaagt

SEQ ID NO: 957068 - DNA, 15 bp, Homo sapiens
agcactcattaagtg

SEQ ID NO: 957069 - DNA, 15 bp, Homo sapiens
gcactcattaagtgc

SEQ ID NO: 957070 - DNA, 15 bp, Homo sapiens
cactcattaagtgcc

SEQ ID NO: 957071 - DNA, 15 bp, Homo sapiens
actcattaagtgccc

SEQ ID NO: 957072 - DNA, 15 bp, Homo sapiens
ctcattaagtgccca

SEQ ID NO: 957073 - DNA, 15 bp, Homo sapiens
tcattaagtgcccat

SEQ ID NO: 957074 - DNA, 15 bp, Homo sapiens
cattaagtgcccatc

SEQ ID NO: 957075 - DNA, 15 bp, Homo sapiens
attaagtgcccatcc

SEQ ID NO: 957076 - DNA, 15 bp, Homo sapiens
ttaagtgcccatccc

SEQ ID NO: 957077 - DNA, 15 bp, Homo sapiens
taagtgcccatccct

SEQ ID NO: 957078 - DNA, 15 bp, Homo sapiens
aagtgcccatccctt

SEQ ID NO: 957079 - DNA, 15 bp, Homo sapiens
agtgcccatcccttt

SEQ ID NO: 957080 - DNA, 15 bp, Homo sapiens
gtgcccatccctttc

SEQ ID NO: 957081 - DNA, 15 bp, Homo sapiens
tgcccatccctttct

SEQ ID NO: 957082 - DNA, 15 bp, Homo sapiens
gcccatccctttctc

SEQ ID NO: 957083 - DNA, 15 bp, Homo sapiens
cccatccctttctct

SEQ ID NO: 957084 - DNA, 15 bp, Homo sapiens
ccatccctttctctt

SEQ ID NO: 957085 - DNA, 15 bp, Homo sapiens
catccctttctctta

SEQ ID NO: 957086 - DNA, 15 bp, Homo sapiens
atccctttctcttac

SEQ ID NO: 957087 - DNA, 15 bp, Homo sapiens
tccctttctcttacc

SEQ ID NO: 957088 - DNA, 15 bp, Homo sapiens
ccctttctcttaccc

SEQ ID NO: 957089 - DNA, 15 bp, Homo sapiens
cctttctcttacccc

SEQ ID NO: 957090 - DNA, 15 bp, Homo sapiens
ctttctcttacccct

SEQ ID NO: 957091 - DNA, 15 bp, Homo sapiens
tttctcttacccctg

SEQ ID NO: 957092 - DNA, 15 bp, Homo sapiens
ttctcttacccctgt

SEQ ID NO: 957093 - DNA, 15 bp, Homo sapiens
tctcttacccctgta

SEQ ID NO: 957094 - DNA, 15 bp, Homo sapiens
ctcttacccctgtac

SEQ ID NO: 957095 - DNA, 15 bp, Homo sapiens
tcttacccctgtacc

SEQ ID NO: 957096 - DNA, 15 bp, Homo sapiens
cttacccctgtaccc

SEQ ID NO: 957097 - DNA, 15 bp, Homo sapiens
ttacccctgtaccca

SEQ ID NO: 957098 - DNA, 15 bp, Homo sapiens
tacccctgtacccag

SEQ ID NO: 957099 - DNA, 15 bp, Homo sapiens
acccctgtacccaga

SEQ ID NO: 957100 - DNA, 15 bp, Homo sapiens
cccctgtacccagaa

SEQ ID NO: 957101 - DNA, 15 bp, Homo sapiens
ccctgtacccagaac

SEQ ID NO: 957102 - DNA, 15 bp, Homo sapiens
cctgtacccagaaca

SEQ ID NO: 957103 - DNA, 15 bp, Homo sapiens
ctgtacccagaacaa

SEQ ID NO: 957104 - DNA, 15 bp, Homo sapiens
tgtacccagaacaaa

SEQ ID NO: 957105 - DNA, 15 bp, Homo sapiens
gtacccagaacaaac

SEQ ID NO: 957106 - DNA, 15 bp, Homo sapiens
tacccagaacaaact

SEQ ID NO: 957107 - DNA, 15 bp, Homo sapiens
acccagaacaaacta

SEQ ID NO: 957108 - DNA, 15 bp, Homo sapiens
cccagaacaaactat

SEQ ID NO: 957109 - DNA, 15 bp, Homo sapiens
ccagaacaaactatt

SEQ ID NO: 957110 - DNA, 15 bp, Homo sapiens
cagaacaaactattc

SEQ ID NO: 957111 - DNA, 15 bp, Homo sapiens
agaacaaactattct

SEQ ID NO: 957112 - DNA, 15 bp, Homo sapiens
gaacaaactattctc

SEQ ID NO: 957113 - DNA, 15 bp, Homo sapiens
aacaaactattctcc

SEQ ID NO: 957114 - DNA, 15 bp, Homo sapiens
acaaactattctccc

SEQ ID NO: 957115 - DNA, 15 bp, Homo sapiens
caaactattctccca

SEQ ID NO: 957116 - DNA, 15 bp, Homo sapiens
aaactattctcccat

SEQ ID NO: 957117 - DNA, 15 bp, Homo sapiens
aactattctcccatg

SEQ ID NO: 957118 - DNA, 15 bp, Homo sapiens
actattctcccatgg

SEQ ID NO: 957119 - DNA, 15 bp, Homo sapiens
ctattctcccatggt

SEQ ID NO: 957120 - DNA, 15 bp, Homo sapiens
tattctcccatggtc

SEQ ID NO: 957121 - DNA, 15 bp, Homo sapiens
attctcccatggtcc

SEQ ID NO: 957122 - DNA, 15 bp, Homo sapiens
ttctcccatggtccc

SEQ ID NO: 957123 - DNA, 15 bp, Homo sapiens
tctcccatggtccct

SEQ ID NO: 957124 - DNA, 15 bp, Homo sapiens
ctcccatggtccctg

SEQ ID NO: 957125 - DNA, 15 bp, Homo sapiens
tcccatggtccctgg

SEQ ID NO: 957126 - DNA, 15 bp, Homo sapiens
cccatggtccctggc

SEQ ID NO: 957127 - DNA, 15 bp, Homo sapiens
ccatggtccctggct

SEQ ID NO: 957128 - DNA, 15 bp, Homo sapiens
catggtccctggctt

SEQ ID NO: 957129 - DNA, 15 bp, Homo sapiens
atggtccctggcttt

SEQ ID NO: 957130 - DNA, 15 bp, Homo sapiens
tggtccctggctttt

SEQ ID NO: 957131 - DNA, 15 bp, Homo sapiens
ggtccctggcttttg

SEQ ID NO: 957132 - DNA, 15 bp, Homo sapiens
gtccctggcttttgt

SEQ ID NO: 957133 - DNA, 15 bp, Homo sapiens
tccctggcttttgtt

SEQ ID NO: 957134 - DNA, 15 bp, Homo sapiens
ccctggcttttgttc

SEQ ID NO: 957135 - DNA, 15 bp, Homo sapiens
cctggcttttgttcc

SEQ ID NO: 957136 - DNA, 15 bp, Homo sapiens
ctggcttttgttcct

SEQ ID NO: 957137 - DNA, 15 bp, Homo sapiens
tggcttttgttcctt

SEQ ID NO: 957138 - DNA, 15 bp, Homo sapiens
ggcttttgttccttg

SEQ ID NO: 957139 - DNA, 15 bp, Homo sapiens
gcttttgttccttgg

SEQ ID NO: 957140 - DNA, 15 bp, Homo sapiens
cttttgttccttgga

SEQ ID NO: 957141 - DNA, 15 bp, Homo sapiens
ttttgttccttggaa

SEQ ID NO: 957142 - DNA, 15 bp, Homo sapiens
tttgttccttggaat

SEQ ID NO: 957143 - DNA, 15 bp, Homo sapiens
ttgttccttggaatg

SEQ ID NO: 957144 - DNA, 15 bp, Homo sapiens
tgttccttggaatgg

SEQ ID NO: 957145 - DNA, 15 bp, Homo sapiens
gttccttggaatgga

SEQ ID NO: 957146 - DNA, 15 bp, Homo sapiens
ttccttggaatggat

SEQ ID NO: 957147 - DNA, 15 bp, Homo sapiens
tccttggaatggatg

SEQ ID NO: 957148 - DNA, 15 bp, Homo sapiens
ccttggaatggatgt

SEQ ID NO: 957149 - DNA, 15 bp, Homo sapiens
cttggaatggatgta

SEQ ID NO: 957150 - DNA, 15 bp, Homo sapiens
ttggaatggatgtag

SEQ ID NO: 957151 - DNA, 15 bp, Homo sapiens
tggaatggatgtagc

SEQ ID NO: 957152 - DNA, 15 bp, Homo sapiens
ggaatggatgtagcc

SEQ ID NO: 957153 - DNA, 15 bp, Homo sapiens
gaatggatgtagcca

SEQ ID NO: 957154 - DNA, 15 bp, Homo sapiens
aatggatgtagccaa

SEQ ID NO: 957155 - DNA, 15 bp, Homo sapiens
atggatgtagccaac

SEQ ID NO: 957156 - DNA, 15 bp, Homo sapiens
tggatgtagccaaca

SEQ ID NO: 957157 - DNA, 15 bp, Homo sapiens
ggatgtagccaacag

SEQ ID NO: 957158 - DNA, 15 bp, Homo sapiens
gatgtagccaacagt

SEQ ID NO: 957159 - DNA, 15 bp, Homo sapiens
atgtagccaacagta

SEQ ID NO: 957160 - DNA, 15 bp, Homo sapiens
tgtagccaacagtag

SEQ ID NO: 957161 - DNA, 15 bp, Homo sapiens
gtagccaacagtagc

SEQ ID NO: 957162 - DNA, 15 bp, Homo sapiens
tagccaacagtagct

SEQ ID NO: 957163 - DNA, 15 bp, Homo sapiens
agccaacagtagctg

SEQ ID NO: 957164 - DNA, 15 bp, Homo sapiens
gccaacagtagctga

SEQ ID NO: 957165 - DNA, 15 bp, Homo sapiens
ccaacagtagctgaa

SEQ ID NO: 957166 - DNA, 15 bp, Homo sapiens
caacagtagctgaaa

SEQ ID NO: 957167 - DNA, 15 bp, Homo sapiens
aacagtagctgaaat

SEQ ID NO: 957168 - DNA, 15 bp, Homo sapiens
acagtagctgaaata

SEQ ID NO: 957169 - DNA, 15 bp, Homo sapiens
cagtagctgaaatat

SEQ ID NO: 957170 - DNA, 15 bp, Homo sapiens
agtagctgaaatatt

SEQ ID NO: 957171 - DNA, 15 bp, Homo sapiens
gtagctgaaatatta

SEQ ID NO: 957172 - DNA, 15 bp, Homo sapiens
tagctgaaatattaa

SEQ ID NO: 957173 - DNA, 15 bp, Homo sapiens
agctgaaatattaag

SEQ ID NO: 957174 - DNA, 15 bp, Homo sapiens
gctgaaatattaagg

SEQ ID NO: 957175 - DNA, 15 bp, Homo sapiens
ctgaaatattaaggg

SEQ ID NO: 957176 - DNA, 15 bp, Homo sapiens
tgaaatattaagggc

SEQ ID NO: 957177 - DNA, 15 bp, Homo sapiens
gaaatattaagggct

SEQ ID NO: 957178 - DNA, 15 bp, Homo sapiens
aaatattaagggctc

SEQ ID NO: 957179 - DNA, 15 bp, Homo sapiens
aatattaagggctct

SEQ ID NO: 957180 - DNA, 15 bp, Homo sapiens
atattaagggctctt

SEQ ID NO: 957181 - DNA, 15 bp, Homo sapiens
tattaagggctcttc

SEQ ID NO: 957182 - DNA, 15 bp, Homo sapiens
attaagggctcttcc

SEQ ID NO: 957183 - DNA, 15 bp, Homo sapiens
ttaagggctcttcct

SEQ ID NO: 957184 - DNA, 15 bp, Homo sapiens
taagggctcttcctg

SEQ ID NO: 957185 - DNA, 15 bp, Homo sapiens
aagggctcttcctgg

SEQ ID NO: 957186 - DNA, 15 bp, Homo sapiens
agggctcttcctgga

SEQ ID NO: 957187 - DNA, 15 bp, Homo sapiens
gggctcttcctggac

SEQ ID NO: 957188 - DNA, 15 bp, Homo sapiens
ggctcttcctggacc

SEQ ID NO: 957189 - DNA, 15 bp, Homo sapiens
gctcttcctggacca

SEQ ID NO: 957190 - DNA, 15 bp, Homo sapiens
ctcttcctggaccat

SEQ ID NO: 957191 - DNA, 15 bp, Homo sapiens
tcttcctggaccatg

SEQ ID NO: 957192 - DNA, 15 bp, Homo sapiens
cttcctggaccatgg

SEQ ID NO: 957193 - DNA, 15 bp, Homo sapiens
ttcctggaccatgga

SEQ ID NO: 957194 - DNA, 15 bp, Homo sapiens
tcctggaccatggat

SEQ ID NO: 957195 - DNA, 15 bp, Homo sapiens
cctggaccatggatg

SEQ ID NO: 957196 - DNA, 15 bp, Homo sapiens
ctggaccatggatgc

SEQ ID NO: 957197 - DNA, 15 bp, Homo sapiens
tggaccatggatgca

SEQ ID NO: 957198 - DNA, 15 bp, Homo sapiens
ggaccatggatgcac

SEQ ID NO: 957199 - DNA, 15 bp, Homo sapiens
gaccatggatgcact

SEQ ID NO: 957200 - DNA, 15 bp, Homo sapiens
accatggatgcactc

SEQ ID NO: 957201 - DNA, 15 bp, Homo sapiens
ccatggatgcactct

SEQ ID NO: 957202 - DNA, 15 bp, Homo sapiens
catggatgcactctg

SEQ ID NO: 957203 - DNA, 15 bp, Homo sapiens
atggatgcactctgt

SEQ ID NO: 957204 - DNA, 15 bp, Homo sapiens
tggatgcactctgta

SEQ ID NO: 957205 - DNA, 15 bp, Homo sapiens
ggatgcactctgtaa

SEQ ID NO: 957206 - DNA, 15 bp, Homo sapiens
gatgcactctgtaaa

SEQ ID NO: 957207 - DNA, 15 bp, Homo sapiens
atgcactctgtaaat

SEQ ID NO: 957208 - DNA, 15 bp, Homo sapiens
tgcactctgtaaatt

SEQ ID NO: 957209 - DNA, 15 bp, Homo sapiens
gcactctgtaaattc

SEQ ID NO: 957210 - DNA, 15 bp, Homo sapiens
cactctgtaaattct

SEQ ID NO: 957211 - DNA, 15 bp, Homo sapiens
actctgtaaattctc

SEQ ID NO: 957212 - DNA, 15 bp, Homo sapiens
ctctgtaaattctca

SEQ ID NO: 957213 - DNA, 15 bp, Homo sapiens
tctgtaaattctcat

SEQ ID NO: 957214 - DNA, 15 bp, Homo sapiens
ctgtaaattctcatc

SEQ ID NO: 957215 - DNA, 15 bp, Homo sapiens
tgtaaattctcatca

SEQ ID NO: 957216 - DNA, 15 bp, Homo sapiens
gtaaattctcatcat

SEQ ID NO: 957217 - DNA, 15 bp, Homo sapiens
taaattctcatcatt

SEQ ID NO: 957218 - DNA, 15 bp, Homo sapiens
aaattctcatcattt

SEQ ID NO: 957219 - DNA, 15 bp, Homo sapiens
aattctcatcatttt

SEQ ID NO: 957220 - DNA, 15 bp, Homo sapiens
attctcatcattttt

SEQ ID NO: 957221 - DNA, 15 bp, Homo sapiens
ttctcatcatttttt

SEQ ID NO: 957222 - DNA, 15 bp, Homo sapiens
tctcatcatttttta

SEQ ID NO: 957223 - DNA, 15 bp, Homo sapiens
ctcatcattttttat

SEQ ID NO: 957224 - DNA, 15 bp, Homo sapiens
tcatcattttttatt

SEQ ID NO: 957225 - DNA, 15 bp, Homo sapiens
catcattttttattg

SEQ ID NO: 957226 - DNA, 15 bp, Homo sapiens
atcattttttattgt

SEQ ID NO: 957227 - DNA, 15 bp, Homo sapiens
tcattttttattgta

SEQ ID NO: 957228 - DNA, 15 bp, Homo sapiens
cattttttattgtag

SEQ ID NO: 957229 - DNA, 15 bp, Homo sapiens
attttttattgtaga

SEQ ID NO: 957230 - DNA, 15 bp, Homo sapiens
ttttttattgtagaa

SEQ ID NO: 957231 - DNA, 15 bp, Homo sapiens
tttttattgtagaat

SEQ ID NO: 957232 - DNA, 15 bp, Homo sapiens
ttttattgtagaata

SEQ ID NO: 957233 - DNA, 15 bp, Homo sapiens
tttattgtagaataa

SEQ ID NO: 957234 - DNA, 15 bp, Homo sapiens
ttattgtagaataaa

SEQ ID NO: 957235 - DNA, 15 bp, Homo sapiens
tattgtagaataaat

SEQ ID NO: 957236 - DNA, 15 bp, Homo sapiens
attgtagaataaatg

SEQ ID NO: 957237 - DNA, 15 bp, Homo sapiens
ttgtagaataaatgt

SEQ ID NO: 957238 - DNA, 15 bp, Homo sapiens
tgtagaataaatgta

SEQ ID NO: 957239 - DNA, 15 bp, Homo sapiens
gtagaataaatgtag

SEQ ID NO: 957240 - DNA, 15 bp, Homo sapiens
tagaataaatgtaga

SEQ ID NO: 957241 - DNA, 15 bp, Homo sapiens
agaataaatgtagaa

SEQ ID NO: 957242 - DNA, 15 bp, Homo sapiens
gaataaatgtagaat

SEQ ID NO: 957243 - DNA, 15 bp, Homo sapiens
aataaatgtagaatt

SEQ ID NO: 957244 - DNA, 15 bp, Homo sapiens
ataaatgtagaattt

SEQ ID NO: 957245 - DNA, 15 bp, Homo sapiens
taaatgtagaatttt

SEQ ID NO: 957246 - DNA, 15 bp, Homo sapiens
aaatgtagaatttta

SEQ ID NO: 957247 - DNA, 15 bp, Homo sapiens
aatgtagaattttaa

SEQ ID NO: 957248 - DNA, 15 bp, Homo sapiens
atgtagaattttaat

SEQ ID NO: 957249 - DNA, 15 bp, Homo sapiens
tgtagaattttaatg

SEQ ID NO: 957250 - DNA, 15 bp, Homo sapiens
gtagaattttaatgt

SEQ ID NO: 957251 - DNA, 15 bp, Homo sapiens
tagaattttaatgta

SEQ ID NO: 957252 - DNA, 15 bp, Homo sapiens
agaattttaatgtag

SEQ ID NO: 957253 - DNA, 15 bp, Homo sapiens
gaattttaatgtaga

SEQ ID NO: 957254 - DNA, 15 bp, Homo sapiens
aattttaatgtagaa

SEQ ID NO: 957255 - DNA, 15 bp, Homo sapiens
attttaatgtagaat

SEQ ID NO: 957256 - DNA, 15 bp, Homo sapiens
ttttaatgtagaata

SEQ ID NO: 957257 - DNA, 15 bp, Homo sapiens
tttaatgtagaataa

SEQ ID NO: 957258 - DNA, 15 bp, Homo sapiens
ttaatgtagaataaa

SEQ ID NO: 957259 - DNA, 15 bp, Homo sapiens
taatgtagaataaat

SEQ ID NO: 957260 - DNA, 15 bp, Homo sapiens
aatgtagaataaatt

SEQ ID NO: 957261 - DNA, 15 bp, Homo sapiens
atgtagaataaattt

SEQ ID NO: 957262 - DNA, 15 bp, Homo sapiens
tgtagaataaattta

SEQ ID NO: 957263 - DNA, 15 bp, Homo sapiens
gtagaataaatttat

SEQ ID NO: 957264 - DNA, 15 bp, Homo sapiens
tagaataaatttatt

SEQ ID NO: 957265 - DNA, 15 bp, Homo sapiens
agaataaatttattt

SEQ ID NO: 957266 - DNA, 15 bp, Homo sapiens
gaataaatttattta

SEQ ID NO: 957267 - DNA, 15 bp, Homo sapiens
aataaatttatttaa

SEQ ID NO: 957268 - DNA, 15 bp, Homo sapiens
ataaatttatttaat

SEQ ID NO: 957269 - DNA, 15 bp, Homo sapiens
taaatttatttaatg

SEQ ID NO: 957270 - DNA, 15 bp, Homo sapiens
aaatttatttaatgt

SEQ ID NO: 957271 - DNA, 15 bp, Homo sapiens
aatttatttaatgta

SEQ ID NO: 957272 - DNA, 15 bp, Homo sapiens
atttatttaatgtag

SEQ ID NO: 957273 - DNA, 15 bp, Homo sapiens
tttatttaatgtaga

SEQ ID NO: 957274 - DNA, 15 bp, Homo sapiens
ttatttaatgtagaa

SEQ ID NO: 957275 - DNA, 15 bp, Homo sapiens
tatttaatgtagaat

SEQ ID NO: 957276 - DNA, 15 bp, Homo sapiens
atttaatgtagaata

SEQ ID NO: 957277 - DNA, 15 bp, Homo sapiens
taatgtagaataaaa

SEQ ID NO: 957278 - DNA, 15 bp, Homo sapiens
aatgtagaataaaaa

SEQ ID NO: 957279 - DNA, 15 bp, Homo sapiens
atgtagaataaaaaa

SEQ ID NO: 957280 - DNA, 15 bp, Homo sapiens
tgtagaataaaaaat

SEQ ID NO: 957281 - DNA, 15 bp, Homo sapiens
gtagaataaaaaata

SEQ ID NO: 957282 - DNA, 15 bp, Homo sapiens
tagaataaaaaataa

SEQ ID NO: 957283 - DNA, 15 bp, Homo sapiens
agaataaaaaataaa

SEQ ID NO: 957284 - DNA, 15 bp, Homo sapiens
gaataaaaaataaaa

SEQ ID NO: 957285 - DNA, 15 bp, Homo sapiens
aataaaaaataaaaa

SEQ ID NO: 957286 - DNA, 15 bp, Homo sapiens
ataaaaaataaaaaa

SEQ ID NO: 957287 - DNA, 15 bp, Homo sapiens
taaaaaataaaaaaa

SEQ ID NO: 957288 - DNA, 15 bp, Homo sapiens
aaaaaataaaaaaac

SEQ ID NO: 957289 - DNA, 15 bp, Homo sapiens
aaaaataaaaaaact

SEQ ID NO: 957290 - DNA, 15 bp, Homo sapiens
aaaataaaaaaacta

SEQ ID NO: 957291 - DNA, 15 bp, Homo sapiens
aaataaaaaaactag

SEQ ID NO: 957292 - DNA, 15 bp, Homo sapiens
aataaaaaaactaga

SEQ ID NO: 957293 - DNA, 15 bp, Homo sapiens
ataaaaaaactagag

SEQ ID NO: 957294 - DNA, 15 bp, Homo sapiens
taaaaaaactagagt

SEQ ID NO: 957295 - DNA, 15 bp, Homo sapiens
aaaaaaactagagta

SEQ ID NO: 957296 - DNA, 15 bp, Homo sapiens
aaaaaactagagtag

SEQ ID NO: 957297 - DNA, 15 bp, Homo sapiens
aaaaactagagtaga

SEQ ID NO: 957298 - DNA, 15 bp, Homo sapiens
aaaactagagtagaa

SEQ ID NO: 957299 - DNA, 15 bp, Homo sapiens
aaactagagtagaat

SEQ ID NO: 957300 - DNA, 15 bp, Homo sapiens
aactagagtagaata

SEQ ID NO: 957301 - DNA, 15 bp, Homo sapiens
actagagtagaatat

SEQ ID NO: 957302 - DNA, 15 bp, Homo sapiens
ctagagtagaatatc

SEQ ID NO: 957303 - DNA, 15 bp, Homo sapiens
tagagtagaatatca

SEQ ID NO: 957304 - DNA, 15 bp, Homo sapiens
agagtagaatatcat

SEQ ID NO: 957305 - DNA, 15 bp, Homo sapiens
gagtagaatatcata

SEQ ID NO: 957306 - DNA, 15 bp, Homo sapiens
agtagaatatcataa

SEQ ID NO: 957307 - DNA, 15 bp, Homo sapiens
gtagaatatcataag

SEQ ID NO: 957308 - DNA, 15 bp, Homo sapiens
tagaatatcataagt

SEQ ID NO: 957309 - DNA, 15 bp, Homo sapiens
agaatatcataagtt

SEQ ID NO: 957310 - DNA, 15 bp, Homo sapiens
gaatatcataagtta

SEQ ID NO: 957311 - DNA, 15 bp, Homo sapiens
aatatcataagttac

SEQ ID NO: 957312 - DNA, 15 bp, Homo sapiens
atatcataagttaca

SEQ ID NO: 957313 - DNA, 15 bp, Homo sapiens
tatcataagttacaa

SEQ ID NO: 957314 - DNA, 15 bp, Homo sapiens
atcataagttacaat

SEQ ID NO: 957315 - DNA, 15 bp, Homo sapiens
tcataagttacaatc

SEQ ID NO: 957316 - DNA, 15 bp, Homo sapiens
cataagttacaatct

SEQ ID NO: 957317 - DNA, 15 bp, Homo sapiens
ataagttacaatctg

SEQ ID NO: 957318 - DNA, 15 bp, Homo sapiens
taagttacaatctgt

SEQ ID NO: 957319 - DNA, 15 bp, Homo sapiens
aagttacaatctgtg

SEQ ID NO: 957320 - DNA, 15 bp, Homo sapiens
agttacaatctgtga

SEQ ID NO: 957321 - DNA, 15 bp, Homo sapiens
gttacaatctgtgaa

SEQ ID NO: 957322 - DNA, 15 bp, Homo sapiens
ttacaatctgtgaat

SEQ ID NO: 957323 - DNA, 15 bp, Homo sapiens
tacaatctgtgaata

SEQ ID NO: 957324 - DNA, 15 bp, Homo sapiens
acaatctgtgaatat

SEQ ID NO: 957325 - DNA, 15 bp, Homo sapiens
caatctgtgaatatg

SEQ ID NO: 957326 - DNA, 15 bp, Homo sapiens
aatctgtgaatatgg

SEQ ID NO: 957327 - DNA, 15 bp, Homo sapiens
atctgtgaatatgga

SEQ ID NO: 957328 - DNA, 15 bp, Homo sapiens
tctgtgaatatggac

SEQ ID NO: 957329 - DNA, 15 bp, Homo sapiens
ctgtgaatatggacc

SEQ ID NO: 957330 - DNA, 15 bp, Homo sapiens
tgtgaatatggacca

SEQ ID NO: 957331 - DNA, 15 bp, Homo sapiens
gtgaatatggaccag

SEQ ID NO: 957332 - DNA, 15 bp, Homo sapiens
tgaatatggaccaga

SEQ ID NO: 957333 - DNA, 15 bp, Homo sapiens
gaatatggaccagac

SEQ ID NO: 957334 - DNA, 15 bp, Homo sapiens
aatatggaccagacc

SEQ ID NO: 957335 - DNA, 15 bp, Homo sapiens
atatggaccagaccc

SEQ ID NO: 957336 - DNA, 15 bp, Homo sapiens
tatggaccagaccct

SEQ ID NO: 957337 - DNA, 15 bp, Homo sapiens
atggaccagaccctt

SEQ ID NO: 957338 - DNA, 15 bp, Homo sapiens
tggaccagacccttt

SEQ ID NO: 957339 - DNA, 15 bp, Homo sapiens
ggaccagaccctttg

SEQ ID NO: 957340 - DNA, 15 bp, Homo sapiens
gaccagaccctttgt

SEQ ID NO: 957341 - DNA, 15 bp, Homo sapiens
accagaccctttgta

SEQ ID NO: 957342 - DNA, 15 bp, Homo sapiens
ccagaccctttgtag

SEQ ID NO: 957343 - DNA, 15 bp, Homo sapiens
cagaccctttgtagt

SEQ ID NO: 957344 - DNA, 15 bp, Homo sapiens
agaccctttgtagtt

SEQ ID NO: 957345 - DNA, 15 bp, Homo sapiens
gaccctttgtagtta

SEQ ID NO: 957346 - DNA, 15 bp, Homo sapiens
accctttgtagttat

SEQ ID NO: 957347 - DNA, 15 bp, Homo sapiens
ccctttgtagttatc

SEQ ID NO: 957348 - DNA, 15 bp, Homo sapiens
cctttgtagttatct

SEQ ID NO: 957349 - DNA, 15 bp, Homo sapiens
ctttgtagttatctt

SEQ ID NO: 957350 - DNA, 15 bp, Homo sapiens
tttgtagttatctta

SEQ ID NO: 957351 - DNA, 15 bp, Homo sapiens
ttgtagttatcttac

SEQ ID NO: 957352 - DNA, 15 bp, Homo sapiens
tgtagttatcttaca

SEQ ID NO: 957353 - DNA, 15 bp, Homo sapiens
gtagttatcttacag

SEQ ID NO: 957354 - DNA, 15 bp, Homo sapiens
tagttatcttacagc

SEQ ID NO: 957355 - DNA, 15 bp, Homo sapiens
agttatcttacagcc

SEQ ID NO: 957356 - DNA, 15 bp, Homo sapiens
gttatcttacagcca

SEQ ID NO: 957357 - DNA, 15 bp, Homo sapiens
ttatcttacagccac

SEQ ID NO: 957358 - DNA, 15 bp, Homo sapiens
tatcttacagccact

SEQ ID NO: 957359 - DNA, 15 bp, Homo sapiens
atcttacagccactt

SEQ ID NO: 957360 - DNA, 15 bp, Homo sapiens
tcttacagccacttg

SEQ ID NO: 957361 - DNA, 15 bp, Homo sapiens
cttacagccacttga

SEQ ID NO: 957362 - DNA, 15 bp, Homo sapiens
ttacagccacttgaa

SEQ ID NO: 957363 - DNA, 15 bp, Homo sapiens
tacagccacttgaac

SEQ ID NO: 957364 - DNA, 15 bp, Homo sapiens
acagccacttgaact

SEQ ID NO: 957365 - DNA, 15 bp, Homo sapiens
cagccacttgaactc

SEQ ID NO: 957366 - DNA, 15 bp, Homo sapiens
agccacttgaactct

SEQ ID NO: 957367 - DNA, 15 bp, Homo sapiens
gccacttgaactcta

SEQ ID NO: 957368 - DNA, 15 bp, Homo sapiens
ccacttgaactctat

SEQ ID NO: 957369 - DNA, 15 bp, Homo sapiens
cacttgaactctata

SEQ ID NO: 957370 - DNA, 15 bp, Homo sapiens
acttgaactctatac

SEQ ID NO: 957371 - DNA, 15 bp, Homo sapiens
cttgaactctatacc

SEQ ID NO: 957372 - DNA, 15 bp, Homo sapiens
ttgaactctatacct

SEQ ID NO: 957373 - DNA, 15 bp, Homo sapiens
tgaactctatacctt

SEQ ID NO: 957374 - DNA, 15 bp, Homo sapiens
gaactctataccttt

SEQ ID NO: 957375 - DNA, 15 bp, Homo sapiens
aactctatacctttt

SEQ ID NO: 957376 - DNA, 15 bp, Homo sapiens
actctatacctttta

SEQ ID NO: 957377 - DNA, 15 bp, Homo sapiens
ctctataccttttac

SEQ ID NO: 957378 - DNA, 15 bp, Homo sapiens
tctataccttttact

SEQ ID NO: 957379 - DNA, 15 bp, Homo sapiens
ctataccttttactg

SEQ ID NO: 957380 - DNA, 15 bp, Homo sapiens
tataccttttactga

SEQ ID NO: 957381 - DNA, 15 bp, Homo sapiens
ataccttttactgag

SEQ ID NO: 957382 - DNA, 15 bp, Homo sapiens
taccttttactgagg

SEQ ID NO: 957383 - DNA, 15 bp, Homo sapiens
accttttactgagga

SEQ ID NO: 957384 - DNA, 15 bp, Homo sapiens
ccttttactgaggac

SEQ ID NO: 957385 - DNA, 15 bp, Homo sapiens
cttttactgaggaca

SEQ ID NO: 957386 - DNA, 15 bp, Homo sapiens
ttttactgaggacag

SEQ ID NO: 957387 - DNA, 15 bp, Homo sapiens
tttactgaggacaga

SEQ ID NO: 957388 - DNA, 15 bp, Homo sapiens
ttactgaggacagaa

SEQ ID NO: 957389 - DNA, 15 bp, Homo sapiens
tactgaggacagaac

SEQ ID NO: 957390 - DNA, 15 bp, Homo sapiens
actgaggacagaaca

SEQ ID NO: 957391 - DNA, 15 bp, Homo sapiens
ctgaggacagaacaa

SEQ ID NO: 957392 - DNA, 15 bp, Homo sapiens
tgaggacagaacaag

SEQ ID NO: 957393 - DNA, 15 bp, Homo sapiens
gaggacagaacaagc

SEQ ID NO: 957394 - DNA, 15 bp, Homo sapiens
aggacagaacaagct

SEQ ID NO: 957395 - DNA, 15 bp, Homo sapiens
ggacagaacaagctc

SEQ ID NO: 957396 - DNA, 15 bp, Homo sapiens
gacagaacaagctcc

SEQ ID NO: 957397 - DNA, 15 bp, Homo sapiens
acagaacaagctcct

SEQ ID NO: 957398 - DNA, 15 bp, Homo sapiens
cagaacaagctcctg

SEQ ID NO: 957399 - DNA, 15 bp, Homo sapiens
agaacaagctcctga

SEQ ID NO: 957400 - DNA, 15 bp, Homo sapiens
gaacaagctcctgat

SEQ ID NO: 957401 - DNA, 15 bp, Homo sapiens
aacaagctcctgatt

SEQ ID NO: 957402 - DNA, 15 bp, Homo sapiens
acaagctcctgattt

SEQ ID NO: 957403 - DNA, 15 bp, Homo sapiens
caagctcctgatttg

SEQ ID NO: 957404 - DNA, 15 bp, Homo sapiens
aagctcctgatttgt

SEQ ID NO: 957405 - DNA, 15 bp, Homo sapiens
agctcctgatttgtt

SEQ ID NO: 957406 - DNA, 15 bp, Homo sapiens
gctcctgatttgttc

SEQ ID NO: 957407 - DNA, 15 bp, Homo sapiens
ctcctgatttgttca

SEQ ID NO: 957408 - DNA, 15 bp, Homo sapiens
tcctgatttgttcat

SEQ ID NO: 957409 - DNA, 15 bp, Homo sapiens
cctgatttgttcatc

SEQ ID NO: 957410 - DNA, 15 bp, Homo sapiens
ctgatttgttcatct

SEQ ID NO: 957411 - DNA, 15 bp, Homo sapiens
tgatttgttcatctt

SEQ ID NO: 957412 - DNA, 15 bp, Homo sapiens
gatttgttcatcttc

SEQ ID NO: 957413 - DNA, 15 bp, Homo sapiens
atttgttcatcttcc

SEQ ID NO: 957414 - DNA, 15 bp, Homo sapiens
tttgttcatcttcct

SEQ ID NO: 957415 - DNA, 15 bp, Homo sapiens
ttgttcatcttcctc

SEQ ID NO: 957416 - DNA, 15 bp, Homo sapiens
tgttcatcttcctca

SEQ ID NO: 957417 - DNA, 15 bp, Homo sapiens
gttcatcttcctcat

SEQ ID NO: 957418 - DNA, 15 bp, Homo sapiens
ttcatcttcctcatc

SEQ ID NO: 957419 - DNA, 15 bp, Homo sapiens
tcatcttcctcatca

SEQ ID NO: 957420 - DNA, 15 bp, Homo sapiens
catcttcctcatcag

SEQ ID NO: 957421 - DNA, 15 bp, Homo sapiens
atcttcctcatcaga

SEQ ID NO: 957422 - DNA, 15 bp, Homo sapiens
tcttcctcatcagaa

SEQ ID NO: 957423 - DNA, 15 bp, Homo sapiens
cttcctcatcagaaa

SEQ ID NO: 957424 - DNA, 15 bp, Homo sapiens
ttcctcatcagaaat

SEQ ID NO: 957425 - DNA, 15 bp, Homo sapiens
tcctcatcagaaata

SEQ ID NO: 957426 - DNA, 15 bp, Homo sapiens
cctcatcagaaatag

SEQ ID NO: 957427 - DNA, 15 bp, Homo sapiens
ctcatcagaaataga

SEQ ID NO: 957428 - DNA, 15 bp, Homo sapiens
tcatcagaaatagag

SEQ ID NO: 957429 - DNA, 15 bp, Homo sapiens
catcagaaatagagg

SEQ ID NO: 957430 - DNA, 15 bp, Homo sapiens
atcagaaatagaggc

SEQ ID NO: 957431 - DNA, 15 bp, Homo sapiens
tcagaaatagaggct

SEQ ID NO: 957432 - DNA, 15 bp, Homo sapiens
cagaaatagaggctt

SEQ ID NO: 957433 - DNA, 15 bp, Homo sapiens
agaaatagaggctta

SEQ ID NO: 957434 - DNA, 15 bp, Homo sapiens
gaaatagaggcttat

SEQ ID NO: 957435 - DNA, 15 bp, Homo sapiens
aaatagaggcttatg

SEQ ID NO: 957436 - DNA, 15 bp, Homo sapiens
aatagaggcttatgg

SEQ ID NO: 957437 - DNA, 15 bp, Homo sapiens
atagaggcttatgga

SEQ ID NO: 957438 - DNA, 15 bp, Homo sapiens
tagaggcttatggat

SEQ ID NO: 957439 - DNA, 15 bp, Homo sapiens
agaggcttatggatt

SEQ ID NO: 957440 - DNA, 15 bp, Homo sapiens
gaggcttatggattt

SEQ ID NO: 957441 - DNA, 15 bp, Homo sapiens
aggcttatggatttt

SEQ ID NO: 957442 - DNA, 15 bp, Homo sapiens
ggcttatggattttg

SEQ ID NO: 957443 - DNA, 15 bp, Homo sapiens
gcttatggattttgg

SEQ ID NO: 957444 - DNA, 15 bp, Homo sapiens
cttatggattttgga

SEQ ID NO: 957445 - DNA, 15 bp, Homo sapiens
ttatggattttggat

SEQ ID NO: 957446 - DNA, 15 bp, Homo sapiens
tatggattttggatt

SEQ ID NO: 957447 - DNA, 15 bp, Homo sapiens
atggattttggatta

SEQ ID NO: 957448 - DNA, 15 bp, Homo sapiens
tggattttggattat

SEQ ID NO: 957449 - DNA, 15 bp, Homo sapiens
ggattttggattatt

SEQ ID NO: 957450 - DNA, 15 bp, Homo sapiens
gattttggattattc

SEQ ID NO: 957451 - DNA, 15 bp, Homo sapiens
attttggattattct

SEQ ID NO: 957452 - DNA, 15 bp, Homo sapiens
ttttggattattctt

SEQ ID NO: 957453 - DNA, 15 bp, Homo sapiens
tttggattattctta

SEQ ID NO: 957454 - DNA, 15 bp, Homo sapiens
ttggattattcttat

SEQ ID NO: 957455 - DNA, 15 bp, Homo sapiens
tggattattcttatc

SEQ ID NO: 957456 - DNA, 15 bp, Homo sapiens
ggattattcttatct

SEQ ID NO: 957457 - DNA, 15 bp, Homo sapiens
gattattcttatcta

SEQ ID NO: 957458 - DNA, 15 bp, Homo sapiens
attattcttatctaa

SEQ ID NO: 957459 - DNA, 15 bp, Homo sapiens
ttattcttatctaag

SEQ ID NO: 957460 - DNA, 15 bp, Homo sapiens
tattcttatctaaga

SEQ ID NO: 957461 - DNA, 15 bp, Homo sapiens
attcttatctaagat

SEQ ID NO: 957462 - DNA, 15 bp, Homo sapiens
ttcttatctaagatc

SEQ ID NO: 957463 - DNA, 15 bp, Homo sapiens
tcttatctaagatcc

SEQ ID NO: 957464 - DNA, 15 bp, Homo sapiens
cttatctaagatcct

SEQ ID NO: 957465 - DNA, 15 bp, Homo sapiens
ttatctaagatcctt

SEQ ID NO: 957466 - DNA, 15 bp, Homo sapiens
tatctaagatccttt

SEQ ID NO: 957467 - DNA, 15 bp, Homo sapiens
atctaagatcctttc

SEQ ID NO: 957468 - DNA, 15 bp, Homo sapiens
tctaagatcctttca

SEQ ID NO: 957469 - DNA, 15 bp, Homo sapiens
ctaagatcctttcac

SEQ ID NO: 957470 - DNA, 15 bp, Homo sapiens
taagatcctttcaca

SEQ ID NO: 957471 - DNA, 15 bp, Homo sapiens
aagatcctttcacag

SEQ ID NO: 957472 - DNA, 15 bp, Homo sapiens
agatcctttcacagg

SEQ ID NO: 957473 - DNA, 15 bp, Homo sapiens
gatcctttcacagga

SEQ ID NO: 957474 - DNA, 15 bp, Homo sapiens
atcctttcacaggag

SEQ ID NO: 957475 - DNA, 15 bp, Homo sapiens
tcctttcacaggagt

SEQ ID NO: 957476 - DNA, 15 bp, Homo sapiens
cctttcacaggagta

SEQ ID NO: 957477 - DNA, 15 bp, Homo sapiens
ctttcacaggagtag

SEQ ID NO: 957478 - DNA, 15 bp, Homo sapiens
tttcacaggagtaga

SEQ ID NO: 957479 - DNA, 15 bp, Homo sapiens
ttcacaggagtagaa

SEQ ID NO: 957480 - DNA, 15 bp, Homo sapiens
tcacaggagtagaat

SEQ ID NO: 957481 - DNA, 15 bp, Homo sapiens
cacaggagtagaata

SEQ ID NO: 957482 - DNA, 15 bp, Homo sapiens
acaggagtagaataa

SEQ ID NO: 957483 - DNA, 15 bp, Homo sapiens
caggagtagaataag

SEQ ID NO: 957484 - DNA, 15 bp, Homo sapiens
aggagtagaataaga

SEQ ID NO: 957485 - DNA, 15 bp, Homo sapiens
ggagtagaataagat

SEQ ID NO: 957486 - DNA, 15 bp, Homo sapiens
gagtagaataagatc

SEQ ID NO: 957487 - DNA, 15 bp, Homo sapiens
agtagaataagatct

SEQ ID NO: 957488 - DNA, 15 bp, Homo sapiens
gtagaataagatcta

SEQ ID NO: 957489 - DNA, 15 bp, Homo sapiens
tagaataagatctaa

SEQ ID NO: 957490 - DNA, 15 bp, Homo sapiens
agaataagatctaat

SEQ ID NO: 957491 - DNA, 15 bp, Homo sapiens
gaataagatctaatt

SEQ ID NO: 957492 - DNA, 15 bp, Homo sapiens
aataagatctaattc

SEQ ID NO: 957493 - DNA, 15 bp, Homo sapiens
ataagatctaattct

SEQ ID NO: 957494 - DNA, 15 bp, Homo sapiens
taagatctaattcta

SEQ ID NO: 957495 - DNA, 15 bp, Homo sapiens
aagatctaattctat

SEQ ID NO: 957496 - DNA, 15 bp, Homo sapiens
agatctaattctatt

SEQ ID NO: 957497 - DNA, 15 bp, Homo sapiens
gatctaattctatta

SEQ ID NO: 957498 - DNA, 15 bp, Homo sapiens
atctaattctattag

SEQ ID NO: 957499 - DNA, 15 bp, Homo sapiens
tctaattctattagc

SEQ ID NO: 957500 - DNA, 15 bp, Homo sapiens
ctaattctattagct

SEQ ID NO: 957501 - DNA, 15 bp, Homo sapiens
taattctattagctc

SEQ ID NO: 957502 - DNA, 15 bp, Homo sapiens
aattctattagctca

SEQ ID NO: 957503 - DNA, 15 bp, Homo sapiens
attctattagctcaa

SEQ ID NO: 957504 - DNA, 15 bp, Homo sapiens
ttctattagctcaaa

SEQ ID NO: 957505 - DNA, 15 bp, Homo sapiens
tctattagctcaaaa

SEQ ID NO: 957506 - DNA, 15 bp, Homo sapiens
ctattagctcaaaag

SEQ ID NO: 957507 - DNA, 15 bp, Homo sapiens
tattagctcaaaagc

SEQ ID NO: 957508 - DNA, 15 bp, Homo sapiens
attagctcaaaagct

SEQ ID NO: 957509 - DNA, 15 bp, Homo sapiens
ttagctcaaaagctt

SEQ ID NO: 957510 - DNA, 15 bp, Homo sapiens
tagctcaaaagcttt

SEQ ID NO: 957511 - DNA, 15 bp, Homo sapiens
agctcaaaagctttt

SEQ ID NO: 957512 - DNA, 15 bp, Homo sapiens
gctcaaaagcttttg

SEQ ID NO: 957513 - DNA, 15 bp, Homo sapiens
ctcaaaagcttttgc

SEQ ID NO: 957514 - DNA, 15 bp, Homo sapiens
tcaaaagcttttgct

SEQ ID NO: 957515 - DNA, 15 bp, Homo sapiens
caaaagcttttgctg

SEQ ID NO: 957516 - DNA, 15 bp, Homo sapiens
aaaagcttttgctgg

SEQ ID NO: 957517 - DNA, 15 bp, Homo sapiens
aaagcttttgctggc

SEQ ID NO: 957518 - DNA, 15 bp, Homo sapiens
aagcttttgctggct

SEQ ID NO: 957519 - DNA, 15 bp, Homo sapiens
agcttttgctggctc

SEQ ID NO: 957520 - DNA, 15 bp, Homo sapiens
gcttttgctggctca

SEQ ID NO: 957521 - DNA, 15 bp, Homo sapiens
cttttgctggctcat

SEQ ID NO: 957522 - DNA, 15 bp, Homo sapiens
ttttgctggctcata

SEQ ID NO: 957523 - DNA, 15 bp, Homo sapiens
tttgctggctcatag

SEQ ID NO: 957524 - DNA, 15 bp, Homo sapiens
ttgctggctcataga

SEQ ID NO: 957525 - DNA, 15 bp, Homo sapiens
tgctggctcatagag

SEQ ID NO: 957526 - DNA, 15 bp, Homo sapiens
gctggctcatagaga

SEQ ID NO: 957527 - DNA, 15 bp, Homo sapiens
ctggctcatagagac

SEQ ID NO: 957528 - DNA, 15 bp, Homo sapiens
tggctcatagagaca

SEQ ID NO: 957529 - DNA, 15 bp, Homo sapiens
ggctcatagagacac

SEQ ID NO: 957530 - DNA, 15 bp, Homo sapiens
gctcatagagacaca

SEQ ID NO: 957531 - DNA, 15 bp, Homo sapiens
ctcatagagacacat

SEQ ID NO: 957532 - DNA, 15 bp, Homo sapiens
tcatagagacacatt

SEQ ID NO: 957533 - DNA, 15 bp, Homo sapiens
catagagacacattc

SEQ ID NO: 957534 - DNA, 15 bp, Homo sapiens
atagagacacattca

SEQ ID NO: 957535 - DNA, 15 bp, Homo sapiens
tagagacacattcag

SEQ ID NO: 957536 - DNA, 15 bp, Homo sapiens
agagacacattcagt

SEQ ID NO: 957537 - DNA, 15 bp, Homo sapiens
gagacacattcagta

SEQ ID NO: 957538 - DNA, 15 bp, Homo sapiens
agacacattcagtaa

SEQ ID NO: 957539 - DNA, 15 bp, Homo sapiens
gacacattcagtaaa

SEQ ID NO: 957540 - DNA, 15 bp, Homo sapiens
acacattcagtaaat

SEQ ID NO: 957541 - DNA, 15 bp, Homo sapiens
cacattcagtaaatg

SEQ ID NO: 957542 - DNA, 15 bp, Homo sapiens
acattcagtaaatga

SEQ ID NO: 957543 - DNA, 15 bp, Homo sapiens
cattcagtaaatgaa

SEQ ID NO: 957544 - DNA, 15 bp, Homo sapiens
attcagtaaatgaaa

SEQ ID NO: 957545 - DNA, 15 bp, Homo sapiens
ttcagtaaatgaaaa

SEQ ID NO: 957546 - DNA, 15 bp, Homo sapiens
tcagtaaatgaaaac

SEQ ID NO: 957547 - DNA, 15 bp, Homo sapiens
cagtaaatgaaaacg

SEQ ID NO: 957548 - DNA, 15 bp, Homo sapiens
agtaaatgaaaacgt

SEQ ID NO: 957549 - DNA, 15 bp, Homo sapiens
gtaaatgaaaacgtt

SEQ ID NO: 957550 - DNA, 15 bp, Homo sapiens
taaatgaaaacgttg

SEQ ID NO: 957551 - DNA, 15 bp, Homo sapiens
aaatgaaaacgttgt

SEQ ID NO: 957552 - DNA, 15 bp, Homo sapiens
aatgaaaacgttgtt

SEQ ID NO: 957553 - DNA, 15 bp, Homo sapiens
atgaaaacgttgttc

SEQ ID NO: 957554 - DNA, 15 bp, Homo sapiens
tgaaaacgttgttct

SEQ ID NO: 957555 - DNA, 15 bp, Homo sapiens
gaaaacgttgttctg

SEQ ID NO: 957556 - DNA, 15 bp, Homo sapiens
aaaacgttgttctga

SEQ ID NO: 957557 - DNA, 15 bp, Homo sapiens
aaacgttgttctgag

SEQ ID NO: 957558 - DNA, 15 bp, Homo sapiens
aacgttgttctgagt

SEQ ID NO: 957559 - DNA, 15 bp, Homo sapiens
acgttgttctgagta

SEQ ID NO: 957560 - DNA, 15 bp, Homo sapiens
cgttgttctgagtag

SEQ ID NO: 957561 - DNA, 15 bp, Homo sapiens
gttgttctgagtagc

SEQ ID NO: 957562 - DNA, 15 bp, Homo sapiens
ttgttctgagtagct

SEQ ID NO: 957563 - DNA, 15 bp, Homo sapiens
tgttctgagtagctt

SEQ ID NO: 957564 - DNA, 15 bp, Homo sapiens
gttctgagtagcttt

SEQ ID NO: 957565 - DNA, 15 bp, Homo sapiens
ttctgagtagctttc

SEQ ID NO: 957566 - DNA, 15 bp, Homo sapiens
tctgagtagctttca

SEQ ID NO: 957567 - DNA, 15 bp, Homo sapiens
ctgagtagctttcag

SEQ ID NO: 957568 - DNA, 15 bp, Homo sapiens
tgagtagctttcagg

SEQ ID NO: 957569 - DNA, 15 bp, Homo sapiens
gagtagctttcagga

SEQ ID NO: 957570 - DNA, 15 bp, Homo sapiens
agtagctttcaggat

SEQ ID NO: 957571 - DNA, 15 bp, Homo sapiens
gtagctttcaggatt

SEQ ID NO: 957572 - DNA, 15 bp, Homo sapiens
tagctttcaggattc

SEQ ID NO: 957573 - DNA, 15 bp, Homo sapiens
agctttcaggattcc

SEQ ID NO: 957574 - DNA, 15 bp, Homo sapiens
gctttcaggattcct

SEQ ID NO: 957575 - DNA, 15 bp, Homo sapiens
ctttcaggattccta

SEQ ID NO: 957576 - DNA, 15 bp, Homo sapiens
tttcaggattcctac

SEQ ID NO: 957577 - DNA, 15 bp, Homo sapiens
ttcaggattcctact

SEQ ID NO: 957578 - DNA, 15 bp, Homo sapiens
tcaggattcctacta

SEQ ID NO: 957579 - DNA, 15 bp, Homo sapiens
caggattcctactaa

SEQ ID NO: 957580 - DNA, 15 bp, Homo sapiens
aggattcctactaaa

SEQ ID NO: 957581 - DNA, 15 bp, Homo sapiens
ggattcctactaaat

SEQ ID NO: 957582 - DNA, 15 bp, Homo sapiens
gattcctactaaatt

SEQ ID NO: 957583 - DNA, 15 bp, Homo sapiens
attcctactaaatta

SEQ ID NO: 957584 - DNA, 15 bp, Homo sapiens
ttcctactaaattat

SEQ ID NO: 957585 - DNA, 15 bp, Homo sapiens
tcctactaaattatg

SEQ ID NO: 957586 - DNA, 15 bp, Homo sapiens
cctactaaattatga

SEQ ID NO: 957587 - DNA, 15 bp, Homo sapiens
ctactaaattatgag

SEQ ID NO: 957588 - DNA, 15 bp, Homo sapiens
tactaaattatgagt

SEQ ID NO: 957589 - DNA, 15 bp, Homo sapiens
actaaattatgagtc

SEQ ID NO: 957590 - DNA, 15 bp, Homo sapiens
ctaaattatgagtca

SEQ ID NO: 957591 - DNA, 15 bp, Homo sapiens
taaattatgagtcat

SEQ ID NO: 957592 - DNA, 15 bp, Homo sapiens
aaattatgagtcatg

SEQ ID NO: 957593 - DNA, 15 bp, Homo sapiens
aattatgagtcatgt

SEQ ID NO: 957594 - DNA, 15 bp, Homo sapiens
attatgagtcatgtt

SEQ ID NO: 957595 - DNA, 15 bp, Homo sapiens
ttatgagtcatgttt

SEQ ID NO: 957596 - DNA, 15 bp, Homo sapiens
tatgagtcatgttta

SEQ ID NO: 957597 - DNA, 15 bp, Homo sapiens
atgagtcatgtttat

SEQ ID NO: 957598 - DNA, 15 bp, Homo sapiens
tgagtcatgtttatc

SEQ ID NO: 957599 - DNA, 15 bp, Homo sapiens
gagtcatgtttatca

SEQ ID NO: 957600 - DNA, 15 bp, Homo sapiens
agtcatgtttatcaa

SEQ ID NO: 957601 - DNA, 15 bp, Homo sapiens
gtcatgtttatcaat

SEQ ID NO: 957602 - DNA, 15 bp, Homo sapiens
tcatgtttatcaata

SEQ ID NO: 957603 - DNA, 15 bp, Homo sapiens
catgtttatcaatat

SEQ ID NO: 957604 - DNA, 15 bp, Homo sapiens
atgtttatcaatatt

SEQ ID NO: 957605 - DNA, 15 bp, Homo sapiens
tgtttatcaatatta

SEQ ID NO: 957606 - DNA, 15 bp, Homo sapiens
gtttatcaatattat

SEQ ID NO: 957607 - DNA, 15 bp, Homo sapiens
tttatcaatattatt

SEQ ID NO: 957608 - DNA, 15 bp, Homo sapiens
ttatcaatattattt

SEQ ID NO: 957609 - DNA, 15 bp, Homo sapiens
tatcaatattattta

SEQ ID NO: 957610 - DNA, 15 bp, Homo sapiens
atcaatattatttag

SEQ ID NO: 957611 - DNA, 15 bp, Homo sapiens
tcaatattatttaga

SEQ ID NO: 957612 - DNA, 15 bp, Homo sapiens
caatattatttagaa

SEQ ID NO: 957613 - DNA, 15 bp, Homo sapiens
aatattatttagaag

SEQ ID NO: 957614 - DNA, 15 bp, Homo sapiens
atattatttagaagt

SEQ ID NO: 957615 - DNA, 15 bp, Homo sapiens
tattatttagaagta

SEQ ID NO: 957616 - DNA, 15 bp, Homo sapiens
attatttagaagtaa

SEQ ID NO: 957617 - DNA, 15 bp, Homo sapiens
ttatttagaagtaat

SEQ ID NO: 957618 - DNA, 15 bp, Homo sapiens
tatttagaagtaatc

SEQ ID NO: 957619 - DNA, 15 bp, Homo sapiens
atttagaagtaatca

SEQ ID NO: 957620 - DNA, 15 bp, Homo sapiens
tttagaagtaatcat

SEQ ID NO: 957621 - DNA, 15 bp, Homo sapiens
ttagaagtaatcata

SEQ ID NO: 957622 - DNA, 15 bp, Homo sapiens
tagaagtaatcataa

SEQ ID NO: 957623 - DNA, 15 bp, Homo sapiens
agaagtaatcataat

SEQ ID NO: 957624 - DNA, 15 bp, Homo sapiens
gaagtaatcataatc

SEQ ID NO: 957625 - DNA, 15 bp, Homo sapiens
aagtaatcataatca

SEQ ID NO: 957626 - DNA, 15 bp, Homo sapiens
agtaatcataatcag

SEQ ID NO: 957627 - DNA, 15 bp, Homo sapiens
gtaatcataatcagt

SEQ ID NO: 957628 - DNA, 15 bp, Homo sapiens
taatcataatcagtt

SEQ ID NO: 957629 - DNA, 15 bp, Homo sapiens
aatcataatcagttt

SEQ ID NO: 957630 - DNA, 15 bp, Homo sapiens
atcataatcagtttg

SEQ ID NO: 957631 - DNA, 15 bp, Homo sapiens
tcataatcagtttgc

SEQ ID NO: 957632 - DNA, 15 bp, Homo sapiens
cataatcagtttgct

SEQ ID NO: 957633 - DNA, 15 bp, Homo sapiens
ataatcagtttgctt

SEQ ID NO: 957634 - DNA, 15 bp, Homo sapiens
taatcagtttgcttt

SEQ ID NO: 957635 - DNA, 15 bp, Homo sapiens
aatcagtttgctttc

SEQ ID NO: 957636 - DNA, 15 bp, Homo sapiens
atcagtttgctttct

SEQ ID NO: 957637 - DNA, 15 bp, Homo sapiens
tcagtttgctttctg

SEQ ID NO: 957638 - DNA, 15 bp, Homo sapiens
cagtttgctttctgc

SEQ ID NO: 957639 - DNA, 15 bp, Homo sapiens
agtttgctttctgct

SEQ ID NO: 957640 - DNA, 15 bp, Homo sapiens
gtttgctttctgctg

SEQ ID NO: 957641 - DNA, 15 bp, Homo sapiens
tttgctttctgctgc

SEQ ID NO: 957642 - DNA, 15 bp, Homo sapiens
ttgctttctgctgct

SEQ ID NO: 957643 - DNA, 15 bp, Homo sapiens
tgctttctgctgctt

SEQ ID NO: 957644 - DNA, 15 bp, Homo sapiens
gctttctgctgcttt

SEQ ID NO: 957645 - DNA, 15 bp, Homo sapiens
ctttctgctgctttt

SEQ ID NO: 957646 - DNA, 15 bp, Homo sapiens
tttctgctgcttttg

SEQ ID NO: 957647 - DNA, 15 bp, Homo sapiens
ttctgctgcttttgc

SEQ ID NO: 957648 - DNA, 15 bp, Homo sapiens
tctgctgcttttgcc

SEQ ID NO: 957649 - DNA, 15 bp, Homo sapiens
ctgctgcttttgcca

SEQ ID NO: 957650 - DNA, 15 bp, Homo sapiens
tgctgcttttgccaa

SEQ ID NO: 957651 - DNA, 15 bp, Homo sapiens
gctgcttttgccaaa

SEQ ID NO: 957652 - DNA, 15 bp, Homo sapiens
ctgcttttgccaaag

SEQ ID NO: 957653 - DNA, 15 bp, Homo sapiens
tgcttttgccaaaga

SEQ ID NO: 957654 - DNA, 15 bp, Homo sapiens
gcttttgccaaagag

SEQ ID NO: 957655 - DNA, 15 bp, Homo sapiens
cttttgccaaagaga

SEQ ID NO: 957656 - DNA, 15 bp, Homo sapiens
ttttgccaaagagag

SEQ ID NO: 957657 - DNA, 15 bp, Homo sapiens
tttgccaaagagagg

SEQ ID NO: 957658 - DNA, 15 bp, Homo sapiens
ttgccaaagagaggt

SEQ ID NO: 957659 - DNA, 15 bp, Homo sapiens
tgccaaagagaggtg

SEQ ID NO: 957660 - DNA, 15 bp, Homo sapiens
gccaaagagaggtga

SEQ ID NO: 957661 - DNA, 15 bp, Homo sapiens
ccaaagagaggtgat

SEQ ID NO: 957662 - DNA, 15 bp, Homo sapiens
caaagagaggtgatt

SEQ ID NO: 957663 - DNA, 15 bp, Homo sapiens
aaagagaggtgatta

SEQ ID NO: 957664 - DNA, 15 bp, Homo sapiens
aagagaggtgattat

SEQ ID NO: 957665 - DNA, 15 bp, Homo sapiens
agagaggtgattatg

SEQ ID NO: 957666 - DNA, 15 bp, Homo sapiens
gagaggtgattatgt

SEQ ID NO: 957667 - DNA, 15 bp, Homo sapiens
agaggtgattatgtt

SEQ ID NO: 957668 - DNA, 15 bp, Homo sapiens
gaggtgattatgtta

SEQ ID NO: 957669 - DNA, 15 bp, Homo sapiens
aggtgattatgttac

SEQ ID NO: 957670 - DNA, 15 bp, Homo sapiens
ggtgattatgttact

SEQ ID NO: 957671 - DNA, 15 bp, Homo sapiens
gtgattatgttactt

SEQ ID NO: 957672 - DNA, 15 bp, Homo sapiens
tgattatgttacttt

SEQ ID NO: 957673 - DNA, 15 bp, Homo sapiens
gattatgttactttt

SEQ ID NO: 957674 - DNA, 15 bp, Homo sapiens
attatgttacttttt

SEQ ID NO: 957675 - DNA, 15 bp, Homo sapiens
ttatgttacttttta

SEQ ID NO: 957676 - DNA, 15 bp, Homo sapiens
tatgttactttttat

SEQ ID NO: 957677 - DNA, 15 bp, Homo sapiens
atgttactttttata

SEQ ID NO: 957678 - DNA, 15 bp, Homo sapiens
tgttactttttatag

SEQ ID NO: 957679 - DNA, 15 bp, Homo sapiens
gttactttttataga

SEQ ID NO: 957680 - DNA, 15 bp, Homo sapiens
ttactttttatagaa

SEQ ID NO: 957681 - DNA, 15 bp, Homo sapiens
tactttttatagaaa

SEQ ID NO: 957682 - DNA, 15 bp, Homo sapiens
actttttatagaaaa

SEQ ID NO: 957683 - DNA, 15 bp, Homo sapiens
ctttttatagaaaat

SEQ ID NO: 957684 - DNA, 15 bp, Homo sapiens
tttttatagaaaatt

SEQ ID NO: 957685 - DNA, 15 bp, Homo sapiens
ttttatagaaaatta

SEQ ID NO: 957686 - DNA, 15 bp, Homo sapiens
tttatagaaaattat

SEQ ID NO: 957687 - DNA, 15 bp, Homo sapiens
ttatagaaaattatg

SEQ ID NO: 957688 - DNA, 15 bp, Homo sapiens
tatagaaaattatgc

SEQ ID NO: 957689 - DNA, 15 bp, Homo sapiens
atagaaaattatgcc

SEQ ID NO: 957690 - DNA, 15 bp, Homo sapiens
tagaaaattatgcct

SEQ ID NO: 957691 - DNA, 15 bp, Homo sapiens
agaaaattatgccta

SEQ ID NO: 957692 - DNA, 15 bp, Homo sapiens
gaaaattatgcctat

SEQ ID NO: 957693 - DNA, 15 bp, Homo sapiens
aaaattatgcctatt

SEQ ID NO: 957694 - DNA, 15 bp, Homo sapiens
aaattatgcctattt

SEQ ID NO: 957695 - DNA, 15 bp, Homo sapiens
aattatgcctattta

SEQ ID NO: 957696 - DNA, 15 bp, Homo sapiens
attatgcctatttag

SEQ ID NO: 957697 - DNA, 15 bp, Homo sapiens
ttatgcctatttagt

SEQ ID NO: 957698 - DNA, 15 bp, Homo sapiens
tatgcctatttagtg

SEQ ID NO: 957699 - DNA, 15 bp, Homo sapiens
atgcctatttagtgt

SEQ ID NO: 957700 - DNA, 15 bp, Homo sapiens
tgcctatttagtgtg

SEQ ID NO: 957701 - DNA, 15 bp, Homo sapiens
gcctatttagtgtgg

SEQ ID NO: 957702 - DNA, 15 bp, Homo sapiens
cctatttagtgtggt

SEQ ID NO: 957703 - DNA, 15 bp, Homo sapiens
ctatttagtgtggtg

SEQ ID NO: 957704 - DNA, 15 bp, Homo sapiens
tatttagtgtggtga

SEQ ID NO: 957705 - DNA, 15 bp, Homo sapiens
atttagtgtggtgat

SEQ ID NO: 957706 - DNA, 15 bp, Homo sapiens
tttagtgtggtgata

SEQ ID NO: 957707 - DNA, 15 bp, Homo sapiens
ttagtgtggtgataa

SEQ ID NO: 957708 - DNA, 15 bp, Homo sapiens
tagtgtggtgataat

SEQ ID NO: 957709 - DNA, 15 bp, Homo sapiens
agtgtggtgataatt

SEQ ID NO: 957710 - DNA, 15 bp, Homo sapiens
gtgtggtgataattt

SEQ ID NO: 957711 - DNA, 15 bp, Homo sapiens
tgtggtgataattta

SEQ ID NO: 957712 - DNA, 15 bp, Homo sapiens
gtggtgataatttat

SEQ ID NO: 957713 - DNA, 15 bp, Homo sapiens
tggtgataatttatt

SEQ ID NO: 957714 - DNA, 15 bp, Homo sapiens
ggtgataatttattt

SEQ ID NO: 957715 - DNA, 15 bp, Homo sapiens
gtgataatttatttt

SEQ ID NO: 957716 - DNA, 15 bp, Homo sapiens
tgataatttattttt

SEQ ID NO: 957717 - DNA, 15 bp, Homo sapiens
gataatttatttttt

SEQ ID NO: 957718 - DNA, 15 bp, Homo sapiens
ataatttattttttt

SEQ ID NO: 957719 - DNA, 15 bp, Homo sapiens
taatttatttttttc

SEQ ID NO: 957720 - DNA, 15 bp, Homo sapiens
aatttatttttttcc

SEQ ID NO: 957721 - DNA, 15 bp, Homo sapiens
atttatttttttcca

SEQ ID NO: 957722 - DNA, 15 bp, Homo sapiens
tttatttttttccat

SEQ ID NO: 957723 - DNA, 15 bp, Homo sapiens
ttatttttttccatt

SEQ ID NO: 957724 - DNA, 15 bp, Homo sapiens
tatttttttccattc

SEQ ID NO: 957725 - DNA, 15 bp, Homo sapiens
atttttttccattct

SEQ ID NO: 957726 - DNA, 15 bp, Homo sapiens
tttttttccattctc

SEQ ID NO: 957727 - DNA, 15 bp, Homo sapiens
ttttttccattctcc

SEQ ID NO: 957728 - DNA, 15 bp, Homo sapiens
tttttccattctcca

SEQ ID NO: 957729 - DNA, 15 bp, Homo sapiens
ttttccattctccat

SEQ ID NO: 957730 - DNA, 15 bp, Homo sapiens
tttccattctccatg

SEQ ID NO: 957731 - DNA, 15 bp, Homo sapiens
ttccattctccatgt

SEQ ID NO: 957732 - DNA, 15 bp, Homo sapiens
tccattctccatgtc

SEQ ID NO: 957733 - DNA, 15 bp, Homo sapiens
ccattctccatgtcc

SEQ ID NO: 957734 - DNA, 15 bp, Homo sapiens
cattctccatgtcct

SEQ ID NO: 957735 - DNA, 15 bp, Homo sapiens
attctccatgtcctc

SEQ ID NO: 957736 - DNA, 15 bp, Homo sapiens
ttctccatgtcctct

SEQ ID NO: 957737 - DNA, 15 bp, Homo sapiens
tctccatgtcctctg

SEQ ID NO: 957738 - DNA, 15 bp, Homo sapiens
ctccatgtcctctgt

SEQ ID NO: 957739 - DNA, 15 bp, Homo sapiens
tccatgtcctctgtc

SEQ ID NO: 957740 - DNA, 15 bp, Homo sapiens
ccatgtcctctgtcc

SEQ ID NO: 957741 - DNA, 15 bp, Homo sapiens
catgtcctctgtcct

SEQ ID NO: 957742 - DNA, 15 bp, Homo sapiens
atgtcctctgtccta

SEQ ID NO: 957743 - DNA, 15 bp, Homo sapiens
tgtcctctgtcctat

SEQ ID NO: 957744 - DNA, 15 bp, Homo sapiens
gtcctctgtcctatc

SEQ ID NO: 957745 - DNA, 15 bp, Homo sapiens
tcctctgtcctatcc

SEQ ID NO: 957746 - DNA, 15 bp, Homo sapiens
cctctgtcctatcct

SEQ ID NO: 957747 - DNA, 15 bp, Homo sapiens
ctctgtcctatcctc

SEQ ID NO: 957748 - DNA, 15 bp, Homo sapiens
tctgtcctatcctct

SEQ ID NO: 957749 - DNA, 15 bp, Homo sapiens
ctgtcctatcctctc

SEQ ID NO: 957750 - DNA, 15 bp, Homo sapiens
tgtcctatcctctcc

SEQ ID NO: 957751 - DNA, 15 bp, Homo sapiens
gtcctatcctctcca

SEQ ID NO: 957752 - DNA, 15 bp, Homo sapiens
tcctatcctctccag

SEQ ID NO: 957753 - DNA, 15 bp, Homo sapiens
cctatcctctccagc

SEQ ID NO: 957754 - DNA, 15 bp, Homo sapiens
ctatcctctccagca

SEQ ID NO: 957755 - DNA, 15 bp, Homo sapiens
tatcctctccagcat

SEQ ID NO: 957756 - DNA, 15 bp, Homo sapiens
atcctctccagcatt

SEQ ID NO: 957757 - DNA, 15 bp, Homo sapiens
tcctctccagcatta

SEQ ID NO: 957758 - DNA, 15 bp, Homo sapiens
cctctccagcattag

SEQ ID NO: 957759 - DNA, 15 bp, Homo sapiens
ctctccagcattaga

SEQ ID NO: 957760 - DNA, 15 bp, Homo sapiens
tctccagcattagaa

SEQ ID NO: 957761 - DNA, 15 bp, Homo sapiens
ctccagcattagaaa

SEQ ID NO: 957762 - DNA, 15 bp, Homo sapiens
tccagcattagaaag

SEQ ID NO: 957763 - DNA, 15 bp, Homo sapiens
ccagcattagaaagt

SEQ ID NO: 957764 - DNA, 15 bp, Homo sapiens
cagcattagaaagtc

SEQ ID NO: 957765 - DNA, 15 bp, Homo sapiens
agcattagaaagtcc

SEQ ID NO: 957766 - DNA, 15 bp, Homo sapiens
gcattagaaagtcct

SEQ ID NO: 957767 - DNA, 15 bp, Homo sapiens
cattagaaagtccta

SEQ ID NO: 957768 - DNA, 15 bp, Homo sapiens
attagaaagtcctag

SEQ ID NO: 957769 - DNA, 15 bp, Homo sapiens
ttagaaagtcctagg

SEQ ID NO: 957770 - DNA, 15 bp, Homo sapiens
tagaaagtcctaggc

SEQ ID NO: 957771 - DNA, 15 bp, Homo sapiens
agaaagtcctaggca

SEQ ID NO: 957772 - DNA, 15 bp, Homo sapiens
gaaagtcctaggcaa

SEQ ID NO: 957773 - DNA, 15 bp, Homo sapiens
aaagtcctaggcaag

SEQ ID NO: 957774 - DNA, 15 bp, Homo sapiens
aagtcctaggcaaga

SEQ ID NO: 957775 - DNA, 15 bp, Homo sapiens
agtcctaggcaagag

SEQ ID NO: 957776 - DNA, 15 bp, Homo sapiens
gtcctaggcaagaga

SEQ ID NO: 957777 - DNA, 15 bp, Homo sapiens
tcctaggcaagagac

SEQ ID NO: 957778 - DNA, 15 bp, Homo sapiens
cctaggcaagagaca

SEQ ID NO: 957779 - DNA, 15 bp, Homo sapiens
ctaggcaagagacat

SEQ ID NO: 957780 - DNA, 15 bp, Homo sapiens
taggcaagagacatc

SEQ ID NO: 957781 - DNA, 15 bp, Homo sapiens
aggcaagagacatct

SEQ ID NO: 957782 - DNA, 15 bp, Homo sapiens
ggcaagagacatctt

SEQ ID NO: 957783 - DNA, 15 bp, Homo sapiens
gcaagagacatcttg

SEQ ID NO: 957784 - DNA, 15 bp, Homo sapiens
caagagacatcttgt

SEQ ID NO: 957785 - DNA, 15 bp, Homo sapiens
aagagacatcttgtg

SEQ ID NO: 957786 - DNA, 15 bp, Homo sapiens
agagacatcttgtgg

SEQ ID NO: 957787 - DNA, 15 bp, Homo sapiens
gagacatcttgtgga

SEQ ID NO: 957788 - DNA, 15 bp, Homo sapiens
agacatcttgtggat

SEQ ID NO: 957789 - DNA, 15 bp, Homo sapiens
gacatcttgtggata

SEQ ID NO: 957790 - DNA, 15 bp, Homo sapiens
acatcttgtggataa

SEQ ID NO: 957791 - DNA, 15 bp, Homo sapiens
catcttgtggataat

SEQ ID NO: 957792 - DNA, 15 bp, Homo sapiens
atcttgtggataatg

SEQ ID NO: 957793 - DNA, 15 bp, Homo sapiens
tcttgtggataatgt

SEQ ID NO: 957794 - DNA, 15 bp, Homo sapiens
cttgtggataatgta

SEQ ID NO: 957795 - DNA, 15 bp, Homo sapiens
ttgtggataatgtat

SEQ ID NO: 957796 - DNA, 15 bp, Homo sapiens
tgtggataatgtatc

SEQ ID NO: 957797 - DNA, 15 bp, Homo sapiens
gtggataatgtatca

SEQ ID NO: 957798 - DNA, 15 bp, Homo sapiens
tggataatgtatcaa

SEQ ID NO: 957799 - DNA, 15 bp, Homo sapiens
ggataatgtatcaat

SEQ ID NO: 957800 - DNA, 15 bp, Homo sapiens
gataatgtatcaatg

SEQ ID NO: 957801 - DNA, 15 bp, Homo sapiens
ataatgtatcaatga

SEQ ID NO: 957802 - DNA, 15 bp, Homo sapiens
taatgtatcaatgag

SEQ ID NO: 957803 - DNA, 15 bp, Homo sapiens
aatgtatcaatgagt

SEQ ID NO: 957804 - DNA, 15 bp, Homo sapiens
atgtatcaatgagtg

SEQ ID NO: 957805 - DNA, 15 bp, Homo sapiens
tgtatcaatgagtga

SEQ ID NO: 957806 - DNA, 15 bp, Homo sapiens
gtatcaatgagtgat

SEQ ID NO: 957807 - DNA, 15 bp, Homo sapiens
tatcaatgagtgatg

SEQ ID NO: 957808 - DNA, 15 bp, Homo sapiens
atcaatgagtgatgt

SEQ ID NO: 957809 - DNA, 15 bp, Homo sapiens
tcaatgagtgatgtt

SEQ ID NO: 957810 - DNA, 15 bp, Homo sapiens
caatgagtgatgttt

SEQ ID NO: 957811 - DNA, 15 bp, Homo sapiens
aatgagtgatgttta

SEQ ID NO: 957812 - DNA, 15 bp, Homo sapiens
atgagtgatgtttaa

SEQ ID NO: 957813 - DNA, 15 bp, Homo sapiens
tgagtgatgtttaac

SEQ ID NO: 957814 - DNA, 15 bp, Homo sapiens
gagtgatgtttaacg

SEQ ID NO: 957815 - DNA, 15 bp, Homo sapiens
agtgatgtttaacgt

SEQ ID NO: 957816 - DNA, 15 bp, Homo sapiens
gtgatgtttaacgtt

SEQ ID NO: 957817 - DNA, 15 bp, Homo sapiens
tgatgtttaacgtta

SEQ ID NO: 957818 - DNA, 15 bp, Homo sapiens
gatgtttaacgttat

SEQ ID NO: 957819 - DNA, 15 bp, Homo sapiens
atgtttaacgttatc

SEQ ID NO: 957820 - DNA, 15 bp, Homo sapiens
tgtttaacgttatca

SEQ ID NO: 957821 - DNA, 15 bp, Homo sapiens
gtttaacgttatcat

SEQ ID NO: 957822 - DNA, 15 bp, Homo sapiens
tttaacgttatcatt

SEQ ID NO: 957823 - DNA, 15 bp, Homo sapiens
ttaacgttatcattt

SEQ ID NO: 957824 - DNA, 15 bp, Homo sapiens
taacgttatcatttt

SEQ ID NO: 957825 - DNA, 15 bp, Homo sapiens
aacgttatcattttc

SEQ ID NO: 957826 - DNA, 15 bp, Homo sapiens
acgttatcattttcc

SEQ ID NO: 957827 - DNA, 15 bp, Homo sapiens
cgttatcattttccc

SEQ ID NO: 957828 - DNA, 15 bp, Homo sapiens
gttatcattttccca

SEQ ID NO: 957829 - DNA, 15 bp, Homo sapiens
ttatcattttcccaa

SEQ ID NO: 957830 - DNA, 15 bp, Homo sapiens
tatcattttcccaaa

SEQ ID NO: 957831 - DNA, 15 bp, Homo sapiens
atcattttcccaaag

SEQ ID NO: 957832 - DNA, 15 bp, Homo sapiens
tcattttcccaaaga

SEQ ID NO: 957833 - DNA, 15 bp, Homo sapiens
cattttcccaaagag

SEQ ID NO: 957834 - DNA, 15 bp, Homo sapiens
attttcccaaagagt

SEQ ID NO: 957835 - DNA, 15 bp, Homo sapiens
ttttcccaaagagta

SEQ ID NO: 957836 - DNA, 15 bp, Homo sapiens
tttcccaaagagtat

SEQ ID NO: 957837 - DNA, 15 bp, Homo sapiens
ttcccaaagagtatt

SEQ ID NO: 957838 - DNA, 15 bp, Homo sapiens
tcccaaagagtattt

SEQ ID NO: 957839 - DNA, 15 bp, Homo sapiens
cccaaagagtatttt

SEQ ID NO: 957840 - DNA, 15 bp, Homo sapiens
ccaaagagtattttt

SEQ ID NO: 957841 - DNA, 15 bp, Homo sapiens
caaagagtatttttc

SEQ ID NO: 957842 - DNA, 15 bp, Homo sapiens
aaagagtatttttca

SEQ ID NO: 957843 - DNA, 15 bp, Homo sapiens
aagagtatttttcat

SEQ ID NO: 957844 - DNA, 15 bp, Homo sapiens
agagtatttttcatc

SEQ ID NO: 957845 - DNA, 15 bp, Homo sapiens
gagtatttttcatct

SEQ ID NO: 957846 - DNA, 15 bp, Homo sapiens
agtatttttcatctt

SEQ ID NO: 957847 - DNA, 15 bp, Homo sapiens
gtatttttcatcttt

SEQ ID NO: 957848 - DNA, 15 bp, Homo sapiens
tatttttcatctttc

SEQ ID NO: 957849 - DNA, 15 bp, Homo sapiens
atttttcatctttcc

SEQ ID NO: 957850 - DNA, 15 bp, Homo sapiens
tttttcatctttcct

SEQ ID NO: 957851 - DNA, 15 bp, Homo sapiens
ttttcatctttccta

SEQ ID NO: 957852 - DNA, 15 bp, Homo sapiens
tttcatctttcctaa

SEQ ID NO: 957853 - DNA, 15 bp, Homo sapiens
ttcatctttcctaaa

SEQ ID NO: 957854 - DNA, 15 bp, Homo sapiens
tcatctttcctaaag

SEQ ID NO: 957855 - DNA, 15 bp, Homo sapiens
catctttcctaaaga

SEQ ID NO: 957856 - DNA, 15 bp, Homo sapiens
atctttcctaaagat

SEQ ID NO: 957857 - DNA, 15 bp, Homo sapiens
tctttcctaaagatt

SEQ ID NO: 957858 - DNA, 15 bp, Homo sapiens
ctttcctaaagattt

SEQ ID NO: 957859 - DNA, 15 bp, Homo sapiens
tttcctaaagatttt

SEQ ID NO: 957860 - DNA, 15 bp, Homo sapiens
ttcctaaagattttt

SEQ ID NO: 957861 - DNA, 15 bp, Homo sapiens
tcctaaagatttttt

SEQ ID NO: 957862 - DNA, 15 bp, Homo sapiens
cctaaagattttttt

SEQ ID NO: 957863 - DNA, 15 bp, Homo sapiens
ctaaagatttttttt

SEQ ID NO: 957864 - DNA, 15 bp, Homo sapiens
taaagattttttttt

SEQ ID NO: 957865 - DNA, 15 bp, Homo sapiens
aaagatttttttttt

SEQ ID NO: 957866 - DNA, 15 bp, Homo sapiens
aagattttttttttt

SEQ ID NO: 957867 - DNA, 15 bp, Homo sapiens
agatttttttttttt

SEQ ID NO: 957868 - DNA, 15 bp, Homo sapiens
gattttttttttttt

SEQ ID NO: 957869 - DNA, 15 bp, Homo sapiens
ttttttttttgagat

SEQ ID NO: 957870 - DNA, 15 bp, Homo sapiens
tttttttttgagatg

SEQ ID NO: 957871 - DNA, 15 bp, Homo sapiens
ttttttttgagatgg

SEQ ID NO: 957872 - DNA, 15 bp, Homo sapiens
tttttttgagatgga

SEQ ID NO: 957873 - DNA, 15 bp, Homo sapiens
ttttttgagatggag

SEQ ID NO: 957874 - DNA, 15 bp, Homo sapiens
tttttgagatggagt

SEQ ID NO: 957875 - DNA, 15 bp, Homo sapiens
ttttgagatggagtt

SEQ ID NO: 957876 - DNA, 15 bp, Homo sapiens
tttgagatggagttt

SEQ ID NO: 957877 - DNA, 15 bp, Homo sapiens
ttgagatggagtttc

SEQ ID NO: 957878 - DNA, 15 bp, Homo sapiens
tgagatggagtttca

SEQ ID NO: 957879 - DNA, 15 bp, Homo sapiens
gagatggagtttcat

SEQ ID NO: 957880 - DNA, 15 bp, Homo sapiens
agatggagtttcatt

SEQ ID NO: 957881 - DNA, 15 bp, Homo sapiens
gatggagtttcattc

SEQ ID NO: 957882 - DNA, 15 bp, Homo sapiens
atggagtttcattct

SEQ ID NO: 957883 - DNA, 15 bp, Homo sapiens
tggagtttcattctg

SEQ ID NO: 957884 - DNA, 15 bp, Homo sapiens
ggagtttcattctgt

SEQ ID NO: 957885 - DNA, 15 bp, Homo sapiens
gagtttcattctgtc

SEQ ID NO: 957886 - DNA, 15 bp, Homo sapiens
agtttcattctgtca

SEQ ID NO: 957887 - DNA, 15 bp, Homo sapiens
gtttcattctgtcac

SEQ ID NO: 957888 - DNA, 15 bp, Homo sapiens
tttcattctgtcacc

SEQ ID NO: 957889 - DNA, 15 bp, Homo sapiens
ttcattctgtcaccc

SEQ ID NO: 957890 - DNA, 15 bp, Homo sapiens
tcattctgtcaccca

SEQ ID NO: 957891 - DNA, 15 bp, Homo sapiens
cattctgtcacccag

SEQ ID NO: 957892 - DNA, 15 bp, Homo sapiens
attctgtcacccagg

SEQ ID NO: 957893 - DNA, 15 bp, Homo sapiens
ttctgtcacccaggc

SEQ ID NO: 957894 - DNA, 15 bp, Homo sapiens
tgtcacccaggctga

SEQ ID NO: 957895 - DNA, 15 bp, Homo sapiens
gtcacccaggctgag

SEQ ID NO: 957896 - DNA, 15 bp, Homo sapiens
tcacccaggctgagt

SEQ ID NO: 957897 - DNA, 15 bp, Homo sapiens
cacccaggctgagtg

SEQ ID NO: 957898 - DNA, 15 bp, Homo sapiens
acccaggctgagtgc

SEQ ID NO: 957899 - DNA, 15 bp, Homo sapiens
cccaggctgagtgca

SEQ ID NO: 957900 - DNA, 15 bp, Homo sapiens
ccaggctgagtgcag

SEQ ID NO: 957901 - DNA, 15 bp, Homo sapiens
caggctgagtgcagt

SEQ ID NO: 957902 - DNA, 15 bp, Homo sapiens
aggctgagtgcagtg

SEQ ID NO: 957903 - DNA, 15 bp, Homo sapiens
ggctgagtgcagtgg

SEQ ID NO: 957904 - DNA, 15 bp, Homo sapiens
gctgagtgcagtggc

SEQ ID NO: 957905 - DNA, 15 bp, Homo sapiens
ctgagtgcagtggca

SEQ ID NO: 957906 - DNA, 15 bp, Homo sapiens
tgagtgcagtggcac

SEQ ID NO: 957907 - DNA, 15 bp, Homo sapiens
gagtgcagtggcacg

SEQ ID NO: 957908 - DNA, 15 bp, Homo sapiens
agtgcagtggcacga

SEQ ID NO: 957909 - DNA, 15 bp, Homo sapiens
gtgcagtggcacgat

SEQ ID NO: 957910 - DNA, 15 bp, Homo sapiens
tgcagtggcacgatc

SEQ ID NO: 957911 - DNA, 15 bp, Homo sapiens
gcagtggcacgatct

SEQ ID NO: 957912 - DNA, 15 bp, Homo sapiens
cagtggcacgatctc

SEQ ID NO: 957913 - DNA, 15 bp, Homo sapiens
agtggcacgatctcg

SEQ ID NO: 957914 - DNA, 15 bp, Homo sapiens
gtggcacgatctcgg

SEQ ID NO: 957915 - DNA, 15 bp, Homo sapiens
tggcacgatctcggc

SEQ ID NO: 957916 - DNA, 15 bp, Homo sapiens
ggcacgatctcggct

SEQ ID NO: 957917 - DNA, 15 bp, Homo sapiens
gcacgatctcggctt

SEQ ID NO: 957918 - DNA, 15 bp, Homo sapiens
cacgatctcggctta

SEQ ID NO: 957919 - DNA, 15 bp, Homo sapiens
acgatctcggcttaa

SEQ ID NO: 957920 - DNA, 15 bp, Homo sapiens
cgatctcggcttaac

SEQ ID NO: 957921 - DNA, 15 bp, Homo sapiens
gatctcggcttaacg

SEQ ID NO: 957922 - DNA, 15 bp, Homo sapiens
atctcggcttaacgc

SEQ ID NO: 957923 - DNA, 15 bp, Homo sapiens
tctcggcttaacgct

SEQ ID NO: 957924 - DNA, 15 bp, Homo sapiens
ctcggcttaacgctt

SEQ ID NO: 957925 - DNA, 15 bp, Homo sapiens
tcggcttaacgctta

SEQ ID NO: 957926 - DNA, 15 bp, Homo sapiens
cggcttaacgcttac

SEQ ID NO: 957927 - DNA, 15 bp, Homo sapiens
ggcttaacgcttact

SEQ ID NO: 957928 - DNA, 15 bp, Homo sapiens
gcttaacgcttactg

SEQ ID NO: 957929 - DNA, 15 bp, Homo sapiens
cttaacgcttactgc

SEQ ID NO: 957930 - DNA, 15 bp, Homo sapiens
ttaacgcttactgca

SEQ ID NO: 957931 - DNA, 15 bp, Homo sapiens
taacgcttactgcat

SEQ ID NO: 957932 - DNA, 15 bp, Homo sapiens
aacgcttactgcatc

SEQ ID NO: 957933 - DNA, 15 bp, Homo sapiens
acgcttactgcatcc

SEQ ID NO: 957934 - DNA, 15 bp, Homo sapiens
cgcttactgcatcct

SEQ ID NO: 957935 - DNA, 15 bp, Homo sapiens
gcttactgcatcctc

SEQ ID NO: 957936 - DNA, 15 bp, Homo sapiens
cttactgcatcctct

SEQ ID NO: 957937 - DNA, 15 bp, Homo sapiens
ttactgcatcctctg

SEQ ID NO: 957938 - DNA, 15 bp, Homo sapiens
tactgcatcctctgc

SEQ ID NO: 957939 - DNA, 15 bp, Homo sapiens
actgcatcctctgcc

SEQ ID NO: 957940 - DNA, 15 bp, Homo sapiens
ctgcatcctctgcct

SEQ ID NO: 957941 - DNA, 15 bp, Homo sapiens
tgcatcctctgcctc

SEQ ID NO: 957942 - DNA, 15 bp, Homo sapiens
gcatcctctgcctcc

SEQ ID NO: 957943 - DNA, 15 bp, Homo sapiens
catcctctgcctccc

SEQ ID NO: 957944 - DNA, 15 bp, Homo sapiens
atcctctgcctccca

SEQ ID NO: 957945 - DNA, 15 bp, Homo sapiens
tcctctgcctcccag

SEQ ID NO: 957946 - DNA, 15 bp, Homo sapiens
cctctgcctcccaga

SEQ ID NO: 957947 - DNA, 15 bp, Homo sapiens
ctctgcctcccagat

SEQ ID NO: 957948 - DNA, 15 bp, Homo sapiens
tctgcctcccagatt

SEQ ID NO: 957949 - DNA, 15 bp, Homo sapiens
ctgcctcccagattc

SEQ ID NO: 957950 - DNA, 15 bp, Homo sapiens
tgcctcccagattca

SEQ ID NO: 957951 - DNA, 15 bp, Homo sapiens
gcctcccagattcaa

SEQ ID NO: 957952 - DNA, 15 bp, Homo sapiens
cctcccagattcaag

SEQ ID NO: 957953 - DNA, 15 bp, Homo sapiens
ctcccagattcaagc

SEQ ID NO: 957954 - DNA, 15 bp, Homo sapiens
tcccagattcaagca

SEQ ID NO: 957955 - DNA, 15 bp, Homo sapiens
cccagattcaagcag

SEQ ID NO: 957956 - DNA, 15 bp, Homo sapiens
ccagattcaagcagt

SEQ ID NO: 957957 - DNA, 15 bp, Homo sapiens
cagattcaagcagtt

SEQ ID NO: 957958 - DNA, 15 bp, Homo sapiens
agattcaagcagttc

SEQ ID NO: 957959 - DNA, 15 bp, Homo sapiens
gattcaagcagttct

SEQ ID NO: 957960 - DNA, 15 bp, Homo sapiens
attcaagcagttctc

SEQ ID NO: 957961 - DNA, 15 bp, Homo sapiens
ttcaagcagttctcc

SEQ ID NO: 957962 - DNA, 15 bp, Homo sapiens
tcaagcagttctcct

SEQ ID NO: 957963 - DNA, 15 bp, Homo sapiens
caagcagttctcctg

SEQ ID NO: 957964 - DNA, 15 bp, Homo sapiens
aagcagttctcctgc

SEQ ID NO: 957965 - DNA, 15 bp, Homo sapiens
agcagttctcctgcc

SEQ ID NO: 957966 - DNA, 15 bp, Homo sapiens
gcagttctcctgcct

SEQ ID NO: 957967 - DNA, 15 bp, Homo sapiens
cagttctcctgcctc

SEQ ID NO: 957968 - DNA, 15 bp, Homo sapiens
agttctcctgcctca

SEQ ID NO: 957969 - DNA, 15 bp, Homo sapiens
gttctcctgcctcag

SEQ ID NO: 957970 - DNA, 15 bp, Homo sapiens
cctgcctcagcctct

SEQ ID NO: 957971 - DNA, 15 bp, Homo sapiens
ctgcctcagcctctg

SEQ ID NO: 957972 - DNA, 15 bp, Homo sapiens
tgcctcagcctctga

SEQ ID NO: 957973 - DNA, 15 bp, Homo sapiens
gcctcagcctctgag

SEQ ID NO: 957974 - DNA, 15 bp, Homo sapiens
cctcagcctctgagt

SEQ ID NO: 957975 - DNA, 15 bp, Homo sapiens
ctcagcctctgagta

SEQ ID NO: 957976 - DNA, 15 bp, Homo sapiens
tcagcctctgagtag

SEQ ID NO: 957977 - DNA, 15 bp, Homo sapiens
cagcctctgagtagc

SEQ ID NO: 957978 - DNA, 15 bp, Homo sapiens
agcctctgagtagct

SEQ ID NO: 957979 - DNA, 15 bp, Homo sapiens
gcctctgagtagctg

SEQ ID NO: 957980 - DNA, 15 bp, Homo sapiens
cctctgagtagctgg

SEQ ID NO: 957981 - DNA, 15 bp, Homo sapiens
ctctgagtagctggg

SEQ ID NO: 957982 - DNA, 15 bp, Homo sapiens
tctgagtagctggga

SEQ ID NO: 957983 - DNA, 15 bp, Homo sapiens
caggtgtgcaccacc

SEQ ID NO: 957984 - DNA, 15 bp, Homo sapiens
aggtgtgcaccacca

SEQ ID NO: 957985 - DNA, 15 bp, Homo sapiens
ggtgtgcaccaccac

SEQ ID NO: 957986 - DNA, 15 bp, Homo sapiens
gtgtgcaccaccaca

SEQ ID NO: 957987 - DNA, 15 bp, Homo sapiens
tgtgcaccaccacac

SEQ ID NO: 957988 - DNA, 15 bp, Homo sapiens
gtgcaccaccacacc

SEQ ID NO: 957989 - DNA, 15 bp, Homo sapiens
tgcaccaccacacca

SEQ ID NO: 957990 - DNA, 15 bp, Homo sapiens
gcaccaccacaccag

SEQ ID NO: 957991 - DNA, 15 bp, Homo sapiens
caccaccacaccagc

SEQ ID NO: 957992 - DNA, 15 bp, Homo sapiens
accaccacaccagct

SEQ ID NO: 957993 - DNA, 15 bp, Homo sapiens
ccaccacaccagcta

SEQ ID NO: 957994 - DNA, 15 bp, Homo sapiens
caccacaccagctaa

SEQ ID NO: 957995 - DNA, 15 bp, Homo sapiens
accacaccagctaat

SEQ ID NO: 957996 - DNA, 15 bp, Homo sapiens
ccacaccagctaatt

SEQ ID NO: 957997 - DNA, 15 bp, Homo sapiens
cacaccagctaattt

SEQ ID NO: 957998 - DNA, 15 bp, Homo sapiens
acaccagctaatttt

SEQ ID NO: 957999 - DNA, 15 bp, Homo sapiens
caccagctaattttt

SEQ ID NO: 958000 - DNA, 15 bp, Homo sapiens
accagctaatttttt

SEQ ID NO: 958001 - DNA, 15 bp, Homo sapiens
ccagctaattttttt

SEQ ID NO: 958002 - DNA, 15 bp, Homo sapiens
cagctaatttttttt

SEQ ID NO: 958003 - DNA, 15 bp, Homo sapiens
agctaattttttttt

SEQ ID NO: 958004 - DNA, 15 bp, Homo sapiens
gctaatttttttttt

SEQ ID NO: 958005 - DNA, 15 bp, Homo sapiens
ctaattttttttttt

SEQ ID NO: 958006 - DNA, 15 bp, Homo sapiens
taatttttttttttt

SEQ ID NO: 958007 - DNA, 15 bp, Homo sapiens
aattttttttttttt

SEQ ID NO: 958008 - DNA, 15 bp, Homo sapiens
tttttttttttgagg

SEQ ID NO: 958009 - DNA, 15 bp, Homo sapiens
ttttttttttgaggc

SEQ ID NO: 958010 - DNA, 15 bp, Homo sapiens
tttttttttgaggca

SEQ ID NO: 958011 - DNA, 15 bp, Homo sapiens
ttttttttgaggcag

SEQ ID NO: 958012 - DNA, 15 bp, Homo sapiens
tttttttgaggcaga

SEQ ID NO: 958013 - DNA, 15 bp, Homo sapiens
ttttttgaggcagag

SEQ ID NO: 958014 - DNA, 15 bp, Homo sapiens
tttttgaggcagagt

SEQ ID NO: 958015 - DNA, 15 bp, Homo sapiens
ttttgaggcagagtc

SEQ ID NO: 958016 - DNA, 15 bp, Homo sapiens
tttgaggcagagtct

SEQ ID NO: 958017 - DNA, 15 bp, Homo sapiens
ttgaggcagagtctc

SEQ ID NO: 958018 - DNA, 15 bp, Homo sapiens
tgaggcagagtctcg

SEQ ID NO: 958019 - DNA, 15 bp, Homo sapiens
gaggcagagtctcgc

SEQ ID NO: 958020 - DNA, 15 bp, Homo sapiens
aggcagagtctcgct

SEQ ID NO: 958021 - DNA, 15 bp, Homo sapiens
ggcagagtctcgctc

SEQ ID NO: 958022 - DNA, 15 bp, Homo sapiens
gcagagtctcgctct

SEQ ID NO: 958023 - DNA, 15 bp, Homo sapiens
cagagtctcgctctg

SEQ ID NO: 958024 - DNA, 15 bp, Homo sapiens
agagtctcgctctgt

SEQ ID NO: 958025 - DNA, 15 bp, Homo sapiens
agtctcgctctgtca

SEQ ID NO: 958026 - DNA, 15 bp, Homo sapiens
gtctcgctctgtcac

SEQ ID NO: 958027 - DNA, 15 bp, Homo sapiens
tctcgctctgtcacc

SEQ ID NO: 958028 - DNA, 15 bp, Homo sapiens
ctcgctctgtcaccc

SEQ ID NO: 958029 - DNA, 15 bp, Homo sapiens
tcgctctgtcaccca

SEQ ID NO: 958030 - DNA, 15 bp, Homo sapiens
cgctctgtcacccag

SEQ ID NO: 958031 - DNA, 15 bp, Homo sapiens
gagtgcagtggcgcc

SEQ ID NO: 958032 - DNA, 15 bp, Homo sapiens
agtgcagtggcgcca

SEQ ID NO: 958033 - DNA, 15 bp, Homo sapiens
gtgcagtggcgccat

SEQ ID NO: 958034 - DNA, 15 bp, Homo sapiens
tgcagtggcgccatc

SEQ ID NO: 958035 - DNA, 15 bp, Homo sapiens
gcagtggcgccatct

SEQ ID NO: 958036 - DNA, 15 bp, Homo sapiens
cagtggcgccatctt

SEQ ID NO: 958037 - DNA, 15 bp, Homo sapiens
agtggcgccatcttg

SEQ ID NO: 958038 - DNA, 15 bp, Homo sapiens
gtggcgccatcttgg

SEQ ID NO: 958039 - DNA, 15 bp, Homo sapiens
tggcgccatcttggc

SEQ ID NO: 958040 - DNA, 15 bp, Homo sapiens
ggcgccatcttggct

SEQ ID NO: 958041 - DNA, 15 bp, Homo sapiens
gcgccatcttggctc

SEQ ID NO: 958042 - DNA, 15 bp, Homo sapiens
cgccatcttggctca

SEQ ID NO: 958043 - DNA, 15 bp, Homo sapiens
gccatcttggctcac

SEQ ID NO: 958044 - DNA, 15 bp, Homo sapiens
ccatcttggctcact

SEQ ID NO: 958045 - DNA, 15 bp, Homo sapiens
catcttggctcactg

SEQ ID NO: 958046 - DNA, 15 bp, Homo sapiens
ttggctcactgcaag

SEQ ID NO: 958047 - DNA, 15 bp, Homo sapiens
tggctcactgcaagc

SEQ ID NO: 958048 - DNA, 15 bp, Homo sapiens
tcactgcaagctcca

SEQ ID NO: 958049 - DNA, 15 bp, Homo sapiens
cactgcaagctccac

SEQ ID NO: 958050 - DNA, 15 bp, Homo sapiens
actgcaagctccacc

SEQ ID NO: 958051 - DNA, 15 bp, Homo sapiens
ctgcaagctccacct

SEQ ID NO: 958052 - DNA, 15 bp, Homo sapiens
tgcaagctccacctc

SEQ ID NO: 958053 - DNA, 15 bp, Homo sapiens
gcaagctccacctcc

SEQ ID NO: 958054 - DNA, 15 bp, Homo sapiens
caagctccacctccc

SEQ ID NO: 958055 - DNA, 15 bp, Homo sapiens
aagctccacctcccg

SEQ ID NO: 958056 - DNA, 15 bp, Homo sapiens
agctccacctcccgg

SEQ ID NO: 958057 - DNA, 15 bp, Homo sapiens
gctccacctcccggg

SEQ ID NO: 958058 - DNA, 15 bp, Homo sapiens
ctccacctcccgggt

SEQ ID NO: 958059 - DNA, 15 bp, Homo sapiens
tccacctcccgggtt

SEQ ID NO: 958060 - DNA, 15 bp, Homo sapiens
ccacctcccgggttc

SEQ ID NO: 958061 - DNA, 15 bp, Homo sapiens
cacctcccgggttca

SEQ ID NO: 958062 - DNA, 15 bp, Homo sapiens
acctcccgggttcag

SEQ ID NO: 958063 - DNA, 15 bp, Homo sapiens
cctcccgggttcagg

SEQ ID NO: 958064 - DNA, 15 bp, Homo sapiens
ctcccgggttcaggc

SEQ ID NO: 958065 - DNA, 15 bp, Homo sapiens
tcccgggttcaggcc

SEQ ID NO: 958066 - DNA, 15 bp, Homo sapiens
cccgggttcaggccg

SEQ ID NO: 958067 - DNA, 15 bp, Homo sapiens
ccgggttcaggccgt

SEQ ID NO: 958068 - DNA, 15 bp, Homo sapiens
cgggttcaggccgtt

SEQ ID NO: 958069 - DNA, 15 bp, Homo sapiens
gggttcaggccgttc

SEQ ID NO: 958070 - DNA, 15 bp, Homo sapiens
ggttcaggccgttct

SEQ ID NO: 958071 - DNA, 15 bp, Homo sapiens
gttcaggccgttctc

SEQ ID NO: 958072 - DNA, 15 bp, Homo sapiens
ttcaggccgttctcc

SEQ ID NO: 958073 - DNA, 15 bp, Homo sapiens
tcaggccgttctcct

SEQ ID NO: 958074 - DNA, 15 bp, Homo sapiens
caggccgttctcctg

SEQ ID NO: 958075 - DNA, 15 bp, Homo sapiens
aggccgttctcctgc

SEQ ID NO: 958076 - DNA, 15 bp, Homo sapiens
ggccgttctcctgcc

SEQ ID NO: 958077 - DNA, 15 bp, Homo sapiens
gccgttctcctgcct

SEQ ID NO: 958078 - DNA, 15 bp, Homo sapiens
ccgttctcctgcctc

SEQ ID NO: 958079 - DNA, 15 bp, Homo sapiens
cgttctcctgcctca

SEQ ID NO: 958080 - DNA, 15 bp, Homo sapiens
ctgcctcagcctcct

SEQ ID NO: 958081 - DNA, 15 bp, Homo sapiens
tcctgagtagctggt

SEQ ID NO: 958082 - DNA, 15 bp, Homo sapiens
cctgagtagctggta

SEQ ID NO: 958083 - DNA, 15 bp, Homo sapiens
ctgagtagctggtac

SEQ ID NO: 958084 - DNA, 15 bp, Homo sapiens
tgagtagctggtacc

SEQ ID NO: 958085 - DNA, 15 bp, Homo sapiens
gagtagctggtacca

SEQ ID NO: 958086 - DNA, 15 bp, Homo sapiens
agtagctggtaccac

SEQ ID NO: 958087 - DNA, 15 bp, Homo sapiens
gtagctggtaccaca

SEQ ID NO: 958088 - DNA, 15 bp, Homo sapiens
tagctggtaccacag

SEQ ID NO: 958089 - DNA, 15 bp, Homo sapiens
agctggtaccacagg

SEQ ID NO: 958090 - DNA, 15 bp, Homo sapiens
gctggtaccacaggc

SEQ ID NO: 958091 - DNA, 15 bp, Homo sapiens
ctggtaccacaggca

SEQ ID NO: 958092 - DNA, 15 bp, Homo sapiens
tggtaccacaggcac

SEQ ID NO: 958093 - DNA, 15 bp, Homo sapiens
ggtaccacaggcacc

SEQ ID NO: 958094 - DNA, 15 bp, Homo sapiens
gtaccacaggcaccc

SEQ ID NO: 958095 - DNA, 15 bp, Homo sapiens
taccacaggcaccca

SEQ ID NO: 958096 - DNA, 15 bp, Homo sapiens
accacaggcacccac

SEQ ID NO: 958097 - DNA, 15 bp, Homo sapiens
ccacaggcacccacc

SEQ ID NO: 958098 - DNA, 15 bp, Homo sapiens
cacaggcacccacca

SEQ ID NO: 958099 - DNA, 15 bp, Homo sapiens
acaggcacccaccat

SEQ ID NO: 958100 - DNA, 15 bp, Homo sapiens
caggcacccaccatc

SEQ ID NO: 958101 - DNA, 15 bp, Homo sapiens
aggcacccaccatca

SEQ ID NO: 958102 - DNA, 15 bp, Homo sapiens
ggcacccaccatcat

SEQ ID NO: 958103 - DNA, 15 bp, Homo sapiens
gcacccaccatcatg

SEQ ID NO: 958104 - DNA, 15 bp, Homo sapiens
cacccaccatcatgc

SEQ ID NO: 958105 - DNA, 15 bp, Homo sapiens
acccaccatcatgcc

SEQ ID NO: 958106 - DNA, 15 bp, Homo sapiens
cccaccatcatgccc

SEQ ID NO: 958107 - DNA, 15 bp, Homo sapiens
ccaccatcatgcccg

SEQ ID NO: 958108 - DNA, 15 bp, Homo sapiens
caccatcatgcccgg

SEQ ID NO: 958109 - DNA, 15 bp, Homo sapiens
accatcatgcccggc

SEQ ID NO: 958110 - DNA, 15 bp, Homo sapiens
ccatcatgcccggct

SEQ ID NO: 958111 - DNA, 15 bp, Homo sapiens
catcatgcccggcta

SEQ ID NO: 958112 - DNA, 15 bp, Homo sapiens
atcatgcccggctaa

SEQ ID NO: 958113 - DNA, 15 bp, Homo sapiens
tcatgcccggctaat

SEQ ID NO: 958114 - DNA, 15 bp, Homo sapiens
catgcccggctaatt

SEQ ID NO: 958115 - DNA, 15 bp, Homo sapiens
atttttagtagagat

SEQ ID NO: 958116 - DNA, 15 bp, Homo sapiens
tttagtagagatggg

SEQ ID NO: 958117 - DNA, 15 bp, Homo sapiens
ttagtagagatgggg

SEQ ID NO: 958118 - DNA, 15 bp, Homo sapiens
tagtagagatggggt

SEQ ID NO: 958119 - DNA, 15 bp, Homo sapiens
agtagagatggggtt

SEQ ID NO: 958120 - DNA, 15 bp, Homo sapiens
gtagagatggggttt

SEQ ID NO: 958121 - DNA, 15 bp, Homo sapiens
tagagatggggtttc

SEQ ID NO: 958122 - DNA, 15 bp, Homo sapiens
agagatggggtttca

SEQ ID NO: 958123 - DNA, 15 bp, Homo sapiens
gagatggggtttcac

SEQ ID NO: 958124 - DNA, 15 bp, Homo sapiens
agatggggtttcacc

SEQ ID NO: 958125 - DNA, 15 bp, Homo sapiens
gatggggtttcacct

SEQ ID NO: 958126 - DNA, 15 bp, Homo sapiens
atggggtttcacctt

SEQ ID NO: 958127 - DNA, 15 bp, Homo sapiens
tggggtttcaccttg

SEQ ID NO: 958128 - DNA, 15 bp, Homo sapiens
ggggtttcaccttgt

SEQ ID NO: 958129 - DNA, 15 bp, Homo sapiens
gggtttcaccttgtt

SEQ ID NO: 958130 - DNA, 15 bp, Homo sapiens
ggtttcaccttgtta

SEQ ID NO: 958131 - DNA, 15 bp, Homo sapiens
gtttcaccttgttag

SEQ ID NO: 958132 - DNA, 15 bp, Homo sapiens
tttcaccttgttagc

SEQ ID NO: 958133 - DNA, 15 bp, Homo sapiens
ttcaccttgttagcc

SEQ ID NO: 958134 - DNA, 15 bp, Homo sapiens
tcaccttgttagcca

SEQ ID NO: 958135 - DNA, 15 bp, Homo sapiens
caccttgttagccag

SEQ ID NO: 958136 - DNA, 15 bp, Homo sapiens
accttgttagccagg

SEQ ID NO: 958137 - DNA, 15 bp, Homo sapiens
ccttgttagccagga

SEQ ID NO: 958138 - DNA, 15 bp, Homo sapiens
cttgttagccaggat

SEQ ID NO: 958139 - DNA, 15 bp, Homo sapiens
ttgttagccaggatg

SEQ ID NO: 958140 - DNA, 15 bp, Homo sapiens
tgttagccaggatgg

SEQ ID NO: 958141 - DNA, 15 bp, Homo sapiens
gttagccaggatggt

SEQ ID NO: 958142 - DNA, 15 bp, Homo sapiens
ttagccaggatggtg

SEQ ID NO: 958143 - DNA, 15 bp, Homo sapiens
tagccaggatggtgt

SEQ ID NO: 958144 - DNA, 15 bp, Homo sapiens
agccaggatggtgtc

SEQ ID NO: 958145 - DNA, 15 bp, Homo sapiens
gccaggatggtgtcg

SEQ ID NO: 958146 - DNA, 15 bp, Homo sapiens
ccaggatggtgtcga

SEQ ID NO: 958147 - DNA, 15 bp, Homo sapiens
caggatggtgtcgat

SEQ ID NO: 958148 - DNA, 15 bp, Homo sapiens
aggatggtgtcgatc

SEQ ID NO: 958149 - DNA, 15 bp, Homo sapiens
ggatggtgtcgatct

SEQ ID NO: 958150 - DNA, 15 bp, Homo sapiens
gatggtgtcgatctc

SEQ ID NO: 958151 - DNA, 15 bp, Homo sapiens
atggtgtcgatctcc

SEQ ID NO: 958152 - DNA, 15 bp, Homo sapiens
tggtgtcgatctcct

SEQ ID NO: 958153 - DNA, 15 bp, Homo sapiens
ggtgtcgatctcctg

SEQ ID NO: 958154 - DNA, 15 bp, Homo sapiens
gtgtcgatctcctga

SEQ ID NO: 958155 - DNA, 15 bp, Homo sapiens
tgtcgatctcctgaa

SEQ ID NO: 958156 - DNA, 15 bp, Homo sapiens
gtcgatctcctgaac

SEQ ID NO: 958157 - DNA, 15 bp, Homo sapiens
tcgatctcctgaact

SEQ ID NO: 958158 - DNA, 15 bp, Homo sapiens
cgatctcctgaactc

SEQ ID NO: 958159 - DNA, 15 bp, Homo sapiens
gatctcctgaactcg

SEQ ID NO: 958160 - DNA, 15 bp, Homo sapiens
atctcctgaactcgt

SEQ ID NO: 958161 - DNA, 15 bp, Homo sapiens
tctcctgaactcgtg

SEQ ID NO: 958162 - DNA, 15 bp, Homo sapiens
ctcctgaactcgtga

SEQ ID NO: 958163 - DNA, 15 bp, Homo sapiens
tcctgaactcgtgat

SEQ ID NO: 958164 - DNA, 15 bp, Homo sapiens
cctgaactcgtgatc

SEQ ID NO: 958165 - DNA, 15 bp, Homo sapiens
ctgaactcgtgatcc

SEQ ID NO: 958166 - DNA, 15 bp, Homo sapiens
tgaactcgtgatcca

SEQ ID NO: 958167 - DNA, 15 bp, Homo sapiens
gaactcgtgatccac

SEQ ID NO: 958168 - DNA, 15 bp, Homo sapiens
aactcgtgatccacc

SEQ ID NO: 958169 - DNA, 15 bp, Homo sapiens
actcgtgatccaccc

SEQ ID NO: 958170 - DNA, 15 bp, Homo sapiens
ctcgtgatccacccg

SEQ ID NO: 958171 - DNA, 15 bp, Homo sapiens
tcgtgatccacccgc

SEQ ID NO: 958172 - DNA, 15 bp, Homo sapiens
cgtgatccacccgcc

SEQ ID NO: 958173 - DNA, 15 bp, Homo sapiens
tgatccacccgcctc

SEQ ID NO: 958174 - DNA, 15 bp, Homo sapiens
gatccacccgcctcg

SEQ ID NO: 958175 - DNA, 15 bp, Homo sapiens
atccacccgcctcgg

SEQ ID NO: 958176 - DNA, 15 bp, Homo sapiens
tccacccgcctcggc

SEQ ID NO: 958177 - DNA, 15 bp, Homo sapiens
ccacccgcctcggcc

SEQ ID NO: 958178 - DNA, 15 bp, Homo sapiens
cacccgcctcggcct

SEQ ID NO: 958179 - DNA, 15 bp, Homo sapiens
acccgcctcggcctc

SEQ ID NO: 958180 - DNA, 15 bp, Homo sapiens
ccgcctcggcctcct

SEQ ID NO: 958181 - DNA, 15 bp, Homo sapiens
cgcctcggcctccta

SEQ ID NO: 958182 - DNA, 15 bp, Homo sapiens
gcctcggcctcctaa

SEQ ID NO: 958183 - DNA, 15 bp, Homo sapiens
cctcggcctcctaaa

SEQ ID NO: 958184 - DNA, 15 bp, Homo sapiens
ctcggcctcctaaag

SEQ ID NO: 958185 - DNA, 15 bp, Homo sapiens
tcggcctcctaaagt

SEQ ID NO: 958186 - DNA, 15 bp, Homo sapiens
cggcctcctaaagtg

SEQ ID NO: 958187 - DNA, 15 bp, Homo sapiens
ggcctcctaaagtgc

SEQ ID NO: 958188 - DNA, 15 bp, Homo sapiens
gcctcctaaagtgct

SEQ ID NO: 958189 - DNA, 15 bp, Homo sapiens
cctcctaaagtgctg

SEQ ID NO: 958190 - DNA, 15 bp, Homo sapiens
ctcctaaagtgctgg

SEQ ID NO: 958191 - DNA, 15 bp, Homo sapiens
tcctaaagtgctggg

SEQ ID NO: 958192 - DNA, 15 bp, Homo sapiens
cctaaagtgctggga

SEQ ID NO: 958193 - DNA, 15 bp, Homo sapiens
ctaaagtgctgggat

SEQ ID NO: 958194 - DNA, 15 bp, Homo sapiens
taaagtgctgggatt

SEQ ID NO: 958195 - DNA, 15 bp, Homo sapiens
tgctgggattacaga

SEQ ID NO: 958196 - DNA, 15 bp, Homo sapiens
gctgggattacagat

SEQ ID NO: 958197 - DNA, 15 bp, Homo sapiens
ctgggattacagatg

SEQ ID NO: 958198 - DNA, 15 bp, Homo sapiens
tgggattacagatgt

SEQ ID NO: 958199 - DNA, 15 bp, Homo sapiens
gggattacagatgtg

SEQ ID NO: 958200 - DNA, 15 bp, Homo sapiens
ggattacagatgtga

SEQ ID NO: 958201 - DNA, 15 bp, Homo sapiens
gattacagatgtgag

SEQ ID NO: 958202 - DNA, 15 bp, Homo sapiens
attacagatgtgagc

SEQ ID NO: 958203 - DNA, 15 bp, Homo sapiens
ttacagatgtgagcc

SEQ ID NO: 958204 - DNA, 15 bp, Homo sapiens
tacagatgtgagcca

SEQ ID NO: 958205 - DNA, 15 bp, Homo sapiens
acagatgtgagccac

SEQ ID NO: 958206 - DNA, 15 bp, Homo sapiens
cagatgtgagccacc

SEQ ID NO: 958207 - DNA, 15 bp, Homo sapiens
agatgtgagccaccg

SEQ ID NO: 958208 - DNA, 15 bp, Homo sapiens
gatgtgagccaccgc

SEQ ID NO: 958209 - DNA, 15 bp, Homo sapiens
atgtgagccaccgca

SEQ ID NO: 958210 - DNA, 15 bp, Homo sapiens
tgtgagccaccgcac

SEQ ID NO: 958211 - DNA, 15 bp, Homo sapiens
gtgagccaccgcacc

SEQ ID NO: 958212 - DNA, 15 bp, Homo sapiens
tgagccaccgcacct

SEQ ID NO: 958213 - DNA, 15 bp, Homo sapiens
gagccaccgcacctg

SEQ ID NO: 958214 - DNA, 15 bp, Homo sapiens
agccaccgcacctgg

SEQ ID NO: 958215 - DNA, 15 bp, Homo sapiens
gccaccgcacctggc

SEQ ID NO: 958216 - DNA, 15 bp, Homo sapiens
ccaccgcacctggcc

SEQ ID NO: 958217 - DNA, 15 bp, Homo sapiens
caccgcacctggccc

SEQ ID NO: 958218 - DNA, 15 bp, Homo sapiens
accgcacctggcccc

SEQ ID NO: 958219 - DNA, 15 bp, Homo sapiens
ccgcacctggcccca

SEQ ID NO: 958220 - DNA, 15 bp, Homo sapiens
cgcacctggccccag

SEQ ID NO: 958221 - DNA, 15 bp, Homo sapiens
gcacctggccccagt

SEQ ID NO: 958222 - DNA, 15 bp, Homo sapiens
cacctggccccagtt

SEQ ID NO: 958223 - DNA, 15 bp, Homo sapiens
acctggccccagttg

SEQ ID NO: 958224 - DNA, 15 bp, Homo sapiens
cctggccccagttgt

SEQ ID NO: 958225 - DNA, 15 bp, Homo sapiens
ctggccccagttgta

SEQ ID NO: 958226 - DNA, 15 bp, Homo sapiens
tggccccagttgtaa

SEQ ID NO: 958227 - DNA, 15 bp, Homo sapiens
ggccccagttgtaat

SEQ ID NO: 958228 - DNA, 15 bp, Homo sapiens
gccccagttgtaatt

SEQ ID NO: 958229 - DNA, 15 bp, Homo sapiens
ccccagttgtaattg

SEQ ID NO: 958230 - DNA, 15 bp, Homo sapiens
cccagttgtaattgt

SEQ ID NO: 958231 - DNA, 15 bp, Homo sapiens
ccagttgtaattgtg

SEQ ID NO: 958232 - DNA, 15 bp, Homo sapiens
cagttgtaattgtga

SEQ ID NO: 958233 - DNA, 15 bp, Homo sapiens
agttgtaattgtgaa

SEQ ID NO: 958234 - DNA, 15 bp, Homo sapiens
gttgtaattgtgaat

SEQ ID NO: 958235 - DNA, 15 bp, Homo sapiens
ttgtaattgtgaata

SEQ ID NO: 958236 - DNA, 15 bp, Homo sapiens
tgtaattgtgaatat

SEQ ID NO: 958237 - DNA, 15 bp, Homo sapiens
gtaattgtgaatatc

SEQ ID NO: 958238 - DNA, 15 bp, Homo sapiens
taattgtgaatatct

SEQ ID NO: 958239 - DNA, 15 bp, Homo sapiens
aattgtgaatatctc

SEQ ID NO: 958240 - DNA, 15 bp, Homo sapiens
attgtgaatatctca

SEQ ID NO: 958241 - DNA, 15 bp, Homo sapiens
ttgtgaatatctcat

SEQ ID NO: 958242 - DNA, 15 bp, Homo sapiens
tgtgaatatctcata

SEQ ID NO: 958243 - DNA, 15 bp, Homo sapiens
gtgaatatctcatac

SEQ ID NO: 958244 - DNA, 15 bp, Homo sapiens
tgaatatctcatacc

SEQ ID NO: 958245 - DNA, 15 bp, Homo sapiens
gaatatctcatacct

SEQ ID NO: 958246 - DNA, 15 bp, Homo sapiens
aatatctcataccta

SEQ ID NO: 958247 - DNA, 15 bp, Homo sapiens
atatctcatacctat

SEQ ID NO: 958248 - DNA, 15 bp, Homo sapiens
tatctcatacctatc

SEQ ID NO: 958249 - DNA, 15 bp, Homo sapiens
atctcatacctatcc

SEQ ID NO: 958250 - DNA, 15 bp, Homo sapiens
tctcatacctatccc

SEQ ID NO: 958251 - DNA, 15 bp, Homo sapiens
ctcatacctatccct

SEQ ID NO: 958252 - DNA, 15 bp, Homo sapiens
tcatacctatcccta

SEQ ID NO: 958253 - DNA, 15 bp, Homo sapiens
catacctatccctat

SEQ ID NO: 958254 - DNA, 15 bp, Homo sapiens
atacctatccctatt

SEQ ID NO: 958255 - DNA, 15 bp, Homo sapiens
tacctatccctattg

SEQ ID NO: 958256 - DNA, 15 bp, Homo sapiens
acctatccctattgg

SEQ ID NO: 958257 - DNA, 15 bp, Homo sapiens
cctatccctattggc

SEQ ID NO: 958258 - DNA, 15 bp, Homo sapiens
ctatccctattggca

SEQ ID NO: 958259 - DNA, 15 bp, Homo sapiens
tatccctattggcag

SEQ ID NO: 958260 - DNA, 15 bp, Homo sapiens
atccctattggcagt

SEQ ID NO: 958261 - DNA, 15 bp, Homo sapiens
tccctattggcagtg

SEQ ID NO: 958262 - DNA, 15 bp, Homo sapiens
ccctattggcagtgt

SEQ ID NO: 958263 - DNA, 15 bp, Homo sapiens
cctattggcagtgtc

SEQ ID NO: 958264 - DNA, 15 bp, Homo sapiens
ctattggcagtgtct

SEQ ID NO: 958265 - DNA, 15 bp, Homo sapiens
tattggcagtgtctt

SEQ ID NO: 958266 - DNA, 15 bp, Homo sapiens
attggcagtgtctta

SEQ ID NO: 958267 - DNA, 15 bp, Homo sapiens
ttggcagtgtcttag

SEQ ID NO: 958268 - DNA, 15 bp, Homo sapiens
tggcagtgtcttagt

SEQ ID NO: 958269 - DNA, 15 bp, Homo sapiens
ggcagtgtcttagtt

SEQ ID NO: 958270 - DNA, 15 bp, Homo sapiens
gcagtgtcttagttt

SEQ ID NO: 958271 - DNA, 15 bp, Homo sapiens
cagtgtcttagtttt

SEQ ID NO: 958272 - DNA, 15 bp, Homo sapiens
agtgtcttagtttta

SEQ ID NO: 958273 - DNA, 15 bp, Homo sapiens
gtgtcttagttttat

SEQ ID NO: 958274 - DNA, 15 bp, Homo sapiens
tgtcttagttttatt

SEQ ID NO: 958275 - DNA, 15 bp, Homo sapiens
gtcttagttttattt

SEQ ID NO: 958276 - DNA, 15 bp, Homo sapiens
tcttagttttatttt

SEQ ID NO: 958277 - DNA, 15 bp, Homo sapiens
cttagttttattttt

SEQ ID NO: 958278 - DNA, 15 bp, Homo sapiens
ttagttttatttttt

SEQ ID NO: 958279 - DNA, 15 bp, Homo sapiens
tagttttatttttta

SEQ ID NO: 958280 - DNA, 15 bp, Homo sapiens
gttttattttttatt

SEQ ID NO: 958281 - DNA, 15 bp, Homo sapiens
ttttattttttatta

SEQ ID NO: 958282 - DNA, 15 bp, Homo sapiens
tttattttttattat

SEQ ID NO: 958283 - DNA, 15 bp, Homo sapiens
ttattttttattatc

SEQ ID NO: 958284 - DNA, 15 bp, Homo sapiens
tattttttattatct

SEQ ID NO: 958285 - DNA, 15 bp, Homo sapiens
attttttattatctt

SEQ ID NO: 958286 - DNA, 15 bp, Homo sapiens
ttttttattatcttt

SEQ ID NO: 958287 - DNA, 15 bp, Homo sapiens
tttttattatcttta

SEQ ID NO: 958288 - DNA, 15 bp, Homo sapiens
ttttattatctttat

SEQ ID NO: 958289 - DNA, 15 bp, Homo sapiens
tttattatctttatt

SEQ ID NO: 958290 - DNA, 15 bp, Homo sapiens
ttattatctttattg

SEQ ID NO: 958291 - DNA, 15 bp, Homo sapiens
tattatctttattgt

SEQ ID NO: 958292 - DNA, 15 bp, Homo sapiens
attatctttattgtg

SEQ ID NO: 958293 - DNA, 15 bp, Homo sapiens
ttatctttattgtgg

SEQ ID NO: 958294 - DNA, 15 bp, Homo sapiens
tatctttattgtggc

SEQ ID NO: 958295 - DNA, 15 bp, Homo sapiens
atctttattgtggca

SEQ ID NO: 958296 - DNA, 15 bp, Homo sapiens
tctttattgtggcag

SEQ ID NO: 958297 - DNA, 15 bp, Homo sapiens
ctttattgtggcagc

SEQ ID NO: 958298 - DNA, 15 bp, Homo sapiens
tttattgtggcagcc

SEQ ID NO: 958299 - DNA, 15 bp, Homo sapiens
ttattgtggcagcca

SEQ ID NO: 958300 - DNA, 15 bp, Homo sapiens
tattgtggcagccat

SEQ ID NO: 958301 - DNA, 15 bp, Homo sapiens
attgtggcagccatt

SEQ ID NO: 958302 - DNA, 15 bp, Homo sapiens
ttgtggcagccatta

SEQ ID NO: 958303 - DNA, 15 bp, Homo sapiens
tgtggcagccattat

SEQ ID NO: 958304 - DNA, 15 bp, Homo sapiens
gtggcagccattatt

SEQ ID NO: 958305 - DNA, 15 bp, Homo sapiens
tggcagccattattc

SEQ ID NO: 958306 - DNA, 15 bp, Homo sapiens
ggcagccattattcc

SEQ ID NO: 958307 - DNA, 15 bp, Homo sapiens
gcagccattattcct

SEQ ID NO: 958308 - DNA, 15 bp, Homo sapiens
cagccattattcctg

SEQ ID NO: 958309 - DNA, 15 bp, Homo sapiens
agccattattcctgt

SEQ ID NO: 958310 - DNA, 15 bp, Homo sapiens
gccattattcctgtc

SEQ ID NO: 958311 - DNA, 15 bp, Homo sapiens
ccattattcctgtct

SEQ ID NO: 958312 - DNA, 15 bp, Homo sapiens
cattattcctgtctc

SEQ ID NO: 958313 - DNA, 15 bp, Homo sapiens
attattcctgtctct

SEQ ID NO: 958314 - DNA, 15 bp, Homo sapiens
ttattcctgtctcta

SEQ ID NO: 958315 - DNA, 15 bp, Homo sapiens
tattcctgtctctat

SEQ ID NO: 958316 - DNA, 15 bp, Homo sapiens
attcctgtctctatc

SEQ ID NO: 958317 - DNA, 15 bp, Homo sapiens
ttcctgtctctatct

SEQ ID NO: 958318 - DNA, 15 bp, Homo sapiens
tcctgtctctatctc

SEQ ID NO: 958319 - DNA, 15 bp, Homo sapiens
cctgtctctatctcc

SEQ ID NO: 958320 - DNA, 15 bp, Homo sapiens
ctgtctctatctcca

SEQ ID NO: 958321 - DNA, 15 bp, Homo sapiens
tgtctctatctccag

SEQ ID NO: 958322 - DNA, 15 bp, Homo sapiens
gtctctatctccagt

SEQ ID NO: 958323 - DNA, 15 bp, Homo sapiens
tctctatctccagtc

SEQ ID NO: 958324 - DNA, 15 bp, Homo sapiens
ctctatctccagtct

SEQ ID NO: 958325 - DNA, 15 bp, Homo sapiens
tctatctccagtctt

SEQ ID NO: 958326 - DNA, 15 bp, Homo sapiens
ctatctccagtctta

SEQ ID NO: 958327 - DNA, 15 bp, Homo sapiens
tatctccagtcttac

SEQ ID NO: 958328 - DNA, 15 bp, Homo sapiens
atctccagtcttaca

SEQ ID NO: 958329 - DNA, 15 bp, Homo sapiens
tctccagtcttacat

SEQ ID NO: 958330 - DNA, 15 bp, Homo sapiens
ctccagtcttacatc

SEQ ID NO: 958331 - DNA, 15 bp, Homo sapiens
tccagtcttacatcc

SEQ ID NO: 958332 - DNA, 15 bp, Homo sapiens
ccagtcttacatcct

SEQ ID NO: 958333 - DNA, 15 bp, Homo sapiens
cagtcttacatcctc

SEQ ID NO: 958334 - DNA, 15 bp, Homo sapiens
agtcttacatcctcc

SEQ ID NO: 958335 - DNA, 15 bp, Homo sapiens
gtcttacatcctcct

SEQ ID NO: 958336 - DNA, 15 bp, Homo sapiens
tcttacatcctcctt

SEQ ID NO: 958337 - DNA, 15 bp, Homo sapiens
cttacatcctcctta

SEQ ID NO: 958338 - DNA, 15 bp, Homo sapiens
ttacatcctccttac

SEQ ID NO: 958339 - DNA, 15 bp, Homo sapiens
tacatcctccttact

SEQ ID NO: 958340 - DNA, 15 bp, Homo sapiens
acatcctccttactg

SEQ ID NO: 958341 - DNA, 15 bp, Homo sapiens
catcctccttactgc

SEQ ID NO: 958342 - DNA, 15 bp, Homo sapiens
atcctccttactgcc

SEQ ID NO: 958343 - DNA, 15 bp, Homo sapiens
tcctccttactgcca

SEQ ID NO: 958344 - DNA, 15 bp, Homo sapiens
cctccttactgccac

SEQ ID NO: 958345 - DNA, 15 bp, Homo sapiens
ctccttactgccaca

SEQ ID NO: 958346 - DNA, 15 bp, Homo sapiens
tccttactgccacaa

SEQ ID NO: 958347 - DNA, 15 bp, Homo sapiens
ccttactgccacaag

SEQ ID NO: 958348 - DNA, 15 bp, Homo sapiens
cttactgccacaaga

SEQ ID NO: 958349 - DNA, 15 bp, Homo sapiens
ttactgccacaagaa

SEQ ID NO: 958350 - DNA, 15 bp, Homo sapiens
tactgccacaagaat

SEQ ID NO: 958351 - DNA, 15 bp, Homo sapiens
actgccacaagaatg

SEQ ID NO: 958352 - DNA, 15 bp, Homo sapiens
ctgccacaagaatga

SEQ ID NO: 958353 - DNA, 15 bp, Homo sapiens
tgccacaagaatgat

SEQ ID NO: 958354 - DNA, 15 bp, Homo sapiens
gccacaagaatgatc

SEQ ID NO: 958355 - DNA, 15 bp, Homo sapiens
ccacaagaatgatca

SEQ ID NO: 958356 - DNA, 15 bp, Homo sapiens
cacaagaatgatcat

SEQ ID NO: 958357 - DNA, 15 bp, Homo sapiens
acaagaatgatcatt

SEQ ID NO: 958358 - DNA, 15 bp, Homo sapiens
caagaatgatcattc

SEQ ID NO: 958359 - DNA, 15 bp, Homo sapiens
aagaatgatcattct

SEQ ID NO: 958360 - DNA, 15 bp, Homo sapiens
agaatgatcattcta

SEQ ID NO: 958361 - DNA, 15 bp, Homo sapiens
gaatgatcattctaa

SEQ ID NO: 958362 - DNA, 15 bp, Homo sapiens
aatgatcattctaaa

SEQ ID NO: 958363 - DNA, 15 bp, Homo sapiens
atgatcattctaaac

SEQ ID NO: 958364 - DNA, 15 bp, Homo sapiens
tgatcattctaaaca

SEQ ID NO: 958365 - DNA, 15 bp, Homo sapiens
gatcattctaaacat

SEQ ID NO: 958366 - DNA, 15 bp, Homo sapiens
atcattctaaacatg

SEQ ID NO: 958367 - DNA, 15 bp, Homo sapiens
tcattctaaacatga

SEQ ID NO: 958368 - DNA, 15 bp, Homo sapiens
cattctaaacatgaa

SEQ ID NO: 958369 - DNA, 15 bp, Homo sapiens
attctaaacatgaat

SEQ ID NO: 958370 - DNA, 15 bp, Homo sapiens
ttctaaacatgaatc

SEQ ID NO: 958371 - DNA, 15 bp, Homo sapiens
tctaaacatgaatcc

SEQ ID NO: 958372 - DNA, 15 bp, Homo sapiens
ctaaacatgaatcct

SEQ ID NO: 958373 - DNA, 15 bp, Homo sapiens
taaacatgaatccta

SEQ ID NO: 958374 - DNA, 15 bp, Homo sapiens
aaacatgaatcctac

SEQ ID NO: 958375 - DNA, 15 bp, Homo sapiens
aacatgaatcctacc

SEQ ID NO: 958376 - DNA, 15 bp, Homo sapiens
acatgaatcctaccc

SEQ ID NO: 958377 - DNA, 15 bp, Homo sapiens
catgaatcctaccct

SEQ ID NO: 958378 - DNA, 15 bp, Homo sapiens
atgaatcctaccctg

SEQ ID NO: 958379 - DNA, 15 bp, Homo sapiens
tgaatcctaccctgt

SEQ ID NO: 958380 - DNA, 15 bp, Homo sapiens
gaatcctaccctgtg

SEQ ID NO: 958381 - DNA, 15 bp, Homo sapiens
aatcctaccctgtga

SEQ ID NO: 958382 - DNA, 15 bp, Homo sapiens
atcctaccctgtgac

SEQ ID NO: 958383 - DNA, 15 bp, Homo sapiens
tcctaccctgtgact

SEQ ID NO: 958384 - DNA, 15 bp, Homo sapiens
cctaccctgtgactc

SEQ ID NO: 958385 - DNA, 15 bp, Homo sapiens
ctaccctgtgactcc

SEQ ID NO: 958386 - DNA, 15 bp, Homo sapiens
taccctgtgactccc

SEQ ID NO: 958387 - DNA, 15 bp, Homo sapiens
accctgtgactccca

SEQ ID NO: 958388 - DNA, 15 bp, Homo sapiens
ccctgtgactcccat

SEQ ID NO: 958389 - DNA, 15 bp, Homo sapiens
cctgtgactcccatg

SEQ ID NO: 958390 - DNA, 15 bp, Homo sapiens
ctgtgactcccatgt

SEQ ID NO: 958391 - DNA, 15 bp, Homo sapiens
tgtgactcccatgtg

SEQ ID NO: 958392 - DNA, 15 bp, Homo sapiens
gtgactcccatgtga

SEQ ID NO: 958393 - DNA, 15 bp, Homo sapiens
tgactcccatgtgac

SEQ ID NO: 958394 - DNA, 15 bp, Homo sapiens
gactcccatgtgact

SEQ ID NO: 958395 - DNA, 15 bp, Homo sapiens
actcccatgtgactc

SEQ ID NO: 958396 - DNA, 15 bp, Homo sapiens
ctcccatgtgactcc

SEQ ID NO: 958397 - DNA, 15 bp, Homo sapiens
tcccatgtgactccc

SEQ ID NO: 958398 - DNA, 15 bp, Homo sapiens
cccatgtgactcccc

SEQ ID NO: 958399 - DNA, 15 bp, Homo sapiens
ccatgtgactccccg

SEQ ID NO: 958400 - DNA, 15 bp, Homo sapiens
catgtgactccccgc

SEQ ID NO: 958401 - DNA, 15 bp, Homo sapiens
atgtgactccccgcc

SEQ ID NO: 958402 - DNA, 15 bp, Homo sapiens
tgtgactccccgcct

SEQ ID NO: 958403 - DNA, 15 bp, Homo sapiens
gtgactccccgcctt

SEQ ID NO: 958404 - DNA, 15 bp, Homo sapiens
tgactccccgcctta

SEQ ID NO: 958405 - DNA, 15 bp, Homo sapiens
gactccccgccttaa

SEQ ID NO: 958406 - DNA, 15 bp, Homo sapiens
actccccgccttaaa

SEQ ID NO: 958407 - DNA, 15 bp, Homo sapiens
ctccccgccttaaaa

SEQ ID NO: 958408 - DNA, 15 bp, Homo sapiens
tccccgccttaaaaa

SEQ ID NO: 958409 - DNA, 15 bp, Homo sapiens
ccccgccttaaaaac

SEQ ID NO: 958410 - DNA, 15 bp, Homo sapiens
cccgccttaaaaact

SEQ ID NO: 958411 - DNA, 15 bp, Homo sapiens
ccgccttaaaaactg

SEQ ID NO: 958412 - DNA, 15 bp, Homo sapiens
cgccttaaaaactgt

SEQ ID NO: 958413 - DNA, 15 bp, Homo sapiens
gccttaaaaactgtc

SEQ ID NO: 958414 - DNA, 15 bp, Homo sapiens
ccttaaaaactgtca

SEQ ID NO: 958415 - DNA, 15 bp, Homo sapiens
cttaaaaactgtcaa

SEQ ID NO: 958416 - DNA, 15 bp, Homo sapiens
ttaaaaactgtcaaa

SEQ ID NO: 958417 - DNA, 15 bp, Homo sapiens
taaaaactgtcaaaa

SEQ ID NO: 958418 - DNA, 15 bp, Homo sapiens
aaaaactgtcaaaag

SEQ ID NO: 958419 - DNA, 15 bp, Homo sapiens
aaaactgtcaaaagc

SEQ ID NO: 958420 - DNA, 15 bp, Homo sapiens
aaactgtcaaaagct

SEQ ID NO: 958421 - DNA, 15 bp, Homo sapiens
aactgtcaaaagcta

SEQ ID NO: 958422 - DNA, 15 bp, Homo sapiens
actgtcaaaagctac

SEQ ID NO: 958423 - DNA, 15 bp, Homo sapiens
ctgtcaaaagctacc

SEQ ID NO: 958424 - DNA, 15 bp, Homo sapiens
tgtcaaaagctaccg

SEQ ID NO: 958425 - DNA, 15 bp, Homo sapiens
gtcaaaagctaccgg

SEQ ID NO: 958426 - DNA, 15 bp, Homo sapiens
tcaaaagctaccggt

SEQ ID NO: 958427 - DNA, 15 bp, Homo sapiens
caaaagctaccggtt

SEQ ID NO: 958428 - DNA, 15 bp, Homo sapiens
aaaagctaccggtta

SEQ ID NO: 958429 - DNA, 15 bp, Homo sapiens
aaagctaccggttac

SEQ ID NO: 958430 - DNA, 15 bp, Homo sapiens
aagctaccggttacc

SEQ ID NO: 958431 - DNA, 15 bp, Homo sapiens
agctaccggttacct

SEQ ID NO: 958432 - DNA, 15 bp, Homo sapiens
gctaccggttacctg

SEQ ID NO: 958433 - DNA, 15 bp, Homo sapiens
ctaccggttacctga

SEQ ID NO: 958434 - DNA, 15 bp, Homo sapiens
taccggttacctgaa

SEQ ID NO: 958435 - DNA, 15 bp, Homo sapiens
accggttacctgaag

SEQ ID NO: 958436 - DNA, 15 bp, Homo sapiens
ccggttacctgaagg

SEQ ID NO: 958437 - DNA, 15 bp, Homo sapiens
cggttacctgaaggg

SEQ ID NO: 958438 - DNA, 15 bp, Homo sapiens
ggttacctgaagggt

SEQ ID NO: 958439 - DNA, 15 bp, Homo sapiens
gttacctgaagggta

SEQ ID NO: 958440 - DNA, 15 bp, Homo sapiens
ttacctgaagggtaa

SEQ ID NO: 958441 - DNA, 15 bp, Homo sapiens
tacctgaagggtaaa

SEQ ID NO: 958442 - DNA, 15 bp, Homo sapiens
acctgaagggtaaaa

SEQ ID NO: 958443 - DNA, 15 bp, Homo sapiens
cctgaagggtaaaag

SEQ ID NO: 958444 - DNA, 15 bp, Homo sapiens
ctgaagggtaaaagt

SEQ ID NO: 958445 - DNA, 15 bp, Homo sapiens
tgaagggtaaaagtc

SEQ ID NO: 958446 - DNA, 15 bp, Homo sapiens
gaagggtaaaagtca

SEQ ID NO: 958447 - DNA, 15 bp, Homo sapiens
aagggtaaaagtcaa

SEQ ID NO: 958448 - DNA, 15 bp, Homo sapiens
agggtaaaagtcaag

SEQ ID NO: 958449 - DNA, 15 bp, Homo sapiens
gggtaaaagtcaagt

SEQ ID NO: 958450 - DNA, 15 bp, Homo sapiens
ggtaaaagtcaagtc

SEQ ID NO: 958451 - DNA, 15 bp, Homo sapiens
gtaaaagtcaagtcc

SEQ ID NO: 958452 - DNA, 15 bp, Homo sapiens
taaaagtcaagtccc

SEQ ID NO: 958453 - DNA, 15 bp, Homo sapiens
aaaagtcaagtcccc

SEQ ID NO: 958454 - DNA, 15 bp, Homo sapiens
aaagtcaagtcccct

SEQ ID NO: 958455 - DNA, 15 bp, Homo sapiens
aagtcaagtccccta

SEQ ID NO: 958456 - DNA, 15 bp, Homo sapiens
agtcaagtcccctac

SEQ ID NO: 958457 - DNA, 15 bp, Homo sapiens
gtcaagtcccctact

SEQ ID NO: 958458 - DNA, 15 bp, Homo sapiens
tcaagtcccctactt

SEQ ID NO: 958459 - DNA, 15 bp, Homo sapiens
caagtcccctactta

SEQ ID NO: 958460 - DNA, 15 bp, Homo sapiens
aagtcccctacttac

SEQ ID NO: 958461 - DNA, 15 bp, Homo sapiens
agtcccctacttacc

SEQ ID NO: 958462 - DNA, 15 bp, Homo sapiens
gtcccctacttacct

SEQ ID NO: 958463 - DNA, 15 bp, Homo sapiens
tcccctacttacctc

SEQ ID NO: 958464 - DNA, 15 bp, Homo sapiens
cccctacttacctca

SEQ ID NO: 958465 - DNA, 15 bp, Homo sapiens
ccctacttacctcat

SEQ ID NO: 958466 - DNA, 15 bp, Homo sapiens
cctacttacctcatg

SEQ ID NO: 958467 - DNA, 15 bp, Homo sapiens
ctacttacctcatgt

SEQ ID NO: 958468 - DNA, 15 bp, Homo sapiens
tacttacctcatgtc

SEQ ID NO: 958469 - DNA, 15 bp, Homo sapiens
acttacctcatgtca

SEQ ID NO: 958470 - DNA, 15 bp, Homo sapiens
cttacctcatgtcat

SEQ ID NO: 958471 - DNA, 15 bp, Homo sapiens
ttacctcatgtcatc

SEQ ID NO: 958472 - DNA, 15 bp, Homo sapiens
tacctcatgtcatct

SEQ ID NO: 958473 - DNA, 15 bp, Homo sapiens
acctcatgtcatcta

SEQ ID NO: 958474 - DNA, 15 bp, Homo sapiens
cctcatgtcatctag

SEQ ID NO: 958475 - DNA, 15 bp, Homo sapiens
ctcatgtcatctaga

SEQ ID NO: 958476 - DNA, 15 bp, Homo sapiens
tcatgtcatctagag

SEQ ID NO: 958477 - DNA, 15 bp, Homo sapiens
catgtcatctagagc

SEQ ID NO: 958478 - DNA, 15 bp, Homo sapiens
atgtcatctagagca

SEQ ID NO: 958479 - DNA, 15 bp, Homo sapiens
tgtcatctagagcaa

SEQ ID NO: 958480 - DNA, 15 bp, Homo sapiens
gtcatctagagcaag

SEQ ID NO: 958481 - DNA, 15 bp, Homo sapiens
tcatctagagcaaga

SEQ ID NO: 958482 - DNA, 15 bp, Homo sapiens
catctagagcaagag

SEQ ID NO: 958483 - DNA, 15 bp, Homo sapiens
atctagagcaagaga

SEQ ID NO: 958484 - DNA, 15 bp, Homo sapiens
tctagagcaagagat

SEQ ID NO: 958485 - DNA, 15 bp, Homo sapiens
ctagagcaagagatg

SEQ ID NO: 958486 - DNA, 15 bp, Homo sapiens
tagagcaagagatga

SEQ ID NO: 958487 - DNA, 15 bp, Homo sapiens
agagcaagagatgaa

SEQ ID NO: 958488 - DNA, 15 bp, Homo sapiens
gagcaagagatgaac

SEQ ID NO: 958489 - DNA, 15 bp, Homo sapiens
agcaagagatgaact

SEQ ID NO: 958490 - DNA, 15 bp, Homo sapiens
gcaagagatgaacta

SEQ ID NO: 958491 - DNA, 15 bp, Homo sapiens
caagagatgaactag

SEQ ID NO: 958492 - DNA, 15 bp, Homo sapiens
aagagatgaactagc

SEQ ID NO: 958493 - DNA, 15 bp, Homo sapiens
agagatgaactagct

SEQ ID NO: 958494 - DNA, 15 bp, Homo sapiens
gagatgaactagctg

SEQ ID NO: 958495 - DNA, 15 bp, Homo sapiens
agatgaactagctga

SEQ ID NO: 958496 - DNA, 15 bp, Homo sapiens
gatgaactagctgag

SEQ ID NO: 958497 - DNA, 15 bp, Homo sapiens
atgaactagctgagt

SEQ ID NO: 958498 - DNA, 15 bp, Homo sapiens
tgaactagctgagtt

SEQ ID NO: 958499 - DNA, 15 bp, Homo sapiens
gaactagctgagttt

SEQ ID NO: 958500 - DNA, 15 bp, Homo sapiens
aactagctgagtttt

SEQ ID NO: 958501 - DNA, 15 bp, Homo sapiens
actagctgagttttc

SEQ ID NO: 958502 - DNA, 15 bp, Homo sapiens
ctagctgagttttct

SEQ ID NO: 958503 - DNA, 15 bp, Homo sapiens
tagctgagttttctg

SEQ ID NO: 958504 - DNA, 15 bp, Homo sapiens
agctgagttttctga

SEQ ID NO: 958505 - DNA, 15 bp, Homo sapiens
gctgagttttctgac

SEQ ID NO: 958506 - DNA, 15 bp, Homo sapiens
ctgagttttctgacc

SEQ ID NO: 958507 - DNA, 15 bp, Homo sapiens
tgagttttctgacca

SEQ ID NO: 958508 - DNA, 15 bp, Homo sapiens
gagttttctgaccac

SEQ ID NO: 958509 - DNA, 15 bp, Homo sapiens
agttttctgaccaca

SEQ ID NO: 958510 - DNA, 15 bp, Homo sapiens
gttttctgaccacag

SEQ ID NO: 958511 - DNA, 15 bp, Homo sapiens
ttttctgaccacagt

SEQ ID NO: 958512 - DNA, 15 bp, Homo sapiens
tttctgaccacagtg

SEQ ID NO: 958513 - DNA, 15 bp, Homo sapiens
ttctgaccacagtgt

SEQ ID NO: 958514 - DNA, 15 bp, Homo sapiens
tctgaccacagtgtt

SEQ ID NO: 958515 - DNA, 15 bp, Homo sapiens
ctgaccacagtgttc

SEQ ID NO: 958516 - DNA, 15 bp, Homo sapiens
tgaccacagtgttct

SEQ ID NO: 958517 - DNA, 15 bp, Homo sapiens
gaccacagtgttctt

SEQ ID NO: 958518 - DNA, 15 bp, Homo sapiens
accacagtgttcttt

SEQ ID NO: 958519 - DNA, 15 bp, Homo sapiens
ccacagtgttctttc

SEQ ID NO: 958520 - DNA, 15 bp, Homo sapiens
cacagtgttctttct

SEQ ID NO: 958521 - DNA, 15 bp, Homo sapiens
acagtgttctttctt

SEQ ID NO: 958522 - DNA, 15 bp, Homo sapiens
cagtgttctttctta

SEQ ID NO: 958523 - DNA, 15 bp, Homo sapiens
agtgttctttcttat

SEQ ID NO: 958524 - DNA, 15 bp, Homo sapiens
gtgttctttcttatg

SEQ ID NO: 958525 - DNA, 15 bp, Homo sapiens
tgttctttcttatgt

SEQ ID NO: 958526 - DNA, 15 bp, Homo sapiens
gttctttcttatgta

SEQ ID NO: 958527 - DNA, 15 bp, Homo sapiens
ttctttcttatgtat

SEQ ID NO: 958528 - DNA, 15 bp, Homo sapiens
tctttcttatgtatg

SEQ ID NO: 958529 - DNA, 15 bp, Homo sapiens
ctttcttatgtatgt

SEQ ID NO: 958530 - DNA, 15 bp, Homo sapiens
tttcttatgtatgtt

SEQ ID NO: 958531 - DNA, 15 bp, Homo sapiens
ttcttatgtatgttc

SEQ ID NO: 958532 - DNA, 15 bp, Homo sapiens
tcttatgtatgttct

SEQ ID NO: 958533 - DNA, 15 bp, Homo sapiens
cttatgtatgttctt

SEQ ID NO: 958534 - DNA, 15 bp, Homo sapiens
ttatgtatgttcttt

SEQ ID NO: 958535 - DNA, 15 bp, Homo sapiens
tatgtatgttctttt

SEQ ID NO: 958536 - DNA, 15 bp, Homo sapiens
atgtatgttcttttg

SEQ ID NO: 958537 - DNA, 15 bp, Homo sapiens
tgtatgttcttttgt

SEQ ID NO: 958538 - DNA, 15 bp, Homo sapiens
gtatgttcttttgta

SEQ ID NO: 958539 - DNA, 15 bp, Homo sapiens
tatgttcttttgtac

SEQ ID NO: 958540 - DNA, 15 bp, Homo sapiens
atgttcttttgtacg

SEQ ID NO: 958541 - DNA, 15 bp, Homo sapiens
tgttcttttgtacgt

SEQ ID NO: 958542 - DNA, 15 bp, Homo sapiens
gttcttttgtacgtg

SEQ ID NO: 958543 - DNA, 15 bp, Homo sapiens
ttcttttgtacgtgc

SEQ ID NO: 958544 - DNA, 15 bp, Homo sapiens
tcttttgtacgtgct

SEQ ID NO: 958545 - DNA, 15 bp, Homo sapiens
cttttgtacgtgctc

SEQ ID NO: 958546 - DNA, 15 bp, Homo sapiens
ttttgtacgtgctct

SEQ ID NO: 958547 - DNA, 15 bp, Homo sapiens
tttgtacgtgctctt

SEQ ID NO: 958548 - DNA, 15 bp, Homo sapiens
ttgtacgtgctcttt

SEQ ID NO: 958549 - DNA, 15 bp, Homo sapiens
tgtacgtgctctttt

SEQ ID NO: 958550 - DNA, 15 bp, Homo sapiens
gtacgtgctcttttc

SEQ ID NO: 958551 - DNA, 15 bp, Homo sapiens
tacgtgctcttttct

SEQ ID NO: 958552 - DNA, 15 bp, Homo sapiens
acgtgctcttttcta

SEQ ID NO: 958553 - DNA, 15 bp, Homo sapiens
cgtgctcttttctat

SEQ ID NO: 958554 - DNA, 15 bp, Homo sapiens
gtgctcttttctata

SEQ ID NO: 958555 - DNA, 15 bp, Homo sapiens
tgctcttttctatat

SEQ ID NO: 958556 - DNA, 15 bp, Homo sapiens
gctcttttctatata

SEQ ID NO: 958557 - DNA, 15 bp, Homo sapiens
ctcttttctatatat

SEQ ID NO: 958558 - DNA, 15 bp, Homo sapiens
tcttttctatatata

SEQ ID NO: 958559 - DNA, 15 bp, Homo sapiens
cttttctatatatag

SEQ ID NO: 958560 - DNA, 15 bp, Homo sapiens
ttttctatatatagg

SEQ ID NO: 958561 - DNA, 15 bp, Homo sapiens
tttctatatataggg

SEQ ID NO: 958562 - DNA, 15 bp, Homo sapiens
ttctatatataggga

SEQ ID NO: 958563 - DNA, 15 bp, Homo sapiens
tctatatatagggaa

SEQ ID NO: 958564 - DNA, 15 bp, Homo sapiens
ctatatatagggaac

SEQ ID NO: 958565 - DNA, 15 bp, Homo sapiens
tatatatagggaacc

SEQ ID NO: 958566 - DNA, 15 bp, Homo sapiens
atatatagggaacca

SEQ ID NO: 958567 - DNA, 15 bp, Homo sapiens
tatatagggaaccat

SEQ ID NO: 958568 - DNA, 15 bp, Homo sapiens
atatagggaaccatt

SEQ ID NO: 958569 - DNA, 15 bp, Homo sapiens
tatagggaaccattt

SEQ ID NO: 958570 - DNA, 15 bp, Homo sapiens
atagggaaccatttc

SEQ ID NO: 958571 - DNA, 15 bp, Homo sapiens
tagggaaccatttct

SEQ ID NO: 958572 - DNA, 15 bp, Homo sapiens
agggaaccatttctc

SEQ ID NO: 958573 - DNA, 15 bp, Homo sapiens
gggaaccatttctct

SEQ ID NO: 958574 - DNA, 15 bp, Homo sapiens
ggaaccatttctctc

SEQ ID NO: 958575 - DNA, 15 bp, Homo sapiens
gaaccatttctctct

SEQ ID NO: 958576 - DNA, 15 bp, Homo sapiens
aaccatttctctctt

SEQ ID NO: 958577 - DNA, 15 bp, Homo sapiens
accatttctctcttc

SEQ ID NO: 958578 - DNA, 15 bp, Homo sapiens
ccatttctctcttcc

SEQ ID NO: 958579 - DNA, 15 bp, Homo sapiens
catttctctcttcca

SEQ ID NO: 958580 - DNA, 15 bp, Homo sapiens
atttctctcttccag

SEQ ID NO: 958581 - DNA, 15 bp, Homo sapiens
tttctctcttccagt

SEQ ID NO: 958582 - DNA, 15 bp, Homo sapiens
ttctctcttccagtt

SEQ ID NO: 958583 - DNA, 15 bp, Homo sapiens
tctctcttccagttg

SEQ ID NO: 958584 - DNA, 15 bp, Homo sapiens
ctctcttccagttgt

SEQ ID NO: 958585 - DNA, 15 bp, Homo sapiens
tctcttccagttgtt

SEQ ID NO: 958586 - DNA, 15 bp, Homo sapiens
ctcttccagttgttt

SEQ ID NO: 958587 - DNA, 15 bp, Homo sapiens
tcttccagttgtttt

SEQ ID NO: 958588 - DNA, 15 bp, Homo sapiens
cttccagttgttttg

SEQ ID NO: 958589 - DNA, 15 bp, Homo sapiens
ttccagttgttttgc

SEQ ID NO: 958590 - DNA, 15 bp, Homo sapiens
tccagttgttttgct

SEQ ID NO: 958591 - DNA, 15 bp, Homo sapiens
ccagttgttttgctc

SEQ ID NO: 958592 - DNA, 15 bp, Homo sapiens
cagttgttttgctca

SEQ ID NO: 958593 - DNA, 15 bp, Homo sapiens
agttgttttgctcag

SEQ ID NO: 958594 - DNA, 15 bp, Homo sapiens
gttgttttgctcagt

SEQ ID NO: 958595 - DNA, 15 bp, Homo sapiens
ttgttttgctcagtg

SEQ ID NO: 958596 - DNA, 15 bp, Homo sapiens
tgttttgctcagtga

SEQ ID NO: 958597 - DNA, 15 bp, Homo sapiens
gttttgctcagtgaa

SEQ ID NO: 958598 - DNA, 15 bp, Homo sapiens
ttttgctcagtgaat

SEQ ID NO: 958599 - DNA, 15 bp, Homo sapiens
tttgctcagtgaatt

SEQ ID NO: 958600 - DNA, 15 bp, Homo sapiens
ttgctcagtgaattt

SEQ ID NO: 958601 - DNA, 15 bp, Homo sapiens
tgctcagtgaatttc

SEQ ID NO: 958602 - DNA, 15 bp, Homo sapiens
gctcagtgaatttct

SEQ ID NO: 958603 - DNA, 15 bp, Homo sapiens
ctcagtgaatttcta

SEQ ID NO: 958604 - DNA, 15 bp, Homo sapiens
tcagtgaatttctat

SEQ ID NO: 958605 - DNA, 15 bp, Homo sapiens
cagtgaatttctatt

SEQ ID NO: 958606 - DNA, 15 bp, Homo sapiens
agtgaatttctattc

SEQ ID NO: 958607 - DNA, 15 bp, Homo sapiens
gtgaatttctattcc

SEQ ID NO: 958608 - DNA, 15 bp, Homo sapiens
tgaatttctattcct

SEQ ID NO: 958609 - DNA, 15 bp, Homo sapiens
gaatttctattcctg

SEQ ID NO: 958610 - DNA, 15 bp, Homo sapiens
aatttctattcctgt

SEQ ID NO: 958611 - DNA, 15 bp, Homo sapiens
atttctattcctgtt

SEQ ID NO: 958612 - DNA, 15 bp, Homo sapiens
tttctattcctgttt

SEQ ID NO: 958613 - DNA, 15 bp, Homo sapiens
ttctattcctgtttc

SEQ ID NO: 958614 - DNA, 15 bp, Homo sapiens
tctattcctgtttca

SEQ ID NO: 958615 - DNA, 15 bp, Homo sapiens
ctattcctgtttcaa

SEQ ID NO: 958616 - DNA, 15 bp, Homo sapiens
tattcctgtttcaaa

SEQ ID NO: 958617 - DNA, 15 bp, Homo sapiens
attcctgtttcaaaa

SEQ ID NO: 958618 - DNA, 15 bp, Homo sapiens
ttcctgtttcaaaac

SEQ ID NO: 958619 - DNA, 15 bp, Homo sapiens
tcctgtttcaaaact

SEQ ID NO: 958620 - DNA, 15 bp, Homo sapiens
cctgtttcaaaactt

SEQ ID NO: 958621 - DNA, 15 bp, Homo sapiens
ctgtttcaaaacttg

SEQ ID NO: 958622 - DNA, 15 bp, Homo sapiens
tgtttcaaaacttgt

SEQ ID NO: 958623 - DNA, 15 bp, Homo sapiens
gtttcaaaacttgtt

SEQ ID NO: 958624 - DNA, 15 bp, Homo sapiens
tttcaaaacttgttc

SEQ ID NO: 958625 - DNA, 15 bp, Homo sapiens
ttcaaaacttgttca

SEQ ID NO: 958626 - DNA, 15 bp, Homo sapiens
tcaaaacttgttcag

SEQ ID NO: 958627 - DNA, 15 bp, Homo sapiens
caaaacttgttcagg

SEQ ID NO: 958628 - DNA, 15 bp, Homo sapiens
aaaacttgttcaggc

SEQ ID NO: 958629 - DNA, 15 bp, Homo sapiens
aaacttgttcaggca

SEQ ID NO: 958630 - DNA, 15 bp, Homo sapiens
aacttgttcaggcat

SEQ ID NO: 958631 - DNA, 15 bp, Homo sapiens
acttgttcaggcatt

SEQ ID NO: 958632 - DNA, 15 bp, Homo sapiens
cttgttcaggcatta

SEQ ID NO: 958633 - DNA, 15 bp, Homo sapiens
ttgttcaggcattac

SEQ ID NO: 958634 - DNA, 15 bp, Homo sapiens
tgttcaggcattacc

SEQ ID NO: 958635 - DNA, 15 bp, Homo sapiens
gttcaggcattacct

SEQ ID NO: 958636 - DNA, 15 bp, Homo sapiens
ttcaggcattacctt

SEQ ID NO: 958637 - DNA, 15 bp, Homo sapiens
tcaggcattaccttt

SEQ ID NO: 958638 - DNA, 15 bp, Homo sapiens
caggcattacctttt

SEQ ID NO: 958639 - DNA, 15 bp, Homo sapiens
aggcattaccttttt

SEQ ID NO: 958640 - DNA, 15 bp, Homo sapiens
ggcattacctttttt

SEQ ID NO: 958641 - DNA, 15 bp, Homo sapiens
gcattaccttttttt

SEQ ID NO: 958642 - DNA, 15 bp, Homo sapiens
cattacctttttttt

SEQ ID NO: 958643 - DNA, 15 bp, Homo sapiens
attaccttttttttc

SEQ ID NO: 958644 - DNA, 15 bp, Homo sapiens
ttaccttttttttct

SEQ ID NO: 958645 - DNA, 15 bp, Homo sapiens
taccttttttttctt

SEQ ID NO: 958646 - DNA, 15 bp, Homo sapiens
accttttttttctta

SEQ ID NO: 958647 - DNA, 15 bp, Homo sapiens
ccttttttttcttaa

SEQ ID NO: 958648 - DNA, 15 bp, Homo sapiens
cttttttttcttaag

SEQ ID NO: 958649 - DNA, 15 bp, Homo sapiens
ttttttttcttaagc

SEQ ID NO: 958650 - DNA, 15 bp, Homo sapiens
tttttttcttaagca

SEQ ID NO: 958651 - DNA, 15 bp, Homo sapiens
ttttttcttaagcat

SEQ ID NO: 958652 - DNA, 15 bp, Homo sapiens
tttttcttaagcata

SEQ ID NO: 958653 - DNA, 15 bp, Homo sapiens
ttttcttaagcatac

SEQ ID NO: 958654 - DNA, 15 bp, Homo sapiens
tttcttaagcatact

SEQ ID NO: 958655 - DNA, 15 bp, Homo sapiens
ttcttaagcatactt

SEQ ID NO: 958656 - DNA, 15 bp, Homo sapiens
tcttaagcatacttt

SEQ ID NO: 958657 - DNA, 15 bp, Homo sapiens
cttaagcatactttt

SEQ ID NO: 958658 - DNA, 15 bp, Homo sapiens
ttaagcatacttttt

SEQ ID NO: 958659 - DNA, 15 bp, Homo sapiens
taagcatactttttt

SEQ ID NO: 958660 - DNA, 15 bp, Homo sapiens
aagcatacttttttt

SEQ ID NO: 958661 - DNA, 15 bp, Homo sapiens
agcatacttttttta

SEQ ID NO: 958662 - DNA, 15 bp, Homo sapiens
gcatactttttttaa

SEQ ID NO: 958663 - DNA, 15 bp, Homo sapiens
catactttttttaat

SEQ ID NO: 958664 - DNA, 15 bp, Homo sapiens
atactttttttaatg

SEQ ID NO: 958665 - DNA, 15 bp, Homo sapiens
tactttttttaatgg

SEQ ID NO: 958666 - DNA, 15 bp, Homo sapiens
actttttttaatgga

SEQ ID NO: 958667 - DNA, 15 bp, Homo sapiens
ctttttttaatggaa

SEQ ID NO: 958668 - DNA, 15 bp, Homo sapiens
tttttttaatggaac

SEQ ID NO: 958669 - DNA, 15 bp, Homo sapiens
ttttttaatggaaca

SEQ ID NO: 958670 - DNA, 15 bp, Homo sapiens
tttttaatggaacaa

SEQ ID NO: 958671 - DNA, 15 bp, Homo sapiens
ttttaatggaacaaa

SEQ ID NO: 958672 - DNA, 15 bp, Homo sapiens
tttaatggaacaaag

SEQ ID NO: 958673 - DNA, 15 bp, Homo sapiens
ttaatggaacaaagt

SEQ ID NO: 958674 - DNA, 15 bp, Homo sapiens
taatggaacaaagtc

SEQ ID NO: 958675 - DNA, 15 bp, Homo sapiens
aatggaacaaagtca

SEQ ID NO: 958676 - DNA, 15 bp, Homo sapiens
atggaacaaagtcac

SEQ ID NO: 958677 - DNA, 15 bp, Homo sapiens
tggaacaaagtcact

SEQ ID NO: 958678 - DNA, 15 bp, Homo sapiens
ggaacaaagtcactc

SEQ ID NO: 958679 - DNA, 15 bp, Homo sapiens
gaacaaagtcactcc

SEQ ID NO: 958680 - DNA, 15 bp, Homo sapiens
aacaaagtcactcct

SEQ ID NO: 958681 - DNA, 15 bp, Homo sapiens
acaaagtcactcctg

SEQ ID NO: 958682 - DNA, 15 bp, Homo sapiens
caaagtcactcctgt

SEQ ID NO: 958683 - DNA, 15 bp, Homo sapiens
aaagtcactcctgtc

SEQ ID NO: 958684 - DNA, 15 bp, Homo sapiens
aagtcactcctgtct

SEQ ID NO: 958685 - DNA, 15 bp, Homo sapiens
agtcactcctgtcta

SEQ ID NO: 958686 - DNA, 15 bp, Homo sapiens
gtcactcctgtctac

SEQ ID NO: 958687 - DNA, 15 bp, Homo sapiens
tcactcctgtctaca

SEQ ID NO: 958688 - DNA, 15 bp, Homo sapiens
cactcctgtctacac

SEQ ID NO: 958689 - DNA, 15 bp, Homo sapiens
actcctgtctacact

SEQ ID NO: 958690 - DNA, 15 bp, Homo sapiens
ctcctgtctacacta

SEQ ID NO: 958691 - DNA, 15 bp, Homo sapiens
tcctgtctacactag

SEQ ID NO: 958692 - DNA, 15 bp, Homo sapiens
cctgtctacactagt

SEQ ID NO: 958693 - DNA, 15 bp, Homo sapiens
ctgtctacactagtt

SEQ ID NO: 958694 - DNA, 15 bp, Homo sapiens
tgtctacactagttc

SEQ ID NO: 958695 - DNA, 15 bp, Homo sapiens
gtctacactagttct

SEQ ID NO: 958696 - DNA, 15 bp, Homo sapiens
tctacactagttctg

SEQ ID NO: 958697 - DNA, 15 bp, Homo sapiens
ctacactagttctgc

SEQ ID NO: 958698 - DNA, 15 bp, Homo sapiens
tacactagttctgca

SEQ ID NO: 958699 - DNA, 15 bp, Homo sapiens
acactagttctgcat

SEQ ID NO: 958700 - DNA, 15 bp, Homo sapiens
cactagttctgcatc

SEQ ID NO: 958701 - DNA, 15 bp, Homo sapiens
actagttctgcatct

SEQ ID NO: 958702 - DNA, 15 bp, Homo sapiens
ctagttctgcatctt

SEQ ID NO: 958703 - DNA, 15 bp, Homo sapiens
tagttctgcatctta

SEQ ID NO: 958704 - DNA, 15 bp, Homo sapiens
agttctgcatcttat

SEQ ID NO: 958705 - DNA, 15 bp, Homo sapiens
gttctgcatcttata

SEQ ID NO: 958706 - DNA, 15 bp, Homo sapiens
ttctgcatcttatac

SEQ ID NO: 958707 - DNA, 15 bp, Homo sapiens
tctgcatcttataca

SEQ ID NO: 958708 - DNA, 15 bp, Homo sapiens
ctgcatcttatacat

SEQ ID NO: 958709 - DNA, 15 bp, Homo sapiens
tgcatcttatacata

SEQ ID NO: 958710 - DNA, 15 bp, Homo sapiens
gcatcttatacatag

SEQ ID NO: 958711 - DNA, 15 bp, Homo sapiens
catcttatacatagg

SEQ ID NO: 958712 - DNA, 15 bp, Homo sapiens
atcttatacataggt

SEQ ID NO: 958713 - DNA, 15 bp, Homo sapiens
tcttatacataggtt

SEQ ID NO: 958714 - DNA, 15 bp, Homo sapiens
cttatacataggttt

SEQ ID NO: 958715 - DNA, 15 bp, Homo sapiens
ttatacataggtttt

SEQ ID NO: 958716 - DNA, 15 bp, Homo sapiens
tatacataggttttg

SEQ ID NO: 958717 - DNA, 15 bp, Homo sapiens
atacataggttttgt

SEQ ID NO: 958718 - DNA, 15 bp, Homo sapiens
tacataggttttgta

SEQ ID NO: 958719 - DNA, 15 bp, Homo sapiens
acataggttttgtac

SEQ ID NO: 958720 - DNA, 15 bp, Homo sapiens
cataggttttgtaca

SEQ ID NO: 958721 - DNA, 15 bp, Homo sapiens
ataggttttgtacat

SEQ ID NO: 958722 - DNA, 15 bp, Homo sapiens
taggttttgtacata

SEQ ID NO: 958723 - DNA, 15 bp, Homo sapiens
aggttttgtacatag

SEQ ID NO: 958724 - DNA, 15 bp, Homo sapiens
ggttttgtacatagt

SEQ ID NO: 958725 - DNA, 15 bp, Homo sapiens
gttttgtacatagta

SEQ ID NO: 958726 - DNA, 15 bp, Homo sapiens
ttttgtacatagtac

SEQ ID NO: 958727 - DNA, 15 bp, Homo sapiens
tttgtacatagtaca

SEQ ID NO: 958728 - DNA, 15 bp, Homo sapiens
ttgtacatagtacat

SEQ ID NO: 958729 - DNA, 15 bp, Homo sapiens
tgtacatagtacata

SEQ ID NO: 958730 - DNA, 15 bp, Homo sapiens
gtacatagtacatat

SEQ ID NO: 958731 - DNA, 15 bp, Homo sapiens
tacatagtacatatt

SEQ ID NO: 958732 - DNA, 15 bp, Homo sapiens
acatagtacatattt

SEQ ID NO: 958733 - DNA, 15 bp, Homo sapiens
catagtacatattta

SEQ ID NO: 958734 - DNA, 15 bp, Homo sapiens
atagtacatatttat

SEQ ID NO: 958735 - DNA, 15 bp, Homo sapiens
tagtacatatttata

SEQ ID NO: 958736 - DNA, 15 bp, Homo sapiens
agtacatatttatat

SEQ ID NO: 958737 - DNA, 15 bp, Homo sapiens
gtacatatttatatc

SEQ ID NO: 958738 - DNA, 15 bp, Homo sapiens
tacatatttatatca

SEQ ID NO: 958739 - DNA, 15 bp, Homo sapiens
acatatttatatcac

SEQ ID NO: 958740 - DNA, 15 bp, Homo sapiens
catatttatatcaca

SEQ ID NO: 958741 - DNA, 15 bp, Homo sapiens
atatttatatcacat

SEQ ID NO: 958742 - DNA, 15 bp, Homo sapiens
tatttatatcacatc

SEQ ID NO: 958743 - DNA, 15 bp, Homo sapiens
atttatatcacatca

SEQ ID NO: 958744 - DNA, 15 bp, Homo sapiens
tttatatcacatcaa

SEQ ID NO: 958745 - DNA, 15 bp, Homo sapiens
ttatatcacatcaaa

SEQ ID NO: 958746 - DNA, 15 bp, Homo sapiens
tatatcacatcaaat

SEQ ID NO: 958747 - DNA, 15 bp, Homo sapiens
atatcacatcaaatt

SEQ ID NO: 958748 - DNA, 15 bp, Homo sapiens
tatcacatcaaatta

SEQ ID NO: 958749 - DNA, 15 bp, Homo sapiens
atcacatcaaattat

SEQ ID NO: 958750 - DNA, 15 bp, Homo sapiens
tcacatcaaattata

SEQ ID NO: 958751 - DNA, 15 bp, Homo sapiens
cacatcaaattatat

SEQ ID NO: 958752 - DNA, 15 bp, Homo sapiens
acatcaaattatatg

SEQ ID NO: 958753 - DNA, 15 bp, Homo sapiens
catcaaattatatgt

SEQ ID NO: 958754 - DNA, 15 bp, Homo sapiens
atcaaattatatgtg

SEQ ID NO: 958755 - DNA, 15 bp, Homo sapiens
tcaaattatatgtgt

SEQ ID NO: 958756 - DNA, 15 bp, Homo sapiens
caaattatatgtgtt

SEQ ID NO: 958757 - DNA, 15 bp, Homo sapiens
aaattatatgtgttt

SEQ ID NO: 958758 - DNA, 15 bp, Homo sapiens
aattatatgtgttta

SEQ ID NO: 958759 - DNA, 15 bp, Homo sapiens
attatatgtgtttac

SEQ ID NO: 958760 - DNA, 15 bp, Homo sapiens
ttatatgtgtttaca

SEQ ID NO: 958761 - DNA, 15 bp, Homo sapiens
tatatgtgtttacat

SEQ ID NO: 958762 - DNA, 15 bp, Homo sapiens
atatgtgtttacata

SEQ ID NO: 958763 - DNA, 15 bp, Homo sapiens
tatgtgtttacatat

SEQ ID NO: 958764 - DNA, 15 bp, Homo sapiens
atgtgtttacatatc

SEQ ID NO: 958765 - DNA, 15 bp, Homo sapiens
tgtgtttacatatct

SEQ ID NO: 958766 - DNA, 15 bp, Homo sapiens
gtgtttacatatctg

SEQ ID NO: 958767 - DNA, 15 bp, Homo sapiens
tgtttacatatctgt

SEQ ID NO: 958768 - DNA, 15 bp, Homo sapiens
gtttacatatctgtc

SEQ ID NO: 958769 - DNA, 15 bp, Homo sapiens
tttacatatctgtct

SEQ ID NO: 958770 - DNA, 15 bp, Homo sapiens
ttacatatctgtctt

SEQ ID NO: 958771 - DNA, 15 bp, Homo sapiens
tacatatctgtcttc

SEQ ID NO: 958772 - DNA, 15 bp, Homo sapiens
acatatctgtcttcc

SEQ ID NO: 958773 - DNA, 15 bp, Homo sapiens
catatctgtcttcct

SEQ ID NO: 958774 - DNA, 15 bp, Homo sapiens
atatctgtcttcctt

SEQ ID NO: 958775 - DNA, 15 bp, Homo sapiens
tatctgtcttcctta

SEQ ID NO: 958776 - DNA, 15 bp, Homo sapiens
atctgtcttccttaa

SEQ ID NO: 958777 - DNA, 15 bp, Homo sapiens
tctgtcttccttaat

SEQ ID NO: 958778 - DNA, 15 bp, Homo sapiens
ctgtcttccttaatg

SEQ ID NO: 958779 - DNA, 15 bp, Homo sapiens
tgtcttccttaatgg

SEQ ID NO: 958780 - DNA, 15 bp, Homo sapiens
gtcttccttaatgga

SEQ ID NO: 958781 - DNA, 15 bp, Homo sapiens
tcttccttaatggaa

SEQ ID NO: 958782 - DNA, 15 bp, Homo sapiens
cttccttaatggaat

SEQ ID NO: 958783 - DNA, 15 bp, Homo sapiens
ttccttaatggaata

SEQ ID NO: 958784 - DNA, 15 bp, Homo sapiens
tccttaatggaatat

SEQ ID NO: 958785 - DNA, 15 bp, Homo sapiens
ccttaatggaatata

SEQ ID NO: 958786 - DNA, 15 bp, Homo sapiens
cttaatggaatataa

SEQ ID NO: 958787 - DNA, 15 bp, Homo sapiens
ttaatggaatataag

SEQ ID NO: 958788 - DNA, 15 bp, Homo sapiens
taatggaatataagt

SEQ ID NO: 958789 - DNA, 15 bp, Homo sapiens
aatggaatataagtc

SEQ ID NO: 958790 - DNA, 15 bp, Homo sapiens
atggaatataagtct

SEQ ID NO: 958791 - DNA, 15 bp, Homo sapiens
tggaatataagtctt

SEQ ID NO: 958792 - DNA, 15 bp, Homo sapiens
ggaatataagtcttt

SEQ ID NO: 958793 - DNA, 15 bp, Homo sapiens
gaatataagtctttt

SEQ ID NO: 958794 - DNA, 15 bp, Homo sapiens
aatataagtcttttg

SEQ ID NO: 958795 - DNA, 15 bp, Homo sapiens
atataagtcttttga

SEQ ID NO: 958796 - DNA, 15 bp, Homo sapiens
tataagtcttttgat

SEQ ID NO: 958797 - DNA, 15 bp, Homo sapiens
ataagtcttttgata

SEQ ID NO: 958798 - DNA, 15 bp, Homo sapiens
taagtcttttgatat

SEQ ID NO: 958799 - DNA, 15 bp, Homo sapiens
aagtcttttgatata

SEQ ID NO: 958800 - DNA, 15 bp, Homo sapiens
agtcttttgatataa

SEQ ID NO: 958801 - DNA, 15 bp, Homo sapiens
gtcttttgatataag

SEQ ID NO: 958802 - DNA, 15 bp, Homo sapiens
tcttttgatataagg

SEQ ID NO: 958803 - DNA, 15 bp, Homo sapiens
cttttgatataagga

SEQ ID NO: 958804 - DNA, 15 bp, Homo sapiens
ttttgatataaggaa

SEQ ID NO: 958805 - DNA, 15 bp, Homo sapiens
tttgatataaggaac

SEQ ID NO: 958806 - DNA, 15 bp, Homo sapiens
ttgatataaggaact

SEQ ID NO: 958807 - DNA, 15 bp, Homo sapiens
tgatataaggaacta

SEQ ID NO: 958808 - DNA, 15 bp, Homo sapiens
gatataaggaactat

SEQ ID NO: 958809 - DNA, 15 bp, Homo sapiens
atataaggaactatt

SEQ ID NO: 958810 - DNA, 15 bp, Homo sapiens
tataaggaactattt

SEQ ID NO: 958811 - DNA, 15 bp, Homo sapiens
ataaggaactattta

SEQ ID NO: 958812 - DNA, 15 bp, Homo sapiens
taaggaactatttaa

SEQ ID NO: 958813 - DNA, 15 bp, Homo sapiens
aaggaactatttaat

SEQ ID NO: 958814 - DNA, 15 bp, Homo sapiens
aggaactatttaatt

SEQ ID NO: 958815 - DNA, 15 bp, Homo sapiens
ggaactatttaattt

SEQ ID NO: 958816 - DNA, 15 bp, Homo sapiens
gaactatttaatttg

SEQ ID NO: 958817 - DNA, 15 bp, Homo sapiens
aactatttaatttgt

SEQ ID NO: 958818 - DNA, 15 bp, Homo sapiens
actatttaatttgtt

SEQ ID NO: 958819 - DNA, 15 bp, Homo sapiens
ctatttaatttgttt

SEQ ID NO: 958820 - DNA, 15 bp, Homo sapiens
tatttaatttgtttc

SEQ ID NO: 958821 - DNA, 15 bp, Homo sapiens
atttaatttgtttct

SEQ ID NO: 958822 - DNA, 15 bp, Homo sapiens
tttaatttgtttctg

SEQ ID NO: 958823 - DNA, 15 bp, Homo sapiens
taatttgtttctgtg

SEQ ID NO: 958824 - DNA, 15 bp, Homo sapiens
aatttgtttctgtgt

SEQ ID NO: 958825 - DNA, 15 bp, Homo sapiens
atttgtttctgtgtg

SEQ ID NO: 958826 - DNA, 15 bp, Homo sapiens
tttgtttctgtgtgt

SEQ ID NO: 958827 - DNA, 15 bp, Homo sapiens
ttgtttctgtgtgtt

SEQ ID NO: 958828 - DNA, 15 bp, Homo sapiens
tgtttctgtgtgttg

SEQ ID NO: 958829 - DNA, 15 bp, Homo sapiens
gtttctgtgtgttga

SEQ ID NO: 958830 - DNA, 15 bp, Homo sapiens
tttctgtgtgttgag

SEQ ID NO: 958831 - DNA, 15 bp, Homo sapiens
ttctgtgtgttgagt

SEQ ID NO: 958832 - DNA, 15 bp, Homo sapiens
tctgtgtgttgagta

SEQ ID NO: 958833 - DNA, 15 bp, Homo sapiens
ctgtgtgttgagtat

SEQ ID NO: 958834 - DNA, 15 bp, Homo sapiens
tgtgtgttgagtatc

SEQ ID NO: 958835 - DNA, 15 bp, Homo sapiens
gtgtgttgagtatct

SEQ ID NO: 958836 - DNA, 15 bp, Homo sapiens
tgtgttgagtatctc

SEQ ID NO: 958837 - DNA, 15 bp, Homo sapiens
gtgttgagtatctcc

SEQ ID NO: 958838 - DNA, 15 bp, Homo sapiens
tgttgagtatctcct

SEQ ID NO: 958839 - DNA, 15 bp, Homo sapiens
gttgagtatctcctg

SEQ ID NO: 958840 - DNA, 15 bp, Homo sapiens
ttgagtatctcctgt

SEQ ID NO: 958841 - DNA, 15 bp, Homo sapiens
tgagtatctcctgtt

SEQ ID NO: 958842 - DNA, 15 bp, Homo sapiens
gagtatctcctgttt

SEQ ID NO: 958843 - DNA, 15 bp, Homo sapiens
agtatctcctgtttg

SEQ ID NO: 958844 - DNA, 15 bp, Homo sapiens
gtatctcctgtttgg

SEQ ID NO: 958845 - DNA, 15 bp, Homo sapiens
tatctcctgtttggc

SEQ ID NO: 958846 - DNA, 15 bp, Homo sapiens
atctcctgtttggca

SEQ ID NO: 958847 - DNA, 15 bp, Homo sapiens
tctcctgtttggcac

SEQ ID NO: 958848 - DNA, 15 bp, Homo sapiens
ctcctgtttggcaca

SEQ ID NO: 958849 - DNA, 15 bp, Homo sapiens
tcctgtttggcacag

SEQ ID NO: 958850 - DNA, 15 bp, Homo sapiens
cctgtttggcacaga

SEQ ID NO: 958851 - DNA, 15 bp, Homo sapiens
ctgtttggcacagag

SEQ ID NO: 958852 - DNA, 15 bp, Homo sapiens
tgtttggcacagagt

SEQ ID NO: 958853 - DNA, 15 bp, Homo sapiens
gtttggcacagagtt

SEQ ID NO: 958854 - DNA, 15 bp, Homo sapiens
tttggcacagagttc

SEQ ID NO: 958855 - DNA, 15 bp, Homo sapiens
ttggcacagagttca

SEQ ID NO: 958856 - DNA, 15 bp, Homo sapiens
tggcacagagttcaa

SEQ ID NO: 958857 - DNA, 15 bp, Homo sapiens
ggcacagagttcaag

SEQ ID NO: 958858 - DNA, 15 bp, Homo sapiens
gcacagagttcaagc

SEQ ID NO: 958859 - DNA, 15 bp, Homo sapiens
cacagagttcaagct

SEQ ID NO: 958860 - DNA, 15 bp, Homo sapiens
acagagttcaagcta

SEQ ID NO: 958861 - DNA, 15 bp, Homo sapiens
cagagttcaagctaa

SEQ ID NO: 958862 - DNA, 15 bp, Homo sapiens
agagttcaagctaat

SEQ ID NO: 958863 - DNA, 15 bp, Homo sapiens
gagttcaagctaata

SEQ ID NO: 958864 - DNA, 15 bp, Homo sapiens
agttcaagctaatac

SEQ ID NO: 958865 - DNA, 15 bp, Homo sapiens
gttcaagctaataca

SEQ ID NO: 958866 - DNA, 15 bp, Homo sapiens
ttcaagctaatacat

SEQ ID NO: 958867 - DNA, 15 bp, Homo sapiens
tcaagctaatacatg

SEQ ID NO: 958868 - DNA, 15 bp, Homo sapiens
caagctaatacatga

SEQ ID NO: 958869 - DNA, 15 bp, Homo sapiens
aagctaatacatgag

SEQ ID NO: 958870 - DNA, 15 bp, Homo sapiens
agctaatacatgaga

SEQ ID NO: 958871 - DNA, 15 bp, Homo sapiens
gctaatacatgagag

SEQ ID NO: 958872 - DNA, 15 bp, Homo sapiens
ctaatacatgagagt

SEQ ID NO: 958873 - DNA, 15 bp, Homo sapiens
taatacatgagagtg

SEQ ID NO: 958874 - DNA, 15 bp, Homo sapiens
aatacatgagagtga

SEQ ID NO: 958875 - DNA, 15 bp, Homo sapiens
atacatgagagtgat

SEQ ID NO: 958876 - DNA, 15 bp, Homo sapiens
tacatgagagtgatt

SEQ ID NO: 958877 - DNA, 15 bp, Homo sapiens
acatgagagtgatta

SEQ ID NO: 958878 - DNA, 15 bp, Homo sapiens
catgagagtgattag

SEQ ID NO: 958879 - DNA, 15 bp, Homo sapiens
atgagagtgattagt

SEQ ID NO: 958880 - DNA, 15 bp, Homo sapiens
tgagagtgattagtg

SEQ ID NO: 958881 - DNA, 15 bp, Homo sapiens
gagagtgattagtgg

SEQ ID NO: 958882 - DNA, 15 bp, Homo sapiens
agagtgattagtggt

SEQ ID NO: 958883 - DNA, 15 bp, Homo sapiens
gagtgattagtggtg

SEQ ID NO: 958884 - DNA, 15 bp, Homo sapiens
agtgattagtggtgg

SEQ ID NO: 958885 - DNA, 15 bp, Homo sapiens
gtgattagtggtgga

SEQ ID NO: 958886 - DNA, 15 bp, Homo sapiens
tgattagtggtggag

SEQ ID NO: 958887 - DNA, 15 bp, Homo sapiens
gattagtggtggaga

SEQ ID NO: 958888 - DNA, 15 bp, Homo sapiens
attagtggtggagag

SEQ ID NO: 958889 - DNA, 15 bp, Homo sapiens
ttagtggtggagagc

SEQ ID NO: 958890 - DNA, 15 bp, Homo sapiens
tagtggtggagagcc

SEQ ID NO: 958891 - DNA, 15 bp, Homo sapiens
agtggtggagagcca

SEQ ID NO: 958892 - DNA, 15 bp, Homo sapiens
gtggtggagagccac

SEQ ID NO: 958893 - DNA, 15 bp, Homo sapiens
tggtggagagccaca

SEQ ID NO: 958894 - DNA, 15 bp, Homo sapiens
ggtggagagccacag

SEQ ID NO: 958895 - DNA, 15 bp, Homo sapiens
gtggagagccacagt

SEQ ID NO: 958896 - DNA, 15 bp, Homo sapiens
tggagagccacagtg

SEQ ID NO: 958897 - DNA, 15 bp, Homo sapiens
ggagagccacagtgc

SEQ ID NO: 958898 - DNA, 15 bp, Homo sapiens
gagagccacagtgca

SEQ ID NO: 958899 - DNA, 15 bp, Homo sapiens
agagccacagtgcat

SEQ ID NO: 958900 - DNA, 15 bp, Homo sapiens
gagccacagtgcatg

SEQ ID NO: 958901 - DNA, 15 bp, Homo sapiens
agccacagtgcatgt

SEQ ID NO: 958902 - DNA, 15 bp, Homo sapiens
gccacagtgcatgtg

SEQ ID NO: 958903 - DNA, 15 bp, Homo sapiens
ccacagtgcatgtgg

SEQ ID NO: 958904 - DNA, 15 bp, Homo sapiens
cacagtgcatgtggt

SEQ ID NO: 958905 - DNA, 15 bp, Homo sapiens
acagtgcatgtggtg

SEQ ID NO: 958906 - DNA, 15 bp, Homo sapiens
cagtgcatgtggtgt

SEQ ID NO: 958907 - DNA, 15 bp, Homo sapiens
agtgcatgtggtgtc

SEQ ID NO: 958908 - DNA, 15 bp, Homo sapiens
gtgcatgtggtgtca

SEQ ID NO: 958909 - DNA, 15 bp, Homo sapiens
tgcatgtggtgtcaa

SEQ ID NO: 958910 - DNA, 15 bp, Homo sapiens
gcatgtggtgtcaaa

SEQ ID NO: 958911 - DNA, 15 bp, Homo sapiens
catgtggtgtcaaat

SEQ ID NO: 958912 - DNA, 15 bp, Homo sapiens
atgtggtgtcaaata

SEQ ID NO: 958913 - DNA, 15 bp, Homo sapiens
tgtggtgtcaaatat

SEQ ID NO: 958914 - DNA, 15 bp, Homo sapiens
gtggtgtcaaatatg

SEQ ID NO: 958915 - DNA, 15 bp, Homo sapiens
tggtgtcaaatatgg

SEQ ID NO: 958916 - DNA, 15 bp, Homo sapiens
ggtgtcaaatatggt

SEQ ID NO: 958917 - DNA, 15 bp, Homo sapiens
gtgtcaaatatggtg

SEQ ID NO: 958918 - DNA, 15 bp, Homo sapiens
tgtcaaatatggtgc

SEQ ID NO: 958919 - DNA, 15 bp, Homo sapiens
gtcaaatatggtgct

SEQ ID NO: 958920 - DNA, 15 bp, Homo sapiens
tcaaatatggtgctt

SEQ ID NO: 958921 - DNA, 15 bp, Homo sapiens
caaatatggtgctta

SEQ ID NO: 958922 - DNA, 15 bp, Homo sapiens
aaatatggtgcttag

SEQ ID NO: 958923 - DNA, 15 bp, Homo sapiens
aatatggtgcttagg

SEQ ID NO: 958924 - DNA, 15 bp, Homo sapiens
atatggtgcttagga

SEQ ID NO: 958925 - DNA, 15 bp, Homo sapiens
tatggtgcttaggaa

SEQ ID NO: 958926 - DNA, 15 bp, Homo sapiens
atggtgcttaggaaa

SEQ ID NO: 958927 - DNA, 15 bp, Homo sapiens
tggtgcttaggaaat

SEQ ID NO: 958928 - DNA, 15 bp, Homo sapiens
ggtgcttaggaaatt

SEQ ID NO: 958929 - DNA, 15 bp, Homo sapiens
gtgcttaggaaatta

SEQ ID NO: 958930 - DNA, 15 bp, Homo sapiens
tgcttaggaaattat

SEQ ID NO: 958931 - DNA, 15 bp, Homo sapiens
gcttaggaaattatt

SEQ ID NO: 958932 - DNA, 15 bp, Homo sapiens
cttaggaaattattg

SEQ ID NO: 958933 - DNA, 15 bp, Homo sapiens
ttaggaaattattgt

SEQ ID NO: 958934 - DNA, 15 bp, Homo sapiens
taggaaattattgtt

SEQ ID NO: 958935 - DNA, 15 bp, Homo sapiens
aggaaattattgttg

SEQ ID NO: 958936 - DNA, 15 bp, Homo sapiens
ggaaattattgttgc

SEQ ID NO: 958937 - DNA, 15 bp, Homo sapiens
gaaattattgttgct

SEQ ID NO: 958938 - DNA, 15 bp, Homo sapiens
aaattattgttgctt

SEQ ID NO: 958939 - DNA, 15 bp, Homo sapiens
aattattgttgcttt

SEQ ID NO: 958940 - DNA, 15 bp, Homo sapiens
attattgttgctttt

SEQ ID NO: 958941 - DNA, 15 bp, Homo sapiens
ttattgttgcttttt

SEQ ID NO: 958942 - DNA, 15 bp, Homo sapiens
tattgttgctttttg

SEQ ID NO: 958943 - DNA, 15 bp, Homo sapiens
attgttgctttttga

SEQ ID NO: 958944 - DNA, 15 bp, Homo sapiens
ttgttgctttttgag

SEQ ID NO: 958945 - DNA, 15 bp, Homo sapiens
tgttgctttttgaga

SEQ ID NO: 958946 - DNA, 15 bp, Homo sapiens
gttgctttttgagag

SEQ ID NO: 958947 - DNA, 15 bp, Homo sapiens
ttgctttttgagagg

SEQ ID NO: 958948 - DNA, 15 bp, Homo sapiens
tgctttttgagaggt

SEQ ID NO: 958949 - DNA, 15 bp, Homo sapiens
gctttttgagaggta

SEQ ID NO: 958950 - DNA, 15 bp, Homo sapiens
ctttttgagaggtaa

SEQ ID NO: 958951 - DNA, 15 bp, Homo sapiens
tttttgagaggtaaa

SEQ ID NO: 958952 - DNA, 15 bp, Homo sapiens
ttttgagaggtaaag

SEQ ID NO: 958953 - DNA, 15 bp, Homo sapiens
tttgagaggtaaagg

SEQ ID NO: 958954 - DNA, 15 bp, Homo sapiens
ttgagaggtaaaggt

SEQ ID NO: 958955 - DNA, 15 bp, Homo sapiens
tgagaggtaaaggtt

SEQ ID NO: 958956 - DNA, 15 bp, Homo sapiens
gagaggtaaaggttc

SEQ ID NO: 958957 - DNA, 15 bp, Homo sapiens
agaggtaaaggttca

SEQ ID NO: 958958 - DNA, 15 bp, Homo sapiens
gaggtaaaggttcat

SEQ ID NO: 958959 - DNA, 15 bp, Homo sapiens
aggtaaaggttcatg

SEQ ID NO: 958960 - DNA, 15 bp, Homo sapiens
ggtaaaggttcatga

SEQ ID NO: 958961 - DNA, 15 bp, Homo sapiens
gtaaaggttcatgag

SEQ ID NO: 958962 - DNA, 15 bp, Homo sapiens
taaaggttcatgaga

SEQ ID NO: 958963 - DNA, 15 bp, Homo sapiens
aaaggttcatgagac

SEQ ID NO: 958964 - DNA, 15 bp, Homo sapiens
aaggttcatgagact

SEQ ID NO: 958965 - DNA, 15 bp, Homo sapiens
aggttcatgagacta

SEQ ID NO: 958966 - DNA, 15 bp, Homo sapiens
ggttcatgagactag

SEQ ID NO: 958967 - DNA, 15 bp, Homo sapiens
gttcatgagactaga

SEQ ID NO: 958968 - DNA, 15 bp, Homo sapiens
ttcatgagactagag

SEQ ID NO: 958969 - DNA, 15 bp, Homo sapiens
tcatgagactagagg

SEQ ID NO: 958970 - DNA, 15 bp, Homo sapiens
catgagactagaggt

SEQ ID NO: 958971 - DNA, 15 bp, Homo sapiens
atgagactagaggtc

SEQ ID NO: 958972 - DNA, 15 bp, Homo sapiens
tgagactagaggtca

SEQ ID NO: 958973 - DNA, 15 bp, Homo sapiens
gagactagaggtcac

SEQ ID NO: 958974 - DNA, 15 bp, Homo sapiens
agactagaggtcacg

SEQ ID NO: 958975 - DNA, 15 bp, Homo sapiens
gactagaggtcacga

SEQ ID NO: 958976 - DNA, 15 bp, Homo sapiens
actagaggtcacgaa

SEQ ID NO: 958977 - DNA, 15 bp, Homo sapiens
ctagaggtcacgaaa

SEQ ID NO: 958978 - DNA, 15 bp, Homo sapiens
tagaggtcacgaaaa

SEQ ID NO: 958979 - DNA, 15 bp, Homo sapiens
agaggtcacgaaaat

SEQ ID NO: 958980 - DNA, 15 bp, Homo sapiens
gaggtcacgaaaatc

SEQ ID NO: 958981 - DNA, 15 bp, Homo sapiens
aggtcacgaaaatca

SEQ ID NO: 958982 - DNA, 15 bp, Homo sapiens
ggtcacgaaaatcag

SEQ ID NO: 958983 - DNA, 15 bp, Homo sapiens
gtcacgaaaatcaga

SEQ ID NO: 958984 - DNA, 15 bp, Homo sapiens
tcacgaaaatcagat

SEQ ID NO: 958985 - DNA, 15 bp, Homo sapiens
cacgaaaatcagatt

SEQ ID NO: 958986 - DNA, 15 bp, Homo sapiens
acgaaaatcagattt

SEQ ID NO: 958987 - DNA, 15 bp, Homo sapiens
cgaaaatcagatttc

SEQ ID NO: 958988 - DNA, 15 bp, Homo sapiens
gaaaatcagatttca

SEQ ID NO: 958989 - DNA, 15 bp, Homo sapiens
aaaatcagatttcat

SEQ ID NO: 958990 - DNA, 15 bp, Homo sapiens
aaatcagatttcatg

SEQ ID NO: 958991 - DNA, 15 bp, Homo sapiens
aatcagatttcatgt

SEQ ID NO: 958992 - DNA, 15 bp, Homo sapiens
atcagatttcatgtg

SEQ ID NO: 958993 - DNA, 15 bp, Homo sapiens
tcagatttcatgtgt

SEQ ID NO: 958994 - DNA, 15 bp, Homo sapiens
cagatttcatgtgtg

SEQ ID NO: 958995 - DNA, 15 bp, Homo sapiens
agatttcatgtgtga

SEQ ID NO: 958996 - DNA, 15 bp, Homo sapiens
gatttcatgtgtgaa

SEQ ID NO: 958997 - DNA, 15 bp, Homo sapiens
atttcatgtgtgaag

SEQ ID NO: 958998 - DNA, 15 bp, Homo sapiens
tttcatgtgtgaaga

SEQ ID NO: 958999 - DNA, 15 bp, Homo sapiens
ttcatgtgtgaagaa

SEQ ID NO: 959000 - DNA, 15 bp, Homo sapiens
tcatgtgtgaagaat

SEQ ID NO: 959001 - DNA, 15 bp, Homo sapiens
catgtgtgaagaatg

SEQ ID NO: 959002 - DNA, 15 bp, Homo sapiens
atgtgtgaagaatgg

SEQ ID NO: 959003 - DNA, 15 bp, Homo sapiens
tgtgtgaagaatgga

SEQ ID NO: 959004 - DNA, 15 bp, Homo sapiens
gtgtgaagaatggaa

SEQ ID NO: 959005 - DNA, 15 bp, Homo sapiens
tgtgaagaatggaat

SEQ ID NO: 959006 - DNA, 15 bp, Homo sapiens
gtgaagaatggaata

SEQ ID NO: 959007 - DNA, 15 bp, Homo sapiens
tgaagaatggaatag

SEQ ID NO: 959008 - DNA, 15 bp, Homo sapiens
gaagaatggaataga

SEQ ID NO: 959009 - DNA, 15 bp, Homo sapiens
aagaatggaatagat

SEQ ID NO: 959010 - DNA, 15 bp, Homo sapiens
agaatggaatagata

SEQ ID NO: 959011 - DNA, 15 bp, Homo sapiens
gaatggaatagataa

SEQ ID NO: 959012 - DNA, 15 bp, Homo sapiens
aatggaatagataat

SEQ ID NO: 959013 - DNA, 15 bp, Homo sapiens
atggaatagataata

SEQ ID NO: 959014 - DNA, 15 bp, Homo sapiens
tggaatagataataa

SEQ ID NO: 959015 - DNA, 15 bp, Homo sapiens
ggaatagataataag

SEQ ID NO: 959016 - DNA, 15 bp, Homo sapiens
gaatagataataagg

SEQ ID NO: 959017 - DNA, 15 bp, Homo sapiens
aatagataataagga

SEQ ID NO: 959018 - DNA, 15 bp, Homo sapiens
atagataataaggaa

SEQ ID NO: 959019 - DNA, 15 bp, Homo sapiens
tagataataaggaaa

SEQ ID NO: 959020 - DNA, 15 bp, Homo sapiens
agataataaggaaat

SEQ ID NO: 959021 - DNA, 15 bp, Homo sapiens
gataataaggaaata

SEQ ID NO: 959022 - DNA, 15 bp, Homo sapiens
ataataaggaaatac

SEQ ID NO: 959023 - DNA, 15 bp, Homo sapiens
taataaggaaataca

SEQ ID NO: 959024 - DNA, 15 bp, Homo sapiens
aataaggaaatacaa

SEQ ID NO: 959025 - DNA, 15 bp, Homo sapiens
ataaggaaatacaaa

SEQ ID NO: 959026 - DNA, 15 bp, Homo sapiens
taaggaaatacaaaa

SEQ ID NO: 959027 - DNA, 15 bp, Homo sapiens
aaggaaatacaaaaa

SEQ ID NO: 959028 - DNA, 15 bp, Homo sapiens
aggaaatacaaaaac

SEQ ID NO: 959029 - DNA, 15 bp, Homo sapiens
ggaaatacaaaaact

SEQ ID NO: 959030 - DNA, 15 bp, Homo sapiens
gaaatacaaaaactg

SEQ ID NO: 959031 - DNA, 15 bp, Homo sapiens
aaatacaaaaactgg

SEQ ID NO: 959032 - DNA, 15 bp, Homo sapiens
aatacaaaaactgga

SEQ ID NO: 959033 - DNA, 15 bp, Homo sapiens
atacaaaaactggat

SEQ ID NO: 959034 - DNA, 15 bp, Homo sapiens
tacaaaaactggatg

SEQ ID NO: 959035 - DNA, 15 bp, Homo sapiens
acaaaaactggatgg

SEQ ID NO: 959036 - DNA, 15 bp, Homo sapiens
caaaaactggatggg

SEQ ID NO: 959037 - DNA, 15 bp, Homo sapiens
aaaaactggatgggt

SEQ ID NO: 959038 - DNA, 15 bp, Homo sapiens
aaaactggatgggta

SEQ ID NO: 959039 - DNA, 15 bp, Homo sapiens
aaactggatgggtaa

SEQ ID NO: 959040 - DNA, 15 bp, Homo sapiens
aactggatgggtaat

SEQ ID NO: 959041 - DNA, 15 bp, Homo sapiens
actggatgggtaata

SEQ ID NO: 959042 - DNA, 15 bp, Homo sapiens
ctggatgggtaataa

SEQ ID NO: 959043 - DNA, 15 bp, Homo sapiens
tggatgggtaataaa

SEQ ID NO: 959044 - DNA, 15 bp, Homo sapiens
ggatgggtaataaag

SEQ ID NO: 959045 - DNA, 15 bp, Homo sapiens
gatgggtaataaagc

SEQ ID NO: 959046 - DNA, 15 bp, Homo sapiens
atgggtaataaagca

SEQ ID NO: 959047 - DNA, 15 bp, Homo sapiens
tgggtaataaagcaa

SEQ ID NO: 959048 - DNA, 15 bp, Homo sapiens
gggtaataaagcaaa

SEQ ID NO: 959049 - DNA, 15 bp, Homo sapiens
ggtaataaagcaaaa

SEQ ID NO: 959050 - DNA, 15 bp, Homo sapiens
gtaataaagcaaaag

SEQ ID NO: 959051 - DNA, 15 bp, Homo sapiens
taataaagcaaaaga

SEQ ID NO: 959052 - DNA, 15 bp, Homo sapiens
aataaagcaaaagaa

SEQ ID NO: 959053 - DNA, 15 bp, Homo sapiens
ataaagcaaaagaaa

SEQ ID NO: 959054 - DNA, 15 bp, Homo sapiens
taaagcaaaagaaaa

SEQ ID NO: 959055 - DNA, 15 bp, Homo sapiens
aaagcaaaagaaaaa

SEQ ID NO: 959056 - DNA, 15 bp, Homo sapiens
aagcaaaagaaaaac

SEQ ID NO: 959057 - DNA, 15 bp, Homo sapiens
agcaaaagaaaaact

SEQ ID NO: 959058 - DNA, 15 bp, Homo sapiens
gcaaaagaaaaactt

SEQ ID NO: 959059 - DNA, 15 bp, Homo sapiens
ttgtgtgtgtgtgct

SEQ ID NO: 959060 - DNA, 15 bp, Homo sapiens
tgtgtgtgtgtgctt

SEQ ID NO: 959061 - DNA, 15 bp, Homo sapiens
gtgtgtgtgtgcttt

SEQ ID NO: 959062 - DNA, 15 bp, Homo sapiens
tgtgtgtgtgcttta

SEQ ID NO: 959063 - DNA, 15 bp, Homo sapiens
gtgtgtgtgctttac

SEQ ID NO: 959064 - DNA, 15 bp, Homo sapiens
tgtgtgtgctttaca

SEQ ID NO: 959065 - DNA, 15 bp, Homo sapiens
gtgtgtgctttacaa

SEQ ID NO: 959066 - DNA, 15 bp, Homo sapiens
tgtgtgctttacaat

SEQ ID NO: 959067 - DNA, 15 bp, Homo sapiens
gtgtgctttacaatc

SEQ ID NO: 959068 - DNA, 15 bp, Homo sapiens
tgtgctttacaatct

SEQ ID NO: 959069 - DNA, 15 bp, Homo sapiens
gtgctttacaatctc

SEQ ID NO: 959070 - DNA, 15 bp, Homo sapiens
tgctttacaatctct

SEQ ID NO: 959071 - DNA, 15 bp, Homo sapiens
gctttacaatctctt

SEQ ID NO: 959072 - DNA, 15 bp, Homo sapiens
ctttacaatctcttt

SEQ ID NO: 959073 - DNA, 15 bp, Homo sapiens
tttacaatctctttc

SEQ ID NO: 959074 - DNA, 15 bp, Homo sapiens
ttacaatctctttcc

SEQ ID NO: 959075 - DNA, 15 bp, Homo sapiens
tacaatctctttcca

SEQ ID NO: 959076 - DNA, 15 bp, Homo sapiens
acaatctctttccaa

SEQ ID NO: 959077 - DNA, 15 bp, Homo sapiens
caatctctttccaag

SEQ ID NO: 959078 - DNA, 15 bp, Homo sapiens
aatctctttccaagt

SEQ ID NO: 959079 - DNA, 15 bp, Homo sapiens
atctctttccaagtt

SEQ ID NO: 959080 - DNA, 15 bp, Homo sapiens
tctctttccaagtta

SEQ ID NO: 959081 - DNA, 15 bp, Homo sapiens
ctctttccaagttat

SEQ ID NO: 959082 - DNA, 15 bp, Homo sapiens
tctttccaagttata

SEQ ID NO: 959083 - DNA, 15 bp, Homo sapiens
ctttccaagttatat

SEQ ID NO: 959084 - DNA, 15 bp, Homo sapiens
tttccaagttatatc

SEQ ID NO: 959085 - DNA, 15 bp, Homo sapiens
ttccaagttatatct

SEQ ID NO: 959086 - DNA, 15 bp, Homo sapiens
tccaagttatatctt

SEQ ID NO: 959087 - DNA, 15 bp, Homo sapiens
ccaagttatatcttc

SEQ ID NO: 959088 - DNA, 15 bp, Homo sapiens
caagttatatcttct

SEQ ID NO: 959089 - DNA, 15 bp, Homo sapiens
aagttatatcttctg

SEQ ID NO: 959090 - DNA, 15 bp, Homo sapiens
agttatatcttctga

SEQ ID NO: 959091 - DNA, 15 bp, Homo sapiens
gttatatcttctgat

SEQ ID NO: 959092 - DNA, 15 bp, Homo sapiens
ttatatcttctgata

SEQ ID NO: 959093 - DNA, 15 bp, Homo sapiens
tatatcttctgatac

SEQ ID NO: 959094 - DNA, 15 bp, Homo sapiens
atatcttctgataca

SEQ ID NO: 959095 - DNA, 15 bp, Homo sapiens
tatcttctgatacag

SEQ ID NO: 959096 - DNA, 15 bp, Homo sapiens
atcttctgatacagt

SEQ ID NO: 959097 - DNA, 15 bp, Homo sapiens
tcttctgatacagtc

SEQ ID NO: 959098 - DNA, 15 bp, Homo sapiens
cttctgatacagtca

SEQ ID NO: 959099 - DNA, 15 bp, Homo sapiens
ttctgatacagtcat

SEQ ID NO: 959100 - DNA, 15 bp, Homo sapiens
tctgatacagtcatg

SEQ ID NO: 959101 - DNA, 15 bp, Homo sapiens
ctgatacagtcatgg

SEQ ID NO: 959102 - DNA, 15 bp, Homo sapiens
tgatacagtcatggt

SEQ ID NO: 959103 - DNA, 15 bp, Homo sapiens
gatacagtcatggtc

SEQ ID NO: 959104 - DNA, 15 bp, Homo sapiens
atacagtcatggtcg

SEQ ID NO: 959105 - DNA, 15 bp, Homo sapiens
tacagtcatggtcgt

SEQ ID NO: 959106 - DNA, 15 bp, Homo sapiens
acagtcatggtcgtg

SEQ ID NO: 959107 - DNA, 15 bp, Homo sapiens
cagtcatggtcgtga

SEQ ID NO: 959108 - DNA, 15 bp, Homo sapiens
agtcatggtcgtgaa

SEQ ID NO: 959109 - DNA, 15 bp, Homo sapiens
gtcatggtcgtgaaa

SEQ ID NO: 959110 - DNA, 15 bp, Homo sapiens
tcatggtcgtgaaaa

SEQ ID NO: 959111 - DNA, 15 bp, Homo sapiens
catggtcgtgaaaag

SEQ ID NO: 959112 - DNA, 15 bp, Homo sapiens
atggtcgtgaaaagc

SEQ ID NO: 959113 - DNA, 15 bp, Homo sapiens
tggtcgtgaaaagca

SEQ ID NO: 959114 - DNA, 15 bp, Homo sapiens
ggtcgtgaaaagcaa

SEQ ID NO: 959115 - DNA, 15 bp, Homo sapiens
gtcgtgaaaagcaaa

SEQ ID NO: 959116 - DNA, 15 bp, Homo sapiens
tcgtgaaaagcaaaa

SEQ ID NO: 959117 - DNA, 15 bp, Homo sapiens
cgtgaaaagcaaaat

SEQ ID NO: 959118 - DNA, 15 bp, Homo sapiens
gtgaaaagcaaaata

SEQ ID NO: 959119 - DNA, 15 bp, Homo sapiens
tgaaaagcaaaataa

SEQ ID NO: 959120 - DNA, 15 bp, Homo sapiens
gaaaagcaaaataaa

SEQ ID NO: 959121 - DNA, 15 bp, Homo sapiens
aaaagcaaaataaaa

SEQ ID NO: 959122 - DNA, 15 bp, Homo sapiens
aaagcaaaataaaat

SEQ ID NO: 959123 - DNA, 15 bp, Homo sapiens
aagcaaaataaaatc

SEQ ID NO: 959124 - DNA, 15 bp, Homo sapiens
agcaaaataaaatca

SEQ ID NO: 959125 - DNA, 15 bp, Homo sapiens
gcaaaataaaatcat

SEQ ID NO: 959126 - DNA, 15 bp, Homo sapiens
caaaataaaatcatg

SEQ ID NO: 959127 - DNA, 15 bp, Homo sapiens
aaaataaaatcatgt

SEQ ID NO: 959128 - DNA, 15 bp, Homo sapiens
aaataaaatcatgtg

SEQ ID NO: 959129 - DNA, 15 bp, Homo sapiens
aataaaatcatgtgt

SEQ ID NO: 959130 - DNA, 15 bp, Homo sapiens
ataaaatcatgtgtt

SEQ ID NO: 959131 - DNA, 15 bp, Homo sapiens
taaaatcatgtgtta

SEQ ID NO: 959132 - DNA, 15 bp, Homo sapiens
aaaatcatgtgttaa

SEQ ID NO: 959133 - DNA, 15 bp, Homo sapiens
aaatcatgtgttaac

SEQ ID NO: 959134 - DNA, 15 bp, Homo sapiens
aatcatgtgttaaca

SEQ ID NO: 959135 - DNA, 15 bp, Homo sapiens
atcatgtgttaacat

SEQ ID NO: 959136 - DNA, 15 bp, Homo sapiens
tcatgtgttaacatt

SEQ ID NO: 959137 - DNA, 15 bp, Homo sapiens
catgtgttaacattt

SEQ ID NO: 959138 - DNA, 15 bp, Homo sapiens
atgtgttaacattta

SEQ ID NO: 959139 - DNA, 15 bp, Homo sapiens
tgtgttaacatttaa

SEQ ID NO: 959140 - DNA, 15 bp, Homo sapiens
gtgttaacatttaaa

SEQ ID NO: 959141 - DNA, 15 bp, Homo sapiens
tgttaacatttaaaa

SEQ ID NO: 959142 - DNA, 15 bp, Homo sapiens
gttaacatttaaaac

SEQ ID NO: 959143 - DNA, 15 bp, Homo sapiens
ttaacatttaaaact

SEQ ID NO: 959144 - DNA, 15 bp, Homo sapiens
taacatttaaaactt

SEQ ID NO: 959145 - DNA, 15 bp, Homo sapiens
aacatttaaaacttt

SEQ ID NO: 959146 - DNA, 15 bp, Homo sapiens
acatttaaaactttt

SEQ ID NO: 959147 - DNA, 15 bp, Homo sapiens
catttaaaacttttt

SEQ ID NO: 959148 - DNA, 15 bp, Homo sapiens
atttaaaacttttta

SEQ ID NO: 959149 - DNA, 15 bp, Homo sapiens
tttaaaactttttaa

SEQ ID NO: 959150 - DNA, 15 bp, Homo sapiens
ttaaaactttttaat

SEQ ID NO: 959151 - DNA, 15 bp, Homo sapiens
taaaactttttaatt

SEQ ID NO: 959152 - DNA, 15 bp, Homo sapiens
aaaactttttaattt

SEQ ID NO: 959153 - DNA, 15 bp, Homo sapiens
aaactttttaatttt

SEQ ID NO: 959154 - DNA, 15 bp, Homo sapiens
aactttttaatttta

SEQ ID NO: 959155 - DNA, 15 bp, Homo sapiens
actttttaattttat

SEQ ID NO: 959156 - DNA, 15 bp, Homo sapiens
ctttttaattttatt

SEQ ID NO: 959157 - DNA, 15 bp, Homo sapiens
tttttaattttattc

SEQ ID NO: 959158 - DNA, 15 bp, Homo sapiens
ttttaattttattct

SEQ ID NO: 959159 - DNA, 15 bp, Homo sapiens
tttaattttattctg

SEQ ID NO: 959160 - DNA, 15 bp, Homo sapiens
ttaattttattctga

SEQ ID NO: 959161 - DNA, 15 bp, Homo sapiens
taattttattctgac

SEQ ID NO: 959162 - DNA, 15 bp, Homo sapiens
aattttattctgaca

SEQ ID NO: 959163 - DNA, 15 bp, Homo sapiens
attttattctgacaa

SEQ ID NO: 959164 - DNA, 15 bp, Homo sapiens
ttttattctgacaac

SEQ ID NO: 959165 - DNA, 15 bp, Homo sapiens
tttattctgacaaca

SEQ ID NO: 959166 - DNA, 15 bp, Homo sapiens
ttattctgacaacag

SEQ ID NO: 959167 - DNA, 15 bp, Homo sapiens
tattctgacaacagc

SEQ ID NO: 959168 - DNA, 15 bp, Homo sapiens
attctgacaacagct

SEQ ID NO: 959169 - DNA, 15 bp, Homo sapiens
ttctgacaacagcta

SEQ ID NO: 959170 - DNA, 15 bp, Homo sapiens
tctgacaacagctaa

SEQ ID NO: 959171 - DNA, 15 bp, Homo sapiens
ctgacaacagctaaa

SEQ ID NO: 959172 - DNA, 15 bp, Homo sapiens
tgacaacagctaaaa

SEQ ID NO: 959173 - DNA, 15 bp, Homo sapiens
gacaacagctaaaac

SEQ ID NO: 959174 - DNA, 15 bp, Homo sapiens
acaacagctaaaact

SEQ ID NO: 959175 - DNA, 15 bp, Homo sapiens
caacagctaaaacta

SEQ ID NO: 959176 - DNA, 15 bp, Homo sapiens
aacagctaaaactat

SEQ ID NO: 959177 - DNA, 15 bp, Homo sapiens
acagctaaaactatt

SEQ ID NO: 959178 - DNA, 15 bp, Homo sapiens
cagctaaaactattt

SEQ ID NO: 959179 - DNA, 15 bp, Homo sapiens
agctaaaactattta

SEQ ID NO: 959180 - DNA, 15 bp, Homo sapiens
gctaaaactatttaa

SEQ ID NO: 959181 - DNA, 15 bp, Homo sapiens
ctaaaactatttaat

SEQ ID NO: 959182 - DNA, 15 bp, Homo sapiens
taaaactatttaatc

SEQ ID NO: 959183 - DNA, 15 bp, Homo sapiens
aaaactatttaatct

SEQ ID NO: 959184 - DNA, 15 bp, Homo sapiens
aaactatttaatctt

SEQ ID NO: 959185 - DNA, 15 bp, Homo sapiens
aactatttaatcttc

SEQ ID NO: 959186 - DNA, 15 bp, Homo sapiens
actatttaatcttct

SEQ ID NO: 959187 - DNA, 15 bp, Homo sapiens
ctatttaatcttctg

SEQ ID NO: 959188 - DNA, 15 bp, Homo sapiens
tatttaatcttctgt

SEQ ID NO: 959189 - DNA, 15 bp, Homo sapiens
atttaatcttctgtt

SEQ ID NO: 959190 - DNA, 15 bp, Homo sapiens
tttaatcttctgttt

SEQ ID NO: 959191 - DNA, 15 bp, Homo sapiens
ttaatcttctgtttc

SEQ ID NO: 959192 - DNA, 15 bp, Homo sapiens
taatcttctgtttcg

SEQ ID NO: 959193 - DNA, 15 bp, Homo sapiens
aatcttctgtttcgc

SEQ ID NO: 959194 - DNA, 15 bp, Homo sapiens
atcttctgtttcgct

SEQ ID NO: 959195 - DNA, 15 bp, Homo sapiens
tcttctgtttcgctc

SEQ ID NO: 959196 - DNA, 15 bp, Homo sapiens
cttctgtttcgctca

SEQ ID NO: 959197 - DNA, 15 bp, Homo sapiens
ttctgtttcgctcat

SEQ ID NO: 959198 - DNA, 15 bp, Homo sapiens
tctgtttcgctcatt

SEQ ID NO: 959199 - DNA, 15 bp, Homo sapiens
ctgtttcgctcattt

SEQ ID NO: 959200 - DNA, 15 bp, Homo sapiens
tgtttcgctcatttc

SEQ ID NO: 959201 - DNA, 15 bp, Homo sapiens
gtttcgctcatttct

SEQ ID NO: 959202 - DNA, 15 bp, Homo sapiens
tttcgctcatttctt

SEQ ID NO: 959203 - DNA, 15 bp, Homo sapiens
ttcgctcatttcttc

SEQ ID NO: 959204 - DNA, 15 bp, Homo sapiens
tcgctcatttcttcc

SEQ ID NO: 959205 - DNA, 15 bp, Homo sapiens
cgctcatttcttcca

SEQ ID NO: 959206 - DNA, 15 bp, Homo sapiens
gctcatttcttccaa

SEQ ID NO: 959207 - DNA, 15 bp, Homo sapiens
ctcatttcttccaag

SEQ ID NO: 959208 - DNA, 15 bp, Homo sapiens
tcatttcttccaagg

SEQ ID NO: 959209 - DNA, 15 bp, Homo sapiens
catttcttccaaggt

SEQ ID NO: 959210 - DNA, 15 bp, Homo sapiens
atttcttccaaggta

SEQ ID NO: 959211 - DNA, 15 bp, Homo sapiens
tttcttccaaggtaa

SEQ ID NO: 959212 - DNA, 15 bp, Homo sapiens
ttcttccaaggtaaa

SEQ ID NO: 959213 - DNA, 15 bp, Homo sapiens
tcttccaaggtaaac

SEQ ID NO: 959214 - DNA, 15 bp, Homo sapiens
cttccaaggtaaact

SEQ ID NO: 959215 - DNA, 15 bp, Homo sapiens
ttccaaggtaaactt

SEQ ID NO: 959216 - DNA, 15 bp, Homo sapiens
tccaaggtaaacttc

SEQ ID NO: 959217 - DNA, 15 bp, Homo sapiens
ccaaggtaaacttca

SEQ ID NO: 959218 - DNA, 15 bp, Homo sapiens
caaggtaaacttcag

SEQ ID NO: 959219 - DNA, 15 bp, Homo sapiens
aaggtaaacttcagt

SEQ ID NO: 959220 - DNA, 15 bp, Homo sapiens
aggtaaacttcagtt

SEQ ID NO: 959221 - DNA, 15 bp, Homo sapiens
ggtaaacttcagttg

SEQ ID NO: 959222 - DNA, 15 bp, Homo sapiens
gtaaacttcagttgg

SEQ ID NO: 959223 - DNA, 15 bp, Homo sapiens
taaacttcagttggt

SEQ ID NO: 959224 - DNA, 15 bp, Homo sapiens
aaacttcagttggtt

SEQ ID NO: 959225 - DNA, 15 bp, Homo sapiens
aacttcagttggttt

SEQ ID NO: 959226 - DNA, 15 bp, Homo sapiens
acttcagttggtttt

SEQ ID NO: 959227 - DNA, 15 bp, Homo sapiens
cttcagttggtttta

SEQ ID NO: 959228 - DNA, 15 bp, Homo sapiens
ttcagttggttttac

SEQ ID NO: 959229 - DNA, 15 bp, Homo sapiens
tcagttggttttacg

SEQ ID NO: 959230 - DNA, 15 bp, Homo sapiens
cagttggttttacgt

SEQ ID NO: 959231 - DNA, 15 bp, Homo sapiens
agttggttttacgtg

SEQ ID NO: 959232 - DNA, 15 bp, Homo sapiens
gttggttttacgtga

SEQ ID NO: 959233 - DNA, 15 bp, Homo sapiens
ttggttttacgtgat

SEQ ID NO: 959234 - DNA, 15 bp, Homo sapiens
tggttttacgtgatt

SEQ ID NO: 959235 - DNA, 15 bp, Homo sapiens
ggttttacgtgattt

SEQ ID NO: 959236 - DNA, 15 bp, Homo sapiens
gttttacgtgatttg

SEQ ID NO: 959237 - DNA, 15 bp, Homo sapiens
ttttacgtgatttgc

SEQ ID NO: 959238 - DNA, 15 bp, Homo sapiens
tttacgtgatttgct

SEQ ID NO: 959239 - DNA, 15 bp, Homo sapiens
ttacgtgatttgcta

SEQ ID NO: 959240 - DNA, 15 bp, Homo sapiens
tacgtgatttgctat

SEQ ID NO: 959241 - DNA, 15 bp, Homo sapiens
acgtgatttgctatt

SEQ ID NO: 959242 - DNA, 15 bp, Homo sapiens
cgtgatttgctattt

SEQ ID NO: 959243 - DNA, 15 bp, Homo sapiens
gtgatttgctatttc

SEQ ID NO: 959244 - DNA, 15 bp, Homo sapiens
tgatttgctatttct

SEQ ID NO: 959245 - DNA, 15 bp, Homo sapiens
gatttgctatttctt

SEQ ID NO: 959246 - DNA, 15 bp, Homo sapiens
atttgctatttcttc

SEQ ID NO: 959247 - DNA, 15 bp, Homo sapiens
tttgctatttcttct

SEQ ID NO: 959248 - DNA, 15 bp, Homo sapiens
ttgctatttcttctt

SEQ ID NO: 959249 - DNA, 15 bp, Homo sapiens
tgctatttcttcttc

SEQ ID NO: 959250 - DNA, 15 bp, Homo sapiens
gctatttcttcttct

SEQ ID NO: 959251 - DNA, 15 bp, Homo sapiens
ctatttcttcttctt

SEQ ID NO: 959252 - DNA, 15 bp, Homo sapiens
tatttcttcttcttt

SEQ ID NO: 959253 - DNA, 15 bp, Homo sapiens
atttcttcttctttg

SEQ ID NO: 959254 - DNA, 15 bp, Homo sapiens
tttcttcttctttgc

SEQ ID NO: 959255 - DNA, 15 bp, Homo sapiens
ttcttcttctttgca

SEQ ID NO: 959256 - DNA, 15 bp, Homo sapiens
tcttcttctttgcat

SEQ ID NO: 959257 - DNA, 15 bp, Homo sapiens
cttcttctttgcatt

SEQ ID NO: 959258 - DNA, 15 bp, Homo sapiens
ttcttctttgcattt

SEQ ID NO: 959259 - DNA, 15 bp, Homo sapiens
tcttctttgcattta

SEQ ID NO: 959260 - DNA, 15 bp, Homo sapiens
cttctttgcatttac

SEQ ID NO: 959261 - DNA, 15 bp, Homo sapiens
ttctttgcatttaca

SEQ ID NO: 959262 - DNA, 15 bp, Homo sapiens
tctttgcatttacaa

SEQ ID NO: 959263 - DNA, 15 bp, Homo sapiens
ctttgcatttacaaa

SEQ ID NO: 959264 - DNA, 15 bp, Homo sapiens
tttgcatttacaaat

SEQ ID NO: 959265 - DNA, 15 bp, Homo sapiens
ttgcatttacaaatg

SEQ ID NO: 959266 - DNA, 15 bp, Homo sapiens
tgcatttacaaatga

SEQ ID NO: 959267 - DNA, 15 bp, Homo sapiens
gcatttacaaatgat

SEQ ID NO: 959268 - DNA, 15 bp, Homo sapiens
catttacaaatgatc

SEQ ID NO: 959269 - DNA, 15 bp, Homo sapiens
atttacaaatgatct

SEQ ID NO: 959270 - DNA, 15 bp, Homo sapiens
tttacaaatgatctg

SEQ ID NO: 959271 - DNA, 15 bp, Homo sapiens
ttacaaatgatctgt

SEQ ID NO: 959272 - DNA, 15 bp, Homo sapiens
tacaaatgatctgtg

SEQ ID NO: 959273 - DNA, 15 bp, Homo sapiens
acaaatgatctgtga

SEQ ID NO: 959274 - DNA, 15 bp, Homo sapiens
caaatgatctgtgat

SEQ ID NO: 959275 - DNA, 15 bp, Homo sapiens
aaatgatctgtgatc

SEQ ID NO: 959276 - DNA, 15 bp, Homo sapiens
aatgatctgtgatca

SEQ ID NO: 959277 - DNA, 15 bp, Homo sapiens
atgatctgtgatcat

SEQ ID NO: 959278 - DNA, 15 bp, Homo sapiens
tgatctgtgatcata

SEQ ID NO: 959279 - DNA, 15 bp, Homo sapiens
gatctgtgatcatat

SEQ ID NO: 959280 - DNA, 15 bp, Homo sapiens
atctgtgatcatatt

SEQ ID NO: 959281 - DNA, 15 bp, Homo sapiens
tctgtgatcatatta

SEQ ID NO: 959282 - DNA, 15 bp, Homo sapiens
ctgtgatcatattac

SEQ ID NO: 959283 - DNA, 15 bp, Homo sapiens
tgtgatcatattact

SEQ ID NO: 959284 - DNA, 15 bp, Homo sapiens
gtgatcatattactg

SEQ ID NO: 959285 - DNA, 15 bp, Homo sapiens
tgatcatattactga

SEQ ID NO: 959286 - DNA, 15 bp, Homo sapiens
gatcatattactgat

SEQ ID NO: 959287 - DNA, 15 bp, Homo sapiens
atcatattactgatc

SEQ ID NO: 959288 - DNA, 15 bp, Homo sapiens
tcatattactgatct

SEQ ID NO: 959289 - DNA, 15 bp, Homo sapiens
catattactgatctt

SEQ ID NO: 959290 - DNA, 15 bp, Homo sapiens
atattactgatcttt

SEQ ID NO: 959291 - DNA, 15 bp, Homo sapiens
tattactgatctttg

SEQ ID NO: 959292 - DNA, 15 bp, Homo sapiens
attactgatctttgt

SEQ ID NO: 959293 - DNA, 15 bp, Homo sapiens
ttactgatctttgta

SEQ ID NO: 959294 - DNA, 15 bp, Homo sapiens
tactgatctttgtaa

SEQ ID NO: 959295 - DNA, 15 bp, Homo sapiens
actgatctttgtaaa

SEQ ID NO: 959296 - DNA, 15 bp, Homo sapiens
ctgatctttgtaaag

SEQ ID NO: 959297 - DNA, 15 bp, Homo sapiens
tgatctttgtaaagg

SEQ ID NO: 959298 - DNA, 15 bp, Homo sapiens
gatctttgtaaaggg

SEQ ID NO: 959299 - DNA, 15 bp, Homo sapiens
atctttgtaaagggc

SEQ ID NO: 959300 - DNA, 15 bp, Homo sapiens
tctttgtaaagggct

SEQ ID NO: 959301 - DNA, 15 bp, Homo sapiens
ctttgtaaagggcta

SEQ ID NO: 959302 - DNA, 15 bp, Homo sapiens
tttgtaaagggctaa

SEQ ID NO: 959303 - DNA, 15 bp, Homo sapiens
ttgtaaagggctaat

SEQ ID NO: 959304 - DNA, 15 bp, Homo sapiens
tgtaaagggctaata

SEQ ID NO: 959305 - DNA, 15 bp, Homo sapiens
gtaaagggctaatat

SEQ ID NO: 959306 - DNA, 15 bp, Homo sapiens
taaagggctaatatc

SEQ ID NO: 959307 - DNA, 15 bp, Homo sapiens
aaagggctaatatct

SEQ ID NO: 959308 - DNA, 15 bp, Homo sapiens
aagggctaatatcta

SEQ ID NO: 959309 - DNA, 15 bp, Homo sapiens
agggctaatatctac

SEQ ID NO: 959310 - DNA, 15 bp, Homo sapiens
gggctaatatctacc

SEQ ID NO: 959311 - DNA, 15 bp, Homo sapiens
ggctaatatctacct

SEQ ID NO: 959312 - DNA, 15 bp, Homo sapiens
gctaatatctacctg

SEQ ID NO: 959313 - DNA, 15 bp, Homo sapiens
ctaatatctacctgc

SEQ ID NO: 959314 - DNA, 15 bp, Homo sapiens
taatatctacctgca

SEQ ID NO: 959315 - DNA, 15 bp, Homo sapiens
aatatctacctgcaa

SEQ ID NO: 959316 - DNA, 15 bp, Homo sapiens
atatctacctgcaac

SEQ ID NO: 959317 - DNA, 15 bp, Homo sapiens
tatctacctgcaaca

SEQ ID NO: 959318 - DNA, 15 bp, Homo sapiens
atctacctgcaacat

SEQ ID NO: 959319 - DNA, 15 bp, Homo sapiens
tctacctgcaacatt

SEQ ID NO: 959320 - DNA, 15 bp, Homo sapiens
ctacctgcaacattt

SEQ ID NO: 959321 - DNA, 15 bp, Homo sapiens
tacctgcaacatttg

SEQ ID NO: 959322 - DNA, 15 bp, Homo sapiens
acctgcaacatttgg

SEQ ID NO: 959323 - DNA, 15 bp, Homo sapiens
cctgcaacatttgga

SEQ ID NO: 959324 - DNA, 15 bp, Homo sapiens
ctgcaacatttggat

SEQ ID NO: 959325 - DNA, 15 bp, Homo sapiens
tgcaacatttggata

SEQ ID NO: 959326 - DNA, 15 bp, Homo sapiens
gcaacatttggatat

SEQ ID NO: 959327 - DNA, 15 bp, Homo sapiens
caacatttggatatg

SEQ ID NO: 959328 - DNA, 15 bp, Homo sapiens
aacatttggatatga

SEQ ID NO: 959329 - DNA, 15 bp, Homo sapiens
acatttggatatgac

SEQ ID NO: 959330 - DNA, 15 bp, Homo sapiens
catttggatatgaca

SEQ ID NO: 959331 - DNA, 15 bp, Homo sapiens
atttggatatgacag

SEQ ID NO: 959332 - DNA, 15 bp, Homo sapiens
tttggatatgacagt

SEQ ID NO: 959333 - DNA, 15 bp, Homo sapiens
ttggatatgacagta

SEQ ID NO: 959334 - DNA, 15 bp, Homo sapiens
tggatatgacagtat

SEQ ID NO: 959335 - DNA, 15 bp, Homo sapiens
ggatatgacagtatt

SEQ ID NO: 959336 - DNA, 15 bp, Homo sapiens
gatatgacagtattt

SEQ ID NO: 959337 - DNA, 15 bp, Homo sapiens
atatgacagtattta

SEQ ID NO: 959338 - DNA, 15 bp, Homo sapiens
tatgacagtatttac

SEQ ID NO: 959339 - DNA, 15 bp, Homo sapiens
atgacagtatttacc

SEQ ID NO: 959340 - DNA, 15 bp, Homo sapiens
tgacagtatttaccc

SEQ ID NO: 959341 - DNA, 15 bp, Homo sapiens
gacagtatttaccct

SEQ ID NO: 959342 - DNA, 15 bp, Homo sapiens
acagtatttaccctt

SEQ ID NO: 959343 - DNA, 15 bp, Homo sapiens
cagtatttacccttt

SEQ ID NO: 959344 - DNA, 15 bp, Homo sapiens
agtatttaccctttg

SEQ ID NO: 959345 - DNA, 15 bp, Homo sapiens
gtatttaccctttgt

SEQ ID NO: 959346 - DNA, 15 bp, Homo sapiens
tatttaccctttgta

SEQ ID NO: 959347 - DNA, 15 bp, Homo sapiens
atttaccctttgtaa

SEQ ID NO: 959348 - DNA, 15 bp, Homo sapiens
tttaccctttgtaaa

SEQ ID NO: 959349 - DNA, 15 bp, Homo sapiens
ttaccctttgtaaat

SEQ ID NO: 959350 - DNA, 15 bp, Homo sapiens
taccctttgtaaata

SEQ ID NO: 959351 - DNA, 15 bp, Homo sapiens
accctttgtaaatac

SEQ ID NO: 959352 - DNA, 15 bp, Homo sapiens
ccctttgtaaataca

SEQ ID NO: 959353 - DNA, 15 bp, Homo sapiens
cctttgtaaatacac

SEQ ID NO: 959354 - DNA, 15 bp, Homo sapiens
ctttgtaaatacaca

SEQ ID NO: 959355 - DNA, 15 bp, Homo sapiens
tttgtaaatacacat

SEQ ID NO: 959356 - DNA, 15 bp, Homo sapiens
ttgtaaatacacatt

SEQ ID NO: 959357 - DNA, 15 bp, Homo sapiens
tgtaaatacacattt

SEQ ID NO: 959358 - DNA, 15 bp, Homo sapiens
gtaaatacacatttt

SEQ ID NO: 959359 - DNA, 15 bp, Homo sapiens
taaatacacattttc

SEQ ID NO: 959360 - DNA, 15 bp, Homo sapiens
aaatacacattttct

SEQ ID NO: 959361 - DNA, 15 bp, Homo sapiens
aatacacattttcta

SEQ ID NO: 959362 - DNA, 15 bp, Homo sapiens
atacacattttctat

SEQ ID NO: 959363 - DNA, 15 bp, Homo sapiens
tacacattttctatt

SEQ ID NO: 959364 - DNA, 15 bp, Homo sapiens
acacattttctattt

SEQ ID NO: 959365 - DNA, 15 bp, Homo sapiens
cacattttctattta

SEQ ID NO: 959366 - DNA, 15 bp, Homo sapiens
acattttctatttat

SEQ ID NO: 959367 - DNA, 15 bp, Homo sapiens
cattttctatttatc

SEQ ID NO: 959368 - DNA, 15 bp, Homo sapiens
attttctatttatct

SEQ ID NO: 959369 - DNA, 15 bp, Homo sapiens
ttttctatttatctt

SEQ ID NO: 959370 - DNA, 15 bp, Homo sapiens
tttctatttatcttc

SEQ ID NO: 959371 - DNA, 15 bp, Homo sapiens
ttctatttatcttca

SEQ ID NO: 959372 - DNA, 15 bp, Homo sapiens
tctatttatcttcaa

SEQ ID NO: 959373 - DNA, 15 bp, Homo sapiens
ctatttatcttcaaa

SEQ ID NO: 959374 - DNA, 15 bp, Homo sapiens
tatttatcttcaaaa

SEQ ID NO: 959375 - DNA, 15 bp, Homo sapiens
atttatcttcaaaaa

SEQ ID NO: 959376 - DNA, 15 bp, Homo sapiens
tttatcttcaaaaat

SEQ ID NO: 959377 - DNA, 15 bp, Homo sapiens
ttatcttcaaaaatt

SEQ ID NO: 959378 - DNA, 15 bp, Homo sapiens
tatcttcaaaaatta

SEQ ID NO: 959379 - DNA, 15 bp, Homo sapiens
atcttcaaaaattac

SEQ ID NO: 959380 - DNA, 15 bp, Homo sapiens
tcttcaaaaattacc

SEQ ID NO: 959381 - DNA, 15 bp, Homo sapiens
cttcaaaaattacca

SEQ ID NO: 959382 - DNA, 15 bp, Homo sapiens
ttcaaaaattaccat

SEQ ID NO: 959383 - DNA, 15 bp, Homo sapiens
tcaaaaattaccatt

SEQ ID NO: 959384 - DNA, 15 bp, Homo sapiens
caaaaattaccattc

SEQ ID NO: 959385 - DNA, 15 bp, Homo sapiens
aaaaattaccattca

SEQ ID NO: 959386 - DNA, 15 bp, Homo sapiens
aaaattaccattcat

SEQ ID NO: 959387 - DNA, 15 bp, Homo sapiens
aaattaccattcatt

SEQ ID NO: 959388 - DNA, 15 bp, Homo sapiens
aattaccattcatta

SEQ ID NO: 959389 - DNA, 15 bp, Homo sapiens
attaccattcattag

SEQ ID NO: 959390 - DNA, 15 bp, Homo sapiens
ttaccattcattagt

SEQ ID NO: 959391 - DNA, 15 bp, Homo sapiens
taccattcattagtc

SEQ ID NO: 959392 - DNA, 15 bp, Homo sapiens
accattcattagtct

SEQ ID NO: 959393 - DNA, 15 bp, Homo sapiens
ccattcattagtctg

SEQ ID NO: 959394 - DNA, 15 bp, Homo sapiens
cattcattagtctgt

SEQ ID NO: 959395 - DNA, 15 bp, Homo sapiens
attcattagtctgtg

SEQ ID NO: 959396 - DNA, 15 bp, Homo sapiens
ttcattagtctgtgt

SEQ ID NO: 959397 - DNA, 15 bp, Homo sapiens
tcattagtctgtgtt

SEQ ID NO: 959398 - DNA, 15 bp, Homo sapiens
cattagtctgtgtta

SEQ ID NO: 959399 - DNA, 15 bp, Homo sapiens
attagtctgtgttaa

SEQ ID NO: 959400 - DNA, 15 bp, Homo sapiens
ttagtctgtgttaat

SEQ ID NO: 959401 - DNA, 15 bp, Homo sapiens
tagtctgtgttaatg

SEQ ID NO: 959402 - DNA, 15 bp, Homo sapiens
agtctgtgttaatgt

SEQ ID NO: 959403 - DNA, 15 bp, Homo sapiens
gtctgtgttaatgtc

SEQ ID NO: 959404 - DNA, 15 bp, Homo sapiens
tctgtgttaatgtct

SEQ ID NO: 959405 - DNA, 15 bp, Homo sapiens
ctgtgttaatgtctg

SEQ ID NO: 959406 - DNA, 15 bp, Homo sapiens
tgtgttaatgtctgt

SEQ ID NO: 959407 - DNA, 15 bp, Homo sapiens
gtgttaatgtctgtt

SEQ ID NO: 959408 - DNA, 15 bp, Homo sapiens
tgttaatgtctgttt

SEQ ID NO: 959409 - DNA, 15 bp, Homo sapiens
gttaatgtctgttta

SEQ ID NO: 959410 - DNA, 15 bp, Homo sapiens
ttaatgtctgtttac

SEQ ID NO: 959411 - DNA, 15 bp, Homo sapiens
taatgtctgtttact

SEQ ID NO: 959412 - DNA, 15 bp, Homo sapiens
aatgtctgtttacta

SEQ ID NO: 959413 - DNA, 15 bp, Homo sapiens
atgtctgtttactat

SEQ ID NO: 959414 - DNA, 15 bp, Homo sapiens
tgtctgtttactatt

SEQ ID NO: 959415 - DNA, 15 bp, Homo sapiens
gtctgtttactattg

SEQ ID NO: 959416 - DNA, 15 bp, Homo sapiens
tctgtttactattgt

SEQ ID NO: 959417 - DNA, 15 bp, Homo sapiens
ctgtttactattgtg

SEQ ID NO: 959418 - DNA, 15 bp, Homo sapiens
tgtttactattgtgt

SEQ ID NO: 959419 - DNA, 15 bp, Homo sapiens
gtttactattgtgtc

SEQ ID NO: 959420 - DNA, 15 bp, Homo sapiens
tttactattgtgtca

SEQ ID NO: 959421 - DNA, 15 bp, Homo sapiens
ttactattgtgtcat

SEQ ID NO: 959422 - DNA, 15 bp, Homo sapiens
tactattgtgtcatt

SEQ ID NO: 959423 - DNA, 15 bp, Homo sapiens
actattgtgtcatta

SEQ ID NO: 959424 - DNA, 15 bp, Homo sapiens
ctattgtgtcattat

SEQ ID NO: 959425 - DNA, 15 bp, Homo sapiens
tattgtgtcattatg

SEQ ID NO: 959426 - DNA, 15 bp, Homo sapiens
attgtgtcattatga

SEQ ID NO: 959427 - DNA, 15 bp, Homo sapiens
ttgtgtcattatgaa

SEQ ID NO: 959428 - DNA, 15 bp, Homo sapiens
tgtgtcattatgaat

SEQ ID NO: 959429 - DNA, 15 bp, Homo sapiens
gtgtcattatgaatg

SEQ ID NO: 959430 - DNA, 15 bp, Homo sapiens
gtcattatgaatgtg

SEQ ID NO: 959431 - DNA, 15 bp, Homo sapiens
tcattatgaatgtga

SEQ ID NO: 959432 - DNA, 15 bp, Homo sapiens
cattatgaatgtgat

SEQ ID NO: 959433 - DNA, 15 bp, Homo sapiens
attatgaatgtgatg

SEQ ID NO: 959434 - DNA, 15 bp, Homo sapiens
ttatgaatgtgatgt

SEQ ID NO: 959435 - DNA, 15 bp, Homo sapiens
tatgaatgtgatgtg

SEQ ID NO: 959436 - DNA, 15 bp, Homo sapiens
atgaatgtgatgtga

SEQ ID NO: 959437 - DNA, 15 bp, Homo sapiens
tgaatgtgatgtgaa

SEQ ID NO: 959438 - DNA, 15 bp, Homo sapiens
gaatgtgatgtgaac

SEQ ID NO: 959439 - DNA, 15 bp, Homo sapiens
aatgtgatgtgaaca

SEQ ID NO: 959440 - DNA, 15 bp, Homo sapiens
atgtgatgtgaacat

SEQ ID NO: 959441 - DNA, 15 bp, Homo sapiens
tgtgatgtgaacata

SEQ ID NO: 959442 - DNA, 15 bp, Homo sapiens
gtgatgtgaacatac

SEQ ID NO: 959443 - DNA, 15 bp, Homo sapiens
tgatgtgaacatacg

SEQ ID NO: 959444 - DNA, 15 bp, Homo sapiens
gatgtgaacatacga

SEQ ID NO: 959445 - DNA, 15 bp, Homo sapiens
atgtgaacatacgaa

SEQ ID NO: 959446 - DNA, 15 bp, Homo sapiens
tgtgaacatacgaag

SEQ ID NO: 959447 - DNA, 15 bp, Homo sapiens
gtgaacatacgaagt

SEQ ID NO: 959448 - DNA, 15 bp, Homo sapiens
tgaacatacgaagtt

SEQ ID NO: 959449 - DNA, 15 bp, Homo sapiens
gaacatacgaagttg

SEQ ID NO: 959450 - DNA, 15 bp, Homo sapiens
aacatacgaagttga

SEQ ID NO: 959451 - DNA, 15 bp, Homo sapiens
acatacgaagttgaa

SEQ ID NO: 959452 - DNA, 15 bp, Homo sapiens
catacgaagttgaac

SEQ ID NO: 959453 - DNA, 15 bp, Homo sapiens
atacgaagttgaact

SEQ ID NO: 959454 - DNA, 15 bp, Homo sapiens
tacgaagttgaactt

SEQ ID NO: 959455 - DNA, 15 bp, Homo sapiens
acgaagttgaactta

SEQ ID NO: 959456 - DNA, 15 bp, Homo sapiens
cgaagttgaacttat

SEQ ID NO: 959457 - DNA, 15 bp, Homo sapiens
gaagttgaacttatt

SEQ ID NO: 959458 - DNA, 15 bp, Homo sapiens
aagttgaacttattt

SEQ ID NO: 959459 - DNA, 15 bp, Homo sapiens
agttgaacttattta

SEQ ID NO: 959460 - DNA, 15 bp, Homo sapiens
gttgaacttatttaa

SEQ ID NO: 959461 - DNA, 15 bp, Homo sapiens
ttgaacttatttaaa

SEQ ID NO: 959462 - DNA, 15 bp, Homo sapiens
tgaacttatttaaac

SEQ ID NO: 959463 - DNA, 15 bp, Homo sapiens
gaacttatttaaacg

SEQ ID NO: 959464 - DNA, 15 bp, Homo sapiens
aacttatttaaacga

SEQ ID NO: 959465 - DNA, 15 bp, Homo sapiens
acttatttaaacgaa

SEQ ID NO: 959466 - DNA, 15 bp, Homo sapiens
cttatttaaacgaac

SEQ ID NO: 959467 - DNA, 15 bp, Homo sapiens
ttatttaaacgaaca

SEQ ID NO: 959468 - DNA, 15 bp, Homo sapiens
tatttaaacgaacac

SEQ ID NO: 959469 - DNA, 15 bp, Homo sapiens
atttaaacgaacact

SEQ ID NO: 959470 - DNA, 15 bp, Homo sapiens
tttaaacgaacactc

SEQ ID NO: 959471 - DNA, 15 bp, Homo sapiens
ttaaacgaacactct

SEQ ID NO: 959472 - DNA, 15 bp, Homo sapiens
taaacgaacactctc

SEQ ID NO: 959473 - DNA, 15 bp, Homo sapiens
aaacgaacactctca

SEQ ID NO: 959474 - DNA, 15 bp, Homo sapiens
aacgaacactctcat

SEQ ID NO: 959475 - DNA, 15 bp, Homo sapiens
acgaacactctcatg

SEQ ID NO: 959476 - DNA, 15 bp, Homo sapiens
cgaacactctcatga

SEQ ID NO: 959477 - DNA, 15 bp, Homo sapiens
gaacactctcatgag

SEQ ID NO: 959478 - DNA, 15 bp, Homo sapiens
aacactctcatgagc

SEQ ID NO: 959479 - DNA, 15 bp, Homo sapiens
acactctcatgagct

SEQ ID NO: 959480 - DNA, 15 bp, Homo sapiens
cactctcatgagctt

SEQ ID NO: 959481 - DNA, 15 bp, Homo sapiens
actctcatgagcttc

SEQ ID NO: 959482 - DNA, 15 bp, Homo sapiens
ctctcatgagcttct

SEQ ID NO: 959483 - DNA, 15 bp, Homo sapiens
tctcatgagcttcta

SEQ ID NO: 959484 - DNA, 15 bp, Homo sapiens
ctcatgagcttctaa

SEQ ID NO: 959485 - DNA, 15 bp, Homo sapiens
tcatgagcttctaat

SEQ ID NO: 959486 - DNA, 15 bp, Homo sapiens
catgagcttctaatc

SEQ ID NO: 959487 - DNA, 15 bp, Homo sapiens
atgagcttctaatcc

SEQ ID NO: 959488 - DNA, 15 bp, Homo sapiens
tgagcttctaatcca

SEQ ID NO: 959489 - DNA, 15 bp, Homo sapiens
gagcttctaatccac

SEQ ID NO: 959490 - DNA, 15 bp, Homo sapiens
agcttctaatccaca

SEQ ID NO: 959491 - DNA, 15 bp, Homo sapiens
gcttctaatccacat

SEQ ID NO: 959492 - DNA, 15 bp, Homo sapiens
cttctaatccacatt

SEQ ID NO: 959493 - DNA, 15 bp, Homo sapiens
ttctaatccacattc

SEQ ID NO: 959494 - DNA, 15 bp, Homo sapiens
tctaatccacattcc

SEQ ID NO: 959495 - DNA, 15 bp, Homo sapiens
ctaatccacattcct

SEQ ID NO: 959496 - DNA, 15 bp, Homo sapiens
taatccacattcctt

SEQ ID NO: 959497 - DNA, 15 bp, Homo sapiens
aatccacattccttc

SEQ ID NO: 959498 - DNA, 15 bp, Homo sapiens
atccacattccttcc

SEQ ID NO: 959499 - DNA, 15 bp, Homo sapiens
tccacattccttcct

SEQ ID NO: 959500 - DNA, 15 bp, Homo sapiens
ccacattccttcctt

SEQ ID NO: 959501 - DNA, 15 bp, Homo sapiens
cacattccttccttt

SEQ ID NO: 959502 - DNA, 15 bp, Homo sapiens
acattccttcctttt

SEQ ID NO: 959503 - DNA, 15 bp, Homo sapiens
cattccttccttttc

SEQ ID NO: 959504 - DNA, 15 bp, Homo sapiens
attccttccttttcc

SEQ ID NO: 959505 - DNA, 15 bp, Homo sapiens
ttccttccttttcct

SEQ ID NO: 959506 - DNA, 15 bp, Homo sapiens
tccttccttttcctt

SEQ ID NO: 959507 - DNA, 15 bp, Homo sapiens
ccttccttttccttc

SEQ ID NO: 959508 - DNA, 15 bp, Homo sapiens
cttccttttccttct

SEQ ID NO: 959509 - DNA, 15 bp, Homo sapiens
ttccttttccttcta

SEQ ID NO: 959510 - DNA, 15 bp, Homo sapiens
tccttttccttctaa

SEQ ID NO: 959511 - DNA, 15 bp, Homo sapiens
ccttttccttctaag

SEQ ID NO: 959512 - DNA, 15 bp, Homo sapiens
cttttccttctaagt

SEQ ID NO: 959513 - DNA, 15 bp, Homo sapiens
ttttccttctaagtt

SEQ ID NO: 959514 - DNA, 15 bp, Homo sapiens
tttccttctaagtta

SEQ ID NO: 959515 - DNA, 15 bp, Homo sapiens
ttccttctaagttac

SEQ ID NO: 959516 - DNA, 15 bp, Homo sapiens
tccttctaagttacc

SEQ ID NO: 959517 - DNA, 15 bp, Homo sapiens
ccttctaagttacca

SEQ ID NO: 959518 - DNA, 15 bp, Homo sapiens
cttctaagttaccat

SEQ ID NO: 959519 - DNA, 15 bp, Homo sapiens
ttctaagttaccatt

SEQ ID NO: 959520 - DNA, 15 bp, Homo sapiens
tctaagttaccattt

SEQ ID NO: 959521 - DNA, 15 bp, Homo sapiens
ctaagttaccatttc

SEQ ID NO: 959522 - DNA, 15 bp, Homo sapiens
taagttaccatttct

SEQ ID NO: 959523 - DNA, 15 bp, Homo sapiens
aagttaccatttctt

SEQ ID NO: 959524 - DNA, 15 bp, Homo sapiens
agttaccatttctta

SEQ ID NO: 959525 - DNA, 15 bp, Homo sapiens
gttaccatttcttaa

SEQ ID NO: 959526 - DNA, 15 bp, Homo sapiens
ttaccatttcttaaa

SEQ ID NO: 959527 - DNA, 15 bp, Homo sapiens
taccatttcttaaaa

SEQ ID NO: 959528 - DNA, 15 bp, Homo sapiens
accatttcttaaaaa

SEQ ID NO: 959529 - DNA, 15 bp, Homo sapiens
ccatttcttaaaaat

SEQ ID NO: 959530 - DNA, 15 bp, Homo sapiens
catttcttaaaaatc

SEQ ID NO: 959531 - DNA, 15 bp, Homo sapiens
atttcttaaaaatct

SEQ ID NO: 959532 - DNA, 15 bp, Homo sapiens
tttcttaaaaatctt

SEQ ID NO: 959533 - DNA, 15 bp, Homo sapiens
ttcttaaaaatcttt

SEQ ID NO: 959534 - DNA, 15 bp, Homo sapiens
tcttaaaaatctttt

SEQ ID NO: 959535 - DNA, 15 bp, Homo sapiens
cttaaaaatctttta

SEQ ID NO: 959536 - DNA, 15 bp, Homo sapiens
ttaaaaatcttttag

SEQ ID NO: 959537 - DNA, 15 bp, Homo sapiens
taaaaatcttttaga

SEQ ID NO: 959538 - DNA, 15 bp, Homo sapiens
aaaaatcttttagaa

SEQ ID NO: 959539 - DNA, 15 bp, Homo sapiens
aaaatcttttagaag

SEQ ID NO: 959540 - DNA, 15 bp, Homo sapiens
aaatcttttagaagt

SEQ ID NO: 959541 - DNA, 15 bp, Homo sapiens
aatcttttagaagtt

SEQ ID NO: 959542 - DNA, 15 bp, Homo sapiens
atcttttagaagttt

SEQ ID NO: 959543 - DNA, 15 bp, Homo sapiens
tcttttagaagtttc

SEQ ID NO: 959544 - DNA, 15 bp, Homo sapiens
cttttagaagtttcc

SEQ ID NO: 959545 - DNA, 15 bp, Homo sapiens
ttttagaagtttcct

SEQ ID NO: 959546 - DNA, 15 bp, Homo sapiens
tttagaagtttcctt

SEQ ID NO: 959547 - DNA, 15 bp, Homo sapiens
ttagaagtttccttg

SEQ ID NO: 959548 - DNA, 15 bp, Homo sapiens
tagaagtttccttga

SEQ ID NO: 959549 - DNA, 15 bp, Homo sapiens
agaagtttccttgat

SEQ ID NO: 959550 - DNA, 15 bp, Homo sapiens
gaagtttccttgata

SEQ ID NO: 959551 - DNA, 15 bp, Homo sapiens
aagtttccttgatag

SEQ ID NO: 959552 - DNA, 15 bp, Homo sapiens
agtttccttgatagg

SEQ ID NO: 959553 - DNA, 15 bp, Homo sapiens
gtttccttgataggg

SEQ ID NO: 959554 - DNA, 15 bp, Homo sapiens
tttccttgataggga

SEQ ID NO: 959555 - DNA, 15 bp, Homo sapiens
ttccttgatagggaa

SEQ ID NO: 959556 - DNA, 15 bp, Homo sapiens
tccttgatagggaaa

SEQ ID NO: 959557 - DNA, 15 bp, Homo sapiens
ccttgatagggaaaa

SEQ ID NO: 959558 - DNA, 15 bp, Homo sapiens
cttgatagggaaaac

SEQ ID NO: 959559 - DNA, 15 bp, Homo sapiens
ttgatagggaaaaca

SEQ ID NO: 959560 - DNA, 15 bp, Homo sapiens
tgatagggaaaacac

SEQ ID NO: 959561 - DNA, 15 bp, Homo sapiens
gatagggaaaacaca

SEQ ID NO: 959562 - DNA, 15 bp, Homo sapiens
atagggaaaacacaa

SEQ ID NO: 959563 - DNA, 15 bp, Homo sapiens
tagggaaaacacaaa

SEQ ID NO: 959564 - DNA, 15 bp, Homo sapiens
agggaaaacacaaat

SEQ ID NO: 959565 - DNA, 15 bp, Homo sapiens
gggaaaacacaaatt

SEQ ID NO: 959566 - DNA, 15 bp, Homo sapiens
ggaaaacacaaatta

SEQ ID NO: 959567 - DNA, 15 bp, Homo sapiens
gaaaacacaaattat

SEQ ID NO: 959568 - DNA, 15 bp, Homo sapiens
aaaacacaaattatt

SEQ ID NO: 959569 - DNA, 15 bp, Homo sapiens
aaacacaaattattg

SEQ ID NO: 959570 - DNA, 15 bp, Homo sapiens
aacacaaattattga

SEQ ID NO: 959571 - DNA, 15 bp, Homo sapiens
acacaaattattgag

SEQ ID NO: 959572 - DNA, 15 bp, Homo sapiens
cacaaattattgagg

SEQ ID NO: 959573 - DNA, 15 bp, Homo sapiens
acaaattattgagga

SEQ ID NO: 959574 - DNA, 15 bp, Homo sapiens
caaattattgaggaa

SEQ ID NO: 959575 - DNA, 15 bp, Homo sapiens
aaattattgaggaat

SEQ ID NO: 959576 - DNA, 15 bp, Homo sapiens
aattattgaggaatt

SEQ ID NO: 959577 - DNA, 15 bp, Homo sapiens
attattgaggaattt

SEQ ID NO: 959578 - DNA, 15 bp, Homo sapiens
ttattgaggaatttt

SEQ ID NO: 959579 - DNA, 15 bp, Homo sapiens
tattgaggaattttt

SEQ ID NO: 959580 - DNA, 15 bp, Homo sapiens
attgaggaatttttc

SEQ ID NO: 959581 - DNA, 15 bp, Homo sapiens
ttgaggaatttttct

SEQ ID NO: 959582 - DNA, 15 bp, Homo sapiens
tgaggaatttttctt

SEQ ID NO: 959583 - DNA, 15 bp, Homo sapiens
gaggaatttttcttt

SEQ ID NO: 959584 - DNA, 15 bp, Homo sapiens
aggaatttttctttc

SEQ ID NO: 959585 - DNA, 15 bp, Homo sapiens
ggaatttttctttct

SEQ ID NO: 959586 - DNA, 15 bp, Homo sapiens
gaatttttctttctc

SEQ ID NO: 959587 - DNA, 15 bp, Homo sapiens
aatttttctttctct

SEQ ID NO: 959588 - DNA, 15 bp, Homo sapiens
atttttctttctctt

SEQ ID NO: 959589 - DNA, 15 bp, Homo sapiens
tttttctttctcttg

SEQ ID NO: 959590 - DNA, 15 bp, Homo sapiens
ttttctttctcttga

SEQ ID NO: 959591 - DNA, 15 bp, Homo sapiens
tttctttctcttgac

SEQ ID NO: 959592 - DNA, 15 bp, Homo sapiens
ttctttctcttgaca

SEQ ID NO: 959593 - DNA, 15 bp, Homo sapiens
tctttctcttgacat

SEQ ID NO: 959594 - DNA, 15 bp, Homo sapiens
ctttctcttgacatc

SEQ ID NO: 959595 - DNA, 15 bp, Homo sapiens
tttctcttgacatct

SEQ ID NO: 959596 - DNA, 15 bp, Homo sapiens
ttctcttgacatctg

SEQ ID NO: 959597 - DNA, 15 bp, Homo sapiens
tctcttgacatctgt

SEQ ID NO: 959598 - DNA, 15 bp, Homo sapiens
ctcttgacatctgtt

SEQ ID NO: 959599 - DNA, 15 bp, Homo sapiens
tcttgacatctgttt

SEQ ID NO: 959600 - DNA, 15 bp, Homo sapiens
cttgacatctgttta

SEQ ID NO: 959601 - DNA, 15 bp, Homo sapiens
ttgacatctgtttat

SEQ ID NO: 959602 - DNA, 15 bp, Homo sapiens
tgacatctgtttata

SEQ ID NO: 959603 - DNA, 15 bp, Homo sapiens
gacatctgtttatag

SEQ ID NO: 959604 - DNA, 15 bp, Homo sapiens
acatctgtttatagt

SEQ ID NO: 959605 - DNA, 15 bp, Homo sapiens
catctgtttatagtt

SEQ ID NO: 959606 - DNA, 15 bp, Homo sapiens
atctgtttatagtta

SEQ ID NO: 959607 - DNA, 15 bp, Homo sapiens
tctgtttatagttac

SEQ ID NO: 959608 - DNA, 15 bp, Homo sapiens
ctgtttatagttact

SEQ ID NO: 959609 - DNA, 15 bp, Homo sapiens
tgtttatagttactc

SEQ ID NO: 959610 - DNA, 15 bp, Homo sapiens
gtttatagttactct

SEQ ID NO: 959611 - DNA, 15 bp, Homo sapiens
tttatagttactctc

SEQ ID NO: 959612 - DNA, 15 bp, Homo sapiens
ttatagttactctct

SEQ ID NO: 959613 - DNA, 15 bp, Homo sapiens
tatagttactctctt

SEQ ID NO: 959614 - DNA, 15 bp, Homo sapiens
atagttactctcttg

SEQ ID NO: 959615 - DNA, 15 bp, Homo sapiens
tagttactctcttgt

SEQ ID NO: 959616 - DNA, 15 bp, Homo sapiens
agttactctcttgtt

SEQ ID NO: 959617 - DNA, 15 bp, Homo sapiens
gttactctcttgttc

SEQ ID NO: 959618 - DNA, 15 bp, Homo sapiens
ttactctcttgttcc

SEQ ID NO: 959619 - DNA, 15 bp, Homo sapiens
tactctcttgttcca

SEQ ID NO: 959620 - DNA, 15 bp, Homo sapiens
actctcttgttccag

SEQ ID NO: 959621 - DNA, 15 bp, Homo sapiens
ctctcttgttccagc

SEQ ID NO: 959622 - DNA, 15 bp, Homo sapiens
tctcttgttccagca

SEQ ID NO: 959623 - DNA, 15 bp, Homo sapiens
ctcttgttccagcag

SEQ ID NO: 959624 - DNA, 15 bp, Homo sapiens
tcttgttccagcagt

SEQ ID NO: 959625 - DNA, 15 bp, Homo sapiens
cttgttccagcagtg

SEQ ID NO: 959626 - DNA, 15 bp, Homo sapiens
ttgttccagcagtgg

SEQ ID NO: 959627 - DNA, 15 bp, Homo sapiens
tgttccagcagtgga

SEQ ID NO: 959628 - DNA, 15 bp, Homo sapiens
gttccagcagtggat

SEQ ID NO: 959629 - DNA, 15 bp, Homo sapiens
ttccagcagtggata

SEQ ID NO: 959630 - DNA, 15 bp, Homo sapiens
tccagcagtggatat

SEQ ID NO: 959631 - DNA, 15 bp, Homo sapiens
ccagcagtggatatt

SEQ ID NO: 959632 - DNA, 15 bp, Homo sapiens
cagcagtggatattt

SEQ ID NO: 959633 - DNA, 15 bp, Homo sapiens
agcagtggatatttc

SEQ ID NO: 959634 - DNA, 15 bp, Homo sapiens
gcagtggatatttcc

SEQ ID NO: 959635 - DNA, 15 bp, Homo sapiens
cagtggatatttccc

SEQ ID NO: 959636 - DNA, 15 bp, Homo sapiens
agtggatatttcccc

SEQ ID NO: 959637 - DNA, 15 bp, Homo sapiens
gtggatatttcccct

SEQ ID NO: 959638 - DNA, 15 bp, Homo sapiens
tggatatttcccctc

SEQ ID NO: 959639 - DNA, 15 bp, Homo sapiens
ggatatttcccctcc

SEQ ID NO: 959640 - DNA, 15 bp, Homo sapiens
gatatttcccctcca

SEQ ID NO: 959641 - DNA, 15 bp, Homo sapiens
atatttcccctccat

SEQ ID NO: 959642 - DNA, 15 bp, Homo sapiens
tatttcccctccatg

SEQ ID NO: 959643 - DNA, 15 bp, Homo sapiens
atttcccctccatgt

SEQ ID NO: 959644 - DNA, 15 bp, Homo sapiens
tttcccctccatgtt

SEQ ID NO: 959645 - DNA, 15 bp, Homo sapiens
ttcccctccatgttt

SEQ ID NO: 959646 - DNA, 15 bp, Homo sapiens
tcccctccatgtttt

SEQ ID NO: 959647 - DNA, 15 bp, Homo sapiens
cccctccatgttttt

SEQ ID NO: 959648 - DNA, 15 bp, Homo sapiens
ccctccatgtttttc

SEQ ID NO: 959649 - DNA, 15 bp, Homo sapiens
cctccatgtttttct

SEQ ID NO: 959650 - DNA, 15 bp, Homo sapiens
ctccatgtttttctt

SEQ ID NO: 959651 - DNA, 15 bp, Homo sapiens
tccatgtttttcttt

SEQ ID NO: 959652 - DNA, 15 bp, Homo sapiens
ccatgtttttctttg

SEQ ID NO: 959653 - DNA, 15 bp, Homo sapiens
catgtttttctttgt

SEQ ID NO: 959654 - DNA, 15 bp, Homo sapiens
atgtttttctttgtc

SEQ ID NO: 959655 - DNA, 15 bp, Homo sapiens
tgtttttctttgtct

SEQ ID NO: 959656 - DNA, 15 bp, Homo sapiens
gtttttctttgtcta

SEQ ID NO: 959657 - DNA, 15 bp, Homo sapiens
tttttctttgtctaa

SEQ ID NO: 959658 - DNA, 15 bp, Homo sapiens
ttttctttgtctaaa

SEQ ID NO: 959659 - DNA, 15 bp, Homo sapiens
tttctttgtctaaac

SEQ ID NO: 959660 - DNA, 15 bp, Homo sapiens
ttctttgtctaaaca

SEQ ID NO: 959661 - DNA, 15 bp, Homo sapiens
tctttgtctaaacat

SEQ ID NO: 959662 - DNA, 15 bp, Homo sapiens
ctttgtctaaacata

SEQ ID NO: 959663 - DNA, 15 bp, Homo sapiens
tttgtctaaacatat

SEQ ID NO: 959664 - DNA, 15 bp, Homo sapiens
ttgtctaaacatatg

SEQ ID NO: 959665 - DNA, 15 bp, Homo sapiens
tgtctaaacatatgt

SEQ ID NO: 959666 - DNA, 15 bp, Homo sapiens
gtctaaacatatgtt

SEQ ID NO: 959667 - DNA, 15 bp, Homo sapiens
tctaaacatatgttc

SEQ ID NO: 959668 - DNA, 15 bp, Homo sapiens
ctaaacatatgttca

SEQ ID NO: 959669 - DNA, 15 bp, Homo sapiens
taaacatatgttcaa

SEQ ID NO: 959670 - DNA, 15 bp, Homo sapiens
aaacatatgttcaaa

SEQ ID NO: 959671 - DNA, 15 bp, Homo sapiens
aacatatgttcaaaa

SEQ ID NO: 959672 - DNA, 15 bp, Homo sapiens
acatatgttcaaaac

SEQ ID NO: 959673 - DNA, 15 bp, Homo sapiens
catatgttcaaaaca

SEQ ID NO: 959674 - DNA, 15 bp, Homo sapiens
atatgttcaaaacaa

SEQ ID NO: 959675 - DNA, 15 bp, Homo sapiens
tatgttcaaaacaaa

SEQ ID NO: 959676 - DNA, 15 bp, Homo sapiens
atgttcaaaacaaaa

SEQ ID NO: 959677 - DNA, 15 bp, Homo sapiens
tgttcaaaacaaaac

SEQ ID NO: 959678 - DNA, 15 bp, Homo sapiens
gttcaaaacaaaaca

SEQ ID NO: 959679 - DNA, 15 bp, Homo sapiens
ttcaaaacaaaacac

SEQ ID NO: 959680 - DNA, 15 bp, Homo sapiens
tcaaaacaaaacact

SEQ ID NO: 959681 - DNA, 15 bp, Homo sapiens
caaaacaaaacactt

SEQ ID NO: 959682 - DNA, 15 bp, Homo sapiens
aaaacaaaacacttt

SEQ ID NO: 959683 - DNA, 15 bp, Homo sapiens
aaacaaaacactttt

SEQ ID NO: 959684 - DNA, 15 bp, Homo sapiens
aacaaaacactttta

SEQ ID NO: 959685 - DNA, 15 bp, Homo sapiens
acaaaacacttttat

SEQ ID NO: 959686 - DNA, 15 bp, Homo sapiens
caaaacacttttatt

SEQ ID NO: 959687 - DNA, 15 bp, Homo sapiens
aaaacacttttattc

SEQ ID NO: 959688 - DNA, 15 bp, Homo sapiens
aaacacttttattct

SEQ ID NO: 959689 - DNA, 15 bp, Homo sapiens
aacacttttattctt

SEQ ID NO: 959690 - DNA, 15 bp, Homo sapiens
acacttttattcttc

SEQ ID NO: 959691 - DNA, 15 bp, Homo sapiens
cacttttattcttct

SEQ ID NO: 959692 - DNA, 15 bp, Homo sapiens
acttttattcttctt

SEQ ID NO: 959693 - DNA, 15 bp, Homo sapiens
cttttattcttcttt

SEQ ID NO: 959694 - DNA, 15 bp, Homo sapiens
ttttattcttctttg

SEQ ID NO: 959695 - DNA, 15 bp, Homo sapiens
tttattcttctttgc

SEQ ID NO: 959696 - DNA, 15 bp, Homo sapiens
ttattcttctttgca

SEQ ID NO: 959697 - DNA, 15 bp, Homo sapiens
tattcttctttgcag

SEQ ID NO: 959698 - DNA, 15 bp, Homo sapiens
attcttctttgcagg

SEQ ID NO: 959699 - DNA, 15 bp, Homo sapiens
ttcttctttgcaggt

SEQ ID NO: 959700 - DNA, 15 bp, Homo sapiens
tcttctttgcaggtt

SEQ ID NO: 959701 - DNA, 15 bp, Homo sapiens
cttctttgcaggttt

SEQ ID NO: 959702 - DNA, 15 bp, Homo sapiens
ttctttgcaggtttt

SEQ ID NO: 959703 - DNA, 15 bp, Homo sapiens
tctttgcaggtttta

SEQ ID NO: 959704 - DNA, 15 bp, Homo sapiens
ctttgcaggttttac

SEQ ID NO: 959705 - DNA, 15 bp, Homo sapiens
tttgcaggttttaca

SEQ ID NO: 959706 - DNA, 15 bp, Homo sapiens
ttgcaggttttacaa

SEQ ID NO: 959707 - DNA, 15 bp, Homo sapiens
tgcaggttttacaag

SEQ ID NO: 959708 - DNA, 15 bp, Homo sapiens
gcaggttttacaagg

SEQ ID NO: 959709 - DNA, 15 bp, Homo sapiens
caggttttacaagga

SEQ ID NO: 959710 - DNA, 15 bp, Homo sapiens
aggttttacaaggat

SEQ ID NO: 959711 - DNA, 15 bp, Homo sapiens
ggttttacaaggatc

SEQ ID NO: 959712 - DNA, 15 bp, Homo sapiens
gttttacaaggatca

SEQ ID NO: 959713 - DNA, 15 bp, Homo sapiens
ttttacaaggatcaa

SEQ ID NO: 959714 - DNA, 15 bp, Homo sapiens
tttacaaggatcaac

SEQ ID NO: 959715 - DNA, 15 bp, Homo sapiens
ttacaaggatcaact

SEQ ID NO: 959716 - DNA, 15 bp, Homo sapiens
tacaaggatcaactt

SEQ ID NO: 959717 - DNA, 15 bp, Homo sapiens
acaaggatcaacttt

SEQ ID NO: 959718 - DNA, 15 bp, Homo sapiens
caaggatcaactttt

SEQ ID NO: 959719 - DNA, 15 bp, Homo sapiens
aaggatcaactttta

SEQ ID NO: 959720 - DNA, 15 bp, Homo sapiens
aggatcaacttttag

SEQ ID NO: 959721 - DNA, 15 bp, Homo sapiens
ggatcaacttttagt

SEQ ID NO: 959722 - DNA, 15 bp, Homo sapiens
gatcaacttttagtt

SEQ ID NO: 959723 - DNA, 15 bp, Homo sapiens
atcaacttttagttt

SEQ ID NO: 959724 - DNA, 15 bp, Homo sapiens
tcaacttttagtttt

SEQ ID NO: 959725 - DNA, 15 bp, Homo sapiens
caacttttagttttg

SEQ ID NO: 959726 - DNA, 15 bp, Homo sapiens
aacttttagttttga

SEQ ID NO: 959727 - DNA, 15 bp, Homo sapiens
acttttagttttgaa

SEQ ID NO: 959728 - DNA, 15 bp, Homo sapiens
cttttagttttgaaa

SEQ ID NO: 959729 - DNA, 15 bp, Homo sapiens
ttttagttttgaaac

SEQ ID NO: 959730 - DNA, 15 bp, Homo sapiens
tttagttttgaaacc

SEQ ID NO: 959731 - DNA, 15 bp, Homo sapiens
ttagttttgaaacct

SEQ ID NO: 959732 - DNA, 15 bp, Homo sapiens
tagttttgaaacctg

SEQ ID NO: 959733 - DNA, 15 bp, Homo sapiens
agttttgaaacctgc

SEQ ID NO: 959734 - DNA, 15 bp, Homo sapiens
gttttgaaacctgct

SEQ ID NO: 959735 - DNA, 15 bp, Homo sapiens
ttttgaaacctgcta

SEQ ID NO: 959736 - DNA, 15 bp, Homo sapiens
tttgaaacctgctat

SEQ ID NO: 959737 - DNA, 15 bp, Homo sapiens
ttgaaacctgctatt

SEQ ID NO: 959738 - DNA, 15 bp, Homo sapiens
tgaaacctgctatta

SEQ ID NO: 959739 - DNA, 15 bp, Homo sapiens
gaaacctgctattac

SEQ ID NO: 959740 - DNA, 15 bp, Homo sapiens
aaacctgctattact

SEQ ID NO: 959741 - DNA, 15 bp, Homo sapiens
aacctgctattactt

SEQ ID NO: 959742 - DNA, 15 bp, Homo sapiens
acctgctattacttt

SEQ ID NO: 959743 - DNA, 15 bp, Homo sapiens
cctgctattactttt

SEQ ID NO: 959744 - DNA, 15 bp, Homo sapiens
ctgctattactttta

SEQ ID NO: 959745 - DNA, 15 bp, Homo sapiens
tgctattacttttag

SEQ ID NO: 959746 - DNA, 15 bp, Homo sapiens
gctattacttttaga

SEQ ID NO: 959747 - DNA, 15 bp, Homo sapiens
ctattacttttagag

SEQ ID NO: 959748 - DNA, 15 bp, Homo sapiens
tattacttttagagg

SEQ ID NO: 959749 - DNA, 15 bp, Homo sapiens
attacttttagaggc

SEQ ID NO: 959750 - DNA, 15 bp, Homo sapiens
ttacttttagaggcc

SEQ ID NO: 959751 - DNA, 15 bp, Homo sapiens
tacttttagaggcca

SEQ ID NO: 959752 - DNA, 15 bp, Homo sapiens
acttttagaggccat

SEQ ID NO: 959753 - DNA, 15 bp, Homo sapiens
cttttagaggccatt

SEQ ID NO: 959754 - DNA, 15 bp, Homo sapiens
ttttagaggccattt

SEQ ID NO: 959755 - DNA, 15 bp, Homo sapiens
tttagaggccatttt

SEQ ID NO: 959756 - DNA, 15 bp, Homo sapiens
ttagaggccattttt

SEQ ID NO: 959757 - DNA, 15 bp, Homo sapiens
tagaggccatttttt

SEQ ID NO: 959758 - DNA, 15 bp, Homo sapiens
agaggccattttttt

SEQ ID NO: 959759 - DNA, 15 bp, Homo sapiens
gaggccatttttttt

SEQ ID NO: 959760 - DNA, 15 bp, Homo sapiens
aggccattttttttt

SEQ ID NO: 959761 - DNA, 15 bp, Homo sapiens
ggccatttttttttt

SEQ ID NO: 959762 - DNA, 15 bp, Homo sapiens
gccattttttttttc

SEQ ID NO: 959763 - DNA, 15 bp, Homo sapiens
ccattttttttttct

SEQ ID NO: 959764 - DNA, 15 bp, Homo sapiens
cattttttttttctc

SEQ ID NO: 959765 - DNA, 15 bp, Homo sapiens
attttttttttctct

SEQ ID NO: 959766 - DNA, 15 bp, Homo sapiens
ttttttttttctcta

SEQ ID NO: 959767 - DNA, 15 bp, Homo sapiens
tttttttttctctaa

SEQ ID NO: 959768 - DNA, 15 bp, Homo sapiens
ttttttttctctaat

SEQ ID NO: 959769 - DNA, 15 bp, Homo sapiens
tttttttctctaata

SEQ ID NO: 959770 - DNA, 15 bp, Homo sapiens
ttttttctctaataa

SEQ ID NO: 959771 - DNA, 15 bp, Homo sapiens
tttttctctaataat

SEQ ID NO: 959772 - DNA, 15 bp, Homo sapiens
ttttctctaataatg

SEQ ID NO: 959773 - DNA, 15 bp, Homo sapiens
tttctctaataatgt

SEQ ID NO: 959774 - DNA, 15 bp, Homo sapiens
ttctctaataatgtg

SEQ ID NO: 959775 - DNA, 15 bp, Homo sapiens
tctctaataatgtga

SEQ ID NO: 959776 - DNA, 15 bp, Homo sapiens
ctctaataatgtgag

SEQ ID NO: 959777 - DNA, 15 bp, Homo sapiens
tctaataatgtgagt

SEQ ID NO: 959778 - DNA, 15 bp, Homo sapiens
ctaataatgtgagtt

SEQ ID NO: 959779 - DNA, 15 bp, Homo sapiens
taataatgtgagttc

SEQ ID NO: 959780 - DNA, 15 bp, Homo sapiens
aataatgtgagttca

SEQ ID NO: 959781 - DNA, 15 bp, Homo sapiens
ataatgtgagttcat

SEQ ID NO: 959782 - DNA, 15 bp, Homo sapiens
taatgtgagttcatg

SEQ ID NO: 959783 - DNA, 15 bp, Homo sapiens
aatgtgagttcatgc

SEQ ID NO: 959784 - DNA, 15 bp, Homo sapiens
atgtgagttcatgcg

SEQ ID NO: 959785 - DNA, 15 bp, Homo sapiens
tgtgagttcatgcgg

SEQ ID NO: 959786 - DNA, 15 bp, Homo sapiens
gtgagttcatgcggg

SEQ ID NO: 959787 - DNA, 15 bp, Homo sapiens
tgagttcatgcgggc

SEQ ID NO: 959788 - DNA, 15 bp, Homo sapiens
gagttcatgcgggct

SEQ ID NO: 959789 - DNA, 15 bp, Homo sapiens
agttcatgcgggctg

SEQ ID NO: 959790 - DNA, 15 bp, Homo sapiens
gttcatgcgggctga

SEQ ID NO: 959791 - DNA, 15 bp, Homo sapiens
ttcatgcgggctgaa

SEQ ID NO: 959792 - DNA, 15 bp, Homo sapiens
tcatgcgggctgaag

SEQ ID NO: 959793 - DNA, 15 bp, Homo sapiens
catgcgggctgaagt

SEQ ID NO: 959794 - DNA, 15 bp, Homo sapiens
atgcgggctgaagta

SEQ ID NO: 959795 - DNA, 15 bp, Homo sapiens
tgcgggctgaagtaa

SEQ ID NO: 959796 - DNA, 15 bp, Homo sapiens
gcgggctgaagtaat

SEQ ID NO: 959797 - DNA, 15 bp, Homo sapiens
cgggctgaagtaatt

SEQ ID NO: 959798 - DNA, 15 bp, Homo sapiens
gggctgaagtaattg

SEQ ID NO: 959799 - DNA, 15 bp, Homo sapiens
ggctgaagtaattgg

SEQ ID NO: 959800 - DNA, 15 bp, Homo sapiens
gctgaagtaattgga

SEQ ID NO: 959801 - DNA, 15 bp, Homo sapiens
ctgaagtaattggaa

SEQ ID NO: 959802 - DNA, 15 bp, Homo sapiens
tgaagtaattggaat

SEQ ID NO: 959803 - DNA, 15 bp, Homo sapiens
gaagtaattggaata

SEQ ID NO: 959804 - DNA, 15 bp, Homo sapiens
aagtaattggaatac

SEQ ID NO: 959805 - DNA, 15 bp, Homo sapiens
agtaattggaatact

SEQ ID NO: 959806 - DNA, 15 bp, Homo sapiens
gtaattggaatactt

SEQ ID NO: 959807 - DNA, 15 bp, Homo sapiens
taattggaatacttt

SEQ ID NO: 959808 - DNA, 15 bp, Homo sapiens
aattggaatacttta

SEQ ID NO: 959809 - DNA, 15 bp, Homo sapiens
attggaatactttat

SEQ ID NO: 959810 - DNA, 15 bp, Homo sapiens
ttggaatactttata

SEQ ID NO: 959811 - DNA, 15 bp, Homo sapiens
tggaatactttatag

SEQ ID NO: 959812 - DNA, 15 bp, Homo sapiens
ggaatactttataga

SEQ ID NO: 959813 - DNA, 15 bp, Homo sapiens
gaatactttatagaa

SEQ ID NO: 959814 - DNA, 15 bp, Homo sapiens
aatactttatagaaa

SEQ ID NO: 959815 - DNA, 15 bp, Homo sapiens
atactttatagaaaa

SEQ ID NO: 959816 - DNA, 15 bp, Homo sapiens
tactttatagaaaag

SEQ ID NO: 959817 - DNA, 15 bp, Homo sapiens
actttatagaaaaga

SEQ ID NO: 959818 - DNA, 15 bp, Homo sapiens
ctttatagaaaagat

SEQ ID NO: 959819 - DNA, 15 bp, Homo sapiens
tttatagaaaagatt

SEQ ID NO: 959820 - DNA, 15 bp, Homo sapiens
ttatagaaaagattg

SEQ ID NO: 959821 - DNA, 15 bp, Homo sapiens
tatagaaaagattga

SEQ ID NO: 959822 - DNA, 15 bp, Homo sapiens
atagaaaagattgaa

SEQ ID NO: 959823 - DNA, 15 bp, Homo sapiens
tagaaaagattgaat

SEQ ID NO: 959824 - DNA, 15 bp, Homo sapiens
agaaaagattgaatt

SEQ ID NO: 959825 - DNA, 15 bp, Homo sapiens
gaaaagattgaattt

SEQ ID NO: 959826 - DNA, 15 bp, Homo sapiens
aaaagattgaatttg

SEQ ID NO: 959827 - DNA, 15 bp, Homo sapiens
aaagattgaatttgt

SEQ ID NO: 959828 - DNA, 15 bp, Homo sapiens
aagattgaatttgtc

SEQ ID NO: 959829 - DNA, 15 bp, Homo sapiens
agattgaatttgtct

SEQ ID NO: 959830 - DNA, 15 bp, Homo sapiens
gattgaatttgtctt

SEQ ID NO: 959831 - DNA, 15 bp, Homo sapiens
attgaatttgtcttc

SEQ ID NO: 959832 - DNA, 15 bp, Homo sapiens
ttgaatttgtcttct

SEQ ID NO: 959833 - DNA, 15 bp, Homo sapiens
tgaatttgtcttctc

SEQ ID NO: 959834 - DNA, 15 bp, Homo sapiens
gaatttgtcttctct

SEQ ID NO: 959835 - DNA, 15 bp, Homo sapiens
aatttgtcttctctc

SEQ ID NO: 959836 - DNA, 15 bp, Homo sapiens
atttgtcttctctct

SEQ ID NO: 959837 - DNA, 15 bp, Homo sapiens
tttgtcttctctctg

SEQ ID NO: 959838 - DNA, 15 bp, Homo sapiens
ttgtcttctctctga

SEQ ID NO: 959839 - DNA, 15 bp, Homo sapiens
tgtcttctctctgaa

SEQ ID NO: 959840 - DNA, 15 bp, Homo sapiens
gtcttctctctgaac

SEQ ID NO: 959841 - DNA, 15 bp, Homo sapiens
tcttctctctgaact

SEQ ID NO: 959842 - DNA, 15 bp, Homo sapiens
cttctctctgaactc

SEQ ID NO: 959843 - DNA, 15 bp, Homo sapiens
ttctctctgaactct

SEQ ID NO: 959844 - DNA, 15 bp, Homo sapiens
tctctctgaactcta

SEQ ID NO: 959845 - DNA, 15 bp, Homo sapiens
ctctctgaactctag

SEQ ID NO: 959846 - DNA, 15 bp, Homo sapiens
tctctgaactctagt

SEQ ID NO: 959847 - DNA, 15 bp, Homo sapiens
ctctgaactctagtt

SEQ ID NO: 959848 - DNA, 15 bp, Homo sapiens
tctgaactctagttt

SEQ ID NO: 959849 - DNA, 15 bp, Homo sapiens
ctgaactctagtttg

SEQ ID NO: 959850 - DNA, 15 bp, Homo sapiens
tgaactctagtttga

SEQ ID NO: 959851 - DNA, 15 bp, Homo sapiens
gaactctagtttgaa

SEQ ID NO: 959852 - DNA, 15 bp, Homo sapiens
aactctagtttgaat

SEQ ID NO: 959853 - DNA, 15 bp, Homo sapiens
actctagtttgaatt

SEQ ID NO: 959854 - DNA, 15 bp, Homo sapiens
ctctagtttgaattt

SEQ ID NO: 959855 - DNA, 15 bp, Homo sapiens
tctagtttgaatttc

SEQ ID NO: 959856 - DNA, 15 bp, Homo sapiens
ctagtttgaatttct

SEQ ID NO: 959857 - DNA, 15 bp, Homo sapiens
tagtttgaatttcta

SEQ ID NO: 959858 - DNA, 15 bp, Homo sapiens
agtttgaatttctaa

SEQ ID NO: 959859 - DNA, 15 bp, Homo sapiens
gtttgaatttctaaa

SEQ ID NO: 959860 - DNA, 15 bp, Homo sapiens
tttgaatttctaaat

SEQ ID NO: 959861 - DNA, 15 bp, Homo sapiens
ttgaatttctaaatt

SEQ ID NO: 959862 - DNA, 15 bp, Homo sapiens
tgaatttctaaattt

SEQ ID NO: 959863 - DNA, 15 bp, Homo sapiens
gaatttctaaatttt

SEQ ID NO: 959864 - DNA, 15 bp, Homo sapiens
aatttctaaatttta

SEQ ID NO: 959865 - DNA, 15 bp, Homo sapiens
atttctaaattttat

SEQ ID NO: 959866 - DNA, 15 bp, Homo sapiens
tttctaaattttatg

SEQ ID NO: 959867 - DNA, 15 bp, Homo sapiens
ttctaaattttatga

SEQ ID NO: 959868 - DNA, 15 bp, Homo sapiens
tctaaattttatgaa

SEQ ID NO: 959869 - DNA, 15 bp, Homo sapiens
ctaaattttatgaat

SEQ ID NO: 959870 - DNA, 15 bp, Homo sapiens
taaattttatgaatc

SEQ ID NO: 959871 - DNA, 15 bp, Homo sapiens
aaattttatgaatca

SEQ ID NO: 959872 - DNA, 15 bp, Homo sapiens
aattttatgaatcat

SEQ ID NO: 959873 - DNA, 15 bp, Homo sapiens
attttatgaatcatc

SEQ ID NO: 959874 - DNA, 15 bp, Homo sapiens
ttttatgaatcatct

SEQ ID NO: 959875 - DNA, 15 bp, Homo sapiens
tttatgaatcatcta

SEQ ID NO: 959876 - DNA, 15 bp, Homo sapiens
ttatgaatcatctag

SEQ ID NO: 959877 - DNA, 15 bp, Homo sapiens
tatgaatcatctaga

SEQ ID NO: 959878 - DNA, 15 bp, Homo sapiens
atgaatcatctagat

SEQ ID NO: 959879 - DNA, 15 bp, Homo sapiens
tgaatcatctagata

SEQ ID NO: 959880 - DNA, 15 bp, Homo sapiens
gaatcatctagatat

SEQ ID NO: 959881 - DNA, 15 bp, Homo sapiens
aatcatctagatatt

SEQ ID NO: 959882 - DNA, 15 bp, Homo sapiens
atcatctagatatta

SEQ ID NO: 959883 - DNA, 15 bp, Homo sapiens
tcatctagatattaa

SEQ ID NO: 959884 - DNA, 15 bp, Homo sapiens
catctagatattaaa

SEQ ID NO: 959885 - DNA, 15 bp, Homo sapiens
atctagatattaaag

SEQ ID NO: 959886 - DNA, 15 bp, Homo sapiens
tctagatattaaaga

SEQ ID NO: 959887 - DNA, 15 bp, Homo sapiens
ctagatattaaagag

SEQ ID NO: 959888 - DNA, 15 bp, Homo sapiens
tagatattaaagagg

SEQ ID NO: 959889 - DNA, 15 bp, Homo sapiens
agatattaaagagga

SEQ ID NO: 959890 - DNA, 15 bp, Homo sapiens
gatattaaagaggag

SEQ ID NO: 959891 - DNA, 15 bp, Homo sapiens
atattaaagaggagg

SEQ ID NO: 959892 - DNA, 15 bp, Homo sapiens
tattaaagaggaggg

SEQ ID NO: 959893 - DNA, 15 bp, Homo sapiens
attaaagaggagggg

SEQ ID NO: 959894 - DNA, 15 bp, Homo sapiens
ttaaagaggaggggc

SEQ ID NO: 959895 - DNA, 15 bp, Homo sapiens
taaagaggaggggca

SEQ ID NO: 959896 - DNA, 15 bp, Homo sapiens
aaagaggaggggcat

SEQ ID NO: 959897 - DNA, 15 bp, Homo sapiens
aagaggaggggcata

SEQ ID NO: 959898 - DNA, 15 bp, Homo sapiens
agaggaggggcatat

SEQ ID NO: 959899 - DNA, 15 bp, Homo sapiens
gaggaggggcatatc

SEQ ID NO: 959900 - DNA, 15 bp, Homo sapiens
aggaggggcatatca

SEQ ID NO: 959901 - DNA, 15 bp, Homo sapiens
ggaggggcatatcaa

SEQ ID NO: 959902 - DNA, 15 bp, Homo sapiens
gaggggcatatcaaa

SEQ ID NO: 959903 - DNA, 15 bp, Homo sapiens
aggggcatatcaaag

SEQ ID NO: 959904 - DNA, 15 bp, Homo sapiens
ggggcatatcaaaga

SEQ ID NO: 959905 - DNA, 15 bp, Homo sapiens
gggcatatcaaagag

SEQ ID NO: 959906 - DNA, 15 bp, Homo sapiens
ggcatatcaaagagg

SEQ ID NO: 959907 - DNA, 15 bp, Homo sapiens
gcatatcaaagagga

SEQ ID NO: 959908 - DNA, 15 bp, Homo sapiens
catatcaaagaggag

SEQ ID NO: 959909 - DNA, 15 bp, Homo sapiens
atatcaaagaggaga

SEQ ID NO: 959910 - DNA, 15 bp, Homo sapiens
tatcaaagaggagaa

SEQ ID NO: 959911 - DNA, 15 bp, Homo sapiens
atcaaagaggagaac

SEQ ID NO: 959912 - DNA, 15 bp, Homo sapiens
tcaaagaggagaacc

SEQ ID NO: 959913 - DNA, 15 bp, Homo sapiens
caaagaggagaaccc

SEQ ID NO: 959914 - DNA, 15 bp, Homo sapiens
aaagaggagaaccct

SEQ ID NO: 959915 - DNA, 15 bp, Homo sapiens
aagaggagaacccta

SEQ ID NO: 959916 - DNA, 15 bp, Homo sapiens
agaggagaaccctag

SEQ ID NO: 959917 - DNA, 15 bp, Homo sapiens
gaggagaaccctagc

SEQ ID NO: 959918 - DNA, 15 bp, Homo sapiens
aggagaaccctagca

SEQ ID NO: 959919 - DNA, 15 bp, Homo sapiens
ggagaaccctagcag

SEQ ID NO: 959920 - DNA, 15 bp, Homo sapiens
gagaaccctagcaga

SEQ ID NO: 959921 - DNA, 15 bp, Homo sapiens
agaaccctagcagag

SEQ ID NO: 959922 - DNA, 15 bp, Homo sapiens
gaaccctagcagaga

SEQ ID NO: 959923 - DNA, 15 bp, Homo sapiens
aaccctagcagagat

SEQ ID NO: 959924 - DNA, 15 bp, Homo sapiens
accctagcagagata

SEQ ID NO: 959925 - DNA, 15 bp, Homo sapiens
ccctagcagagataa

SEQ ID NO: 959926 - DNA, 15 bp, Homo sapiens
cctagcagagataag

SEQ ID NO: 959927 - DNA, 15 bp, Homo sapiens
ctagcagagataaga

SEQ ID NO: 959928 - DNA, 15 bp, Homo sapiens
tagcagagataagag

SEQ ID NO: 959929 - DNA, 15 bp, Homo sapiens
agcagagataagagg

SEQ ID NO: 959930 - DNA, 15 bp, Homo sapiens
gcagagataagaggc

SEQ ID NO: 959931 - DNA, 15 bp, Homo sapiens
cagagataagaggca

SEQ ID NO: 959932 - DNA, 15 bp, Homo sapiens
agagataagaggcaa

SEQ ID NO: 959933 - DNA, 15 bp, Homo sapiens
gagataagaggcaag

SEQ ID NO: 959934 - DNA, 15 bp, Homo sapiens
agataagaggcaaga

SEQ ID NO: 959935 - DNA, 15 bp, Homo sapiens
gataagaggcaagag

SEQ ID NO: 959936 - DNA, 15 bp, Homo sapiens
ataagaggcaagagt

SEQ ID NO: 959937 - DNA, 15 bp, Homo sapiens
taagaggcaagagta

SEQ ID NO: 959938 - DNA, 15 bp, Homo sapiens
aagaggcaagagtaa

SEQ ID NO: 959939 - DNA, 15 bp, Homo sapiens
agaggcaagagtaaa

SEQ ID NO: 959940 - DNA, 15 bp, Homo sapiens
gaggcaagagtaaat

SEQ ID NO: 959941 - DNA, 15 bp, Homo sapiens
aggcaagagtaaatg

SEQ ID NO: 959942 - DNA, 15 bp, Homo sapiens
ggcaagagtaaatgt

SEQ ID NO: 959943 - DNA, 15 bp, Homo sapiens
gcaagagtaaatgtt

SEQ ID NO: 959944 - DNA, 15 bp, Homo sapiens
caagagtaaatgttt

SEQ ID NO: 959945 - DNA, 15 bp, Homo sapiens
aagagtaaatgtttc

SEQ ID NO: 959946 - DNA, 15 bp, Homo sapiens
agagtaaatgtttca

SEQ ID NO: 959947 - DNA, 15 bp, Homo sapiens
gagtaaatgtttcat

SEQ ID NO: 959948 - DNA, 15 bp, Homo sapiens
agtaaatgtttcatg

SEQ ID NO: 959949 - DNA, 15 bp, Homo sapiens
gtaaatgtttcatgt

SEQ ID NO: 959950 - DNA, 15 bp, Homo sapiens
taaatgtttcatgta

SEQ ID NO: 959951 - DNA, 15 bp, Homo sapiens
aaatgtttcatgtat

SEQ ID NO: 959952 - DNA, 15 bp, Homo sapiens
aatgtttcatgtatg

SEQ ID NO: 959953 - DNA, 15 bp, Homo sapiens
atgtttcatgtatgg

SEQ ID NO: 959954 - DNA, 15 bp, Homo sapiens
tgtttcatgtatggg

SEQ ID NO: 959955 - DNA, 15 bp, Homo sapiens
gtttcatgtatgggt

SEQ ID NO: 959956 - DNA, 15 bp, Homo sapiens
tttcatgtatgggta

SEQ ID NO: 959957 - DNA, 15 bp, Homo sapiens
ttcatgtatgggtaa

SEQ ID NO: 959958 - DNA, 15 bp, Homo sapiens
tcatgtatgggtaag

SEQ ID NO: 959959 - DNA, 15 bp, Homo sapiens
catgtatgggtaaga

SEQ ID NO: 959960 - DNA, 15 bp, Homo sapiens
atgtatgggtaagag

SEQ ID NO: 959961 - DNA, 15 bp, Homo sapiens
tgtatgggtaagagt

SEQ ID NO: 959962 - DNA, 15 bp, Homo sapiens
gtatgggtaagagtg

SEQ ID NO: 959963 - DNA, 15 bp, Homo sapiens
tatgggtaagagtgg

SEQ ID NO: 959964 - DNA, 15 bp, Homo sapiens
atgggtaagagtgga

SEQ ID NO: 959965 - DNA, 15 bp, Homo sapiens
tgggtaagagtggat

SEQ ID NO: 959966 - DNA, 15 bp, Homo sapiens
gggtaagagtggatt

SEQ ID NO: 959967 - DNA, 15 bp, Homo sapiens
ggtaagagtggattt

SEQ ID NO: 959968 - DNA, 15 bp, Homo sapiens
gtaagagtggatttg

SEQ ID NO: 959969 - DNA, 15 bp, Homo sapiens
taagagtggatttgt

SEQ ID NO: 959970 - DNA, 15 bp, Homo sapiens
aagagtggatttgta

SEQ ID NO: 959971 - DNA, 15 bp, Homo sapiens
agagtggatttgtat

SEQ ID NO: 959972 - DNA, 15 bp, Homo sapiens
gagtggatttgtatt

SEQ ID NO: 959973 - DNA, 15 bp, Homo sapiens
agtggatttgtattt

SEQ ID NO: 959974 - DNA, 15 bp, Homo sapiens
gtggatttgtattta

SEQ ID NO: 959975 - DNA, 15 bp, Homo sapiens
tggatttgtatttac

SEQ ID NO: 959976 - DNA, 15 bp, Homo sapiens
ggatttgtatttacc

SEQ ID NO: 959977 - DNA, 15 bp, Homo sapiens
gatttgtatttacct

SEQ ID NO: 959978 - DNA, 15 bp, Homo sapiens
atttgtatttaccta

SEQ ID NO: 959979 - DNA, 15 bp, Homo sapiens
tttgtatttacctaa

SEQ ID NO: 959980 - DNA, 15 bp, Homo sapiens
ttgtatttacctaag

SEQ ID NO: 959981 - DNA, 15 bp, Homo sapiens
tgtatttacctaagt

SEQ ID NO: 959982 - DNA, 15 bp, Homo sapiens
gtatttacctaagta

SEQ ID NO: 959983 - DNA, 15 bp, Homo sapiens
tatttacctaagtaa

SEQ ID NO: 959984 - DNA, 15 bp, Homo sapiens
atttacctaagtaaa

SEQ ID NO: 959985 - DNA, 15 bp, Homo sapiens
tttacctaagtaaag

SEQ ID NO: 959986 - DNA, 15 bp, Homo sapiens
ttacctaagtaaagg

SEQ ID NO: 959987 - DNA, 15 bp, Homo sapiens
tacctaagtaaaggt

SEQ ID NO: 959988 - DNA, 15 bp, Homo sapiens
acctaagtaaaggta

SEQ ID NO: 959989 - DNA, 15 bp, Homo sapiens
cctaagtaaaggtag

SEQ ID NO: 959990 - DNA, 15 bp, Homo sapiens
ctaagtaaaggtaga

SEQ ID NO: 959991 - DNA, 15 bp, Homo sapiens
taagtaaaggtagac

SEQ ID NO: 959992 - DNA, 15 bp, Homo sapiens
aagtaaaggtagacc

SEQ ID NO: 959993 - DNA, 15 bp, Homo sapiens
agtaaaggtagaccc

SEQ ID NO: 959994 - DNA, 15 bp, Homo sapiens
gtaaaggtagaccct

SEQ ID NO: 959995 - DNA, 15 bp, Homo sapiens
taaaggtagaccctg

SEQ ID NO: 959996 - DNA, 15 bp, Homo sapiens
aaaggtagaccctgg

SEQ ID NO: 959997 - DNA, 15 bp, Homo sapiens
aaggtagaccctgga

SEQ ID NO: 959998 - DNA, 15 bp, Homo sapiens
aggtagaccctggac

SEQ ID NO: 959999 - DNA, 15 bp, Homo sapiens
ggtagaccctggaca

SEQ ID NO: 960000 - DNA, 15 bp, Homo sapiens
gtagaccctggacaa

SEQ ID NO: 960001 - DNA, 15 bp, Homo sapiens
tagaccctggacaat

SEQ ID NO: 960002 - DNA, 15 bp, Homo sapiens
agaccctggacaata

SEQ ID NO: 960003 - DNA, 15 bp, Homo sapiens
gaccctggacaataa

SEQ ID NO: 960004 - DNA, 15 bp, Homo sapiens
accctggacaataag

SEQ ID NO: 960005 - DNA, 15 bp, Homo sapiens
ccctggacaataagg

SEQ ID NO: 960006 - DNA, 15 bp, Homo sapiens
cctggacaataaggt

SEQ ID NO: 960007 - DNA, 15 bp, Homo sapiens
ctggacaataaggtt

SEQ ID NO: 960008 - DNA, 15 bp, Homo sapiens
tggacaataaggttg

SEQ ID NO: 960009 - DNA, 15 bp, Homo sapiens
ggacaataaggttgg

SEQ ID NO: 960010 - DNA, 15 bp, Homo sapiens
gacaataaggttgga

SEQ ID NO: 960011 - DNA, 15 bp, Homo sapiens
acaataaggttggat

SEQ ID NO: 960012 - DNA, 15 bp, Homo sapiens
caataaggttggata

SEQ ID NO: 960013 - DNA, 15 bp, Homo sapiens
aataaggttggatag

SEQ ID NO: 960014 - DNA, 15 bp, Homo sapiens
ataaggttggataga

SEQ ID NO: 960015 - DNA, 15 bp, Homo sapiens
taaggttggatagat

SEQ ID NO: 960016 - DNA, 15 bp, Homo sapiens
aaggttggatagatg

SEQ ID NO: 960017 - DNA, 15 bp, Homo sapiens
aggttggatagatgt

SEQ ID NO: 960018 - DNA, 15 bp, Homo sapiens
ggttggatagatgtg

SEQ ID NO: 960019 - DNA, 15 bp, Homo sapiens
gttggatagatgtgg

SEQ ID NO: 960020 - DNA, 15 bp, Homo sapiens
ttggatagatgtgga

SEQ ID NO: 960021 - DNA, 15 bp, Homo sapiens
tggatagatgtggag

SEQ ID NO: 960022 - DNA, 15 bp, Homo sapiens
ggatagatgtggagg

SEQ ID NO: 960023 - DNA, 15 bp, Homo sapiens
gatagatgtggaggt

SEQ ID NO: 960024 - DNA, 15 bp, Homo sapiens
atagatgtggaggtg

SEQ ID NO: 960025 - DNA, 15 bp, Homo sapiens
tagatgtggaggtgg

SEQ ID NO: 960026 - DNA, 15 bp, Homo sapiens
agatgtggaggtggc

SEQ ID NO: 960027 - DNA, 15 bp, Homo sapiens
gatgtggaggtggca

SEQ ID NO: 960028 - DNA, 15 bp, Homo sapiens
atgtggaggtggcaa

SEQ ID NO: 960029 - DNA, 15 bp, Homo sapiens
tgtggaggtggcaaa

SEQ ID NO: 960030 - DNA, 15 bp, Homo sapiens
gtggaggtggcaaac

SEQ ID NO: 960031 - DNA, 15 bp, Homo sapiens
tggaggtggcaaacc

SEQ ID NO: 960032 - DNA, 15 bp, Homo sapiens
ggaggtggcaaacca

SEQ ID NO: 960033 - DNA, 15 bp, Homo sapiens
gaggtggcaaaccat

SEQ ID NO: 960034 - DNA, 15 bp, Homo sapiens
aggtggcaaaccatg

SEQ ID NO: 960035 - DNA, 15 bp, Homo sapiens
ggtggcaaaccatgg

SEQ ID NO: 960036 - DNA, 15 bp, Homo sapiens
gtggcaaaccatgga

SEQ ID NO: 960037 - DNA, 15 bp, Homo sapiens
tggcaaaccatggag

SEQ ID NO: 960038 - DNA, 15 bp, Homo sapiens
ggcaaaccatggagg

SEQ ID NO: 960039 - DNA, 15 bp, Homo sapiens
gcaaaccatggaggg

SEQ ID NO: 960040 - DNA, 15 bp, Homo sapiens
caaaccatggagggt

SEQ ID NO: 960041 - DNA, 15 bp, Homo sapiens
aaaccatggagggtc

SEQ ID NO: 960042 - DNA, 15 bp, Homo sapiens
aaccatggagggtct

SEQ ID NO: 960043 - DNA, 15 bp, Homo sapiens
accatggagggtctt

SEQ ID NO: 960044 - DNA, 15 bp, Homo sapiens
ccatggagggtcttg

SEQ ID NO: 960045 - DNA, 15 bp, Homo sapiens
catggagggtcttgt

SEQ ID NO: 960046 - DNA, 15 bp, Homo sapiens
atggagggtcttgta

SEQ ID NO: 960047 - DNA, 15 bp, Homo sapiens
tggagggtcttgtag

SEQ ID NO: 960048 - DNA, 15 bp, Homo sapiens
ggagggtcttgtagg

SEQ ID NO: 960049 - DNA, 15 bp, Homo sapiens
gagggtcttgtaggt

SEQ ID NO: 960050 - DNA, 15 bp, Homo sapiens
agggtcttgtaggtc

SEQ ID NO: 960051 - DNA, 15 bp, Homo sapiens
gggtcttgtaggtca

SEQ ID NO: 960052 - DNA, 15 bp, Homo sapiens
ggtcttgtaggtcaa

SEQ ID NO: 960053 - DNA, 15 bp, Homo sapiens
gtcttgtaggtcaag

SEQ ID NO: 960054 - DNA, 15 bp, Homo sapiens
tcttgtaggtcaagt

SEQ ID NO: 960055 - DNA, 15 bp, Homo sapiens
cttgtaggtcaagtg

SEQ ID NO: 960056 - DNA, 15 bp, Homo sapiens
ttgtaggtcaagtgg

SEQ ID NO: 960057 - DNA, 15 bp, Homo sapiens
tgtaggtcaagtgga

SEQ ID NO: 960058 - DNA, 15 bp, Homo sapiens
gtaggtcaagtggat

SEQ ID NO: 960059 - DNA, 15 bp, Homo sapiens
taggtcaagtggatg

SEQ ID NO: 960060 - DNA, 15 bp, Homo sapiens
aggtcaagtggatgt

SEQ ID NO: 960061 - DNA, 15 bp, Homo sapiens
ggtcaagtggatgtt

SEQ ID NO: 960062 - DNA, 15 bp, Homo sapiens
gtcaagtggatgttt

SEQ ID NO: 960063 - DNA, 15 bp, Homo sapiens
tcaagtggatgtttt

SEQ ID NO: 960064 - DNA, 15 bp, Homo sapiens
caagtggatgttttt

SEQ ID NO: 960065 - DNA, 15 bp, Homo sapiens
aagtggatgttttta

SEQ ID NO: 960066 - DNA, 15 bp, Homo sapiens
agtggatgtttttag

SEQ ID NO: 960067 - DNA, 15 bp, Homo sapiens
gtggatgtttttaga

SEQ ID NO: 960068 - DNA, 15 bp, Homo sapiens
tggatgtttttagac

SEQ ID NO: 960069 - DNA, 15 bp, Homo sapiens
ggatgtttttagact

SEQ ID NO: 960070 - DNA, 15 bp, Homo sapiens
gatgtttttagactt

SEQ ID NO: 960071 - DNA, 15 bp, Homo sapiens
atgtttttagacttg

SEQ ID NO: 960072 - DNA, 15 bp, Homo sapiens
tgtttttagacttga

SEQ ID NO: 960073 - DNA, 15 bp, Homo sapiens
gtttttagacttgaa

SEQ ID NO: 960074 - DNA, 15 bp, Homo sapiens
tttttagacttgaag

SEQ ID NO: 960075 - DNA, 15 bp, Homo sapiens
ttttagacttgaagt

SEQ ID NO: 960076 - DNA, 15 bp, Homo sapiens
tttagacttgaagtg

SEQ ID NO: 960077 - DNA, 15 bp, Homo sapiens
ttagacttgaagtgt

SEQ ID NO: 960078 - DNA, 15 bp, Homo sapiens
tagacttgaagtgtt

SEQ ID NO: 960079 - DNA, 15 bp, Homo sapiens
agacttgaagtgtta

SEQ ID NO: 960080 - DNA, 15 bp, Homo sapiens
gacttgaagtgttaa

SEQ ID NO: 960081 - DNA, 15 bp, Homo sapiens
acttgaagtgttaaa

SEQ ID NO: 960082 - DNA, 15 bp, Homo sapiens
cttgaagtgttaaat

SEQ ID NO: 960083 - DNA, 15 bp, Homo sapiens
ttgaagtgttaaatt

SEQ ID NO: 960084 - DNA, 15 bp, Homo sapiens
tgaagtgttaaatta

SEQ ID NO: 960085 - DNA, 15 bp, Homo sapiens
gaagtgttaaattat

SEQ ID NO: 960086 - DNA, 15 bp, Homo sapiens
aagtgttaaattatt

SEQ ID NO: 960087 - DNA, 15 bp, Homo sapiens
agtgttaaattatta

SEQ ID NO: 960088 - DNA, 15 bp, Homo sapiens
gtgttaaattattat

SEQ ID NO: 960089 - DNA, 15 bp, Homo sapiens
tgttaaattattatc

SEQ ID NO: 960090 - DNA, 15 bp, Homo sapiens
gttaaattattatct

SEQ ID NO: 960091 - DNA, 15 bp, Homo sapiens
ttaaattattatctg

SEQ ID NO: 960092 - DNA, 15 bp, Homo sapiens
taaattattatctga

SEQ ID NO: 960093 - DNA, 15 bp, Homo sapiens
aaattattatctgaa

SEQ ID NO: 960094 - DNA, 15 bp, Homo sapiens
aattattatctgaaa

SEQ ID NO: 960095 - DNA, 15 bp, Homo sapiens
attattatctgaaat

SEQ ID NO: 960096 - DNA, 15 bp, Homo sapiens
ttattatctgaaatc

SEQ ID NO: 960097 - DNA, 15 bp, Homo sapiens
tattatctgaaatca

SEQ ID NO: 960098 - DNA, 15 bp, Homo sapiens
attatctgaaatcat

SEQ ID NO: 960099 - DNA, 15 bp, Homo sapiens
ttatctgaaatcatt

SEQ ID NO: 960100 - DNA, 15 bp, Homo sapiens
tatctgaaatcatta

SEQ ID NO: 960101 - DNA, 15 bp, Homo sapiens
atctgaaatcattaa

SEQ ID NO: 960102 - DNA, 15 bp, Homo sapiens
tctgaaatcattaag

SEQ ID NO: 960103 - DNA, 15 bp, Homo sapiens
ctgaaatcattaaga

SEQ ID NO: 960104 - DNA, 15 bp, Homo sapiens
tgaaatcattaagag

SEQ ID NO: 960105 - DNA, 15 bp, Homo sapiens
gaaatcattaagagt

SEQ ID NO: 960106 - DNA, 15 bp, Homo sapiens
aaatcattaagagtc

SEQ ID NO: 960107 - DNA, 15 bp, Homo sapiens
aatcattaagagtct

SEQ ID NO: 960108 - DNA, 15 bp, Homo sapiens
atcattaagagtctt

SEQ ID NO: 960109 - DNA, 15 bp, Homo sapiens
tcattaagagtcttt

SEQ ID NO: 960110 - DNA, 15 bp, Homo sapiens
cattaagagtctttt

SEQ ID NO: 960111 - DNA, 15 bp, Homo sapiens
attaagagtcttttt

SEQ ID NO: 960112 - DNA, 15 bp, Homo sapiens
ttaagagtcttttta

SEQ ID NO: 960113 - DNA, 15 bp, Homo sapiens
taagagtctttttag

SEQ ID NO: 960114 - DNA, 15 bp, Homo sapiens
aagagtctttttaga

SEQ ID NO: 960115 - DNA, 15 bp, Homo sapiens
agagtctttttagat

SEQ ID NO: 960116 - DNA, 15 bp, Homo sapiens
gagtctttttagatc

SEQ ID NO: 960117 - DNA, 15 bp, Homo sapiens
agtctttttagatcc

SEQ ID NO: 960118 - DNA, 15 bp, Homo sapiens
gtctttttagatcct

SEQ ID NO: 960119 - DNA, 15 bp, Homo sapiens
tctttttagatcctt

SEQ ID NO: 960120 - DNA, 15 bp, Homo sapiens
ctttttagatccttg

SEQ ID NO: 960121 - DNA, 15 bp, Homo sapiens
tttttagatccttga

SEQ ID NO: 960122 - DNA, 15 bp, Homo sapiens
ttttagatccttgag

SEQ ID NO: 960123 - DNA, 15 bp, Homo sapiens
tttagatccttgagc

SEQ ID NO: 960124 - DNA, 15 bp, Homo sapiens
ttagatccttgagct

SEQ ID NO: 960125 - DNA, 15 bp, Homo sapiens
tagatccttgagctt

SEQ ID NO: 960126 - DNA, 15 bp, Homo sapiens
agatccttgagcttc

SEQ ID NO: 960127 - DNA, 15 bp, Homo sapiens
gatccttgagcttct

SEQ ID NO: 960128 - DNA, 15 bp, Homo sapiens
atccttgagcttctt

SEQ ID NO: 960129 - DNA, 15 bp, Homo sapiens
tccttgagcttcttg

SEQ ID NO: 960130 - DNA, 15 bp, Homo sapiens
ccttgagcttcttga

SEQ ID NO: 960131 - DNA, 15 bp, Homo sapiens
cttgagcttcttgag

SEQ ID NO: 960132 - DNA, 15 bp, Homo sapiens
ttgagcttcttgaga

SEQ ID NO: 960133 - DNA, 15 bp, Homo sapiens
tgagcttcttgagaa

SEQ ID NO: 960134 - DNA, 15 bp, Homo sapiens
gagcttcttgagaag

SEQ ID NO: 960135 - DNA, 15 bp, Homo sapiens
agcttcttgagaaga

SEQ ID NO: 960136 - DNA, 15 bp, Homo sapiens
gcttcttgagaagac

SEQ ID NO: 960137 - DNA, 15 bp, Homo sapiens
cttcttgagaagacc

SEQ ID NO: 960138 - DNA, 15 bp, Homo sapiens
ttcttgagaagacca

SEQ ID NO: 960139 - DNA, 15 bp, Homo sapiens
tcttgagaagaccat

SEQ ID NO: 960140 - DNA, 15 bp, Homo sapiens
cttgagaagaccatg

SEQ ID NO: 960141 - DNA, 15 bp, Homo sapiens
ttgagaagaccatgg

SEQ ID NO: 960142 - DNA, 15 bp, Homo sapiens
tgagaagaccatgga

SEQ ID NO: 960143 - DNA, 15 bp, Homo sapiens
gagaagaccatggat

SEQ ID NO: 960144 - DNA, 15 bp, Homo sapiens
agaagaccatggata

SEQ ID NO: 960145 - DNA, 15 bp, Homo sapiens
gaagaccatggatat

SEQ ID NO: 960146 - DNA, 15 bp, Homo sapiens
aagaccatggatatt

SEQ ID NO: 960147 - DNA, 15 bp, Homo sapiens
agaccatggatatta

SEQ ID NO: 960148 - DNA, 15 bp, Homo sapiens
gaccatggatattat

SEQ ID NO: 960149 - DNA, 15 bp, Homo sapiens
accatggatattatg

SEQ ID NO: 960150 - DNA, 15 bp, Homo sapiens
ccatggatattatgc

SEQ ID NO: 960151 - DNA, 15 bp, Homo sapiens
catggatattatgca

SEQ ID NO: 960152 - DNA, 15 bp, Homo sapiens
atggatattatgcag

SEQ ID NO: 960153 - DNA, 15 bp, Homo sapiens
tggatattatgcagt

SEQ ID NO: 960154 - DNA, 15 bp, Homo sapiens
ggatattatgcagtt

SEQ ID NO: 960155 - DNA, 15 bp, Homo sapiens
gatattatgcagtta

SEQ ID NO: 960156 - DNA, 15 bp, Homo sapiens
atattatgcagttat

SEQ ID NO: 960157 - DNA, 15 bp, Homo sapiens
tattatgcagttatt

SEQ ID NO: 960158 - DNA, 15 bp, Homo sapiens
attatgcagttatta

SEQ ID NO: 960159 - DNA, 15 bp, Homo sapiens
ttatgcagttattat

SEQ ID NO: 960160 - DNA, 15 bp, Homo sapiens
tatgcagttattata

SEQ ID NO: 960161 - DNA, 15 bp, Homo sapiens
atgcagttattatat

SEQ ID NO: 960162 - DNA, 15 bp, Homo sapiens
tgcagttattatata

SEQ ID NO: 960163 - DNA, 15 bp, Homo sapiens
gcagttattatataa

SEQ ID NO: 960164 - DNA, 15 bp, Homo sapiens
cagttattatataat

SEQ ID NO: 960165 - DNA, 15 bp, Homo sapiens
agttattatataatg

SEQ ID NO: 960166 - DNA, 15 bp, Homo sapiens
gttattatataatgt

SEQ ID NO: 960167 - DNA, 15 bp, Homo sapiens
ttattatataatgtt

SEQ ID NO: 960168 - DNA, 15 bp, Homo sapiens
tattatataatgttt

SEQ ID NO: 960169 - DNA, 15 bp, Homo sapiens
attatataatgtttt

SEQ ID NO: 960170 - DNA, 15 bp, Homo sapiens
ttatataatgtttta

SEQ ID NO: 960171 - DNA, 15 bp, Homo sapiens
tatataatgttttaa

SEQ ID NO: 960172 - DNA, 15 bp, Homo sapiens
atataatgttttaaa

SEQ ID NO: 960173 - DNA, 15 bp, Homo sapiens
tataatgttttaaaa

SEQ ID NO: 960174 - DNA, 15 bp, Homo sapiens
ataatgttttaaaat

SEQ ID NO: 960175 - DNA, 15 bp, Homo sapiens
taatgttttaaaata

SEQ ID NO: 960176 - DNA, 15 bp, Homo sapiens
aatgttttaaaatag

SEQ ID NO: 960177 - DNA, 15 bp, Homo sapiens
atgttttaaaatagt

SEQ ID NO: 960178 - DNA, 15 bp, Homo sapiens
tgttttaaaatagta

SEQ ID NO: 960179 - DNA, 15 bp, Homo sapiens
gttttaaaatagtaa

SEQ ID NO: 960180 - DNA, 15 bp, Homo sapiens
ttttaaaatagtaag

SEQ ID NO: 960181 - DNA, 15 bp, Homo sapiens
tttaaaatagtaagt

SEQ ID NO: 960182 - DNA, 15 bp, Homo sapiens
ttaaaatagtaagta

SEQ ID NO: 960183 - DNA, 15 bp, Homo sapiens
taaaatagtaagtat

SEQ ID NO: 960184 - DNA, 15 bp, Homo sapiens
aaaatagtaagtatt

SEQ ID NO: 960185 - DNA, 15 bp, Homo sapiens
aaatagtaagtattt

SEQ ID NO: 960186 - DNA, 15 bp, Homo sapiens
aatagtaagtatttt

SEQ ID NO: 960187 - DNA, 15 bp, Homo sapiens
atagtaagtatttta

SEQ ID NO: 960188 - DNA, 15 bp, Homo sapiens
tagtaagtattttag

SEQ ID NO: 960189 - DNA, 15 bp, Homo sapiens
agtaagtattttagt

SEQ ID NO: 960190 - DNA, 15 bp, Homo sapiens
gtaagtattttagtt

SEQ ID NO: 960191 - DNA, 15 bp, Homo sapiens
taagtattttagttt

SEQ ID NO: 960192 - DNA, 15 bp, Homo sapiens
aagtattttagttta

SEQ ID NO: 960193 - DNA, 15 bp, Homo sapiens
agtattttagtttaa

SEQ ID NO: 960194 - DNA, 15 bp, Homo sapiens
gtattttagtttaac

SEQ ID NO: 960195 - DNA, 15 bp, Homo sapiens
tattttagtttaact

SEQ ID NO: 960196 - DNA, 15 bp, Homo sapiens
attttagtttaactg

SEQ ID NO: 960197 - DNA, 15 bp, Homo sapiens
ttttagtttaactgt

SEQ ID NO: 960198 - DNA, 15 bp, Homo sapiens
tttagtttaactgtc

SEQ ID NO: 960199 - DNA, 15 bp, Homo sapiens
ttagtttaactgtct

SEQ ID NO: 960200 - DNA, 15 bp, Homo sapiens
tagtttaactgtctt

SEQ ID NO: 960201 - DNA, 15 bp, Homo sapiens
agtttaactgtctta

SEQ ID NO: 960202 - DNA, 15 bp, Homo sapiens
gtttaactgtcttat

SEQ ID NO: 960203 - DNA, 15 bp, Homo sapiens
tttaactgtcttatg

SEQ ID NO: 960204 - DNA, 15 bp, Homo sapiens
ttaactgtcttatgt

SEQ ID NO: 960205 - DNA, 15 bp, Homo sapiens
taactgtcttatgta

SEQ ID NO: 960206 - DNA, 15 bp, Homo sapiens
aactgtcttatgtaa

SEQ ID NO: 960207 - DNA, 15 bp, Homo sapiens
actgtcttatgtaat

SEQ ID NO: 960208 - DNA, 15 bp, Homo sapiens
ctgtcttatgtaatt

SEQ ID NO: 960209 - DNA, 15 bp, Homo sapiens
tgtcttatgtaattc

SEQ ID NO: 960210 - DNA, 15 bp, Homo sapiens
gtcttatgtaattcc

SEQ ID NO: 960211 - DNA, 15 bp, Homo sapiens
tcttatgtaattcca

SEQ ID NO: 960212 - DNA, 15 bp, Homo sapiens
cttatgtaattccat

SEQ ID NO: 960213 - DNA, 15 bp, Homo sapiens
ttatgtaattccata

SEQ ID NO: 960214 - DNA, 15 bp, Homo sapiens
tatgtaattccatat

SEQ ID NO: 960215 - DNA, 15 bp, Homo sapiens
atgtaattccatata

SEQ ID NO: 960216 - DNA, 15 bp, Homo sapiens
tgtaattccatataa

SEQ ID NO: 960217 - DNA, 15 bp, Homo sapiens
gtaattccatataaa

SEQ ID NO: 960218 - DNA, 15 bp, Homo sapiens
taattccatataaat

SEQ ID NO: 960219 - DNA, 15 bp, Homo sapiens
aattccatataaatg

SEQ ID NO: 960220 - DNA, 15 bp, Homo sapiens
attccatataaatgg

SEQ ID NO: 960221 - DNA, 15 bp, Homo sapiens
ttccatataaatgga

SEQ ID NO: 960222 - DNA, 15 bp, Homo sapiens
tccatataaatggat

SEQ ID NO: 960223 - DNA, 15 bp, Homo sapiens
ccatataaatggatg

SEQ ID NO: 960224 - DNA, 15 bp, Homo sapiens
catataaatggatgc

SEQ ID NO: 960225 - DNA, 15 bp, Homo sapiens
atataaatggatgca

SEQ ID NO: 960226 - DNA, 15 bp, Homo sapiens
tataaatggatgcat

SEQ ID NO: 960227 - DNA, 15 bp, Homo sapiens
ataaatggatgcatg

SEQ ID NO: 960228 - DNA, 15 bp, Homo sapiens
taaatggatgcatgt

SEQ ID NO: 960229 - DNA, 15 bp, Homo sapiens
aaatggatgcatgtt

SEQ ID NO: 960230 - DNA, 15 bp, Homo sapiens
aatggatgcatgttc

SEQ ID NO: 960231 - DNA, 15 bp, Homo sapiens
atggatgcatgttct

SEQ ID NO: 960232 - DNA, 15 bp, Homo sapiens
tggatgcatgttctt

SEQ ID NO: 960233 - DNA, 15 bp, Homo sapiens
ggatgcatgttcttt

SEQ ID NO: 960234 - DNA, 15 bp, Homo sapiens
gatgcatgttcttta

SEQ ID NO: 960235 - DNA, 15 bp, Homo sapiens
atgcatgttctttaa

SEQ ID NO: 960236 - DNA, 15 bp, Homo sapiens
tgcatgttctttaaa

SEQ ID NO: 960237 - DNA, 15 bp, Homo sapiens
gcatgttctttaaaa

SEQ ID NO: 960238 - DNA, 15 bp, Homo sapiens
catgttctttaaaaa

SEQ ID NO: 960239 - DNA, 15 bp, Homo sapiens
atgttctttaaaaat

SEQ ID NO: 960240 - DNA, 15 bp, Homo sapiens
tgttctttaaaaatg

SEQ ID NO: 960241 - DNA, 15 bp, Homo sapiens
gttctttaaaaatgt

SEQ ID NO: 960242 - DNA, 15 bp, Homo sapiens
ttctttaaaaatgtt

SEQ ID NO: 960243 - DNA, 15 bp, Homo sapiens
tctttaaaaatgtta

SEQ ID NO: 960244 - DNA, 15 bp, Homo sapiens
ctttaaaaatgttaa

SEQ ID NO: 960245 - DNA, 15 bp, Homo sapiens
tttaaaaatgttaat

SEQ ID NO: 960246 - DNA, 15 bp, Homo sapiens
ttaaaaatgttaatg

SEQ ID NO: 960247 - DNA, 15 bp, Homo sapiens
taaaaatgttaatgt

SEQ ID NO: 960248 - DNA, 15 bp, Homo sapiens
aaaaatgttaatgta

SEQ ID NO: 960249 - DNA, 15 bp, Homo sapiens
aaaatgttaatgtat

SEQ ID NO: 960250 - DNA, 15 bp, Homo sapiens
aaatgttaatgtatt

SEQ ID NO: 960251 - DNA, 15 bp, Homo sapiens
aatgttaatgtattt

SEQ ID NO: 960252 - DNA, 15 bp, Homo sapiens
atgttaatgtatttc

SEQ ID NO: 960253 - DNA, 15 bp, Homo sapiens
tgttaatgtatttca

SEQ ID NO: 960254 - DNA, 15 bp, Homo sapiens
gttaatgtatttcag

SEQ ID NO: 960255 - DNA, 15 bp, Homo sapiens
ttaatgtatttcagt

SEQ ID NO: 960256 - DNA, 15 bp, Homo sapiens
taatgtatttcagta

SEQ ID NO: 960257 - DNA, 15 bp, Homo sapiens
aatgtatttcagtaa

SEQ ID NO: 960258 - DNA, 15 bp, Homo sapiens
atgtatttcagtaaa

SEQ ID NO: 960259 - DNA, 15 bp, Homo sapiens
tgtatttcagtaaat

SEQ ID NO: 960260 - DNA, 15 bp, Homo sapiens
gtatttcagtaaatc

SEQ ID NO: 960261 - DNA, 15 bp, Homo sapiens
tatttcagtaaatca

SEQ ID NO: 960262 - DNA, 15 bp, Homo sapiens
atttcagtaaatcaa

SEQ ID NO: 960263 - DNA, 15 bp, Homo sapiens
tttcagtaaatcaaa

SEQ ID NO: 960264 - DNA, 15 bp, Homo sapiens
ttcagtaaatcaaaa

SEQ ID NO: 960265 - DNA, 15 bp, Homo sapiens
tcagtaaatcaaaat

SEQ ID NO: 960266 - DNA, 15 bp, Homo sapiens
cagtaaatcaaaata

SEQ ID NO: 960267 - DNA, 15 bp, Homo sapiens
agtaaatcaaaatat

SEQ ID NO: 960268 - DNA, 15 bp, Homo sapiens
gtaaatcaaaatata

SEQ ID NO: 960269 - DNA, 15 bp, Homo sapiens
taaatcaaaatatac

SEQ ID NO: 960270 - DNA, 15 bp, Homo sapiens
aaatcaaaatatact

SEQ ID NO: 960271 - DNA, 15 bp, Homo sapiens
aatcaaaatatactt

SEQ ID NO: 960272 - DNA, 15 bp, Homo sapiens
atcaaaatatacttt

SEQ ID NO: 960273 - DNA, 15 bp, Homo sapiens
tcaaaatatactttt

SEQ ID NO: 960274 - DNA, 15 bp, Homo sapiens
caaaatatacttttt

SEQ ID NO: 960275 - DNA, 15 bp, Homo sapiens
aaaatatactttttg

SEQ ID NO: 960276 - DNA, 15 bp, Homo sapiens
aaatatactttttga

SEQ ID NO: 960277 - DNA, 15 bp, Homo sapiens
aatatactttttgac

SEQ ID NO: 960278 - DNA, 15 bp, Homo sapiens
atatactttttgact

SEQ ID NO: 960279 - DNA, 15 bp, Homo sapiens
tatactttttgactc

SEQ ID NO: 960280 - DNA, 15 bp, Homo sapiens
atactttttgactca

SEQ ID NO: 960281 - DNA, 15 bp, Homo sapiens
tactttttgactcat

SEQ ID NO: 960282 - DNA, 15 bp, Homo sapiens
actttttgactcatc

SEQ ID NO: 960283 - DNA, 15 bp, Homo sapiens
ctttttgactcatca

SEQ ID NO: 960284 - DNA, 15 bp, Homo sapiens
tttttgactcatcat

SEQ ID NO: 960285 - DNA, 15 bp, Homo sapiens
ttttgactcatcatt

SEQ ID NO: 960286 - DNA, 15 bp, Homo sapiens
tttgactcatcattt

SEQ ID NO: 960287 - DNA, 15 bp, Homo sapiens
ttgactcatcattta

SEQ ID NO: 960288 - DNA, 15 bp, Homo sapiens
tgactcatcatttaa

SEQ ID NO: 960289 - DNA, 15 bp, Homo sapiens
gactcatcatttaaa

SEQ ID NO: 960290 - DNA, 15 bp, Homo sapiens
actcatcatttaaag

SEQ ID NO: 960291 - DNA, 15 bp, Homo sapiens
ctcatcatttaaagg

SEQ ID NO: 960292 - DNA, 15 bp, Homo sapiens
tcatcatttaaagga

SEQ ID NO: 960293 - DNA, 15 bp, Homo sapiens
catcatttaaaggag

SEQ ID NO: 960294 - DNA, 15 bp, Homo sapiens
atcatttaaaggagg

SEQ ID NO: 960295 - DNA, 15 bp, Homo sapiens
tcatttaaaggaggc

SEQ ID NO: 960296 - DNA, 15 bp, Homo sapiens
catttaaaggaggcc

SEQ ID NO: 960297 - DNA, 15 bp, Homo sapiens
atttaaaggaggcct

SEQ ID NO: 960298 - DNA, 15 bp, Homo sapiens
tttaaaggaggcctt

SEQ ID NO: 960299 - DNA, 15 bp, Homo sapiens
ttaaaggaggccttc

SEQ ID NO: 960300 - DNA, 15 bp, Homo sapiens
taaaggaggccttca

SEQ ID NO: 960301 - DNA, 15 bp, Homo sapiens
aaaggaggccttcag

SEQ ID NO: 960302 - DNA, 15 bp, Homo sapiens
aaggaggccttcagt

SEQ ID NO: 960303 - DNA, 15 bp, Homo sapiens
aggaggccttcagtg

SEQ ID NO: 960304 - DNA, 15 bp, Homo sapiens
ggaggccttcagtga

SEQ ID NO: 960305 - DNA, 15 bp, Homo sapiens
gaggccttcagtgaa

SEQ ID NO: 960306 - DNA, 15 bp, Homo sapiens
aggccttcagtgaat

SEQ ID NO: 960307 - DNA, 15 bp, Homo sapiens
ggccttcagtgaatg

SEQ ID NO: 960308 - DNA, 15 bp, Homo sapiens
gccttcagtgaatgc

SEQ ID NO: 960309 - DNA, 15 bp, Homo sapiens
ccttcagtgaatgct

SEQ ID NO: 960310 - DNA, 15 bp, Homo sapiens
cttcagtgaatgctc

SEQ ID NO: 960311 - DNA, 15 bp, Homo sapiens
ttcagtgaatgctct

SEQ ID NO: 960312 - DNA, 15 bp, Homo sapiens
tcagtgaatgctctg

SEQ ID NO: 960313 - DNA, 15 bp, Homo sapiens
cagtgaatgctctgt

SEQ ID NO: 960314 - DNA, 15 bp, Homo sapiens
agtgaatgctctgta

SEQ ID NO: 960315 - DNA, 15 bp, Homo sapiens
gtgaatgctctgtag

SEQ ID NO: 960316 - DNA, 15 bp, Homo sapiens
tgaatgctctgtaga

SEQ ID NO: 960317 - DNA, 15 bp, Homo sapiens
gaatgctctgtagag

SEQ ID NO: 960318 - DNA, 15 bp, Homo sapiens
aatgctctgtagagg

SEQ ID NO: 960319 - DNA, 15 bp, Homo sapiens
atgctctgtagagga

SEQ ID NO: 960320 - DNA, 15 bp, Homo sapiens
tgctctgtagaggat

SEQ ID NO: 960321 - DNA, 15 bp, Homo sapiens
gctctgtagaggatt

SEQ ID NO: 960322 - DNA, 15 bp, Homo sapiens
ctctgtagaggatta

SEQ ID NO: 960323 - DNA, 15 bp, Homo sapiens
tctgtagaggattat

SEQ ID NO: 960324 - DNA, 15 bp, Homo sapiens
ctgtagaggattatt

SEQ ID NO: 960325 - DNA, 15 bp, Homo sapiens
tgtagaggattattt

SEQ ID NO: 960326 - DNA, 15 bp, Homo sapiens
gtagaggattatttt

SEQ ID NO: 960327 - DNA, 15 bp, Homo sapiens
tagaggattatttta

SEQ ID NO: 960328 - DNA, 15 bp, Homo sapiens
agaggattattttat

SEQ ID NO: 960329 - DNA, 15 bp, Homo sapiens
gaggattattttata

SEQ ID NO: 960330 - DNA, 15 bp, Homo sapiens
aggattattttataa

SEQ ID NO: 960331 - DNA, 15 bp, Homo sapiens
ggattattttataat

SEQ ID NO: 960332 - DNA, 15 bp, Homo sapiens
gattattttataata

SEQ ID NO: 960333 - DNA, 15 bp, Homo sapiens
attattttataatac

SEQ ID NO: 960334 - DNA, 15 bp, Homo sapiens
ttattttataatact

SEQ ID NO: 960335 - DNA, 15 bp, Homo sapiens
tattttataatacta

SEQ ID NO: 960336 - DNA, 15 bp, Homo sapiens
attttataatactaa

SEQ ID NO: 960337 - DNA, 15 bp, Homo sapiens
ttttataatactaat

SEQ ID NO: 960338 - DNA, 15 bp, Homo sapiens
tttataatactaatt

SEQ ID NO: 960339 - DNA, 15 bp, Homo sapiens
ttataatactaattt

SEQ ID NO: 960340 - DNA, 15 bp, Homo sapiens
tataatactaatttt

SEQ ID NO: 960341 - DNA, 15 bp, Homo sapiens
ataatactaattttg

SEQ ID NO: 960342 - DNA, 15 bp, Homo sapiens
taatactaattttga

SEQ ID NO: 960343 - DNA, 15 bp, Homo sapiens
aatactaattttgat

SEQ ID NO: 960344 - DNA, 15 bp, Homo sapiens
atactaattttgata

SEQ ID NO: 960345 - DNA, 15 bp, Homo sapiens
tactaattttgatat

SEQ ID NO: 960346 - DNA, 15 bp, Homo sapiens
actaattttgatatc

SEQ ID NO: 960347 - DNA, 15 bp, Homo sapiens
ctaattttgatatcc

SEQ ID NO: 960348 - DNA, 15 bp, Homo sapiens
taattttgatatcct

SEQ ID NO: 960349 - DNA, 15 bp, Homo sapiens
aattttgatatccta

SEQ ID NO: 960350 - DNA, 15 bp, Homo sapiens
attttgatatcctaa

SEQ ID NO: 960351 - DNA, 15 bp, Homo sapiens
ttttgatatcctaat

SEQ ID NO: 960352 - DNA, 15 bp, Homo sapiens
tttgatatcctaatt

SEQ ID NO: 960353 - DNA, 15 bp, Homo sapiens
ttgatatcctaattt

SEQ ID NO: 960354 - DNA, 15 bp, Homo sapiens
tgatatcctaattta

SEQ ID NO: 960355 - DNA, 15 bp, Homo sapiens
gatatcctaatttat

SEQ ID NO: 960356 - DNA, 15 bp, Homo sapiens
atatcctaatttatt

SEQ ID NO: 960357 - DNA, 15 bp, Homo sapiens
tatcctaatttattt

SEQ ID NO: 960358 - DNA, 15 bp, Homo sapiens
atcctaatttatttg

SEQ ID NO: 960359 - DNA, 15 bp, Homo sapiens
tcctaatttatttgt

SEQ ID NO: 960360 - DNA, 15 bp, Homo sapiens
cctaatttatttgtt

SEQ ID NO: 960361 - DNA, 15 bp, Homo sapiens
ctaatttatttgtta

SEQ ID NO: 960362 - DNA, 15 bp, Homo sapiens
taatttatttgttat

SEQ ID NO: 960363 - DNA, 15 bp, Homo sapiens
aatttatttgttata

SEQ ID NO: 960364 - DNA, 15 bp, Homo sapiens
atttatttgttataa

SEQ ID NO: 960365 - DNA, 15 bp, Homo sapiens
tttatttgttataaa

SEQ ID NO: 960366 - DNA, 15 bp, Homo sapiens
ttatttgttataaag

SEQ ID NO: 960367 - DNA, 15 bp, Homo sapiens
tatttgttataaagt

SEQ ID NO: 960368 - DNA, 15 bp, Homo sapiens
atttgttataaagtt

SEQ ID NO: 960369 - DNA, 15 bp, Homo sapiens
tttgttataaagttt

SEQ ID NO: 960370 - DNA, 15 bp, Homo sapiens
ttgttataaagttta

SEQ ID NO: 960371 - DNA, 15 bp, Homo sapiens
tgttataaagtttag

SEQ ID NO: 960372 - DNA, 15 bp, Homo sapiens
gttataaagtttaga

SEQ ID NO: 960373 - DNA, 15 bp, Homo sapiens
ttataaagtttagaa

SEQ ID NO: 960374 - DNA, 15 bp, Homo sapiens
tataaagtttagaag

SEQ ID NO: 960375 - DNA, 15 bp, Homo sapiens
ataaagtttagaagg

SEQ ID NO: 960376 - DNA, 15 bp, Homo sapiens
taaagtttagaaggt

SEQ ID NO: 960377 - DNA, 15 bp, Homo sapiens
aaagtttagaaggtt

SEQ ID NO: 960378 - DNA, 15 bp, Homo sapiens
aagtttagaaggttt

SEQ ID NO: 960379 - DNA, 15 bp, Homo sapiens
agtttagaaggtttg

SEQ ID NO: 960380 - DNA, 15 bp, Homo sapiens
gtttagaaggtttga

SEQ ID NO: 960381 - DNA, 15 bp, Homo sapiens
tttagaaggtttgaa

SEQ ID NO: 960382 - DNA, 15 bp, Homo sapiens
ttagaaggtttgaag

SEQ ID NO: 960383 - DNA, 15 bp, Homo sapiens
tagaaggtttgaaga

SEQ ID NO: 960384 - DNA, 15 bp, Homo sapiens
agaaggtttgaagaa

SEQ ID NO: 960385 - DNA, 15 bp, Homo sapiens
gaaggtttgaagaat

SEQ ID NO: 960386 - DNA, 15 bp, Homo sapiens
aaggtttgaagaatt

SEQ ID NO: 960387 - DNA, 15 bp, Homo sapiens
aggtttgaagaattt

SEQ ID NO: 960388 - DNA, 15 bp, Homo sapiens
ggtttgaagaattta

SEQ ID NO: 960389 - DNA, 15 bp, Homo sapiens
gtttgaagaatttaa

SEQ ID NO: 960390 - DNA, 15 bp, Homo sapiens
tttgaagaatttaaa

SEQ ID NO: 960391 - DNA, 15 bp, Homo sapiens
ttgaagaatttaaaa

SEQ ID NO: 960392 - DNA, 15 bp, Homo sapiens
tgaagaatttaaaat

SEQ ID NO: 960393 - DNA, 15 bp, Homo sapiens
gaagaatttaaaata

SEQ ID NO: 960394 - DNA, 15 bp, Homo sapiens
aagaatttaaaatat

SEQ ID NO: 960395 - DNA, 15 bp, Homo sapiens
agaatttaaaatata

SEQ ID NO: 960396 - DNA, 15 bp, Homo sapiens
gaatttaaaatatag

SEQ ID NO: 960397 - DNA, 15 bp, Homo sapiens
aatttaaaatatagt

SEQ ID NO: 960398 - DNA, 15 bp, Homo sapiens
atttaaaatatagtg

SEQ ID NO: 960399 - DNA, 15 bp, Homo sapiens
tttaaaatatagtgt

SEQ ID NO: 960400 - DNA, 15 bp, Homo sapiens
ttaaaatatagtgtt

SEQ ID NO: 960401 - DNA, 15 bp, Homo sapiens
taaaatatagtgtta

SEQ ID NO: 960402 - DNA, 15 bp, Homo sapiens
aaaatatagtgttaa

SEQ ID NO: 960403 - DNA, 15 bp, Homo sapiens
aaatatagtgttaat

SEQ ID NO: 960404 - DNA, 15 bp, Homo sapiens
aatatagtgttaata

SEQ ID NO: 960405 - DNA, 15 bp, Homo sapiens
atatagtgttaataa

SEQ ID NO: 960406 - DNA, 15 bp, Homo sapiens
tatagtgttaataaa

SEQ ID NO: 960407 - DNA, 15 bp, Homo sapiens
atagtgttaataaac

SEQ ID NO: 960408 - DNA, 15 bp, Homo sapiens
tagtgttaataaaca

SEQ ID NO: 960409 - DNA, 15 bp, Homo sapiens
agtgttaataaacac

SEQ ID NO: 960410 - DNA, 15 bp, Homo sapiens
gtgttaataaacaca

SEQ ID NO: 960411 - DNA, 15 bp, Homo sapiens
tgttaataaacacac

SEQ ID NO: 960412 - DNA, 15 bp, Homo sapiens
gttaataaacacact

SEQ ID NO: 960413 - DNA, 15 bp, Homo sapiens
ttaataaacacactg

SEQ ID NO: 960414 - DNA, 15 bp, Homo sapiens
taataaacacactga

SEQ ID NO: 960415 - DNA, 15 bp, Homo sapiens
aataaacacactgaa

SEQ ID NO: 960416 - DNA, 15 bp, Homo sapiens
ataaacacactgaac

SEQ ID NO: 960417 - DNA, 15 bp, Homo sapiens
taaacacactgaact

SEQ ID NO: 960418 - DNA, 15 bp, Homo sapiens
aaacacactgaactt

SEQ ID NO: 960419 - DNA, 15 bp, Homo sapiens
aacacactgaacttt

SEQ ID NO: 960420 - DNA, 15 bp, Homo sapiens
acacactgaactttt

SEQ ID NO: 960421 - DNA, 15 bp, Homo sapiens
cacactgaacttttc

SEQ ID NO: 960422 - DNA, 15 bp, Homo sapiens
acactgaacttttct

SEQ ID NO: 960423 - DNA, 15 bp, Homo sapiens
cactgaacttttctt

SEQ ID NO: 960424 - DNA, 15 bp, Homo sapiens
actgaacttttcttt

SEQ ID NO: 960425 - DNA, 15 bp, Homo sapiens
ctgaacttttctttt

SEQ ID NO: 960426 - DNA, 15 bp, Homo sapiens
tgaacttttcttttt

SEQ ID NO: 960427 - DNA, 15 bp, Homo sapiens
gaacttttctttttt

SEQ ID NO: 960428 - DNA, 15 bp, Homo sapiens
aacttttcttttttt

SEQ ID NO: 960429 - DNA, 15 bp, Homo sapiens
acttttcttttttta

SEQ ID NO: 960430 - DNA, 15 bp, Homo sapiens
cttttctttttttat

SEQ ID NO: 960431 - DNA, 15 bp, Homo sapiens
ttttctttttttatc

SEQ ID NO: 960432 - DNA, 15 bp, Homo sapiens
tttctttttttatct

SEQ ID NO: 960433 - DNA, 15 bp, Homo sapiens
ttctttttttatctt

SEQ ID NO: 960434 - DNA, 15 bp, Homo sapiens
tctttttttatcttg

SEQ ID NO: 960435 - DNA, 15 bp, Homo sapiens
ctttttttatcttgt

SEQ ID NO: 960436 - DNA, 15 bp, Homo sapiens
tttttttatcttgta

SEQ ID NO: 960437 - DNA, 15 bp, Homo sapiens
ttttttatcttgtat

SEQ ID NO: 960438 - DNA, 15 bp, Homo sapiens
tttttatcttgtatt

SEQ ID NO: 960439 - DNA, 15 bp, Homo sapiens
ttttatcttgtattt

SEQ ID NO: 960440 - DNA, 15 bp, Homo sapiens
tttatcttgtatttt

SEQ ID NO: 960441 - DNA, 15 bp, Homo sapiens
ttatcttgtattttt

SEQ ID NO: 960442 - DNA, 15 bp, Homo sapiens
tatcttgtattttta

SEQ ID NO: 960443 - DNA, 15 bp, Homo sapiens
atcttgtatttttat

SEQ ID NO: 960444 - DNA, 15 bp, Homo sapiens
tcttgtatttttata

SEQ ID NO: 960445 - DNA, 15 bp, Homo sapiens
cttgtatttttatat

SEQ ID NO: 960446 - DNA, 15 bp, Homo sapiens
ttgtatttttatata

SEQ ID NO: 960447 - DNA, 15 bp, Homo sapiens
tgtatttttatatag

SEQ ID NO: 960448 - DNA, 15 bp, Homo sapiens
gtatttttatatagt

SEQ ID NO: 960449 - DNA, 15 bp, Homo sapiens
tatttttatatagta

SEQ ID NO: 960450 - DNA, 15 bp, Homo sapiens
atttttatatagtac

SEQ ID NO: 960451 - DNA, 15 bp, Homo sapiens
tttttatatagtaca

SEQ ID NO: 960452 - DNA, 15 bp, Homo sapiens
ttttatatagtacaa

SEQ ID NO: 960453 - DNA, 15 bp, Homo sapiens
tttatatagtacaac

SEQ ID NO: 960454 - DNA, 15 bp, Homo sapiens
ttatatagtacaaca

SEQ ID NO: 960455 - DNA, 15 bp, Homo sapiens
tatatagtacaacag

SEQ ID NO: 960456 - DNA, 15 bp, Homo sapiens
atatagtacaacaga

SEQ ID NO: 960457 - DNA, 15 bp, Homo sapiens
tatagtacaacagaa

SEQ ID NO: 960458 - DNA, 15 bp, Homo sapiens
atagtacaacagaaa

SEQ ID NO: 960459 - DNA, 15 bp, Homo sapiens
tagtacaacagaaaa

SEQ ID NO: 960460 - DNA, 15 bp, Homo sapiens
agtacaacagaaaaa

SEQ ID NO: 960461 - DNA, 15 bp, Homo sapiens
gtacaacagaaaaaa

SEQ ID NO: 960462 - DNA, 15 bp, Homo sapiens
tacaacagaaaaaag

SEQ ID NO: 960463 - DNA, 15 bp, Homo sapiens
acaacagaaaaaaga

SEQ ID NO: 960464 - DNA, 15 bp, Homo sapiens
caacagaaaaaagat

SEQ ID NO: 960465 - DNA, 15 bp, Homo sapiens
aacagaaaaaagatg

SEQ ID NO: 960466 - DNA, 15 bp, Homo sapiens
acagaaaaaagatga

SEQ ID NO: 960467 - DNA, 15 bp, Homo sapiens
cagaaaaaagatgaa

SEQ ID NO: 960468 - DNA, 15 bp, Homo sapiens
agaaaaaagatgaaa

SEQ ID NO: 960469 - DNA, 15 bp, Homo sapiens
gaaaaaagatgaaat

SEQ ID NO: 960470 - DNA, 15 bp, Homo sapiens
aaaaaagatgaaatg

SEQ ID NO: 960471 - DNA, 15 bp, Homo sapiens
aaaaagatgaaatgt

SEQ ID NO: 960472 - DNA, 15 bp, Homo sapiens
aaaagatgaaatgtg

SEQ ID NO: 960473 - DNA, 15 bp, Homo sapiens
aaagatgaaatgtga

SEQ ID NO: 960474 - DNA, 15 bp, Homo sapiens
aagatgaaatgtgaa

SEQ ID NO: 960475 - DNA, 15 bp, Homo sapiens
agatgaaatgtgaat

SEQ ID NO: 960476 - DNA, 15 bp, Homo sapiens
gatgaaatgtgaata

SEQ ID NO: 960477 - DNA, 15 bp, Homo sapiens
atgaaatgtgaatag

SEQ ID NO: 960478 - DNA, 15 bp, Homo sapiens
tgaaatgtgaatagt

SEQ ID NO: 960479 - DNA, 15 bp, Homo sapiens
gaaatgtgaatagta

SEQ ID NO: 960480 - DNA, 15 bp, Homo sapiens
aaatgtgaatagtaa

SEQ ID NO: 960481 - DNA, 15 bp, Homo sapiens
aatgtgaatagtaaa

SEQ ID NO: 960482 - DNA, 15 bp, Homo sapiens
atgtgaatagtaaag

SEQ ID NO: 960483 - DNA, 15 bp, Homo sapiens
tgtgaatagtaaaga

SEQ ID NO: 960484 - DNA, 15 bp, Homo sapiens
gtgaatagtaaagag

SEQ ID NO: 960485 - DNA, 15 bp, Homo sapiens
tgaatagtaaagagt

SEQ ID NO: 960486 - DNA, 15 bp, Homo sapiens
gaatagtaaagagtc

SEQ ID NO: 960487 - DNA, 15 bp, Homo sapiens
aatagtaaagagtct

SEQ ID NO: 960488 - DNA, 15 bp, Homo sapiens
atagtaaagagtctg

SEQ ID NO: 960489 - DNA, 15 bp, Homo sapiens
tagtaaagagtctgt

SEQ ID NO: 960490 - DNA, 15 bp, Homo sapiens
agtaaagagtctgtg

SEQ ID NO: 960491 - DNA, 15 bp, Homo sapiens
gtaaagagtctgtga

SEQ ID NO: 960492 - DNA, 15 bp, Homo sapiens
taaagagtctgtgat

SEQ ID NO: 960493 - DNA, 15 bp, Homo sapiens
aaagagtctgtgatt

SEQ ID NO: 960494 - DNA, 15 bp, Homo sapiens
aagagtctgtgattg

SEQ ID NO: 960495 - DNA, 15 bp, Homo sapiens
agagtctgtgattgt

SEQ ID NO: 960496 - DNA, 15 bp, Homo sapiens
gagtctgtgattgtt

SEQ ID NO: 960497 - DNA, 15 bp, Homo sapiens
agtctgtgattgttg

SEQ ID NO: 960498 - DNA, 15 bp, Homo sapiens
gtctgtgattgttgt

SEQ ID NO: 960499 - DNA, 15 bp, Homo sapiens
tctgtgattgttgtt

SEQ ID NO: 960500 - DNA, 15 bp, Homo sapiens
ctgtgattgttgttc

SEQ ID NO: 960501 - DNA, 15 bp, Homo sapiens
tgtgattgttgttca

SEQ ID NO: 960502 - DNA, 15 bp, Homo sapiens
gtgattgttgttcat

SEQ ID NO: 960503 - DNA, 15 bp, Homo sapiens
tgattgttgttcata

SEQ ID NO: 960504 - DNA, 15 bp, Homo sapiens
gattgttgttcatag

SEQ ID NO: 960505 - DNA, 15 bp, Homo sapiens
attgttgttcatagg

SEQ ID NO: 960506 - DNA, 15 bp, Homo sapiens
ttgttgttcataggg

SEQ ID NO: 960507 - DNA, 15 bp, Homo sapiens
tgttgttcatagggc

SEQ ID NO: 960508 - DNA, 15 bp, Homo sapiens
gttgttcatagggcc

SEQ ID NO: 960509 - DNA, 15 bp, Homo sapiens
ttgttcatagggccc

SEQ ID NO: 960510 - DNA, 15 bp, Homo sapiens
tgttcatagggccca

SEQ ID NO: 960511 - DNA, 15 bp, Homo sapiens
gttcatagggcccac

SEQ ID NO: 960512 - DNA, 15 bp, Homo sapiens
ttcatagggcccacc

SEQ ID NO: 960513 - DNA, 15 bp, Homo sapiens
tcatagggcccacca

SEQ ID NO: 960514 - DNA, 15 bp, Homo sapiens
catagggcccaccaa

SEQ ID NO: 960515 - DNA, 15 bp, Homo sapiens
atagggcccaccaag

SEQ ID NO: 960516 - DNA, 15 bp, Homo sapiens
tagggcccaccaagc

SEQ ID NO: 960517 - DNA, 15 bp, Homo sapiens
agggcccaccaagct

SEQ ID NO: 960518 - DNA, 15 bp, Homo sapiens
gggcccaccaagctc

SEQ ID NO: 960519 - DNA, 15 bp, Homo sapiens
ggcccaccaagctct

SEQ ID NO: 960520 - DNA, 15 bp, Homo sapiens
gcccaccaagctctt

SEQ ID NO: 960521 - DNA, 15 bp, Homo sapiens
cccaccaagctcttc

SEQ ID NO: 960522 - DNA, 15 bp, Homo sapiens
ccaccaagctcttcc

SEQ ID NO: 960523 - DNA, 15 bp, Homo sapiens
caccaagctcttcct

SEQ ID NO: 960524 - DNA, 15 bp, Homo sapiens
accaagctcttcctc

SEQ ID NO: 960525 - DNA, 15 bp, Homo sapiens
ccaagctcttcctcg

SEQ ID NO: 960526 - DNA, 15 bp, Homo sapiens
caagctcttcctcga

SEQ ID NO: 960527 - DNA, 15 bp, Homo sapiens
aagctcttcctcgag

SEQ ID NO: 960528 - DNA, 15 bp, Homo sapiens
agctcttcctcgaga

SEQ ID NO: 960529 - DNA, 15 bp, Homo sapiens
gctcttcctcgagat

SEQ ID NO: 960530 - DNA, 15 bp, Homo sapiens
ctcttcctcgagatt

SEQ ID NO: 960531 - DNA, 15 bp, Homo sapiens
tcttcctcgagattc

SEQ ID NO: 960532 - DNA, 15 bp, Homo sapiens
cttcctcgagattct

SEQ ID NO: 960533 - DNA, 15 bp, Homo sapiens
ttcctcgagattctg

SEQ ID NO: 960534 - DNA, 15 bp, Homo sapiens
tcctcgagattctgt

SEQ ID NO: 960535 - DNA, 15 bp, Homo sapiens
cctcgagattctgtt

SEQ ID NO: 960536 - DNA, 15 bp, Homo sapiens
ctcgagattctgttg

SEQ ID NO: 960537 - DNA, 15 bp, Homo sapiens
tcgagattctgttgt

SEQ ID NO: 960538 - DNA, 15 bp, Homo sapiens
cgagattctgttgta

SEQ ID NO: 960539 - DNA, 15 bp, Homo sapiens
gagattctgttgtag

SEQ ID NO: 960540 - DNA, 15 bp, Homo sapiens
agattctgttgtaga

SEQ ID NO: 960541 - DNA, 15 bp, Homo sapiens
gattctgttgtagaa

SEQ ID NO: 960542 - DNA, 15 bp, Homo sapiens
attctgttgtagaag

SEQ ID NO: 960543 - DNA, 15 bp, Homo sapiens
ttctgttgtagaaga

SEQ ID NO: 960544 - DNA, 15 bp, Homo sapiens
tctgttgtagaagat

SEQ ID NO: 960545 - DNA, 15 bp, Homo sapiens
ctgttgtagaagatt

SEQ ID NO: 960546 - DNA, 15 bp, Homo sapiens
tgttgtagaagattt

SEQ ID NO: 960547 - DNA, 15 bp, Homo sapiens
gttgtagaagattta

SEQ ID NO: 960548 - DNA, 15 bp, Homo sapiens
ttgtagaagatttac

SEQ ID NO: 960549 - DNA, 15 bp, Homo sapiens
tgtagaagatttaca

SEQ ID NO: 960550 - DNA, 15 bp, Homo sapiens
gtagaagatttacat

SEQ ID NO: 960551 - DNA, 15 bp, Homo sapiens
tagaagatttacatt

SEQ ID NO: 960552 - DNA, 15 bp, Homo sapiens
agaagatttacattt

SEQ ID NO: 960553 - DNA, 15 bp, Homo sapiens
gaagatttacattta

SEQ ID NO: 960554 - DNA, 15 bp, Homo sapiens
aagatttacatttac

SEQ ID NO: 960555 - DNA, 15 bp, Homo sapiens
agatttacatttaca

SEQ ID NO: 960556 - DNA, 15 bp, Homo sapiens
gatttacatttacaa

SEQ ID NO: 960557 - DNA, 15 bp, Homo sapiens
atttacatttacaaa

SEQ ID NO: 960558 - DNA, 15 bp, Homo sapiens
tttacatttacaaaa

SEQ ID NO: 960559 - DNA, 15 bp, Homo sapiens
ttacatttacaaaat

SEQ ID NO: 960560 - DNA, 15 bp, Homo sapiens
tacatttacaaaata

SEQ ID NO: 960561 - DNA, 15 bp, Homo sapiens
acatttacaaaatag

SEQ ID NO: 960562 - DNA, 15 bp, Homo sapiens
catttacaaaataga

SEQ ID NO: 960563 - DNA, 15 bp, Homo sapiens
atttacaaaatagat

SEQ ID NO: 960564 - DNA, 15 bp, Homo sapiens
tttacaaaatagata

SEQ ID NO: 960565 - DNA, 15 bp, Homo sapiens
ttacaaaatagatac

SEQ ID NO: 960566 - DNA, 15 bp, Homo sapiens
tacaaaatagatacc

SEQ ID NO: 960567 - DNA, 15 bp, Homo sapiens
acaaaatagatacct

SEQ ID NO: 960568 - DNA, 15 bp, Homo sapiens
caaaatagatacctc

SEQ ID NO: 960569 - DNA, 15 bp, Homo sapiens
aaaatagatacctcc

SEQ ID NO: 960570 - DNA, 15 bp, Homo sapiens
aaatagatacctcca

SEQ ID NO: 960571 - DNA, 15 bp, Homo sapiens
aatagatacctccaa

SEQ ID NO: 960572 - DNA, 15 bp, Homo sapiens
atagatacctccaag

SEQ ID NO: 960573 - DNA, 15 bp, Homo sapiens
tagatacctccaaga

SEQ ID NO: 960574 - DNA, 15 bp, Homo sapiens
agatacctccaagaa

SEQ ID NO: 960575 - DNA, 15 bp, Homo sapiens
gatacctccaagaaa

SEQ ID NO: 960576 - DNA, 15 bp, Homo sapiens
atacctccaagaaaa

SEQ ID NO: 960577 - DNA, 15 bp, Homo sapiens
tacctccaagaaaaa

SEQ ID NO: 960578 - DNA, 15 bp, Homo sapiens
acctccaagaaaaac

SEQ ID NO: 960579 - DNA, 15 bp, Homo sapiens
cctccaagaaaaact

SEQ ID NO: 960580 - DNA, 15 bp, Homo sapiens
ctccaagaaaaactt

SEQ ID NO: 960581 - DNA, 15 bp, Homo sapiens
tccaagaaaaacttc

SEQ ID NO: 960582 - DNA, 15 bp, Homo sapiens
ccaagaaaaacttca

SEQ ID NO: 960583 - DNA, 15 bp, Homo sapiens
caagaaaaacttcat

SEQ ID NO: 960584 - DNA, 15 bp, Homo sapiens
aagaaaaacttcatg

SEQ ID NO: 960585 - DNA, 15 bp, Homo sapiens
agaaaaacttcatgc

SEQ ID NO: 960586 - DNA, 15 bp, Homo sapiens
gaaaaacttcatgct

SEQ ID NO: 960587 - DNA, 15 bp, Homo sapiens
aaaaacttcatgctt

SEQ ID NO: 960588 - DNA, 15 bp, Homo sapiens
aaaacttcatgcttt

SEQ ID NO: 960589 - DNA, 15 bp, Homo sapiens
aaacttcatgcttta

SEQ ID NO: 960590 - DNA, 15 bp, Homo sapiens
aacttcatgctttag

SEQ ID NO: 960591 - DNA, 15 bp, Homo sapiens
acttcatgctttaga

SEQ ID NO: 960592 - DNA, 15 bp, Homo sapiens
cttcatgctttagaa

SEQ ID NO: 960593 - DNA, 15 bp, Homo sapiens
ttcatgctttagaaa

SEQ ID NO: 960594 - DNA, 15 bp, Homo sapiens
tcatgctttagaaaa

SEQ ID NO: 960595 - DNA, 15 bp, Homo sapiens
catgctttagaaaaa

SEQ ID NO: 960596 - DNA, 15 bp, Homo sapiens
atgctttagaaaaac

SEQ ID NO: 960597 - DNA, 15 bp, Homo sapiens
tgctttagaaaaaca

SEQ ID NO: 960598 - DNA, 15 bp, Homo sapiens
gctttagaaaaacag

SEQ ID NO: 960599 - DNA, 15 bp, Homo sapiens
ctttagaaaaacagt

SEQ ID NO: 960600 - DNA, 15 bp, Homo sapiens
tttagaaaaacagtt

SEQ ID NO: 960601 - DNA, 15 bp, Homo sapiens
ttagaaaaacagttt

SEQ ID NO: 960602 - DNA, 15 bp, Homo sapiens
tagaaaaacagtttt

SEQ ID NO: 960603 - DNA, 15 bp, Homo sapiens
agaaaaacagttttc

SEQ ID NO: 960604 - DNA, 15 bp, Homo sapiens
gaaaaacagttttca

SEQ ID NO: 960605 - DNA, 15 bp, Homo sapiens
aaaaacagttttcaa

SEQ ID NO: 960606 - DNA, 15 bp, Homo sapiens
aaaacagttttcaaa

SEQ ID NO: 960607 - DNA, 15 bp, Homo sapiens
aaacagttttcaaag

SEQ ID NO: 960608 - DNA, 15 bp, Homo sapiens
aacagttttcaaagg

SEQ ID NO: 960609 - DNA, 15 bp, Homo sapiens
acagttttcaaagga

SEQ ID NO: 960610 - DNA, 15 bp, Homo sapiens
cagttttcaaaggat

SEQ ID NO: 960611 - DNA, 15 bp, Homo sapiens
agttttcaaaggata

SEQ ID NO: 960612 - DNA, 15 bp, Homo sapiens
gttttcaaaggatac

SEQ ID NO: 960613 - DNA, 15 bp, Homo sapiens
ttttcaaaggataca

SEQ ID NO: 960614 - DNA, 15 bp, Homo sapiens
tttcaaaggatacat

SEQ ID NO: 960615 - DNA, 15 bp, Homo sapiens
ttcaaaggatacata

SEQ ID NO: 960616 - DNA, 15 bp, Homo sapiens
tcaaaggatacatat

SEQ ID NO: 960617 - DNA, 15 bp, Homo sapiens
caaaggatacatatt

SEQ ID NO: 960618 - DNA, 15 bp, Homo sapiens
aaaggatacatattc

SEQ ID NO: 960619 - DNA, 15 bp, Homo sapiens
aaggatacatattct

SEQ ID NO: 960620 - DNA, 15 bp, Homo sapiens
aggatacatattcta

SEQ ID NO: 960621 - DNA, 15 bp, Homo sapiens
ggatacatattctaa

SEQ ID NO: 960622 - DNA, 15 bp, Homo sapiens
gatacatattctaag

SEQ ID NO: 960623 - DNA, 15 bp, Homo sapiens
atacatattctaagc

SEQ ID NO: 960624 - DNA, 15 bp, Homo sapiens
tacatattctaagcc

SEQ ID NO: 960625 - DNA, 15 bp, Homo sapiens
acatattctaagcct

SEQ ID NO: 960626 - DNA, 15 bp, Homo sapiens
catattctaagcctt

SEQ ID NO: 960627 - DNA, 15 bp, Homo sapiens
atattctaagccttc

SEQ ID NO: 960628 - DNA, 15 bp, Homo sapiens
tattctaagccttca

SEQ ID NO: 960629 - DNA, 15 bp, Homo sapiens
attctaagccttcag

SEQ ID NO: 960630 - DNA, 15 bp, Homo sapiens
ttctaagccttcagt

SEQ ID NO: 960631 - DNA, 15 bp, Homo sapiens
tctaagccttcagta

SEQ ID NO: 960632 - DNA, 15 bp, Homo sapiens
ctaagccttcagtaa

SEQ ID NO: 960633 - DNA, 15 bp, Homo sapiens
taagccttcagtaag

SEQ ID NO: 960634 - DNA, 15 bp, Homo sapiens
aagccttcagtaagt

SEQ ID NO: 960635 - DNA, 15 bp, Homo sapiens
agccttcagtaagtg

SEQ ID NO: 960636 - DNA, 15 bp, Homo sapiens
gccttcagtaagtgt

SEQ ID NO: 960637 - DNA, 15 bp, Homo sapiens
ccttcagtaagtgta

SEQ ID NO: 960638 - DNA, 15 bp, Homo sapiens
cttcagtaagtgtat

SEQ ID NO: 960639 - DNA, 15 bp, Homo sapiens
ttcagtaagtgtata

SEQ ID NO: 960640 - DNA, 15 bp, Homo sapiens
tcagtaagtgtatat

SEQ ID NO: 960641 - DNA, 15 bp, Homo sapiens
cagtaagtgtatatc

SEQ ID NO: 960642 - DNA, 15 bp, Homo sapiens
agtaagtgtatatct

SEQ ID NO: 960643 - DNA, 15 bp, Homo sapiens
gtaagtgtatatctt

SEQ ID NO: 960644 - DNA, 15 bp, Homo sapiens
taagtgtatatcttt

SEQ ID NO: 960645 - DNA, 15 bp, Homo sapiens
aagtgtatatctttt

SEQ ID NO: 960646 - DNA, 15 bp, Homo sapiens
agtgtatatctttta

SEQ ID NO: 960647 - DNA, 15 bp, Homo sapiens
gtgtatatcttttat

SEQ ID NO: 960648 - DNA, 15 bp, Homo sapiens
tgtatatcttttatt

SEQ ID NO: 960649 - DNA, 15 bp, Homo sapiens
gtatatcttttatta

SEQ ID NO: 960650 - DNA, 15 bp, Homo sapiens
tatatcttttattat

SEQ ID NO: 960651 - DNA, 15 bp, Homo sapiens
atatcttttattatt

SEQ ID NO: 960652 - DNA, 15 bp, Homo sapiens
tatcttttattattt

SEQ ID NO: 960653 - DNA, 15 bp, Homo sapiens
atcttttattatttt

SEQ ID NO: 960654 - DNA, 15 bp, Homo sapiens
tcttttattattttt

SEQ ID NO: 960655 - DNA, 15 bp, Homo sapiens
cttttattatttttt

SEQ ID NO: 960656 - DNA, 15 bp, Homo sapiens
ttttattattttttt

SEQ ID NO: 960657 - DNA, 15 bp, Homo sapiens
tttattatttttttc

SEQ ID NO: 960658 - DNA, 15 bp, Homo sapiens
ttattatttttttct

SEQ ID NO: 960659 - DNA, 15 bp, Homo sapiens
tattatttttttctt

SEQ ID NO: 960660 - DNA, 15 bp, Homo sapiens
attatttttttcttt

SEQ ID NO: 960661 - DNA, 15 bp, Homo sapiens
ttatttttttctttt

SEQ ID NO: 960662 - DNA, 15 bp, Homo sapiens
tatttttttcttttt

SEQ ID NO: 960663 - DNA, 15 bp, Homo sapiens
atttttttctttttt

SEQ ID NO: 960664 - DNA, 15 bp, Homo sapiens
tttttttcttttttc

SEQ ID NO: 960665 - DNA, 15 bp, Homo sapiens
ttttttcttttttcc

SEQ ID NO: 960666 - DNA, 15 bp, Homo sapiens
tttttcttttttcca

SEQ ID NO: 960667 - DNA, 15 bp, Homo sapiens
ttttcttttttccat

SEQ ID NO: 960668 - DNA, 15 bp, Homo sapiens
tttcttttttccatg

SEQ ID NO: 960669 - DNA, 15 bp, Homo sapiens
ttcttttttccatgt

SEQ ID NO: 960670 - DNA, 15 bp, Homo sapiens
tcttttttccatgtt

SEQ ID NO: 960671 - DNA, 15 bp, Homo sapiens
cttttttccatgtta

SEQ ID NO: 960672 - DNA, 15 bp, Homo sapiens
ttttttccatgttaa

SEQ ID NO: 960673 - DNA, 15 bp, Homo sapiens
tttttccatgttaaa

SEQ ID NO: 960674 - DNA, 15 bp, Homo sapiens
ttttccatgttaaaa

SEQ ID NO: 960675 - DNA, 15 bp, Homo sapiens
tttccatgttaaaat

SEQ ID NO: 960676 - DNA, 15 bp, Homo sapiens
ttccatgttaaaatg

SEQ ID NO: 960677 - DNA, 15 bp, Homo sapiens
tccatgttaaaatgc

SEQ ID NO: 960678 - DNA, 15 bp, Homo sapiens
ccatgttaaaatgca

SEQ ID NO: 960679 - DNA, 15 bp, Homo sapiens
catgttaaaatgcat

SEQ ID NO: 960680 - DNA, 15 bp, Homo sapiens
atgttaaaatgcatg

SEQ ID NO: 960681 - DNA, 15 bp, Homo sapiens
tgttaaaatgcatga

SEQ ID NO: 960682 - DNA, 15 bp, Homo sapiens
gttaaaatgcatgaa

SEQ ID NO: 960683 - DNA, 15 bp, Homo sapiens
ttaaaatgcatgaaa

SEQ ID NO: 960684 - DNA, 15 bp, Homo sapiens
taaaatgcatgaaag

SEQ ID NO: 960685 - DNA, 15 bp, Homo sapiens
aaaatgcatgaaagt

SEQ ID NO: 960686 - DNA, 15 bp, Homo sapiens
aaatgcatgaaagtg

SEQ ID NO: 960687 - DNA, 15 bp, Homo sapiens
aatgcatgaaagtga

SEQ ID NO: 960688 - DNA, 15 bp, Homo sapiens
atgcatgaaagtgaa

SEQ ID NO: 960689 - DNA, 15 bp, Homo sapiens
tgcatgaaagtgaaa

SEQ ID NO: 960690 - DNA, 15 bp, Homo sapiens
gcatgaaagtgaaat

SEQ ID NO: 960691 - DNA, 15 bp, Homo sapiens
catgaaagtgaaatc

SEQ ID NO: 960692 - DNA, 15 bp, Homo sapiens
atgaaagtgaaatca

SEQ ID NO: 960693 - DNA, 15 bp, Homo sapiens
tgaaagtgaaatcaa

SEQ ID NO: 960694 - DNA, 15 bp, Homo sapiens
gaaagtgaaatcaac

SEQ ID NO: 960695 - DNA, 15 bp, Homo sapiens
aaagtgaaatcaact

SEQ ID NO: 960696 - DNA, 15 bp, Homo sapiens
aagtgaaatcaactt

SEQ ID NO: 960697 - DNA, 15 bp, Homo sapiens
agtgaaatcaacttc

SEQ ID NO: 960698 - DNA, 15 bp, Homo sapiens
gtgaaatcaacttct

SEQ ID NO: 960699 - DNA, 15 bp, Homo sapiens
tgaaatcaacttctt

SEQ ID NO: 960700 - DNA, 15 bp, Homo sapiens
gaaatcaacttcttt

SEQ ID NO: 960701 - DNA, 15 bp, Homo sapiens
aaatcaacttctttc

SEQ ID NO: 960702 - DNA, 15 bp, Homo sapiens
aatcaacttctttct

SEQ ID NO: 960703 - DNA, 15 bp, Homo sapiens
atcaacttctttctt

SEQ ID NO: 960704 - DNA, 15 bp, Homo sapiens
tcaacttctttctta

SEQ ID NO: 960705 - DNA, 15 bp, Homo sapiens
caacttctttcttaa

SEQ ID NO: 960706 - DNA, 15 bp, Homo sapiens
aacttctttcttaat

SEQ ID NO: 960707 - DNA, 15 bp, Homo sapiens
acttctttcttaatc

SEQ ID NO: 960708 - DNA, 15 bp, Homo sapiens
cttctttcttaatct

SEQ ID NO: 960709 - DNA, 15 bp, Homo sapiens
ttctttcttaatctg

SEQ ID NO: 960710 - DNA, 15 bp, Homo sapiens
tctttcttaatctgg

SEQ ID NO: 960711 - DNA, 15 bp, Homo sapiens
ctttcttaatctggc

SEQ ID NO: 960712 - DNA, 15 bp, Homo sapiens
tttcttaatctggcc

SEQ ID NO: 960713 - DNA, 15 bp, Homo sapiens
ttcttaatctggcca

SEQ ID NO: 960714 - DNA, 15 bp, Homo sapiens
tcttaatctggccaa

SEQ ID NO: 960715 - DNA, 15 bp, Homo sapiens
cttaatctggccaaa

SEQ ID NO: 960716 - DNA, 15 bp, Homo sapiens
ttaatctggccaaaa

SEQ ID NO: 960717 - DNA, 15 bp, Homo sapiens
taatctggccaaaag

SEQ ID NO: 960718 - DNA, 15 bp, Homo sapiens
aatctggccaaaagc

SEQ ID NO: 960719 - DNA, 15 bp, Homo sapiens
atctggccaaaagca

SEQ ID NO: 960720 - DNA, 15 bp, Homo sapiens
tctggccaaaagcat

SEQ ID NO: 960721 - DNA, 15 bp, Homo sapiens
ctggccaaaagcatt

SEQ ID NO: 960722 - DNA, 15 bp, Homo sapiens
tggccaaaagcatta

SEQ ID NO: 960723 - DNA, 15 bp, Homo sapiens
ggccaaaagcattac

SEQ ID NO: 960724 - DNA, 15 bp, Homo sapiens
gccaaaagcattaca

SEQ ID NO: 960725 - DNA, 15 bp, Homo sapiens
ccaaaagcattacat

SEQ ID NO: 960726 - DNA, 15 bp, Homo sapiens
caaaagcattacatc

SEQ ID NO: 960727 - DNA, 15 bp, Homo sapiens
aaaagcattacatct

SEQ ID NO: 960728 - DNA, 15 bp, Homo sapiens
aaagcattacatctt

SEQ ID NO: 960729 - DNA, 15 bp, Homo sapiens
aagcattacatcttt

SEQ ID NO: 960730 - DNA, 15 bp, Homo sapiens
agcattacatctttc

SEQ ID NO: 960731 - DNA, 15 bp, Homo sapiens
gcattacatctttct

SEQ ID NO: 960732 - DNA, 15 bp, Homo sapiens
cattacatctttctc

SEQ ID NO: 960733 - DNA, 15 bp, Homo sapiens
attacatctttctca

SEQ ID NO: 960734 - DNA, 15 bp, Homo sapiens
ttacatctttctcat

SEQ ID NO: 960735 - DNA, 15 bp, Homo sapiens
tacatctttctcatt

SEQ ID NO: 960736 - DNA, 15 bp, Homo sapiens
acatctttctcatta

SEQ ID NO: 960737 - DNA, 15 bp, Homo sapiens
catctttctcattaa

SEQ ID NO: 960738 - DNA, 15 bp, Homo sapiens
atctttctcattaat

SEQ ID NO: 960739 - DNA, 15 bp, Homo sapiens
tctttctcattaata

SEQ ID NO: 960740 - DNA, 15 bp, Homo sapiens
ctttctcattaatag

SEQ ID NO: 960741 - DNA, 15 bp, Homo sapiens
tttctcattaatagt

SEQ ID NO: 960742 - DNA, 15 bp, Homo sapiens
ttctcattaatagta

SEQ ID NO: 960743 - DNA, 15 bp, Homo sapiens
tctcattaatagtaa

SEQ ID NO: 960744 - DNA, 15 bp, Homo sapiens
ctcattaatagtaat

SEQ ID NO: 960745 - DNA, 15 bp, Homo sapiens
tcattaatagtaata

SEQ ID NO: 960746 - DNA, 15 bp, Homo sapiens
cattaatagtaatac

SEQ ID NO: 960747 - DNA, 15 bp, Homo sapiens
attaatagtaataca

SEQ ID NO: 960748 - DNA, 15 bp, Homo sapiens
ttaatagtaatacag

SEQ ID NO: 960749 - DNA, 15 bp, Homo sapiens
taatagtaatacagt

SEQ ID NO: 960750 - DNA, 15 bp, Homo sapiens
aatagtaatacagta

SEQ ID NO: 960751 - DNA, 15 bp, Homo sapiens
atagtaatacagtaa

SEQ ID NO: 960752 - DNA, 15 bp, Homo sapiens
tagtaatacagtaaa

SEQ ID NO: 960753 - DNA, 15 bp, Homo sapiens
agtaatacagtaaat

SEQ ID NO: 960754 - DNA, 15 bp, Homo sapiens
gtaatacagtaaatt

SEQ ID NO: 960755 - DNA, 15 bp, Homo sapiens
taatacagtaaattc

SEQ ID NO: 960756 - DNA, 15 bp, Homo sapiens
aatacagtaaattca

SEQ ID NO: 960757 - DNA, 15 bp, Homo sapiens
atacagtaaattcaa

SEQ ID NO: 960758 - DNA, 15 bp, Homo sapiens
tacagtaaattcaac

SEQ ID NO: 960759 - DNA, 15 bp, Homo sapiens
acagtaaattcaact

SEQ ID NO: 960760 - DNA, 15 bp, Homo sapiens
cagtaaattcaactt

SEQ ID NO: 960761 - DNA, 15 bp, Homo sapiens
agtaaattcaacttt

SEQ ID NO: 960762 - DNA, 15 bp, Homo sapiens
gtaaattcaactttt

SEQ ID NO: 960763 - DNA, 15 bp, Homo sapiens
taaattcaactttta

SEQ ID NO: 960764 - DNA, 15 bp, Homo sapiens
aaattcaacttttat

SEQ ID NO: 960765 - DNA, 15 bp, Homo sapiens
aattcaacttttatt

SEQ ID NO: 960766 - DNA, 15 bp, Homo sapiens
attcaacttttattt

SEQ ID NO: 960767 - DNA, 15 bp, Homo sapiens
ttcaacttttatttt

SEQ ID NO: 960768 - DNA, 15 bp, Homo sapiens
tcaacttttattttt

SEQ ID NO: 960769 - DNA, 15 bp, Homo sapiens
caacttttattttta

SEQ ID NO: 960770 - DNA, 15 bp, Homo sapiens
aacttttatttttaa

SEQ ID NO: 960771 - DNA, 15 bp, Homo sapiens
acttttatttttaac

SEQ ID NO: 960772 - DNA, 15 bp, Homo sapiens
cttttatttttaaca

SEQ ID NO: 960773 - DNA, 15 bp, Homo sapiens
ttttatttttaacag

SEQ ID NO: 960774 - DNA, 15 bp, Homo sapiens
tttatttttaacagg

SEQ ID NO: 960775 - DNA, 15 bp, Homo sapiens
ttatttttaacaggt

SEQ ID NO: 960776 - DNA, 15 bp, Homo sapiens
tatttttaacaggta

SEQ ID NO: 960777 - DNA, 15 bp, Homo sapiens
atttttaacaggtag

SEQ ID NO: 960778 - DNA, 15 bp, Homo sapiens
tttttaacaggtagt

SEQ ID NO: 960779 - DNA, 15 bp, Homo sapiens
ttttaacaggtagtg

SEQ ID NO: 960780 - DNA, 15 bp, Homo sapiens
tttaacaggtagtga

SEQ ID NO: 960781 - DNA, 15 bp, Homo sapiens
ttaacaggtagtgat

SEQ ID NO: 960782 - DNA, 15 bp, Homo sapiens
taacaggtagtgatg

SEQ ID NO: 960783 - DNA, 15 bp, Homo sapiens
aacaggtagtgatgt

SEQ ID NO: 960784 - DNA, 15 bp, Homo sapiens
acaggtagtgatgtg

SEQ ID NO: 960785 - DNA, 15 bp, Homo sapiens
caggtagtgatgtgt

SEQ ID NO: 960786 - DNA, 15 bp, Homo sapiens
aggtagtgatgtgta

SEQ ID NO: 960787 - DNA, 15 bp, Homo sapiens
ggtagtgatgtgtaa

SEQ ID NO: 960788 - DNA, 15 bp, Homo sapiens
gtagtgatgtgtaat

SEQ ID NO: 960789 - DNA, 15 bp, Homo sapiens
tagtgatgtgtaata

SEQ ID NO: 960790 - DNA, 15 bp, Homo sapiens
agtgatgtgtaataa

SEQ ID NO: 960791 - DNA, 15 bp, Homo sapiens
gtgatgtgtaataat

SEQ ID NO: 960792 - DNA, 15 bp, Homo sapiens
tgatgtgtaataatt

SEQ ID NO: 960793 - DNA, 15 bp, Homo sapiens
gatgtgtaataattt

SEQ ID NO: 960794 - DNA, 15 bp, Homo sapiens
atgtgtaataattta

SEQ ID NO: 960795 - DNA, 15 bp, Homo sapiens
tgtgtaataatttat

SEQ ID NO: 960796 - DNA, 15 bp, Homo sapiens
gtgtaataatttatt

SEQ ID NO: 960797 - DNA, 15 bp, Homo sapiens
tgtaataatttattt

SEQ ID NO: 960798 - DNA, 15 bp, Homo sapiens
gtaataatttattta

SEQ ID NO: 960799 - DNA, 15 bp, Homo sapiens
taataatttatttaa

SEQ ID NO: 960800 - DNA, 15 bp, Homo sapiens
aataatttatttaat

SEQ ID NO: 960801 - DNA, 15 bp, Homo sapiens
ataatttatttaatc

SEQ ID NO: 960802 - DNA, 15 bp, Homo sapiens
taatttatttaatcc

SEQ ID NO: 960803 - DNA, 15 bp, Homo sapiens
aatttatttaatcct

SEQ ID NO: 960804 - DNA, 15 bp, Homo sapiens
atttatttaatcctt

SEQ ID NO: 960805 - DNA, 15 bp, Homo sapiens
tttatttaatccttt

SEQ ID NO: 960806 - DNA, 15 bp, Homo sapiens
ttatttaatcctttt

SEQ ID NO: 960807 - DNA, 15 bp, Homo sapiens
tatttaatccttttt

SEQ ID NO: 960808 - DNA, 15 bp, Homo sapiens
atttaatccttttta

SEQ ID NO: 960809 - DNA, 15 bp, Homo sapiens
tttaatcctttttaa

SEQ ID NO: 960810 - DNA, 15 bp, Homo sapiens
ttaatcctttttaac

SEQ ID NO: 960811 - DNA, 15 bp, Homo sapiens
taatcctttttaaca

SEQ ID NO: 960812 - DNA, 15 bp, Homo sapiens
aatcctttttaacat

SEQ ID NO: 960813 - DNA, 15 bp, Homo sapiens
atcctttttaacata

SEQ ID NO: 960814 - DNA, 15 bp, Homo sapiens
tcctttttaacataa

SEQ ID NO: 960815 - DNA, 15 bp, Homo sapiens
cctttttaacataat

SEQ ID NO: 960816 - DNA, 15 bp, Homo sapiens
ctttttaacataata

SEQ ID NO: 960817 - DNA, 15 bp, Homo sapiens
tttttaacataataa

SEQ ID NO: 960818 - DNA, 15 bp, Homo sapiens
ttttaacataataac

SEQ ID NO: 960819 - DNA, 15 bp, Homo sapiens
tttaacataataaca

SEQ ID NO: 960820 - DNA, 15 bp, Homo sapiens
ttaacataataacag

SEQ ID NO: 960821 - DNA, 15 bp, Homo sapiens
taacataataacagt

SEQ ID NO: 960822 - DNA, 15 bp, Homo sapiens
aacataataacagta

SEQ ID NO: 960823 - DNA, 15 bp, Homo sapiens
acataataacagtaa

SEQ ID NO: 960824 - DNA, 15 bp, Homo sapiens
cataataacagtaaa

SEQ ID NO: 960825 - DNA, 15 bp, Homo sapiens
ataataacagtaaac

SEQ ID NO: 960826 - DNA, 15 bp, Homo sapiens
taataacagtaaact

SEQ ID NO: 960827 - DNA, 15 bp, Homo sapiens
aataacagtaaactt

SEQ ID NO: 960828 - DNA, 15 bp, Homo sapiens
ataacagtaaactta

SEQ ID NO: 960829 - DNA, 15 bp, Homo sapiens
taacagtaaacttaa

SEQ ID NO: 960830 - DNA, 15 bp, Homo sapiens
aacagtaaacttaag

SEQ ID NO: 960831 - DNA, 15 bp, Homo sapiens
acagtaaacttaaga

SEQ ID NO: 960832 - DNA, 15 bp, Homo sapiens
cagtaaacttaagat

SEQ ID NO: 960833 - DNA, 15 bp, Homo sapiens
agtaaacttaagatt

SEQ ID NO: 960834 - DNA, 15 bp, Homo sapiens
gtaaacttaagattc

SEQ ID NO: 960835 - DNA, 15 bp, Homo sapiens
taaacttaagattct

SEQ ID NO: 960836 - DNA, 15 bp, Homo sapiens
aaacttaagattctt

SEQ ID NO: 960837 - DNA, 15 bp, Homo sapiens
aacttaagattctta

SEQ ID NO: 960838 - DNA, 15 bp, Homo sapiens
acttaagattcttaa

SEQ ID NO: 960839 - DNA, 15 bp, Homo sapiens
cttaagattcttaag

SEQ ID NO: 960840 - DNA, 15 bp, Homo sapiens
ttaagattcttaagc

SEQ ID NO: 960841 - DNA, 15 bp, Homo sapiens
taagattcttaagct

SEQ ID NO: 960842 - DNA, 15 bp, Homo sapiens
aagattcttaagctt

SEQ ID NO: 960843 - DNA, 15 bp, Homo sapiens
agattcttaagcttt

SEQ ID NO: 960844 - DNA, 15 bp, Homo sapiens
gattcttaagctttt

SEQ ID NO: 960845 - DNA, 15 bp, Homo sapiens
attcttaagcttttc

SEQ ID NO: 960846 - DNA, 15 bp, Homo sapiens
ttcttaagcttttca

SEQ ID NO: 960847 - DNA, 15 bp, Homo sapiens
tcttaagcttttcat

SEQ ID NO: 960848 - DNA, 15 bp, Homo sapiens
cttaagcttttcata

SEQ ID NO: 960849 - DNA, 15 bp, Homo sapiens
ttaagcttttcataa

SEQ ID NO: 960850 - DNA, 15 bp, Homo sapiens
taagcttttcataaa

SEQ ID NO: 960851 - DNA, 15 bp, Homo sapiens
aagcttttcataaag

SEQ ID NO: 960852 - DNA, 15 bp, Homo sapiens
agcttttcataaagc

SEQ ID NO: 960853 - DNA, 15 bp, Homo sapiens
gcttttcataaagct

SEQ ID NO: 960854 - DNA, 15 bp, Homo sapiens
cttttcataaagctc

SEQ ID NO: 960855 - DNA, 15 bp, Homo sapiens
ttttcataaagctca

SEQ ID NO: 960856 - DNA, 15 bp, Homo sapiens
tttcataaagctcat

SEQ ID NO: 960857 - DNA, 15 bp, Homo sapiens
ttcataaagctcata

SEQ ID NO: 960858 - DNA, 15 bp, Homo sapiens
tcataaagctcataa

SEQ ID NO: 960859 - DNA, 15 bp, Homo sapiens
cataaagctcataaa

SEQ ID NO: 960860 - DNA, 15 bp, Homo sapiens
ataaagctcataaat

SEQ ID NO: 960861 - DNA, 15 bp, Homo sapiens
taaagctcataaatg

SEQ ID NO: 960862 - DNA, 15 bp, Homo sapiens
aaagctcataaatga

SEQ ID NO: 960863 - DNA, 15 bp, Homo sapiens
aagctcataaatgat

SEQ ID NO: 960864 - DNA, 15 bp, Homo sapiens
agctcataaatgatt

SEQ ID NO: 960865 - DNA, 15 bp, Homo sapiens
gctcataaatgattt

SEQ ID NO: 960866 - DNA, 15 bp, Homo sapiens
ctcataaatgatttc

SEQ ID NO: 960867 - DNA, 15 bp, Homo sapiens
tcataaatgatttct

SEQ ID NO: 960868 - DNA, 15 bp, Homo sapiens
cataaatgatttcta

SEQ ID NO: 960869 - DNA, 15 bp, Homo sapiens
ataaatgatttctag

SEQ ID NO: 960870 - DNA, 15 bp, Homo sapiens
taaatgatttctaga

SEQ ID NO: 960871 - DNA, 15 bp, Homo sapiens
aaatgatttctagaa

SEQ ID NO: 960872 - DNA, 15 bp, Homo sapiens
aatgatttctagaaa

SEQ ID NO: 960873 - DNA, 15 bp, Homo sapiens
atgatttctagaaat

SEQ ID NO: 960874 - DNA, 15 bp, Homo sapiens
tgatttctagaaatt

SEQ ID NO: 960875 - DNA, 15 bp, Homo sapiens
gatttctagaaattt

SEQ ID NO: 960876 - DNA, 15 bp, Homo sapiens
atttctagaaatttt

SEQ ID NO: 960877 - DNA, 15 bp, Homo sapiens
tttctagaaatttta

SEQ ID NO: 960878 - DNA, 15 bp, Homo sapiens
ttctagaaattttaa

SEQ ID NO: 960879 - DNA, 15 bp, Homo sapiens
tctagaaattttaaa

SEQ ID NO: 960880 - DNA, 15 bp, Homo sapiens
ctagaaattttaaat

SEQ ID NO: 960881 - DNA, 15 bp, Homo sapiens
tagaaattttaaata

SEQ ID NO: 960882 - DNA, 15 bp, Homo sapiens
agaaattttaaatat

SEQ ID NO: 960883 - DNA, 15 bp, Homo sapiens
gaaattttaaatatg

SEQ ID NO: 960884 - DNA, 15 bp, Homo sapiens
aaattttaaatatgt

SEQ ID NO: 960885 - DNA, 15 bp, Homo sapiens
aattttaaatatgta

SEQ ID NO: 960886 - DNA, 15 bp, Homo sapiens
attttaaatatgtag

SEQ ID NO: 960887 - DNA, 15 bp, Homo sapiens
ttttaaatatgtagt

SEQ ID NO: 960888 - DNA, 15 bp, Homo sapiens
tttaaatatgtagtt

SEQ ID NO: 960889 - DNA, 15 bp, Homo sapiens
ttaaatatgtagtta

SEQ ID NO: 960890 - DNA, 15 bp, Homo sapiens
taaatatgtagttat

SEQ ID NO: 960891 - DNA, 15 bp, Homo sapiens
aaatatgtagttatc

SEQ ID NO: 960892 - DNA, 15 bp, Homo sapiens
aatatgtagttatca

SEQ ID NO: 960893 - DNA, 15 bp, Homo sapiens
atatgtagttatcat

SEQ ID NO: 960894 - DNA, 15 bp, Homo sapiens
tatgtagttatcatt

SEQ ID NO: 960895 - DNA, 15 bp, Homo sapiens
atgtagttatcatta

SEQ ID NO: 960896 - DNA, 15 bp, Homo sapiens
tgtagttatcattat

SEQ ID NO: 960897 - DNA, 15 bp, Homo sapiens
gtagttatcattatg

SEQ ID NO: 960898 - DNA, 15 bp, Homo sapiens
tagttatcattatgt

SEQ ID NO: 960899 - DNA, 15 bp, Homo sapiens
agttatcattatgta

SEQ ID NO: 960900 - DNA, 15 bp, Homo sapiens
gttatcattatgtat

SEQ ID NO: 960901 - DNA, 15 bp, Homo sapiens
ttatcattatgtatt

SEQ ID NO: 960902 - DNA, 15 bp, Homo sapiens
tatcattatgtattt

SEQ ID NO: 960903 - DNA, 15 bp, Homo sapiens
atcattatgtatttt

SEQ ID NO: 960904 - DNA, 15 bp, Homo sapiens
tcattatgtattttg

SEQ ID NO: 960905 - DNA, 15 bp, Homo sapiens
cattatgtattttgc

SEQ ID NO: 960906 - DNA, 15 bp, Homo sapiens
attatgtattttgct

SEQ ID NO: 960907 - DNA, 15 bp, Homo sapiens
ttatgtattttgctg

SEQ ID NO: 960908 - DNA, 15 bp, Homo sapiens
tatgtattttgctgt

SEQ ID NO: 960909 - DNA, 15 bp, Homo sapiens
atgtattttgctgta

SEQ ID NO: 960910 - DNA, 15 bp, Homo sapiens
tgtattttgctgtag

SEQ ID NO: 960911 - DNA, 15 bp, Homo sapiens
gtattttgctgtagc

SEQ ID NO: 960912 - DNA, 15 bp, Homo sapiens
tattttgctgtagca

SEQ ID NO: 960913 - DNA, 15 bp, Homo sapiens
attttgctgtagcag

SEQ ID NO: 960914 - DNA, 15 bp, Homo sapiens
ttttgctgtagcagc

SEQ ID NO: 960915 - DNA, 15 bp, Homo sapiens
tttgctgtagcagca

SEQ ID NO: 960916 - DNA, 15 bp, Homo sapiens
ttgctgtagcagcag

SEQ ID NO: 960917 - DNA, 15 bp, Homo sapiens
tgctgtagcagcagt

SEQ ID NO: 960918 - DNA, 15 bp, Homo sapiens
gctgtagcagcagta

SEQ ID NO: 960919 - DNA, 15 bp, Homo sapiens
ctgtagcagcagtat

SEQ ID NO: 960920 - DNA, 15 bp, Homo sapiens
tgtagcagcagtata

SEQ ID NO: 960921 - DNA, 15 bp, Homo sapiens
gtagcagcagtatac

SEQ ID NO: 960922 - DNA, 15 bp, Homo sapiens
tagcagcagtataca

SEQ ID NO: 960923 - DNA, 15 bp, Homo sapiens
agcagcagtatacag

SEQ ID NO: 960924 - DNA, 15 bp, Homo sapiens
gcagcagtatacagt

SEQ ID NO: 960925 - DNA, 15 bp, Homo sapiens
cagcagtatacagtt

SEQ ID NO: 960926 - DNA, 15 bp, Homo sapiens
agcagtatacagtta

SEQ ID NO: 960927 - DNA, 15 bp, Homo sapiens
gcagtatacagttaa

SEQ ID NO: 960928 - DNA, 15 bp, Homo sapiens
cagtatacagttaaa

SEQ ID NO: 960929 - DNA, 15 bp, Homo sapiens
agtatacagttaaat

SEQ ID NO: 960930 - DNA, 15 bp, Homo sapiens
gtatacagttaaata

SEQ ID NO: 960931 - DNA, 15 bp, Homo sapiens
tatacagttaaataa

SEQ ID NO: 960932 - DNA, 15 bp, Homo sapiens
atacagttaaataaa

SEQ ID NO: 960933 - DNA, 15 bp, Homo sapiens
tacagttaaataaaa

SEQ ID NO: 960934 - DNA, 15 bp, Homo sapiens
acagttaaataaaat

SEQ ID NO: 960935 - DNA, 15 bp, Homo sapiens
cagttaaataaaata

SEQ ID NO: 960936 - DNA, 15 bp, Homo sapiens
agttaaataaaatag

SEQ ID NO: 960937 - DNA, 15 bp, Homo sapiens
gttaaataaaatagg

SEQ ID NO: 960938 - DNA, 15 bp, Homo sapiens
ttaaataaaatagga

SEQ ID NO: 960939 - DNA, 15 bp, Homo sapiens
taaataaaataggaa

SEQ ID NO: 960940 - DNA, 15 bp, Homo sapiens
aaataaaataggaaa

SEQ ID NO: 960941 - DNA, 15 bp, Homo sapiens
aataaaataggaaaa

SEQ ID NO: 960942 - DNA, 15 bp, Homo sapiens
ataaaataggaaaac

SEQ ID NO: 960943 - DNA, 15 bp, Homo sapiens
taaaataggaaaaca

SEQ ID NO: 960944 - DNA, 15 bp, Homo sapiens
aaaataggaaaacat

SEQ ID NO: 960945 - DNA, 15 bp, Homo sapiens
aaataggaaaacatg

SEQ ID NO: 960946 - DNA, 15 bp, Homo sapiens
aataggaaaacatgt

SEQ ID NO: 960947 - DNA, 15 bp, Homo sapiens
ataggaaaacatgtt

SEQ ID NO: 960948 - DNA, 15 bp, Homo sapiens
taggaaaacatgttc

SEQ ID NO: 960949 - DNA, 15 bp, Homo sapiens
aggaaaacatgttcc

SEQ ID NO: 960950 - DNA, 15 bp, Homo sapiens
ggaaaacatgttcca

SEQ ID NO: 960951 - DNA, 15 bp, Homo sapiens
gaaaacatgttccaa

SEQ ID NO: 960952 - DNA, 15 bp, Homo sapiens
aaaacatgttccaag

SEQ ID NO: 960953 - DNA, 15 bp, Homo sapiens
aaacatgttccaaga

SEQ ID NO: 960954 - DNA, 15 bp, Homo sapiens
aacatgttccaagac

SEQ ID NO: 960955 - DNA, 15 bp, Homo sapiens
acatgttccaagact

SEQ ID NO: 960956 - DNA, 15 bp, Homo sapiens
catgttccaagactg

SEQ ID NO: 960957 - DNA, 15 bp, Homo sapiens
atgttccaagactgt

SEQ ID NO: 960958 - DNA, 15 bp, Homo sapiens
tgttccaagactgtt

SEQ ID NO: 960959 - DNA, 15 bp, Homo sapiens
gttccaagactgttt

SEQ ID NO: 960960 - DNA, 15 bp, Homo sapiens
ttccaagactgtttt

SEQ ID NO: 960961 - DNA, 15 bp, Homo sapiens
tccaagactgttttc

SEQ ID NO: 960962 - DNA, 15 bp, Homo sapiens
ccaagactgttttca

SEQ ID NO: 960963 - DNA, 15 bp, Homo sapiens
caagactgttttcat

SEQ ID NO: 960964 - DNA, 15 bp, Homo sapiens
aagactgttttcatt

SEQ ID NO: 960965 - DNA, 15 bp, Homo sapiens
agactgttttcattc

SEQ ID NO: 960966 - DNA, 15 bp, Homo sapiens
gactgttttcattca

SEQ ID NO: 960967 - DNA, 15 bp, Homo sapiens
actgttttcattcaa

SEQ ID NO: 960968 - DNA, 15 bp, Homo sapiens
ctgttttcattcaaa

SEQ ID NO: 960969 - DNA, 15 bp, Homo sapiens
tgttttcattcaaat

SEQ ID NO: 960970 - DNA, 15 bp, Homo sapiens
gttttcattcaaata

SEQ ID NO: 960971 - DNA, 15 bp, Homo sapiens
ttttcattcaaatat

SEQ ID NO: 960972 - DNA, 15 bp, Homo sapiens
tttcattcaaatatt

SEQ ID NO: 960973 - DNA, 15 bp, Homo sapiens
ttcattcaaatattt

SEQ ID NO: 960974 - DNA, 15 bp, Homo sapiens
tcattcaaatattta

SEQ ID NO: 960975 - DNA, 15 bp, Homo sapiens
cattcaaatatttat

SEQ ID NO: 960976 - DNA, 15 bp, Homo sapiens
attcaaatatttatg

SEQ ID NO: 960977 - DNA, 15 bp, Homo sapiens
ttcaaatatttatgc

SEQ ID NO: 960978 - DNA, 15 bp, Homo sapiens
tcaaatatttatgct

SEQ ID NO: 960979 - DNA, 15 bp, Homo sapiens
caaatatttatgcta

SEQ ID NO: 960980 - DNA, 15 bp, Homo sapiens
aaatatttatgctat

SEQ ID NO: 960981 - DNA, 15 bp, Homo sapiens
aatatttatgctata

SEQ ID NO: 960982 - DNA, 15 bp, Homo sapiens
atatttatgctatat

SEQ ID NO: 960983 - DNA, 15 bp, Homo sapiens
tatttatgctatatt

SEQ ID NO: 960984 - DNA, 15 bp, Homo sapiens
atttatgctatattt

SEQ ID NO: 960985 - DNA, 15 bp, Homo sapiens
tttatgctatatttt

SEQ ID NO: 960986 - DNA, 15 bp, Homo sapiens
ttatgctatattttt

SEQ ID NO: 960987 - DNA, 15 bp, Homo sapiens
tatgctatattttta

SEQ ID NO: 960988 - DNA, 15 bp, Homo sapiens
atgctatatttttag

SEQ ID NO: 960989 - DNA, 15 bp, Homo sapiens
tgctatatttttagc

SEQ ID NO: 960990 - DNA, 15 bp, Homo sapiens
gctatatttttagct

SEQ ID NO: 960991 - DNA, 15 bp, Homo sapiens
ctatatttttagctt

SEQ ID NO: 960992 - DNA, 15 bp, Homo sapiens
tatatttttagctta

SEQ ID NO: 960993 - DNA, 15 bp, Homo sapiens
atatttttagcttat

SEQ ID NO: 960994 - DNA, 15 bp, Homo sapiens
tatttttagcttata

SEQ ID NO: 960995 - DNA, 15 bp, Homo sapiens
atttttagcttataa

SEQ ID NO: 960996 - DNA, 15 bp, Homo sapiens
tttttagcttataaa

SEQ ID NO: 960997 - DNA, 15 bp, Homo sapiens
ttttagcttataaaa

SEQ ID NO: 960998 - DNA, 15 bp, Homo sapiens
tttagcttataaaaa

SEQ ID NO: 960999 - DNA, 15 bp, Homo sapiens
ttagcttataaaaac

SEQ ID NO: 961000 - DNA, 15 bp, Homo sapiens
tagcttataaaaact

SEQ ID NO: 961001 - DNA, 15 bp, Homo sapiens
agcttataaaaactc

SEQ ID NO: 961002 - DNA, 15 bp, Homo sapiens
gcttataaaaactca

SEQ ID NO: 961003 - DNA, 15 bp, Homo sapiens
cttataaaaactcat

SEQ ID NO: 961004 - DNA, 15 bp, Homo sapiens
ttataaaaactcatt

SEQ ID NO: 961005 - DNA, 15 bp, Homo sapiens
tataaaaactcatta

SEQ ID NO: 961006 - DNA, 15 bp, Homo sapiens
ataaaaactcattaa

SEQ ID NO: 961007 - DNA, 15 bp, Homo sapiens
taaaaactcattaat

SEQ ID NO: 961008 - DNA, 15 bp, Homo sapiens
aaaaactcattaatc

SEQ ID NO: 961009 - DNA, 15 bp, Homo sapiens
aaaactcattaatca

SEQ ID NO: 961010 - DNA, 15 bp, Homo sapiens
aaactcattaatcat

SEQ ID NO: 961011 - DNA, 15 bp, Homo sapiens
aactcattaatcatt

SEQ ID NO: 961012 - DNA, 15 bp, Homo sapiens
actcattaatcatta

SEQ ID NO: 961013 - DNA, 15 bp, Homo sapiens
ctcattaatcattaa

SEQ ID NO: 961014 - DNA, 15 bp, Homo sapiens
tcattaatcattaat

SEQ ID NO: 961015 - DNA, 15 bp, Homo sapiens
cattaatcattaatg

SEQ ID NO: 961016 - DNA, 15 bp, Homo sapiens
attaatcattaatgt

SEQ ID NO: 961017 - DNA, 15 bp, Homo sapiens
ttaatcattaatgta

SEQ ID NO: 961018 - DNA, 15 bp, Homo sapiens
taatcattaatgtaa

SEQ ID NO: 961019 - DNA, 15 bp, Homo sapiens
aatcattaatgtaaa

SEQ ID NO: 961020 - DNA, 15 bp, Homo sapiens
atcattaatgtaaaa

SEQ ID NO: 961021 - DNA, 15 bp, Homo sapiens
tcattaatgtaaaat

SEQ ID NO: 961022 - DNA, 15 bp, Homo sapiens
cattaatgtaaaatt

SEQ ID NO: 961023 - DNA, 15 bp, Homo sapiens
attaatgtaaaatta

SEQ ID NO: 961024 - DNA, 15 bp, Homo sapiens
ttaatgtaaaattat

SEQ ID NO: 961025 - DNA, 15 bp, Homo sapiens
taatgtaaaattatt

SEQ ID NO: 961026 - DNA, 15 bp, Homo sapiens
aatgtaaaattattt

SEQ ID NO: 961027 - DNA, 15 bp, Homo sapiens
atgtaaaattatttg

SEQ ID NO: 961028 - DNA, 15 bp, Homo sapiens
tgtaaaattatttgt

SEQ ID NO: 961029 - DNA, 15 bp, Homo sapiens
gtaaaattatttgtt

SEQ ID NO: 961030 - DNA, 15 bp, Homo sapiens
taaaattatttgttg

SEQ ID NO: 961031 - DNA, 15 bp, Homo sapiens
aaaattatttgttgg

SEQ ID NO: 961032 - DNA, 15 bp, Homo sapiens
aaattatttgttgga

SEQ ID NO: 961033 - DNA, 15 bp, Homo sapiens
aattatttgttggat

SEQ ID NO: 961034 - DNA, 15 bp, Homo sapiens
attatttgttggatt

SEQ ID NO: 961035 - DNA, 15 bp, Homo sapiens
ttatttgttggattt

SEQ ID NO: 961036 - DNA, 15 bp, Homo sapiens
tatttgttggatttt

SEQ ID NO: 961037 - DNA, 15 bp, Homo sapiens
atttgttggattttt

SEQ ID NO: 961038 - DNA, 15 bp, Homo sapiens
tttgttggatttttt

SEQ ID NO: 961039 - DNA, 15 bp, Homo sapiens
ttgttggatttttta

SEQ ID NO: 961040 - DNA, 15 bp, Homo sapiens
tgttggattttttaa

SEQ ID NO: 961041 - DNA, 15 bp, Homo sapiens
gttggattttttaaa

SEQ ID NO: 961042 - DNA, 15 bp, Homo sapiens
ttggattttttaaat

SEQ ID NO: 961043 - DNA, 15 bp, Homo sapiens
tggattttttaaata

SEQ ID NO: 961044 - DNA, 15 bp, Homo sapiens
ggattttttaaatat

SEQ ID NO: 961045 - DNA, 15 bp, Homo sapiens
gattttttaaatatt

SEQ ID NO: 961046 - DNA, 15 bp, Homo sapiens
attttttaaatattt

SEQ ID NO: 961047 - DNA, 15 bp, Homo sapiens
ttttttaaatattta

SEQ ID NO: 961048 - DNA, 15 bp, Homo sapiens
tttttaaatatttag

SEQ ID NO: 961049 - DNA, 15 bp, Homo sapiens
ttttaaatatttagt

SEQ ID NO: 961050 - DNA, 15 bp, Homo sapiens
tttaaatatttagtg

SEQ ID NO: 961051 - DNA, 15 bp, Homo sapiens
ttaaatatttagtgt

SEQ ID NO: 961052 - DNA, 15 bp, Homo sapiens
taaatatttagtgta

SEQ ID NO: 961053 - DNA, 15 bp, Homo sapiens
aaatatttagtgtat

SEQ ID NO: 961054 - DNA, 15 bp, Homo sapiens
aatatttagtgtatt

SEQ ID NO: 961055 - DNA, 15 bp, Homo sapiens
atatttagtgtatta

SEQ ID NO: 961056 - DNA, 15 bp, Homo sapiens
tatttagtgtattat

SEQ ID NO: 961057 - DNA, 15 bp, Homo sapiens
atttagtgtattatt

SEQ ID NO: 961058 - DNA, 15 bp, Homo sapiens
tttagtgtattattt

SEQ ID NO: 961059 - DNA, 15 bp, Homo sapiens
ttagtgtattatttt

SEQ ID NO: 961060 - DNA, 15 bp, Homo sapiens
tagtgtattattttt

SEQ ID NO: 961061 - DNA, 15 bp, Homo sapiens
agtgtattatttttg

SEQ ID NO: 961062 - DNA, 15 bp, Homo sapiens
gtgtattatttttgt

SEQ ID NO: 961063 - DNA, 15 bp, Homo sapiens
tgtattatttttgtt

SEQ ID NO: 961064 - DNA, 15 bp, Homo sapiens
gtattatttttgttt

SEQ ID NO: 961065 - DNA, 15 bp, Homo sapiens
tattatttttgtttc

SEQ ID NO: 961066 - DNA, 15 bp, Homo sapiens
attatttttgtttct

SEQ ID NO: 961067 - DNA, 15 bp, Homo sapiens
ttatttttgtttctt

SEQ ID NO: 961068 - DNA, 15 bp, Homo sapiens
tatttttgtttcttt

SEQ ID NO: 961069 - DNA, 15 bp, Homo sapiens
atttttgtttctttt

SEQ ID NO: 961070 - DNA, 15 bp, Homo sapiens
tttttgtttcttttt

SEQ ID NO: 961071 - DNA, 15 bp, Homo sapiens
ttttgtttctttttt

SEQ ID NO: 961072 - DNA, 15 bp, Homo sapiens
tttgtttcttttttc

SEQ ID NO: 961073 - DNA, 15 bp, Homo sapiens
ttgtttcttttttct

SEQ ID NO: 961074 - DNA, 15 bp, Homo sapiens
tgtttcttttttctt

SEQ ID NO: 961075 - DNA, 15 bp, Homo sapiens
gtttcttttttcttt

SEQ ID NO: 961076 - DNA, 15 bp, Homo sapiens
tttcttttttctttc

SEQ ID NO: 961077 - DNA, 15 bp, Homo sapiens
ttcttttttctttcc

SEQ ID NO: 961078 - DNA, 15 bp, Homo sapiens
tcttttttctttcca

SEQ ID NO: 961079 - DNA, 15 bp, Homo sapiens
cttttttctttccat

SEQ ID NO: 961080 - DNA, 15 bp, Homo sapiens
ttttttctttccatg

SEQ ID NO: 961081 - DNA, 15 bp, Homo sapiens
tttttctttccatgt

SEQ ID NO: 961082 - DNA, 15 bp, Homo sapiens
ttttctttccatgtt

SEQ ID NO: 961083 - DNA, 15 bp, Homo sapiens
tttctttccatgttt

SEQ ID NO: 961084 - DNA, 15 bp, Homo sapiens
ttctttccatgtttc

SEQ ID NO: 961085 - DNA, 15 bp, Homo sapiens
tctttccatgtttct

SEQ ID NO: 961086 - DNA, 15 bp, Homo sapiens
ctttccatgtttctt

SEQ ID NO: 961087 - DNA, 15 bp, Homo sapiens
tttccatgtttcttc

SEQ ID NO: 961088 - DNA, 15 bp, Homo sapiens
ttccatgtttcttca

SEQ ID NO: 961089 - DNA, 15 bp, Homo sapiens
tccatgtttcttcat

SEQ ID NO: 961090 - DNA, 15 bp, Homo sapiens
ccatgtttcttcatt

SEQ ID NO: 961091 - DNA, 15 bp, Homo sapiens
catgtttcttcattc

SEQ ID NO: 961092 - DNA, 15 bp, Homo sapiens
atgtttcttcattct

SEQ ID NO: 961093 - DNA, 15 bp, Homo sapiens
tgtttcttcattctt

SEQ ID NO: 961094 - DNA, 15 bp, Homo sapiens
gtttcttcattcttc

SEQ ID NO: 961095 - DNA, 15 bp, Homo sapiens
tttcttcattcttcc

SEQ ID NO: 961096 - DNA, 15 bp, Homo sapiens
ttcttcattcttcca

SEQ ID NO: 961097 - DNA, 15 bp, Homo sapiens
tcttcattcttccac

SEQ ID NO: 961098 - DNA, 15 bp, Homo sapiens
cttcattcttccacc

SEQ ID NO: 961099 - DNA, 15 bp, Homo sapiens
ttcattcttccacct

SEQ ID NO: 961100 - DNA, 15 bp, Homo sapiens
tcattcttccacctt

SEQ ID NO: 961101 - DNA, 15 bp, Homo sapiens
cattcttccacctta

SEQ ID NO: 961102 - DNA, 15 bp, Homo sapiens
attcttccaccttaa

SEQ ID NO: 961103 - DNA, 15 bp, Homo sapiens
ttcttccaccttaag

SEQ ID NO: 961104 - DNA, 15 bp, Homo sapiens
tcttccaccttaagc

SEQ ID NO: 961105 - DNA, 15 bp, Homo sapiens
cttccaccttaagca

SEQ ID NO: 961106 - DNA, 15 bp, Homo sapiens
ttccaccttaagcag

SEQ ID NO: 961107 - DNA, 15 bp, Homo sapiens
tccaccttaagcaga

SEQ ID NO: 961108 - DNA, 15 bp, Homo sapiens
ccaccttaagcagaa

SEQ ID NO: 961109 - DNA, 15 bp, Homo sapiens
caccttaagcagaat

SEQ ID NO: 961110 - DNA, 15 bp, Homo sapiens
accttaagcagaatc

SEQ ID NO: 961111 - DNA, 15 bp, Homo sapiens
ccttaagcagaatca

SEQ ID NO: 961112 - DNA, 15 bp, Homo sapiens
cttaagcagaatcag

SEQ ID NO: 961113 - DNA, 15 bp, Homo sapiens
ttaagcagaatcagg

SEQ ID NO: 961114 - DNA, 15 bp, Homo sapiens
taagcagaatcaggt

SEQ ID NO: 961115 - DNA, 15 bp, Homo sapiens
aagcagaatcaggtg

SEQ ID NO: 961116 - DNA, 15 bp, Homo sapiens
agcagaatcaggtgt

SEQ ID NO: 961117 - DNA, 15 bp, Homo sapiens
gcagaatcaggtgtg

SEQ ID NO: 961118 - DNA, 15 bp, Homo sapiens
cagaatcaggtgtgt

SEQ ID NO: 961119 - DNA, 15 bp, Homo sapiens
agaatcaggtgtgtg

SEQ ID NO: 961120 - DNA, 15 bp, Homo sapiens
gaatcaggtgtgtga

SEQ ID NO: 961121 - DNA, 15 bp, Homo sapiens
aatcaggtgtgtgac

SEQ ID NO: 961122 - DNA, 15 bp, Homo sapiens
atcaggtgtgtgaca

SEQ ID NO: 961123 - DNA, 15 bp, Homo sapiens
tcaggtgtgtgacac

SEQ ID NO: 961124 - DNA, 15 bp, Homo sapiens
caggtgtgtgacaca

SEQ ID NO: 961125 - DNA, 15 bp, Homo sapiens
aggtgtgtgacacaa

SEQ ID NO: 961126 - DNA, 15 bp, Homo sapiens
ggtgtgtgacacaac

SEQ ID NO: 961127 - DNA, 15 bp, Homo sapiens
gtgtgtgacacaact

SEQ ID NO: 961128 - DNA, 15 bp, Homo sapiens
tgtgtgacacaacta

SEQ ID NO: 961129 - DNA, 15 bp, Homo sapiens
gtgtgacacaactat

SEQ ID NO: 961130 - DNA, 15 bp, Homo sapiens
tgtgacacaactatg

SEQ ID NO: 961131 - DNA, 15 bp, Homo sapiens
gtgacacaactatgt

SEQ ID NO: 961132 - DNA, 15 bp, Homo sapiens
tgacacaactatgtt

SEQ ID NO: 961133 - DNA, 15 bp, Homo sapiens
gacacaactatgttt

SEQ ID NO: 961134 - DNA, 15 bp, Homo sapiens
acacaactatgtttt

SEQ ID NO: 961135 - DNA, 15 bp, Homo sapiens
cacaactatgttttc

SEQ ID NO: 961136 - DNA, 15 bp, Homo sapiens
acaactatgttttct

SEQ ID NO: 961137 - DNA, 15 bp, Homo sapiens
caactatgttttcta

SEQ ID NO: 961138 - DNA, 15 bp, Homo sapiens
aactatgttttctat

SEQ ID NO: 961139 - DNA, 15 bp, Homo sapiens
actatgttttctatc

SEQ ID NO: 961140 - DNA, 15 bp, Homo sapiens
ctatgttttctatcc

SEQ ID NO: 961141 - DNA, 15 bp, Homo sapiens
tatgttttctatcct

SEQ ID NO: 961142 - DNA, 15 bp, Homo sapiens
atgttttctatcctt

SEQ ID NO: 961143 - DNA, 15 bp, Homo sapiens
tgttttctatccttg

SEQ ID NO: 961144 - DNA, 15 bp, Homo sapiens
gttttctatccttgt

SEQ ID NO: 961145 - DNA, 15 bp, Homo sapiens
ttttctatccttgtt

SEQ ID NO: 961146 - DNA, 15 bp, Homo sapiens
tttctatccttgtta

SEQ ID NO: 961147 - DNA, 15 bp, Homo sapiens
ttctatccttgttac

SEQ ID NO: 961148 - DNA, 15 bp, Homo sapiens
tctatccttgttacc

SEQ ID NO: 961149 - DNA, 15 bp, Homo sapiens
ctatccttgttacca

SEQ ID NO: 961150 - DNA, 15 bp, Homo sapiens
tatccttgttaccat

SEQ ID NO: 961151 - DNA, 15 bp, Homo sapiens
atccttgttaccatt

SEQ ID NO: 961152 - DNA, 15 bp, Homo sapiens
tccttgttaccatta

SEQ ID NO: 961153 - DNA, 15 bp, Homo sapiens
ccttgttaccattat

SEQ ID NO: 961154 - DNA, 15 bp, Homo sapiens
cttgttaccattatt

SEQ ID NO: 961155 - DNA, 15 bp, Homo sapiens
ttgttaccattatta

SEQ ID NO: 961156 - DNA, 15 bp, Homo sapiens
tgttaccattattaa

SEQ ID NO: 961157 - DNA, 15 bp, Homo sapiens
gttaccattattaat

SEQ ID NO: 961158 - DNA, 15 bp, Homo sapiens
ttaccattattaata

SEQ ID NO: 961159 - DNA, 15 bp, Homo sapiens
taccattattaataa

SEQ ID NO: 961160 - DNA, 15 bp, Homo sapiens
accattattaataaa

SEQ ID NO: 961161 - DNA, 15 bp, Homo sapiens
ccattattaataaat

SEQ ID NO: 961162 - DNA, 15 bp, Homo sapiens
cattattaataaata

SEQ ID NO: 961163 - DNA, 15 bp, Homo sapiens
attattaataaatac

SEQ ID NO: 961164 - DNA, 15 bp, Homo sapiens
ttattaataaataca

SEQ ID NO: 961165 - DNA, 15 bp, Homo sapiens
tattaataaatacaa

SEQ ID NO: 961166 - DNA, 15 bp, Homo sapiens
attaataaatacaag

SEQ ID NO: 961167 - DNA, 15 bp, Homo sapiens
ttaataaatacaagg

SEQ ID NO: 961168 - DNA, 15 bp, Homo sapiens
taataaatacaaggg

SEQ ID NO: 961169 - DNA, 15 bp, Homo sapiens
aataaatacaagggc

SEQ ID NO: 961170 - DNA, 15 bp, Homo sapiens
ataaatacaagggca

SEQ ID NO: 961171 - DNA, 15 bp, Homo sapiens
taaatacaagggcat

SEQ ID NO: 961172 - DNA, 15 bp, Homo sapiens
aaatacaagggcatg

SEQ ID NO: 961173 - DNA, 15 bp, Homo sapiens
aatacaagggcatga

SEQ ID NO: 961174 - DNA, 15 bp, Homo sapiens
atacaagggcatgat

SEQ ID NO: 961175 - DNA, 15 bp, Homo sapiens
tacaagggcatgata

SEQ ID NO: 961176 - DNA, 15 bp, Homo sapiens
acaagggcatgatat

SEQ ID NO: 961177 - DNA, 15 bp, Homo sapiens
caagggcatgatatt

SEQ ID NO: 961178 - DNA, 15 bp, Homo sapiens
aagggcatgatattt

SEQ ID NO: 961179 - DNA, 15 bp, Homo sapiens
agggcatgatatttt

SEQ ID NO: 961180 - DNA, 15 bp, Homo sapiens
gggcatgatattttt

SEQ ID NO: 961181 - DNA, 15 bp, Homo sapiens
ggcatgatatttttc

SEQ ID NO: 961182 - DNA, 15 bp, Homo sapiens
gcatgatatttttca

SEQ ID NO: 961183 - DNA, 15 bp, Homo sapiens
catgatatttttcac

SEQ ID NO: 961184 - DNA, 15 bp, Homo sapiens
atgatatttttcaca

SEQ ID NO: 961185 - DNA, 15 bp, Homo sapiens
tgatatttttcacaa

SEQ ID NO: 961186 - DNA, 15 bp, Homo sapiens
gatatttttcacaaa

SEQ ID NO: 961187 - DNA, 15 bp, Homo sapiens
atatttttcacaaaa

SEQ ID NO: 961188 - DNA, 15 bp, Homo sapiens
tatttttcacaaaag

SEQ ID NO: 961189 - DNA, 15 bp, Homo sapiens
atttttcacaaaaga

SEQ ID NO: 961190 - DNA, 15 bp, Homo sapiens
tttttcacaaaagaa

SEQ ID NO: 961191 - DNA, 15 bp, Homo sapiens
ttttcacaaaagaaa

SEQ ID NO: 961192 - DNA, 15 bp, Homo sapiens
tttcacaaaagaaac

SEQ ID NO: 961193 - DNA, 15 bp, Homo sapiens
ttcacaaaagaaaca

SEQ ID NO: 961194 - DNA, 15 bp, Homo sapiens
tcacaaaagaaacac

SEQ ID NO: 961195 - DNA, 15 bp, Homo sapiens
cacaaaagaaacact

SEQ ID NO: 961196 - DNA, 15 bp, Homo sapiens
acaaaagaaacactt

SEQ ID NO: 961197 - DNA, 15 bp, Homo sapiens
caaaagaaacacttt

SEQ ID NO: 961198 - DNA, 15 bp, Homo sapiens
aaaagaaacactttg

SEQ ID NO: 961199 - DNA, 15 bp, Homo sapiens
aaagaaacactttgt

SEQ ID NO: 961200 - DNA, 15 bp, Homo sapiens
aagaaacactttgtt

SEQ ID NO: 961201 - DNA, 15 bp, Homo sapiens
agaaacactttgttc

SEQ ID NO: 961202 - DNA, 15 bp, Homo sapiens
gaaacactttgttca

SEQ ID NO: 961203 - DNA, 15 bp, Homo sapiens
aaacactttgttcag

SEQ ID NO: 961204 - DNA, 15 bp, Homo sapiens
aacactttgttcaga

SEQ ID NO: 961205 - DNA, 15 bp, Homo sapiens
acactttgttcagaa

SEQ ID NO: 961206 - DNA, 15 bp, Homo sapiens
cactttgttcagaac

SEQ ID NO: 961207 - DNA, 15 bp, Homo sapiens
actttgttcagaacc

SEQ ID NO: 961208 - DNA, 15 bp, Homo sapiens
ctttgttcagaacca

SEQ ID NO: 961209 - DNA, 15 bp, Homo sapiens
tttgttcagaaccaa

SEQ ID NO: 961210 - DNA, 15 bp, Homo sapiens
ttgttcagaaccaaa

SEQ ID NO: 961211 - DNA, 15 bp, Homo sapiens
tgttcagaaccaaaa

SEQ ID NO: 961212 - DNA, 15 bp, Homo sapiens
gttcagaaccaaaaa

SEQ ID NO: 961213 - DNA, 15 bp, Homo sapiens
ttcagaaccaaaaaa

SEQ ID NO: 961214 - DNA, 15 bp, Homo sapiens
tcagaaccaaaaaag

SEQ ID NO: 961215 - DNA, 15 bp, Homo sapiens
cagaaccaaaaaaga

SEQ ID NO: 961216 - DNA, 15 bp, Homo sapiens
agaaccaaaaaagat

SEQ ID NO: 961217 - DNA, 15 bp, Homo sapiens
gaaccaaaaaagatc

SEQ ID NO: 961218 - DNA, 15 bp, Homo sapiens
aaccaaaaaagatca

SEQ ID NO: 961219 - DNA, 15 bp, Homo sapiens
accaaaaaagatcat

SEQ ID NO: 961220 - DNA, 15 bp, Homo sapiens
ccaaaaaagatcatg

SEQ ID NO: 961221 - DNA, 15 bp, Homo sapiens
caaaaaagatcatgg

SEQ ID NO: 961222 - DNA, 15 bp, Homo sapiens
aaaaaagatcatggc

SEQ ID NO: 961223 - DNA, 15 bp, Homo sapiens
aaaaagatcatggca

SEQ ID NO: 961224 - DNA, 15 bp, Homo sapiens
aaaagatcatggcaa

SEQ ID NO: 961225 - DNA, 15 bp, Homo sapiens
aaagatcatggcaac

SEQ ID NO: 961226 - DNA, 15 bp, Homo sapiens
aagatcatggcaaca

SEQ ID NO: 961227 - DNA, 15 bp, Homo sapiens
agatcatggcaacag

SEQ ID NO: 961228 - DNA, 15 bp, Homo sapiens
gatcatggcaacagt

SEQ ID NO: 961229 - DNA, 15 bp, Homo sapiens
atcatggcaacagtc

SEQ ID NO: 961230 - DNA, 15 bp, Homo sapiens
tcatggcaacagtca

SEQ ID NO: 961231 - DNA, 15 bp, Homo sapiens
catggcaacagtcag

SEQ ID NO: 961232 - DNA, 15 bp, Homo sapiens
atggcaacagtcaga

SEQ ID NO: 961233 - DNA, 15 bp, Homo sapiens
tggcaacagtcagaa

SEQ ID NO: 961234 - DNA, 15 bp, Homo sapiens
ggcaacagtcagaat

SEQ ID NO: 961235 - DNA, 15 bp, Homo sapiens
gcaacagtcagaatt

SEQ ID NO: 961236 - DNA, 15 bp, Homo sapiens
caacagtcagaatta

SEQ ID NO: 961237 - DNA, 15 bp, Homo sapiens
aacagtcagaattaa

SEQ ID NO: 961238 - DNA, 15 bp, Homo sapiens
acagtcagaattaaa

SEQ ID NO: 961239 - DNA, 15 bp, Homo sapiens
cagtcagaattaaaa

SEQ ID NO: 961240 - DNA, 15 bp, Homo sapiens
agtcagaattaaaaa

SEQ ID NO: 961241 - DNA, 15 bp, Homo sapiens
gtcagaattaaaaat

SEQ ID NO: 961242 - DNA, 15 bp, Homo sapiens
tcagaattaaaaatg

SEQ ID NO: 961243 - DNA, 15 bp, Homo sapiens
cagaattaaaaatgg

SEQ ID NO: 961244 - DNA, 15 bp, Homo sapiens
agaattaaaaatggt

SEQ ID NO: 961245 - DNA, 15 bp, Homo sapiens
gaattaaaaatggta

SEQ ID NO: 961246 - DNA, 15 bp, Homo sapiens
aattaaaaatggtaa

SEQ ID NO: 961247 - DNA, 15 bp, Homo sapiens
attaaaaatggtaaa

SEQ ID NO: 961248 - DNA, 15 bp, Homo sapiens
ttaaaaatggtaaaa

SEQ ID NO: 961249 - DNA, 15 bp, Homo sapiens
taaaaatggtaaaag

SEQ ID NO: 961250 - DNA, 15 bp, Homo sapiens
aaaaatggtaaaaga

SEQ ID NO: 961251 - DNA, 15 bp, Homo sapiens
aaaatggtaaaagac

SEQ ID NO: 961252 - DNA, 15 bp, Homo sapiens
aaatggtaaaagact

SEQ ID NO: 961253 - DNA, 15 bp, Homo sapiens
aatggtaaaagacta

SEQ ID NO: 961254 - DNA, 15 bp, Homo sapiens
atggtaaaagactag

SEQ ID NO: 961255 - DNA, 15 bp, Homo sapiens
tggtaaaagactagg

SEQ ID NO: 961256 - DNA, 15 bp, Homo sapiens
ggtaaaagactaggt

SEQ ID NO: 961257 - DNA, 15 bp, Homo sapiens
gtaaaagactaggtg

SEQ ID NO: 961258 - DNA, 15 bp, Homo sapiens
taaaagactaggtgc

SEQ ID NO: 961259 - DNA, 15 bp, Homo sapiens
aaaagactaggtgcc

SEQ ID NO: 961260 - DNA, 15 bp, Homo sapiens
aaagactaggtgcca

SEQ ID NO: 961261 - DNA, 15 bp, Homo sapiens
aagactaggtgccaa

SEQ ID NO: 961262 - DNA, 15 bp, Homo sapiens
agactaggtgccaaa

SEQ ID NO: 961263 - DNA, 15 bp, Homo sapiens
gactaggtgccaaag

SEQ ID NO: 961264 - DNA, 15 bp, Homo sapiens
actaggtgccaaaga

SEQ ID NO: 961265 - DNA, 15 bp, Homo sapiens
ctaggtgccaaagat

SEQ ID NO: 961266 - DNA, 15 bp, Homo sapiens
taggtgccaaagatg

SEQ ID NO: 961267 - DNA, 15 bp, Homo sapiens
aggtgccaaagatga

SEQ ID NO: 961268 - DNA, 15 bp, Homo sapiens
ggtgccaaagatgac

SEQ ID NO: 961269 - DNA, 15 bp, Homo sapiens
gtgccaaagatgact

SEQ ID NO: 961270 - DNA, 15 bp, Homo sapiens
tgccaaagatgactt

SEQ ID NO: 961271 - DNA, 15 bp, Homo sapiens
gccaaagatgactta

SEQ ID NO: 961272 - DNA, 15 bp, Homo sapiens
ccaaagatgacttac

SEQ ID NO: 961273 - DNA, 15 bp, Homo sapiens
caaagatgacttaca

SEQ ID NO: 961274 - DNA, 15 bp, Homo sapiens
aaagatgacttacat

SEQ ID NO: 961275 - DNA, 15 bp, Homo sapiens
aagatgacttacata

SEQ ID NO: 961276 - DNA, 15 bp, Homo sapiens
agatgacttacataa

SEQ ID NO: 961277 - DNA, 15 bp, Homo sapiens
gatgacttacataat

SEQ ID NO: 961278 - DNA, 15 bp, Homo sapiens
atgacttacataatt

SEQ ID NO: 961279 - DNA, 15 bp, Homo sapiens
tgacttacataattg

SEQ ID NO: 961280 - DNA, 15 bp, Homo sapiens
gacttacataattgg

SEQ ID NO: 961281 - DNA, 15 bp, Homo sapiens
acttacataattggg

SEQ ID NO: 961282 - DNA, 15 bp, Homo sapiens
cttacataattgggt

SEQ ID NO: 961283 - DNA, 15 bp, Homo sapiens
ttacataattgggta

SEQ ID NO: 961284 - DNA, 15 bp, Homo sapiens
tacataattgggtac

SEQ ID NO: 961285 - DNA, 15 bp, Homo sapiens
acataattgggtacc

SEQ ID NO: 961286 - DNA, 15 bp, Homo sapiens
cataattgggtacct

SEQ ID NO: 961287 - DNA, 15 bp, Homo sapiens
ataattgggtaccta

SEQ ID NO: 961288 - DNA, 15 bp, Homo sapiens
taattgggtacctag

SEQ ID NO: 961289 - DNA, 15 bp, Homo sapiens
aattgggtacctaga

SEQ ID NO: 961290 - DNA, 15 bp, Homo sapiens
attgggtacctagaa

SEQ ID NO: 961291 - DNA, 15 bp, Homo sapiens
ttgggtacctagaaa

SEQ ID NO: 961292 - DNA, 15 bp, Homo sapiens
tgggtacctagaaat

SEQ ID NO: 961293 - DNA, 15 bp, Homo sapiens
gggtacctagaaata

SEQ ID NO: 961294 - DNA, 15 bp, Homo sapiens
ggtacctagaaatat

SEQ ID NO: 961295 - DNA, 15 bp, Homo sapiens
gtacctagaaatatt

SEQ ID NO: 961296 - DNA, 15 bp, Homo sapiens
tacctagaaatattc

SEQ ID NO: 961297 - DNA, 15 bp, Homo sapiens
acctagaaatattct

SEQ ID NO: 961298 - DNA, 15 bp, Homo sapiens
cctagaaatattcta

SEQ ID NO: 961299 - DNA, 15 bp, Homo sapiens
ctagaaatattctat

SEQ ID NO: 961300 - DNA, 15 bp, Homo sapiens
tagaaatattctatg

SEQ ID NO: 961301 - DNA, 15 bp, Homo sapiens
agaaatattctatgg

SEQ ID NO: 961302 - DNA, 15 bp, Homo sapiens
gaaatattctatggt

SEQ ID NO: 961303 - DNA, 15 bp, Homo sapiens
aaatattctatggta

SEQ ID NO: 961304 - DNA, 15 bp, Homo sapiens
aatattctatggtat

SEQ ID NO: 961305 - DNA, 15 bp, Homo sapiens
atattctatggtatt

SEQ ID NO: 961306 - DNA, 15 bp, Homo sapiens
tattctatggtatta

SEQ ID NO: 961307 - DNA, 15 bp, Homo sapiens
attctatggtattac

SEQ ID NO: 961308 - DNA, 15 bp, Homo sapiens
ttctatggtattaca

SEQ ID NO: 961309 - DNA, 15 bp, Homo sapiens
tctatggtattacag

SEQ ID NO: 961310 - DNA, 15 bp, Homo sapiens
ctatggtattacagt

SEQ ID NO: 961311 - DNA, 15 bp, Homo sapiens
tatggtattacagta

SEQ ID NO: 961312 - DNA, 15 bp, Homo sapiens
atggtattacagtaa

SEQ ID NO: 961313 - DNA, 15 bp, Homo sapiens
tggtattacagtaat

SEQ ID NO: 961314 - DNA, 15 bp, Homo sapiens
ggtattacagtaatg

SEQ ID NO: 961315 - DNA, 15 bp, Homo sapiens
gtattacagtaatga

SEQ ID NO: 961316 - DNA, 15 bp, Homo sapiens
tattacagtaatgat

SEQ ID NO: 961317 - DNA, 15 bp, Homo sapiens
attacagtaatgatg

SEQ ID NO: 961318 - DNA, 15 bp, Homo sapiens
ttacagtaatgatga

SEQ ID NO: 961319 - DNA, 15 bp, Homo sapiens
tacagtaatgatgaa

SEQ ID NO: 961320 - DNA, 15 bp, Homo sapiens
acagtaatgatgaaa

SEQ ID NO: 961321 - DNA, 15 bp, Homo sapiens
cagtaatgatgaaaa

SEQ ID NO: 961322 - DNA, 15 bp, Homo sapiens
agtaatgatgaaaaa

SEQ ID NO: 961323 - DNA, 15 bp, Homo sapiens
gtaatgatgaaaaat

SEQ ID NO: 961324 - DNA, 15 bp, Homo sapiens
taatgatgaaaaata

SEQ ID NO: 961325 - DNA, 15 bp, Homo sapiens
aatgatgaaaaatac

SEQ ID NO: 961326 - DNA, 15 bp, Homo sapiens
atgatgaaaaataca

SEQ ID NO: 961327 - DNA, 15 bp, Homo sapiens
tgatgaaaaatacaa

SEQ ID NO: 961328 - DNA, 15 bp, Homo sapiens
gatgaaaaatacaaa

SEQ ID NO: 961329 - DNA, 15 bp, Homo sapiens
atgaaaaatacaaat

SEQ ID NO: 961330 - DNA, 15 bp, Homo sapiens
tgaaaaatacaaatt

SEQ ID NO: 961331 - DNA, 15 bp, Homo sapiens
gaaaaatacaaatta

SEQ ID NO: 961332 - DNA, 15 bp, Homo sapiens
aaaaatacaaattag

SEQ ID NO: 961333 - DNA, 15 bp, Homo sapiens
aaaatacaaattaga

SEQ ID NO: 961334 - DNA, 15 bp, Homo sapiens
aaatacaaattagaa

SEQ ID NO: 961335 - DNA, 15 bp, Homo sapiens
aatacaaattagaac

SEQ ID NO: 961336 - DNA, 15 bp, Homo sapiens
atacaaattagaaca

SEQ ID NO: 961337 - DNA, 15 bp, Homo sapiens
tacaaattagaacac

SEQ ID NO: 961338 - DNA, 15 bp, Homo sapiens
acaaattagaacaca

SEQ ID NO: 961339 - DNA, 15 bp, Homo sapiens
caaattagaacacat

SEQ ID NO: 961340 - DNA, 15 bp, Homo sapiens
aaattagaacacatt

SEQ ID NO: 961341 - DNA, 15 bp, Homo sapiens
aattagaacacattt

SEQ ID NO: 961342 - DNA, 15 bp, Homo sapiens
attagaacacatttt

SEQ ID NO: 961343 - DNA, 15 bp, Homo sapiens
ttagaacacatttta

SEQ ID NO: 961344 - DNA, 15 bp, Homo sapiens
tagaacacattttag

SEQ ID NO: 961345 - DNA, 15 bp, Homo sapiens
agaacacattttaga

SEQ ID NO: 961346 - DNA, 15 bp, Homo sapiens
gaacacattttagat

SEQ ID NO: 961347 - DNA, 15 bp, Homo sapiens
aacacattttagatc

SEQ ID NO: 961348 - DNA, 15 bp, Homo sapiens
acacattttagatcc

SEQ ID NO: 961349 - DNA, 15 bp, Homo sapiens
cacattttagatcct

SEQ ID NO: 961350 - DNA, 15 bp, Homo sapiens
acattttagatccta

SEQ ID NO: 961351 - DNA, 15 bp, Homo sapiens
cattttagatcctat

SEQ ID NO: 961352 - DNA, 15 bp, Homo sapiens
attttagatcctatt

SEQ ID NO: 961353 - DNA, 15 bp, Homo sapiens
ttttagatcctattg

SEQ ID NO: 961354 - DNA, 15 bp, Homo sapiens
tttagatcctattga

SEQ ID NO: 961355 - DNA, 15 bp, Homo sapiens
ttagatcctattgag

SEQ ID NO: 961356 - DNA, 15 bp, Homo sapiens
tagatcctattgagt

SEQ ID NO: 961357 - DNA, 15 bp, Homo sapiens
agatcctattgagtt

SEQ ID NO: 961358 - DNA, 15 bp, Homo sapiens
gatcctattgagtta

SEQ ID NO: 961359 - DNA, 15 bp, Homo sapiens
atcctattgagttaa

SEQ ID NO: 961360 - DNA, 15 bp, Homo sapiens
tcctattgagttaaa

SEQ ID NO: 961361 - DNA, 15 bp, Homo sapiens
cctattgagttaaat

SEQ ID NO: 961362 - DNA, 15 bp, Homo sapiens
ctattgagttaaata

SEQ ID NO: 961363 - DNA, 15 bp, Homo sapiens
tattgagttaaataa

SEQ ID NO: 961364 - DNA, 15 bp, Homo sapiens
attgagttaaataaa

SEQ ID NO: 961365 - DNA, 15 bp, Homo sapiens
ttgagttaaataaat

SEQ ID NO: 961366 - DNA, 15 bp, Homo sapiens
tgagttaaataaatc

SEQ ID NO: 961367 - DNA, 15 bp, Homo sapiens
gagttaaataaatca

SEQ ID NO: 961368 - DNA, 15 bp, Homo sapiens
agttaaataaatcag

SEQ ID NO: 961369 - DNA, 15 bp, Homo sapiens
gttaaataaatcaga

SEQ ID NO: 961370 - DNA, 15 bp, Homo sapiens
ttaaataaatcagag

SEQ ID NO: 961371 - DNA, 15 bp, Homo sapiens
taaataaatcagagt

SEQ ID NO: 961372 - DNA, 15 bp, Homo sapiens
aaataaatcagagtc

SEQ ID NO: 961373 - DNA, 15 bp, Homo sapiens
aataaatcagagtca

SEQ ID NO: 961374 - DNA, 15 bp, Homo sapiens
ataaatcagagtcaa

SEQ ID NO: 961375 - DNA, 15 bp, Homo sapiens
taaatcagagtcaag

SEQ ID NO: 961376 - DNA, 15 bp, Homo sapiens
aaatcagagtcaaga

SEQ ID NO: 961377 - DNA, 15 bp, Homo sapiens
aatcagagtcaagac

SEQ ID NO: 961378 - DNA, 15 bp, Homo sapiens
atcagagtcaagacc

SEQ ID NO: 961379 - DNA, 15 bp, Homo sapiens
tcagagtcaagacca

SEQ ID NO: 961380 - DNA, 15 bp, Homo sapiens
cagagtcaagaccaa

SEQ ID NO: 961381 - DNA, 15 bp, Homo sapiens
agagtcaagaccaaa

SEQ ID NO: 961382 - DNA, 15 bp, Homo sapiens
gagtcaagaccaaac

SEQ ID NO: 961383 - DNA, 15 bp, Homo sapiens
agtcaagaccaaaca

SEQ ID NO: 961384 - DNA, 15 bp, Homo sapiens
gtcaagaccaaacaa

SEQ ID NO: 961385 - DNA, 15 bp, Homo sapiens
tcaagaccaaacaat

SEQ ID NO: 961386 - DNA, 15 bp, Homo sapiens
caagaccaaacaata

SEQ ID NO: 961387 - DNA, 15 bp, Homo sapiens
aagaccaaacaataa

SEQ ID NO: 961388 - DNA, 15 bp, Homo sapiens
agaccaaacaataaa

SEQ ID NO: 961389 - DNA, 15 bp, Homo sapiens
gaccaaacaataaat

SEQ ID NO: 961390 - DNA, 15 bp, Homo sapiens
accaaacaataaata

SEQ ID NO: 961391 - DNA, 15 bp, Homo sapiens
ccaaacaataaataa

SEQ ID NO: 961392 - DNA, 15 bp, Homo sapiens
caaacaataaataaa

SEQ ID NO: 961393 - DNA, 15 bp, Homo sapiens
aaacaataaataaag

SEQ ID NO: 961394 - DNA, 15 bp, Homo sapiens
aacaataaataaagt

SEQ ID NO: 961395 - DNA, 15 bp, Homo sapiens
acaataaataaagtc

SEQ ID NO: 961396 - DNA, 15 bp, Homo sapiens
caataaataaagtca

SEQ ID NO: 961397 - DNA, 15 bp, Homo sapiens
aataaataaagtcaa

SEQ ID NO: 961398 - DNA, 15 bp, Homo sapiens
ataaataaagtcaat

SEQ ID NO: 961399 - DNA, 15 bp, Homo sapiens
taaataaagtcaatt

SEQ ID NO: 961400 - DNA, 15 bp, Homo sapiens
aaataaagtcaattt

SEQ ID NO: 961401 - DNA, 15 bp, Homo sapiens
aataaagtcaattta

SEQ ID NO: 961402 - DNA, 15 bp, Homo sapiens
ataaagtcaatttac

SEQ ID NO: 961403 - DNA, 15 bp, Homo sapiens
taaagtcaatttacg

SEQ ID NO: 961404 - DNA, 15 bp, Homo sapiens
aaagtcaatttacgt

SEQ ID NO: 961405 - DNA, 15 bp, Homo sapiens
aagtcaatttacgtc

SEQ ID NO: 961406 - DNA, 15 bp, Homo sapiens
agtcaatttacgtca

SEQ ID NO: 961407 - DNA, 15 bp, Homo sapiens
gtcaatttacgtcaa

SEQ ID NO: 961408 - DNA, 15 bp, Homo sapiens
tcaatttacgtcaac

SEQ ID NO: 961409 - DNA, 15 bp, Homo sapiens
caatttacgtcaaca

SEQ ID NO: 961410 - DNA, 15 bp, Homo sapiens
aatttacgtcaacaa

SEQ ID NO: 961411 - DNA, 15 bp, Homo sapiens
atttacgtcaacaaa

SEQ ID NO: 961412 - DNA, 15 bp, Homo sapiens
tttacgtcaacaaat

SEQ ID NO: 961413 - DNA, 15 bp, Homo sapiens
ttacgtcaacaaatg

SEQ ID NO: 961414 - DNA, 15 bp, Homo sapiens
tacgtcaacaaatgg

SEQ ID NO: 961415 - DNA, 15 bp, Homo sapiens
acgtcaacaaatggt

SEQ ID NO: 961416 - DNA, 15 bp, Homo sapiens
cgtcaacaaatggta

SEQ ID NO: 961417 - DNA, 15 bp, Homo sapiens
gtcaacaaatggtaa

SEQ ID NO: 961418 - DNA, 15 bp, Homo sapiens
tcaacaaatggtaag

SEQ ID NO: 961419 - DNA, 15 bp, Homo sapiens
caacaaatggtaagt

SEQ ID NO: 961420 - DNA, 15 bp, Homo sapiens
aacaaatggtaagtt

SEQ ID NO: 961421 - DNA, 15 bp, Homo sapiens
acaaatggtaagttg

SEQ ID NO: 961422 - DNA, 15 bp, Homo sapiens
caaatggtaagttgg

SEQ ID NO: 961423 - DNA, 15 bp, Homo sapiens
aaatggtaagttggc

SEQ ID NO: 961424 - DNA, 15 bp, Homo sapiens
aatggtaagttggca

SEQ ID NO: 961425 - DNA, 15 bp, Homo sapiens
atggtaagttggcag

SEQ ID NO: 961426 - DNA, 15 bp, Homo sapiens
tggtaagttggcaga

SEQ ID NO: 961427 - DNA, 15 bp, Homo sapiens
ggtaagttggcagat

SEQ ID NO: 961428 - DNA, 15 bp, Homo sapiens
gtaagttggcagatt

SEQ ID NO: 961429 - DNA, 15 bp, Homo sapiens
taagttggcagattt

SEQ ID NO: 961430 - DNA, 15 bp, Homo sapiens
aagttggcagatttt

SEQ ID NO: 961431 - DNA, 15 bp, Homo sapiens
agttggcagatttta

SEQ ID NO: 961432 - DNA, 15 bp, Homo sapiens
gttggcagattttaa

SEQ ID NO: 961433 - DNA, 15 bp, Homo sapiens
ttggcagattttaac

SEQ ID NO: 961434 - DNA, 15 bp, Homo sapiens
tggcagattttaact

SEQ ID NO: 961435 - DNA, 15 bp, Homo sapiens
ggcagattttaactc

SEQ ID NO: 961436 - DNA, 15 bp, Homo sapiens
gcagattttaactcc

SEQ ID NO: 961437 - DNA, 15 bp, Homo sapiens
cagattttaactccc

SEQ ID NO: 961438 - DNA, 15 bp, Homo sapiens
agattttaactccct

SEQ ID NO: 961439 - DNA, 15 bp, Homo sapiens
gattttaactccctt

SEQ ID NO: 961440 - DNA, 15 bp, Homo sapiens
attttaactcccttt

SEQ ID NO: 961441 - DNA, 15 bp, Homo sapiens
ttttaactccctttt

SEQ ID NO: 961442 - DNA, 15 bp, Homo sapiens
tttaactcccttttt

SEQ ID NO: 961443 - DNA, 15 bp, Homo sapiens
ttaactccctttttg

SEQ ID NO: 961444 - DNA, 15 bp, Homo sapiens
taactccctttttga

SEQ ID NO: 961445 - DNA, 15 bp, Homo sapiens
aactccctttttgaa

SEQ ID NO: 961446 - DNA, 15 bp, Homo sapiens
actccctttttgaaa

SEQ ID NO: 961447 - DNA, 15 bp, Homo sapiens
ctccctttttgaaaa

SEQ ID NO: 961448 - DNA, 15 bp, Homo sapiens
tccctttttgaaaat

SEQ ID NO: 961449 - DNA, 15 bp, Homo sapiens
ccctttttgaaaatg

SEQ ID NO: 961450 - DNA, 15 bp, Homo sapiens
cctttttgaaaatga

SEQ ID NO: 961451 - DNA, 15 bp, Homo sapiens
ctttttgaaaatgaa

SEQ ID NO: 961452 - DNA, 15 bp, Homo sapiens
tttttgaaaatgaac

SEQ ID NO: 961453 - DNA, 15 bp, Homo sapiens
ttttgaaaatgaacc

SEQ ID NO: 961454 - DNA, 15 bp, Homo sapiens
tttgaaaatgaacca

SEQ ID NO: 961455 - DNA, 15 bp, Homo sapiens
ttgaaaatgaaccat

SEQ ID NO: 961456 - DNA, 15 bp, Homo sapiens
tgaaaatgaaccatg

SEQ ID NO: 961457 - DNA, 15 bp, Homo sapiens
gaaaatgaaccatga

SEQ ID NO: 961458 - DNA, 15 bp, Homo sapiens
aaaatgaaccatgat

SEQ ID NO: 961459 - DNA, 15 bp, Homo sapiens
aaatgaaccatgatc

SEQ ID NO: 961460 - DNA, 15 bp, Homo sapiens
aatgaaccatgatcc

SEQ ID NO: 961461 - DNA, 15 bp, Homo sapiens
atgaaccatgatcct

SEQ ID NO: 961462 - DNA, 15 bp, Homo sapiens
tgaaccatgatccta

SEQ ID NO: 961463 - DNA, 15 bp, Homo sapiens
gaaccatgatcctaa

SEQ ID NO: 961464 - DNA, 15 bp, Homo sapiens
aaccatgatcctaag

SEQ ID NO: 961465 - DNA, 15 bp, Homo sapiens
accatgatcctaagg

SEQ ID NO: 961466 - DNA, 15 bp, Homo sapiens
ccatgatcctaaggt

SEQ ID NO: 961467 - DNA, 15 bp, Homo sapiens
catgatcctaaggtt

SEQ ID NO: 961468 - DNA, 15 bp, Homo sapiens
atgatcctaaggttg

SEQ ID NO: 961469 - DNA, 15 bp, Homo sapiens
tgatcctaaggttgg

SEQ ID NO: 961470 - DNA, 15 bp, Homo sapiens
gatcctaaggttggt

SEQ ID NO: 961471 - DNA, 15 bp, Homo sapiens
atcctaaggttggta

SEQ ID NO: 961472 - DNA, 15 bp, Homo sapiens
tcctaaggttggtaa

SEQ ID NO: 961473 - DNA, 15 bp, Homo sapiens
cctaaggttggtaaa

SEQ ID NO: 961474 - DNA, 15 bp, Homo sapiens
ctaaggttggtaaaa

SEQ ID NO: 961475 - DNA, 15 bp, Homo sapiens
taaggttggtaaaat

SEQ ID NO: 961476 - DNA, 15 bp, Homo sapiens
aaggttggtaaaatt

SEQ ID NO: 961477 - DNA, 15 bp, Homo sapiens
aggttggtaaaatta

SEQ ID NO: 961478 - DNA, 15 bp, Homo sapiens
ggttggtaaaattaa

SEQ ID NO: 961479 - DNA, 15 bp, Homo sapiens
gttggtaaaattaat

SEQ ID NO: 961480 - DNA, 15 bp, Homo sapiens
ttggtaaaattaatc

SEQ ID NO: 961481 - DNA, 15 bp, Homo sapiens
tggtaaaattaatca

SEQ ID NO: 961482 - DNA, 15 bp, Homo sapiens
ggtaaaattaatcaa

SEQ ID NO: 961483 - DNA, 15 bp, Homo sapiens
gtaaaattaatcaag

SEQ ID NO: 961484 - DNA, 15 bp, Homo sapiens
taaaattaatcaaga

SEQ ID NO: 961485 - DNA, 15 bp, Homo sapiens
aaaattaatcaagaa

SEQ ID NO: 961486 - DNA, 15 bp, Homo sapiens
aaattaatcaagaat

SEQ ID NO: 961487 - DNA, 15 bp, Homo sapiens
aattaatcaagaatg

SEQ ID NO: 961488 - DNA, 15 bp, Homo sapiens
attaatcaagaatgt

SEQ ID NO: 961489 - DNA, 15 bp, Homo sapiens
ttaatcaagaatgtt

SEQ ID NO: 961490 - DNA, 15 bp, Homo sapiens
taatcaagaatgttg

SEQ ID NO: 961491 - DNA, 15 bp, Homo sapiens
aatcaagaatgttgt

SEQ ID NO: 961492 - DNA, 15 bp, Homo sapiens
atcaagaatgttgtc

SEQ ID NO: 961493 - DNA, 15 bp, Homo sapiens
tcaagaatgttgtca

SEQ ID NO: 961494 - DNA, 15 bp, Homo sapiens
caagaatgttgtcaa

SEQ ID NO: 961495 - DNA, 15 bp, Homo sapiens
aagaatgttgtcaaa

SEQ ID NO: 961496 - DNA, 15 bp, Homo sapiens
agaatgttgtcaaaa

SEQ ID NO: 961497 - DNA, 15 bp, Homo sapiens
gaatgttgtcaaaat

SEQ ID NO: 961498 - DNA, 15 bp, Homo sapiens
aatgttgtcaaaatg

SEQ ID NO: 961499 - DNA, 15 bp, Homo sapiens
atgttgtcaaaatga

SEQ ID NO: 961500 - DNA, 15 bp, Homo sapiens
tgttgtcaaaatgat

SEQ ID NO: 961501 - DNA, 15 bp, Homo sapiens
gttgtcaaaatgata

SEQ ID NO: 961502 - DNA, 15 bp, Homo sapiens
ttgtcaaaatgataa

SEQ ID NO: 961503 - DNA, 15 bp, Homo sapiens
tgtcaaaatgataaa

SEQ ID NO: 961504 - DNA, 15 bp, Homo sapiens
gtcaaaatgataaag

SEQ ID NO: 961505 - DNA, 15 bp, Homo sapiens
tcaaaatgataaaga

SEQ ID NO: 961506 - DNA, 15 bp, Homo sapiens
caaaatgataaagat

SEQ ID NO: 961507 - DNA, 15 bp, Homo sapiens
aaaatgataaagata

SEQ ID NO: 961508 - DNA, 15 bp, Homo sapiens
aaatgataaagataa

SEQ ID NO: 961509 - DNA, 15 bp, Homo sapiens
aatgataaagataaa

SEQ ID NO: 961510 - DNA, 15 bp, Homo sapiens
atgataaagataaaa

SEQ ID NO: 961511 - DNA, 15 bp, Homo sapiens
tgataaagataaaaa

SEQ ID NO: 961512 - DNA, 15 bp, Homo sapiens
gataaagataaaaat

SEQ ID NO: 961513 - DNA, 15 bp, Homo sapiens
ataaagataaaaatg

SEQ ID NO: 961514 - DNA, 15 bp, Homo sapiens
taaagataaaaatga

SEQ ID NO: 961515 - DNA, 15 bp, Homo sapiens
aaagataaaaatgag

SEQ ID NO: 961516 - DNA, 15 bp, Homo sapiens
aagataaaaatgagg

SEQ ID NO: 961517 - DNA, 15 bp, Homo sapiens
agataaaaatgagga

SEQ ID NO: 961518 - DNA, 15 bp, Homo sapiens
gataaaaatgaggaa

SEQ ID NO: 961519 - DNA, 15 bp, Homo sapiens
ataaaaatgaggaag

SEQ ID NO: 961520 - DNA, 15 bp, Homo sapiens
taaaaatgaggaaga

SEQ ID NO: 961521 - DNA, 15 bp, Homo sapiens
aaaaatgaggaagag

SEQ ID NO: 961522 - DNA, 15 bp, Homo sapiens
aaaatgaggaagaga

SEQ ID NO: 961523 - DNA, 15 bp, Homo sapiens
aaatgaggaagagaa

SEQ ID NO: 961524 - DNA, 15 bp, Homo sapiens
aatgaggaagagaat

SEQ ID NO: 961525 - DNA, 15 bp, Homo sapiens
atgaggaagagaata

SEQ ID NO: 961526 - DNA, 15 bp, Homo sapiens
tgaggaagagaataa

SEQ ID NO: 961527 - DNA, 15 bp, Homo sapiens
gaggaagagaataag

SEQ ID NO: 961528 - DNA, 15 bp, Homo sapiens
aggaagagaataaga

SEQ ID NO: 961529 - DNA, 15 bp, Homo sapiens
ggaagagaataagat

SEQ ID NO: 961530 - DNA, 15 bp, Homo sapiens
gaagagaataagata

SEQ ID NO: 961531 - DNA, 15 bp, Homo sapiens
aagagaataagatag

SEQ ID NO: 961532 - DNA, 15 bp, Homo sapiens
agagaataagatagg

SEQ ID NO: 961533 - DNA, 15 bp, Homo sapiens
gagaataagataggc

SEQ ID NO: 961534 - DNA, 15 bp, Homo sapiens
agaataagataggca

SEQ ID NO: 961535 - DNA, 15 bp, Homo sapiens
gaataagataggcaa

SEQ ID NO: 961536 - DNA, 15 bp, Homo sapiens
aataagataggcaag

SEQ ID NO: 961537 - DNA, 15 bp, Homo sapiens
ataagataggcaaga

SEQ ID NO: 961538 - DNA, 15 bp, Homo sapiens
taagataggcaagag

SEQ ID NO: 961539 - DNA, 15 bp, Homo sapiens
aagataggcaagagt

SEQ ID NO: 961540 - DNA, 15 bp, Homo sapiens
agataggcaagagtg

SEQ ID NO: 961541 - DNA, 15 bp, Homo sapiens
gataggcaagagtga

SEQ ID NO: 961542 - DNA, 15 bp, Homo sapiens
ataggcaagagtgag

SEQ ID NO: 961543 - DNA, 15 bp, Homo sapiens
taggcaagagtgaga

SEQ ID NO: 961544 - DNA, 15 bp, Homo sapiens
aggcaagagtgagaa

SEQ ID NO: 961545 - DNA, 15 bp, Homo sapiens
ggcaagagtgagaaa

SEQ ID NO: 961546 - DNA, 15 bp, Homo sapiens
gcaagagtgagaaag

SEQ ID NO: 961547 - DNA, 15 bp, Homo sapiens
caagagtgagaaagg

SEQ ID NO: 961548 - DNA, 15 bp, Homo sapiens
aagagtgagaaagga

SEQ ID NO: 961549 - DNA, 15 bp, Homo sapiens
agagtgagaaaggaa

SEQ ID NO: 961550 - DNA, 15 bp, Homo sapiens
gagtgagaaaggaaa

SEQ ID NO: 961551 - DNA, 15 bp, Homo sapiens
agtgagaaaggaaag

SEQ ID NO: 961552 - DNA, 15 bp, Homo sapiens
gtgagaaaggaaaga

SEQ ID NO: 961553 - DNA, 15 bp, Homo sapiens
tgagaaaggaaagag

SEQ ID NO: 961554 - DNA, 15 bp, Homo sapiens
gagaaaggaaagaga

SEQ ID NO: 961555 - DNA, 15 bp, Homo sapiens
agaaaggaaagagac

SEQ ID NO: 961556 - DNA, 15 bp, Homo sapiens
gaaaggaaagagaca

SEQ ID NO: 961557 - DNA, 15 bp, Homo sapiens
aaaggaaagagacac

SEQ ID NO: 961558 - DNA, 15 bp, Homo sapiens
aaggaaagagacaca

SEQ ID NO: 961559 - DNA, 15 bp, Homo sapiens
aggaaagagacacat

SEQ ID NO: 961560 - DNA, 15 bp, Homo sapiens
ggaaagagacacata

SEQ ID NO: 961561 - DNA, 15 bp, Homo sapiens
gaaagagacacatag

SEQ ID NO: 961562 - DNA, 15 bp, Homo sapiens
aaagagacacatagc

SEQ ID NO: 961563 - DNA, 15 bp, Homo sapiens
aagagacacatagct

SEQ ID NO: 961564 - DNA, 15 bp, Homo sapiens
agagacacatagctg

SEQ ID NO: 961565 - DNA, 15 bp, Homo sapiens
gagacacatagctga

SEQ ID NO: 961566 - DNA, 15 bp, Homo sapiens
agacacatagctgaa

SEQ ID NO: 961567 - DNA, 15 bp, Homo sapiens
gacacatagctgaaa

SEQ ID NO: 961568 - DNA, 15 bp, Homo sapiens
acacatagctgaaaa

SEQ ID NO: 961569 - DNA, 15 bp, Homo sapiens
cacatagctgaaaat

SEQ ID NO: 961570 - DNA, 15 bp, Homo sapiens
acatagctgaaaatg

SEQ ID NO: 961571 - DNA, 15 bp, Homo sapiens
catagctgaaaatgt

SEQ ID NO: 961572 - DNA, 15 bp, Homo sapiens
atagctgaaaatgtg

SEQ ID NO: 961573 - DNA, 15 bp, Homo sapiens
tagctgaaaatgtga

SEQ ID NO: 961574 - DNA, 15 bp, Homo sapiens
agctgaaaatgtgag

SEQ ID NO: 961575 - DNA, 15 bp, Homo sapiens
gctgaaaatgtgagt

SEQ ID NO: 961576 - DNA, 15 bp, Homo sapiens
ctgaaaatgtgagtc

SEQ ID NO: 961577 - DNA, 15 bp, Homo sapiens
tgaaaatgtgagtca

SEQ ID NO: 961578 - DNA, 15 bp, Homo sapiens
gaaaatgtgagtcac

SEQ ID NO: 961579 - DNA, 15 bp, Homo sapiens
aaaatgtgagtcaca

SEQ ID NO: 961580 - DNA, 15 bp, Homo sapiens
aaatgtgagtcacaa

SEQ ID NO: 961581 - DNA, 15 bp, Homo sapiens
aatgtgagtcacaac

SEQ ID NO: 961582 - DNA, 15 bp, Homo sapiens
atgtgagtcacaaca

SEQ ID NO: 961583 - DNA, 15 bp, Homo sapiens
tgtgagtcacaacaa

SEQ ID NO: 961584 - DNA, 15 bp, Homo sapiens
gtgagtcacaacaac

SEQ ID NO: 961585 - DNA, 15 bp, Homo sapiens
tgagtcacaacaact

SEQ ID NO: 961586 - DNA, 15 bp, Homo sapiens
gagtcacaacaacta

SEQ ID NO: 961587 - DNA, 15 bp, Homo sapiens
agtcacaacaactac

SEQ ID NO: 961588 - DNA, 15 bp, Homo sapiens
gtcacaacaactaca

SEQ ID NO: 961589 - DNA, 15 bp, Homo sapiens
tcacaacaactacat

SEQ ID NO: 961590 - DNA, 15 bp, Homo sapiens
cacaacaactacata

SEQ ID NO: 961591 - DNA, 15 bp, Homo sapiens
acaacaactacatag

SEQ ID NO: 961592 - DNA, 15 bp, Homo sapiens
caacaactacataga

SEQ ID NO: 961593 - DNA, 15 bp, Homo sapiens
aacaactacatagat

SEQ ID NO: 961594 - DNA, 15 bp, Homo sapiens
acaactacatagatc

SEQ ID NO: 961595 - DNA, 15 bp, Homo sapiens
caactacatagatcc

SEQ ID NO: 961596 - DNA, 15 bp, Homo sapiens
aactacatagatccg

SEQ ID NO: 961597 - DNA, 15 bp, Homo sapiens
actacatagatccgt

SEQ ID NO: 961598 - DNA, 15 bp, Homo sapiens
ctacatagatccgta

SEQ ID NO: 961599 - DNA, 15 bp, Homo sapiens
tacatagatccgtag

SEQ ID NO: 961600 - DNA, 15 bp, Homo sapiens
acatagatccgtaga

SEQ ID NO: 961601 - DNA, 15 bp, Homo sapiens
catagatccgtagaa

SEQ ID NO: 961602 - DNA, 15 bp, Homo sapiens
atagatccgtagaat

SEQ ID NO: 961603 - DNA, 15 bp, Homo sapiens
tagatccgtagaatc

SEQ ID NO: 961604 - DNA, 15 bp, Homo sapiens
agatccgtagaatct

SEQ ID NO: 961605 - DNA, 15 bp, Homo sapiens
gatccgtagaatctg

SEQ ID NO: 961606 - DNA, 15 bp, Homo sapiens
atccgtagaatctgc

SEQ ID NO: 961607 - DNA, 15 bp, Homo sapiens
tccgtagaatctgct

SEQ ID NO: 961608 - DNA, 15 bp, Homo sapiens
ccgtagaatctgcta

SEQ ID NO: 961609 - DNA, 15 bp, Homo sapiens
cgtagaatctgctat

SEQ ID NO: 961610 - DNA, 15 bp, Homo sapiens
gtagaatctgctatg

SEQ ID NO: 961611 - DNA, 15 bp, Homo sapiens
tagaatctgctatgg

SEQ ID NO: 961612 - DNA, 15 bp, Homo sapiens
agaatctgctatgga

SEQ ID NO: 961613 - DNA, 15 bp, Homo sapiens
gaatctgctatggag

SEQ ID NO: 961614 - DNA, 15 bp, Homo sapiens
aatctgctatggagg

SEQ ID NO: 961615 - DNA, 15 bp, Homo sapiens
atctgctatggagga

SEQ ID NO: 961616 - DNA, 15 bp, Homo sapiens
tctgctatggaggac

SEQ ID NO: 961617 - DNA, 15 bp, Homo sapiens
ctgctatggaggact

SEQ ID NO: 961618 - DNA, 15 bp, Homo sapiens
tgctatggaggactg

SEQ ID NO: 961619 - DNA, 15 bp, Homo sapiens
gctatggaggactgt

SEQ ID NO: 961620 - DNA, 15 bp, Homo sapiens
ctatggaggactgtg

SEQ ID NO: 961621 - DNA, 15 bp, Homo sapiens
tatggaggactgtga

SEQ ID NO: 961622 - DNA, 15 bp, Homo sapiens
atggaggactgtgat

SEQ ID NO: 961623 - DNA, 15 bp, Homo sapiens
tggaggactgtgatt

SEQ ID NO: 961624 - DNA, 15 bp, Homo sapiens
ggaggactgtgatta

SEQ ID NO: 961625 - DNA, 15 bp, Homo sapiens
gaggactgtgattat

SEQ ID NO: 961626 - DNA, 15 bp, Homo sapiens
aggactgtgattatg

SEQ ID NO: 961627 - DNA, 15 bp, Homo sapiens
ggactgtgattatgt

SEQ ID NO: 961628 - DNA, 15 bp, Homo sapiens
gactgtgattatgtg

SEQ ID NO: 961629 - DNA, 15 bp, Homo sapiens
actgtgattatgtga

SEQ ID NO: 961630 - DNA, 15 bp, Homo sapiens
ctgtgattatgtgac

SEQ ID NO: 961631 - DNA, 15 bp, Homo sapiens
tgtgattatgtgaca

SEQ ID NO: 961632 - DNA, 15 bp, Homo sapiens
gtgattatgtgacag

SEQ ID NO: 961633 - DNA, 15 bp, Homo sapiens
tgattatgtgacagt

SEQ ID NO: 961634 - DNA, 15 bp, Homo sapiens
gattatgtgacagtt

SEQ ID NO: 961635 - DNA, 15 bp, Homo sapiens
attatgtgacagttg

SEQ ID NO: 961636 - DNA, 15 bp, Homo sapiens
ttatgtgacagttgc

SEQ ID NO: 961637 - DNA, 15 bp, Homo sapiens
tatgtgacagttgct

SEQ ID NO: 961638 - DNA, 15 bp, Homo sapiens
atgtgacagttgctg

SEQ ID NO: 961639 - DNA, 15 bp, Homo sapiens
tgtgacagttgctga

SEQ ID NO: 961640 - DNA, 15 bp, Homo sapiens
gtgacagttgctgat

SEQ ID NO: 961641 - DNA, 15 bp, Homo sapiens
tgacagttgctgatg

SEQ ID NO: 961642 - DNA, 15 bp, Homo sapiens
gacagttgctgatgc

SEQ ID NO: 961643 - DNA, 15 bp, Homo sapiens
acagttgctgatgcc

SEQ ID NO: 961644 - DNA, 15 bp, Homo sapiens
cagttgctgatgccg

SEQ ID NO: 961645 - DNA, 15 bp, Homo sapiens
agttgctgatgccgt

SEQ ID NO: 961646 - DNA, 15 bp, Homo sapiens
gttgctgatgccgtg

SEQ ID NO: 961647 - DNA, 15 bp, Homo sapiens
ttgctgatgccgtgg

SEQ ID NO: 961648 - DNA, 15 bp, Homo sapiens
tgctgatgccgtggc

SEQ ID NO: 961649 - DNA, 15 bp, Homo sapiens
gctgatgccgtggct

SEQ ID NO: 961650 - DNA, 15 bp, Homo sapiens
ctgatgccgtggctt

SEQ ID NO: 961651 - DNA, 15 bp, Homo sapiens
tgatgccgtggctta

SEQ ID NO: 961652 - DNA, 15 bp, Homo sapiens
gatgccgtggcttag

SEQ ID NO: 961653 - DNA, 15 bp, Homo sapiens
atgccgtggcttagt

SEQ ID NO: 961654 - DNA, 15 bp, Homo sapiens
tgccgtggcttagtg

SEQ ID NO: 961655 - DNA, 15 bp, Homo sapiens
gccgtggcttagtga

SEQ ID NO: 961656 - DNA, 15 bp, Homo sapiens
ccgtggcttagtgag

SEQ ID NO: 961657 - DNA, 15 bp, Homo sapiens
cgtggcttagtgagc

SEQ ID NO: 961658 - DNA, 15 bp, Homo sapiens
gtggcttagtgagct

SEQ ID NO: 961659 - DNA, 15 bp, Homo sapiens
tggcttagtgagctg

SEQ ID NO: 961660 - DNA, 15 bp, Homo sapiens
ggcttagtgagctga

SEQ ID NO: 961661 - DNA, 15 bp, Homo sapiens
gcttagtgagctgag

SEQ ID NO: 961662 - DNA, 15 bp, Homo sapiens
cttagtgagctgagg

SEQ ID NO: 961663 - DNA, 15 bp, Homo sapiens
ttagtgagctgaggg

SEQ ID NO: 961664 - DNA, 15 bp, Homo sapiens
tagtgagctgagggt

SEQ ID NO: 961665 - DNA, 15 bp, Homo sapiens
agtgagctgagggtg

SEQ ID NO: 961666 - DNA, 15 bp, Homo sapiens
gtgagctgagggtga

SEQ ID NO: 961667 - DNA, 15 bp, Homo sapiens
tgagctgagggtgat

SEQ ID NO: 961668 - DNA, 15 bp, Homo sapiens
gagctgagggtgatg

SEQ ID NO: 961669 - DNA, 15 bp, Homo sapiens
agctgagggtgatgc

SEQ ID NO: 961670 - DNA, 15 bp, Homo sapiens
gctgagggtgatgca

SEQ ID NO: 961671 - DNA, 15 bp, Homo sapiens
ctgagggtgatgcac

SEQ ID NO: 961672 - DNA, 15 bp, Homo sapiens
tgagggtgatgcaca

SEQ ID NO: 961673 - DNA, 15 bp, Homo sapiens
gagggtgatgcacag

SEQ ID NO: 961674 - DNA, 15 bp, Homo sapiens
agggtgatgcacagg

SEQ ID NO: 961675 - DNA, 15 bp, Homo sapiens
gggtgatgcacaggc

SEQ ID NO: 961676 - DNA, 15 bp, Homo sapiens
ggtgatgcacaggca

SEQ ID NO: 961677 - DNA, 15 bp, Homo sapiens
gtgatgcacaggcag

SEQ ID NO: 961678 - DNA, 15 bp, Homo sapiens
tgatgcacaggcagg

SEQ ID NO: 961679 - DNA, 15 bp, Homo sapiens
gatgcacaggcaggc

SEQ ID NO: 961680 - DNA, 15 bp, Homo sapiens
atgcacaggcaggcg

SEQ ID NO: 961681 - DNA, 15 bp, Homo sapiens
tgcacaggcaggcga

SEQ ID NO: 961682 - DNA, 15 bp, Homo sapiens
gcacaggcaggcgat

SEQ ID NO: 961683 - DNA, 15 bp, Homo sapiens
cacaggcaggcgatg

SEQ ID NO: 961684 - DNA, 15 bp, Homo sapiens
acaggcaggcgatgt

SEQ ID NO: 961685 - DNA, 15 bp, Homo sapiens
caggcaggcgatgta

SEQ ID NO: 961686 - DNA, 15 bp, Homo sapiens
aggcaggcgatgtaa

SEQ ID NO: 961687 - DNA, 15 bp, Homo sapiens
ggcaggcgatgtaac

SEQ ID NO: 961688 - DNA, 15 bp, Homo sapiens
gcaggcgatgtaact

SEQ ID NO: 961689 - DNA, 15 bp, Homo sapiens
caggcgatgtaactg

SEQ ID NO: 961690 - DNA, 15 bp, Homo sapiens
aggcgatgtaactga

SEQ ID NO: 961691 - DNA, 15 bp, Homo sapiens
ggcgatgtaactgat

SEQ ID NO: 961692 - DNA, 15 bp, Homo sapiens
gcgatgtaactgatg

SEQ ID NO: 961693 - DNA, 15 bp, Homo sapiens
cgatgtaactgatgc

SEQ ID NO: 961694 - DNA, 15 bp, Homo sapiens
gatgtaactgatgcg

SEQ ID NO: 961695 - DNA, 15 bp, Homo sapiens
atgtaactgatgcgt

SEQ ID NO: 961696 - DNA, 15 bp, Homo sapiens
tgtaactgatgcgtc

SEQ ID NO: 961697 - DNA, 15 bp, Homo sapiens
gtaactgatgcgtca

SEQ ID NO: 961698 - DNA, 15 bp, Homo sapiens
taactgatgcgtcag

SEQ ID NO: 961699 - DNA, 15 bp, Homo sapiens
aactgatgcgtcagt

SEQ ID NO: 961700 - DNA, 15 bp, Homo sapiens
actgatgcgtcagtc

SEQ ID NO: 961701 - DNA, 15 bp, Homo sapiens
ctgatgcgtcagtcc

SEQ ID NO: 961702 - DNA, 15 bp, Homo sapiens
tgatgcgtcagtcca

SEQ ID NO: 961703 - DNA, 15 bp, Homo sapiens
gatgcgtcagtccag

SEQ ID NO: 961704 - DNA, 15 bp, Homo sapiens
atgcgtcagtccagc

SEQ ID NO: 961705 - DNA, 15 bp, Homo sapiens
tgcgtcagtccagcc

SEQ ID NO: 961706 - DNA, 15 bp, Homo sapiens
gcgtcagtccagcca

SEQ ID NO: 961707 - DNA, 15 bp, Homo sapiens
cgtcagtccagccaa

SEQ ID NO: 961708 - DNA, 15 bp, Homo sapiens
gtcagtccagccaag

SEQ ID NO: 961709 - DNA, 15 bp, Homo sapiens
tcagtccagccaaga

SEQ ID NO: 961710 - DNA, 15 bp, Homo sapiens
cagtccagccaagaa

SEQ ID NO: 961711 - DNA, 15 bp, Homo sapiens
agtccagccaagaaa

SEQ ID NO: 961712 - DNA, 15 bp, Homo sapiens
gtccagccaagaaag

SEQ ID NO: 961713 - DNA, 15 bp, Homo sapiens
tccagccaagaaagg

SEQ ID NO: 961714 - DNA, 15 bp, Homo sapiens
ccagccaagaaagga

SEQ ID NO: 961715 - DNA, 15 bp, Homo sapiens
cagccaagaaaggac

SEQ ID NO: 961716 - DNA, 15 bp, Homo sapiens
agccaagaaaggacg

SEQ ID NO: 961717 - DNA, 15 bp, Homo sapiens
gccaagaaaggacgc

SEQ ID NO: 961718 - DNA, 15 bp, Homo sapiens
ccaagaaaggacgcg

SEQ ID NO: 961719 - DNA, 15 bp, Homo sapiens
caagaaaggacgcgt

SEQ ID NO: 961720 - DNA, 15 bp, Homo sapiens
aagaaaggacgcgtc

SEQ ID NO: 961721 - DNA, 15 bp, Homo sapiens
agaaaggacgcgtcc

SEQ ID NO: 961722 - DNA, 15 bp, Homo sapiens
gaaaggacgcgtccc

SEQ ID NO: 961723 - DNA, 15 bp, Homo sapiens
aaaggacgcgtccct

SEQ ID NO: 961724 - DNA, 15 bp, Homo sapiens
aaggacgcgtccctg

SEQ ID NO: 961725 - DNA, 15 bp, Homo sapiens
aggacgcgtccctgg

SEQ ID NO: 961726 - DNA, 15 bp, Homo sapiens
ggacgcgtccctggt

SEQ ID NO: 961727 - DNA, 15 bp, Homo sapiens
gacgcgtccctggtt

SEQ ID NO: 961728 - DNA, 15 bp, Homo sapiens
acgcgtccctggttt

SEQ ID NO: 961729 - DNA, 15 bp, Homo sapiens
cgcgtccctggtttg

SEQ ID NO: 961730 - DNA, 15 bp, Homo sapiens
gcgtccctggtttgg

SEQ ID NO: 961731 - DNA, 15 bp, Homo sapiens
cgtccctggtttggc

SEQ ID NO: 961732 - DNA, 15 bp, Homo sapiens
gtccctggtttggct

SEQ ID NO: 961733 - DNA, 15 bp, Homo sapiens
tccctggtttggcta

SEQ ID NO: 961734 - DNA, 15 bp, Homo sapiens
ccctggtttggctac

SEQ ID NO: 961735 - DNA, 15 bp, Homo sapiens
cctggtttggctacg

SEQ ID NO: 961736 - DNA, 15 bp, Homo sapiens
ctggtttggctacgt

SEQ ID NO: 961737 - DNA, 15 bp, Homo sapiens
tggtttggctacgtg

SEQ ID NO: 961738 - DNA, 15 bp, Homo sapiens
ggtttggctacgtgg

SEQ ID NO: 961739 - DNA, 15 bp, Homo sapiens
gtttggctacgtggc

SEQ ID NO: 961740 - DNA, 15 bp, Homo sapiens
tttggctacgtggcc

SEQ ID NO: 961741 - DNA, 15 bp, Homo sapiens
ttggctacgtggccg

SEQ ID NO: 961742 - DNA, 15 bp, Homo sapiens
tggctacgtggccgt

SEQ ID NO: 961743 - DNA, 15 bp, Homo sapiens
ggctacgtggccgtc

SEQ ID NO: 961744 - DNA, 15 bp, Homo sapiens
gctacgtggccgtcc

SEQ ID NO: 961745 - DNA, 15 bp, Homo sapiens
ctacgtggccgtcct

SEQ ID NO: 961746 - DNA, 15 bp, Homo sapiens
tacgtggccgtcctt

SEQ ID NO: 961747 - DNA, 15 bp, Homo sapiens
acgtggccgtccttt

SEQ ID NO: 961748 - DNA, 15 bp, Homo sapiens
cgtggccgtccttta

SEQ ID NO: 961749 - DNA, 15 bp, Homo sapiens
gtggccgtcctttat

SEQ ID NO: 961750 - DNA, 15 bp, Homo sapiens
tggccgtcctttatt

SEQ ID NO: 961751 - DNA, 15 bp, Homo sapiens
ggccgtcctttattt

SEQ ID NO: 961752 - DNA, 15 bp, Homo sapiens
gccgtcctttatttc

SEQ ID NO: 961753 - DNA, 15 bp, Homo sapiens
ccgtcctttatttct

SEQ ID NO: 961754 - DNA, 15 bp, Homo sapiens
cgtcctttatttctt

SEQ ID NO: 961755 - DNA, 15 bp, Homo sapiens
gtcctttatttcttt

SEQ ID NO: 961756 - DNA, 15 bp, Homo sapiens
tcctttatttctttg

SEQ ID NO: 961757 - DNA, 15 bp, Homo sapiens
cctttatttctttgt

SEQ ID NO: 961758 - DNA, 15 bp, Homo sapiens
ctttatttctttgtt

SEQ ID NO: 961759 - DNA, 15 bp, Homo sapiens
tttatttctttgtta

SEQ ID NO: 961760 - DNA, 15 bp, Homo sapiens
ttatttctttgttaa

SEQ ID NO: 961761 - DNA, 15 bp, Homo sapiens
tatttctttgttaac

SEQ ID NO: 961762 - DNA, 15 bp, Homo sapiens
atttctttgttaact

SEQ ID NO: 961763 - DNA, 15 bp, Homo sapiens
tttctttgttaactg

SEQ ID NO: 961764 - DNA, 15 bp, Homo sapiens
ttctttgttaactga

SEQ ID NO: 961765 - DNA, 15 bp, Homo sapiens
tctttgttaactgaa

SEQ ID NO: 961766 - DNA, 15 bp, Homo sapiens
ctttgttaactgaat

SEQ ID NO: 961767 - DNA, 15 bp, Homo sapiens
tttgttaactgaatt

SEQ ID NO: 961768 - DNA, 15 bp, Homo sapiens
ttgttaactgaattt

SEQ ID NO: 961769 - DNA, 15 bp, Homo sapiens
tgttaactgaatttt

SEQ ID NO: 961770 - DNA, 15 bp, Homo sapiens
gttaactgaattttc

SEQ ID NO: 961771 - DNA, 15 bp, Homo sapiens
ttaactgaattttct

SEQ ID NO: 961772 - DNA, 15 bp, Homo sapiens
taactgaattttctt

SEQ ID NO: 961773 - DNA, 15 bp, Homo sapiens
aactgaattttctta

SEQ ID NO: 961774 - DNA, 15 bp, Homo sapiens
actgaattttcttat

SEQ ID NO: 961775 - DNA, 15 bp, Homo sapiens
ctgaattttcttata

SEQ ID NO: 961776 - DNA, 15 bp, Homo sapiens
tgaattttcttatag

SEQ ID NO: 961777 - DNA, 15 bp, Homo sapiens
gaattttcttatagt

SEQ ID NO: 961778 - DNA, 15 bp, Homo sapiens
aattttcttatagta

SEQ ID NO: 961779 - DNA, 15 bp, Homo sapiens
attttcttatagtaa

SEQ ID NO: 961780 - DNA, 15 bp, Homo sapiens
ttttcttatagtaag

SEQ ID NO: 961781 - DNA, 15 bp, Homo sapiens
tttcttatagtaagt

SEQ ID NO: 961782 - DNA, 15 bp, Homo sapiens
ttcttatagtaagta

SEQ ID NO: 961783 - DNA, 15 bp, Homo sapiens
tcttatagtaagtag

SEQ ID NO: 961784 - DNA, 15 bp, Homo sapiens
cttatagtaagtagc

SEQ ID NO: 961785 - DNA, 15 bp, Homo sapiens
ttatagtaagtagct

SEQ ID NO: 961786 - DNA, 15 bp, Homo sapiens
tatagtaagtagctt

SEQ ID NO: 961787 - DNA, 15 bp, Homo sapiens
atagtaagtagctta

SEQ ID NO: 961788 - DNA, 15 bp, Homo sapiens
tagtaagtagcttac

SEQ ID NO: 961789 - DNA, 15 bp, Homo sapiens
agtaagtagcttacg

SEQ ID NO: 961790 - DNA, 15 bp, Homo sapiens
gtaagtagcttacgt

SEQ ID NO: 961791 - DNA, 15 bp, Homo sapiens
taagtagcttacgta

SEQ ID NO: 961792 - DNA, 15 bp, Homo sapiens
aagtagcttacgtac

SEQ ID NO: 961793 - DNA, 15 bp, Homo sapiens
agtagcttacgtaca

SEQ ID NO: 961794 - DNA, 15 bp, Homo sapiens
gtagcttacgtacat

SEQ ID NO: 961795 - DNA, 15 bp, Homo sapiens
tagcttacgtacata

SEQ ID NO: 961796 - DNA, 15 bp, Homo sapiens
agcttacgtacatat

SEQ ID NO: 961797 - DNA, 15 bp, Homo sapiens
gcttacgtacatata

SEQ ID NO: 961798 - DNA, 15 bp, Homo sapiens
cttacgtacatatat

SEQ ID NO: 961799 - DNA, 15 bp, Homo sapiens
ttacgtacatatata
